United States Patent Application Publication US 2007/0042381 A1 - sequence listing, part 28

SEQ ID NO: 1226985 - RNA, 20 nt, Human
aaauuuuuucucuaggaaau

SEQ ID NO: 1226986 - RNA, 13 nt, Human
gucagaauagaaa

SEQ ID NO: 1226987 - RNA, 17 nt, Human
gucagaauagaaauuag

SEQ ID NO: 1226988 - RNA, 12 nt, Human
aaauuugccaag

SEQ ID NO: 1226989 - RNA, 20 nt, Human
aaauggucucuaacauuucc

SEQ ID NO: 1226990 - RNA, 20 nt, Human
guaguguuggagaagaacug

SEQ ID NO: 1226991 - RNA, 17 nt, Human
guaguugccuuaaaaua

SEQ ID NO: 1226992 - RNA, 19 nt, Human
guauaaaagggacugagaa

SEQ ID NO: 1226993 - RNA, 21 nt, Human
guauaaaauaauuuuuauauu

SEQ ID NO: 1226994 - RNA, 15 nt, Human
guauaaaauaauuuu

SEQ ID NO: 1226995 - RNA, 10 nt, Human
guauaauuaa

SEQ ID NO: 1226996 - RNA, 15 nt, Human
aaauguauuacagug

SEQ ID NO: 1226997 - RNA, 18 nt, Human
guauguacuucaugcugu

SEQ ID NO: 1226998 - RNA, 17 nt, Human
gucaacacuaacaugau

SEQ ID NO: 1226999 - RNA, 22 nt, Human
aaauuuauuucaauauuagcaa

SEQ ID NO: 1227000 - RNA, 15 nt, Human
aaauuguaauuauau

SEQ ID NO: 1227001 - RNA, 16 nt, Human
aaauucugucucugga

SEQ ID NO: 1227002 - RNA, 18 nt, Human
aaauucugucucuggauu

SEQ ID NO: 1227003 - RNA, 20 nt, Human
aaauuguaagcaugcacaaa

SEQ ID NO: 1227004 - RNA, 14 nt, Human
aaauuguaauuaua

SEQ ID NO: 1227005 - RNA, 17 nt, Human
aagacugcauuauauuu

SEQ ID NO: 1227006 - RNA, 16 nt, Human
aagacugcacaucaaa

SEQ ID NO: 1227007 - RNA, 19 nt, Human
aagaggaauuacgugcucu

SEQ ID NO: 1227008 - RNA, 16 nt, Human
aagcuagcaaauagua

SEQ ID NO: 1227009 - RNA, 20 nt, Human
aagcucacagaccuuugaac

SEQ ID NO: 1227010 - RNA, 14 nt, Human
aagcuccagguaga

SEQ ID NO: 1227011 - RNA, 13 nt, Human
aagcuccagguag

SEQ ID NO: 1227012 - RNA, 23 nt, Human
guuagggaaaacauuccauccuu

SEQ ID NO: 1227013 - RNA, 15 nt, Human
guuagggaaaacauu

SEQ ID NO: 1227014 - RNA, 20 nt, Human
guuagggaaaacauuccauc

SEQ ID NO: 1227015 - RNA, 16 nt, Human
aagcccauucauucca

SEQ ID NO: 1227016 - RNA, 21 nt, Human
aagcccauucauuccauucug

SEQ ID NO: 1227017 - RNA, 23 nt, Human
aagcccauucauuccauucugga

SEQ ID NO: 1227018 - RNA, 16 nt, Human
aagcauuuagauguau

SEQ ID NO: 1227019 - RNA, 13 nt, Human
aagcaucccucac

SEQ ID NO: 1227020 - RNA, 14 nt, Human
aagcaucccucacc

SEQ ID NO: 1227021 - RNA, 23 nt, Human
aagcaucccucacccauccuaga

SEQ ID NO: 1227022 - RNA, 15 nt, Human
guuuuucauaaagca

SEQ ID NO: 1227023 - RNA, 16 nt, Human
aagucuuucacauuua

SEQ ID NO: 1227024 - RNA, 19 nt, Human
aaguaaugauaacuggaaa

SEQ ID NO: 1227025 - RNA, 14 nt, Human
aaguaaugauaacu

SEQ ID NO: 1227026 - RNA, 15 nt, Human
aaguauuaagcauau

SEQ ID NO: 1227027 - RNA, 13 nt, Human
aaguauuagaaua

SEQ ID NO: 1227028 - RNA, 16 nt, Human
aaguauuaagcauaua

SEQ ID NO: 1227029 - RNA, 17 nt, Human
aaguauuaagcauauau

SEQ ID NO: 1227030 - RNA, 18 nt, Human
aaguauuaagcauauauu

SEQ ID NO: 1227031 - RNA, 21 nt, Human
aagugaucaaacuacauauug

SEQ ID NO: 1227032 - RNA, 20 nt, Human
uaaaauaauuuuuauauuug

SEQ ID NO: 1227033 - RNA, 22 nt, Human
uaaaauaauuuuaucucuuucu

SEQ ID NO: 1227034 - RNA, 20 nt, Human
uaaaagacagugaaagaaaa

SEQ ID NO: 1227035 - RNA, 18 nt, Human
uaaaaauaaaaaacacug

SEQ ID NO: 1227036 - RNA, 19 nt, Human
uaaaaauaaaaaacacugg

SEQ ID NO: 1227037 - RNA, 21 nt, Human
uaaaaauaaaaaacacuggga

SEQ ID NO: 1227038 - RNA, 16 nt, Human
uaaaaauaaacauguu

SEQ ID NO: 1227039 - RNA, 18 nt, Human
uaaaacgcaguugcaaac

SEQ ID NO: 1227040 - RNA, 11 nt, Human
uaaaacuaaga

SEQ ID NO: 1227041 - RNA, 12 nt, Human
uaaaagaaugau

SEQ ID NO: 1227042 - RNA, 22 nt, Human
guugccuaaauccauuuggaaa

SEQ ID NO: 1227043 - RNA, 11 nt, Human
aaggauaaagu

SEQ ID NO: 1227044 - RNA, 19 nt, Human
aaggcauuauaaaaagaau

SEQ ID NO: 1227045 - RNA, 15 nt, Human
aaggaaagaaaacau

SEQ ID NO: 1227046 - RNA, 20 nt, Human
guuuaauauuaaagccaugu

SEQ ID NO: 1227047 - RNA, 17 nt, Human
guuucuauuuuuugaaa

SEQ ID NO: 1227048 - RNA, 18 nt, Human
aagguauuuaauagguuu

SEQ ID NO: 1227049 - RNA, 16 nt, Human
aaguaaggaauuuuau

SEQ ID NO: 1227050 - RNA, 14 nt, Human
aagguacuucaaau

SEQ ID NO: 1227051 - RNA, 16 nt, Human
aaucagccuaguugau

SEQ ID NO: 1227052 - RNA, 16 nt, Human
aaucaggguuaguauu

SEQ ID NO: 1227053 - RNA, 15 nt, Human
aauauuuauuuuaau

SEQ ID NO: 1227054 - RNA, 13 nt, Human
uaagcauauauuu

SEQ ID NO: 1227055 - RNA, 16 nt, Human
uaagcauauauuuuua

SEQ ID NO: 1227056 - RNA, 21 nt, Human
uaagcauaagcuuaugcuuaa

SEQ ID NO: 1227057 - RNA, 17 nt, Human
uaaggaaaaguuuaaua

SEQ ID NO: 1227058 - RNA, 19 nt, Human
uaaggaaaaguuuaauauu

SEQ ID NO: 1227059 - RNA, 21 nt, Human
uaaggaaaaguuuaauauuaa

SEQ ID NO: 1227060 - RNA, 22 nt, Human
uaaggaauuuuauuuuuuucug

SEQ ID NO: 1227061 - RNA, 14 nt, Human
uaaggacuucuuua

SEQ ID NO: 1227062 - RNA, 15 nt, Human
uaaggacuucuuuaa

SEQ ID NO: 1227063 - RNA, 16 nt, Human
uaaggacuucuuuaau

SEQ ID NO: 1227064 - RNA, 22 nt, Human
uaaggacuucuuuaauuuugga

SEQ ID NO: 1227065 - RNA, 13 nt, Human
uaaggacuuguua

SEQ ID NO: 1227066 - RNA, 15 nt, Human
uaaggacuuguuaga

SEQ ID NO: 1227067 - RNA, 16 nt, Human
uaaggacuuguuagau

SEQ ID NO: 1227068 - RNA, 19 nt, Human
uaaggacuuguuagaucua

SEQ ID NO: 1227069 - RNA, 20 nt, Human
uaaguaaugauaacuggaaa

SEQ ID NO: 1227070 - RNA, 18 nt, Human
uaaguacacaauaagcaa

SEQ ID NO: 1227071 - RNA, 17 nt, Human
uaaguguguguuuuuca

SEQ ID NO: 1227072 - RNA, 14 nt, Human
aaucccauuauuca

SEQ ID NO: 1227073 - RNA, 16 nt, Human
aaucccauuauucaaa

SEQ ID NO: 1227074 - RNA, 13 nt, Human
uaauaaaaauaaa

SEQ ID NO: 1227075 - RNA, 21 nt, Human
aaucccauuauucaaaguugc

SEQ ID NO: 1227076 - RNA, 11 nt, Human
aaucuguaaaa

SEQ ID NO: 1227077 - RNA, 19 nt, Human
uaaauguuaugacuaugua

SEQ ID NO: 1227078 - RNA, 21 nt, Human
uaaauguuaugacuauguaaa

SEQ ID NO: 1227079 - RNA, 20 nt, Human
uaaauguuaugacuauguaa

SEQ ID NO: 1227080 - RNA, 13 nt, Human
uaacaaugcugua

SEQ ID NO: 1227081 - RNA, 23 nt, Human
aauaccacaggaaccacaagacu

SEQ ID NO: 1227082 - RNA, 14 nt, Human
aauagcuagacugg

SEQ ID NO: 1227083 - RNA, 20 nt, Human
aauagcuagacuggugacug

SEQ ID NO: 1227084 - RNA, 21 nt, Human
aauagcuagacuggugacuga

SEQ ID NO: 1227085 - RNA, 21 nt, Human
aauauauucagccuggcuuca

SEQ ID NO: 1227086 - RNA, 21 nt, Human
aauauauuuuaagacgaaaca

SEQ ID NO: 1227087 - RNA, 20 nt, Human
uaacaugaauauuuaguguu

SEQ ID NO: 1227088 - RNA, 21 nt, Human
uaacaugaauauuuaguguuc

SEQ ID NO: 1227089 - RNA, 12 nt, Human
uaacauguuaaa

SEQ ID NO: 1227090 - RNA, 15 nt, Human
uaacauguuaaacca

SEQ ID NO: 1227091 - RNA, 16 nt, Human
uaacauguuaaaccau

SEQ ID NO: 1227092 - RNA, 19 nt, Human
uaacaugaauauuuagugu

SEQ ID NO: 1227093 - RNA, 13 nt, Human
uaacguauaaaag

SEQ ID NO: 1227094 - RNA, 17 nt, Human
uaacguauaaaagccug

SEQ ID NO: 1227095 - RNA, 23 nt, Human
uaagacaaaaagcuacuuauugu

SEQ ID NO: 1227096 - RNA, 13 nt, Human
uaagacaaauaug

SEQ ID NO: 1227097 - RNA, 13 nt, Human
uacauuuccuaaa

SEQ ID NO: 1227098 - RNA, 18 nt, Human
aauguucacaauauauuu

SEQ ID NO: 1227099 - RNA, 19 nt, Human
aauguuaugacuauguaaa

SEQ ID NO: 1227100 - RNA, 22 nt, Human
aauguuaugacuauguaaacua

SEQ ID NO: 1227101 - RNA, 15 nt, Human
aauuaugugacauuu

SEQ ID NO: 1227102 - RNA, 17 nt, Human
aauuaugugacauuuua

SEQ ID NO: 1227103 - RNA, 20 nt, Human
aauuaugugacauuuuacau

SEQ ID NO: 1227104 - RNA, 22 nt, Human
aauuaugugccagauuuaugca

SEQ ID NO: 1227105 - RNA, 22 nt, Human
aauuaugugacauuuuacauua

SEQ ID NO: 1227106 - RNA, 14 nt, Human
aauuacauuuguau

SEQ ID NO: 1227107 - RNA, 13 nt, Human
aauuacauuugua

SEQ ID NO: 1227108 - RNA, 23 nt, Human
uaccugaagcuaucguaaaauua

SEQ ID NO: 1227109 - RNA, 14 nt, Human
uacccuaaccaagu

SEQ ID NO: 1227110 - RNA, 16 nt, Human
uacccuaaccaaguuc

SEQ ID NO: 1227111 - RNA, 17 nt, Human
uacccuaaccaaguucc

SEQ ID NO: 1227112 - RNA, 21 nt, Human
uaauuuuuuucaccuagauuu

SEQ ID NO: 1227113 - RNA, 21 nt, Human
aaugcuguauuuuaaaagaau

SEQ ID NO: 1227114 - RNA, 22 nt, Human
aaugcuguauuuuaaaagaaug

SEQ ID NO: 1227115 - RNA, 19 nt, Human
aauggaggggcagagccag

SEQ ID NO: 1227116 - RNA, 20 nt, Human
aauggaggggcagagccagg

SEQ ID NO: 1227117 - RNA, 21 nt, Human
aauggaggggcagagccagga

SEQ ID NO: 1227118 - RNA, 22 nt, Human
aauggaggggcagagccaggaa

SEQ ID NO: 1227119 - RNA, 11 nt, Human
uacacccagca

SEQ ID NO: 1227120 - RNA, 12 nt, Human
uacacccagcaa

SEQ ID NO: 1227121 - RNA, 14 nt, Human
uacacccagcaaua

SEQ ID NO: 1227122 - RNA, 22 nt, Human
aaugagagacacacugaagaag

SEQ ID NO: 1227123 - RNA, 12 nt, Human
aaugagaaaucu

SEQ ID NO: 1227124 - RNA, 22 nt, Human
aaugagaaaucuaaaaaacgaa

SEQ ID NO: 1227125 - RNA, 19 nt, Human
uaauuauaucugaggaauu

SEQ ID NO: 1227126 - RNA, 21 nt, Human
uaauuauaucugaggaauucu

SEQ ID NO: 1227127 - RNA, 22 nt, Human
uaauuauaucugaggaauucug

SEQ ID NO: 1227128 - RNA, 23 nt, Human
uaauuauaucugaggaauucugu

SEQ ID NO: 1227129 - RNA, 14 nt, Human
uaauuauaugcuau

SEQ ID NO: 1227130 - RNA, 18 nt, Human
uaauuauaugcuauuucu

SEQ ID NO: 1227131 - RNA, 19 nt, Human
uaauuauaugcuauuucua

SEQ ID NO: 1227132 - RNA, 20 nt, Human
uaauuauaugcuauuucuau

SEQ ID NO: 1227133 - RNA, 22 nt, Human
uaauuccguagguuauuuucag

SEQ ID NO: 1227134 - RNA, 21 nt, Human
uaauuuuuauauuugaaauau

SEQ ID NO: 1227135 - RNA, 19 nt, Human
uaauuuuuauauuugaaau

SEQ ID NO: 1227136 - RNA, 18 nt, Human
uaauuuuuauauuugaaa

SEQ ID NO: 1227137 - RNA, 22 nt, Human
acaggaaccacaagacugcaca

SEQ ID NO: 1227138 - RNA, 23 nt, Human
acagcuguaugauucccagccag

SEQ ID NO: 1227139 - RNA, 20 nt, Human
acagcuguaugauucccagc

SEQ ID NO: 1227140 - RNA, 19 nt, Human
acagcuguaugauucccag

SEQ ID NO: 1227141 - RNA, 14 nt, Human
acagcuguaugauu

SEQ ID NO: 1227142 - RNA, 20 nt, Human
uaugaagcuuuuaugugaaa

SEQ ID NO: 1227143 - RNA, 22 nt, Human
uaugaagcuuuuaugugaaaca

SEQ ID NO: 1227144 - RNA, 23 nt, Human
uaugaagcuuuuaugugaaacau

SEQ ID NO: 1227145 - RNA, 19 nt, Human
acagcccuucuuuccacag

SEQ ID NO: 1227146 - RNA, 14 nt, Human
uaugaaacuugugu

SEQ ID NO: 1227147 - RNA, 19 nt, Human
uaugaaacuuguguaaaua

SEQ ID NO: 1227148 - RNA, 21 nt, Human
uaugaaacuuguguaaauaca

SEQ ID NO: 1227149 - RNA, 15 nt, Human
uaucuauauuuuaca

SEQ ID NO: 1227150 - RNA, 17 nt, Human
uaugauacuugaaaauu

SEQ ID NO: 1227151 - RNA, 22 nt, Human
uaugcuauuucuauauuuucau

SEQ ID NO: 1227152 - RNA, 23 nt, Human
uaugcuauuucuauauuuucauu

SEQ ID NO: 1227153 - RNA, 14 nt, Human
uaugcuauuucuau

SEQ ID NO: 1227154 - RNA, 15 nt, Human
uaugcuauuucuaua

SEQ ID NO: 1227155 - RNA, 16 nt, Human
uaugcuauuucuauau

SEQ ID NO: 1227156 - RNA, 18 nt, Human
uaugcuauuucuauauuu

SEQ ID NO: 1227157 - RNA, 17 nt, Human
uaugccauauaauucac

SEQ ID NO: 1227158 - RNA, 15 nt, Human
uaugccccauucaac

SEQ ID NO: 1227159 - RNA, 15 nt, Human
uagucaccagagacu

SEQ ID NO: 1227160 - RNA, 18 nt, Human
uagucaccagagacuuua

SEQ ID NO: 1227161 - RNA, 19 nt, Human
uauaagugauugcugguuu

SEQ ID NO: 1227162 - RNA, 18 nt, Human
uauagauuagaauucugu

SEQ ID NO: 1227163 - RNA, 19 nt, Human
uauagauuagaauucugua

SEQ ID NO: 1227164 - RNA, 21 nt, Human
uauaucuauauuuuacauaaa

SEQ ID NO: 1227165 - RNA, 20 nt, Human
uauauauuuuuuucugaaau

SEQ ID NO: 1227166 - RNA, 19 nt, Human
uauauauuuuuuucugaaa

SEQ ID NO: 1227167 - RNA, 21 nt, Human
uauauauguguaugcacagua

SEQ ID NO: 1227168 - RNA, 23 nt, Human
uauauauguguaugcacaguaaa

SEQ ID NO: 1227169 - RNA, 14 nt, Human
acagaccuuugaac

SEQ ID NO: 1227170 - RNA, 23 nt, Human
uauccaccaaaagggcucccuga

SEQ ID NO: 1227171 - RNA, 13 nt, Human
uaucuauagcuaa

SEQ ID NO: 1227172 - RNA, 16 nt, Human
uagguaaauuacaguu

SEQ ID NO: 1227173 - RNA, 21 nt, Human
acaaugaucaccgacugaaaa

SEQ ID NO: 1227174 - RNA, 14 nt, Human
acacaacuauauug

SEQ ID NO: 1227175 - RNA, 13 nt, Human
acacaacuauauu

SEQ ID NO: 1227176 - RNA, 14 nt, Human
acacaauaagcaaa

SEQ ID NO: 1227177 - RNA, 13 nt, Human
acacaauaagcaa

SEQ ID NO: 1227178 - RNA, 12 nt, Human
uaguaaucauau

SEQ ID NO: 1227179 - RNA, 13 nt, Human
uagggaaaacauu

SEQ ID NO: 1227180 - RNA, 16 nt, Human
uagggaaaacauucca

SEQ ID NO: 1227181 - RNA, 18 nt, Human
uagggaaaacauuccauc

SEQ ID NO: 1227182 - RNA, 18 nt, Human
uagggcaauuaauuccuu

SEQ ID NO: 1227183 - RNA, 21 nt, Human
uagggcaauuaauuccuucag

SEQ ID NO: 1227184 - RNA, 23 nt, Human
uagggcaauuaauuccuucagca

SEQ ID NO: 1227185 - RNA, 21 nt, Human
uaggggcuuauaauaaaggac

SEQ ID NO: 1227186 - RNA, 22 nt, Human
uaggggcuuauaauaaaggacu

SEQ ID NO: 1227187 - RNA, 23 nt, Human
uaggggcuuauaauaaaggacug

SEQ ID NO: 1227188 - RNA, 16 nt, Human
uagcguuuuuuaaaug

SEQ ID NO: 1227189 - RNA, 17 nt, Human
uagcguuuuuuaaaugu

SEQ ID NO: 1227190 - RNA, 18 nt, Human
uagcguuuuuuaaaugua

SEQ ID NO: 1227191 - RNA, 23 nt, Human
uagcuuuuuucucugauacagaa

SEQ ID NO: 1227192 - RNA, 13 nt, Human
uagcuuuuuucuc

SEQ ID NO: 1227193 - RNA, 22 nt, Human
uagcguuuuuuaaauguauacu

SEQ ID NO: 1227194 - RNA, 14 nt, Human
uagcuaaguacaca

SEQ ID NO: 1227195 - RNA, 14 nt, Human
uagaggguguguaa

SEQ ID NO: 1227196 - RNA, 13 nt, Human
acaaaguauuaag

SEQ ID NO: 1227197 - RNA, 15 nt, Human
acaaaguauuaagca

SEQ ID NO: 1227198 - RNA, 16 nt, Human
acaaaguauuaagcau

SEQ ID NO: 1227199 - RNA, 18 nt, Human
acaaaguauuaagcauau

SEQ ID NO: 1227200 - RNA, 13 nt, Human
acaaauaauuuag

SEQ ID NO: 1227201 - RNA, 14 nt, Human
acaaauaauuuaga

SEQ ID NO: 1227202 - RNA, 16 nt, Human
acaaaaagcuacuuau

SEQ ID NO: 1227203 - RNA, 20 nt, Human
aauuuuacauggcuggagcu

SEQ ID NO: 1227204 - RNA, 12 nt, Human
aauuuuacauuu

SEQ ID NO: 1227205 - RNA, 16 nt, Human
uagacacgcacggcag

SEQ ID NO: 1227206 - RNA, 13 nt, Human
uagacacacauga

SEQ ID NO: 1227207 - RNA, 20 nt, Human
uagaauuugauaugugaaca

SEQ ID NO: 1227208 - RNA, 22 nt, Human
uagaauuugauaugugaacagu

SEQ ID NO: 1227209 - RNA, 15 nt, Human
uagaaaaaaaauuau

SEQ ID NO: 1227210 - RNA, 18 nt, Human
uagaagacaaaauguuca

SEQ ID NO: 1227211 - RNA, 15 nt, Human
uagaaacacaacuau

SEQ ID NO: 1227212 - RNA, 22 nt, Human
accugaagcuaucguaaaauua

SEQ ID NO: 1227213 - RNA, 16 nt, Human
ucauaauaaguugcau

SEQ ID NO: 1227214 - RNA, 22 nt, Human
accugccucccuucaugcaugg

SEQ ID NO: 1227215 - RNA, 21 nt, Human
accugccucccuucaugcaug

SEQ ID NO: 1227216 - RNA, 23 nt, Human
accugccucccuucaugcaugga

SEQ ID NO: 1227217 - RNA, 18 nt, Human
uccacauuucccccuagc

SEQ ID NO: 1227218 - RNA, 13 nt, Human
acgcguugaaauu

SEQ ID NO: 1227219 - RNA, 14 nt, Human
acgcguugaaauug

SEQ ID NO: 1227220 - RNA, 18 nt, Human
acgcguugaaauuguaau

SEQ ID NO: 1227221 - RNA, 20 nt, Human
acgcguugaaauuguaauua

SEQ ID NO: 1227222 - RNA, 15 nt, Human
acggaugauuucuau

SEQ ID NO: 1227223 - RNA, 15 nt, Human
acggcagccacagcu

SEQ ID NO: 1227224 - RNA, 17 nt, Human
uccauuuaauaauuaua

SEQ ID NO: 1227225 - RNA, 12 nt, Human
uccauuuggaaa

SEQ ID NO: 1227226 - RNA, 19 nt, Human
uccauuuggaaaucuuuaa

SEQ ID NO: 1227227 - RNA, 20 nt, Human
uccauuuggaaaucuuuaaa

SEQ ID NO: 1227228 - RNA, 16 nt, Human
ucccaauugagaaaaa

SEQ ID NO: 1227229 - RNA, 12 nt, Human
uccauuuaauaa

SEQ ID NO: 1227230 - RNA, 11 nt, Human
acuauguaaac

SEQ ID NO: 1227231 - RNA, 12 nt, Human
acuauguaaacu

SEQ ID NO: 1227232 - RNA, 14 nt, Human
acuauguaaacuac

SEQ ID NO: 1227233 - RNA, 16 nt, Human
acuauguaaacuacuu

SEQ ID NO: 1227234 - RNA, 13 nt, Human
acuacgccuggcu

SEQ ID NO: 1227235 - RNA, 14 nt, Human
acuacuagggaaau

SEQ ID NO: 1227236 - RNA, 23 nt, Human
acuacuucuuuuuucaaaagaaa

SEQ ID NO: 1227237 - RNA, 20 nt, Human
acuagaguuuagcuggaaaa

SEQ ID NO: 1227238 - RNA, 22 nt, Human
ucccucuuccuucccugcugug

SEQ ID NO: 1227239 - RNA, 23 nt, Human
ucccucuuccuucccugcuguga

SEQ ID NO: 1227240 - RNA, 23 nt, Human
acucaucuagguaaauuacaguu

SEQ ID NO: 1227241 - RNA, 21 nt, Human
acuccaaacugacucuuaaga

SEQ ID NO: 1227242 - RNA, 23 nt, Human
uccgugcuaaggacuuguuagau

SEQ ID NO: 1227243 - RNA, 14 nt, Human
uccgugcuuaacca

SEQ ID NO: 1227244 - RNA, 21 nt, Human
uccgugcuuaaccaaagaagc

SEQ ID NO: 1227245 - RNA, 18 nt, Human
acuccagaaagugacaag

SEQ ID NO: 1227246 - RNA, 14 nt, Human
acuccagaaaguga

SEQ ID NO: 1227247 - RNA, 17 nt, Human
uccgugcuaaggacuug

SEQ ID NO: 1227248 - RNA, 18 nt, Human
uccgugcuaaggacuugu

SEQ ID NO: 1227249 - RNA, 20 nt, Human
acucuucaaggucugcuuuu

SEQ ID NO: 1227250 - RNA, 19 nt, Human
acucuucaaggucugcuuu

SEQ ID NO: 1227251 - RNA, 13 nt, Human
acucuugaaaaau

SEQ ID NO: 1227252 - RNA, 15 nt, Human
acucguguguuucua

SEQ ID NO: 1227253 - RNA, 23 nt, Human
acucguguguuucuauuuuuuga

SEQ ID NO: 1227254 - RNA, 21 nt, Human
acucuugaaaaaugcauguug

SEQ ID NO: 1227255 - RNA, 14 nt, Human
acucuugaaaaaug

SEQ ID NO: 1227256 - RNA, 19 nt, Human
acucuugaaaaaugcaugu

SEQ ID NO: 1227257 - RNA, 20 nt, Human
uccucccacuucagccuccc

SEQ ID NO: 1227258 - RNA, 17 nt, Human
uccucuccccaugaugu

SEQ ID NO: 1227259 - RNA, 21 nt, Human
uccugaccccaaguuauccac

SEQ ID NO: 1227260 - RNA, 19 nt, Human
acucuuucuuucaauaaaa

SEQ ID NO: 1227261 - RNA, 18 nt, Human
acugaaaauauuguuuua

SEQ ID NO: 1227262 - RNA, 22 nt, Human
uccugaaaacccuugccaugug

SEQ ID NO: 1227263 - RNA, 21 nt, Human
uccugaaaacccuugccaugu

SEQ ID NO: 1227264 - RNA, 24 nt, Human
ucauaaagcaggcagaacucaucu

SEQ ID NO: 1227265 - RNA, 18 nt, Human
ucauaaauaaaguuuguu

SEQ ID NO: 1227266 - RNA, 21 nt, Human
accgaacugauguaaguaaac

SEQ ID NO: 1227267 - RNA, 11 nt, Human
acccucccucc

SEQ ID NO: 1227268 - RNA, 17 nt, Human
acccucccucccuaccc

SEQ ID NO: 1227269 - RNA, 20 nt, Human
acccucaugcugugugacuc

SEQ ID NO: 1227270 - RNA, 13 nt, Human
ucagaucugccua

SEQ ID NO: 1227271 - RNA, 15 nt, Human
ucagaucugccuaag

SEQ ID NO: 1227272 - RNA, 18 nt, Human
ucagaucugccuaaggac

SEQ ID NO: 1227273 - RNA, 20 nt, Human
ucagaucugccuaaggacuu

SEQ ID NO: 1227274 - RNA, 21 nt, Human
ucagaucugccuaaggacuuc

SEQ ID NO: 1227275 - RNA, 14 nt, Human
acccagcaauagag

SEQ ID NO: 1227276 - RNA, 16 nt, Human
ucagaauagaaauuag

SEQ ID NO: 1227277 - RNA, 17 nt, Human
acccaggacaggaucca

SEQ ID NO: 1227278 - RNA, 20 nt, Human
acccaggacaggauccaggc

SEQ ID NO: 1227279 - RNA, 15 nt, Human
ucagauuucugagga

SEQ ID NO: 1227280 - RNA, 19 nt, Human
accccagcuggggccaggc

SEQ ID NO: 1227281 - RNA, 22 nt, Human
accccagcuggggccaggcugg

SEQ ID NO: 1227282 - RNA, 23 nt, Human
accauguuggccaggcuugucuc

SEQ ID NO: 1227283 - RNA, 21 nt, Human
accauggacacuacacccagc

SEQ ID NO: 1227284 - RNA, 22 nt, Human
accauggacacuacacccagca

SEQ ID NO: 1227285 - RNA, 23 nt, Human
accauggacacuacacccagcaa

SEQ ID NO: 1227286 - RNA, 24 nt, Human
accauggacacuacacccagcaau

SEQ ID NO: 1227287 - RNA, 20 nt, Human
accauggccagcuaauuuuu

SEQ ID NO: 1227288 - RNA, 17 nt, Human
accaugggauaaaugcc

SEQ ID NO: 1227289 - RNA, 18 nt, Human
accaugggauaaaugcca

SEQ ID NO: 1227290 - RNA, 18 nt, Human
ucacugcaaccucugccu

SEQ ID NO: 1227291 - RNA, 18 nt, Human
ucacugcaaccuccaccu

SEQ ID NO: 1227292 - RNA, 19 nt, Human
ucacauuccugaacaggau

SEQ ID NO: 1227293 - RNA, 16 nt, Human
ucaccagcccuggcaa

SEQ ID NO: 1227294 - RNA, 21 nt, Human
ucacugaacuuugcugagccu

SEQ ID NO: 1227295 - RNA, 16 nt, Human
accacaagacugcaca

SEQ ID NO: 1227296 - RNA, 23 nt, Human
accaaaaaucucaauauuucaga

SEQ ID NO: 1227297 - RNA, 12 nt, Human
accaaaaaccag

SEQ ID NO: 1227298 - RNA, 13 nt, Human
accaaaaaccagu

SEQ ID NO: 1227299 - RNA, 20 nt, Human
ucacauuccugaacaggaua

SEQ ID NO: 1227300 - RNA, 17 nt, Human
ucacauuccugaacagg

SEQ ID NO: 1227301 - RNA, 13 nt, Human
ucacauuccugaa

SEQ ID NO: 1227302 - RNA, 19 nt, Human
ucacagcuccaagaauuuc

SEQ ID NO: 1227303 - RNA, 16 nt, Human
ucacagaccuuugaac

SEQ ID NO: 1227304 - RNA, 15 nt, Human
ucaaggucugcuuuu

SEQ ID NO: 1227305 - RNA, 14 nt, Human
ucaaggucugcuuu

SEQ ID NO: 1227306 - RNA, 15 nt, Human
acauuuuacauuaaa

SEQ ID NO: 1227307 - RNA, 18 nt, Human
acauuuuacauuaaauuu

SEQ ID NO: 1227308 - RNA, 14 nt, Human
acauuuuacauuaa

SEQ ID NO: 1227309 - RNA, 16 nt, Human
acauuggaaacaaguc

SEQ ID NO: 1227310 - RNA, 14 nt, Human
acauugguguugua

SEQ ID NO: 1227311 - RNA, 16 nt, Human
acauugguguuguacu

SEQ ID NO: 1227312 - RNA, 22 nt, Human
acauugguguuguacucaauuu

SEQ ID NO: 1227313 - RNA, 23 nt, Human
acauugguguuguacucaauuuu

SEQ ID NO: 1227314 - RNA, 22 nt, Human
acauggcuggagcuagaauuug

SEQ ID NO: 1227315 - RNA, 21 nt, Human
ucaaauauauucagccuggcu

SEQ ID NO: 1227316 - RNA, 23 nt, Human
ucaaauacgugggcauucaaaug

SEQ ID NO: 1227317 - RNA, 13 nt, Human
ucaaauauauuca

SEQ ID NO: 1227318 - RNA, 22 nt, Human
ucaaauacgugggcauucaaau

SEQ ID NO: 1227319 - RNA, 21 nt, Human
ucaaauacgugggcauucaaa

SEQ ID NO: 1227320 - RNA, 15 nt, Human
ucaaaguugccuaaa

SEQ ID NO: 1227321 - RNA, 18 nt, Human
ucaaaguugccuaaaucc

SEQ ID NO: 1227322 - RNA, 17 nt, Human
uauuuuguguuuaggaa

SEQ ID NO: 1227323 - RNA, 20 nt, Human
uauuuuguguuuaggaacua

SEQ ID NO: 1227324 - RNA, 13 nt, Human
uauuuuacauaaa

SEQ ID NO: 1227325 - RNA, 22 nt, Human
uauuuuaauaauguuucaaaca

SEQ ID NO: 1227326 - RNA, 19 nt, Human
uauuuuaauaauguuucaa

SEQ ID NO: 1227327 - RNA, 17 nt, Human
uauuuuaauaaacacuc

SEQ ID NO: 1227328 - RNA, 14 nt, Human
uauuuuaauaaaca

SEQ ID NO: 1227329 - RNA, 18 nt, Human
uauuuuaaaagaaugauu

SEQ ID NO: 1227330 - RNA, 14 nt, Human
uauuuuaaaagaau

SEQ ID NO: 1227331 - RNA, 14 nt, Human
uauuuuaagacgaa

SEQ ID NO: 1227332 - RNA, 22 nt, Human
uauuuuaagacgaaacauuugu

SEQ ID NO: 1227333 - RNA, 11 nt, Human
acaucuuuaag

SEQ ID NO: 1227334 - RNA, 20 nt, Human
acaucuuuaaggggaggaac

SEQ ID NO: 1227335 - RNA, 23 nt, Human
uaugugccagauuuaugcauauu

SEQ ID NO: 1227336 - RNA, 14 nt, Human
uaugugccagauuu

SEQ ID NO: 1227337 - RNA, 19 nt, Human
uaugugccagauuuaugca

SEQ ID NO: 1227338 - RNA, 17 nt, Human
ucuaccaaaaaucucaa

SEQ ID NO: 1227339 - RNA, 13 nt, Human
acuguggguagac

SEQ ID NO: 1227340 - RNA, 14 nt, Human
ucguuaucuaauag

SEQ ID NO: 1227341 - RNA, 15 nt, Human
acuguacuugcucuu

SEQ ID NO: 1227342 - RNA, 23 nt, Human
acuguacuugcucuugaugccug

SEQ ID NO: 1227343 - RNA, 20 nt, Human
acuguacagacagaaaaaac

SEQ ID NO: 1227344 - RNA, 18 nt, Human
acuguacagacagaaaaa

SEQ ID NO: 1227345 - RNA, 22 nt, Human
acugaagaagcaccaaucauga

SEQ ID NO: 1227346 - RNA, 18 nt, Human
ucgcccuggacugugugc

SEQ ID NO: 1227347 - RNA, 16 nt, Human
ucgccggaucugaggg

SEQ ID NO: 1227348 - RNA, 17 nt, Human
ucgccggaucugaggga

SEQ ID NO: 1227349 - RNA, 12 nt, Human
ucgccucagccu

SEQ ID NO: 1227350 - RNA, 20 nt, Human
ucuauuuuuugaaaagcaga

SEQ ID NO: 1227351 - RNA, 15 nt, Human
acuuguauuaugugu

SEQ ID NO: 1227352 - RNA, 13 nt, Human
acuuguauuaugu

SEQ ID NO: 1227353 - RNA, 14 nt, Human
acuuguauuaugug

SEQ ID NO: 1227354 - RNA, 17 nt, Human
acuugaggacacauguc

SEQ ID NO: 1227355 - RNA, 18 nt, Human
acuugaggacacaugucc

SEQ ID NO: 1227356 - RNA, 19 nt, Human
acuugaggacacaugucca

SEQ ID NO: 1227357 - RNA, 16 nt, Human
acuugaaauuugaauu

SEQ ID NO: 1227358 - RNA, 21 nt, Human
acuucucuuguuagguaauuu

SEQ ID NO: 1227359 - RNA, 17 nt, Human
acuugaaaauuaacaug

SEQ ID NO: 1227360 - RNA, 18 nt, Human
acuugaaaauuaacauga

SEQ ID NO: 1227361 - RNA, 16 nt, Human
ucuaguucacucucca

SEQ ID NO: 1227362 - RNA, 19 nt, Human
ucuaguucacucuccauuu

SEQ ID NO: 1227363 - RNA, 12 nt, Human
ucuaguucacuc

SEQ ID NO: 1227364 - RNA, 13 nt, Human
ucuauaaaccgaa

SEQ ID NO: 1227365 - RNA, 13 nt, Human
ucuauaauuuaaa

SEQ ID NO: 1227366 - RNA, 20 nt, Human
acuuccagauccuggaaauc

SEQ ID NO: 1227367 - RNA, 22 nt, Human
ucucugcaggucccuaauaaag

SEQ ID NO: 1227368 - RNA, 19 nt, Human
ucucugcaggucccuaaua

SEQ ID NO: 1227369 - RNA, 20 nt, Human
ucucugcaggucccuaauaa

SEQ ID NO: 1227370 - RNA, 21 nt, Human
ucucugcaggucccuaauaaa

SEQ ID NO: 1227371 - RNA, 15 nt, Human
agaaacauuugguaa

SEQ ID NO: 1227372 - RNA, 21 nt, Human
agaaacuuaaauuuuaguucu

SEQ ID NO: 1227373 - RNA, 17 nt, Human
agaaacacccucacacu

SEQ ID NO: 1227374 - RNA, 16 nt, Human
agaaacacaacuauau

SEQ ID NO: 1227375 - RNA, 16 nt, Human
agaaaacaaggaugaa

SEQ ID NO: 1227376 - RNA, 17 nt, Human
agaaagcaucccucacc

SEQ ID NO: 1227377 - RNA, 19 nt, Human
agaaagcaucccucaccca

SEQ ID NO: 1227378 - RNA, 22 nt, Human
agaaagcaucccucacccaucc

SEQ ID NO: 1227379 - RNA, 20 nt, Human
ucugaaggguaauuauauag

SEQ ID NO: 1227380 - RNA, 16 nt, Human
agaaaugaaaaaauau

SEQ ID NO: 1227381 - RNA, 13 nt, Human
agaaaugaaaaaa

SEQ ID NO: 1227382 - RNA, 12 nt, Human
agaaaugaaaaa

SEQ ID NO: 1227383 - RNA, 22 nt, Human
acuuguuuuauuuaaccucuaa

SEQ ID NO: 1227384 - RNA, 17 nt, Human
acuuuagaauaugccuu

SEQ ID NO: 1227385 - RNA, 13 nt, Human
acuuuagggaagu

SEQ ID NO: 1227386 - RNA, 22 nt, Human
acuuugugcugggguuaucuga

SEQ ID NO: 1227387 - RNA, 22 nt, Human
ucucucacuuguuuuauuuaac

SEQ ID NO: 1227388 - RNA, 19 nt, Human
agaagcaccaaucaugaau

SEQ ID NO: 1227389 - RNA, 13 nt, Human
agaagcaaguaaa

SEQ ID NO: 1227390 - RNA, 21 nt, Human
agaagccccacccugccucac

SEQ ID NO: 1227391 - RNA, 12 nt, Human
agaacggaagaa

SEQ ID NO: 1227392 - RNA, 13 nt, Human
agaacggaagaag

SEQ ID NO: 1227393 - RNA, 14 nt, Human
ucugaauaaagcaa

SEQ ID NO: 1227394 - RNA, 17 nt, Human
ucugaauaaagcaauua

SEQ ID NO: 1227395 - RNA, 21 nt, Human
ucugcaggucccuaauaaagc

SEQ ID NO: 1227396 - RNA, 22 nt, Human
ucugcaggucccuaauaaagcu

SEQ ID NO: 1227397 - RNA, 23 nt, Human
ucugcaggucccuaauaaagcug

SEQ ID NO: 1227398 - RNA, 12 nt, Human
agaaauuaugug

SEQ ID NO: 1227399 - RNA, 13 nt, Human
agaaguugauaug

SEQ ID NO: 1227400 - RNA, 14 nt, Human
ucuggauuccagag

SEQ ID NO: 1227401 - RNA, 18 nt, Human
ucuggaagugacuuuggc

SEQ ID NO: 1227402 - RNA, 19 nt, Human
ucuggaagugacuuuggcu

SEQ ID NO: 1227403 - RNA, 22 nt, Human
ucuggaagugacuuuggcugca

SEQ ID NO: 1227404 - RNA, 22 nt, Human
ucuggauuccagagcacugcuc

SEQ ID NO: 1227405 - RNA, 22 nt, Human
ucuucuuaauauguucuuuuaa

SEQ ID NO: 1227406 - RNA, 21 nt, Human
ucuugaugccuggcggggugg

SEQ ID NO: 1227407 - RNA, 23 nt, Human
ugaaaaaauauauaucaaauaua

SEQ ID NO: 1227408 - RNA, 16 nt, Human
ugaaaauauuguuuua

SEQ ID NO: 1227409 - RNA, 20 nt, Human
ugaaaauauuguuuuacaau

SEQ ID NO: 1227410 - RNA, 23 nt, Human
ugaaaauauuguuuuacaauagu

SEQ ID NO: 1227411 - RNA, 20 nt, Human
ugaaaaucuuauaauuuaaa

SEQ ID NO: 1227412 - RNA, 15 nt, Human
ugaaacggaugauuu

SEQ ID NO: 1227413 - RNA, 17 nt, Human
ugaaacuuguguaaaua

SEQ ID NO: 1227414 - RNA, 23 nt, Human
ugaaacuuguguaaauacaauuu

SEQ ID NO: 1227415 - RNA, 19 nt, Human
ugaaacucguuaauuugua

SEQ ID NO: 1227416 - RNA, 17 nt, Human
ugaaacggaugauuucu

SEQ ID NO: 1227417 - RNA, 18 nt, Human
ugaaacggaugauuucua

SEQ ID NO: 1227418 - RNA, 19 nt, Human
ugaaacggaugauuucuau

SEQ ID NO: 1227419 - RNA, 20 nt, Human
ugaaacggaugauuucuaug

SEQ ID NO: 1227420 - RNA, 18 nt, Human
agagcaagaccccaucuc

SEQ ID NO: 1227421 - RNA, 16 nt, Human
agagcugauggagaag

SEQ ID NO: 1227422 - RNA, 17 nt, Human
agagcugauggagaagg

SEQ ID NO: 1227423 - RNA, 18 nt, Human
agagcugauggagaagga

SEQ ID NO: 1227424 - RNA, 14 nt, Human
agagaucaggaaga

SEQ ID NO: 1227425 - RNA, 15 nt, Human
agagaucaggaagag

SEQ ID NO: 1227426 - RNA, 19 nt, Human
agagaucaggaagagaagg

SEQ ID NO: 1227427 - RNA, 20 nt, Human
agagaucaggaagagaagga

SEQ ID NO: 1227428 - RNA, 12 nt, Human
ugaaacuuuugg

SEQ ID NO: 1227429 - RNA, 13 nt, Human
ugaauuugugaag

SEQ ID NO: 1227430 - RNA, 21 nt, Human
ugaauuugugaagguggaaau

SEQ ID NO: 1227431 - RNA, 23 nt, Human
ugaauuugugaagguggaaauaa

SEQ ID NO: 1227432 - RNA, 17 nt, Human
ugaauuuuguguuagag

SEQ ID NO: 1227433 - RNA, 21 nt, Human
ugaauuuuguguuagagauuu

SEQ ID NO: 1227434 - RNA, 20 nt, Human
ugacaaagguaaaucagacu

SEQ ID NO: 1227435 - RNA, 17 nt, Human
agauacuggauuguacu

SEQ ID NO: 1227436 - RNA, 22 nt, Human
ugaaggguaauuauauaguuac

SEQ ID NO: 1227437 - RNA, 14 nt, Human
ugaauaaagcaauu

SEQ ID NO: 1227438 - RNA, 15 nt, Human
ugaauacuuuauaaa

SEQ ID NO: 1227439 - RNA, 17 nt, Human
ugaauggcuuuguauag

SEQ ID NO: 1227440 - RNA, 18 nt, Human
ugaauggcuuuguauaga

SEQ ID NO: 1227441 - RNA, 19 nt, Human
ugaauggcuuuguauagaa

SEQ ID NO: 1227442 - RNA, 22 nt, Human
ugaauggcuuuguauagaaccu

SEQ ID NO: 1227443 - RNA, 18 nt, Human
ugaauauuuaguguucau

SEQ ID NO: 1227444 - RNA, 12 nt, Human
ugaauggcuuug

SEQ ID NO: 1227445 - RNA, 15 nt, Human
ugaauggcuuuguau

SEQ ID NO: 1227446 - RNA, 19 nt, Human
agagcugauggagaaggaa

SEQ ID NO: 1227447 - RNA, 20 nt, Human
agagcugauggagaaggaag

SEQ ID NO: 1227448 - RNA, 21 nt, Human
agagcugauggagaaggaagg

SEQ ID NO: 1227449 - RNA, 20 nt, Human
ugaagcuaucguaaaauuaa

SEQ ID NO: 1227450 - RNA, 14 nt, Human
agauuucugaggaa

SEQ ID NO: 1227451 - RNA, 15 nt, Human
agauuucugaggaaa

SEQ ID NO: 1227452 - RNA, 14 nt, Human
agauuuuauuaugu

SEQ ID NO: 1227453 - RNA, 15 nt, Human
agauuuuauuaugua

SEQ ID NO: 1227454 - RNA, 16 nt, Human
agauuuuauuauguaa

SEQ ID NO: 1227455 - RNA, 17 nt, Human
agauuuuauuauguaaa

SEQ ID NO: 1227456 - RNA, 18 nt, Human
agauuuuauuauguaaau

SEQ ID NO: 1227457 - RNA, 19 nt, Human
agauuuuauuauguaaauc

SEQ ID NO: 1227458 - RNA, 20 nt, Human
agauuuuauuauguaaaucc

SEQ ID NO: 1227459 - RNA, 15 nt, Human
agauuuuuuuguugu

SEQ ID NO: 1227460 - RNA, 16 nt, Human
agauuuuuuuguuguu

SEQ ID NO: 1227461 - RNA, 18 nt, Human
agauuuuuuuguuguuug

SEQ ID NO: 1227462 - RNA, 19 nt, Human
agauuuuuuuguuguuugu

SEQ ID NO: 1227463 - RNA, 23 nt, Human
agauuuuuuuguuguuuguuuag

SEQ ID NO: 1227464 - RNA, 17 nt, Human
agcaagaccccaucuca

SEQ ID NO: 1227465 - RNA, 17 nt, Human
agaugcaguucugaaga

SEQ ID NO: 1227466 - RNA, 16 nt, Human
agaugcaguucugaag

SEQ ID NO: 1227467 - RNA, 13 nt, Human
agccauguuuauu

SEQ ID NO: 1227468 - RNA, 14 nt, Human
agccauguuuauua

SEQ ID NO: 1227469 - RNA, 17 nt, Human
agccauguuuauuacag

SEQ ID NO: 1227470 - RNA, 16 nt, Human
agccauguuuauuaca

SEQ ID NO: 1227471 - RNA, 20 nt, Human
agccaggaagaucccccaga

SEQ ID NO: 1227472 - RNA, 21 nt, Human
agccaggaagaucccccagaa

SEQ ID NO: 1227473 - RNA, 22 nt, Human
agccaggaagaucccccagaaa

SEQ ID NO: 1227474 - RNA, 15 nt, Human
ugauggugguauguu

SEQ ID NO: 1227475 - RNA, 21 nt, Human
ugauccagcagauuauucacu

SEQ ID NO: 1227476 - RNA, 22 nt, Human
ugauccagcagauuauucacug

SEQ ID NO: 1227477 - RNA, 22 nt, Human
ugauccaguuuuguuuggacca

SEQ ID NO: 1227478 - RNA, 17 nt, Human
ugaugaagaaguugaua

SEQ ID NO: 1227479 - RNA, 17 nt, Human
agcaugucgucaaagcu

SEQ ID NO: 1227480 - RNA, 20 nt, Human
agcaugucgucaaagcugaa

SEQ ID NO: 1227481 - RNA, 20 nt, Human
agcaucacaugaacuuguaa

SEQ ID NO: 1227482 - RNA, 19 nt, Human
ugaucaaaaucaauuaaaa

SEQ ID NO: 1227483 - RNA, 16 nt, Human
ugauaugugaacaguu

SEQ ID NO: 1227484 - RNA, 15 nt, Human
ugauaugugaacagu

SEQ ID NO: 1227485 - RNA, 12 nt, Human
ugauaugggucu

SEQ ID NO: 1227486 - RNA, 17 nt, Human
ugauagacaauugaggu

SEQ ID NO: 1227487 - RNA, 18 nt, Human
ugauagacaauugaggua

SEQ ID NO: 1227488 - RNA, 17 nt, Human
ugaguagaguugaucaa

SEQ ID NO: 1227489 - RNA, 14 nt, Human
ugaguagaguugau

SEQ ID NO: 1227490 - RNA, 22 nt, Human
ugaguaacugauuuguaacaag

SEQ ID NO: 1227491 - RNA, 21 nt, Human
agcauaauacuugcuuuggaa

SEQ ID NO: 1227492 - RNA, 23 nt, Human
agcauaaauguugacaugggaca

SEQ ID NO: 1227493 - RNA, 21 nt, Human
ugauacagaaaaguugaauuu

SEQ ID NO: 1227494 - RNA, 12 nt, Human
ugauacagaaaa

SEQ ID NO: 1227495 - RNA, 15 nt, Human
ugagucaaaaaaucu

SEQ ID NO: 1227496 - RNA, 20 nt, Human
ugcacaccuacuagucacca

SEQ ID NO: 1227497 - RNA, 22 nt, Human
ugcacaccuacuagucaccaga

SEQ ID NO: 1227498 - RNA, 17 nt, Human
agcccuucuuuccacag

SEQ ID NO: 1227499 - RNA, 23 nt, Human
agcccuucuauacccacccagaa

SEQ ID NO: 1227500 - RNA, 21 nt, Human
agcccuucuccauggcccugc

SEQ ID NO: 1227501 - RNA, 23 nt, Human
agcccuucuccauggcccugcca

SEQ ID NO: 1227502 - RNA, 19 nt, Human
agcccuucuauacccaccc

SEQ ID NO: 1227503 - RNA, 20 nt, Human
agcccuucuauacccaccca

SEQ ID NO: 1227504 - RNA, 22 nt, Human
agcccuucuauacccacccaga

SEQ ID NO: 1227505 - RNA, 23 nt, Human
ugcauaacguauaaaagccuguu

SEQ ID NO: 1227506 - RNA, 16 nt, Human
ugcagucucuauacca

SEQ ID NO: 1227507 - RNA, 18 nt, Human
ugcagucucuauaccaau

SEQ ID NO: 1227508 - RNA, 19 nt, Human
ugcagucucuauaccaaua

SEQ ID NO: 1227509 - RNA, 20 nt, Human
ugcagucucuauaccaauaa

SEQ ID NO: 1227510 - RNA, 21 nt, Human
ugcagucucuauaccaauaaa

SEQ ID NO: 1227511 - RNA, 23 nt, Human
ugcagucucuauaccaauaaagu

SEQ ID NO: 1227512 - RNA, 22 nt, Human
ugcagucucuauaccaauaaag

SEQ ID NO: 1227513 - RNA, 17 nt, Human
ugcaggucccuaauaaa

SEQ ID NO: 1227514 - RNA, 12 nt, Human
ugcaggucccua

SEQ ID NO: 1227515 - RNA, 14 nt, Human
ugcaggucccuaau

SEQ ID NO: 1227516 - RNA, 15 nt, Human
ugcaggucccuaaua

SEQ ID NO: 1227517 - RNA, 16 nt, Human
ugcaggucccuaauaa

SEQ ID NO: 1227518 - RNA, 14 nt, Human
ugcagcccugcugc

SEQ ID NO: 1227519 - RNA, 17 nt, Human
ugcagcccccacugccu

SEQ ID NO: 1227520 - RNA, 23 nt, Human
ugcagcccccacugccuuugacc

SEQ ID NO: 1227521 - RNA, 22 nt, Human
ugcagcccugcugcugccugcc

SEQ ID NO: 1227522 - RNA, 20 nt, Human
agccuuggggcugaugcagu

SEQ ID NO: 1227523 - RNA, 18 nt, Human
agcgccuccaacccuagc

SEQ ID NO: 1227524 - RNA, 19 nt, Human
agcgccuccaacccuagca

SEQ ID NO: 1227525 - RNA, 22 nt, Human
agcgccuccaacccuagcaaaa

SEQ ID NO: 1227526 - RNA, 23 nt, Human
agcgccuccaacccuagcaaaag

SEQ ID NO: 1227527 - RNA, 13 nt, Human
agccuguuuaaga

SEQ ID NO: 1227528 - RNA, 15 nt, Human
agccuguuuaagaga

SEQ ID NO: 1227529 - RNA, 13 nt, Human
agcuagacuggug

SEQ ID NO: 1227530 - RNA, 14 nt, Human
agcuagacugguga

SEQ ID NO: 1227531 - RNA, 16 nt, Human
agcuagacuggugacu

SEQ ID NO: 1227532 - RNA, 17 nt, Human
agcuagacuggugacug

SEQ ID NO: 1227533 - RNA, 21 nt, Human
agcuagacuggugacugauuc

SEQ ID NO: 1227534 - RNA, 16 nt, Human
agcuagaauuugauau

SEQ ID NO: 1227535 - RNA, 13 nt, Human
agcuagaauuuga

SEQ ID NO: 1227536 - RNA, 19 nt, Human
agcuacuaauuuuaaaaug

SEQ ID NO: 1227537 - RNA, 18 nt, Human
agcuaggaauuguguuua

SEQ ID NO: 1227538 - RNA, 12 nt, Human
ugcuaaggacuu

SEQ ID NO: 1227539 - RNA, 17 nt, Human
ugccuuuucccaacucc

SEQ ID NO: 1227540 - RNA, 21 nt, Human
ugcggaggaaggaggacccag

SEQ ID NO: 1227541 - RNA, 22 nt, Human
ugcggaggaaggaggacccagg

SEQ ID NO: 1227542 - RNA, 23 nt, Human
ugcggaggaaggaggacccagga

SEQ ID NO: 1227543 - RNA, 13 nt, Human
ugccuuugaccug

SEQ ID NO: 1227544 - RNA, 17 nt, Human
ugccuuugaccugccuc

SEQ ID NO: 1227545 - RNA, 23 nt, Human
ugccuuugaccugccucccuuca

SEQ ID NO: 1227546 - RNA, 12 nt, Human
ugcuacaauguc

SEQ ID NO: 1227547 - RNA, 13 nt, Human
ugcuaaggacuug

SEQ ID NO: 1227548 - RNA, 18 nt, Human
ugcuaaggacuuguuaga

SEQ ID NO: 1227549 - RNA, 22 nt, Human
ugcuaaggacuuguuagaucua

SEQ ID NO: 1227550 - RNA, 15 nt, Human
ugccugcccuauucu

SEQ ID NO: 1227551 - RNA, 14 nt, Human
agcuguguggcagu

SEQ ID NO: 1227552 - RNA, 16 nt, Human
agcuguguggcagucu

SEQ ID NO: 1227553 - RNA, 23 nt, Human
ugcuguauuuuaaaagaaugauu

SEQ ID NO: 1227554 - RNA, 11 nt, Human
aggacacaugu

SEQ ID NO: 1227555 - RNA, 12 nt, Human
aggacacauguc

SEQ ID NO: 1227556 - RNA, 13 nt, Human
aggacacaugucc

SEQ ID NO: 1227557 - RNA, 14 nt, Human
aggaauggaagucc

SEQ ID NO: 1227558 - RNA, 23 nt, Human
aggaauggagccugcacggugaa

SEQ ID NO: 1227559 - RNA, 13 nt, Human
ugcuguauuuuaa

SEQ ID NO: 1227560 - RNA, 22 nt, Human
ugcuguauuuuaaaagaaugau

SEQ ID NO: 1227561 - RNA, 21 nt, Human
ugcuguauuuuaaaagaauga

SEQ ID NO: 1227562 - RNA, 12 nt, Human
aggaaauauuua

SEQ ID NO: 1227563 - RNA, 13 nt, Human
aggaaauauuuau

SEQ ID NO: 1227564 - RNA, 21 nt, Human
aggaagccugauuaaagaaug

SEQ ID NO: 1227565 - RNA, 17 nt, Human
aggaagccugauuaaag

SEQ ID NO: 1227566 - RNA, 18 nt, Human
aggaagccugauuaaaga

SEQ ID NO: 1227567 - RNA, 14 nt, Human
ugcucauggaauug

SEQ ID NO: 1227568 - RNA, 14 nt, Human
ugcucauuucagga

SEQ ID NO: 1227569 - RNA, 17 nt, Human
uggauuauauuaugaag

SEQ ID NO: 1227570 - RNA, 21 nt, Human
uggcauaacauaaaucuguga

SEQ ID NO: 1227571 - RNA, 22 nt, Human
uggcauaacauaaaucugugaa

SEQ ID NO: 1227572 - RNA, 13 nt, Human
uggagaagaacug

SEQ ID NO: 1227573 - RNA, 15 nt, Human
uggacugugugcuca

SEQ ID NO: 1227574 - RNA, 14 nt, Human
uggagaagaacuga

SEQ ID NO: 1227575 - RNA, 14 nt, Human
uggagcucguggaa

SEQ ID NO: 1227576 - RNA, 13 nt, Human
aggcaaucauggu

SEQ ID NO: 1227577 - RNA, 15 nt, Human
uggacuguggugacu

SEQ ID NO: 1227578 - RNA, 16 nt, Human
uggacuguggugacuu

SEQ ID NO: 1227579 - RNA, 17 nt, Human
uggacuguggugacuuu

SEQ ID NO: 1227580 - RNA, 19 nt, Human
uggacuguggugacuuugg

SEQ ID NO: 1227581 - RNA, 21 nt, Human
uggacuguggugacuuuggau

SEQ ID NO: 1227582 - RNA, 22 nt, Human
uggacuguggugacuuuggaua

SEQ ID NO: 1227583 - RNA, 14 nt, Human
uggaaaucuuuaaa

SEQ ID NO: 1227584 - RNA, 15 nt, Human
uggaaaucuuuaaaa

SEQ ID NO: 1227585 - RNA, 17 nt, Human
uggaagguauuuaauag

SEQ ID NO: 1227586 - RNA, 13 nt, Human
uggaagguauuua

SEQ ID NO: 1227587 - RNA, 23 nt, Human
aggacagcccuucuuuccacaga

SEQ ID NO: 1227588 - RNA, 14 nt, Human
ugggaguacaaaag

SEQ ID NO: 1227589 - RNA, 19 nt, Human
ugggaggugagaccaccuc

SEQ ID NO: 1227590 - RNA, 16 nt, Human
ugggauuuggucaaca

SEQ ID NO: 1227591 - RNA, 15 nt, Human
uggggaaugaagaua

SEQ ID NO: 1227592 - RNA, 14 nt, Human
uggggaaugaagau

SEQ ID NO: 1227593 - RNA, 23 nt, Human
agguauaauucacauuguauuca

SEQ ID NO: 1227594 - RNA, 23 nt, Human
agguacuucaaauccuugaagau

SEQ ID NO: 1227595 - RNA, 18 nt, Human
agguauucguuaucuaau

SEQ ID NO: 1227596 - RNA, 20 nt, Human
agguauucguuaucuaauag

SEQ ID NO: 1227597 - RNA, 17 nt, Human
aggguuaugauuaagua

SEQ ID NO: 1227598 - RNA, 16 nt, Human
agggggcaagaggaau

SEQ ID NO: 1227599 - RNA, 17 nt, Human
aggggcuaccaggaaag

SEQ ID NO: 1227600 - RNA, 14 nt, Human
aggggcuaccagga

SEQ ID NO: 1227601 - RNA, 15 nt, Human
aggggcuaccaggaa

SEQ ID NO: 1227602 - RNA, 11 nt, Human
aggguggcagc

SEQ ID NO: 1227603 - RNA, 13 nt, Human
aggguggcagcaa

SEQ ID NO: 1227604 - RNA, 15 nt, Human
aggguggcagcaaca

SEQ ID NO: 1227605 - RNA, 16 nt, Human
aggguggcagcaacaa

SEQ ID NO: 1227606 - RNA, 20 nt, Human
ugguaaggggaauugaggac

SEQ ID NO: 1227607 - RNA, 16 nt, Human
agucaggaaagagaac

SEQ ID NO: 1227608 - RNA, 17 nt, Human
agucagaucugccuaag

SEQ ID NO: 1227609 - RNA, 22 nt, Human
aguccaggcuuuuuuaucaugu

SEQ ID NO: 1227610 - RNA, 20 nt, Human
ugucaaucagccuaguugau

SEQ ID NO: 1227611 - RNA, 17 nt, Human
uguauuuuuaguagaga

SEQ ID NO: 1227612 - RNA, 20 nt, Human
agucacauuccugaacagga

SEQ ID NO: 1227613 - RNA, 19 nt, Human
agucacauuccugaacagg

SEQ ID NO: 1227614 - RNA, 16 nt, Human
aguauuucuaugaaau

SEQ ID NO: 1227615 - RNA, 15 nt, Human
aguauuucuaugaaa

SEQ ID NO: 1227616 - RNA, 13 nt, Human
aguauuucuauga

SEQ ID NO: 1227617 - RNA, 19 nt, Human
aguagauaggccaugggca

SEQ ID NO: 1227618 - RNA, 22 nt, Human
aguagagacgagguuucacugu

SEQ ID NO: 1227619 - RNA, 19 nt, Human
aguacuuuuggcauuuuac

SEQ ID NO: 1227620 - RNA, 15 nt, Human
aguaauccaagcaaa

SEQ ID NO: 1227621 - RNA, 21 nt, Human
aguaauccaagcaaaugugaa

SEQ ID NO: 1227622 - RNA, 16 nt, Human
aguacacaauaagcaa

SEQ ID NO: 1227623 - RNA, 17 nt, Human
aguacacaauaagcaaa

SEQ ID NO: 1227624 - RNA, 18 nt, Human
aguacacaauaagcaaaa

SEQ ID NO: 1227625 - RNA, 21 nt, Human
aguacacaauaagcaaaaaca

SEQ ID NO: 1227626 - RNA, 22 nt, Human
aguacacaauaagcaaaaacaa

SEQ ID NO: 1227627 - RNA, 23 nt, Human
aguaaggaauuuuauuuuuuucu

SEQ ID NO: 1227628 - RNA, 17 nt, Human
uguacuuuuuggcauaa

SEQ ID NO: 1227629 - RNA, 12 nt, Human
uguacuuuuugg

SEQ ID NO: 1227630 - RNA, 15 nt, Human
uguacuuuuuggcau

SEQ ID NO: 1227631 - RNA, 16 nt, Human
uguacuuuuuggcaua

SEQ ID NO: 1227632 - RNA, 20 nt, Human
aggugcauauuuauaaaaau

SEQ ID NO: 1227633 - RNA, 21 nt, Human
agguggugguagagaagcaag

SEQ ID NO: 1227634 - RNA, 19 nt, Human
uguaaaucccauuauucaa

SEQ ID NO: 1227635 - RNA, 20 nt, Human
uguaaaucccauuauucaaa

SEQ ID NO: 1227636 - RNA, 22 nt, Human
uguaaaucccauuauucaaagu

SEQ ID NO: 1227637 - RNA, 11 nt, Human
aggucccuaau

SEQ ID NO: 1227638 - RNA, 10 nt, Human
aggucccuaa

SEQ ID NO: 1227639 - RNA, 13 nt, Human
uguaaaucccauu

SEQ ID NO: 1227640 - RNA, 16 nt, Human
uguaaaucccauuauu

SEQ ID NO: 1227641 - RNA, 18 nt, Human
uguaaaucccauuauuca

SEQ ID NO: 1227642 - RNA, 15 nt, Human
uguaaguaaacgguc

SEQ ID NO: 1227643 - RNA, 13 nt, Human
uguaauuauaucu

SEQ ID NO: 1227644 - RNA, 14 nt, Human
uguaauuauaucug

SEQ ID NO: 1227645 - RNA, 15 nt, Human
uguaauuauaucuga

SEQ ID NO: 1227646 - RNA, 17 nt, Human
uguaagaaaauaucacu

SEQ ID NO: 1227647 - RNA, 21 nt, Human
agugcaaauugucacaggaca

SEQ ID NO: 1227648 - RNA, 18 nt, Human
agugcaaauugucacagg

SEQ ID NO: 1227649 - RNA, 22 nt, Human
agugcaaauugucacaggacag

SEQ ID NO: 1227650 - RNA, 14 nt, Human
agugcacuaaugug

SEQ ID NO: 1227651 - RNA, 20 nt, Human
agugcuggcauuacaggugu

SEQ ID NO: 1227652 - RNA, 16 nt, Human
uguggugacuuuggau

SEQ ID NO: 1227653 - RNA, 17 nt, Human
uguggugacuuuggaua

SEQ ID NO: 1227654 - RNA, 22 nt, Human
aguucacucuccauuuaauaau

SEQ ID NO: 1227655 - RNA, 24 nt, Human
aguucacucuccauuuaauaauua

SEQ ID NO: 1227656 - RNA, 19 nt, Human
aguucggugagcuacaaau

SEQ ID NO: 1227657 - RNA, 20 nt, Human
aguucggugagcuacaaaug

SEQ ID NO: 1227658 - RNA, 13 nt, Human
uguuuaguaauca

SEQ ID NO: 1227659 - RNA, 14 nt, Human
uguuuaguaaucau

SEQ ID NO: 1227660 - RNA, 17 nt, Human
uguuuaguaaucauauu

SEQ ID NO: 1227661 - RNA, 13 nt, Human
uguuuagucuugu

SEQ ID NO: 1227662 - RNA, 17 nt, Human
uguuuagucuugucuca

SEQ ID NO: 1227663 - RNA, 18 nt, Human
uguuuagucuugucucag

SEQ ID NO: 1227664 - RNA, 19 nt, Human
uguuuagucuugucucaga

SEQ ID NO: 1227665 - RNA, 20 nt, Human
uguuuagucuugucucagau

SEQ ID NO: 1227666 - RNA, 16 nt, Human
uguugucugcaacucu

SEQ ID NO: 1227667 - RNA, 13 nt, Human
uguugucugcaac

SEQ ID NO: 1227668 - RNA, 21 nt, Human
aguguucauaaauaaaguuug

SEQ ID NO: 1227669 - RNA, 16 nt, Human
aguguuggagaagaac

SEQ ID NO: 1227670 - RNA, 14 nt, Human
aguguuggagaaga

SEQ ID NO: 1227671 - RNA, 21 nt, Human
aguguugaaacggaugauuuc

SEQ ID NO: 1227672 - RNA, 18 nt, Human
aguguuggagaagaacug

SEQ ID NO: 1227673 - RNA, 17 nt, Human
aguguuggagaagaacu

SEQ ID NO: 1227674 - RNA, 23 nt, Human
aguguuggagaagaacugaaauc

SEQ ID NO: 1227675 - RNA, 20 nt, Human
uuaagaagacugcauuauau

SEQ ID NO: 1227676 - RNA, 24 nt, Human
uuaaggggaggaaccagagugcug

SEQ ID NO: 1227677 - RNA, 15 nt, Human
auaaaauaauuuuua

SEQ ID NO: 1227678 - RNA, 22 nt, Human
auaaaauaauuuuaucucuuuc

SEQ ID NO: 1227679 - RNA, 12 nt, Human
auaaaauaauuu

SEQ ID NO: 1227680 - RNA, 18 nt, Human
auaaaagccuguuuaaga

SEQ ID NO: 1227681 - RNA, 19 nt, Human
auaaaagccuguuuaagag

SEQ ID NO: 1227682 - RNA, 13 nt, Human
auaaaagccuguu

SEQ ID NO: 1227683 - RNA, 14 nt, Human
aguuuaaauuguaa

SEQ ID NO: 1227684 - RNA, 19 nt, Human
uguuucaaacauauauaac

SEQ ID NO: 1227685 - RNA, 13 nt, Human
uguuucaaacaua

SEQ ID NO: 1227686 - RNA, 11 nt, Human
aguugccuaaa

SEQ ID NO: 1227687 - RNA, 15 nt, Human
aguugccuaaaucca

SEQ ID NO: 1227688 - RNA, 16 nt, Human
aguugccuaaauccau

SEQ ID NO: 1227689 - RNA, 17 nt, Human
aguugccuaaauccauu

SEQ ID NO: 1227690 - RNA, 19 nt, Human
aguugccuaaauccauuug

SEQ ID NO: 1227691 - RNA, 13 nt, Human
uuaccuuugacaa

SEQ ID NO: 1227692 - RNA, 20 nt, Human
uuaccuuugacaaagguaaa

SEQ ID NO: 1227693 - RNA, 22 nt, Human
auaacgauaaaagacagugaaa

SEQ ID NO: 1227694 - RNA, 14 nt, Human
auaacguauaaaag

SEQ ID NO: 1227695 - RNA, 13 nt, Human
auaaauaaaaaua

SEQ ID NO: 1227696 - RNA, 17 nt, Human
auaaagguucaugcaaa

SEQ ID NO: 1227697 - RNA, 15 nt, Human
auaaagguucaugca

SEQ ID NO: 1227698 - RNA, 14 nt, Human
auaaauaaaaauaa

SEQ ID NO: 1227699 - RNA, 22 nt, Human
auaaauagcuagacuggugacu

SEQ ID NO: 1227700 - RNA, 18 nt, Human
auaauccuaaacauauga

SEQ ID NO: 1227701 - RNA, 11 nt, Human
auaauaaagga

SEQ ID NO: 1227702 - RNA, 13 nt, Human
auaauaaaggacu

SEQ ID NO: 1227703 - RNA, 18 nt, Human
auaauaaaggacuguaau

SEQ ID NO: 1227704 - RNA, 19 nt, Human
auaauacuugcuuuggaaa

SEQ ID NO: 1227705 - RNA, 15 nt, Human
uuagggaaaacauuc

SEQ ID NO: 1227706 - RNA, 17 nt, Human
uuagggaaaacauucca

SEQ ID NO: 1227707 - RNA, 12 nt, Human
auauauuuuaag

SEQ ID NO: 1227708 - RNA, 13 nt, Human
auauauuuuaaga

SEQ ID NO: 1227709 - RNA, 19 nt, Human
uucauaauuauuauuuggc

SEQ ID NO: 1227710 - RNA, 12 nt, Human
auaugauucaaa

SEQ ID NO: 1227711 - RNA, 21 nt, Human
auaucuccgucaacucauauu

SEQ ID NO: 1227712 - RNA, 20 nt, Human
auaucuccgucaacucauau

SEQ ID NO: 1227713 - RNA, 19 nt, Human
auaucuccgucaacucaua

SEQ ID NO: 1227714 - RNA, 16 nt, Human
auaucuauauuuuaca

SEQ ID NO: 1227715 - RNA, 14 nt, Human
auauauuuuaagac

SEQ ID NO: 1227716 - RNA, 15 nt, Human
auauauuuuaagacg

SEQ ID NO: 1227717 - RNA, 23 nt, Human
uucccaaaggcauuauaaaaaga

SEQ ID NO: 1227718 - RNA, 18 nt, Human
uucccaacuccagaaagu

SEQ ID NO: 1227719 - RNA, 23 nt, Human
uuccacccagugcugaauuuccc

SEQ ID NO: 1227720 - RNA, 16 nt, Human
uucauuccauucugga

SEQ ID NO: 1227721 - RNA, 12 nt, Human
uucauuccucca

SEQ ID NO: 1227722 - RNA, 13 nt, Human
uucauuccuccag

SEQ ID NO: 1227723 - RNA, 14 nt, Human
uucauuccuccagg

SEQ ID NO: 1227724 - RNA, 14 nt, Human
auagucucuuuaaa

SEQ ID NO: 1227725 - RNA, 21 nt, Human
auagucucuuuaaaaggaaag

SEQ ID NO: 1227726 - RNA, 13 nt, Human
auagucuggcugu

SEQ ID NO: 1227727 - RNA, 14 nt, Human
auauauaacaaugc

SEQ ID NO: 1227728 - RNA, 21 nt, Human
auauauauuuuuuucugaaau

SEQ ID NO: 1227729 - RNA, 21 nt, Human
uucaagcgauucuccugccuc

SEQ ID NO: 1227730 - RNA, 17 nt, Human
uucaaggucugcuuuuc

SEQ ID NO: 1227731 - RNA, 18 nt, Human
uucaagcgauucuccugc

SEQ ID NO: 1227732 - RNA, 14 nt, Human
uucaagcaauccuc

SEQ ID NO: 1227733 - RNA, 16 nt, Human
uucaagcaauccuccc

SEQ ID NO: 1227734 - RNA, 21 nt, Human
uucaaaauuguuacaaauugu

SEQ ID NO: 1227735 - RNA, 13 nt, Human
uucaaaagaaagu

SEQ ID NO: 1227736 - RNA, 14 nt, Human
uucaaacauauaua

SEQ ID NO: 1227737 - RNA, 13 nt, Human
uuauuuuuuucug

SEQ ID NO: 1227738 - RNA, 17 nt, Human
uuauuuuuuucugaauu

SEQ ID NO: 1227739 - RNA, 12 nt, Human
uucaaaagaaag

SEQ ID NO: 1227740 - RNA, 17 nt, Human
auaggcguaacuaauuu

SEQ ID NO: 1227741 - RNA, 15 nt, Human
auagcuuuuuucucu

SEQ ID NO: 1227742 - RNA, 13 nt, Human
uucacauuggaaa

SEQ ID NO: 1227743 - RNA, 22 nt, Human
auagcuuuucccuuuuuuuaag

SEQ ID NO: 1227744 - RNA, 19 nt, Human
uugaaauauugacuuuuua

SEQ ID NO: 1227745 - RNA, 12 nt, Human
uugaaccaauaa

SEQ ID NO: 1227746 - RNA, 18 nt, Human
uucuguacuuuuuggcau

SEQ ID NO: 1227747 - RNA, 19 nt, Human
uucuguacuuuuuggcaua

SEQ ID NO: 1227748 - RNA, 14 nt, Human
auccauacauuugu

SEQ ID NO: 1227749 - RNA, 20 nt, Human
auccauuuggaaaucuuuaa

SEQ ID NO: 1227750 - RNA, 13 nt, Human
auccauuuggaaa

SEQ ID NO: 1227751 - RNA, 17 nt, Human
auccauuuggaaaucuu

SEQ ID NO: 1227752 - RNA, 19 nt, Human
auccauuuggaaaucuuua

SEQ ID NO: 1227753 - RNA, 18 nt, Human
auccaguuuuguuuggac

SEQ ID NO: 1227754 - RNA, 20 nt, Human
auccaguuuuguuuggacca

SEQ ID NO: 1227755 - RNA, 21 nt, Human
auccaguuuuguuuggaccaa

SEQ ID NO: 1227756 - RNA, 12 nt, Human
uucucuaggaaa

SEQ ID NO: 1227757 - RNA, 14 nt, Human
aucaaguuauuuuu

SEQ ID NO: 1227758 - RNA, 16 nt, Human
auauuuuuauauuuac

SEQ ID NO: 1227759 - RNA, 14 nt, Human
uuccuucagcacuu

SEQ ID NO: 1227760 - RNA, 17 nt, Human
auauuuucauucuccua

SEQ ID NO: 1227761 - RNA, 15 nt, Human
uuccuucagcacuuu

SEQ ID NO: 1227762 - RNA, 16 nt, Human
uucccuaucuuugcca

SEQ ID NO: 1227763 - RNA, 20 nt, Human
auauuuuacauaaauuuagu

SEQ ID NO: 1227764 - RNA, 16 nt, Human
auauuuuacauaaauu

SEQ ID NO: 1227765 - RNA, 15 nt, Human
auauuuuacauaaau

SEQ ID NO: 1227766 - RNA, 15 nt, Human
aucaauaaaaaauua

SEQ ID NO: 1227767 - RNA, 17 nt, Human
aucaauaaaaaauuaug

SEQ ID NO: 1227768 - RNA, 18 nt, Human
aucaauaaaaaauuauga

SEQ ID NO: 1227769 - RNA, 15 nt, Human
uucuaaaguaaaaac

SEQ ID NO: 1227770 - RNA, 15 nt, Human
uucucagauuucuga

SEQ ID NO: 1227771 - RNA, 20 nt, Human
uucucagauuucugaggaaa

SEQ ID NO: 1227772 - RNA, 16 nt, Human
uucucagauuucugag

SEQ ID NO: 1227773 - RNA, 16 nt, Human
aucagaaacacccuca

SEQ ID NO: 1227774 - RNA, 20 nt, Human
aucagaaacacccucacacu

SEQ ID NO: 1227775 - RNA, 19 nt, Human
aucagacuaugaaguuuuu

SEQ ID NO: 1227776 - RNA, 13 nt, Human
uucuauaauuuaa

SEQ ID NO: 1227777 - RNA, 14 nt, Human
uucuauaauuuaaa

SEQ ID NO: 1227778 - RNA, 15 nt, Human
uucuaguguagaauu

SEQ ID NO: 1227779 - RNA, 17 nt, Human
augcaguucugaagaag

SEQ ID NO: 1227780 - RNA, 15 nt, Human
augcaguucugaaga

SEQ ID NO: 1227781 - RNA, 14 nt, Human
uuuaauuuuggaau

SEQ ID NO: 1227782 - RNA, 15 nt, Human
uuuaauuuuggaauu

SEQ ID NO: 1227783 - RNA, 17 nt, Human
uuuaauuuuggaauuuu

SEQ ID NO: 1227784 - RNA, 19 nt, Human
augcaguucugaagaagau

SEQ ID NO: 1227785 - RNA, 18 nt, Human
augcaguucugaagaaga

SEQ ID NO: 1227786 - RNA, 12 nt, Human
uuuaauuuuaca

SEQ ID NO: 1227787 - RNA, 14 nt, Human
uuuaaauguauacu

SEQ ID NO: 1227788 - RNA, 15 nt, Human
uuuaaauguauacua

SEQ ID NO: 1227789 - RNA, 14 nt, Human
uuuaaauguuuuuu

SEQ ID NO: 1227790 - RNA, 23 nt, Human
uugugugaaagguacuucaaauc

SEQ ID NO: 1227791 - RNA, 19 nt, Human
uuguguaaauacaauuuug

SEQ ID NO: 1227792 - RNA, 23 nt, Human
augagagacacacugaagaagca

SEQ ID NO: 1227793 - RNA, 21 nt, Human
augagagacacacugaagaag

SEQ ID NO: 1227794 - RNA, 20 nt, Human
augagagacacacugaagaa

SEQ ID NO: 1227795 - RNA, 16 nt, Human
augauuucuaugcuga

SEQ ID NO: 1227796 - RNA, 12 nt, Human
augauuucuaug

SEQ ID NO: 1227797 - RNA, 13 nt, Human
augauuucuaugc

SEQ ID NO: 1227798 - RNA, 22 nt, Human
augauuaugaauuacauuugua

SEQ ID NO: 1227799 - RNA, 15 nt, Human
uuguugucugcaacu

SEQ ID NO: 1227800 - RNA, 21 nt, Human
augauucaaaugucuauaaac

SEQ ID NO: 1227801 - RNA, 12 nt, Human
augauucccagc

SEQ ID NO: 1227802 - RNA, 19 nt, Human
uuucaugcuguucaugaaa

SEQ ID NO: 1227803 - RNA, 17 nt, Human
uuucaugaccaguaaag

SEQ ID NO: 1227804 - RNA, 24 nt, Human
uuucaugaccaguaaaggcugcug

SEQ ID NO: 1227805 - RNA, 16 nt, Human
auggaauacucuuaua

SEQ ID NO: 1227806 - RNA, 17 nt, Human
auggaauacucuuauau

SEQ ID NO: 1227807 - RNA, 19 nt, Human
augcucuccaaaccacuuu

SEQ ID NO: 1227808 - RNA, 16 nt, Human
uuuauuacuguaagaa

SEQ ID NO: 1227809 - RNA, 23 nt, Human
uuuauuacaguauaauuaacaug

SEQ ID NO: 1227810 - RNA, 22 nt, Human
augcugucuacacuaagagaga

SEQ ID NO: 1227811 - RNA, 23 nt, Human
augcugucuacacuaagagagaa

SEQ ID NO: 1227812 - RNA, 13 nt, Human
uuuauauaagcuu

SEQ ID NO: 1227813 - RNA, 22 nt, Human
uuuauuacaguauaauuaacau

SEQ ID NO: 1227814 - RNA, 22 nt, Human
uuuagcuggaaaaguauguuag

SEQ ID NO: 1227815 - RNA, 22 nt, Human
uuuaggaaguugacuuauagua

SEQ ID NO: 1227816 - RNA, 16 nt, Human
uuuaguaucuuuuuau

SEQ ID NO: 1227817 - RNA, 14 nt, Human
uuuagucuugucuc

SEQ ID NO: 1227818 - RNA, 15 nt, Human
uuuagucuugucuca

SEQ ID NO: 1227819 - RNA, 15 nt, Human
augagaaaucuaaaa

SEQ ID NO: 1227820 - RNA, 18 nt, Human
augagaaaucuaaaaaac

SEQ ID NO: 1227821 - RNA, 23 nt, Human
augagaaaucuaaaaaacgaaaa

SEQ ID NO: 1227822 - RNA, 19 nt, Human
augagagacacacugaaga

SEQ ID NO: 1227823 - RNA, 17 nt, Human
augagagacacacugaa

SEQ ID NO: 1227824 - RNA, 14 nt, Human
augagagacacacu

SEQ ID NO: 1227825 - RNA, 13 nt, Human
augagagacacac

SEQ ID NO: 1227826 - RNA, 19 nt, Human
uuguauaaaauaauuuuua

SEQ ID NO: 1227827 - RNA, 23 nt, Human
uuguaguguuggagaagaacuga

SEQ ID NO: 1227828 - RNA, 17 nt, Human
uuguauaaaauaauuuu

SEQ ID NO: 1227829 - RNA, 16 nt, Human
uuguauaaaauaauuu

SEQ ID NO: 1227830 - RNA, 21 nt, Human
uuguaguagcguuuuuuaaau

SEQ ID NO: 1227831 - RNA, 22 nt, Human
uuguaguagcguuuuuuaaaug

SEQ ID NO: 1227832 - RNA, 23 nt, Human
uuguaguagcguuuuuuaaaugu

SEQ ID NO: 1227833 - RNA, 15 nt, Human
uuguacaaaguauua

SEQ ID NO: 1227834 - RNA, 17 nt, Human
uuguacaaaguauuaag

SEQ ID NO: 1227835 - RNA, 20 nt, Human
uuguacaaaguauuaagcau

SEQ ID NO: 1227836 - RNA, 21 nt, Human
uuguacaaaguauuaagcaua

SEQ ID NO: 1227837 - RNA, 22 nt, Human
uuguacaaaguauuaagcauau

SEQ ID NO: 1227838 - RNA, 13 nt, Human
uuguacaaaguau

SEQ ID NO: 1227839 - RNA, 14 nt, Human
uuguacaaaguauu

SEQ ID NO: 1227840 - RNA, 22 nt, Human
aucuuuaauuuuacauuuccua

SEQ ID NO: 1227841 - RNA, 16 nt, Human
aucuuuaauuuuacau

SEQ ID NO: 1227842 - RNA, 21 nt, Human
aucuuuaauuuuacauuuccu

SEQ ID NO: 1227843 - RNA, 16 nt, Human
aucuuugccacccuca

SEQ ID NO: 1227844 - RNA, 15 nt, Human
aucuuugccacccuc

SEQ ID NO: 1227845 - RNA, 14 nt, Human
aucuuugccacccu

SEQ ID NO: 1227846 - RNA, 12 nt, Human
augaaagauuca

SEQ ID NO: 1227847 - RNA, 13 nt, Human
aucuuuuuauuca

SEQ ID NO: 1227848 - RNA, 15 nt, Human
uuggagugcaguggc

SEQ ID NO: 1227849 - RNA, 15 nt, Human
uuggauaauaaggaa

SEQ ID NO: 1227850 - RNA, 19 nt, Human
uuggauaauaaggaaaagu

SEQ ID NO: 1227851 - RNA, 21 nt, Human
uuggauaauaaggaaaaguuu

SEQ ID NO: 1227852 - RNA, 15 nt, Human
uuggggauucuuaaa

SEQ ID NO: 1227853 - RNA, 15 nt, Human
augaauuaaguuuuu

SEQ ID NO: 1227854 - RNA, 13 nt, Human
uuggggauucuua

SEQ ID NO: 1227855 - RNA, 20 nt, Human
augaaauauuauguuaaaac

SEQ ID NO: 1227856 - RNA, 18 nt, Human
augaaauauuauguuaaa

SEQ ID NO: 1227857 - RNA, 17 nt, Human
augaaauauuauguuaa

SEQ ID NO: 1227858 - RNA, 17 nt, Human
augaagauacugaaaua

SEQ ID NO: 1227859 - RNA, 16 nt, Human
augaagauacugaaau

SEQ ID NO: 1227860 - RNA, 19 nt, Human
uugauggugguauguuuuc

SEQ ID NO: 1227861 - RNA, 18 nt, Human
uugauggugguauguuuu

SEQ ID NO: 1227862 - RNA, 15 nt, Human
uugaugggauuuggu

SEQ ID NO: 1227863 - RNA, 12 nt, Human
uugaugccuggc

SEQ ID NO: 1227864 - RNA, 12 nt, Human
aucucuucaguc

SEQ ID NO: 1227865 - RNA, 13 nt, Human
aucucuucagucu

SEQ ID NO: 1227866 - RNA, 21 nt, Human
aucucuucagucucuauacca

SEQ ID NO: 1227867 - RNA, 14 nt, Human
uugcaucugaaaau

SEQ ID NO: 1227868 - RNA, 14 nt, Human
aucucagcucacug

SEQ ID NO: 1227869 - RNA, 11 nt, Human
aucucagcuca

SEQ ID NO: 1227870 - RNA, 13 nt, Human
aucucagcucacu

SEQ ID NO: 1227871 - RNA, 15 nt, Human
aucucagcucacuac

SEQ ID NO: 1227872 - RNA, 13 nt, Human
aucucaauauuuc

SEQ ID NO: 1227873 - RNA, 14 nt, Human
aucucaauucuucc

SEQ ID NO: 1227874 - RNA, 16 nt, Human
aucucaauucuucccu

SEQ ID NO: 1227875 - RNA, 22 nt, Human
aucuccauugugccuaagucca

SEQ ID NO: 1227876 - RNA, 16 nt, Human
aucuccccaucauugg

SEQ ID NO: 1227877 - RNA, 23 nt, Human
aucucauuuccaagcaaguauua

SEQ ID NO: 1227878 - RNA, 21 nt, Human
aucucauuuccaagcaaguau

SEQ ID NO: 1227879 - RNA, 13 nt, Human
uugccuaaaucca

SEQ ID NO: 1227880 - RNA, 14 nt, Human
uugccuaaauccau

SEQ ID NO: 1227881 - RNA, 15 nt, Human
uugccuaaauccauu

SEQ ID NO: 1227882 - RNA, 22 nt, Human
uugccuaaauccauuuggaaau

SEQ ID NO: 1227883 - RNA, 15 nt, Human
aucugaggaauucug

SEQ ID NO: 1227884 - RNA, 16 nt, Human
aucugaggaauucugu

SEQ ID NO: 1227885 - RNA, 17 nt, Human
aucugaggaauucugua

SEQ ID NO: 1227886 - RNA, 18 nt, Human
aucugaggaauucuguau

SEQ ID NO: 1227887 - RNA, 20 nt, Human
aucugaggaauucuguauag

SEQ ID NO: 1227888 - RNA, 21 nt, Human
aucugaggaauucuguauaga

SEQ ID NO: 1227889 - RNA, 20 nt, Human
aucugccuaaggacuucuuu

SEQ ID NO: 1227890 - RNA, 18 nt, Human
aucugccuaaggacuucu

SEQ ID NO: 1227891 - RNA, 19 nt, Human
aucugccuaaggacuucuu

SEQ ID NO: 1227892 - RNA, 14 nt, Human
aucugccuaaggac

SEQ ID NO: 1227893 - RNA, 15 nt, Human
aucugccuaaggacu

SEQ ID NO: 1227894 - RNA, 16 nt, Human
aucugccuaaggacuu

SEQ ID NO: 1227895 - RNA, 17 nt, Human
aucugccuaaggacuuc

SEQ ID NO: 1227896 - RNA, 13 nt, Human
aucugugaacuug

SEQ ID NO: 1227897 - RNA, 17 nt, Human
aucugugaacuugaaau

SEQ ID NO: 1227898 - RNA, 18 nt, Human
aucugugaacuugaaauu

SEQ ID NO: 1227899 - RNA, 19 nt, Human
aucugugaacuugaaauuu

SEQ ID NO: 1227900 - RNA, 18 nt, Human
auuuuauguugcauagaa

SEQ ID NO: 1227901 - RNA, 21 nt, Human
auuuuauguugcauagaauaa

SEQ ID NO: 1227902 - RNA, 18 nt, Human
auuuuauuaugaaacuug

SEQ ID NO: 1227903 - RNA, 21 nt, Human
auuuuauuaugaaacuugugu

SEQ ID NO: 1227904 - RNA, 11 nt, Human
auuuuauuaug

SEQ ID NO: 1227905 - RNA, 12 nt, Human
auuuuauuauga

SEQ ID NO: 1227906 - RNA, 13 nt, Human
auuuuauuaugaa

SEQ ID NO: 1227907 - RNA, 14 nt, Human
auuuuauuaugaaa

SEQ ID NO: 1227908 - RNA, 13 nt, Human
auuuuauuaugua

SEQ ID NO: 1227909 - RNA, 14 nt, Human
auuuuauuauguaa

SEQ ID NO: 1227910 - RNA, 15 nt, Human
auuuuauuauguaaa

SEQ ID NO: 1227911 - RNA, 13 nt, Human
auuuuacauaaau

SEQ ID NO: 1227912 - RNA, 20 nt, Human
auuuuacuguacagacagaa

SEQ ID NO: 1227913 - RNA, 22 nt, Human
auuuuacuguacagacagaaaa

SEQ ID NO: 1227914 - RNA, 16 nt, Human
auuuuaauaauguuuc

SEQ ID NO: 1227915 - RNA, 15 nt, Human
auuuuaauaauguuu

SEQ ID NO: 1227916 - RNA, 14 nt, Human
auuuuaauaauguu

SEQ ID NO: 1227917 - RNA, 19 nt, Human
auuuguaguguuggagaag

SEQ ID NO: 1227918 - RNA, 23 nt, Human
auuugguaaggggaauugaggac

SEQ ID NO: 1227919 - RNA, 17 nt, Human
auuugguuuucacauug

SEQ ID NO: 1227920 - RNA, 22 nt, Human
auuugguuuucacauuggaaac

SEQ ID NO: 1227921 - RNA, 21 nt, Human
auuugguuuucacauuggaaa

SEQ ID NO: 1227922 - RNA, 18 nt, Human
auuuguaguguuggagaa

SEQ ID NO: 1227923 - RNA, 20 nt, Human
auuuggaaaucuuuaaaaaa

SEQ ID NO: 1227924 - RNA, 22 nt, Human
auuuauuacuguaagaaaauau

SEQ ID NO: 1227925 - RNA, 15 nt, Human
auuuacuaaaaugga

SEQ ID NO: 1227926 - RNA, 16 nt, Human
auuuaggaaguugacu

SEQ ID NO: 1227927 - RNA, 23 nt, Human
auuuaggaaguugacuuauagua

SEQ ID NO: 1227928 - RNA, 23 nt, Human
auuuccugggagcuuuuguagaa

SEQ ID NO: 1227929 - RNA, 13 nt, Human
auuggcuuuucug

SEQ ID NO: 1227930 - RNA, 15 nt, Human
auuguauauuacaau

SEQ ID NO: 1227931 - RNA, 17 nt, Human
auuguauauuacaauga

SEQ ID NO: 1227932 - RNA, 18 nt, Human
auuguauauuacaaugau

SEQ ID NO: 1227933 - RNA, 19 nt, Human
auuguauauuacaaugauc

SEQ ID NO: 1227934 - RNA, 20 nt, Human
auuguauauuacaaugauca

SEQ ID NO: 1227935 - RNA, 15 nt, Human
auugugaaauuauuc

SEQ ID NO: 1227936 - RNA, 14 nt, Human
auuguauuacaaau

SEQ ID NO: 1227937 - RNA, 15 nt, Human
auuguauuacaaauc

SEQ ID NO: 1227938 - RNA, 23 nt, Human
auugugcgcuaaacuuuucugau

SEQ ID NO: 1227939 - RNA, 16 nt, Human
auuuacaaaugggaaa

SEQ ID NO: 1227940 - RNA, 18 nt, Human
auuuaaccucuaaauucu

SEQ ID NO: 1227941 - RNA, 16 nt, Human
auuuaaccucuaaauu

SEQ ID NO: 1227942 - RNA, 22 nt, Human
auucucacagcuccaagaauuu

SEQ ID NO: 1227943 - RNA, 21 nt, Human
auucucacagcuccaagaauu

SEQ ID NO: 1227944 - RNA, 19 nt, Human
auucucacagcuccaagaa

SEQ ID NO: 1227945 - RNA, 22 nt, Human
auugaccuauuuccagaaauac

SEQ ID NO: 1227946 - RNA, 21 nt, Human
auuauuuuauuaugaaacuug

SEQ ID NO: 1227947 - RNA, 22 nt, Human
auuauuuuauuaugaaacuugu

SEQ ID NO: 1227948 - RNA, 14 nt, Human
auucagcucaugga

SEQ ID NO: 1227949 - RNA, 16 nt, Human
auucccuucaucugga

SEQ ID NO: 1227950 - RNA, 19 nt, Human
auucccuucaucuggaacc

SEQ ID NO: 1227951 - RNA, 21 nt, Human
auuccauucuggaagugacuu

SEQ ID NO: 1227952 - RNA, 16 nt, Human
auuacauuuguauaaa

SEQ ID NO: 1227953 - RNA, 15 nt, Human
auuacauuuguauaa

SEQ ID NO: 1227954 - RNA, 13 nt, Human
auuacauuuguau

SEQ ID NO: 1227955 - RNA, 20 nt, Human
auuaagagagucuauuuacg

SEQ ID NO: 1227956 - RNA, 23 nt, Human
uuuuuuaaaaaagaaacauuugg

SEQ ID NO: 1227957 - RNA, 21 nt, Human
auuaaguaaugauaacuggaa

SEQ ID NO: 1227958 - RNA, 15 nt, Human
auuaaguaaugauaa

SEQ ID NO: 1227959 - RNA, 13 nt, Human
auuaaguaaugau

SEQ ID NO: 1227960 - RNA, 16 nt, Human
auuauuuuauguugca

SEQ ID NO: 1227961 - RNA, 18 nt, Human
auuauuuuauguugcaua

SEQ ID NO: 1227962 - RNA, 15 nt, Human
auuauuuuauuauga

SEQ ID NO: 1227963 - RNA, 17 nt, Human
auuauauuuacaaaugg

SEQ ID NO: 1227964 - RNA, 19 nt, Human
auuaucuauagcuaaguac

SEQ ID NO: 1227965 - RNA, 22 nt, Human
auuaucuauagcuaaguacaca

SEQ ID NO: 1227966 - RNA, 16 nt, Human
auuauauuuacaaaug

SEQ ID NO: 1227967 - RNA, 19 nt, Human
auuagagaguguugaaacg

SEQ ID NO: 1227968 - RNA, 15 nt, Human
auuagagaguguuga

SEQ ID NO: 1227969 - RNA, 16 nt, Human
auuagagaguguugaa

SEQ ID NO: 1227970 - RNA, 17 nt, Human
auuagagaguguugaaa

SEQ ID NO: 1227971 - RNA, 18 nt, Human
auuagagaguguugaaac

SEQ ID NO: 1227972 - RNA, 15 nt, Human
auguugacaugggac

SEQ ID NO: 1227973 - RNA, 15 nt, Human
auguugcauagaaua

SEQ ID NO: 1227974 - RNA, 14 nt, Human
uuuuauaauuuugu

SEQ ID NO: 1227975 - RNA, 19 nt, Human
uuuuauggcacuaguauuu

SEQ ID NO: 1227976 - RNA, 22 nt, Human
uuuuauggcacuaguauuucua

SEQ ID NO: 1227977 - RNA, 21 nt, Human
uuuuauaauuuugugaagcaa

SEQ ID NO: 1227978 - RNA, 18 nt, Human
uuuuaugugaaacauguu

SEQ ID NO: 1227979 - RNA, 19 nt, Human
uuuuaugugaaacauguuu

SEQ ID NO: 1227980 - RNA, 22 nt, Human
uuuuauguugcauagaauaaaa

SEQ ID NO: 1227981 - RNA, 12 nt, Human
uuuuauuaugua

SEQ ID NO: 1227982 - RNA, 15 nt, Human
uuuucauuauuuuau

SEQ ID NO: 1227983 - RNA, 21 nt, Human
uuuucauuauuuuauuaugaa

SEQ ID NO: 1227984 - RNA, 22 nt, Human
uuuucauucuccuaucaccugu

SEQ ID NO: 1227985 - RNA, 13 nt, Human
uuuuauuauguaa

SEQ ID NO: 1227986 - RNA, 14 nt, Human
uuuuauuauguaaa

SEQ ID NO: 1227987 - RNA, 21 nt, Human
uuuuauucagcucauggacuu

SEQ ID NO: 1227988 - RNA, 12 nt, Human
auuaaagccaug

SEQ ID NO: 1227989 - RNA, 16 nt, Human
auuaaagccauguuua

SEQ ID NO: 1227990 - RNA, 17 nt, Human
auuaaagccauguuuau

SEQ ID NO: 1227991 - RNA, 21 nt, Human
auuaaagccauguuuauuaca

SEQ ID NO: 1227992 - RNA, 19 nt, Human
auuaacauguuaaaccaug

SEQ ID NO: 1227993 - RNA, 13 nt, Human
auuaacauguuaa

SEQ ID NO: 1227994 - RNA, 14 nt, Human
auuaacauguuaaa

SEQ ID NO: 1227995 - RNA, 15 nt, Human
auuaacauguuaaac

SEQ ID NO: 1227996 - RNA, 17 nt, Human
auuaacauguuaaacca

SEQ ID NO: 1227997 - RNA, 21 nt, Human
auguuucaaacauauauaaca

SEQ ID NO: 1227998 - RNA, 18 nt, Human
auguuucaaacauauaua

SEQ ID NO: 1227999 - RNA, 17 nt, Human
auguuuaguaaucauau

SEQ ID NO: 1228000 - RNA, 13 nt, Human
uuuuaaaaaagaa

SEQ ID NO: 1228001 - RNA, 16 nt, Human
uuuuaaaaaaugguca

SEQ ID NO: 1228002 - RNA, 17 nt, Human
uuuuaaaaaauggucac

SEQ ID NO: 1228003 - RNA, 15 nt, Human
uuuuaaaagaaugau

SEQ ID NO: 1228004 - RNA, 14 nt, Human
uuuuaaaagaauga

SEQ ID NO: 1228005 - RNA, 16 nt, Human
uuuuaaguaaggaauu

SEQ ID NO: 1228006 - RNA, 12 nt, Human
uuuguuucugua

SEQ ID NO: 1228007 - RNA, 13 nt, Human
uuuguuucuguac

SEQ ID NO: 1228008 - RNA, 18 nt, Human
uuuguuucuguacuuuuu

SEQ ID NO: 1228009 - RNA, 17 nt, Human
uuuguagaagucacauu

SEQ ID NO: 1228010 - RNA, 15 nt, Human
uuugucuacaccauu

SEQ ID NO: 1228011 - RNA, 13 nt, Human
uuugcucauggaa

SEQ ID NO: 1228012 - RNA, 12 nt, Human
uuugcucaugga

SEQ ID NO: 1228013 - RNA, 11 nt, Human
uuugcucaugg

SEQ ID NO: 1228014 - RNA, 22 nt, Human
augucuauaaaccgaacugaug

SEQ ID NO: 1228015 - RNA, 21 nt, Human
auaacaaugcuguauuuuaaa

SEQ ID NO: 1228016 - RNA, 20 nt, Human
auaacaaugcuguauuuuaa

SEQ ID NO: 1228017 - RNA, 19 nt, Human
auaacaaugcuguauuuua

SEQ ID NO: 1228018 - RNA, 17 nt, Human
auaacaaugcuguauuu

SEQ ID NO: 1228019 - RNA, 15 nt, Human
auaacaaugcuguau

SEQ ID NO: 1228020 - RNA, 14 nt, Human
auaacaaugaaagu

SEQ ID NO: 1228021 - RNA, 11 nt, Human
auaaagcaauu

SEQ ID NO: 1228022 - RNA, 11 nt, Human
auaaaaaggac

SEQ ID NO: 1228023 - RNA, 14 nt, Human
auaaaaaggacauc

SEQ ID NO: 1228024 - RNA, 19 nt, Human
auaaaaaggacaucagcaa

SEQ ID NO: 1228025 - RNA, 13 nt, Human
auaauguuucaaa

SEQ ID NO: 1228026 - RNA, 13 nt, Human
auaauggucagag

SEQ ID NO: 1228027 - RNA, 23 nt, Human
auaauguuucaaacauauauaac

SEQ ID NO: 1228028 - RNA, 18 nt, Human
auaauguuucaaacauau

SEQ ID NO: 1228029 - RNA, 13 nt, Human
auacagaaaaguu

SEQ ID NO: 1228030 - RNA, 13 nt, Human
auauuauguuaaa

SEQ ID NO: 1228031 - RNA, 13 nt, Human
auauucaauaaag

SEQ ID NO: 1228032 - RNA, 15 nt, Human
auauucaauaaagcu

SEQ ID NO: 1228033 - RNA, 20 nt, Human
auauucaauaaagcugcuga

SEQ ID NO: 1228034 - RNA, 16 nt, Human
auauuauguuaaaacu

SEQ ID NO: 1228035 - RNA, 14 nt, Human
auauuauguuaaaa

SEQ ID NO: 1228036 - RNA, 15 nt, Human
auauuauuuuauguu

SEQ ID NO: 1228037 - RNA, 22 nt, Human
auauuauuuuauguugcauaga

SEQ ID NO: 1228038 - RNA, 19 nt, Human
auauauuuuuuucugaaau

SEQ ID NO: 1228039 - RNA, 18 nt, Human
auauauuuuuuucugaaa

SEQ ID NO: 1228040 - RNA, 20 nt, Human
auauauuuuuauauuuacua

SEQ ID NO: 1228041 - RNA, 18 nt, Human
auauauuuuuauauuuac

SEQ ID NO: 1228042 - RNA, 19 nt, Human
auauauuuuuauauuuacu

SEQ ID NO: 1228043 - RNA, 12 nt, Human
auagaaagcuau

SEQ ID NO: 1228044 - RNA, 24 nt, Human
auagguuuggacaaaauggaauac

SEQ ID NO: 1228045 - RNA, 20 nt, Human
auaguacaugauaaaugaua

SEQ ID NO: 1228046 - RNA, 15 nt, Human
aguugacuuauagua

SEQ ID NO: 1228047 - RNA, 17 nt, Human
aguugacuuauaguaca

SEQ ID NO: 1228048 - RNA, 18 nt, Human
aguugacuuauaguacau

SEQ ID NO: 1228049 - RNA, 21 nt, Human
aguugacuuauaguacaugau

SEQ ID NO: 1228050 - RNA, 17 nt, Human
agugaucugcccgccuc

SEQ ID NO: 1228051 - RNA, 15 nt, Human
agugcuaauuuugaa

SEQ ID NO: 1228052 - RNA, 18 nt, Human
agugcuaauuuugaaaaa

SEQ ID NO: 1228053 - RNA, 20 nt, Human
agugcuaauuuugaaaaacu

SEQ ID NO: 1228054 - RNA, 15 nt, Human
agucaaaaauuaaac

SEQ ID NO: 1228055 - RNA, 14 nt, Human
aguauuuuguuuca

SEQ ID NO: 1228056 - RNA, 17 nt, Human
aguauuuuguuucagug

SEQ ID NO: 1228057 - RNA, 17 nt, Human
agugacccugcucucac

SEQ ID NO: 1228058 - RNA, 23 nt, Human
augaaguccaagcauuuagaugu

SEQ ID NO: 1228059 - RNA, 20 nt, Human
augaaguccaagcauuuaga

SEQ ID NO: 1228060 - RNA, 13 nt, Human
augaccaguaaag

SEQ ID NO: 1228061 - RNA, 18 nt, Human
aucugggggccucuucug

SEQ ID NO: 1228062 - RNA, 13 nt, Human
aucuuauuuagga

SEQ ID NO: 1228063 - RNA, 15 nt, Human
aucuggauuccagag

SEQ ID NO: 1228064 - RNA, 20 nt, Human
aucuccgucaacucauauuu

SEQ ID NO: 1228065 - RNA, 14 nt, Human
aucuauauuuuaca

SEQ ID NO: 1228066 - RNA, 17 nt, Human
aucuauagaaagcuaua

SEQ ID NO: 1228067 - RNA, 16 nt, Human
aucuauagaaagcuau

SEQ ID NO: 1228068 - RNA, 21 nt, Human
aucaugaauuaguuuuauaug

SEQ ID NO: 1228069 - RNA, 17 nt, Human
aucaugaauuaguuuua

SEQ ID NO: 1228070 - RNA, 14 nt, Human
aucaugugaaauca

SEQ ID NO: 1228071 - RNA, 12 nt, Human
aucaugugaaau

SEQ ID NO: 1228072 - RNA, 13 nt, Human
aucagcuuauugu

SEQ ID NO: 1228073 - RNA, 14 nt, Human
aucaggaagagaag

SEQ ID NO: 1228074 - RNA, 17 nt, Human
aucaggaagagaaggag

SEQ ID NO: 1228075 - RNA, 19 nt, Human
aucaggaagagaaggagca

SEQ ID NO: 1228076 - RNA, 22 nt, Human
aucaaauauauucagccuggcu

SEQ ID NO: 1228077 - RNA, 16 nt, Human
aucaccgacugaaaau

SEQ ID NO: 1228078 - RNA, 14 nt, Human
aucaaauauauuca

SEQ ID NO: 1228079 - RNA, 16 nt, Human
auccuugagucaaaaa

SEQ ID NO: 1228080 - RNA, 22 nt, Human
auccuucaucuggauuccagag

SEQ ID NO: 1228081 - RNA, 17 nt, Human
auccaccugccuuggcu

SEQ ID NO: 1228082 - RNA, 14 nt, Human
aucccauuauucaa

SEQ ID NO: 1228083 - RNA, 15 nt, Human
aucccauuauucaaa

SEQ ID NO: 1228084 - RNA, 20 nt, Human
aucccauuauucaaaguugc

SEQ ID NO: 1228085 - RNA, 19 nt, Human
auccucaguuuuugugaaa

SEQ ID NO: 1228086 - RNA, 22 nt, Human
auggguuagggaaaacauucca

SEQ ID NO: 1228087 - RNA, 21 nt, Human
augucaaucagccuaguugau

SEQ ID NO: 1228088 - RNA, 15 nt, Human
augguccgugcuaag

SEQ ID NO: 1228089 - RNA, 18 nt, Human
augguccgugcuaaggac

SEQ ID NO: 1228090 - RNA, 19 nt, Human
augguccgugcuaaggacu

SEQ ID NO: 1228091 - RNA, 14 nt, Human
augugaaacauguu

SEQ ID NO: 1228092 - RNA, 15 nt, Human
augugaaacauguuu

SEQ ID NO: 1228093 - RNA, 17 nt, Human
augugaaaucauucauu

SEQ ID NO: 1228094 - RNA, 18 nt, Human
augugaaaucauucauuu

SEQ ID NO: 1228095 - RNA, 15 nt, Human
auguguaugcacagu

SEQ ID NO: 1228096 - RNA, 19 nt, Human
auguguaugcacaguaaaa

SEQ ID NO: 1228097 - RNA, 20 nt, Human
auguguaugcacaguaaaaa

SEQ ID NO: 1228098 - RNA, 19 nt, Human
auguguaagacaaaaagcu

SEQ ID NO: 1228099 - RNA, 17 nt, Human
auguguaagacaaaaag

SEQ ID NO: 1228100 - RNA, 20 nt, Human
augcugaguuugugcuggug

SEQ ID NO: 1228101 - RNA, 14 nt, Human
auggaggggcagag

SEQ ID NO: 1228102 - RNA, 15 nt, Human
auggaggggcagagc

SEQ ID NO: 1228103 - RNA, 19 nt, Human
auggaggggcagagccagg

SEQ ID NO: 1228104 - RNA, 18 nt, Human
auggauaggcacaggaaa

SEQ ID NO: 1228105 - RNA, 17 nt, Human
auggauaggcacaggaa

SEQ ID NO: 1228106 - RNA, 19 nt, Human
auggcuuuguauagaaccu

SEQ ID NO: 1228107 - RNA, 18 nt, Human
augccuuguuucauauuu

SEQ ID NO: 1228108 - RNA, 23 nt, Human
augcacaaauucugucucuggau

SEQ ID NO: 1228109 - RNA, 15 nt, Human
augcacaaauucugu

SEQ ID NO: 1228110 - RNA, 22 nt, Human
augcacaaauucugucucugga

SEQ ID NO: 1228111 - RNA, 23 nt, Human
aggccaugggcacuguggguaga

SEQ ID NO: 1228112 - RNA, 21 nt, Human
aggccaugggcacugugggua

SEQ ID NO: 1228113 - RNA, 20 nt, Human
aggagagggcgcuccucucu

SEQ ID NO: 1228114 - RNA, 13 nt, Human
aggcagagaagaa

SEQ ID NO: 1228115 - RNA, 14 nt, Human
aggcagagaagaaa

SEQ ID NO: 1228116 - RNA, 15 nt, Human
aggcagagaagaaag

SEQ ID NO: 1228117 - RNA, 14 nt, Human
agggaccggcggac

SEQ ID NO: 1228118 - RNA, 19 nt, Human
aggccggcuugccacaccc

SEQ ID NO: 1228119 - RNA, 20 nt, Human
aggccggcuugccacacccc

SEQ ID NO: 1228120 - RNA, 21 nt, Human
aggccggcuugccacaccccc

SEQ ID NO: 1228121 - RNA, 17 nt, Human
agccuggggcugaggcu

SEQ ID NO: 1228122 - RNA, 17 nt, Human
agccuggcuucaaauug

SEQ ID NO: 1228123 - RNA, 18 nt, Human
agccuggcuucaaauugu

SEQ ID NO: 1228124 - RNA, 19 nt, Human
agcucacugcaaccuccac

SEQ ID NO: 1228125 - RNA, 12 nt, Human
agcuacaaaugc

SEQ ID NO: 1228126 - RNA, 11 nt, Human
agcguuuuuua

SEQ ID NO: 1228127 - RNA, 14 nt, Human
agcguuuuuuaaau

SEQ ID NO: 1228128 - RNA, 17 nt, Human
agcguuuuuuaaaugua

SEQ ID NO: 1228129 - RNA, 18 nt, Human
agcguuuuuuaaauguau

SEQ ID NO: 1228130 - RNA, 19 nt, Human
agcguuuuuuaaauguaua

SEQ ID NO: 1228131 - RNA, 20 nt, Human
agcguuuuuuaaauguauac

SEQ ID NO: 1228132 - RNA, 23 nt, Human
agcguuuuuuaaauguauacuau

SEQ ID NO: 1228133 - RNA, 18 nt, Human
agcuucacuguaaaauaa

SEQ ID NO: 1228134 - RNA, 18 nt, Human
aggaaguugacuuauagu

SEQ ID NO: 1228135 - RNA, 22 nt, Human
aggaaguugacuuauaguacau

SEQ ID NO: 1228136 - RNA, 23 nt, Human
aggaaguugacuuauaguacaug

SEQ ID NO: 1228137 - RNA, 15 nt, Human
agcuuuuaugugaaa

SEQ ID NO: 1228138 - RNA, 21 nt, Human
agcuuuuaugugaaacauguu

SEQ ID NO: 1228139 - RNA, 21 nt, Human
agcaauuacaacggagucaaa

SEQ ID NO: 1228140 - RNA, 24 nt, Human
agcaaaauuuuuucucuaggaaau

SEQ ID NO: 1228141 - RNA, 19 nt, Human
agaucugccuaaggacuuc

SEQ ID NO: 1228142 - RNA, 21 nt, Human
agauguagccccucuccugga

SEQ ID NO: 1228143 - RNA, 22 nt, Human
agacagccaacuauggccugug

SEQ ID NO: 1228144 - RNA, 14 nt, Human
agaaugagacaucc

SEQ ID NO: 1228145 - RNA, 22 nt, Human
agaaugagagacacacugaaga

SEQ ID NO: 1228146 - RNA, 17 nt, Human
agaaugagagacacacu

SEQ ID NO: 1228147 - RNA, 22 nt, Human
agaagucacauuccugaacagg

SEQ ID NO: 1228148 - RNA, 18 nt, Human
agaagacugcauuauauu

SEQ ID NO: 1228149 - RNA, 21 nt, Human
agaagucacauuccugaacag

SEQ ID NO: 1228150 - RNA, 20 nt, Human
agaagucacauuccugaaca

SEQ ID NO: 1228151 - RNA, 18 nt, Human
agaagucacauuccugaa

SEQ ID NO: 1228152 - RNA, 17 nt, Human
agaagagaucaggaaga

SEQ ID NO: 1228153 - RNA, 18 nt, Human
agaggaauuacgugcucu

SEQ ID NO: 1228154 - RNA, 20 nt, Human
aaaucugugaacuugaaauu

SEQ ID NO: 1228155 - RNA, 21 nt, Human
aaaucugugaacuugaaauuu

SEQ ID NO: 1228156 - RNA, 17 nt, Human
aacacccucacacuggg

SEQ ID NO: 1228157 - RNA, 21 nt, Human
aacacccucacacugggacuu

SEQ ID NO: 1228158 - RNA, 22 nt, Human
aaauguuuuuuuuuaaagacuu

SEQ ID NO: 1228159 - RNA, 23 nt, Human
aaauuggggauucuuaaaguuga

SEQ ID NO: 1228160 - RNA, 19 nt, Human
aaauuguaagcaugcacaa

SEQ ID NO: 1228161 - RNA, 18 nt, Human
aaauugaugggauuuggu

SEQ ID NO: 1228162 - RNA, 18 nt, Human
aaauuggggauucuuaaa

SEQ ID NO: 1228163 - RNA, 19 nt, Human
aaauuggggauucuuaaag

SEQ ID NO: 1228164 - RNA, 20 nt, Human
aaauuggggauucuuaaagu

SEQ ID NO: 1228165 - RNA, 22 nt, Human
aaauuggggauucuuaaaguug

SEQ ID NO: 1228166 - RNA, 18 nt, Human
aaauguuuuuuuuuaaag

SEQ ID NO: 1228167 - RNA, 21 nt, Human
aaauguuuuuuuuuaaagacu

SEQ ID NO: 1228168 - RNA, 15 nt, Human
aacguauaaaagccu

SEQ ID NO: 1228169 - RNA, 13 nt, Human
aacgcguugaaau

SEQ ID NO: 1228170 - RNA, 14 nt, Human
aacgcguugaaauu

SEQ ID NO: 1228171 - RNA, 15 nt, Human
aacgcguugaaauug

SEQ ID NO: 1228172 - RNA, 17 nt, Human
aacgcguugaaauugua

SEQ ID NO: 1228173 - RNA, 18 nt, Human
aacucauauuuucaugcu

SEQ ID NO: 1228174 - RNA, 16 nt, Human
aacucauauuuucaug

SEQ ID NO: 1228175 - RNA, 15 nt, Human
aacucauauuuucau

SEQ ID NO: 1228176 - RNA, 22 nt, Human
aacucaucuagguaaauuacag

SEQ ID NO: 1228177 - RNA, 11 nt, Human
aaccaguauug

SEQ ID NO: 1228178 - RNA, 13 nt, Human
aaccaguauugua

SEQ ID NO: 1228179 - RNA, 14 nt, Human
aaccaguauuguac

SEQ ID NO: 1228180 - RNA, 15 nt, Human
aaccaguauuguaca

SEQ ID NO: 1228181 - RNA, 20 nt, Human
aacaggaucaguuaacuauu

SEQ ID NO: 1228182 - RNA, 13 nt, Human
aaaauuaagaaag

SEQ ID NO: 1228183 - RNA, 20 nt, Human
aaaauuaagaaaggauaaag

SEQ ID NO: 1228184 - RNA, 19 nt, Human
aaaauccauacauuugugu

SEQ ID NO: 1228185 - RNA, 20 nt, Human
aaaauuaaaccggaccaucu

SEQ ID NO: 1228186 - RNA, 22 nt, Human
aaaauuaacaugaauauuuagu

SEQ ID NO: 1228187 - RNA, 12 nt, Human
aaaauuaagaaa

SEQ ID NO: 1228188 - RNA, 14 nt, Human
aaaauuacaacuaa

SEQ ID NO: 1228189 - RNA, 13 nt, Human
aaaauuaucuaua

SEQ ID NO: 1228190 - RNA, 21 nt, Human
aaaauccacuuuaucuugaau

SEQ ID NO: 1228191 - RNA, 23 nt, Human
aaaaguuuaauauuaaagccaug

SEQ ID NO: 1228192 - RNA, 21 nt, Human
aaaaguuuaauauuaaagcca

SEQ ID NO: 1228193 - RNA, 22 nt, Human
aaaaguuuaauauuaaagccau

SEQ ID NO: 1228194 - RNA, 15 nt, Human
aaaauaaaaaacacu

SEQ ID NO: 1228195 - RNA, 12 nt, Human
aaacaggaucag

SEQ ID NO: 1228196 - RNA, 19 nt, Human
aaacccuugccaugugcua

SEQ ID NO: 1228197 - RNA, 12 nt, Human
aaagaaaauuuu

SEQ ID NO: 1228198 - RNA, 19 nt, Human
aaagaaaauuuuuguagua

SEQ ID NO: 1228199 - RNA, 13 nt, Human
aaagaaacauuug

SEQ ID NO: 1228200 - RNA, 15 nt, Human
aaagaacggaagaag

SEQ ID NO: 1228201 - RNA, 19 nt, Human
aaagaacggaagaagagau

SEQ ID NO: 1228202 - RNA, 16 nt, Human
aaagcccauucauucc

SEQ ID NO: 1228203 - RNA, 17 nt, Human
aaagcccauucauucca

SEQ ID NO: 1228204 - RNA, 17 nt, Human
aaauaaacgucuuaaau

SEQ ID NO: 1228205 - RNA, 16 nt, Human
aaauaaacgucuuaaa

SEQ ID NO: 1228206 - RNA, 15 nt, Human
aaauaaacgucuuaa

SEQ ID NO: 1228207 - RNA, 15 nt, Human
aauggguuacuugau

SEQ ID NO: 1228208 - RNA, 22 nt, Human
aauggucacguuuggugcuucu

SEQ ID NO: 1228209 - RNA, 23 nt, Human
aauggucacguuuggugcuucuc

SEQ ID NO: 1228210 - RNA, 20 nt, Human
aaugguccgugcuaaggacu

SEQ ID NO: 1228211 - RNA, 22 nt, Human
aaugguccgugcuaaggacuug

SEQ ID NO: 1228212 - RNA, 17 nt, Human
aaugauaacuggaaacu

SEQ ID NO: 1228213 - RNA, 21 nt, Human
aaugauagacaauugagguaa

SEQ ID NO: 1228214 - RNA, 16 nt, Human
aaugauaacuggaaac

SEQ ID NO: 1228215 - RNA, 15 nt, Human
aaugauaacuggaaa

SEQ ID NO: 1228216 - RNA, 14 nt, Human
aaugauaacuggaa

SEQ ID NO: 1228217 - RNA, 17 nt, Human
aauccauacauuugugu

SEQ ID NO: 1228218 - RNA, 16 nt, Human
aauccauacauuugug

SEQ ID NO: 1228219 - RNA, 17 nt, Human
aauccaagcaaauguga

SEQ ID NO: 1228220 - RNA, 22 nt, Human
aauauuaaagccauguuuauua

SEQ ID NO: 1228221 - RNA, 13 nt, Human
aauauuaaagcca

SEQ ID NO: 1228222 - RNA, 14 nt, Human
aauauuaaagccau

SEQ ID NO: 1228223 - RNA, 15 nt, Human
aauauuaaagccaug

SEQ ID NO: 1228224 - RNA, 16 nt, Human
aauauuaaagccaugu

SEQ ID NO: 1228225 - RNA, 18 nt, Human
aauauuaaagccauguuu

SEQ ID NO: 1228226 - RNA, 19 nt, Human
aauauuaaagccauguuua

SEQ ID NO: 1228227 - RNA, 20 nt, Human
aauauuaaagccauguuuau

SEQ ID NO: 1228228 - RNA, 20 nt, Human
aauacgugggcauucaaaug

SEQ ID NO: 1228229 - RNA, 19 nt, Human
aauacgugggcauucaaau

SEQ ID NO: 1228230 - RNA, 22 nt, Human
aaguugauaugccuuuucccaa

SEQ ID NO: 1228231 - RNA, 16 nt, Human
aauaaacgucuuaaau

SEQ ID NO: 1228232 - RNA, 15 nt, Human
aauaaacgucuuaaa

SEQ ID NO: 1228233 - RNA, 11 nt, Human
aauaaagcugu

SEQ ID NO: 1228234 - RNA, 19 nt, Human
aauaaagcuguguggcagu

SEQ ID NO: 1228235 - RNA, 14 nt, Human
aauaaagcugcuga

SEQ ID NO: 1228236 - RNA, 11 nt, Human
aauaaaggacu

SEQ ID NO: 1228237 - RNA, 18 nt, Human
aauaaaggacuguaaucu

SEQ ID NO: 1228238 - RNA, 22 nt, Human
aauaaaggacuguaaucuuauu

SEQ ID NO: 1228239 - RNA, 12 nt, Human
aauaaaauuuuu

SEQ ID NO: 1228240 - RNA, 12 nt, Human
aauaauguuuca

SEQ ID NO: 1228241 - RNA, 19 nt, Human
aauaauguuucaaacauau

SEQ ID NO: 1228242 - RNA, 14 nt, Human
aauaauguuucaaa

SEQ ID NO: 1228243 - RNA, 12 nt, Human
aaggaauuuuau

SEQ ID NO: 1228244 - RNA, 20 nt, Human
aaggcagcucuaaaugucaa

SEQ ID NO: 1228245 - RNA, 21 nt, Human
aagcugcugagaaucuagccu

SEQ ID NO: 1228246 - RNA, 17 nt, Human
aagcuggagugcagugg

SEQ ID NO: 1228247 - RNA, 20 nt, Human
aagcuggagugcaguggcau

SEQ ID NO: 1228248 - RNA, 15 nt, Human
aagggacugagaaau

SEQ ID NO: 1228249 - RNA, 17 nt, Human
aagggacugagaaauuu

SEQ ID NO: 1228250 - RNA, 12 nt, Human
aaggucugcuuu

SEQ ID NO: 1228251 - RNA, 21 nt, Human
aagauucaaugccccugaauu

SEQ ID NO: 1228252 - RNA, 20 nt, Human
aagauucaaugccccugaau

SEQ ID NO: 1228253 - RNA, 20 nt, Human
aagauacugaaauaaacguc

SEQ ID NO: 1228254 - RNA, 16 nt, Human
aagauacugaaauaaa

SEQ ID NO: 1228255 - RNA, 23 nt, Human
aagacagugaaagaaaauaacaa

SEQ ID NO: 1228256 - RNA, 18 nt, Human
aacuguuguagaagacaa

SEQ ID NO: 1228257 - RNA, 19 nt, Human
aacuguuguagaagacaaa

SEQ ID NO: 1228258 - RNA, 15 nt, Human
aagagaacuuccaga

SEQ ID NO: 1228259 - RNA, 15 nt, Human
aagacuuuuaugaua

SEQ ID NO: 1228260 - RNA, 13 nt, Human
aagagaaggagca

SEQ ID NO: 1228261 - RNA, 20 nt, Human
acucuuaagaagacugcauu

SEQ ID NO: 1228262 - RNA, 20 nt, Human
acucuguucauuccuccagg

SEQ ID NO: 1228263 - RNA, 15 nt, Human
acucuuaagaagacu

SEQ ID NO: 1228264 - RNA, 14 nt, Human
acucuuaagaagac

SEQ ID NO: 1228265 - RNA, 15 nt, Human
acucuguucauuccu

SEQ ID NO: 1228266 - RNA, 16 nt, Human
acucuguucauuccuc

SEQ ID NO: 1228267 - RNA, 18 nt, Human
acucuguucauuccucca

SEQ ID NO: 1228268 - RNA, 19 nt, Human
acucuguucauuccuccag

SEQ ID NO: 1228269 - RNA, 12 nt, Human
acugauucuuca

SEQ ID NO: 1228270 - RNA, 13 nt, Human
acugauucuucag

SEQ ID NO: 1228271 - RNA, 15 nt, Human
acugauucuucagca

SEQ ID NO: 1228272 - RNA, 22 nt, Human
acugauucuucagcaaaaauau

SEQ ID NO: 1228273 - RNA, 19 nt, Human
acuucagcgguuuauauaa

SEQ ID NO: 1228274 - RNA, 18 nt, Human
acuucagcgguuuauaua

SEQ ID NO: 1228275 - RNA, 20 nt, Human
acuucaaauccuugaagauu

SEQ ID NO: 1228276 - RNA, 23 nt, Human
accggcggaccccagccauccag

SEQ ID NO: 1228277 - RNA, 20 nt, Human
accucugccucagaaaacaa

SEQ ID NO: 1228278 - RNA, 12 nt, Human
accugcccugcc

SEQ ID NO: 1228279 - RNA, 13 nt, Human
accugcccugccc

SEQ ID NO: 1228280 - RNA, 16 nt, Human
accugcccugcccugc

SEQ ID NO: 1228281 - RNA, 17 nt, Human
accugcccugcccugcc

SEQ ID NO: 1228282 - RNA, 18 nt, Human
accugcccugcccugcca

SEQ ID NO: 1228283 - RNA, 20 nt, Human
accugcccugcccugccacc

SEQ ID NO: 1228284 - RNA, 21 nt, Human
accugcccugcccugccaccu

SEQ ID NO: 1228285 - RNA, 22 nt, Human
accugcccugcccugccaccug

SEQ ID NO: 1228286 - RNA, 23 nt, Human
accugcccugcccugccaccugu

SEQ ID NO: 1228287 - RNA, 18 nt, Human
accugucugucugucugu

SEQ ID NO: 1228288 - RNA, 20 nt, Human
accugucugucugucugucc

SEQ ID NO: 1228289 - RNA, 19 nt, Human
accugucuugccuuuuuca

SEQ ID NO: 1228290 - RNA, 21 nt, Human
accugucuugccuuuuucauu

SEQ ID NO: 1228291 - RNA, 22 nt, Human
accugucuugccuuuuucauua

SEQ ID NO: 1228292 - RNA, 18 nt, Human
accucugccucagaaaac

SEQ ID NO: 1228293 - RNA, 17 nt, Human
accucugccucagaaaa

SEQ ID NO: 1228294 - RNA, 15 nt, Human
acgcacggcagccac

SEQ ID NO: 1228295 - RNA, 17 nt, Human
acgcacggcagccacag

SEQ ID NO: 1228296 - RNA, 15 nt, Human
acuauugcauuuaua

SEQ ID NO: 1228297 - RNA, 18 nt, Human
acuaguauuucuaugaaa

SEQ ID NO: 1228298 - RNA, 19 nt, Human
acuaguauuucuaugaaau

SEQ ID NO: 1228299 - RNA, 20 nt, Human
acaauuuuguuucuguacuu

SEQ ID NO: 1228300 - RNA, 13 nt, Human
acacugggacuug

SEQ ID NO: 1228301 - RNA, 18 nt, Human
acacugggacuugcaaaa

SEQ ID NO: 1228302 - RNA, 19 nt, Human
acacugggacuugcaaaaa

SEQ ID NO: 1228303 - RNA, 20 nt, Human
acacugggagaaaugaaaaa

SEQ ID NO: 1228304 - RNA, 16 nt, Human
acagaagcuccaggua

SEQ ID NO: 1228305 - RNA, 11 nt, Human
aauuuuggaau

SEQ ID NO: 1228306 - RNA, 12 nt, Human
aauuuuggaauu

SEQ ID NO: 1228307 - RNA, 18 nt, Human
aauuuugugaagcaaaau

SEQ ID NO: 1228308 - RNA, 17 nt, Human
aauuuugugaagcaaaa

SEQ ID NO: 1228309 - RNA, 18 nt, Human
aauuuucaucuaggauuu

SEQ ID NO: 1228310 - RNA, 15 nt, Human
acaaaauggaauacu

SEQ ID NO: 1228311 - RNA, 14 nt, Human
acaaaauggaauac

SEQ ID NO: 1228312 - RNA, 13 nt, Human
acaaaauggaaua

SEQ ID NO: 1228313 - RNA, 12 nt, Human
acaaagaaauua

SEQ ID NO: 1228314 - RNA, 14 nt, Human
acaaagaaauuaug

SEQ ID NO: 1228315 - RNA, 16 nt, Human
acaaagaaauuaugug

SEQ ID NO: 1228316 - RNA, 21 nt, Human
acaaggaugaauuaaguuuuu

SEQ ID NO: 1228317 - RNA, 21 nt, Human
aaugguccgugcuaaggacuu

SEQ ID NO: 1228318 - RNA, 16 nt, Human
aauuggggauucuuaa

SEQ ID NO: 1228319 - RNA, 17 nt, Human
aauuggggauucuuaaa

SEQ ID NO: 1228320 - RNA, 20 nt, Human
aauuggggauucuuaaaguu

SEQ ID NO: 1228321 - RNA, 23 nt, Human
aauuuauuggcuuuucugaucca

SEQ ID NO: 1228322 - RNA, 17 nt, Human
aauuuauuggcuuuucu

SEQ ID NO: 1228323 - RNA, 19 nt, Human
aauuuauuggcuuuucuga

SEQ ID NO: 1228324 - RNA, 20 nt, Human
aauuuauuggcuuuucugau

SEQ ID NO: 1228325 - RNA, 21 nt, Human
aauuuauuggcuuuucugauc

SEQ ID NO: 1228326 - RNA, 21 nt, Human
aauuuccugggagcuuuugua

SEQ ID NO: 1228327 - RNA, 18 nt, Human
aauuuccugggagcuuuu

SEQ ID NO: 1228328 - RNA, 14 nt, Human
acagcugccucuuc

SEQ ID NO: 1228329 - RNA, 15 nt, Human
acagcugccucuucc

SEQ ID NO: 1228330 - RNA, 21 nt, Human
acagggccuuuggcaggugca

SEQ ID NO: 1228331 - RNA, 19 nt, Human
acaguggggaaugaagaua

SEQ ID NO: 1228332 - RNA, 15 nt, Human
acaguggggaaugaa

SEQ ID NO: 1228333 - RNA, 18 nt, Human
acauuuccuuacagaacu

SEQ ID NO: 1228334 - RNA, 16 nt, Human
acauuuccuaaauaua

SEQ ID NO: 1228335 - RNA, 17 nt, Human
acauuuccuaaauauau

SEQ ID NO: 1228336 - RNA, 12 nt, Human
acccacccagaa

SEQ ID NO: 1228337 - RNA, 15 nt, Human
acccacccagaauga

SEQ ID NO: 1228338 - RNA, 22 nt, Human
accaucaccagaauuaauuuua

SEQ ID NO: 1228339 - RNA, 20 nt, Human
accaucagaaacacccucac

SEQ ID NO: 1228340 - RNA, 23 nt, Human
accaucagaaacacccucacacu

SEQ ID NO: 1228341 - RNA, 15 nt, Human
accaucucuccaacu

SEQ ID NO: 1228342 - RNA, 19 nt, Human
cacaggaaccacaagacug

SEQ ID NO: 1228343 - RNA, 13 nt, Human
cacaggaaaccag

SEQ ID NO: 1228344 - RNA, 15 nt, Human
cacagcugccucuuc

SEQ ID NO: 1228345 - RNA, 22 nt, Human
cacagcugccucuucccucuuc

SEQ ID NO: 1228346 - RNA, 16 nt, Human
caaacugacucuuaag

SEQ ID NO: 1228347 - RNA, 21 nt, Human
caaacugacucuuaagaagac

SEQ ID NO: 1228348 - RNA, 17 nt, Human
caaacugacucuuaaga

SEQ ID NO: 1228349 - RNA, 16 nt, Human
caaaaucaauuaaaau

SEQ ID NO: 1228350 - RNA, 20 nt, Human
caaaucaaucuguaaaacua

SEQ ID NO: 1228351 - RNA, 17 nt, Human
caaaucaaucuguaaaa

SEQ ID NO: 1228352 - RNA, 23 nt, Human
caacauagugggacccugucucu

SEQ ID NO: 1228353 - RNA, 23 nt, Human
caacagcuggugcccugcuuuca

SEQ ID NO: 1228354 - RNA, 14 nt, Human
cacacugaagaagc

SEQ ID NO: 1228355 - RNA, 13 nt, Human
cacacugaagaag

SEQ ID NO: 1228356 - RNA, 14 nt, Human
cacagcugccucuu

SEQ ID NO: 1228357 - RNA, 13 nt, Human
cacaauaagcaaa

SEQ ID NO: 1228358 - RNA, 19 nt, Human
caauagucaaauuguguga

SEQ ID NO: 1228359 - RNA, 12 nt, Human
caauaagcaaaa

SEQ ID NO: 1228360 - RNA, 21 nt, Human
caauaaagugacccugcucuc

SEQ ID NO: 1228361 - RNA, 14 nt, Human
caauaaagugaccc

SEQ ID NO: 1228362 - RNA, 13 nt, Human
caauaaauagaca

SEQ ID NO: 1228363 - RNA, 17 nt, Human
caauaaauagacacgca

SEQ ID NO: 1228364 - RNA, 18 nt, Human
caaggaaaaaauaacaau

SEQ ID NO: 1228365 - RNA, 20 nt, Human
caaggaaaaaauaacaauga

SEQ ID NO: 1228366 - RNA, 21 nt, Human
ccccagcuggggccaggcugg

SEQ ID NO: 1228367 - RNA, 22 nt, Human
ccccagcuggggccaggcuggg

SEQ ID NO: 1228368 - RNA, 20 nt, Human
cccuaaaagaaacccugcac

SEQ ID NO: 1228369 - RNA, 19 nt, Human
cccuaaauaauaaaaauaa

SEQ ID NO: 1228370 - RNA, 15 nt, Human
cccuaaccaaguucc

SEQ ID NO: 1228371 - RNA, 12 nt, Human
cccuaauaaagc

SEQ ID NO: 1228372 - RNA, 13 nt, Human
cccuaauaaagcu

SEQ ID NO: 1228373 - RNA, 14 nt, Human
cccuaauaaagcug

SEQ ID NO: 1228374 - RNA, 15 nt, Human
cccuaauaaagcugu

SEQ ID NO: 1228375 - RNA, 18 nt, Human
cccuaauaaagcugugug

SEQ ID NO: 1228376 - RNA, 12 nt, Human
cccucaugcugu

SEQ ID NO: 1228377 - RNA, 16 nt, Human
cccugggaggcucugg

SEQ ID NO: 1228378 - RNA, 17 nt, Human
cccugggaggcucugga

SEQ ID NO: 1228379 - RNA, 18 nt, Human
cccugggaggcucuggag

SEQ ID NO: 1228380 - RNA, 15 nt, Human
cccuggaaaccuucc

SEQ ID NO: 1228381 - RNA, 16 nt, Human
cccuggaaaccuucca

SEQ ID NO: 1228382 - RNA, 19 nt, Human
cccuggaaaccuuccaccc

SEQ ID NO: 1228383 - RNA, 21 nt, Human
cccuggaaaccuuccacccag

SEQ ID NO: 1228384 - RNA, 22 nt, Human
cccuggaaaccuuccacccagu

SEQ ID NO: 1228385 - RNA, 21 nt, Human
cccugccucucugcagguccc

SEQ ID NO: 1228386 - RNA, 22 nt, Human
cccugccucucugcaggucccu

SEQ ID NO: 1228387 - RNA, 14 nt, Human
cccugccaccuccu

SEQ ID NO: 1228388 - RNA, 17 nt, Human
cccugccaccuccugcc

SEQ ID NO: 1228389 - RNA, 18 nt, Human
cccugccaccuccugccu

SEQ ID NO: 1228390 - RNA, 11 nt, Human
cccugccucuc

SEQ ID NO: 1228391 - RNA, 18 nt, Human
cccugccucucugcaggu

SEQ ID NO: 1228392 - RNA, 22 nt, Human
ccuagguauaauucacauugua

SEQ ID NO: 1228393 - RNA, 13 nt, Human
ccuaaacauauga

SEQ ID NO: 1228394 - RNA, 19 nt, Human
ccuaaauccauuuggaaau

SEQ ID NO: 1228395 - RNA, 20 nt, Human
ccuaaauccauuuggaaauc

SEQ ID NO: 1228396 - RNA, 21 nt, Human
ccuaaauccauuuggaaaucu

SEQ ID NO: 1228397 - RNA, 16 nt, Human
cccuucaugcauggaa

SEQ ID NO: 1228398 - RNA, 14 nt, Human
cccuucaucuggaa

SEQ ID NO: 1228399 - RNA, 16 nt, Human
cccuucaucuggaacc

SEQ ID NO: 1228400 - RNA, 16 nt, Human
ccggaucugagggaga

SEQ ID NO: 1228401 - RNA, 12 nt, Human
ccucacacuggg

SEQ ID NO: 1228402 - RNA, 13 nt, Human
ccucacacuggga

SEQ ID NO: 1228403 - RNA, 15 nt, Human
ccucacacugggacu

SEQ ID NO: 1228404 - RNA, 21 nt, Human
ccuauucaacacacacaugcu

SEQ ID NO: 1228405 - RNA, 23 nt, Human
ccuauucaacacacacaugcuuc

SEQ ID NO: 1228406 - RNA, 18 nt, Human
ccucaccagcccuggcaa

SEQ ID NO: 1228407 - RNA, 15 nt, Human
ccucguggacaccug

SEQ ID NO: 1228408 - RNA, 16 nt, Human
ccucguggacaccugc

SEQ ID NO: 1228409 - RNA, 17 nt, Human
ccucguggacaccugcc

SEQ ID NO: 1228410 - RNA, 18 nt, Human
ccucguggacaccugccc

SEQ ID NO: 1228411 - RNA, 20 nt, Human
ccucguggacaccugcccug

SEQ ID NO: 1228412 - RNA, 21 nt, Human
ccucguggacaccugcccugc

SEQ ID NO: 1228413 - RNA, 22 nt, Human
ccucguggacaccugcccugcc

SEQ ID NO: 1228414 - RNA, 20 nt, Human
ccuccacucuuucuuucaau

SEQ ID NO: 1228415 - RNA, 15 nt, Human
ccuccacucuuucuu

SEQ ID NO: 1228416 - RNA, 20 nt, Human
ccuccaggguggcagcaaca

SEQ ID NO: 1228417 - RNA, 21 nt, Human
ccuccaggguggcagcaacaa

SEQ ID NO: 1228418 - RNA, 12 nt, Human
cccauuauucaa

SEQ ID NO: 1228419 - RNA, 19 nt, Human
ccauggacacuacacccag

SEQ ID NO: 1228420 - RNA, 20 nt, Human
ccauggacacuacacccagc

SEQ ID NO: 1228421 - RNA, 21 nt, Human
ccauggacacuacacccagca

SEQ ID NO: 1228422 - RNA, 22 nt, Human
ccauggacacuacacccagcaa

SEQ ID NO: 1228423 - RNA, 23 nt, Human
ccauggacacuacacccagcaau

SEQ ID NO: 1228424 - RNA, 20 nt, Human
ccauucauuccauucuggaa

SEQ ID NO: 1228425 - RNA, 17 nt, Human
cccaggacaggauccag

SEQ ID NO: 1228426 - RNA, 10 nt, Human
cccaggacag

SEQ ID NO: 1228427 - RNA, 14 nt, Human
ccagggaccggcgg

SEQ ID NO: 1228428 - RNA, 12 nt, Human
ccagugcugaau

SEQ ID NO: 1228429 - RNA, 22 nt, Human
ccagugcugaauuucccucucu

SEQ ID NO: 1228430 - RNA, 20 nt, Human
ccagugggaggugagaccac

SEQ ID NO: 1228431 - RNA, 23 nt, Human
ccagugggaggugagaccaccuc

SEQ ID NO: 1228432 - RNA, 20 nt, Human
ccaucagaaacacccucaca

SEQ ID NO: 1228433 - RNA, 22 nt, Human
ccaucagaaacacccucacacu

SEQ ID NO: 1228434 - RNA, 18 nt, Human
ccaucagaaacacccuca

SEQ ID NO: 1228435 - RNA, 18 nt, Human
cauuugcucauggaauug

SEQ ID NO: 1228436 - RNA, 16 nt, Human
cauuugcucauggaau

SEQ ID NO: 1228437 - RNA, 15 nt, Human
cauuugcucauggaa

SEQ ID NO: 1228438 - RNA, 15 nt, Human
cauuuccuaaauaua

SEQ ID NO: 1228439 - RNA, 12 nt, Human
cauuauuuuauu

SEQ ID NO: 1228440 - RNA, 14 nt, Human
cauuauuuuauuau

SEQ ID NO: 1228441 - RNA, 16 nt, Human
cauuauuuuauuauga

SEQ ID NO: 1228442 - RNA, 15 nt, Human
cauugaccuauuucc

SEQ ID NO: 1228443 - RNA, 21 nt, Human
cauugaccuauuuccagaaau

SEQ ID NO: 1228444 - RNA, 17 nt, Human
cauuauuuuauuaugaa

SEQ ID NO: 1228445 - RNA, 15 nt, Human
caugcauggaaauuc

SEQ ID NO: 1228446 - RNA, 17 nt, Human
caugcauggaaauuccc

SEQ ID NO: 1228447 - RNA, 23 nt, Human
caugcugucuacacuaagagaga

SEQ ID NO: 1228448 - RNA, 19 nt, Human
cauggaacgcguugaaauu

SEQ ID NO: 1228449 - RNA, 20 nt, Human
cauggaacgcguugaaauug

SEQ ID NO: 1228450 - RNA, 23 nt, Human
cauggaacgcguugaaauuguaa

SEQ ID NO: 1228451 - RNA, 20 nt, Human
caugcuucccuuuccugagu

SEQ ID NO: 1228452 - RNA, 15 nt, Human
caugcuucccuuucc

SEQ ID NO: 1228453 - RNA, 18 nt, Human
cauggaacgcguugaaau

SEQ ID NO: 1228454 - RNA, 22 nt, Human
cauggacacuacacccagcaau

SEQ ID NO: 1228455 - RNA, 23 nt, Human
cauggacacuacacccagcaaua

SEQ ID NO: 1228456 - RNA, 22 nt, Human
cauguuucuuuguaaugaaaac

SEQ ID NO: 1228457 - RNA, 12 nt, Human
cauguuuauuac

SEQ ID NO: 1228458 - RNA, 13 nt, Human
cauguuuauuaca

SEQ ID NO: 1228459 - RNA, 18 nt, Human
cauguuuauuacaguaua

SEQ ID NO: 1228460 - RNA, 19 nt, Human
cauguuuauuacaguauaa

SEQ ID NO: 1228461 - RNA, 20 nt, Human
cauguuuauuacaguauaau

SEQ ID NO: 1228462 - RNA, 22 nt, Human
cauguuuauuacaguauaauua

SEQ ID NO: 1228463 - RNA, 21 nt, Human
cauguuucuuuguaaugaaaa

SEQ ID NO: 1228464 - RNA, 15 nt, Human
caugugaaaucauuc

SEQ ID NO: 1228465 - RNA, 16 nt, Human
caugugaaaucauuca

SEQ ID NO: 1228466 - RNA, 17 nt, Human
caugugaaaucauucau

SEQ ID NO: 1228467 - RNA, 11 nt, Human
cauuauuuuau

SEQ ID NO: 1228468 - RNA, 13 nt, Human
caucccucaccca

SEQ ID NO: 1228469 - RNA, 14 nt, Human
caucccucacccau

SEQ ID NO: 1228470 - RNA, 20 nt, Human
caucccucacccauccuaga

SEQ ID NO: 1228471 - RNA, 23 nt, Human
cauccagcagauuuccagccuuc

SEQ ID NO: 1228472 - RNA, 13 nt, Human
cauccagggggca

SEQ ID NO: 1228473 - RNA, 19 nt, Human
caucucagcucacugcaac

SEQ ID NO: 1228474 - RNA, 20 nt, Human
caucucagcucacugcaacc

SEQ ID NO: 1228475 - RNA, 22 nt, Human
caucuagugagcagucaggaaa

SEQ ID NO: 1228476 - RNA, 17 nt, Human
caucuauagaaagcuau

SEQ ID NO: 1228477 - RNA, 11 nt, Human
cauccucucca

SEQ ID NO: 1228478 - RNA, 12 nt, Human
caucuaggauuu

SEQ ID NO: 1228479 - RNA, 14 nt, Human
caucuagugagcag

SEQ ID NO: 1228480 - RNA, 18 nt, Human
caucuagguaaauuacag

SEQ ID NO: 1228481 - RNA, 17 nt, Human
caucuagguaaauuaca

SEQ ID NO: 1228482 - RNA, 16 nt, Human
caucucuuguuuaaau

SEQ ID NO: 1228483 - RNA, 15 nt, Human
cauaugauguacaug

SEQ ID NO: 1228484 - RNA, 17 nt, Human
cauaugauguacaugua

SEQ ID NO: 1228485 - RNA, 21 nt, Human
cauaugauguacauguacuga

SEQ ID NO: 1228486 - RNA, 14 nt, Human
cauagaauaaaauu

SEQ ID NO: 1228487 - RNA, 20 nt, Human
cauagaauaaaauuuuuaau

SEQ ID NO: 1228488 - RNA, 12 nt, Human
cauauuuauaaa

SEQ ID NO: 1228489 - RNA, 17 nt, Human
cauauuuauaaaaauaa

SEQ ID NO: 1228490 - RNA, 22 nt, Human
caucaagucuuucacauuuaaa

SEQ ID NO: 1228491 - RNA, 12 nt, Human
cauauuuucaug

SEQ ID NO: 1228492 - RNA, 21 nt, Human
caguuuuguuuggaccaaaaa

SEQ ID NO: 1228493 - RNA, 11 nt, Human
caguugcagcc

SEQ ID NO: 1228494 - RNA, 22 nt, Human
cauaaaaaggacaucagcaaac

SEQ ID NO: 1228495 - RNA, 13 nt, Human
cauaaaaaggaca

SEQ ID NO: 1228496 - RNA, 19 nt, Human
cauaaaaaggacaucagca

SEQ ID NO: 1228497 - RNA, 20 nt, Human
cauaaaaaggacaucagcaa

SEQ ID NO: 1228498 - RNA, 21 nt, Human
cauaaaaaggacaucagcaaa

SEQ ID NO: 1228499 - RNA, 14 nt, Human
cauaaagcaggcag

SEQ ID NO: 1228500 - RNA, 16 nt, Human
cauaaagcaggcagaa

SEQ ID NO: 1228501 - RNA, 21 nt, Human
cauaacauaaaucugugaacu

SEQ ID NO: 1228502 - RNA, 20 nt, Human
cauaaauuuaguauuuuguu

SEQ ID NO: 1228503 - RNA, 19 nt, Human
cauaaauuuaguauuuugu

SEQ ID NO: 1228504 - RNA, 12 nt, Human
cauaacauaaau

SEQ ID NO: 1228505 - RNA, 19 nt, Human
cauaacauaaaucugugaa

SEQ ID NO: 1228506 - RNA, 14 nt, Human
cauaaaucugugaa

SEQ ID NO: 1228507 - RNA, 16 nt, Human
cauaaaucugugaacu

SEQ ID NO: 1228508 - RNA, 18 nt, Human
cauaaaucugugaacuug

SEQ ID NO: 1228509 - RNA, 22 nt, Human
cauaaaucugugaacuugaaau

SEQ ID NO: 1228510 - RNA, 23 nt, Human
cauaaaucugugaacuugaaauu

SEQ ID NO: 1228511 - RNA, 18 nt, Human
cauaagcuuaugcuuaaa

SEQ ID NO: 1228512 - RNA, 17 nt, Human
cauaauccaguaaaaua

SEQ ID NO: 1228513 - RNA, 18 nt, Human
cauaauccaguaaaauaa

SEQ ID NO: 1228514 - RNA, 15 nt, Human
cauaauacuugcuuu

SEQ ID NO: 1228515 - RNA, 22 nt, Human
caguucggugagcuacaaaugc

SEQ ID NO: 1228516 - RNA, 12 nt, Human
caguucugaaga

SEQ ID NO: 1228517 - RNA, 14 nt, Human
caguucugaagaag

SEQ ID NO: 1228518 - RNA, 13 nt, Human
caguucugaagaa

SEQ ID NO: 1228519 - RNA, 22 nt, Human
caguucugaagaagaugguacc

SEQ ID NO: 1228520 - RNA, 16 nt, Human
caguucugaagaagau

SEQ ID NO: 1228521 - RNA, 15 nt, Human
caguucugaagaaga

SEQ ID NO: 1228522 - RNA, 21 nt, Human
caguuaccucugccucagaaa

SEQ ID NO: 1228523 - RNA, 21 nt, Human
caguuaacuauugcauuuaua

SEQ ID NO: 1228524 - RNA, 24 nt, Human
caguuaacuauugcauuuauaugu

SEQ ID NO: 1228525 - RNA, 21 nt, Human
caguggcaucaucucagcuca

SEQ ID NO: 1228526 - RNA, 21 nt, Human
caguggcgcgaucucagcuca

SEQ ID NO: 1228527 - RNA, 21 nt, Human
caguggcgugaucucagcuca

SEQ ID NO: 1228528 - RNA, 16 nt, Human
cgcccuggacugugug

SEQ ID NO: 1228529 - RNA, 17 nt, Human
cggcccacaauuaauuu

SEQ ID NO: 1228530 - RNA, 13 nt, Human
cgggacugcggag

SEQ ID NO: 1228531 - RNA, 14 nt, Human
cggggacucagccc

SEQ ID NO: 1228532 - RNA, 18 nt, Human
cggugaauggcuuuguau

SEQ ID NO: 1228533 - RNA, 20 nt, Human
cggugaauggcuuuguauag

SEQ ID NO: 1228534 - RNA, 22 nt, Human
cggugaauggcuuuguauagaa

SEQ ID NO: 1228535 - RNA, 17 nt, Human
cggugagcuacaaaugc

SEQ ID NO: 1228536 - RNA, 13 nt, Human
cggugaauggcuu

SEQ ID NO: 1228537 - RNA, 14 nt, Human
cggugaauggcuuu

SEQ ID NO: 1228538 - RNA, 15 nt, Human
cggugaauggcuuug

SEQ ID NO: 1228539 - RNA, 16 nt, Human
cggugaauggcuuugu

SEQ ID NO: 1228540 - RNA, 23 nt, Human
cguugaaauuguaauuauaucug

SEQ ID NO: 1228541 - RNA, 12 nt, Human
cgugcuaaggac

SEQ ID NO: 1228542 - RNA, 13 nt, Human
cgugcuaaggacu

SEQ ID NO: 1228543 - RNA, 14 nt, Human
cgugcuaaggacuu

SEQ ID NO: 1228544 - RNA, 15 nt, Human
cgugcuaaggacuug

SEQ ID NO: 1228545 - RNA, 16 nt, Human
cgugcuaaggacuugu

SEQ ID NO: 1228546 - RNA, 12 nt, Human
cguggacaccug

SEQ ID NO: 1228547 - RNA, 13 nt, Human
cguggacaccugc

SEQ ID NO: 1228548 - RNA, 14 nt, Human
cguggacaccugcc

SEQ ID NO: 1228549 - RNA, 15 nt, Human
cguggacaccugccc

SEQ ID NO: 1228550 - RNA, 17 nt, Human
cguggacaccugcccug

SEQ ID NO: 1228551 - RNA, 18 nt, Human
cguggacaccugcccugc

SEQ ID NO: 1228552 - RNA, 19 nt, Human
cguggacaccugcccugcc

SEQ ID NO: 1228553 - RNA, 18 nt, Human
cuaaauauauuuuaagac

SEQ ID NO: 1228554 - RNA, 20 nt, Human
cuaaauauauuuuaagacga

SEQ ID NO: 1228555 - RNA, 16 nt, Human
cuaaauccauuuggaa

SEQ ID NO: 1228556 - RNA, 17 nt, Human
cuaaauccauuuggaaa

SEQ ID NO: 1228557 - RNA, 19 nt, Human
cuaaauccauuuggaaauc

SEQ ID NO: 1228558 - RNA, 20 nt, Human
cuaaauccauuuggaaaucu

SEQ ID NO: 1228559 - RNA, 15 nt, Human
cuaacaugauuuggg

SEQ ID NO: 1228560 - RNA, 18 nt, Human
cuauuuuaauaaacacuc

SEQ ID NO: 1228561 - RNA, 22 nt, Human
cuauuuuaauaaacacucuuga

SEQ ID NO: 1228562 - RNA, 17 nt, Human
cucacccauccuagagg

SEQ ID NO: 1228563 - RNA, 14 nt, Human
cucacccauccuag

SEQ ID NO: 1228564 - RNA, 15 nt, Human
cucacccauccuaga

SEQ ID NO: 1228565 - RNA, 13 nt, Human
cucacauuuauau

SEQ ID NO: 1228566 - RNA, 19 nt, Human
cuauauuguuugcuaagca

SEQ ID NO: 1228567 - RNA, 12 nt, Human
cuaguucacucu

SEQ ID NO: 1228568 - RNA, 18 nt, Human
cuaugaaauauuauguua

SEQ ID NO: 1228569 - RNA, 21 nt, Human
cuaucuuugccacccucaugc

SEQ ID NO: 1228570 - RNA, 13 nt, Human
cuaugaaauauua

SEQ ID NO: 1228571 - RNA, 14 nt, Human
cuaucuuugccacc

SEQ ID NO: 1228572 - RNA, 15 nt, Human
cuaucuuugccaccc

SEQ ID NO: 1228573 - RNA, 18 nt, Human
cuaucuuugccacccuca

SEQ ID NO: 1228574 - RNA, 19 nt, Human
cuaucuuugccacccucau

SEQ ID NO: 1228575 - RNA, 12 nt, Human
cuaucuuugcca

SEQ ID NO: 1228576 - RNA, 13 nt, Human
cuaguguagaauu

SEQ ID NO: 1228577 - RNA, 20 nt, Human
cuaguguagaauugugcaac

SEQ ID NO: 1228578 - RNA, 20 nt, Human
cuaggcaguucaaagcagga

SEQ ID NO: 1228579 - RNA, 20 nt, Human
cuaguauuucuaugaaauau

SEQ ID NO: 1228580 - RNA, 19 nt, Human
cuaguauuucuaugaaaua

SEQ ID NO: 1228581 - RNA, 22 nt, Human
cuaguauuucuaugaaauauua

SEQ ID NO: 1228582 - RNA, 22 nt, Human
cuaggacugaauuaugaaacuu

SEQ ID NO: 1228583 - RNA, 17 nt, Human
cuagcaaaagugcaaga

SEQ ID NO: 1228584 - RNA, 16 nt, Human
cuagcaaaagugcaag

SEQ ID NO: 1228585 - RNA, 16 nt, Human
cuacccuaaccaaguu

SEQ ID NO: 1228586 - RNA, 15 nt, Human
cuacccuaaccaagu

SEQ ID NO: 1228587 - RNA, 21 nt, Human
cuacuguaaggcaaucauggu

SEQ ID NO: 1228588 - RNA, 22 nt, Human
cuacuuauuguagcauccugga

SEQ ID NO: 1228589 - RNA, 22 nt, Human
cuacuuucugugucuauggauu

SEQ ID NO: 1228590 - RNA, 23 nt, Human
cuacuucuuuuuucaaaagaaag

SEQ ID NO: 1228591 - RNA, 11 nt, Human
cuaaggacuug

SEQ ID NO: 1228592 - RNA, 16 nt, Human
cuaaggacuuguuaga

SEQ ID NO: 1228593 - RNA, 17 nt, Human
cuaaggacuuguuagau

SEQ ID NO: 1228594 - RNA, 12 nt, Human
cuaauaaagcug

SEQ ID NO: 1228595 - RNA, 13 nt, Human
cuaauaaagcugu

SEQ ID NO: 1228596 - RNA, 14 nt, Human
cuaauaaagcugug

SEQ ID NO: 1228597 - RNA, 16 nt, Human
cuaaucuacuuucugu

SEQ ID NO: 1228598 - RNA, 23 nt, Human
cuaauguggaccuuagaauacag

SEQ ID NO: 1228599 - RNA, 12 nt, Human
cuaccaggaaag

SEQ ID NO: 1228600 - RNA, 13 nt, Human
cucccuacccuaa

SEQ ID NO: 1228601 - RNA, 21 nt, Human
cucccaaagugcugggauuaa

SEQ ID NO: 1228602 - RNA, 22 nt, Human
cucccaagcaccugggauuaca

SEQ ID NO: 1228603 - RNA, 20 nt, Human
cuccauggcccugccaugcu

SEQ ID NO: 1228604 - RNA, 15 nt, Human
cuccuccaccucaac

SEQ ID NO: 1228605 - RNA, 14 nt, Human
cuccuccaccucaa

SEQ ID NO: 1228606 - RNA, 21 nt, Human
cuccuccaggguggcagcaac

SEQ ID NO: 1228607 - RNA, 22 nt, Human
cuccuccaggguggcagcaaca

SEQ ID NO: 1228608 - RNA, 17 nt, Human
cucuaggaaauauuuau

SEQ ID NO: 1228609 - RNA, 15 nt, Human
cucuaggaaauauuu

SEQ ID NO: 1228610 - RNA, 15 nt, Human
cucuauaccaauaaa

SEQ ID NO: 1228611 - RNA, 16 nt, Human
cucuauaccaauaaag

SEQ ID NO: 1228612 - RNA, 17 nt, Human
cucuauaccaauaaagu

SEQ ID NO: 1228613 - RNA, 15 nt, Human
cucuccaaaccacuu

SEQ ID NO: 1228614 - RNA, 16 nt, Human
cucuccaaaccacuuu

SEQ ID NO: 1228615 - RNA, 18 nt, Human
cucuccagccucagcucu

SEQ ID NO: 1228616 - RNA, 21 nt, Human
cucucucauacccucccuccc

SEQ ID NO: 1228617 - RNA, 17 nt, Human
cugacucuuaagaagac

SEQ ID NO: 1228618 - RNA, 11 nt, Human
cugagaaauuu

SEQ ID NO: 1228619 - RNA, 14 nt, Human
cugagaaauuuaua

SEQ ID NO: 1228620 - RNA, 17 nt, Human
cugaggaucagaguaau

SEQ ID NO: 1228621 - RNA, 19 nt, Human
cugaggaucagaguaaucc

SEQ ID NO: 1228622 - RNA, 15 nt, Human
cucuguucauuccuc

SEQ ID NO: 1228623 - RNA, 17 nt, Human
cucuguucauuccucca

SEQ ID NO: 1228624 - RNA, 18 nt, Human
cucuguucauuccuccag

SEQ ID NO: 1228625 - RNA, 19 nt, Human
cucuguucauuccuccagg

SEQ ID NO: 1228626 - RNA, 22 nt, Human
cucugucuccuaagcuggagug

SEQ ID NO: 1228627 - RNA, 23 nt, Human
cugaagaagcaccaaucaugaau

SEQ ID NO: 1228628 - RNA, 16 nt, Human
cugaaauuuccuggga

SEQ ID NO: 1228629 - RNA, 23 nt, Human
cugaaauuuccugggagcuuuug

SEQ ID NO: 1228630 - RNA, 13 nt, Human
cugaaauuuccug

SEQ ID NO: 1228631 - RNA, 17 nt, Human
cucuuucuuucaauaaa

SEQ ID NO: 1228632 - RNA, 21 nt, Human
cugaaauaaacgucuuaaaua

SEQ ID NO: 1228633 - RNA, 20 nt, Human
cucuuuaaaaggaaagaaaa

SEQ ID NO: 1228634 - RNA, 23 nt, Human
cucuuuaaaaggaaagaaaacau

SEQ ID NO: 1228635 - RNA, 19 nt, Human
cucuuuaaaaggaaagaaa

SEQ ID NO: 1228636 - RNA, 13 nt, Human
cugcugccugccu

SEQ ID NO: 1228637 - RNA, 19 nt, Human
cugcuucugacauaaucca

SEQ ID NO: 1228638 - RNA, 12 nt, Human
cugcuuucagau

SEQ ID NO: 1228639 - RNA, 15 nt, Human
cugcuuucagauacu

SEQ ID NO: 1228640 - RNA, 16 nt, Human
cugcuuucagauacug

SEQ ID NO: 1228641 - RNA, 15 nt, Human
cuggaagugacuuug

SEQ ID NO: 1228642 - RNA, 18 nt, Human
cuggaagugacuuuggcu

SEQ ID NO: 1228643 - RNA, 14 nt, Human
cugcccugcccugc

SEQ ID NO: 1228644 - RNA, 15 nt, Human
cugcccugcccugcc

SEQ ID NO: 1228645 - RNA, 22 nt, Human
cugcccucucccaaaaaacuac

SEQ ID NO: 1228646 - RNA, 22 nt, Human
cugcgcccuuaacugcauccag

SEQ ID NO: 1228647 - RNA, 22 nt, Human
cugccugcuuuuuauggccugu

SEQ ID NO: 1228648 - RNA, 11 nt, Human
cugcugccugc

SEQ ID NO: 1228649 - RNA, 14 nt, Human
cugcugccugcuuu

SEQ ID NO: 1228650 - RNA, 23 nt, Human
cugcugccugcuuuuuauggccu

SEQ ID NO: 1228651 - RNA, 11 nt, Human
cugcagguccc

SEQ ID NO: 1228652 - RNA, 12 nt, Human
cugcaggucccu

SEQ ID NO: 1228653 - RNA, 13 nt, Human
cugcaggucccua

SEQ ID NO: 1228654 - RNA, 14 nt, Human
cugcaggucccuaa

SEQ ID NO: 1228655 - RNA, 15 nt, Human
cugcaggucccuaau

SEQ ID NO: 1228656 - RNA, 16 nt, Human
cugcaggucccuaaua

SEQ ID NO: 1228657 - RNA, 17 nt, Human
cugcaggucccuaauaa

SEQ ID NO: 1228658 - RNA, 18 nt, Human
cugcaggucccuaauaaa

SEQ ID NO: 1228659 - RNA, 17 nt, Human
cugcagucucuauacca

SEQ ID NO: 1228660 - RNA, 21 nt, Human
cugcagucucuauaccaauaa

SEQ ID NO: 1228661 - RNA, 23 nt, Human
cugcagucucuauaccaauaaag

SEQ ID NO: 1228662 - RNA, 19 nt, Human
cugcaggucccuaauaaag

SEQ ID NO: 1228663 - RNA, 20 nt, Human
cugcaggucccuaauaaagc

SEQ ID NO: 1228664 - RNA, 21 nt, Human
cugcaggucccuaauaaagcu

SEQ ID NO: 1228665 - RNA, 22 nt, Human
cugcaggucccuaauaaagcug

SEQ ID NO: 1228666 - RNA, 23 nt, Human
cugcaggucccuaauaaagcugu

SEQ ID NO: 1228667 - RNA, 23 nt, Human
cuggcauuacaggugugagccac

SEQ ID NO: 1228668 - RNA, 20 nt, Human
cuggaagugcuaauuuugaa

SEQ ID NO: 1228669 - RNA, 21 nt, Human
cuggaagugcuaauuuugaaa

SEQ ID NO: 1228670 - RNA, 10 nt, Human
cugggccccu

SEQ ID NO: 1228671 - RNA, 23 nt, Human
cugggauuacaggugugagccac

SEQ ID NO: 1228672 - RNA, 22 nt, Human
cugggaggcucuggagcccacu

SEQ ID NO: 1228673 - RNA, 18 nt, Human
cugggaggcucuggagcc

SEQ ID NO: 1228674 - RNA, 20 nt, Human
cugggaggcucuggagccca

SEQ ID NO: 1228675 - RNA, 21 nt, Human
cugggaggcucuggagcccac

SEQ ID NO: 1228676 - RNA, 13 nt, Human
cugguguuucuug

SEQ ID NO: 1228677 - RNA, 14 nt, Human
cugguguuucuuga

SEQ ID NO: 1228678 - RNA, 18 nt, Human
cuguaaggcaaucauggu

SEQ ID NO: 1228679 - RNA, 17 nt, Human
cugggucgcccuggacu

SEQ ID NO: 1228680 - RNA, 18 nt, Human
cugggucgcccuggacug

SEQ ID NO: 1228681 - RNA, 22 nt, Human
cugggucgcccuggacugugug

SEQ ID NO: 1228682 - RNA, 19 nt, Human
cuguauuuuaaaagaauga

SEQ ID NO: 1228683 - RNA, 16 nt, Human
cuguauuuuaaaagaa

SEQ ID NO: 1228684 - RNA, 13 nt, Human
cuguauuuuaaaa

SEQ ID NO: 1228685 - RNA, 15 nt, Human
cuguaugauucccag

SEQ ID NO: 1228686 - RNA, 15 nt, Human
cuguauagauuagag

SEQ ID NO: 1228687 - RNA, 16 nt, Human
cuguauagauuagaga

SEQ ID NO: 1228688 - RNA, 12 nt, Human
cuugaggacaca

SEQ ID NO: 1228689 - RNA, 13 nt, Human
cuugaggacacau

SEQ ID NO: 1228690 - RNA, 14 nt, Human
cuugaggacacaug

SEQ ID NO: 1228691 - RNA, 15 nt, Human
cuugaggacacaugu

SEQ ID NO: 1228692 - RNA, 16 nt, Human
cuugaggacacauguc

SEQ ID NO: 1228693 - RNA, 17 nt, Human
cuugaggacacaugucc

SEQ ID NO: 1228694 - RNA, 18 nt, Human
cuugaggacacaugucca

SEQ ID NO: 1228695 - RNA, 19 nt, Human
cuucuuuuuucaaaagaaa

SEQ ID NO: 1228696 - RNA, 20 nt, Human
cuucuuuuuucaaaagaaag

SEQ ID NO: 1228697 - RNA, 19 nt, Human
cuucuuuccacagaagcuc

SEQ ID NO: 1228698 - RNA, 13 nt, Human
cuucuuuccacag

SEQ ID NO: 1228699 - RNA, 19 nt, Human
cuugaaauuugaauuuugu

SEQ ID NO: 1228700 - RNA, 20 nt, Human
cuugaaauuugaauuuugug

SEQ ID NO: 1228701 - RNA, 15 nt, Human
cuugcuuuuaaaauc

SEQ ID NO: 1228702 - RNA, 17 nt, Human
cuugccaaauauaaaua

SEQ ID NO: 1228703 - RNA, 18 nt, Human
cuuguaaaggaauuuaaa

SEQ ID NO: 1228704 - RNA, 18 nt, Human
cuuguauuauguguguuu

SEQ ID NO: 1228705 - RNA, 13 nt, Human
cuuguauuaugug

SEQ ID NO: 1228706 - RNA, 19 nt, Human
cuuuauuuuguguuuagga

SEQ ID NO: 1228707 - RNA, 21 nt, Human
cuuugccacccucaugcugug

SEQ ID NO: 1228708 - RNA, 21 nt, Human
cuuucuuucaauaaaacgcag

SEQ ID NO: 1228709 - RNA, 19 nt, Human
cuuuuuuaucaugugaaau

SEQ ID NO: 1228710 - RNA, 16 nt, Human
cuuuuuucaaaagaaa

SEQ ID NO: 1228711 - RNA, 14 nt, Human
cuuuggauaauaag

SEQ ID NO: 1228712 - RNA, 22 nt, Human
cuuuuaacuguuguagaagaca

SEQ ID NO: 1228713 - RNA, 22 nt, Human
cuuuuaaaugauugaauuauau

SEQ ID NO: 1228714 - RNA, 15 nt, Human
gaaaccuuccaccca

SEQ ID NO: 1228715 - RNA, 17 nt, Human
gaaaccuuccacccagu

SEQ ID NO: 1228716 - RNA, 20 nt, Human
gaaacuaggugcauauuuau

SEQ ID NO: 1228717 - RNA, 16 nt, Human
gaaacggaugauuucu

SEQ ID NO: 1228718 - RNA, 20 nt, Human
gaaagucagccauaucucca

SEQ ID NO: 1228719 - RNA, 17 nt, Human
gaacaggauauucucac

SEQ ID NO: 1228720 - RNA, 20 nt, Human
gaacaguuguguuugaagca

SEQ ID NO: 1228721 - RNA, 24 nt, Human
gaacaguuaccucugccucagaaa

SEQ ID NO: 1228722 - RNA, 22 nt, Human
gaacaguuguguuugaagcaca

SEQ ID NO: 1228723 - RNA, 21 nt, Human
gaaauuuccugggagcuuuug

SEQ ID NO: 1228724 - RNA, 13 nt, Human
gaaauuugaauuu

SEQ ID NO: 1228725 - RNA, 16 nt, Human
gaaauuugaauuuugu

SEQ ID NO: 1228726 - RNA, 24 nt, Human
gaaauuugaauuuuguguuagaga

SEQ ID NO: 1228727 - RNA, 23 nt, Human
gaaauuaguacuccccuccuuga

SEQ ID NO: 1228728 - RNA, 22 nt, Human
gaaauuaugugacauuuuacau

SEQ ID NO: 1228729 - RNA, 23 nt, Human
gaaauuaugugacauuuuacauu

SEQ ID NO: 1228730 - RNA, 17 nt, Human
gaaauucccuucaucug

SEQ ID NO: 1228731 - RNA, 21 nt, Human
gaaauucccuucaucuggaac

SEQ ID NO: 1228732 - RNA, 22 nt, Human
gaaauucccuucaucuggaacc

SEQ ID NO: 1228733 - RNA, 13 nt, Human
gaaauauuuauuu

SEQ ID NO: 1228734 - RNA, 16 nt, Human
gaaauauuuauuuuaa

SEQ ID NO: 1228735 - RNA, 15 nt, Human
gaaauauuuauuuua

SEQ ID NO: 1228736 - RNA, 21 nt, Human
gaaauaaacgucuuaaauauu

SEQ ID NO: 1228737 - RNA, 18 nt, Human
gaaauaaacgucuuaaau

SEQ ID NO: 1228738 - RNA, 17 nt, Human
gaaauaaacgucuuaaa

SEQ ID NO: 1228739 - RNA, 16 nt, Human
gaaauaaacgucuuaa

SEQ ID NO: 1228740 - RNA, 14 nt, Human
gaaauaaacgucuu

SEQ ID NO: 1228741 - RNA, 13 nt, Human
gaaggaggaccca

SEQ ID NO: 1228742 - RNA, 14 nt, Human
gaaggaggacccag

SEQ ID NO: 1228743 - RNA, 15 nt, Human
gaaggaggacccagg

SEQ ID NO: 1228744 - RNA, 16 nt, Human
gaaggaggacccagga

SEQ ID NO: 1228745 - RNA, 17 nt, Human
gaaggaggacccaggac

SEQ ID NO: 1228746 - RNA, 18 nt, Human
gaaggaggacccaggaca

SEQ ID NO: 1228747 - RNA, 19 nt, Human
gaaggaggacccaggacag

SEQ ID NO: 1228748 - RNA, 18 nt, Human
gaaggaaggcagggagga

SEQ ID NO: 1228749 - RNA, 19 nt, Human
gaaggaaggcagggaggag

SEQ ID NO: 1228750 - RNA, 20 nt, Human
gaaggaaggcagggaggagg

SEQ ID NO: 1228751 - RNA, 22 nt, Human
gaaggaaggcuccaucuccagu

SEQ ID NO: 1228752 - RNA, 21 nt, Human
gaaggugaggagcuugaaacc

SEQ ID NO: 1228753 - RNA, 14 nt, Human
gaaguaacuacagu

SEQ ID NO: 1228754 - RNA, 20 nt, Human
gaagucacauuccugaacag

SEQ ID NO: 1228755 - RNA, 16 nt, Human
gaagucacauuccuga

SEQ ID NO: 1228756 - RNA, 21 nt, Human
gaagucacauuccugaacagg

SEQ ID NO: 1228757 - RNA, 14 nt, Human
gaagucagaucugc

SEQ ID NO: 1228758 - RNA, 22 nt, Human
gaagucagaucugccuaaggac

SEQ ID NO: 1228759 - RNA, 23 nt, Human
gaagucagaucugccuaaggacu

SEQ ID NO: 1228760 - RNA, 23 nt, Human
gaaguccaagcauuuagauguau

SEQ ID NO: 1228761 - RNA, 19 nt, Human
gaaccaauaaaauaauuuu

SEQ ID NO: 1228762 - RNA, 15 nt, Human
gaaccacaagacugc

SEQ ID NO: 1228763 - RNA, 14 nt, Human
gaaccacaagacug

SEQ ID NO: 1228764 - RNA, 12 nt, Human
gaacuugaaauu

SEQ ID NO: 1228765 - RNA, 13 nt, Human
gaacuugaaauuu

SEQ ID NO: 1228766 - RNA, 15 nt, Human
gaacuugaaauuuga

SEQ ID NO: 1228767 - RNA, 22 nt, Human
gaacuugaaauuugaauuuugu

SEQ ID NO: 1228768 - RNA, 17 nt, Human
gaagauugagauguguu

SEQ ID NO: 1228769 - RNA, 22 nt, Human
gaagauugagauguguucacaa

SEQ ID NO: 1228770 - RNA, 14 nt, Human
gaagaucccccaga

SEQ ID NO: 1228771 - RNA, 15 nt, Human
gaagaucccccagaa

SEQ ID NO: 1228772 - RNA, 18 nt, Human
gaagaucccccagaaaag

SEQ ID NO: 1228773 - RNA, 22 nt, Human
gacagccaacuauggccugugg

SEQ ID NO: 1228774 - RNA, 19 nt, Human
gacagccaacuauggccug

SEQ ID NO: 1228775 - RNA, 23 nt, Human
gacaggaugguucccuugaugaa

SEQ ID NO: 1228776 - RNA, 18 nt, Human
gacaggauccaggccggc

SEQ ID NO: 1228777 - RNA, 13 nt, Human
gacaggauccagg

SEQ ID NO: 1228778 - RNA, 15 nt, Human
gacaggauccaggcc

SEQ ID NO: 1228779 - RNA, 16 nt, Human
gacauagucuggcugu

SEQ ID NO: 1228780 - RNA, 13 nt, Human
gaccaaaaaccag

SEQ ID NO: 1228781 - RNA, 19 nt, Human
gaccaaaaaccaguauugu

SEQ ID NO: 1228782 - RNA, 20 nt, Human
gaccaaaaaccaguauugua

SEQ ID NO: 1228783 - RNA, 22 nt, Human
gacaugggacauuugcucaugg

SEQ ID NO: 1228784 - RNA, 15 nt, Human
gacaagcucacagac

SEQ ID NO: 1228785 - RNA, 13 nt, Human
gacaccugcccug

SEQ ID NO: 1228786 - RNA, 14 nt, Human
gacaccugcccugc

SEQ ID NO: 1228787 - RNA, 15 nt, Human
gacaccugcccugcc

SEQ ID NO: 1228788 - RNA, 16 nt, Human
gacaccugcccugccc

SEQ ID NO: 1228789 - RNA, 22 nt, Human
gacaccugcccugcccugccac

SEQ ID NO: 1228790 - RNA, 23 nt, Human
gacaccugcccugcccugccacc

SEQ ID NO: 1228791 - RNA, 9 nt, Human
gacaccugc

SEQ ID NO: 1228792 - RNA, 10 nt, Human
gacaccugcc

SEQ ID NO: 1228793 - RNA, 11 nt, Human
gacaccugccc

SEQ ID NO: 1228794 - RNA, 12 nt, Human
gacaccugcccu

SEQ ID NO: 1228795 - RNA, 12 nt, Human
gacccaggacag

SEQ ID NO: 1228796 - RNA, 13 nt, Human
gacccaggacagg

SEQ ID NO: 1228797 - RNA, 22 nt, Human
gacccaggacaggauccaggcc

SEQ ID NO: 1228798 - RNA, 23 nt, Human
gaccugauuucugagcauuuaau

SEQ ID NO: 1228799 - RNA, 11 nt, Human
gaccugccucc

SEQ ID NO: 1228800 - RNA, 22 nt, Human
gaccugccucccuucaugcaug

SEQ ID NO: 1228801 - RNA, 19 nt, Human
gaccggcggaccccagcca

SEQ ID NO: 1228802 - RNA, 20 nt, Human
gaccggcggaccccagccau

SEQ ID NO: 1228803 - RNA, 16 nt, Human
gacggguuucaccaug

SEQ ID NO: 1228804 - RNA, 12 nt, Human
gagaccaccucu

SEQ ID NO: 1228805 - RNA, 11 nt, Human
gagacauccag

SEQ ID NO: 1228806 - RNA, 12 nt, Human
gagacauccagc

SEQ ID NO: 1228807 - RNA, 17 nt, Human
gagauacagaauuuuau

SEQ ID NO: 1228808 - RNA, 19 nt, Human
gagagacacacugaagaag

SEQ ID NO: 1228809 - RNA, 17 nt, Human
gagagagguugaaaaac

SEQ ID NO: 1228810 - RNA, 19 nt, Human
gagagagguugaaaaacaa

SEQ ID NO: 1228811 - RNA, 12 nt, Human
gagaaaugaaaa

SEQ ID NO: 1228812 - RNA, 12 nt, Human
gacuuguuagau

SEQ ID NO: 1228813 - RNA, 18 nt, Human
gagacacacugaagaagc

SEQ ID NO: 1228814 - RNA, 16 nt, Human
gagacagccaacuaug

SEQ ID NO: 1228815 - RNA, 16 nt, Human
gagaagaacugaaauc

SEQ ID NO: 1228816 - RNA, 14 nt, Human
gagaagaacugaaa

SEQ ID NO: 1228817 - RNA, 22 nt, Human
gagaagcaaguaaaaaggcuaa

SEQ ID NO: 1228818 - RNA, 20 nt, Human
gagcagagcugauggagaag

SEQ ID NO: 1228819 - RNA, 23 nt, Human
gagcagagcugauggagaaggaa

SEQ ID NO: 1228820 - RNA, 20 nt, Human
gagccaggaagaucccccag

SEQ ID NO: 1228821 - RNA, 21 nt, Human
gagccaggaagaucccccaga

SEQ ID NO: 1228822 - RNA, 18 nt, Human
gagcccacuguacuugcu

SEQ ID NO: 1228823 - RNA, 21 nt, Human
gagcccacuguacuugcucuu

SEQ ID NO: 1228824 - RNA, 23 nt, Human
gagcccacuguacuugcucuuga

SEQ ID NO: 1228825 - RNA, 18 nt, Human
gaggaagccugauuaaag

SEQ ID NO: 1228826 - RNA, 19 nt, Human
gaggaagccugauuaaaga

SEQ ID NO: 1228827 - RNA, 14 nt, Human
gagcuuuuguagaa

SEQ ID NO: 1228828 - RNA, 15 nt, Human
gagcugauggagaag

SEQ ID NO: 1228829 - RNA, 16 nt, Human
gagcugauggagaagg

SEQ ID NO: 1228830 - RNA, 18 nt, Human
gagcugauggagaaggaa

SEQ ID NO: 1228831 - RNA, 16 nt, Human
gagcucgugggacagu

SEQ ID NO: 1228832 - RNA, 21 nt, Human
gaucaaguuauuuuuaauuug

SEQ ID NO: 1228833 - RNA, 14 nt, Human
gaucaguuaacuau

SEQ ID NO: 1228834 - RNA, 14 nt, Human
gaucauugugaaau

SEQ ID NO: 1228835 - RNA, 20 nt, Human
gaucauugugaaauuauuca

SEQ ID NO: 1228836 - RNA, 12 nt, Human
gaucccccagaa

SEQ ID NO: 1228837 - RNA, 19 nt, Human
gauaaaguugguaaaccuu

SEQ ID NO: 1228838 - RNA, 11 nt, Human
gauacagaaaa

SEQ ID NO: 1228839 - RNA, 13 nt, Human
gauccuggaaauc

SEQ ID NO: 1228840 - RNA, 12 nt, Human
gaucucagcuca

SEQ ID NO: 1228841 - RNA, 17 nt, Human
gaucucagcucacuaca

SEQ ID NO: 1228842 - RNA, 17 nt, Human
gaucucagcucacugca

SEQ ID NO: 1228843 - RNA, 19 nt, Human
gaucucagcucacugcaac

SEQ ID NO: 1228844 - RNA, 10 nt, Human
gcaagccaga

SEQ ID NO: 1228845 - RNA, 20 nt, Human
gcaaggccugguguuucuug

SEQ ID NO: 1228846 - RNA, 20 nt, Human
gcaauccucccacuucagcc

SEQ ID NO: 1228847 - RNA, 21 nt, Human
gcaaacaggaucaguuaacua

SEQ ID NO: 1228848 - RNA, 18 nt, Human
gauggggguuucaccaua

SEQ ID NO: 1228849 - RNA, 19 nt, Human
gauuccagagcacugcucc

SEQ ID NO: 1228850 - RNA, 13 nt, Human
gauuuuauuaugu

SEQ ID NO: 1228851 - RNA, 15 nt, Human
gauuuuauuauguaa

SEQ ID NO: 1228852 - RNA, 18 nt, Human
gauuuuauuauguaaauc

SEQ ID NO: 1228853 - RNA, 19 nt, Human
gauuuuauuauguaaaucc

SEQ ID NO: 1228854 - RNA, 20 nt, Human
gauuuuauuauguaaauccc

SEQ ID NO: 1228855 - RNA, 23 nt, Human
gauuuuauuauguaaaucccauu

SEQ ID NO: 1228856 - RNA, 15 nt, Human
gauuuuccugaaaac

SEQ ID NO: 1228857 - RNA, 22 nt, Human
gauuuggucaacacuaacauga

SEQ ID NO: 1228858 - RNA, 14 nt, Human
gauuucugaggaaa

SEQ ID NO: 1228859 - RNA, 15 nt, Human
gauuuccagccuucu

SEQ ID NO: 1228860 - RNA, 14 nt, Human
gcacggcagccaca

SEQ ID NO: 1228861 - RNA, 16 nt, Human
gcacggcagccacagc

SEQ ID NO: 1228862 - RNA, 18 nt, Human
gcacggugaauggcuuug

SEQ ID NO: 1228863 - RNA, 20 nt, Human
gcagcccugcugcugccugc

SEQ ID NO: 1228864 - RNA, 21 nt, Human
gcagcccugcugcugccugcc

SEQ ID NO: 1228865 - RNA, 17 nt, Human
gcagcaauuuaaauguu

SEQ ID NO: 1228866 - RNA, 12 nt, Human
gcagcaauuuaa

SEQ ID NO: 1228867 - RNA, 15 nt, Human
gcagcaauuuaaaug

SEQ ID NO: 1228868 - RNA, 16 nt, Human
gcagcaauuuaaaugu

SEQ ID NO: 1228869 - RNA, 17 nt, Human
gcagacauuuuaaaaaa

SEQ ID NO: 1228870 - RNA, 18 nt, Human
gcagauuauucacugauu

SEQ ID NO: 1228871 - RNA, 15 nt, Human
gcaguucugaagaag

SEQ ID NO: 1228872 - RNA, 17 nt, Human
gcaguucugaagaagau

SEQ ID NO: 1228873 - RNA, 13 nt, Human
gcauagaaguaaa

SEQ ID NO: 1228874 - RNA, 22 nt, Human
gcaguggcgugaucucagcuca

SEQ ID NO: 1228875 - RNA, 18 nt, Human
gcaguggcgcgaucucag

SEQ ID NO: 1228876 - RNA, 22 nt, Human
gcaguggcgcgaucucagcuca

SEQ ID NO: 1228877 - RNA, 17 nt, Human
gcauagguuuaauaauu

SEQ ID NO: 1228878 - RNA, 22 nt, Human
gcaguggcaucaucucagcuca

SEQ ID NO: 1228879 - RNA, 13 nt, Human
gcauuauauuuau

SEQ ID NO: 1228880 - RNA, 16 nt, Human
gcaucugaaaauugau

SEQ ID NO: 1228881 - RNA, 16 nt, Human
gcauuuguguugaaga

SEQ ID NO: 1228882 - RNA, 19 nt, Human
gcauucaaauguauuacag

SEQ ID NO: 1228883 - RNA, 20 nt, Human
gccccuggucccucugcagu

SEQ ID NO: 1228884 - RNA, 23 nt, Human
gccaggcugggucgcccuggacu

SEQ ID NO: 1228885 - RNA, 17 nt, Human
gccaggcugggucgccc

SEQ ID NO: 1228886 - RNA, 15 nt, Human
gccaugcagaaagca

SEQ ID NO: 1228887 - RNA, 14 nt, Human
gcccugcuuucaga

SEQ ID NO: 1228888 - RNA, 16 nt, Human
gcccugcuuucagaua

SEQ ID NO: 1228889 - RNA, 22 nt, Human
gccuaaauccauuuggaaaucu

SEQ ID NO: 1228890 - RNA, 23 nt, Human
gccuaaauccauuuggaaaucuu

SEQ ID NO: 1228891 - RNA, 12 nt, Human
gccuaaauccau

SEQ ID NO: 1228892 - RNA, 13 nt, Human
gccuaaauccauu

SEQ ID NO: 1228893 - RNA, 19 nt, Human
gccuaaauccauuuggaaa

SEQ ID NO: 1228894 - RNA, 21 nt, Human
gccuaaauccauuuggaaauc

SEQ ID NO: 1228895 - RNA, 14 nt, Human
gccucccagguuca

SEQ ID NO: 1228896 - RNA, 15 nt, Human
gccucccuucaugca

SEQ ID NO: 1228897 - RNA, 18 nt, Human
gccucccuucaugcaugg

SEQ ID NO: 1228898 - RNA, 20 nt, Human
gccucccuucaugcauggaa

SEQ ID NO: 1228899 - RNA, 22 nt, Human
gccucccuucaugcauggaaau

SEQ ID NO: 1228900 - RNA, 23 nt, Human
gccucccuucaugcauggaaauu

SEQ ID NO: 1228901 - RNA, 12 nt, Human
gccuguuuaaga

SEQ ID NO: 1228902 - RNA, 13 nt, Human
gccuguuuaagag

SEQ ID NO: 1228903 - RNA, 13 nt, Human
gccuuuggcaggu

SEQ ID NO: 1228904 - RNA, 15 nt, Human
gccuuuggcaggugc

SEQ ID NO: 1228905 - RNA, 16 nt, Human
gccuuugaccugccuc

SEQ ID NO: 1228906 - RNA, 13 nt, Human
gcuaaacuuuucu

SEQ ID NO: 1228907 - RNA, 15 nt, Human
gcuaaacuuuucuga

SEQ ID NO: 1228908 - RNA, 17 nt, Human
gcuaaacuuuucugaua

SEQ ID NO: 1228909 - RNA, 15 nt, Human
gcgcgaucucagcuc

SEQ ID NO: 1228910 - RNA, 16 nt, Human
gcgcgaucucagcuca

SEQ ID NO: 1228911 - RNA, 13 nt, Human
uuuugaaaaacug

SEQ ID NO: 1228912 - RNA, 21 nt, Human
uuuuggcauaacauaaaucug

SEQ ID NO: 1228913 - RNA, 18 nt, Human
uuuuggucuggagggaag

SEQ ID NO: 1228914 - RNA, 14 nt, Human
uuuuccugaaaacc

SEQ ID NO: 1228915 - RNA, 18 nt, Human
uuuucuaaaguaaaaaca

SEQ ID NO: 1228916 - RNA, 18 nt, Human
uuuuuaaaaaagaaacau

SEQ ID NO: 1228917 - RNA, 12 nt, Human
uuuuuaaagacu

SEQ ID NO: 1228918 - RNA, 13 nt, Human
uuuuuaaagacuu

SEQ ID NO: 1228919 - RNA, 18 nt, Human
uuuuuaaagacuuuuaug

SEQ ID NO: 1228920 - RNA, 23 nt, Human
uuuuucucugauacagaaaaguu

SEQ ID NO: 1228921 - RNA, 19 nt, Human
uuuuucucuaggaaauauu

SEQ ID NO: 1228922 - RNA, 15 nt, Human
uuuuugaagcuguau

SEQ ID NO: 1228923 - RNA, 10 nt, Human
uuuuuugaga

SEQ ID NO: 1228924 - RNA, 16 nt, Human
uuuuuugggcagcaau

SEQ ID NO: 1228925 - RNA, 20 nt, Human
uuuuugaaaagcagacauuu

SEQ ID NO: 1228926 - RNA, 12 nt, Human
uuuuaaauguau

SEQ ID NO: 1228927 - RNA, 16 nt, Human
uuuuaaauguauacua

SEQ ID NO: 1228928 - RNA, 18 nt, Human
uuuuaaagacuuuuauga

SEQ ID NO: 1228929 - RNA, 21 nt, Human
uuuuaaaagaaugauuaugaa

SEQ ID NO: 1228930 - RNA, 22 nt, Human
uuuggaauuuuccuccuuucuc

SEQ ID NO: 1228931 - RNA, 15 nt, Human
uuugcaucugaaaau

SEQ ID NO: 1228932 - RNA, 19 nt, Human
uuugguuuucacauuggaa

SEQ ID NO: 1228933 - RNA, 21 nt, Human
uuuggugcuucucagauuucu

SEQ ID NO: 1228934 - RNA, 16 nt, Human
uuuguauaaaauaauu

SEQ ID NO: 1228935 - RNA, 14 nt, Human
uuuguauaaaauaa

SEQ ID NO: 1228936 - RNA, 13 nt, Human
uuuguauaaaaua

SEQ ID NO: 1228937 - RNA, 19 nt, Human
uuuggacaaaauggaauac

SEQ ID NO: 1228938 - RNA, 16 nt, Human
uuuggauaauaaggaa

SEQ ID NO: 1228939 - RNA, 18 nt, Human
uuugaagcacagugauca

SEQ ID NO: 1228940 - RNA, 18 nt, Human
uuugaaucaucaagucuu

SEQ ID NO: 1228941 - RNA, 21 nt, Human
uuacauuuuuugggcagcaau

SEQ ID NO: 1228942 - RNA, 12 nt, Human
uuucuaaaguaa

SEQ ID NO: 1228943 - RNA, 14 nt, Human
uuucuaaaguaaaa

SEQ ID NO: 1228944 - RNA, 21 nt, Human
uuucugaaauuuccugggagc

SEQ ID NO: 1228945 - RNA, 18 nt, Human
uuucucugauacagaaaa

SEQ ID NO: 1228946 - RNA, 17 nt, Human
uuucucugauacagaaa

SEQ ID NO: 1228947 - RNA, 16 nt, Human
uuucucugauacagaa

SEQ ID NO: 1228948 - RNA, 15 nt, Human
uuucucugauacaga

SEQ ID NO: 1228949 - RNA, 13 nt, Human
guauauuacaaug

SEQ ID NO: 1228950 - RNA, 14 nt, Human
guauauuacaauga

SEQ ID NO: 1228951 - RNA, 15 nt, Human
guauauuacaaugau

SEQ ID NO: 1228952 - RNA, 12 nt, Human
guaucucuucag

SEQ ID NO: 1228953 - RNA, 13 nt, Human
guaucucuucagu

SEQ ID NO: 1228954 - RNA, 17 nt, Human
guaucucuucagucucu

SEQ ID NO: 1228955 - RNA, 19 nt, Human
guauagaaccucuuugucu

SEQ ID NO: 1228956 - RNA, 14 nt, Human
guauagauuagaau

SEQ ID NO: 1228957 - RNA, 19 nt, Human
guaugaacuugaggacaca

SEQ ID NO: 1228958 - RNA, 20 nt, Human
guaugaacuugaggacacau

SEQ ID NO: 1228959 - RNA, 22 nt, Human
guaugaacuugaggacacaugu

SEQ ID NO: 1228960 - RNA, 23 nt, Human
guaugaacuugaggacacauguc

SEQ ID NO: 1228961 - RNA, 17 nt, Human
guaugaaccaccgcgcc

SEQ ID NO: 1228962 - RNA, 15 nt, Human
guaugaacuugagga

SEQ ID NO: 1228963 - RNA, 16 nt, Human
guaugaacuugaggac

SEQ ID NO: 1228964 - RNA, 17 nt, Human
guauguuagugcaaauu

SEQ ID NO: 1228965 - RNA, 21 nt, Human
guagcauuuguguugaagagg

SEQ ID NO: 1228966 - RNA, 16 nt, Human
guagcauccuggaaua

SEQ ID NO: 1228967 - RNA, 19 nt, Human
guagaguugaucaaaauca

SEQ ID NO: 1228968 - RNA, 22 nt, Human
guaggggcuuauaauaaaggac

SEQ ID NO: 1228969 - RNA, 22 nt, Human
guaguagcguuuuuuaaaugua

SEQ ID NO: 1228970 - RNA, 17 nt, Human
guaguguuggagaagaa

SEQ ID NO: 1228971 - RNA, 13 nt, Human
guauaauuaacau

SEQ ID NO: 1228972 - RNA, 14 nt, Human
guauaauuaacaug

SEQ ID NO: 1228973 - RNA, 15 nt, Human
guaguguuggagaag

SEQ ID NO: 1228974 - RNA, 14 nt, Human
guaguguuggagaa

SEQ ID NO: 1228975 - RNA, 15 nt, Human
guauaauuaacaugu

SEQ ID NO: 1228976 - RNA, 17 nt, Human
guauaauuaacauguua

SEQ ID NO: 1228977 - RNA, 19 nt, Human
guauaauuaacauguuaaa

SEQ ID NO: 1228978 - RNA, 22 nt, Human
guauaauuaacauguuaaacca

SEQ ID NO: 1228979 - RNA, 17 nt, Human
guauaauucacauugua

SEQ ID NO: 1228980 - RNA, 23 nt, Human
guauaauuaacauguuaaaccau

SEQ ID NO: 1228981 - RNA, 15 nt, Human
guauacuauaguacc

SEQ ID NO: 1228982 - RNA, 16 nt, Human
gucagaucugccuaag

SEQ ID NO: 1228983 - RNA, 18 nt, Human
gucagaucugccuaagga

SEQ ID NO: 1228984 - RNA, 19 nt, Human
gucagaucugccuaaggac

SEQ ID NO: 1228985 - RNA, 20 nt, Human
gucagaucugccuaaggacu

SEQ ID NO: 1228986 - RNA, 21 nt, Human
gucagaucugccuaaggacuu

SEQ ID NO: 1228987 - RNA, 16 nt, Human
gucacuacgccuggcu

SEQ ID NO: 1228988 - RNA, 22 nt, Human
gucaauaaaauccauacauuug

SEQ ID NO: 1228989 - RNA, 23 nt, Human
gucaauaaaauccauacauuugu

SEQ ID NO: 1228990 - RNA, 13 nt, Human
gucaccagagacu

SEQ ID NO: 1228991 - RNA, 16 nt, Human
gucaccagagacuuua

SEQ ID NO: 1228992 - RNA, 20 nt, Human
guauuuuaaaagaaugauua

SEQ ID NO: 1228993 - RNA, 15 nt, Human
guauuaagcauauau

SEQ ID NO: 1228994 - RNA, 16 nt, Human
guauuaagcauauauu

SEQ ID NO: 1228995 - RNA, 17 nt, Human
guauuaagcauauauuu

SEQ ID NO: 1228996 - RNA, 18 nt, Human
guauuaagcauauauuuu

SEQ ID NO: 1228997 - RNA, 21 nt, Human
guauuaagcauauauuuuuau

SEQ ID NO: 1228998 - RNA, 13 nt, Human
gucaggaaagaga

SEQ ID NO: 1228999 - RNA, 21 nt, Human
gucauucagauaugauucaaa

SEQ ID NO: 1229000 - RNA, 15 nt, Human
gucccaucccugcgu

SEQ ID NO: 1229001 - RNA, 16 nt, Human
gucccuaauaaagcug

SEQ ID NO: 1229002 - RNA, 17 nt, Human
gucccuaauaaagcugu

SEQ ID NO: 1229003 - RNA, 18 nt, Human
gucccuaauaaagcugug

SEQ ID NO: 1229004 - RNA, 20 nt, Human
gucccuaauaaagcugugug

SEQ ID NO: 1229005 - RNA, 19 nt, Human
gucucuucugaauaaagca

SEQ ID NO: 1229006 - RNA, 20 nt, Human
gucucuucugaauaaagcaa

SEQ ID NO: 1229007 - RNA, 21 nt, Human
gucucuucugaauaaagcaau

SEQ ID NO: 1229008 - RNA, 22 nt, Human
gucucuucugaauaaagcaauu

SEQ ID NO: 1229009 - RNA, 23 nt, Human
gucucuucugaauaaagcaauua

SEQ ID NO: 1229010 - RNA, 21 nt, Human
gucucuggauuauauuaugaa

SEQ ID NO: 1229011 - RNA, 19 nt, Human
gucucugaggggcuaccag

SEQ ID NO: 1229012 - RNA, 17 nt, Human
gucucuggaauuugaaa

SEQ ID NO: 1229013 - RNA, 15 nt, Human
gucucagauuuuauu

SEQ ID NO: 1229014 - RNA, 16 nt, Human
gucucagauuuuauua

SEQ ID NO: 1229015 - RNA, 17 nt, Human
gucucagauuuuauuau

SEQ ID NO: 1229016 - RNA, 21 nt, Human
gucucagauuuuauuauguaa

SEQ ID NO: 1229017 - RNA, 17 nt, Human
gucucuauaccaauaaa

SEQ ID NO: 1229018 - RNA, 18 nt, Human
gucucuauaccaauaaag

SEQ ID NO: 1229019 - RNA, 19 nt, Human
gucucuauaccaauaaagu

SEQ ID NO: 1229020 - RNA, 20 nt, Human
gucucuauaccaauaaagug

SEQ ID NO: 1229021 - RNA, 18 nt, Human
gucgucaaagcugaaaug

SEQ ID NO: 1229022 - RNA, 15 nt, Human
gucuugccuuuuuca

SEQ ID NO: 1229023 - RNA, 16 nt, Human
gucuugccuuuuucau

SEQ ID NO: 1229024 - RNA, 17 nt, Human
gucuugccuuuuucauu

SEQ ID NO: 1229025 - RNA, 18 nt, Human
gucuugccuuuuucauua

SEQ ID NO: 1229026 - RNA, 20 nt, Human
gucuugccuuuuucauuauu

SEQ ID NO: 1229027 - RNA, 15 nt, Human
gucuugucucagauu

SEQ ID NO: 1229028 - RNA, 20 nt, Human
gucuugucucagauuuuauu

SEQ ID NO: 1229029 - RNA, 22 nt, Human
gucuugucucagauuuuauuau

SEQ ID NO: 1229030 - RNA, 19 nt, Human
gugauauaaguguguguuu

SEQ ID NO: 1229031 - RNA, 14 nt, Human
gugagcuacaaaug

SEQ ID NO: 1229032 - RNA, 18 nt, Human
gugaggagcuugaaaccc

SEQ ID NO: 1229033 - RNA, 17 nt, Human
gugcgcuaaacuuuucu

SEQ ID NO: 1229034 - RNA, 21 nt, Human
gugcgcuaaacuuuucugaua

SEQ ID NO: 1229035 - RNA, 12 nt, Human
gugcuaaggacu

SEQ ID NO: 1229036 - RNA, 13 nt, Human
gugcuaaggacuu

SEQ ID NO: 1229037 - RNA, 14 nt, Human
gugcuaaggacuug

SEQ ID NO: 1229038 - RNA, 20 nt, Human
gugcuaaggacuuguuagau

SEQ ID NO: 1229039 - RNA, 19 nt, Human
gugcagcccccacugccuu

SEQ ID NO: 1229040 - RNA, 20 nt, Human
gugauccacccgccucagcc

SEQ ID NO: 1229041 - RNA, 24 nt, Human
gugauccacccgccucagccuccc

SEQ ID NO: 1229042 - RNA, 13 nt, Human
gugcacuggcccc

SEQ ID NO: 1229043 - RNA, 16 nt, Human
gugcacuggccccacc

SEQ ID NO: 1229044 - RNA, 17 nt, Human
gugcacuggccccaccc

SEQ ID NO: 1229045 - RNA, 18 nt, Human
gugcacuggccccacccu

SEQ ID NO: 1229046 - RNA, 13 nt, Human
gugcuaauuuuga

SEQ ID NO: 1229047 - RNA, 15 nt, Human
gugcuaauuuugaaa

SEQ ID NO: 1229048 - RNA, 15 nt, Human
gugggcauucaaaug

SEQ ID NO: 1229049 - RNA, 13 nt, Human
gugguagagaagc

SEQ ID NO: 1229050 - RNA, 13 nt, Human
guggugacuuugg

SEQ ID NO: 1229051 - RNA, 15 nt, Human
guggugacuuuggau

SEQ ID NO: 1229052 - RNA, 21 nt, Human
guguaaguagauaggccaugg

SEQ ID NO: 1229053 - RNA, 17 nt, Human
guguaagacaaaaagcu

SEQ ID NO: 1229054 - RNA, 16 nt, Human
guggugacuuuggaua

SEQ ID NO: 1229055 - RNA, 14 nt, Human
guguaugcacagua

SEQ ID NO: 1229056 - RNA, 13 nt, Human
guguguuuuaaaa

SEQ ID NO: 1229057 - RNA, 16 nt, Human
guguguuuuaaaauga

SEQ ID NO: 1229058 - RNA, 19 nt, Human
guguguuuuaaaaugagaa

SEQ ID NO: 1229059 - RNA, 14 nt, Human
guguguuuuucaua

SEQ ID NO: 1229060 - RNA, 13 nt, Human
guguucugugaua

SEQ ID NO: 1229061 - RNA, 18 nt, Human
guguuuuucauaaagcag

SEQ ID NO: 1229062 - RNA, 13 nt, Human
guuacagaagccc

SEQ ID NO: 1229063 - RNA, 17 nt, Human
guuaacuauugcauuua

SEQ ID NO: 1229064 - RNA, 18 nt, Human
guuaaaccaugggauaaa

SEQ ID NO: 1229065 - RNA, 21 nt, Human
guuaaaccaugggauaaaugc

SEQ ID NO: 1229066 - RNA, 18 nt, Human
gugugcucaggagcccug

SEQ ID NO: 1229067 - RNA, 19 nt, Human
gugugcucaggagcccugg

SEQ ID NO: 1229068 - RNA, 16 nt, Human
gugugcucaggagccc

SEQ ID NO: 1229069 - RNA, 17 nt, Human
gugugcucaggagcccu

SEQ ID NO: 1229070 - RNA, 12 nt, Human
guguguuuuaaa

SEQ ID NO: 1229071 - RNA, 13 nt, Human
guucauuccucca

SEQ ID NO: 1229072 - RNA, 14 nt, Human
guucauuccuccag

SEQ ID NO: 1229073 - RNA, 15 nt, Human
guucauuccuccagg

SEQ ID NO: 1229074 - RNA, 12 nt, Human
guucaugaaaga

SEQ ID NO: 1229075 - RNA, 22 nt, Human
guucauggaacgcguugaaauu

SEQ ID NO: 1229076 - RNA, 23 nt, Human
guucauggaacgcguugaaauug

SEQ ID NO: 1229077 - RNA, 19 nt, Human
guucacucuccauuuaaua

SEQ ID NO: 1229078 - RNA, 17 nt, Human
guuauuauauuuacaaa

SEQ ID NO: 1229079 - RNA, 17 nt, Human
guuaugacuauguaaac

SEQ ID NO: 1229080 - RNA, 15 nt, Human
guuaugacuauguaa

SEQ ID NO: 1229081 - RNA, 20 nt, Human
guuauccaccugccuuggcu

SEQ ID NO: 1229082 - RNA, 19 nt, Human
guuaucuaauagggcaauu

SEQ ID NO: 1229083 - RNA, 19 nt, Human
guuaucugaagucagaucu

SEQ ID NO: 1229084 - RNA, 16 nt, Human
guuacccaaauuaaga

SEQ ID NO: 1229085 - RNA, 23 nt, Human
guuaccucugccucagaaaacaa

SEQ ID NO: 1229086 - RNA, 14 nt, Human
guuggagugcagug

SEQ ID NO: 1229087 - RNA, 15 nt, Human
guuggagugcagugg

SEQ ID NO: 1229088 - RNA, 23 nt, Human
guugcagcccugcugcugccugc

SEQ ID NO: 1229089 - RNA, 16 nt, Human
guugcaacuuuguaua

SEQ ID NO: 1229090 - RNA, 14 nt, Human
guugcaacuuugua

SEQ ID NO: 1229091 - RNA, 18 nt, Human
guugaagagguuuuaaag

SEQ ID NO: 1229092 - RNA, 21 nt, Human
guugaaacggaugauuucuau

SEQ ID NO: 1229093 - RNA, 22 nt, Human
guugaaacggaugauuucuaug

SEQ ID NO: 1229094 - RNA, 15 nt, Human
guugaaauuguaauu

SEQ ID NO: 1229095 - RNA, 16 nt, Human
guugaaauuguaauua

SEQ ID NO: 1229096 - RNA, 20 nt, Human
guugaaauuguaauuauauc

SEQ ID NO: 1229097 - RNA, 21 nt, Human
guugauggugguauguuuuca

SEQ ID NO: 1229098 - RNA, 20 nt, Human
guugauggugguauguuuuc

SEQ ID NO: 1229099 - RNA, 21 nt, Human
guugaauuuauuggcuuuucu

SEQ ID NO: 1229100 - RNA, 22 nt, Human
guugaauuuauuggcuuuucug

SEQ ID NO: 1229101 - RNA, 14 nt, Human
guugaauuuauugg

SEQ ID NO: 1229102 - RNA, 15 nt, Human
guucugaagaagaug

SEQ ID NO: 1229103 - RNA, 14 nt, Human
guucugaagaagau

SEQ ID NO: 1229104 - RNA, 13 nt, Human
guucugaagaaga

SEQ ID NO: 1229105 - RNA, 12 nt, Human
guucugaagaag

SEQ ID NO: 1229106 - RNA, 18 nt, Human
guuccuuggccaugcaga

SEQ ID NO: 1229107 - RNA, 18 nt, Human
uaaaauccauacauuugu

SEQ ID NO: 1229108 - RNA, 15 nt, Human
uaaacacucuugaaa

SEQ ID NO: 1229109 - RNA, 17 nt, Human
uaaacacucuugaaaaa

SEQ ID NO: 1229110 - RNA, 18 nt, Human
uaaacacucuugaaaaau

SEQ ID NO: 1229111 - RNA, 18 nt, Human
uaaagcaggcagaacuca

SEQ ID NO: 1229112 - RNA, 11 nt, Human
uaaagccaugu

SEQ ID NO: 1229113 - RNA, 13 nt, Human
uaaagccauguuu

SEQ ID NO: 1229114 - RNA, 15 nt, Human
uaaagccauguuuau

SEQ ID NO: 1229115 - RNA, 20 nt, Human
uaaagccauguuuauuacag

SEQ ID NO: 1229116 - RNA, 14 nt, Human
uaaaguguuugaaa

SEQ ID NO: 1229117 - RNA, 14 nt, Human
uaaaggaauuuaaa

SEQ ID NO: 1229118 - RNA, 22 nt, Human
uaaaacaagcacuaaacaaaga

SEQ ID NO: 1229119 - RNA, 21 nt, Human
uaaaaacaaagaaauuaugug

SEQ ID NO: 1229120 - RNA, 21 nt, Human
uaaaaggaaagaaaacaucuu

SEQ ID NO: 1229121 - RNA, 17 nt, Human
uaaaauccauacauuug

SEQ ID NO: 1229122 - RNA, 15 nt, Human
uaaaauccauacauu

SEQ ID NO: 1229123 - RNA, 13 nt, Human
guuuggugcuucu

SEQ ID NO: 1229124 - RNA, 19 nt, Human
guuucuuuguaaugaaaac

SEQ ID NO: 1229125 - RNA, 17 nt, Human
guuuccuccaagcuauu

SEQ ID NO: 1229126 - RNA, 15 nt, Human
guuuuaaaaugagaa

SEQ ID NO: 1229127 - RNA, 16 nt, Human
guuuuaaaaugagaaa

SEQ ID NO: 1229128 - RNA, 20 nt, Human
guuuucaaaauuguuacaaa

SEQ ID NO: 1229129 - RNA, 17 nt, Human
guuuuaaaaugagaaau

SEQ ID NO: 1229130 - RNA, 19 nt, Human
guugucugcaacucugaag

SEQ ID NO: 1229131 - RNA, 20 nt, Human
guuuauauaagcuuguauuc

SEQ ID NO: 1229132 - RNA, 19 nt, Human
guuuaggaacuacugagga

SEQ ID NO: 1229133 - RNA, 21 nt, Human
guuuagcuggaaaaguauguu

SEQ ID NO: 1229134 - RNA, 22 nt, Human
guuucauauuuuucauagcuaa

SEQ ID NO: 1229135 - RNA, 13 nt, Human
uaaccagaucauu

SEQ ID NO: 1229136 - RNA, 15 nt, Human
uaacuauugcauuua

SEQ ID NO: 1229137 - RNA, 16 nt, Human
uaacuauugcauuuau

SEQ ID NO: 1229138 - RNA, 21 nt, Human
uaacuauugcauuuauaugua

SEQ ID NO: 1229139 - RNA, 23 nt, Human
uaacuauugcauuuauauguacc

SEQ ID NO: 1229140 - RNA, 15 nt, Human
uaacuggaaacuuca

SEQ ID NO: 1229141 - RNA, 21 nt, Human
uaagaaaauaucacuugucaa

SEQ ID NO: 1229142 - RNA, 13 nt, Human
uaagagagaauga

SEQ ID NO: 1229143 - RNA, 23 nt, Human
uaagagagaaugagagacacacu

SEQ ID NO: 1229144 - RNA, 14 nt, Human
uaagagagaaugag

SEQ ID NO: 1229145 - RNA, 16 nt, Human
uaaaugccaucaauaa

SEQ ID NO: 1229146 - RNA, 23 nt, Human
uaaaugccaucaauaaaaaauua

SEQ ID NO: 1229147 - RNA, 16 nt, Human
uaaaguugguaaaccu

SEQ ID NO: 1229148 - RNA, 17 nt, Human
uaaaguugguaaaccuu

SEQ ID NO: 1229149 - RNA, 20 nt, Human
uaaauggcuuccuggcaaua

SEQ ID NO: 1229150 - RNA, 15 nt, Human
uaaauguauacuaua

SEQ ID NO: 1229151 - RNA, 17 nt, Human
uaaauguauacuauagu

SEQ ID NO: 1229152 - RNA, 20 nt, Human
uaaauguauacuauaguacc

SEQ ID NO: 1229153 - RNA, 12 nt, Human
uaaauguauacu

SEQ ID NO: 1229154 - RNA, 13 nt, Human
uaaauguauacua

SEQ ID NO: 1229155 - RNA, 13 nt, Human
uaaauucuuucau

SEQ ID NO: 1229156 - RNA, 21 nt, Human
uaauuaacauguuaaaccaug

SEQ ID NO: 1229157 - RNA, 23 nt, Human
uaaugauaacuggaaacuucagc

SEQ ID NO: 1229158 - RNA, 22 nt, Human
uaaugauaacuggaaacuucag

SEQ ID NO: 1229159 - RNA, 17 nt, Human
uaaugauaacuggaaac

SEQ ID NO: 1229160 - RNA, 17 nt, Human
uaauauuaaagccaugu

SEQ ID NO: 1229161 - RNA, 20 nt, Human
uaauauuaaagccauguuua

SEQ ID NO: 1229162 - RNA, 21 nt, Human
uaauauuaaagccauguuuau

SEQ ID NO: 1229163 - RNA, 16 nt, Human
uaauauuaaagccaug

SEQ ID NO: 1229164 - RNA, 14 nt, Human
uaauaauguuucaa

SEQ ID NO: 1229165 - RNA, 19 nt, Human
uaaggggaggaaccagagu

SEQ ID NO: 1229166 - RNA, 14 nt, Human
uaaggcaaucaugg

SEQ ID NO: 1229167 - RNA, 12 nt, Human
uaauaaagcugu

SEQ ID NO: 1229168 - RNA, 12 nt, Human
uaauaaaggacu

SEQ ID NO: 1229169 - RNA, 13 nt, Human
uaauaaaggacug

SEQ ID NO: 1229170 - RNA, 16 nt, Human
uaauaaaggacuguaa

SEQ ID NO: 1229171 - RNA, 20 nt, Human
uaauaaaggacuguaaucuu

SEQ ID NO: 1229172 - RNA, 16 nt, Human
uaauaaggaaaaguuu

SEQ ID NO: 1229173 - RNA, 18 nt, Human
uaauaaggaaaaguuuaa

SEQ ID NO: 1229174 - RNA, 22 nt, Human
uaagugauugcugguuuuaguu

SEQ ID NO: 1229175 - RNA, 12 nt, Human
uaaguccagugu

SEQ ID NO: 1229176 - RNA, 14 nt, Human
uacugccuauuuua

SEQ ID NO: 1229177 - RNA, 21 nt, Human
uacugccuauuuuaauaaaca

SEQ ID NO: 1229178 - RNA, 20 nt, Human
uacuugcucuugaugccugg

SEQ ID NO: 1229179 - RNA, 14 nt, Human
uacuugcucuugau

SEQ ID NO: 1229180 - RNA, 18 nt, Human
uacuugcucuugaugccu

SEQ ID NO: 1229181 - RNA, 19 nt, Human
uacuugcucuugaugccug

SEQ ID NO: 1229182 - RNA, 13 nt, Human
uacugcuuaauuc

SEQ ID NO: 1229183 - RNA, 19 nt, Human
uacugcuuaauucaaauaa

SEQ ID NO: 1229184 - RNA, 20 nt, Human
uacugcuuaauucaaauaau

SEQ ID NO: 1229185 - RNA, 15 nt, Human
uacugcucuccucca

SEQ ID NO: 1229186 - RNA, 23 nt, Human
uaccucuccagccucagcucuca

SEQ ID NO: 1229187 - RNA, 17 nt, Human
uacuaaaauggacugug

SEQ ID NO: 1229188 - RNA, 23 nt, Human
uacuaaaauggacuguggugacu

SEQ ID NO: 1229189 - RNA, 20 nt, Human
uaccguaggcuuuguauuca

SEQ ID NO: 1229190 - RNA, 23 nt, Human
uacauggcuggagcuagaauuug

SEQ ID NO: 1229191 - RNA, 20 nt, Human
uacauuuuuugggcagcaau

SEQ ID NO: 1229192 - RNA, 22 nt, Human
uaccaaaaaucucaauauuuca

SEQ ID NO: 1229193 - RNA, 12 nt, Human
uacaaaguauua

SEQ ID NO: 1229194 - RNA, 13 nt, Human
uacaaaguauuaa

SEQ ID NO: 1229195 - RNA, 14 nt, Human
uacaaaguauuaag

SEQ ID NO: 1229196 - RNA, 15 nt, Human
uacaaaguauuaagc

SEQ ID NO: 1229197 - RNA, 16 nt, Human
uacaaaguauuaagca

SEQ ID NO: 1229198 - RNA, 18 nt, Human
uacaaaguauuaagcaua

SEQ ID NO: 1229199 - RNA, 19 nt, Human
uacaaaguauuaagcauau

SEQ ID NO: 1229200 - RNA, 17 nt, Human
uaauuuuuauauuugaa

SEQ ID NO: 1229201 - RNA, 16 nt, Human
uaauuuuuauauuuga

SEQ ID NO: 1229202 - RNA, 12 nt, Human
uaauuuuuauau

SEQ ID NO: 1229203 - RNA, 18 nt, Human
uaauuuugugaagcaaaa

SEQ ID NO: 1229204 - RNA, 14 nt, Human
uaauuccuucagca

SEQ ID NO: 1229205 - RNA, 21 nt, Human
uaauuccuucagcacuuuaga

SEQ ID NO: 1229206 - RNA, 20 nt, Human
uaauuccuucagcacuuuag

SEQ ID NO: 1229207 - RNA, 17 nt, Human
uacaauuuuguuucugu

SEQ ID NO: 1229208 - RNA, 18 nt, Human
uacaauuuuguuucugua

SEQ ID NO: 1229209 - RNA, 12 nt, Human
uacaauuuuguu

SEQ ID NO: 1229210 - RNA, 15 nt, Human
uacaauuuuguuucu

SEQ ID NO: 1229211 - RNA, 16 nt, Human
uacaauuuuguuucug

SEQ ID NO: 1229212 - RNA, 15 nt, Human
uacaacggagucaaa

SEQ ID NO: 1229213 - RNA, 22 nt, Human
uacaacggagucaaaaauuaaa

SEQ ID NO: 1229214 - RNA, 15 nt, Human
uacaaccuccgccuc

SEQ ID NO: 1229215 - RNA, 14 nt, Human
uacaggauuugaaa

SEQ ID NO: 1229216 - RNA, 20 nt, Human
uacaggaugaugacuaugga

SEQ ID NO: 1229217 - RNA, 23 nt, Human
uacaguucggugagcuacaaaug

SEQ ID NO: 1229218 - RNA, 18 nt, Human
uacaguuuugaguagagu

SEQ ID NO: 1229219 - RNA, 21 nt, Human
uacauggcuggagcuagaauu

SEQ ID NO: 1229220 - RNA, 13 nt, Human
uagagaagcaagu

SEQ ID NO: 1229221 - RNA, 16 nt, Human
uagagaagcaaguaaa

SEQ ID NO: 1229222 - RNA, 11 nt, Human
uagaauucugu

SEQ ID NO: 1229223 - RNA, 13 nt, Human
uagaauucuguau

SEQ ID NO: 1229224 - RNA, 14 nt, Human
uagaauucuguaua

SEQ ID NO: 1229225 - RNA, 15 nt, Human
uagaauucuguauag

SEQ ID NO: 1229226 - RNA, 16 nt, Human
uagaauucuguauaga

SEQ ID NO: 1229227 - RNA, 21 nt, Human
uagaauucuguauagauuaga

SEQ ID NO: 1229228 - RNA, 20 nt, Human
uagacuggugacugauucuu

SEQ ID NO: 1229229 - RNA, 21 nt, Human
uagacuggugacugauucuuc

SEQ ID NO: 1229230 - RNA, 23 nt, Human
uagacuggugacugauucuucag

SEQ ID NO: 1229231 - RNA, 23 nt, Human
uagaauaccacaggaaccacaag

SEQ ID NO: 1229232 - RNA, 23 nt, Human
uagaauacaguuuugaguagagu

SEQ ID NO: 1229233 - RNA, 13 nt, Human
uagaauaugccuu

SEQ ID NO: 1229234 - RNA, 16 nt, Human
uagccccucuccugga

SEQ ID NO: 1229235 - RNA, 14 nt, Human
uagauaggccaugg

SEQ ID NO: 1229236 - RNA, 17 nt, Human
uagauaggccaugggca

SEQ ID NO: 1229237 - RNA, 14 nt, Human
uagauuagaauucu

SEQ ID NO: 1229238 - RNA, 15 nt, Human
uagauuagaauucug

SEQ ID NO: 1229239 - RNA, 16 nt, Human
uagauuagaauucugu

SEQ ID NO: 1229240 - RNA, 17 nt, Human
uagauuagaauucugua

SEQ ID NO: 1229241 - RNA, 19 nt, Human
uagauuagaauucuguaua

SEQ ID NO: 1229242 - RNA, 20 nt, Human
uagauuagaauucuguauag

SEQ ID NO: 1229243 - RNA, 20 nt, Human
uagauuagagaguguugaaa

SEQ ID NO: 1229244 - RNA, 18 nt, Human
uagcauccuggaauaucu

SEQ ID NO: 1229245 - RNA, 16 nt, Human
uagcauccuggaauau

SEQ ID NO: 1229246 - RNA, 15 nt, Human
uagcauccuggaaua

SEQ ID NO: 1229247 - RNA, 13 nt, Human
uagcauccuggaa

SEQ ID NO: 1229248 - RNA, 19 nt, Human
uaguagcguuuuuuaaaug

SEQ ID NO: 1229249 - RNA, 21 nt, Human
uaguagcguuuuuuaaaugua

SEQ ID NO: 1229250 - RNA, 23 nt, Human
uaguagcguuuuuuaaauguaua

SEQ ID NO: 1229251 - RNA, 17 nt, Human
uaguucuuacugcuuaa

SEQ ID NO: 1229252 - RNA, 16 nt, Human
uaguauuucuaugaaa

SEQ ID NO: 1229253 - RNA, 17 nt, Human
uaguauuguccaggucu

SEQ ID NO: 1229254 - RNA, 18 nt, Human
uauaaaccgaacugaugu

SEQ ID NO: 1229255 - RNA, 16 nt, Human
uauaugcuucuguuuu

SEQ ID NO: 1229256 - RNA, 14 nt, Human
uauaugcuucuguu

SEQ ID NO: 1229257 - RNA, 20 nt, Human
uauauuuuuuucugaaauuu

SEQ ID NO: 1229258 - RNA, 19 nt, Human
uauauuuuuuucugaaauu

SEQ ID NO: 1229259 - RNA, 16 nt, Human
uauauuuuuuucugaa

SEQ ID NO: 1229260 - RNA, 18 nt, Human
uauauuuuuauauuuacu

SEQ ID NO: 1229261 - RNA, 16 nt, Human
uauauuuucauucucc

SEQ ID NO: 1229262 - RNA, 19 nt, Human
uauauaacaaugcuguauu

SEQ ID NO: 1229263 - RNA, 17 nt, Human
uauauaacaaugcugua

SEQ ID NO: 1229264 - RNA, 23 nt, Human
uauaucugaggaauucuguauag

SEQ ID NO: 1229265 - RNA, 12 nt, Human
uauaguacauga

SEQ ID NO: 1229266 - RNA, 13 nt, Human
uauaguacaugau

SEQ ID NO: 1229267 - RNA, 14 nt, Human
uauaguacaugaua

SEQ ID NO: 1229268 - RNA, 16 nt, Human
uauaguacaugauaaa

SEQ ID NO: 1229269 - RNA, 13 nt, Human
uauagaaagcuau

SEQ ID NO: 1229270 - RNA, 24 nt, Human
uauagaaagcuauauaagacaaga

SEQ ID NO: 1229271 - RNA, 20 nt, Human
uauagaaccucuuugucuac

SEQ ID NO: 1229272 - RNA, 21 nt, Human
uauagaaccucuuugucuaca

SEQ ID NO: 1229273 - RNA, 22 nt, Human
ucagucucuauaccaauaaagu

SEQ ID NO: 1229274 - RNA, 23 nt, Human
ucagucucuauaccaauaaagug

SEQ ID NO: 1229275 - RNA, 16 nt, Human
ucaguuaacuauugca

SEQ ID NO: 1229276 - RNA, 20 nt, Human
ucaguuaacuauugcauuua

SEQ ID NO: 1229277 - RNA, 22 nt, Human
ucauauuuuucauagcuaaaaa

SEQ ID NO: 1229278 - RNA, 13 nt, Human
ucaucuggaacca

SEQ ID NO: 1229279 - RNA, 17 nt, Human
ucaucuggauuccagag

SEQ ID NO: 1229280 - RNA, 12 nt, Human
ucaucuggaacc

SEQ ID NO: 1229281 - RNA, 18 nt, Human
ucaucuggaaccaucaga

SEQ ID NO: 1229282 - RNA, 13 nt, Human
ucaugaaagauuc

SEQ ID NO: 1229283 - RNA, 15 nt, Human
ucaugaaagauucaa

SEQ ID NO: 1229284 - RNA, 21 nt, Human
ucauggaauuggagcucgugg

SEQ ID NO: 1229285 - RNA, 24 nt, Human
ucauggacuucugccagcauaaua

SEQ ID NO: 1229286 - RNA, 19 nt, Human
ucagcucucaguugcagcc

SEQ ID NO: 1229287 - RNA, 18 nt, Human
ucagauaugauucaaaug

SEQ ID NO: 1229288 - RNA, 17 nt, Human
ucagauaugauucaaau

SEQ ID NO: 1229289 - RNA, 16 nt, Human
ucagauacuggauugu

SEQ ID NO: 1229290 - RNA, 19 nt, Human
ucagauacuggauuguacu

SEQ ID NO: 1229291 - RNA, 20 nt, Human
ucagauacuggauuguacuu

SEQ ID NO: 1229292 - RNA, 14 nt, Human
ucagauacuggauu

SEQ ID NO: 1229293 - RNA, 15 nt, Human
ucagauacuggauug

SEQ ID NO: 1229294 - RNA, 23 nt, Human
uccacagcugccucuucccucuu

SEQ ID NO: 1229295 - RNA, 17 nt, Human
uccaagcaaaugugaau

SEQ ID NO: 1229296 - RNA, 15 nt, Human
uccacuuuaucuuga

SEQ ID NO: 1229297 - RNA, 17 nt, Human
uccacuuuaucuugaau

SEQ ID NO: 1229298 - RNA, 17 nt, Human
uccagagcacugcucca

SEQ ID NO: 1229299 - RNA, 21 nt, Human
ucccacuucagccucccaagc

SEQ ID NO: 1229300 - RNA, 21 nt, Human
ucccaagcaccugggauuaca

SEQ ID NO: 1229301 - RNA, 20 nt, Human
ucccaagcaccugggauuac

SEQ ID NO: 1229302 - RNA, 12 nt, Human
uccauacauuug

SEQ ID NO: 1229303 - RNA, 21 nt, Human
ucccucuuccuucccugcugu

SEQ ID NO: 1229304 - RNA, 22 nt, Human
ucccucugcagucucuauacca

SEQ ID NO: 1229305 - RNA, 16 nt, Human
ucccucugcagucucu

SEQ ID NO: 1229306 - RNA, 19 nt, Human
ucccuacccuaaccaaguu

SEQ ID NO: 1229307 - RNA, 15 nt, Human
ucuauauuuucauuc

SEQ ID NO: 1229308 - RNA, 16 nt, Human
ucuauauuuucauucu

SEQ ID NO: 1229309 - RNA, 19 nt, Human
ucuauauuuucauucuccu

SEQ ID NO: 1229310 - RNA, 13 nt, Human
ucuaugaaauauu

SEQ ID NO: 1229311 - RNA, 14 nt, Human
ucucagauuucuga

SEQ ID NO: 1229312 - RNA, 17 nt, Human
ucucagauuucugagga

SEQ ID NO: 1229313 - RNA, 18 nt, Human
ucucagauuucugaggaa

SEQ ID NO: 1229314 - RNA, 13 nt, Human
ucucagauuuuau

SEQ ID NO: 1229315 - RNA, 14 nt, Human
ucucagauuuuauu

SEQ ID NO: 1229316 - RNA, 15 nt, Human
ucucagauuuuauua

SEQ ID NO: 1229317 - RNA, 16 nt, Human
ucucagauuuuauuau

SEQ ID NO: 1229318 - RNA, 17 nt, Human
ucucagauuuuauuaug

SEQ ID NO: 1229319 - RNA, 18 nt, Human
ucucagauuuuauuaugu

SEQ ID NO: 1229320 - RNA, 19 nt, Human
ucucagauuuuauuaugua

SEQ ID NO: 1229321 - RNA, 21 nt, Human
ucuaggcaguucaaagcagga

SEQ ID NO: 1229322 - RNA, 15 nt, Human
ucuagguaaauuaca

SEQ ID NO: 1229323 - RNA, 13 nt, Human
ucuauauuuuaca

SEQ ID NO: 1229324 - RNA, 13 nt, Human
ucuauauuuucau

SEQ ID NO: 1229325 - RNA, 14 nt, Human
ucuauauuuucauu

SEQ ID NO: 1229326 - RNA, 19 nt, Human
uccuuagaaaaaaaauuau

SEQ ID NO: 1229327 - RNA, 14 nt, Human
ucugcagucucuau

SEQ ID NO: 1229328 - RNA, 18 nt, Human
ucugcagucucuauacca

SEQ ID NO: 1229329 - RNA, 20 nt, Human
ucugcagucucuauaccaau

SEQ ID NO: 1229330 - RNA, 21 nt, Human
ucugcagucucuauaccaaua

SEQ ID NO: 1229331 - RNA, 20 nt, Human
ucugccuaaggacuucuuua

SEQ ID NO: 1229332 - RNA, 21 nt, Human
ucugccuaaggacuucuuuaa

SEQ ID NO: 1229333 - RNA, 23 nt, Human
ucugccuaaggacuucuuuaauu

SEQ ID NO: 1229334 - RNA, 14 nt, Human
ucuggaauuugaaa

SEQ ID NO: 1229335 - RNA, 18 nt, Human
ucuguaagcauaagcuua

SEQ ID NO: 1229336 - RNA, 23 nt, Human
ucuggagcccacuguacuugcuc

SEQ ID NO: 1229337 - RNA, 12 nt, Human
ucuggagcccac

SEQ ID NO: 1229338 - RNA, 16 nt, Human
ucuggagcccacugua

SEQ ID NO: 1229339 - RNA, 22 nt, Human
ucuggagcccacuguacuugcu

SEQ ID NO: 1229340 - RNA, 18 nt, Human
ugaaaaccacauuggaga

SEQ ID NO: 1229341 - RNA, 15 nt, Human
ugaaacacuuugcau

SEQ ID NO: 1229342 - RNA, 21 nt, Human
ucuuugccacccucaugcugu

SEQ ID NO: 1229343 - RNA, 22 nt, Human
ucuuugccacccucaugcugug

SEQ ID NO: 1229344 - RNA, 12 nt, Human
ucuugucucaga

SEQ ID NO: 1229345 - RNA, 14 nt, Human
ucuugucucagauu

SEQ ID NO: 1229346 - RNA, 15 nt, Human
ucuugucucagauuu

SEQ ID NO: 1229347 - RNA, 17 nt, Human
ucuugucucagauuuua

SEQ ID NO: 1229348 - RNA, 19 nt, Human
ucuuuccacagaagcucca

SEQ ID NO: 1229349 - RNA, 17 nt, Human
ucuuuccacagaagcuc

SEQ ID NO: 1229350 - RNA, 19 nt, Human
ucuugccaaauauaaauaa

SEQ ID NO: 1229351 - RNA, 13 nt, Human
ucuuauaauuuaa

SEQ ID NO: 1229352 - RNA, 14 nt, Human
ucuuauaauuuaaa

SEQ ID NO: 1229353 - RNA, 15 nt, Human
ugagcagucaggaaa

SEQ ID NO: 1229354 - RNA, 19 nt, Human
ugaggaucagaguaaucca

SEQ ID NO: 1229355 - RNA, 13 nt, Human
ugaggaucagagu

SEQ ID NO: 1229356 - RNA, 17 nt, Human
ugaggaucagaguaauc

SEQ ID NO: 1229357 - RNA, 15 nt, Human
ugaggcacuggcgag

SEQ ID NO: 1229358 - RNA, 13 nt, Human
ugagacauccagc

SEQ ID NO: 1229359 - RNA, 13 nt, Human
ugagaaaucuaaa

SEQ ID NO: 1229360 - RNA, 10 nt, Human
ugagacaucc

SEQ ID NO: 1229361 - RNA, 12 nt, Human
ugagacauccag

SEQ ID NO: 1229362 - RNA, 18 nt, Human
ugagaaaaauauauacua

SEQ ID NO: 1229363 - RNA, 16 nt, Human
ugacucuuaagaagac

SEQ ID NO: 1229364 - RNA, 15 nt, Human
ugacucuuaagaaga

SEQ ID NO: 1229365 - RNA, 14 nt, Human
ugacucuuaagaag

SEQ ID NO: 1229366 - RNA, 12 nt, Human
ugacuuuggaua

SEQ ID NO: 1229367 - RNA, 13 nt, Human
ugacuuuggauaa

SEQ ID NO: 1229368 - RNA, 14 nt, Human
ugacuuuggauaau

SEQ ID NO: 1229369 - RNA, 15 nt, Human
ugacuuuggauaaua

SEQ ID NO: 1229370 - RNA, 16 nt, Human
ugacuuuggauaauaa

SEQ ID NO: 1229371 - RNA, 20 nt, Human
ugacuuuggauaauaaggaa

SEQ ID NO: 1229372 - RNA, 22 nt, Human
ugacuuuggauaauaaggaaaa

SEQ ID NO: 1229373 - RNA, 16 nt, Human
ugacuuuggcugcaug

SEQ ID NO: 1229374 - RNA, 16 nt, Human
ugacaugggacauuug

SEQ ID NO: 1229375 - RNA, 14 nt, Human
ugaauuacauuugu

SEQ ID NO: 1229376 - RNA, 13 nt, Human
ugaauuacauuug

SEQ ID NO: 1229377 - RNA, 14 nt, Human
ugaauuaaguuuuu

SEQ ID NO: 1229378 - RNA, 16 nt, Human
ugaauuuaaauagcuu

SEQ ID NO: 1229379 - RNA, 21 nt, Human
ugaacuugaggacacaugucc

SEQ ID NO: 1229380 - RNA, 22 nt, Human
ugaacuugaggacacaugucca

SEQ ID NO: 1229381 - RNA, 17 nt, Human
ugaacuugaggacacau

SEQ ID NO: 1229382 - RNA, 18 nt, Human
ugaacuugaggacacaug

SEQ ID NO: 1229383 - RNA, 19 nt, Human
ugaacuugaggacacaugu

SEQ ID NO: 1229384 - RNA, 20 nt, Human
ugaacuugaggacacauguc

SEQ ID NO: 1229385 - RNA, 13 nt, Human
ugaacuugaaauu

SEQ ID NO: 1229386 - RNA, 14 nt, Human
ugaacuugaaauuu

SEQ ID NO: 1229387 - RNA, 18 nt, Human
ugaacuugaaauuugaau

SEQ ID NO: 1229388 - RNA, 16 nt, Human
ugaacuugaggacaca

SEQ ID NO: 1229389 - RNA, 16 nt, Human
ugaaacacuuugcaua

SEQ ID NO: 1229390 - RNA, 13 nt, Human
ugaaacauguuuc

SEQ ID NO: 1229391 - RNA, 21 nt, Human
ugaagcuuuuaugugaaacau

SEQ ID NO: 1229392 - RNA, 21 nt, Human
ugaagagguuuuaaagcuucc

SEQ ID NO: 1229393 - RNA, 20 nt, Human
ugaagagguuuuaaagcuuc

SEQ ID NO: 1229394 - RNA, 9 nt, Human
ugccucucu

SEQ ID NO: 1229395 - RNA, 20 nt, Human
ugcgagugcucauuucagga

SEQ ID NO: 1229396 - RNA, 17 nt, Human
ugccuucucaacuccaa

SEQ ID NO: 1229397 - RNA, 15 nt, Human
ugccuucucaacucc

SEQ ID NO: 1229398 - RNA, 17 nt, Human
ugcucagagcaguguuu

SEQ ID NO: 1229399 - RNA, 19 nt, Human
ugcuaagcauuccaacuau

SEQ ID NO: 1229400 - RNA, 15 nt, Human
ugcuaagcauuccaa

SEQ ID NO: 1229401 - RNA, 22 nt, Human
ugcaguucugaagaagauggua

SEQ ID NO: 1229402 - RNA, 19 nt, Human
ugcaguucugaagaagaug

SEQ ID NO: 1229403 - RNA, 22 nt, Human
ugcaguggcaucaucucagcuc

SEQ ID NO: 1229404 - RNA, 22 nt, Human
ugcaguggcgcgaucucagcuc

SEQ ID NO: 1229405 - RNA, 22 nt, Human
ugcaguggcgugaucucagcuc

SEQ ID NO: 1229406 - RNA, 18 nt, Human
ugcaguucugaagaagau

SEQ ID NO: 1229407 - RNA, 17 nt, Human
ugcaguucugaagaaga

SEQ ID NO: 1229408 - RNA, 16 nt, Human
ugcaguucugaagaag

SEQ ID NO: 1229409 - RNA, 15 nt, Human
ugcaguucugaagaa

SEQ ID NO: 1229410 - RNA, 15 nt, Human
ugcacuggccccacc

SEQ ID NO: 1229411 - RNA, 16 nt, Human
ugcacuggccccaccc

SEQ ID NO: 1229412 - RNA, 17 nt, Human
ugcacuggccccacccu

SEQ ID NO: 1229413 - RNA, 14 nt, Human
ugcacggugaaugg

SEQ ID NO: 1229414 - RNA, 18 nt, Human
ugcacggugaauggcuuu

SEQ ID NO: 1229415 - RNA, 19 nt, Human
ugcacggugaauggcuuug

SEQ ID NO: 1229416 - RNA, 19 nt, Human
ugccaaauauaaauaaaaa

SEQ ID NO: 1229417 - RNA, 22 nt, Human
ugccaaauauaaauaaaaauaa

SEQ ID NO: 1229418 - RNA, 17 nt, Human
ugccaaauauaaauaaa

SEQ ID NO: 1229419 - RNA, 18 nt, Human
ugccaaauauaaauaaaa

SEQ ID NO: 1229420 - RNA, 20 nt, Human
ugcauauuuauaaaaauaaa

SEQ ID NO: 1229421 - RNA, 21 nt, Human
ugcauauuuauaaaaauaaaa

SEQ ID NO: 1229422 - RNA, 16 nt, Human
ugccacccucaugcug

SEQ ID NO: 1229423 - RNA, 17 nt, Human
ugccacccucaugcugu

SEQ ID NO: 1229424 - RNA, 11 nt, Human
uggagggaagc

SEQ ID NO: 1229425 - RNA, 15 nt, Human
uggcaggugcagccc

SEQ ID NO: 1229426 - RNA, 14 nt, Human
uggaaagaguacuc

SEQ ID NO: 1229427 - RNA, 23 nt, Human
uggaaacuucagcgguuuauaua

SEQ ID NO: 1229428 - RNA, 17 nt, Human
uggaaacaagucaguca

SEQ ID NO: 1229429 - RNA, 22 nt, Human
uggaauaauccuaaacauauga

SEQ ID NO: 1229430 - RNA, 16 nt, Human
uggaauaucuccguca

SEQ ID NO: 1229431 - RNA, 18 nt, Human
uggaacgcguugaaauug

SEQ ID NO: 1229432 - RNA, 19 nt, Human
uggaacgcguugaaauugu

SEQ ID NO: 1229433 - RNA, 18 nt, Human
uggcuuuucugauccagu

SEQ ID NO: 1229434 - RNA, 19 nt, Human
uggcuuuucugauccaguu

SEQ ID NO: 1229435 - RNA, 14 nt, Human
uggcuuuucugauc

SEQ ID NO: 1229436 - RNA, 17 nt, Human
uggcuuuucugauccag

SEQ ID NO: 1229437 - RNA, 21 nt, Human
uggcuugaguuuaaauuguaa

SEQ ID NO: 1229438 - RNA, 16 nt, Human
uggcuuccuggcaaua

SEQ ID NO: 1229439 - RNA, 22 nt, Human
uggccccacccucguggacacc

SEQ ID NO: 1229440 - RNA, 19 nt, Human
ugguaugaacuugaggaca

SEQ ID NO: 1229441 - RNA, 21 nt, Human
ugguaugaacuugaggacaca

SEQ ID NO: 1229442 - RNA, 22 nt, Human
ugguaugaacuugaggacacau

SEQ ID NO: 1229443 - RNA, 23 nt, Human
ugguaugaacuugaggacacaug

SEQ ID NO: 1229444 - RNA, 16 nt, Human
uggguuagggaaaaca

SEQ ID NO: 1229445 - RNA, 18 nt, Human
uggguuagggaaaacauu

SEQ ID NO: 1229446 - RNA, 19 nt, Human
uggguuagggaaaacauuc

SEQ ID NO: 1229447 - RNA, 21 nt, Human
uggguuagggaaaacauucca

SEQ ID NO: 1229448 - RNA, 12 nt, Human
ugggcagcaauu

SEQ ID NO: 1229449 - RNA, 18 nt, Human
uggggauucuuaaaguug

SEQ ID NO: 1229450 - RNA, 20 nt, Human
uggggauucuuaaaguugaa

SEQ ID NO: 1229451 - RNA, 12 nt, Human
uggggauucuua

SEQ ID NO: 1229452 - RNA, 13 nt, Human
uggggauucuuaa

SEQ ID NO: 1229453 - RNA, 16 nt, Human
uggggauucuuaaagu

SEQ ID NO: 1229454 - RNA, 16 nt, Human
uguaugauucccagcc

SEQ ID NO: 1229455 - RNA, 21 nt, Human
uguauuguauauuacaaugau

SEQ ID NO: 1229456 - RNA, 21 nt, Human
uguauugugcgcuaaacuuuu

SEQ ID NO: 1229457 - RNA, 15 nt, Human
uguaugauucccagc

SEQ ID NO: 1229458 - RNA, 22 nt, Human
uguauaaaagggacugagaaau

SEQ ID NO: 1229459 - RNA, 22 nt, Human
ugucacccagguuggagugcag

SEQ ID NO: 1229460 - RNA, 22 nt, Human
uguaccguaggcuuuguauuca

SEQ ID NO: 1229461 - RNA, 20 nt, Human
uguaaucuuauuuaggaagu

SEQ ID NO: 1229462 - RNA, 11 nt, Human
uguaaugaaaa

SEQ ID NO: 1229463 - RNA, 18 nt, Human
uguagcauccuggaauau

SEQ ID NO: 1229464 - RNA, 17 nt, Human
uguagcauccuggaaua

SEQ ID NO: 1229465 - RNA, 16 nt, Human
uguagcauccuggaau

SEQ ID NO: 1229466 - RNA, 14 nt, Human
uguagcauccugga

SEQ ID NO: 1229467 - RNA, 18 nt, Human
uguagccccucuccugga

SEQ ID NO: 1229468 - RNA, 15 nt, Human
ugugacauuuuacau

SEQ ID NO: 1229469 - RNA, 17 nt, Human
ugugacauuuuacauua

SEQ ID NO: 1229470 - RNA, 18 nt, Human
ugugacauuuuacauuaa

SEQ ID NO: 1229471 - RNA, 16 nt, Human
ugugauauaagugugu

SEQ ID NO: 1229472 - RNA, 19 nt, Human
ugugcuaguaauuggaaag

SEQ ID NO: 1229473 - RNA, 20 nt, Human
ugugcucaggagcccuggga

SEQ ID NO: 1229474 - RNA, 17 nt, Human
ugugcucaggagcccug

SEQ ID NO: 1229475 - RNA, 15 nt, Human
ugugcucaggagccc

SEQ ID NO: 1229476 - RNA, 16 nt, Human
ugugcucaggagcccu

SEQ ID NO: 1229477 - RNA, 16 nt, Human
uguggaacauaaaaag

SEQ ID NO: 1229478 - RNA, 21 nt, Human
uguggaacauaaaaaggacau

SEQ ID NO: 1229479 - RNA, 19 nt, Human
uguggaacauaaaaaggac

SEQ ID NO: 1229480 - RNA, 12 nt, Human
uuacagaagccc

SEQ ID NO: 1229481 - RNA, 14 nt, Human
uuacauuuccuaaa

SEQ ID NO: 1229482 - RNA, 18 nt, Human
uuaauauuaaagccaugu

SEQ ID NO: 1229483 - RNA, 19 nt, Human
uuaauauuaaagccauguu

SEQ ID NO: 1229484 - RNA, 20 nt, Human
uuaauauuaaagccauguuu

SEQ ID NO: 1229485 - RNA, 16 nt, Human
uuacaacggagucaaa

SEQ ID NO: 1229486 - RNA, 19 nt, Human
uuacaacggagucaaaaau

SEQ ID NO: 1229487 - RNA, 23 nt, Human
uuacaacggagucaaaaauuaaa

SEQ ID NO: 1229488 - RNA, 12 nt, Human
uuaaauguauac

SEQ ID NO: 1229489 - RNA, 14 nt, Human
uuaaauguauacua

SEQ ID NO: 1229490 - RNA, 19 nt, Human
uuaaauguauacuauagua

SEQ ID NO: 1229491 - RNA, 16 nt, Human
uuaaauguuaugacua

SEQ ID NO: 1229492 - RNA, 20 nt, Human
uuaaauguuaugacuaugua

SEQ ID NO: 1229493 - RNA, 12 nt, Human
uuaagaguaaaa

SEQ ID NO: 1229494 - RNA, 16 nt, Human
uuaauaauguuucaaa

SEQ ID NO: 1229495 - RNA, 11 nt, Human
uuaauauuaaa

SEQ ID NO: 1229496 - RNA, 13 nt, Human
uuaauauuaaagc

SEQ ID NO: 1229497 - RNA, 14 nt, Human
uuaauauuaaagcc

SEQ ID NO: 1229498 - RNA, 16 nt, Human
uuaauauuaaagccau

SEQ ID NO: 1229499 - RNA, 17 nt, Human
uuaauauuaaagccaug

SEQ ID NO: 1229500 - RNA, 12 nt, Human
uuaaagccaugu

SEQ ID NO: 1229501 - RNA, 14 nt, Human
uuaaagccauguuu

SEQ ID NO: 1229502 - RNA, 18 nt, Human
uuaaagccauguuuauua

SEQ ID NO: 1229503 - RNA, 20 nt, Human
uuaaagccauguuuauuaca

SEQ ID NO: 1229504 - RNA, 15 nt, Human
uuaaaaaaaaaauug

SEQ ID NO: 1229505 - RNA, 11 nt, Human
uguuucuguac

SEQ ID NO: 1229506 - RNA, 22 nt, Human
uguuucuguacuuuuuggcaua

SEQ ID NO: 1229507 - RNA, 23 nt, Human
uguuucuguacuuuuuggcauaa

SEQ ID NO: 1229508 - RNA, 20 nt, Human
uguuggagaagaacugaaau

SEQ ID NO: 1229509 - RNA, 19 nt, Human
uguuggagaagaacugaaa

SEQ ID NO: 1229510 - RNA, 17 nt, Human
uguuggagaagaacuga

SEQ ID NO: 1229511 - RNA, 16 nt, Human
uguuggagaagaacug

SEQ ID NO: 1229512 - RNA, 14 nt, Human
uguuggagaagaac

SEQ ID NO: 1229513 - RNA, 12 nt, Human
uguuuaagagac

SEQ ID NO: 1229514 - RNA, 20 nt, Human
uguucaugaaagauucaaug

SEQ ID NO: 1229515 - RNA, 14 nt, Human
uguucaugaaagau

SEQ ID NO: 1229516 - RNA, 13 nt, Human
uguucaugaaaga

SEQ ID NO: 1229517 - RNA, 20 nt, Human
uguucuuuuaaaugauugaa

SEQ ID NO: 1229518 - RNA, 20 nt, Human
uguugacaugggacauuugc

SEQ ID NO: 1229519 - RNA, 16 nt, Human
uguuaaaccaugggau

SEQ ID NO: 1229520 - RNA, 14 nt, Human
uguuagugcaaauu

SEQ ID NO: 1229521 - RNA, 17 nt, Human
uguucauaaauaaaguu

SEQ ID NO: 1229522 - RNA, 13 nt, Human
uguguuugaagca

SEQ ID NO: 1229523 - RNA, 19 nt, Human
uguguuuugcaagccagau

SEQ ID NO: 1229524 - RNA, 13 nt, Human
uguguuuugcaag

SEQ ID NO: 1229525 - RNA, 15 nt, Human
uguguuuuucauaaa

SEQ ID NO: 1229526 - RNA, 18 nt, Human
uguguuuuucauaaagca

SEQ ID NO: 1229527 - RNA, 22 nt, Human
ugugugaaagguacuucaaauc

SEQ ID NO: 1229528 - RNA, 21 nt, Human
ugugugaaagguacuucaaau

SEQ ID NO: 1229529 - RNA, 12 nt, Human
uuuuuuguuauu

SEQ ID NO: 1229530 - RNA, 17 nt, Human
ggccccugccucucugc

SEQ ID NO: 1229531 - RNA, 18 nt, Human
ggccccugccucucugca

SEQ ID NO: 1229532 - RNA, 19 nt, Human
ggccccugccucucugcag

SEQ ID NO: 1229533 - RNA, 21 nt, Human
ggccccugccucucugcaggu

SEQ ID NO: 1229534 - RNA, 20 nt, Human
ggcuaagcuucacuguaaaa

SEQ ID NO: 1229535 - RNA, 23 nt, Human
ggcgugaucucagcucacugcaa

SEQ ID NO: 1229536 - RNA, 14 nt, Human
ggcuaccaggaaag

SEQ ID NO: 1229537 - RNA, 17 nt, Human
ggcuagacuagucucaa

SEQ ID NO: 1229538 - RNA, 14 nt, Human
aaaaauaaaaaaca

SEQ ID NO: 1229539 - RNA, 10 nt, Human
aaaaaacuac

SEQ ID NO: 1229540 - RNA, 18 nt, Human
ggcauuuuacuguacaga

SEQ ID NO: 1229541 - RNA, 16 nt, Human
ggccagaccauggaca

SEQ ID NO: 1229542 - RNA, 17 nt, Human
ggcaucaucucagcuca

SEQ ID NO: 1229543 - RNA, 23 nt, Human
ggcaucaucucagcucacugcaa

SEQ ID NO: 1229544 - RNA, 15 nt, Human
ggaggcucuggagcc

SEQ ID NO: 1229545 - RNA, 14 nt, Human
ggauuguaguccca

SEQ ID NO: 1229546 - RNA, 13 nt, Human
gggccaggcuggg

SEQ ID NO: 1229547 - RNA, 15 nt, Human
aaaauggucucuaac

SEQ ID NO: 1229548 - RNA, 17 nt, Human
aaaaggacaucagcaaa

SEQ ID NO: 1229549 - RNA, 19 nt, Human
aaaaggacaucagcaaaca

SEQ ID NO: 1229550 - RNA, 12 nt, Human
aaaauacauugu

SEQ ID NO: 1229551 - RNA, 20 nt, Human
aaaauaauuuuuauauuuga

SEQ ID NO: 1229552 - RNA, 17 nt, Human
aaaauaauuuuuauauu

SEQ ID NO: 1229553 - RNA, 16 nt, Human
aaaauaauuuuuauau

SEQ ID NO: 1229554 - RNA, 11 nt, Human
aaaauaauuuu

SEQ ID NO: 1229555 - RNA, 11 nt, Human
aaaaugagaaa

SEQ ID NO: 1229556 - RNA, 12 nt, Human
aaaaugagaaau

SEQ ID NO: 1229557 - RNA, 18 nt, Human
aaaauauuuuaugaucca

SEQ ID NO: 1229558 - RNA, 20 nt, Human
aaaauauuguuuuacaauag

SEQ ID NO: 1229559 - RNA, 19 nt, Human
aaaauauuguuuuacaaua

SEQ ID NO: 1229560 - RNA, 15 nt, Human
aaaauauuuuaugau

SEQ ID NO: 1229561 - RNA, 16 nt, Human
aaaccuuccacccagu

SEQ ID NO: 1229562 - RNA, 23 nt, Human
aaaccuuccacccagugcugaau

SEQ ID NO: 1229563 - RNA, 20 nt, Human
aaaccacuuuuugcagcuuu

SEQ ID NO: 1229564 - RNA, 10 nt, Human
aaaccacuuu

SEQ ID NO: 1229565 - RNA, 22 nt, Human
gguaaaucagacuaugaaguuu

SEQ ID NO: 1229566 - RNA, 16 nt, Human
gguaugaacuugagga

SEQ ID NO: 1229567 - RNA, 19 nt, Human
gguaugaacuugaggacac

SEQ ID NO: 1229568 - RNA, 20 nt, Human
gguaugaacuugaggacaca

SEQ ID NO: 1229569 - RNA, 21 nt, Human
gguaugaacuugaggacacau

SEQ ID NO: 1229570 - RNA, 14 nt, Human
ggucagugcaaaua

SEQ ID NO: 1229571 - RNA, 18 nt, Human
gguaaguuuuuugaaauu

SEQ ID NO: 1229572 - RNA, 15 nt, Human
guaauuuuuuucacc

SEQ ID NO: 1229573 - RNA, 20 nt, Human
guacaaaguauuaagcauau

SEQ ID NO: 1229574 - RNA, 21 nt, Human
guacaaaguauuaagcauaua

SEQ ID NO: 1229575 - RNA, 13 nt, Human
guaaguuuuuuga

SEQ ID NO: 1229576 - RNA, 21 nt, Human
guaaagcccauuuuuaaaaua

SEQ ID NO: 1229577 - RNA, 18 nt, Human
guacacaauaagcaaaaa

SEQ ID NO: 1229578 - RNA, 20 nt, Human
guacacaauaagcaaaaaca

SEQ ID NO: 1229579 - RNA, 16 nt, Human
aaauauauacuaaaca

SEQ ID NO: 1229580 - RNA, 12 nt, Human
aaauauauacua

SEQ ID NO: 1229581 - RNA, 22 nt, Human
aaauacgugggcauucaaaugu

SEQ ID NO: 1229582 - RNA, 21 nt, Human
aaauacgugggcauucaaaug

SEQ ID NO: 1229583 - RNA, 20 nt, Human
aaauacgugggcauucaaau

SEQ ID NO: 1229584 - RNA, 22 nt, Human
aaauaucacuugucaauaaaau

SEQ ID NO: 1229585 - RNA, 16 nt, Human
aaauauauuuuaagac

SEQ ID NO: 1229586 - RNA, 22 nt, Human
aaauauauuuuaagacgaaaca

SEQ ID NO: 1229587 - RNA, 18 nt, Human
aaauauaugcuaagucuu

SEQ ID NO: 1229588 - RNA, 14 nt, Human
aaauauauaucaaa

SEQ ID NO: 1229589 - RNA, 17 nt, Human
aaagcagccuggccaac

SEQ ID NO: 1229590 - RNA, 14 nt, Human
aaagcuguguggca

SEQ ID NO: 1229591 - RNA, 14 nt, Human
gguggcagcaacaa

SEQ ID NO: 1229592 - RNA, 13 nt, Human
gguggcagcaaca

SEQ ID NO: 1229593 - RNA, 22 nt, Human
aaagggcuguuauaaucuuuca

SEQ ID NO: 1229594 - RNA, 20 nt, Human
aaagggcuguuauaaucuuu

SEQ ID NO: 1229595 - RNA, 18 nt, Human
aaagguucaugcaaacuu

SEQ ID NO: 1229596 - RNA, 21 nt, Human
aaaguaaaaacaaagaaauua

SEQ ID NO: 1229597 - RNA, 19 nt, Human
gguguuguacucaauuuua

SEQ ID NO: 1229598 - RNA, 20 nt, Human
gguguuguacucaauuuuaa

SEQ ID NO: 1229599 - RNA, 17 nt, Human
gguggggggggugcugg

SEQ ID NO: 1229600 - RNA, 17 nt, Human
aaaguauguuagugcaa

SEQ ID NO: 1229601 - RNA, 17 nt, Human
gguuuucacauuggaaa

SEQ ID NO: 1229602 - RNA, 15 nt, Human
gcccacuguacuugc

SEQ ID NO: 1229603 - RNA, 20 nt, Human
gcccacuguacuugcucuug

SEQ ID NO: 1229604 - RNA, 22 nt, Human
gcccacuguacuugcucuugau

SEQ ID NO: 1229605 - RNA, 12 nt, Human
gcauuuagaugu

SEQ ID NO: 1229606 - RNA, 13 nt, Human
gcauuuagaugua

SEQ ID NO: 1229607 - RNA, 13 nt, Human
gccauguuuauua

SEQ ID NO: 1229608 - RNA, 14 nt, Human
gccauguuuauuac

SEQ ID NO: 1229609 - RNA, 18 nt, Human
gccauguuuauuacagua

SEQ ID NO: 1229610 - RNA, 22 nt, Human
gccauguuuauuacaguauaau

SEQ ID NO: 1229611 - RNA, 15 nt, Human
gccggaucugaggga

SEQ ID NO: 1229612 - RNA, 17 nt, Human
gccggaucugagggaga

SEQ ID NO: 1229613 - RNA, 20 nt, Human
gcccugccaccugucugucu

SEQ ID NO: 1229614 - RNA, 22 nt, Human
gcguucauggaacgcguugaaa

SEQ ID NO: 1229615 - RNA, 12 nt, Human
gcguugaaauug

SEQ ID NO: 1229616 - RNA, 18 nt, Human
gcguugaaauuguaauua

SEQ ID NO: 1229617 - RNA, 12 nt, Human
gcuaaggacuug

SEQ ID NO: 1229618 - RNA, 23 nt, Human
gcuaaggacuuguuagaucuagu

SEQ ID NO: 1229619 - RNA, 19 nt, Human
gccuucucuaaacauuuca

SEQ ID NO: 1229620 - RNA, 22 nt, Human
gcucaggagcccugggaggcuc

SEQ ID NO: 1229621 - RNA, 23 nt, Human
gcucaggagcccugggaggcucu

SEQ ID NO: 1229622 - RNA, 16 nt, Human
gcucagagcaguguuu

SEQ ID NO: 1229623 - RNA, 21 nt, Human
gcuaggaauuguguuuauaau

SEQ ID NO: 1229624 - RNA, 11 nt, Human
gcuauuucuau

SEQ ID NO: 1229625 - RNA, 13 nt, Human
gcuauuucuauau

SEQ ID NO: 1229626 - RNA, 15 nt, Human
gcuauuucuauauuu

SEQ ID NO: 1229627 - RNA, 16 nt, Human
gcuauuucuauauuuu

SEQ ID NO: 1229628 - RNA, 18 nt, Human
gcuauuucuauauuuuca

SEQ ID NO: 1229629 - RNA, 19 nt, Human
gcuauuucuauauuuucau

SEQ ID NO: 1229630 - RNA, 20 nt, Human
gcuauuucuauauuuucauu

SEQ ID NO: 1229631 - RNA, 22 nt, Human
gcuauuucuauauuuucauucu

SEQ ID NO: 1229632 - RNA, 21 nt, Human
gcuaguaauuggaaaggcagc

SEQ ID NO: 1229633 - RNA, 20 nt, Human
gcuaaguacacaauaagcaa

SEQ ID NO: 1229634 - RNA, 21 nt, Human
gcuaaguacacaauaagcaaa

SEQ ID NO: 1229635 - RNA, 22 nt, Human
gcuaaguacacaauaagcaaaa

SEQ ID NO: 1229636 - RNA, 12 nt, Human
ggacaucagcaa

SEQ ID NO: 1229637 - RNA, 14 nt, Human
ggacaucagcaaac

SEQ ID NO: 1229638 - RNA, 15 nt, Human
ggacaucagcaaaca

SEQ ID NO: 1229639 - RNA, 14 nt, Human
ggacaccugcccug

SEQ ID NO: 1229640 - RNA, 15 nt, Human
ggacaccugcccugc

SEQ ID NO: 1229641 - RNA, 16 nt, Human
ggacaccugcccugcc

SEQ ID NO: 1229642 - RNA, 13 nt, Human
ggacaccugcccu

SEQ ID NO: 1229643 - RNA, 10 nt, Human
ggacaccugc

SEQ ID NO: 1229644 - RNA, 11 nt, Human
ggacaccugcc

SEQ ID NO: 1229645 - RNA, 12 nt, Human
ggacaccugccc

SEQ ID NO: 1229646 - RNA, 21 nt, Human
ggacagucaccucauggaauu

SEQ ID NO: 1229647 - RNA, 18 nt, Human
ggacagucaccucaugga

SEQ ID NO: 1229648 - RNA, 17 nt, Human
ggacagucaccucaugg

SEQ ID NO: 1229649 - RNA, 15 nt, Human
ggaagccugauuaaa

SEQ ID NO: 1229650 - RNA, 19 nt, Human
ggaauacucuuauaucuau

SEQ ID NO: 1229651 - RNA, 12 nt, Human
ggacacaugucc

SEQ ID NO: 1229652 - RNA, 13 nt, Human
ggacacaugucca

SEQ ID NO: 1229653 - RNA, 19 nt, Human
ggacacauguccaguggga

SEQ ID NO: 1229654 - RNA, 19 nt, Human
ggaaaucaggguuaguauu

SEQ ID NO: 1229655 - RNA, 13 nt, Human
ggaaaucuuuaaa

SEQ ID NO: 1229656 - RNA, 16 nt, Human
ggaaaaaauaacaaug

SEQ ID NO: 1229657 - RNA, 19 nt, Human
ggaaagcagccuggccaac

SEQ ID NO: 1229658 - RNA, 23 nt, Human
ggaaagcgccuccaacccuagca

SEQ ID NO: 1229659 - RNA, 19 nt, Human
ggaaagcgccuccaacccu

SEQ ID NO: 1229660 - RNA, 21 nt, Human
gcuuuucccuuuuuuuaagua

SEQ ID NO: 1229661 - RNA, 20 nt, Human
gcuuuucccuuuuuuuaagu

SEQ ID NO: 1229662 - RNA, 18 nt, Human
gcugggccccugccucuc

SEQ ID NO: 1229663 - RNA, 20 nt, Human
gcugggccccugccucucug

SEQ ID NO: 1229664 - RNA, 12 nt, Human
gcugggccccug

SEQ ID NO: 1229665 - RNA, 13 nt, Human
gcugggccccugc

SEQ ID NO: 1229666 - RNA, 14 nt, Human
gcugggccccugcc

SEQ ID NO: 1229667 - RNA, 21 nt, Human
gcugggaauggaggggcagag

SEQ ID NO: 1229668 - RNA, 22 nt, Human
gcuguauuuuaaaagaaugauu

SEQ ID NO: 1229669 - RNA, 21 nt, Human
gcuguauuuuaaaagaaugau

SEQ ID NO: 1229670 - RNA, 20 nt, Human
gcuguauuuuaaaagaauga

SEQ ID NO: 1229671 - RNA, 18 nt, Human
gcugccucuucccucuuc

SEQ ID NO: 1229672 - RNA, 14 nt, Human
gcugccucuucccu

SEQ ID NO: 1229673 - RNA, 20 nt, Human
gcugccccuggugcacuggc

SEQ ID NO: 1229674 - RNA, 15 nt, Human
gcaaaaacaaaaaga

SEQ ID NO: 1229675 - RNA, 20 nt, Human
gcaaaaacaaaaagaaaaga

SEQ ID NO: 1229676 - RNA, 21 nt, Human
gcaaaaacaaaaagaaaagaa

SEQ ID NO: 1229677 - RNA, 12 nt, Human
gauccacccgcc

SEQ ID NO: 1229678 - RNA, 16 nt, Human
gauacuggauuguacu

SEQ ID NO: 1229679 - RNA, 20 nt, Human
gauacuggauuguacuuugu

SEQ ID NO: 1229680 - RNA, 12 nt, Human
gauacugaaaua

SEQ ID NO: 1229681 - RNA, 13 nt, Human
gaucugagggaga

SEQ ID NO: 1229682 - RNA, 19 nt, Human
gauccagcagauuauucac

SEQ ID NO: 1229683 - RNA, 18 nt, Human
gauccacucgccucagcc

SEQ ID NO: 1229684 - RNA, 18 nt, Human
gauccagcagauuauuca

SEQ ID NO: 1229685 - RNA, 21 nt, Human
gauccacccgccucagccucc

SEQ ID NO: 1229686 - RNA, 12 nt, Human
gaucugccuaag

SEQ ID NO: 1229687 - RNA, 15 nt, Human
gaucugccuaaggac

SEQ ID NO: 1229688 - RNA, 16 nt, Human
gaucugccuaaggacu

SEQ ID NO: 1229689 - RNA, 17 nt, Human
gaucugccuaaggacuu

SEQ ID NO: 1229690 - RNA, 12 nt, Human
gaugauuucuau

SEQ ID NO: 1229691 - RNA, 13 nt, Human
gaugauuucuaug

SEQ ID NO: 1229692 - RNA, 23 nt, Human
gaugauuucuaugcugaguuugu

SEQ ID NO: 1229693 - RNA, 11 nt, Human
gcauccagccu

SEQ ID NO: 1229694 - RNA, 21 nt, Human
gcaucccucacccauccuaga

SEQ ID NO: 1229695 - RNA, 20 nt, Human
gcaucuagcaugucgucaaa

SEQ ID NO: 1229696 - RNA, 22 nt, Human
gcaguuguugcccacagcugua

SEQ ID NO: 1229697 - RNA, 17 nt, Human
gcagucucuauaccaau

SEQ ID NO: 1229698 - RNA, 18 nt, Human
gcagucucuauaccaaua

SEQ ID NO: 1229699 - RNA, 20 nt, Human
gcagucucuauaccaauaaa

SEQ ID NO: 1229700 - RNA, 21 nt, Human
gcagucucuauaccaauaaag

SEQ ID NO: 1229701 - RNA, 22 nt, Human
gcagucucuauaccaauaaagu

SEQ ID NO: 1229702 - RNA, 23 nt, Human
gcagucucuauaccaauaaagug

SEQ ID NO: 1229703 - RNA, 21 nt, Human
gcagagcugauggagaaggaa

SEQ ID NO: 1229704 - RNA, 22 nt, Human
gcagagcugauggagaaggaag

SEQ ID NO: 1229705 - RNA, 23 nt, Human
gcagagcugauggagaaggaagg

SEQ ID NO: 1229706 - RNA, 19 nt, Human
gcagaaagcaucccucacc

SEQ ID NO: 1229707 - RNA, 23 nt, Human
gagacgggacugcggaggaagga

SEQ ID NO: 1229708 - RNA, 13 nt, Human
gagaaggagcaga

SEQ ID NO: 1229709 - RNA, 22 nt, Human
gacuuuuuauggcacuaguauu

SEQ ID NO: 1229710 - RNA, 13 nt, Human
gaggggcagagcc

SEQ ID NO: 1229711 - RNA, 20 nt, Human
gaggggcagagccaggaaga

SEQ ID NO: 1229712 - RNA, 16 nt, Human
gaggggcagagccagg

SEQ ID NO: 1229713 - RNA, 14 nt, Human
gaggacccaggaca

SEQ ID NO: 1229714 - RNA, 15 nt, Human
gaggacccaggacag

SEQ ID NO: 1229715 - RNA, 14 nt, Human
gagcagucaggaaa

SEQ ID NO: 1229716 - RNA, 12 nt, Human
gagcccugggag

SEQ ID NO: 1229717 - RNA, 16 nt, Human
gagcccugggaggcuc

SEQ ID NO: 1229718 - RNA, 18 nt, Human
gagcccugggaggcucug

SEQ ID NO: 1229719 - RNA, 19 nt, Human
gagcccugggaggcucugg

SEQ ID NO: 1229720 - RNA, 20 nt, Human
gagcccugggaggcucugga

SEQ ID NO: 1229721 - RNA, 22 nt, Human
gagcuggagaugaggccagacc

SEQ ID NO: 1229722 - RNA, 23 nt, Human
gagcuggagaugaggccagacca

SEQ ID NO: 1229723 - RNA, 20 nt, Human
gacauuuuaaaaaaugguca

SEQ ID NO: 1229724 - RNA, 13 nt, Human
gacauuuuacauu

SEQ ID NO: 1229725 - RNA, 14 nt, Human
gacauuuuacauua

SEQ ID NO: 1229726 - RNA, 15 nt, Human
gacauuuuacauuaa

SEQ ID NO: 1229727 - RNA, 21 nt, Human
gacauuuuacauuaaauuuuu

SEQ ID NO: 1229728 - RNA, 18 nt, Human
gacagucaccucauggaa

SEQ ID NO: 1229729 - RNA, 14 nt, Human
gacaaaaagcuacu

SEQ ID NO: 1229730 - RNA, 20 nt, Human
gaauuacauuuguauaaaau

SEQ ID NO: 1229731 - RNA, 15 nt, Human
gaauuacgugcucug

SEQ ID NO: 1229732 - RNA, 19 nt, Human
gaauuacgugcucuguggg

SEQ ID NO: 1229733 - RNA, 18 nt, Human
gaauuacauuuguauaaa

SEQ ID NO: 1229734 - RNA, 15 nt, Human
gaauuacauuuguau

SEQ ID NO: 1229735 - RNA, 13 nt, Human
gaauuacauuugu

SEQ ID NO: 1229736 - RNA, 22 nt, Human
gaaugauuaugaauuacauuug

SEQ ID NO: 1229737 - RNA, 14 nt, Human
gaaugauuaugaau

SEQ ID NO: 1229738 - RNA, 22 nt, Human
gaauaucuccgucaacucauau

SEQ ID NO: 1229739 - RNA, 11 nt, Human
gaauaugccuu

SEQ ID NO: 1229740 - RNA, 23 nt, Human
cuggaaaaguauguuagugcaaa

SEQ ID NO: 1229741 - RNA, 17 nt, Human
cuggaaaccuuccaccc

SEQ ID NO: 1229742 - RNA, 20 nt, Human
cuggaaaccuuccacccagu

SEQ ID NO: 1229743 - RNA, 15 nt, Human
cugugaacuugaaau

SEQ ID NO: 1229744 - RNA, 16 nt, Human
cugugaacuugaaauu

SEQ ID NO: 1229745 - RNA, 17 nt, Human
cugugaacuugaaauuu

SEQ ID NO: 1229746 - RNA, 18 nt, Human
cugugaacuugaaauuug

SEQ ID NO: 1229747 - RNA, 22 nt, Human
cuuaaaauaaugaauacauuuc

SEQ ID NO: 1229748 - RNA, 13 nt, Human
cuggugacugauu

SEQ ID NO: 1229749 - RNA, 14 nt, Human
cuggugacugauuc

SEQ ID NO: 1229750 - RNA, 15 nt, Human
cuggugacugauucu

SEQ ID NO: 1229751 - RNA, 17 nt, Human
cuggugacugauucuuc

SEQ ID NO: 1229752 - RNA, 18 nt, Human
cuggugacugauucuuca

SEQ ID NO: 1229753 - RNA, 15 nt, Human
cuggugcccugcuuu

SEQ ID NO: 1229754 - RNA, 16 nt, Human
cuggugcccugcuuuc

SEQ ID NO: 1229755 - RNA, 19 nt, Human
cuggugcccugcuuucaga

SEQ ID NO: 1229756 - RNA, 21 nt, Human
cuggugcccugcuuucagaua

SEQ ID NO: 1229757 - RNA, 23 nt, Human
cuggugcccugcuuucagauacu

SEQ ID NO: 1229758 - RNA, 21 nt, Human
cuguacuugcucuugaugccu

SEQ ID NO: 1229759 - RNA, 16 nt, Human
cuguacuugcucuuga

SEQ ID NO: 1229760 - RNA, 19 nt, Human
cuguacuugcucuugaugc

SEQ ID NO: 1229761 - RNA, 20 nt, Human
cuguacuugcucuugaugcc

SEQ ID NO: 1229762 - RNA, 20 nt, Human
cuguaagaaaauaucacuug

SEQ ID NO: 1229763 - RNA, 20 nt, Human
cugucuacacuaagagagaa

SEQ ID NO: 1229764 - RNA, 13 nt, Human
gaaaauuuuugua

SEQ ID NO: 1229765 - RNA, 16 nt, Human
gaaaauuuuuguagua

SEQ ID NO: 1229766 - RNA, 18 nt, Human
gaaaacuuguauuaugug

SEQ ID NO: 1229767 - RNA, 14 nt, Human
gaaaauuaacauga

SEQ ID NO: 1229768 - RNA, 15 nt, Human
gaaaagcagacauuu

SEQ ID NO: 1229769 - RNA, 16 nt, Human
gaaaagcagacauuuu

SEQ ID NO: 1229770 - RNA, 14 nt, Human
gaaaaaauauauau

SEQ ID NO: 1229771 - RNA, 18 nt, Human
cuuuuggaagguauuuaa

SEQ ID NO: 1229772 - RNA, 19 nt, Human
cuuuuaugugaaacauguu

SEQ ID NO: 1229773 - RNA, 23 nt, Human
gaaacuucagcgguuuauauaag

SEQ ID NO: 1229774 - RNA, 14 nt, Human
gaaacuuguguaaa

SEQ ID NO: 1229775 - RNA, 16 nt, Human
gaaacuuguguaaaua

SEQ ID NO: 1229776 - RNA, 20 nt, Human
gaaacuuguguaaauacaau

SEQ ID NO: 1229777 - RNA, 15 nt, Human
cuucuauacccaccc

SEQ ID NO: 1229778 - RNA, 18 nt, Human
cuucuauacccacccaga

SEQ ID NO: 1229779 - RNA, 17 nt, Human
cuucuauacccacccag

SEQ ID NO: 1229780 - RNA, 23 nt, Human
cuucccaaaguccugggauuaca

SEQ ID NO: 1229781 - RNA, 14 nt, Human
cucguuaauuugua

SEQ ID NO: 1229782 - RNA, 14 nt, Human
cucguguguuucua

SEQ ID NO: 1229783 - RNA, 19 nt, Human
cucuauaccaauaaaguga

SEQ ID NO: 1229784 - RNA, 18 nt, Human
cucuauaccaauaaagug

SEQ ID NO: 1229785 - RNA, 14 nt, Human
cuccaagaauuucu

SEQ ID NO: 1229786 - RNA, 13 nt, Human
cuccaagaauuuc

SEQ ID NO: 1229787 - RNA, 18 nt, Human
cucugcaggucccuaaua

SEQ ID NO: 1229788 - RNA, 14 nt, Human
cucugcaggucccu

SEQ ID NO: 1229789 - RNA, 15 nt, Human
cucugcaggucccua

SEQ ID NO: 1229790 - RNA, 16 nt, Human
cucugcaggucccuaa

SEQ ID NO: 1229791 - RNA, 17 nt, Human
cucugcaggucccuaau

SEQ ID NO: 1229792 - RNA, 22 nt, Human
cucuuagaugcaguucugaaga

SEQ ID NO: 1229793 - RNA, 21 nt, Human
cugaagcuaucguaaaauuaa

SEQ ID NO: 1229794 - RNA, 22 nt, Human
cugaagcuaucguaaaauuaag

SEQ ID NO: 1229795 - RNA, 13 nt, Human
cucuugaugccug

SEQ ID NO: 1229796 - RNA, 15 nt, Human
cucuugaugccuggc

SEQ ID NO: 1229797 - RNA, 16 nt, Human
cucuugaugccuggcg

SEQ ID NO: 1229798 - RNA, 21 nt, Human
cucuugaugccuggcggggug

SEQ ID NO: 1229799 - RNA, 21 nt, Human
cugaggaaauugcuuuguauu

SEQ ID NO: 1229800 - RNA, 14 nt, Human
cguaaaauuaagaa

SEQ ID NO: 1229801 - RNA, 13 nt, Human
cgugauccacccg

SEQ ID NO: 1229802 - RNA, 17 nt, Human
cgugauccacccgccuc

SEQ ID NO: 1229803 - RNA, 24 nt, Human
cgugauccacccgccucagccucc

SEQ ID NO: 1229804 - RNA, 14 nt, Human
cgugaucucagcuc

SEQ ID NO: 1229805 - RNA, 15 nt, Human
cgugaucucagcuca

SEQ ID NO: 1229806 - RNA, 19 nt, Human
cggaggaaggaggacccag

SEQ ID NO: 1229807 - RNA, 20 nt, Human
cggaggaaggaggacccagg

SEQ ID NO: 1229808 - RNA, 21 nt, Human
cggaggaaggaggacccagga

SEQ ID NO: 1229809 - RNA, 23 nt, Human
cggaggaaggaggacccaggaca

SEQ ID NO: 1229810 - RNA, 16 nt, Human
cgccuccaacccuagc

SEQ ID NO: 1229811 - RNA, 17 nt, Human
cgccuccaacccuagca

SEQ ID NO: 1229812 - RNA, 18 nt, Human
cgacugaaaauauuguuu

SEQ ID NO: 1229813 - RNA, 17 nt, Human
cgacugaaaauauuguu

SEQ ID NO: 1229814 - RNA, 16 nt, Human
ccuuuuuuaaauaaau

SEQ ID NO: 1229815 - RNA, 15 nt, Human
ccuuuuucauuauuu

SEQ ID NO: 1229816 - RNA, 19 nt, Human
cucaauucuucccuaucuu

SEQ ID NO: 1229817 - RNA, 16 nt, Human
cucaauauucaauaaa

SEQ ID NO: 1229818 - RNA, 17 nt, Human
cucaauauucaauaaag

SEQ ID NO: 1229819 - RNA, 18 nt, Human
cucaauauucaauaaagc

SEQ ID NO: 1229820 - RNA, 19 nt, Human
cucaauauucaauaaagcu

SEQ ID NO: 1229821 - RNA, 18 nt, Human
cucaaaccaaaucacuga

SEQ ID NO: 1229822 - RNA, 19 nt, Human
cucaaaccaaaucacugaa

SEQ ID NO: 1229823 - RNA, 22 nt, Human
cucaaaccaaaucacugaacuu

SEQ ID NO: 1229824 - RNA, 18 nt, Human
cuaucguaaaauuaagaa

SEQ ID NO: 1229825 - RNA, 23 nt, Human
cuagaauuugauaugugaacagu

SEQ ID NO: 1229826 - RNA, 14 nt, Human
cuaauucuaaugug

SEQ ID NO: 1229827 - RNA, 11 nt, Human
ccugaguccca

SEQ ID NO: 1229828 - RNA, 16 nt, Human
ccugagucccaucccu

SEQ ID NO: 1229829 - RNA, 16 nt, Human
ccugccuccccugccu

SEQ ID NO: 1229830 - RNA, 16 nt, Human
ccugccucccuucaug

SEQ ID NO: 1229831 - RNA, 20 nt, Human
ccugucugucugucuguccc

SEQ ID NO: 1229832 - RNA, 21 nt, Human
ccugucugucugucuguccca

SEQ ID NO: 1229833 - RNA, 22 nt, Human
ccugucugucugucugucccaa

SEQ ID NO: 1229834 - RNA, 17 nt, Human
ccugucuugccuuuuuc

SEQ ID NO: 1229835 - RNA, 19 nt, Human
ccugucuugccuuuuucau

SEQ ID NO: 1229836 - RNA, 20 nt, Human
ccugucuugccuuuuucauu

SEQ ID NO: 1229837 - RNA, 19 nt, Human
ccuccaacccuagcaaaag

SEQ ID NO: 1229838 - RNA, 18 nt, Human
ccuccaacccuagcaaaa

SEQ ID NO: 1229839 - RNA, 18 nt, Human
ccucccauguucaagcga

SEQ ID NO: 1229840 - RNA, 23 nt, Human
ccucauggaauuggagcucgugg

SEQ ID NO: 1229841 - RNA, 14 nt, Human
cccuaucuuugcca

SEQ ID NO: 1229842 - RNA, 16 nt, Human
cccuaucuuugccacc

SEQ ID NO: 1229843 - RNA, 19 nt, Human
cccuaucuuugccacccuc

SEQ ID NO: 1229844 - RNA, 21 nt, Human
cccuaucuuugccacccucau

SEQ ID NO: 1229845 - RNA, 10 nt, Human
cccucacacu

SEQ ID NO: 1229846 - RNA, 12 nt, Human
cccucacacugg

SEQ ID NO: 1229847 - RNA, 13 nt, Human
cccucacacuggg

SEQ ID NO: 1229848 - RNA, 14 nt, Human
cccucacacuggga

SEQ ID NO: 1229849 - RNA, 18 nt, Human
cccaggaauggagccugc

SEQ ID NO: 1229850 - RNA, 19 nt, Human
cccaggaauggagccugca

SEQ ID NO: 1229851 - RNA, 20 nt, Human
cccaggaauggagccugcac

SEQ ID NO: 1229852 - RNA, 22 nt, Human
cccaggaauggagccugcacgg

SEQ ID NO: 1229853 - RNA, 16 nt, Human
ccagcagauuauucac

SEQ ID NO: 1229854 - RNA, 15 nt, Human
ccagcagauuauuca

SEQ ID NO: 1229855 - RNA, 15 nt, Human
ccagcuaauuuuugu

SEQ ID NO: 1229856 - RNA, 15 nt, Human
ccagggggcaagagg

SEQ ID NO: 1229857 - RNA, 22 nt, Human
ccaguauuguacaaaguauuaa

SEQ ID NO: 1229858 - RNA, 14 nt, Human
ccauacauuugugu

SEQ ID NO: 1229859 - RNA, 13 nt, Human
ccauacauuugug

SEQ ID NO: 1229860 - RNA, 16 nt, Human
ccaguuuuguuuggac

SEQ ID NO: 1229861 - RNA, 19 nt, Human
ccaguuuuguuuggaccaa

SEQ ID NO: 1229862 - RNA, 12 nt, Human
ccaucccugcgu

SEQ ID NO: 1229863 - RNA, 20 nt, Human
caauucuucccuaucuuugc

SEQ ID NO: 1229864 - RNA, 17 nt, Human
caauucuucccuaucuu

SEQ ID NO: 1229865 - RNA, 15 nt, Human
caaugcuguauuuua

SEQ ID NO: 1229866 - RNA, 14 nt, Human
caaugcuguauuuu

SEQ ID NO: 1229867 - RNA, 21 nt, Human
caauauuucagauaaucacaa

SEQ ID NO: 1229868 - RNA, 20 nt, Human
caauauuucagauaaucaca

SEQ ID NO: 1229869 - RNA, 12 nt, Human
caauauuucaga

SEQ ID NO: 1229870 - RNA, 18 nt, Human
cacaagacugcacaucaa

SEQ ID NO: 1229871 - RNA, 16 nt, Human
cacaagacugcacauc

SEQ ID NO: 1229872 - RNA, 20 nt, Human
caaguauuagaauaccacag

SEQ ID NO: 1229873 - RNA, 14 nt, Human
caaguauuagaaua

SEQ ID NO: 1229874 - RNA, 13 nt, Human
caauaaaaaauua

SEQ ID NO: 1229875 - RNA, 16 nt, Human
caauaaaaaauuauga

SEQ ID NO: 1229876 - RNA, 17 nt, Human
caauaaaaaauuaugac

SEQ ID NO: 1229877 - RNA, 21 nt, Human
cacagggccuuuggcaggugc

SEQ ID NO: 1229878 - RNA, 14 nt, Human
cacuacacccagca

SEQ ID NO: 1229879 - RNA, 15 nt, Human
cacuacacccagcaa

SEQ ID NO: 1229880 - RNA, 16 nt, Human
cacuacacccagcaau

SEQ ID NO: 1229881 - RNA, 17 nt, Human
cacuacacccagcaaua

SEQ ID NO: 1229882 - RNA, 18 nt, Human
cacuacacccagcaauag

SEQ ID NO: 1229883 - RNA, 23 nt, Human
cacuacgccuggcugauuuuugu

SEQ ID NO: 1229884 - RNA, 20 nt, Human
cacggcagccacagcuuggg

SEQ ID NO: 1229885 - RNA, 14 nt, Human
cacuacaaccuccg

SEQ ID NO: 1229886 - RNA, 13 nt, Human
cacuacaaccucc

SEQ ID NO: 1229887 - RNA, 12 nt, Human
cacuacacccag

SEQ ID NO: 1229888 - RNA, 13 nt, Human
cacggcagccaca

SEQ ID NO: 1229889 - RNA, 17 nt, Human
cacucuugaaaaaugca

SEQ ID NO: 1229890 - RNA, 11 nt, Human
cacugaagaag

SEQ ID NO: 1229891 - RNA, 20 nt, Human
cacugaacuuugcugagccu

SEQ ID NO: 1229892 - RNA, 17 nt, Human
auuuuauagcuacuaau

SEQ ID NO: 1229893 - RNA, 22 nt, Human
caaaagcccauucauuccauuc

SEQ ID NO: 1229894 - RNA, 20 nt, Human
caaaccacuuuuugcagcuu

SEQ ID NO: 1229895 - RNA, 19 nt, Human
caaaccacuuuuugcagcu

SEQ ID NO: 1229896 - RNA, 17 nt, Human
caaaccacuuuuugcag

SEQ ID NO: 1229897 - RNA, 23 nt, Human
caagaauuucuaggacugaauua

SEQ ID NO: 1229898 - RNA, 15 nt, Human
caaaguauuaagcau

SEQ ID NO: 1229899 - RNA, 16 nt, Human
caaaguauuaagcaua

SEQ ID NO: 1229900 - RNA, 17 nt, Human
caaaguauuaagcauau

SEQ ID NO: 1229901 - RNA, 19 nt, Human
caaaguauuaagcauauau

SEQ ID NO: 1229902 - RNA, 21 nt, Human
caaaguauuaagcauauauuu

SEQ ID NO: 1229903 - RNA, 22 nt, Human
caaauccagccugcugccugcu

SEQ ID NO: 1229904 - RNA, 16 nt, Human
auuucagcagcugcag

SEQ ID NO: 1229905 - RNA, 20 nt, Human
auuucuaugaaauauuaugu

SEQ ID NO: 1229906 - RNA, 18 nt, Human
auuucuaugaaauauuau

SEQ ID NO: 1229907 - RNA, 15 nt, Human
auuucuaugaaauau

SEQ ID NO: 1229908 - RNA, 23 nt, Human
auuguaauaggcguaacuaauuu

SEQ ID NO: 1229909 - RNA, 18 nt, Human
auugaugggauuugguca

SEQ ID NO: 1229910 - RNA, 18 nt, Human
auugauccagaaagaaaa

SEQ ID NO: 1229911 - RNA, 19 nt, Human
auugauccagaaagaaaac

SEQ ID NO: 1229912 - RNA, 22 nt, Human
auugauccagaaagaaaacuug

SEQ ID NO: 1229913 - RNA, 23 nt, Human
auuguacaaaguauuaagcauau

SEQ ID NO: 1229914 - RNA, 22 nt, Human
auuguacaaaguauuaagcaua

SEQ ID NO: 1229915 - RNA, 15 nt, Human
auuauguguguuuua

SEQ ID NO: 1229916 - RNA, 20 nt, Human
auuauguguguuuuaaaaug

SEQ ID NO: 1229917 - RNA, 21 nt, Human
auuauguguguuuuaaaauga

SEQ ID NO: 1229918 - RNA, 21 nt, Human
auuauguuaaaacugggacag

SEQ ID NO: 1229919 - RNA, 13 nt, Human
auuccugaacagg

SEQ ID NO: 1229920 - RNA, 20 nt, Human
auugagaaaaauauauacua

SEQ ID NO: 1229921 - RNA, 16 nt, Human
auugauccagaaagaa

SEQ ID NO: 1229922 - RNA, 17 nt, Human
auugauccagaaagaaa

SEQ ID NO: 1229923 - RNA, 20 nt, Human
cauuuguguugaagagguuu

SEQ ID NO: 1229924 - RNA, 18 nt, Human
cauuuuuugggcagcaau

SEQ ID NO: 1229925 - RNA, 19 nt, Human
cauuuuuugggcagcaauu

SEQ ID NO: 1229926 - RNA, 22 nt, Human
cauuuuuugggcagcaauuuaa

SEQ ID NO: 1229927 - RNA, 16 nt, Human
cauuuguguugaagag

SEQ ID NO: 1229928 - RNA, 20 nt, Human
cauuuguauaaaauaauuuu

SEQ ID NO: 1229929 - RNA, 19 nt, Human
cauuuguauaaaauaauuu

SEQ ID NO: 1229930 - RNA, 14 nt, Human
ccacagcugccucu

SEQ ID NO: 1229931 - RNA, 15 nt, Human
ccaccgcagaaggaa

SEQ ID NO: 1229932 - RNA, 16 nt, Human
ccaccgcagaaggaag

SEQ ID NO: 1229933 - RNA, 12 nt, Human
cauccuggaaua

SEQ ID NO: 1229934 - RNA, 12 nt, Human
caucuggaacca

SEQ ID NO: 1229935 - RNA, 17 nt, Human
caucuggaaccaucaga

SEQ ID NO: 1229936 - RNA, 19 nt, Human
caucuggaaccaucagaaa

SEQ ID NO: 1229937 - RNA, 19 nt, Human
cauuauauuuauuacugua

SEQ ID NO: 1229938 - RNA, 13 nt, Human
cauuauaaaaaga

SEQ ID NO: 1229939 - RNA, 14 nt, Human
caugauguuuagaa

SEQ ID NO: 1229940 - RNA, 20 nt, Human
caugcucuccaaaccacuuu

SEQ ID NO: 1229941 - RNA, 13 nt, Human
cagcauaauacuu

SEQ ID NO: 1229942 - RNA, 21 nt, Human
cagaguaauccaagcaaaugu

SEQ ID NO: 1229943 - RNA, 12 nt, Human
cagauccuggaa

SEQ ID NO: 1229944 - RNA, 13 nt, Human
cagauccuggaaa

SEQ ID NO: 1229945 - RNA, 23 nt, Human
caguaaagaacaucccuccuggg

SEQ ID NO: 1229946 - RNA, 19 nt, Human
cagucaccucauggaauug

SEQ ID NO: 1229947 - RNA, 16 nt, Human
cagucaccucauggaa

SEQ ID NO: 1229948 - RNA, 21 nt, Human
cagugggaggugagaccaccu

SEQ ID NO: 1229949 - RNA, 14 nt, Human
caguggggaaugaa

SEQ ID NO: 1229950 - RNA, 22 nt, Human
cagugggaggugagaccaccuc

SEQ ID NO: 1229951 - RNA, 20 nt, Human
cagucugacuguuuccauca

SEQ ID NO: 1229952 - RNA, 16 nt, Human
caggcacacaccacca

SEQ ID NO: 1229953 - RNA, 11 nt, Human
aaauguauacu

SEQ ID NO: 1229954 - RNA, 16 nt, Human
aaaucauucauuuucu

SEQ ID NO: 1229955 - RNA, 23 nt, Human
guauuguacaaaguauuaagcau

SEQ ID NO: 1229956 - RNA, 21 nt, Human
guauuguacaaaguauuaagc

SEQ ID NO: 1229957 - RNA, 22 nt, Human
guauuguacaaaguauuaagca

SEQ ID NO: 1229958 - RNA, 19 nt, Human
guauuguacaaaguauuaa

SEQ ID NO: 1229959 - RNA, 17 nt, Human
aaauuccaagugauuga

SEQ ID NO: 1229960 - RNA, 17 nt, Human
aaauuguauuacaaauc

SEQ ID NO: 1229961 - RNA, 12 nt, Human
aaauuacaacua

SEQ ID NO: 1229962 - RNA, 13 nt, Human
aaauuacaacuaa

SEQ ID NO: 1229963 - RNA, 16 nt, Human
aaauuaucuauagcua

SEQ ID NO: 1229964 - RNA, 17 nt, Human
aaauuaugugacauuuu

SEQ ID NO: 1229965 - RNA, 20 nt, Human
aaauuaugugacauuuuaca

SEQ ID NO: 1229966 - RNA, 22 nt, Human
aaauuaugugacauuuuacauu

SEQ ID NO: 1229967 - RNA, 23 nt, Human
aaauuaugugccagauuuaugca

SEQ ID NO: 1229968 - RNA, 14 nt, Human
gucaggaaagagaa

SEQ ID NO: 1229969 - RNA, 18 nt, Human
gucacauuccugaacagg

SEQ ID NO: 1229970 - RNA, 15 nt, Human
guccgugcuaaggac

SEQ ID NO: 1229971 - RNA, 16 nt, Human
guccgugcuaaggacu

SEQ ID NO: 1229972 - RNA, 17 nt, Human
guccgugcuaaggacuu

SEQ ID NO: 1229973 - RNA, 12 nt, Human
aacauauauaac

SEQ ID NO: 1229974 - RNA, 15 nt, Human
aacauaaaaaggaca

SEQ ID NO: 1229975 - RNA, 19 nt, Human
aacauaaaaaggacaucag

SEQ ID NO: 1229976 - RNA, 20 nt, Human
aacauaaaaaggacaucagc

SEQ ID NO: 1229977 - RNA, 22 nt, Human
aacauaaaaaggacaucagcaa

SEQ ID NO: 1229978 - RNA, 16 nt, Human
aacauauauaacaaug

SEQ ID NO: 1229979 - RNA, 14 nt, Human
aacauguuaaacca

SEQ ID NO: 1229980 - RNA, 15 nt, Human
aacauguuaaaccau

SEQ ID NO: 1229981 - RNA, 16 nt, Human
aacauguuaaaccaug

SEQ ID NO: 1229982 - RNA, 10 nt, Human
aacauuccau

SEQ ID NO: 1229983 - RNA, 13 nt, Human
aacauuccauccu

SEQ ID NO: 1229984 - RNA, 14 nt, Human
aacauuccauccuu

SEQ ID NO: 1229985 - RNA, 23 nt, Human
aacauuccauccuugagucaaaa

SEQ ID NO: 1229986 - RNA, 20 nt, Human
gucuauuuacggaacucaaa

SEQ ID NO: 1229987 - RNA, 12 nt, Human
aaauuugaauuu

SEQ ID NO: 1229988 - RNA, 15 nt, Human
aaauuugaauuuugu

SEQ ID NO: 1229989 - RNA, 22 nt, Human
aaauuugaauuuuguguuagag

SEQ ID NO: 1229990 - RNA, 12 nt, Human
aacacucaccau

SEQ ID NO: 1229991 - RNA, 21 nt, Human
aacacugggagaaaugaaaaa

SEQ ID NO: 1229992 - RNA, 15 nt, Human
gucccuaauaaagcu

SEQ ID NO: 1229993 - RNA, 12 nt, Human
gucccuaauaaa

SEQ ID NO: 1229994 - RNA, 12 nt, Human
gugacuuuggau

SEQ ID NO: 1229995 - RNA, 15 nt, Human
gugacuuuggauaau

SEQ ID NO: 1229996 - RNA, 18 nt, Human
gugacuuuggcugcaugc

SEQ ID NO: 1229997 - RNA, 20 nt, Human
gugacuuuggcugcaugcga

SEQ ID NO: 1229998 - RNA, 13 nt, Human
gugagaccaccuc

SEQ ID NO: 1229999 - RNA, 14 nt, Human
gugagaccaccucu

SEQ ID NO: 1230000 - RNA, 20 nt, Human
gugagaccaccucucaauau

SEQ ID NO: 1230001 - RNA, 21 nt, Human
aacuaggugcauauuuauaaa

SEQ ID NO: 1230002 - RNA, 12 nt, Human
aacuauggccug

SEQ ID NO: 1230003 - RNA, 15 nt, Human
aacuauugcauuuau

SEQ ID NO: 1230004 - RNA, 15 nt, Human
aacgucuuaaauauu

SEQ ID NO: 1230005 - RNA, 14 nt, Human
aacgucuuaaauau

SEQ ID NO: 1230006 - RNA, 12 nt, Human
aacgucuuaaau

SEQ ID NO: 1230007 - RNA, 13 nt, Human
aaccuuccaccca

SEQ ID NO: 1230008 - RNA, 15 nt, Human
aaccuuccacccagu

SEQ ID NO: 1230009 - RNA, 23 nt, Human
gucuugucucagauuuuauuaug

SEQ ID NO: 1230010 - RNA, 19 nt, Human
gugccagauuuaugcauau

SEQ ID NO: 1230011 - RNA, 11 nt, Human
aagaaacauuu

SEQ ID NO: 1230012 - RNA, 14 nt, Human
aagaaagaacggaa

SEQ ID NO: 1230013 - RNA, 22 nt, Human
aagaagcaccaaucaugaauua

SEQ ID NO: 1230014 - RNA, 18 nt, Human
gugcucaggagcccuggg

SEQ ID NO: 1230015 - RNA, 19 nt, Human
gugcucaggagcccuggga

SEQ ID NO: 1230016 - RNA, 16 nt, Human
gugcucauuucaggau

SEQ ID NO: 1230017 - RNA, 21 nt, Human
aacuucagcgguuuauauaag

SEQ ID NO: 1230018 - RNA, 18 nt, Human
aacuucagcgguuuauau

SEQ ID NO: 1230019 - RNA, 12 nt, Human
aacuugaaauuu

SEQ ID NO: 1230020 - RNA, 13 nt, Human
aacuugaaauuug

SEQ ID NO: 1230021 - RNA, 18 nt, Human
aacuugaaauuugaauuu

SEQ ID NO: 1230022 - RNA, 19 nt, Human
aacuugaaauuugaauuuu

SEQ ID NO: 1230023 - RNA, 12 nt, Human
aacuugaggaca

SEQ ID NO: 1230024 - RNA, 13 nt, Human
aacuugaggacac

SEQ ID NO: 1230025 - RNA, 14 nt, Human
aacuugaggacaca

SEQ ID NO: 1230026 - RNA, 15 nt, Human
aacuugaggacacau

SEQ ID NO: 1230027 - RNA, 16 nt, Human
aacuugaggacacaug

SEQ ID NO: 1230028 - RNA, 17 nt, Human
aacuugaggacacaugu

SEQ ID NO: 1230029 - RNA, 18 nt, Human
aacuugaggacacauguc

SEQ ID NO: 1230030 - RNA, 19 nt, Human
aacuugaggacacaugucc

SEQ ID NO: 1230031 - RNA, 20 nt, Human
aacuugaggacacaugucca

SEQ ID NO: 1230032 - RNA, 13 nt, Human
gugcaccugcccc

SEQ ID NO: 1230033 - RNA, 14 nt, Human
gugaucucagcuca

SEQ ID NO: 1230034 - RNA, 14 nt, Human
uaaaaaaaaaauug

SEQ ID NO: 1230035 - RNA, 18 nt, Human
uaaaaaaaaaauugggga

SEQ ID NO: 1230036 - RNA, 23 nt, Human
aagucagaucugccuaaggacuu

SEQ ID NO: 1230037 - RNA, 11 nt, Human
uaaaaaggaca

SEQ ID NO: 1230038 - RNA, 18 nt, Human
uaaaaaggacaucagcaa

SEQ ID NO: 1230039 - RNA, 19 nt, Human
uaaaaaggacaucagcaaa

SEQ ID NO: 1230040 - RNA, 21 nt, Human
uaaaaaggacaucagcaaaca

SEQ ID NO: 1230041 - RNA, 17 nt, Human
uaaaaaggcuaaaugga

SEQ ID NO: 1230042 - RNA, 18 nt, Human
uaaaauagucucuuuaaa

SEQ ID NO: 1230043 - RNA, 16 nt, Human
uaaaagaaacccugca

SEQ ID NO: 1230044 - RNA, 17 nt, Human
uaaaagaaacccugcac

SEQ ID NO: 1230045 - RNA, 22 nt, Human
uaaaauaauuuuuauauuugaa

SEQ ID NO: 1230046 - RNA, 19 nt, Human
aaguuauuuuuaauuuggu

SEQ ID NO: 1230047 - RNA, 21 nt, Human
aaguucaccagacucuauaaa

SEQ ID NO: 1230048 - RNA, 20 nt, Human
aaguuccuuggccaugcaga

SEQ ID NO: 1230049 - RNA, 16 nt, Human
aaguuuccaucaucua

SEQ ID NO: 1230050 - RNA, 12 nt, Human
aaguguguguuu

SEQ ID NO: 1230051 - RNA, 16 nt, Human
aaguguguguuuuuca

SEQ ID NO: 1230052 - RNA, 21 nt, Human
aaguguguguuuuucauaaag

SEQ ID NO: 1230053 - RNA, 12 nt, Human
aaggaaaaguuu

SEQ ID NO: 1230054 - RNA, 12 nt, Human
aaggaaagaaaa

SEQ ID NO: 1230055 - RNA, 12 nt, Human
guuguuuguuua

SEQ ID NO: 1230056 - RNA, 19 nt, Human
guuuaauauuaaagccaug

SEQ ID NO: 1230057 - RNA, 13 nt, Human
guuuaauauuaaa

SEQ ID NO: 1230058 - RNA, 14 nt, Human
guuuaauauuaaag

SEQ ID NO: 1230059 - RNA, 15 nt, Human
guuuaauauuaaagc

SEQ ID NO: 1230060 - RNA, 18 nt, Human
guuuaauauuaaagccau

SEQ ID NO: 1230061 - RNA, 13 nt, Human
guuuauuacagua

SEQ ID NO: 1230062 - RNA, 17 nt, Human
guuuauuacaguauaau

SEQ ID NO: 1230063 - RNA, 17 nt, Human
aagggcuguuauaaucu

SEQ ID NO: 1230064 - RNA, 15 nt, Human
aagggcuguuauaau

SEQ ID NO: 1230065 - RNA, 23 nt, Human
aaguaacugggauuacaggcaug

SEQ ID NO: 1230066 - RNA, 15 nt, Human
guuuuaaagcuucca

SEQ ID NO: 1230067 - RNA, 19 nt, Human
guuuggacaaaauggaaua

SEQ ID NO: 1230068 - RNA, 18 nt, Human
guuuggaccaaaaaccag

SEQ ID NO: 1230069 - RNA, 19 nt, Human
aaguacacaauaagcaaaa

SEQ ID NO: 1230070 - RNA, 16 nt, Human
aaguacacaauaagca

SEQ ID NO: 1230071 - RNA, 17 nt, Human
aaguacacaauaagcaa

SEQ ID NO: 1230072 - RNA, 18 nt, Human
aaguacacaauaagcaaa

SEQ ID NO: 1230073 - RNA, 21 nt, Human
aaguauguuagugcaaauugu

SEQ ID NO: 1230074 - RNA, 19 nt, Human
aaguauguuagugcaaauu

SEQ ID NO: 1230075 - RNA, 18 nt, Human
aaguauguuagugcaaau

SEQ ID NO: 1230076 - RNA, 18 nt, Human
aagucagaucugccuaag

SEQ ID NO: 1230077 - RNA, 21 nt, Human
aagucagaucugccuaaggac

SEQ ID NO: 1230078 - RNA, 22 nt, Human
aagucagaucugccuaaggacu

SEQ ID NO: 1230079 - RNA, 19 nt, Human
guugacuuauaguacauga

SEQ ID NO: 1230080 - RNA, 24 nt, Human
guugacuuauaguacaugauaaau

SEQ ID NO: 1230081 - RNA, 18 nt, Human
guucccuugaugaagaag

SEQ ID NO: 1230082 - RNA, 19 nt, Human
aagcuuuuaugugaaacau

SEQ ID NO: 1230083 - RNA, 21 nt, Human
aagcuuuuaugugaaacaugu

SEQ ID NO: 1230084 - RNA, 23 nt, Human
aagcuuguauuccuuuuucucuc

SEQ ID NO: 1230085 - RNA, 18 nt, Human
aagcuuaugcuuaaauuc

SEQ ID NO: 1230086 - RNA, 20 nt, Human
aagccauguuuauuacagua

SEQ ID NO: 1230087 - RNA, 21 nt, Human
aagccauguuuauuacaguau

SEQ ID NO: 1230088 - RNA, 22 nt, Human
aagccauguuuauuacaguaua

SEQ ID NO: 1230089 - RNA, 23 nt, Human
aagccauguuuauuacaguauaa

SEQ ID NO: 1230090 - RNA, 22 nt, Human
aagccauucuccugccucagcc

SEQ ID NO: 1230091 - RNA, 18 nt, Human
guuagagauuuuuuuguu

SEQ ID NO: 1230092 - RNA, 19 nt, Human
guuauuauauuuacaaaug

SEQ ID NO: 1230093 - RNA, 20 nt, Human
guuauuauauuuacaaaugg

SEQ ID NO: 1230094 - RNA, 15 nt, Human
aagccuguuuaagag

SEQ ID NO: 1230095 - RNA, 18 nt, Human
aagccuguuuaagagaca

SEQ ID NO: 1230096 - RNA, 21 nt, Human
aagccuuggggcugaugcagu

SEQ ID NO: 1230097 - RNA, 23 nt, Human
aagcaugcacaaauucugucucu

SEQ ID NO: 1230098 - RNA, 23 nt, Human
aagcauauauuuuuauauuuacu

SEQ ID NO: 1230099 - RNA, 15 nt, Human
aagccauguuuauua

SEQ ID NO: 1230100 - RNA, 16 nt, Human
aagccauguuuauuac

SEQ ID NO: 1230101 - RNA, 17 nt, Human
aagccauguuuauuaca

SEQ ID NO: 1230102 - RNA, 16 nt, Human
aagcacuaaacaaaga

SEQ ID NO: 1230103 - RNA, 12 nt, Human
guguuugaagca

SEQ ID NO: 1230104 - RNA, 18 nt, Human
guguaaauacaauuuugu

SEQ ID NO: 1230105 - RNA, 21 nt, Human
guguaaauacaauuuuguuuc

SEQ ID NO: 1230106 - RNA, 22 nt, Human
guguaaauacaauuuuguuucu

SEQ ID NO: 1230107 - RNA, 15 nt, Human
uagaugcaguucuga

SEQ ID NO: 1230108 - RNA, 16 nt, Human
uagaugcaguucugaa

SEQ ID NO: 1230109 - RNA, 18 nt, Human
uagcaugucgucaaagcu

SEQ ID NO: 1230110 - RNA, 14 nt, Human
uagccaagugcagg

SEQ ID NO: 1230111 - RNA, 18 nt, Human
acaaaaggauaaugaaua

SEQ ID NO: 1230112 - RNA, 21 nt, Human
aauuguguuuauaauuuuaaa

SEQ ID NO: 1230113 - RNA, 16 nt, Human
aauuguuacaaauugu

SEQ ID NO: 1230114 - RNA, 20 nt, Human
uagauaucaugcaaauuuca

SEQ ID NO: 1230115 - RNA, 23 nt, Human
uagagauuuuuuuguuguuuguu

SEQ ID NO: 1230116 - RNA, 15 nt, Human
uagcuaaguacacaa

SEQ ID NO: 1230117 - RNA, 22 nt, Human
uagcuaaguacacaauaagcaa

SEQ ID NO: 1230118 - RNA, 21 nt, Human
uagcuagacuggugacugauu

SEQ ID NO: 1230119 - RNA, 22 nt, Human
uagcuagacuggugacugauuc

SEQ ID NO: 1230120 - RNA, 23 nt, Human
acaauacaucccuuaccugggaa

SEQ ID NO: 1230121 - RNA, 13 nt, Human
acaauaaauagac

SEQ ID NO: 1230122 - RNA, 15 nt, Human
acaauaagcaaaaac

SEQ ID NO: 1230123 - RNA, 16 nt, Human
acaauaagcaaaaaca

SEQ ID NO: 1230124 - RNA, 14 nt, Human
acaagacugcacau

SEQ ID NO: 1230125 - RNA, 13 nt, Human
acaagacugcaca

SEQ ID NO: 1230126 - RNA, 18 nt, Human
uaggaaauauuuauuuua

SEQ ID NO: 1230127 - RNA, 19 nt, Human
uaggaaauauuuauuuuaa

SEQ ID NO: 1230128 - RNA, 23 nt, Human
uaguguuggagaagaacugaaau

SEQ ID NO: 1230129 - RNA, 22 nt, Human
uagugaaacucguuaauuugua

SEQ ID NO: 1230130 - RNA, 22 nt, Human
acaaugcuguauuuuaaaagaa

SEQ ID NO: 1230131 - RNA, 19 nt, Human
acaauggauaggcacagga

SEQ ID NO: 1230132 - RNA, 22 nt, Human
acaauguccuaacugaaagaug

SEQ ID NO: 1230133 - RNA, 17 nt, Human
acacaccaccacgccug

SEQ ID NO: 1230134 - RNA, 20 nt, Human
acacaccaccacgccuggcu

SEQ ID NO: 1230135 - RNA, 19 nt, Human
uauaaaaauaaaaaacacu

SEQ ID NO: 1230136 - RNA, 20 nt, Human
uauaaaagccuguuuaagag

SEQ ID NO: 1230137 - RNA, 20 nt, Human
uauaaaaauaaaaaacacug

SEQ ID NO: 1230138 - RNA, 22 nt, Human
uauaaaagggacugagaaauuu

SEQ ID NO: 1230139 - RNA, 17 nt, Human
acaccauuaugugcgcu

SEQ ID NO: 1230140 - RNA, 21 nt, Human
acaccauuaugugcgcugaua

SEQ ID NO: 1230141 - RNA, 16 nt, Human
acacccucacacuggg

SEQ ID NO: 1230142 - RNA, 13 nt, Human
acacccucacacu

SEQ ID NO: 1230143 - RNA, 14 nt, Human
acacuaagagagaa

SEQ ID NO: 1230144 - RNA, 13 nt, Human
acacuaagagaga

SEQ ID NO: 1230145 - RNA, 15 nt, Human
uauaaguguguguuu

SEQ ID NO: 1230146 - RNA, 14 nt, Human
uauuacuguaagaa

SEQ ID NO: 1230147 - RNA, 15 nt, Human
uauuagaauaccaca

SEQ ID NO: 1230148 - RNA, 23 nt, Human
uauucaaaaauuaucuauagcua

SEQ ID NO: 1230149 - RNA, 14 nt, Human
uauucauaauuauu

SEQ ID NO: 1230150 - RNA, 12 nt, Human
uauucaaaguug

SEQ ID NO: 1230151 - RNA, 13 nt, Human
uauucaaaguugc

SEQ ID NO: 1230152 - RNA, 16 nt, Human
uauucaaaguugccua

SEQ ID NO: 1230153 - RNA, 12 nt, Human
uauucaauaaag

SEQ ID NO: 1230154 - RNA, 13 nt, Human
uauucaauaaagc

SEQ ID NO: 1230155 - RNA, 14 nt, Human
uauucaauaaagcu

SEQ ID NO: 1230156 - RNA, 16 nt, Human
uauucaauucuuuuaa

SEQ ID NO: 1230157 - RNA, 21 nt, Human
uauucagcucauggacuucug

SEQ ID NO: 1230158 - RNA, 18 nt, Human
acagucaccucauggaau

SEQ ID NO: 1230159 - RNA, 17 nt, Human
acagucaccucauggaa

SEQ ID NO: 1230160 - RNA, 16 nt, Human
acagucaccucaugga

SEQ ID NO: 1230161 - RNA, 15 nt, Human
acaguauaauuaaca

SEQ ID NO: 1230162 - RNA, 20 nt, Human
acaguauaauuaacauguua

SEQ ID NO: 1230163 - RNA, 13 nt, Human
acaguauaauuaa

SEQ ID NO: 1230164 - RNA, 16 nt, Human
acaggcaugugucacc

SEQ ID NO: 1230165 - RNA, 19 nt, Human
acaggcaugugucaccaug

SEQ ID NO: 1230166 - RNA, 14 nt, Human
uaugugaaacaugu

SEQ ID NO: 1230167 - RNA, 21 nt, Human
uaugugacauuuuacauuaaa

SEQ ID NO: 1230168 - RNA, 19 nt, Human
uaugugacauuuuacauua

SEQ ID NO: 1230169 - RNA, 22 nt, Human
uaugugaacaguuguguuugaa

SEQ ID NO: 1230170 - RNA, 12 nt, Human
uaugugaacagu

SEQ ID NO: 1230171 - RNA, 17 nt, Human
uaugugaaacauguuuc

SEQ ID NO: 1230172 - RNA, 14 nt, Human
uaugugacauuuua

SEQ ID NO: 1230173 - RNA, 18 nt, Human
uaugugacauuuuacauu

SEQ ID NO: 1230174 - RNA, 20 nt, Human
uauguguaugcacaguaaaa

SEQ ID NO: 1230175 - RNA, 12 nt, Human
uaugugugaagu

SEQ ID NO: 1230176 - RNA, 14 nt, Human
uaugugugaaguga

SEQ ID NO: 1230177 - RNA, 12 nt, Human
uauauuacaaug

SEQ ID NO: 1230178 - RNA, 13 nt, Human
uauauuacaauga

SEQ ID NO: 1230179 - RNA, 17 nt, Human
uauauuacaaugaucac

SEQ ID NO: 1230180 - RNA, 15 nt, Human
uauauuguuugcuaa

SEQ ID NO: 1230181 - RNA, 20 nt, Human
uauauuuacuaaaauggacu

SEQ ID NO: 1230182 - RNA, 21 nt, Human
uauauuuacuaaaauggacug

SEQ ID NO: 1230183 - RNA, 16 nt, Human
uauauuuaguaucuuu

SEQ ID NO: 1230184 - RNA, 17 nt, Human
uauaaguguguguuuuu

SEQ ID NO: 1230185 - RNA, 23 nt, Human
uauaaguguguguuuuucauaaa

SEQ ID NO: 1230186 - RNA, 23 nt, Human
uaucuauauuuuacauaaauuua

SEQ ID NO: 1230187 - RNA, 11 nt, Human
uaucuuugcca

SEQ ID NO: 1230188 - RNA, 14 nt, Human
uaucuuugccaccc

SEQ ID NO: 1230189 - RNA, 16 nt, Human
uaucuuugccacccuc

SEQ ID NO: 1230190 - RNA, 22 nt, Human
uaucuuugccacccucaugcug

SEQ ID NO: 1230191 - RNA, 21 nt, Human
uaugauuaaguaaugauaacu

SEQ ID NO: 1230192 - RNA, 20 nt, Human
uaugauuaaguaaugauaac

SEQ ID NO: 1230193 - RNA, 16 nt, Human
uaugauuaaguaauga

SEQ ID NO: 1230194 - RNA, 16 nt, Human
uaugaacuugaggaca

SEQ ID NO: 1230195 - RNA, 18 nt, Human
uaugaacuugaggacaca

SEQ ID NO: 1230196 - RNA, 19 nt, Human
uaugaacuugaggacacau

SEQ ID NO: 1230197 - RNA, 16 nt, Human
uaugccuuguuucaua

SEQ ID NO: 1230198 - RNA, 19 nt, Human
uaugccccauucaacaucu

SEQ ID NO: 1230199 - RNA, 16 nt, Human
acagccucuuagaugc

SEQ ID NO: 1230200 - RNA, 12 nt, Human
uacuauaguacc

SEQ ID NO: 1230201 - RNA, 13 nt, Human
uacuauaguacca

SEQ ID NO: 1230202 - RNA, 16 nt, Human
uacuauaguaccagua

SEQ ID NO: 1230203 - RNA, 14 nt, Human
uacuggauuguacu

SEQ ID NO: 1230204 - RNA, 19 nt, Human
uacuguaaggcaaucaugg

SEQ ID NO: 1230205 - RNA, 14 nt, Human
uacuguaagaaaau

SEQ ID NO: 1230206 - RNA, 18 nt, Human
uacuguaaggcaaucaug

SEQ ID NO: 1230207 - RNA, 19 nt, Human
aauugaugggauuugguca

SEQ ID NO: 1230208 - RNA, 18 nt, Human
aauuccaagugauugaaa

SEQ ID NO: 1230209 - RNA, 16 nt, Human
aauuauuauuuggccc

SEQ ID NO: 1230210 - RNA, 14 nt, Human
aauuacaacuaagu

SEQ ID NO: 1230211 - RNA, 16 nt, Human
aauuacaacuaaguga

SEQ ID NO: 1230212 - RNA, 18 nt, Human
aauuacaacggagucaaa

SEQ ID NO: 1230213 - RNA, 14 nt, Human
aauuacgugcucug

SEQ ID NO: 1230214 - RNA, 16 nt, Human
aaugcuguauuuuaaa

SEQ ID NO: 1230215 - RNA, 20 nt, Human
aaugcuguauuuuaaaagaa

SEQ ID NO: 1230216 - RNA, 16 nt, Human
aaugcuucaucccuuu

SEQ ID NO: 1230217 - RNA, 16 nt, Human
aaugccaucaauaaaa

SEQ ID NO: 1230218 - RNA, 21 nt, Human
aaugccaucaauaaaaaauua

SEQ ID NO: 1230219 - RNA, 23 nt, Human
aaugccaucaauaaaaaauuaug

SEQ ID NO: 1230220 - RNA, 16 nt, Human
aauggacuguggugac

SEQ ID NO: 1230221 - RNA, 18 nt, Human
uacacuaagagagaauga

SEQ ID NO: 1230222 - RNA, 14 nt, Human
uacacuaagagaga

SEQ ID NO: 1230223 - RNA, 20 nt, Human
aauuaacauguuaaaccaug

SEQ ID NO: 1230224 - RNA, 15 nt, Human
aauuaagagagucua

SEQ ID NO: 1230225 - RNA, 21 nt, Human
aauuaagaaaggauaaaguug

SEQ ID NO: 1230226 - RNA, 17 nt, Human
aauuaauuccuucagca

SEQ ID NO: 1230227 - RNA, 20 nt, Human
uacaucccuuaccugggaaa

SEQ ID NO: 1230228 - RNA, 22 nt, Human
aauguauuacaguggggaauga

SEQ ID NO: 1230229 - RNA, 19 nt, Human
aauguauacuauaguacca

SEQ ID NO: 1230230 - RNA, 17 nt, Human
aaucaugaauuaguuuu

SEQ ID NO: 1230231 - RNA, 12 nt, Human
aauccgcccauc

SEQ ID NO: 1230232 - RNA, 19 nt, Human
aaucuuauaauuuaaaaua

SEQ ID NO: 1230233 - RNA, 22 nt, Human
aaucugugaacuugaaauuuga

SEQ ID NO: 1230234 - RNA, 20 nt, Human
aaucugugaacuugaaauuu

SEQ ID NO: 1230235 - RNA, 21 nt, Human
aaucugugaacuugaaauuug

SEQ ID NO: 1230236 - RNA, 19 nt, Human
uaaguaaugauaacuggaa

SEQ ID NO: 1230237 - RNA, 16 nt, Human
uaaggaaaaguuuaau

SEQ ID NO: 1230238 - RNA, 16 nt, Human
uaagcuuguauuccuu

SEQ ID NO: 1230239 - RNA, 15 nt, Human
uaagcuuaugcuuaa

SEQ ID NO: 1230240 - RNA, 15 nt, Human
aaucaugaauuaguu

SEQ ID NO: 1230241 - RNA, 12 nt, Human
aaucaugaauua

SEQ ID NO: 1230242 - RNA, 12 nt, Human
uaauaaacacuc

SEQ ID NO: 1230243 - RNA, 18 nt, Human
uaauaaacacucuugaaa

SEQ ID NO: 1230244 - RNA, 12 nt, Human
uaauccaguaaa

SEQ ID NO: 1230245 - RNA, 15 nt, Human
aaucuuuaauuuuac

SEQ ID NO: 1230246 - RNA, 16 nt, Human
aaucuuuaauuuuaca

SEQ ID NO: 1230247 - RNA, 23 nt, Human
uaagcaaaaacaaaaagaaaaga

SEQ ID NO: 1230248 - RNA, 16 nt, Human
uaagcuggagugcagu

SEQ ID NO: 1230249 - RNA, 21 nt, Human
aaucaggguuaguauugucca

SEQ ID NO: 1230250 - RNA, 22 nt, Human
aaucaggguuaguauuguccag

SEQ ID NO: 1230251 - RNA, 24 nt, Human
aauaugccccauucaacaucuagu

SEQ ID NO: 1230252 - RNA, 21 nt, Human
aauaugccccauucaacaucu

SEQ ID NO: 1230253 - RNA, 14 nt, Human
aauauuucagauaa

SEQ ID NO: 1230254 - RNA, 19 nt, Human
aauauuuauuuuaauaaug

SEQ ID NO: 1230255 - RNA, 18 nt, Human
aauauuuauuuuaauaau

SEQ ID NO: 1230256 - RNA, 12 nt, Human
aauauuuagugu

SEQ ID NO: 1230257 - RNA, 14 nt, Human
aauauauuuuaaga

SEQ ID NO: 1230258 - RNA, 15 nt, Human
aauauauuuuaagac

SEQ ID NO: 1230259 - RNA, 19 nt, Human
aauagucaaauugugugaa

SEQ ID NO: 1230260 - RNA, 16 nt, Human
aauagucaaauugugu

SEQ ID NO: 1230261 - RNA, 14 nt, Human
uaacaugaauauuu

SEQ ID NO: 1230262 - RNA, 12 nt, Human
uaacauaaaucu

SEQ ID NO: 1230263 - RNA, 14 nt, Human
uaacauaaaucugu

SEQ ID NO: 1230264 - RNA, 22 nt, Human
aauaucacuugucaauaaaauc

SEQ ID NO: 1230265 - RNA, 18 nt, Human
aauauauuuuaagacgaa

SEQ ID NO: 1230266 - RNA, 20 nt, Human
uaacgauaaaagacagugaa

SEQ ID NO: 1230267 - RNA, 15 nt, Human
ucauauuuucaugcu

SEQ ID NO: 1230268 - RNA, 12 nt, Human
accgcagaagga

SEQ ID NO: 1230269 - RNA, 13 nt, Human
accgcagaaggaa

SEQ ID NO: 1230270 - RNA, 14 nt, Human
accgcagaaggaag

SEQ ID NO: 1230271 - RNA, 17 nt, Human
ucaguuuuugugaaaag

SEQ ID NO: 1230272 - RNA, 15 nt, Human
ucaguuuuugugaaa

SEQ ID NO: 1230273 - RNA, 13 nt, Human
ucaucuaggauuu

SEQ ID NO: 1230274 - RNA, 17 nt, Human
ucaugaaagauucaaug

SEQ ID NO: 1230275 - RNA, 16 nt, Human
ucaugaaagauucaau

SEQ ID NO: 1230276 - RNA, 14 nt, Human
ucaucuaggauuuu

SEQ ID NO: 1230277 - RNA, 14 nt, Human
ucaugcaaacuuua

SEQ ID NO: 1230278 - RNA, 14 nt, Human
ucaugcauggaaau

SEQ ID NO: 1230279 - RNA, 17 nt, Human
ucaugugaaaucauuca

SEQ ID NO: 1230280 - RNA, 23 nt, Human
ucaugcaaacuuuauuuuguguu

SEQ ID NO: 1230281 - RNA, 17 nt, Human
accucccucaaccucau

SEQ ID NO: 1230282 - RNA, 15 nt, Human
accgcagaaggaagg

SEQ ID NO: 1230283 - RNA, 16 nt, Human
accuagggugauauua

SEQ ID NO: 1230284 - RNA, 16 nt, Human
accuauuuccagaaau

SEQ ID NO: 1230285 - RNA, 17 nt, Human
accuauuuccagaaaua

SEQ ID NO: 1230286 - RNA, 19 nt, Human
accuauuuccagaaauaca

SEQ ID NO: 1230287 - RNA, 15 nt, Human
acccucguggacacc

SEQ ID NO: 1230288 - RNA, 17 nt, Human
acccucguggacaccug

SEQ ID NO: 1230289 - RNA, 18 nt, Human
acccucguggacaccugc

SEQ ID NO: 1230290 - RNA, 19 nt, Human
acccucguggacaccugcc

SEQ ID NO: 1230291 - RNA, 20 nt, Human
acccucguggacaccugccc

SEQ ID NO: 1230292 - RNA, 22 nt, Human
acccucguggacaccugcccug

SEQ ID NO: 1230293 - RNA, 23 nt, Human
acccucguggacaccugcccugc

SEQ ID NO: 1230294 - RNA, 16 nt, Human
ucagauuucugaggaa

SEQ ID NO: 1230295 - RNA, 15 nt, Human
ucagcaaacaggauc

SEQ ID NO: 1230296 - RNA, 23 nt, Human
ucagauuuuauuauguaaauccc

SEQ ID NO: 1230297 - RNA, 19 nt, Human
ucagcaaaaauauuuuaug

SEQ ID NO: 1230298 - RNA, 20 nt, Human
ucagcaaaaauauuuuauga

SEQ ID NO: 1230299 - RNA, 15 nt, Human
ucaauauucaauaaa

SEQ ID NO: 1230300 - RNA, 16 nt, Human
ucaauauucaauaaag

SEQ ID NO: 1230301 - RNA, 17 nt, Human
ucaauauucaauaaagc

SEQ ID NO: 1230302 - RNA, 23 nt, Human
ucaauauuucagauaaucacaau

SEQ ID NO: 1230303 - RNA, 19 nt, Human
ucaauauuucagauaauca

SEQ ID NO: 1230304 - RNA, 15 nt, Human
ucaauauuucagaua

SEQ ID NO: 1230305 - RNA, 20 nt, Human
acaugaauauuuaguguuca

SEQ ID NO: 1230306 - RNA, 13 nt, Human
acaugcuucccuu

SEQ ID NO: 1230307 - RNA, 16 nt, Human
acaugcuucccuuucc

SEQ ID NO: 1230308 - RNA, 18 nt, Human
acaugcuucccuuuccug

SEQ ID NO: 1230309 - RNA, 19 nt, Human
acaugcuucccuuuccuga

SEQ ID NO: 1230310 - RNA, 14 nt, Human
acaugggacauuug

SEQ ID NO: 1230311 - RNA, 11 nt, Human
acaugggacau

SEQ ID NO: 1230312 - RNA, 21 nt, Human
acaugggacauuugcucaugg

SEQ ID NO: 1230313 - RNA, 20 nt, Human
acaugggacauuugcucaug

SEQ ID NO: 1230314 - RNA, 15 nt, Human
acaugggacauuugc

SEQ ID NO: 1230315 - RNA, 15 nt, Human
acauuccugaacagg

SEQ ID NO: 1230316 - RNA, 14 nt, Human
acauuccugaacag

SEQ ID NO: 1230317 - RNA, 18 nt, Human
ucaaauugugugaaaggu

SEQ ID NO: 1230318 - RNA, 20 nt, Human
accaguaggggcuuauaaua

SEQ ID NO: 1230319 - RNA, 14 nt, Human
accaguauuguaca

SEQ ID NO: 1230320 - RNA, 15 nt, Human
accaguauuguacaa

SEQ ID NO: 1230321 - RNA, 20 nt, Human
accaguauuguacaaaguau

SEQ ID NO: 1230322 - RNA, 22 nt, Human
accaguauuguacaaaguauua

SEQ ID NO: 1230323 - RNA, 14 nt, Human
accagucugacugu

SEQ ID NO: 1230324 - RNA, 23 nt, Human
accaguauuguacaaaguauuaa

SEQ ID NO: 1230325 - RNA, 14 nt, Human
ucaccucauggaau

SEQ ID NO: 1230326 - RNA, 13 nt, Human
ucaccucauggaa

SEQ ID NO: 1230327 - RNA, 12 nt, Human
ucaccucaugga

SEQ ID NO: 1230328 - RNA, 19 nt, Human
ucaccugucuugccuuuuu

SEQ ID NO: 1230329 - RNA, 20 nt, Human
ucaccugucuugccuuuuuc

SEQ ID NO: 1230330 - RNA, 21 nt, Human
ucacguuuggugcuucucaga

SEQ ID NO: 1230331 - RNA, 17 nt, Human
ucacguuuggugcuucu

SEQ ID NO: 1230332 - RNA, 24 nt, Human
accacauuggagauguuuaguaau

SEQ ID NO: 1230333 - RNA, 16 nt, Human
accaccacgccuggcu

SEQ ID NO: 1230334 - RNA, 13 nt, Human
ucaauuuuaacaa

SEQ ID NO: 1230335 - RNA, 16 nt, Human
ucaauucuugccaaau

SEQ ID NO: 1230336 - RNA, 11 nt, Human
ucacacuggga

SEQ ID NO: 1230337 - RNA, 22 nt, Human
acuauauuguuugcuaagcauu

SEQ ID NO: 1230338 - RNA, 22 nt, Human
acuauaggcaugcgccaccaug

SEQ ID NO: 1230339 - RNA, 20 nt, Human
acuauaggcaugcgccacca

SEQ ID NO: 1230340 - RNA, 15 nt, Human
acuaucucauuucca

SEQ ID NO: 1230341 - RNA, 17 nt, Human
acuaucucauuuccaag

SEQ ID NO: 1230342 - RNA, 16 nt, Human
acuaucucauuuccaa

SEQ ID NO: 1230343 - RNA, 12 nt, Human
acucaauuuuaa

SEQ ID NO: 1230344 - RNA, 15 nt, Human
acucaauuuuaacaa

SEQ ID NO: 1230345 - RNA, 15 nt, Human
acuaauuuuaaaaug

SEQ ID NO: 1230346 - RNA, 13 nt, Human
acuacacccagca

SEQ ID NO: 1230347 - RNA, 14 nt, Human
acuacacccagcaa

SEQ ID NO: 1230348 - RNA, 16 nt, Human
acuacacccagcaaua

SEQ ID NO: 1230349 - RNA, 15 nt, Human
acuacacccagcaau

SEQ ID NO: 1230350 - RNA, 19 nt, Human
acggugaauggcuuuguau

SEQ ID NO: 1230351 - RNA, 20 nt, Human
acggugaauggcuuuguaua

SEQ ID NO: 1230352 - RNA, 16 nt, Human
acggugaauggcuuug

SEQ ID NO: 1230353 - RNA, 21 nt, Human
acggagucucacucugucacc

SEQ ID NO: 1230354 - RNA, 23 nt, Human
acgcgccucgccggaucugaggg

SEQ ID NO: 1230355 - RNA, 13 nt, Human
acggaugauuucu

SEQ ID NO: 1230356 - RNA, 14 nt, Human
acggaugauuucua

SEQ ID NO: 1230357 - RNA, 23 nt, Human
uccagugggaggugagaccaccu

SEQ ID NO: 1230358 - RNA, 16 nt, Human
uccacucguguguuuc

SEQ ID NO: 1230359 - RNA, 18 nt, Human
uccacucguguguuucua

SEQ ID NO: 1230360 - RNA, 14 nt, Human
uccacucguguguu

SEQ ID NO: 1230361 - RNA, 15 nt, Human
uccacucguguguuu

SEQ ID NO: 1230362 - RNA, 12 nt, Human
ucauuccuccag

SEQ ID NO: 1230363 - RNA, 13 nt, Human
ucauuccuccagg

SEQ ID NO: 1230364 - RNA, 14 nt, Human
ucauuccuccaggu

SEQ ID NO: 1230365 - RNA, 17 nt, Human
accuuugacaaagguaa

SEQ ID NO: 1230366 - RNA, 18 nt, Human
accuuugacaaagguaaa

SEQ ID NO: 1230367 - RNA, 22 nt, Human
accuuuguuugcaucugaaaau

SEQ ID NO: 1230368 - RNA, 14 nt, Human
uccagccucagcuc

SEQ ID NO: 1230369 - RNA, 20 nt, Human
uccagccugcugccugcuuu

SEQ ID NO: 1230370 - RNA, 19 nt, Human
acucuuauaucuauauuuu

SEQ ID NO: 1230371 - RNA, 22 nt, Human
acucuuauaucuauauuuuaca

SEQ ID NO: 1230372 - RNA, 18 nt, Human
acucuuauaucuauauuu

SEQ ID NO: 1230373 - RNA, 17 nt, Human
acucuuauaucuauauu

SEQ ID NO: 1230374 - RNA, 16 nt, Human
acucuuauaucuauau

SEQ ID NO: 1230375 - RNA, 21 nt, Human
acucuuaagaagacugcauua

SEQ ID NO: 1230376 - RNA, 16 nt, Human
ucccuuuuuuuaagua

SEQ ID NO: 1230377 - RNA, 21 nt, Human
ucccuuuuuuuaaguaaggaa

SEQ ID NO: 1230378 - RNA, 13 nt, Human
ucccuuuuuuuaa

SEQ ID NO: 1230379 - RNA, 15 nt, Human
acucuuguuuccuua

SEQ ID NO: 1230380 - RNA, 16 nt, Human
acugaacuuugcugag

SEQ ID NO: 1230381 - RNA, 19 nt, Human
acugaacuuugcugagccu

SEQ ID NO: 1230382 - RNA, 12 nt, Human
acugagaaauuu

SEQ ID NO: 1230383 - RNA, 17 nt, Human
acugagaaauuuauaaa

SEQ ID NO: 1230384 - RNA, 21 nt, Human
acugagaaauuuauaaacuuu

SEQ ID NO: 1230385 - RNA, 20 nt, Human
acugacucuuaagaagacug

SEQ ID NO: 1230386 - RNA, 18 nt, Human
acugacucuuaagaagac

SEQ ID NO: 1230387 - RNA, 17 nt, Human
acugacucuuaagaaga

SEQ ID NO: 1230388 - RNA, 16 nt, Human
acugacucuuaagaag

SEQ ID NO: 1230389 - RNA, 15 nt, Human
acugacucuuaagaa

SEQ ID NO: 1230390 - RNA, 14 nt, Human
acugacucuuaaga

SEQ ID NO: 1230391 - RNA, 13 nt, Human
acugacucuuaag

SEQ ID NO: 1230392 - RNA, 12 nt, Human
acugaagaagca

SEQ ID NO: 1230393 - RNA, 21 nt, Human
acugaacuuugcugagccugu

SEQ ID NO: 1230394 - RNA, 15 nt, Human
uccugggagcuuuug

SEQ ID NO: 1230395 - RNA, 16 nt, Human
uccuggaaaucagggu

SEQ ID NO: 1230396 - RNA, 22 nt, Human
uccuggaauaucuccgucaacu

SEQ ID NO: 1230397 - RNA, 23 nt, Human
uccuggaagugcuaauuuugaaa

SEQ ID NO: 1230398 - RNA, 15 nt, Human
ucucauuuccaagca

SEQ ID NO: 1230399 - RNA, 22 nt, Human
ucucagauuuuauuauguaaau

SEQ ID NO: 1230400 - RNA, 23 nt, Human
ucucagauuuuauuauguaaauc

SEQ ID NO: 1230401 - RNA, 23 nt, Human
acuugcaaaaagggucaguaugg

SEQ ID NO: 1230402 - RNA, 17 nt, Human
acuugcaaaaaggguca

SEQ ID NO: 1230403 - RNA, 16 nt, Human
acuugcucuugaugcc

SEQ ID NO: 1230404 - RNA, 17 nt, Human
acuugcucuugaugccu

SEQ ID NO: 1230405 - RNA, 18 nt, Human
acuugcucuugaugccug

SEQ ID NO: 1230406 - RNA, 20 nt, Human
acuugcucuugaugccuggc

SEQ ID NO: 1230407 - RNA, 16 nt, Human
acuugucaauaaaauc

SEQ ID NO: 1230408 - RNA, 13 nt, Human
acuuguguaaaua

SEQ ID NO: 1230409 - RNA, 15 nt, Human
acuugucaauaaaau

SEQ ID NO: 1230410 - RNA, 18 nt, Human
acuuguauuauguguguu

SEQ ID NO: 1230411 - RNA, 19 nt, Human
acuuguauuauguguguuu

SEQ ID NO: 1230412 - RNA, 14 nt, Human
acuugcuuuuaaaa

SEQ ID NO: 1230413 - RNA, 12 nt, Human
acuuuggauaau

SEQ ID NO: 1230414 - RNA, 17 nt, Human
acuuuggauaauaagga

SEQ ID NO: 1230415 - RNA, 19 nt, Human
acuuuggauaauaaggaaa

SEQ ID NO: 1230416 - RNA, 13 nt, Human
acuuuggcugcau

SEQ ID NO: 1230417 - RNA, 19 nt, Human
acuuuguauaaaagggacu

SEQ ID NO: 1230418 - RNA, 22 nt, Human
acuuuuuauggcacuaguauuu

SEQ ID NO: 1230419 - RNA, 13 nt, Human
acuuaaauuuuag

SEQ ID NO: 1230420 - RNA, 14 nt, Human
ucuauaccaauaaa

SEQ ID NO: 1230421 - RNA, 15 nt, Human
ucuauaccaauaaag

SEQ ID NO: 1230422 - RNA, 16 nt, Human
ucuauaccaauaaagu

SEQ ID NO: 1230423 - RNA, 17 nt, Human
ucuauaccaauaaagug

SEQ ID NO: 1230424 - RNA, 18 nt, Human
ucuauaccaauaaaguga

SEQ ID NO: 1230425 - RNA, 15 nt, Human
ucuauacccacccag

SEQ ID NO: 1230426 - RNA, 17 nt, Human
ucuauacccacccagaa

SEQ ID NO: 1230427 - RNA, 16 nt, Human
ucuauacccacccaga

SEQ ID NO: 1230428 - RNA, 16 nt, Human
ucuaggaaauauuuau

SEQ ID NO: 1230429 - RNA, 17 nt, Human
ucuaggaaauauuuauu

SEQ ID NO: 1230430 - RNA, 10 nt, Human
ucugaauuau

SEQ ID NO: 1230431 - RNA, 15 nt, Human
ucugaauuauuuucu

SEQ ID NO: 1230432 - RNA, 11 nt, Human
ucugauccagu

SEQ ID NO: 1230433 - RNA, 14 nt, Human
ucugauccaguuuu

SEQ ID NO: 1230434 - RNA, 21 nt, Human
ucugauccaguuuuguuugga

SEQ ID NO: 1230435 - RNA, 21 nt, Human
ucugacuguuuccaucaaggg

SEQ ID NO: 1230436 - RNA, 11 nt, Human
ucugcaggucc

SEQ ID NO: 1230437 - RNA, 12 nt, Human
ucugcagguccc

SEQ ID NO: 1230438 - RNA, 13 nt, Human
ucugcaggucccu

SEQ ID NO: 1230439 - RNA, 14 nt, Human
ucugcaggucccua

SEQ ID NO: 1230440 - RNA, 14 nt, Human
agaagaacugaaau

SEQ ID NO: 1230441 - RNA, 13 nt, Human
agaagaacugaaa

SEQ ID NO: 1230442 - RNA, 18 nt, Human
agaagaugguaccaccag

SEQ ID NO: 1230443 - RNA, 12 nt, Human
agaagacaaaau

SEQ ID NO: 1230444 - RNA, 15 nt, Human
agacacacaugaagu

SEQ ID NO: 1230445 - RNA, 12 nt, Human
agacacacauga

SEQ ID NO: 1230446 - RNA, 22 nt, Human
agaauuugauaugugaacaguu

SEQ ID NO: 1230447 - RNA, 14 nt, Human
agaauucuguauag

SEQ ID NO: 1230448 - RNA, 18 nt, Human
ucugugaacuugaaauuu

SEQ ID NO: 1230449 - RNA, 14 nt, Human
ucugugaacuugaa

SEQ ID NO: 1230450 - RNA, 17 nt, Human
ucugugaacuugaaauu

SEQ ID NO: 1230451 - RNA, 12 nt, Human
agaauaugccuu

SEQ ID NO: 1230452 - RNA, 12 nt, Human
agaauaaaauuu

SEQ ID NO: 1230453 - RNA, 14 nt, Human
agaauaaaauuuuu

SEQ ID NO: 1230454 - RNA, 17 nt, Human
agaauaaaauuuuuaau

SEQ ID NO: 1230455 - RNA, 21 nt, Human
agaaugguccgugcuaaggac

SEQ ID NO: 1230456 - RNA, 23 nt, Human
agaaugguccgugcuaaggacuu

SEQ ID NO: 1230457 - RNA, 20 nt, Human
ugaagauuuaccacuugugu

SEQ ID NO: 1230458 - RNA, 17 nt, Human
ugaagauuuaccacuug

SEQ ID NO: 1230459 - RNA, 23 nt, Human
ugaauaauguaagacaaauaugu

SEQ ID NO: 1230460 - RNA, 15 nt, Human
ugaauacauuuccaa

SEQ ID NO: 1230461 - RNA, 23 nt, Human
agaggccaggcaggagcccuucu

SEQ ID NO: 1230462 - RNA, 18 nt, Human
agaguaauccaagcaaau

SEQ ID NO: 1230463 - RNA, 20 nt, Human
agaguaauccaagcaaaugu

SEQ ID NO: 1230464 - RNA, 22 nt, Human
agaguaauccaagcaaauguga

SEQ ID NO: 1230465 - RNA, 12 nt, Human
ugaaccaccgcg

SEQ ID NO: 1230466 - RNA, 23 nt, Human
ugaacuagaguuuagcuggaaaa

SEQ ID NO: 1230467 - RNA, 23 nt, Human
ugaaauaaacgucuuaaauauuc

SEQ ID NO: 1230468 - RNA, 22 nt, Human
ugaaauaaacgucuuaaauauu

SEQ ID NO: 1230469 - RNA, 18 nt, Human
ugaaauaaacgucuuaaa

SEQ ID NO: 1230470 - RNA, 13 nt, Human
ugaaauaaacguc

SEQ ID NO: 1230471 - RNA, 23 nt, Human
ugaaauuuccugggagcuuuugu

SEQ ID NO: 1230472 - RNA, 21 nt, Human
ugaaauuuccugggagcuuuu

SEQ ID NO: 1230473 - RNA, 15 nt, Human
ugaaauuuccuggga

SEQ ID NO: 1230474 - RNA, 13 nt, Human
ugaaauuguaauu

SEQ ID NO: 1230475 - RNA, 14 nt, Human
ugaaauuguaauua

SEQ ID NO: 1230476 - RNA, 15 nt, Human
ugaaauuguaauuau

SEQ ID NO: 1230477 - RNA, 16 nt, Human
ugaaauuguaauuaua

SEQ ID NO: 1230478 - RNA, 19 nt, Human
ugaaauuguaauuauaucu

SEQ ID NO: 1230479 - RNA, 20 nt, Human
ugaaauuguaauuauaucug

SEQ ID NO: 1230480 - RNA, 15 nt, Human
agagaguguugaaac

SEQ ID NO: 1230481 - RNA, 16 nt, Human
agagaguguugaaacg

SEQ ID NO: 1230482 - RNA, 13 nt, Human
ugaaagaaaauaa

SEQ ID NO: 1230483 - RNA, 14 nt, Human
ugaaaauuaacaug

SEQ ID NO: 1230484 - RNA, 20 nt, Human
agacuggugacugauucuuc

SEQ ID NO: 1230485 - RNA, 21 nt, Human
agacuggugacugauucuuca

SEQ ID NO: 1230486 - RNA, 12 nt, Human
agacuuuuauga

SEQ ID NO: 1230487 - RNA, 15 nt, Human
agacuuuuaugauac

SEQ ID NO: 1230488 - RNA, 16 nt, Human
agagacacacugaaga

SEQ ID NO: 1230489 - RNA, 17 nt, Human
ucuuugucuacaccauu

SEQ ID NO: 1230490 - RNA, 21 nt, Human
ucuuuuuucuaaaguaaaaac

SEQ ID NO: 1230491 - RNA, 22 nt, Human
ucuuuuuucuaaaguaaaaaca

SEQ ID NO: 1230492 - RNA, 17 nt, Human
ucuuuuuucaaaagaaa

SEQ ID NO: 1230493 - RNA, 13 nt, Human
ugacuauguaaac

SEQ ID NO: 1230494 - RNA, 12 nt, Human
ugacuauguaaa

SEQ ID NO: 1230495 - RNA, 17 nt, Human
ugaccugccucccuuca

SEQ ID NO: 1230496 - RNA, 19 nt, Human
ugaccugccucccuucaug

SEQ ID NO: 1230497 - RNA, 23 nt, Human
ugaccugccucccuucaugcaug

SEQ ID NO: 1230498 - RNA, 21 nt, Human
ugaccugccucccuucaugca

SEQ ID NO: 1230499 - RNA, 22 nt, Human
agauguauguacuucaugcugu

SEQ ID NO: 1230500 - RNA, 16 nt, Human
ugaccugccucccuuc

SEQ ID NO: 1230501 - RNA, 22 nt, Human
agauuagaauucuguauagauu

SEQ ID NO: 1230502 - RNA, 23 nt, Human
agauuagaauucuguauagauua

SEQ ID NO: 1230503 - RNA, 21 nt, Human
agauuagagaguguugaaacg

SEQ ID NO: 1230504 - RNA, 13 nt, Human
ugacuuauaguac

SEQ ID NO: 1230505 - RNA, 14 nt, Human
ugacuuauaguaca

SEQ ID NO: 1230506 - RNA, 15 nt, Human
ugacuuauaguacau

SEQ ID NO: 1230507 - RNA, 17 nt, Human
ugacuuauaguacauga

SEQ ID NO: 1230508 - RNA, 19 nt, Human
ugacuuauaguacaugaua

SEQ ID NO: 1230509 - RNA, 15 nt, Human
agauuagaauucugu

SEQ ID NO: 1230510 - RNA, 16 nt, Human
agauuagaauucugua

SEQ ID NO: 1230511 - RNA, 14 nt, Human
agauccuggaaauc

SEQ ID NO: 1230512 - RNA, 13 nt, Human
agauccuggaaau

SEQ ID NO: 1230513 - RNA, 13 nt, Human
agaucccccagaa

SEQ ID NO: 1230514 - RNA, 19 nt, Human
agaucccccagaaaagaaa

SEQ ID NO: 1230515 - RNA, 15 nt, Human
agaucccccagaaaa

SEQ ID NO: 1230516 - RNA, 22 nt, Human
agauguagccccucuccuggaa

SEQ ID NO: 1230517 - RNA, 21 nt, Human
agaugcaguucugaagaagau

SEQ ID NO: 1230518 - RNA, 18 nt, Human
agcaaguaaaaaggcuaa

SEQ ID NO: 1230519 - RNA, 13 nt, Human
agcaaguaaaaag

SEQ ID NO: 1230520 - RNA, 15 nt, Human
agcaagucagaauag

SEQ ID NO: 1230521 - RNA, 15 nt, Human
agcaauccucccacu

SEQ ID NO: 1230522 - RNA, 16 nt, Human
agauuuuccugaaaac

SEQ ID NO: 1230523 - RNA, 15 nt, Human
agauuuuccugaaaa

SEQ ID NO: 1230524 - RNA, 20 nt, Human
ugagagacacacugaagaag

SEQ ID NO: 1230525 - RNA, 19 nt, Human
ugagagacacacugaagaa

SEQ ID NO: 1230526 - RNA, 17 nt, Human
ugagagacacacugaag

SEQ ID NO: 1230527 - RNA, 16 nt, Human
ugagagacacacugaa

SEQ ID NO: 1230528 - RNA, 19 nt, Human
ugagacagaaucucagucu

SEQ ID NO: 1230529 - RNA, 23 nt, Human
ugagauguagccccucuccugga

SEQ ID NO: 1230530 - RNA, 14 nt, Human
ugagauguguucac

SEQ ID NO: 1230531 - RNA, 22 nt, Human
ugagagacacacugaagaagca

SEQ ID NO: 1230532 - RNA, 21 nt, Human
ugagagacacacugaagaagc

SEQ ID NO: 1230533 - RNA, 11 nt, Human
aggaauuuaaa

SEQ ID NO: 1230534 - RNA, 18 nt, Human
aggaaggaggacccagga

SEQ ID NO: 1230535 - RNA, 21 nt, Human
aggaaggaggacccaggacag

SEQ ID NO: 1230536 - RNA, 23 nt, Human
aggaauuguguuuauaauuuuaa

SEQ ID NO: 1230537 - RNA, 19 nt, Human
aggaaggaggacccaggac

SEQ ID NO: 1230538 - RNA, 20 nt, Human
aggaaggaggacccaggaca

SEQ ID NO: 1230539 - RNA, 15 nt, Human
agcuggagugcagug

SEQ ID NO: 1230540 - RNA, 19 nt, Human
agcuggagugcaguggcau

SEQ ID NO: 1230541 - RNA, 12 nt, Human
ugcuauuucuau

SEQ ID NO: 1230542 - RNA, 13 nt, Human
ugcuauuucuaua

SEQ ID NO: 1230543 - RNA, 14 nt, Human
ugcuauuucuauau

SEQ ID NO: 1230544 - RNA, 20 nt, Human
ugcuauuucuauauuuucau

SEQ ID NO: 1230545 - RNA, 21 nt, Human
ugcuauuucuauauuuucauu

SEQ ID NO: 1230546 - RNA, 14 nt, Human
aggacaggauccag

SEQ ID NO: 1230547 - RNA, 20 nt, Human
aggacaggauccaggccggc

SEQ ID NO: 1230548 - RNA, 17 nt, Human
aggacacugauaugggu

SEQ ID NO: 1230549 - RNA, 12 nt, Human
aggacaucagca

SEQ ID NO: 1230550 - RNA, 13 nt, Human
aggacaucagcaa

SEQ ID NO: 1230551 - RNA, 14 nt, Human
aggacaucagcaaa

SEQ ID NO: 1230552 - RNA, 15 nt, Human
aggacaucagcaaac

SEQ ID NO: 1230553 - RNA, 16 nt, Human
aggacaucagcaaaca

SEQ ID NO: 1230554 - RNA, 22 nt, Human
aggacaucagcaaacaggauca

SEQ ID NO: 1230555 - RNA, 14 nt, Human
aggacacugauaug

SEQ ID NO: 1230556 - RNA, 14 nt, Human
ugcuucaucccuuu

SEQ ID NO: 1230557 - RNA, 20 nt, Human
aggaauuuuauuuuuuucug

SEQ ID NO: 1230558 - RNA, 12 nt, Human
ugcuuuguauug

SEQ ID NO: 1230559 - RNA, 14 nt, Human
ugcuuuucauccuu

SEQ ID NO: 1230560 - RNA, 13 nt, Human
uggaaaggcagcu

SEQ ID NO: 1230561 - RNA, 19 nt, Human
aggagcccugggaggcucu

SEQ ID NO: 1230562 - RNA, 23 nt, Human
aggagcccugggaggcucuggag

SEQ ID NO: 1230563 - RNA, 17 nt, Human
aggacuuguuagaucua

SEQ ID NO: 1230564 - RNA, 18 nt, Human
aggagcccugggaggcuc

SEQ ID NO: 1230565 - RNA, 20 nt, Human
aggacugaauuaugaaacuu

SEQ ID NO: 1230566 - RNA, 19 nt, Human
aggacugaauuaugaaacu

SEQ ID NO: 1230567 - RNA, 14 nt, Human
aggacuuguuagau

SEQ ID NO: 1230568 - RNA, 16 nt, Human
aggacuuguuagaucu

SEQ ID NO: 1230569 - RNA, 17 nt, Human
uggaaauucccuucauc

SEQ ID NO: 1230570 - RNA, 22 nt, Human
uggaaauucccuucaucuggaa

SEQ ID NO: 1230571 - RNA, 18 nt, Human
uggaaauucccuucaucu

SEQ ID NO: 1230572 - RNA, 14 nt, Human
aggaggcagagaag

SEQ ID NO: 1230573 - RNA, 18 nt, Human
uggaauuggagcucgugg

SEQ ID NO: 1230574 - RNA, 20 nt, Human
uggccaggcuugucucgaac

SEQ ID NO: 1230575 - RNA, 20 nt, Human
uggccagucuggucucgaac

SEQ ID NO: 1230576 - RNA, 16 nt, Human
aggccagaccauggac

SEQ ID NO: 1230577 - RNA, 17 nt, Human
aggccagaccauggaca

SEQ ID NO: 1230578 - RNA, 18 nt, Human
aggccagaccauggacac

SEQ ID NO: 1230579 - RNA, 18 nt, Human
uggacgagaaaacaauaa

SEQ ID NO: 1230580 - RNA, 17 nt, Human
aggccugguguuucuug

SEQ ID NO: 1230581 - RNA, 13 nt, Human
aggcucuggagcc

SEQ ID NO: 1230582 - RNA, 14 nt, Human
aggcucuggagccc

SEQ ID NO: 1230583 - RNA, 15 nt, Human
aggcucuggagccca

SEQ ID NO: 1230584 - RNA, 18 nt, Human
aggcucuggagcccacug

SEQ ID NO: 1230585 - RNA, 19 nt, Human
aggcucuggagcccacugu

SEQ ID NO: 1230586 - RNA, 22 nt, Human
aggcugggaauggaggggcaga

SEQ ID NO: 1230587 - RNA, 12 nt, Human
uggcugcaugcg

SEQ ID NO: 1230588 - RNA, 18 nt, Human
ugauuaaguaaugauaac

SEQ ID NO: 1230589 - RNA, 23 nt, Human
ugauuaaguaaugauaacuggaa

SEQ ID NO: 1230590 - RNA, 12 nt, Human
ugaugaagaagu

SEQ ID NO: 1230591 - RNA, 11 nt, Human
ugaugaagaag

SEQ ID NO: 1230592 - RNA, 12 nt, Human
ugauggagaagg

SEQ ID NO: 1230593 - RNA, 13 nt, Human
ugauggagaagga

SEQ ID NO: 1230594 - RNA, 14 nt, Human
ugauggagaaggaa

SEQ ID NO: 1230595 - RNA, 15 nt, Human
ugauggagaaggaag

SEQ ID NO: 1230596 - RNA, 16 nt, Human
ugauggagaaggaagg

SEQ ID NO: 1230597 - RNA, 14 nt, Human
ugaugggauuuggu

SEQ ID NO: 1230598 - RNA, 17 nt, Human
ugauggagaaggaaggc

SEQ ID NO: 1230599 - RNA, 12 nt, Human
ugauuucuaugc

SEQ ID NO: 1230600 - RNA, 15 nt, Human
ugauuucuaugcuga

SEQ ID NO: 1230601 - RNA, 16 nt, Human
ugauuucuaugcugag

SEQ ID NO: 1230602 - RNA, 14 nt, Human
agcccacuguacuu

SEQ ID NO: 1230603 - RNA, 16 nt, Human
agcccacuguacuugc

SEQ ID NO: 1230604 - RNA, 20 nt, Human
agcccugcugcugccugccu

SEQ ID NO: 1230605 - RNA, 18 nt, Human
agcccugcugcugccugc

SEQ ID NO: 1230606 - RNA, 19 nt, Human
agcccugcugcugccugcc

SEQ ID NO: 1230607 - RNA, 17 nt, Human
agcccugggaggcucug

SEQ ID NO: 1230608 - RNA, 14 nt, Human
agcccauucauucc

SEQ ID NO: 1230609 - RNA, 17 nt, Human
agcccauucauuccauu

SEQ ID NO: 1230610 - RNA, 22 nt, Human
agcccauucauuccauucugga

SEQ ID NO: 1230611 - RNA, 23 nt, Human
agcccauucauuccauucuggaa

SEQ ID NO: 1230612 - RNA, 23 nt, Human
agccucagcucucaguugcagcc

SEQ ID NO: 1230613 - RNA, 16 nt, Human
ugccccauucaacauc

SEQ ID NO: 1230614 - RNA, 17 nt, Human
agcuaucguaaaauuaa

SEQ ID NO: 1230615 - RNA, 18 nt, Human
agcuccaagaauuucuag

SEQ ID NO: 1230616 - RNA, 15 nt, Human
agcuccaagaauuuc

SEQ ID NO: 1230617 - RNA, 13 nt, Human
ugcauuuauaugu

SEQ ID NO: 1230618 - RNA, 14 nt, Human
ugcauuuauaugua

SEQ ID NO: 1230619 - RNA, 16 nt, Human
ugcauuuauauguacc

SEQ ID NO: 1230620 - RNA, 14 nt, Human
ugcccugccaccug

SEQ ID NO: 1230621 - RNA, 15 nt, Human
ugcccugccaccugu

SEQ ID NO: 1230622 - RNA, 16 nt, Human
ugcccugccaccuguc

SEQ ID NO: 1230623 - RNA, 17 nt, Human
ugcccugccaccugucu

SEQ ID NO: 1230624 - RNA, 19 nt, Human
ugcccugccaccugucugu

SEQ ID NO: 1230625 - RNA, 20 nt, Human
ugcccugccaccugucuguc

SEQ ID NO: 1230626 - RNA, 21 nt, Human
ugcccugccaccugucugucu

SEQ ID NO: 1230627 - RNA, 22 nt, Human
ugcccugccaccugucugucug

SEQ ID NO: 1230628 - RNA, 18 nt, Human
ugccucagaaaacaagga

SEQ ID NO: 1230629 - RNA, 11 nt, Human
ugccucucugc

SEQ ID NO: 1230630 - RNA, 12 nt, Human
ugccucucugca

SEQ ID NO: 1230631 - RNA, 15 nt, Human
ugccucucugcaggu

SEQ ID NO: 1230632 - RNA, 23 nt, Human
ugccucucugcaggucccuaaua

SEQ ID NO: 1230633 - RNA, 13 nt, Human
agcuggaaaagua

SEQ ID NO: 1230634 - RNA, 18 nt, Human
agcuggagaugaggccag

SEQ ID NO: 1230635 - RNA, 14 nt, Human
agcuggagugcagu

SEQ ID NO: 1230636 - RNA, 19 nt, Human
agcuggagaugaggccaga

SEQ ID NO: 1230637 - RNA, 20 nt, Human
agcuggagaugaggccagac

SEQ ID NO: 1230638 - RNA, 21 nt, Human
agcuggagaugaggccagacc

SEQ ID NO: 1230639 - RNA, 22 nt, Human
agcuggagaugaggccagacca

SEQ ID NO: 1230640 - RNA, 23 nt, Human
agcuggagaugaggccagaccau

SEQ ID NO: 1230641 - RNA, 18 nt, Human
agucccaucccugcguga

SEQ ID NO: 1230642 - RNA, 21 nt, Human
agucagucauucagauaugau

SEQ ID NO: 1230643 - RNA, 15 nt, Human
agucagucauucaga

SEQ ID NO: 1230644 - RNA, 23 nt, Human
agucagaucugccuaaggacuuc

SEQ ID NO: 1230645 - RNA, 20 nt, Human
agucagaucugccuaaggac

SEQ ID NO: 1230646 - RNA, 21 nt, Human
agucagaucugccuaaggacu

SEQ ID NO: 1230647 - RNA, 22 nt, Human
agucagaucugccuaaggacuu

SEQ ID NO: 1230648 - RNA, 11 nt, Human
aguauuguaca

SEQ ID NO: 1230649 - RNA, 15 nt, Human
aguauuguacaaagu

SEQ ID NO: 1230650 - RNA, 20 nt, Human
aguauuguacaaaguauuaa

SEQ ID NO: 1230651 - RNA, 22 nt, Human
aguauuguacaaaguauuaagc

SEQ ID NO: 1230652 - RNA, 23 nt, Human
aguauuguacaaaguauuaagca

SEQ ID NO: 1230653 - RNA, 21 nt, Human
aguauguuagugcaaauuguc

SEQ ID NO: 1230654 - RNA, 18 nt, Human
aguauguuagugcaaauu

SEQ ID NO: 1230655 - RNA, 18 nt, Human
agucacauuccugaacag

SEQ ID NO: 1230656 - RNA, 16 nt, Human
aguauuguccaggucu

SEQ ID NO: 1230657 - RNA, 15 nt, Human
aguauuguccagguc

SEQ ID NO: 1230658 - RNA, 21 nt, Human
aguauuuaauucauguugccu

SEQ ID NO: 1230659 - RNA, 11 nt, Human
uguauuaugug

SEQ ID NO: 1230660 - RNA, 21 nt, Human
aguagcguuuuuuaaauguau

SEQ ID NO: 1230661 - RNA, 22 nt, Human
aguagcguuuuuuaaauguaua

SEQ ID NO: 1230662 - RNA, 12 nt, Human
uguaugugugaa

SEQ ID NO: 1230663 - RNA, 13 nt, Human
uguaugugugaag

SEQ ID NO: 1230664 - RNA, 23 nt, Human
agguuuggacaaaauggaauacu

SEQ ID NO: 1230665 - RNA, 15 nt, Human
ugucuugccuuuuuc

SEQ ID NO: 1230666 - RNA, 16 nt, Human
ugucuugccuuuuuca

SEQ ID NO: 1230667 - RNA, 17 nt, Human
ugucuugccuuuuucau

SEQ ID NO: 1230668 - RNA, 21 nt, Human
ugucuugccuuuuucauuauu

SEQ ID NO: 1230669 - RNA, 22 nt, Human
ugucucuggauuauauuaugaa

SEQ ID NO: 1230670 - RNA, 14 nt, Human
ugugaagcaaaauu

SEQ ID NO: 1230671 - RNA, 16 nt, Human
agucucugaggggcua

SEQ ID NO: 1230672 - RNA, 22 nt, Human
agucucugaggggcuaccagga

SEQ ID NO: 1230673 - RNA, 23 nt, Human
agucucugaggggcuaccaggaa

SEQ ID NO: 1230674 - RNA, 19 nt, Human
agucuccaaagucucugga

SEQ ID NO: 1230675 - RNA, 18 nt, Human
agucuuacucuguugcca

SEQ ID NO: 1230676 - RNA, 20 nt, Human
agugaaacucguuaauuugu

SEQ ID NO: 1230677 - RNA, 21 nt, Human
agugagcagucaggaaagaga

SEQ ID NO: 1230678 - RNA, 18 nt, Human
uguaagaaaauaucacuu

SEQ ID NO: 1230679 - RNA, 15 nt, Human
uguaaggcaaucaug

SEQ ID NO: 1230680 - RNA, 13 nt, Human
uguacaaaguauu

SEQ ID NO: 1230681 - RNA, 14 nt, Human
uguacaaaguauua

SEQ ID NO: 1230682 - RNA, 21 nt, Human
uguagaagucacauuccugaa

SEQ ID NO: 1230683 - RNA, 15 nt, Human
uguacuugcucuuga

SEQ ID NO: 1230684 - RNA, 19 nt, Human
uguacuugcucuugaugcc

SEQ ID NO: 1230685 - RNA, 10 nt, Human
uguaaauccc

SEQ ID NO: 1230686 - RNA, 21 nt, Human
uguaaauacaauuuuguuucu

SEQ ID NO: 1230687 - RNA, 16 nt, Human
uguaaaggaauuuaaa

SEQ ID NO: 1230688 - RNA, 16 nt, Human
uguaaauacaauuuug

SEQ ID NO: 1230689 - RNA, 17 nt, Human
uguaaauacaauuuugu

SEQ ID NO: 1230690 - RNA, 18 nt, Human
uguaaauacaauuuuguu

SEQ ID NO: 1230691 - RNA, 19 nt, Human
uguaaauacaauuuuguuu

SEQ ID NO: 1230692 - RNA, 18 nt, Human
ugguuuuaguugcaacuu

SEQ ID NO: 1230693 - RNA, 15 nt, Human
aggucagugcaaaua

SEQ ID NO: 1230694 - RNA, 22 nt, Human
ugguccaugggccauaugaaaa

SEQ ID NO: 1230695 - RNA, 19 nt, Human
uggucacguuuggugcuuc

SEQ ID NO: 1230696 - RNA, 21 nt, Human
aggggcuuauaauaaaggacu

SEQ ID NO: 1230697 - RNA, 21 nt, Human
auaauuauaugcuauuucuau

SEQ ID NO: 1230698 - RNA, 23 nt, Human
auaauuauaugcuauuucuauau

SEQ ID NO: 1230699 - RNA, 17 nt, Human
auaauuauaugcuauuu

SEQ ID NO: 1230700 - RNA, 19 nt, Human
auaauuauaugcuauuucu

SEQ ID NO: 1230701 - RNA, 14 nt, Human
auaaugaauacuuu

SEQ ID NO: 1230702 - RNA, 17 nt, Human
auaauccaguaaaauaa

SEQ ID NO: 1230703 - RNA, 23 nt, Human
uuagaugcaguucugaagaagau

SEQ ID NO: 1230704 - RNA, 12 nt, Human
uuaccugggaaa

SEQ ID NO: 1230705 - RNA, 20 nt, Human
auaagcaaaaacaaaaagaa

SEQ ID NO: 1230706 - RNA, 14 nt, Human
auaauaauuaguaa

SEQ ID NO: 1230707 - RNA, 17 nt, Human
auaauaaggaaaaguuu

SEQ ID NO: 1230708 - RNA, 18 nt, Human
auaauaaggaaaaguuua

SEQ ID NO: 1230709 - RNA, 19 nt, Human
auaauaaggaaaaguuuaa

SEQ ID NO: 1230710 - RNA, 22 nt, Human
auaauaaggaaaaguuuaauau

SEQ ID NO: 1230711 - RNA, 16 nt, Human
auaauaaggaaaaguu

SEQ ID NO: 1230712 - RNA, 12 nt, Human
auaacuggaaac

SEQ ID NO: 1230713 - RNA, 13 nt, Human
auaaauaaaguuu

SEQ ID NO: 1230714 - RNA, 19 nt, Human
auaaauaaaguuuguugaa

SEQ ID NO: 1230715 - RNA, 18 nt, Human
auaaagugacccugcucu

SEQ ID NO: 1230716 - RNA, 20 nt, Human
auaaagugacccugcucuca

SEQ ID NO: 1230717 - RNA, 18 nt, Human
auaaacgucuuaaauauu

SEQ ID NO: 1230718 - RNA, 16 nt, Human
auaaacgucuuaaaua

SEQ ID NO: 1230719 - RNA, 15 nt, Human
auaaacgucuuaaau

SEQ ID NO: 1230720 - RNA, 16 nt, Human
auaaaccgaacugaug

SEQ ID NO: 1230721 - RNA, 23 nt, Human
auaaacacucuugaaaaaugcau

SEQ ID NO: 1230722 - RNA, 22 nt, Human
auaauuuuuauauuugaaauau

SEQ ID NO: 1230723 - RNA, 21 nt, Human
auaauuuuuauauuugaaaua

SEQ ID NO: 1230724 - RNA, 19 nt, Human
auaauuuuuauauuugaaa

SEQ ID NO: 1230725 - RNA, 16 nt, Human
auaauuuuuauauuug

SEQ ID NO: 1230726 - RNA, 14 nt, Human
auaauuuuuauauu

SEQ ID NO: 1230727 - RNA, 20 nt, Human
auaauuuugugaagcaaaau

SEQ ID NO: 1230728 - RNA, 15 nt, Human
auaauuuugugaagc

SEQ ID NO: 1230729 - RNA, 14 nt, Human
auaauuuugugaag

SEQ ID NO: 1230730 - RNA, 13 nt, Human
auaauuuugugaa

SEQ ID NO: 1230731 - RNA, 22 nt, Human
uuauauauauuuuuuucugaaa

SEQ ID NO: 1230732 - RNA, 18 nt, Human
uuauauaagcuuguauuc

SEQ ID NO: 1230733 - RNA, 13 nt, Human
uuauaguacauga

SEQ ID NO: 1230734 - RNA, 16 nt, Human
uuauaguacaugauaa

SEQ ID NO: 1230735 - RNA, 17 nt, Human
uuauaguacaugauaaa

SEQ ID NO: 1230736 - RNA, 12 nt, Human
auaccaauaaag

SEQ ID NO: 1230737 - RNA, 13 nt, Human
auaccaauaaagu

SEQ ID NO: 1230738 - RNA, 20 nt, Human
auacauuguauauaugugua

SEQ ID NO: 1230739 - RNA, 20 nt, Human
auacaucccuuaccugggaa

SEQ ID NO: 1230740 - RNA, 22 nt, Human
auaccacaggaaccacaagacu

SEQ ID NO: 1230741 - RNA, 14 nt, Human
auaccaauaaagug

SEQ ID NO: 1230742 - RNA, 15 nt, Human
auaccaauaaaguga

SEQ ID NO: 1230743 - RNA, 21 nt, Human
auaccaauaaagugacccugc

SEQ ID NO: 1230744 - RNA, 17 nt, Human
uuaucaugugaaaucau

SEQ ID NO: 1230745 - RNA, 18 nt, Human
uuaucaugugaaaucauu

SEQ ID NO: 1230746 - RNA, 20 nt, Human
uuaucaugugaaaucauuca

SEQ ID NO: 1230747 - RNA, 22 nt, Human
uuaucaugugaaaucauucauu

SEQ ID NO: 1230748 - RNA, 18 nt, Human
uuaaaaaagaaacauuug

SEQ ID NO: 1230749 - RNA, 15 nt, Human
uuaaaaaagaaacau

SEQ ID NO: 1230750 - RNA, 19 nt, Human
uuaaaaaagaaacauuugg

SEQ ID NO: 1230751 - RNA, 15 nt, Human
aguuucguuuucaaa

SEQ ID NO: 1230752 - RNA, 16 nt, Human
aguuucguuuucaaaa

SEQ ID NO: 1230753 - RNA, 19 nt, Human
aguuugugcugguguaugu

SEQ ID NO: 1230754 - RNA, 16 nt, Human
aguucugaagaagaug

SEQ ID NO: 1230755 - RNA, 15 nt, Human
aguucugaagaagau

SEQ ID NO: 1230756 - RNA, 14 nt, Human
aguucugaagaaga

SEQ ID NO: 1230757 - RNA, 13 nt, Human
aguucugaagaag

SEQ ID NO: 1230758 - RNA, 21 nt, Human
aguugauaugccuuuucccaa

SEQ ID NO: 1230759 - RNA, 19 nt, Human
aguugcaacuuuguauaaa

SEQ ID NO: 1230760 - RNA, 15 nt, Human
uguuugcaucugaaa

SEQ ID NO: 1230761 - RNA, 15 nt, Human
uguuugcuaagcauu

SEQ ID NO: 1230762 - RNA, 13 nt, Human
uguuuuacaauag

SEQ ID NO: 1230763 - RNA, 17 nt, Human
uguuuuacaauaguucu

SEQ ID NO: 1230764 - RNA, 22 nt, Human
uguuuuacaauaguucuguggg

SEQ ID NO: 1230765 - RNA, 21 nt, Human
uguuuuacaauaguucugugg

SEQ ID NO: 1230766 - RNA, 19 nt, Human
uguuugcuaagcauuccaa

SEQ ID NO: 1230767 - RNA, 20 nt, Human
uguuuuauaauuuugugaag

SEQ ID NO: 1230768 - RNA, 13 nt, Human
uguuuuauaauuu

SEQ ID NO: 1230769 - RNA, 14 nt, Human
uguuauuaaacaaa

SEQ ID NO: 1230770 - RNA, 15 nt, Human
aguggcaucaucuca

SEQ ID NO: 1230771 - RNA, 18 nt, Human
aguuacccaaauuaagag

SEQ ID NO: 1230772 - RNA, 17 nt, Human
aguuacccaaauuaaga

SEQ ID NO: 1230773 - RNA, 20 nt, Human
aguuauuauauuuacaaaug

SEQ ID NO: 1230774 - RNA, 21 nt, Human
uguuguacucaauuuuaacaa

SEQ ID NO: 1230775 - RNA, 17 nt, Human
uugacauagucuggcug

SEQ ID NO: 1230776 - RNA, 14 nt, Human
uugacauagucugg

SEQ ID NO: 1230777 - RNA, 12 nt, Human
aucguaaaauua

SEQ ID NO: 1230778 - RNA, 13 nt, Human
aucguaaaauuaa

SEQ ID NO: 1230779 - RNA, 14 nt, Human
aucguaaaauuaag

SEQ ID NO: 1230780 - RNA, 17 nt, Human
aucguaaaauuaagaaa

SEQ ID NO: 1230781 - RNA, 17 nt, Human
uucuguuuuauaauuuu

SEQ ID NO: 1230782 - RNA, 16 nt, Human
uucuguuuuauaauuu

SEQ ID NO: 1230783 - RNA, 13 nt, Human
uucuuaaaguuga

SEQ ID NO: 1230784 - RNA, 22 nt, Human
uucuuaaccagaucauugugaa

SEQ ID NO: 1230785 - RNA, 23 nt, Human
uucuuaaccagaucauugugaaa

SEQ ID NO: 1230786 - RNA, 14 nt, Human
uucuuacugcuuaa

SEQ ID NO: 1230787 - RNA, 15 nt, Human
auccaguaaaauaau

SEQ ID NO: 1230788 - RNA, 18 nt, Human
auccaagcaaaugugaau

SEQ ID NO: 1230789 - RNA, 16 nt, Human
auccaagcaaauguga

SEQ ID NO: 1230790 - RNA, 14 nt, Human
uucugaauaaagca

SEQ ID NO: 1230791 - RNA, 15 nt, Human
uucugaauaaagcaa

SEQ ID NO: 1230792 - RNA, 16 nt, Human
uucugaauaaagcaau

SEQ ID NO: 1230793 - RNA, 17 nt, Human
uucugaauaaagcaauu

SEQ ID NO: 1230794 - RNA, 13 nt, Human
aucauugugaaau

SEQ ID NO: 1230795 - RNA, 15 nt, Human
aucauugugaaauua

SEQ ID NO: 1230796 - RNA, 19 nt, Human
aucauugugaaauuauuca

SEQ ID NO: 1230797 - RNA, 12 nt, Human
aucaguuaacua

SEQ ID NO: 1230798 - RNA, 18 nt, Human
aucaguuaacuauugcau

SEQ ID NO: 1230799 - RNA, 21 nt, Human
aucacucuguucauuccucca

SEQ ID NO: 1230800 - RNA, 22 nt, Human
aucacucuguucauuccuccag

SEQ ID NO: 1230801 - RNA, 23 nt, Human
aucacucuguucauuccuccagg

SEQ ID NO: 1230802 - RNA, 14 nt, Human
aucacugaacuuug

SEQ ID NO: 1230803 - RNA, 21 nt, Human
aucacugaacuuugcugagcc

SEQ ID NO: 1230804 - RNA, 18 nt, Human
uuccuuacagaacuacuu

SEQ ID NO: 1230805 - RNA, 19 nt, Human
aucacucuguucauuccuc

SEQ ID NO: 1230806 - RNA, 21 nt, Human
aucaaggguacacugccuucu

SEQ ID NO: 1230807 - RNA, 14 nt, Human
uuccugaacaggau

SEQ ID NO: 1230808 - RNA, 12 nt, Human
uuccugaacagg

SEQ ID NO: 1230809 - RNA, 21 nt, Human
uuccuaaauauauuuuaagac

SEQ ID NO: 1230810 - RNA, 15 nt, Human
uucccuuuuuuuaag

SEQ ID NO: 1230811 - RNA, 16 nt, Human
auauguucugacauaa

SEQ ID NO: 1230812 - RNA, 13 nt, Human
auauuacaaugau

SEQ ID NO: 1230813 - RNA, 15 nt, Human
auauuacaaugauca

SEQ ID NO: 1230814 - RNA, 16 nt, Human
auauuacaaugaucac

SEQ ID NO: 1230815 - RNA, 12 nt, Human
auauuaaagcca

SEQ ID NO: 1230816 - RNA, 14 nt, Human
auauuaaagccaug

SEQ ID NO: 1230817 - RNA, 12 nt, Human
auauuacaauga

SEQ ID NO: 1230818 - RNA, 14 nt, Human
auauuguuugcuaa

SEQ ID NO: 1230819 - RNA, 13 nt, Human
auauuuacaaaug

SEQ ID NO: 1230820 - RNA, 19 nt, Human
auauuguuuuacaauaguu

SEQ ID NO: 1230821 - RNA, 15 nt, Human
auauugauccagaaa

SEQ ID NO: 1230822 - RNA, 21 nt, Human
auauucucacagcuccaagaa

SEQ ID NO: 1230823 - RNA, 18 nt, Human
auauucucacagcuccaa

SEQ ID NO: 1230824 - RNA, 22 nt, Human
uucauuauuuuauuaugaaacu

SEQ ID NO: 1230825 - RNA, 22 nt, Human
uucaugcuguucaugaaagauu

SEQ ID NO: 1230826 - RNA, 19 nt, Human
uucauggaacgcguugaaa

SEQ ID NO: 1230827 - RNA, 20 nt, Human
uucauggaacgcguugaaau

SEQ ID NO: 1230828 - RNA, 22 nt, Human
auauguguaugcacaguaaaaa

SEQ ID NO: 1230829 - RNA, 21 nt, Human
uucauggaacgcguugaaauu

SEQ ID NO: 1230830 - RNA, 22 nt, Human
uucauggaacgcguugaaauug

SEQ ID NO: 1230831 - RNA, 13 nt, Human
auauauuuuuaua

SEQ ID NO: 1230832 - RNA, 18 nt, Human
uucagucucuauaccaau

SEQ ID NO: 1230833 - RNA, 21 nt, Human
uucagucucuauaccaauaaa

SEQ ID NO: 1230834 - RNA, 22 nt, Human
uucagucucuauaccaauaaag

SEQ ID NO: 1230835 - RNA, 23 nt, Human
uucagucucuauaccaauaaagu

SEQ ID NO: 1230836 - RNA, 24 nt, Human
uucagucucuauaccaauaaagug

SEQ ID NO: 1230837 - RNA, 21 nt, Human
uucauauuuuucauagcuaaa

SEQ ID NO: 1230838 - RNA, 13 nt, Human
auauaugcuaagu

SEQ ID NO: 1230839 - RNA, 17 nt, Human
uucagcgguuuauauaa

SEQ ID NO: 1230840 - RNA, 19 nt, Human
uucagcaaaaauauuuuau

SEQ ID NO: 1230841 - RNA, 22 nt, Human
uucagcacuuuagaauaugccu

SEQ ID NO: 1230842 - RNA, 23 nt, Human
uucagcacuuuagaauaugccuu

SEQ ID NO: 1230843 - RNA, 17 nt, Human
uucagcaaaaauauuuu

SEQ ID NO: 1230844 - RNA, 19 nt, Human
uucagauaugauucaaaug

SEQ ID NO: 1230845 - RNA, 18 nt, Human
uucagauaugauucaaau

SEQ ID NO: 1230846 - RNA, 17 nt, Human
uucagauaugauucaaa

SEQ ID NO: 1230847 - RNA, 16 nt, Human
uucagauaugauucaa

SEQ ID NO: 1230848 - RNA, 22 nt, Human
augggacauuugcucauggaau

SEQ ID NO: 1230849 - RNA, 13 nt, Human
uuugaaaagcaga

SEQ ID NO: 1230850 - RNA, 16 nt, Human
uuugaaaagcagacau

SEQ ID NO: 1230851 - RNA, 18 nt, Human
uuugaaaagcagacauuu

SEQ ID NO: 1230852 - RNA, 15 nt, Human
uuugaaauauugacu

SEQ ID NO: 1230853 - RNA, 14 nt, Human
uuugaaauauugac

SEQ ID NO: 1230854 - RNA, 17 nt, Human
uuugaaacacuuugcau

SEQ ID NO: 1230855 - RNA, 19 nt, Human
uuugaaacacuuugcauaa

SEQ ID NO: 1230856 - RNA, 21 nt, Human
uuucuaugcugaguuugugcu

SEQ ID NO: 1230857 - RNA, 20 nt, Human
uuucuaugaaauauuauguu

SEQ ID NO: 1230858 - RNA, 14 nt, Human
uuucuaugaaauau

SEQ ID NO: 1230859 - RNA, 13 nt, Human
uuucuaugaaaua

SEQ ID NO: 1230860 - RNA, 22 nt, Human
uuucuaggacugaauuaugaaa

SEQ ID NO: 1230861 - RNA, 21 nt, Human
uuucuaggacugaauuaugaa

SEQ ID NO: 1230862 - RNA, 13 nt, Human
uuucuauauuuuc

SEQ ID NO: 1230863 - RNA, 15 nt, Human
uuucuauauuuucau

SEQ ID NO: 1230864 - RNA, 18 nt, Human
uuucuauauuuucauucu

SEQ ID NO: 1230865 - RNA, 19 nt, Human
augcuguauuuuaaaagaa

SEQ ID NO: 1230866 - RNA, 14 nt, Human
augcuguauuuuaa

SEQ ID NO: 1230867 - RNA, 21 nt, Human
uuuauuaugaaacuuguguaa

SEQ ID NO: 1230868 - RNA, 19 nt, Human
uuuauuacuguaagaaaau

SEQ ID NO: 1230869 - RNA, 13 nt, Human
uuuauuaugaaac

SEQ ID NO: 1230870 - RNA, 16 nt, Human
uuuauuuuaauaaugu

SEQ ID NO: 1230871 - RNA, 16 nt, Human
uuuauuuuguguuuag

SEQ ID NO: 1230872 - RNA, 17 nt, Human
uuuauuuuuuucugaau

SEQ ID NO: 1230873 - RNA, 16 nt, Human
uuucaccuagauuuuu

SEQ ID NO: 1230874 - RNA, 12 nt, Human
uuucauaaagca

SEQ ID NO: 1230875 - RNA, 14 nt, Human
uuucauagcuaaaa

SEQ ID NO: 1230876 - RNA, 15 nt, Human
uuucauagcuaaaaa

SEQ ID NO: 1230877 - RNA, 18 nt, Human
uuucauauaaauggaauu

SEQ ID NO: 1230878 - RNA, 21 nt, Human
uuucaguuuauuugaaccaau

SEQ ID NO: 1230879 - RNA, 23 nt, Human
auggaauuggagcucgugggaca

SEQ ID NO: 1230880 - RNA, 20 nt, Human
uuuagcuggaaaaguauguu

SEQ ID NO: 1230881 - RNA, 14 nt, Human
uuuaugugaaacau

SEQ ID NO: 1230882 - RNA, 15 nt, Human
uuuaugugaaacaug

SEQ ID NO: 1230883 - RNA, 19 nt, Human
uuuauaugcuucuguuuua

SEQ ID NO: 1230884 - RNA, 17 nt, Human
uuuauaugcuucuguuu

SEQ ID NO: 1230885 - RNA, 18 nt, Human
augcuacaggauuugaaa

SEQ ID NO: 1230886 - RNA, 15 nt, Human
uuuacuaaaauggac

SEQ ID NO: 1230887 - RNA, 17 nt, Human
uuuacuaaaauggacug

SEQ ID NO: 1230888 - RNA, 16 nt, Human
uuuaaagcuuccauug

SEQ ID NO: 1230889 - RNA, 14 nt, Human
augauaacuggaaa

SEQ ID NO: 1230890 - RNA, 17 nt, Human
uuuaaaaaaaaaauugg

SEQ ID NO: 1230891 - RNA, 19 nt, Human
uuuaaaaaauagcagcuuu

SEQ ID NO: 1230892 - RNA, 16 nt, Human
uuuaaaaaauggucac

SEQ ID NO: 1230893 - RNA, 22 nt, Human
augcaaacuuuauuuuguguuu

SEQ ID NO: 1230894 - RNA, 18 nt, Human
augaucaccgacugaaaa

SEQ ID NO: 1230895 - RNA, 18 nt, Human
uugugaagcaaaauuuuu

SEQ ID NO: 1230896 - RNA, 17 nt, Human
uugugaagguggaaaua

SEQ ID NO: 1230897 - RNA, 18 nt, Human
uugugaagguggaaauaa

SEQ ID NO: 1230898 - RNA, 22 nt, Human
augaauuacauuuguauaaaau

SEQ ID NO: 1230899 - RNA, 19 nt, Human
augaauuacauuuguauaa

SEQ ID NO: 1230900 - RNA, 18 nt, Human
augaauuacauuuguaua

SEQ ID NO: 1230901 - RNA, 18 nt, Human
uugggcagcaauuuaaau

SEQ ID NO: 1230902 - RNA, 19 nt, Human
uugggcagcaauuuaaaug

SEQ ID NO: 1230903 - RNA, 23 nt, Human
augaauuaguuuuauaugcuucu

SEQ ID NO: 1230904 - RNA, 21 nt, Human
augaauuaguuuuauaugcuu

SEQ ID NO: 1230905 - RNA, 13 nt, Human
uuguauauuacaa

SEQ ID NO: 1230906 - RNA, 14 nt, Human
uuguauauuacaau

SEQ ID NO: 1230907 - RNA, 15 nt, Human
uuguauauuacaaug

SEQ ID NO: 1230908 - RNA, 16 nt, Human
uuguauauuacaauga

SEQ ID NO: 1230909 - RNA, 13 nt, Human
uuguaaugaaaac

SEQ ID NO: 1230910 - RNA, 15 nt, Human
uuguaauuauaucug

SEQ ID NO: 1230911 - RNA, 15 nt, Human
uuguauaaaauaauu

SEQ ID NO: 1230912 - RNA, 13 nt, Human
uuguauaaaauaa

SEQ ID NO: 1230913 - RNA, 21 nt, Human
augaaauauuauguuaaaacu

SEQ ID NO: 1230914 - RNA, 11 nt, Human
uugcugagccu

SEQ ID NO: 1230915 - RNA, 12 nt, Human
uugcucauggaa

SEQ ID NO: 1230916 - RNA, 11 nt, Human
uugcucaugga

SEQ ID NO: 1230917 - RNA, 21 nt, Human
auucuccuaucaccugucuug

SEQ ID NO: 1230918 - RNA, 20 nt, Human
auucuccugccucagccucc

SEQ ID NO: 1230919 - RNA, 11 nt, Human
auuccauccuu

SEQ ID NO: 1230920 - RNA, 17 nt, Human
auucagaguugaugguu

SEQ ID NO: 1230921 - RNA, 18 nt, Human
auucagauaugauucaaa

SEQ ID NO: 1230922 - RNA, 20 nt, Human
auucagauaugauucaaaug

SEQ ID NO: 1230923 - RNA, 12 nt, Human
auuagaauucug

SEQ ID NO: 1230924 - RNA, 13 nt, Human
auuagaauucugu

SEQ ID NO: 1230925 - RNA, 14 nt, Human
auuagaauucugua

SEQ ID NO: 1230926 - RNA, 15 nt, Human
auuagaauucuguau

SEQ ID NO: 1230927 - RNA, 16 nt, Human
auuagaauucuguaua

SEQ ID NO: 1230928 - RNA, 17 nt, Human
auuagaauucuguauag

SEQ ID NO: 1230929 - RNA, 18 nt, Human
auuagaauucuguauaga

SEQ ID NO: 1230930 - RNA, 21 nt, Human
auuagaauucuguauagauua

SEQ ID NO: 1230931 - RNA, 13 nt, Human
auuacgugcucug

SEQ ID NO: 1230932 - RNA, 19 nt, Human
uuuuugugaaaagcuccau

SEQ ID NO: 1230933 - RNA, 23 nt, Human
auuaaguaaugauaacuggaaac

SEQ ID NO: 1230934 - RNA, 16 nt, Human
uuuuuguuauuaaaca

SEQ ID NO: 1230935 - RNA, 21 nt, Human
auuacaguggggaaugaagau

SEQ ID NO: 1230936 - RNA, 20 nt, Human
auuacauuuguauaaaauaa

SEQ ID NO: 1230937 - RNA, 18 nt, Human
auuacauuuguauaaaau

SEQ ID NO: 1230938 - RNA, 17 nt, Human
auuacauuuguauaaaa

SEQ ID NO: 1230939 - RNA, 11 nt, Human
auuaaagccau

SEQ ID NO: 1230940 - RNA, 14 nt, Human
auuaagcauauauu

SEQ ID NO: 1230941 - RNA, 15 nt, Human
auuaagcauauauuu

SEQ ID NO: 1230942 - RNA, 21 nt, Human
auuaagcauauauuuuuauau

SEQ ID NO: 1230943 - RNA, 12 nt, Human
uuuugcagcuuu

SEQ ID NO: 1230944 - RNA, 23 nt, Human
uuuuguuuggaccaaaaaccagu

SEQ ID NO: 1230945 - RNA, 19 nt, Human
uuuuuauauuugaaauauu

SEQ ID NO: 1230946 - RNA, 12 nt, Human
uuuuuaucaugu

SEQ ID NO: 1230947 - RNA, 15 nt, Human
uuuuguuauuaaaca

SEQ ID NO: 1230948 - RNA, 18 nt, Human
uuuuguuguuuguuuagu

SEQ ID NO: 1230949 - RNA, 12 nt, Human
uuuuguuucugu

SEQ ID NO: 1230950 - RNA, 13 nt, Human
uuuuguuucugua

SEQ ID NO: 1230951 - RNA, 12 nt, Human
uuuuguuuggac

SEQ ID NO: 1230952 - RNA, 22 nt, Human
uuuuguuuggaccaaaaaccag

SEQ ID NO: 1230953 - RNA, 17 nt, Human
auuaaaccggaccaucu

SEQ ID NO: 1230954 - RNA, 21 nt, Human
auguuuucaggcuagauguau

SEQ ID NO: 1230955 - RNA, 17 nt, Human
auguuuucaggcuagau

SEQ ID NO: 1230956 - RNA, 22 nt, Human
uuuucaguuuauuugaaccaau

SEQ ID NO: 1230957 - RNA, 21 nt, Human
uuuuauuaugaaacuugugua

SEQ ID NO: 1230958 - RNA, 22 nt, Human
uuuuauuaugaaacuuguguaa

SEQ ID NO: 1230959 - RNA, 12 nt, Human
uuuuauuaugaa

SEQ ID NO: 1230960 - RNA, 16 nt, Human
uuuucucuaggaaaua

SEQ ID NO: 1230961 - RNA, 14 nt, Human
uuuucucuaggaaa

SEQ ID NO: 1230962 - RNA, 15 nt, Human
uuuucugauccaguu

SEQ ID NO: 1230963 - RNA, 19 nt, Human
uuuucugauccaguuuugu

SEQ ID NO: 1230964 - RNA, 17 nt, Human
auguugcauagaauaaa

SEQ ID NO: 1230965 - RNA, 18 nt, Human
auguugcauagaauaaaa

SEQ ID NO: 1230966 - RNA, 20 nt, Human
auguugcccuguugcugccu

SEQ ID NO: 1230967 - RNA, 12 nt, Human
auguuaaaccau

SEQ ID NO: 1230968 - RNA, 13 nt, Human
auguuaaaccaug

SEQ ID NO: 1230969 - RNA, 20 nt, Human
auguuaaaccaugggauaaa

SEQ ID NO: 1230970 - RNA, 16 nt, Human
auguucagauuauugg

SEQ ID NO: 1230971 - RNA, 14 nt, Human
uuuuaauaaacacu

SEQ ID NO: 1230972 - RNA, 14 nt, Human
uuuuaauaauguuu

SEQ ID NO: 1230973 - RNA, 13 nt, Human
uuuuaauaauguu

SEQ ID NO: 1230974 - RNA, 12 nt, Human
uuuuaauaaugu

SEQ ID NO: 1230975 - RNA, 16 nt, Human
uuuuaauaauguuuca

SEQ ID NO: 1230976 - RNA, 20 nt, Human
uuuuaauaauguuucaaaca

SEQ ID NO: 1230977 - RNA, 19 nt, Human
augugcuaguaauuggaaa

SEQ ID NO: 1230978 - RNA, 18 nt, Human
auguggaccuuagaauac

SEQ ID NO: 1230979 - RNA, 20 nt, Human
augugcuaguaauuggaaag

SEQ ID NO: 1230980 - RNA, 23 nt, Human
auguguguuuuaaaaugagaaau

SEQ ID NO: 1230981 - RNA, 17 nt, Human
auuuuaaaagaaugauu

SEQ ID NO: 1230982 - RNA, 21 nt, Human
auuuguauaaaauaauuuuua

SEQ ID NO: 1230983 - RNA, 19 nt, Human
auuuguauaaaauaauuuu

SEQ ID NO: 1230984 - RNA, 18 nt, Human
auuuguauaaaauaauuu

SEQ ID NO: 1230985 - RNA, 17 nt, Human
auuuuacauaaauuuag

SEQ ID NO: 1230986 - RNA, 16 nt, Human
auuuuacauaaauuua

SEQ ID NO: 1230987 - RNA, 12 nt, Human
auuuuacauuaa

SEQ ID NO: 1230988 - RNA, 15 nt, Human
auuuuacauuaaauu

SEQ ID NO: 1230989 - RNA, 17 nt, Human
auuuuaccuuugacaaa

SEQ ID NO: 1230990 - RNA, 22 nt, Human
auuuuaaaagaaugauuaugaa

SEQ ID NO: 1230991 - RNA, 18 nt, Human
auuuuaaaagaaugauua

SEQ ID NO: 1230992 - RNA, 16 nt, Human
auuuuaaaaaaugguc

SEQ ID NO: 1230993 - RNA, 17 nt, Human
auuuuaaaaaaugguca

SEQ ID NO: 1230994 - RNA, 22 nt, Human
auuuucaguuauuauauuuaca

SEQ ID NO: 1230995 - RNA, 13 nt, Human
auuuuccuccuuu

SEQ ID NO: 1230996 - RNA, 17 nt, Human
auuuuccuccuuucucu

SEQ ID NO: 1230997 - RNA, 16 nt, Human
auuuuauuauguaaau

SEQ ID NO: 1230998 - RNA, 17 nt, Human
auuuuauuauguaaauc

SEQ ID NO: 1230999 - RNA, 18 nt, Human
auuuuauuauguaaaucc

SEQ ID NO: 1231000 - RNA, 19 nt, Human
auuuuauuauguaaauccc

SEQ ID NO: 1231001 - RNA, 20 nt, Human
auuuuauuauguaaauccca

SEQ ID NO: 1231002 - RNA, 21 nt, Human
auuuuauuauguaaaucccau

SEQ ID NO: 1231003 - RNA, 21 nt, Human
auuuuauuuuuuucugaauua

SEQ ID NO: 1231004 - RNA, 18 nt, Human
auuuaguauuuuguuuca

SEQ ID NO: 1231005 - RNA, 20 nt, Human
auuuaguaucuuuuuauuca

SEQ ID NO: 1231006 - RNA, 13 nt, Human
auuuaguguucau

SEQ ID NO: 1231007 - RNA, 13 nt, Human
auuuagauguaua

SEQ ID NO: 1231008 - RNA, 17 nt, Human
auuuauaaaaauaaaaa

SEQ ID NO: 1231009 - RNA, 22 nt, Human
auuuauaaaaauaaaaaacacu

SEQ ID NO: 1231010 - RNA, 23 nt, Human
auuuauaaaaauaaaaaacacug

SEQ ID NO: 1231011 - RNA, 21 nt, Human
auuuauuuuaauaauguuuca

SEQ ID NO: 1231012 - RNA, 20 nt, Human
auuuauuuuaauaauguuuc

SEQ ID NO: 1231013 - RNA, 19 nt, Human
auuuauuuuaauaauguuu

SEQ ID NO: 1231014 - RNA, 14 nt, Human
auuugaaauauuga

SEQ ID NO: 1231015 - RNA, 14 nt, Human
auuugaaccaauaa

SEQ ID NO: 1231016 - RNA, 15 nt, Human
auucuucagcaaaaa

SEQ ID NO: 1231017 - RNA, 23 nt, Human
auucuucagcaaaaauauuuuau

SEQ ID NO: 1231018 - RNA, 18 nt, Human
auucuuaaaguugaauuu

SEQ ID NO: 1231019 - RNA, 21 nt, Human
auucuguauagauuagaauuc

SEQ ID NO: 1231020 - RNA, 24 nt, Human
auucugucucuggauuauauuaug

SEQ ID NO: 1231021 - RNA, 13 nt, Human
auucuuaaaguug

SEQ ID NO: 1231022 - RNA, 14 nt, Human
auucuuaaaguuga

SEQ ID NO: 1231023 - RNA, 15 nt, Human
auucuuaaaguugaa

SEQ ID NO: 1231024 - RNA, 16 nt, Human
auucuuaaaguugaau

SEQ ID NO: 1231025 - RNA, 13 nt, Human
auuguauucagag

SEQ ID NO: 1231026 - RNA, 14 nt, Human
auugguguuguacu

SEQ ID NO: 1231027 - RNA, 22 nt, Human
auugguguuguacucaauuuua

SEQ ID NO: 1231028 - RNA, 23 nt, Human
auugguguuguacucaauuuuaa

SEQ ID NO: 1231029 - RNA, 16 nt, Human
aaaaaccaguauugua

SEQ ID NO: 1231030 - RNA, 18 nt, Human
aaaaaccaguauuguaca

SEQ ID NO: 1231031 - RNA, 20 nt, Human
aaaaaccaguauuguacaaa

SEQ ID NO: 1231032 - RNA, 17 nt, Human
aaaaagaaugaagccuc

SEQ ID NO: 1231033 - RNA, 17 nt, Human
aaaaauuggggauucuu

SEQ ID NO: 1231034 - RNA, 18 nt, Human
aaaaauuggggauucuua

SEQ ID NO: 1231035 - RNA, 19 nt, Human
aaaaauuggggauucuuaa

SEQ ID NO: 1231036 - RNA, 20 nt, Human
aaaaauuggggauucuuaaa

SEQ ID NO: 1231037 - RNA, 17 nt, Human
aaaacaaggaugaauua

SEQ ID NO: 1231038 - RNA, 14 nt, Human
aaaacaaggaugaa

SEQ ID NO: 1231039 - RNA, 15 nt, Human
acagaagaaacuggg

SEQ ID NO: 1231040 - RNA, 14 nt, Human
acaauuuuguuucu

SEQ ID NO: 1231041 - RNA, 15 nt, Human
acaauuuuguuucug

SEQ ID NO: 1231042 - RNA, 17 nt, Human
acaauuuuguuucugua

SEQ ID NO: 1231043 - RNA, 18 nt, Human
acaauuuuguuucuguac

SEQ ID NO: 1231044 - RNA, 13 nt, Human
acaacuauauugu

SEQ ID NO: 1231045 - RNA, 20 nt, Human
acaaaauggaauacucuuau

SEQ ID NO: 1231046 - RNA, 19 nt, Human
acaaaauggaauacucuua

SEQ ID NO: 1231047 - RNA, 13 nt, Human
aauuuugaaaaac

SEQ ID NO: 1231048 - RNA, 20 nt, Human
acaagucagucauucagaua

SEQ ID NO: 1231049 - RNA, 13 nt, Human
accacgccuggcu

SEQ ID NO: 1231050 - RNA, 20 nt, Human
accacgccuggcuaauuuuu

SEQ ID NO: 1231051 - RNA, 14 nt, Human
acauuuguauaaaa

SEQ ID NO: 1231052 - RNA, 18 nt, Human
acauuugcucauggaauu

SEQ ID NO: 1231053 - RNA, 20 nt, Human
acauaaauuuaguauuuugu

SEQ ID NO: 1231054 - RNA, 15 nt, Human
acauaaaucugugaa

SEQ ID NO: 1231055 - RNA, 18 nt, Human
acauaaaucugugaacuu

SEQ ID NO: 1231056 - RNA, 14 nt, Human
acauaaaucuguga

SEQ ID NO: 1231057 - RNA, 12 nt, Human
acauccagcaga

SEQ ID NO: 1231058 - RNA, 20 nt, Human
acauaaaaaggacaucagca

SEQ ID NO: 1231059 - RNA, 21 nt, Human
acauaaaaaggacaucagcaa

SEQ ID NO: 1231060 - RNA, 22 nt, Human
acauaaaaaggacaucagcaaa

SEQ ID NO: 1231061 - RNA, 15 nt, Human
acauaaaaaggacau

SEQ ID NO: 1231062 - RNA, 12 nt, Human
accccuaggacu

SEQ ID NO: 1231063 - RNA, 21 nt, Human
accccuaaaagaaacccugca

SEQ ID NO: 1231064 - RNA, 22 nt, Human
accccuaaaagaaacccugcac

SEQ ID NO: 1231065 - RNA, 16 nt, Human
agaaaggauaaaguug

SEQ ID NO: 1231066 - RNA, 23 nt, Human
acuuuagggaaguacuuuuggca

SEQ ID NO: 1231067 - RNA, 19 nt, Human
acuuuagggggugggauuc

SEQ ID NO: 1231068 - RNA, 14 nt, Human
agaaaauaacaaua

SEQ ID NO: 1231069 - RNA, 16 nt, Human
agaaaauuuuuguagu

SEQ ID NO: 1231070 - RNA, 20 nt, Human
agaaaauuuuuguaguagcg

SEQ ID NO: 1231071 - RNA, 22 nt, Human
agaaaauuuuuguaguagcguu

SEQ ID NO: 1231072 - RNA, 12 nt, Human
acuuuucugaua

SEQ ID NO: 1231073 - RNA, 21 nt, Human
agaaaaguugaauuuuacaug

SEQ ID NO: 1231074 - RNA, 18 nt, Human
agaaaaguugaauuuuac

SEQ ID NO: 1231075 - RNA, 18 nt, Human
acugguaggaaacuaggu

SEQ ID NO: 1231076 - RNA, 15 nt, Human
acuggguaggaaaga

SEQ ID NO: 1231077 - RNA, 22 nt, Human
acuucugccagcauaauacuug

SEQ ID NO: 1231078 - RNA, 21 nt, Human
acuucuuuaauuuuggaauuu

SEQ ID NO: 1231079 - RNA, 19 nt, Human
acuuguaaaggaauuuaaa

SEQ ID NO: 1231080 - RNA, 20 nt, Human
acuuguaaaggaauuuaaaa

SEQ ID NO: 1231081 - RNA, 23 nt, Human
acuuauuguagcauccuggaaua

SEQ ID NO: 1231082 - RNA, 20 nt, Human
acuuauuguagcauccugga

SEQ ID NO: 1231083 - RNA, 16 nt, Human
acuaagagagaaugag

SEQ ID NO: 1231084 - RNA, 21 nt, Human
acucuguucauuccuccaggu

SEQ ID NO: 1231085 - RNA, 19 nt, Human
acucaaaccaaaucacuga

SEQ ID NO: 1231086 - RNA, 20 nt, Human
acucaaaccaaaucacugaa

SEQ ID NO: 1231087 - RNA, 12 nt, Human
acuccccuccuu

SEQ ID NO: 1231088 - RNA, 14 nt, Human
acuagcuauggugu

SEQ ID NO: 1231089 - RNA, 18 nt, Human
aaauugcuuuguauugua

SEQ ID NO: 1231090 - RNA, 16 nt, Human
aaauuggggauucuua

SEQ ID NO: 1231091 - RNA, 17 nt, Human
aaauuggggauucuuaa

SEQ ID NO: 1231092 - RNA, 15 nt, Human
aacaaagaaauuaug

SEQ ID NO: 1231093 - RNA, 17 nt, Human
aacaaagaaauuaugug

SEQ ID NO: 1231094 - RNA, 13 nt, Human
aacaugauuuggg

SEQ ID NO: 1231095 - RNA, 17 nt, Human
aacagcuggugcccugc

SEQ ID NO: 1231096 - RNA, 22 nt, Human
aaccacuggaaaguuuaugguu

SEQ ID NO: 1231097 - RNA, 14 nt, Human
aaccagaucauugu

SEQ ID NO: 1231098 - RNA, 21 nt, Human
aaccaguauuguacaaaguau

SEQ ID NO: 1231099 - RNA, 22 nt, Human
aaccaguauuguacaaaguauu

SEQ ID NO: 1231100 - RNA, 20 nt, Human
aaccaguauuguacaaagua

SEQ ID NO: 1231101 - RNA, 17 nt, Human
aacugauccagcaauua

SEQ ID NO: 1231102 - RNA, 12 nt, Human
aacuuuucugau

SEQ ID NO: 1231103 - RNA, 13 nt, Human
aacuuuucugaua

SEQ ID NO: 1231104 - RNA, 14 nt, Human
aacuuuucugauag

SEQ ID NO: 1231105 - RNA, 15 nt, Human
aacuuugcugagccu

SEQ ID NO: 1231106 - RNA, 17 nt, Human
aaagaguacucuuguuu

SEQ ID NO: 1231107 - RNA, 12 nt, Human
aaagaguacucu

SEQ ID NO: 1231108 - RNA, 13 nt, Human
aaagaaauuaugu

SEQ ID NO: 1231109 - RNA, 15 nt, Human
aaagaaauuaugugc

SEQ ID NO: 1231110 - RNA, 15 nt, Human
aaagaaauauaccua

SEQ ID NO: 1231111 - RNA, 11 nt, Human
aaagaacaucc

SEQ ID NO: 1231112 - RNA, 17 nt, Human
aaacugacucuuaagaa

SEQ ID NO: 1231113 - RNA, 16 nt, Human
aaacugacucuuaaga

SEQ ID NO: 1231114 - RNA, 16 nt, Human
aaagaaaagaaaauuu

SEQ ID NO: 1231115 - RNA, 12 nt, Human
aaagaaaacuug

SEQ ID NO: 1231116 - RNA, 20 nt, Human
aaagaaaacuuguauuaugu

SEQ ID NO: 1231117 - RNA, 14 nt, Human
aaacacucuugaaa

SEQ ID NO: 1231118 - RNA, 17 nt, Human
aaacacucuugaaaaau

SEQ ID NO: 1231119 - RNA, 17 nt, Human
aaaauuggggauucuua

SEQ ID NO: 1231120 - RNA, 18 nt, Human
aaaauuggggauucuuaa

SEQ ID NO: 1231121 - RNA, 19 nt, Human
aaaauuggggauucuuaaa

SEQ ID NO: 1231122 - RNA, 13 nt, Human
aaacacucuugaa

SEQ ID NO: 1231123 - RNA, 23 nt, Human
aaauagucucuuuaaaaggaaag

SEQ ID NO: 1231124 - RNA, 14 nt, Human
aaauauuuuaugau

SEQ ID NO: 1231125 - RNA, 18 nt, Human
aaauauuuuaugauccag

SEQ ID NO: 1231126 - RNA, 19 nt, Human
aaauauuuuaugauccagc

SEQ ID NO: 1231127 - RNA, 16 nt, Human
aaauagaagagagagg

SEQ ID NO: 1231128 - RNA, 13 nt, Human
aaauggaaacuau

SEQ ID NO: 1231129 - RNA, 17 nt, Human
aaauggaauacucuuau

SEQ ID NO: 1231130 - RNA, 18 nt, Human
aaauggcuuccuggcaau

SEQ ID NO: 1231131 - RNA, 20 nt, Human
aaauggacuguggugacuuu

SEQ ID NO: 1231132 - RNA, 19 nt, Human
aaauggacuguggugacuu

SEQ ID NO: 1231133 - RNA, 14 nt, Human
aaagugacccuguu

SEQ ID NO: 1231134 - RNA, 12 nt, Human
aaauaacaauga

SEQ ID NO: 1231135 - RNA, 20 nt, Human
aaagggacugagaaauuuau

SEQ ID NO: 1231136 - RNA, 16 nt, Human
aaagggacugagaaau

SEQ ID NO: 1231137 - RNA, 19 nt, Human
aaagucucuggaauuugaa

SEQ ID NO: 1231138 - RNA, 20 nt, Human
aaagucucuggaauuugaaa

SEQ ID NO: 1231139 - RNA, 22 nt, Human
aaagucucuggaauuugaaaca

SEQ ID NO: 1231140 - RNA, 16 nt, Human
aagcagacauuuuaaa

SEQ ID NO: 1231141 - RNA, 19 nt, Human
aagccagauuuuccugaaa

SEQ ID NO: 1231142 - RNA, 13 nt, Human
aagccagauuuuc

SEQ ID NO: 1231143 - RNA, 16 nt, Human
aagauuuaccacuugu

SEQ ID NO: 1231144 - RNA, 19 nt, Human
aagauugcuuaauaaauug

SEQ ID NO: 1231145 - RNA, 13 nt, Human
aagaaauuaugug

SEQ ID NO: 1231146 - RNA, 22 nt, Human
aagaaauuaugugccagauuua

SEQ ID NO: 1231147 - RNA, 13 nt, Human
aagccauguuuau

SEQ ID NO: 1231148 - RNA, 14 nt, Human
aaggacuguaaucu

SEQ ID NO: 1231149 - RNA, 19 nt, Human
aagucucuggaauuugaaa

SEQ ID NO: 1231150 - RNA, 14 nt, Human
aaguacuuuuggca

SEQ ID NO: 1231151 - RNA, 15 nt, Human
aaguacuuuuggcau

SEQ ID NO: 1231152 - RNA, 23 nt, Human
aaguccaggcuuuuuuaucaugu

SEQ ID NO: 1231153 - RNA, 20 nt, Human
aaguccaguguuucuuuuuu

SEQ ID NO: 1231154 - RNA, 12 nt, Human
aauaauguaaga

SEQ ID NO: 1231155 - RNA, 19 nt, Human
aauaauguaagacaaauau

SEQ ID NO: 1231156 - RNA, 21 nt, Human
aauaauccuaaacauaugaau

SEQ ID NO: 1231157 - RNA, 19 nt, Human
aauaaacuauuuguaaagu

SEQ ID NO: 1231158 - RNA, 17 nt, Human
aauaaacgucuuaaaua

SEQ ID NO: 1231159 - RNA, 16 nt, Human
aauauuauguuaaaac

SEQ ID NO: 1231160 - RNA, 14 nt, Human
aauauucaauaaag

SEQ ID NO: 1231161 - RNA, 15 nt, Human
aauauucaauaaagc

SEQ ID NO: 1231162 - RNA, 16 nt, Human
aauauucaauaaagcu

SEQ ID NO: 1231163 - RNA, 13 nt, Human
aaucacaauacau

SEQ ID NO: 1231164 - RNA, 14 nt, Human
aauccauuuggaaa

SEQ ID NO: 1231165 - RNA, 15 nt, Human
aauccauuuggaaau

SEQ ID NO: 1231166 - RNA, 17 nt, Human
aauccauuuggaaaucu

SEQ ID NO: 1231167 - RNA, 18 nt, Human
aauccauuuggaaaucuu

SEQ ID NO: 1231168 - RNA, 22 nt, Human
aauccauuuggaaaucuuuaaa

SEQ ID NO: 1231169 - RNA, 14 nt, Human
aauccauacauuug

SEQ ID NO: 1231170 - RNA, 13 nt, Human
aauccauacauuu

SEQ ID NO: 1231171 - RNA, 17 nt, Human
aaugaagauacugaaau

SEQ ID NO: 1231172 - RNA, 20 nt, Human
aaugauaacuggaaacuuca

SEQ ID NO: 1231173 - RNA, 12 nt, Human
aaugaagauacu

SEQ ID NO: 1231174 - RNA, 20 nt, Human
aauuaguuuuauaugcuucu

SEQ ID NO: 1231175 - RNA, 17 nt, Human
aauuaguuuuauaugcu

SEQ ID NO: 1231176 - RNA, 14 nt, Human
aauuaguuuuauau

SEQ ID NO: 1231177 - RNA, 13 nt, Human
aauggcuuuguau

SEQ ID NO: 1231178 - RNA, 15 nt, Human
aauggcuuuguauag

SEQ ID NO: 1231179 - RNA, 16 nt, Human
aauggcuuuguauaga

SEQ ID NO: 1231180 - RNA, 18 nt, Human
aauggcuuuguauagaac

SEQ ID NO: 1231181 - RNA, 22 nt, Human
agaugaggccagaccauggaca

SEQ ID NO: 1231182 - RNA, 13 nt, Human
agaugaggccaga

SEQ ID NO: 1231183 - RNA, 14 nt, Human
agaugaggccagac

SEQ ID NO: 1231184 - RNA, 16 nt, Human
agaugaggccagacca

SEQ ID NO: 1231185 - RNA, 21 nt, Human
agaugaggccagaccauggac

SEQ ID NO: 1231186 - RNA, 21 nt, Human
agauaggucagugcaaauacu

SEQ ID NO: 1231187 - RNA, 14 nt, Human
agaguguugaaacg

SEQ ID NO: 1231188 - RNA, 21 nt, Human
agacugcauuauauuuauuac

SEQ ID NO: 1231189 - RNA, 17 nt, Human
agacugcauuauauuua

SEQ ID NO: 1231190 - RNA, 15 nt, Human
agagaagcaaguaaa

SEQ ID NO: 1231191 - RNA, 13 nt, Human
agagaaggagcag

SEQ ID NO: 1231192 - RNA, 23 nt, Human
agacuacaggcacacaccaccac

SEQ ID NO: 1231193 - RNA, 12 nt, Human
agcacugcucca

SEQ ID NO: 1231194 - RNA, 14 nt, Human
agcaugcacaaauu

SEQ ID NO: 1231195 - RNA, 19 nt, Human
agccagauuuuccugaaaa

SEQ ID NO: 1231196 - RNA, 15 nt, Human
agccagauuuuccug

SEQ ID NO: 1231197 - RNA, 22 nt, Human
agccauguuuauuacaguauaa

SEQ ID NO: 1231198 - RNA, 13 nt, Human
agguaaguuuuuu

SEQ ID NO: 1231199 - RNA, 23 nt, Human
aggucccuaauaaagcugugugg

SEQ ID NO: 1231200 - RNA, 20 nt, Human
aggucccuaauaaagcugug

SEQ ID NO: 1231201 - RNA, 18 nt, Human
aggucccuaauaaagcug

SEQ ID NO: 1231202 - RNA, 19 nt, Human
aggucccuaauaaagcugu

SEQ ID NO: 1231203 - RNA, 17 nt, Human
aggucccuaauaaagcu

SEQ ID NO: 1231204 - RNA, 19 nt, Human
agguucaagcaauccuccc

SEQ ID NO: 1231205 - RNA, 17 nt, Human
agguucaugcaaacuuu

SEQ ID NO: 1231206 - RNA, 15 nt, Human
agguggaaauaaacu

SEQ ID NO: 1231207 - RNA, 19 nt, Human
agggcaauuaauuccuuca

SEQ ID NO: 1231208 - RNA, 22 nt, Human
agggcaauuaauuccuucagca

SEQ ID NO: 1231209 - RNA, 18 nt, Human
agggcaauuaauuccuuc

SEQ ID NO: 1231210 - RNA, 13 nt, Human
aggggcagagcca

SEQ ID NO: 1231211 - RNA, 14 nt, Human
aggggcagagccag

SEQ ID NO: 1231212 - RNA, 15 nt, Human
aggggcagagccagg

SEQ ID NO: 1231213 - RNA, 16 nt, Human
aggggcagagccagga

SEQ ID NO: 1231214 - RNA, 17 nt, Human
aggggcagagccaggaa

SEQ ID NO: 1231215 - RNA, 14 nt, Human
agcuggugcccugc

SEQ ID NO: 1231216 - RNA, 21 nt, Human
agcuuuucccuuuuuuuaagu

SEQ ID NO: 1231217 - RNA, 15 nt, Human
agcuuuucccuuuuu

SEQ ID NO: 1231218 - RNA, 18 nt, Human
agcuuuucccaaaagccc

SEQ ID NO: 1231219 - RNA, 14 nt, Human
agcuguaugauucc

SEQ ID NO: 1231220 - RNA, 15 nt, Human
aggaacuacugagga

SEQ ID NO: 1231221 - RNA, 12 nt, Human
aucccucaccca

SEQ ID NO: 1231222 - RNA, 19 nt, Human
aucccucacccauccuaga

SEQ ID NO: 1231223 - RNA, 20 nt, Human
auccacccgccucagccucc

SEQ ID NO: 1231224 - RNA, 12 nt, Human
aucaccugucuu

SEQ ID NO: 1231225 - RNA, 21 nt, Human
aucaccugucuugccuuuuuc

SEQ ID NO: 1231226 - RNA, 22 nt, Human
aucaccugucuugccuuuuuca

SEQ ID NO: 1231227 - RNA, 15 nt, Human
aucaucuauagaaag

SEQ ID NO: 1231228 - RNA, 19 nt, Human
aucaucuauagaaagcuau

SEQ ID NO: 1231229 - RNA, 13 nt, Human
aucaucucagcuc

SEQ ID NO: 1231230 - RNA, 14 nt, Human
aucaucucagcuca

SEQ ID NO: 1231231 - RNA, 19 nt, Human
aucaucucagcucacugca

SEQ ID NO: 1231232 - RNA, 22 nt, Human
aucuuauaauuuaaaauaugcu

SEQ ID NO: 1231233 - RNA, 18 nt, Human
augaagcuuuuaugugaa

SEQ ID NO: 1231234 - RNA, 19 nt, Human
augaagcuuuuaugugaaa

SEQ ID NO: 1231235 - RNA, 20 nt, Human
augaagcuuuuaugugaaac

SEQ ID NO: 1231236 - RNA, 21 nt, Human
augaagcuuuuaugugaaaca

SEQ ID NO: 1231237 - RNA, 15 nt, Human
augacuauguaaacu

SEQ ID NO: 1231238 - RNA, 16 nt, Human
augacuauguaaacua

SEQ ID NO: 1231239 - RNA, 14 nt, Human
augaaaaaauauau

SEQ ID NO: 1231240 - RNA, 17 nt, Human
augaaaaaauauauauc

SEQ ID NO: 1231241 - RNA, 22 nt, Human
augaaaaaauauauaucaaaua

SEQ ID NO: 1231242 - RNA, 23 nt, Human
augaaaaaauauauaucaaauau

SEQ ID NO: 1231243 - RNA, 17 nt, Human
augcacaguaaaaaugg

SEQ ID NO: 1231244 - RNA, 12 nt, Human
augcauggaaau

SEQ ID NO: 1231245 - RNA, 16 nt, Human
augcauggaaauuccc

SEQ ID NO: 1231246 - RNA, 14 nt, Human
augccuuuucccaa

SEQ ID NO: 1231247 - RNA, 21 nt, Human
augccuuuguacuuuagggaa

SEQ ID NO: 1231248 - RNA, 20 nt, Human
auggaaauucccuucaucug

SEQ ID NO: 1231249 - RNA, 18 nt, Human
auggagccugcacgguga

SEQ ID NO: 1231250 - RNA, 22 nt, Human
auggagccugcacggugaaugg

SEQ ID NO: 1231251 - RNA, 18 nt, Human
auggcuggagcuagaauu

SEQ ID NO: 1231252 - RNA, 16 nt, Human
augucaaucagccuag

SEQ ID NO: 1231253 - RNA, 17 nt, Human
auguacauguacugauu

SEQ ID NO: 1231254 - RNA, 16 nt, Human
auguaaguaaacgguc

SEQ ID NO: 1231255 - RNA, 13 nt, Human
augugugaaguga

SEQ ID NO: 1231256 - RNA, 18 nt, Human
auguuucuuuguaaugaa

SEQ ID NO: 1231257 - RNA, 19 nt, Human
auacaauuuuguuucugua

SEQ ID NO: 1231258 - RNA, 20 nt, Human
auacaauuuuguuucuguac

SEQ ID NO: 1231259 - RNA, 14 nt, Human
auacccucccuccc

SEQ ID NO: 1231260 - RNA, 16 nt, Human
auacccucccucccua

SEQ ID NO: 1231261 - RNA, 22 nt, Human
auacccucccucccuacccuaa

SEQ ID NO: 1231262 - RNA, 19 nt, Human
auaaguguguguuuuucau

SEQ ID NO: 1231263 - RNA, 22 nt, Human
auaaguguguguuuuucauaaa

SEQ ID NO: 1231264 - RNA, 20 nt, Human
auaauuaacauguuaaacca

SEQ ID NO: 1231265 - RNA, 21 nt, Human
auaauuaacauguuaaaccau

SEQ ID NO: 1231266 - RNA, 22 nt, Human
auaauuaacauguuaaaccaug

SEQ ID NO: 1231267 - RNA, 19 nt, Human
auaaguauuuaauucaugu

SEQ ID NO: 1231268 - RNA, 19 nt, Human
auacuugaaaauuaacaug

SEQ ID NO: 1231269 - RNA, 15 nt, Human
auacuugaaaauuaa

SEQ ID NO: 1231270 - RNA, 16 nt, Human
auacuugaaaauuaac

SEQ ID NO: 1231271 - RNA, 15 nt, Human
auauaagugauugcu

SEQ ID NO: 1231272 - RNA, 15 nt, Human
auauaaguguguguu

SEQ ID NO: 1231273 - RNA, 12 nt, Human
auauaauucuua

SEQ ID NO: 1231274 - RNA, 22 nt, Human
auauuuauuacuguaagaaaau

SEQ ID NO: 1231275 - RNA, 18 nt, Human
auauuuauuuuaauaaug

SEQ ID NO: 1231276 - RNA, 19 nt, Human
auauuuauuacuguaagaa

SEQ ID NO: 1231277 - RNA, 14 nt, Human
auauuuauuacugu

SEQ ID NO: 1231278 - RNA, 18 nt, Human
auauuuaguguucauaaa

SEQ ID NO: 1231279 - RNA, 16 nt, Human
auauuuauaaaaauaa

SEQ ID NO: 1231280 - RNA, 23 nt, Human
auauuucagauaaucacaauaca

SEQ ID NO: 1231281 - RNA, 14 nt, Human
auaugcuauuucua

SEQ ID NO: 1231282 - RNA, 15 nt, Human
auaugcuauuucuau

SEQ ID NO: 1231283 - RNA, 18 nt, Human
auaucacuugucaauaaa

SEQ ID NO: 1231284 - RNA, 14 nt, Human
agugaucaaacuac

SEQ ID NO: 1231285 - RNA, 17 nt, Human
agucaaauugugugaaa

SEQ ID NO: 1231286 - RNA, 15 nt, Human
agucaaauuguguga

SEQ ID NO: 1231287 - RNA, 19 nt, Human
agucaaauugugugaaagg

SEQ ID NO: 1231288 - RNA, 23 nt, Human
agucauucagauaugauucaaau

SEQ ID NO: 1231289 - RNA, 20 nt, Human
agucauucagauaugauuca

SEQ ID NO: 1231290 - RNA, 15 nt, Human
agucauucagauaug

SEQ ID NO: 1231291 - RNA, 21 nt, Human
aguccaagcauuuagauguau

SEQ ID NO: 1231292 - RNA, 16 nt, Human
aguccaagcauuuaga

SEQ ID NO: 1231293 - RNA, 11 nt, Human
aguugaauuua

SEQ ID NO: 1231294 - RNA, 13 nt, Human
aguugaauuuauu

SEQ ID NO: 1231295 - RNA, 17 nt, Human
aguugaauuuauuggcu

SEQ ID NO: 1231296 - RNA, 19 nt, Human
aguugaauuuauuggcuuu

SEQ ID NO: 1231297 - RNA, 15 nt, Human
aguugaauuuuacau

SEQ ID NO: 1231298 - RNA, 20 nt, Human
aguugaauuuauuggcuuuu

SEQ ID NO: 1231299 - RNA, 19 nt, Human
cacagugaucaaguuauuu

SEQ ID NO: 1231300 - RNA, 14 nt, Human
auuuuccugaaaac

SEQ ID NO: 1231301 - RNA, 13 nt, Human
auuuuccugaaaa

SEQ ID NO: 1231302 - RNA, 14 nt, Human
caaaaacaaaaaga

SEQ ID NO: 1231303 - RNA, 18 nt, Human
caaaaaccaguauuguac

SEQ ID NO: 1231304 - RNA, 19 nt, Human
caaaaaccaguauuguaca

SEQ ID NO: 1231305 - RNA, 20 nt, Human
caaaaaccaguauuguacaa

SEQ ID NO: 1231306 - RNA, 20 nt, Human
caaaaagaaaagaaaauuuu

SEQ ID NO: 1231307 - RNA, 19 nt, Human
caaaaauuaucuauagcua

SEQ ID NO: 1231308 - RNA, 19 nt, Human
caaaaaucucaauauuuca

SEQ ID NO: 1231309 - RNA, 22 nt, Human
caaaaauauuuuaugauccagc

SEQ ID NO: 1231310 - RNA, 23 nt, Human
caaaaauauuuuaugauccagca

SEQ ID NO: 1231311 - RNA, 14 nt, Human
caaaaauauuuuau

SEQ ID NO: 1231312 - RNA, 15 nt, Human
caaaaauauuuuaug

SEQ ID NO: 1231313 - RNA, 17 nt, Human
caaaaauauuuuaugau

SEQ ID NO: 1231314 - RNA, 21 nt, Human
caaaaauauuuuaugauccag

SEQ ID NO: 1231315 - RNA, 16 nt, Human
caaaauuguuacaaau

SEQ ID NO: 1231316 - RNA, 22 nt, Human
caaaauuuuuucucuaggaaau

SEQ ID NO: 1231317 - RNA, 21 nt, Human
caaaauuuuuucucuaggaaa

SEQ ID NO: 1231318 - RNA, 16 nt, Human
caaaauuuuuucucua

SEQ ID NO: 1231319 - RNA, 21 nt, Human
caaaggcauuauaaaaagaau

SEQ ID NO: 1231320 - RNA, 15 nt, Human
caaauugugugaaag

SEQ ID NO: 1231321 - RNA, 21 nt, Human
caaauuguaagcaugcacaaa

SEQ ID NO: 1231322 - RNA, 14 nt, Human
caaaugucuauaaa

SEQ ID NO: 1231323 - RNA, 15 nt, Human
caaaugucuauaaac

SEQ ID NO: 1231324 - RNA, 22 nt, Human
caaauacgugggcauucaaaug

SEQ ID NO: 1231325 - RNA, 21 nt, Human
caaauacgugggcauucaaau

SEQ ID NO: 1231326 - RNA, 17 nt, Human
caaaaauuaucuauagc

SEQ ID NO: 1231327 - RNA, 23 nt, Human
caauacaucccuuaccugggaaa

SEQ ID NO: 1231328 - RNA, 18 nt, Human
caaucuguaaaacuaaga

SEQ ID NO: 1231329 - RNA, 19 nt, Human
caauuacaacggagucaaa

SEQ ID NO: 1231330 - RNA, 18 nt, Human
caauuaauuccuucagca

SEQ ID NO: 1231331 - RNA, 15 nt, Human
caauuaauuccuuca

SEQ ID NO: 1231332 - RNA, 14 nt, Human
caauuaauuuuaga

SEQ ID NO: 1231333 - RNA, 14 nt, Human
caaggucugcuuuu

SEQ ID NO: 1231334 - RNA, 13 nt, Human
caaggucugcuuu

SEQ ID NO: 1231335 - RNA, 21 nt, Human
caagccagauuuuccugaaaa

SEQ ID NO: 1231336 - RNA, 20 nt, Human
caagaacacagcccugcuuc

SEQ ID NO: 1231337 - RNA, 19 nt, Human
caagacugcacaucaaaau

SEQ ID NO: 1231338 - RNA, 17 nt, Human
caaauuucaugaccagu

SEQ ID NO: 1231339 - RNA, 13 nt, Human
caacggagucaaa

SEQ ID NO: 1231340 - RNA, 20 nt, Human
caaccucugccucccagguu

SEQ ID NO: 1231341 - RNA, 12 nt, Human
caccccuaggac

SEQ ID NO: 1231342 - RNA, 12 nt, Human
cacccucacacu

SEQ ID NO: 1231343 - RNA, 15 nt, Human
caccgacugaaaaua

SEQ ID NO: 1231344 - RNA, 13 nt, Human
caccgcagaagga

SEQ ID NO: 1231345 - RNA, 20 nt, Human
caccugggauuacaagcaug

SEQ ID NO: 1231346 - RNA, 11 nt, Human
caccugucugu

SEQ ID NO: 1231347 - RNA, 12 nt, Human
caccugucuguc

SEQ ID NO: 1231348 - RNA, 13 nt, Human
caccugucugucu

SEQ ID NO: 1231349 - RNA, 14 nt, Human
caccugucugucug

SEQ ID NO: 1231350 - RNA, 13 nt, Human
caccuccugccuc

SEQ ID NO: 1231351 - RNA, 15 nt, Human
caccuccugccucag

SEQ ID NO: 1231352 - RNA, 21 nt, Human
caccucccucaaccucauccu

SEQ ID NO: 1231353 - RNA, 19 nt, Human
caccucgcagguucaagca

SEQ ID NO: 1231354 - RNA, 21 nt, Human
caccucucaauauucaauaaa

SEQ ID NO: 1231355 - RNA, 22 nt, Human
caccucucaauauucaauaaag

SEQ ID NO: 1231356 - RNA, 23 nt, Human
caccucucaauauucaauaaagc

SEQ ID NO: 1231357 - RNA, 14 nt, Human
caccucauggaauu

SEQ ID NO: 1231358 - RNA, 12 nt, Human
caccucauggaa

SEQ ID NO: 1231359 - RNA, 11 nt, Human
caccucaugga

SEQ ID NO: 1231360 - RNA, 15 nt, Human
caccucccucaaccu

SEQ ID NO: 1231361 - RNA, 17 nt, Human
caccucccucaaccuca

SEQ ID NO: 1231362 - RNA, 19 nt, Human
caccucccucaaccucauc

SEQ ID NO: 1231363 - RNA, 14 nt, Human
caccgcagaaggaa

SEQ ID NO: 1231364 - RNA, 15 nt, Human
caccgcagaaggaag

SEQ ID NO: 1231365 - RNA, 13 nt, Human
caccucucaauau

SEQ ID NO: 1231366 - RNA, 19 nt, Human
cacuguggguagacacaca

SEQ ID NO: 1231367 - RNA, 24 nt, Human
cacuguggguagacacacaugaag

SEQ ID NO: 1231368 - RNA, 22 nt, Human
cacuguggguagacacacauga

SEQ ID NO: 1231369 - RNA, 13 nt, Human
cacuggccccacc

SEQ ID NO: 1231370 - RNA, 14 nt, Human
cacuggccccaccc

SEQ ID NO: 1231371 - RNA, 16 nt, Human
cacuggccccacccuc

SEQ ID NO: 1231372 - RNA, 13 nt, Human
cacuggcgaggag

SEQ ID NO: 1231373 - RNA, 15 nt, Human
cacuguacuugcucu

SEQ ID NO: 1231374 - RNA, 18 nt, Human
cacuguacuugcucuuga

SEQ ID NO: 1231375 - RNA, 19 nt, Human
cacuguacuugcucuugau

SEQ ID NO: 1231376 - RNA, 12 nt, Human
cacugccuuuga

SEQ ID NO: 1231377 - RNA, 20 nt, Human
cacugccuucucaacuccaa

SEQ ID NO: 1231378 - RNA, 13 nt, Human
cacugcaaccucc

SEQ ID NO: 1231379 - RNA, 21 nt, Human
cacugauuugacauagucugg

SEQ ID NO: 1231380 - RNA, 23 nt, Human
cacugauuugacauagucuggcu

SEQ ID NO: 1231381 - RNA, 14 nt, Human
cacugcaaccuccg

SEQ ID NO: 1231382 - RNA, 14 nt, Human
cacugcaaccucca

SEQ ID NO: 1231383 - RNA, 17 nt, Human
cacugcaaccuccaccu

SEQ ID NO: 1231384 - RNA, 19 nt, Human
cacugcaaccuccaccucg

SEQ ID NO: 1231385 - RNA, 14 nt, Human
cacugcaaccucug

SEQ ID NO: 1231386 - RNA, 16 nt, Human
caccugucugucuguc

SEQ ID NO: 1231387 - RNA, 22 nt, Human
caccugucugucugucuguccc

SEQ ID NO: 1231388 - RNA, 17 nt, Human
caccugucuugccuuuu

SEQ ID NO: 1231389 - RNA, 20 nt, Human
caccugucuugccuuuuuca

SEQ ID NO: 1231390 - RNA, 22 nt, Human
caccuguggaacauaaaaagga

SEQ ID NO: 1231391 - RNA, 13 nt, Human
cacgcacggcagc

SEQ ID NO: 1231392 - RNA, 16 nt, Human
cacgccuggcuaauuu

SEQ ID NO: 1231393 - RNA, 20 nt, Human
cacggugaauggcuuuguau

SEQ ID NO: 1231394 - RNA, 23 nt, Human
cacggugaauggcuuuguauaga

SEQ ID NO: 1231395 - RNA, 13 nt, Human
cacuaaacaaaga

SEQ ID NO: 1231396 - RNA, 19 nt, Human
cacuaguauuucuaugaaa

SEQ ID NO: 1231397 - RNA, 16 nt, Human
cacuaacaugauuugg

SEQ ID NO: 1231398 - RNA, 17 nt, Human
cacuaagagagaaugag

SEQ ID NO: 1231399 - RNA, 15 nt, Human
cacucuccauuuaau

SEQ ID NO: 1231400 - RNA, 17 nt, Human
cacucuccauuuaauaa

SEQ ID NO: 1231401 - RNA, 15 nt, Human
cacucguguguuucu

SEQ ID NO: 1231402 - RNA, 16 nt, Human
cacucguguguuucua

SEQ ID NO: 1231403 - RNA, 11 nt, Human
cagaaggaagg

SEQ ID NO: 1231404 - RNA, 15 nt, Human
cagaaggaaggcagg

SEQ ID NO: 1231405 - RNA, 20 nt, Human
cagaaggaaggcagggagga

SEQ ID NO: 1231406 - RNA, 22 nt, Human
cagaaggaaggcagggaggagg

SEQ ID NO: 1231407 - RNA, 13 nt, Human
cagaacuacuucu

SEQ ID NO: 1231408 - RNA, 14 nt, Human
cacuuuuugcagcu

SEQ ID NO: 1231409 - RNA, 18 nt, Human
cacuuuuugcagcuuucu

SEQ ID NO: 1231410 - RNA, 15 nt, Human
cacuuuuugcagcuu

SEQ ID NO: 1231411 - RNA, 12 nt, Human
cacuuugcauaa

SEQ ID NO: 1231412 - RNA, 22 nt, Human
cagaaaaguugaauuuuacaug

SEQ ID NO: 1231413 - RNA, 20 nt, Human
cagaaaaguugaauuuuaca

SEQ ID NO: 1231414 - RNA, 17 nt, Human
cagaaaaguugaauuuu

SEQ ID NO: 1231415 - RNA, 23 nt, Human
cagaaaagaaagcuacagaagaa

SEQ ID NO: 1231416 - RNA, 22 nt, Human
cagaaagcaucccucacccauc

SEQ ID NO: 1231417 - RNA, 18 nt, Human
cagaaacacccucacacu

SEQ ID NO: 1231418 - RNA, 20 nt, Human
cagaaacacccucacacugg

SEQ ID NO: 1231419 - RNA, 21 nt, Human
cagaaacacccucacacuggg

SEQ ID NO: 1231420 - RNA, 22 nt, Human
cagaaacacccucacacuggga

SEQ ID NO: 1231421 - RNA, 23 nt, Human
cagaaacacccucacacugggac

SEQ ID NO: 1231422 - RNA, 21 nt, Human
cagaaugagacauccagcaga

SEQ ID NO: 1231423 - RNA, 13 nt, Human
cagacauuuuaaa

SEQ ID NO: 1231424 - RNA, 14 nt, Human
cagaccauggacac

SEQ ID NO: 1231425 - RNA, 22 nt, Human
cagaccauggacacuacaccca

SEQ ID NO: 1231426 - RNA, 21 nt, Human
cagaccauggacacuacaccc

SEQ ID NO: 1231427 - RNA, 14 nt, Human
cagauccuggaaau

SEQ ID NO: 1231428 - RNA, 14 nt, Human
cagaucugccuaag

SEQ ID NO: 1231429 - RNA, 16 nt, Human
cagaucugccuaagga

SEQ ID NO: 1231430 - RNA, 17 nt, Human
cagaucugccuaaggac

SEQ ID NO: 1231431 - RNA, 19 nt, Human
cagaucugccuaaggacuu

SEQ ID NO: 1231432 - RNA, 20 nt, Human
cagaucugccuaaggacuuc

SEQ ID NO: 1231433 - RNA, 21 nt, Human
cagaucugccuaaggacuucu

SEQ ID NO: 1231434 - RNA, 23 nt, Human
cagaucugccuaaggacuucuuu

SEQ ID NO: 1231435 - RNA, 22 nt, Human
cagauaaagguucaugcaaacu

SEQ ID NO: 1231436 - RNA, 14 nt, Human
cagauaaucacaau

SEQ ID NO: 1231437 - RNA, 23 nt, Human
cagaggcgcaugaauuugugaag

SEQ ID NO: 1231438 - RNA, 17 nt, Human
cagagcaagaccccauc

SEQ ID NO: 1231439 - RNA, 13 nt, Human
cagagaagaaaga

SEQ ID NO: 1231440 - RNA, 14 nt, Human
cagagaagaaagaa

SEQ ID NO: 1231441 - RNA, 18 nt, Human
cagagaagaaagaacgga

SEQ ID NO: 1231442 - RNA, 19 nt, Human
cagagaagaaagaacggaa

SEQ ID NO: 1231443 - RNA, 13 nt, Human
cagagcacugcuc

SEQ ID NO: 1231444 - RNA, 15 nt, Human
cagagcacugcucca

SEQ ID NO: 1231445 - RNA, 14 nt, Human
cagagccaggaaga

SEQ ID NO: 1231446 - RNA, 15 nt, Human
cagagccaggaagau

SEQ ID NO: 1231447 - RNA, 17 nt, Human
cagagccaggaagaucc

SEQ ID NO: 1231448 - RNA, 21 nt, Human
cagagccaggaagauccccca

SEQ ID NO: 1231449 - RNA, 23 nt, Human
cagagccaggaagaucccccaga

SEQ ID NO: 1231450 - RNA, 13 nt, Human
cagagccaggaag

SEQ ID NO: 1231451 - RNA, 12 nt, Human
cagauuauucac

SEQ ID NO: 1231452 - RNA, 18 nt, Human
cagauuauucacugauuu

SEQ ID NO: 1231453 - RNA, 23 nt, Human
cagauuauucacugauuugacau

SEQ ID NO: 1231454 - RNA, 13 nt, Human
cagauuuuauuau

SEQ ID NO: 1231455 - RNA, 15 nt, Human
cagauuuuauuaugu

SEQ ID NO: 1231456 - RNA, 16 nt, Human
cagauuuuauuaugua

SEQ ID NO: 1231457 - RNA, 18 nt, Human
cagauuuuauuauguaaa

SEQ ID NO: 1231458 - RNA, 20 nt, Human
cagauuuuauuauguaaauc

SEQ ID NO: 1231459 - RNA, 21 nt, Human
cagauuuuauuauguaaaucc

SEQ ID NO: 1231460 - RNA, 22 nt, Human
cagauuuuauuauguaaauccc

SEQ ID NO: 1231461 - RNA, 15 nt, Human
cagauuuuccugaaa

SEQ ID NO: 1231462 - RNA, 14 nt, Human
cagauuuuccugaa

SEQ ID NO: 1231463 - RNA, 17 nt, Human
cagcaaaaauauuuuau

SEQ ID NO: 1231464 - RNA, 14 nt, Human
cagcaacaauaaau

SEQ ID NO: 1231465 - RNA, 19 nt, Human
cagcaacaauaaauagaca

SEQ ID NO: 1231466 - RNA, 20 nt, Human
cagcaacaauaaauagacac

SEQ ID NO: 1231467 - RNA, 17 nt, Human
cagcaauagagacggga

SEQ ID NO: 1231468 - RNA, 15 nt, Human
cagcaauagagacgg

SEQ ID NO: 1231469 - RNA, 22 nt, Human
cagcaauuacaacggagucaaa

SEQ ID NO: 1231470 - RNA, 14 nt, Human
cagcaauuuaaaug

SEQ ID NO: 1231471 - RNA, 15 nt, Human
cagcaauuuaaaugu

SEQ ID NO: 1231472 - RNA, 16 nt, Human
cagcaauuuaaauguu

SEQ ID NO: 1231473 - RNA, 14 nt, Human
cagcacuuuagaau

SEQ ID NO: 1231474 - RNA, 22 nt, Human
cagcacuuuagaauaugccuug

SEQ ID NO: 1231475 - RNA, 14 nt, Human
cagcagauuauuca

SEQ ID NO: 1231476 - RNA, 15 nt, Human
cagcagauuauucac

SEQ ID NO: 1231477 - RNA, 19 nt, Human
cagcagauuauucacugau

SEQ ID NO: 1231478 - RNA, 21 nt, Human
cagccacggggacucagcccu

SEQ ID NO: 1231479 - RNA, 23 nt, Human
cagccauccagggggcaagagga

SEQ ID NO: 1231480 - RNA, 18 nt, Human
cagccaacuauggccugu

SEQ ID NO: 1231481 - RNA, 20 nt, Human
cagcccugcugcugccugcc

SEQ ID NO: 1231482 - RNA, 16 nt, Human
cagccuaguugaucag

SEQ ID NO: 1231483 - RNA, 21 nt, Human
cagcgagauaccccaccuccc

SEQ ID NO: 1231484 - RNA, 13 nt, Human
cagcucacugcaa

SEQ ID NO: 1231485 - RNA, 15 nt, Human
cagcucacugcaacc

SEQ ID NO: 1231486 - RNA, 16 nt, Human
cagccuucuacugcuc

SEQ ID NO: 1231487 - RNA, 18 nt, Human
cagcuggggccaggcugg

SEQ ID NO: 1231488 - RNA, 19 nt, Human
cagcuggggccaggcuggg

SEQ ID NO: 1231489 - RNA, 20 nt, Human
cagcuggggccaggcugggu

SEQ ID NO: 1231490 - RNA, 18 nt, Human
cagcuguaugauucccag

SEQ ID NO: 1231491 - RNA, 18 nt, Human
cagcuggugcccugcuuu

SEQ ID NO: 1231492 - RNA, 19 nt, Human
cagcuggugcccugcuuuc

SEQ ID NO: 1231493 - RNA, 20 nt, Human
cagcuggugcccugcuuuca

SEQ ID NO: 1231494 - RNA, 21 nt, Human
cagcuggugcccugcuuucag

SEQ ID NO: 1231495 - RNA, 23 nt, Human
cagcuggugcccugcuuucagau

SEQ ID NO: 1231496 - RNA, 21 nt, Human
cagcuggggccaggcuggguc

SEQ ID NO: 1231497 - RNA, 22 nt, Human
cagcuggggccaggcugggucg

SEQ ID NO: 1231498 - RNA, 18 nt, Human
cagcucucaguugcagcc

SEQ ID NO: 1231499 - RNA, 21 nt, Human
cagcuuuauggagauauaauu

SEQ ID NO: 1231500 - RNA, 14 nt, Human
cagcuuuagccaag

SEQ ID NO: 1231501 - RNA, 18 nt, Human
caggaaccacaagacugc

SEQ ID NO: 1231502 - RNA, 18 nt, Human
cagcuuuucccaaaagcc

SEQ ID NO: 1231503 - RNA, 20 nt, Human
cagcuuuucccaaaagccca

SEQ ID NO: 1231504 - RNA, 19 nt, Human
cagcuguaugauucccagc

SEQ ID NO: 1231505 - RNA, 17 nt, Human
caggaauggagccugca

SEQ ID NO: 1231506 - RNA, 23 nt, Human
caggaauggagccugcacgguga

SEQ ID NO: 1231507 - RNA, 19 nt, Human
caggaagaucccccagaaa

SEQ ID NO: 1231508 - RNA, 14 nt, Human
caggaagagaagga

SEQ ID NO: 1231509 - RNA, 15 nt, Human
caggaagagaaggag

SEQ ID NO: 1231510 - RNA, 17 nt, Human
caggaagagaaggagca

SEQ ID NO: 1231511 - RNA, 17 nt, Human
caggaagaucccccaga

SEQ ID NO: 1231512 - RNA, 18 nt, Human
caggaagaucccccagaa

SEQ ID NO: 1231513 - RNA, 19 nt, Human
caggaguuucguuuucaaa

SEQ ID NO: 1231514 - RNA, 11 nt, Human
caggagcccug

SEQ ID NO: 1231515 - RNA, 14 nt, Human
caggagcccuggga

SEQ ID NO: 1231516 - RNA, 16 nt, Human
caggagcccugggagg

SEQ ID NO: 1231517 - RNA, 18 nt, Human
caggagcccugggaggcu

SEQ ID NO: 1231518 - RNA, 19 nt, Human
caggagcccugggaggcuc

SEQ ID NO: 1231519 - RNA, 21 nt, Human
caggagcccugggaggcucug

SEQ ID NO: 1231520 - RNA, 23 nt, Human
caggaugguucccuugaugaaga

SEQ ID NO: 1231521 - RNA, 21 nt, Human
caggaugguucccuugaugaa

SEQ ID NO: 1231522 - RNA, 18 nt, Human
caggauggucuccaucuc

SEQ ID NO: 1231523 - RNA, 22 nt, Human
caggaugaugacuauggaaaga

SEQ ID NO: 1231524 - RNA, 18 nt, Human
caggaugaugacuaugga

SEQ ID NO: 1231525 - RNA, 20 nt, Human
caggaugaugacuauggaaa

SEQ ID NO: 1231526 - RNA, 15 nt, Human
caggaucaguuaacu

SEQ ID NO: 1231527 - RNA, 21 nt, Human
caggauauucucacagcucca

SEQ ID NO: 1231528 - RNA, 17 nt, Human
caggaucaguuaacuau

SEQ ID NO: 1231529 - RNA, 13 nt, Human
caggauccaggcc

SEQ ID NO: 1231530 - RNA, 14 nt, Human
caggcaggagcccu

SEQ ID NO: 1231531 - RNA, 23 nt, Human
caggcuuuuuuaucaugugaaau

SEQ ID NO: 1231532 - RNA, 16 nt, Human
caggcuggagugcagu

SEQ ID NO: 1231533 - RNA, 23 nt, Human
caggcugggucgcccuggacugu

SEQ ID NO: 1231534 - RNA, 21 nt, Human
caggcugggucgcccuggacu

SEQ ID NO: 1231535 - RNA, 19 nt, Human
caggcuagauguauguacu

SEQ ID NO: 1231536 - RNA, 13 nt, Human
caggcuagaugua

SEQ ID NO: 1231537 - RNA, 23 nt, Human
cagggaccggcggaccccagcca

SEQ ID NO: 1231538 - RNA, 16 nt, Human
caggggacaggauggu

SEQ ID NO: 1231539 - RNA, 11 nt, Human
caggggacagg

SEQ ID NO: 1231540 - RNA, 15 nt, Human
cagggggcaagagga

SEQ ID NO: 1231541 - RNA, 16 nt, Human
cagugaaagaaaauaa

SEQ ID NO: 1231542 - RNA, 20 nt, Human
cagugaaagaaaauaacaau

SEQ ID NO: 1231543 - RNA, 13 nt, Human
cagucccuccaca

SEQ ID NO: 1231544 - RNA, 14 nt, Human
caguaucucuucag

SEQ ID NO: 1231545 - RNA, 15 nt, Human
caguaucucuucagu

SEQ ID NO: 1231546 - RNA, 16 nt, Human
caguaucucuucaguc

SEQ ID NO: 1231547 - RNA, 17 nt, Human
caguaucucuucagucu

SEQ ID NO: 1231548 - RNA, 19 nt, Human
caguaucucuucagucucu

SEQ ID NO: 1231549 - RNA, 22 nt, Human
caguaucucuucagucucuaua

SEQ ID NO: 1231550 - RNA, 19 nt, Human
caguaggggcuuauaauaa

SEQ ID NO: 1231551 - RNA, 22 nt, Human
caguaggggcuuauaauaaagg

SEQ ID NO: 1231552 - RNA, 14 nt, Human
caguauaauuaaca

SEQ ID NO: 1231553 - RNA, 15 nt, Human
caguauaauuaacau

SEQ ID NO: 1231554 - RNA, 17 nt, Human
caguauaauuaacaugu

SEQ ID NO: 1231555 - RNA, 21 nt, Human
caguauaauuaacauguuaaa

SEQ ID NO: 1231556 - RNA, 20 nt, Human
cagucauucagauaugauuc

SEQ ID NO: 1231557 - RNA, 17 nt, Human
cagucauucagauauga

SEQ ID NO: 1231558 - RNA, 23 nt, Human
caguauggguuagggaaaacauu

SEQ ID NO: 1231559 - RNA, 16 nt, Human
caguauggguuaggga

SEQ ID NO: 1231560 - RNA, 21 nt, Human
caguauggguuagggaaaaca

SEQ ID NO: 1231561 - RNA, 22 nt, Human
cagucaggaaagagaacuucca

SEQ ID NO: 1231562 - RNA, 18 nt, Human
cagucaggaaagagaacu

SEQ ID NO: 1231563 - RNA, 15 nt, Human
cagucaggaaagaga

SEQ ID NO: 1231564 - RNA, 19 nt, Human
caggucccuaauaaagcug

SEQ ID NO: 1231565 - RNA, 20 nt, Human
caggucccuaauaaagcugu

SEQ ID NO: 1231566 - RNA, 21 nt, Human
caggucccuaauaaagcugug

SEQ ID NO: 1231567 - RNA, 22 nt, Human
caggucccuaauaaagcugugu

SEQ ID NO: 1231568 - RNA, 11 nt, Human
caggucccuaa

SEQ ID NO: 1231569 - RNA, 12 nt, Human
caggucccuaau

SEQ ID NO: 1231570 - RNA, 13 nt, Human
caggucccuaaua

SEQ ID NO: 1231571 - RNA, 14 nt, Human
caggucccuaauaa

SEQ ID NO: 1231572 - RNA, 15 nt, Human
caggucccuaauaaa

SEQ ID NO: 1231573 - RNA, 16 nt, Human
caggucccuaauaaag

SEQ ID NO: 1231574 - RNA, 17 nt, Human
caggucccuaauaaagc

SEQ ID NO: 1231575 - RNA, 18 nt, Human
caggucccuaauaaagcu

SEQ ID NO: 1231576 - RNA, 16 nt, Human
cauauaagugauugcu

SEQ ID NO: 1231577 - RNA, 13 nt, Human
cauauauaacaau

SEQ ID NO: 1231578 - RNA, 19 nt, Human
cauagucuggcuguaccca

SEQ ID NO: 1231579 - RNA, 20 nt, Human
cauauauaacaaugcuguau

SEQ ID NO: 1231580 - RNA, 15 nt, Human
cauauauaacaaugc

SEQ ID NO: 1231581 - RNA, 18 nt, Human
cauauauuuuuauauuua

SEQ ID NO: 1231582 - RNA, 20 nt, Human
cauauauuuuuauauuuacu

SEQ ID NO: 1231583 - RNA, 21 nt, Human
cauauauuuuuauauuuacua

SEQ ID NO: 1231584 - RNA, 22 nt, Human
cauauauuuuuauauuuacuaa

SEQ ID NO: 1231585 - RNA, 13 nt, Human
cauauuguuacug

SEQ ID NO: 1231586 - RNA, 19 nt, Human
cauauuguuacugguacca

SEQ ID NO: 1231587 - RNA, 13 nt, Human
caucccuccuggg

SEQ ID NO: 1231588 - RNA, 18 nt, Human
caucccuuaccugggaaa

SEQ ID NO: 1231589 - RNA, 14 nt, Human
caucaucucagcuc

SEQ ID NO: 1231590 - RNA, 15 nt, Human
caucaucucagcuca

SEQ ID NO: 1231591 - RNA, 10 nt, Human
caucuuuaag

SEQ ID NO: 1231592 - RNA, 14 nt, Human
caugaaagauucaa

SEQ ID NO: 1231593 - RNA, 18 nt, Human
caugagucacuacgccug

SEQ ID NO: 1231594 - RNA, 13 nt, Human
caugauaaaugau

SEQ ID NO: 1231595 - RNA, 16 nt, Human
caugggauaaaugcca

SEQ ID NO: 1231596 - RNA, 17 nt, Human
caugggauaaaugccau

SEQ ID NO: 1231597 - RNA, 18 nt, Human
caugggauaaaugccauc

SEQ ID NO: 1231598 - RNA, 23 nt, Human
caugggauaaaugccaucaauaa

SEQ ID NO: 1231599 - RNA, 22 nt, Human
cauggacuucugccagcauaau

SEQ ID NO: 1231600 - RNA, 16 nt, Human
cauggacacuacaccc

SEQ ID NO: 1231601 - RNA, 17 nt, Human
cauggacacuacaccca

SEQ ID NO: 1231602 - RNA, 18 nt, Human
cauggacacuacacccag

SEQ ID NO: 1231603 - RNA, 19 nt, Human
cauggacacuacacccagc

SEQ ID NO: 1231604 - RNA, 20 nt, Human
cauggacacuacacccagca

SEQ ID NO: 1231605 - RNA, 21 nt, Human
cauggacacuacacccagcaa

SEQ ID NO: 1231606 - RNA, 20 nt, Human
caugcuguucaugaaagauu

SEQ ID NO: 1231607 - RNA, 22 nt, Human
caugcugugugacucaaaccaa

SEQ ID NO: 1231608 - RNA, 18 nt, Human
caugcuguucaugaaaga

SEQ ID NO: 1231609 - RNA, 16 nt, Human
caugcuguucaugaaa

SEQ ID NO: 1231610 - RNA, 20 nt, Human
cauggaauuggagcucgugg

SEQ ID NO: 1231611 - RNA, 21 nt, Human
cauggaaauucccuucaucug

SEQ ID NO: 1231612 - RNA, 14 nt, Human
caugcugugugacu

SEQ ID NO: 1231613 - RNA, 15 nt, Human
caugcuguucaugaa

SEQ ID NO: 1231614 - RNA, 17 nt, Human
caugcugugugacucaa

SEQ ID NO: 1231615 - RNA, 21 nt, Human
caugcugugugacucaaacca

SEQ ID NO: 1231616 - RNA, 14 nt, Human
caugcagaaagcau

SEQ ID NO: 1231617 - RNA, 20 nt, Human
cauguuucuuuguaaugaaa

SEQ ID NO: 1231618 - RNA, 20 nt, Human
caugugcuaguaauuggaaa

SEQ ID NO: 1231619 - RNA, 13 nt, Human
cauguuaaaccau

SEQ ID NO: 1231620 - RNA, 22 nt, Human
cauguuaaaccaugggauaaau

SEQ ID NO: 1231621 - RNA, 23 nt, Human
cauguuuauuacaguauaauuaa

SEQ ID NO: 1231622 - RNA, 21 nt, Human
cauguuaaccccuccacucuu

SEQ ID NO: 1231623 - RNA, 18 nt, Human
cauuuuacauuaaauuuu

SEQ ID NO: 1231624 - RNA, 11 nt, Human
cauuuggaaau

SEQ ID NO: 1231625 - RNA, 17 nt, Human
cauuuggaaaucuuuaa

SEQ ID NO: 1231626 - RNA, 18 nt, Human
cauuuggaaaucuuuaaa

SEQ ID NO: 1231627 - RNA, 22 nt, Human
cauuuggaaaucuuuaaaaaaa

SEQ ID NO: 1231628 - RNA, 23 nt, Human
cauuuuaccuuugacaaagguaa

SEQ ID NO: 1231629 - RNA, 13 nt, Human
cauucuggaauaa

SEQ ID NO: 1231630 - RNA, 12 nt, Human
cauucuggaagu

SEQ ID NO: 1231631 - RNA, 16 nt, Human
cauucuggaagugacu

SEQ ID NO: 1231632 - RNA, 14 nt, Human
cauuccugaacagg

SEQ ID NO: 1231633 - RNA, 12 nt, Human
cauuccuccagg

SEQ ID NO: 1231634 - RNA, 13 nt, Human
cauuccuccaggu

SEQ ID NO: 1231635 - RNA, 15 nt, Human
cauuccauucuggaa

SEQ ID NO: 1231636 - RNA, 14 nt, Human
cauuccauucugga

SEQ ID NO: 1231637 - RNA, 12 nt, Human
cauuccauccuu

SEQ ID NO: 1231638 - RNA, 14 nt, Human
cauuccauccuuga

SEQ ID NO: 1231639 - RNA, 22 nt, Human
cauuccaacuaucucauuucca

SEQ ID NO: 1231640 - RNA, 15 nt, Human
cauucauuccauucu

SEQ ID NO: 1231641 - RNA, 16 nt, Human
cauucauuccauucug

SEQ ID NO: 1231642 - RNA, 17 nt, Human
cauucauuccauucugg

SEQ ID NO: 1231643 - RNA, 19 nt, Human
cauucauuuucuggguguu

SEQ ID NO: 1231644 - RNA, 21 nt, Human
cauucagauaugauucaaaug

SEQ ID NO: 1231645 - RNA, 20 nt, Human
cauucaaauguauuacagug

SEQ ID NO: 1231646 - RNA, 18 nt, Human
cauuauucaaaguugccu

SEQ ID NO: 1231647 - RNA, 21 nt, Human
cauuauucaaaguugccuaaa

SEQ ID NO: 1231648 - RNA, 22 nt, Human
cauuauucaaaguugccuaaau

SEQ ID NO: 1231649 - RNA, 11 nt, Human
ccaaaccacuu

SEQ ID NO: 1231650 - RNA, 14 nt, Human
ccaaaccacuuuuu

SEQ ID NO: 1231651 - RNA, 22 nt, Human
ccaaaccacuuuuugcagcuuu

SEQ ID NO: 1231652 - RNA, 22 nt, Human
ccacccagaaugagacauccag

SEQ ID NO: 1231653 - RNA, 21 nt, Human
ccacccucguggacaccugcc

SEQ ID NO: 1231654 - RNA, 22 nt, Human
ccacccucguggacaccugccc

SEQ ID NO: 1231655 - RNA, 18 nt, Human
ccaccucccucaaccuca

SEQ ID NO: 1231656 - RNA, 20 nt, Human
ccaccucccucaaccucauc

SEQ ID NO: 1231657 - RNA, 14 nt, Human
ccacugccuuugac

SEQ ID NO: 1231658 - RNA, 22 nt, Human
ccacugccuuugaccugccucc

SEQ ID NO: 1231659 - RNA, 13 nt, Human
ccagauuuaugca

SEQ ID NO: 1231660 - RNA, 22 nt, Human
ccagauuuaugcauauuauuuu

SEQ ID NO: 1231661 - RNA, 16 nt, Human
ccagagcacugcucca

SEQ ID NO: 1231662 - RNA, 20 nt, Human
ccacuguacuugcucuugau

SEQ ID NO: 1231663 - RNA, 17 nt, Human
ccacuguacuugcucuu

SEQ ID NO: 1231664 - RNA, 18 nt, Human
ccacuguacuugcucuug

SEQ ID NO: 1231665 - RNA, 19 nt, Human
ccacuguacuugcucuuga

SEQ ID NO: 1231666 - RNA, 15 nt, Human
ccagaccauggacac

SEQ ID NO: 1231667 - RNA, 23 nt, Human
ccagcaauuacaacggagucaaa

SEQ ID NO: 1231668 - RNA, 14 nt, Human
ccagccucagcucu

SEQ ID NO: 1231669 - RNA, 23 nt, Human
ccagcauaauacuugcuuuggaa

SEQ ID NO: 1231670 - RNA, 18 nt, Human
ccagguuggagugcagug

SEQ ID NO: 1231671 - RNA, 13 nt, Human
ccauucauuccau

SEQ ID NO: 1231672 - RNA, 14 nt, Human
ccauucauuccauu

SEQ ID NO: 1231673 - RNA, 17 nt, Human
ccaugggauaaaugcca

SEQ ID NO: 1231674 - RNA, 13 nt, Human
ccaugggauaaau

SEQ ID NO: 1231675 - RNA, 13 nt, Human
ccauguuuauuac

SEQ ID NO: 1231676 - RNA, 20 nt, Human
ccauguuuauuacaguauaa

SEQ ID NO: 1231677 - RNA, 14 nt, Human
ccauuauucaaagu

SEQ ID NO: 1231678 - RNA, 17 nt, Human
ccauuauucaaaguugc

SEQ ID NO: 1231679 - RNA, 22 nt, Human
ccauuauucaaaguugccuaaa

SEQ ID NO: 1231680 - RNA, 18 nt, Human
ccauucauuccauucugg

SEQ ID NO: 1231681 - RNA, 14 nt, Human
ccauauuggccagu

SEQ ID NO: 1231682 - RNA, 13 nt, Human
ccauggcccugcc

SEQ ID NO: 1231683 - RNA, 13 nt, Human
cccagaaaagaaa

SEQ ID NO: 1231684 - RNA, 20 nt, Human
cccagaaaagaaagcuacag

SEQ ID NO: 1231685 - RNA, 13 nt, Human
cccgccucagccu

SEQ ID NO: 1231686 - RNA, 18 nt, Human
cccuggucccucugcagu

SEQ ID NO: 1231687 - RNA, 21 nt, Human
cccuggacugugugcucagga

SEQ ID NO: 1231688 - RNA, 15 nt, Human
cccuggacugugugc

SEQ ID NO: 1231689 - RNA, 15 nt, Human
cccugggaggcucug

SEQ ID NO: 1231690 - RNA, 17 nt, Human
cccugcuuucagauacu

SEQ ID NO: 1231691 - RNA, 20 nt, Human
cccugccaccuccugccuca

SEQ ID NO: 1231692 - RNA, 13 nt, Human
cccugccaccugu

SEQ ID NO: 1231693 - RNA, 14 nt, Human
cccugccaccuguc

SEQ ID NO: 1231694 - RNA, 15 nt, Human
cccugccaccugucu

SEQ ID NO: 1231695 - RNA, 16 nt, Human
cccugccaccugucug

SEQ ID NO: 1231696 - RNA, 17 nt, Human
cccugccaccugucugu

SEQ ID NO: 1231697 - RNA, 18 nt, Human
cccugccaccugucuguc

SEQ ID NO: 1231698 - RNA, 19 nt, Human
cccuccaccgcagaaggaa

SEQ ID NO: 1231699 - RNA, 23 nt, Human
cccuccacauuucccccuagccu

SEQ ID NO: 1231700 - RNA, 21 nt, Human
cccuccaccgcagaaggaagg

SEQ ID NO: 1231701 - RNA, 18 nt, Human
cccuccaccgcagaagga

SEQ ID NO: 1231702 - RNA, 18 nt, Human
cccucucucauacccucc

SEQ ID NO: 1231703 - RNA, 22 nt, Human
cccucucucauacccucccucc

SEQ ID NO: 1231704 - RNA, 21 nt, Human
cccaccucccucaaccucauc

SEQ ID NO: 1231705 - RNA, 16 nt, Human
ccuaaauauauuuuaa

SEQ ID NO: 1231706 - RNA, 18 nt, Human
ccuaaauauauuuuaaga

SEQ ID NO: 1231707 - RNA, 12 nt, Human
ccuaaauccauu

SEQ ID NO: 1231708 - RNA, 19 nt, Human
ccuaaauaauaaaaauaaa

SEQ ID NO: 1231709 - RNA, 17 nt, Human
ccuaaauccauuuggaa

SEQ ID NO: 1231710 - RNA, 18 nt, Human
ccuaaauccauuuggaaa

SEQ ID NO: 1231711 - RNA, 19 nt, Human
ccuaaaagaaacccugcac

SEQ ID NO: 1231712 - RNA, 15 nt, Human
ccgugcuaaggacuu

SEQ ID NO: 1231713 - RNA, 16 nt, Human
ccgugcuaaggacuug

SEQ ID NO: 1231714 - RNA, 17 nt, Human
ccggcuugccacacccc

SEQ ID NO: 1231715 - RNA, 21 nt, Human
ccucaucuccccaucauuggu

SEQ ID NO: 1231716 - RNA, 18 nt, Human
ccuccaccgcagaaggaa

SEQ ID NO: 1231717 - RNA, 12 nt, Human
ccuccaccucaa

SEQ ID NO: 1231718 - RNA, 22 nt, Human
ccucucaauauucaauaaagcu

SEQ ID NO: 1231719 - RNA, 18 nt, Human
ccucucaauauucaauaa

SEQ ID NO: 1231720 - RNA, 20 nt, Human
ccucucaauauucaauaaag

SEQ ID NO: 1231721 - RNA, 19 nt, Human
ccugcugugaaagaaguaa

SEQ ID NO: 1231722 - RNA, 23 nt, Human
ccuggaaaucaggguuaguauug

SEQ ID NO: 1231723 - RNA, 20 nt, Human
ccugcuuuuuauggccugug

SEQ ID NO: 1231724 - RNA, 22 nt, Human
ccugccucaccagcccuggcaa

SEQ ID NO: 1231725 - RNA, 17 nt, Human
ccuggugcacuggcccc

SEQ ID NO: 1231726 - RNA, 19 nt, Human
ccuggugcacuggccccac

SEQ ID NO: 1231727 - RNA, 20 nt, Human
ccuggugcacuggccccacc

SEQ ID NO: 1231728 - RNA, 20 nt, Human
ccugcacggugaauggcuuu

SEQ ID NO: 1231729 - RNA, 21 nt, Human
ccugcacggugaauggcuuug

SEQ ID NO: 1231730 - RNA, 12 nt, Human
ccuguuuaagag

SEQ ID NO: 1231731 - RNA, 15 nt, Human
ccuguuuaagagaca

SEQ ID NO: 1231732 - RNA, 16 nt, Human
ccuuaacugcauccag

SEQ ID NO: 1231733 - RNA, 17 nt, Human
ccuuaagagucauccag

SEQ ID NO: 1231734 - RNA, 20 nt, Human
ccuucagcacuuuagaauau

SEQ ID NO: 1231735 - RNA, 18 nt, Human
ccuucuauacccacccag

SEQ ID NO: 1231736 - RNA, 20 nt, Human
ccuucuauacccacccagaa

SEQ ID NO: 1231737 - RNA, 19 nt, Human
ccuucuauacccacccaga

SEQ ID NO: 1231738 - RNA, 13 nt, Human
ccuugaacuagga

SEQ ID NO: 1231739 - RNA, 19 nt, Human
ccuuggggcugaugcaguu

SEQ ID NO: 1231740 - RNA, 16 nt, Human
ccuuugaccugccucc

SEQ ID NO: 1231741 - RNA, 21 nt, Human
ccuuguuucucuuccuuucuu

SEQ ID NO: 1231742 - RNA, 21 nt, Human
ccuuugaccugccucccuuca

SEQ ID NO: 1231743 - RNA, 22 nt, Human
ccuuugaccugccucccuucau

SEQ ID NO: 1231744 - RNA, 13 nt, Human
cgagauaccccac

SEQ ID NO: 1231745 - RNA, 20 nt, Human
cgagauaccccaccucccuc

SEQ ID NO: 1231746 - RNA, 17 nt, Human
cucauacccucccuccc

SEQ ID NO: 1231747 - RNA, 16 nt, Human
cucauacccucccucc

SEQ ID NO: 1231748 - RNA, 21 nt, Human
cuccaaacugacucuuaagaa

SEQ ID NO: 1231749 - RNA, 16 nt, Human
cuccccuuuuuuuccc

SEQ ID NO: 1231750 - RNA, 17 nt, Human
cuccugccucagccucc

SEQ ID NO: 1231751 - RNA, 18 nt, Human
cucgccggaucugaggga

SEQ ID NO: 1231752 - RNA, 17 nt, Human
cucgccggaucugaggg

SEQ ID NO: 1231753 - RNA, 22 nt, Human
cuagguaaauuacaguuccuag

SEQ ID NO: 1231754 - RNA, 21 nt, Human
cuagugagcagucaggaaaga

SEQ ID NO: 1231755 - RNA, 20 nt, Human
cuagugaaacucguuaauuu

SEQ ID NO: 1231756 - RNA, 16 nt, Human
cuaguaauuggaaagg

SEQ ID NO: 1231757 - RNA, 14 nt, Human
cuagucaccagaga

SEQ ID NO: 1231758 - RNA, 13 nt, Human
cuauaccaauaaa

SEQ ID NO: 1231759 - RNA, 14 nt, Human
cuauaccaauaaag

SEQ ID NO: 1231760 - RNA, 18 nt, Human
cuauauuguuugcuaagc

SEQ ID NO: 1231761 - RNA, 17 nt, Human
cuauauuuuacauaaau

SEQ ID NO: 1231762 - RNA, 15 nt, Human
cuauauuuucauucu

SEQ ID NO: 1231763 - RNA, 19 nt, Human
cuauauuuucauucuccua

SEQ ID NO: 1231764 - RNA, 13 nt, Human
cuauguaaacuac

SEQ ID NO: 1231765 - RNA, 13 nt, Human
cuauggccugugg

SEQ ID NO: 1231766 - RNA, 16 nt, Human
cucagauuucugagga

SEQ ID NO: 1231767 - RNA, 17 nt, Human
cucagauuucugaggaa

SEQ ID NO: 1231768 - RNA, 13 nt, Human
cucagauuuuauu

SEQ ID NO: 1231769 - RNA, 15 nt, Human
cucagauuuuauuau

SEQ ID NO: 1231770 - RNA, 17 nt, Human
cucagauuuuauuaugu

SEQ ID NO: 1231771 - RNA, 18 nt, Human
cucagauuuuauuaugua

SEQ ID NO: 1231772 - RNA, 22 nt, Human
cucagauuuuauuauguaaauc

SEQ ID NO: 1231773 - RNA, 12 nt, Human
cucaaccucauc

SEQ ID NO: 1231774 - RNA, 13 nt, Human
cucaaccucaucc

SEQ ID NO: 1231775 - RNA, 14 nt, Human
cuauuucuauauuu

SEQ ID NO: 1231776 - RNA, 16 nt, Human
cuauuucuauauuuuc

SEQ ID NO: 1231777 - RNA, 18 nt, Human
cuauuucuauauuuucau

SEQ ID NO: 1231778 - RNA, 19 nt, Human
cucuggauuauauuaugaa

SEQ ID NO: 1231779 - RNA, 20 nt, Human
cucuggauuauauuaugaag

SEQ ID NO: 1231780 - RNA, 15 nt, Human
cucuuccuucccugc

SEQ ID NO: 1231781 - RNA, 19 nt, Human
cucuuccuucccugcugug

SEQ ID NO: 1231782 - RNA, 13 nt, Human
cucuuccuuucuu

SEQ ID NO: 1231783 - RNA, 14 nt, Human
cucuucccucuucc

SEQ ID NO: 1231784 - RNA, 19 nt, Human
cucuuaagaagacugcauu

SEQ ID NO: 1231785 - RNA, 19 nt, Human
cucugaaggguaauuauau

SEQ ID NO: 1231786 - RNA, 21 nt, Human
cucugcaggucccuaauaaag

SEQ ID NO: 1231787 - RNA, 22 nt, Human
cucugcaggucccuaauaaagc

SEQ ID NO: 1231788 - RNA, 19 nt, Human
cucugcaggucccuaauaa

SEQ ID NO: 1231789 - RNA, 20 nt, Human
cucugcaggucccuaauaaa

SEQ ID NO: 1231790 - RNA, 15 nt, Human
cucugauacagaaaa

SEQ ID NO: 1231791 - RNA, 10 nt, Human
cucuucugaa

SEQ ID NO: 1231792 - RNA, 16 nt, Human
cucuucugaauaaagc

SEQ ID NO: 1231793 - RNA, 19 nt, Human
cucuucugaauaaagcaau

SEQ ID NO: 1231794 - RNA, 20 nt, Human
cucuucugaauaaagcaauu

SEQ ID NO: 1231795 - RNA, 23 nt, Human
cucuuugucuacaccauuaugug

SEQ ID NO: 1231796 - RNA, 20 nt, Human
cugaaauaaacgucuuaaau

SEQ ID NO: 1231797 - RNA, 12 nt, Human
cugaacuuugcu

SEQ ID NO: 1231798 - RNA, 13 nt, Human
cugaacuuugcug

SEQ ID NO: 1231799 - RNA, 14 nt, Human
cugaacuuugcuga

SEQ ID NO: 1231800 - RNA, 21 nt, Human
cugaacuuugcugagccugua

SEQ ID NO: 1231801 - RNA, 14 nt, Human
cugaagaagauggu

SEQ ID NO: 1231802 - RNA, 13 nt, Human
cugaauaaagcaa

SEQ ID NO: 1231803 - RNA, 14 nt, Human
cugaauaaagcaau

SEQ ID NO: 1231804 - RNA, 15 nt, Human
cugaauaaagcaauu

SEQ ID NO: 1231805 - RNA, 12 nt, Human
cugaauuauuuu

SEQ ID NO: 1231806 - RNA, 15 nt, Human
cugaauuaugaaacu

SEQ ID NO: 1231807 - RNA, 14 nt, Human
cugaauuaugaaac

SEQ ID NO: 1231808 - RNA, 13 nt, Human
cugaauuaugaaa

SEQ ID NO: 1231809 - RNA, 16 nt, Human
cugaauuaugaaacuu

SEQ ID NO: 1231810 - RNA, 13 nt, Human
cugcauccagccu

SEQ ID NO: 1231811 - RNA, 23 nt, Human
cugcaugcgagugcucauuucag

SEQ ID NO: 1231812 - RNA, 14 nt, Human
cugccaccuccugc

SEQ ID NO: 1231813 - RNA, 16 nt, Human
cugccaccuccugccu

SEQ ID NO: 1231814 - RNA, 19 nt, Human
cugccaccuccugccucag

SEQ ID NO: 1231815 - RNA, 17 nt, Human
cugccaccugucugucu

SEQ ID NO: 1231816 - RNA, 11 nt, Human
cugccaccugu

SEQ ID NO: 1231817 - RNA, 12 nt, Human
cugccaccuguc

SEQ ID NO: 1231818 - RNA, 13 nt, Human
cugccaccugucu

SEQ ID NO: 1231819 - RNA, 14 nt, Human
cugccaccugucug

SEQ ID NO: 1231820 - RNA, 15 nt, Human
cugccaccugucugu

SEQ ID NO: 1231821 - RNA, 16 nt, Human
cugccaccugucuguc

SEQ ID NO: 1231822 - RNA, 18 nt, Human
cugccaccugucugucug

SEQ ID NO: 1231823 - RNA, 13 nt, Human
cugccuauuuuaa

SEQ ID NO: 1231824 - RNA, 15 nt, Human
cugccucucugcagg

SEQ ID NO: 1231825 - RNA, 16 nt, Human
cugccucucugcaggu

SEQ ID NO: 1231826 - RNA, 17 nt, Human
cugccucucugcagguc

SEQ ID NO: 1231827 - RNA, 18 nt, Human
cugccucucugcaggucc

SEQ ID NO: 1231828 - RNA, 23 nt, Human
cugcggaggaaggaggacccagg

SEQ ID NO: 1231829 - RNA, 19 nt, Human
cugccucucugcagguccc

SEQ ID NO: 1231830 - RNA, 22 nt, Human
cugccuggacuuggccccugcc

SEQ ID NO: 1231831 - RNA, 23 nt, Human
cugccuggacuuggccccugcca

SEQ ID NO: 1231832 - RNA, 12 nt, Human
cugaggcugagg

SEQ ID NO: 1231833 - RNA, 14 nt, Human
cugaggcugaggca

SEQ ID NO: 1231834 - RNA, 22 nt, Human
cugauacagaaaaguugaauuu

SEQ ID NO: 1231835 - RNA, 13 nt, Human
cugaguuugugcu

SEQ ID NO: 1231836 - RNA, 18 nt, Human
cugaguuugugcuggugu

SEQ ID NO: 1231837 - RNA, 21 nt, Human
cugauuugacauagucuggcu

SEQ ID NO: 1231838 - RNA, 22 nt, Human
cugauuugacauagucuggcug

SEQ ID NO: 1231839 - RNA, 23 nt, Human
cugauuugacauagucuggcugu

SEQ ID NO: 1231840 - RNA, 20 nt, Human
cugggccccugccucucugc

SEQ ID NO: 1231841 - RNA, 23 nt, Human
cugggccccugccucucugcagg

SEQ ID NO: 1231842 - RNA, 13 nt, Human
cugggucgcccug

SEQ ID NO: 1231843 - RNA, 14 nt, Human
cugggguuaucuga

SEQ ID NO: 1231844 - RNA, 15 nt, Human
cugggucgcccugga

SEQ ID NO: 1231845 - RNA, 16 nt, Human
cugggucgcccuggac

SEQ ID NO: 1231846 - RNA, 18 nt, Human
cugguaugaacuugagga

SEQ ID NO: 1231847 - RNA, 20 nt, Human
cugguaugaacuugaggaca

SEQ ID NO: 1231848 - RNA, 21 nt, Human
cugguaugaacuugaggacac

SEQ ID NO: 1231849 - RNA, 22 nt, Human
cugguaugaacuugaggacaca

SEQ ID NO: 1231850 - RNA, 16 nt, Human
cugggggccucuucug

SEQ ID NO: 1231851 - RNA, 23 nt, Human
cugguaugaacuugaggacacau

SEQ ID NO: 1231852 - RNA, 15 nt, Human
cugguguauguguga

SEQ ID NO: 1231853 - RNA, 14 nt, Human
cugucugucugucc

SEQ ID NO: 1231854 - RNA, 15 nt, Human
cugucugucuguccc

SEQ ID NO: 1231855 - RNA, 16 nt, Human
cugucugucuguccca

SEQ ID NO: 1231856 - RNA, 17 nt, Human
cugucugucugucccaa

SEQ ID NO: 1231857 - RNA, 14 nt, Human
cugucugucugucu

SEQ ID NO: 1231858 - RNA, 15 nt, Human
cugucugucugucug

SEQ ID NO: 1231859 - RNA, 21 nt, Human
cugucuuuuuucuaaaguaaa

SEQ ID NO: 1231860 - RNA, 21 nt, Human
cugucuugccuuuuucauuau

SEQ ID NO: 1231861 - RNA, 23 nt, Human
cugucuugccuuuuucauuauuu

SEQ ID NO: 1231862 - RNA, 12 nt, Human
cuguggugacuu

SEQ ID NO: 1231863 - RNA, 13 nt, Human
cuguggugacuuu

SEQ ID NO: 1231864 - RNA, 14 nt, Human
cuguggugacuuug

SEQ ID NO: 1231865 - RNA, 15 nt, Human
cuguggugacuuugg

SEQ ID NO: 1231866 - RNA, 17 nt, Human
cuguggugacuuuggau

SEQ ID NO: 1231867 - RNA, 18 nt, Human
cuguggugacuuuggaua

SEQ ID NO: 1231868 - RNA, 20 nt, Human
cuguggugacuuuggauaau

SEQ ID NO: 1231869 - RNA, 23 nt, Human
cuguggugacuuuggauaauaag

SEQ ID NO: 1231870 - RNA, 14 nt, Human
cuguggaucaaauc

SEQ ID NO: 1231871 - RNA, 24 nt, Human
cuguggaucaaauccagccugcug

SEQ ID NO: 1231872 - RNA, 18 nt, Human
cuguggaacauaaaaagg

SEQ ID NO: 1231873 - RNA, 21 nt, Human
cuguggaacauaaaaaggaca

SEQ ID NO: 1231874 - RNA, 18 nt, Human
cugugugacucaaaccaa

SEQ ID NO: 1231875 - RNA, 14 nt, Human
cugugugcucagga

SEQ ID NO: 1231876 - RNA, 16 nt, Human
cugugugcucaggagc

SEQ ID NO: 1231877 - RNA, 15 nt, Human
cuguuuuauaauuuu

SEQ ID NO: 1231878 - RNA, 14 nt, Human
cuguuuuauaauuu

SEQ ID NO: 1231879 - RNA, 21 nt, Human
cuguugccaggcuggagugca

SEQ ID NO: 1231880 - RNA, 16 nt, Human
cuuagaauacaguuuu

SEQ ID NO: 1231881 - RNA, 13 nt, Human
cuuaauucaaaua

SEQ ID NO: 1231882 - RNA, 20 nt, Human
cuuaauaaauuguguuuccu

SEQ ID NO: 1231883 - RNA, 23 nt, Human
cuuaagaagacugcauuauauuu

SEQ ID NO: 1231884 - RNA, 17 nt, Human
cuuaaccagaucauugu

SEQ ID NO: 1231885 - RNA, 19 nt, Human
cuuccagauccuggaaauc

SEQ ID NO: 1231886 - RNA, 16 nt, Human
cuucccuaucuuugcc

SEQ ID NO: 1231887 - RNA, 17 nt, Human
cuucccuaucuuugcca

SEQ ID NO: 1231888 - RNA, 18 nt, Human
cuucccuaucuuugccac

SEQ ID NO: 1231889 - RNA, 22 nt, Human
cuucccuaucuuugccacccuc

SEQ ID NO: 1231890 - RNA, 23 nt, Human
cuucccuaucuuugccacccuca

SEQ ID NO: 1231891 - RNA, 19 nt, Human
cuucccugcugugaaagaa

SEQ ID NO: 1231892 - RNA, 23 nt, Human
cuucccuggaaaccuuccaccca

SEQ ID NO: 1231893 - RNA, 22 nt, Human
cuucccuggaaaccuuccaccc

SEQ ID NO: 1231894 - RNA, 15 nt, Human
cuuccuucccugcug

SEQ ID NO: 1231895 - RNA, 17 nt, Human
cuucaaauccuugaaga

SEQ ID NO: 1231896 - RNA, 17 nt, Human
cuucagcaaaaauauuu

SEQ ID NO: 1231897 - RNA, 20 nt, Human
cuucagcaaaaauauuuuau

SEQ ID NO: 1231898 - RNA, 23 nt, Human
cuucagcaaaaauauuuuaugau

SEQ ID NO: 1231899 - RNA, 14 nt, Human
cuucagcacuuuag

SEQ ID NO: 1231900 - RNA, 15 nt, Human
cuucagcacuuuaga

SEQ ID NO: 1231901 - RNA, 16 nt, Human
cuucagcacuuuagaa

SEQ ID NO: 1231902 - RNA, 16 nt, Human
cuucagcgguuuauau

SEQ ID NO: 1231903 - RNA, 13 nt, Human
cuucagucucuau

SEQ ID NO: 1231904 - RNA, 17 nt, Human
cuucagucucuauacca

SEQ ID NO: 1231905 - RNA, 21 nt, Human
cuucagucucuauaccaauaa

SEQ ID NO: 1231906 - RNA, 23 nt, Human
cuucagucucuauaccaauaaag

SEQ ID NO: 1231907 - RNA, 22 nt, Human
cuucagucucuauaccaauaaa

SEQ ID NO: 1231908 - RNA, 18 nt, Human
cuuugcugagccuguaaa

SEQ ID NO: 1231909 - RNA, 20 nt, Human
cuuuuacguccaucucuugu

SEQ ID NO: 1231910 - RNA, 14 nt, Human
cuuuucugauagag

SEQ ID NO: 1231911 - RNA, 11 nt, Human
cuuuucugaua

SEQ ID NO: 1231912 - RNA, 16 nt, Human
gaaacacuuugcauaa

SEQ ID NO: 1231913 - RNA, 20 nt, Human
gaaaaucuuauaauuuaaaa

SEQ ID NO: 1231914 - RNA, 18 nt, Human
gaaacacccucacacugg

SEQ ID NO: 1231915 - RNA, 19 nt, Human
gaaacacccucacacuggg

SEQ ID NO: 1231916 - RNA, 22 nt, Human
gaaacacccucacacugggacu

SEQ ID NO: 1231917 - RNA, 19 nt, Human
gaaaaucuuauaauuuaaa

SEQ ID NO: 1231918 - RNA, 12 nt, Human
gaaaauaucacu

SEQ ID NO: 1231919 - RNA, 19 nt, Human
gaaaauaacgauaaaagac

SEQ ID NO: 1231920 - RNA, 22 nt, Human
gaaaacaauaacgauaaaagac

SEQ ID NO: 1231921 - RNA, 22 nt, Human
cuuuuuucucugauacagaaaa

SEQ ID NO: 1231922 - RNA, 20 nt, Human
cuuuuuucucugauacagaa

SEQ ID NO: 1231923 - RNA, 14 nt, Human
cuuuuuucuaaagu

SEQ ID NO: 1231924 - RNA, 19 nt, Human
cuuguaaaggaauuuaaaa

SEQ ID NO: 1231925 - RNA, 17 nt, Human
cuuuaaaaaaaaaauug

SEQ ID NO: 1231926 - RNA, 16 nt, Human
cuuuagaauaugccuu

SEQ ID NO: 1231927 - RNA, 21 nt, Human
cuuuauuuucuauaauuuaaa

SEQ ID NO: 1231928 - RNA, 13 nt, Human
cuuuccacagaag

SEQ ID NO: 1231929 - RNA, 21 nt, Human
gaagccuuggggcugaugcag

SEQ ID NO: 1231930 - RNA, 18 nt, Human
gaagcuuuuaugugaaac

SEQ ID NO: 1231931 - RNA, 19 nt, Human
gaagccuccuuagaaaaaa

SEQ ID NO: 1231932 - RNA, 17 nt, Human
gaagacugcauuauauu

SEQ ID NO: 1231933 - RNA, 22 nt, Human
gaagccacgguguucugugaua

SEQ ID NO: 1231934 - RNA, 14 nt, Human
gaaggcagggagga

SEQ ID NO: 1231935 - RNA, 16 nt, Human
gaaggcagggaggagg

SEQ ID NO: 1231936 - RNA, 17 nt, Human
gaaggcagggaggaggc

SEQ ID NO: 1231937 - RNA, 18 nt, Human
gaaggcagggaggaggca

SEQ ID NO: 1231938 - RNA, 20 nt, Human
gaaggcagggaggaggcaga

SEQ ID NO: 1231939 - RNA, 12 nt, Human
gaauaaaauuuu

SEQ ID NO: 1231940 - RNA, 11 nt, Human
gaauaaagcaa

SEQ ID NO: 1231941 - RNA, 13 nt, Human
gaauaaagcaauu

SEQ ID NO: 1231942 - RNA, 14 nt, Human
gaauacuuuauaaa

SEQ ID NO: 1231943 - RNA, 11 nt, Human
gaaacauuugg

SEQ ID NO: 1231944 - RNA, 18 nt, Human
gaaauugcuuuguauugu

SEQ ID NO: 1231945 - RNA, 17 nt, Human
gaaauuguaauuauauc

SEQ ID NO: 1231946 - RNA, 16 nt, Human
gaaauauuauguuaaa

SEQ ID NO: 1231947 - RNA, 13 nt, Human
gaaauauuauguu

SEQ ID NO: 1231948 - RNA, 21 nt, Human
gaacuuguaaaggaauuuaaa

SEQ ID NO: 1231949 - RNA, 21 nt, Human
gaagaagcaccaaucaugaau

SEQ ID NO: 1231950 - RNA, 16 nt, Human
gaagaaagaacggaag

SEQ ID NO: 1231951 - RNA, 19 nt, Human
gaagaaagaacggaagaag

SEQ ID NO: 1231952 - RNA, 20 nt, Human
gaagaaagaacggaagaaga

SEQ ID NO: 1231953 - RNA, 22 nt, Human
gaacuuguaaaggaauuuaaaa

SEQ ID NO: 1231954 - RNA, 22 nt, Human
gaacuuccagauccuggaaauc

SEQ ID NO: 1231955 - RNA, 13 nt, Human
gaacuugaggaca

SEQ ID NO: 1231956 - RNA, 14 nt, Human
gaacuugaggacac

SEQ ID NO: 1231957 - RNA, 15 nt, Human
gaacuugaggacaca

SEQ ID NO: 1231958 - RNA, 16 nt, Human
gaacuugaggacacau

SEQ ID NO: 1231959 - RNA, 17 nt, Human
gaacuugaggacacaug

SEQ ID NO: 1231960 - RNA, 18 nt, Human
gaacuugaggacacaugu

SEQ ID NO: 1231961 - RNA, 19 nt, Human
gaacuugaggacacauguc

SEQ ID NO: 1231962 - RNA, 21 nt, Human
gaacuugaggacacaugucca

SEQ ID NO: 1231963 - RNA, 22 nt, Human
gaacuagaguuuagcuggaaaa

SEQ ID NO: 1231964 - RNA, 16 nt, Human
gaacgcguugaaauug

SEQ ID NO: 1231965 - RNA, 13 nt, Human
gagaucaggaaga

SEQ ID NO: 1231966 - RNA, 20 nt, Human
gagaucaggaagagaaggag

SEQ ID NO: 1231967 - RNA, 12 nt, Human
gagcuacaaaug

SEQ ID NO: 1231968 - RNA, 13 nt, Human
gagcuacaaaugc

SEQ ID NO: 1231969 - RNA, 17 nt, Human
gagccugcacggugaau

SEQ ID NO: 1231970 - RNA, 22 nt, Human
gagccugcacggugaauggcuu

SEQ ID NO: 1231971 - RNA, 23 nt, Human
gagccugcacggugaauggcuuu

SEQ ID NO: 1231972 - RNA, 19 nt, Human
gagcugauggagaaggaag

SEQ ID NO: 1231973 - RNA, 14 nt, Human
gagcuacaaaugca

SEQ ID NO: 1231974 - RNA, 18 nt, Human
gaggcuacuguaaggcaa

SEQ ID NO: 1231975 - RNA, 16 nt, Human
gagggagaacaagacc

SEQ ID NO: 1231976 - RNA, 22 nt, Human
gagcuugaaacccguggcgcuu

SEQ ID NO: 1231977 - RNA, 16 nt, Human
gaggaaggaggaccca

SEQ ID NO: 1231978 - RNA, 18 nt, Human
gaggaaggaggacccagg

SEQ ID NO: 1231979 - RNA, 21 nt, Human
gaggaaggaggacccaggaca

SEQ ID NO: 1231980 - RNA, 14 nt, Human
gaggaauucuguau

SEQ ID NO: 1231981 - RNA, 16 nt, Human
gaggaauucuguauag

SEQ ID NO: 1231982 - RNA, 17 nt, Human
gaggaauucuguauaga

SEQ ID NO: 1231983 - RNA, 11 nt, Human
gaggacacaug

SEQ ID NO: 1231984 - RNA, 12 nt, Human
gaggacacaugu

SEQ ID NO: 1231985 - RNA, 13 nt, Human
gaggacacauguc

SEQ ID NO: 1231986 - RNA, 14 nt, Human
gaggacacaugucc

SEQ ID NO: 1231987 - RNA, 16 nt, Human
gaggaggcagagaaga

SEQ ID NO: 1231988 - RNA, 20 nt, Human
gaggaggcagagaagaaaga

SEQ ID NO: 1231989 - RNA, 23 nt, Human
gauagauaggucagugcaaauac

SEQ ID NO: 1231990 - RNA, 21 nt, Human
gauauaaguguguguuuuuca

SEQ ID NO: 1231991 - RNA, 14 nt, Human
gauagaggaagccu

SEQ ID NO: 1231992 - RNA, 15 nt, Human
gauagaggaagccug

SEQ ID NO: 1231993 - RNA, 21 nt, Human
gauagaggaagccugauuaaa

SEQ ID NO: 1231994 - RNA, 22 nt, Human
gauagaggaagccugauuaaag

SEQ ID NO: 1231995 - RNA, 21 nt, Human
gaguugaaaaucuuauaauuu

SEQ ID NO: 1231996 - RNA, 15 nt, Human
gagucaaaaauuaaa

SEQ ID NO: 1231997 - RNA, 16 nt, Human
gagucucugaggggcu

SEQ ID NO: 1231998 - RNA, 21 nt, Human
gaugccuggcgggguggggug

SEQ ID NO: 1231999 - RNA, 14 nt, Human
gaugacuauggaaa

SEQ ID NO: 1232000 - RNA, 21 nt, Human
gauuaacagguaugaaccacc

SEQ ID NO: 1232001 - RNA, 13 nt, Human
gcagauuauucac

SEQ ID NO: 1232002 - RNA, 16 nt, Human
gcagauuauucacuga

SEQ ID NO: 1232003 - RNA, 15 nt, Human
gcacuggccccaccc

SEQ ID NO: 1232004 - RNA, 15 nt, Human
gcacuggcgaggaga

SEQ ID NO: 1232005 - RNA, 16 nt, Human
gcacuggcgaggagag

SEQ ID NO: 1232006 - RNA, 18 nt, Human
gcacagccucuuagaugc

SEQ ID NO: 1232007 - RNA, 15 nt, Human
gcacagccucuuaga

SEQ ID NO: 1232008 - RNA, 15 nt, Human
gcaucaucucagcuc

SEQ ID NO: 1232009 - RNA, 23 nt, Human
gcaggucccuaauaaagcugugu

SEQ ID NO: 1232010 - RNA, 20 nt, Human
gcaggucccuaauaaagcug

SEQ ID NO: 1232011 - RNA, 21 nt, Human
gcaggucccuaauaaagcugu

SEQ ID NO: 1232012 - RNA, 16 nt, Human
gcaggucccuaauaaa

SEQ ID NO: 1232013 - RNA, 17 nt, Human
gcaggucccuaauaaag

SEQ ID NO: 1232014 - RNA, 18 nt, Human
gcaggucccuaauaaagc

SEQ ID NO: 1232015 - RNA, 19 nt, Human
gcaggucccuaauaaagcu

SEQ ID NO: 1232016 - RNA, 14 nt, Human
gcaggucccuaaua

SEQ ID NO: 1232017 - RNA, 15 nt, Human
gcaggucccuaauaa

SEQ ID NO: 1232018 - RNA, 19 nt, Human
gccagauuuuccugaaaac

SEQ ID NO: 1232019 - RNA, 16 nt, Human
gccaggcuggagugca

SEQ ID NO: 1232020 - RNA, 13 nt, Human
gccaggcuggguc

SEQ ID NO: 1232021 - RNA, 18 nt, Human
gccaggcuggagugcagu

SEQ ID NO: 1232022 - RNA, 19 nt, Human
gccaggcuggagugcagug

SEQ ID NO: 1232023 - RNA, 14 nt, Human
gccagggagcgagu

SEQ ID NO: 1232024 - RNA, 19 nt, Human
gccaugggcacugugggua

SEQ ID NO: 1232025 - RNA, 18 nt, Human
gccacggggacucagccc

SEQ ID NO: 1232026 - RNA, 14 nt, Human
gccaccugucuguc

SEQ ID NO: 1232027 - RNA, 15 nt, Human
gccaccugucugucu

SEQ ID NO: 1232028 - RNA, 10 nt, Human
gccaccuguc

SEQ ID NO: 1232029 - RNA, 12 nt, Human
gccaccugucug

SEQ ID NO: 1232030 - RNA, 13 nt, Human
gccaccugucugu

SEQ ID NO: 1232031 - RNA, 21 nt, Human
gcgccucgccggaucugaggg

SEQ ID NO: 1232032 - RNA, 22 nt, Human
gcgcccuuaacugcauccagcc

SEQ ID NO: 1232033 - RNA, 13 nt, Human
gcuagauguaugu

SEQ ID NO: 1232034 - RNA, 16 nt, Human
gcuagauguauguacu

SEQ ID NO: 1232035 - RNA, 14 nt, Human
gcuagauguaugua

SEQ ID NO: 1232036 - RNA, 17 nt, Human
gcuauauaagacaagaa

SEQ ID NO: 1232037 - RNA, 12 nt, Human
gcuauccaccaa

SEQ ID NO: 1232038 - RNA, 17 nt, Human
gcuaucguaaaauuaag

SEQ ID NO: 1232039 - RNA, 15 nt, Human
gcuaucguaaaauua

SEQ ID NO: 1232040 - RNA, 16 nt, Human
gcuaucguaaaauuaa

SEQ ID NO: 1232041 - RNA, 18 nt, Human
gcucauggacuucugcca

SEQ ID NO: 1232042 - RNA, 14 nt, Human
gcucauuucaggau

SEQ ID NO: 1232043 - RNA, 21 nt, Human
gcuccuauucaacacacacau

SEQ ID NO: 1232044 - RNA, 21 nt, Human
gcuccuccaggguggcagcaa

SEQ ID NO: 1232045 - RNA, 22 nt, Human
gcuccuccaggguggcagcaac

SEQ ID NO: 1232046 - RNA, 21 nt, Human
gcuucucagauuucugaggaa

SEQ ID NO: 1232047 - RNA, 22 nt, Human
gcuucucagauuucugaggaaa

SEQ ID NO: 1232048 - RNA, 19 nt, Human
gcuucuguuuuauaauuuu

SEQ ID NO: 1232049 - RNA, 12 nt, Human
gcuuuguauaga

SEQ ID NO: 1232050 - RNA, 13 nt, Human
gcuuuguauagaa

SEQ ID NO: 1232051 - RNA, 14 nt, Human
gcuuuguauagaac

SEQ ID NO: 1232052 - RNA, 20 nt, Human
gcuuuguauagaaccucuuu

SEQ ID NO: 1232053 - RNA, 13 nt, Human
gcuuuuaugugaa

SEQ ID NO: 1232054 - RNA, 15 nt, Human
gcuuuuaugugaaac

SEQ ID NO: 1232055 - RNA, 22 nt, Human
gcuggugcccugcuuucagaua

SEQ ID NO: 1232056 - RNA, 21 nt, Human
gcugguguaugugugaaguga

SEQ ID NO: 1232057 - RNA, 16 nt, Human
gcuguguggcagucug

SEQ ID NO: 1232058 - RNA, 23 nt, Human
gcuggaaaaguauguuagugcaa

SEQ ID NO: 1232059 - RNA, 21 nt, Human
gcuggaaaaguauguuagugc

SEQ ID NO: 1232060 - RNA, 16 nt, Human
gcuggcauuacaggug

SEQ ID NO: 1232061 - RNA, 16 nt, Human
gcucuccaaaccacuu

SEQ ID NO: 1232062 - RNA, 17 nt, Human
gcucuccaaaccacuuu

SEQ ID NO: 1232063 - RNA, 22 nt, Human
gcucuccaaaccacuuuuugca

SEQ ID NO: 1232064 - RNA, 19 nt, Human
gcucuugaugccuggcggg

SEQ ID NO: 1232065 - RNA, 13 nt, Human
ggauucuuaaagu

SEQ ID NO: 1232066 - RNA, 12 nt, Human
ggcagagccagg

SEQ ID NO: 1232067 - RNA, 13 nt, Human
ggcagagccagga

SEQ ID NO: 1232068 - RNA, 14 nt, Human
ggcagagccaggaa

SEQ ID NO: 1232069 - RNA, 16 nt, Human
ggcagagccaggaaga

SEQ ID NO: 1232070 - RNA, 17 nt, Human
ggcagagccaggaagau

SEQ ID NO: 1232071 - RNA, 18 nt, Human
ggaugaugacuauggaaa

SEQ ID NO: 1232072 - RNA, 12 nt, Human
ggauuauauuau

SEQ ID NO: 1232073 - RNA, 22 nt, Human
ggauuccacucguguguuucua

SEQ ID NO: 1232074 - RNA, 19 nt, Human
gcuuuuaugugaaacaugu

SEQ ID NO: 1232075 - RNA, 20 nt, Human
gcuuuuaugugaaacauguu

SEQ ID NO: 1232076 - RNA, 21 nt, Human
gcuuuuaugugaaacauguuu

SEQ ID NO: 1232077 - RNA, 20 nt, Human
ggacauuugcucauggaauu

SEQ ID NO: 1232078 - RNA, 14 nt, Human
ggaccaaaaaccag

SEQ ID NO: 1232079 - RNA, 17 nt, Human
ggacauuugcucaugga

SEQ ID NO: 1232080 - RNA, 19 nt, Human
ggacugaauuaugaaacuu

SEQ ID NO: 1232081 - RNA, 17 nt, Human
ggacugaauuaugaaac

SEQ ID NO: 1232082 - RNA, 14 nt, Human
ggacugagaaauuu

SEQ ID NO: 1232083 - RNA, 12 nt, Human
ggagaaggaagg

SEQ ID NO: 1232084 - RNA, 14 nt, Human
ggagaagaacugaa

SEQ ID NO: 1232085 - RNA, 11 nt, Human
ggagaagaacu

SEQ ID NO: 1232086 - RNA, 18 nt, Human
ggacugagaaauuuauaa

SEQ ID NO: 1232087 - RNA, 16 nt, Human
ggagucaaaaauuaaa

SEQ ID NO: 1232088 - RNA, 12 nt, Human
ggaggggcagag

SEQ ID NO: 1232089 - RNA, 13 nt, Human
ggaggggcagagc

SEQ ID NO: 1232090 - RNA, 15 nt, Human
ggaggggcagagcca

SEQ ID NO: 1232091 - RNA, 16 nt, Human
ggaggggcagagccag

SEQ ID NO: 1232092 - RNA, 15 nt, Human
ggaggacccaggaca

SEQ ID NO: 1232093 - RNA, 16 nt, Human
ggaggacccaggacag

SEQ ID NO: 1232094 - RNA, 14 nt, Human
ggaggcagagaaga

SEQ ID NO: 1232095 - RNA, 15 nt, Human
ggaggcagagaagaa

SEQ ID NO: 1232096 - RNA, 17 nt, Human
ggaggcaggaguuucgu

SEQ ID NO: 1232097 - RNA, 19 nt, Human
ggaggcagagaagaaagaa

SEQ ID NO: 1232098 - RNA, 16 nt, Human
ggagcccugggaggcu

SEQ ID NO: 1232099 - RNA, 19 nt, Human
ggagcccugggaggcucug

SEQ ID NO: 1232100 - RNA, 20 nt, Human
ggagcccugggaggcucugg

SEQ ID NO: 1232101 - RNA, 14 nt, Human
ggagcuagaauuug

SEQ ID NO: 1232102 - RNA, 17 nt, Human
ggcucuggagcccacug

SEQ ID NO: 1232103 - RNA, 19 nt, Human
ggcucuggagcccacugua

SEQ ID NO: 1232104 - RNA, 19 nt, Human
ggccggcuugccacacccc

SEQ ID NO: 1232105 - RNA, 23 nt, Human
ggcucuggagcccacuguacuug

SEQ ID NO: 1232106 - RNA, 18 nt, Human
ggcuggagcuagaauuug

SEQ ID NO: 1232107 - RNA, 20 nt, Human
ggcuggagugcaguggcgcg

SEQ ID NO: 1232108 - RNA, 14 nt, Human
ggcuugccacaccc

SEQ ID NO: 1232109 - RNA, 15 nt, Human
ggcuugccacacccc

SEQ ID NO: 1232110 - RNA, 14 nt, Human
gggaauugaggaca

SEQ ID NO: 1232111 - RNA, 15 nt, Human
ggcuuuguauagaac

SEQ ID NO: 1232112 - RNA, 15 nt, Human
gggaggaggcagaga

SEQ ID NO: 1232113 - RNA, 17 nt, Human
ucaggcuagauguaugu

SEQ ID NO: 1232114 - RNA, 19 nt, Human
ucaggagcccugggaggcu

SEQ ID NO: 1232115 - RNA, 20 nt, Human
ucaggagcccugggaggcuc

SEQ ID NO: 1232116 - RNA, 23 nt, Human
ucaggagcccugggaggcucugg

SEQ ID NO: 1232117 - RNA, 20 nt, Human
ucagccucccgaguagcugg

SEQ ID NO: 1232118 - RNA, 16 nt, Human
ucagauaugauucaaa

SEQ ID NO: 1232119 - RNA, 15 nt, Human
ucagauaugauucaa

SEQ ID NO: 1232120 - RNA, 23 nt, Human
ucaccccuaaaagaaacccugca

SEQ ID NO: 1232121 - RNA, 20 nt, Human
ucacucuguucauuccucca

SEQ ID NO: 1232122 - RNA, 21 nt, Human
ucacucuguucauuccuccag

SEQ ID NO: 1232123 - RNA, 22 nt, Human
ucacucuguucauuccuccagg

SEQ ID NO: 1232124 - RNA, 20 nt, Human
ucacuuguuuuauuuaaccu

SEQ ID NO: 1232125 - RNA, 19 nt, Human
ucagaaacacccucacacu

SEQ ID NO: 1232126 - RNA, 21 nt, Human
ucagaaacacccucacacugg

SEQ ID NO: 1232127 - RNA, 22 nt, Human
ucagaaacacccucacacuggg

SEQ ID NO: 1232128 - RNA, 21 nt, Human
ucagaguaauccaagcaaaug

SEQ ID NO: 1232129 - RNA, 22 nt, Human
ucagaguaauccaagcaaaugu

SEQ ID NO: 1232130 - RNA, 19 nt, Human
uccacagaagcuccaggua

SEQ ID NO: 1232131 - RNA, 14 nt, Human
uccaggguggcagc

SEQ ID NO: 1232132 - RNA, 15 nt, Human
uccaggguggcagca

SEQ ID NO: 1232133 - RNA, 18 nt, Human
uccaggguggcagcaaca

SEQ ID NO: 1232134 - RNA, 20 nt, Human
uccaggguggcagcaacaau

SEQ ID NO: 1232135 - RNA, 14 nt, Human
ucauagcuaaaaaa

SEQ ID NO: 1232136 - RNA, 16 nt, Human
ucauuuccaagcaagu

SEQ ID NO: 1232137 - RNA, 13 nt, Human
ucauuuccaagca

SEQ ID NO: 1232138 - RNA, 12 nt, Human
ucauugugaaau

SEQ ID NO: 1232139 - RNA, 15 nt, Human
ucauugugaaauuau

SEQ ID NO: 1232140 - RNA, 17 nt, Human
ucauugugaaauuauuc

SEQ ID NO: 1232141 - RNA, 18 nt, Human
ucauugugaaauuauuca

SEQ ID NO: 1232142 - RNA, 16 nt, Human
ucauuccauucuggaa

SEQ ID NO: 1232143 - RNA, 19 nt, Human
ucauuccauucuggaagug

SEQ ID NO: 1232144 - RNA, 12 nt, Human
ucauuucaggau

SEQ ID NO: 1232145 - RNA, 23 nt, Human
ucauuauuuuauuaugaaacuug

SEQ ID NO: 1232146 - RNA, 14 nt, Human
ucauuccauucugg

SEQ ID NO: 1232147 - RNA, 15 nt, Human
ucauuccauucugga

SEQ ID NO: 1232148 - RNA, 21 nt, Human
ucaauaaaauccauacauuug

SEQ ID NO: 1232149 - RNA, 22 nt, Human
ucaaugccccugaauuuaaaua

SEQ ID NO: 1232150 - RNA, 20 nt, Human
ucaaugccccugaauuuaaa

SEQ ID NO: 1232151 - RNA, 18 nt, Human
ucaaugccccugaauuua

SEQ ID NO: 1232152 - RNA, 17 nt, Human
ucaaugccccugaauuu

SEQ ID NO: 1232153 - RNA, 15 nt, Human
uauuuucauucuccu

SEQ ID NO: 1232154 - RNA, 13 nt, Human
uauuuuauuauga

SEQ ID NO: 1232155 - RNA, 18 nt, Human
uauuuuauuaugaaacuu

SEQ ID NO: 1232156 - RNA, 23 nt, Human
uauuuuauuaugaaacuugugua

SEQ ID NO: 1232157 - RNA, 13 nt, Human
uauuuuuugaaaa

SEQ ID NO: 1232158 - RNA, 15 nt, Human
ucaaauugugugaaa

SEQ ID NO: 1232159 - RNA, 14 nt, Human
ucaaauugugugaa

SEQ ID NO: 1232160 - RNA, 17 nt, Human
ucaaauuguaagcaugc

SEQ ID NO: 1232161 - RNA, 20 nt, Human
ucaaauuguaagcaugcaca

SEQ ID NO: 1232162 - RNA, 15 nt, Human
ucaaauccuugaaga

SEQ ID NO: 1232163 - RNA, 12 nt, Human
ucaaaaauuaaa

SEQ ID NO: 1232164 - RNA, 20 nt, Human
ucaaaaauuaucuauagcua

SEQ ID NO: 1232165 - RNA, 23 nt, Human
ucaaaaauuaaaccggaccaucu

SEQ ID NO: 1232166 - RNA, 22 nt, Human
ucaaauauauucagccuggcuu

SEQ ID NO: 1232167 - RNA, 23 nt, Human
ucaaauauauucagccuggcuuc

SEQ ID NO: 1232168 - RNA, 20 nt, Human
ucaaaucaaucuguaaaacu

SEQ ID NO: 1232169 - RNA, 16 nt, Human
uauguugcauagaaua

SEQ ID NO: 1232170 - RNA, 12 nt, Human
uauguugcauag

SEQ ID NO: 1232171 - RNA, 12 nt, Human
uauguaaauccc

SEQ ID NO: 1232172 - RNA, 15 nt, Human
uauguaaaucccauu

SEQ ID NO: 1232173 - RNA, 19 nt, Human
uauguaaaucccauuauuc

SEQ ID NO: 1232174 - RNA, 20 nt, Human
uauguaaaucccauuauuca

SEQ ID NO: 1232175 - RNA, 21 nt, Human
uauguaaaucccauuauucaa

SEQ ID NO: 1232176 - RNA, 23 nt, Human
uauguaaaucccauuauucaaag

SEQ ID NO: 1232177 - RNA, 17 nt, Human
uauguacuucaugcugu

SEQ ID NO: 1232178 - RNA, 13 nt, Human
uauguacuucaug

SEQ ID NO: 1232179 - RNA, 14 nt, Human
uauuguuuuacaau

SEQ ID NO: 1232180 - RNA, 15 nt, Human
uauuguuuuacaaua

SEQ ID NO: 1232181 - RNA, 17 nt, Human
uauuguuuuacaauagu

SEQ ID NO: 1232182 - RNA, 20 nt, Human
uauuguuuuacaauaguucu

SEQ ID NO: 1232183 - RNA, 22 nt, Human
uauuguuuuacaauaguucugu

SEQ ID NO: 1232184 - RNA, 24 nt, Human
uauuuauaaaaauaaaaaacacug

SEQ ID NO: 1232185 - RNA, 22 nt, Human
uauuuaguuguaaaccaaguga

SEQ ID NO: 1232186 - RNA, 14 nt, Human
uauuacaaugauca

SEQ ID NO: 1232187 - RNA, 15 nt, Human
uauuacaaugaucac

SEQ ID NO: 1232188 - RNA, 12 nt, Human
uauuacaguaua

SEQ ID NO: 1232189 - RNA, 13 nt, Human
uauuacaguauaa

SEQ ID NO: 1232190 - RNA, 14 nt, Human
uauuacaguauaau

SEQ ID NO: 1232191 - RNA, 17 nt, Human
uauucguuaucuaauag

SEQ ID NO: 1232192 - RNA, 16 nt, Human
ucccucucucauaccc

SEQ ID NO: 1232193 - RNA, 20 nt, Human
ucccuggaaaccuuccaccc

SEQ ID NO: 1232194 - RNA, 22 nt, Human
ucccuggaaaccuuccacccag

SEQ ID NO: 1232195 - RNA, 23 nt, Human
ucccuggaaaccuuccacccagu

SEQ ID NO: 1232196 - RNA, 17 nt, Human
ucccuucaugcauggaa

SEQ ID NO: 1232197 - RNA, 18 nt, Human
ucccuucaugcauggaaa

SEQ ID NO: 1232198 - RNA, 16 nt, Human
ucccuugaugaagaag

SEQ ID NO: 1232199 - RNA, 15 nt, Human
ucccuugaugaagaa

SEQ ID NO: 1232200 - RNA, 15 nt, Human
ucccuaauaaagcug

SEQ ID NO: 1232201 - RNA, 19 nt, Human
ucccuaucuuugccacccu

SEQ ID NO: 1232202 - RNA, 16 nt, Human
ucccuaauaaagcugu

SEQ ID NO: 1232203 - RNA, 11 nt, Human
ucccuccuggg

SEQ ID NO: 1232204 - RNA, 19 nt, Human
ucccuccugggaaugaagc

SEQ ID NO: 1232205 - RNA, 14 nt, Human
uccugccucagccu

SEQ ID NO: 1232206 - RNA, 17 nt, Human
uccugccucagccuccc

SEQ ID NO: 1232207 - RNA, 17 nt, Human
uccuuggccaugcagaa

SEQ ID NO: 1232208 - RNA, 16 nt, Human
uccuuggccaugcaga

SEQ ID NO: 1232209 - RNA, 18 nt, Human
ucuaugaaauauuauguu

SEQ ID NO: 1232210 - RNA, 17 nt, Human
ucuaugaaauauuaugu

SEQ ID NO: 1232211 - RNA, 14 nt, Human
ucuaugaaauauua

SEQ ID NO: 1232212 - RNA, 16 nt, Human
ucuaugcugaguuugu

SEQ ID NO: 1232213 - RNA, 20 nt, Human
ucuaugcugaguuugugcug

SEQ ID NO: 1232214 - RNA, 19 nt, Human
ucuagugagcagucaggaa

SEQ ID NO: 1232215 - RNA, 22 nt, Human
ucuagugagcagucaggaaaga

SEQ ID NO: 1232216 - RNA, 16 nt, Human
ucuaggacugaauuau

SEQ ID NO: 1232217 - RNA, 23 nt, Human
ucuaggacugaauuaugaaacuu

SEQ ID NO: 1232218 - RNA, 22 nt, Human
ucgugggacagucaccucaugg

SEQ ID NO: 1232219 - RNA, 21 nt, Human
ucguggaacaguuaccucugc

SEQ ID NO: 1232220 - RNA, 16 nt, Human
ucuaauagggcaauua

SEQ ID NO: 1232221 - RNA, 22 nt, Human
ucuaauagggcaauuaauuccu

SEQ ID NO: 1232222 - RNA, 13 nt, Human
ucguuaauuugua

SEQ ID NO: 1232223 - RNA, 21 nt, Human
ucguguguuucuauuuuuuga

SEQ ID NO: 1232224 - RNA, 14 nt, Human
ucugaaaauugaug

SEQ ID NO: 1232225 - RNA, 22 nt, Human
ucugaaaauugaugggauuugg

SEQ ID NO: 1232226 - RNA, 15 nt, Human
ucugacauaaguauu

SEQ ID NO: 1232227 - RNA, 13 nt, Human
ucugacauaaucc

SEQ ID NO: 1232228 - RNA, 19 nt, Human
ucugacauaauccaguaaa

SEQ ID NO: 1232229 - RNA, 23 nt, Human
ucugacauaauccaguaaaauaa

SEQ ID NO: 1232230 - RNA, 20 nt, Human
ucugaaauuuccugggagcu

SEQ ID NO: 1232231 - RNA, 18 nt, Human
ucugaaauuuccugggag

SEQ ID NO: 1232232 - RNA, 17 nt, Human
ucugaaauuuccuggga

SEQ ID NO: 1232233 - RNA, 14 nt, Human
ucugaggaauucug

SEQ ID NO: 1232234 - RNA, 15 nt, Human
ucugaggaauucugu

SEQ ID NO: 1232235 - RNA, 16 nt, Human
ucugaggaauucugua

SEQ ID NO: 1232236 - RNA, 17 nt, Human
ucugaggaauucuguau

SEQ ID NO: 1232237 - RNA, 18 nt, Human
ucugaggaauucuguaua

SEQ ID NO: 1232238 - RNA, 19 nt, Human
ucugaggaauucuguauag

SEQ ID NO: 1232239 - RNA, 15 nt, Human
ucugcaacucugaag

SEQ ID NO: 1232240 - RNA, 14 nt, Human
ucugcaacucugaa

SEQ ID NO: 1232241 - RNA, 19 nt, Human
ucuccugccucagccuccc

SEQ ID NO: 1232242 - RNA, 21 nt, Human
ucuccuggaagugcuaauuuu

SEQ ID NO: 1232243 - RNA, 18 nt, Human
ucucaauauucaauaaag

SEQ ID NO: 1232244 - RNA, 17 nt, Human
ucucaauauucaauaaa

SEQ ID NO: 1232245 - RNA, 20 nt, Human
ucucaauauucaauaaagcu

SEQ ID NO: 1232246 - RNA, 15 nt, Human
ucucugauacagaaa

SEQ ID NO: 1232247 - RNA, 21 nt, Human
ucucugaggggcuaccaggaa

SEQ ID NO: 1232248 - RNA, 22 nt, Human
ucucugaggggcuaccaggaaa

SEQ ID NO: 1232249 - RNA, 13 nt, Human
ucucugcaggucc

SEQ ID NO: 1232250 - RNA, 14 nt, Human
ucucugcagguccc

SEQ ID NO: 1232251 - RNA, 15 nt, Human
ucucugcaggucccu

SEQ ID NO: 1232252 - RNA, 16 nt, Human
ucucugcaggucccua

SEQ ID NO: 1232253 - RNA, 18 nt, Human
ucucugcaggucccuaau

SEQ ID NO: 1232254 - RNA, 23 nt, Human
ucucugaggggcuaccaggaaag

SEQ ID NO: 1232255 - RNA, 22 nt, Human
ucuuaggguuaugauuaaguaa

SEQ ID NO: 1232256 - RNA, 21 nt, Human
ucuucagcaaaaauauuuuau

SEQ ID NO: 1232257 - RNA, 22 nt, Human
ucuucagcaaaaauauuuuaug

SEQ ID NO: 1232258 - RNA, 23 nt, Human
ucuucagcaaaaauauuuuauga

SEQ ID NO: 1232259 - RNA, 13 nt, Human
ucuugaaaaaugc

SEQ ID NO: 1232260 - RNA, 14 nt, Human
ucuuccuucccugc

SEQ ID NO: 1232261 - RNA, 15 nt, Human
ucuuccuucccugcu

SEQ ID NO: 1232262 - RNA, 17 nt, Human
ucuuccuucccugcugu

SEQ ID NO: 1232263 - RNA, 12 nt, Human
ucuuaaaguuga

SEQ ID NO: 1232264 - RNA, 13 nt, Human
ucuuaaaguugaa

SEQ ID NO: 1232265 - RNA, 14 nt, Human
ucuuaaaguugaau

SEQ ID NO: 1232266 - RNA, 14 nt, Human
ucugucugucccaa

SEQ ID NO: 1232267 - RNA, 15 nt, Human
ucugucugucccaaa

SEQ ID NO: 1232268 - RNA, 16 nt, Human
ucugucugucccaaag

SEQ ID NO: 1232269 - RNA, 15 nt, Human
ucugucugucugucc

SEQ ID NO: 1232270 - RNA, 18 nt, Human
ucugucugucugucccaa

SEQ ID NO: 1232271 - RNA, 16 nt, Human
ucuuaaccagaucauu

SEQ ID NO: 1232272 - RNA, 17 nt, Human
ucuuaaccagaucauug

SEQ ID NO: 1232273 - RNA, 16 nt, Human
ucuuaaaguugaauuu

SEQ ID NO: 1232274 - RNA, 19 nt, Human
ucuuaaaguugaauuuauu

SEQ ID NO: 1232275 - RNA, 20 nt, Human
ucuuaaaguugaauuuauug

SEQ ID NO: 1232276 - RNA, 21 nt, Human
ucuuaaaguugaauuuauugg

SEQ ID NO: 1232277 - RNA, 22 nt, Human
ucuuaaaguugaauuuauuggc

SEQ ID NO: 1232278 - RNA, 18 nt, Human
ucuuaagaagacugcauu

SEQ ID NO: 1232279 - RNA, 12 nt, Human
ucuuaagaagac

SEQ ID NO: 1232280 - RNA, 22 nt, Human
ucuuaaccagaucauugugaaa

SEQ ID NO: 1232281 - RNA, 22 nt, Human
ucugucucuggauuauauuaug

SEQ ID NO: 1232282 - RNA, 14 nt, Human
ugcacaguaaaaau

SEQ ID NO: 1232283 - RNA, 13 nt, Human
ugcaaccuccacc

SEQ ID NO: 1232284 - RNA, 15 nt, Human
ugcaaccuccaccuc

SEQ ID NO: 1232285 - RNA, 14 nt, Human
ugcaaccucugccu

SEQ ID NO: 1232286 - RNA, 22 nt, Human
ugcaacucugaaggguaauuau

SEQ ID NO: 1232287 - RNA, 18 nt, Human
ugcaacuuuguauaaaag

SEQ ID NO: 1232288 - RNA, 14 nt, Human
ugcaaaaaggguca

SEQ ID NO: 1232289 - RNA, 12 nt, Human
ugccuaaggacu

SEQ ID NO: 1232290 - RNA, 13 nt, Human
ugccuaaggacuu

SEQ ID NO: 1232291 - RNA, 14 nt, Human
ugccuaaggacuuc

SEQ ID NO: 1232292 - RNA, 15 nt, Human
ugccuaaggacuucu

SEQ ID NO: 1232293 - RNA, 16 nt, Human
ugccuaaggacuucuu

SEQ ID NO: 1232294 - RNA, 20 nt, Human
ugccuaaggacuucuuuaau

SEQ ID NO: 1232295 - RNA, 21 nt, Human
ugccuaaggacuucuuuaauu

SEQ ID NO: 1232296 - RNA, 16 nt, Human
ugccucccuucaugca

SEQ ID NO: 1232297 - RNA, 14 nt, Human
ugccucuucccucu

SEQ ID NO: 1232298 - RNA, 16 nt, Human
ugcccugcuuucagau

SEQ ID NO: 1232299 - RNA, 17 nt, Human
ugcccugcuuucagaua

SEQ ID NO: 1232300 - RNA, 12 nt, Human
ugcccugcuuuc

SEQ ID NO: 1232301 - RNA, 14 nt, Human
ugcccugcccugcc

SEQ ID NO: 1232302 - RNA, 15 nt, Human
ugcccugcccugcca

SEQ ID NO: 1232303 - RNA, 18 nt, Human
ugcccugcccugccaccu

SEQ ID NO: 1232304 - RNA, 14 nt, Human
ugcauuauauuuau

SEQ ID NO: 1232305 - RNA, 18 nt, Human
ugaccucgugauccaccc

SEQ ID NO: 1232306 - RNA, 22 nt, Human
ugacccuccaccgcagaaggaa

SEQ ID NO: 1232307 - RNA, 23 nt, Human
ugacccuccaccgcagaaggaag

SEQ ID NO: 1232308 - RNA, 20 nt, Human
ugaccucaagugaucugccc

SEQ ID NO: 1232309 - RNA, 16 nt, Human
ucuugaauaauguaag

SEQ ID NO: 1232310 - RNA, 12 nt, Human
ugacucuuaaga

SEQ ID NO: 1232311 - RNA, 13 nt, Human
ugacucuuaagaa

SEQ ID NO: 1232312 - RNA, 13 nt, Human
ugacugauucuuc

SEQ ID NO: 1232313 - RNA, 14 nt, Human
ugacugauucuuca

SEQ ID NO: 1232314 - RNA, 15 nt, Human
ugacugauucuucag

SEQ ID NO: 1232315 - RNA, 16 nt, Human
ugacugauucuucagc

SEQ ID NO: 1232316 - RNA, 17 nt, Human
ugacugauucuucagca

SEQ ID NO: 1232317 - RNA, 17 nt, Human
ugagaaaucuaaaaaac

SEQ ID NO: 1232318 - RNA, 19 nt, Human
ugagaggcugggaauggag

SEQ ID NO: 1232319 - RNA, 20 nt, Human
ugagcagucaggaaagagaa

SEQ ID NO: 1232320 - RNA, 17 nt, Human
ugagcagucaggaaaga

SEQ ID NO: 1232321 - RNA, 19 nt, Human
ugaucucagcucacugcaa

SEQ ID NO: 1232322 - RNA, 18 nt, Human
ugaucucagcucacugca

SEQ ID NO: 1232323 - RNA, 17 nt, Human
ugauauaaguguguguu

SEQ ID NO: 1232324 - RNA, 23 nt, Human
ugauauaaguguguguuuuucau

SEQ ID NO: 1232325 - RNA, 13 nt, Human
ugauguacaugua

SEQ ID NO: 1232326 - RNA, 15 nt, Human
uggaccaaaaaccag

SEQ ID NO: 1232327 - RNA, 17 nt, Human
uggaccaaaaaccagua

SEQ ID NO: 1232328 - RNA, 23 nt, Human
uggaggggcagagccaggaagau

SEQ ID NO: 1232329 - RNA, 13 nt, Human
uggaggggcagag

SEQ ID NO: 1232330 - RNA, 14 nt, Human
uggaggggcagagc

SEQ ID NO: 1232331 - RNA, 16 nt, Human
uggaggggcagagcca

SEQ ID NO: 1232332 - RNA, 18 nt, Human
uggaggggcagagccagg

SEQ ID NO: 1232333 - RNA, 21 nt, Human
uggaggggcagagccaggaag

SEQ ID NO: 1232334 - RNA, 14 nt, Human
uggagaugaggcca

SEQ ID NO: 1232335 - RNA, 15 nt, Human
uggagaugaggccag

SEQ ID NO: 1232336 - RNA, 16 nt, Human
uggagaugaggccaga

SEQ ID NO: 1232337 - RNA, 17 nt, Human
uggagaugaggccagac

SEQ ID NO: 1232338 - RNA, 18 nt, Human
uggagaugaggccagacc

SEQ ID NO: 1232339 - RNA, 19 nt, Human
uggaucaaauccagccugc

SEQ ID NO: 1232340 - RNA, 15 nt, Human
ugcuuaauaaauugu

SEQ ID NO: 1232341 - RNA, 16 nt, Human
ugcuuaauucaaauaa

SEQ ID NO: 1232342 - RNA, 17 nt, Human
ugcuuaauucaaauaau

SEQ ID NO: 1232343 - RNA, 18 nt, Human
ugcuuaauucaaauaaua

SEQ ID NO: 1232344 - RNA, 20 nt, Human
ugcuuaauucaaauaauaau

SEQ ID NO: 1232345 - RNA, 16 nt, Human
ugcuucccuuuccuga

SEQ ID NO: 1232346 - RNA, 21 nt, Human
ugcuucucagauuucugagga

SEQ ID NO: 1232347 - RNA, 22 nt, Human
ugcuucucagauuucugaggaa

SEQ ID NO: 1232348 - RNA, 13 nt, Human
ugcuucuccagcc

SEQ ID NO: 1232349 - RNA, 19 nt, Human
uggaaaccuuccacccagu

SEQ ID NO: 1232350 - RNA, 16 nt, Human
uggaaaccuuccaccc

SEQ ID NO: 1232351 - RNA, 22 nt, Human
uggaaaaguauguuagugcaaa

SEQ ID NO: 1232352 - RNA, 18 nt, Human
uggaacauaaaaaggaca

SEQ ID NO: 1232353 - RNA, 20 nt, Human
uggaacauaaaaaggacauc

SEQ ID NO: 1232354 - RNA, 14 nt, Human
uggaacgcguugaa

SEQ ID NO: 1232355 - RNA, 15 nt, Human
uggaacgcguugaaa

SEQ ID NO: 1232356 - RNA, 16 nt, Human
uggaacgcguugaaau

SEQ ID NO: 1232357 - RNA, 17 nt, Human
uggaacgcguugaaauu

SEQ ID NO: 1232358 - RNA, 22 nt, Human
ugcuucuguuuuauaauuuugu

SEQ ID NO: 1232359 - RNA, 17 nt, Human
ugcuuuggaaaacccag

SEQ ID NO: 1232360 - RNA, 14 nt, Human
ugggaaugaagcaa

SEQ ID NO: 1232361 - RNA, 13 nt, Human
uggcuuuucugau

SEQ ID NO: 1232362 - RNA, 17 nt, Human
uggggccaggcuggguc

SEQ ID NO: 1232363 - RNA, 20 nt, Human
uggggccaggcugggucgcc

SEQ ID NO: 1232364 - RNA, 13 nt, Human
uggggggggugcu

SEQ ID NO: 1232365 - RNA, 23 nt, Human
ugggguuaucugaagucagaucu

SEQ ID NO: 1232366 - RNA, 17 nt, Human
ugggcagcaauuuaaau

SEQ ID NO: 1232367 - RNA, 18 nt, Human
ugggcagcaauuuaaaug

SEQ ID NO: 1232368 - RNA, 19 nt, Human
ugggcagcaauuuaaaugu

SEQ ID NO: 1232369 - RNA, 21 nt, Human
ugggcagcaauuuaaauguua

SEQ ID NO: 1232370 - RNA, 12 nt, Human
ugggauaaaugc

SEQ ID NO: 1232371 - RNA, 13 nt, Human
ugggauaaaugcc

SEQ ID NO: 1232372 - RNA, 14 nt, Human
ugggauaaaugcca

SEQ ID NO: 1232373 - RNA, 23 nt, Human
uguauagaaccucuuugucuaca

SEQ ID NO: 1232374 - RNA, 15 nt, Human
uguauagauuagaau

SEQ ID NO: 1232375 - RNA, 21 nt, Human
uguauagauuagaauucugua

SEQ ID NO: 1232376 - RNA, 23 nt, Human
uguauagauuagagaguguugaa

SEQ ID NO: 1232377 - RNA, 22 nt, Human
uguaguguuggagaagaacuga

SEQ ID NO: 1232378 - RNA, 13 nt, Human
uguauaaaauaau

SEQ ID NO: 1232379 - RNA, 14 nt, Human
uguauaaaauaauu

SEQ ID NO: 1232380 - RNA, 21 nt, Human
uguaguguuggagaagaacug

SEQ ID NO: 1232381 - RNA, 20 nt, Human
uguaguguuggagaagaacu

SEQ ID NO: 1232382 - RNA, 19 nt, Human
uguauuuuaaaagaaugau

SEQ ID NO: 1232383 - RNA, 18 nt, Human
uguauuuuaaaagaauga

SEQ ID NO: 1232384 - RNA, 16 nt, Human
ugucucagauuuuauu

SEQ ID NO: 1232385 - RNA, 20 nt, Human
ugucucagauuuuauuaugu

SEQ ID NO: 1232386 - RNA, 22 nt, Human
ugucucagauuuuauuauguaa

SEQ ID NO: 1232387 - RNA, 20 nt, Human
ugucuauggauuugccuucu

SEQ ID NO: 1232388 - RNA, 20 nt, Human
ugucugagacagaaucucag

SEQ ID NO: 1232389 - RNA, 14 nt, Human
ugucugucuguccc

SEQ ID NO: 1232390 - RNA, 15 nt, Human
ugucugucuguccca

SEQ ID NO: 1232391 - RNA, 15 nt, Human
ugucugucugucugu

SEQ ID NO: 1232392 - RNA, 16 nt, Human
ugucugucugucuguc

SEQ ID NO: 1232393 - RNA, 22 nt, Human
ugucuacacuaagagagaauga

SEQ ID NO: 1232394 - RNA, 18 nt, Human
ugucuacaccauuaugug

SEQ ID NO: 1232395 - RNA, 17 nt, Human
ugucuacacuaagagag

SEQ ID NO: 1232396 - RNA, 17 nt, Human
ugucuacaccauuaugu

SEQ ID NO: 1232397 - RNA, 16 nt, Human
uggguagacacacaug

SEQ ID NO: 1232398 - RNA, 14 nt, Human
uggguagacacaca

SEQ ID NO: 1232399 - RNA, 16 nt, Human
uggugacuuuggauaa

SEQ ID NO: 1232400 - RNA, 18 nt, Human
uggugacuuuggauaaua

SEQ ID NO: 1232401 - RNA, 19 nt, Human
uggugacuuuggauaauaa

SEQ ID NO: 1232402 - RNA, 23 nt, Human
uggugacuuuggauaauaaggaa

SEQ ID NO: 1232403 - RNA, 14 nt, Human
uggugguagagaag

SEQ ID NO: 1232404 - RNA, 20 nt, Human
ugguucccuugaugaagaag

SEQ ID NO: 1232405 - RNA, 17 nt, Human
ugguucccuugaugaag

SEQ ID NO: 1232406 - RNA, 16 nt, Human
ugguucccuugaugaa

SEQ ID NO: 1232407 - RNA, 20 nt, Human
ugguuguacauauaagugau

SEQ ID NO: 1232408 - RNA, 21 nt, Human
uguacaaaguauuaagcauau

SEQ ID NO: 1232409 - RNA, 12 nt, Human
uguaaugaaaac

SEQ ID NO: 1232410 - RNA, 13 nt, Human
uguaaugaaaacc

SEQ ID NO: 1232411 - RNA, 17 nt, Human
uguaaugaaaaccacau

SEQ ID NO: 1232412 - RNA, 15 nt, Human
uguacaaaguauuaa

SEQ ID NO: 1232413 - RNA, 17 nt, Human
uguacaaaguauuaagc

SEQ ID NO: 1232414 - RNA, 18 nt, Human
uguacaaaguauuaagca

SEQ ID NO: 1232415 - RNA, 19 nt, Human
uguacaaaguauuaagcau

SEQ ID NO: 1232416 - RNA, 20 nt, Human
uguacaaaguauuaagcaua

SEQ ID NO: 1232417 - RNA, 13 nt, Human
uuggguguauugu

SEQ ID NO: 1232418 - RNA, 15 nt, Human
uuggguguauugugc

SEQ ID NO: 1232419 - RNA, 16 nt, Human
uuggguguauugugcg

SEQ ID NO: 1232420 - RNA, 22 nt, Human
uugucucagauuuuauuaugua

SEQ ID NO: 1232421 - RNA, 15 nt, Human
uugucuagugaaacu

SEQ ID NO: 1232422 - RNA, 20 nt, Human
uugucuacaccauuaugugc

SEQ ID NO: 1232423 - RNA, 13 nt, Human
uugucucagauuu

SEQ ID NO: 1232424 - RNA, 16 nt, Human
uugucucagauuuuau

SEQ ID NO: 1232425 - RNA, 20 nt, Human
uugucucagauuuuauuaug

SEQ ID NO: 1232426 - RNA, 13 nt, Human
uugugaaauuauu

SEQ ID NO: 1232427 - RNA, 14 nt, Human
uuguauuacaaauc

SEQ ID NO: 1232428 - RNA, 19 nt, Human
uugucuacaccauuaugug

SEQ ID NO: 1232429 - RNA, 14 nt, Human
uuguacucaauuuu

SEQ ID NO: 1232430 - RNA, 15 nt, Human
uuguacucaauuuua

SEQ ID NO: 1232431 - RNA, 17 nt, Human
uuguuguuuguuuaguc

SEQ ID NO: 1232432 - RNA, 17 nt, Human
uuguuagaucuaguuca

SEQ ID NO: 1232433 - RNA, 18 nt, Human
uuguguuuugcaagccag

SEQ ID NO: 1232434 - RNA, 18 nt, Human
uuguuaaucuucaauagu

SEQ ID NO: 1232435 - RNA, 22 nt, Human
uugugcgcuaaacuuuucugau

SEQ ID NO: 1232436 - RNA, 23 nt, Human
uugugcgcuaaacuuuucugaua

SEQ ID NO: 1232437 - RNA, 19 nt, Human
uugugcugggguuaucuga

SEQ ID NO: 1232438 - RNA, 20 nt, Human
uuguguugaagagguuuuaa

SEQ ID NO: 1232439 - RNA, 13 nt, Human
uuuaauaauguuu

SEQ ID NO: 1232440 - RNA, 14 nt, Human
uuuaauaaacacuc

SEQ ID NO: 1232441 - RNA, 20 nt, Human
uuuaagacgaaacauuuguu

SEQ ID NO: 1232442 - RNA, 19 nt, Human
uuuaacucuauaauguguu

SEQ ID NO: 1232443 - RNA, 21 nt, Human
uuguuuggaccaaaaaccagu

SEQ ID NO: 1232444 - RNA, 16 nt, Human
uuuaacaacagcuggu

SEQ ID NO: 1232445 - RNA, 21 nt, Human
uuuauaaaaauaaaaaacacu

SEQ ID NO: 1232446 - RNA, 23 nt, Human
uuuauaaaaauaaaaaacacugg

SEQ ID NO: 1232447 - RNA, 21 nt, Human
uuuaauagguuuggacaaaau

SEQ ID NO: 1232448 - RNA, 14 nt, Human
uuuaauaauguuuc

SEQ ID NO: 1232449 - RNA, 18 nt, Human
uuuaauaauuauaugcua

SEQ ID NO: 1232450 - RNA, 21 nt, Human
uuuaauaauuauaugcuauuu

SEQ ID NO: 1232451 - RNA, 13 nt, Human
uuuaccacuugug

SEQ ID NO: 1232452 - RNA, 14 nt, Human
uuuauuauguaaau

SEQ ID NO: 1232453 - RNA, 16 nt, Human
uuuauuauguaaaucc

SEQ ID NO: 1232454 - RNA, 17 nt, Human
uuuauuauguaaauccc

SEQ ID NO: 1232455 - RNA, 22 nt, Human
uuuauaauuuugugaagcaaaa

SEQ ID NO: 1232456 - RNA, 13 nt, Human
uuucagauacugg

SEQ ID NO: 1232457 - RNA, 21 nt, Human
uuucagauacuggauuguacu

SEQ ID NO: 1232458 - RNA, 23 nt, Human
uucaguuauuauauuuacaaaug

SEQ ID NO: 1232459 - RNA, 20 nt, Human
uucauaaauaaaguuuguug

SEQ ID NO: 1232460 - RNA, 19 nt, Human
uuccagauccuggaaauca

SEQ ID NO: 1232461 - RNA, 18 nt, Human
uuccagauccuggaaauc

SEQ ID NO: 1232462 - RNA, 20 nt, Human
uucaugcuguucaugaaaga

SEQ ID NO: 1232463 - RNA, 12 nt, Human
uucaucuggaac

SEQ ID NO: 1232464 - RNA, 23 nt, Human
uucaucuggaaccaucagaaaca

SEQ ID NO: 1232465 - RNA, 17 nt, Human
uucaucuggaaccauca

SEQ ID NO: 1232466 - RNA, 15 nt, Human
uucaugcauggaaau

SEQ ID NO: 1232467 - RNA, 16 nt, Human
uucaugcauggaaauu

SEQ ID NO: 1232468 - RNA, 16 nt, Human
uucagauacuggauug

SEQ ID NO: 1232469 - RNA, 20 nt, Human
uucagauacuggauuguacu

SEQ ID NO: 1232470 - RNA, 20 nt, Human
uuauuuuaauaauguuucaa

SEQ ID NO: 1232471 - RNA, 15 nt, Human
uuauuuuauuaugaa

SEQ ID NO: 1232472 - RNA, 16 nt, Human
uuauuuuauuaugaaa

SEQ ID NO: 1232473 - RNA, 19 nt, Human
uuauuuuaauaauguuuca

SEQ ID NO: 1232474 - RNA, 20 nt, Human
uuauuuuauuaugaaacuug

SEQ ID NO: 1232475 - RNA, 18 nt, Human
uucaaauguauuacagug

SEQ ID NO: 1232476 - RNA, 23 nt, Human
uucaaauuguaagcaugcacaaa

SEQ ID NO: 1232477 - RNA, 18 nt, Human
uuaucuauagcuaaguac

SEQ ID NO: 1232478 - RNA, 20 nt, Human
uuaucuugaauaauguaaga

SEQ ID NO: 1232479 - RNA, 16 nt, Human
uuaucuugaauaaugu

SEQ ID NO: 1232480 - RNA, 14 nt, Human
uuaucuugaauaau

SEQ ID NO: 1232481 - RNA, 15 nt, Human
uuauauuugaaauau

SEQ ID NO: 1232482 - RNA, 13 nt, Human
uuauauuugaaau

SEQ ID NO: 1232483 - RNA, 12 nt, Human
uuauauuugaaa

SEQ ID NO: 1232484 - RNA, 20 nt, Human
uuauauuuauuacuguaaga

SEQ ID NO: 1232485 - RNA, 16 nt, Human
uuauauuuacaaaugg

SEQ ID NO: 1232486 - RNA, 16 nt, Human
uuauuacuguaagaaa

SEQ ID NO: 1232487 - RNA, 16 nt, Human
uuauuacaguauaauu

SEQ ID NO: 1232488 - RNA, 18 nt, Human
uuauaauaaaggacugua

SEQ ID NO: 1232489 - RNA, 19 nt, Human
uuauaauaaaggacuguaa

SEQ ID NO: 1232490 - RNA, 21 nt, Human
uuauaauaaaggacuguaauc

SEQ ID NO: 1232491 - RNA, 11 nt, Human
uuauaaucuuu

SEQ ID NO: 1232492 - RNA, 15 nt, Human
uuauaauuuugugaa

SEQ ID NO: 1232493 - RNA, 14 nt, Human
uuauaauuuuguga

SEQ ID NO: 1232494 - RNA, 17 nt, Human
uuauaauuuuaaauguu

SEQ ID NO: 1232495 - RNA, 21 nt, Human
uuauaauuuuaaauguuuuuu

SEQ ID NO: 1232496 - RNA, 12 nt, Human
uuauaauuuaaa

SEQ ID NO: 1232497 - RNA, 12 nt, Human
uuauaauuuuaa

SEQ ID NO: 1232498 - RNA, 23 nt, Human
uuauaucuauauuuuacauaaau

SEQ ID NO: 1232499 - RNA, 19 nt, Human
uuauaucuauauuuuacau

SEQ ID NO: 1232500 - RNA, 18 nt, Human
uuauaauuuugugaagca

SEQ ID NO: 1232501 - RNA, 17 nt, Human
uuauaauuuugugaagc

SEQ ID NO: 1232502 - RNA, 16 nt, Human
uuauaauuuugugaag

SEQ ID NO: 1232503 - RNA, 14 nt, Human
uuauaucugaggaa

SEQ ID NO: 1232504 - RNA, 20 nt, Human
uuauaucugaggaauucugu

SEQ ID NO: 1232505 - RNA, 21 nt, Human
uuauaucugaggaauucugua

SEQ ID NO: 1232506 - RNA, 22 nt, Human
uuauaucugaggaauucuguau

SEQ ID NO: 1232507 - RNA, 23 nt, Human
uuauaucugaggaauucuguaua

SEQ ID NO: 1232508 - RNA, 16 nt, Human
uuauaugcuauuucua

SEQ ID NO: 1232509 - RNA, 18 nt, Human
uuauaugcuauuucuaua

SEQ ID NO: 1232510 - RNA, 14 nt, Human
uuauauguaccgua

SEQ ID NO: 1232511 - RNA, 16 nt, Human
uuauauguaccguagg

SEQ ID NO: 1232512 - RNA, 16 nt, Human
uuauauuaugaagcuu

SEQ ID NO: 1232513 - RNA, 23 nt, Human
uugaugaagaaguugauaugccu

SEQ ID NO: 1232514 - RNA, 14 nt, Human
uugaugaagaaguu

SEQ ID NO: 1232515 - RNA, 15 nt, Human
uugaauuuauuggcu

SEQ ID NO: 1232516 - RNA, 18 nt, Human
uugaauuuauuggcuuuu

SEQ ID NO: 1232517 - RNA, 22 nt, Human
uugaauuuauuggcuuuucuga

SEQ ID NO: 1232518 - RNA, 12 nt, Human
uugaauuuuaca

SEQ ID NO: 1232519 - RNA, 17 nt, Human
uugaauuuuguguuaga

SEQ ID NO: 1232520 - RNA, 21 nt, Human
uugaauuuuguguuagagauu

SEQ ID NO: 1232521 - RNA, 15 nt, Human
uucuuuaaaauuaca

SEQ ID NO: 1232522 - RNA, 18 nt, Human
uucuuuccacagaagcuc

SEQ ID NO: 1232523 - RNA, 15 nt, Human
uugaaaaaugcaugu

SEQ ID NO: 1232524 - RNA, 17 nt, Human
uugaaaagcagacauuu

SEQ ID NO: 1232525 - RNA, 15 nt, Human
uugaaaagcagacau

SEQ ID NO: 1232526 - RNA, 21 nt, Human
uucuaugaaauauuauguuaa

SEQ ID NO: 1232527 - RNA, 14 nt, Human
uucuaugaaauauu

SEQ ID NO: 1232528 - RNA, 19 nt, Human
uucuccagccucagccucc

SEQ ID NO: 1232529 - RNA, 13 nt, Human
uucugauagagga

SEQ ID NO: 1232530 - RNA, 21 nt, Human
uucugauagaggaagccugau

SEQ ID NO: 1232531 - RNA, 19 nt, Human
uucuaccaaggucuucuua

SEQ ID NO: 1232532 - RNA, 13 nt, Human
uucguuaucuaau

SEQ ID NO: 1232533 - RNA, 20 nt, Human
uucuacugcucuccuccacc

SEQ ID NO: 1232534 - RNA, 13 nt, Human
uucuacugcucuc

SEQ ID NO: 1232535 - RNA, 14 nt, Human
uucuauagcuuuuc

SEQ ID NO: 1232536 - RNA, 18 nt, Human
uucggugagcuacaaaug

SEQ ID NO: 1232537 - RNA, 22 nt, Human
uuccugagucccaucccugcgu

SEQ ID NO: 1232538 - RNA, 14 nt, Human
uuuuuuuguuauua

SEQ ID NO: 1232539 - RNA, 12 nt, Human
uuuuuuuacauu

SEQ ID NO: 1232540 - RNA, 11 nt, Human
uuuuuuacauu

SEQ ID NO: 1232541 - RNA, 12 nt, Human
uuuuuuacauuu

SEQ ID NO: 1232542 - RNA, 15 nt, Human
uuuuuaaauguauac

SEQ ID NO: 1232543 - RNA, 23 nt, Human
uuuuuaaauguauacuauaguac

SEQ ID NO: 1232544 - RNA, 13 nt, Human
uuuuuaaucuuua

SEQ ID NO: 1232545 - RNA, 13 nt, Human
uuuuucauuauuu

SEQ ID NO: 1232546 - RNA, 22 nt, Human
uuuuucauuauuuuauuaugaa

SEQ ID NO: 1232547 - RNA, 17 nt, Human
uuuguauaaaauaauuu

SEQ ID NO: 1232548 - RNA, 19 nt, Human
uuuguauaaaauaauuuuu

SEQ ID NO: 1232549 - RNA, 18 nt, Human
uuuguauaaaauaauuuu

SEQ ID NO: 1232550 - RNA, 24 nt, Human
uuuggaccaaaaaccaguauugua

SEQ ID NO: 1232551 - RNA, 15 nt, Human
uuuggucaacacuaa

SEQ ID NO: 1232552 - RNA, 14 nt, Human
uuuguauuguauau

SEQ ID NO: 1232553 - RNA, 14 nt, Human
uuuuaaaauccacu

SEQ ID NO: 1232554 - RNA, 23 nt, Human
uuuuaaaauccacuuuaucuuga

SEQ ID NO: 1232555 - RNA, 20 nt, Human
uuuccuaaauauauuuuaag

SEQ ID NO: 1232556 - RNA, 15 nt, Human
uuuccacagaagcuc

SEQ ID NO: 1232557 - RNA, 21 nt, Human
uuuggaccaaaaaccaguauu

SEQ ID NO: 1232558 - RNA, 22 nt, Human
uuuggaccaaaaaccaguauug

SEQ ID NO: 1232559 - RNA, 15 nt, Human
uuuggaaaucuuuaa

SEQ ID NO: 1232560 - RNA, 18 nt, Human
uuuggaccaaaaaccagu

SEQ ID NO: 1232561 - RNA, 18 nt, Human
uuugcauaacguauaaaa

SEQ ID NO: 1232562 - RNA, 20 nt, Human
uuuugaaauuaugugacauu

SEQ ID NO: 1232563 - RNA, 16 nt, Human
uuuucacauuggaaac

SEQ ID NO: 1232564 - RNA, 21 nt, Human
uuuucaaaauuguuacaaauu

SEQ ID NO: 1232565 - RNA, 23 nt, Human
uuuuauaauuuugugaagcaaaa

SEQ ID NO: 1232566 - RNA, 19 nt, Human
uuuuacguccaucucuugu

SEQ ID NO: 1232567 - RNA, 21 nt, Human
uuuuaaaguaacccuacaaaa

SEQ ID NO: 1232568 - RNA, 18 nt, Human
uuuuauauuugaaauauu

SEQ ID NO: 1232569 - RNA, 13 nt, Human
uuuuauauuugaa

SEQ ID NO: 1232570 - RNA, 13 nt, Human
uuuuauauuuacu

SEQ ID NO: 1232571 - RNA, 14 nt, Human
uuuucaaaagaaag

SEQ ID NO: 1232572 - RNA, 17 nt, Human
aaaaccaguauuguaca

SEQ ID NO: 1232573 - RNA, 19 nt, Human
gggacauuugcucauggaa

SEQ ID NO: 1232574 - RNA, 14 nt, Human
aaaaggaaagaaaa

SEQ ID NO: 1232575 - RNA, 13 nt, Human
aaaaggaaagaaa

SEQ ID NO: 1232576 - RNA, 14 nt, Human
aaaaauaacaauga

SEQ ID NO: 1232577 - RNA, 14 nt, Human
ggcugggucgcccu

SEQ ID NO: 1232578 - RNA, 17 nt, Human
ggcugggucgcccugga

SEQ ID NO: 1232579 - RNA, 20 nt, Human
ggcugggucgcccuggacug

SEQ ID NO: 1232580 - RNA, 15 nt, Human
ggcuguacccaggaa

SEQ ID NO: 1232581 - RNA, 22 nt, Human
gggacagucaccucauggaauu

SEQ ID NO: 1232582 - RNA, 21 nt, Human
gggacagucaccucauggaau

SEQ ID NO: 1232583 - RNA, 20 nt, Human
gggacagucaccucauggaa

SEQ ID NO: 1232584 - RNA, 16 nt, Human
ggcauaacauaaaucu

SEQ ID NO: 1232585 - RNA, 17 nt, Human
ggcauaacauaaaucug

SEQ ID NO: 1232586 - RNA, 15 nt, Human
aaaauuuuuaaucuu

SEQ ID NO: 1232587 - RNA, 19 nt, Human
ggggaauugaggacacuga

SEQ ID NO: 1232588 - RNA, 13 nt, Human
ggguggcagcaac

SEQ ID NO: 1232589 - RNA, 15 nt, Human
aaacgucuuaaauau

SEQ ID NO: 1232590 - RNA, 14 nt, Human
aaacgucuuaaaua

SEQ ID NO: 1232591 - RNA, 18 nt, Human
aaacuaggugcauauuua

SEQ ID NO: 1232592 - RNA, 13 nt, Human
aaacgucuuaaau

SEQ ID NO: 1232593 - RNA, 22 nt, Human
aaacuaggugcauauuuauaaa

SEQ ID NO: 1232594 - RNA, 15 nt, Human
aaacucguuaauuug

SEQ ID NO: 1232595 - RNA, 18 nt, Human
aaaccuuuguuugcaucu

SEQ ID NO: 1232596 - RNA, 18 nt, Human
aaaccuuuuauauuuagu

SEQ ID NO: 1232597 - RNA, 19 nt, Human
gggggugcugggccccugc

SEQ ID NO: 1232598 - RNA, 13 nt, Human
gggucgcccugga

SEQ ID NO: 1232599 - RNA, 15 nt, Human
gggucgcccuggacu

SEQ ID NO: 1232600 - RNA, 15 nt, Human
ggguggggggggugc

SEQ ID NO: 1232601 - RNA, 23 nt, Human
aaacuucagcgguuuauauaagc

SEQ ID NO: 1232602 - RNA, 16 nt, Human
aaacuuguauuaugug

SEQ ID NO: 1232603 - RNA, 15 nt, Human
aaacuuguguaaaua

SEQ ID NO: 1232604 - RNA, 13 nt, Human
aaagacagugaaa

SEQ ID NO: 1232605 - RNA, 11 nt, Human
aaacuuuucug

SEQ ID NO: 1232606 - RNA, 12 nt, Human
aaacuuuucuga

SEQ ID NO: 1232607 - RNA, 23 nt, Human
aaagcugcugagaaucuagccuc

SEQ ID NO: 1232608 - RNA, 14 nt, Human
aaagguacuucaaa

SEQ ID NO: 1232609 - RNA, 14 nt, Human
aaagguaaaucaga

SEQ ID NO: 1232610 - RNA, 14 nt, Human
ggucgcccuggacu

SEQ ID NO: 1232611 - RNA, 20 nt, Human
ggucgcccuggacugugugc

SEQ ID NO: 1232612 - RNA, 21 nt, Human
ggugcauauuuauaaaaauaa

SEQ ID NO: 1232613 - RNA, 11 nt, Human
ggugcugggcc

SEQ ID NO: 1232614 - RNA, 13 nt, Human
ggugcugggcccc

SEQ ID NO: 1232615 - RNA, 15 nt, Human
ggugcugggccccug

SEQ ID NO: 1232616 - RNA, 16 nt, Human
ggugcugggccccugc

SEQ ID NO: 1232617 - RNA, 19 nt, Human
ggugcugggccccugccuc

SEQ ID NO: 1232618 - RNA, 18 nt, Human
aaaguauguuagugcaaa

SEQ ID NO: 1232619 - RNA, 12 nt, Human
aaaguugaauuu

SEQ ID NO: 1232620 - RNA, 13 nt, Human
aaaguugccuaaa

SEQ ID NO: 1232621 - RNA, 14 nt, Human
aaaguugccuaaau

SEQ ID NO: 1232622 - RNA, 13 nt, Human
aaaguauuaagca

SEQ ID NO: 1232623 - RNA, 18 nt, Human
aaaguauuaagcauauau

SEQ ID NO: 1232624 - RNA, 19 nt, Human
aaaguauuaagcauauauu

SEQ ID NO: 1232625 - RNA, 20 nt, Human
aaaguauuaagcauauauuu

SEQ ID NO: 1232626 - RNA, 15 nt, Human
aaauaauuuuuauau

SEQ ID NO: 1232627 - RNA, 19 nt, Human
aaauaauuuuaucucuuuc

SEQ ID NO: 1232628 - RNA, 13 nt, Human
guaaaccuuuuau

SEQ ID NO: 1232629 - RNA, 13 nt, Human
aaauaauaauuuu

SEQ ID NO: 1232630 - RNA, 12 nt, Human
aaaguuuaauau

SEQ ID NO: 1232631 - RNA, 14 nt, Human
aaaguuuaauauua

SEQ ID NO: 1232632 - RNA, 16 nt, Human
aaaguugccuaaaucc

SEQ ID NO: 1232633 - RNA, 17 nt, Human
aaaguugccuaaaucca

SEQ ID NO: 1232634 - RNA, 16 nt, Human
aaaguugguaaaccuu

SEQ ID NO: 1232635 - RNA, 17 nt, Human
aaaguugguaaaccuuu

SEQ ID NO: 1232636 - RNA, 23 nt, Human
aaaguugccuaaauccauuugga

SEQ ID NO: 1232637 - RNA, 23 nt, Human
guacacugccuucucaacuccaa

SEQ ID NO: 1232638 - RNA, 23 nt, Human
aaauaauuuuuauauuugaaaua

SEQ ID NO: 1232639 - RNA, 22 nt, Human
aaauaauuuuuauauuugaaau

SEQ ID NO: 1232640 - RNA, 13 nt, Human
aaauacaauuuug

SEQ ID NO: 1232641 - RNA, 14 nt, Human
aaauacaauuuugu

SEQ ID NO: 1232642 - RNA, 17 nt, Human
aaauacaauuuuguuuc

SEQ ID NO: 1232643 - RNA, 18 nt, Human
aaauacaauuuuguuucu

SEQ ID NO: 1232644 - RNA, 20 nt, Human
aaauacaauuuuguuucugu

SEQ ID NO: 1232645 - RNA, 21 nt, Human
aaauacaauuuuguuucugua

SEQ ID NO: 1232646 - RNA, 22 nt, Human
aaauacaauuuuguuucuguac

SEQ ID NO: 1232647 - RNA, 18 nt, Human
aaauacauuguauauaug

SEQ ID NO: 1232648 - RNA, 21 nt, Human
guaauccaagcaaaugugaau

SEQ ID NO: 1232649 - RNA, 20 nt, Human
guaauaggcguaacuaauuu

SEQ ID NO: 1232650 - RNA, 15 nt, Human
aaauccacuuuaucu

SEQ ID NO: 1232651 - RNA, 17 nt, Human
aaauauuauguuaaaac

SEQ ID NO: 1232652 - RNA, 14 nt, Human
aaaucagacuauga

SEQ ID NO: 1232653 - RNA, 21 nt, Human
aaaucagacuaugaaguuuuu

SEQ ID NO: 1232654 - RNA, 20 nt, Human
guaccaagacuacuagggaa

SEQ ID NO: 1232655 - RNA, 23 nt, Human
guaccaagacuacuagggaaaug

SEQ ID NO: 1232656 - RNA, 18 nt, Human
aaauccauacauuugugu

SEQ ID NO: 1232657 - RNA, 15 nt, Human
aaauccauacauuug

SEQ ID NO: 1232658 - RNA, 15 nt, Human
guacuucaugcuguc

SEQ ID NO: 1232659 - RNA, 22 nt, Human
guacuucaaauccuugaagauu

SEQ ID NO: 1232660 - RNA, 21 nt, Human
guacuucaaauccuugaagau

SEQ ID NO: 1232661 - RNA, 14 nt, Human
gcugggguuaucug

SEQ ID NO: 1232662 - RNA, 22 nt, Human
gcugggguuaucugaagucaga

SEQ ID NO: 1232663 - RNA, 23 nt, Human
gcugggguuaucugaagucagau

SEQ ID NO: 1232664 - RNA, 12 nt, Human
gcugggucgccc

SEQ ID NO: 1232665 - RNA, 21 nt, Human
gcugggccccugccucucugc

SEQ ID NO: 1232666 - RNA, 22 nt, Human
gcugggccccugccucucugca

SEQ ID NO: 1232667 - RNA, 23 nt, Human
gcugggccccugccucucugcag

SEQ ID NO: 1232668 - RNA, 15 nt, Human
gcuggagugcagugg

SEQ ID NO: 1232669 - RNA, 15 nt, Human
ggacaggauccaggc

SEQ ID NO: 1232670 - RNA, 15 nt, Human
ggacuuguuagaucu

SEQ ID NO: 1232671 - RNA, 19 nt, Human
ggacuugcaaaaaggguca

SEQ ID NO: 1232672 - RNA, 21 nt, Human
ggacuucuuuaauuuuggaau

SEQ ID NO: 1232673 - RNA, 22 nt, Human
ggacuucuuuaauuuuggaauu

SEQ ID NO: 1232674 - RNA, 18 nt, Human
ggagaaaugaaaaaauau

SEQ ID NO: 1232675 - RNA, 17 nt, Human
ggacaccugcccugccc

SEQ ID NO: 1232676 - RNA, 19 nt, Human
ggaaugaagauacugaaau

SEQ ID NO: 1232677 - RNA, 18 nt, Human
ggaaugaagcaaugcuuc

SEQ ID NO: 1232678 - RNA, 18 nt, Human
ggaaguugacuuauagua

SEQ ID NO: 1232679 - RNA, 12 nt, Human
ggaagagaagga

SEQ ID NO: 1232680 - RNA, 17 nt, Human
ggaagagaaggagcaga

SEQ ID NO: 1232681 - RNA, 13 nt, Human
gccucuucccucu

SEQ ID NO: 1232682 - RNA, 15 nt, Human
gccucuuagaugcag

SEQ ID NO: 1232683 - RNA, 19 nt, Human
gccuccuuagaaaaaaaau

SEQ ID NO: 1232684 - RNA, 14 nt, Human
gcgaucucagcuca

SEQ ID NO: 1232685 - RNA, 20 nt, Human
gccccugccucucugcaggu

SEQ ID NO: 1232686 - RNA, 23 nt, Human
gccccugccucucugcagguccc

SEQ ID NO: 1232687 - RNA, 23 nt, Human
gccccugccaccuccugccucag

SEQ ID NO: 1232688 - RNA, 19 nt, Human
gcccccacugccuuugacc

SEQ ID NO: 1232689 - RNA, 13 nt, Human
gcccugcccugcc

SEQ ID NO: 1232690 - RNA, 17 nt, Human
gcccugcccugccaccu

SEQ ID NO: 1232691 - RNA, 18 nt, Human
gcccugccaccugucugu

SEQ ID NO: 1232692 - RNA, 13 nt, Human
gcccugccaccug

SEQ ID NO: 1232693 - RNA, 14 nt, Human
gcccugccaccugu

SEQ ID NO: 1232694 - RNA, 15 nt, Human
gcccugccaccuguc

SEQ ID NO: 1232695 - RNA, 16 nt, Human
gcccugccaccugucu

SEQ ID NO: 1232696 - RNA, 17 nt, Human
gcccugccaccugucug

SEQ ID NO: 1232697 - RNA, 20 nt, Human
gcucacugcaaccucugccu

SEQ ID NO: 1232698 - RNA, 19 nt, Human
gcguuuuuuaaauguauac

SEQ ID NO: 1232699 - RNA, 15 nt, Human
cugccucccuucaug

SEQ ID NO: 1232700 - RNA, 17 nt, Human
cugccucccuucaugca

SEQ ID NO: 1232701 - RNA, 18 nt, Human
cugccucccuucaugcau

SEQ ID NO: 1232702 - RNA, 19 nt, Human
cugccucccuucaugcaug

SEQ ID NO: 1232703 - RNA, 21 nt, Human
cugccucccuucaugcaugga

SEQ ID NO: 1232704 - RNA, 23 nt, Human
cugccucccuucaugcauggaaa

SEQ ID NO: 1232705 - RNA, 14 nt, Human
cugccucccuucau

SEQ ID NO: 1232706 - RNA, 17 nt, Human
cuggacuuggccccugc

SEQ ID NO: 1232707 - RNA, 18 nt, Human
cuggacuuggccccugcc

SEQ ID NO: 1232708 - RNA, 19 nt, Human
cuggacuuggccccugcca

SEQ ID NO: 1232709 - RNA, 15 nt, Human
cuggggccaggcugg

SEQ ID NO: 1232710 - RNA, 18 nt, Human
cuggggccaggcuggguc

SEQ ID NO: 1232711 - RNA, 20 nt, Human
cuggggcugaggcugaggca

SEQ ID NO: 1232712 - RNA, 13 nt, Human
cugggaauggagg

SEQ ID NO: 1232713 - RNA, 20 nt, Human
cugggaauggaggggcagag

SEQ ID NO: 1232714 - RNA, 23 nt, Human
cugggaauggaggggcagagcca

SEQ ID NO: 1232715 - RNA, 23 nt, Human
cugggacuauaggcaugcgccac

SEQ ID NO: 1232716 - RNA, 18 nt, Human
cugggacuugcaaaaagg

SEQ ID NO: 1232717 - RNA, 19 nt, Human
cuguuauaaucuuucacag

SEQ ID NO: 1232718 - RNA, 13 nt, Human
cuguuauaaucuu

SEQ ID NO: 1232719 - RNA, 15 nt, Human
cuuaaaguugaauuu

SEQ ID NO: 1232720 - RNA, 18 nt, Human
cuuaaaguugaauuuauu

SEQ ID NO: 1232721 - RNA, 22 nt, Human
cuuaaaguugaauuuauuggcu

SEQ ID NO: 1232722 - RNA, 15 nt, Human
cuguuguagaagaca

SEQ ID NO: 1232723 - RNA, 12 nt, Human
cuguuuaagaga

SEQ ID NO: 1232724 - RNA, 14 nt, Human
cuguuuaagagaca

SEQ ID NO: 1232725 - RNA, 23 nt, Human
cuuugaccugccucccuucaugc

SEQ ID NO: 1232726 - RNA, 20 nt, Human
cuuugaccugccucccuuca

SEQ ID NO: 1232727 - RNA, 16 nt, Human
cuuuguaaugaaaacc

SEQ ID NO: 1232728 - RNA, 14 nt, Human
cuuuguaaugaaaa

SEQ ID NO: 1232729 - RNA, 15 nt, Human
cuuuguaaugaaaac

SEQ ID NO: 1232730 - RNA, 13 nt, Human
cuuuguauucaaa

SEQ ID NO: 1232731 - RNA, 22 nt, Human
cuuuguauuguauauuacaaug

SEQ ID NO: 1232732 - RNA, 13 nt, Human
cuugucucagauu

SEQ ID NO: 1232733 - RNA, 14 nt, Human
cuugucucagauuu

SEQ ID NO: 1232734 - RNA, 17 nt, Human
cuugucucagauuuuau

SEQ ID NO: 1232735 - RNA, 18 nt, Human
cuugucucagauuuuauu

SEQ ID NO: 1232736 - RNA, 21 nt, Human
cuugucucagauuuuauuaug

SEQ ID NO: 1232737 - RNA, 14 nt, Human
cuuucagauacugg

SEQ ID NO: 1232738 - RNA, 15 nt, Human
cuuucagauacugga

SEQ ID NO: 1232739 - RNA, 17 nt, Human
cuuucagauacuggauu

SEQ ID NO: 1232740 - RNA, 22 nt, Human
cuuucagauacuggauuguacu

SEQ ID NO: 1232741 - RNA, 13 nt, Human
cuucucacauuua

SEQ ID NO: 1232742 - RNA, 20 nt, Human
cuucucacauuuauauuuuu

SEQ ID NO: 1232743 - RNA, 16 nt, Human
cuucucuuguuaggua

SEQ ID NO: 1232744 - RNA, 15 nt, Human
cuucugaauaaagca

SEQ ID NO: 1232745 - RNA, 16 nt, Human
cuucugaauaaagcaa

SEQ ID NO: 1232746 - RNA, 18 nt, Human
cuucugaauaaagcaauu

SEQ ID NO: 1232747 - RNA, 22 nt, Human
cuucugaauaaagcaauuagca

SEQ ID NO: 1232748 - RNA, 19 nt, Human
cuucugacauaauccagua

SEQ ID NO: 1232749 - RNA, 16 nt, Human
cuugcaaaaaggguca

SEQ ID NO: 1232750 - RNA, 15 nt, Human
cuugcaaaaaggguc

SEQ ID NO: 1232751 - RNA, 21 nt, Human
gaaaagaaaauuuuuguagua

SEQ ID NO: 1232752 - RNA, 15 nt, Human
gaaaagaaagcuaca

SEQ ID NO: 1232753 - RNA, 19 nt, Human
gaaaacuuguauuaugugu

SEQ ID NO: 1232754 - RNA, 22 nt, Human
gaaaacuuguauuauguguguu

SEQ ID NO: 1232755 - RNA, 21 nt, Human
gaaacaagucagucauucaga

SEQ ID NO: 1232756 - RNA, 12 nt, Human
gaaaucuuuaaa

SEQ ID NO: 1232757 - RNA, 15 nt, Human
gaaaucuuuaaaaaa

SEQ ID NO: 1232758 - RNA, 11 nt, Human
gaaaugaaaaa

SEQ ID NO: 1232759 - RNA, 16 nt, Human
gaaagaacggaagaag

SEQ ID NO: 1232760 - RNA, 17 nt, Human
gaacugauguaaguaaa

SEQ ID NO: 1232761 - RNA, 13 nt, Human
gaacugaaaucau

SEQ ID NO: 1232762 - RNA, 12 nt, Human
gaaccaucagaa

SEQ ID NO: 1232763 - RNA, 17 nt, Human
gaagcacagugaucaag

SEQ ID NO: 1232764 - RNA, 19 nt, Human
gacccuccaccgcagaagg

SEQ ID NO: 1232765 - RNA, 21 nt, Human
gacccuccaccgcagaaggaa

SEQ ID NO: 1232766 - RNA, 22 nt, Human
gacccuccaccgcagaaggaag

SEQ ID NO: 1232767 - RNA, 14 nt, Human
gacugugugcucag

SEQ ID NO: 1232768 - RNA, 16 nt, Human
gacugugugcucagga

SEQ ID NO: 1232769 - RNA, 17 nt, Human
gacugugugcucaggag

SEQ ID NO: 1232770 - RNA, 20 nt, Human
gacugugugcucaggagccc

SEQ ID NO: 1232771 - RNA, 19 nt, Human
gacuuuggcugcaugcgag

SEQ ID NO: 1232772 - RNA, 19 nt, Human
gacuuuggauaauaaggaa

SEQ ID NO: 1232773 - RNA, 16 nt, Human
gacuuuggcugcaugc

SEQ ID NO: 1232774 - RNA, 21 nt, Human
gacagcccuucuuuccacaga

SEQ ID NO: 1232775 - RNA, 23 nt, Human
gaccauggacacuacacccagca

SEQ ID NO: 1232776 - RNA, 16 nt, Human
gaccauggacacuaca

SEQ ID NO: 1232777 - RNA, 21 nt, Human
gaccauggacacuacacccag

SEQ ID NO: 1232778 - RNA, 14 nt, Human
gaggcucuggagcc

SEQ ID NO: 1232779 - RNA, 19 nt, Human
gaggcucuggagcccacug

SEQ ID NO: 1232780 - RNA, 20 nt, Human
gaggcucuggagcccacugu

SEQ ID NO: 1232781 - RNA, 14 nt, Human
gccaacuauggccu

SEQ ID NO: 1232782 - RNA, 15 nt, Human
gccaacuauggccug

SEQ ID NO: 1232783 - RNA, 19 nt, Human
gccaacuauggccugugga

SEQ ID NO: 1232784 - RNA, 13 nt, Human
gcauaacauaaau

SEQ ID NO: 1232785 - RNA, 15 nt, Human
gcauaacauaaaucu

SEQ ID NO: 1232786 - RNA, 14 nt, Human
gaugaugacuaugg

SEQ ID NO: 1232787 - RNA, 13 nt, Human
gaugaggccagac

SEQ ID NO: 1232788 - RNA, 15 nt, Human
gaugaggccagacca

SEQ ID NO: 1232789 - RNA, 22 nt, Human
gaugaggccagaccauggacac

SEQ ID NO: 1232790 - RNA, 16 nt, Human
gcaaaaauauuuuaug

SEQ ID NO: 1232791 - RNA, 17 nt, Human
gcaaaaauauuuuauga

SEQ ID NO: 1232792 - RNA, 22 nt, Human
gcaaaaauauuuuaugauccag

SEQ ID NO: 1232793 - RNA, 23 nt, Human
gcaaaaauauuuuaugauccagc

SEQ ID NO: 1232794 - RNA, 16 nt, Human
gauucuuaaaguugaa

SEQ ID NO: 1232795 - RNA, 17 nt, Human
gauucuuaaaguugaau

SEQ ID NO: 1232796 - RNA, 21 nt, Human
gauucuuaaaguugaauuuau

SEQ ID NO: 1232797 - RNA, 15 nt, Human
gauucuuaaaguuga

SEQ ID NO: 1232798 - RNA, 13 nt, Human
gcaaccuccaccu

SEQ ID NO: 1232799 - RNA, 18 nt, Human
gcaaguuuccaucaucua

SEQ ID NO: 1232800 - RNA, 18 nt, Human
gcaauagucaaauugugu

SEQ ID NO: 1232801 - RNA, 22 nt, Human
gcaauagucaaauugugugaaa

SEQ ID NO: 1232802 - RNA, 22 nt, Human
gcacacaccaccacgccuggcu

SEQ ID NO: 1232803 - RNA, 11 nt, Human
gcaauagagac

SEQ ID NO: 1232804 - RNA, 19 nt, Human
cagauaugauucaaauguc

SEQ ID NO: 1232805 - RNA, 17 nt, Human
cagauaugauucaaaug

SEQ ID NO: 1232806 - RNA, 16 nt, Human
cagauaugauucaaau

SEQ ID NO: 1232807 - RNA, 22 nt, Human
cagcacagccucuuagaugcag

SEQ ID NO: 1232808 - RNA, 20 nt, Human
cagcccuucuuuccacagaa

SEQ ID NO: 1232809 - RNA, 19 nt, Human
cagcccuucuuuccacaga

SEQ ID NO: 1232810 - RNA, 15 nt, Human
cagcccuucuuucca

SEQ ID NO: 1232811 - RNA, 20 nt, Human
caggaaagcgccuccaaccc

SEQ ID NO: 1232812 - RNA, 19 nt, Human
caggaaagcgccuccaacc

SEQ ID NO: 1232813 - RNA, 19 nt, Human
cagcugccucuucccucuu

SEQ ID NO: 1232814 - RNA, 19 nt, Human
cagcuccaagaauuucuag

SEQ ID NO: 1232815 - RNA, 16 nt, Human
cagcuccaagaauuuc

SEQ ID NO: 1232816 - RNA, 18 nt, Human
caggugcagcccccacug

SEQ ID NO: 1232817 - RNA, 20 nt, Human
caggugcagcccccacugcc

SEQ ID NO: 1232818 - RNA, 23 nt, Human
caggugcagcccccacugccuuu

SEQ ID NO: 1232819 - RNA, 15 nt, Human
cagucaccucaugga

SEQ ID NO: 1232820 - RNA, 21 nt, Human
caguauuguacaaaguauuaa

SEQ ID NO: 1232821 - RNA, 22 nt, Human
caguauuguacaaaguauuaag

SEQ ID NO: 1232822 - RNA, 12 nt, Human
caguauuguaca

SEQ ID NO: 1232823 - RNA, 13 nt, Human
caguauuguacaa

SEQ ID NO: 1232824 - RNA, 16 nt, Human
caguauuguacaaagu

SEQ ID NO: 1232825 - RNA, 17 nt, Human
caguauuguacaaagua

SEQ ID NO: 1232826 - RNA, 18 nt, Human
caguauuguacaaaguau

SEQ ID NO: 1232827 - RNA, 19 nt, Human
caguauuguacaaaguauu

SEQ ID NO: 1232828 - RNA, 22 nt, Human
cagugcacuaauguguaagaca

SEQ ID NO: 1232829 - RNA, 18 nt, Human
ccacagaagcuccaggua

SEQ ID NO: 1232830 - RNA, 18 nt, Human
ccaccagucugacuguuu

SEQ ID NO: 1232831 - RNA, 16 nt, Human
ccacagaagcuccagg

SEQ ID NO: 1232832 - RNA, 13 nt, Human
cauuuauauguac

SEQ ID NO: 1232833 - RNA, 16 nt, Human
cauggccagcuaauuu

SEQ ID NO: 1232834 - RNA, 12 nt, Human
caugcacaaauu

SEQ ID NO: 1232835 - RNA, 23 nt, Human
cauccuucaucuggauuccagag

SEQ ID NO: 1232836 - RNA, 17 nt, Human
caaaccaaaucacugaa

SEQ ID NO: 1232837 - RNA, 17 nt, Human
caaacauauauaacaau

SEQ ID NO: 1232838 - RNA, 21 nt, Human
caaaaggauaaugaauacuuu

SEQ ID NO: 1232839 - RNA, 13 nt, Human
auuuuuuuguugu

SEQ ID NO: 1232840 - RNA, 16 nt, Human
auuuuuauauuugaaa

SEQ ID NO: 1232841 - RNA, 15 nt, Human
auuuuuauauuugaa

SEQ ID NO: 1232842 - RNA, 15 nt, Human
auuuuuauauuuacu

SEQ ID NO: 1232843 - RNA, 16 nt, Human
auuuuuauauuuacua

SEQ ID NO: 1232844 - RNA, 18 nt, Human
auuuuuuuguuguuuguu

SEQ ID NO: 1232845 - RNA, 19 nt, Human
auuuuagggguagcauuug

SEQ ID NO: 1232846 - RNA, 14 nt, Human
auuuuauguugcau

SEQ ID NO: 1232847 - RNA, 19 nt, Human
caaaguccugggauuacag

SEQ ID NO: 1232848 - RNA, 14 nt, Human
caaaguauuaagca

SEQ ID NO: 1232849 - RNA, 14 nt, Human
caaagguaaaucag

SEQ ID NO: 1232850 - RNA, 22 nt, Human
caaagguaaaucagacuaugaa

SEQ ID NO: 1232851 - RNA, 15 nt, Human
caacacacacaugcu

SEQ ID NO: 1232852 - RNA, 23 nt, Human
caacacacacaugcuucccuuuc

SEQ ID NO: 1232853 - RNA, 18 nt, Human
caacacacacaugcuucc

SEQ ID NO: 1232854 - RNA, 20 nt, Human
caagaauuucuaggacugaa

SEQ ID NO: 1232855 - RNA, 22 nt, Human
caagauggggagugagaggcug

SEQ ID NO: 1232856 - RNA, 17 nt, Human
caacucauauuuucaug

SEQ ID NO: 1232857 - RNA, 13 nt, Human
auuuaauaauuau

SEQ ID NO: 1232858 - RNA, 16 nt, Human
auuuaugcauauuauu

SEQ ID NO: 1232859 - RNA, 22 nt, Human
auuuaugcauauuauuuuaugu

SEQ ID NO: 1232860 - RNA, 14 nt, Human
auuucuaugaaaua

SEQ ID NO: 1232861 - RNA, 17 nt, Human
auuucuauauuuucauu

SEQ ID NO: 1232862 - RNA, 18 nt, Human
auuucuauauuuucauuc

SEQ ID NO: 1232863 - RNA, 15 nt, Human
auuucuauauuuuca

SEQ ID NO: 1232864 - RNA, 16 nt, Human
auuucuauauuuucau

SEQ ID NO: 1232865 - RNA, 19 nt, Human
auuucuauauuuucauucu

SEQ ID NO: 1232866 - RNA, 19 nt, Human
auuucuaugcugaguuugu

SEQ ID NO: 1232867 - RNA, 21 nt, Human
auuucuaugcugaguuugugc

SEQ ID NO: 1232868 - RNA, 22 nt, Human
auuucuaugcugaguuugugcu

SEQ ID NO: 1232869 - RNA, 18 nt, Human
auuguaagcaugcacaaa

SEQ ID NO: 1232870 - RNA, 15 nt, Human
auuguaauuauaucu

SEQ ID NO: 1232871 - RNA, 16 nt, Human
auuguaauuauaucug

SEQ ID NO: 1232872 - RNA, 17 nt, Human
auuguaauuauaucuga

SEQ ID NO: 1232873 - RNA, 21 nt, Human
auuguaauuauaucugaggaa

SEQ ID NO: 1232874 - RNA, 16 nt, Human
auuguacaaaguauua

SEQ ID NO: 1232875 - RNA, 17 nt, Human
auuguacaaaguauuaa

SEQ ID NO: 1232876 - RNA, 19 nt, Human
auuguacaaaguauuaagc

SEQ ID NO: 1232877 - RNA, 20 nt, Human
auuguacaaaguauuaagca

SEQ ID NO: 1232878 - RNA, 11 nt, Human
auuccuccagg

SEQ ID NO: 1232879 - RNA, 15 nt, Human
auuccuucagcacuu

SEQ ID NO: 1232880 - RNA, 17 nt, Human
auuccuucagcacuuua

SEQ ID NO: 1232881 - RNA, 17 nt, Human
auucuugccaaauauaa

SEQ ID NO: 1232882 - RNA, 22 nt, Human
auuaugaauuacauuuguauaa

SEQ ID NO: 1232883 - RNA, 20 nt, Human
auuaugaauuacauuuguau

SEQ ID NO: 1232884 - RNA, 19 nt, Human
auuaugaauuacauuugua

SEQ ID NO: 1232885 - RNA, 18 nt, Human
auuaguaagcuagcaaau

SEQ ID NO: 1232886 - RNA, 20 nt, Human
auuaguacuccccuccuuga

SEQ ID NO: 1232887 - RNA, 16 nt, Human
auucaaaugucuauaa

SEQ ID NO: 1232888 - RNA, 12 nt, Human
auuauguaaauc

SEQ ID NO: 1232889 - RNA, 14 nt, Human
caauugagaaaaau

SEQ ID NO: 1232890 - RNA, 23 nt, Human
caauugagaaaaauauauacuaa

SEQ ID NO: 1232891 - RNA, 21 nt, Human
caagucagucauucagauaug

SEQ ID NO: 1232892 - RNA, 22 nt, Human
caaggccugguguuucuugaua

SEQ ID NO: 1232893 - RNA, 21 nt, Human
caaggccugguguuucuugau

SEQ ID NO: 1232894 - RNA, 23 nt, Human
caauaaaauccauacauuugugu

SEQ ID NO: 1232895 - RNA, 20 nt, Human
caauaaaauccauacauuug

SEQ ID NO: 1232896 - RNA, 14 nt, Human
cagaaauacaauuu

SEQ ID NO: 1232897 - RNA, 19 nt, Human
cacugggagaaaugaaaaa

SEQ ID NO: 1232898 - RNA, 17 nt, Human
cacuuguguuuugcaag

SEQ ID NO: 1232899 - RNA, 18 nt, Human
cacuuuagaauaugccuu

SEQ ID NO: 1232900 - RNA, 22 nt, Human
cacucuguucauuccuccaggu

SEQ ID NO: 1232901 - RNA, 21 nt, Human
cacuacacccagcaauagaga

SEQ ID NO: 1232902 - RNA, 17 nt, Human
cacucuguucauuccuc

SEQ ID NO: 1232903 - RNA, 18 nt, Human
cacucuguucauuccucc

SEQ ID NO: 1232904 - RNA, 19 nt, Human
cacucuguucauuccucca

SEQ ID NO: 1232905 - RNA, 20 nt, Human
cacucuguucauuccuccag

SEQ ID NO: 1232906 - RNA, 21 nt, Human
cacucuguucauuccuccagg

SEQ ID NO: 1232907 - RNA, 20 nt, Human
cccagcuggggccaggcugg

SEQ ID NO: 1232908 - RNA, 13 nt, Human
cccagccauccag

SEQ ID NO: 1232909 - RNA, 18 nt, Human
cccacuguacuugcucuu

SEQ ID NO: 1232910 - RNA, 18 nt, Human
cccucaaccucauccucu

SEQ ID NO: 1232911 - RNA, 15 nt, Human
ccccugccaccuccu

SEQ ID NO: 1232912 - RNA, 17 nt, Human
ccccugccaccuccugc

SEQ ID NO: 1232913 - RNA, 13 nt, Human
ccccugaauuuaa

SEQ ID NO: 1232914 - RNA, 17 nt, Human
ccccugaauuuaaauag

SEQ ID NO: 1232915 - RNA, 13 nt, Human
ccagcuuuuccca

SEQ ID NO: 1232916 - RNA, 23 nt, Human
ccagcuuuucccaaaagcccauu

SEQ ID NO: 1232917 - RNA, 17 nt, Human
ccaggcuggagugcagu

SEQ ID NO: 1232918 - RNA, 18 nt, Human
ccaggcuggagugcagug

SEQ ID NO: 1232919 - RNA, 13 nt, Human
cccaacuccagaa

SEQ ID NO: 1232920 - RNA, 20 nt, Human
cccaagcaccugggauuaca

SEQ ID NO: 1232921 - RNA, 13 nt, Human
cccuucuauaccc

SEQ ID NO: 1232922 - RNA, 18 nt, Human
cccuucuauacccaccca

SEQ ID NO: 1232923 - RNA, 19 nt, Human
cccuucuauacccacccag

SEQ ID NO: 1232924 - RNA, 20 nt, Human
cccuucuauacccacccaga

SEQ ID NO: 1232925 - RNA, 21 nt, Human
cccuucuauacccacccagaa

SEQ ID NO: 1232926 - RNA, 21 nt, Human
cccuucuccauggcccugcca

SEQ ID NO: 1232927 - RNA, 12 nt, Human
ccuaauaaagcu

SEQ ID NO: 1232928 - RNA, 13 nt, Human
ccuaauaaagcug

SEQ ID NO: 1232929 - RNA, 17 nt, Human
ccucagcucucaguugc

SEQ ID NO: 1232930 - RNA, 13 nt, Human
ccucaaccucauc

SEQ ID NO: 1232931 - RNA, 14 nt, Human
ccucaaccucaucc

SEQ ID NO: 1232932 - RNA, 23 nt, Human
ccugaccccaaguuauccaccug

SEQ ID NO: 1232933 - RNA, 16 nt, Human
ccugccucagccuccc

SEQ ID NO: 1232934 - RNA, 13 nt, Human
ccugccucucugc

SEQ ID NO: 1232935 - RNA, 17 nt, Human
ccugccucucugcaggu

SEQ ID NO: 1232936 - RNA, 14 nt, Human
ccugccucucugca

SEQ ID NO: 1232937 - RNA, 15 nt, Human
ccugccucucugcag

SEQ ID NO: 1232938 - RNA, 23 nt, Human
cucaaauacgugggcauucaaau

SEQ ID NO: 1232939 - RNA, 18 nt, Human
cucacuuguuuuauuuaa

SEQ ID NO: 1232940 - RNA, 23 nt, Human
cucagaaaacaaggaugaauuaa

SEQ ID NO: 1232941 - RNA, 19 nt, Human
cucagaaaacaaggaugaa

SEQ ID NO: 1232942 - RNA, 20 nt, Human
cuacuagggaaaugccuuug

SEQ ID NO: 1232943 - RNA, 15 nt, Human
cgguuuauauaagcu

SEQ ID NO: 1232944 - RNA, 16 nt, Human
cuaaacuuuucugaua

SEQ ID NO: 1232945 - RNA, 15 nt, Human
cugaggaauucugua

SEQ ID NO: 1232946 - RNA, 16 nt, Human
cugaggaauucuguau

SEQ ID NO: 1232947 - RNA, 18 nt, Human
cugaggaauucuguauag

SEQ ID NO: 1232948 - RNA, 19 nt, Human
cugaggaauucuguauaga

SEQ ID NO: 1232949 - RNA, 17 nt, Human
cugaggggcuaccagga

SEQ ID NO: 1232950 - RNA, 20 nt, Human
cugaggggcuaccaggaaag

SEQ ID NO: 1232951 - RNA, 18 nt, Human
cugaggggcuaccaggaa

SEQ ID NO: 1232952 - RNA, 18 nt, Human
cugacccuccaccgcaga

SEQ ID NO: 1232953 - RNA, 23 nt, Human
cugacccuccaccgcagaaggaa

SEQ ID NO: 1232954 - RNA, 17 nt, Human
cugaaaauauuguuuua

SEQ ID NO: 1232955 - RNA, 20 nt, Human
cugaaaauauuguuuuacaa

SEQ ID NO: 1232956 - RNA, 22 nt, Human
cugaaaauauuguuuuacaaua

SEQ ID NO: 1232957 - RNA, 24 nt, Human
cugaaaauauuguuuuacaauagu

SEQ ID NO: 1232958 - RNA, 19 nt, Human
cuccccaugauguuuagaa

SEQ ID NO: 1232959 - RNA, 14 nt, Human
cuccgucaacucau

SEQ ID NO: 1232960 - RNA, 13 nt, Human
cuccuuucucuuu

SEQ ID NO: 1232961 - RNA, 17 nt, Human
cucguggacaccugccc

SEQ ID NO: 1232962 - RNA, 19 nt, Human
cucguggacaccugcccug

SEQ ID NO: 1232963 - RNA, 20 nt, Human
cucguggacaccugcccugc

SEQ ID NO: 1232964 - RNA, 21 nt, Human
cucguggacaccugcccugcc

SEQ ID NO: 1232965 - RNA, 22 nt, Human
gucucuuuaaaaggaaagaaaa

SEQ ID NO: 1232966 - RNA, 15 nt, Human
aacuaagaaacuuaa

SEQ ID NO: 1232967 - RNA, 19 nt, Human
aacuaagaaacuuaaauuu

SEQ ID NO: 1232968 - RNA, 22 nt, Human
aacuacuucucuuguuagguaa

SEQ ID NO: 1232969 - RNA, 23 nt, Human
aacuaucucauuuccaagcaagu

SEQ ID NO: 1232970 - RNA, 20 nt, Human
aacuaucucauuuccaagca

SEQ ID NO: 1232971 - RNA, 13 nt, Human
aacuauauuguuu

SEQ ID NO: 1232972 - RNA, 17 nt, Human
gugacauuuuacauuaa

SEQ ID NO: 1232973 - RNA, 19 nt, Human
gugacauuuuacauuaaau

SEQ ID NO: 1232974 - RNA, 20 nt, Human
gugacauuuuacauuaaauu

SEQ ID NO: 1232975 - RNA, 21 nt, Human
gugacauuuuacauuaaauuu

SEQ ID NO: 1232976 - RNA, 20 nt, Human
aacugaaaucauacuucuua

SEQ ID NO: 1232977 - RNA, 12 nt, Human
aacauaaaucug

SEQ ID NO: 1232978 - RNA, 14 nt, Human
aacauaaaucugug

SEQ ID NO: 1232979 - RNA, 15 nt, Human
aacauaaaucuguga

SEQ ID NO: 1232980 - RNA, 23 nt, Human
aacauguuaaaccaugggauaaa

SEQ ID NO: 1232981 - RNA, 13 nt, Human
guagcguuuuuua

SEQ ID NO: 1232982 - RNA, 17 nt, Human
guagcguuuuuuaaaug

SEQ ID NO: 1232983 - RNA, 18 nt, Human
guagcguuuuuuaaaugu

SEQ ID NO: 1232984 - RNA, 22 nt, Human
guagcguuuuuuaaauguauac

SEQ ID NO: 1232985 - RNA, 22 nt, Human
aaccaaaucacugaacuuugcu

SEQ ID NO: 1232986 - RNA, 14 nt, Human
gucgcccuggacug

SEQ ID NO: 1232987 - RNA, 18 nt, Human
gucgcccuggacugugug

SEQ ID NO: 1232988 - RNA, 14 nt, Human
aacuuguguaaaua

SEQ ID NO: 1232989 - RNA, 15 nt, Human
aacuuguguaaauac

SEQ ID NO: 1232990 - RNA, 20 nt, Human
aacuuguguaaauacaauuu

SEQ ID NO: 1232991 - RNA, 13 nt, Human
aagaaaacaucuu

SEQ ID NO: 1232992 - RNA, 17 nt, Human
aagaaaacaucuuuaag

SEQ ID NO: 1232993 - RNA, 13 nt, Human
aagaaaauaucac

SEQ ID NO: 1232994 - RNA, 16 nt, Human
aagaaagucagccaua

SEQ ID NO: 1232995 - RNA, 19 nt, Human
aagaaaauuuuuguaguag

SEQ ID NO: 1232996 - RNA, 22 nt, Human
aagaaaauuuuuguaguagcgu

SEQ ID NO: 1232997 - RNA, 15 nt, Human
aacuuguauuaugug

SEQ ID NO: 1232998 - RNA, 22 nt, Human
gugcacuaauguguaagacaaa

SEQ ID NO: 1232999 - RNA, 20 nt, Human
gugcacuaauguguaagaca

SEQ ID NO: 1233000 - RNA, 16 nt, Human
gugcugggccccugcc

SEQ ID NO: 1233001 - RNA, 19 nt, Human
gugcugggccccugccucu

SEQ ID NO: 1233002 - RNA, 22 nt, Human
gugcugggguuaucugaaguca

SEQ ID NO: 1233003 - RNA, 19 nt, Human
gugcugguguaugugugaa

SEQ ID NO: 1233004 - RNA, 11 nt, Human
guggacaccug

SEQ ID NO: 1233005 - RNA, 12 nt, Human
guggacaccugc

SEQ ID NO: 1233006 - RNA, 13 nt, Human
guggacaccugcc

SEQ ID NO: 1233007 - RNA, 14 nt, Human
guggacaccugccc

SEQ ID NO: 1233008 - RNA, 16 nt, Human
guggacaccugcccug

SEQ ID NO: 1233009 - RNA, 17 nt, Human
guggacaccugcccugc

SEQ ID NO: 1233010 - RNA, 18 nt, Human
guggacaccugcccugcc

SEQ ID NO: 1233011 - RNA, 19 nt, Human
guggacaccugcccugccc

SEQ ID NO: 1233012 - RNA, 13 nt, Human
guggcagcaacaa

SEQ ID NO: 1233013 - RNA, 16 nt, Human
aagacaaaaagcuacu

SEQ ID NO: 1233014 - RNA, 24 nt, Human
aagaauuucuaggacugaauuaug

SEQ ID NO: 1233015 - RNA, 18 nt, Human
guggggggggugcugggc

SEQ ID NO: 1233016 - RNA, 13 nt, Human
aagaugaucauuu

SEQ ID NO: 1233017 - RNA, 19 nt, Human
aagcaaaauuuuuucucua

SEQ ID NO: 1233018 - RNA, 13 nt, Human
aagcaaaugugaa

SEQ ID NO: 1233019 - RNA, 14 nt, Human
aagcaaaugugaau

SEQ ID NO: 1233020 - RNA, 20 nt, Human
aagcaaaugugaaucauuuu

SEQ ID NO: 1233021 - RNA, 16 nt, Human
aagcaaguauuagaau

SEQ ID NO: 1233022 - RNA, 20 nt, Human
aagcaaguaaaaaggcuaaa

SEQ ID NO: 1233023 - RNA, 19 nt, Human
aagcaaguaaaaaggcuaa

SEQ ID NO: 1233024 - RNA, 21 nt, Human
guguugaaacggaugauuucu

SEQ ID NO: 1233025 - RNA, 23 nt, Human
guguugaaacggaugauuucuau

SEQ ID NO: 1233026 - RNA, 17 nt, Human
guuuuuuuuuaaagacu

SEQ ID NO: 1233027 - RNA, 19 nt, Human
aaguuuaauauuaaagcca

SEQ ID NO: 1233028 - RNA, 20 nt, Human
aaguuuaauauuaaagccau

SEQ ID NO: 1233029 - RNA, 21 nt, Human
aaguuuaauauuaaagccaug

SEQ ID NO: 1233030 - RNA, 13 nt, Human
uaaaauuacaacu

SEQ ID NO: 1233031 - RNA, 15 nt, Human
uaaaauuacaacuaa

SEQ ID NO: 1233032 - RNA, 17 nt, Human
uaaaauuacaacuaagu

SEQ ID NO: 1233033 - RNA, 19 nt, Human
uaaaauuacaacuaaguga

SEQ ID NO: 1233034 - RNA, 17 nt, Human
uaaaauuuuuaaucuuu

SEQ ID NO: 1233035 - RNA, 19 nt, Human
uaaaauuuuuaaucuuuaa

SEQ ID NO: 1233036 - RNA, 22 nt, Human
aaguuuaguuugaggaauucuu

SEQ ID NO: 1233037 - RNA, 16 nt, Human
uaaagacuuuuaugau

SEQ ID NO: 1233038 - RNA, 16 nt, Human
uaaaccggaccaucuc

SEQ ID NO: 1233039 - RNA, 18 nt, Human
uaaaccaugggauaaaug

SEQ ID NO: 1233040 - RNA, 20 nt, Human
uaaaccaugggauaaaugcc

SEQ ID NO: 1233041 - RNA, 21 nt, Human
uaaaccaugggauaaaugcca

SEQ ID NO: 1233042 - RNA, 22 nt, Human
uaaaccaugggauaaaugccau

SEQ ID NO: 1233043 - RNA, 17 nt, Human
uaaacgucuuaaauauu

SEQ ID NO: 1233044 - RNA, 13 nt, Human
uaaacgucuuaaa

SEQ ID NO: 1233045 - RNA, 17 nt, Human
uaacaaugcuguauuuu

SEQ ID NO: 1233046 - RNA, 15 nt, Human
uaacaaugcuguauu

SEQ ID NO: 1233047 - RNA, 16 nt, Human
uaacaacagcuggugc

SEQ ID NO: 1233048 - RNA, 20 nt, Human
uaaauguuuuuuuuuaaaga

SEQ ID NO: 1233049 - RNA, 23 nt, Human
uaaauguuuuuuuuuaaagacuu

SEQ ID NO: 1233050 - RNA, 22 nt, Human
aauacaauuuuguuucuguacu

SEQ ID NO: 1233051 - RNA, 23 nt, Human
aauacaauuuuguuucuguacuu

SEQ ID NO: 1233052 - RNA, 12 nt, Human
aauacaauuuug

SEQ ID NO: 1233053 - RNA, 13 nt, Human
aauacaauuuugu

SEQ ID NO: 1233054 - RNA, 15 nt, Human
aauacaauuuuguuu

SEQ ID NO: 1233055 - RNA, 17 nt, Human
aauacaauuuuguuucu

SEQ ID NO: 1233056 - RNA, 18 nt, Human
aauacaauuuuguuucug

SEQ ID NO: 1233057 - RNA, 20 nt, Human
aauacaauuuuguuucugua

SEQ ID NO: 1233058 - RNA, 23 nt, Human
uaaaucccauuauucaaaguugc

SEQ ID NO: 1233059 - RNA, 12 nt, Human
uaaauagcuuuu

SEQ ID NO: 1233060 - RNA, 23 nt, Human
uaaauagcuagacuggugacuga

SEQ ID NO: 1233061 - RNA, 13 nt, Human
uaaauacaauuuu

SEQ ID NO: 1233062 - RNA, 15 nt, Human
uaaauacaauuuugu

SEQ ID NO: 1233063 - RNA, 22 nt, Human
uaaauacaauuuuguuucugua

SEQ ID NO: 1233064 - RNA, 23 nt, Human
uaaauacaauuuuguuucuguac

SEQ ID NO: 1233065 - RNA, 22 nt, Human
aauaaaauccauacauuugugu

SEQ ID NO: 1233066 - RNA, 12 nt, Human
aauaaaaauaau

SEQ ID NO: 1233067 - RNA, 17 nt, Human
uaaagugacccugcucu

SEQ ID NO: 1233068 - RNA, 20 nt, Human
uaaagugacccugcucucac

SEQ ID NO: 1233069 - RNA, 14 nt, Human
aauaaaaaauuaug

SEQ ID NO: 1233070 - RNA, 15 nt, Human
aauaaaaaauuauga

SEQ ID NO: 1233071 - RNA, 16 nt, Human
aauaaaaaauuaugac

SEQ ID NO: 1233072 - RNA, 15 nt, Human
aauaacaauaaaaga

SEQ ID NO: 1233073 - RNA, 21 nt, Human
aauaaauagcuagacugguga

SEQ ID NO: 1233074 - RNA, 13 nt, Human
aauaaggaaaagu

SEQ ID NO: 1233075 - RNA, 15 nt, Human
aauaaggaaaaguuu

SEQ ID NO: 1233076 - RNA, 14 nt, Human
aauaauuauaugcu

SEQ ID NO: 1233077 - RNA, 15 nt, Human
aauaauuauaugcua

SEQ ID NO: 1233078 - RNA, 20 nt, Human
aauaauuauaugcuauuucu

SEQ ID NO: 1233079 - RNA, 21 nt, Human
aauaauuauaugcuauuucua

SEQ ID NO: 1233080 - RNA, 22 nt, Human
aauaauuauaugcuauuucuau

SEQ ID NO: 1233081 - RNA, 23 nt, Human
aauaauuauaugcuauuucuaua

SEQ ID NO: 1233082 - RNA, 16 nt, Human
aauaaggaaaaguuua

SEQ ID NO: 1233083 - RNA, 19 nt, Human
aauaaggaaaaguuuaaua

SEQ ID NO: 1233084 - RNA, 22 nt, Human
aauaaggaaaaguuuaauauua

SEQ ID NO: 1233085 - RNA, 16 nt, Human
guuguaaaccaaguga

SEQ ID NO: 1233086 - RNA, 10 nt, Human
guuucuguac

SEQ ID NO: 1233087 - RNA, 19 nt, Human
guuugcaucugaaaauuga

SEQ ID NO: 1233088 - RNA, 15 nt, Human
guuucuguacuuuuu

SEQ ID NO: 1233089 - RNA, 22 nt, Human
guuuuauaauuuugugaagcaa

SEQ ID NO: 1233090 - RNA, 15 nt, Human
guuuuauaauuuugu

SEQ ID NO: 1233091 - RNA, 22 nt, Human
aagucuuauauauuguagauaa

SEQ ID NO: 1233092 - RNA, 19 nt, Human
aagugacuuuggcugcaug

SEQ ID NO: 1233093 - RNA, 23 nt, Human
guuuuuuuuuaaaaaagaaacau

SEQ ID NO: 1233094 - RNA, 15 nt, Human
guuuuuuuuuaaaga

SEQ ID NO: 1233095 - RNA, 17 nt, Human
guuuuuuuguuauuaaa

SEQ ID NO: 1233096 - RNA, 23 nt, Human
aaguauguuagugcaaauuguca

SEQ ID NO: 1233097 - RNA, 13 nt, Human
aaguauuaagcau

SEQ ID NO: 1233098 - RNA, 14 nt, Human
aaguauuaagcaua

SEQ ID NO: 1233099 - RNA, 20 nt, Human
aagucacauuccugaacagg

SEQ ID NO: 1233100 - RNA, 23 nt, Human
aaggagcagagcugauggagaag

SEQ ID NO: 1233101 - RNA, 13 nt, Human
aaggaggacccag

SEQ ID NO: 1233102 - RNA, 14 nt, Human
aaggaggacccagg

SEQ ID NO: 1233103 - RNA, 15 nt, Human
aaggaggacccagga

SEQ ID NO: 1233104 - RNA, 17 nt, Human
aaggaggacccaggaca

SEQ ID NO: 1233105 - RNA, 18 nt, Human
aaggaggacccaggacag

SEQ ID NO: 1233106 - RNA, 21 nt, Human
aaggaggacccaggacaggau

SEQ ID NO: 1233107 - RNA, 22 nt, Human
aaggaggacccaggacaggauc

SEQ ID NO: 1233108 - RNA, 13 nt, Human
aaggauaaugaau

SEQ ID NO: 1233109 - RNA, 23 nt, Human
aaggauaaaguugguaaaccuuu

SEQ ID NO: 1233110 - RNA, 21 nt, Human
aaggauaaaguugguaaaccu

SEQ ID NO: 1233111 - RNA, 17 nt, Human
aaggaaggcagggagga

SEQ ID NO: 1233112 - RNA, 17 nt, Human
aaggaaggcuccaucuc

SEQ ID NO: 1233113 - RNA, 22 nt, Human
aaggagcaagucagaauagaaa

SEQ ID NO: 1233114 - RNA, 20 nt, Human
aaggccugguguuucuugau

SEQ ID NO: 1233115 - RNA, 13 nt, Human
guugacaugggac

SEQ ID NO: 1233116 - RNA, 13 nt, Human
guugaauuuuaca

SEQ ID NO: 1233117 - RNA, 16 nt, Human
aaggaaaaaauaacaa

SEQ ID NO: 1233118 - RNA, 19 nt, Human
aaggaaaaaauaacaauga

SEQ ID NO: 1233119 - RNA, 16 nt, Human
aagcuuuuaugugaaa

SEQ ID NO: 1233120 - RNA, 19 nt, Human
uaacaaugcuguauuuuaa

SEQ ID NO: 1233121 - RNA, 23 nt, Human
aauacaucccuuaccugggaaag

SEQ ID NO: 1233122 - RNA, 18 nt, Human
uaauacuugcuuuggaaa

SEQ ID NO: 1233123 - RNA, 13 nt, Human
uaaucuuucacag

SEQ ID NO: 1233124 - RNA, 17 nt, Human
uaaucuuuaauuuuaca

SEQ ID NO: 1233125 - RNA, 22 nt, Human
uaauccaagcaaaugugaauca

SEQ ID NO: 1233126 - RNA, 15 nt, Human
uaauguaagacaaau

SEQ ID NO: 1233127 - RNA, 13 nt, Human
uaauuauaucuga

SEQ ID NO: 1233128 - RNA, 17 nt, Human
uaauuauaucugaggaa

SEQ ID NO: 1233129 - RNA, 21 nt, Human
uaauuauaugcuauuucuaua

SEQ ID NO: 1233130 - RNA, 13 nt, Human
uaauucauguugc

SEQ ID NO: 1233131 - RNA, 13 nt, Human
aauguaagacaaa

SEQ ID NO: 1233132 - RNA, 20 nt, Human
uacaguggggaaugaagaua

SEQ ID NO: 1233133 - RNA, 18 nt, Human
aauuaacauguuaaacca

SEQ ID NO: 1233134 - RNA, 19 nt, Human
aauuaacauguuaaaccau

SEQ ID NO: 1233135 - RNA, 17 nt, Human
uacauguacugauuacu

SEQ ID NO: 1233136 - RNA, 15 nt, Human
uacauuguauauaug

SEQ ID NO: 1233137 - RNA, 20 nt, Human
aauuaagaaaggauaaaguu

SEQ ID NO: 1233138 - RNA, 19 nt, Human
aauuaacaugaauauuuag

SEQ ID NO: 1233139 - RNA, 13 nt, Human
aauuaacauguua

SEQ ID NO: 1233140 - RNA, 14 nt, Human
aauuaacauguuaa

SEQ ID NO: 1233141 - RNA, 18 nt, Human
aauguugacaugggacau

SEQ ID NO: 1233142 - RNA, 23 nt, Human
uaccccaccucccucaaccucau

SEQ ID NO: 1233143 - RNA, 14 nt, Human
acaaaaagaaaaga

SEQ ID NO: 1233144 - RNA, 18 nt, Human
acaaaaagaaaagaaaau

SEQ ID NO: 1233145 - RNA, 19 nt, Human
uagaugcaguucugaagaa

SEQ ID NO: 1233146 - RNA, 17 nt, Human
uagaugcaguucugaag

SEQ ID NO: 1233147 - RNA, 21 nt, Human
uagaggaagccugauuaaaga

SEQ ID NO: 1233148 - RNA, 20 nt, Human
uagaugcaguucugaagaag

SEQ ID NO: 1233149 - RNA, 21 nt, Human
uagcaugucgucaaagcugaa

SEQ ID NO: 1233150 - RNA, 18 nt, Human
acaagcacuaaacaaaga

SEQ ID NO: 1233151 - RNA, 18 nt, Human
acaaauucugucucugga

SEQ ID NO: 1233152 - RNA, 19 nt, Human
uagcauuuguguugaagag

SEQ ID NO: 1233153 - RNA, 20 nt, Human
aauuuuuuucaccuagauuu

SEQ ID NO: 1233154 - RNA, 19 nt, Human
acaaaaaaaaaauuugcca

SEQ ID NO: 1233155 - RNA, 22 nt, Human
aauuuuuucucuaggaaauauu

SEQ ID NO: 1233156 - RNA, 13 nt, Human
aauuuuuuucacc

SEQ ID NO: 1233157 - RNA, 19 nt, Human
aauuuuuucucuaggaaau

SEQ ID NO: 1233158 - RNA, 19 nt, Human
aauuuuuauauuugaaaua

SEQ ID NO: 1233159 - RNA, 15 nt, Human
uagacaauugaggua

SEQ ID NO: 1233160 - RNA, 18 nt, Human
uagacaauugagguaagu

SEQ ID NO: 1233161 - RNA, 19 nt, Human
uagaauuugauaugugaac

SEQ ID NO: 1233162 - RNA, 23 nt, Human
uagaagucacauuccugaacagg

SEQ ID NO: 1233163 - RNA, 14 nt, Human
uagaaccucuuugu

SEQ ID NO: 1233164 - RNA, 16 nt, Human
uacuucaugcugucua

SEQ ID NO: 1233165 - RNA, 21 nt, Human
uacuucaaauccuugaagauu

SEQ ID NO: 1233166 - RNA, 14 nt, Human
uagaagagagaggu

SEQ ID NO: 1233167 - RNA, 22 nt, Human
uagaagagagagguugaaaaac

SEQ ID NO: 1233168 - RNA, 20 nt, Human
aauuguguuuauaauuuuaa

SEQ ID NO: 1233169 - RNA, 13 nt, Human
uacuguaagaaaa

SEQ ID NO: 1233170 - RNA, 23 nt, Human
aauugugugaaagguacuucaaa

SEQ ID NO: 1233171 - RNA, 16 nt, Human
aauuuaaauagcuuuu

SEQ ID NO: 1233172 - RNA, 15 nt, Human
aauuuaaauagcuuu

SEQ ID NO: 1233173 - RNA, 18 nt, Human
aauuugauaugugaacag

SEQ ID NO: 1233174 - RNA, 16 nt, Human
aauuugauaugugaac

SEQ ID NO: 1233175 - RNA, 15 nt, Human
aauuugauaugugaa

SEQ ID NO: 1233176 - RNA, 19 nt, Human
aauuugauaugugaacagu

SEQ ID NO: 1233177 - RNA, 19 nt, Human
uacuucaaauccuugaaga

SEQ ID NO: 1233178 - RNA, 14 nt, Human
uacuucaaauccuu

SEQ ID NO: 1233179 - RNA, 20 nt, Human
aauuugaaacacuuugcaua

SEQ ID NO: 1233180 - RNA, 13 nt, Human
aauuugaauuuug

SEQ ID NO: 1233181 - RNA, 16 nt, Human
aauuugaauuuugugu

SEQ ID NO: 1233182 - RNA, 18 nt, Human
aauuugaauuuuguguua

SEQ ID NO: 1233183 - RNA, 18 nt, Human
uacgugcucugugggucu

SEQ ID NO: 1233184 - RNA, 20 nt, Human
uacuagucaccagagacuuu

SEQ ID NO: 1233185 - RNA, 21 nt, Human
uacuagucaccagagacuuua

SEQ ID NO: 1233186 - RNA, 22 nt, Human
uacuagucaccagagacuuuag

SEQ ID NO: 1233187 - RNA, 22 nt, Human
uacucuuauaucuauauuuuac

SEQ ID NO: 1233188 - RNA, 20 nt, Human
uacucuuauaucuauauuuu

SEQ ID NO: 1233189 - RNA, 12 nt, Human
uacucaauuuua

SEQ ID NO: 1233190 - RNA, 13 nt, Human
uacucaauuuuaa

SEQ ID NO: 1233191 - RNA, 14 nt, Human
uacucaauuuuaac

SEQ ID NO: 1233192 - RNA, 21 nt, Human
aauucuugccaaauauaaaua

SEQ ID NO: 1233193 - RNA, 11 nt, Human
aauucuucccu

SEQ ID NO: 1233194 - RNA, 21 nt, Human
aauucuucccuaucuuugcca

SEQ ID NO: 1233195 - RNA, 19 nt, Human
aauucuuaugccauauaau

SEQ ID NO: 1233196 - RNA, 14 nt, Human
aauucuuucauuuu

SEQ ID NO: 1233197 - RNA, 17 nt, Human
aauucuuuaaaauuaca

SEQ ID NO: 1233198 - RNA, 22 nt, Human
aauucuuuaaaauuacaacuaa

SEQ ID NO: 1233199 - RNA, 15 nt, Human
acacaugaaguccaa

SEQ ID NO: 1233200 - RNA, 23 nt, Human
uauaaaauaauuuuuauauuuga

SEQ ID NO: 1233201 - RNA, 19 nt, Human
uauaaaagccuguuuaaga

SEQ ID NO: 1233202 - RNA, 22 nt, Human
uauaaaauaauuuuuauauuug

SEQ ID NO: 1233203 - RNA, 21 nt, Human
uauaaaauaauuuuuauauuu

SEQ ID NO: 1233204 - RNA, 14 nt, Human
uauaaaagccuguu

SEQ ID NO: 1233205 - RNA, 17 nt, Human
uauaaaagccuguuuaa

SEQ ID NO: 1233206 - RNA, 12 nt, Human
uauaaaagccug

SEQ ID NO: 1233207 - RNA, 21 nt, Human
acaccuacuagucaccagaga

SEQ ID NO: 1233208 - RNA, 22 nt, Human
acaagcucacagaccuuugaac

SEQ ID NO: 1233209 - RNA, 22 nt, Human
uagugagcagucaggaaagaga

SEQ ID NO: 1233210 - RNA, 18 nt, Human
uagucucuuuaaaaggaa

SEQ ID NO: 1233211 - RNA, 16 nt, Human
uagucucuuuaaaagg

SEQ ID NO: 1233212 - RNA, 16 nt, Human
uaguuuuauaugcuuc

SEQ ID NO: 1233213 - RNA, 14 nt, Human
uauagcuaaguaca

SEQ ID NO: 1233214 - RNA, 23 nt, Human
uauauauuuuuuucugaaauuuc

SEQ ID NO: 1233215 - RNA, 22 nt, Human
uauauauuuuuuucugaaauuu

SEQ ID NO: 1233216 - RNA, 21 nt, Human
uauauauuuuuuucugaaauu

SEQ ID NO: 1233217 - RNA, 16 nt, Human
uauauauagcagcuuu

SEQ ID NO: 1233218 - RNA, 13 nt, Human
uauauaucaaaua

SEQ ID NO: 1233219 - RNA, 19 nt, Human
uauaauuuugugaagcaaa

SEQ ID NO: 1233220 - RNA, 12 nt, Human
uauaccaauaaa

SEQ ID NO: 1233221 - RNA, 13 nt, Human
uauaccaauaaag

SEQ ID NO: 1233222 - RNA, 15 nt, Human
uauaccaauaaagug

SEQ ID NO: 1233223 - RNA, 14 nt, Human
uauaccaauaaagu

SEQ ID NO: 1233224 - RNA, 14 nt, Human
uauacccacccaga

SEQ ID NO: 1233225 - RNA, 20 nt, Human
uauagauuagaauucuguau

SEQ ID NO: 1233226 - RNA, 19 nt, Human
uauagauuagagaguguug

SEQ ID NO: 1233227 - RNA, 22 nt, Human
uauagauuagagaguguugaaa

SEQ ID NO: 1233228 - RNA, 14 nt, Human
uauaauuuugugaa

SEQ ID NO: 1233229 - RNA, 15 nt, Human
uaucuugaauaaugu

SEQ ID NO: 1233230 - RNA, 10 nt, Human
uaugauccag

SEQ ID NO: 1233231 - RNA, 11 nt, Human
uaugauccagc

SEQ ID NO: 1233232 - RNA, 19 nt, Human
uaugauccagcagauuauu

SEQ ID NO: 1233233 - RNA, 20 nt, Human
uaugauccagcagauuauuc

SEQ ID NO: 1233234 - RNA, 21 nt, Human
uaugauccagcagauuauuca

SEQ ID NO: 1233235 - RNA, 22 nt, Human
uaugauccagcagauuauucac

SEQ ID NO: 1233236 - RNA, 15 nt, Human
uaugcugaguuugug

SEQ ID NO: 1233237 - RNA, 22 nt, Human
uauggccugugagcuaggaauu

SEQ ID NO: 1233238 - RNA, 14 nt, Human
uauggccuguggau

SEQ ID NO: 1233239 - RNA, 15 nt, Human
acagcuccaagaauu

SEQ ID NO: 1233240 - RNA, 19 nt, Human
uauauuuacuaaaauggac

SEQ ID NO: 1233241 - RNA, 15 nt, Human
uauauuuacaaaugg

SEQ ID NO: 1233242 - RNA, 14 nt, Human
uauauuuacaaaug

SEQ ID NO: 1233243 - RNA, 20 nt, Human
uaucaccugucuugccuuuu

SEQ ID NO: 1233244 - RNA, 16 nt, Human
uauauugauccagaaa

SEQ ID NO: 1233245 - RNA, 23 nt, Human
acaguucggugagcuacaaaugc

SEQ ID NO: 1233246 - RNA, 19 nt, Human
acaguucggugagcuacaa

SEQ ID NO: 1233247 - RNA, 22 nt, Human
acaguucggugagcuacaaaug

SEQ ID NO: 1233248 - RNA, 14 nt, Human
uauuggcuuuucug

SEQ ID NO: 1233249 - RNA, 15 nt, Human
uauuggcuuuucuga

SEQ ID NO: 1233250 - RNA, 16 nt, Human
uauuggcuuuucugau

SEQ ID NO: 1233251 - RNA, 17 nt, Human
uauuggcuuuucugauc

SEQ ID NO: 1233252 - RNA, 18 nt, Human
uauuggcuuuucugaucc

SEQ ID NO: 1233253 - RNA, 21 nt, Human
uauuggcuuuucugauccagu

SEQ ID NO: 1233254 - RNA, 22 nt, Human
uauuggcuuuucugauccaguu

SEQ ID NO: 1233255 - RNA, 18 nt, Human
uauuuacuaaaauggacu

SEQ ID NO: 1233256 - RNA, 14 nt, Human
uauuuaauucaugu

SEQ ID NO: 1233257 - RNA, 19 nt, Human
uauuuaguguucauaaaua

SEQ ID NO: 1233258 - RNA, 18 nt, Human
uauuuauuuuaauaaugu

SEQ ID NO: 1233259 - RNA, 16 nt, Human
uauuuauuuuaauaau

SEQ ID NO: 1233260 - RNA, 14 nt, Human
uauuuauuuuaaua

SEQ ID NO: 1233261 - RNA, 14 nt, Human
uauuuaauagguuu

SEQ ID NO: 1233262 - RNA, 18 nt, Human
uauuuaaccucuaaauuc

SEQ ID NO: 1233263 - RNA, 17 nt, Human
uauuuaaccucuaaauu

SEQ ID NO: 1233264 - RNA, 17 nt, Human
uauugucuagugaaacu

SEQ ID NO: 1233265 - RNA, 21 nt, Human
uauuguagcauccuggaauau

SEQ ID NO: 1233266 - RNA, 20 nt, Human
uauuguagcauccuggaaua

SEQ ID NO: 1233267 - RNA, 18 nt, Human
uauuguagcauccuggaa

SEQ ID NO: 1233268 - RNA, 17 nt, Human
uauuguagcauccugga

SEQ ID NO: 1233269 - RNA, 16 nt, Human
uauuguauauuacaau

SEQ ID NO: 1233270 - RNA, 17 nt, Human
uauuguauauuacaaug

SEQ ID NO: 1233271 - RNA, 19 nt, Human
uauuguauauuacaaugau

SEQ ID NO: 1233272 - RNA, 15 nt, Human
uauuguacaaaguau

SEQ ID NO: 1233273 - RNA, 16 nt, Human
uauuguacaaaguauu

SEQ ID NO: 1233274 - RNA, 21 nt, Human
uauuguacaaaguauuaagca

SEQ ID NO: 1233275 - RNA, 22 nt, Human
uauuguacaaaguauuaagcau

SEQ ID NO: 1233276 - RNA, 23 nt, Human
uauuguacaaaguauuaagcaua

SEQ ID NO: 1233277 - RNA, 23 nt, Human
acaguauaauuaacauguuaaac

SEQ ID NO: 1233278 - RNA, 21 nt, Human
acaguauaauuaacauguuaa

SEQ ID NO: 1233279 - RNA, 20 nt, Human
acagugaaagaaaauaacaa

SEQ ID NO: 1233280 - RNA, 21 nt, Human
acaguuaccucugccucagaa

SEQ ID NO: 1233281 - RNA, 18 nt, Human
uauucaaaguugccuaaa

SEQ ID NO: 1233282 - RNA, 21 nt, Human
uauucaaaguugccuaaaucc

SEQ ID NO: 1233283 - RNA, 22 nt, Human
uauucaaaguugccuaaaucca

SEQ ID NO: 1233284 - RNA, 23 nt, Human
uauucaaaguugccuaaauccau

SEQ ID NO: 1233285 - RNA, 11 nt, Human
uauucaauaaa

SEQ ID NO: 1233286 - RNA, 13 nt, Human
uauucacugauuu

SEQ ID NO: 1233287 - RNA, 19 nt, Human
uauucacugauuugacaua

SEQ ID NO: 1233288 - RNA, 22 nt, Human
uauucacugauuugacauaguc

SEQ ID NO: 1233289 - RNA, 15 nt, Human
uauucagcucaugga

SEQ ID NO: 1233290 - RNA, 22 nt, Human
uauuagcccuucuccauggccc

SEQ ID NO: 1233291 - RNA, 12 nt, Human
uauuaaagccau

SEQ ID NO: 1233292 - RNA, 13 nt, Human
uauuaaagccaug

SEQ ID NO: 1233293 - RNA, 14 nt, Human
uauuaaagccaugu

SEQ ID NO: 1233294 - RNA, 23 nt, Human
uauuacaguggggaaugaagaua

SEQ ID NO: 1233295 - RNA, 16 nt, Human
uauuacaguauaauua

SEQ ID NO: 1233296 - RNA, 18 nt, Human
uauuacaguauaauuaac

SEQ ID NO: 1233297 - RNA, 20 nt, Human
uauuacaguauaauuaacau

SEQ ID NO: 1233298 - RNA, 21 nt, Human
uauuacaguauaauuaacaug

SEQ ID NO: 1233299 - RNA, 17 nt, Human
uauuaaagccauguuua

SEQ ID NO: 1233300 - RNA, 18 nt, Human
uauuaaagccauguuuau

SEQ ID NO: 1233301 - RNA, 20 nt, Human
uauuaaagccauguuuauua

SEQ ID NO: 1233302 - RNA, 21 nt, Human
uauguuuucaggcuagaugua

SEQ ID NO: 1233303 - RNA, 17 nt, Human
acagcuggugcccugcu

SEQ ID NO: 1233304 - RNA, 20 nt, Human
acagcuggugcccugcuuuc

SEQ ID NO: 1233305 - RNA, 19 nt, Human
acccacuugcuuuuaaaau

SEQ ID NO: 1233306 - RNA, 18 nt, Human
acccagaaugagacaucc

SEQ ID NO: 1233307 - RNA, 20 nt, Human
acccagaaugagacauccag

SEQ ID NO: 1233308 - RNA, 19 nt, Human
acccagaaugagacaucca

SEQ ID NO: 1233309 - RNA, 23 nt, Human
accacuuguguuuugcaagccag

SEQ ID NO: 1233310 - RNA, 19 nt, Human
accacuuguguuuugcaag

SEQ ID NO: 1233311 - RNA, 19 nt, Human
ucagccuggcuucaaauug

SEQ ID NO: 1233312 - RNA, 13 nt, Human
ucagauuuuauua

SEQ ID NO: 1233313 - RNA, 14 nt, Human
ucagauuuuauuau

SEQ ID NO: 1233314 - RNA, 15 nt, Human
ucagauuuuauuaug

SEQ ID NO: 1233315 - RNA, 10 nt, Human
acccaggaca

SEQ ID NO: 1233316 - RNA, 11 nt, Human
acccaggacag

SEQ ID NO: 1233317 - RNA, 14 nt, Human
acccaggacaggau

SEQ ID NO: 1233318 - RNA, 19 nt, Human
acccagguuggagugcagu

SEQ ID NO: 1233319 - RNA, 20 nt, Human
acccagguuggagugcagug

SEQ ID NO: 1233320 - RNA, 16 nt, Human
ucagauuuuauuaugu

SEQ ID NO: 1233321 - RNA, 19 nt, Human
ucagauuuuauuauguaaa

SEQ ID NO: 1233322 - RNA, 20 nt, Human
ucagauuuuauuauguaaau

SEQ ID NO: 1233323 - RNA, 22 nt, Human
ucagauuuuauuauguaaaucc

SEQ ID NO: 1233324 - RNA, 18 nt, Human
acccuccaccgcagaagg

SEQ ID NO: 1233325 - RNA, 20 nt, Human
acccuccaccgcagaaggaa

SEQ ID NO: 1233326 - RNA, 21 nt, Human
acccuccaccgcagaaggaag

SEQ ID NO: 1233327 - RNA, 20 nt, Human
ucaggaagagaaggagcaga

SEQ ID NO: 1233328 - RNA, 15 nt, Human
ucaggaagagaagga

SEQ ID NO: 1233329 - RNA, 16 nt, Human
ucaggaagagaaggag

SEQ ID NO: 1233330 - RNA, 13 nt, Human
uccacucuuucuu

SEQ ID NO: 1233331 - RNA, 15 nt, Human
uccacucuuucuuuc

SEQ ID NO: 1233332 - RNA, 16 nt, Human
uccacucuuucuuuca

SEQ ID NO: 1233333 - RNA, 14 nt, Human
accuuagaauacag

SEQ ID NO: 1233334 - RNA, 12 nt, Human
accuuccaccca

SEQ ID NO: 1233335 - RNA, 14 nt, Human
accuuccacccagu

SEQ ID NO: 1233336 - RNA, 21 nt, Human
uccaacuaucucauuuccaag

SEQ ID NO: 1233337 - RNA, 23 nt, Human
uccaaagucucuggaauuugaaa

SEQ ID NO: 1233338 - RNA, 20 nt, Human
ucauuuuagggguagcauuu

SEQ ID NO: 1233339 - RNA, 13 nt, Human
accucaauguccc

SEQ ID NO: 1233340 - RNA, 12 nt, Human
accuagauuuuu

SEQ ID NO: 1233341 - RNA, 12 nt, Human
accggaccaucu

SEQ ID NO: 1233342 - RNA, 18 nt, Human
accucuaaauucuuucau

SEQ ID NO: 1233343 - RNA, 21 nt, Human
accucuaaauucuuucauuuu

SEQ ID NO: 1233344 - RNA, 12 nt, Human
accucucaauau

SEQ ID NO: 1233345 - RNA, 14 nt, Human
ucaugugaaaucau

SEQ ID NO: 1233346 - RNA, 16 nt, Human
ucaugugaaaucauuc

SEQ ID NO: 1233347 - RNA, 22 nt, Human
ucaugaauuaguuuuauaugcu

SEQ ID NO: 1233348 - RNA, 14 nt, Human
ucaugaccaguaaa

SEQ ID NO: 1233349 - RNA, 15 nt, Human
ucaugaccaguaaag

SEQ ID NO: 1233350 - RNA, 15 nt, Human
ucaugcauggaaauu

SEQ ID NO: 1233351 - RNA, 19 nt, Human
uccagccuggggcugaggc

SEQ ID NO: 1233352 - RNA, 22 nt, Human
acuaugaaguuuuuuuuauaca

SEQ ID NO: 1233353 - RNA, 17 nt, Human
acuauauuguuugcuaa

SEQ ID NO: 1233354 - RNA, 18 nt, Human
ucccucaaccucauccuc

SEQ ID NO: 1233355 - RNA, 19 nt, Human
ucccucaaccucauccucu

SEQ ID NO: 1233356 - RNA, 12 nt, Human
ucccucacccau

SEQ ID NO: 1233357 - RNA, 18 nt, Human
ucccucacccauccuaga

SEQ ID NO: 1233358 - RNA, 14 nt, Human
ucccucacccaucc

SEQ ID NO: 1233359 - RNA, 14 nt, Human
uccgugcuaaggac

SEQ ID NO: 1233360 - RNA, 15 nt, Human
uccgugcuaaggacu

SEQ ID NO: 1233361 - RNA, 16 nt, Human
uccgugcuaaggacuu

SEQ ID NO: 1233362 - RNA, 16 nt, Human
acucaucuagguaaau

SEQ ID NO: 1233363 - RNA, 18 nt, Human
acucaucuagguaaauua

SEQ ID NO: 1233364 - RNA, 21 nt, Human
acucaucuagguaaauuacag

SEQ ID NO: 1233365 - RNA, 18 nt, Human
acuccugaccucaaguga

SEQ ID NO: 1233366 - RNA, 22 nt, Human
acucuccauuuaauaauuauau

SEQ ID NO: 1233367 - RNA, 23 nt, Human
acucuuauaucuauauuuuacau

SEQ ID NO: 1233368 - RNA, 16 nt, Human
acugcaaccuccaccu

SEQ ID NO: 1233369 - RNA, 17 nt, Human
acugcaaccuccaccuc

SEQ ID NO: 1233370 - RNA, 20 nt, Human
acugcaaccuccaccucgca

SEQ ID NO: 1233371 - RNA, 14 nt, Human
acugaggaucagag

SEQ ID NO: 1233372 - RNA, 16 nt, Human
acugcaaccucugccu

SEQ ID NO: 1233373 - RNA, 13 nt, Human
acuggauuguacu

SEQ ID NO: 1233374 - RNA, 16 nt, Human
acuggauuguacuuug

SEQ ID NO: 1233375 - RNA, 22 nt, Human
acugccuucucaacuccaaacu

SEQ ID NO: 1233376 - RNA, 11 nt, Human
acugccuuuga

SEQ ID NO: 1233377 - RNA, 13 nt, Human
acugccuuugacc

SEQ ID NO: 1233378 - RNA, 23 nt, Human
acugcgcccuuaacugcauccag

SEQ ID NO: 1233379 - RNA, 21 nt, Human
acugcucuccuccaccucaac

SEQ ID NO: 1233380 - RNA, 18 nt, Human
uccuucagcacuuuagaa

SEQ ID NO: 1233381 - RNA, 15 nt, Human
uccuucagcacuuua

SEQ ID NO: 1233382 - RNA, 14 nt, Human
uccuucccugcugu

SEQ ID NO: 1233383 - RNA, 19 nt, Human
acuguaaucuuauuuagga

SEQ ID NO: 1233384 - RNA, 22 nt, Human
acuguaaucuuauuuaggaagu

SEQ ID NO: 1233385 - RNA, 16 nt, Human
acuguaaggcaaucau

SEQ ID NO: 1233386 - RNA, 20 nt, Human
agcacuuuagaauaugccuu

SEQ ID NO: 1233387 - RNA, 14 nt, Human
agcacuuuagaaua

SEQ ID NO: 1233388 - RNA, 21 nt, Human
agcacuuuagaauaugccuug

SEQ ID NO: 1233389 - RNA, 11 nt, Human
agcagacauuu

SEQ ID NO: 1233390 - RNA, 16 nt, Human
agcaccaaucaugaau

SEQ ID NO: 1233391 - RNA, 22 nt, Human
agcacagccucuuagaugcagu

SEQ ID NO: 1233392 - RNA, 15 nt, Human
agcacagugaucaag

SEQ ID NO: 1233393 - RNA, 14 nt, Human
ugaggaauucugua

SEQ ID NO: 1233394 - RNA, 15 nt, Human
ugaggaauucuguau

SEQ ID NO: 1233395 - RNA, 16 nt, Human
ugaggaauucuguaua

SEQ ID NO: 1233396 - RNA, 18 nt, Human
ugaggaauucuguauaga

SEQ ID NO: 1233397 - RNA, 19 nt, Human
ugaggaauucuguauagau

SEQ ID NO: 1233398 - RNA, 12 nt, Human
ugaggacacaug

SEQ ID NO: 1233399 - RNA, 13 nt, Human
ugaggacacaugu

SEQ ID NO: 1233400 - RNA, 14 nt, Human
ugaggacacauguc

SEQ ID NO: 1233401 - RNA, 15 nt, Human
ugaggacacaugucc

SEQ ID NO: 1233402 - RNA, 15 nt, Human
ugaggacacugauau

SEQ ID NO: 1233403 - RNA, 16 nt, Human
ugaggacacaugucca

SEQ ID NO: 1233404 - RNA, 13 nt, Human
ugaggccagacca

SEQ ID NO: 1233405 - RNA, 13 nt, Human
ugagcuacaaaug

SEQ ID NO: 1233406 - RNA, 14 nt, Human
ugagcuacaaaugc

SEQ ID NO: 1233407 - RNA, 16 nt, Human
ugagcuacaaaugcau

SEQ ID NO: 1233408 - RNA, 14 nt, Human
ugagcuaggaauug

SEQ ID NO: 1233409 - RNA, 16 nt, Human
ugaggggcuaccagga

SEQ ID NO: 1233410 - RNA, 17 nt, Human
ugaggggcuaccaggaa

SEQ ID NO: 1233411 - RNA, 19 nt, Human
ugaggggcuaccaggaaag

SEQ ID NO: 1233412 - RNA, 17 nt, Human
agcagagcugauggaga

SEQ ID NO: 1233413 - RNA, 19 nt, Human
agcagagcugauggagaag

SEQ ID NO: 1233414 - RNA, 21 nt, Human
agcagagcugauggagaagga

SEQ ID NO: 1233415 - RNA, 22 nt, Human
agcagagcugauggagaaggaa

SEQ ID NO: 1233416 - RNA, 23 nt, Human
agcagagcugauggagaaggaag

SEQ ID NO: 1233417 - RNA, 14 nt, Human
agcagauuauucac

SEQ ID NO: 1233418 - RNA, 15 nt, Human
agcagauuauucacu

SEQ ID NO: 1233419 - RNA, 16 nt, Human
agcagauuauucacug

SEQ ID NO: 1233420 - RNA, 19 nt, Human
agcagauuauucacugauu

SEQ ID NO: 1233421 - RNA, 20 nt, Human
agcagauuauucacugauuu

SEQ ID NO: 1233422 - RNA, 15 nt, Human
ugagguaaguuuuuu

SEQ ID NO: 1233423 - RNA, 16 nt, Human
agauuuaccacuugug

SEQ ID NO: 1233424 - RNA, 14 nt, Human
agauuuaugcauau

SEQ ID NO: 1233425 - RNA, 14 nt, Human
agauuuuccugaaa

SEQ ID NO: 1233426 - RNA, 21 nt, Human
agauuuuauuauguaaauccc

SEQ ID NO: 1233427 - RNA, 22 nt, Human
agauuuuauuauguaaauccca

SEQ ID NO: 1233428 - RNA, 15 nt, Human
agcaaaaauauuuua

SEQ ID NO: 1233429 - RNA, 17 nt, Human
agcaaaaauauuuuaug

SEQ ID NO: 1233430 - RNA, 18 nt, Human
agcaaaaauauuuuauga

SEQ ID NO: 1233431 - RNA, 19 nt, Human
agcaaaaauauuuuaugau

SEQ ID NO: 1233432 - RNA, 23 nt, Human
agcaaaaauauuuuaugauccag

SEQ ID NO: 1233433 - RNA, 15 nt, Human
ugacuguuuccauca

SEQ ID NO: 1233434 - RNA, 22 nt, Human
agauucaaugccccugaauuua

SEQ ID NO: 1233435 - RNA, 21 nt, Human
agauucaaugccccugaauuu

SEQ ID NO: 1233436 - RNA, 16 nt, Human
agauuauucacugauu

SEQ ID NO: 1233437 - RNA, 23 nt, Human
agauuauauauauuuuuuucuga

SEQ ID NO: 1233438 - RNA, 15 nt, Human
agauguguucacaau

SEQ ID NO: 1233439 - RNA, 18 nt, Human
agauguguucacaaugga

SEQ ID NO: 1233440 - RNA, 17 nt, Human
ugaauuuauuggcuuuu

SEQ ID NO: 1233441 - RNA, 12 nt, Human
ugaauuuauugg

SEQ ID NO: 1233442 - RNA, 15 nt, Human
ugaauuuauuggcuu

SEQ ID NO: 1233443 - RNA, 16 nt, Human
ugaauuuauuggcuuu

SEQ ID NO: 1233444 - RNA, 12 nt, Human
ugacauuuuaca

SEQ ID NO: 1233445 - RNA, 14 nt, Human
ugacauuuuacauu

SEQ ID NO: 1233446 - RNA, 15 nt, Human
ugacauuuuacauua

SEQ ID NO: 1233447 - RNA, 16 nt, Human
ugacauuuuacauuaa

SEQ ID NO: 1233448 - RNA, 21 nt, Human
agaucauugugaaauuauuca

SEQ ID NO: 1233449 - RNA, 11 nt, Human
ugaauggcuuu

SEQ ID NO: 1233450 - RNA, 18 nt, Human
agagucuauuuacggaac

SEQ ID NO: 1233451 - RNA, 16 nt, Human
ugaagcuuuuauguga

SEQ ID NO: 1233452 - RNA, 18 nt, Human
ugaagguggaaauaaacu

SEQ ID NO: 1233453 - RNA, 12 nt, Human
ucuuuguaauga

SEQ ID NO: 1233454 - RNA, 16 nt, Human
ucuuuguaaugaaaac

SEQ ID NO: 1233455 - RNA, 13 nt, Human
ucuuuguaaugaa

SEQ ID NO: 1233456 - RNA, 15 nt, Human
ucuuuguaaugaaaa

SEQ ID NO: 1233457 - RNA, 20 nt, Human
ugaagaagcaccaaucauga

SEQ ID NO: 1233458 - RNA, 14 nt, Human
ugaagaagauggua

SEQ ID NO: 1233459 - RNA, 22 nt, Human
ugaagaagcaccaaucaugaau

SEQ ID NO: 1233460 - RNA, 21 nt, Human
agaggcgcaugaauuugugaa

SEQ ID NO: 1233461 - RNA, 15 nt, Human
agagaaugagagaca

SEQ ID NO: 1233462 - RNA, 17 nt, Human
agagacacacugaagaa

SEQ ID NO: 1233463 - RNA, 20 nt, Human
agagacacacugaagaagca

SEQ ID NO: 1233464 - RNA, 18 nt, Human
agagacacacugaagaag

SEQ ID NO: 1233465 - RNA, 18 nt, Human
ucuuuaauuuuggaauuu

SEQ ID NO: 1233466 - RNA, 14 nt, Human
ucuuuaauuuugga

SEQ ID NO: 1233467 - RNA, 15 nt, Human
ucuuuaauuuuggaa

SEQ ID NO: 1233468 - RNA, 16 nt, Human
ucuuuaauuuuggaau

SEQ ID NO: 1233469 - RNA, 17 nt, Human
ucuuuaauuuuggaauu

SEQ ID NO: 1233470 - RNA, 15 nt, Human
ucuuuaaaauuacaa

SEQ ID NO: 1233471 - RNA, 20 nt, Human
ucuuuaaaauuacaacuaag

SEQ ID NO: 1233472 - RNA, 14 nt, Human
ucuugaugccuggc

SEQ ID NO: 1233473 - RNA, 20 nt, Human
ucuugaugccuggcggggug

SEQ ID NO: 1233474 - RNA, 21 nt, Human
ucuucccuggaaaccuuccac

SEQ ID NO: 1233475 - RNA, 22 nt, Human
ucuuagaugcaguucugaagaa

SEQ ID NO: 1233476 - RNA, 19 nt, Human
ucuuaauauguucuuuuaa

SEQ ID NO: 1233477 - RNA, 21 nt, Human
agaauuugauaugugaacagu

SEQ ID NO: 1233478 - RNA, 20 nt, Human
agaauuugauaugugaacag

SEQ ID NO: 1233479 - RNA, 19 nt, Human
agaauuugauaugugaaca

SEQ ID NO: 1233480 - RNA, 18 nt, Human
agaauuugauaugugaac

SEQ ID NO: 1233481 - RNA, 17 nt, Human
agaauuugauaugugaa

SEQ ID NO: 1233482 - RNA, 20 nt, Human
agacagaaucucagucuguc

SEQ ID NO: 1233483 - RNA, 11 nt, Human
agaaggaaggc

SEQ ID NO: 1233484 - RNA, 17 nt, Human
agaaggaaggcagggag

SEQ ID NO: 1233485 - RNA, 19 nt, Human
agaaggaaggcagggagga

SEQ ID NO: 1233486 - RNA, 20 nt, Human
agaaggaaggcagggaggag

SEQ ID NO: 1233487 - RNA, 21 nt, Human
agaaggaaggcagggaggagg

SEQ ID NO: 1233488 - RNA, 16 nt, Human
ucuguauagauuagag

SEQ ID NO: 1233489 - RNA, 14 nt, Human
ucuggucucgaacu

SEQ ID NO: 1233490 - RNA, 17 nt, Human
ucuguauagauuagaau

SEQ ID NO: 1233491 - RNA, 16 nt, Human
ucuguucauuccucca

SEQ ID NO: 1233492 - RNA, 17 nt, Human
ucuguucauuccuccag

SEQ ID NO: 1233493 - RNA, 21 nt, Human
agaauuucuaggacugaauua

SEQ ID NO: 1233494 - RNA, 13 nt, Human
agaauuucuagga

SEQ ID NO: 1233495 - RNA, 18 nt, Human
ucuguuuuauaauuuugu

SEQ ID NO: 1233496 - RNA, 20 nt, Human
ucuguuuuauaauuuuguga

SEQ ID NO: 1233497 - RNA, 17 nt, Human
agaaaaauauauacuaa

SEQ ID NO: 1233498 - RNA, 19 nt, Human
agaaaacaaggaugaauua

SEQ ID NO: 1233499 - RNA, 20 nt, Human
agaaagaacggaagaagaga

SEQ ID NO: 1233500 - RNA, 19 nt, Human
agaaaacuuguauuaugug

SEQ ID NO: 1233501 - RNA, 13 nt, Human
agaaacccugcac

SEQ ID NO: 1233502 - RNA, 18 nt, Human
ucucccaaaaaacuacuu

SEQ ID NO: 1233503 - RNA, 12 nt, Human
ucuccauuuaau

SEQ ID NO: 1233504 - RNA, 16 nt, Human
ucuccauuuaauaauu

SEQ ID NO: 1233505 - RNA, 19 nt, Human
ucuccauuuaauaauuaua

SEQ ID NO: 1233506 - RNA, 19 nt, Human
ucuccauugugccuaaguc

SEQ ID NO: 1233507 - RNA, 23 nt, Human
acuuguguaaauacaauuuuguu

SEQ ID NO: 1233508 - RNA, 21 nt, Human
acuuguguaaauacaauuuug

SEQ ID NO: 1233509 - RNA, 22 nt, Human
acuuguguaaauacaauuuugu

SEQ ID NO: 1233510 - RNA, 14 nt, Human
acuuuggcugcaug

SEQ ID NO: 1233511 - RNA, 17 nt, Human
acuuuggcugcaugcga

SEQ ID NO: 1233512 - RNA, 14 nt, Human
acuuuuggcauuuu

SEQ ID NO: 1233513 - RNA, 12 nt, Human
acuuuuugcagc

SEQ ID NO: 1233514 - RNA, 13 nt, Human
acuuuuugcagcu

SEQ ID NO: 1233515 - RNA, 15 nt, Human
acuuuuugcagcuuu

SEQ ID NO: 1233516 - RNA, 17 nt, Human
acuuuuugcagcuuucu

SEQ ID NO: 1233517 - RNA, 22 nt, Human
acuuuuuuuuuuuaagaguaaa

SEQ ID NO: 1233518 - RNA, 22 nt, Human
agaaccucuuugucuacaccau

SEQ ID NO: 1233519 - RNA, 17 nt, Human
ucugauacagaaaaguu

SEQ ID NO: 1233520 - RNA, 16 nt, Human
ucugauacagaaaagu

SEQ ID NO: 1233521 - RNA, 19 nt, Human
ucugaggggcuaccaggaa

SEQ ID NO: 1233522 - RNA, 20 nt, Human
ucugaggggcuaccaggaaa

SEQ ID NO: 1233523 - RNA, 21 nt, Human
ucugaggggcuaccaggaaag

SEQ ID NO: 1233524 - RNA, 13 nt, Human
ucugccuaaggac

SEQ ID NO: 1233525 - RNA, 14 nt, Human
ucugccuaaggacu

SEQ ID NO: 1233526 - RNA, 15 nt, Human
ucugccuaaggacuu

SEQ ID NO: 1233527 - RNA, 16 nt, Human
ucugccuaaggacuuc

SEQ ID NO: 1233528 - RNA, 16 nt, Human
agaagaaagaacggaa

SEQ ID NO: 1233529 - RNA, 18 nt, Human
agaagaaagaacggaaga

SEQ ID NO: 1233530 - RNA, 21 nt, Human
agaagaacugaaaucauacuu

SEQ ID NO: 1233531 - RNA, 12 nt, Human
ucuggauuauau

SEQ ID NO: 1233532 - RNA, 18 nt, Human
ucuggauuauauuaugaa

SEQ ID NO: 1233533 - RNA, 14 nt, Human
agaagcuccaggua

SEQ ID NO: 1233534 - RNA, 19 nt, Human
agcuauggugucauaggcu

SEQ ID NO: 1233535 - RNA, 11 nt, Human
agcuauauaag

SEQ ID NO: 1233536 - RNA, 17 nt, Human
agcuauauaagacaaga

SEQ ID NO: 1233537 - RNA, 21 nt, Human
ugccacaccccccaccccuag

SEQ ID NO: 1233538 - RNA, 23 nt, Human
ugccacaccccccaccccuagga

SEQ ID NO: 1233539 - RNA, 13 nt, Human
ugcagaaagcauc

SEQ ID NO: 1233540 - RNA, 20 nt, Human
ugcagaaagcaucccucacc

SEQ ID NO: 1233541 - RNA, 19 nt, Human
agcccuucuuuccacagaa

SEQ ID NO: 1233542 - RNA, 18 nt, Human
agcccuucuuuccacaga

SEQ ID NO: 1233543 - RNA, 14 nt, Human
agccugauuaaaga

SEQ ID NO: 1233544 - RNA, 16 nt, Human
agccugcacggugaau

SEQ ID NO: 1233545 - RNA, 18 nt, Human
agccugcacggugaaugg

SEQ ID NO: 1233546 - RNA, 21 nt, Human
ugcaggucccuaauaaagcug

SEQ ID NO: 1233547 - RNA, 18 nt, Human
ugcaggucccuaauaaag

SEQ ID NO: 1233548 - RNA, 19 nt, Human
ugcaggucccuaauaaagc

SEQ ID NO: 1233549 - RNA, 20 nt, Human
ugcaggucccuaauaaagcu

SEQ ID NO: 1233550 - RNA, 22 nt, Human
ugcauaacguauaaaagccugu

SEQ ID NO: 1233551 - RNA, 15 nt, Human
ugcauaauggucaga

SEQ ID NO: 1233552 - RNA, 17 nt, Human
aggaaagaggaagcaaa

SEQ ID NO: 1233553 - RNA, 16 nt, Human
ugcuaguaauuggaaa

SEQ ID NO: 1233554 - RNA, 19 nt, Human
aggaaagagaacuuccaga

SEQ ID NO: 1233555 - RNA, 13 nt, Human
aggaaagagaacu

SEQ ID NO: 1233556 - RNA, 12 nt, Human
aggaaagaaaac

SEQ ID NO: 1233557 - RNA, 13 nt, Human
aggaaagaaaaca

SEQ ID NO: 1233558 - RNA, 21 nt, Human
aggaaaaguuuaauauuaaag

SEQ ID NO: 1233559 - RNA, 23 nt, Human
aggaaaaguuuaauauuaaagcc

SEQ ID NO: 1233560 - RNA, 24 nt, Human
aggaaaaguuuaauauuaaagcca

SEQ ID NO: 1233561 - RNA, 21 nt, Human
agcuuauugucuagugaaacu

SEQ ID NO: 1233562 - RNA, 22 nt, Human
aggaauuuuauuuuuuucugaa

SEQ ID NO: 1233563 - RNA, 12 nt, Human
aggaagagaagg

SEQ ID NO: 1233564 - RNA, 14 nt, Human
aggaagagaaggag

SEQ ID NO: 1233565 - RNA, 16 nt, Human
aggaagagaaggagca

SEQ ID NO: 1233566 - RNA, 17 nt, Human
aggaagagaaggagcag

SEQ ID NO: 1233567 - RNA, 23 nt, Human
aggaauucuguauagauuagaau

SEQ ID NO: 1233568 - RNA, 16 nt, Human
aggaauucuguauaga

SEQ ID NO: 1233569 - RNA, 17 nt, Human
aggaauucuguauagau

SEQ ID NO: 1233570 - RNA, 22 nt, Human
aggaauucuguauagauuagaa

SEQ ID NO: 1233571 - RNA, 24 nt, Human
aggaaagcgccuccaacccuagca

SEQ ID NO: 1233572 - RNA, 18 nt, Human
aggaaauauuuauuuuaa

SEQ ID NO: 1233573 - RNA, 14 nt, Human
aggaaauauuuauu

SEQ ID NO: 1233574 - RNA, 17 nt, Human
agcucucaguugcagcc

SEQ ID NO: 1233575 - RNA, 21 nt, Human
agcucucaguugcagcccugc

SEQ ID NO: 1233576 - RNA, 14 nt, Human
agcugauggagaag

SEQ ID NO: 1233577 - RNA, 15 nt, Human
agcugauggagaagg

SEQ ID NO: 1233578 - RNA, 16 nt, Human
agcugauggagaagga

SEQ ID NO: 1233579 - RNA, 17 nt, Human
agcugauggagaaggaa

SEQ ID NO: 1233580 - RNA, 19 nt, Human
agcugauggagaaggaagg

SEQ ID NO: 1233581 - RNA, 16 nt, Human
ugccucucugcagguc

SEQ ID NO: 1233582 - RNA, 18 nt, Human
ugccucucugcagguccc

SEQ ID NO: 1233583 - RNA, 19 nt, Human
ugccucucugcaggucccu

SEQ ID NO: 1233584 - RNA, 20 nt, Human
ugccucucugcaggucccua

SEQ ID NO: 1233585 - RNA, 17 nt, Human
agcuggggccaggcugg

SEQ ID NO: 1233586 - RNA, 21 nt, Human
ugccucucugcaggucccuaa

SEQ ID NO: 1233587 - RNA, 15 nt, Human
agcugccucuucccu

SEQ ID NO: 1233588 - RNA, 19 nt, Human
agcugccucuucccucuuc

SEQ ID NO: 1233589 - RNA, 21 nt, Human
ugccuuuuucauuauuuuauu

SEQ ID NO: 1233590 - RNA, 14 nt, Human
ugccuuuuucauua

SEQ ID NO: 1233591 - RNA, 15 nt, Human
ugccuuuuucauuau

SEQ ID NO: 1233592 - RNA, 16 nt, Human
ugccuuuuucauuauu

SEQ ID NO: 1233593 - RNA, 17 nt, Human
ugccuuuuucauuauuu

SEQ ID NO: 1233594 - RNA, 13 nt, Human
ugccuuguuucau

SEQ ID NO: 1233595 - RNA, 13 nt, Human
ugccuuuuucauu

SEQ ID NO: 1233596 - RNA, 20 nt, Human
agcuggggccaggcuggguc

SEQ ID NO: 1233597 - RNA, 13 nt, Human
uggcagcaacaau

SEQ ID NO: 1233598 - RNA, 18 nt, Human
uggcaucaucucagcuca

SEQ ID NO: 1233599 - RNA, 20 nt, Human
aggcaggaguuucguuuuca

SEQ ID NO: 1233600 - RNA, 22 nt, Human
aggcagggaggaggcagagaag

SEQ ID NO: 1233601 - RNA, 20 nt, Human
aggcagcucuaaaugucaau

SEQ ID NO: 1233602 - RNA, 18 nt, Human
aggcaguucaaagcagga

SEQ ID NO: 1233603 - RNA, 19 nt, Human
aggcaguucaaagcaggau

SEQ ID NO: 1233604 - RNA, 17 nt, Human
uggacaccugcccugcc

SEQ ID NO: 1233605 - RNA, 18 nt, Human
uggacaccugcccugccc

SEQ ID NO: 1233606 - RNA, 23 nt, Human
uggacaccugcccugcccugcca

SEQ ID NO: 1233607 - RNA, 16 nt, Human
uggagaagaacugaaa

SEQ ID NO: 1233608 - RNA, 16 nt, Human
uggagcccacuguacu

SEQ ID NO: 1233609 - RNA, 19 nt, Human
uggagcccacuguacuugc

SEQ ID NO: 1233610 - RNA, 23 nt, Human
uggagcccacuguacuugcucuu

SEQ ID NO: 1233611 - RNA, 23 nt, Human
uggagccugcacggugaauggcu

SEQ ID NO: 1233612 - RNA, 14 nt, Human
uggaauuugaaaca

SEQ ID NO: 1233613 - RNA, 17 nt, Human
uggaauuuuccuccuuu

SEQ ID NO: 1233614 - RNA, 21 nt, Human
uggaauuuuccuccuuucucu

SEQ ID NO: 1233615 - RNA, 10 nt, Human
uggacaccug

SEQ ID NO: 1233616 - RNA, 11 nt, Human
uggacaccugc

SEQ ID NO: 1233617 - RNA, 12 nt, Human
uggacaccugcc

SEQ ID NO: 1233618 - RNA, 13 nt, Human
uggacaccugccc

SEQ ID NO: 1233619 - RNA, 14 nt, Human
uggacaccugcccu

SEQ ID NO: 1233620 - RNA, 15 nt, Human
uggacaccugcccug

SEQ ID NO: 1233621 - RNA, 16 nt, Human
uggacaccugcccugc

SEQ ID NO: 1233622 - RNA, 14 nt, Human
uggacaaaauggaa

SEQ ID NO: 1233623 - RNA, 17 nt, Human
uggacaaaauggaauac

SEQ ID NO: 1233624 - RNA, 19 nt, Human
aggaguuucguuuucaaaa

SEQ ID NO: 1233625 - RNA, 14 nt, Human
uggaagugcuaauu

SEQ ID NO: 1233626 - RNA, 15 nt, Human
uggaagugacuuugg

SEQ ID NO: 1233627 - RNA, 17 nt, Human
uggaagugacuuuggcu

SEQ ID NO: 1233628 - RNA, 23 nt, Human
uggaagugacuuuggcugcaugc

SEQ ID NO: 1233629 - RNA, 15 nt, Human
agggcuccuauucaa

SEQ ID NO: 1233630 - RNA, 22 nt, Human
agggcuguuauaaucuuucaca

SEQ ID NO: 1233631 - RNA, 15 nt, Human
ugggagaaaugaaaa

SEQ ID NO: 1233632 - RNA, 13 nt, Human
agggaaauuucag

SEQ ID NO: 1233633 - RNA, 21 nt, Human
agggagacuggguaggaaaga

SEQ ID NO: 1233634 - RNA, 16 nt, Human
ugggagaaaugaaaaa

SEQ ID NO: 1233635 - RNA, 14 nt, Human
ugggaggcucugga

SEQ ID NO: 1233636 - RNA, 17 nt, Human
ugggaggcucuggagcc

SEQ ID NO: 1233637 - RNA, 23 nt, Human
ugggaggcucuggagcccacugu

SEQ ID NO: 1233638 - RNA, 14 nt, Human
ugggcauucaaaug

SEQ ID NO: 1233639 - RNA, 15 nt, Human
aggcuuuuuuaucau

SEQ ID NO: 1233640 - RNA, 18 nt, Human
aggcuuuuuuaucaugug

SEQ ID NO: 1233641 - RNA, 21 nt, Human
aggcuuuuuuaucaugugaaa

SEQ ID NO: 1233642 - RNA, 15 nt, Human
agggaaaacauucca

SEQ ID NO: 1233643 - RNA, 16 nt, Human
agggaaaacauuccau

SEQ ID NO: 1233644 - RNA, 18 nt, Human
agggaaaacauuccaucc

SEQ ID NO: 1233645 - RNA, 10 nt, Human
aggcuggguc

SEQ ID NO: 1233646 - RNA, 15 nt, Human
aggcugggucgcccu

SEQ ID NO: 1233647 - RNA, 18 nt, Human
aggcugggucgcccugga

SEQ ID NO: 1233648 - RNA, 20 nt, Human
aggcugggucgcccuggacu

SEQ ID NO: 1233649 - RNA, 21 nt, Human
aggcugggucgcccuggacug

SEQ ID NO: 1233650 - RNA, 18 nt, Human
ugggaaacaaaaggauaa

SEQ ID NO: 1233651 - RNA, 14 nt, Human
uguacauauaagug

SEQ ID NO: 1233652 - RNA, 20 nt, Human
agguuucacuguguuggcca

SEQ ID NO: 1233653 - RNA, 13 nt, Human
agguugaaaaaca

SEQ ID NO: 1233654 - RNA, 13 nt, Human
aguaauuggaaag

SEQ ID NO: 1233655 - RNA, 12 nt, Human
aguaauuggaaa

SEQ ID NO: 1233656 - RNA, 13 nt, Human
aguaaugauaacu

SEQ ID NO: 1233657 - RNA, 16 nt, Human
aguaaaaacaaagaaa

SEQ ID NO: 1233658 - RNA, 23 nt, Human
aguaaaaacaaagaaauuaugug

SEQ ID NO: 1233659 - RNA, 14 nt, Human
aguaaaaaggcuaa

SEQ ID NO: 1233660 - RNA, 14 nt, Human
uguauauuacaaug

SEQ ID NO: 1233661 - RNA, 15 nt, Human
uguauauuacaauga

SEQ ID NO: 1233662 - RNA, 19 nt, Human
uguaguguuggagaagaac

SEQ ID NO: 1233663 - RNA, 18 nt, Human
uguaguguuggagaagaa

SEQ ID NO: 1233664 - RNA, 17 nt, Human
uguaguguuggagaaga

SEQ ID NO: 1233665 - RNA, 23 nt, Human
aguaccaguaggggcuuauaaua

SEQ ID NO: 1233666 - RNA, 15 nt, Human
agucaggaaagagaa

SEQ ID NO: 1233667 - RNA, 14 nt, Human
agucaggaaagaga

SEQ ID NO: 1233668 - RNA, 20 nt, Human
agucuauuuacggaacucaa

SEQ ID NO: 1233669 - RNA, 15 nt, Human
agucuauuuacggaa

SEQ ID NO: 1233670 - RNA, 12 nt, Human
aguauuaagcau

SEQ ID NO: 1233671 - RNA, 14 nt, Human
aguauuaagcauau

SEQ ID NO: 1233672 - RNA, 19 nt, Human
uguauauuacaaugaucac

SEQ ID NO: 1233673 - RNA, 13 nt, Human
aguauaauuaaca

SEQ ID NO: 1233674 - RNA, 14 nt, Human
aguauaauuaacau

SEQ ID NO: 1233675 - RNA, 16 nt, Human
aguauaauuaacaugu

SEQ ID NO: 1233676 - RNA, 23 nt, Human
aguauaauuaacauguuaaacca

SEQ ID NO: 1233677 - RNA, 14 nt, Human
agucaccagagacu

SEQ ID NO: 1233678 - RNA, 16 nt, Human
agucuugucucagauu

SEQ ID NO: 1233679 - RNA, 17 nt, Human
agucuugucucagauuu

SEQ ID NO: 1233680 - RNA, 19 nt, Human
agucuugucucagauuuua

SEQ ID NO: 1233681 - RNA, 16 nt, Human
agucuuucacauuuaa

SEQ ID NO: 1233682 - RNA, 20 nt, Human
agucuugucucagauuuuau

SEQ ID NO: 1233683 - RNA, 21 nt, Human
agucuugucucagauuuuauu

SEQ ID NO: 1233684 - RNA, 18 nt, Human
agucuuucacauuuaaau

SEQ ID NO: 1233685 - RNA, 12 nt, Human
agugagaggcug

SEQ ID NO: 1233686 - RNA, 18 nt, Human
agugacuuuggcugcaug

SEQ ID NO: 1233687 - RNA, 20 nt, Human
ugugcugguguaugugugaa

SEQ ID NO: 1233688 - RNA, 21 nt, Human
uguggaucaaauccagccugc

SEQ ID NO: 1233689 - RNA, 21 nt, Human
ugugcucaggagcccugggag

SEQ ID NO: 1233690 - RNA, 21 nt, Human
agugaguuggguguauugugc

SEQ ID NO: 1233691 - RNA, 14 nt, Human
agugcaaauuguca

SEQ ID NO: 1233692 - RNA, 23 nt, Human
agugcaguggcgcgaucucagcu

SEQ ID NO: 1233693 - RNA, 23 nt, Human
agugcaguggcgugaucucagcu

SEQ ID NO: 1233694 - RNA, 23 nt, Human
agugcaguggcaucaucucagcu

SEQ ID NO: 1233695 - RNA, 21 nt, Human
agugcacuaauguguaagaca

SEQ ID NO: 1233696 - RNA, 17 nt, Human
agugcacuaauguguaa

SEQ ID NO: 1233697 - RNA, 18 nt, Human
agugccagcaccugccca

SEQ ID NO: 1233698 - RNA, 22 nt, Human
uguugcccacagcuguaugauu

SEQ ID NO: 1233699 - RNA, 15 nt, Human
uguugcauagaauaa

SEQ ID NO: 1233700 - RNA, 18 nt, Human
aguguguguuuuucauaa

SEQ ID NO: 1233701 - RNA, 19 nt, Human
aguguguguuuuucauaaa

SEQ ID NO: 1233702 - RNA, 16 nt, Human
uguuaugacuauguaa

SEQ ID NO: 1233703 - RNA, 17 nt, Human
uguuaugacuauguaaa

SEQ ID NO: 1233704 - RNA, 18 nt, Human
uguuaugacuauguaaac

SEQ ID NO: 1233705 - RNA, 20 nt, Human
uguuaugacuauguaaacua

SEQ ID NO: 1233706 - RNA, 16 nt, Human
uguguuagagauuuuu

SEQ ID NO: 1233707 - RNA, 17 nt, Human
uguuacaaauuguagaa

SEQ ID NO: 1233708 - RNA, 18 nt, Human
uguuacaaauuguagaag

SEQ ID NO: 1233709 - RNA, 16 nt, Human
aguggggaaugaagau

SEQ ID NO: 1233710 - RNA, 14 nt, Human
auacuauaguacca

SEQ ID NO: 1233711 - RNA, 19 nt, Human
uuauauuugaaauauugac

SEQ ID NO: 1233712 - RNA, 19 nt, Human
auacgugggcauucaaaug

SEQ ID NO: 1233713 - RNA, 18 nt, Human
auacgugggcauucaaau

SEQ ID NO: 1233714 - RNA, 12 nt, Human
uuauaaacuuuu

SEQ ID NO: 1233715 - RNA, 16 nt, Human
uuauaaacuuuuuucu

SEQ ID NO: 1233716 - RNA, 22 nt, Human
uuauaaacuuuuuucuuacugu

SEQ ID NO: 1233717 - RNA, 21 nt, Human
auacaguucggugagcuacaa

SEQ ID NO: 1233718 - RNA, 22 nt, Human
auacauguaauucuaccaaggu

SEQ ID NO: 1233719 - RNA, 21 nt, Human
auacaggaugaugacuaugga

SEQ ID NO: 1233720 - RNA, 21 nt, Human
uuaugaauuacauuuguauaa

SEQ ID NO: 1233721 - RNA, 17 nt, Human
uuaugaauuacauuugu

SEQ ID NO: 1233722 - RNA, 16 nt, Human
uuaugaauuacauuug

SEQ ID NO: 1233723 - RNA, 14 nt, Human
uuaugaauuacauu

SEQ ID NO: 1233724 - RNA, 15 nt, Human
uuaugacuauguaaa

SEQ ID NO: 1233725 - RNA, 16 nt, Human
uuaugacuauguaaac

SEQ ID NO: 1233726 - RNA, 20 nt, Human
uuaugauacuugaaaauuaa

SEQ ID NO: 1233727 - RNA, 13 nt, Human
uuaugauccagca

SEQ ID NO: 1233728 - RNA, 18 nt, Human
uuaugauccagcagauua

SEQ ID NO: 1233729 - RNA, 19 nt, Human
uuaugaaacuuuuggaagg

SEQ ID NO: 1233730 - RNA, 20 nt, Human
uuaugaagcuuuuaugugaa

SEQ ID NO: 1233731 - RNA, 18 nt, Human
uuaugaaacuuuuggaag

SEQ ID NO: 1233732 - RNA, 17 nt, Human
uuaugaaacuuuuggaa

SEQ ID NO: 1233733 - RNA, 14 nt, Human
uuaugaaacuuuug

SEQ ID NO: 1233734 - RNA, 19 nt, Human
uuaugaaacuuguguaaau

SEQ ID NO: 1233735 - RNA, 13 nt, Human
uuaugaaacuugu

SEQ ID NO: 1233736 - RNA, 16 nt, Human
uuaugaaacuugugua

SEQ ID NO: 1233737 - RNA, 18 nt, Human
uuaugaaacuuguguaaa

SEQ ID NO: 1233738 - RNA, 22 nt, Human
uuaugauuaaguaaugauaacu

SEQ ID NO: 1233739 - RNA, 19 nt, Human
uuaugauuaaguaaugaua

SEQ ID NO: 1233740 - RNA, 22 nt, Human
uuaugauccagcagauuauuca

SEQ ID NO: 1233741 - RNA, 23 nt, Human
uuaugauccagcagauuauucac

SEQ ID NO: 1233742 - RNA, 11 nt, Human
uuauguaaauc

SEQ ID NO: 1233743 - RNA, 12 nt, Human
uuauguaaaucc

SEQ ID NO: 1233744 - RNA, 13 nt, Human
uuauguaaauccc

SEQ ID NO: 1233745 - RNA, 19 nt, Human
uuauguaaaucccauuauu

SEQ ID NO: 1233746 - RNA, 21 nt, Human
uuauguaaaucccauuauuca

SEQ ID NO: 1233747 - RNA, 22 nt, Human
uuauguaaaucccauuauucaa

SEQ ID NO: 1233748 - RNA, 23 nt, Human
uuauguaaaucccauuauucaaa

SEQ ID NO: 1233749 - RNA, 15 nt, Human
uuaugugaaacaugu

SEQ ID NO: 1233750 - RNA, 14 nt, Human
uuaugugacauuuu

SEQ ID NO: 1233751 - RNA, 19 nt, Human
uuaugugacauuuuacauu

SEQ ID NO: 1233752 - RNA, 22 nt, Human
uuaugugccagauuuaugcaua

SEQ ID NO: 1233753 - RNA, 20 nt, Human
uuaugugacauuuuacauua

SEQ ID NO: 1233754 - RNA, 16 nt, Human
uuaugugcgcugauaa

SEQ ID NO: 1233755 - RNA, 13 nt, Human
uuaugugaaacau

SEQ ID NO: 1233756 - RNA, 13 nt, Human
uuauuauguaaau

SEQ ID NO: 1233757 - RNA, 14 nt, Human
uuauuauguaaauc

SEQ ID NO: 1233758 - RNA, 16 nt, Human
uuauuauguaaauccc

SEQ ID NO: 1233759 - RNA, 22 nt, Human
uuauuauguaaaucccauuauu

SEQ ID NO: 1233760 - RNA, 13 nt, Human
uuauucaaaguug

SEQ ID NO: 1233761 - RNA, 15 nt, Human
uuauucaaaguugcc

SEQ ID NO: 1233762 - RNA, 19 nt, Human
uuauucaaaguugccuaaa

SEQ ID NO: 1233763 - RNA, 14 nt, Human
uuauucacugauuu

SEQ ID NO: 1233764 - RNA, 12 nt, Human
uuauucauaauu

SEQ ID NO: 1233765 - RNA, 23 nt, Human
uuauuaugaaacuuguguaaaua

SEQ ID NO: 1233766 - RNA, 17 nt, Human
uuauuaugaaacuugug

SEQ ID NO: 1233767 - RNA, 20 nt, Human
uuauuaugaaacuuguguaa

SEQ ID NO: 1233768 - RNA, 21 nt, Human
uuauuaugaaacuuguguaaa

SEQ ID NO: 1233769 - RNA, 22 nt, Human
uuauuaugaaacuuguguaaau

SEQ ID NO: 1233770 - RNA, 15 nt, Human
uuauuauauuuacaa

SEQ ID NO: 1233771 - RNA, 11 nt, Human
uuauuaugaaa

SEQ ID NO: 1233772 - RNA, 19 nt, Human
uuauguuaaaacugggaca

SEQ ID NO: 1233773 - RNA, 14 nt, Human
uuauuauauuuaca

SEQ ID NO: 1233774 - RNA, 17 nt, Human
uuauguugcauagaaua

SEQ ID NO: 1233775 - RNA, 18 nt, Human
auacucuuauaucuauau

SEQ ID NO: 1233776 - RNA, 14 nt, Human
auacucuuauaucu

SEQ ID NO: 1233777 - RNA, 15 nt, Human
auacuggauuguacu

SEQ ID NO: 1233778 - RNA, 14 nt, Human
auagacaauugagg

SEQ ID NO: 1233779 - RNA, 21 nt, Human
auagacaauugagguaaguuu

SEQ ID NO: 1233780 - RNA, 12 nt, Human
auagacacgcac

SEQ ID NO: 1233781 - RNA, 14 nt, Human
auagaauaaaauuu

SEQ ID NO: 1233782 - RNA, 19 nt, Human
auagaauaaaauuuuuaau

SEQ ID NO: 1233783 - RNA, 22 nt, Human
auagaauaaaauuuuuaaucuu

SEQ ID NO: 1233784 - RNA, 13 nt, Human
auagaaguaaaaa

SEQ ID NO: 1233785 - RNA, 14 nt, Human
auagaaccucuuug

SEQ ID NO: 1233786 - RNA, 20 nt, Human
auagaaccucuuugucuaca

SEQ ID NO: 1233787 - RNA, 14 nt, Human
auagagacgggacu

SEQ ID NO: 1233788 - RNA, 18 nt, Human
auagauaggucagugcaa

SEQ ID NO: 1233789 - RNA, 21 nt, Human
auagaggaagccugauuaaag

SEQ ID NO: 1233790 - RNA, 22 nt, Human
auagaggaagccugauuaaaga

SEQ ID NO: 1233791 - RNA, 13 nt, Human
auagauuagaauu

SEQ ID NO: 1233792 - RNA, 15 nt, Human
auagauuagaauucu

SEQ ID NO: 1233793 - RNA, 16 nt, Human
auagauuagaauucug

SEQ ID NO: 1233794 - RNA, 21 nt, Human
auagauuagagaguguugaaa

SEQ ID NO: 1233795 - RNA, 22 nt, Human
auagauuagagaguguugaaac

SEQ ID NO: 1233796 - RNA, 15 nt, Human
aguuuguugaaacac

SEQ ID NO: 1233797 - RNA, 16 nt, Human
uuaaauuuuuuuuaca

SEQ ID NO: 1233798 - RNA, 17 nt, Human
uuaaauuuuuuuuacau

SEQ ID NO: 1233799 - RNA, 21 nt, Human
uuaaaccaugggauaaaugcc

SEQ ID NO: 1233800 - RNA, 22 nt, Human
uuaaaccaugggauaaaugcca

SEQ ID NO: 1233801 - RNA, 23 nt, Human
uuaaaccaugggauaaaugccau

SEQ ID NO: 1233802 - RNA, 13 nt, Human
uuaaaguugaauu

SEQ ID NO: 1233803 - RNA, 16 nt, Human
uuaaaguugaauuuau

SEQ ID NO: 1233804 - RNA, 17 nt, Human
uuaaaguugaauuuauu

SEQ ID NO: 1233805 - RNA, 22 nt, Human
uuaaaguugaauuuauuggcuu

SEQ ID NO: 1233806 - RNA, 12 nt, Human
uuaaaaugagaa

SEQ ID NO: 1233807 - RNA, 19 nt, Human
uuaaaaugagaaaucuaaa

SEQ ID NO: 1233808 - RNA, 17 nt, Human
uuaaaccaugggauaaa

SEQ ID NO: 1233809 - RNA, 16 nt, Human
aguuuagcuggaaaag

SEQ ID NO: 1233810 - RNA, 15 nt, Human
aguuuagcuggaaaa

SEQ ID NO: 1233811 - RNA, 17 nt, Human
aguuuaaauuguaauag

SEQ ID NO: 1233812 - RNA, 20 nt, Human
aguuuaaauuguaauaggcg

SEQ ID NO: 1233813 - RNA, 19 nt, Human
uuaagacgaaacauuuguu

SEQ ID NO: 1233814 - RNA, 22 nt, Human
auaaaagggacugagaaauuua

SEQ ID NO: 1233815 - RNA, 23 nt, Human
aguuuuuugaaauuaugugacau

SEQ ID NO: 1233816 - RNA, 20 nt, Human
auaaaagccuguuuaagaga

SEQ ID NO: 1233817 - RNA, 16 nt, Human
aguuuuauaugcuucu

SEQ ID NO: 1233818 - RNA, 12 nt, Human
aguuuuguuugg

SEQ ID NO: 1233819 - RNA, 14 nt, Human
aguuuuguuuggac

SEQ ID NO: 1233820 - RNA, 16 nt, Human
aguuuuguuuggacca

SEQ ID NO: 1233821 - RNA, 18 nt, Human
aguuuuguuuggaccaaa

SEQ ID NO: 1233822 - RNA, 21 nt, Human
aguuuuuugaaauuaugugac

SEQ ID NO: 1233823 - RNA, 15 nt, Human
aguuuuuuuuauaca

SEQ ID NO: 1233824 - RNA, 22 nt, Human
uuaagagagucuauuuacggaa

SEQ ID NO: 1233825 - RNA, 22 nt, Human
uuaagacgaaacauuuguucua

SEQ ID NO: 1233826 - RNA, 16 nt, Human
uuaauuugguuuucac

SEQ ID NO: 1233827 - RNA, 13 nt, Human
uuaauuuuggaau

SEQ ID NO: 1233828 - RNA, 14 nt, Human
uuaauuuuggaauu

SEQ ID NO: 1233829 - RNA, 15 nt, Human
uuaauuuuggaauuu

SEQ ID NO: 1233830 - RNA, 13 nt, Human
uuaaucuuuaauu

SEQ ID NO: 1233831 - RNA, 17 nt, Human
uuaaucuuuaauuuuac

SEQ ID NO: 1233832 - RNA, 23 nt, Human
uuacuguacagacagaaaaaacu

SEQ ID NO: 1233833 - RNA, 20 nt, Human
uuacugcuuaauucaaauaa

SEQ ID NO: 1233834 - RNA, 17 nt, Human
uuacugucuuuuuucua

SEQ ID NO: 1233835 - RNA, 14 nt, Human
uuagaauucuguau

SEQ ID NO: 1233836 - RNA, 15 nt, Human
uuagaauucuguaua

SEQ ID NO: 1233837 - RNA, 17 nt, Human
uuagaauucuguauaga

SEQ ID NO: 1233838 - RNA, 17 nt, Human
uuacaguggggaaugaa

SEQ ID NO: 1233839 - RNA, 15 nt, Human
auaaaucugugaacu

SEQ ID NO: 1233840 - RNA, 16 nt, Human
auaaaucugugaacuu

SEQ ID NO: 1233841 - RNA, 19 nt, Human
auaaaucugugaacuugaa

SEQ ID NO: 1233842 - RNA, 17 nt, Human
auaaaugccaucaauaa

SEQ ID NO: 1233843 - RNA, 18 nt, Human
auaaaugccaucaauaaa

SEQ ID NO: 1233844 - RNA, 15 nt, Human
uuauaaaaauaaaaa

SEQ ID NO: 1233845 - RNA, 19 nt, Human
uuaguacuccccuccuuga

SEQ ID NO: 1233846 - RNA, 21 nt, Human
uuauaaaaauaaaaaacacug

SEQ ID NO: 1233847 - RNA, 22 nt, Human
uuauaaaaauaaaaaacacugg

SEQ ID NO: 1233848 - RNA, 17 nt, Human
uuagguaauuuuuuuca

SEQ ID NO: 1233849 - RNA, 13 nt, Human
uuaguaaucauau

SEQ ID NO: 1233850 - RNA, 14 nt, Human
uuaguaaucauauu

SEQ ID NO: 1233851 - RNA, 16 nt, Human
uuaggguuaugauuaa

SEQ ID NO: 1233852 - RNA, 14 nt, Human
uuaggguuaugauu

SEQ ID NO: 1233853 - RNA, 21 nt, Human
auaaucuuucacaggggacag

SEQ ID NO: 1233854 - RNA, 14 nt, Human
auaaucuuucacag

SEQ ID NO: 1233855 - RNA, 23 nt, Human
auaauucacauuguauucagagu

SEQ ID NO: 1233856 - RNA, 14 nt, Human
auaauuuagauggu

SEQ ID NO: 1233857 - RNA, 12 nt, Human
auaauuuuaaau

SEQ ID NO: 1233858 - RNA, 13 nt, Human
auaauuuuaaaug

SEQ ID NO: 1233859 - RNA, 14 nt, Human
auaauuuuaaaugu

SEQ ID NO: 1233860 - RNA, 17 nt, Human
augaauuacauuuguau

SEQ ID NO: 1233861 - RNA, 16 nt, Human
augaauuacauuugua

SEQ ID NO: 1233862 - RNA, 21 nt, Human
augaauauuuaguguucauaa

SEQ ID NO: 1233863 - RNA, 15 nt, Human
augaauuacauuugu

SEQ ID NO: 1233864 - RNA, 13 nt, Human
augaacuugagga

SEQ ID NO: 1233865 - RNA, 15 nt, Human
augaacuugaggaca

SEQ ID NO: 1233866 - RNA, 15 nt, Human
augaagauacugaaa

SEQ ID NO: 1233867 - RNA, 16 nt, Human
augaauauuuaguguu

SEQ ID NO: 1233868 - RNA, 18 nt, Human
augaacuuguaaaggaau

SEQ ID NO: 1233869 - RNA, 16 nt, Human
augaacuugaggacac

SEQ ID NO: 1233870 - RNA, 17 nt, Human
augaacuugaggacaca

SEQ ID NO: 1233871 - RNA, 18 nt, Human
augaacuugaggacacau

SEQ ID NO: 1233872 - RNA, 19 nt, Human
augaacuugaggacacaug

SEQ ID NO: 1233873 - RNA, 20 nt, Human
augaacuugaggacacaugu

SEQ ID NO: 1233874 - RNA, 21 nt, Human
augaacuugaggacacauguc

SEQ ID NO: 1233875 - RNA, 22 nt, Human
augaacuugaggacacaugucc

SEQ ID NO: 1233876 - RNA, 22 nt, Human
aucugccuaaggacuucuuuaa

SEQ ID NO: 1233877 - RNA, 23 nt, Human
aucugccuaaggacuucuuuaau

SEQ ID NO: 1233878 - RNA, 11 nt, Human
aucugccuaag

SEQ ID NO: 1233879 - RNA, 13 nt, Human
aucugccuaagga

SEQ ID NO: 1233880 - RNA, 21 nt, Human
aucugccuaaggacuucuuua

SEQ ID NO: 1233881 - RNA, 15 nt, Human
aucugcgugugugca

SEQ ID NO: 1233882 - RNA, 15 nt, Human
uugcauuuauaugua

SEQ ID NO: 1233883 - RNA, 20 nt, Human
uugcauuuauauguaccgua

SEQ ID NO: 1233884 - RNA, 14 nt, Human
aucuuauaauuuaa

SEQ ID NO: 1233885 - RNA, 21 nt, Human
auccucuccacagcugccucu

SEQ ID NO: 1233886 - RNA, 17 nt, Human
uugaagggaaauuucag

SEQ ID NO: 1233887 - RNA, 16 nt, Human
uugagauguguucaca

SEQ ID NO: 1233888 - RNA, 16 nt, Human
uugagucaaaaaaucu

SEQ ID NO: 1233889 - RNA, 18 nt, Human
uugacuuauaguacauga

SEQ ID NO: 1233890 - RNA, 14 nt, Human
aucucauuuccaag

SEQ ID NO: 1233891 - RNA, 17 nt, Human
auccaguuuuguuugga

SEQ ID NO: 1233892 - RNA, 21 nt, Human
auccauuuggaaaucuuuaaa

SEQ ID NO: 1233893 - RNA, 15 nt, Human
uucuuuguaaugaaa

SEQ ID NO: 1233894 - RNA, 16 nt, Human
uucuuuguaaugaaaa

SEQ ID NO: 1233895 - RNA, 17 nt, Human
uugaaauuguauuacaa

SEQ ID NO: 1233896 - RNA, 15 nt, Human
uugaaauuguaauua

SEQ ID NO: 1233897 - RNA, 17 nt, Human
uugaaauuguaauuaua

SEQ ID NO: 1233898 - RNA, 17 nt, Human
uugaaauuaugugacau

SEQ ID NO: 1233899 - RNA, 20 nt, Human
uugaaauuaugugacauuuu

SEQ ID NO: 1233900 - RNA, 13 nt, Human
uugaaauuguaau

SEQ ID NO: 1233901 - RNA, 14 nt, Human
uugaaauuguaauu

SEQ ID NO: 1233902 - RNA, 21 nt, Human
aucaaucuguaaaacuaagaa

SEQ ID NO: 1233903 - RNA, 23 nt, Human
aucaccugucuugccuuuuucau

SEQ ID NO: 1233904 - RNA, 16 nt, Human
aucaaggguacacugc

SEQ ID NO: 1233905 - RNA, 19 nt, Human
uuccguagguuauuuucag

SEQ ID NO: 1233906 - RNA, 15 nt, Human
uuccugaacaggaua

SEQ ID NO: 1233907 - RNA, 20 nt, Human
uuccuaaauauauuuuaaga

SEQ ID NO: 1233908 - RNA, 13 nt, Human
uucuaaaguaaaa

SEQ ID NO: 1233909 - RNA, 22 nt, Human
aucacuugucaauaaaauccau

SEQ ID NO: 1233910 - RNA, 23 nt, Human
uucuaggacugaauuaugaaacu

SEQ ID NO: 1233911 - RNA, 16 nt, Human
uucuaggacugaauua

SEQ ID NO: 1233912 - RNA, 14 nt, Human
uucuaggacugaau

SEQ ID NO: 1233913 - RNA, 13 nt, Human
uucuaggacugaa

SEQ ID NO: 1233914 - RNA, 17 nt, Human
aucaggguuaguauugu

SEQ ID NO: 1233915 - RNA, 14 nt, Human
augggauaaaugcc

SEQ ID NO: 1233916 - RNA, 16 nt, Human
auggcacuaguauuuc

SEQ ID NO: 1233917 - RNA, 14 nt, Human
auggcacuaguauu

SEQ ID NO: 1233918 - RNA, 14 nt, Human
auggagaaggaagg

SEQ ID NO: 1233919 - RNA, 15 nt, Human
auggagaaggaaggc

SEQ ID NO: 1233920 - RNA, 19 nt, Human
uuucauuauuuuauuauga

SEQ ID NO: 1233921 - RNA, 20 nt, Human
uuucauuauuuuauuaugaa

SEQ ID NO: 1233922 - RNA, 18 nt, Human
uuucccccuagccugccu

SEQ ID NO: 1233923 - RNA, 13 nt, Human
uuucauuauuuua

SEQ ID NO: 1233924 - RNA, 15 nt, Human
uuucauuauuuuauu

SEQ ID NO: 1233925 - RNA, 12 nt, Human
auggagaaggaa

SEQ ID NO: 1233926 - RNA, 13 nt, Human
auggagaaggaag

SEQ ID NO: 1233927 - RNA, 16 nt, Human
auggacuguggugacu

SEQ ID NO: 1233928 - RNA, 17 nt, Human
auggacuguggugacuu

SEQ ID NO: 1233929 - RNA, 22 nt, Human
auggacuguggugacuuuggau

SEQ ID NO: 1233930 - RNA, 15 nt, Human
auggacacuacaccc

SEQ ID NO: 1233931 - RNA, 16 nt, Human
auggacacuacaccca

SEQ ID NO: 1233932 - RNA, 17 nt, Human
auggacacuacacccag

SEQ ID NO: 1233933 - RNA, 18 nt, Human
auggacacuacacccagc

SEQ ID NO: 1233934 - RNA, 19 nt, Human
auggacacuacacccagca

SEQ ID NO: 1233935 - RNA, 22 nt, Human
auggacacuacacccagcaaua

SEQ ID NO: 1233936 - RNA, 17 nt, Human
uuucaaacauauauaac

SEQ ID NO: 1233937 - RNA, 16 nt, Human
uuucaaacauauauaa

SEQ ID NO: 1233938 - RNA, 22 nt, Human
uuucaaaauuguuacaaauugu

SEQ ID NO: 1233939 - RNA, 18 nt, Human
auggaacgcguugaaauu

SEQ ID NO: 1233940 - RNA, 19 nt, Human
auggaacgcguugaaauug

SEQ ID NO: 1233941 - RNA, 20 nt, Human
uuuauuuuguguuuaggaac

SEQ ID NO: 1233942 - RNA, 23 nt, Human
auggaacgcguugaaauuguaau

SEQ ID NO: 1233943 - RNA, 13 nt, Human
uuucaaaagaaag

SEQ ID NO: 1233944 - RNA, 15 nt, Human
auggaacgcguugaa

SEQ ID NO: 1233945 - RNA, 16 nt, Human
auggaacgcguugaaa

SEQ ID NO: 1233946 - RNA, 17 nt, Human
auggaacgcguugaaau

SEQ ID NO: 1233947 - RNA, 19 nt, Human
augcuguucaugaaagauu

SEQ ID NO: 1233948 - RNA, 14 nt, Human
augcugugugacuc

SEQ ID NO: 1233949 - RNA, 23 nt, Human
augcuguucaugaaagauucaau

SEQ ID NO: 1233950 - RNA, 16 nt, Human
augcuucccuuuccug

SEQ ID NO: 1233951 - RNA, 17 nt, Human
augcuguucaugaaaga

SEQ ID NO: 1233952 - RNA, 14 nt, Human
uuuauuacaguaua

SEQ ID NO: 1233953 - RNA, 18 nt, Human
uuuauuacaguauaauua

SEQ ID NO: 1233954 - RNA, 11 nt, Human
augcuauuucu

SEQ ID NO: 1233955 - RNA, 13 nt, Human
augcuauuucuau

SEQ ID NO: 1233956 - RNA, 14 nt, Human
augcuauuucuaua

SEQ ID NO: 1233957 - RNA, 15 nt, Human
augcuauuucuauau

SEQ ID NO: 1233958 - RNA, 20 nt, Human
augcuauuucuauauuuuca

SEQ ID NO: 1233959 - RNA, 21 nt, Human
augcuauuucuauauuuucau

SEQ ID NO: 1233960 - RNA, 22 nt, Human
augcuauuucuauauuuucauu

SEQ ID NO: 1233961 - RNA, 23 nt, Human
augcuauuucuauauuuucauuc

SEQ ID NO: 1233962 - RNA, 13 nt, Human
uuuauauuuacua

SEQ ID NO: 1233963 - RNA, 16 nt, Human
uuuauauuuacuaaaa

SEQ ID NO: 1233964 - RNA, 17 nt, Human
uuuaucaugugaaauca

SEQ ID NO: 1233965 - RNA, 18 nt, Human
uuuaucaugugaaaucau

SEQ ID NO: 1233966 - RNA, 15 nt, Human
augauaacuggaaac

SEQ ID NO: 1233967 - RNA, 22 nt, Human
augauccagcagauuauucacu

SEQ ID NO: 1233968 - RNA, 18 nt, Human
augauuaaguaaugauaa

SEQ ID NO: 1233969 - RNA, 14 nt, Human
augauuaaguaaug

SEQ ID NO: 1233970 - RNA, 17 nt, Human
augauacuugaaaauua

SEQ ID NO: 1233971 - RNA, 21 nt, Human
augauacuugaaaauuaacau

SEQ ID NO: 1233972 - RNA, 10 nt, Human
augauccagc

SEQ ID NO: 1233973 - RNA, 19 nt, Human
augauccagcagauuauuc

SEQ ID NO: 1233974 - RNA, 20 nt, Human
augauccagcagauuauuca

SEQ ID NO: 1233975 - RNA, 19 nt, Human
augauugaauuauauguuc

SEQ ID NO: 1233976 - RNA, 13 nt, Human
augcaguucugaa

SEQ ID NO: 1233977 - RNA, 18 nt, Human
uuuaaauauaugcuaagu

SEQ ID NO: 1233978 - RNA, 21 nt, Human
uuuaaauaaauaaauagcuag

SEQ ID NO: 1233979 - RNA, 14 nt, Human
uuugcaagccagau

SEQ ID NO: 1233980 - RNA, 19 nt, Human
auguagccccucuccugga

SEQ ID NO: 1233981 - RNA, 16 nt, Human
auguacuucaugcugu

SEQ ID NO: 1233982 - RNA, 16 nt, Human
auguaccguaggcuuu

SEQ ID NO: 1233983 - RNA, 22 nt, Human
auguauuacaguggggaaugaa

SEQ ID NO: 1233984 - RNA, 21 nt, Human
uuuggcauaacauaaaucugu

SEQ ID NO: 1233985 - RNA, 13 nt, Human
uuuggcaggugca

SEQ ID NO: 1233986 - RNA, 20 nt, Human
uuuggcauaacauaaaucug

SEQ ID NO: 1233987 - RNA, 16 nt, Human
augugacauuuuacau

SEQ ID NO: 1233988 - RNA, 18 nt, Human
augugacauuuuacauua

SEQ ID NO: 1233989 - RNA, 21 nt, Human
uuuguaguguuggagaagaac

SEQ ID NO: 1233990 - RNA, 19 nt, Human
uuuguaguguuggagaaga

SEQ ID NO: 1233991 - RNA, 12 nt, Human
uuuguauaaaag

SEQ ID NO: 1233992 - RNA, 13 nt, Human
uuuguaaugaaaa

SEQ ID NO: 1233993 - RNA, 14 nt, Human
uuuguaaugaaaac

SEQ ID NO: 1233994 - RNA, 17 nt, Human
uuugugaagcaaaauuu

SEQ ID NO: 1233995 - RNA, 20 nt, Human
uuugugaagguggaaauaaa

SEQ ID NO: 1233996 - RNA, 19 nt, Human
uuugugcugguguaugugu

SEQ ID NO: 1233997 - RNA, 21 nt, Human
augguucccuugaugaagaag

SEQ ID NO: 1233998 - RNA, 13 nt, Human
augguuguacaua

SEQ ID NO: 1233999 - RNA, 22 nt, Human
auguaaaucccauuauucaaag

SEQ ID NO: 1234000 - RNA, 23 nt, Human
auguaaaucccauuauucaaagu

SEQ ID NO: 1234001 - RNA, 14 nt, Human
auguaaaucccauu

SEQ ID NO: 1234002 - RNA, 20 nt, Human
auguaaaucccauuauucaa

SEQ ID NO: 1234003 - RNA, 19 nt, Human
uuucuguacuuuuuggcau

SEQ ID NO: 1234004 - RNA, 20 nt, Human
uuucuguacuuuuuggcaua

SEQ ID NO: 1234005 - RNA, 15 nt, Human
augggauaaaugcca

SEQ ID NO: 1234006 - RNA, 16 nt, Human
augggauaaaugccau

SEQ ID NO: 1234007 - RNA, 20 nt, Human
augggauaaaugccaucaau

SEQ ID NO: 1234008 - RNA, 14 nt, Human
auggggguuucacc

SEQ ID NO: 1234009 - RNA, 22 nt, Human
uuugaaauuaugugacauuuua

SEQ ID NO: 1234010 - RNA, 15 nt, Human
uuugaaauuauguga

SEQ ID NO: 1234011 - RNA, 17 nt, Human
uuugaaauuaugugaca

SEQ ID NO: 1234012 - RNA, 13 nt, Human
auugucuagugaa

SEQ ID NO: 1234013 - RNA, 15 nt, Human
auuguuuuacaauag

SEQ ID NO: 1234014 - RNA, 17 nt, Human
auuguuuuacaauaguu

SEQ ID NO: 1234015 - RNA, 18 nt, Human
auuguuuuacaauaguuc

SEQ ID NO: 1234016 - RNA, 13 nt, Human
auuguuuuacaau

SEQ ID NO: 1234017 - RNA, 14 nt, Human
auuguuuuacaaua

SEQ ID NO: 1234018 - RNA, 19 nt, Human
auuguuuuacaauaguucu

SEQ ID NO: 1234019 - RNA, 21 nt, Human
auugcuuuguauuguauauua

SEQ ID NO: 1234020 - RNA, 18 nt, Human
auugacuuuuuauggcac

SEQ ID NO: 1234021 - RNA, 13 nt, Human
auugacuuuuuau

SEQ ID NO: 1234022 - RNA, 13 nt, Human
auuggaaacaagu

SEQ ID NO: 1234023 - RNA, 19 nt, Human
auuggacaguaaaauccac

SEQ ID NO: 1234024 - RNA, 15 nt, Human
auuggcuuuucugau

SEQ ID NO: 1234025 - RNA, 16 nt, Human
auuggcuuuucugauc

SEQ ID NO: 1234026 - RNA, 19 nt, Human
auuggcuuuucugauccag

SEQ ID NO: 1234027 - RNA, 20 nt, Human
auuggcuuuucugauccagu

SEQ ID NO: 1234028 - RNA, 17 nt, Human
auuuauuuuaauaaugu

SEQ ID NO: 1234029 - RNA, 14 nt, Human
auuuauuuuaauaa

SEQ ID NO: 1234030 - RNA, 20 nt, Human
auuucuugagguaaaagcau

SEQ ID NO: 1234031 - RNA, 18 nt, Human
auuugaaacacuuugcau

SEQ ID NO: 1234032 - RNA, 16 nt, Human
auuugacauagucugg

SEQ ID NO: 1234033 - RNA, 17 nt, Human
auuugacauagucuggc

SEQ ID NO: 1234034 - RNA, 21 nt, Human
auuugacauagucuggcugua

SEQ ID NO: 1234035 - RNA, 23 nt, Human
auuucuaggacugaauuaugaaa

SEQ ID NO: 1234036 - RNA, 20 nt, Human
auuucuaggacugaauuaug

SEQ ID NO: 1234037 - RNA, 14 nt, Human
auuucccucucuca

SEQ ID NO: 1234038 - RNA, 18 nt, Human
auuucuaggacugaauua

SEQ ID NO: 1234039 - RNA, 17 nt, Human
auuucuaggacugaauu

SEQ ID NO: 1234040 - RNA, 23 nt, Human
auuugugaagguggaaauaaacu

SEQ ID NO: 1234041 - RNA, 16 nt, Human
auuuuaaaagaaugau

SEQ ID NO: 1234042 - RNA, 18 nt, Human
auuugugaagguggaaau

SEQ ID NO: 1234043 - RNA, 21 nt, Human
auuugugaagguggaaauaaa

SEQ ID NO: 1234044 - RNA, 23 nt, Human
auuuuaaaagaaugauuaugaau

SEQ ID NO: 1234045 - RNA, 15 nt, Human
auuuguauaaaauaa

SEQ ID NO: 1234046 - RNA, 14 nt, Human
auuuguauaaaaua

SEQ ID NO: 1234047 - RNA, 22 nt, Human
auuuguaguguuggagaagaac

SEQ ID NO: 1234048 - RNA, 12 nt, Human
auuuuggaauuu

SEQ ID NO: 1234049 - RNA, 16 nt, Human
auuuuguuucagugca

SEQ ID NO: 1234050 - RNA, 11 nt, Human
auuuuguuucu

SEQ ID NO: 1234051 - RNA, 17 nt, Human
auuuuguguuuaggaac

SEQ ID NO: 1234052 - RNA, 14 nt, Human
auuuucuauaauuu

SEQ ID NO: 1234053 - RNA, 15 nt, Human
auuuucuauaauuua

SEQ ID NO: 1234054 - RNA, 12 nt, Human
auuuuaauaaug

SEQ ID NO: 1234055 - RNA, 15 nt, Human
auuuuaauaaacacu

SEQ ID NO: 1234056 - RNA, 16 nt, Human
auuuuaauaaacacuc

SEQ ID NO: 1234057 - RNA, 17 nt, Human
auuuuaauaaacacucu

SEQ ID NO: 1234058 - RNA, 15 nt, Human
auuuuuguaguagcg

SEQ ID NO: 1234059 - RNA, 22 nt, Human
auuuuugugauuuugugauuga

SEQ ID NO: 1234060 - RNA, 22 nt, Human
auuuuuugggcagcaauuuaaa

SEQ ID NO: 1234061 - RNA, 23 nt, Human
auuuuuucucuaggaaauauuua

SEQ ID NO: 1234062 - RNA, 20 nt, Human
auuuuuucucuaggaaauau

SEQ ID NO: 1234063 - RNA, 16 nt, Human
auuuuuugaaaagcag

SEQ ID NO: 1234064 - RNA, 19 nt, Human
auuuuuugaaaagcagaca

SEQ ID NO: 1234065 - RNA, 14 nt, Human
auuuuguuucugua

SEQ ID NO: 1234066 - RNA, 15 nt, Human
auuuuguuucuguac

SEQ ID NO: 1234067 - RNA, 13 nt, Human
auucuguauagau

SEQ ID NO: 1234068 - RNA, 11 nt, Human
auucuguauag

SEQ ID NO: 1234069 - RNA, 12 nt, Human
auucuguauaga

SEQ ID NO: 1234070 - RNA, 19 nt, Human
auucuuaaaguugaauuua

SEQ ID NO: 1234071 - RNA, 20 nt, Human
auucuuaaaguugaauuuau

SEQ ID NO: 1234072 - RNA, 21 nt, Human
auucuuaaaguugaauuuauu

SEQ ID NO: 1234073 - RNA, 15 nt, Human
auucuguauagauua

SEQ ID NO: 1234074 - RNA, 21 nt, Human
auucuucccuaucuuugccac

SEQ ID NO: 1234075 - RNA, 20 nt, Human
auucuucccuaucuuugcca

SEQ ID NO: 1234076 - RNA, 15 nt, Human
auuauauuuacaaau

SEQ ID NO: 1234077 - RNA, 14 nt, Human
auuauauuaugaag

SEQ ID NO: 1234078 - RNA, 18 nt, Human
auuauauguucagauuau

SEQ ID NO: 1234079 - RNA, 18 nt, Human
auuauauuuauuacugua

SEQ ID NO: 1234080 - RNA, 15 nt, Human
auuauauuuauuacu

SEQ ID NO: 1234081 - RNA, 15 nt, Human
auuauuauuuggccc

SEQ ID NO: 1234082 - RNA, 13 nt, Human
auuauucaaaguu

SEQ ID NO: 1234083 - RNA, 14 nt, Human
auuauucaaaguug

SEQ ID NO: 1234084 - RNA, 15 nt, Human
auuauucaaaguugc

SEQ ID NO: 1234085 - RNA, 17 nt, Human
auuauucaaaguugccu

SEQ ID NO: 1234086 - RNA, 13 nt, Human
auucacauuguau

SEQ ID NO: 1234087 - RNA, 20 nt, Human
auucacauuguauucagagu

SEQ ID NO: 1234088 - RNA, 17 nt, Human
auuccagagcacugcuc

SEQ ID NO: 1234089 - RNA, 18 nt, Human
aaaaaauuggggauucuu

SEQ ID NO: 1234090 - RNA, 23 nt, Human
aaaaaauuggggauucuuaaagu

SEQ ID NO: 1234091 - RNA, 19 nt, Human
aacuuaaauuuuaguucuu

SEQ ID NO: 1234092 - RNA, 20 nt, Human
aacugacucuuaagaagacu

SEQ ID NO: 1234093 - RNA, 19 nt, Human
aacugacucuuaagaagac

SEQ ID NO: 1234094 - RNA, 18 nt, Human
aacugacucuuaagaaga

SEQ ID NO: 1234095 - RNA, 15 nt, Human
aacugacucuuaaga

SEQ ID NO: 1234096 - RNA, 14 nt, Human
aacggaagaagaga

SEQ ID NO: 1234097 - RNA, 12 nt, Human
aacggagucaaa

SEQ ID NO: 1234098 - RNA, 14 nt, Human
aacggaugauuucu

SEQ ID NO: 1234099 - RNA, 15 nt, Human
aacggaugauuucua

SEQ ID NO: 1234100 - RNA, 16 nt, Human
aacggaugauuucuau

SEQ ID NO: 1234101 - RNA, 17 nt, Human
aacggaugauuucuaug

SEQ ID NO: 1234102 - RNA, 16 nt, Human
aacuauugcauuuaua

SEQ ID NO: 1234103 - RNA, 21 nt, Human
aacuauugcauuuauauguac

SEQ ID NO: 1234104 - RNA, 13 nt, Human
aaauucuuucauu

SEQ ID NO: 1234105 - RNA, 19 nt, Human
aaauuaaaccggaccaucu

SEQ ID NO: 1234106 - RNA, 15 nt, Human
aaauuuuuuuuacau

SEQ ID NO: 1234107 - RNA, 17 nt, Human
aaaucuuauaauuuaaa

SEQ ID NO: 1234108 - RNA, 15 nt, Human
aaaugccuuuguacu

SEQ ID NO: 1234109 - RNA, 16 nt, Human
aaauuuuuuuuacauu

SEQ ID NO: 1234110 - RNA, 17 nt, Human
aaauuuuuuuuacauuu

SEQ ID NO: 1234111 - RNA, 18 nt, Human
aaauuuuuuuuacauuuu

SEQ ID NO: 1234112 - RNA, 17 nt, Human
aacacuaacaugauuug

SEQ ID NO: 1234113 - RNA, 14 nt, Human
aaccacuuuuugca

SEQ ID NO: 1234114 - RNA, 15 nt, Human
aaccacuuuuugcag

SEQ ID NO: 1234115 - RNA, 17 nt, Human
aaccacuuuuugcagcu

SEQ ID NO: 1234116 - RNA, 15 nt, Human
aaccagagugcugaa

SEQ ID NO: 1234117 - RNA, 15 nt, Human
aacaucccuccuggg

SEQ ID NO: 1234118 - RNA, 21 nt, Human
aaccgaacugauguaaguaaa

SEQ ID NO: 1234119 - RNA, 12 nt, Human
aaccagaucauu

SEQ ID NO: 1234120 - RNA, 23 nt, Human
aacccuaaauaauaaaaauaaac

SEQ ID NO: 1234121 - RNA, 14 nt, Human
aacccuagcaaaag

SEQ ID NO: 1234122 - RNA, 17 nt, Human
aaccuagggugauauua

SEQ ID NO: 1234123 - RNA, 19 nt, Human
aacagcuggugcccugcuu

SEQ ID NO: 1234124 - RNA, 20 nt, Human
aacagcuggugcccugcuuu

SEQ ID NO: 1234125 - RNA, 21 nt, Human
aacagcuggugcccugcuuuc

SEQ ID NO: 1234126 - RNA, 20 nt, Human
aaaccaugggauaaaugcca

SEQ ID NO: 1234127 - RNA, 15 nt, Human
aaaccaugggauaaa

SEQ ID NO: 1234128 - RNA, 17 nt, Human
aaagaaauauaccuaaa

SEQ ID NO: 1234129 - RNA, 17 nt, Human
aaaaucucaauauuuca

SEQ ID NO: 1234130 - RNA, 16 nt, Human
aaaaucucaauauuuc

SEQ ID NO: 1234131 - RNA, 21 nt, Human
aaaauugaugggauuugguca

SEQ ID NO: 1234132 - RNA, 22 nt, Human
aaacacugggagaaaugaaaaa

SEQ ID NO: 1234133 - RNA, 21 nt, Human
aaacacugggagaaaugaaaa

SEQ ID NO: 1234134 - RNA, 16 nt, Human
aaaaagaaacauuugg

SEQ ID NO: 1234135 - RNA, 13 nt, Human
aaaaguugaauuu

SEQ ID NO: 1234136 - RNA, 10 nt, Human
aaauaaauaa

SEQ ID NO: 1234137 - RNA, 18 nt, Human
aaauagcuagacugguga

SEQ ID NO: 1234138 - RNA, 20 nt, Human
aaauagcuuuuuucucugau

SEQ ID NO: 1234139 - RNA, 17 nt, Human
aaauagcuuuuuucucu

SEQ ID NO: 1234140 - RNA, 21 nt, Human
aaauauuuauuuuaauaaugu

SEQ ID NO: 1234141 - RNA, 20 nt, Human
aaauauuuauuuuaauaaug

SEQ ID NO: 1234142 - RNA, 15 nt, Human
aaauauuuauuuuaa

SEQ ID NO: 1234143 - RNA, 20 nt, Human
aaaucaaucuguaaaacuaa

SEQ ID NO: 1234144 - RNA, 15 nt, Human
aaaucugugaacuug

SEQ ID NO: 1234145 - RNA, 16 nt, Human
aaaucugugaacuuga

SEQ ID NO: 1234146 - RNA, 18 nt, Human
aaaucugugaacuugaaa

SEQ ID NO: 1234147 - RNA, 19 nt, Human
aaaucugugaacuugaaau

SEQ ID NO: 1234148 - RNA, 13 nt, Human
aagauacugaaau

SEQ ID NO: 1234149 - RNA, 14 nt, Human
aagauacugaaaua

SEQ ID NO: 1234150 - RNA, 14 nt, Human
aagcgccuccaacc

SEQ ID NO: 1234151 - RNA, 15 nt, Human
aagcgccuccaaccc

SEQ ID NO: 1234152 - RNA, 16 nt, Human
aagcgccuccaacccu

SEQ ID NO: 1234153 - RNA, 20 nt, Human
aagcgccuccaacccuagca

SEQ ID NO: 1234154 - RNA, 20 nt, Human
aagcuacagaagaaacuggg

SEQ ID NO: 1234155 - RNA, 23 nt, Human
aaggacuucuuuaauuuuggaau

SEQ ID NO: 1234156 - RNA, 14 nt, Human
aaggcagggaggag

SEQ ID NO: 1234157 - RNA, 18 nt, Human
aagcuguguggcagucug

SEQ ID NO: 1234158 - RNA, 14 nt, Human
aaggacaucagcaa

SEQ ID NO: 1234159 - RNA, 15 nt, Human
aaggacaucagcaaa

SEQ ID NO: 1234160 - RNA, 17 nt, Human
aaggacaucagcaaaca

SEQ ID NO: 1234161 - RNA, 14 nt, Human
aaggacuucuuuaa

SEQ ID NO: 1234162 - RNA, 15 nt, Human
aaggacuucuuuaau

SEQ ID NO: 1234163 - RNA, 20 nt, Human
aaggacuucuuuaauuuugg

SEQ ID NO: 1234164 - RNA, 21 nt, Human
aaggacuucuuuaauuuugga

SEQ ID NO: 1234165 - RNA, 16 nt, Human
aaguugacuuauagua

SEQ ID NO: 1234166 - RNA, 19 nt, Human
aaguugacuuauaguacau

SEQ ID NO: 1234167 - RNA, 20 nt, Human
aaguugacuuauaguacaug

SEQ ID NO: 1234168 - RNA, 21 nt, Human
aaguugacuuauaguacauga

SEQ ID NO: 1234169 - RNA, 23 nt, Human
aaguugacuuauaguacaugaua

SEQ ID NO: 1234170 - RNA, 12 nt, Human
aaguugccuaaa

SEQ ID NO: 1234171 - RNA, 15 nt, Human
aagucuccaaagucu

SEQ ID NO: 1234172 - RNA, 14 nt, Human
aagucuccaaaguc

SEQ ID NO: 1234173 - RNA, 18 nt, Human
aaguccaagcauuuagau

SEQ ID NO: 1234174 - RNA, 14 nt, Human
aaggucggaccagc

SEQ ID NO: 1234175 - RNA, 20 nt, Human
aaggugaggagcuugaaacc

SEQ ID NO: 1234176 - RNA, 15 nt, Human
aauccaaugaaauga

SEQ ID NO: 1234177 - RNA, 13 nt, Human
aauccagccugcu

SEQ ID NO: 1234178 - RNA, 15 nt, Human
aaugauuaugaauua

SEQ ID NO: 1234179 - RNA, 23 nt, Human
aaugauuaugaauuacauuugua

SEQ ID NO: 1234180 - RNA, 21 nt, Human
aaugauuaugaauuacauuug

SEQ ID NO: 1234181 - RNA, 18 nt, Human
aauccaagcaaaugugaa

SEQ ID NO: 1234182 - RNA, 12 nt, Human
aauauuaaagcc

SEQ ID NO: 1234183 - RNA, 13 nt, Human
aauacucuuauau

SEQ ID NO: 1234184 - RNA, 19 nt, Human
aaguugccuaaauccauuu

SEQ ID NO: 1234185 - RNA, 15 nt, Human
aaguugccuaaaucc

SEQ ID NO: 1234186 - RNA, 16 nt, Human
aaguugccuaaaucca

SEQ ID NO: 1234187 - RNA, 17 nt, Human
aaguugccuaaauccau

SEQ ID NO: 1234188 - RNA, 18 nt, Human
aaguugccuaaauccauu

SEQ ID NO: 1234189 - RNA, 23 nt, Human
aauguuucaaacauauauaacaa

SEQ ID NO: 1234190 - RNA, 22 nt, Human
aauguuuuuuuuuaaagacuuu

SEQ ID NO: 1234191 - RNA, 15 nt, Human
aauguuuuuuuuuaa

SEQ ID NO: 1234192 - RNA, 20 nt, Human
aauguuuuuuuuuaaagacu

SEQ ID NO: 1234193 - RNA, 17 nt, Human
agaaauaaauuuauuuc

SEQ ID NO: 1234194 - RNA, 22 nt, Human
acuuuauuuucuauaauuuaaa

SEQ ID NO: 1234195 - RNA, 22 nt, Human
acuuuaucuugaauaauguaag

SEQ ID NO: 1234196 - RNA, 15 nt, Human
acuuuauuuuguguu

SEQ ID NO: 1234197 - RNA, 12 nt, Human
acuuuuaugaua

SEQ ID NO: 1234198 - RNA, 16 nt, Human
acuuuuaugauacuug

SEQ ID NO: 1234199 - RNA, 23 nt, Human
acuuuuaugauacuugaaaauua

SEQ ID NO: 1234200 - RNA, 14 nt, Human
acuuuuggaaggua

SEQ ID NO: 1234201 - RNA, 18 nt, Human
acuuguaaaggaauuuaa

SEQ ID NO: 1234202 - RNA, 14 nt, Human
acuggugacugauu

SEQ ID NO: 1234203 - RNA, 16 nt, Human
acuggugacugauucu

SEQ ID NO: 1234204 - RNA, 22 nt, Human
acuguaagaaaauaucacuugu

SEQ ID NO: 1234205 - RNA, 19 nt, Human
acuguaagaaaauaucacu

SEQ ID NO: 1234206 - RNA, 15 nt, Human
acucauauuuucaug

SEQ ID NO: 1234207 - RNA, 20 nt, Human
acuaguauuucuaugaaaua

SEQ ID NO: 1234208 - RNA, 15 nt, Human
acuaagagagaauga

SEQ ID NO: 1234209 - RNA, 13 nt, Human
acuaagagagaau

SEQ ID NO: 1234210 - RNA, 14 nt, Human
acggaacucaaaua

SEQ ID NO: 1234211 - RNA, 22 nt, Human
acggaagaagagaucaggaaga

SEQ ID NO: 1234212 - RNA, 11 nt, Human
accugucuguc

SEQ ID NO: 1234213 - RNA, 12 nt, Human
accugucugucu

SEQ ID NO: 1234214 - RNA, 14 nt, Human
accugucugucugu

SEQ ID NO: 1234215 - RNA, 22 nt, Human
acaauugagguaaguuuuuuga

SEQ ID NO: 1234216 - RNA, 10 nt, Human
acaacuaagu

SEQ ID NO: 1234217 - RNA, 22 nt, Human
acaacuaagugauuuguauguc

SEQ ID NO: 1234218 - RNA, 14 nt, Human
aauuuuguuucugu

SEQ ID NO: 1234219 - RNA, 15 nt, Human
aauuuuguuucugua

SEQ ID NO: 1234220 - RNA, 14 nt, Human
acaacggagucaaa

SEQ ID NO: 1234221 - RNA, 20 nt, Human
acaacggagucaaaaauuaa

SEQ ID NO: 1234222 - RNA, 22 nt, Human
acaacggagucaaaaauuaaac

SEQ ID NO: 1234223 - RNA, 13 nt, Human
aauuuugugaagc

SEQ ID NO: 1234224 - RNA, 13 nt, Human
aauuuuguuucug

SEQ ID NO: 1234225 - RNA, 22 nt, Human
acaggaugguucccuugaugaa

SEQ ID NO: 1234226 - RNA, 18 nt, Human
acaggauccaggccggcu

SEQ ID NO: 1234227 - RNA, 19 nt, Human
acaggaucaguuaacuauu

SEQ ID NO: 1234228 - RNA, 12 nt, Human
acaggauccagg

SEQ ID NO: 1234229 - RNA, 13 nt, Human
acaggauccaggc

SEQ ID NO: 1234230 - RNA, 21 nt, Human
acaggaugaugacuauggaaa

SEQ ID NO: 1234231 - RNA, 14 nt, Human
acagagucuuccuc

SEQ ID NO: 1234232 - RNA, 19 nt, Human
acagagucuuccucugucu

SEQ ID NO: 1234233 - RNA, 17 nt, Human
acagccaacuauggccu

SEQ ID NO: 1234234 - RNA, 19 nt, Human
acagccaacuauggccugu

SEQ ID NO: 1234235 - RNA, 13 nt, Human
acaucagcaaaca

SEQ ID NO: 1234236 - RNA, 23 nt, Human
acauguuucuuuguaaugaaaac

SEQ ID NO: 1234237 - RNA, 19 nt, Human
acauguuucuuuguaauga

SEQ ID NO: 1234238 - RNA, 22 nt, Human
acauguuucuuuguaaugaaaa

SEQ ID NO: 1234239 - RNA, 17 nt, Human
acaggcacacaccacca

SEQ ID NO: 1234240 - RNA, 19 nt, Human
acauuuguucuauagcuuu

SEQ ID NO: 1234241 - RNA, 20 nt, Human
acauuuuaaaaaauggucac

SEQ ID NO: 1234242 - RNA, 17 nt, Human
accaauaaaauaauuuu

SEQ ID NO: 1234243 - RNA, 11 nt, Human
accaauaaagu

SEQ ID NO: 1234244 - RNA, 12 nt, Human
accaauaaagug

SEQ ID NO: 1234245 - RNA, 17 nt, Human
accaauaaagugacccu

SEQ ID NO: 1234246 - RNA, 21 nt, Human
accaccgcgcccagccuuuuu

SEQ ID NO: 1234247 - RNA, 15 nt, Human
accaccucucaauau

SEQ ID NO: 1234248 - RNA, 23 nt, Human
accaccucucaauauucaauaaa

SEQ ID NO: 1234249 - RNA, 22 nt, Human
accagagugcugaaggaaugga

SEQ ID NO: 1234250 - RNA, 13 nt, Human
accagaucauugu

SEQ ID NO: 1234251 - RNA, 22 nt, Human
acccauuagcagucccuccaca

SEQ ID NO: 1234252 - RNA, 14 nt, Human
acccagugcugaau

SEQ ID NO: 1234253 - RNA, 17 nt, Human
accccuccacucuuucu

SEQ ID NO: 1234254 - RNA, 13 nt, Human
accccuccacucu

SEQ ID NO: 1234255 - RNA, 23 nt, Human
aggcuacuguaaggcaaucaugg

SEQ ID NO: 1234256 - RNA, 17 nt, Human
aggcuagauguauguac

SEQ ID NO: 1234257 - RNA, 16 nt, Human
aggcuagauguaugua

SEQ ID NO: 1234258 - RNA, 15 nt, Human
aggcuagauguaugu

SEQ ID NO: 1234259 - RNA, 22 nt, Human
agggaccggcggaccccagcca

SEQ ID NO: 1234260 - RNA, 13 nt, Human
aggucccuaauaa

SEQ ID NO: 1234261 - RNA, 15 nt, Human
aggucccuaauaaag

SEQ ID NO: 1234262 - RNA, 16 nt, Human
aggucccuaauaaagc

SEQ ID NO: 1234263 - RNA, 20 nt, Human
agguaaaagcaucacaugaa

SEQ ID NO: 1234264 - RNA, 18 nt, Human
agguaaaucagacuauga

SEQ ID NO: 1234265 - RNA, 23 nt, Human
agguaaaucagacuaugaaguuu

SEQ ID NO: 1234266 - RNA, 17 nt, Human
agguaauuuuuuucacc

SEQ ID NO: 1234267 - RNA, 12 nt, Human
aggucccuaaua

SEQ ID NO: 1234268 - RNA, 12 nt, Human
aggacccaggac

SEQ ID NO: 1234269 - RNA, 13 nt, Human
aggacccaggaca

SEQ ID NO: 1234270 - RNA, 14 nt, Human
aggacccaggacag

SEQ ID NO: 1234271 - RNA, 18 nt, Human
aggacccaggacaggauc

SEQ ID NO: 1234272 - RNA, 23 nt, Human
aggacccaggacaggauccaggc

SEQ ID NO: 1234273 - RNA, 23 nt, Human
aggaugguucccuugaugaagaa

SEQ ID NO: 1234274 - RNA, 15 nt, Human
agcaugccuucaaau

SEQ ID NO: 1234275 - RNA, 13 nt, Human
agccaagugcagg

SEQ ID NO: 1234276 - RNA, 17 nt, Human
agagaacuuccagaucc

SEQ ID NO: 1234277 - RNA, 13 nt, Human
agagaagaaagaa

SEQ ID NO: 1234278 - RNA, 17 nt, Human
agagaagaaagaacgga

SEQ ID NO: 1234279 - RNA, 20 nt, Human
agacagagucuuccucuguc

SEQ ID NO: 1234280 - RNA, 19 nt, Human
agacagagucuuacucugu

SEQ ID NO: 1234281 - RNA, 20 nt, Human
agacagagucuuacucuguu

SEQ ID NO: 1234282 - RNA, 23 nt, Human
agacagagucuuccucugucucc

SEQ ID NO: 1234283 - RNA, 13 nt, Human
agaguguugaaac

SEQ ID NO: 1234284 - RNA, 16 nt, Human
augcauauuauuuuau

SEQ ID NO: 1234285 - RNA, 20 nt, Human
augcauauuauuuuauguug

SEQ ID NO: 1234286 - RNA, 15 nt, Human
auguuuucaggcuag

SEQ ID NO: 1234287 - RNA, 20 nt, Human
auggucacguuuggugcuuc

SEQ ID NO: 1234288 - RNA, 21 nt, Human
auggucacguuuggugcuucu

SEQ ID NO: 1234289 - RNA, 24 nt, Human
auggucacguuuggugcuucucag

SEQ ID NO: 1234290 - RNA, 20 nt, Human
augguccgugcuaaggacuu

SEQ ID NO: 1234291 - RNA, 21 nt, Human
augguccgugcuaaggacuug

SEQ ID NO: 1234292 - RNA, 14 nt, Human
augugaaaucauuc

SEQ ID NO: 1234293 - RNA, 23 nt, Human
augugaacaguuguguuugaagc

SEQ ID NO: 1234294 - RNA, 21 nt, Human
augugaacaguuguguuugaa

SEQ ID NO: 1234295 - RNA, 11 nt, Human
augugaacagu

SEQ ID NO: 1234296 - RNA, 18 nt, Human
aucuugaauaauguaaga

SEQ ID NO: 1234297 - RNA, 18 nt, Human
aucuggaaccaucagaaa

SEQ ID NO: 1234298 - RNA, 21 nt, Human
aucuauauuuuacauaaauuu

SEQ ID NO: 1234299 - RNA, 17 nt, Human
aucuauauuuuacauaa

SEQ ID NO: 1234300 - RNA, 22 nt, Human
augaagcuuuuaugugaaacau

SEQ ID NO: 1234301 - RNA, 19 nt, Human
augaaguuuuuuuuauaca

SEQ ID NO: 1234302 - RNA, 23 nt, Human
augaaguuuuuuuuauacaggau

SEQ ID NO: 1234303 - RNA, 20 nt, Human
auccucccacuucagccucc

SEQ ID NO: 1234304 - RNA, 18 nt, Human
auccagaaagaaaacuug

SEQ ID NO: 1234305 - RNA, 16 nt, Human
auccagaaagaaaacu

SEQ ID NO: 1234306 - RNA, 15 nt, Human
aucaugugaaaucau

SEQ ID NO: 1234307 - RNA, 16 nt, Human
aucaugugaaaucauu

SEQ ID NO: 1234308 - RNA, 15 nt, Human
auauuuauuuuaaua

SEQ ID NO: 1234309 - RNA, 14 nt, Human
auauuuauuuuaau

SEQ ID NO: 1234310 - RNA, 17 nt, Human
auauuuauuuuaauaau

SEQ ID NO: 1234311 - RNA, 15 nt, Human
auaaagcaggcagaa

SEQ ID NO: 1234312 - RNA, 18 nt, Human
auaaagcuguguggcagu

SEQ ID NO: 1234313 - RNA, 14 nt, Human
auaaaggacuguaa

SEQ ID NO: 1234314 - RNA, 15 nt, Human
auaaaagacagugaa

SEQ ID NO: 1234315 - RNA, 20 nt, Human
auaaacuuuuuucuuacugu

SEQ ID NO: 1234316 - RNA, 17 nt, Human
auaacauaaaucuguga

SEQ ID NO: 1234317 - RNA, 18 nt, Human
auaacauaaaucugugaa

SEQ ID NO: 1234318 - RNA, 19 nt, Human
auaacauaaaucugugaac

SEQ ID NO: 1234319 - RNA, 18 nt, Human
auaaaggauuaaugucaa

SEQ ID NO: 1234320 - RNA, 14 nt, Human
auaacauaaaucug

SEQ ID NO: 1234321 - RNA, 15 nt, Human
auaacauaaaucugu

SEQ ID NO: 1234322 - RNA, 13 nt, Human
auacccacccaga

SEQ ID NO: 1234323 - RNA, 14 nt, Human
auacccacccagaa

SEQ ID NO: 1234324 - RNA, 15 nt, Human
auaaggaaaaguuua

SEQ ID NO: 1234325 - RNA, 16 nt, Human
auaaggaaaaguuuaa

SEQ ID NO: 1234326 - RNA, 15 nt, Human
auaauuaacauguua

SEQ ID NO: 1234327 - RNA, 17 nt, Human
auaauuaacauguuaaa

SEQ ID NO: 1234328 - RNA, 22 nt, Human
auaugcuauuucuauauuuuca

SEQ ID NO: 1234329 - RNA, 23 nt, Human
auaugcuauuucuauauuuucau

SEQ ID NO: 1234330 - RNA, 22 nt, Human
auaugcuucuguuuuauaauuu

SEQ ID NO: 1234331 - RNA, 20 nt, Human
auaugcuucuguuuuauaau

SEQ ID NO: 1234332 - RNA, 23 nt, Human
auaugcuucuguuuuauaauuuu

SEQ ID NO: 1234333 - RNA, 16 nt, Human
auaugcuauuucuaua

SEQ ID NO: 1234334 - RNA, 18 nt, Human
auaugcuauuucuauauu

SEQ ID NO: 1234335 - RNA, 19 nt, Human
auaugcuauuucuauauuu

SEQ ID NO: 1234336 - RNA, 21 nt, Human
auaugcuauuucuauauuuuc

SEQ ID NO: 1234337 - RNA, 13 nt, Human
auauuuauuuuaa

SEQ ID NO: 1234338 - RNA, 14 nt, Human
auauuauuuuaugu

SEQ ID NO: 1234339 - RNA, 18 nt, Human
auauuuacuaaaauggac

SEQ ID NO: 1234340 - RNA, 20 nt, Human
auauuuacuaaaauggacug

SEQ ID NO: 1234341 - RNA, 23 nt, Human
auauuaugaagcuuuuaugugaa

SEQ ID NO: 1234342 - RNA, 16 nt, Human
auaucaaauauauuca

SEQ ID NO: 1234343 - RNA, 18 nt, Human
auagguuuggacaaaaug

SEQ ID NO: 1234344 - RNA, 14 nt, Human
auagguuuggacaa

SEQ ID NO: 1234345 - RNA, 15 nt, Human
auagguuuaauaauu

SEQ ID NO: 1234346 - RNA, 17 nt, Human
auagucaaauuguguga

SEQ ID NO: 1234347 - RNA, 14 nt, Human
auagucaaauugug

SEQ ID NO: 1234348 - RNA, 12 nt, Human
aguccuguaaug

SEQ ID NO: 1234349 - RNA, 19 nt, Human
aguccugggauuacaggug

SEQ ID NO: 1234350 - RNA, 14 nt, Human
agugacccugcucu

SEQ ID NO: 1234351 - RNA, 18 nt, Human
aguauggguuagggaaaa

SEQ ID NO: 1234352 - RNA, 23 nt, Human
agucaaauugugugaaagguacu

SEQ ID NO: 1234353 - RNA, 13 nt, Human
agucaaauugugu

SEQ ID NO: 1234354 - RNA, 16 nt, Human
aguaucuuuuuauuca

SEQ ID NO: 1234355 - RNA, 18 nt, Human
aguaucucuucagucucu

SEQ ID NO: 1234356 - RNA, 16 nt, Human
aguaucucuucagucu

SEQ ID NO: 1234357 - RNA, 16 nt, Human
aguuguguuugaagca

SEQ ID NO: 1234358 - RNA, 23 nt, Human
aguugaaaaucuuauaauuuaaa

SEQ ID NO: 1234359 - RNA, 22 nt, Human
aguugaaaaucuuauaauuuaa

SEQ ID NO: 1234360 - RNA, 19 nt, Human
aguggcgcgaucucagcuc

SEQ ID NO: 1234361 - RNA, 20 nt, Human
aguggcgcgaucucagcuca

SEQ ID NO: 1234362 - RNA, 19 nt, Human
aguggcgugaucucagcuc

SEQ ID NO: 1234363 - RNA, 20 nt, Human
aguggcgugaucucagcuca

SEQ ID NO: 1234364 - RNA, 21 nt, Human
cacaaauucugucucuggauu

SEQ ID NO: 1234365 - RNA, 17 nt, Human
caauagucaaauugugu

SEQ ID NO: 1234366 - RNA, 18 nt, Human
caauccucccacuucagc

SEQ ID NO: 1234367 - RNA, 22 nt, Human
caauccucccacuucagccucc

SEQ ID NO: 1234368 - RNA, 20 nt, Human
caaugaucaccgacugaaaa

SEQ ID NO: 1234369 - RNA, 18 nt, Human
cacacacaugcuucccuu

SEQ ID NO: 1234370 - RNA, 13 nt, Human
cacaacuauauug

SEQ ID NO: 1234371 - RNA, 19 nt, Human
cacacugggacuugcaaaa

SEQ ID NO: 1234372 - RNA, 20 nt, Human
cacaggaaccacaagacugc

SEQ ID NO: 1234373 - RNA, 20 nt, Human
cacauugguguuguacucaa

SEQ ID NO: 1234374 - RNA, 17 nt, Human
cacauuggaaacaaguc

SEQ ID NO: 1234375 - RNA, 18 nt, Human
cacauuggagauguuuag

SEQ ID NO: 1234376 - RNA, 12 nt, Human
cacauguccagu

SEQ ID NO: 1234377 - RNA, 16 nt, Human
cacauuccugaacagg

SEQ ID NO: 1234378 - RNA, 17 nt, Human
caagcacuaaacaaaga

SEQ ID NO: 1234379 - RNA, 22 nt, Human
caagugcagggccuguaauccc

SEQ ID NO: 1234380 - RNA, 15 nt, Human
caaauucugucucug

SEQ ID NO: 1234381 - RNA, 18 nt, Human
caaauucugucucuggau

SEQ ID NO: 1234382 - RNA, 21 nt, Human
caacucugaaggguaauuaua

SEQ ID NO: 1234383 - RNA, 15 nt, Human
caacugcuaaucuac

SEQ ID NO: 1234384 - RNA, 14 nt, Human
caacuucaguccaa

SEQ ID NO: 1234385 - RNA, 11 nt, Human
caacuuuguau

SEQ ID NO: 1234386 - RNA, 12 nt, Human
caacuuuguaua

SEQ ID NO: 1234387 - RNA, 15 nt, Human
caaaucacugaacuu

SEQ ID NO: 1234388 - RNA, 14 nt, Human
caaaucacugaacu

SEQ ID NO: 1234389 - RNA, 19 nt, Human
caaaguugccuaaauccau

SEQ ID NO: 1234390 - RNA, 12 nt, Human
caaauauauuca

SEQ ID NO: 1234391 - RNA, 23 nt, Human
caaauauauucagccuggcuuca

SEQ ID NO: 1234392 - RNA, 11 nt, Human
caaaaaacuac

SEQ ID NO: 1234393 - RNA, 15 nt, Human
caaaaaacuacuucu

SEQ ID NO: 1234394 - RNA, 20 nt, Human
caaauacgugggcauucaaa

SEQ ID NO: 1234395 - RNA, 15 nt, Human
cacccacccuuuuuu

SEQ ID NO: 1234396 - RNA, 23 nt, Human
caccccuaaaagaaacccugcac

SEQ ID NO: 1234397 - RNA, 21 nt, Human
ccagccuggggcugaggcuga

SEQ ID NO: 1234398 - RNA, 20 nt, Human
ccaccucgcagguucaagca

SEQ ID NO: 1234399 - RNA, 21 nt, Human
ccaccucgcagguucaagcaa

SEQ ID NO: 1234400 - RNA, 13 nt, Human
ccaccucucaaua

SEQ ID NO: 1234401 - RNA, 14 nt, Human
ccaccucucaauau

SEQ ID NO: 1234402 - RNA, 23 nt, Human
ccaccucucaauauucaauaaag

SEQ ID NO: 1234403 - RNA, 17 nt, Human
ccacccucguggacacc

SEQ ID NO: 1234404 - RNA, 18 nt, Human
ccacccucguggacaccu

SEQ ID NO: 1234405 - RNA, 20 nt, Human
ccacccucguggacaccugc

SEQ ID NO: 1234406 - RNA, 19 nt, Human
ccacccucguggacaccug

SEQ ID NO: 1234407 - RNA, 13 nt, Human
ccacuuuuugcag

SEQ ID NO: 1234408 - RNA, 14 nt, Human
ccacuuuuugcagc

SEQ ID NO: 1234409 - RNA, 15 nt, Human
ccacuuuuugcagcu

SEQ ID NO: 1234410 - RNA, 17 nt, Human
ccacuuuuugcagcuuu

SEQ ID NO: 1234411 - RNA, 16 nt, Human
ccacuuuuugcagcuu

SEQ ID NO: 1234412 - RNA, 18 nt, Human
ccagaaaccuuuguuugc

SEQ ID NO: 1234413 - RNA, 14 nt, Human
ccagaccauggaca

SEQ ID NO: 1234414 - RNA, 16 nt, Human
ccagaaugagacaucc

SEQ ID NO: 1234415 - RNA, 20 nt, Human
ccagguauucguuaucuaau

SEQ ID NO: 1234416 - RNA, 21 nt, Human
ccagguauucguuaucuaaua

SEQ ID NO: 1234417 - RNA, 18 nt, Human
ccaucaaggguacacugc

SEQ ID NO: 1234418 - RNA, 20 nt, Human
ccaucaucuauagaaagcua

SEQ ID NO: 1234419 - RNA, 20 nt, Human
ccagguagaggguguguaag

SEQ ID NO: 1234420 - RNA, 14 nt, Human
ccaggguggcagca

SEQ ID NO: 1234421 - RNA, 16 nt, Human
ccaggguggcagcaac

SEQ ID NO: 1234422 - RNA, 17 nt, Human
ccaggguggcagcaaca

SEQ ID NO: 1234423 - RNA, 12 nt, Human
ccaggcuggguc

SEQ ID NO: 1234424 - RNA, 16 nt, Human
ccaggcugggucgccc

SEQ ID NO: 1234425 - RNA, 21 nt, Human
ccaggcugggucgcccuggac

SEQ ID NO: 1234426 - RNA, 22 nt, Human
ccaggcugggucgcccuggacu

SEQ ID NO: 1234427 - RNA, 23 nt, Human
ccaggcugggucgcccuggacug

SEQ ID NO: 1234428 - RNA, 24 nt, Human
ccaggcugggucgcccuggacugu

SEQ ID NO: 1234429 - RNA, 13 nt, Human
ccauuuggaaauc

SEQ ID NO: 1234430 - RNA, 20 nt, Human
ccauguuaaccccuccacuc

SEQ ID NO: 1234431 - RNA, 11 nt, Human
ccauuauucaa

SEQ ID NO: 1234432 - RNA, 12 nt, Human
cccagaaugaga

SEQ ID NO: 1234433 - RNA, 18 nt, Human
cccagaaugagacaucca

SEQ ID NO: 1234434 - RNA, 18 nt, Human
cccauucauuccauucug

SEQ ID NO: 1234435 - RNA, 22 nt, Human
cccauucauuccauucuggaag

SEQ ID NO: 1234436 - RNA, 18 nt, Human
cccauuauucaaaguugc

SEQ ID NO: 1234437 - RNA, 23 nt, Human
cccauuauucaaaguugccuaaa

SEQ ID NO: 1234438 - RNA, 21 nt, Human
cccauucauuccauucuggaa

SEQ ID NO: 1234439 - RNA, 21 nt, Human
ccccacccucguggacaccug

SEQ ID NO: 1234440 - RNA, 22 nt, Human
ccccacccucguggacaccugc

SEQ ID NO: 1234441 - RNA, 23 nt, Human
ccccacccucguggacaccugcc

SEQ ID NO: 1234442 - RNA, 16 nt, Human
ccccacccugccucac

SEQ ID NO: 1234443 - RNA, 20 nt, Human
cccagaaugagacauccagc

SEQ ID NO: 1234444 - RNA, 18 nt, Human
ccccaguaucucuucagu

SEQ ID NO: 1234445 - RNA, 17 nt, Human
ccccaucauugguaccc

SEQ ID NO: 1234446 - RNA, 22 nt, Human
cccccagaaaagaaagcuacag

SEQ ID NO: 1234447 - RNA, 17 nt, Human
cccccacugccuuugac

SEQ ID NO: 1234448 - RNA, 12 nt, Human
ccccuccacucu

SEQ ID NO: 1234449 - RNA, 17 nt, Human
ccccuccacucuuucuu

SEQ ID NO: 1234450 - RNA, 15 nt, Human
ccccuagccugccuc

SEQ ID NO: 1234451 - RNA, 14 nt, Human
ccccugccucucug

SEQ ID NO: 1234452 - RNA, 15 nt, Human
ccccugccucucugc

SEQ ID NO: 1234453 - RNA, 16 nt, Human
ccccugccucucugca

SEQ ID NO: 1234454 - RNA, 17 nt, Human
ccccugccucucugcag

SEQ ID NO: 1234455 - RNA, 19 nt, Human
ccccugccucucugcaggu

SEQ ID NO: 1234456 - RNA, 17 nt, Human
ccccuggucccucugca

SEQ ID NO: 1234457 - RNA, 18 nt, Human
ccccuggucccucugcag

SEQ ID NO: 1234458 - RNA, 23 nt, Human
ccccuggugcacuggccccaccc

SEQ ID NO: 1234459 - RNA, 20 nt, Human
cccucucccaaaaaacuacu

SEQ ID NO: 1234460 - RNA, 13 nt, Human
cccucuuccuucc

SEQ ID NO: 1234461 - RNA, 15 nt, Human
cccucccuacccuaa

SEQ ID NO: 1234462 - RNA, 16 nt, Human
cccucccuacccuaac

SEQ ID NO: 1234463 - RNA, 16 nt, Human
cccucguggacaccug

SEQ ID NO: 1234464 - RNA, 17 nt, Human
cccucguggacaccugc

SEQ ID NO: 1234465 - RNA, 18 nt, Human
cccucguggacaccugcc

SEQ ID NO: 1234466 - RNA, 19 nt, Human
cccucguggacaccugccc

SEQ ID NO: 1234467 - RNA, 22 nt, Human
cccucguggacaccugcccugc

SEQ ID NO: 1234468 - RNA, 23 nt, Human
cccucguggacaccugcccugcc

SEQ ID NO: 1234469 - RNA, 16 nt, Human
cccugcugcugccugc

SEQ ID NO: 1234470 - RNA, 17 nt, Human
cccugcugcugccugcc

SEQ ID NO: 1234471 - RNA, 18 nt, Human
cccugcugcugccugccu

SEQ ID NO: 1234472 - RNA, 14 nt, Human
cccugcuuucagau

SEQ ID NO: 1234473 - RNA, 21 nt, Human
cccuggugcacuggccccacc

SEQ ID NO: 1234474 - RNA, 15 nt, Human
cccuugaugaagaag

SEQ ID NO: 1234475 - RNA, 13 nt, Human
cccugcugcugcc

SEQ ID NO: 1234476 - RNA, 15 nt, Human
cccugccucucugca

SEQ ID NO: 1234477 - RNA, 16 nt, Human
cccugccucucugcag

SEQ ID NO: 1234478 - RNA, 13 nt, Human
cccugccucucug

SEQ ID NO: 1234479 - RNA, 14 nt, Human
cccugccucucugc

SEQ ID NO: 1234480 - RNA, 13 nt, Human
ccgcagaaggaag

SEQ ID NO: 1234481 - RNA, 15 nt, Human
ccgcagaaggaaggc

SEQ ID NO: 1234482 - RNA, 18 nt, Human
ccgcagaaggaaggcagg

SEQ ID NO: 1234483 - RNA, 18 nt, Human
ccgccucagccucccaaa

SEQ ID NO: 1234484 - RNA, 20 nt, Human
ccgacugaaaauauuguuuu

SEQ ID NO: 1234485 - RNA, 20 nt, Human
ccgccucgaccucucucaaa

SEQ ID NO: 1234486 - RNA, 16 nt, Human
ccggggggucucuucu

SEQ ID NO: 1234487 - RNA, 16 nt, Human
ccuacuagucaccaga

SEQ ID NO: 1234488 - RNA, 11 nt, Human
ccuaaccaagu

SEQ ID NO: 1234489 - RNA, 14 nt, Human
ccugccaccuccug

SEQ ID NO: 1234490 - RNA, 16 nt, Human
ccugccaccuccugcc

SEQ ID NO: 1234491 - RNA, 19 nt, Human
ccugccaccuccugccuca

SEQ ID NO: 1234492 - RNA, 20 nt, Human
ccugaagcuaucguaaaauu

SEQ ID NO: 1234493 - RNA, 12 nt, Human
ccuaucuuugcc

SEQ ID NO: 1234494 - RNA, 13 nt, Human
ccuaucuuugcca

SEQ ID NO: 1234495 - RNA, 15 nt, Human
ccuaucuuugccacc

SEQ ID NO: 1234496 - RNA, 19 nt, Human
ccuaucuuugccacccuca

SEQ ID NO: 1234497 - RNA, 20 nt, Human
ccuaucuuugccacccucau

SEQ ID NO: 1234498 - RNA, 23 nt, Human
ccucuuccuucccugcugugaaa

SEQ ID NO: 1234499 - RNA, 17 nt, Human
ccugccaccuccugccu

SEQ ID NO: 1234500 - RNA, 12 nt, Human
ccugccaccugu

SEQ ID NO: 1234501 - RNA, 13 nt, Human
ccugccaccuguc

SEQ ID NO: 1234502 - RNA, 14 nt, Human
ccugccaccugucu

SEQ ID NO: 1234503 - RNA, 15 nt, Human
ccugccaccugucug

SEQ ID NO: 1234504 - RNA, 16 nt, Human
ccugccaccugucugu

SEQ ID NO: 1234505 - RNA, 17 nt, Human
ccugccaccugucuguc

SEQ ID NO: 1234506 - RNA, 21 nt, Human
ccugcccugccaccugucugu

SEQ ID NO: 1234507 - RNA, 18 nt, Human
ccugcccugccaccuguc

SEQ ID NO: 1234508 - RNA, 15 nt, Human
ccugcccugcccugc

SEQ ID NO: 1234509 - RNA, 16 nt, Human
ccugcccugcccugcc

SEQ ID NO: 1234510 - RNA, 17 nt, Human
ccugcccugcccugcca

SEQ ID NO: 1234511 - RNA, 11 nt, Human
ccugcccugcc

SEQ ID NO: 1234512 - RNA, 12 nt, Human
ccugcccugcca

SEQ ID NO: 1234513 - RNA, 14 nt, Human
ccugcccugccacc

SEQ ID NO: 1234514 - RNA, 15 nt, Human
ccugcccugccaccu

SEQ ID NO: 1234515 - RNA, 17 nt, Human
ccugcccugccaccugu

SEQ ID NO: 1234516 - RNA, 22 nt, Human
ccuucuccauggcccugccaug

SEQ ID NO: 1234517 - RNA, 19 nt, Human
ccuucuccauggcccugcc

SEQ ID NO: 1234518 - RNA, 15 nt, Human
ccuucaugcauggaa

SEQ ID NO: 1234519 - RNA, 12 nt, Human
ccuucaugcaug

SEQ ID NO: 1234520 - RNA, 21 nt, Human
ccuucaugcauggaaauuccc

SEQ ID NO: 1234521 - RNA, 18 nt, Human
ccuguggaucaaauccag

SEQ ID NO: 1234522 - RNA, 16 nt, Human
cgcacggcagccacag

SEQ ID NO: 1234523 - RNA, 24 nt, Human
cgcguugaaauuguaauuauaucu

SEQ ID NO: 1234524 - RNA, 17 nt, Human
cgcuaaacuuuucugau

SEQ ID NO: 1234525 - RNA, 18 nt, Human
cgcuaaacuuuucugaua

SEQ ID NO: 1234526 - RNA, 19 nt, Human
cgcuaaacuuuucugauag

SEQ ID NO: 1234527 - RNA, 16 nt, Human
cggcuugccacacccc

SEQ ID NO: 1234528 - RNA, 18 nt, Human
cgggaauuuucaucuagg

SEQ ID NO: 1234529 - RNA, 20 nt, Human
cgggaauuuucaucuaggau

SEQ ID NO: 1234530 - RNA, 18 nt, Human
cguuuggugcuucucaga

SEQ ID NO: 1234531 - RNA, 17 nt, Human
cuaaauauauuuuaaga

SEQ ID NO: 1234532 - RNA, 22 nt, Human
cuaaaauggacuguggugacuu

SEQ ID NO: 1234533 - RNA, 21 nt, Human
cuaaaauggacuguggugacu

SEQ ID NO: 1234534 - RNA, 15 nt, Human
cuaagagagaaugag

SEQ ID NO: 1234535 - RNA, 14 nt, Human
cuaagagagaauga

SEQ ID NO: 1234536 - RNA, 10 nt, Human
cuaaccaagu

SEQ ID NO: 1234537 - RNA, 12 nt, Human
cuaaccaaguuc

SEQ ID NO: 1234538 - RNA, 19 nt, Human
cuaaauucuuucauuuuag

SEQ ID NO: 1234539 - RNA, 13 nt, Human
cguuuucaaaauu

SEQ ID NO: 1234540 - RNA, 14 nt, Human
cuacacuaagagag

SEQ ID NO: 1234541 - RNA, 23 nt, Human
cuacacgagauacagaauuuuau

SEQ ID NO: 1234542 - RNA, 11 nt, Human
cuacacccagc

SEQ ID NO: 1234543 - RNA, 12 nt, Human
cuacacccagca

SEQ ID NO: 1234544 - RNA, 13 nt, Human
cuacacccagcaa

SEQ ID NO: 1234545 - RNA, 14 nt, Human
cuacacccagcaau

SEQ ID NO: 1234546 - RNA, 16 nt, Human
cuacacccagcaauag

SEQ ID NO: 1234547 - RNA, 21 nt, Human
cuaagcuucacuguaaaauaa

SEQ ID NO: 1234548 - RNA, 14 nt, Human
cuaaggacuucuuu

SEQ ID NO: 1234549 - RNA, 15 nt, Human
cuaaggacuucuuua

SEQ ID NO: 1234550 - RNA, 16 nt, Human
cuaaggacuucuuuaa

SEQ ID NO: 1234551 - RNA, 22 nt, Human
cuaaggacuucuuuaauuuugg

SEQ ID NO: 1234552 - RNA, 22 nt, Human
cuaauagggcaauuaauuccuu

SEQ ID NO: 1234553 - RNA, 20 nt, Human
cuaccaaggucuucuuaaua

SEQ ID NO: 1234554 - RNA, 22 nt, Human
cuaggaaauauuuauuuuaaua

SEQ ID NO: 1234555 - RNA, 15 nt, Human
cucagcucacugcaa

SEQ ID NO: 1234556 - RNA, 20 nt, Human
cucagcucacuacaaccucc

SEQ ID NO: 1234557 - RNA, 14 nt, Human
cucagcucacugca

SEQ ID NO: 1234558 - RNA, 20 nt, Human
cucagcucacugcaaccucc

SEQ ID NO: 1234559 - RNA, 23 nt, Human
cucagauuuuauuauguaaaucc

SEQ ID NO: 1234560 - RNA, 24 nt, Human
cucaggagcccugggaggcucugg

SEQ ID NO: 1234561 - RNA, 20 nt, Human
cucagcucucaguugcagcc

SEQ ID NO: 1234562 - RNA, 12 nt, Human
cucaggagcccu

SEQ ID NO: 1234563 - RNA, 13 nt, Human
cucaggagcccug

SEQ ID NO: 1234564 - RNA, 14 nt, Human
cucaggagcccugg

SEQ ID NO: 1234565 - RNA, 15 nt, Human
cucaggagcccuggg

SEQ ID NO: 1234566 - RNA, 16 nt, Human
cucaggagcccuggga

SEQ ID NO: 1234567 - RNA, 17 nt, Human
cucaggagcccugggag

SEQ ID NO: 1234568 - RNA, 20 nt, Human
cucaggagcccugggaggcu

SEQ ID NO: 1234569 - RNA, 21 nt, Human
cucaggagcccugggaggcuc

SEQ ID NO: 1234570 - RNA, 22 nt, Human
cucaggagcccugggaggcucu

SEQ ID NO: 1234571 - RNA, 23 nt, Human
cucaggagcccugggaggcucug

SEQ ID NO: 1234572 - RNA, 21 nt, Human
cucauuuccaagcaaguauua

SEQ ID NO: 1234573 - RNA, 17 nt, Human
cucauuuccaagcaagu

SEQ ID NO: 1234574 - RNA, 14 nt, Human
cucauuuccaagca

SEQ ID NO: 1234575 - RNA, 13 nt, Human
cucauuuccaagc

SEQ ID NO: 1234576 - RNA, 12 nt, Human
cucauuuccaag

SEQ ID NO: 1234577 - RNA, 12 nt, Human
cucauuucagga

SEQ ID NO: 1234578 - RNA, 13 nt, Human
cucauuucaggau

SEQ ID NO: 1234579 - RNA, 13 nt, Human
cuccaaaccacuu

SEQ ID NO: 1234580 - RNA, 22 nt, Human
cuccaaaccacuuuuugcagcu

SEQ ID NO: 1234581 - RNA, 13 nt, Human
cucaguugcagcc

SEQ ID NO: 1234582 - RNA, 18 nt, Human
cuccaccgcagaaggaag

SEQ ID NO: 1234583 - RNA, 16 nt, Human
cuccaccgcagaagga

SEQ ID NO: 1234584 - RNA, 17 nt, Human
cuccaccgcagaaggaa

SEQ ID NO: 1234585 - RNA, 20 nt, Human
cuccauuuaauaauuauaug

SEQ ID NO: 1234586 - RNA, 15 nt, Human
cuccauggcccugcc

SEQ ID NO: 1234587 - RNA, 16 nt, Human
cuccauggcccugcca

SEQ ID NO: 1234588 - RNA, 19 nt, Human
cuccauggcccugccaugc

SEQ ID NO: 1234589 - RNA, 13 nt, Human
cuccauuuaauaa

SEQ ID NO: 1234590 - RNA, 13 nt, Human
cucccucaaccuc

SEQ ID NO: 1234591 - RNA, 17 nt, Human
cucccucaaccucaucc

SEQ ID NO: 1234592 - RNA, 14 nt, Human
cuauugcauuuaua

SEQ ID NO: 1234593 - RNA, 17 nt, Human
cuauugcauuuauaugu

SEQ ID NO: 1234594 - RNA, 19 nt, Human
cuauugcauuuauauguac

SEQ ID NO: 1234595 - RNA, 19 nt, Human
cuauuucuauauuuucauu

SEQ ID NO: 1234596 - RNA, 20 nt, Human
cuauuucuauauuuucauuc

SEQ ID NO: 1234597 - RNA, 23 nt, Human
cucaacuccgugcuuaaccaaag

SEQ ID NO: 1234598 - RNA, 12 nt, Human
cuauaauuuaaa

SEQ ID NO: 1234599 - RNA, 13 nt, Human
cuauaauuuaaau

SEQ ID NO: 1234600 - RNA, 15 nt, Human
cuauaccaauaaagu

SEQ ID NO: 1234601 - RNA, 16 nt, Human
cuauaccaauaaagug

SEQ ID NO: 1234602 - RNA, 15 nt, Human
cuauacccacccaga

SEQ ID NO: 1234603 - RNA, 16 nt, Human
cuauacccacccagaa

SEQ ID NO: 1234604 - RNA, 19 nt, Human
cuaugaaauauuauguuaa

SEQ ID NO: 1234605 - RNA, 19 nt, Human
cuauauaagacaagaacuc

SEQ ID NO: 1234606 - RNA, 15 nt, Human
cuauagcuaaguaca

SEQ ID NO: 1234607 - RNA, 17 nt, Human
cuauagcuaaguacaca

SEQ ID NO: 1234608 - RNA, 22 nt, Human
cuaugaaguuuuuuuuauacag

SEQ ID NO: 1234609 - RNA, 18 nt, Human
cuaugcugaguuugugcu

SEQ ID NO: 1234610 - RNA, 13 nt, Human
cuaugcugaguuu

SEQ ID NO: 1234611 - RNA, 14 nt, Human
cuaugcugaguuug

SEQ ID NO: 1234612 - RNA, 15 nt, Human
cuaugcugaguuugu

SEQ ID NO: 1234613 - RNA, 20 nt, Human
cuaggaaauauuuauuuuaa

SEQ ID NO: 1234614 - RNA, 19 nt, Human
cuaggaaauauuuauuuua

SEQ ID NO: 1234615 - RNA, 15 nt, Human
cuaggaaauauuuau

SEQ ID NO: 1234616 - RNA, 14 nt, Human
cuaggaaauauuua

SEQ ID NO: 1234617 - RNA, 14 nt, Human
cuagacuggugacu

SEQ ID NO: 1234618 - RNA, 15 nt, Human
cuagacuggugacug

SEQ ID NO: 1234619 - RNA, 17 nt, Human
cuagacuggugacugau

SEQ ID NO: 1234620 - RNA, 18 nt, Human
cuagacuggugacugauu

SEQ ID NO: 1234621 - RNA, 19 nt, Human
cuagacuggugacugauuc

SEQ ID NO: 1234622 - RNA, 22 nt, Human
cuagacuggugacugauucuuc

SEQ ID NO: 1234623 - RNA, 23 nt, Human
cuagacuggugacugauucuuca

SEQ ID NO: 1234624 - RNA, 19 nt, Human
cuagaguuuagcuggaaaa

SEQ ID NO: 1234625 - RNA, 18 nt, Human
cuagaguuuagcuggaaa

SEQ ID NO: 1234626 - RNA, 15 nt, Human
cugccuaaggacuuc

SEQ ID NO: 1234627 - RNA, 19 nt, Human
cugccuaaggacuucuuua

SEQ ID NO: 1234628 - RNA, 12 nt, Human
cugccuaaggac

SEQ ID NO: 1234629 - RNA, 13 nt, Human
cugccuaaggacu

SEQ ID NO: 1234630 - RNA, 14 nt, Human
cugccuaaggacuu

SEQ ID NO: 1234631 - RNA, 22 nt, Human
cugccucucugcaggucccuaa

SEQ ID NO: 1234632 - RNA, 20 nt, Human
cugccucucugcaggucccu

SEQ ID NO: 1234633 - RNA, 21 nt, Human
cugccucucugcaggucccua

SEQ ID NO: 1234634 - RNA, 19 nt, Human
cucccuucaugcauggaaa

SEQ ID NO: 1234635 - RNA, 14 nt, Human
cugcugcugccugc

SEQ ID NO: 1234636 - RNA, 15 nt, Human
cugcugcugccugcc

SEQ ID NO: 1234637 - RNA, 16 nt, Human
cugcugcuacaauguc

SEQ ID NO: 1234638 - RNA, 13 nt, Human
cuggaauuugaaa

SEQ ID NO: 1234639 - RNA, 16 nt, Human
cuggagaugaggccag

SEQ ID NO: 1234640 - RNA, 17 nt, Human
cuggagaugaggccaga

SEQ ID NO: 1234641 - RNA, 18 nt, Human
cuggagaugaggccagac

SEQ ID NO: 1234642 - RNA, 20 nt, Human
cuggagaugaggccagacca

SEQ ID NO: 1234643 - RNA, 19 nt, Human
cuggagaugaggccagacc

SEQ ID NO: 1234644 - RNA, 23 nt, Human
cuggccccacccucguggacacc

SEQ ID NO: 1234645 - RNA, 12 nt, Human
cuggccccaccc

SEQ ID NO: 1234646 - RNA, 14 nt, Human
cuggagugcagugg

SEQ ID NO: 1234647 - RNA, 20 nt, Human
cuguauuuuaaaagaaugau

SEQ ID NO: 1234648 - RNA, 22 nt, Human
cuguauuuuaaaagaaugauua

SEQ ID NO: 1234649 - RNA, 16 nt, Human
cuguauagauuagaau

SEQ ID NO: 1234650 - RNA, 20 nt, Human
cuguauagauuagaauucug

SEQ ID NO: 1234651 - RNA, 16 nt, Human
cugugcaaggccuggu

SEQ ID NO: 1234652 - RNA, 22 nt, Human
cugucuccuaagcuggagugca

SEQ ID NO: 1234653 - RNA, 23 nt, Human
cuguucaugaaagauucaaugcc

SEQ ID NO: 1234654 - RNA, 18 nt, Human
cuguucaugaaagauuca

SEQ ID NO: 1234655 - RNA, 17 nt, Human
cuguucaugaaagauuc

SEQ ID NO: 1234656 - RNA, 15 nt, Human
cuguucauuccucca

SEQ ID NO: 1234657 - RNA, 16 nt, Human
cuguucauuccuccag

SEQ ID NO: 1234658 - RNA, 17 nt, Human
cuguucauuccuccagg

SEQ ID NO: 1234659 - RNA, 22 nt, Human
cuguucauuccuccagguauuc

SEQ ID NO: 1234660 - RNA, 19 nt, Human
cugugugcucaggagcccu

SEQ ID NO: 1234661 - RNA, 20 nt, Human
cugugugcucaggagcccug

SEQ ID NO: 1234662 - RNA, 21 nt, Human
cugugugcucaggagcccugg

SEQ ID NO: 1234663 - RNA, 23 nt, Human
cugugugcucaggagcccuggga

SEQ ID NO: 1234664 - RNA, 15 nt, Human
cuguguggcagucug

SEQ ID NO: 1234665 - RNA, 15 nt, Human
cuucuuuaauuuugg

SEQ ID NO: 1234666 - RNA, 16 nt, Human
cuucuuuaauuuugga

SEQ ID NO: 1234667 - RNA, 17 nt, Human
cuucuuuaauuuuggaa

SEQ ID NO: 1234668 - RNA, 18 nt, Human
cuucuuuaauuuuggaau

SEQ ID NO: 1234669 - RNA, 19 nt, Human
cuucuuuaauuuuggaauu

SEQ ID NO: 1234670 - RNA, 12 nt, Human
cuugaaaaaugc

SEQ ID NO: 1234671 - RNA, 18 nt, Human
cuugaaaaaugcauguug

SEQ ID NO: 1234672 - RNA, 12 nt, Human
cuugaaaauuaa

SEQ ID NO: 1234673 - RNA, 13 nt, Human
cuugaaaauuaac

SEQ ID NO: 1234674 - RNA, 18 nt, Human
cuugaaaauuaacaugaa

SEQ ID NO: 1234675 - RNA, 12 nt, Human
cuuccacccagu

SEQ ID NO: 1234676 - RNA, 14 nt, Human
cuuccacccagugc

SEQ ID NO: 1234677 - RNA, 20 nt, Human
cuucccuuuccugaguccca

SEQ ID NO: 1234678 - RNA, 14 nt, Human
cuucccuuuccuga

SEQ ID NO: 1234679 - RNA, 22 nt, Human
cuuagaugcaguucugaagaag

SEQ ID NO: 1234680 - RNA, 19 nt, Human
cuuauaucuauauuuuaca

SEQ ID NO: 1234681 - RNA, 13 nt, Human
cuuauauuaugga

SEQ ID NO: 1234682 - RNA, 14 nt, Human
cuuugaccugccuc

SEQ ID NO: 1234683 - RNA, 15 nt, Human
cuuugaccugccucc

SEQ ID NO: 1234684 - RNA, 18 nt, Human
cuuugaccugccucccuu

SEQ ID NO: 1234685 - RNA, 22 nt, Human
cuuugcauaacguauaaaagcc

SEQ ID NO: 1234686 - RNA, 20 nt, Human
cuuugucuacaccauuaugu

SEQ ID NO: 1234687 - RNA, 23 nt, Human
cuuugucuacaccauuaugugcg

SEQ ID NO: 1234688 - RNA, 15 nt, Human
cuuugugcugggguu

SEQ ID NO: 1234689 - RNA, 20 nt, Human
cuuugugcugggguuaucug

SEQ ID NO: 1234690 - RNA, 22 nt, Human
cuuugugcugggguuaucugaa

SEQ ID NO: 1234691 - RNA, 14 nt, Human
cuuuggcugcaugc

SEQ ID NO: 1234692 - RNA, 16 nt, Human
cuuuggcugcaugcga

SEQ ID NO: 1234693 - RNA, 16 nt, Human
cuuucucuuucguuac

SEQ ID NO: 1234694 - RNA, 22 nt, Human
cuuguuagaucuaguucacucu

SEQ ID NO: 1234695 - RNA, 16 nt, Human
cuuuaaaaggaaagaa

SEQ ID NO: 1234696 - RNA, 18 nt, Human
cuuuaaaaggaaagaaaa

SEQ ID NO: 1234697 - RNA, 17 nt, Human
cuuuaaaaggaaagaaa

SEQ ID NO: 1234698 - RNA, 17 nt, Human
cuuuaaaauuacaacua

SEQ ID NO: 1234699 - RNA, 19 nt, Human
cuuuaaaauuacaacuaag

SEQ ID NO: 1234700 - RNA, 20 nt, Human
cuuuaaaauuacaacuaagu

SEQ ID NO: 1234701 - RNA, 23 nt, Human
cuuuaucuugaauaauguaagac

SEQ ID NO: 1234702 - RNA, 18 nt, Human
cuuuaucuugaauaaugu

SEQ ID NO: 1234703 - RNA, 21 nt, Human
cuuuaucuugaauaauguaag

SEQ ID NO: 1234704 - RNA, 19 nt, Human
cuugaguuuaaauuguaau

SEQ ID NO: 1234705 - RNA, 12 nt, Human
cuuguguaaaua

SEQ ID NO: 1234706 - RNA, 14 nt, Human
cuuguguaaauaca

SEQ ID NO: 1234707 - RNA, 16 nt, Human
cuuguguaaauacaau

SEQ ID NO: 1234708 - RNA, 21 nt, Human
cuuguguaaauacaauuuugu

SEQ ID NO: 1234709 - RNA, 23 nt, Human
cuugucaauaaaauccauacauu

SEQ ID NO: 1234710 - RNA, 17 nt, Human
cuuguacuuuauuuucu

SEQ ID NO: 1234711 - RNA, 16 nt, Human
gaaacacaacuauauu

SEQ ID NO: 1234712 - RNA, 21 nt, Human
gaaacccugcacccauuagca

SEQ ID NO: 1234713 - RNA, 23 nt, Human
gaaacucguuaauuuguaguguu

SEQ ID NO: 1234714 - RNA, 19 nt, Human
gaaacuaggugcauauuua

SEQ ID NO: 1234715 - RNA, 17 nt, Human
gaaacggaugauuucua

SEQ ID NO: 1234716 - RNA, 18 nt, Human
gaaacggaugauuucuau

SEQ ID NO: 1234717 - RNA, 14 nt, Human
gaaaccuuccaccc

SEQ ID NO: 1234718 - RNA, 17 nt, Human
gaaagagaacuuccaga

SEQ ID NO: 1234719 - RNA, 13 nt, Human
gaaagaggaagca

SEQ ID NO: 1234720 - RNA, 21 nt, Human
gaaagaguacucuuguuuccu

SEQ ID NO: 1234721 - RNA, 19 nt, Human
gaaagcuauauaagacaag

SEQ ID NO: 1234722 - RNA, 17 nt, Human
gaaagcgccuccaaccc

SEQ ID NO: 1234723 - RNA, 22 nt, Human
gaaagcgccuccaacccuagca

SEQ ID NO: 1234724 - RNA, 15 nt, Human
gaaaaguugaauuuu

SEQ ID NO: 1234725 - RNA, 15 nt, Human
gaaaaguuuaauauu

SEQ ID NO: 1234726 - RNA, 14 nt, Human
gaaaaguugaauuu

SEQ ID NO: 1234727 - RNA, 19 nt, Human
gaaaaguuuaauauuaaag

SEQ ID NO: 1234728 - RNA, 20 nt, Human
gaaaaguuuaauauuaaagc

SEQ ID NO: 1234729 - RNA, 21 nt, Human
gaaaaguuuaauauuaaagcc

SEQ ID NO: 1234730 - RNA, 22 nt, Human
gaaaaguuuaauauuaaagcca

SEQ ID NO: 1234731 - RNA, 18 nt, Human
gaaaaucuuauaauuuaa

SEQ ID NO: 1234732 - RNA, 22 nt, Human
gaaaauauuguuuuacaauagu

SEQ ID NO: 1234733 - RNA, 15 nt, Human
gaaaauauuguuuua

SEQ ID NO: 1234734 - RNA, 23 nt, Human
gaaaaguuuaauauuaaagccau

SEQ ID NO: 1234735 - RNA, 16 nt, Human
cuuuuuggcauaacau

SEQ ID NO: 1234736 - RNA, 20 nt, Human
cuuuuuggcauaacauaaau

SEQ ID NO: 1234737 - RNA, 22 nt, Human
cuuuuuggcauaacauaaaucu

SEQ ID NO: 1234738 - RNA, 17 nt, Human
cuuuuuauggccuguga

SEQ ID NO: 1234739 - RNA, 16 nt, Human
gacaugggacauuugc

SEQ ID NO: 1234740 - RNA, 17 nt, Human
gacaugggacauuugcu

SEQ ID NO: 1234741 - RNA, 16 nt, Human
gaccaccucucaauau

SEQ ID NO: 1234742 - RNA, 22 nt, Human
gacaauugagguaaguuuuuug

SEQ ID NO: 1234743 - RNA, 16 nt, Human
gacaaggaaaaaauaa

SEQ ID NO: 1234744 - RNA, 20 nt, Human
gaauuucuaggacugaauua

SEQ ID NO: 1234745 - RNA, 19 nt, Human
gaauuucuaggacugaauu

SEQ ID NO: 1234746 - RNA, 20 nt, Human
gaauuugauaugugaacagu

SEQ ID NO: 1234747 - RNA, 20 nt, Human
gaauuugugaagguggaaau

SEQ ID NO: 1234748 - RNA, 13 nt, Human
gaauucuguauag

SEQ ID NO: 1234749 - RNA, 14 nt, Human
gaauucuguauaga

SEQ ID NO: 1234750 - RNA, 21 nt, Human
gaauucuguauagauuagaau

SEQ ID NO: 1234751 - RNA, 22 nt, Human
gaauucuguauagauuagaauu

SEQ ID NO: 1234752 - RNA, 16 nt, Human
gaauuggagcucgugg

SEQ ID NO: 1234753 - RNA, 14 nt, Human
gaauggcuuuguau

SEQ ID NO: 1234754 - RNA, 16 nt, Human
gaauggcuuuguauag

SEQ ID NO: 1234755 - RNA, 17 nt, Human
gaauggcuuuguauaga

SEQ ID NO: 1234756 - RNA, 21 nt, Human
gaauggcuuuguauagaaccu

SEQ ID NO: 1234757 - RNA, 16 nt, Human
gacugcauuauauuua

SEQ ID NO: 1234758 - RNA, 14 nt, Human
gacugcauuauauu

SEQ ID NO: 1234759 - RNA, 24 nt, Human
gacugcauuauauuuauuacugua

SEQ ID NO: 1234760 - RNA, 17 nt, Human
gacuggguaggaaagag

SEQ ID NO: 1234761 - RNA, 15 nt, Human
gacuuggccccugcc

SEQ ID NO: 1234762 - RNA, 16 nt, Human
gacuucuuuaauuuug

SEQ ID NO: 1234763 - RNA, 17 nt, Human
gacuucuuuaauuuugg

SEQ ID NO: 1234764 - RNA, 18 nt, Human
gacuucuuuaauuuugga

SEQ ID NO: 1234765 - RNA, 19 nt, Human
gacuucuuuaauuuuggaa

SEQ ID NO: 1234766 - RNA, 20 nt, Human
gacuucuuuaauuuuggaau

SEQ ID NO: 1234767 - RNA, 21 nt, Human
gacuucuuuaauuuuggaauu

SEQ ID NO: 1234768 - RNA, 21 nt, Human
gagaaaugaaaaaauauauau

SEQ ID NO: 1234769 - RNA, 22 nt, Human
gagaaccuagggugauauuaac

SEQ ID NO: 1234770 - RNA, 21 nt, Human
gagaaccuagggugauauuaa

SEQ ID NO: 1234771 - RNA, 14 nt, Human
gagaaauuuauaaa

SEQ ID NO: 1234772 - RNA, 13 nt, Human
gagaagaacugaa

SEQ ID NO: 1234773 - RNA, 16 nt, Human
gagaagaaagaacgga

SEQ ID NO: 1234774 - RNA, 21 nt, Human
gagaagaaagaacggaagaag

SEQ ID NO: 1234775 - RNA, 23 nt, Human
gagaacuuccagauccuggaaau

SEQ ID NO: 1234776 - RNA, 22 nt, Human
gagaacuuccagauccuggaaa

SEQ ID NO: 1234777 - RNA, 17 nt, Human
gagaaugagagacacac

SEQ ID NO: 1234778 - RNA, 13 nt, Human
gagaguguugaaa

SEQ ID NO: 1234779 - RNA, 15 nt, Human
gagacuggguaggaa

SEQ ID NO: 1234780 - RNA, 21 nt, Human
gagaaugagagacacacugaa

SEQ ID NO: 1234781 - RNA, 20 nt, Human
gagaaugagagacacacuga

SEQ ID NO: 1234782 - RNA, 20 nt, Human
gagcaagaccccaucucaaa

SEQ ID NO: 1234783 - RNA, 13 nt, Human
gagcacugcucca

SEQ ID NO: 1234784 - RNA, 15 nt, Human
gagaugaggccagac

SEQ ID NO: 1234785 - RNA, 13 nt, Human
gagaugaggccag

SEQ ID NO: 1234786 - RNA, 14 nt, Human
gagaugaggccaga

SEQ ID NO: 1234787 - RNA, 21 nt, Human
gagcccuucuauacccaccca

SEQ ID NO: 1234788 - RNA, 22 nt, Human
gagcccuucuauacccacccag

SEQ ID NO: 1234789 - RNA, 23 nt, Human
gagcccuucuauacccacccaga

SEQ ID NO: 1234790 - RNA, 16 nt, Human
gaggcagagaagaaag

SEQ ID NO: 1234791 - RNA, 18 nt, Human
gaggcagagaagaaagaa

SEQ ID NO: 1234792 - RNA, 21 nt, Human
gaggcgcaugaauuugugaag

SEQ ID NO: 1234793 - RNA, 23 nt, Human
gaggcugggaauggaggggcaga

SEQ ID NO: 1234794 - RNA, 22 nt, Human
gaggcugggaauggaggggcag

SEQ ID NO: 1234795 - RNA, 12 nt, Human
gagguaaguuuu

SEQ ID NO: 1234796 - RNA, 18 nt, Human
gagguugaaaaacaaaau

SEQ ID NO: 1234797 - RNA, 22 nt, Human
gaguaauccaagcaaaugugaa

SEQ ID NO: 1234798 - RNA, 21 nt, Human
gagucuauuuacggaacucaa

SEQ ID NO: 1234799 - RNA, 24 nt, Human
gauaugauucaaaugucuauaaac

SEQ ID NO: 1234800 - RNA, 22 nt, Human
gauaugauucaaaugucuauaa

SEQ ID NO: 1234801 - RNA, 14 nt, Human
gauaugauucaaau

SEQ ID NO: 1234802 - RNA, 15 nt, Human
gauauaagugugugu

SEQ ID NO: 1234803 - RNA, 17 nt, Human
gauauaaguguguguuu

SEQ ID NO: 1234804 - RNA, 22 nt, Human
gauaaauggcuuccuggcaaua

SEQ ID NO: 1234805 - RNA, 20 nt, Human
gauaaaugccaucaauaaaa

SEQ ID NO: 1234806 - RNA, 15 nt, Human
gauaaaugauagaca

SEQ ID NO: 1234807 - RNA, 11 nt, Human
gauaaaugcca

SEQ ID NO: 1234808 - RNA, 15 nt, Human
gauaaaugccaucaa

SEQ ID NO: 1234809 - RNA, 16 nt, Human
gaguguugaaacggau

SEQ ID NO: 1234810 - RNA, 23 nt, Human
gcacaaauucugucucuggauua

SEQ ID NO: 1234811 - RNA, 13 nt, Human
gcaauuuaaaugu

SEQ ID NO: 1234812 - RNA, 18 nt, Human
gcaauuuaaauguuauga

SEQ ID NO: 1234813 - RNA, 16 nt, Human
gcaauuaauuccuuca

SEQ ID NO: 1234814 - RNA, 20 nt, Human
gcaauuacaacggagucaaa

SEQ ID NO: 1234815 - RNA, 19 nt, Human
gcaauuaauuccuucagca

SEQ ID NO: 1234816 - RNA, 13 nt, Human
gcaacucugaagg

SEQ ID NO: 1234817 - RNA, 22 nt, Human
gcaccccagcuggggccaggcu

SEQ ID NO: 1234818 - RNA, 19 nt, Human
gcacuguggguagacacac

SEQ ID NO: 1234819 - RNA, 12 nt, Human
gcagaaggaagg

SEQ ID NO: 1234820 - RNA, 13 nt, Human
gcagaaggaaggc

SEQ ID NO: 1234821 - RNA, 15 nt, Human
gcagaaggaaggcag

SEQ ID NO: 1234822 - RNA, 22 nt, Human
gcagaaggaaggcagggaggag

SEQ ID NO: 1234823 - RNA, 16 nt, Human
gcagaaggaaggcagg

SEQ ID NO: 1234824 - RNA, 14 nt, Human
gcacuggccccacc

SEQ ID NO: 1234825 - RNA, 16 nt, Human
gcaaauugucacagga

SEQ ID NO: 1234826 - RNA, 13 nt, Human
gcaacaauaaaua

SEQ ID NO: 1234827 - RNA, 20 nt, Human
gauucaaugccccugaauuu

SEQ ID NO: 1234828 - RNA, 19 nt, Human
gauucaaugccccugaauu

SEQ ID NO: 1234829 - RNA, 21 nt, Human
gauucaaugccccugaauuua

SEQ ID NO: 1234830 - RNA, 14 nt, Human
gauuacacacguga

SEQ ID NO: 1234831 - RNA, 16 nt, Human
gauguuuaguaaucau

SEQ ID NO: 1234832 - RNA, 22 nt, Human
gaugguucccuugaugaagaag

SEQ ID NO: 1234833 - RNA, 17 nt, Human
gaugggguuucaccaug

SEQ ID NO: 1234834 - RNA, 12 nt, Human
gcccuggacugu

SEQ ID NO: 1234835 - RNA, 16 nt, Human
gcccuggacugugugc

SEQ ID NO: 1234836 - RNA, 22 nt, Human
gcccuggacugugugcucagga

SEQ ID NO: 1234837 - RNA, 13 nt, Human
gcccugggaggcu

SEQ ID NO: 1234838 - RNA, 14 nt, Human
gcccugggaggcuc

SEQ ID NO: 1234839 - RNA, 15 nt, Human
gcccugggaggcucu

SEQ ID NO: 1234840 - RNA, 16 nt, Human
gcccugggaggcucug

SEQ ID NO: 1234841 - RNA, 23 nt, Human
gcccugggaggcucuggagccca

SEQ ID NO: 1234842 - RNA, 17 nt, Human
gcccugggaggcucugg

SEQ ID NO: 1234843 - RNA, 18 nt, Human
gcccugggaggcucugga

SEQ ID NO: 1234844 - RNA, 19 nt, Human
gcccugggaggcucuggag

SEQ ID NO: 1234845 - RNA, 21 nt, Human
gcccugggaggcucuggagcc

SEQ ID NO: 1234846 - RNA, 19 nt, Human
gccucaccagcccuggcaa

SEQ ID NO: 1234847 - RNA, 19 nt, Human
gccucucugcaggucccua

SEQ ID NO: 1234848 - RNA, 22 nt, Human
gccuggggcugaggcugaggca

SEQ ID NO: 1234849 - RNA, 18 nt, Human
gccugcuuuuuauggccu

SEQ ID NO: 1234850 - RNA, 19 nt, Human
gccugcuuuuuauggccug

SEQ ID NO: 1234851 - RNA, 22 nt, Human
gccugcuuuuuauggccuguga

SEQ ID NO: 1234852 - RNA, 13 nt, Human
gccugauuaaaga

SEQ ID NO: 1234853 - RNA, 16 nt, Human
gccugauuaaagaaug

SEQ ID NO: 1234854 - RNA, 23 nt, Human
gccugcacggugaauggcuuugu

SEQ ID NO: 1234855 - RNA, 23 nt, Human
gccucucugcaggucccuaauaa

SEQ ID NO: 1234856 - RNA, 20 nt, Human
gccucucugcaggucccuaa

SEQ ID NO: 1234857 - RNA, 21 nt, Human
gccucucugcaggucccuaau

SEQ ID NO: 1234858 - RNA, 20 nt, Human
gccugagugacagagcaaga

SEQ ID NO: 1234859 - RNA, 17 nt, Human
gcucuccuccaccucaa

SEQ ID NO: 1234860 - RNA, 14 nt, Human
gcucuugaugccug

SEQ ID NO: 1234861 - RNA, 15 nt, Human
gcucuugaugccugg

SEQ ID NO: 1234862 - RNA, 16 nt, Human
gcucuugaugccuggc

SEQ ID NO: 1234863 - RNA, 17 nt, Human
gcucuugaugccuggcg

SEQ ID NO: 1234864 - RNA, 16 nt, Human
gcugauggagaaggaa

SEQ ID NO: 1234865 - RNA, 17 nt, Human
gcugauggagaaggaag

SEQ ID NO: 1234866 - RNA, 23 nt, Human
gccugugagcuaggaauuguguu

SEQ ID NO: 1234867 - RNA, 14 nt, Human
gcuaagcauuccaa

SEQ ID NO: 1234868 - RNA, 11 nt, Human
gcuaaggacuu

SEQ ID NO: 1234869 - RNA, 20 nt, Human
gcuccauuuuuagugaaaua

SEQ ID NO: 1234870 - RNA, 14 nt, Human
gcuccaagaauuuc

SEQ ID NO: 1234871 - RNA, 18 nt, Human
gcuuaugcuuaaauucaa

SEQ ID NO: 1234872 - RNA, 17 nt, Human
gcuuauaauaaaggacu

SEQ ID NO: 1234873 - RNA, 20 nt, Human
gcugucuacacuaagagaga

SEQ ID NO: 1234874 - RNA, 12 nt, Human
gcuguucaugaa

SEQ ID NO: 1234875 - RNA, 21 nt, Human
gcuguucaugaaagauucaau

SEQ ID NO: 1234876 - RNA, 14 nt, Human
ggaaaaguuuaaua

SEQ ID NO: 1234877 - RNA, 18 nt, Human
ggaaaaguuuaauauuaa

SEQ ID NO: 1234878 - RNA, 13 nt, Human
ggaacauaaaaag

SEQ ID NO: 1234879 - RNA, 18 nt, Human
ggaacauaaaaaggacau

SEQ ID NO: 1234880 - RNA, 16 nt, Human
gcuuuucccaaaagcc

SEQ ID NO: 1234881 - RNA, 15 nt, Human
ggaaaacauuccauc

SEQ ID NO: 1234882 - RNA, 23 nt, Human
gcuuucagauacuggauuguacu

SEQ ID NO: 1234883 - RNA, 14 nt, Human
gcuuucagauacug

SEQ ID NO: 1234884 - RNA, 18 nt, Human
gcuuucagauacuggauu

SEQ ID NO: 1234885 - RNA, 14 nt, Human
ggaauggaggggca

SEQ ID NO: 1234886 - RNA, 16 nt, Human
ggaauggaggggcaga

SEQ ID NO: 1234887 - RNA, 17 nt, Human
ggaauggaggggcagag

SEQ ID NO: 1234888 - RNA, 21 nt, Human
ggaauggaggggcagagccag

SEQ ID NO: 1234889 - RNA, 19 nt, Human
ggaauuacgugcucugugg

SEQ ID NO: 1234890 - RNA, 12 nt, Human
ggaauucuguau

SEQ ID NO: 1234891 - RNA, 15 nt, Human
ggaauucuguauaga

SEQ ID NO: 1234892 - RNA, 17 nt, Human
ggaauucuguauagauu

SEQ ID NO: 1234893 - RNA, 17 nt, Human
ggacaaaauggaauacu

SEQ ID NO: 1234894 - RNA, 16 nt, Human
ggacaaaauggaauac

SEQ ID NO: 1234895 - RNA, 19 nt, Human
ggaauuuucaucuaggauu

SEQ ID NO: 1234896 - RNA, 15 nt, Human
ggacacuacacccag

SEQ ID NO: 1234897 - RNA, 16 nt, Human
ggacacuacacccagc

SEQ ID NO: 1234898 - RNA, 17 nt, Human
ggacacuacacccagca

SEQ ID NO: 1234899 - RNA, 18 nt, Human
ggacacuacacccagcaa

SEQ ID NO: 1234900 - RNA, 19 nt, Human
ggacacuacacccagcaau

SEQ ID NO: 1234901 - RNA, 20 nt, Human
ggacacuacacccagcaaua

SEQ ID NO: 1234902 - RNA, 21 nt, Human
ggacacuacacccagcaauag

SEQ ID NO: 1234903 - RNA, 12 nt, Human
ggaauuguguuu

SEQ ID NO: 1234904 - RNA, 22 nt, Human
ggaauuggagcucgugggacag

SEQ ID NO: 1234905 - RNA, 16 nt, Human
ggaauuggagcucgug

SEQ ID NO: 1234906 - RNA, 18 nt, Human
ggaagugcuaauuuugaa

SEQ ID NO: 1234907 - RNA, 17 nt, Human
ggaaggcagggaggagg

SEQ ID NO: 1234908 - RNA, 21 nt, Human
ggaaggcagggaggaggcaga

SEQ ID NO: 1234909 - RNA, 16 nt, Human
ggaacgcguugaaauu

SEQ ID NO: 1234910 - RNA, 22 nt, Human
ggacacuacacccagcaauaga

SEQ ID NO: 1234911 - RNA, 16 nt, Human
ggacauuugcucaugg

SEQ ID NO: 1234912 - RNA, 16 nt, Human
ggaccaaaaaccagua

SEQ ID NO: 1234913 - RNA, 23 nt, Human
ggaccaaaaaccaguauuguaca

SEQ ID NO: 1234914 - RNA, 15 nt, Human
ggacuguggugacuu

SEQ ID NO: 1234915 - RNA, 17 nt, Human
ggacuguggugacuuug

SEQ ID NO: 1234916 - RNA, 21 nt, Human
ggacuguggugacuuuggaua

SEQ ID NO: 1234917 - RNA, 22 nt, Human
ggacuguggugacuuuggauaa

SEQ ID NO: 1234918 - RNA, 17 nt, Human
ggacugugugcucagga

SEQ ID NO: 1234919 - RNA, 14 nt, Human
ggacuguggugacu

SEQ ID NO: 1234920 - RNA, 14 nt, Human
ggagaugaggccag

SEQ ID NO: 1234921 - RNA, 15 nt, Human
ggagaugaggccaga

SEQ ID NO: 1234922 - RNA, 16 nt, Human
ggagaugaggccagac

SEQ ID NO: 1234923 - RNA, 19 nt, Human
ggcaaucauggugcucaga

SEQ ID NO: 1234924 - RNA, 16 nt, Human
ggauucuuaaaguuga

SEQ ID NO: 1234925 - RNA, 18 nt, Human
ggauucuuaaaguugaau

SEQ ID NO: 1234926 - RNA, 19 nt, Human
ggauucuuaaaguugaauu

SEQ ID NO: 1234927 - RNA, 20 nt, Human
ggauucuuaaaguugaauuu

SEQ ID NO: 1234928 - RNA, 18 nt, Human
ggagaugaggccagacca

SEQ ID NO: 1234929 - RNA, 11 nt, Human
ggccugugagc

SEQ ID NO: 1234930 - RNA, 20 nt, Human
ggccuguggaucaaauccag

SEQ ID NO: 1234931 - RNA, 23 nt, Human
guacuuuauuuucuauaauuuaa

SEQ ID NO: 1234932 - RNA, 12 nt, Human
guacuuuuuggc

SEQ ID NO: 1234933 - RNA, 21 nt, Human
guacuuuuuggcauaacauaa

SEQ ID NO: 1234934 - RNA, 14 nt, Human
guacuugcucuuga

SEQ ID NO: 1234935 - RNA, 22 nt, Human
guacuugcucuugaugccuggc

SEQ ID NO: 1234936 - RNA, 15 nt, Human
guacuugcucuugau

SEQ ID NO: 1234937 - RNA, 16 nt, Human
guacuugcucuugaug

SEQ ID NO: 1234938 - RNA, 18 nt, Human
guacuugcucuugaugcc

SEQ ID NO: 1234939 - RNA, 19 nt, Human
guacuugcucuugaugccu

SEQ ID NO: 1234940 - RNA, 15 nt, Human
guacagacagaaaaa

SEQ ID NO: 1234941 - RNA, 13 nt, Human
guaauuauaucug

SEQ ID NO: 1234942 - RNA, 15 nt, Human
guaauuggaaaggca

SEQ ID NO: 1234943 - RNA, 23 nt, Human
guaauucuaccaaggucuucuua

SEQ ID NO: 1234944 - RNA, 11 nt, Human
guaaugaaaac

SEQ ID NO: 1234945 - RNA, 13 nt, Human
guaaugaaaacca

SEQ ID NO: 1234946 - RNA, 19 nt, Human
guaaugauaacuggaaacu

SEQ ID NO: 1234947 - RNA, 20 nt, Human
gguuuucacauuggaaacaa

SEQ ID NO: 1234948 - RNA, 17 nt, Human
guaaaaauggaaacuau

SEQ ID NO: 1234949 - RNA, 18 nt, Human
guaaaaacaaagaaauua

SEQ ID NO: 1234950 - RNA, 20 nt, Human
guaaaaacaaagaaauuaug

SEQ ID NO: 1234951 - RNA, 23 nt, Human
guaagcauaagcuuaugcuuaaa

SEQ ID NO: 1234952 - RNA, 16 nt, Human
guaaaucccauuauuc

SEQ ID NO: 1234953 - RNA, 17 nt, Human
guaaaucccauuauuca

SEQ ID NO: 1234954 - RNA, 18 nt, Human
guaaaucccauuauucaa

SEQ ID NO: 1234955 - RNA, 19 nt, Human
guaaaucccauuauucaaa

SEQ ID NO: 1234956 - RNA, 20 nt, Human
guaaaucccauuauucaaag

SEQ ID NO: 1234957 - RNA, 21 nt, Human
guaaaucccauuauucaaagu

SEQ ID NO: 1234958 - RNA, 21 nt, Human
guaaauacaauuuuguuucug

SEQ ID NO: 1234959 - RNA, 16 nt, Human
guaaaauaaaaggucg

SEQ ID NO: 1234960 - RNA, 22 nt, Human
guaaauacaauuuuguuucugu

SEQ ID NO: 1234961 - RNA, 23 nt, Human
guaaauacaauuuuguuucugua

SEQ ID NO: 1234962 - RNA, 15 nt, Human
guaaaucccauuauu

SEQ ID NO: 1234963 - RNA, 14 nt, Human
ggugaauggcuuug

SEQ ID NO: 1234964 - RNA, 17 nt, Human
ggugaauggcuuuguau

SEQ ID NO: 1234965 - RNA, 20 nt, Human
ggugaauggcuuuguauaga

SEQ ID NO: 1234966 - RNA, 18 nt, Human
ggucccuaauaaagcugu

SEQ ID NO: 1234967 - RNA, 12 nt, Human
ggucccuaauaa

SEQ ID NO: 1234968 - RNA, 13 nt, Human
ggucccuaauaaa

SEQ ID NO: 1234969 - RNA, 16 nt, Human
ggucccuaauaaagcu

SEQ ID NO: 1234970 - RNA, 17 nt, Human
ggucccuaauaaagcug

SEQ ID NO: 1234971 - RNA, 16 nt, Human
gguccgugcuaaggac

SEQ ID NO: 1234972 - RNA, 17 nt, Human
gguccgugcuaaggacu

SEQ ID NO: 1234973 - RNA, 18 nt, Human
gguccgugcuaaggacuu

SEQ ID NO: 1234974 - RNA, 19 nt, Human
ggugcccugcuuucagaua

SEQ ID NO: 1234975 - RNA, 22 nt, Human
gguagacacacaugaaguccaa

SEQ ID NO: 1234976 - RNA, 15 nt, Human
gguagacacacauga

SEQ ID NO: 1234977 - RNA, 20 nt, Human
ggguuucaccauguuggcca

SEQ ID NO: 1234978 - RNA, 22 nt, Human
gguacuucaaauccuugaagau

SEQ ID NO: 1234979 - RNA, 19 nt, Human
gggugcugggccccugccu

SEQ ID NO: 1234980 - RNA, 22 nt, Human
gggcuccuccaggguggcagca

SEQ ID NO: 1234981 - RNA, 23 nt, Human
gggcuccuccaggguggcagcaa

SEQ ID NO: 1234982 - RNA, 20 nt, Human
gggcuuauaauaaaggacug

SEQ ID NO: 1234983 - RNA, 16 nt, Human
gggccuuuggcaggug

SEQ ID NO: 1234984 - RNA, 20 nt, Human
ggggcuuauaauaaaggacu

SEQ ID NO: 1234985 - RNA, 13 nt, Human
ggggcagagccag

SEQ ID NO: 1234986 - RNA, 14 nt, Human
ggggcagagccagg

SEQ ID NO: 1234987 - RNA, 15 nt, Human
ggggcagagccagga

SEQ ID NO: 1234988 - RNA, 16 nt, Human
ggggcagagccaggaa

SEQ ID NO: 1234989 - RNA, 18 nt, Human
guauuuuaaaagaaugau

SEQ ID NO: 1234990 - RNA, 17 nt, Human
guauuuuaaaagaauga

SEQ ID NO: 1234991 - RNA, 16 nt, Human
guauuuuaaaagaaug

SEQ ID NO: 1234992 - RNA, 21 nt, Human
gucaauaaaauccauacauuu

SEQ ID NO: 1234993 - RNA, 15 nt, Human
gucaauaaaauccau

SEQ ID NO: 1234994 - RNA, 20 nt, Human
gucacccaggcuggacugca

SEQ ID NO: 1234995 - RNA, 20 nt, Human
gucacccagguuggagugca

SEQ ID NO: 1234996 - RNA, 14 nt, Human
gucaccucauggaa

SEQ ID NO: 1234997 - RNA, 15 nt, Human
guauuauguguguuu

SEQ ID NO: 1234998 - RNA, 19 nt, Human
guauucaaaaauuaucuau

SEQ ID NO: 1234999 - RNA, 22 nt, Human
guauuacaguggggaaugaaga

SEQ ID NO: 1235000 - RNA, 20 nt, Human
guauuacaguggggaaugaa

SEQ ID NO: 1235001 - RNA, 22 nt, Human
guauuucuaugaaauauuaugu

SEQ ID NO: 1235002 - RNA, 17 nt, Human
guauuucuaugaaauau

SEQ ID NO: 1235003 - RNA, 16 nt, Human
guauucguuaucuaau

SEQ ID NO: 1235004 - RNA, 19 nt, Human
gucacguuuggugcuucuc

SEQ ID NO: 1235005 - RNA, 21 nt, Human
gucucuauaccaauaaaguga

SEQ ID NO: 1235006 - RNA, 13 nt, Human
gucugacuguuuc

SEQ ID NO: 1235007 - RNA, 23 nt, Human
gucuacacuaagagagaaugaga

SEQ ID NO: 1235008 - RNA, 17 nt, Human
gucuacacuaagagaga

SEQ ID NO: 1235009 - RNA, 13 nt, Human
gucucagauuuua

SEQ ID NO: 1235010 - RNA, 14 nt, Human
gucucagauuuuau

SEQ ID NO: 1235011 - RNA, 20 nt, Human
gugaaacucguuaauuugua

SEQ ID NO: 1235012 - RNA, 19 nt, Human
gugaaagaaaauaacaaua

SEQ ID NO: 1235013 - RNA, 13 nt, Human
gugaaagaaguaa

SEQ ID NO: 1235014 - RNA, 13 nt, Human
gugaaaucauuca

SEQ ID NO: 1235015 - RNA, 18 nt, Human
gugaaauuauucauaauu

SEQ ID NO: 1235016 - RNA, 20 nt, Human
gugaaauuauucauaauuau

SEQ ID NO: 1235017 - RNA, 13 nt, Human
gugaauggcuuug

SEQ ID NO: 1235018 - RNA, 14 nt, Human
gugaauggcuuugu

SEQ ID NO: 1235019 - RNA, 17 nt, Human
gugaauggcuuuguaua

SEQ ID NO: 1235020 - RNA, 18 nt, Human
gugaauggcuuuguauag

SEQ ID NO: 1235021 - RNA, 19 nt, Human
gugaauggcuuuguauaga

SEQ ID NO: 1235022 - RNA, 16 nt, Human
gugagcagucaggaaa

SEQ ID NO: 1235023 - RNA, 16 nt, Human
gugacaagcucacaga

SEQ ID NO: 1235024 - RNA, 24 nt, Human
gugcaguggcaucaucucagcuca

SEQ ID NO: 1235025 - RNA, 23 nt, Human
gugcagggccuguaaucccagca

SEQ ID NO: 1235026 - RNA, 18 nt, Human
gugcaaauugucacagga

SEQ ID NO: 1235027 - RNA, 24 nt, Human
gugcaguggcgcgaucucagcuca

SEQ ID NO: 1235028 - RNA, 24 nt, Human
gugcaguggcgugaucucagcuca

SEQ ID NO: 1235029 - RNA, 19 nt, Human
guggaacauaaaaaggaca

SEQ ID NO: 1235030 - RNA, 20 nt, Human
guggaacauaaaaaggacau

SEQ ID NO: 1235031 - RNA, 21 nt, Human
guggaacauaaaaaggacauc

SEQ ID NO: 1235032 - RNA, 11 nt, Human
guggcagucug

SEQ ID NO: 1235033 - RNA, 19 nt, Human
guggcaucaucucagcuca

SEQ ID NO: 1235034 - RNA, 22 nt, Human
ucaccgacugaaaauauuguuu

SEQ ID NO: 1235035 - RNA, 14 nt, Human
ucaccagagacuuu

SEQ ID NO: 1235036 - RNA, 15 nt, Human
ucaccagagacuuua

SEQ ID NO: 1235037 - RNA, 19 nt, Human
ucaccagagacuuuagggg

SEQ ID NO: 1235038 - RNA, 17 nt, Human
ucacauuggaaacaagu

SEQ ID NO: 1235039 - RNA, 18 nt, Human
ucacauugguguuguacu

SEQ ID NO: 1235040 - RNA, 22 nt, Human
ucacauuguauucagaguugau

SEQ ID NO: 1235041 - RNA, 12 nt, Human
ucacauuuaaau

SEQ ID NO: 1235042 - RNA, 14 nt, Human
ucacauuggaaaca

SEQ ID NO: 1235043 - RNA, 14 nt, Human
ucaauaaaauccau

SEQ ID NO: 1235044 - RNA, 19 nt, Human
ucaauaaaaaauuaugaca

SEQ ID NO: 1235045 - RNA, 23 nt, Human
ucaauuaaaauagucucuuuaaa

SEQ ID NO: 1235046 - RNA, 22 nt, Human
ucaacuccaaacugacucuuaa

SEQ ID NO: 1235047 - RNA, 13 nt, Human
ucaauaaaaaauu

SEQ ID NO: 1235048 - RNA, 14 nt, Human
ucaauaaaaaauua

SEQ ID NO: 1235049 - RNA, 16 nt, Human
ucaauaaaaaauuaug

SEQ ID NO: 1235050 - RNA, 16 nt, Human
ucaaauccuugaagau

SEQ ID NO: 1235051 - RNA, 17 nt, Human
ucaaacauauauaacaa

SEQ ID NO: 1235052 - RNA, 20 nt, Human
ucaaaccaaaucacugaacu

SEQ ID NO: 1235053 - RNA, 16 nt, Human
uauguucagauuauug

SEQ ID NO: 1235054 - RNA, 19 nt, Human
uauguuagugcaaauuguc

SEQ ID NO: 1235055 - RNA, 12 nt, Human
uauguuaaaacu

SEQ ID NO: 1235056 - RNA, 14 nt, Human
uauggaggcaggag

SEQ ID NO: 1235057 - RNA, 13 nt, Human
uauguguguuuua

SEQ ID NO: 1235058 - RNA, 17 nt, Human
uauuauauuuacaaaug

SEQ ID NO: 1235059 - RNA, 16 nt, Human
uauuaagcauauauuu

SEQ ID NO: 1235060 - RNA, 16 nt, Human
uauuauguuaaaacug

SEQ ID NO: 1235061 - RNA, 22 nt, Human
uauuauguaaaucccauuauuc

SEQ ID NO: 1235062 - RNA, 20 nt, Human
uauuauggaggcaggaguuu

SEQ ID NO: 1235063 - RNA, 12 nt, Human
uauuauguaaau

SEQ ID NO: 1235064 - RNA, 15 nt, Human
uauuauguaaauccc

SEQ ID NO: 1235065 - RNA, 20 nt, Human
uauuaugaaacuuguguaaa

SEQ ID NO: 1235066 - RNA, 21 nt, Human
uauuaugaaacuuguguaaau

SEQ ID NO: 1235067 - RNA, 22 nt, Human
uauuaugaaacuuguguaaaua

SEQ ID NO: 1235068 - RNA, 12 nt, Human
uauuaugaaacu

SEQ ID NO: 1235069 - RNA, 13 nt, Human
uauugcauuuaua

SEQ ID NO: 1235070 - RNA, 17 nt, Human
uauugcauuuauaugua

SEQ ID NO: 1235071 - RNA, 19 nt, Human
uauugugcgcuaaacuuuu

SEQ ID NO: 1235072 - RNA, 22 nt, Human
uauugugcgcuaaacuuuucug

SEQ ID NO: 1235073 - RNA, 23 nt, Human
uauugugcgcuaaacuuuucuga

SEQ ID NO: 1235074 - RNA, 14 nt, Human
uauuuauuacugua

SEQ ID NO: 1235075 - RNA, 13 nt, Human
uauuucuaugaaa

SEQ ID NO: 1235076 - RNA, 16 nt, Human
uauuugaaccaauaaa

SEQ ID NO: 1235077 - RNA, 21 nt, Human
uauuucuaugaaauauuaugu

SEQ ID NO: 1235078 - RNA, 15 nt, Human
uauuucuaugaaaua

SEQ ID NO: 1235079 - RNA, 14 nt, Human
uauuucuaugaaau

SEQ ID NO: 1235080 - RNA, 13 nt, Human
uauaugcuucugu

SEQ ID NO: 1235081 - RNA, 14 nt, Human
uauauguguaugca

SEQ ID NO: 1235082 - RNA, 13 nt, Human
uauauaacaaugc

SEQ ID NO: 1235083 - RNA, 18 nt, Human
uauaucugaggaauucug

SEQ ID NO: 1235084 - RNA, 19 nt, Human
uauaucugaggaauucugu

SEQ ID NO: 1235085 - RNA, 20 nt, Human
uauaucugaggaauucugua

SEQ ID NO: 1235086 - RNA, 21 nt, Human
uauaucugaggaauucuguau

SEQ ID NO: 1235087 - RNA, 22 nt, Human
uauaucugaggaauucuguaua

SEQ ID NO: 1235088 - RNA, 17 nt, Human
uauacuauaguaccagu

SEQ ID NO: 1235089 - RNA, 17 nt, Human
uaguugccuuaaaauaa

SEQ ID NO: 1235090 - RNA, 14 nt, Human
uauaauaaaggacu

SEQ ID NO: 1235091 - RNA, 19 nt, Human
uauaauaaaggacuguaau

SEQ ID NO: 1235092 - RNA, 22 nt, Human
uauaauaaaggacuguaaucuu

SEQ ID NO: 1235093 - RNA, 12 nt, Human
uauaauuaacau

SEQ ID NO: 1235094 - RNA, 13 nt, Human
uauaauuaacaug

SEQ ID NO: 1235095 - RNA, 14 nt, Human
uauaauuaacaugu

SEQ ID NO: 1235096 - RNA, 15 nt, Human
uauaauuaacauguu

SEQ ID NO: 1235097 - RNA, 16 nt, Human
uauaauuaacauguua

SEQ ID NO: 1235098 - RNA, 18 nt, Human
uauaauuaacauguuaaa

SEQ ID NO: 1235099 - RNA, 19 nt, Human
uauaauuaacauguuaaac

SEQ ID NO: 1235100 - RNA, 22 nt, Human
uauaauuaacauguuaaaccau

SEQ ID NO: 1235101 - RNA, 15 nt, Human
uauaauucacauugu

SEQ ID NO: 1235102 - RNA, 20 nt, Human
uauaauucacauuguauuca

SEQ ID NO: 1235103 - RNA, 19 nt, Human
uaguauuucuaugaaauau

SEQ ID NO: 1235104 - RNA, 18 nt, Human
uaguauuucuaugaaaua

SEQ ID NO: 1235105 - RNA, 15 nt, Human
uagugcaaauuguca

SEQ ID NO: 1235106 - RNA, 14 nt, Human
uagugcaaauuguc

SEQ ID NO: 1235107 - RNA, 14 nt, Human
uagucaaauugugu

SEQ ID NO: 1235108 - RNA, 13 nt, Human
uagucaaauugug

SEQ ID NO: 1235109 - RNA, 13 nt, Human
uaguguucauaaa

SEQ ID NO: 1235110 - RNA, 20 nt, Human
uaguugcaacuuuguauaaa

SEQ ID NO: 1235111 - RNA, 16 nt, Human
uaggucagugcaaaua

SEQ ID NO: 1235112 - RNA, 15 nt, Human
uaggucucaauaccu

SEQ ID NO: 1235113 - RNA, 17 nt, Human
uaucugaggaauucugu

SEQ ID NO: 1235114 - RNA, 18 nt, Human
uaucugaggaauucugua

SEQ ID NO: 1235115 - RNA, 19 nt, Human
uaucugaggaauucuguau

SEQ ID NO: 1235116 - RNA, 21 nt, Human
uaucugaggaauucuguauag

SEQ ID NO: 1235117 - RNA, 22 nt, Human
uaucugaggaauucuguauaga

SEQ ID NO: 1235118 - RNA, 15 nt, Human
uaucguaaaauuaag

SEQ ID NO: 1235119 - RNA, 18 nt, Human
uaucguaaaauuaagaaa

SEQ ID NO: 1235120 - RNA, 23 nt, Human
uaugaauuacauuuguauaaaau

SEQ ID NO: 1235121 - RNA, 17 nt, Human
uaugaauuacauuugua

SEQ ID NO: 1235122 - RNA, 20 nt, Human
uaugaaguuuuuuuuauaca

SEQ ID NO: 1235123 - RNA, 16 nt, Human
uaugcuucuguuuuau

SEQ ID NO: 1235124 - RNA, 15 nt, Human
uaugcuucuguuuua

SEQ ID NO: 1235125 - RNA, 20 nt, Human
uaugcauauuauuuuauguu

SEQ ID NO: 1235126 - RNA, 14 nt, Human
uaugcacaguaaaa

SEQ ID NO: 1235127 - RNA, 16 nt, Human
uaugacuauguaaacu

SEQ ID NO: 1235128 - RNA, 17 nt, Human
uaugacuauguaaacua

SEQ ID NO: 1235129 - RNA, 18 nt, Human
uaugacuauguaaacuac

SEQ ID NO: 1235130 - RNA, 21 nt, Human
uaugauucaaaugucuauaaa

SEQ ID NO: 1235131 - RNA, 16 nt, Human
uaugauucaaaugucu

SEQ ID NO: 1235132 - RNA, 16 nt, Human
uaugauucccagccag

SEQ ID NO: 1235133 - RNA, 18 nt, Human
ucaggagcccugggaggc

SEQ ID NO: 1235134 - RNA, 11 nt, Human
ucaggagcccu

SEQ ID NO: 1235135 - RNA, 12 nt, Human
ucaggagcccug

SEQ ID NO: 1235136 - RNA, 14 nt, Human
ucaggagcccuggg

SEQ ID NO: 1235137 - RNA, 15 nt, Human
ucaggagcccuggga

SEQ ID NO: 1235138 - RNA, 13 nt, Human
ucaggcuagaugu

SEQ ID NO: 1235139 - RNA, 15 nt, Human
ucagucucuauacca

SEQ ID NO: 1235140 - RNA, 18 nt, Human
ucagucucuauaccaaua

SEQ ID NO: 1235141 - RNA, 21 nt, Human
ucagucucuauaccaauaaag

SEQ ID NO: 1235142 - RNA, 20 nt, Human
ucagucucuauaccaauaaa

SEQ ID NO: 1235143 - RNA, 22 nt, Human
uccaaaccacuuuuugcagcuu

SEQ ID NO: 1235144 - RNA, 12 nt, Human
uccaaaccacuu

SEQ ID NO: 1235145 - RNA, 14 nt, Human
ucauggugcucaga

SEQ ID NO: 1235146 - RNA, 19 nt, Human
ucaucucagcucacugcaa

SEQ ID NO: 1235147 - RNA, 16 nt, Human
ucaucuccccaucauu

SEQ ID NO: 1235148 - RNA, 17 nt, Human
ucaugcuguucaugaaa

SEQ ID NO: 1235149 - RNA, 19 nt, Human
ucauggaauuggagcucgu

SEQ ID NO: 1235150 - RNA, 20 nt, Human
ucauggaacgcguugaaauu

SEQ ID NO: 1235151 - RNA, 21 nt, Human
ucauggaacgcguugaaauug

SEQ ID NO: 1235152 - RNA, 22 nt, Human
ucauggaacgcguugaaauugu

SEQ ID NO: 1235153 - RNA, 14 nt, Human
ucccauguucaagc

SEQ ID NO: 1235154 - RNA, 13 nt, Human
ucccauuauucaa

SEQ ID NO: 1235155 - RNA, 14 nt, Human
ucccauuauucaaa

SEQ ID NO: 1235156 - RNA, 16 nt, Human
ucccauuauucaaagu

SEQ ID NO: 1235157 - RNA, 18 nt, Human
ucccauuauucaaaguug

SEQ ID NO: 1235158 - RNA, 19 nt, Human
ucccauuauucaaaguugc

SEQ ID NO: 1235159 - RNA, 19 nt, Human
uccagguagagggugugua

SEQ ID NO: 1235160 - RNA, 21 nt, Human
uccagguauucguuaucuaau

SEQ ID NO: 1235161 - RNA, 14 nt, Human
uccaguaaaauaau

SEQ ID NO: 1235162 - RNA, 20 nt, Human
uccaguuuuguuuggaccaa

SEQ ID NO: 1235163 - RNA, 15 nt, Human
uccaguuuuguuugg

SEQ ID NO: 1235164 - RNA, 17 nt, Human
uccaguuuuguuuggac

SEQ ID NO: 1235165 - RNA, 15 nt, Human
uccauacauuugugu

SEQ ID NO: 1235166 - RNA, 20 nt, Human
uccaugggccauaugaaaag

SEQ ID NO: 1235167 - RNA, 14 nt, Human
uccagauccuggaa

SEQ ID NO: 1235168 - RNA, 14 nt, Human
uccagcagauuauu

SEQ ID NO: 1235169 - RNA, 15 nt, Human
uccagcagauuauuc

SEQ ID NO: 1235170 - RNA, 16 nt, Human
uccagcagauuauuca

SEQ ID NO: 1235171 - RNA, 17 nt, Human
uccagcagauuauucac

SEQ ID NO: 1235172 - RNA, 19 nt, Human
uccagaaauacaauuuuag

SEQ ID NO: 1235173 - RNA, 23 nt, Human
uccagaaagaaaacuuguauuau

SEQ ID NO: 1235174 - RNA, 21 nt, Human
ucccuucaucuggaaccauca

SEQ ID NO: 1235175 - RNA, 15 nt, Human
uccgcuauccaccaa

SEQ ID NO: 1235176 - RNA, 17 nt, Human
uccuccaccucaacucc

SEQ ID NO: 1235177 - RNA, 20 nt, Human
uccuccaggguggcagcaac

SEQ ID NO: 1235178 - RNA, 21 nt, Human
uccuccaggguggcagcaaca

SEQ ID NO: 1235179 - RNA, 20 nt, Human
uccuaucaccugucuugccu

SEQ ID NO: 1235180 - RNA, 22 nt, Human
uccuaagcuggagugcaguggc

SEQ ID NO: 1235181 - RNA, 17 nt, Human
uccuggcaauagucaaa

SEQ ID NO: 1235182 - RNA, 12 nt, Human
ucguggacaccu

SEQ ID NO: 1235183 - RNA, 13 nt, Human
ucguggacaccug

SEQ ID NO: 1235184 - RNA, 14 nt, Human
ucguggacaccugc

SEQ ID NO: 1235185 - RNA, 15 nt, Human
ucguggacaccugcc

SEQ ID NO: 1235186 - RNA, 16 nt, Human
ucguggacaccugccc

SEQ ID NO: 1235187 - RNA, 17 nt, Human
ucguggacaccugcccu

SEQ ID NO: 1235188 - RNA, 18 nt, Human
ucguggacaccugcccug

SEQ ID NO: 1235189 - RNA, 19 nt, Human
ucguggacaccugcccugc

SEQ ID NO: 1235190 - RNA, 20 nt, Human
ucguggacaccugcccugcc

SEQ ID NO: 1235191 - RNA, 17 nt, Human
ucuacacuaagagagaa

SEQ ID NO: 1235192 - RNA, 15 nt, Human
ucucagucugucacc

SEQ ID NO: 1235193 - RNA, 16 nt, Human
ucucauacccucccuc

SEQ ID NO: 1235194 - RNA, 16 nt, Human
ucuccagccucagccu

SEQ ID NO: 1235195 - RNA, 19 nt, Human
ucuccagccucagccuccc

SEQ ID NO: 1235196 - RNA, 18 nt, Human
ucuccagccucagcucuc

SEQ ID NO: 1235197 - RNA, 15 nt, Human
ugauagaggaagccu

SEQ ID NO: 1235198 - RNA, 24 nt, Human
ugaucagcuuauugucuagugaaa

SEQ ID NO: 1235199 - RNA, 17 nt, Human
ugaucagcuuauugucu

SEQ ID NO: 1235200 - RNA, 23 nt, Human
ugaugcuacaggauuugaaauug

SEQ ID NO: 1235201 - RNA, 20 nt, Human
ugaugcuacaggauuugaaa

SEQ ID NO: 1235202 - RNA, 11 nt, Human
ugaugccuggc

SEQ ID NO: 1235203 - RNA, 13 nt, Human
ugaugguuguaca

SEQ ID NO: 1235204 - RNA, 14 nt, Human
ugaugguuguacau

SEQ ID NO: 1235205 - RNA, 21 nt, Human
ugaugguuguacauauaagug

SEQ ID NO: 1235206 - RNA, 22 nt, Human
ugauuaugaauuacauuuguau

SEQ ID NO: 1235207 - RNA, 21 nt, Human
ugauuaugaauuacauuugua

SEQ ID NO: 1235208 - RNA, 22 nt, Human
ugauguuuagaaacacaacuau

SEQ ID NO: 1235209 - RNA, 19 nt, Human
ugauuaugaauuacauuug

SEQ ID NO: 1235210 - RNA, 17 nt, Human
ugauuaugaauuacauu

SEQ ID NO: 1235211 - RNA, 13 nt, Human
ugauuauauguca

SEQ ID NO: 1235212 - RNA, 21 nt, Human
ugauucuucagcaaaaauauu

SEQ ID NO: 1235213 - RNA, 17 nt, Human
ugagaaauuuauaaacu

SEQ ID NO: 1235214 - RNA, 12 nt, Human
ugagaccaccuc

SEQ ID NO: 1235215 - RNA, 15 nt, Human
ugagaccaccucuca

SEQ ID NO: 1235216 - RNA, 19 nt, Human
ugagaccaccucucaauau

SEQ ID NO: 1235217 - RNA, 16 nt, Human
ugauaacuggaaacuu

SEQ ID NO: 1235218 - RNA, 17 nt, Human
ugagggagaacaagacc

SEQ ID NO: 1235219 - RNA, 16 nt, Human
ugaggagcuugaaacc

SEQ ID NO: 1235220 - RNA, 16 nt, Human
ugaaagaugaucauuu

SEQ ID NO: 1235221 - RNA, 15 nt, Human
ugaaagguacuucaa

SEQ ID NO: 1235222 - RNA, 16 nt, Human
ugaaagguacuucaaa

SEQ ID NO: 1235223 - RNA, 20 nt, Human
ugaaaagcuccauuuuuagu

SEQ ID NO: 1235224 - RNA, 16 nt, Human
ugaaaagcagacauuu

SEQ ID NO: 1235225 - RNA, 19 nt, Human
ugaacaguuguguuugaag

SEQ ID NO: 1235226 - RNA, 16 nt, Human
ugaaauauugacuuuu

SEQ ID NO: 1235227 - RNA, 15 nt, Human
ugaaaucauucauuu

SEQ ID NO: 1235228 - RNA, 12 nt, Human
ugaaauuauuca

SEQ ID NO: 1235229 - RNA, 20 nt, Human
ugaaauuaugugacauuuua

SEQ ID NO: 1235230 - RNA, 22 nt, Human
ugaaauuaugugacauuuuaca

SEQ ID NO: 1235231 - RNA, 16 nt, Human
ucuugccuuuuucauu

SEQ ID NO: 1235232 - RNA, 17 nt, Human
ucuugccuuuuucauua

SEQ ID NO: 1235233 - RNA, 19 nt, Human
ucuugccuuuuucauuauu

SEQ ID NO: 1235234 - RNA, 14 nt, Human
ucuuugccacccuc

SEQ ID NO: 1235235 - RNA, 16 nt, Human
ucuuugccacccucau

SEQ ID NO: 1235236 - RNA, 17 nt, Human
ucuuugccacccucaug

SEQ ID NO: 1235237 - RNA, 18 nt, Human
ucuuugccacccucaugc

SEQ ID NO: 1235238 - RNA, 20 nt, Human
ucuuugccacccucaugcug

SEQ ID NO: 1235239 - RNA, 12 nt, Human
ucuuugccaagu

SEQ ID NO: 1235240 - RNA, 16 nt, Human
ucuuucuuucaauaaa

SEQ ID NO: 1235241 - RNA, 22 nt, Human
ugaaucauuuuaccuuugacaa

SEQ ID NO: 1235242 - RNA, 23 nt, Human
ugaaucauuuuaccuuugacaaa

SEQ ID NO: 1235243 - RNA, 17 nt, Human
ugaauuaugaaacuuuu

SEQ ID NO: 1235244 - RNA, 15 nt, Human
ugaauuaugaaacuu

SEQ ID NO: 1235245 - RNA, 13 nt, Human
ugaauuaugaaac

SEQ ID NO: 1235246 - RNA, 16 nt, Human
ugaauuauuuucucuc

SEQ ID NO: 1235247 - RNA, 18 nt, Human
ugaauuacauuuguauaa

SEQ ID NO: 1235248 - RNA, 16 nt, Human
ugaauuacauuuguau

SEQ ID NO: 1235249 - RNA, 15 nt, Human
ugaauuacauuugua

SEQ ID NO: 1235250 - RNA, 15 nt, Human
ugaauuauauguuca

SEQ ID NO: 1235251 - RNA, 20 nt, Human
ugaagucagaucugccuaag

SEQ ID NO: 1235252 - RNA, 11 nt, Human
ugaaguccaag

SEQ ID NO: 1235253 - RNA, 23 nt, Human
ugaagucagaucugccuaaggac

SEQ ID NO: 1235254 - RNA, 13 nt, Human
ugaaguccaagca

SEQ ID NO: 1235255 - RNA, 14 nt, Human
ugaagauacugaaa

SEQ ID NO: 1235256 - RNA, 18 nt, Human
ugaagauacugaaauaaa

SEQ ID NO: 1235257 - RNA, 16 nt, Human
ugaagauacugaaaua

SEQ ID NO: 1235258 - RNA, 15 nt, Human
ugaagauacugaaau

SEQ ID NO: 1235259 - RNA, 18 nt, Human
ugacaugggacauuugcu

SEQ ID NO: 1235260 - RNA, 17 nt, Human
ugacaugggacauuugc

SEQ ID NO: 1235261 - RNA, 16 nt, Human
ugacauagucuggcug

SEQ ID NO: 1235262 - RNA, 17 nt, Human
ugacauagucuggcugu

SEQ ID NO: 1235263 - RNA, 20 nt, Human
ugacaagcucacagaccuuu

SEQ ID NO: 1235264 - RNA, 15 nt, Human
ugacaagcucacaga

SEQ ID NO: 1235265 - RNA, 12 nt, Human
ugacaagcucac

SEQ ID NO: 1235266 - RNA, 23 nt, Human
ugacauaaguauuuaauucaugu

SEQ ID NO: 1235267 - RNA, 14 nt, Human
ugcaguucugaaga

SEQ ID NO: 1235268 - RNA, 12 nt, Human
ugcaguucugaa

SEQ ID NO: 1235269 - RNA, 18 nt, Human
ugcauauuauuuuauguu

SEQ ID NO: 1235270 - RNA, 14 nt, Human
ugccaccugucugu

SEQ ID NO: 1235271 - RNA, 15 nt, Human
ugccaccugucuguc

SEQ ID NO: 1235272 - RNA, 16 nt, Human
ugccaccugucugucu

SEQ ID NO: 1235273 - RNA, 14 nt, Human
ugccaccuccugcc

SEQ ID NO: 1235274 - RNA, 10 nt, Human
ugccaccugu

SEQ ID NO: 1235275 - RNA, 11 nt, Human
ugccaccuguc

SEQ ID NO: 1235276 - RNA, 12 nt, Human
ugccaccugucu

SEQ ID NO: 1235277 - RNA, 13 nt, Human
ugccaccugucug

SEQ ID NO: 1235278 - RNA, 17 nt, Human
ugccaggcuggagugca

SEQ ID NO: 1235279 - RNA, 19 nt, Human
ugccaggcuggagugcagu

SEQ ID NO: 1235280 - RNA, 20 nt, Human
ugccuaaauccauuuggaaa

SEQ ID NO: 1235281 - RNA, 22 nt, Human
ugccuaaauccauuuggaaauc

SEQ ID NO: 1235282 - RNA, 23 nt, Human
ugccuaaauccauuuggaaaucu

SEQ ID NO: 1235283 - RNA, 20 nt, Human
ugccucacccacccuuuuuu

SEQ ID NO: 1235284 - RNA, 23 nt, Human
ugccucacccacccuuuuuuaaa

SEQ ID NO: 1235285 - RNA, 13 nt, Human
ugccuaaauccau

SEQ ID NO: 1235286 - RNA, 15 nt, Human
ugccuaaauccauuu

SEQ ID NO: 1235287 - RNA, 19 nt, Human
ugccuaaauccauuuggaa

SEQ ID NO: 1235288 - RNA, 13 nt, Human
ugcugcugccugc

SEQ ID NO: 1235289 - RNA, 14 nt, Human
ugcugcugccugcc

SEQ ID NO: 1235290 - RNA, 14 nt, Human
ugcugggccccugc

SEQ ID NO: 1235291 - RNA, 16 nt, Human
ugcugggccccugccu

SEQ ID NO: 1235292 - RNA, 17 nt, Human
ugcugggccccugccuc

SEQ ID NO: 1235293 - RNA, 18 nt, Human
ugcugggccccugccucu

SEQ ID NO: 1235294 - RNA, 19 nt, Human
ugcugggccccugccucuc

SEQ ID NO: 1235295 - RNA, 21 nt, Human
ugcugggccccugccucucug

SEQ ID NO: 1235296 - RNA, 22 nt, Human
ugcugggccccugccucucugc

SEQ ID NO: 1235297 - RNA, 23 nt, Human
ugcugggccccugccucucugca

SEQ ID NO: 1235298 - RNA, 24 nt, Human
ugcugggccccugccucucugcag

SEQ ID NO: 1235299 - RNA, 15 nt, Human
ugcugccugcuuuuu

SEQ ID NO: 1235300 - RNA, 17 nt, Human
ugcugccugcuuuuuau

SEQ ID NO: 1235301 - RNA, 17 nt, Human
ugcugggguuaucugaa

SEQ ID NO: 1235302 - RNA, 20 nt, Human
ugcugggguuaucugaaguc

SEQ ID NO: 1235303 - RNA, 13 nt, Human
ugcugguguaugu

SEQ ID NO: 1235304 - RNA, 22 nt, Human
ugcugguguaugugugaaguga

SEQ ID NO: 1235305 - RNA, 13 nt, Human
ugcugguuuuagu

SEQ ID NO: 1235306 - RNA, 17 nt, Human
ugcuguucaugaaagau

SEQ ID NO: 1235307 - RNA, 16 nt, Human
ugcuguucaugaaaga

SEQ ID NO: 1235308 - RNA, 13 nt, Human
ugcucuccuccac

SEQ ID NO: 1235309 - RNA, 18 nt, Human
ugcucaggagcccuggga

SEQ ID NO: 1235310 - RNA, 19 nt, Human
ugcucaggagcccugggag

SEQ ID NO: 1235311 - RNA, 20 nt, Human
ugcucaggagcccugggagg

SEQ ID NO: 1235312 - RNA, 20 nt, Human
ugccuugcauaauggucaga

SEQ ID NO: 1235313 - RNA, 19 nt, Human
ugcgcuaaacuuuucugau

SEQ ID NO: 1235314 - RNA, 20 nt, Human
ugcgcuaaacuuuucugaua

SEQ ID NO: 1235315 - RNA, 21 nt, Human
ugcgcuaaacuuuucugauag

SEQ ID NO: 1235316 - RNA, 15 nt, Human
uggcgggguggggug

SEQ ID NO: 1235317 - RNA, 15 nt, Human
uggcacuaguauuuc

SEQ ID NO: 1235318 - RNA, 20 nt, Human
uggcaauagucaaauugugu

SEQ ID NO: 1235319 - RNA, 20 nt, Human
uggauaauaaggaaaaguuu

SEQ ID NO: 1235320 - RNA, 11 nt, Human
uggagaaggaa

SEQ ID NO: 1235321 - RNA, 12 nt, Human
uggagaaggaag

SEQ ID NO: 1235322 - RNA, 13 nt, Human
uggagaaggaagg

SEQ ID NO: 1235323 - RNA, 14 nt, Human
uggagaaggaaggc

SEQ ID NO: 1235324 - RNA, 16 nt, Human
uggacacuacacccag

SEQ ID NO: 1235325 - RNA, 17 nt, Human
uggacacuacacccagc

SEQ ID NO: 1235326 - RNA, 18 nt, Human
uggacacuacacccagca

SEQ ID NO: 1235327 - RNA, 19 nt, Human
uggacacuacacccagcaa

SEQ ID NO: 1235328 - RNA, 20 nt, Human
uggacacuacacccagcaau

SEQ ID NO: 1235329 - RNA, 22 nt, Human
uggaccaaaaaccaguauugua

SEQ ID NO: 1235330 - RNA, 15 nt, Human
uggugacuuuggaua

SEQ ID NO: 1235331 - RNA, 19 nt, Human
uggugacugauucuucagc

SEQ ID NO: 1235332 - RNA, 15 nt, Human
uggugacugauucuu

SEQ ID NO: 1235333 - RNA, 16 nt, Human
uggugacugauucuuc

SEQ ID NO: 1235334 - RNA, 21 nt, Human
ugguauguuuucaggcuagau

SEQ ID NO: 1235335 - RNA, 13 nt, Human
ugguauguuuuca

SEQ ID NO: 1235336 - RNA, 17 nt, Human
ugguccgugcuaaggac

SEQ ID NO: 1235337 - RNA, 18 nt, Human
ugguccgugcuaaggacu

SEQ ID NO: 1235338 - RNA, 19 nt, Human
ugguccgugcuaaggacuu

SEQ ID NO: 1235339 - RNA, 20 nt, Human
ugguccgugcuaaggacuug

SEQ ID NO: 1235340 - RNA, 21 nt, Human
ugggccccugccucucugcag

SEQ ID NO: 1235341 - RNA, 23 nt, Human
ugggccccugccucucugcaggu

SEQ ID NO: 1235342 - RNA, 21 nt, Human
uggggccaggcugggucgccc

SEQ ID NO: 1235343 - RNA, 22 nt, Human
uggggccaggcugggucgcccu

SEQ ID NO: 1235344 - RNA, 18 nt, Human
uucccuugaugaagaagu

SEQ ID NO: 1235345 - RNA, 21 nt, Human
uucccucucucauacccuccc

SEQ ID NO: 1235346 - RNA, 17 nt, Human
uucccuugaugaagaag

SEQ ID NO: 1235347 - RNA, 22 nt, Human
uucccugcugugaaagaaguaa

SEQ ID NO: 1235348 - RNA, 20 nt, Human
uucccuggaaaccuuccacc

SEQ ID NO: 1235349 - RNA, 23 nt, Human
uucccuggaaaccuuccacccag

SEQ ID NO: 1235350 - RNA, 22 nt, Human
uucccuggaaaccuuccaccca

SEQ ID NO: 1235351 - RNA, 13 nt, Human
uuccauucuggaa

SEQ ID NO: 1235352 - RNA, 15 nt, Human
uuccauucuggaagu

SEQ ID NO: 1235353 - RNA, 17 nt, Human
uucaugcaaacuuuauu

SEQ ID NO: 1235354 - RNA, 13 nt, Human
uucaugcauggaa

SEQ ID NO: 1235355 - RNA, 14 nt, Human
uucaugcauggaaa

SEQ ID NO: 1235356 - RNA, 18 nt, Human
uucaugaaagauucaaug

SEQ ID NO: 1235357 - RNA, 17 nt, Human
uucaugaaagauucaau

SEQ ID NO: 1235358 - RNA, 15 nt, Human
uucaugaaagauuca

SEQ ID NO: 1235359 - RNA, 19 nt, Human
uuccacucguguguuucua

SEQ ID NO: 1235360 - RNA, 18 nt, Human
uuccagagcacugcucca

SEQ ID NO: 1235361 - RNA, 15 nt, Human
uuauugucuagugaa

SEQ ID NO: 1235362 - RNA, 16 nt, Human
uuauuuuaauaauguu

SEQ ID NO: 1235363 - RNA, 15 nt, Human
uuauuuuaauaaugu

SEQ ID NO: 1235364 - RNA, 12 nt, Human
uuauuggcuuuu

SEQ ID NO: 1235365 - RNA, 16 nt, Human
uuauuggcuuuucuga

SEQ ID NO: 1235366 - RNA, 18 nt, Human
uuauuggcuuuucugauc

SEQ ID NO: 1235367 - RNA, 22 nt, Human
uuauuggcuuuucugauccagu

SEQ ID NO: 1235368 - RNA, 17 nt, Human
uuauuuuaauaauguuu

SEQ ID NO: 1235369 - RNA, 20 nt, Human
uuauuuuauguugcauagaa

SEQ ID NO: 1235370 - RNA, 13 nt, Human
uuauuuuauuaug

SEQ ID NO: 1235371 - RNA, 14 nt, Human
uuauuuuauuauga

SEQ ID NO: 1235372 - RNA, 17 nt, Human
uucaaauccuugaagau

SEQ ID NO: 1235373 - RNA, 11 nt, Human
uucaaaguugc

SEQ ID NO: 1235374 - RNA, 15 nt, Human
uucaaaguugccuaa

SEQ ID NO: 1235375 - RNA, 16 nt, Human
uucaaaguugccuaaa

SEQ ID NO: 1235376 - RNA, 17 nt, Human
uucaaaguugccuaaau

SEQ ID NO: 1235377 - RNA, 23 nt, Human
uucaaaguugccuaaauccauuu

SEQ ID NO: 1235378 - RNA, 22 nt, Human
uucaaaucaaucuguaaaacua

SEQ ID NO: 1235379 - RNA, 23 nt, Human
uucaaaucaaucuguaaaacuaa

SEQ ID NO: 1235380 - RNA, 20 nt, Human
uucagauaaucacaauacau

SEQ ID NO: 1235381 - RNA, 21 nt, Human
uucagaguugaugguuguaca

SEQ ID NO: 1235382 - RNA, 22 nt, Human
uucagaguugaugguuguacau

SEQ ID NO: 1235383 - RNA, 21 nt, Human
uucacucuccauuuaauaauu

SEQ ID NO: 1235384 - RNA, 18 nt, Human
uuauuacuguaagaaaau

SEQ ID NO: 1235385 - RNA, 17 nt, Human
uuauuacuguaagaaaa

SEQ ID NO: 1235386 - RNA, 14 nt, Human
uuauuacaguauaa

SEQ ID NO: 1235387 - RNA, 16 nt, Human
uuauuaaacaaauaau

SEQ ID NO: 1235388 - RNA, 17 nt, Human
uuaucugaagucagauc

SEQ ID NO: 1235389 - RNA, 13 nt, Human
uuaguugcaacuu

SEQ ID NO: 1235390 - RNA, 20 nt, Human
uuaguugcaacuuuguauaa

SEQ ID NO: 1235391 - RNA, 21 nt, Human
uuauggcacuaguauuucuau

SEQ ID NO: 1235392 - RNA, 16 nt, Human
uuaugcuuaaauucaa

SEQ ID NO: 1235393 - RNA, 18 nt, Human
uuagagaguguugaaacg

SEQ ID NO: 1235394 - RNA, 12 nt, Human
uuagagauuuuu

SEQ ID NO: 1235395 - RNA, 13 nt, Human
uuagaucuaguuc

SEQ ID NO: 1235396 - RNA, 14 nt, Human
uuagaucuaguuca

SEQ ID NO: 1235397 - RNA, 22 nt, Human
uuagaugcaguucugaagaaga

SEQ ID NO: 1235398 - RNA, 21 nt, Human
uuagaugcaguucugaagaag

SEQ ID NO: 1235399 - RNA, 20 nt, Human
uuagaugcaguucugaagaa

SEQ ID NO: 1235400 - RNA, 13 nt, Human
uuagcuggaaaag

SEQ ID NO: 1235401 - RNA, 12 nt, Human
uuagcuggaaaa

SEQ ID NO: 1235402 - RNA, 14 nt, Human
uuaguguucauaaa

SEQ ID NO: 1235403 - RNA, 22 nt, Human
uuaggaaguugacuuauaguac

SEQ ID NO: 1235404 - RNA, 23 nt, Human
uuaggaaguugacuuauaguaca

SEQ ID NO: 1235405 - RNA, 14 nt, Human
uuagggaaaacauu

SEQ ID NO: 1235406 - RNA, 19 nt, Human
uuagaaacacaacuauauu

SEQ ID NO: 1235407 - RNA, 14 nt, Human
uuagagaguguuga

SEQ ID NO: 1235408 - RNA, 16 nt, Human
uuagagaguguugaaa

SEQ ID NO: 1235409 - RNA, 17 nt, Human
uuagagaguguugaaac

SEQ ID NO: 1235410 - RNA, 19 nt, Human
uuacugucuuuuuucuaaa

SEQ ID NO: 1235411 - RNA, 19 nt, Human
uuaagcauauauuuuuaua

SEQ ID NO: 1235412 - RNA, 23 nt, Human
uuaagcauauauuuuuauauuua

SEQ ID NO: 1235413 - RNA, 13 nt, Human
uuaagcauauauu

SEQ ID NO: 1235414 - RNA, 15 nt, Human
uuaagcauauauuuu

SEQ ID NO: 1235415 - RNA, 18 nt, Human
uuaagcauauauuuuuau

SEQ ID NO: 1235416 - RNA, 21 nt, Human
uuaauauuaaagccauguuua

SEQ ID NO: 1235417 - RNA, 22 nt, Human
uuaauauuaaagccauguuuau

SEQ ID NO: 1235418 - RNA, 22 nt, Human
uuaaugucaauucuugccaaau

SEQ ID NO: 1235419 - RNA, 14 nt, Human
uuaaagacuuuuau

SEQ ID NO: 1235420 - RNA, 21 nt, Human
uuaaauguuuuuuuuuaaaga

SEQ ID NO: 1235421 - RNA, 23 nt, Human
uuaaauguuuuuuuuuaaagacu

SEQ ID NO: 1235422 - RNA, 14 nt, Human
uuaacuauugcauu

SEQ ID NO: 1235423 - RNA, 21 nt, Human
uuaacuauugcauuuauaugu

SEQ ID NO: 1235424 - RNA, 22 nt, Human
uuaacuauugcauuuauaugua

SEQ ID NO: 1235425 - RNA, 16 nt, Human
uguuuuuuuguuauua

SEQ ID NO: 1235426 - RNA, 18 nt, Human
uguuuuuuuguuauuaaa

SEQ ID NO: 1235427 - RNA, 18 nt, Human
uguuuuuuuuuaaagacu

SEQ ID NO: 1235428 - RNA, 13 nt, Human
uuaaaagaaugau

SEQ ID NO: 1235429 - RNA, 22 nt, Human
uguuucaaacauauauaacaau

SEQ ID NO: 1235430 - RNA, 21 nt, Human
uguuucaaacauauauaacaa

SEQ ID NO: 1235431 - RNA, 14 nt, Human
uggugcccugcuuu

SEQ ID NO: 1235432 - RNA, 18 nt, Human
uuucuuaaccagaucauu

SEQ ID NO: 1235433 - RNA, 21 nt, Human
uuugaaauuguauuacaaauc

SEQ ID NO: 1235434 - RNA, 13 nt, Human
uuugaaccaauaa

SEQ ID NO: 1235435 - RNA, 13 nt, Human
uuuguauucaaaa

SEQ ID NO: 1235436 - RNA, 18 nt, Human
uuugguaaggggaauuga

SEQ ID NO: 1235437 - RNA, 17 nt, Human
uuugauaugugaacagu

SEQ ID NO: 1235438 - RNA, 15 nt, Human
uuugauaugugaaca

SEQ ID NO: 1235439 - RNA, 14 nt, Human
uuugauaugugaac

SEQ ID NO: 1235440 - RNA, 19 nt, Human
uuugccacccucaugcugu

SEQ ID NO: 1235441 - RNA, 18 nt, Human
uuugccacccucaugcug

SEQ ID NO: 1235442 - RNA, 22 nt, Human
uuucuaaaguaaaaacaaagaa

SEQ ID NO: 1235443 - RNA, 17 nt, Human
uuucuaaaguaaaaaca

SEQ ID NO: 1235444 - RNA, 12 nt, Human
uuucucuaggaa

SEQ ID NO: 1235445 - RNA, 19 nt, Human
uuucugaaauuuccuggga

SEQ ID NO: 1235446 - RNA, 12 nt, Human
uuucugaaauuu

SEQ ID NO: 1235447 - RNA, 13 nt, Human
uuucugauccagu

SEQ ID NO: 1235448 - RNA, 15 nt, Human
uuucugauccaguuu

SEQ ID NO: 1235449 - RNA, 16 nt, Human
uuucugauccaguuuu

SEQ ID NO: 1235450 - RNA, 20 nt, Human
uuucugauccaguuuuguuu

SEQ ID NO: 1235451 - RNA, 22 nt, Human
uuucugauccaguuuuguuugg

SEQ ID NO: 1235452 - RNA, 22 nt, Human
uuuaugauacuugaaaauuaac

SEQ ID NO: 1235453 - RNA, 17 nt, Human
uuuauggcacuaguauu

SEQ ID NO: 1235454 - RNA, 17 nt, Human
uuuaguugcaacuuugu

SEQ ID NO: 1235455 - RNA, 18 nt, Human
uuuaguugcaacuuugua

SEQ ID NO: 1235456 - RNA, 14 nt, Human
uuuaaccucuaaau

SEQ ID NO: 1235457 - RNA, 15 nt, Human
uuuaauaaacacucu

SEQ ID NO: 1235458 - RNA, 19 nt, Human
uuuaauaauguuucaaaca

SEQ ID NO: 1235459 - RNA, 14 nt, Human
uuuaauaauuauau

SEQ ID NO: 1235460 - RNA, 15 nt, Human
uuuaauaauguuuca

SEQ ID NO: 1235461 - RNA, 22 nt, Human
uuuaauaaacacucuugaaaaa

SEQ ID NO: 1235462 - RNA, 14 nt, Human
uuuaauauuaaagc

SEQ ID NO: 1235463 - RNA, 15 nt, Human
uuuaauauuaaagcc

SEQ ID NO: 1235464 - RNA, 17 nt, Human
uuuaauauuaaagccau

SEQ ID NO: 1235465 - RNA, 20 nt, Human
uuuaauauuaaagccauguu

SEQ ID NO: 1235466 - RNA, 21 nt, Human
uuuaauauuaaagccauguuu

SEQ ID NO: 1235467 - RNA, 16 nt, Human
uuuacauggcuggagc

SEQ ID NO: 1235468 - RNA, 17 nt, Human
uuuaaaagaaugauuau

SEQ ID NO: 1235469 - RNA, 14 nt, Human
uuuaaaagaaugau

SEQ ID NO: 1235470 - RNA, 17 nt, Human
uuuaaaaggaaagaaaa

SEQ ID NO: 1235471 - RNA, 16 nt, Human
uuuaaaauuacaacua

SEQ ID NO: 1235472 - RNA, 12 nt, Human
uuuaaaaugucu

SEQ ID NO: 1235473 - RNA, 16 nt, Human
uuuaaaaugagaaauc

SEQ ID NO: 1235474 - RNA, 12 nt, Human
uuguuucuguac

SEQ ID NO: 1235475 - RNA, 14 nt, Human
uuguuucuguacuu

SEQ ID NO: 1235476 - RNA, 12 nt, Human
uuguuuuacaau

SEQ ID NO: 1235477 - RNA, 13 nt, Human
uuguuuuacaaua

SEQ ID NO: 1235478 - RNA, 13 nt, Human
uuguuuguuuagu

SEQ ID NO: 1235479 - RNA, 14 nt, Human
uuguuuguuuaguc

SEQ ID NO: 1235480 - RNA, 15 nt, Human
uuguuauuaaacaaa

SEQ ID NO: 1235481 - RNA, 22 nt, Human
uugcagcccugcugcugccugc

SEQ ID NO: 1235482 - RNA, 19 nt, Human
uugccaggcuggagugcag

SEQ ID NO: 1235483 - RNA, 23 nt, Human
uugccaggcuggagugcaguggc

SEQ ID NO: 1235484 - RNA, 16 nt, Human
uugcauaacguauaaa

SEQ ID NO: 1235485 - RNA, 17 nt, Human
uugauccagaaagaaaa

SEQ ID NO: 1235486 - RNA, 16 nt, Human
uugauaugugaacagu

SEQ ID NO: 1235487 - RNA, 20 nt, Human
uugauaugccuuuucccaac

SEQ ID NO: 1235488 - RNA, 18 nt, Human
uucuuaugccauauaauu

SEQ ID NO: 1235489 - RNA, 19 nt, Human
uucuuaggguuaugauuaa

SEQ ID NO: 1235490 - RNA, 11 nt, Human
uucuguauaga

SEQ ID NO: 1235491 - RNA, 13 nt, Human
uucuguauagauu

SEQ ID NO: 1235492 - RNA, 14 nt, Human
uucuguauagauua

SEQ ID NO: 1235493 - RNA, 21 nt, Human
uugaaaaucuuauaauuuaaa

SEQ ID NO: 1235494 - RNA, 12 nt, Human
uucuuuaauuuu

SEQ ID NO: 1235495 - RNA, 17 nt, Human
uucuuuaauuuuggaau

SEQ ID NO: 1235496 - RNA, 18 nt, Human
uucuuuaauuuuggaauu

SEQ ID NO: 1235497 - RNA, 16 nt, Human
uugaaacggaugauuu

SEQ ID NO: 1235498 - RNA, 19 nt, Human
uugaaacggaugauuucua

SEQ ID NO: 1235499 - RNA, 18 nt, Human
uugaaaauuaacaugaau

SEQ ID NO: 1235500 - RNA, 20 nt, Human
uugaaacggaugauuucuau

SEQ ID NO: 1235501 - RNA, 16 nt, Human
uugaagagguuuuaaa

SEQ ID NO: 1235502 - RNA, 20 nt, Human
uugaagcacagugaucaagu

SEQ ID NO: 1235503 - RNA, 21 nt, Human
uugaagagguuuuaaagcuuc

SEQ ID NO: 1235504 - RNA, 20 nt, Human
uugguaaggggaauugagga

SEQ ID NO: 1235505 - RNA, 18 nt, Human
uuggcauaacauaaaucu

SEQ ID NO: 1235506 - RNA, 19 nt, Human
uuggcauaacauaaaucug

SEQ ID NO: 1235507 - RNA, 20 nt, Human
uuggcauaacauaaaucugu

SEQ ID NO: 1235508 - RNA, 22 nt, Human
uuggcauaacauaaaucuguga

SEQ ID NO: 1235509 - RNA, 23 nt, Human
uuggcauaacauaaaucugugaa

SEQ ID NO: 1235510 - RNA, 15 nt, Human
uuguagcauccugga

SEQ ID NO: 1235511 - RNA, 22 nt, Human
uuguagaagucacauuccugaa

SEQ ID NO: 1235512 - RNA, 17 nt, Human
uuguagaagucacauuc

SEQ ID NO: 1235513 - RNA, 18 nt, Human
uuguacuuuagggaagua

SEQ ID NO: 1235514 - RNA, 13 nt, Human
uugccuuaaaaua

SEQ ID NO: 1235515 - RNA, 12 nt, Human
uugccuuuuuca

SEQ ID NO: 1235516 - RNA, 13 nt, Human
uugccuuuuucau

SEQ ID NO: 1235517 - RNA, 14 nt, Human
uugccuuuuucauu

SEQ ID NO: 1235518 - RNA, 15 nt, Human
uugccuuuuucauua

SEQ ID NO: 1235519 - RNA, 16 nt, Human
uugccuuuuucauuau

SEQ ID NO: 1235520 - RNA, 17 nt, Human
uugccuuuuucauuauu

SEQ ID NO: 1235521 - RNA, 18 nt, Human
uugcuaagcauuccaacu

SEQ ID NO: 1235522 - RNA, 16 nt, Human
uugcuaagcauuccaa

SEQ ID NO: 1235523 - RNA, 18 nt, Human
uuggacaaaauggaauac

SEQ ID NO: 1235524 - RNA, 22 nt, Human
cuugauaaauggcuuccuggca

SEQ ID NO: 1235525 - RNA, 14 nt, Human
ccagauuuuccuga

SEQ ID NO: 1235526 - RNA, 22 nt, Human
agcaaguaaaaaggcuaaaugg

SEQ ID NO: 1235527 - RNA, 21 nt, Human
augaauacauuuccaaaaugg

SEQ ID NO: 1235528 - RNA, 12 nt, Human
ugcgauaagaug

SEQ ID NO: 1235529 - RNA, 19 nt, Human
acuuuccaauaaagaguuc

SEQ ID NO: 1235530 - RNA, 22 nt, Human
accuuugacaaagguaaaucag

SEQ ID NO: 1235531 - RNA, 21 nt, Human
acaagauugcuuaauaaauug

SEQ ID NO: 1235532 - RNA, 17 nt, Hepatitis B virus
cucuaccguccccuucu

SEQ ID NO: 1235533 - RNA, 20 nt, Hepatitis B virus
cucggaaauacaccuccuuu

SEQ ID NO: 1235534 - RNA, 20 nt, Hepatitis B virus
gaacauuguucaccucacca

SEQ ID NO: 1235535 - RNA, 18 nt, Hepatitis B virus
cucccaucucuccaccuc

SEQ ID NO: 1235536 - RNA, 17 nt, Hepatitis B virus
ccucgacaaggcauggg

SEQ ID NO: 1235537 - RNA, 12 nt, Hepatitis B virus
cuuuaauccuga

SEQ ID NO: 1235538 - RNA, 21 nt, Hepatitis B virus
agaggacucuuggacucucag

SEQ ID NO: 1235539 - RNA, 17 nt, Hepatitis B virus
accauauucuugggaac

SEQ ID NO: 1235540 - RNA, 18 nt, Hepatitis B virus
cacuucgcuucaccucug

SEQ ID NO: 1235541 - RNA, 15 nt, Hepatitis B virus
ugcggaacuccuagc

SEQ ID NO: 1235542 - RNA, 21 nt, Hepatitis B virus
cggucuccccgucugugccuu

SEQ ID NO: 1235543 - RNA, 13 nt, Hepatitis B virus
uucgagaucuccu

SEQ ID NO: 1235544 - RNA, 12 nt, Hepatitis B virus
uuuccccucugc

SEQ ID NO: 1235545 - RNA, 14 nt, Hepatitis B virus
aaccgacaacucag

SEQ ID NO: 1235546 - RNA, 13 nt, Hepatitis B virus
cuaggcugugcug

SEQ ID NO: 1235547 - RNA, 16 nt, Hepatitis B virus
ucaaaacuaggcauua

SEQ ID NO: 1235548 - RNA, 22 nt, Hepatitis B virus
uccaaaccucgacaaggcaugg

SEQ ID NO: 1235549 - RNA, 13 nt, Hepatitis B virus
auuuacaggagga

SEQ ID NO: 1235550 - RNA, 17 nt, Hepatitis B virus
aaacuacacgcagcgcc

SEQ ID NO: 1235551 - RNA, 18 nt, Hepatitis B virus
acucauaaggugggaaac

SEQ ID NO: 1235552 - RNA, 15 nt, Hepatitis B virus
uguggcuccucugcc

SEQ ID NO: 1235553 - RNA, 15 nt, Hepatitis B virus
ugccagcagcaccuc

SEQ ID NO: 1235554 - RNA, 18 nt, Hepatitis B virus
acaccgccucugcucugu

SEQ ID NO: 1235555 - RNA, 18 nt, Hepatitis B virus
gucaaagaauuguggguc

SEQ ID NO: 1235556 - RNA, 15 nt, Hepatitis B virus
gucaggucucugcca

SEQ ID NO: 1235557 - RNA, 19 nt, Hepatitis B virus
uguucauguccuacuguuc

SEQ ID NO: 1235558 - RNA, 17 nt, Hepatitis B virus
ucuuuccuucuauucga

SEQ ID NO: 1235559 - RNA, 18 nt, Hepatitis B virus
acccugcguucggagcca

SEQ ID NO: 1235560 - RNA, 21 nt, Hepatitis B virus
cugggaggaguugggggagga

SEQ ID NO: 1235561 - RNA, 23 nt, Hepatitis B virus
caacggucaggucucugccaagu

SEQ ID NO: 1235562 - RNA, 14 nt, Hepatitis B virus
caagagcuacagca

SEQ ID NO: 1235563 - RNA, 15 nt, Hepatitis B virus
caaccccaacaagga

SEQ ID NO: 1235564 - RNA, 19 nt, Hepatitis B virus
cuuugcugccccuuuuaca

SEQ ID NO: 1235565 - RNA, 14 nt, Hepatitis B virus
uuuuccccucugcc

SEQ ID NO: 1235566 - RNA, 18 nt, Hepatitis B virus
uccucaggccaugcagug

SEQ ID NO: 1235567 - RNA, 23 nt, Hepatitis B virus
caccuccuuuccauggcugcuag

SEQ ID NO: 1235568 - RNA, 18 nt, Hepatitis B virus
gaacauuguucaccucac

SEQ ID NO: 1235569 - RNA, 18 nt, Hepatitis B virus
ugcuaggcugugcugcca

SEQ ID NO: 1235570 - RNA, 14 nt, Hepatitis B virus
uggacucucagcaa

SEQ ID NO: 1235571 - RNA, 16 nt, Hepatitis B virus
auugacaacacugcca

SEQ ID NO: 1235572 - RNA, 23 nt, Hepatitis B virus
gguucuauccuaaccuuaccaaa

SEQ ID NO: 1235573 - RNA, 18 nt, Hepatitis B virus
cuugcccaaggucuuaca

SEQ ID NO: 1235574 - RNA, 17 nt, Hepatitis B virus
gcccucaggcucagggc

SEQ ID NO: 1235575 - RNA, 18 nt, Hepatitis B virus
cucucuuuuuugccuucu

SEQ ID NO: 1235576 - RNA, 21 nt, Hepatitis B virus
uacuaggaggcuguaggcaua

SEQ ID NO: 1235577 - RNA, 17 nt, Hepatitis B virus
cucuuggacucucagca

SEQ ID NO: 1235578 - RNA, 16 nt, Hepatitis B virus
cuaggcugugcugcca

SEQ ID NO: 1235579 - RNA, 22 nt, Hepatitis B virus
guucaagccuccaagcugugcc

SEQ ID NO: 1235580 - RNA, 12 nt, Hepatitis B virus
caaaucagguag

SEQ ID NO: 1235581 - RNA, 13 nt, Hepatitis B virus
uuccccucugccu

SEQ ID NO: 1235582 - RNA, 14 nt, Hepatitis B virus
uacaaaaacucaag

SEQ ID NO: 1235583 - RNA, 21 nt, Hepatitis B virus
uguucauguccuacuguucaa

SEQ ID NO: 1235584 - RNA, 14 nt, Hepatitis B virus
ccaucucuccaccu

SEQ ID NO: 1235585 - RNA, 16 nt, Hepatitis B virus
gagcccucaggcucag

SEQ ID NO: 1235586 - RNA, 13 nt, Hepatitis B virus
auccucaggccau

SEQ ID NO: 1235587 - RNA, 23 nt, Hepatitis B virus
aucaccaguuggacccugcguuc

SEQ ID NO: 1235588 - RNA, 18 nt, Hepatitis B virus
auuggaaaguaugucaaa

SEQ ID NO: 1235589 - RNA, 23 nt, Hepatitis B virus
cccgucugugccuucucaucugc

SEQ ID NO: 1235590 - RNA, 12 nt, Hepatitis B virus
uccccucugccu

SEQ ID NO: 1235591 - RNA, 16 nt, Hepatitis B virus
guacuaggaggcugua

SEQ ID NO: 1235592 - RNA, 18 nt, Hepatitis B virus
cugugccuucucaucugc

SEQ ID NO: 1235593 - RNA, 14 nt, Hepatitis B virus
accaaauauuugcc

SEQ ID NO: 1235594 - RNA, 13 nt, Hepatitis B virus
caagagcuacagc

SEQ ID NO: 1235595 - RNA, 17 nt, Hepatitis B virus
ugccuucucaucugccg

SEQ ID NO: 1235596 - RNA, 13 nt, Hepatitis B virus
gccucugcucugu

SEQ ID NO: 1235597 - RNA, 14 nt, Hepatitis B virus
caccauacagcacu

SEQ ID NO: 1235598 - RNA, 17 nt, Hepatitis B virus
aaacuaggcauuauuua

SEQ ID NO: 1235599 - RNA, 17 nt, Hepatitis B virus
auguggcuauccugccu

SEQ ID NO: 1235600 - RNA, 17 nt, Hepatitis B virus
caggcaagcuauucugu

SEQ ID NO: 1235601 - RNA, 23 nt, Hepatitis B virus
cggcaacggucaggucucugcca

SEQ ID NO: 1235602 - RNA, 18 nt, Hepatitis B virus
cauggcugcuaggcugug

SEQ ID NO: 1235603 - RNA, 14 nt, Hepatitis B virus
ccucugggauucuu

SEQ ID NO: 1235604 - RNA, 20 nt, Hepatitis B virus
auggcugcuaggcugugcug

SEQ ID NO: 1235605 - RNA, 22 nt, Hepatitis B virus
ucacuggccagaggcaaaucag

SEQ ID NO: 1235606 - RNA, 14 nt, Hepatitis B virus
ccccuucuucaucu

SEQ ID NO: 1235607 - RNA, 19 nt, Hepatitis B virus
cuaggcugugcugccaacu

SEQ ID NO: 1235608 - RNA, 16 nt, Hepatitis B virus
cuacuguucaagccuc

SEQ ID NO: 1235609 - RNA, 20 nt, Hepatitis B virus
ggcauaaauuggucuguuca

SEQ ID NO: 1235610 - RNA, 14 nt, Hepatitis B virus
uacaaggccuuucu

SEQ ID NO: 1235611 - RNA, 17 nt, Hepatitis B virus
gccuccaagcugugccu

SEQ ID NO: 1235612 - RNA, 15 nt, Hepatitis B virus
cccaucucuccaccu

SEQ ID NO: 1235613 - RNA, 23 nt, Hepatitis B virus
ccaccacacggaggccuuuuggg

SEQ ID NO: 1235614 - RNA, 23 nt, Hepatitis B virus
augcaacuuuuuccccucugccu

SEQ ID NO: 1235615 - RNA, 24 nt, Hepatitis B virus
acccguauaaagaauuuggagcuu

SEQ ID NO: 1235616 - RNA, 16 nt, Hepatitis B virus
agcaugggagguuggu

SEQ ID NO: 1235617 - RNA, 21 nt, Hepatitis B virus
acuggccagaggcaaaucagg

SEQ ID NO: 1235618 - RNA, 16 nt, Hepatitis B virus
cugccccuuuuacaca

SEQ ID NO: 1235619 - RNA, 18 nt, Hepatitis B virus
cuuggccauaggccaucg

SEQ ID NO: 1235620 - RNA, 15 nt, Hepatitis B virus
aggccaugcagugga

SEQ ID NO: 1235621 - RNA, 14 nt, Hepatitis B virus
ucuuggacucucag

SEQ ID NO: 1235622 - RNA, 15 nt, Hepatitis B virus
uguccuacuguucaa

SEQ ID NO: 1235623 - RNA, 18 nt, Hepatitis B virus
cuuggacaaaggcauuaa

SEQ ID NO: 1235624 - RNA, 15 nt, Hepatitis B virus
agcagcaccuccucc

SEQ ID NO: 1235625 - RNA, 15 nt, Hepatitis B virus
gacaacacugccagc

SEQ ID NO: 1235626 - RNA, 21 nt, Hepatitis B virus
gcaacuuuuuccccucugccu

SEQ ID NO: 1235627 - RNA, 22 nt, Hepatitis B virus
ucuaagcaggcuuucacuuucu

SEQ ID NO: 1235628 - RNA, 13 nt, Hepatitis B virus
ccugccuccacca

SEQ ID NO: 1235629 - RNA, 23 nt, Hepatitis B virus
uggagcccucaggcucagggcau

SEQ ID NO: 1235630 - RNA, 19 nt, Hepatitis B virus
uccucgacaccgccucugc

SEQ ID NO: 1235631 - RNA, 12 nt, Hepatitis B virus
cauccucaggcc

SEQ ID NO: 1235632 - RNA, 15 nt, Hepatitis B virus
auuuacauacucugu

SEQ ID NO: 1235633 - RNA, 14 nt, Hepatitis B virus
aggcuggcauucua

SEQ ID NO: 1235634 - RNA, 16 nt, Hepatitis B virus
caaggaucacuggcca

SEQ ID NO: 1235635 - RNA, 13 nt, Hepatitis B virus
ccgccucugcucu

SEQ ID NO: 1235636 - RNA, 12 nt, Hepatitis B virus
uuccccucugcc

SEQ ID NO: 1235637 - RNA, 17 nt, Hepatitis B virus
ccucaccauacagcacu

SEQ ID NO: 1235638 - RNA, 17 nt, Hepatitis B virus
cucaggccaugcagugg

SEQ ID NO: 1235639 - RNA, 12 nt, Hepatitis B virus
cccucaggcuca

SEQ ID NO: 1235640 - RNA, 18 nt, Hepatitis B virus
ccaaaccucgacaaggca

SEQ ID NO: 1235641 - RNA, 14 nt, Hepatitis B virus
ggugggaaacuuua

SEQ ID NO: 1235642 - RNA, 21 nt, Hepatitis B virus
ucucuccaccucuaagagaca

SEQ ID NO: 1235643 - RNA, 14 nt, Hepatitis B virus
ggccaugcagugga

SEQ ID NO: 1235644 - RNA, 15 nt, Hepatitis B virus
auguccuacuguuca

SEQ ID NO: 1235645 - RNA, 15 nt, Hepatitis B virus
caagccuccaagcug

SEQ ID NO: 1235646 - RNA, 12 nt, Hepatitis B virus
acucuuggacuc

SEQ ID NO: 1235647 - RNA, 16 nt, Hepatitis B virus
agcccucaggcucagg

SEQ ID NO: 1235648 - RNA, 17 nt, Hepatitis B virus
uacugcggaacuccuag

SEQ ID NO: 1235649 - RNA, 19 nt, Hepatitis B virus
cuccccgucugugccuucu

SEQ ID NO: 1235650 - RNA, 14 nt, Hepatitis B virus
cguauuauccugaa

SEQ ID NO: 1235651 - RNA, 20 nt, Hepatitis B virus
uuuacaggaggacauuauua

SEQ ID NO: 1235652 - RNA, 19 nt, Hepatitis B virus
uuauccugaauaugcaguu

SEQ ID NO: 1235653 - RNA, 19 nt, Hepatitis B virus
ucggggccguuugggccuc

SEQ ID NO: 1235654 - RNA, 16 nt, Hepatitis B virus
uaaccuuaccaaauau

SEQ ID NO: 1235655 - RNA, 14 nt, Hepatitis B virus
cuucucaucugccg

SEQ ID NO: 1235656 - RNA, 17 nt, Hepatitis B virus
cacggggcgcaccucuc

SEQ ID NO: 1235657 - RNA, 17 nt, Hepatitis B virus
uccucaggccaugcagu

SEQ ID NO: 1235658 - RNA, 19 nt, Hepatitis B virus
ucucuuuuuugccuucuga

SEQ ID NO: 1235659 - RNA, 13 nt, Hepatitis B virus
gucugugccuucu

SEQ ID NO: 1235660 - RNA, 18 nt, Hepatitis B virus
aacuaggcauuauuuaca

SEQ ID NO: 1235661 - RNA, 13 nt, Hepatitis B virus
cucuccaccucua

SEQ ID NO: 1235662 - RNA, 23 nt, Hepatitis B virus
ugcacuucgcuucaccucugcac

SEQ ID NO: 1235663 - RNA, 12 nt, Hepatitis B virus
ccaugcagugga

SEQ ID NO: 1235664 - RNA, 18 nt, Hepatitis B virus
gugccuucucaucugccg

SEQ ID NO: 1235665 - RNA, 17 nt, Hepatitis B virus
gaaccuuuguggcuccu

SEQ ID NO: 1235666 - RNA, 19 nt, Hepatitis B virus
gucuccccgucugugccuu

SEQ ID NO: 1235667 - RNA, 13 nt, Hepatitis B virus
caucucuccaccu

SEQ ID NO: 1235668 - RNA, 21 nt, Hepatitis B virus
cuccggaacauuguucaccuc

SEQ ID NO: 1235669 - RNA, 14 nt, Hepatitis B virus
ucaggucucugcca

SEQ ID NO: 1235670 - RNA, 20 nt, Hepatitis B virus
acucaggcaagcuauucugu

SEQ ID NO: 1235671 - RNA, 21 nt, Hepatitis B virus
ggcauauugacaacacugcca

SEQ ID NO: 1235672 - RNA, 15 nt, Hepatitis B virus
caccgccucugcucu

SEQ ID NO: 1235673 - RNA, 22 nt, Hepatitis B virus
cgaccacggggcgcaccucucu

SEQ ID NO: 1235674 - RNA, 23 nt, Hepatitis B virus
aucuaagcaggcuuucacuuucu

SEQ ID NO: 1235675 - RNA, 18 nt, Hepatitis B virus
cuuucuguucccaauccu

SEQ ID NO: 1235676 - RNA, 11 nt, Hepatitis B virus
agcugugccuu

SEQ ID NO: 1235677 - RNA, 13 nt, Hepatitis B virus
accucucuuuacg

SEQ ID NO: 1235678 - RNA, 18 nt, Hepatitis B virus
caggucuugcccaagguc

SEQ ID NO: 1235679 - RNA, 21 nt, Hepatitis B virus
caacuuuuuccccucugccua

SEQ ID NO: 1235680 - RNA, 15 nt, Hepatitis B virus
ucaggcucagggcau

SEQ ID NO: 1235681 - RNA, 22 nt, Hepatitis B virus
guucccaauccucugggauucu

SEQ ID NO: 1235682 - RNA, 16 nt, Hepatitis B virus
gaccgaccuugaggca

SEQ ID NO: 1235683 - RNA, 12 nt, Hepatitis B virus
uggagcccucag

SEQ ID NO: 1235684 - RNA, 18 nt, Hepatitis B virus
ucuccccgucugugccuu

SEQ ID NO: 1235685 - RNA, 15 nt, Hepatitis B virus
gacaaggcaugggga

SEQ ID NO: 1235686 - RNA, 20 nt, Hepatitis B virus
ucggaaauacaccuccuuuc

SEQ ID NO: 1235687 - RNA, 18 nt, Hepatitis B virus
ggacucuuggacucucag

SEQ ID NO: 1235688 - RNA, 21 nt, Hepatitis B virus
uccagauugggacuucaaccc

SEQ ID NO: 1235689 - RNA, 23 nt, Hepatitis B virus
caacaauaugugggcccucugac

SEQ ID NO: 1235690 - RNA, 15 nt, Hepatitis B virus
cucaggcucagggca

SEQ ID NO: 1235691 - RNA, 23 nt, Hepatitis B virus
ccugcuagguucuauccuaaccu

SEQ ID NO: 1235692 - RNA, 15 nt, Hepatitis B virus
cucagcaaugucaac

SEQ ID NO: 1235693 - RNA, 16 nt, Hepatitis B virus
caccgccucugcucug

SEQ ID NO: 1235694 - RNA, 14 nt, Hepatitis B virus
ccuucucaucugcc

SEQ ID NO: 1235695 - RNA, 11 nt, Hepatitis B virus
gucugugccuu

SEQ ID NO: 1235696 - RNA, 14 nt, Hepatitis B virus
cccaauccucuggg

SEQ ID NO: 1235697 - RNA, 13 nt, Hepatitis B virus
caacacugccagc

SEQ ID NO: 1235698 - RNA, 15 nt, Hepatitis B virus
caccagcaccaugca

SEQ ID NO: 1235699 - RNA, 16 nt, Hepatitis B virus
cauuaaaccguauuau

SEQ ID NO: 1235700 - RNA, 13 nt, Hepatitis B virus
cuccuccugccuc

SEQ ID NO: 1235701 - RNA, 18 nt, Hepatitis B virus
agcaccuccuccugccuc

SEQ ID NO: 1235702 - RNA, 22 nt, Hepatitis B virus
cugcucuguaucgggaggccuu

SEQ ID NO: 1235703 - RNA, 14 nt, Hepatitis B virus
ucuuuaauccugau

SEQ ID NO: 1235704 - RNA, 14 nt, Hepatitis B virus
cgucugugccuucu

SEQ ID NO: 1235705 - RNA, 13 nt, Hepatitis B virus
gucauccucaggc

SEQ ID NO: 1235706 - RNA, 17 nt, Hepatitis B virus
uauccugaauaugcagu

SEQ ID NO: 1235707 - RNA, 16 nt, Hepatitis B virus
ccugaauaugcaguua

SEQ ID NO: 1235708 - RNA, 18 nt, Hepatitis B virus
agccuccaagcugugccu

SEQ ID NO: 1235709 - RNA, 14 nt, Hepatitis B virus
uuguggcuccucug

SEQ ID NO: 1235710 - RNA, 20 nt, Hepatitis B virus
cauuuacaggaggacauuau

SEQ ID NO: 1235711 - RNA, 15 nt, Hepatitis B virus
gccuaaucaucucau

SEQ ID NO: 1235712 - RNA, 23 nt, Hepatitis B virus
aaucuuucuguucccaauccucu

SEQ ID NO: 1235713 - RNA, 19 nt, Hepatitis B virus
acaauccagauugggacuu

SEQ ID NO: 1235714 - RNA, 15 nt, Hepatitis B virus
gcagucaggaagaca

SEQ ID NO: 1235715 - RNA, 17 nt, Hepatitis B virus
uggccagaggcaaauca

SEQ ID NO: 1235716 - RNA, 23 nt, Hepatitis B virus
accccaacaaggaucacuggcca

SEQ ID NO: 1235717 - RNA, 13 nt, Hepatitis B virus
ugggguggagccc

SEQ ID NO: 1235718 - RNA, 14 nt, Hepatitis B virus
cgcuucaccucugc

SEQ ID NO: 1235719 - RNA, 17 nt, Hepatitis B virus
uuugggcuuugcugccc

SEQ ID NO: 1235720 - RNA, 12 nt, Hepatitis B virus
ggacucuuggac

SEQ ID NO: 1235721 - RNA, 20 nt, Hepatitis B virus
ccaugcaacuuuuuccccuc

SEQ ID NO: 1235722 - RNA, 23 nt, Hepatitis B virus
ucuuggacucucagcaaugucaa

SEQ ID NO: 1235723 - RNA, 17 nt, Hepatitis B virus
uugaggcauacuucaaa

SEQ ID NO: 1235724 - RNA, 21 nt, Hepatitis B virus
aggaagacagccuacucccau

SEQ ID NO: 1235725 - RNA, 17 nt, Hepatitis B virus
cuucgcuucaccucugc

SEQ ID NO: 1235726 - RNA, 22 nt, Hepatitis B virus
caaggaucacuggccagaggca

SEQ ID NO: 1235727 - RNA, 18 nt, Hepatitis B virus
ggucuccccgucugugcc

SEQ ID NO: 1235728 - RNA, 17 nt, Hepatitis B virus
uggcuuuggggcaugga

SEQ ID NO: 1235729 - RNA, 18 nt, Hepatitis B virus
gacucauaaggugggaaa

SEQ ID NO: 1235730 - RNA, 13 nt, Hepatitis B virus
cacuuucucgcca

SEQ ID NO: 1235731 - RNA, 20 nt, Hepatitis B virus
ccgucugugccuucucaucu

SEQ ID NO: 1235732 - RNA, 17 nt, Hepatitis B virus
cuccucgacaccgccuc

SEQ ID NO: 1235733 - RNA, 13 nt, Hepatitis B virus
gucaacaauaugu

SEQ ID NO: 1235734 - RNA, 14 nt, Hepatitis B virus
cacaagaggacucu

SEQ ID NO: 1235735 - RNA, 16 nt, Hepatitis B virus
uuggacaaaggcauua

SEQ ID NO: 1235736 - RNA, 12 nt, Hepatitis B virus
ucuuggacucuc

SEQ ID NO: 1235737 - RNA, 15 nt, Hepatitis B virus
uuguucaccucacca

SEQ ID NO: 1235738 - RNA, 12 nt, Hepatitis B virus
gcugugcugcca

SEQ ID NO: 1235739 - RNA, 20 nt, Hepatitis B virus
cuucuguggaguuacucucu

SEQ ID NO: 1235740 - RNA, 19 nt, Hepatitis B virus
ccuccuuuccauggcugcu

SEQ ID NO: 1235741 - RNA, 15 nt, Hepatitis B virus
auccuaaccuuacca

SEQ ID NO: 1235742 - RNA, 14 nt, Hepatitis B virus
ccaagcugugccuu

SEQ ID NO: 1235743 - RNA, 13 nt, Hepatitis B virus
cuacuguaccugu

SEQ ID NO: 1235744 - RNA, 14 nt, Hepatitis B virus
caacacugccagca

SEQ ID NO: 1235745 - RNA, 19 nt, Hepatitis B virus
cacugccagcagcaccucc

SEQ ID NO: 1235746 - RNA, 13 nt, Hepatitis B virus
uggacucucagca

SEQ ID NO: 1235747 - RNA, 13 nt, Hepatitis B virus
caacuuuuucccc

SEQ ID NO: 1235748 - RNA, 23 nt, Hepatitis B virus
aucuccucgacaccgccucugcu

SEQ ID NO: 1235749 - RNA, 22 nt, Hepatitis B virus
ugccugcuagguucuauccuaa

SEQ ID NO: 1235750 - RNA, 19 nt, Hepatitis B virus
cauauugacaacacugcca

SEQ ID NO: 1235751 - RNA, 17 nt, Hepatitis B virus
aaaacucccuccuuucc

SEQ ID NO: 1235752 - RNA, 16 nt, Hepatitis B virus
caacucaaacaaucca

SEQ ID NO: 1235753 - RNA, 18 nt, Hepatitis B virus
caccagcaccaugcaacu

SEQ ID NO: 1235754 - RNA, 16 nt, Hepatitis B virus
cucuuggacucucagc

SEQ ID NO: 1235755 - RNA, 12 nt, Hepatitis B virus
ucgggaggccuu

SEQ ID NO: 1235756 - RNA, 12 nt, Hepatitis B virus
ccgucugugccu

SEQ ID NO: 1235757 - RNA, 19 nt, Hepatitis B virus
cggggccguuugggccucu

SEQ ID NO: 1235758 - RNA, 19 nt, Hepatitis B virus
cuuuugggcuuugcugccc

SEQ ID NO: 1235759 - RNA, 13 nt, Hepatitis B virus
aacguuggggcua

SEQ ID NO: 1235760 - RNA, 19 nt, Hepatitis B virus
agccuccaagcugugccuu

SEQ ID NO: 1235761 - RNA, 15 nt, Hepatitis B virus
cccuucuucaucugc

SEQ ID NO: 1235762 - RNA, 21 nt, Hepatitis B virus
accucgacaaggcauggggac

SEQ ID NO: 1235763 - RNA, 17 nt, Hepatitis B virus
accaaacguuggggcua

SEQ ID NO: 1235764 - RNA, 16 nt, Hepatitis B virus
ggcugcuaggcugugc

SEQ ID NO: 1235765 - RNA, 20 nt, Hepatitis B virus
caccaaucggcagucaggaa

SEQ ID NO: 1235766 - RNA, 19 nt, Hepatitis B virus
acuucaaaacuaggcauua

SEQ ID NO: 1235767 - RNA, 14 nt, Hepatitis B virus
uagagucuccggaa

SEQ ID NO: 1235768 - RNA, 20 nt, Hepatitis B virus
aacaagagcuacagcauggg

SEQ ID NO: 1235769 - RNA, 13 nt, Hepatitis B virus
gccaacucaaaca

SEQ ID NO: 1235770 - RNA, 22 nt, Hepatitis B virus
acauacucuguggaaggcuggc

SEQ ID NO: 1235771 - RNA, 17 nt, Hepatitis B virus
aauauuugcccuuggac

SEQ ID NO: 1235772 - RNA, 19 nt, Hepatitis B virus
ggagauuagguuaaagguc

SEQ ID NO: 1235773 - RNA, 14 nt, Hepatitis B virus
aggcugugcugcca

SEQ ID NO: 1235774 - RNA, 13 nt, Hepatitis B virus
caccgccucugcu

SEQ ID NO: 1235775 - RNA, 15 nt, Hepatitis B virus
ucccaauccucuggg

SEQ ID NO: 1235776 - RNA, 19 nt, Hepatitis B virus
uccagauugggacuucaac

SEQ ID NO: 1235777 - RNA, 14 nt, Hepatitis B virus
cccgucugugccuu

SEQ ID NO: 1235778 - RNA, 15 nt, Hepatitis B virus
acucccuccuuuccu

SEQ ID NO: 1235779 - RNA, 16 nt, Hepatitis B virus
ccuccuuuccucacau

SEQ ID NO: 1235780 - RNA, 12 nt, Hepatitis B virus
aggucucugcca

SEQ ID NO: 1235781 - RNA, 13 nt, Hepatitis B virus
gaucacuggccag

SEQ ID NO: 1235782 - RNA, 16 nt, Hepatitis B virus
caacucaguuguccuc

SEQ ID NO: 1235783 - RNA, 21 nt, Hepatitis B virus
gcggucuccccgucugugccu

SEQ ID NO: 1235784 - RNA, 19 nt, Hepatitis B virus
ccguccccuucuucaucug

SEQ ID NO: 1235785 - RNA, 17 nt, Hepatitis B virus
aucacuggccagaggca

SEQ ID NO: 1235786 - RNA, 13 nt, Hepatitis B virus
ucugacuucuuuc

SEQ ID NO: 1235787 - RNA, 16 nt, Hepatitis B virus
ucccaucucuccaccu

SEQ ID NO: 1235788 - RNA, 16 nt, Hepatitis B virus
gucauccucaggccau

SEQ ID NO: 1235789 - RNA, 15 nt, Hepatitis B virus
uggacaaaggcauua

SEQ ID NO: 1235790 - RNA, 13 nt, Hepatitis B virus
acauucauuuaca

SEQ ID NO: 1235791 - RNA, 15 nt, Hepatitis B virus
cuguggaaggcuggc

SEQ ID NO: 1235792 - RNA, 18 nt, Hepatitis B virus
acucuguggaaggcuggc

SEQ ID NO: 1235793 - RNA, 15 nt, Hepatitis B virus
guggcuccucugccg

SEQ ID NO: 1235794 - RNA, 20 nt, Hepatitis B virus
cuugcccaaggucuuacaca

SEQ ID NO: 1235795 - RNA, 17 nt, Hepatitis B virus
acuaggcauuauuuaca

SEQ ID NO: 1235796 - RNA, 18 nt, Hepatitis B virus
cgaccacggggcgcaccu

SEQ ID NO: 1235797 - RNA, 13 nt, Hepatitis B virus
cuagguucuaucc

SEQ ID NO: 1235798 - RNA, 21 nt, Hepatitis B virus
cauuguucaccucaccauaca

SEQ ID NO: 1235799 - RNA, 17 nt, Hepatitis B virus
ucccaucucuccaccuc

SEQ ID NO: 1235800 - RNA, 12 nt, Hepatitis B virus
gcuuugcugccc

SEQ ID NO: 1235801 - RNA, 22 nt, Hepatitis B virus
cuccucgacaccgccucugcuc

SEQ ID NO: 1235802 - RNA, 12 nt, Hepatitis B virus
cgcuucaccucu

SEQ ID NO: 1235803 - RNA, 23 nt, Hepatitis B virus
gcaacccccacggguuggggcuu

SEQ ID NO: 1235804 - RNA, 12 nt, Hepatitis B virus
cauggcugcuag

SEQ ID NO: 1235805 - RNA, 18 nt, Hepatitis B virus
cugcguucggagccaacu

SEQ ID NO: 1235806 - RNA, 19 nt, Hepatitis B virus
guccuacuguucaagccuc

SEQ ID NO: 1235807 - RNA, 17 nt, Hepatitis B virus
cagucauccucaggcca

SEQ ID NO: 1235808 - RNA, 13 nt, Hepatitis B virus
gaggcaaaucagg

SEQ ID NO: 1235809 - RNA, 17 nt, Hepatitis B virus
uuguggcuccucugccg

SEQ ID NO: 1235810 - RNA, 20 nt, Hepatitis B virus
uccucgacaccgccucugcu

SEQ ID NO: 1235811 - RNA, 16 nt, Hepatitis B virus
cuguucccaauccucu

SEQ ID NO: 1235812 - RNA, 13 nt, Hepatitis B virus
ucuucaucugccg

SEQ ID NO: 1235813 - RNA, 21 nt, Hepatitis B virus
ggucuuccaaaccucgacaag

SEQ ID NO: 1235814 - RNA, 12 nt, Hepatitis B virus
accugucuuuaa

SEQ ID NO: 1235815 - RNA, 19 nt, Hepatitis B virus
agguuggucuuccaaaccu

SEQ ID NO: 1235816 - RNA, 19 nt, Hepatitis B virus
ucuguaucgggaggccuua

SEQ ID NO: 1235817 - RNA, 15 nt, Hepatitis B virus
uuggacaaaggcauu

SEQ ID NO: 1235818 - RNA, 22 nt, Hepatitis B virus
ucuuccaaaccucgacaaggca

SEQ ID NO: 1235819 - RNA, 22 nt, Hepatitis B virus
cuccucugccgauccauacugc

SEQ ID NO: 1235820 - RNA, 17 nt, Hepatitis B virus
auugugggucuuuuggg

SEQ ID NO: 1235821 - RNA, 16 nt, Hepatitis B virus
cuccccgucugugccu

SEQ ID NO: 1235822 - RNA, 20 nt, Hepatitis B virus
cuccaccaaucggcagucag

SEQ ID NO: 1235823 - RNA, 18 nt, Hepatitis B virus
guggaaggcuggcauucu

SEQ ID NO: 1235824 - RNA, 13 nt, Hepatitis B virus
gcugugcugccaa

SEQ ID NO: 1235825 - RNA, 16 nt, Hepatitis B virus
acgcccaccaggucuu

SEQ ID NO: 1235826 - RNA, 13 nt, Hepatitis B virus
accaaucggcagu

SEQ ID NO: 1235827 - RNA, 21 nt, Hepatitis B virus
uuacuucaaaacuaggcauua

SEQ ID NO: 1235828 - RNA, 23 nt, Hepatitis B virus
cuguggaguuacucucuuuuuug

SEQ ID NO: 1235829 - RNA, 18 nt, Hepatitis B virus
gacagucauccucaggcc

SEQ ID NO: 1235830 - RNA, 13 nt, Hepatitis B virus
uucuuuccuucua

SEQ ID NO: 1235831 - RNA, 16 nt, Hepatitis B virus
gcugcuaggcugugcu

SEQ ID NO: 1235832 - RNA, 22 nt, Hepatitis B virus
cuguaccugucuuuaauccuga

SEQ ID NO: 1235833 - RNA, 15 nt, Hepatitis B virus
aauuggucuguucac

SEQ ID NO: 1235834 - RNA, 18 nt, Hepatitis B virus
ccugucuuuaauccugau

SEQ ID NO: 1235835 - RNA, 22 nt, Hepatitis B virus
gagacagucauccucaggccau

SEQ ID NO: 1235836 - RNA, 12 nt, Hepatitis B virus
acaauguggcua

SEQ ID NO: 1235837 - RNA, 13 nt, Hepatitis B virus
cauccucaggcca

SEQ ID NO: 1235838 - RNA, 23 nt, Hepatitis B virus
caauaugugggcccucugacagu

SEQ ID NO: 1235839 - RNA, 12 nt, Hepatitis B virus
agcaaugucaac

SEQ ID NO: 1235840 - RNA, 20 nt, Hepatitis B virus
auaugcaguuaaucauuacu

SEQ ID NO: 1235841 - RNA, 21 nt, Hepatitis B virus
cuacucccaucucuccaccuc

SEQ ID NO: 1235842 - RNA, 16 nt, Hepatitis B virus
acccugcguucggagc

SEQ ID NO: 1235843 - RNA, 22 nt, Hepatitis B virus
acuguaccugucuuuaauccug

SEQ ID NO: 1235844 - RNA, 16 nt, Hepatitis B virus
cuguucaccagcacca

SEQ ID NO: 1235845 - RNA, 23 nt, Hepatitis B virus
accucuaagagacagucauccuc

SEQ ID NO: 1235846 - RNA, 22 nt, Hepatitis B virus
gcaggcuuucacuuucucgcca

SEQ ID NO: 1235847 - RNA, 15 nt, Hepatitis B virus
cuuuacugggcuuua

SEQ ID NO: 1235848 - RNA, 22 nt, Hepatitis B virus
uacauacucuguggaaggcugg

SEQ ID NO: 1235849 - RNA, 11 nt, Hepatitis B virus
cccucaggcuc

SEQ ID NO: 1235850 - RNA, 16 nt, Hepatitis B virus
gcuacagcaugggagg

SEQ ID NO: 1235851 - RNA, 20 nt, Hepatitis B virus
cuccucgacaccgccucugc

SEQ ID NO: 1235852 - RNA, 13 nt, Hepatitis B virus
caucucauguuca

SEQ ID NO: 1235853 - RNA, 15 nt, Hepatitis B virus
ccagcaccaugcaac

SEQ ID NO: 1235854 - RNA, 21 nt, Hepatitis B virus
gcaacggucaggucucugcca

SEQ ID NO: 1235855 - RNA, 11 nt, Hepatitis B virus
acauucauuua

SEQ ID NO: 1235856 - RNA, 14 nt, Hepatitis B virus
ggcccucugacagu

SEQ ID NO: 1235857 - RNA, 15 nt, Hepatitis B virus
agcauuugguccagg

SEQ ID NO: 1235858 - RNA, 16 nt, Hepatitis B virus
ccccuucuucaucugc

SEQ ID NO: 1235859 - RNA, 15 nt, Hepatitis B virus
caagagcuacagcau

SEQ ID NO: 1235860 - RNA, 20 nt, Hepatitis B virus
cuuuguacuaggaggcugua

SEQ ID NO: 1235861 - RNA, 13 nt, Hepatitis B virus
ucgacaaggcaug

SEQ ID NO: 1235862 - RNA, 19 nt, Hepatitis B virus
aauaugugggcccucugac

SEQ ID NO: 1235863 - RNA, 19 nt, Hepatitis B virus
uauaaagaauuuggagcuu

SEQ ID NO: 1235864 - RNA, 15 nt, Hepatitis B virus
cuccaagcugugccu

SEQ ID NO: 1235865 - RNA, 17 nt, Hepatitis B virus
ucucuuuuuugccuucu

SEQ ID NO: 1235866 - RNA, 12 nt, Hepatitis B virus
ccuacuguucaa

SEQ ID NO: 1235867 - RNA, 15 nt, Hepatitis B virus
cuaaucaucucaugu

SEQ ID NO: 1235868 - RNA, 19 nt, Hepatitis B virus
ccuuuguggcuccucugcc

SEQ ID NO: 1235869 - RNA, 15 nt, Hepatitis B virus
ugccuucucaucugc

SEQ ID NO: 1235870 - RNA, 22 nt, Hepatitis B virus
ugcaacuuuuuccccucugccu

SEQ ID NO: 1235871 - RNA, 22 nt, Hepatitis B virus
auccugauuggaaaacucccuc

SEQ ID NO: 1235872 - RNA, 14 nt, Hepatitis B virus
gagcccucaggcuc

SEQ ID NO: 1235873 - RNA, 21 nt, Hepatitis B virus
cccugcguucggagccaacuc

SEQ ID NO: 1235874 - RNA, 16 nt, Hepatitis B virus
gaacauuguucaccuc

SEQ ID NO: 1235875 - RNA, 14 nt, Hepatitis B virus
uugggacuucaacc

SEQ ID NO: 1235876 - RNA, 18 nt, Hepatitis B virus
accucgacaaggcauggg

SEQ ID NO: 1235877 - RNA, 23 nt, Hepatitis B virus
cagcgccucauuuugugggucac

SEQ ID NO: 1235878 - RNA, 21 nt, Hepatitis B virus
ccuuggguggcuuuggggcau

SEQ ID NO: 1235879 - RNA, 19 nt, Hepatitis B virus
accccaccacacggaggcc

SEQ ID NO: 1235880 - RNA, 16 nt, Hepatitis B virus
auccugaauaugcagu

SEQ ID NO: 1235881 - RNA, 12 nt, Hepatitis B virus
acucuguggaag

SEQ ID NO: 1235882 - RNA, 15 nt, Hepatitis B virus
gaaccuuuguggcuc

SEQ ID NO: 1235883 - RNA, 12 nt, Hepatitis B virus
uggucuguucac

SEQ ID NO: 1235884 - RNA, 14 nt, Hepatitis B virus
aacggucaggucuc

SEQ ID NO: 1235885 - RNA, 18 nt, Hepatitis B virus
ugggagguuggucuucca

SEQ ID NO: 1235886 - RNA, 17 nt, Hepatitis B virus
acucucuuuuuugccuu

SEQ ID NO: 1235887 - RNA, 15 nt, Hepatitis B virus
gguggcuuuggggca

SEQ ID NO: 1235888 - RNA, 16 nt, Hepatitis B virus
acaauaucuaaaccuu

SEQ ID NO: 1235889 - RNA, 12 nt, Hepatitis B virus
cugccuccacca

SEQ ID NO: 1235890 - RNA, 15 nt, Hepatitis B virus
cucacauucauuuac

SEQ ID NO: 1235891 - RNA, 18 nt, Hepatitis B virus
uaugucaaagaauugugg

SEQ ID NO: 1235892 - RNA, 18 nt, Hepatitis B virus
ccagcagcaccuccuccu

SEQ ID NO: 1235893 - RNA, 13 nt, Hepatitis B virus
cccaauccucugg

SEQ ID NO: 1235894 - RNA, 18 nt, Hepatitis B virus
gccagaggcaaaucaggu

SEQ ID NO: 1235895 - RNA, 16 nt, Hepatitis B virus
caccccaccacacgga

SEQ ID NO: 1235896 - RNA, 19 nt, Hepatitis B virus
aagaauugugggucuuuug

SEQ ID NO: 1235897 - RNA, 15 nt, Hepatitis B virus
cugggauucuuuccc

SEQ ID NO: 1235898 - RNA, 21 nt, Hepatitis B virus
gagccaacucaaacaauccag

SEQ ID NO: 1235899 - RNA, 19 nt, Hepatitis B virus
ucaacaauaugugggcccu

SEQ ID NO: 1235900 - RNA, 14 nt, Hepatitis B virus
acuucaaaacuagg

SEQ ID NO: 1235901 - RNA, 21 nt, Hepatitis B virus
aucuuucuguucccaauccuc

SEQ ID NO: 1235902 - RNA, 16 nt, Hepatitis B virus
aucacuggccagaggc

SEQ ID NO: 1235903 - RNA, 15 nt, Hepatitis B virus
cugcguucggagcca

SEQ ID NO: 1235904 - RNA, 20 nt, Hepatitis B virus
ccugaauaugcaguuaauca

SEQ ID NO: 1235905 - RNA, 20 nt, Hepatitis B virus
ccuccaccaaucggcaguca

SEQ ID NO: 1235906 - RNA, 22 nt, Hepatitis B virus
ucuguucaccagcaccaugcaa

SEQ ID NO: 1235907 - RNA, 22 nt, Hepatitis B virus
ucaacaauaugugggcccucug

SEQ ID NO: 1235908 - RNA, 14 nt, Hepatitis B virus
aauccucugggauu

SEQ ID NO: 1235909 - RNA, 20 nt, Hepatitis B virus
caaaacuaggcauuauuuac

SEQ ID NO: 1235910 - RNA, 21 nt, Hepatitis B virus
ccgucugugccuucucaucug

SEQ ID NO: 1235911 - RNA, 11 nt, Hepatitis B virus
gguuggggcuu

SEQ ID NO: 1235912 - RNA, 23 nt, Hepatitis B virus
acgcggucuccccgucugugccu

SEQ ID NO: 1235913 - RNA, 15 nt, Hepatitis B virus
cucuuggacucucag

SEQ ID NO: 1235914 - RNA, 23 nt, Hepatitis B virus
gcacuucgcuucaccucugcacg

SEQ ID NO: 1235915 - RNA, 22 nt, Hepatitis B virus
ggucuuuugggcuuugcugccc

SEQ ID NO: 1235916 - RNA, 19 nt, Hepatitis B virus
acucucuuuuuugccuucu

SEQ ID NO: 1235917 - RNA, 14 nt, Hepatitis B virus
gacaacacugccag

SEQ ID NO: 1235918 - RNA, 24 nt, Hepatitis B virus
aggagauuaaaauuaauuaugccu

SEQ ID NO: 1235919 - RNA, 17 nt, Hepatitis B virus
cuuuugggguggagccc

SEQ ID NO: 1235920 - RNA, 15 nt, Hepatitis B virus
uccaggguucacccc

SEQ ID NO: 1235921 - RNA, 22 nt, Hepatitis B virus
cuuggguggcuuuggggcaugg

SEQ ID NO: 1235922 - RNA, 15 nt, Hepatitis B virus
uucgagaucuccucg

SEQ ID NO: 1235923 - RNA, 21 nt, Hepatitis B virus
uggaaccuuuguggcuccucu

SEQ ID NO: 1235924 - RNA, 13 nt, Hepatitis B virus
gagcccucaggcu

SEQ ID NO: 1235925 - RNA, 23 nt, Hepatitis B virus
gaggccuuuugggguggagcccu

SEQ ID NO: 1235926 - RNA, 17 nt, Hepatitis B virus
ccucugacaguuaauga

SEQ ID NO: 1235927 - RNA, 14 nt, Hepatitis B virus
ucauccucaggcca

SEQ ID NO: 1235928 - RNA, 22 nt, Hepatitis B virus
gcaccuccuccugccuccacca

SEQ ID NO: 1235929 - RNA, 21 nt, Hepatitis B virus
caccaggucuugcccaagguc

SEQ ID NO: 1235930 - RNA, 19 nt, Hepatitis B virus
cauccucaggccaugcagu

SEQ ID NO: 1235931 - RNA, 15 nt, Hepatitis B virus
ccuucuucaucugcc

SEQ ID NO: 1235932 - RNA, 19 nt, Hepatitis B virus
ggacuucaaccccaacaag

SEQ ID NO: 1235933 - RNA, 14 nt, Hepatitis B virus
aaccguauuauccu

SEQ ID NO: 1235934 - RNA, 15 nt, Hepatitis B virus
gcaugggagguuggu

SEQ ID NO: 1235935 - RNA, 14 nt, Hepatitis B virus
gccaacuggauccu

SEQ ID NO: 1235936 - RNA, 22 nt, Hepatitis B virus
uggacccugcguucggagccaa

SEQ ID NO: 1235937 - RNA, 16 nt, Hepatitis B virus
gccuccaagcugugcc

SEQ ID NO: 1235938 - RNA, 14 nt, Hepatitis B virus
uucaaagacuguuu

SEQ ID NO: 1235939 - RNA, 15 nt, Hepatitis B virus
uuaaucauuacuuca

SEQ ID NO: 1235940 - RNA, 16 nt, Hepatitis B virus
accauacagcacucag

SEQ ID NO: 1235941 - RNA, 19 nt, Hepatitis B virus
cuuucuguucccaauccuc

SEQ ID NO: 1235942 - RNA, 15 nt, Hepatitis B virus
aguuacucucuuuuu

SEQ ID NO: 1235943 - RNA, 13 nt, Hepatitis B virus
cuccaccucuaag

SEQ ID NO: 1235944 - RNA, 15 nt, Hepatitis B virus
cucucuuuuuugccu

SEQ ID NO: 1235945 - RNA, 19 nt, Hepatitis B virus
auuggaaaacucccuccuu

SEQ ID NO: 1235946 - RNA, 17 nt, Hepatitis B virus
uuaaucauuacuucaaa

SEQ ID NO: 1235947 - RNA, 18 nt, Hepatitis B virus
cuguggaguuacucucuu

SEQ ID NO: 1235948 - RNA, 19 nt, Hepatitis B virus
aagaauuuggagcuucugu

SEQ ID NO: 1235949 - RNA, 14 nt, Hepatitis B virus
caggaagacagccu

SEQ ID NO: 1235950 - RNA, 13 nt, Hepatitis B virus
acaaggccuuucu

SEQ ID NO: 1235951 - RNA, 18 nt, Hepatitis B virus
uggagcccucaggcucag

SEQ ID NO: 1235952 - RNA, 15 nt, Hepatitis B virus
cugccagcagcaccu

SEQ ID NO: 1235953 - RNA, 12 nt, Hepatitis B virus
cuucaucugccg

SEQ ID NO: 1235954 - RNA, 14 nt, Hepatitis B virus
guccuacuguucaa

SEQ ID NO: 1235955 - RNA, 21 nt, Hepatitis B virus
ggcauaaauuggucuguucac

SEQ ID NO: 1235956 - RNA, 16 nt, Hepatitis B virus
ucaccaguuggacccu

SEQ ID NO: 1235957 - RNA, 15 nt, Hepatitis B virus
cugccuugaugccuu

SEQ ID NO: 1235958 - RNA, 16 nt, Hepatitis B virus
ugugggcccucugaca

SEQ ID NO: 1235959 - RNA, 16 nt, Hepatitis B virus
gagcuacagcauggga

SEQ ID NO: 1235960 - RNA, 14 nt, Hepatitis B virus
gcuucaccucugca

SEQ ID NO: 1235961 - RNA, 17 nt, Hepatitis B virus
aaacuuuacugggcuuu

SEQ ID NO: 1235962 - RNA, 14 nt, Hepatitis B virus
gagcuucuguggag

SEQ ID NO: 1235963 - RNA, 20 nt, Hepatitis B virus
ccgucucggggccguuuggg

SEQ ID NO: 1235964 - RNA, 11 nt, Hepatitis B virus
ggagcuucugu

SEQ ID NO: 1235965 - RNA, 20 nt, Hepatitis B virus
ccggaacauuguucaccuca

SEQ ID NO: 1235966 - RNA, 17 nt, Hepatitis B virus
cuuggacaaaggcauua

SEQ ID NO: 1235967 - RNA, 16 nt, Hepatitis B virus
uuacauacucugugga

SEQ ID NO: 1235968 - RNA, 21 nt, Hepatitis B virus
uaccaaauauuugcccuugga

SEQ ID NO: 1235969 - RNA, 16 nt, Hepatitis B virus
caacuuacaaggccuu

SEQ ID NO: 1235970 - RNA, 14 nt, Hepatitis B virus
uccugccuccacca

SEQ ID NO: 1235971 - RNA, 23 nt, Hepatitis B virus
cugccuaaucaucucauguucau

SEQ ID NO: 1235972 - RNA, 21 nt, Hepatitis B virus
uguaccugucuuuaauccuga

SEQ ID NO: 1235973 - RNA, 17 nt, Hepatitis B virus
acaacacugccagcagc

SEQ ID NO: 1235974 - RNA, 14 nt, Hepatitis B virus
guuggucuuccaaa

SEQ ID NO: 1235975 - RNA, 15 nt, Hepatitis B virus
acucuuggacucuca

SEQ ID NO: 1235976 - RNA, 15 nt, Hepatitis B virus
caccuccuccugccu

SEQ ID NO: 1235977 - RNA, 22 nt, Hepatitis B virus
ucaagccuccaagcugugccuu

SEQ ID NO: 1235978 - RNA, 14 nt, Hepatitis B virus
gccuccaagcugug

SEQ ID NO: 1235979 - RNA, 19 nt, Hepatitis B virus
cacuucgcuucaccucugc

SEQ ID NO: 1235980 - RNA, 17 nt, Hepatitis B virus
uccccuucuucaucugc

SEQ ID NO: 1235981 - RNA, 12 nt, Human
aaaaaaugguuc

SEQ ID NO: 1235982 - RNA, 18 nt, Human
aaaaacagauuuggaaag

SEQ ID NO: 1235983 - RNA, 16 nt, Human
aaaaaccuauuccacu

SEQ ID NO: 1235984 - RNA, 18 nt, Human
aaaaaccugagauuuauu

SEQ ID NO: 1235985 - RNA, 22 nt, Human
aaaaaccugagauuuauuaaag

SEQ ID NO: 1235986 - RNA, 23 nt, Human
aaaaaccugagauuuauuaaaga

SEQ ID NO: 1235987 - RNA, 12 nt, Human
aaaaaccuuggg

SEQ ID NO: 1235988 - RNA, 22 nt, Human
aaaaaccuuguauaucuuguuu

SEQ ID NO: 1235989 - RNA, 13 nt, Human
aaaaaccuugggu

SEQ ID NO: 1235990 - RNA, 14 nt, Human
aaaaacuaaaaacu

SEQ ID NO: 1235991 - RNA, 17 nt, Human
aaaaacuaaaaacuaga

SEQ ID NO: 1235992 - RNA, 19 nt, Human
aaaaacuacaaccaaugga

SEQ ID NO: 1235993 - RNA, 11 nt, Human
aaaaacuauuu

SEQ ID NO: 1235994 - RNA, 16 nt, Human
aaaaaauguauaugca

SEQ ID NO: 1235995 - RNA, 20 nt, Human
aguggcgugaucucagcuca

SEQ ID NO: 1235996 - RNA, 14 nt, Human
aguggcucaacauu

SEQ ID NO: 1235997 - RNA, 19 nt, Human
aguggcgugaucucagcuc

SEQ ID NO: 1235998 - RNA, 20 nt, Human
aguggcgcgaucucagcuca

SEQ ID NO: 1235999 - RNA, 19 nt, Human
aguggcgcgaucucagcuc

SEQ ID NO: 1236000 - RNA, 18 nt, Human
aguggcugguccagggcu

SEQ ID NO: 1236001 - RNA, 19 nt, Human
aguggcugguccagggcua

SEQ ID NO: 1236002 - RNA, 22 nt, Human
aguggcuggggcauggaaggca

SEQ ID NO: 1236003 - RNA, 13 nt, Human
aguggcuggggca

SEQ ID NO: 1236004 - RNA, 16 nt, Human
aguggcuggggcaugg

SEQ ID NO: 1236005 - RNA, 15 nt, Human
aguggcugguccagg

SEQ ID NO: 1236006 - RNA, 17 nt, Human
aguggcugguccagggc

SEQ ID NO: 1236007 - RNA, 13 nt, Human
aguggcuccuccc

SEQ ID NO: 1236008 - RNA, 17 nt, Human
aguggcuccucccggug

SEQ ID NO: 1236009 - RNA, 21 nt, Human
aguggcuccucccggugccca

SEQ ID NO: 1236010 - RNA, 18 nt, Human
aguguaucaaaaugcucu

SEQ ID NO: 1236011 - RNA, 17 nt, Human
aguguaucaaaaugcuc

SEQ ID NO: 1236012 - RNA, 18 nt, Human
aguguaugacugcacaug

SEQ ID NO: 1236013 - RNA, 16 nt, Human
aguguaucaaaaugcu

SEQ ID NO: 1236014 - RNA, 15 nt, Human
aguguaucaaaaugc

SEQ ID NO: 1236015 - RNA, 14 nt, Human
aguguaucaaaaug

SEQ ID NO: 1236016 - RNA, 13 nt, Human
aguguaucaaaau

SEQ ID NO: 1236017 - RNA, 14 nt, Human
aguguaugauuacu

SEQ ID NO: 1236018 - RNA, 15 nt, Human
aguguaugauuacug

SEQ ID NO: 1236019 - RNA, 19 nt, Human
aguguaugauuacuggccu

SEQ ID NO: 1236020 - RNA, 16 nt, Human
aguguauggaaauaaa

SEQ ID NO: 1236021 - RNA, 20 nt, Human
aguguauggaaauaaaugua

SEQ ID NO: 1236022 - RNA, 21 nt, Human
aguguauggaaauaaauguau

SEQ ID NO: 1236023 - RNA, 22 nt, Human
aguguauggaaauaaauguauc

SEQ ID NO: 1236024 - RNA, 14 nt, Human
aguguauuuggaaa

SEQ ID NO: 1236025 - RNA, 23 nt, Human
aguguauuuggaaauaaagucag

SEQ ID NO: 1236026 - RNA, 14 nt, Human
aguguccucagggg

SEQ ID NO: 1236027 - RNA, 22 nt, Human
aguguccucuucccucucugca

SEQ ID NO: 1236028 - RNA, 18 nt, Human
aguguccugagccccagg

SEQ ID NO: 1236029 - RNA, 13 nt, Human
aguguccugagcu

SEQ ID NO: 1236030 - RNA, 22 nt, Human
agugucuguguuuugaaagaau

SEQ ID NO: 1236031 - RNA, 20 nt, Human
aguguccugagcucagcgug

SEQ ID NO: 1236032 - RNA, 15 nt, Human
aguguccugagcuca

SEQ ID NO: 1236033 - RNA, 17 nt, Human
aguguccugagcucagc

SEQ ID NO: 1236034 - RNA, 21 nt, Human
aguguccugagcucagcgugg

SEQ ID NO: 1236035 - RNA, 22 nt, Human
aguugaaaaucuuauaauuuaa

SEQ ID NO: 1236036 - RNA, 13 nt, Human
aguuccaagaguc

SEQ ID NO: 1236037 - RNA, 14 nt, Human
aguuccaagagucu

SEQ ID NO: 1236038 - RNA, 19 nt, Human
aguuccaagagucuaaaga

SEQ ID NO: 1236039 - RNA, 13 nt, Human
aguucaugagaau

SEQ ID NO: 1236040 - RNA, 21 nt, Human
aguucaugagaaucuauauuu

SEQ ID NO: 1236041 - RNA, 13 nt, Human
aguucaugcagcu

SEQ ID NO: 1236042 - RNA, 22 nt, Human
aguucaugcagcuguggcagag

SEQ ID NO: 1236043 - RNA, 13 nt, Human
aguucauguaaau

SEQ ID NO: 1236044 - RNA, 14 nt, Human
aguucauguaaaua

SEQ ID NO: 1236045 - RNA, 16 nt, Human
aguucauguaaauaau

SEQ ID NO: 1236046 - RNA, 17 nt, Human
aguucauguaaauaaua

SEQ ID NO: 1236047 - RNA, 17 nt, Human
aguucaugucugcuauc

SEQ ID NO: 1236048 - RNA, 16 nt, Human
aguucaugucugcuau

SEQ ID NO: 1236049 - RNA, 15 nt, Human
aguucauuagaaaua

SEQ ID NO: 1236050 - RNA, 16 nt, Human
aguucauuagaaauau

SEQ ID NO: 1236051 - RNA, 23 nt, Human
aguucauuagaaauauuuuaaaa

SEQ ID NO: 1236052 - RNA, 18 nt, Human
aguucauuagaaauauuu

SEQ ID NO: 1236053 - RNA, 19 nt, Human
aguuacagaaaugauuacu

SEQ ID NO: 1236054 - RNA, 13 nt, Human
aguuaagccuuug

SEQ ID NO: 1236055 - RNA, 14 nt, Human
aguuaagccuuugg

SEQ ID NO: 1236056 - RNA, 15 nt, Human
aguuaaucaucaaga

SEQ ID NO: 1236057 - RNA, 19 nt, Human
aguuaaucaucaagagaau

SEQ ID NO: 1236058 - RNA, 18 nt, Human
aguuaaucaucaagagaa

SEQ ID NO: 1236059 - RNA, 14 nt, Human
aguuaaucuugcuu

SEQ ID NO: 1236060 - RNA, 15 nt, Human
aguuaaucuugcuuu

SEQ ID NO: 1236061 - RNA, 16 nt, Human
aguuaaucuugcuuuc

SEQ ID NO: 1236062 - RNA, 18 nt, Human
aguuaaucuugcuuucuu

SEQ ID NO: 1236063 - RNA, 23 nt, Human
aguugaaaaucuuauaauuuaaa

SEQ ID NO: 1236064 - RNA, 16 nt, Human
aguugaaaauaaagug

SEQ ID NO: 1236065 - RNA, 18 nt, Human
aguugaaaauaaagugua

SEQ ID NO: 1236066 - RNA, 19 nt, Human
aguugaaaauaaaguguau

SEQ ID NO: 1236067 - RNA, 16 nt, Human
aguuguguuugaagca

SEQ ID NO: 1236068 - RNA, 21 nt, Human
aguugugucuggcaguuuaua

SEQ ID NO: 1236069 - RNA, 16 nt, Human
aguuguuguaaccugc

SEQ ID NO: 1236070 - RNA, 14 nt, Human
aguuguuguagaga

SEQ ID NO: 1236071 - RNA, 12 nt, Human
aguuguuguaac

SEQ ID NO: 1236072 - RNA, 14 nt, Human
aguuguguuucaac

SEQ ID NO: 1236073 - RNA, 23 nt, Human
aguuguguuucaacggaaagugc

SEQ ID NO: 1236074 - RNA, 23 nt, Human
aguuguucgggccaaggaccuga

SEQ ID NO: 1236075 - RNA, 18 nt, Human
aguuguucuuuuuagaaa

SEQ ID NO: 1236076 - RNA, 16 nt, Human
aguaucucuucagucu

SEQ ID NO: 1236077 - RNA, 18 nt, Human
aguaucucuucagucucu

SEQ ID NO: 1236078 - RNA, 16 nt, Human
aguaucuuuuuauuca

SEQ ID NO: 1236079 - RNA, 12 nt, Human
aguaucuuuuga

SEQ ID NO: 1236080 - RNA, 12 nt, Human
aguaugaaaaua

SEQ ID NO: 1236081 - RNA, 16 nt, Human
aguaugaauaaagaca

SEQ ID NO: 1236082 - RNA, 13 nt, Human
aguaugaaaauaa

SEQ ID NO: 1236083 - RNA, 22 nt, Human
aguaugaauuauucaauuuauu

SEQ ID NO: 1236084 - RNA, 23 nt, Human
aguaugcuugaaaagauaaauua

SEQ ID NO: 1236085 - RNA, 17 nt, Human
aguaugaauuauucaau

SEQ ID NO: 1236086 - RNA, 15 nt, Human
aguauggccuguguc

SEQ ID NO: 1236087 - RNA, 16 nt, Human
aguauggccuguguca

SEQ ID NO: 1236088 - RNA, 23 nt, Human
agucaaauugugugaaagguacu

SEQ ID NO: 1236089 - RNA, 22 nt, Human
agucaaaugguaggcauuuccu

SEQ ID NO: 1236090 - RNA, 23 nt, Human
agucaaaugguaggcauuuccua

SEQ ID NO: 1236091 - RNA, 14 nt, Human
agucaaauaacucc

SEQ ID NO: 1236092 - RNA, 18 nt, Human
aguauggguuagggaaaa

SEQ ID NO: 1236093 - RNA, 17 nt, Human
aguaugggacuggccuc

SEQ ID NO: 1236094 - RNA, 20 nt, Human
aguaugggacuggccucugc

SEQ ID NO: 1236095 - RNA, 18 nt, Human
aguauggggguuguaaau

SEQ ID NO: 1236096 - RNA, 19 nt, Human
aguauggggguuguaaauu

SEQ ID NO: 1236097 - RNA, 22 nt, Human
agucaacaguaaaccacugaaa

SEQ ID NO: 1236098 - RNA, 17 nt, Human
agucaacaguaaaccac

SEQ ID NO: 1236099 - RNA, 18 nt, Human
agucaacaguaaaccacu

SEQ ID NO: 1236100 - RNA, 20 nt, Human
agucaacaguaaaccacuga

SEQ ID NO: 1236101 - RNA, 21 nt, Human
agucaacaguaaaccacugaa

SEQ ID NO: 1236102 - RNA, 13 nt, Human
agucaacaguaaa

SEQ ID NO: 1236103 - RNA, 14 nt, Human
agucaacaguaaac

SEQ ID NO: 1236104 - RNA, 15 nt, Human
agucaacaguaaacc

SEQ ID NO: 1236105 - RNA, 16 nt, Human
agucaacaguaaacca

SEQ ID NO: 1236106 - RNA, 17 nt, Human
agugacccacaugccau

SEQ ID NO: 1236107 - RNA, 18 nt, Human
agugaccauacuaauuau

SEQ ID NO: 1236108 - RNA, 19 nt, Human
aguccugggauuacaggug

SEQ ID NO: 1236109 - RNA, 13 nt, Human
aguccugugaaug

SEQ ID NO: 1236110 - RNA, 18 nt, Human
aguccugugaaugccacu

SEQ ID NO: 1236111 - RNA, 19 nt, Human
aguccugugaaugccacug

SEQ ID NO: 1236112 - RNA, 20 nt, Human
aguccugugaaugccacugc

SEQ ID NO: 1236113 - RNA, 12 nt, Human
aguccuguaaug

SEQ ID NO: 1236114 - RNA, 21 nt, Human
aguccugugaaugccacugcc

SEQ ID NO: 1236115 - RNA, 14 nt, Human
agucugccacccag

SEQ ID NO: 1236116 - RNA, 11 nt, Human
agucugccagg

SEQ ID NO: 1236117 - RNA, 13 nt, Human
agucugccagggc

SEQ ID NO: 1236118 - RNA, 22 nt, Human
agucugccagggccccucuccc

SEQ ID NO: 1236119 - RNA, 12 nt, Human
agugaagaauac

SEQ ID NO: 1236120 - RNA, 14 nt, Human
agugaagaauacuu

SEQ ID NO: 1236121 - RNA, 22 nt, Human
agugaagaauacuucucauuuu

SEQ ID NO: 1236122 - RNA, 12 nt, Human
agugaagacaga

SEQ ID NO: 1236123 - RNA, 13 nt, Human
agugaagacagaa

SEQ ID NO: 1236124 - RNA, 20 nt, Human
agugaagacagaaccacagg

SEQ ID NO: 1236125 - RNA, 14 nt, Human
agugaagacagaag

SEQ ID NO: 1236126 - RNA, 21 nt, Human
agugaagacuagaaaauuaga

SEQ ID NO: 1236127 - RNA, 15 nt, Human
agugaagacagaagu

SEQ ID NO: 1236128 - RNA, 16 nt, Human
agugaagacuggaagc

SEQ ID NO: 1236129 - RNA, 15 nt, Human
agugaaggcuucucu

SEQ ID NO: 1236130 - RNA, 21 nt, Human
agugaaggcuucucucugugg

SEQ ID NO: 1236131 - RNA, 23 nt, Human
agugaagggaagagacagcccag

SEQ ID NO: 1236132 - RNA, 14 nt, Human
agugaaguugcugc

SEQ ID NO: 1236133 - RNA, 15 nt, Human
agugaaguugcugcu

SEQ ID NO: 1236134 - RNA, 23 nt, Human
agugaaguugcugcuucucccag

SEQ ID NO: 1236135 - RNA, 16 nt, Human
agugaaguugcugcuu

SEQ ID NO: 1236136 - RNA, 20 nt, Human
agugacagcuaggaugugca

SEQ ID NO: 1236137 - RNA, 12 nt, Human
agugacagcuag

SEQ ID NO: 1236138 - RNA, 14 nt, Human
auagucaaauugug

SEQ ID NO: 1236139 - RNA, 18 nt, Human
auaguauuuuuauauuua

SEQ ID NO: 1236140 - RNA, 17 nt, Human
auagucaaauuguguga

SEQ ID NO: 1236141 - RNA, 22 nt, Human
auauacucuagaugaaguuuua

SEQ ID NO: 1236142 - RNA, 20 nt, Human
auauacuuugaaaggagaug

SEQ ID NO: 1236143 - RNA, 23 nt, Human
auauagaucaguuauaaguagca

SEQ ID NO: 1236144 - RNA, 18 nt, Human
auauacuuuuacaaguaa

SEQ ID NO: 1236145 - RNA, 11 nt, Human
auauacuuuuu

SEQ ID NO: 1236146 - RNA, 20 nt, Human
auauacuuuuuuuucuuuaa

SEQ ID NO: 1236147 - RNA, 20 nt, Human
auauagaaguauaaagaauu

SEQ ID NO: 1236148 - RNA, 17 nt, Human
auauagaaguauaaaga

SEQ ID NO: 1236149 - RNA, 15 nt, Human
auagguuuaauaauu

SEQ ID NO: 1236150 - RNA, 14 nt, Human
auagguuuggacaa

SEQ ID NO: 1236151 - RNA, 18 nt, Human
auagguuuggacaaaaug

SEQ ID NO: 1236152 - RNA, 12 nt, Human
auagguuauuuu

SEQ ID NO: 1236153 - RNA, 12 nt, Human
auagguuuagag

SEQ ID NO: 1236154 - RNA, 21 nt, Human
auagguauaaguggugugugu

SEQ ID NO: 1236155 - RNA, 13 nt, Human
auaggucugaaau

SEQ ID NO: 1236156 - RNA, 14 nt, Human
auaggucugaaauu

SEQ ID NO: 1236157 - RNA, 15 nt, Human
auaggucugaaauuu

SEQ ID NO: 1236158 - RNA, 20 nt, Human
auaggugauccauguaacug

SEQ ID NO: 1236159 - RNA, 23 nt, Human
auaggugauccauguaacugccu

SEQ ID NO: 1236160 - RNA, 13 nt, Human
auagccaaaaaua

SEQ ID NO: 1236161 - RNA, 14 nt, Human
auagccaaaaauag

SEQ ID NO: 1236162 - RNA, 15 nt, Human
auagccaaaaauagc

SEQ ID NO: 1236163 - RNA, 16 nt, Human
auagccaaaaauagcu

SEQ ID NO: 1236164 - RNA, 18 nt, Human
auagccaaaaauagcuaa

SEQ ID NO: 1236165 - RNA, 13 nt, Human
auagccacauuug

SEQ ID NO: 1236166 - RNA, 16 nt, Human
auagccacauuuggaa

SEQ ID NO: 1236167 - RNA, 21 nt, Human
auagccacauuuggaauacuu

SEQ ID NO: 1236168 - RNA, 22 nt, Human
auagccacauuuggaauacuuu

SEQ ID NO: 1236169 - RNA, 23 nt, Human
auagccacauuuggaauacuuuu

SEQ ID NO: 1236170 - RNA, 13 nt, Human
auagccacuaacc

SEQ ID NO: 1236171 - RNA, 15 nt, Human
auagccacuaaccuu

SEQ ID NO: 1236172 - RNA, 20 nt, Human
auagccacuaaccuugccug

SEQ ID NO: 1236173 - RNA, 21 nt, Human
auagccacuaaccuugccugg

SEQ ID NO: 1236174 - RNA, 22 nt, Human
auagccacuaaccuugccuggu

SEQ ID NO: 1236175 - RNA, 23 nt, Human
auagccacuaaccuugccuggua

SEQ ID NO: 1236176 - RNA, 12 nt, Human
auagccauauuu

SEQ ID NO: 1236177 - RNA, 16 nt, Human
auagccauauuuguaa

SEQ ID NO: 1236178 - RNA, 20 nt, Human
auagccauauuuguaaaaug

SEQ ID NO: 1236179 - RNA, 22 nt, Human
auagccauauuuguaaaaugac

SEQ ID NO: 1236180 - RNA, 23 nt, Human
auagccauauuuguaaaaugaca

SEQ ID NO: 1236181 - RNA, 13 nt, Human
auagcccacuuac

SEQ ID NO: 1236182 - RNA, 15 nt, Human
auagcccacuuacau

SEQ ID NO: 1236183 - RNA, 19 nt, Human
auagcccacuuacauuuac

SEQ ID NO: 1236184 - RNA, 16 nt, Human
auaucaaauauauuca

SEQ ID NO: 1236185 - RNA, 19 nt, Human
auauauuuuuuucugaaau

SEQ ID NO: 1236186 - RNA, 23 nt, Human
auauauuuuuuuuuaagcucuga

SEQ ID NO: 1236187 - RNA, 15 nt, Human
auaucaauuuaaaaa

SEQ ID NO: 1236188 - RNA, 16 nt, Human
auaucauccacacaug

SEQ ID NO: 1236189 - RNA, 18 nt, Human
auaucauccacacaugaa

SEQ ID NO: 1236190 - RNA, 24 nt, Human
auaucauccacacaugaaucugca

SEQ ID NO: 1236191 - RNA, 16 nt, Human
auaucaucuaccuaga

SEQ ID NO: 1236192 - RNA, 20 nt, Human
auaucaucuaccuagauuua

SEQ ID NO: 1236193 - RNA, 21 nt, Human
auaucaugagugaauaaaugu

SEQ ID NO: 1236194 - RNA, 21 nt, Human
auaucaucuaccuagauuuaa

SEQ ID NO: 1236195 - RNA, 23 nt, Human
auauuaugaagcuuuuaugugaa

SEQ ID NO: 1236196 - RNA, 13 nt, Human
auauuaucuuuuc

SEQ ID NO: 1236197 - RNA, 12 nt, Human
auauuauaugga

SEQ ID NO: 1236198 - RNA, 13 nt, Human
auauuauauggaa

SEQ ID NO: 1236199 - RNA, 18 nt, Human
auauuauauggaaauaua

SEQ ID NO: 1236200 - RNA, 19 nt, Human
auauuauauggaaauauau

SEQ ID NO: 1236201 - RNA, 20 nt, Human
auauuauauggaaauauaua

SEQ ID NO: 1236202 - RNA, 16 nt, Human
auauuaugagaugcug

SEQ ID NO: 1236203 - RNA, 14 nt, Human
auauuaugagaugc

SEQ ID NO: 1236204 - RNA, 15 nt, Human
auauuaugagaugcu

SEQ ID NO: 1236205 - RNA, 12 nt, Human
auauuauuacuu

SEQ ID NO: 1236206 - RNA, 15 nt, Human
auauuauuacuugua

SEQ ID NO: 1236207 - RNA, 17 nt, Human
auauuauuacuuguaaa

SEQ ID NO: 1236208 - RNA, 19 nt, Human
auauuauuacuuguaaaua

SEQ ID NO: 1236209 - RNA, 19 nt, Human
auauuauuaguuuugauuu

SEQ ID NO: 1236210 - RNA, 22 nt, Human
auauuauuaguuuugauuuaau

SEQ ID NO: 1236211 - RNA, 18 nt, Human
auauuauuauaaucuuau

SEQ ID NO: 1236212 - RNA, 19 nt, Human
auauuauuauaaucuuaua

SEQ ID NO: 1236213 - RNA, 21 nt, Human
auauuauuauaaucuuauaau

SEQ ID NO: 1236214 - RNA, 23 nt, Human
auauuauuauaaucuuauaauug

SEQ ID NO: 1236215 - RNA, 19 nt, Human
auauuauuccucaaaaaau

SEQ ID NO: 1236216 - RNA, 15 nt, Human
auauuuaccucagcc

SEQ ID NO: 1236217 - RNA, 16 nt, Human
auauuuaccucagccu

SEQ ID NO: 1236218 - RNA, 17 nt, Human
auauuuaccucagccug

SEQ ID NO: 1236219 - RNA, 19 nt, Human
auauuuaccucagccuggg

SEQ ID NO: 1236220 - RNA, 14 nt, Human
auauuauuuuaugu

SEQ ID NO: 1236221 - RNA, 13 nt, Human
auauuuauuuuaa

SEQ ID NO: 1236222 - RNA, 14 nt, Human
auauuuacucuaua

SEQ ID NO: 1236223 - RNA, 18 nt, Human
auauuuaccucagccugg

SEQ ID NO: 1236224 - RNA, 13 nt, Human
auauccuaaacau

SEQ ID NO: 1236225 - RNA, 15 nt, Human
auauccuaaacauca

SEQ ID NO: 1236226 - RNA, 12 nt, Human
auauccaaaagc

SEQ ID NO: 1236227 - RNA, 19 nt, Human
auauccaaaagcuuuuuau

SEQ ID NO: 1236228 - RNA, 22 nt, Human
auauccuaaacaucauucauuu

SEQ ID NO: 1236229 - RNA, 23 nt, Human
auaugcuucuguuuuauaauuuu

SEQ ID NO: 1236230 - RNA, 20 nt, Human
auaugcucugauuuaucuga

SEQ ID NO: 1236231 - RNA, 17 nt, Human
auauuacgguuugcccc

SEQ ID NO: 1236232 - RNA, 20 nt, Human
auaugcuucuguuuuauaau

SEQ ID NO: 1236233 - RNA, 22 nt, Human
auaugcuucuguuuuauaauuu

SEQ ID NO: 1236234 - RNA, 13 nt, Human
auacacacaguua

SEQ ID NO: 1236235 - RNA, 23 nt, Human
auaccauuauauguucccccugu

SEQ ID NO: 1236236 - RNA, 14 nt, Human
auaagcuuuucuuu

SEQ ID NO: 1236237 - RNA, 13 nt, Human
auaaggaaaagcu

SEQ ID NO: 1236238 - RNA, 13 nt, Human
auaagcuuuucuu

SEQ ID NO: 1236239 - RNA, 20 nt, Human
auaaggaaaucaacuugcuu

SEQ ID NO: 1236240 - RNA, 22 nt, Human
auaaggaaaucaacuugcuuau

SEQ ID NO: 1236241 - RNA, 24 nt, Human
auaaggaaaucaacuugcuuauca

SEQ ID NO: 1236242 - RNA, 19 nt, Human
auaaggccauaaaacaggu

SEQ ID NO: 1236243 - RNA, 11 nt, Human
auaaggcaggg

SEQ ID NO: 1236244 - RNA, 21 nt, Human
auaaugggauuuucuuuucuu

SEQ ID NO: 1236245 - RNA, 14 nt, Human
auacccacccagaa

SEQ ID NO: 1236246 - RNA, 13 nt, Human
auacccacccaga

SEQ ID NO: 1236247 - RNA, 20 nt, Human
auaccucuaauaguauaaac

SEQ ID NO: 1236248 - RNA, 19 nt, Human
auaccucuaauaguauaaa

SEQ ID NO: 1236249 - RNA, 18 nt, Human
auaccucuaauaguauaa

SEQ ID NO: 1236250 - RNA, 14 nt, Human
auaccucuaauagu

SEQ ID NO: 1236251 - RNA, 20 nt, Human
auaccucaauuuucacugug

SEQ ID NO: 1236252 - RNA, 12 nt, Human
auaccucacuuu

SEQ ID NO: 1236253 - RNA, 18 nt, Human
auaccuuagugcaguuau

SEQ ID NO: 1236254 - RNA, 19 nt, Human
auaccuguguuucuugccu

SEQ ID NO: 1236255 - RNA, 20 nt, Human
auaccuguguuucuugccuc

SEQ ID NO: 1236256 - RNA, 22 nt, Human
auaccuguguuucuugccucau

SEQ ID NO: 1236257 - RNA, 21 nt, Human
auaccuguguuucuugccuca

SEQ ID NO: 1236258 - RNA, 15 nt, Human
auaaauuuuuuauaa

SEQ ID NO: 1236259 - RNA, 17 nt, Human
auaacaaaugccaaauu

SEQ ID NO: 1236260 - RNA, 20 nt, Human
auaacaaaugccaaauuaaa

SEQ ID NO: 1236261 - RNA, 21 nt, Human
auaacaaaugccaaauuaaaa

SEQ ID NO: 1236262 - RNA, 14 nt, Human
auaacaacuucaua

SEQ ID NO: 1236263 - RNA, 18 nt, Human
auaaaggauuaaugucaa

SEQ ID NO: 1236264 - RNA, 16 nt, Human
auaaaggcaguuuucu

SEQ ID NO: 1236265 - RNA, 17 nt, Human
auaaaggcaguuuucua

SEQ ID NO: 1236266 - RNA, 18 nt, Human
auaaaggcaguuuucuaa

SEQ ID NO: 1236267 - RNA, 20 nt, Human
auaaacuuuuuucuuacugu

SEQ ID NO: 1236268 - RNA, 14 nt, Human
auaaaagaaaauua

SEQ ID NO: 1236269 - RNA, 13 nt, Human
auaaagaaaagau

SEQ ID NO: 1236270 - RNA, 14 nt, Human
auaaagaaaagaug

SEQ ID NO: 1236271 - RNA, 15 nt, Human
auaaagaaaagaugc

SEQ ID NO: 1236272 - RNA, 16 nt, Human
auaaagaaaagaugca

SEQ ID NO: 1236273 - RNA, 17 nt, Human
auaaagaaaagaugcac

SEQ ID NO: 1236274 - RNA, 19 nt, Human
auaaagaaaagaugcacuu

SEQ ID NO: 1236275 - RNA, 13 nt, Human
auaaagaaaauga

SEQ ID NO: 1236276 - RNA, 15 nt, Human
auaaaagacagugaa

SEQ ID NO: 1236277 - RNA, 12 nt, Human
auaaaagaaaau

SEQ ID NO: 1236278 - RNA, 13 nt, Human
auaaaagaaaauu

SEQ ID NO: 1236279 - RNA, 16 nt, Human
auaaaagaaaauuaca

SEQ ID NO: 1236280 - RNA, 19 nt, Human
auaaaaauaaaaaagaucc

SEQ ID NO: 1236281 - RNA, 14 nt, Human
auaaaaauaaaaaa

SEQ ID NO: 1236282 - RNA, 16 nt, Human
auaaaaagugcuuuug

SEQ ID NO: 1236283 - RNA, 12 nt, Human
auaaaaaggugu

SEQ ID NO: 1236284 - RNA, 14 nt, Human
auaaaggacuguaa

SEQ ID NO: 1236285 - RNA, 13 nt, Human
auaaaggauguga

SEQ ID NO: 1236286 - RNA, 15 nt, Human
auaaaggaaaagaca

SEQ ID NO: 1236287 - RNA, 16 nt, Human
auaaaggaaaagacac

SEQ ID NO: 1236288 - RNA, 18 nt, Human
auaaaggaaaagacacau

SEQ ID NO: 1236289 - RNA, 14 nt, Human
auaaaggaugugau

SEQ ID NO: 1236290 - RNA, 17 nt, Human
auaaaggaugugauugu

SEQ ID NO: 1236291 - RNA, 21 nt, Human
auaaaggaugugauuguggaa

SEQ ID NO: 1236292 - RNA, 22 nt, Human
auaaaggaugugauuguggaau

SEQ ID NO: 1236293 - RNA, 18 nt, Human
auaaagcuguguggcagu

SEQ ID NO: 1236294 - RNA, 12 nt, Human
auaaaggaaaag

SEQ ID NO: 1236295 - RNA, 15 nt, Human
auaaagcaggcagaa

SEQ ID NO: 1236296 - RNA, 16 nt, Human
auaaagcaguauuuuu

SEQ ID NO: 1236297 - RNA, 14 nt, Human
auaaagcaguauuu

SEQ ID NO: 1236298 - RNA, 12 nt, Human
auaaagcauuua

SEQ ID NO: 1236299 - RNA, 13 nt, Human
auaaagcauuuaa

SEQ ID NO: 1236300 - RNA, 14 nt, Human
auaaagcauuuaac

SEQ ID NO: 1236301 - RNA, 18 nt, Human
auaaagccucaagguuuu

SEQ ID NO: 1236302 - RNA, 21 nt, Human
auaaagccucaagguuuuagg

SEQ ID NO: 1236303 - RNA, 22 nt, Human
auaaagccucaagguuuuaggu

SEQ ID NO: 1236304 - RNA, 11 nt, Human
auaaagaaugg

SEQ ID NO: 1236305 - RNA, 12 nt, Human
auaaagacaccu

SEQ ID NO: 1236306 - RNA, 18 nt, Human
auaaagaaauagaacaag

SEQ ID NO: 1236307 - RNA, 17 nt, Human
auaaagaaauagaacaa

SEQ ID NO: 1236308 - RNA, 17 nt, Human
auauuuauuuuaauaau

SEQ ID NO: 1236309 - RNA, 14 nt, Human
auauuuauuuuaau

SEQ ID NO: 1236310 - RNA, 15 nt, Human
auauuuauuuuaaua

SEQ ID NO: 1236311 - RNA, 15 nt, Human
aucacauguggacuu

SEQ ID NO: 1236312 - RNA, 12 nt, Human
aucagcguggcc

SEQ ID NO: 1236313 - RNA, 13 nt, Human
aucagcguggccu

SEQ ID NO: 1236314 - RNA, 15 nt, Human
aucagcguggccuug

SEQ ID NO: 1236315 - RNA, 16 nt, Human
aucagcguggccuugu

SEQ ID NO: 1236316 - RNA, 21 nt, Human
aucagcguggccuuguucugu

SEQ ID NO: 1236317 - RNA, 17 nt, Human
aucagcuauuuugugaa

SEQ ID NO: 1236318 - RNA, 13 nt, Human
aucagcuccuucc

SEQ ID NO: 1236319 - RNA, 15 nt, Human
aucagcuccuuccug

SEQ ID NO: 1236320 - RNA, 16 nt, Human
aucaugugaaaucauu

SEQ ID NO: 1236321 - RNA, 19 nt, Human
aucauguuaguaauaccuc

SEQ ID NO: 1236322 - RNA, 14 nt, Human
aucauguuaguaau

SEQ ID NO: 1236323 - RNA, 22 nt, Human
aucauguuaguaauaccucuaa

SEQ ID NO: 1236324 - RNA, 21 nt, Human
aucauguuaguaauaccucua

SEQ ID NO: 1236325 - RNA, 15 nt, Human
aucaugugaaaucau

SEQ ID NO: 1236326 - RNA, 17 nt, Human
aucagcuccuuccugga

SEQ ID NO: 1236327 - RNA, 16 nt, Human
auccagaaagaaaacu

SEQ ID NO: 1236328 - RNA, 18 nt, Human
auccagaaagaaaacuug

SEQ ID NO: 1236329 - RNA, 13 nt, Human
auccccaagccug

SEQ ID NO: 1236330 - RNA, 19 nt, Human
auccaggcagauccaggac

SEQ ID NO: 1236331 - RNA, 15 nt, Human
auccaggcaccagga

SEQ ID NO: 1236332 - RNA, 16 nt, Human
auccaggcaccaggac

SEQ ID NO: 1236333 - RNA, 14 nt, Human
auccaggcagaucc

SEQ ID NO: 1236334 - RNA, 15 nt, Human
auccaggcagaucca

SEQ ID NO: 1236335 - RNA, 16 nt, Human
auccaggcagauccag

SEQ ID NO: 1236336 - RNA, 14 nt, Human
auccagcucacuca

SEQ ID NO: 1236337 - RNA, 22 nt, Human
auccaggacuauauuugggccu

SEQ ID NO: 1236338 - RNA, 23 nt, Human
auccaggacuauauuugggccug

SEQ ID NO: 1236339 - RNA, 12 nt, Human
auccaggagcuc

SEQ ID NO: 1236340 - RNA, 14 nt, Human
auccaggagcucca

SEQ ID NO: 1236341 - RNA, 15 nt, Human
auccaggagcuccag

SEQ ID NO: 1236342 - RNA, 16 nt, Human
auccaggagcuccagu

SEQ ID NO: 1236343 - RNA, 21 nt, Human
auccaggagcuccaguguccu

SEQ ID NO: 1236344 - RNA, 16 nt, Human
auccccaagccuggca

SEQ ID NO: 1236345 - RNA, 20 nt, Human
auccccaacaugcacugaug

SEQ ID NO: 1236346 - RNA, 13 nt, Human
auccccuucuccc

SEQ ID NO: 1236347 - RNA, 12 nt, Human
auccuauguuuu

SEQ ID NO: 1236348 - RNA, 20 nt, Human
auccuauguuuuuguucaaa

SEQ ID NO: 1236349 - RNA, 15 nt, Human
auccucaaagaaagu

SEQ ID NO: 1236350 - RNA, 16 nt, Human
auccucaaagaaagug

SEQ ID NO: 1236351 - RNA, 18 nt, Human
auccucaaagaaagugua

SEQ ID NO: 1236352 - RNA, 19 nt, Human
auccucaaagaaaguguau

SEQ ID NO: 1236353 - RNA, 20 nt, Human
auccucaaagaaaguguauu

SEQ ID NO: 1236354 - RNA, 21 nt, Human
auccucaaagaaaguguauug

SEQ ID NO: 1236355 - RNA, 18 nt, Human
auccucaaaugcggggug

SEQ ID NO: 1236356 - RNA, 19 nt, Human
auccuccacguucugcuca

SEQ ID NO: 1236357 - RNA, 20 nt, Human
auccucccacuucagccucc

SEQ ID NO: 1236358 - RNA, 12 nt, Human
auccucccaggc

SEQ ID NO: 1236359 - RNA, 15 nt, Human
aucggcauuuguuuc

SEQ ID NO: 1236360 - RNA, 21 nt, Human
aucgcugggaaaugagaugac

SEQ ID NO: 1236361 - RNA, 13 nt, Human
auccucccagaaa

SEQ ID NO: 1236362 - RNA, 17 nt, Human
aucgcuucauguaacua

SEQ ID NO: 1236363 - RNA, 13 nt, Human
aucggaaaaauaa

SEQ ID NO: 1236364 - RNA, 15 nt, Human
aucggaaaaauaauc

SEQ ID NO: 1236365 - RNA, 23 nt, Human
augaaguuuuuuuuauacaggau

SEQ ID NO: 1236366 - RNA, 19 nt, Human
augagcuccuuaaggcucu

SEQ ID NO: 1236367 - RNA, 13 nt, Human
augacgcaaagag

SEQ ID NO: 1236368 - RNA, 10 nt, Human
augagcuccc

SEQ ID NO: 1236369 - RNA, 20 nt, Human
augagcucccacaagccuga

SEQ ID NO: 1236370 - RNA, 22 nt, Human
augagcucccacaagccugagg

SEQ ID NO: 1236371 - RNA, 21 nt, Human
augagcucccacaagccugag

SEQ ID NO: 1236372 - RNA, 19 nt, Human
augaggacucuauucuuua

SEQ ID NO: 1236373 - RNA, 19 nt, Human
augaaguuuuuuuuauaca

SEQ ID NO: 1236374 - RNA, 14 nt, Human
augaaguuuuacau

SEQ ID NO: 1236375 - RNA, 16 nt, Human
augaaguuuuacauug

SEQ ID NO: 1236376 - RNA, 22 nt, Human
augaagcuuuuaugugaaacau

SEQ ID NO: 1236377 - RNA, 21 nt, Human
augaaggagaggcaacaucca

SEQ ID NO: 1236378 - RNA, 15 nt, Human
augaagggcccgaga

SEQ ID NO: 1236379 - RNA, 15 nt, Human
augaagguaaauaaa

SEQ ID NO: 1236380 - RNA, 17 nt, Human
augaagguaaauaaaaa

SEQ ID NO: 1236381 - RNA, 18 nt, Human
augaaggugucauacaga

SEQ ID NO: 1236382 - RNA, 16 nt, Human
augaaaaaauguauau

SEQ ID NO: 1236383 - RNA, 14 nt, Human
augaaaaagaagaa

SEQ ID NO: 1236384 - RNA, 15 nt, Human
augaaaaagaagaau

SEQ ID NO: 1236385 - RNA, 17 nt, Human
augaaaaagaagaaucu

SEQ ID NO: 1236386 - RNA, 16 nt, Human
augaaaaagaagaauc

SEQ ID NO: 1236387 - RNA, 18 nt, Human
augaaaaauugcugacug

SEQ ID NO: 1236388 - RNA, 17 nt, Human
aucuauauuuuacauaa

SEQ ID NO: 1236389 - RNA, 21 nt, Human
aucuauauuuuacauaaauuu

SEQ ID NO: 1236390 - RNA, 22 nt, Human
aucuaucuuaauacuaaggaac

SEQ ID NO: 1236391 - RNA, 16 nt, Human
aucuaugcauuuucug

SEQ ID NO: 1236392 - RNA, 18 nt, Human
aucuaugcauuuucugga

SEQ ID NO: 1236393 - RNA, 17 nt, Human
aucuauggucgggagac

SEQ ID NO: 1236394 - RNA, 14 nt, Human
aucuauguuuuacc

SEQ ID NO: 1236395 - RNA, 19 nt, Human
aucuauuccugguagaaua

SEQ ID NO: 1236396 - RNA, 20 nt, Human
aucucccugagaugggcuuc

SEQ ID NO: 1236397 - RNA, 13 nt, Human
aucucccugccuc

SEQ ID NO: 1236398 - RNA, 14 nt, Human
aucucccugccucc

SEQ ID NO: 1236399 - RNA, 19 nt, Human
aucucccugccuccugccg

SEQ ID NO: 1236400 - RNA, 16 nt, Human
aucucccugccuccug

SEQ ID NO: 1236401 - RNA, 10 nt, Human
aucucccugg

SEQ ID NO: 1236402 - RNA, 14 nt, Human
aucucccuggugcu

SEQ ID NO: 1236403 - RNA, 15 nt, Human
aucucccuggugcuu

SEQ ID NO: 1236404 - RNA, 18 nt, Human
aucuggaaccaucagaaa

SEQ ID NO: 1236405 - RNA, 11 nt, Human
aucuggaaccc

SEQ ID NO: 1236406 - RNA, 14 nt, Human
aucuggaacccaga

SEQ ID NO: 1236407 - RNA, 15 nt, Human
aucuggaacccagac

SEQ ID NO: 1236408 - RNA, 16 nt, Human
aucuggaacccagacu

SEQ ID NO: 1236409 - RNA, 17 nt, Human
aucuggaacccagacuc

SEQ ID NO: 1236410 - RNA, 18 nt, Human
aucuggaacccagacuca

SEQ ID NO: 1236411 - RNA, 21 nt, Human
aucugcuuaggaguuuaggga

SEQ ID NO: 1236412 - RNA, 15 nt, Human
aucuggacuccucug

SEQ ID NO: 1236413 - RNA, 16 nt, Human
aucuggacuccucugu

SEQ ID NO: 1236414 - RNA, 17 nt, Human
aucuggacuccucuguc

SEQ ID NO: 1236415 - RNA, 18 nt, Human
aucuggacuccucugucc

SEQ ID NO: 1236416 - RNA, 19 nt, Human
aucuggacuccucugucca

SEQ ID NO: 1236417 - RNA, 22 nt, Human
aucuggacuccucuguccaggc

SEQ ID NO: 1236418 - RNA, 14 nt, Human
aucuggccuggcca

SEQ ID NO: 1236419 - RNA, 14 nt, Human
aucucggcucacug

SEQ ID NO: 1236420 - RNA, 15 nt, Human
aucucggcucacugc

SEQ ID NO: 1236421 - RNA, 16 nt, Human
aucucggcucacugca

SEQ ID NO: 1236422 - RNA, 18 nt, Human
aucucccuggugcuuaug

SEQ ID NO: 1236423 - RNA, 21 nt, Human
aucucccuggugcuuaugcuc

SEQ ID NO: 1236424 - RNA, 23 nt, Human
aucucccuggugcuuaugcucuu

SEQ ID NO: 1236425 - RNA, 21 nt, Human
aucucccuuuuccaugacugu

SEQ ID NO: 1236426 - RNA, 17 nt, Human
aucucugcuuuggaaau

SEQ ID NO: 1236427 - RNA, 22 nt, Human
aucucugggcuggaugagcucc

SEQ ID NO: 1236428 - RNA, 23 nt, Human
aucucugggcuggaugagcuccc

SEQ ID NO: 1236429 - RNA, 18 nt, Human
aucucuguaaagcuaaaa

SEQ ID NO: 1236430 - RNA, 21 nt, Human
aucucugggggcugaggagca

SEQ ID NO: 1236431 - RNA, 13 nt, Human
aucucuguaaagc

SEQ ID NO: 1236432 - RNA, 17 nt, Human
aucucuguaaagcuaaa

SEQ ID NO: 1236433 - RNA, 13 nt, Human
aucucugugccuu

SEQ ID NO: 1236434 - RNA, 14 nt, Human
aucucugugccuuc

SEQ ID NO: 1236435 - RNA, 15 nt, Human
aucucugugccuucg

SEQ ID NO: 1236436 - RNA, 18 nt, Human
aucucugugccuucgucu

SEQ ID NO: 1236437 - RNA, 15 nt, Human
aucucugugugcaca

SEQ ID NO: 1236438 - RNA, 17 nt, Human
aucucugugugcacaaa

SEQ ID NO: 1236439 - RNA, 19 nt, Human
aucucugugugcacaaaua

SEQ ID NO: 1236440 - RNA, 18 nt, Human
aucuugaauaauguaaga

SEQ ID NO: 1236441 - RNA, 16 nt, Human
aucuugaauuguaacu

SEQ ID NO: 1236442 - RNA, 16 nt, Human
aucuucugccuucuca

SEQ ID NO: 1236443 - RNA, 18 nt, Human
aucuucugccuucucaug

SEQ ID NO: 1236444 - RNA, 17 nt, Human
aucuucuuaugcaauuu

SEQ ID NO: 1236445 - RNA, 20 nt, Human
aucuucuuaugcaauuuccu

SEQ ID NO: 1236446 - RNA, 14 nt, Human
aucuucuucaccau

SEQ ID NO: 1236447 - RNA, 21 nt, Human
aucuggccuggccagugcccu

SEQ ID NO: 1236448 - RNA, 16 nt, Human
aucuggccuggccagu

SEQ ID NO: 1236449 - RNA, 19 nt, Human
aucuggccuggccagugcc

SEQ ID NO: 1236450 - RNA, 22 nt, Human
aucuggcugcaguuuugcuauc

SEQ ID NO: 1236451 - RNA, 21 nt, Human
aucuggcugcaguuuugcuau

SEQ ID NO: 1236452 - RNA, 12 nt, Human
aucuggcuucug

SEQ ID NO: 1236453 - RNA, 22 nt, Human
aucuggcuucuggccaggaagc

SEQ ID NO: 1236454 - RNA, 20 nt, Human
aucuggcuucuggccaggaa

SEQ ID NO: 1236455 - RNA, 15 nt, Human
aucugggaagcuauu

SEQ ID NO: 1236456 - RNA, 21 nt, Human
aucuucugccuuagucucagu

SEQ ID NO: 1236457 - RNA, 14 nt, Human
aucuucugccuucu

SEQ ID NO: 1236458 - RNA, 11 nt, Human
augugaacagu

SEQ ID NO: 1236459 - RNA, 21 nt, Human
augugaacaguuguguuugaa

SEQ ID NO: 1236460 - RNA, 23 nt, Human
augugaacaguuguguuugaagc

SEQ ID NO: 1236461 - RNA, 22 nt, Human
augugaaccauuaaccagaucu

SEQ ID NO: 1236462 - RNA, 12 nt, Human
augugaaccauu

SEQ ID NO: 1236463 - RNA, 12 nt, Human
augugaagccaa

SEQ ID NO: 1236464 - RNA, 21 nt, Human
augugaagccaauucagacag

SEQ ID NO: 1236465 - RNA, 22 nt, Human
augugaagccaauucagacagg

SEQ ID NO: 1236466 - RNA, 12 nt, Human
augugaagccuu

SEQ ID NO: 1236467 - RNA, 14 nt, Human
augugaaaucauuc

SEQ ID NO: 1236468 - RNA, 16 nt, Human
augucuuuucccauuu

SEQ ID NO: 1236469 - RNA, 17 nt, Human
augucuuuucccauuua

SEQ ID NO: 1236470 - RNA, 21 nt, Human
augucuuuucccauuuaucua

SEQ ID NO: 1236471 - RNA, 14 nt, Human
augucuucucccug

SEQ ID NO: 1236472 - RNA, 10 nt, Human
augucuugug

SEQ ID NO: 1236473 - RNA, 11 nt, Human
augucuugugu

SEQ ID NO: 1236474 - RNA, 16 nt, Human
augucuuuaaugcaau

SEQ ID NO: 1236475 - RNA, 13 nt, Human
augucuuccugga

SEQ ID NO: 1236476 - RNA, 13 nt, Human
augucaaacaaau

SEQ ID NO: 1236477 - RNA, 14 nt, Human
augucaaacaaaua

SEQ ID NO: 1236478 - RNA, 23 nt, Human
augugaauuguuaguuucugagu

SEQ ID NO: 1236479 - RNA, 11 nt, Human
augugaauugu

SEQ ID NO: 1236480 - RNA, 13 nt, Human
augugaagccuuc

SEQ ID NO: 1236481 - RNA, 14 nt, Human
augugaagccuucc

SEQ ID NO: 1236482 - RNA, 17 nt, Human
augugaagccuuccccu

SEQ ID NO: 1236483 - RNA, 15 nt, Human
augugaagccuuccc

SEQ ID NO: 1236484 - RNA, 19 nt, Human
augguccaauuaguuuccu

SEQ ID NO: 1236485 - RNA, 24 nt, Human
auggucacguuuggugcuucucag

SEQ ID NO: 1236486 - RNA, 18 nt, Human
auggucagcccuagggug

SEQ ID NO: 1236487 - RNA, 21 nt, Human
auggucacguuuggugcuucu

SEQ ID NO: 1236488 - RNA, 20 nt, Human
auggucacguuuggugcuuc

SEQ ID NO: 1236489 - RNA, 20 nt, Human
auggucacacacugaugcuu

SEQ ID NO: 1236490 - RNA, 15 nt, Human
auggucacacacuga

SEQ ID NO: 1236491 - RNA, 16 nt, Human
auggucacacacugau

SEQ ID NO: 1236492 - RNA, 18 nt, Human
auggucacacacugaugc

SEQ ID NO: 1236493 - RNA, 19 nt, Human
auggucacacacugaugcu

SEQ ID NO: 1236494 - RNA, 14 nt, Human
augguaguuuuuuc

SEQ ID NO: 1236495 - RNA, 17 nt, Human
augguaguuuuuucauc

SEQ ID NO: 1236496 - RNA, 18 nt, Human
augguaguuuuuucaucu

SEQ ID NO: 1236497 - RNA, 23 nt, Human
augguaucaauaaauagaccauu

SEQ ID NO: 1236498 - RNA, 19 nt, Human
augguaguuuuuucaucuu

SEQ ID NO: 1236499 - RNA, 14 nt, Human
auggucacacacug

SEQ ID NO: 1236500 - RNA, 23 nt, Human
auggucgagaaagaggcaccagg

SEQ ID NO: 1236501 - RNA, 17 nt, Human
auguaagcugaaaauau

SEQ ID NO: 1236502 - RNA, 23 nt, Human
auguaaggcuguguaagauuugu

SEQ ID NO: 1236503 - RNA, 18 nt, Human
auguaauggcaguuauau

SEQ ID NO: 1236504 - RNA, 16 nt, Human
auguaauggcaguuau

SEQ ID NO: 1236505 - RNA, 17 nt, Human
auguaauggcaguuaua

SEQ ID NO: 1236506 - RNA, 24 nt, Human
auguauucagcuuuaguagauauu

SEQ ID NO: 1236507 - RNA, 16 nt, Human
auguauugcacauugu

SEQ ID NO: 1236508 - RNA, 17 nt, Human
auguauugcacauugua

SEQ ID NO: 1236509 - RNA, 22 nt, Human
auguauugcacauuguaaaaag

SEQ ID NO: 1236510 - RNA, 13 nt, Human
auguauuuuaugu

SEQ ID NO: 1236511 - RNA, 14 nt, Human
auguauuuuauguu

SEQ ID NO: 1236512 - RNA, 16 nt, Human
auguauuuuauguuau

SEQ ID NO: 1236513 - RNA, 18 nt, Human
auguauuuuauguuauau

SEQ ID NO: 1236514 - RNA, 15 nt, Human
auguuuucaggcuag

SEQ ID NO: 1236515 - RNA, 22 nt, Human
auguuugcucagcuucuccaac

SEQ ID NO: 1236516 - RNA, 17 nt, Human
auguuucacaaggucuu

SEQ ID NO: 1236517 - RNA, 15 nt, Human
auguuucaagaggag

SEQ ID NO: 1236518 - RNA, 21 nt, Human
auguuucaagaggagccccca

SEQ ID NO: 1236519 - RNA, 12 nt, Human
auguuuccagca

SEQ ID NO: 1236520 - RNA, 18 nt, Human
augugggauuauggguca

SEQ ID NO: 1236521 - RNA, 20 nt, Human
augugggauuaugggucaca

SEQ ID NO: 1236522 - RNA, 22 nt, Human
augugggauuaugggucacagg

SEQ ID NO: 1236523 - RNA, 22 nt, Human
augugugcaacaggguauggac

SEQ ID NO: 1236524 - RNA, 17 nt, Human
auguucuaagaagugaa

SEQ ID NO: 1236525 - RNA, 12 nt, Human
auguuccuucca

SEQ ID NO: 1236526 - RNA, 11 nt, Human
auguuccuucc

SEQ ID NO: 1236527 - RNA, 17 nt, Human
auguucuaaccuuuaca

SEQ ID NO: 1236528 - RNA, 12 nt, Human
auguucuaaggc

SEQ ID NO: 1236529 - RNA, 20 nt, Human
auguucuauuuuuuguuuug

SEQ ID NO: 1236530 - RNA, 13 nt, Human
auguucuaaggcu

SEQ ID NO: 1236531 - RNA, 14 nt, Human
auguucuaaggcuc

SEQ ID NO: 1236532 - RNA, 15 nt, Human
auguucuaaggcucu

SEQ ID NO: 1236533 - RNA, 16 nt, Human
auguucuaaggcucug

SEQ ID NO: 1236534 - RNA, 17 nt, Human
auguucuaaggcucuga

SEQ ID NO: 1236535 - RNA, 18 nt, Human
auguucuaaggcucugag

SEQ ID NO: 1236536 - RNA, 19 nt, Human
auguucuaaggcucugaga

SEQ ID NO: 1236537 - RNA, 20 nt, Human
auguucuaaggcucugagag

SEQ ID NO: 1236538 - RNA, 18 nt, Human
auguucuaagucuuucca

SEQ ID NO: 1236539 - RNA, 19 nt, Human
auguucuaagucuuuccau

SEQ ID NO: 1236540 - RNA, 22 nt, Human
auguucuaaggcucugagaguc

SEQ ID NO: 1236541 - RNA, 12 nt, Human
auguucuaaguu

SEQ ID NO: 1236542 - RNA, 13 nt, Human
auguucuaaguuu

SEQ ID NO: 1236543 - RNA, 15 nt, Human
auguucuaaguuucu

SEQ ID NO: 1236544 - RNA, 16 nt, Human
auguucuaaguuucua

SEQ ID NO: 1236545 - RNA, 19 nt, Human
auguucuaaguuucuaaga

SEQ ID NO: 1236546 - RNA, 20 nt, Human
auguucuaaguuucuaagau

SEQ ID NO: 1236547 - RNA, 21 nt, Human
auguucuaaguuucuaagauu

SEQ ID NO: 1236548 - RNA, 23 nt, Human
auguucuaaguuucuaagauucu

SEQ ID NO: 1236549 - RNA, 13 nt, Human
augugggauuaug

SEQ ID NO: 1236550 - RNA, 14 nt, Human
augugggauuaugg

SEQ ID NO: 1236551 - RNA, 16 nt, Human
auguggcuugagaaau

SEQ ID NO: 1236552 - RNA, 21 nt, Human
auguggcuugagaaauaugga

SEQ ID NO: 1236553 - RNA, 20 nt, Human
augcauauuauuuuauguug

SEQ ID NO: 1236554 - RNA, 16 nt, Human
augcauauuauuuuau

SEQ ID NO: 1236555 - RNA, 12 nt, Human
augcaucuguuu

SEQ ID NO: 1236556 - RNA, 20 nt, Human
augcaucuguuuauucuaua

SEQ ID NO: 1236557 - RNA, 12 nt, Human
augccucugagg

SEQ ID NO: 1236558 - RNA, 13 nt, Human
augccucugaggc

SEQ ID NO: 1236559 - RNA, 14 nt, Human
augccucugaggcc

SEQ ID NO: 1236560 - RNA, 11 nt, Human
augcauauacu

SEQ ID NO: 1236561 - RNA, 14 nt, Human
augauguuaaaaaa

SEQ ID NO: 1236562 - RNA, 22 nt, Human
augauguuaaaaaaauaagaag

SEQ ID NO: 1236563 - RNA, 21 nt, Human
augauguuaaaaaaauaagaa

SEQ ID NO: 1236564 - RNA, 22 nt, Human
augaugccucugucuucuggac

SEQ ID NO: 1236565 - RNA, 13 nt, Human
augcaauuuuuau

SEQ ID NO: 1236566 - RNA, 18 nt, Human
augauuaaauaagauucu

SEQ ID NO: 1236567 - RNA, 17 nt, Human
augauuaaauaagauuc

SEQ ID NO: 1236568 - RNA, 17 nt, Human
augccucugaggccagc

SEQ ID NO: 1236569 - RNA, 18 nt, Human
augccucugaggccagcc

SEQ ID NO: 1236570 - RNA, 19 nt, Human
augccucugaggccagccu

SEQ ID NO: 1236571 - RNA, 20 nt, Human
augccucugaggccagccug

SEQ ID NO: 1236572 - RNA, 21 nt, Human
augccucugaggccagccugg

SEQ ID NO: 1236573 - RNA, 22 nt, Human
augccucugaggccagccuggc

SEQ ID NO: 1236574 - RNA, 23 nt, Human
augccucugaggccagccuggcc

SEQ ID NO: 1236575 - RNA, 22 nt, Human
augccucugccaaaggauguga

SEQ ID NO: 1236576 - RNA, 18 nt, Human
augccucugccaaaggau

SEQ ID NO: 1236577 - RNA, 19 nt, Human
augccucugucuucuggac

SEQ ID NO: 1236578 - RNA, 13 nt, Human
auggauucuaaaa

SEQ ID NO: 1236579 - RNA, 14 nt, Human
auggauucuaaaau

SEQ ID NO: 1236580 - RNA, 15 nt, Human
auggauucuaaaaug

SEQ ID NO: 1236581 - RNA, 18 nt, Human
auggauucuaaaaugccu

SEQ ID NO: 1236582 - RNA, 22 nt, Human
auggaggaaaaccaagccgugg

SEQ ID NO: 1236583 - RNA, 13 nt, Human
auggaaaggaugg

SEQ ID NO: 1236584 - RNA, 15 nt, Human
auggaaauauauauu

SEQ ID NO: 1236585 - RNA, 16 nt, Human
auggaaauauauauua

SEQ ID NO: 1236586 - RNA, 23 nt, Human
augcuugggaagacuccuagcug

SEQ ID NO: 1236587 - RNA, 18 nt, Human
augcuugggaagacuccu

SEQ ID NO: 1236588 - RNA, 22 nt, Human
auggaaacaagaugaaauucca

SEQ ID NO: 1236589 - RNA, 19 nt, Human
auggaaagcuucagugcug

SEQ ID NO: 1236590 - RNA, 12 nt, Human
augcuugggaag

SEQ ID NO: 1236591 - RNA, 12 nt, Human
augcugaaaaug

SEQ ID NO: 1236592 - RNA, 23 nt, Human
augcugaaaauguccuugugaug

SEQ ID NO: 1236593 - RNA, 12 nt, Human
augcugccccuc

SEQ ID NO: 1236594 - RNA, 23 nt, Human
augcugcaaguuaugaaauauuu

SEQ ID NO: 1236595 - RNA, 19 nt, Human
augcugcacagauggauuu

SEQ ID NO: 1236596 - RNA, 19 nt, Human
auggcugugccucugccug

SEQ ID NO: 1236597 - RNA, 20 nt, Human
auggcugugccucugccugu

SEQ ID NO: 1236598 - RNA, 21 nt, Human
agagugugaccaaaaguuaca

SEQ ID NO: 1236599 - RNA, 14 nt, Human
agagugucuuucca

SEQ ID NO: 1236600 - RNA, 15 nt, Human
agagugucuuuccac

SEQ ID NO: 1236601 - RNA, 11 nt, Human
agagugugacc

SEQ ID NO: 1236602 - RNA, 14 nt, Human
agagugugaccaaa

SEQ ID NO: 1236603 - RNA, 19 nt, Human
agaguggcuccucccggug

SEQ ID NO: 1236604 - RNA, 23 nt, Human
agaguggcuccucccggugccca

SEQ ID NO: 1236605 - RNA, 13 nt, Human
agaguggcugggg

SEQ ID NO: 1236606 - RNA, 14 nt, Human
agaguggcuggggc

SEQ ID NO: 1236607 - RNA, 16 nt, Human
agagggcacucugcuu

SEQ ID NO: 1236608 - RNA, 22 nt, Human
agaggacuguagggagggcggc

SEQ ID NO: 1236609 - RNA, 15 nt, Human
agaggaaggggccag

SEQ ID NO: 1236610 - RNA, 16 nt, Human
agaggaaggggccaga

SEQ ID NO: 1236611 - RNA, 15 nt, Human
agaggaccggcggcu

SEQ ID NO: 1236612 - RNA, 14 nt, Human
agaggacgggaggc

SEQ ID NO: 1236613 - RNA, 13 nt, Human
agagcccaggcuc

SEQ ID NO: 1236614 - RNA, 20 nt, Human
agagcccaggcucggccugc

SEQ ID NO: 1236615 - RNA, 15 nt, Human
agagcccaggagcuc

SEQ ID NO: 1236616 - RNA, 16 nt, Human
agagcccaggagcucc

SEQ ID NO: 1236617 - RNA, 17 nt, Human
agagcccaggagcuccc

SEQ ID NO: 1236618 - RNA, 19 nt, Human
agagcccaggagcuccccu

SEQ ID NO: 1236619 - RNA, 17 nt, Human
agauauauuuucuuucu

SEQ ID NO: 1236620 - RNA, 23 nt, Human
agauaucaucuaccuagauuuaa

SEQ ID NO: 1236621 - RNA, 14 nt, Human
agaguucaagaaau

SEQ ID NO: 1236622 - RNA, 15 nt, Human
agaguucaagaaaua

SEQ ID NO: 1236623 - RNA, 18 nt, Human
agaguucaagaaauaagu

SEQ ID NO: 1236624 - RNA, 21 nt, Human
agaguucaagaaauaaguuuu

SEQ ID NO: 1236625 - RNA, 16 nt, Human
agauaucgacuuguuu

SEQ ID NO: 1236626 - RNA, 14 nt, Human
agauggcugugccu

SEQ ID NO: 1236627 - RNA, 17 nt, Human
agauggcugugccucug

SEQ ID NO: 1236628 - RNA, 13 nt, Human
agauggcucccag

SEQ ID NO: 1236629 - RNA, 14 nt, Human
agauggcucccagg

SEQ ID NO: 1236630 - RNA, 23 nt, Human
agauggcucccaggggcucccuc

SEQ ID NO: 1236631 - RNA, 17 nt, Human
agauggcucccaggggc

SEQ ID NO: 1236632 - RNA, 16 nt, Human
agaugggcaucuuuug

SEQ ID NO: 1236633 - RNA, 18 nt, Human
agaugggcaucuuuugua

SEQ ID NO: 1236634 - RNA, 20 nt, Human
agaugggcaucuuuuguauu

SEQ ID NO: 1236635 - RNA, 21 nt, Human
agaugggcaucuuuuguauua

SEQ ID NO: 1236636 - RNA, 22 nt, Human
agaugggcaucuuuuguauuaa

SEQ ID NO: 1236637 - RNA, 22 nt, Human
agaugggcuucccaagggcugc

SEQ ID NO: 1236638 - RNA, 17 nt, Human
agaugggcuucccaagg

SEQ ID NO: 1236639 - RNA, 15 nt, Human
agaugaaauuccauu

SEQ ID NO: 1236640 - RNA, 12 nt, Human
agauggcagcuu

SEQ ID NO: 1236641 - RNA, 13 nt, Human
agauggcagcuuu

SEQ ID NO: 1236642 - RNA, 14 nt, Human
agauggcagcuuuu

SEQ ID NO: 1236643 - RNA, 21 nt, Human
agauggcagcuuuuaaaagau

SEQ ID NO: 1236644 - RNA, 21 nt, Human
agauggcauaaccugucucac

SEQ ID NO: 1236645 - RNA, 20 nt, Human
agauggcaucaaaaaagaua

SEQ ID NO: 1236646 - RNA, 20 nt, Human
agauggccagccccuuagac

SEQ ID NO: 1236647 - RNA, 15 nt, Human
agauggcccauccug

SEQ ID NO: 1236648 - RNA, 14 nt, Human
agaugaaagagcag

SEQ ID NO: 1236649 - RNA, 15 nt, Human
agaugaaagagcagu

SEQ ID NO: 1236650 - RNA, 18 nt, Human
agaucuuuuauuuugcca

SEQ ID NO: 1236651 - RNA, 16 nt, Human
agaucuuuuauuuugc

SEQ ID NO: 1236652 - RNA, 23 nt, Human
agacagagucuuccucugucucc

SEQ ID NO: 1236653 - RNA, 20 nt, Human
agacagagucuuacucuguu

SEQ ID NO: 1236654 - RNA, 19 nt, Human
agacagagucuuacucugu

SEQ ID NO: 1236655 - RNA, 20 nt, Human
agacagagucuuccucuguc

SEQ ID NO: 1236656 - RNA, 17 nt, Human
agacagcccaggauacu

SEQ ID NO: 1236657 - RNA, 22 nt, Human
agacagcccaggauacuggcac

SEQ ID NO: 1236658 - RNA, 23 nt, Human
agacagcccaggauacuggcaca

SEQ ID NO: 1236659 - RNA, 21 nt, Human
agacagcuccacccuggccga

SEQ ID NO: 1236660 - RNA, 19 nt, Human
agacaacagguaaaacagg

SEQ ID NO: 1236661 - RNA, 23 nt, Human
agacaacagguaaaacagggcca

SEQ ID NO: 1236662 - RNA, 16 nt, Human
agacaacgugcucuuu

SEQ ID NO: 1236663 - RNA, 19 nt, Human
agacaacgugcucuuuguu

SEQ ID NO: 1236664 - RNA, 20 nt, Human
agacaacgugcucuuuguuu

SEQ ID NO: 1236665 - RNA, 23 nt, Human
agacaacgugcucuuuguuuugu

SEQ ID NO: 1236666 - RNA, 21 nt, Human
agacaacgugcucuuuguuuu

SEQ ID NO: 1236667 - RNA, 18 nt, Human
agacggaaggguaaacaa

SEQ ID NO: 1236668 - RNA, 22 nt, Human
agacggagcccuggcaugucaa

SEQ ID NO: 1236669 - RNA, 20 nt, Human
agacggaaggguaaacaaua

SEQ ID NO: 1236670 - RNA, 19 nt, Human
agacgugaugccaggacca

SEQ ID NO: 1236671 - RNA, 15 nt, Human
agacccauuccuucc

SEQ ID NO: 1236672 - RNA, 22 nt, Human
agacccauuccuucccagaggg

SEQ ID NO: 1236673 - RNA, 17 nt, Human
agacccauuccuuccca

SEQ ID NO: 1236674 - RNA, 17 nt, Human
agagaagaaagaacgga

SEQ ID NO: 1236675 - RNA, 13 nt, Human
agagaagaaagaa

SEQ ID NO: 1236676 - RNA, 17 nt, Human
agagaacuuccagaucc

SEQ ID NO: 1236677 - RNA, 14 nt, Human
agagaagacaggcu

SEQ ID NO: 1236678 - RNA, 15 nt, Human
agagaagacaggcug

SEQ ID NO: 1236679 - RNA, 16 nt, Human
agagaagacaggcugg

SEQ ID NO: 1236680 - RNA, 15 nt, Human
agagagcagugcuuu

SEQ ID NO: 1236681 - RNA, 16 nt, Human
agagagcagugcuuuu

SEQ ID NO: 1236682 - RNA, 17 nt, Human
agagagcagugcuuuug

SEQ ID NO: 1236683 - RNA, 13 nt, Human
agagagcccgagg

SEQ ID NO: 1236684 - RNA, 18 nt, Human
agagagcccgaggaggug

SEQ ID NO: 1236685 - RNA, 18 nt, Human
agagagccugcaggaucu

SEQ ID NO: 1236686 - RNA, 14 nt, Human
agagagccugcagg

SEQ ID NO: 1236687 - RNA, 15 nt, Human
agagagccugcagga

SEQ ID NO: 1236688 - RNA, 13 nt, Human
agagcccaggagc

SEQ ID NO: 1236689 - RNA, 14 nt, Human
agacuggaagcuaa

SEQ ID NO: 1236690 - RNA, 19 nt, Human
agacuggaagcuaauuugc

SEQ ID NO: 1236691 - RNA, 23 nt, Human
agagaaaacaugcagaacaaaug

SEQ ID NO: 1236692 - RNA, 16 nt, Human
agagaaaacuaaagaa

SEQ ID NO: 1236693 - RNA, 17 nt, Human
agagaaaacaugcagaa

SEQ ID NO: 1236694 - RNA, 16 nt, Human
agagaaaacaugcaga

SEQ ID NO: 1236695 - RNA, 20 nt, Human
agagaaaaagcagaggccaa

SEQ ID NO: 1236696 - RNA, 20 nt, Human
agacuggaagcuaauuugca

SEQ ID NO: 1236697 - RNA, 20 nt, Human
agacugccauauuaaauuuu

SEQ ID NO: 1236698 - RNA, 21 nt, Human
agacugccauauuaaauuuuu

SEQ ID NO: 1236699 - RNA, 23 nt, Human
agacugcgauuugucccaggucc

SEQ ID NO: 1236700 - RNA, 13 nt, Human
agccaagugcagg

SEQ ID NO: 1236701 - RNA, 14 nt, Human
agccaauauuuuuc

SEQ ID NO: 1236702 - RNA, 12 nt, Human
agccaauauaac

SEQ ID NO: 1236703 - RNA, 17 nt, Human
agccagcacacagggca

SEQ ID NO: 1236704 - RNA, 18 nt, Human
agccagcacacagggcag

SEQ ID NO: 1236705 - RNA, 19 nt, Human
agccagcacacagggcagu

SEQ ID NO: 1236706 - RNA, 16 nt, Human
agccagcaccggacca

SEQ ID NO: 1236707 - RNA, 20 nt, Human
agccagcaccggaccagccu

SEQ ID NO: 1236708 - RNA, 21 nt, Human
agccagcaccggaccagccug

SEQ ID NO: 1236709 - RNA, 22 nt, Human
agccagcaccggaccagccugg

SEQ ID NO: 1236710 - RNA, 23 nt, Human
agccagcaccggaccagccuggc

SEQ ID NO: 1236711 - RNA, 13 nt, Human
agccagcaccugg

SEQ ID NO: 1236712 - RNA, 14 nt, Human
agccagcaccuggc

SEQ ID NO: 1236713 - RNA, 15 nt, Human
agccagcaccuggca

SEQ ID NO: 1236714 - RNA, 23 nt, Human
agccagcaccuggcaucgcacca

SEQ ID NO: 1236715 - RNA, 24 nt, Human
agccagcaccggaccagccuggcc

SEQ ID NO: 1236716 - RNA, 20 nt, Human
agccagcacuuguccagcug

SEQ ID NO: 1236717 - RNA, 21 nt, Human
agccagcacuuguccagcuga

SEQ ID NO: 1236718 - RNA, 22 nt, Human
agccagcacuuguccagcugag

SEQ ID NO: 1236719 - RNA, 15 nt, Human
agcaugccuucaaau

SEQ ID NO: 1236720 - RNA, 19 nt, Human
agcauggaacacuucgagu

SEQ ID NO: 1236721 - RNA, 17 nt, Human
agcauggaacacuucga

SEQ ID NO: 1236722 - RNA, 20 nt, Human
agcaugagagggaugaggca

SEQ ID NO: 1236723 - RNA, 12 nt, Human
agccaaauuuaa

SEQ ID NO: 1236724 - RNA, 19 nt, Human
agccaaauuuaaaacuguu

SEQ ID NO: 1236725 - RNA, 13 nt, Human
agccaaauuuaaa

SEQ ID NO: 1236726 - RNA, 18 nt, Human
agccaacacgcaccugcc

SEQ ID NO: 1236727 - RNA, 19 nt, Human
agccaacacgcaccugccu

SEQ ID NO: 1236728 - RNA, 22 nt, Human
agccaacacgcaccugccucag

SEQ ID NO: 1236729 - RNA, 16 nt, Human
agcaugaauuuguaau

SEQ ID NO: 1236730 - RNA, 17 nt, Human
agcaguguuagcuuagu

SEQ ID NO: 1236731 - RNA, 22 nt, Human
agcaguucaauaauccaugaaa

SEQ ID NO: 1236732 - RNA, 13 nt, Human
agcaguguuagcu

SEQ ID NO: 1236733 - RNA, 15 nt, Human
agcagugugaggcca

SEQ ID NO: 1236734 - RNA, 21 nt, Human
agcagugugaggccagggcag

SEQ ID NO: 1236735 - RNA, 16 nt, Human
agcaguucugcagagg

SEQ ID NO: 1236736 - RNA, 17 nt, Human
agcaguucugcagagga

SEQ ID NO: 1236737 - RNA, 18 nt, Human
agcagcgaccgcccccuc

SEQ ID NO: 1236738 - RNA, 23 nt, Human
agcagcgaccgcccccuccucua

SEQ ID NO: 1236739 - RNA, 13 nt, Human
agcagcgagccug

SEQ ID NO: 1236740 - RNA, 15 nt, Human
agcagcgagccugcu

SEQ ID NO: 1236741 - RNA, 14 nt, Human
agcagcgagccugc

SEQ ID NO: 1236742 - RNA, 18 nt, Human
agcacuguuuucuagugu

SEQ ID NO: 1236743 - RNA, 15 nt, Human
agcacuguuuucuag

SEQ ID NO: 1236744 - RNA, 22 nt, Human
agcagccuuucucucuuuauac

SEQ ID NO: 1236745 - RNA, 12 nt, Human
agcacugucccu

SEQ ID NO: 1236746 - RNA, 13 nt, Human
agcacugucccuu

SEQ ID NO: 1236747 - RNA, 15 nt, Human
agcacugucccuugc

SEQ ID NO: 1236748 - RNA, 16 nt, Human
agcacugucccuugcc

SEQ ID NO: 1236749 - RNA, 19 nt, Human
agcacugucccuugccuca

SEQ ID NO: 1236750 - RNA, 22 nt, Human
agcacugucccuugccucaaug

SEQ ID NO: 1236751 - RNA, 11 nt, Human
agcagcugagc

SEQ ID NO: 1236752 - RNA, 12 nt, Human
agcagcugagca

SEQ ID NO: 1236753 - RNA, 13 nt, Human
agcagcugagcag

SEQ ID NO: 1236754 - RNA, 14 nt, Human
agcagcugagcagg

SEQ ID NO: 1236755 - RNA, 16 nt, Human
agcagcugagcagggc

SEQ ID NO: 1236756 - RNA, 17 nt, Human
agcagcugagcagggcc

SEQ ID NO: 1236757 - RNA, 18 nt, Human
agcagcugagcagggccg

SEQ ID NO: 1236758 - RNA, 19 nt, Human
agcagcugagcagggccgg

SEQ ID NO: 1236759 - RNA, 18 nt, Human
agcagcugccaggagcac

SEQ ID NO: 1236760 - RNA, 21 nt, Human
agcagcugccaggagcacggc

SEQ ID NO: 1236761 - RNA, 18 nt, Human
agcagcuuagacuaaggc

SEQ ID NO: 1236762 - RNA, 20 nt, Human
agcacucgcuagcaguggca

SEQ ID NO: 1236763 - RNA, 23 nt, Human
agcacucgcuagcaguggcaggc

SEQ ID NO: 1236764 - RNA, 24 nt, Human
agcacucgcuagcaguggcaggca

SEQ ID NO: 1236765 - RNA, 19 nt, Human
agauggggaccagcagccc

SEQ ID NO: 1236766 - RNA, 16 nt, Human
agaugggggaaagcaa

SEQ ID NO: 1236767 - RNA, 21 nt, Human
agaugggggaaagcaaagcac

SEQ ID NO: 1236768 - RNA, 23 nt, Human
agaugggggaaagcaaagcacag

SEQ ID NO: 1236769 - RNA, 24 nt, Human
agaugggggaaagcaaagcacaga

SEQ ID NO: 1236770 - RNA, 16 nt, Human
agccccauuccuggga

SEQ ID NO: 1236771 - RNA, 15 nt, Human
agcccgguaagagca

SEQ ID NO: 1236772 - RNA, 16 nt, Human
agcccgguaagagcaa

SEQ ID NO: 1236773 - RNA, 17 nt, Human
agcccucacccuggggc

SEQ ID NO: 1236774 - RNA, 16 nt, Human
agcccucacacacccu

SEQ ID NO: 1236775 - RNA, 23 nt, Human
agcccucacacacccugucugcc

SEQ ID NO: 1236776 - RNA, 21 nt, Human
agcccuaaacaucauucuuga

SEQ ID NO: 1236777 - RNA, 21 nt, Human
agcccgguaagagcaaaagaa

SEQ ID NO: 1236778 - RNA, 22 nt, Human
agcccgguaagagcaaaagaau

SEQ ID NO: 1236779 - RNA, 14 nt, Human
agcccgucucagug

SEQ ID NO: 1236780 - RNA, 15 nt, Human
agcccgucucagugu

SEQ ID NO: 1236781 - RNA, 13 nt, Human
agcccuaaacauc

SEQ ID NO: 1236782 - RNA, 14 nt, Human
agcccuaaacauca

SEQ ID NO: 1236783 - RNA, 15 nt, Human
agcccuaaacaucau

SEQ ID NO: 1236784 - RNA, 13 nt, Human
agccccauuccug

SEQ ID NO: 1236785 - RNA, 17 nt, Human
agccgugccuucagcuc

SEQ ID NO: 1236786 - RNA, 13 nt, Human
agccguggcuucc

SEQ ID NO: 1236787 - RNA, 18 nt, Human
agccgugcucgccccagc

SEQ ID NO: 1236788 - RNA, 21 nt, Human
agccgggcgugguggugagug

SEQ ID NO: 1236789 - RNA, 12 nt, Human
agccguccuggc

SEQ ID NO: 1236790 - RNA, 15 nt, Human
agccgugccuucagc

SEQ ID NO: 1236791 - RNA, 16 nt, Human
agccgugccuucagcu

SEQ ID NO: 1236792 - RNA, 23 nt, Human
agccguccuggcgccuggcaguc

SEQ ID NO: 1236793 - RNA, 13 nt, Human
agccgugagcaug

SEQ ID NO: 1236794 - RNA, 13 nt, Human
agccguccuggcg

SEQ ID NO: 1236795 - RNA, 17 nt, Human
agccucccauccagggc

SEQ ID NO: 1236796 - RNA, 20 nt, Human
agccuccucaucccguguuc

SEQ ID NO: 1236797 - RNA, 18 nt, Human
agccucccauccagggcc

SEQ ID NO: 1236798 - RNA, 14 nt, Human
agccuccccugcca

SEQ ID NO: 1236799 - RNA, 17 nt, Human
agcccuccucugcacuc

SEQ ID NO: 1236800 - RNA, 21 nt, Human
agcccuccaucuaaacugccc

SEQ ID NO: 1236801 - RNA, 16 nt, Human
agcccucaucccgagc

SEQ ID NO: 1236802 - RNA, 19 nt, Human
agcccucacacacccuguc

SEQ ID NO: 1236803 - RNA, 14 nt, Human
agccgggagccuga

SEQ ID NO: 1236804 - RNA, 15 nt, Human
agccgcugagcgagg

SEQ ID NO: 1236805 - RNA, 19 nt, Human
agccgcugagcgaggagau

SEQ ID NO: 1236806 - RNA, 23 nt, Human
aggaugguucccuugaugaagaa

SEQ ID NO: 1236807 - RNA, 19 nt, Human
aggauguaaagaucaauaa

SEQ ID NO: 1236808 - RNA, 14 nt, Human
aggauggaacacgg

SEQ ID NO: 1236809 - RNA, 19 nt, Human
aggauggaacacggccaca

SEQ ID NO: 1236810 - RNA, 22 nt, Human
aggauguacaaggacagccccu

SEQ ID NO: 1236811 - RNA, 14 nt, Human
aggauuaaauaaug

SEQ ID NO: 1236812 - RNA, 20 nt, Human
aggauuaaauaauguaaaua

SEQ ID NO: 1236813 - RNA, 16 nt, Human
aggaccggcggcucgg

SEQ ID NO: 1236814 - RNA, 14 nt, Human
aggaccuaaaacau

SEQ ID NO: 1236815 - RNA, 16 nt, Human
aggaccuaaaacaucu

SEQ ID NO: 1236816 - RNA, 20 nt, Human
aggagaaucacuugaaccug

SEQ ID NO: 1236817 - RNA, 14 nt, Human
aggagaaugaauca

SEQ ID NO: 1236818 - RNA, 15 nt, Human
aggagaaugagccuc

SEQ ID NO: 1236819 - RNA, 18 nt, Human
aggagacacaccugaggc

SEQ ID NO: 1236820 - RNA, 15 nt, Human
aggaguagcugagcu

SEQ ID NO: 1236821 - RNA, 16 nt, Human
aggaguagcugagcuc

SEQ ID NO: 1236822 - RNA, 18 nt, Human
aggaguaugcagggagcu

SEQ ID NO: 1236823 - RNA, 14 nt, Human
aggagucacugaga

SEQ ID NO: 1236824 - RNA, 15 nt, Human
aggagucacugagac

SEQ ID NO: 1236825 - RNA, 17 nt, Human
aggagucacugagacca

SEQ ID NO: 1236826 - RNA, 20 nt, Human
aggaguccacuuuguuucgu

SEQ ID NO: 1236827 - RNA, 16 nt, Human
aggagucacugagacc

SEQ ID NO: 1236828 - RNA, 14 nt, Human
aggaguguccucuu

SEQ ID NO: 1236829 - RNA, 15 nt, Human
aggagugggugggga

SEQ ID NO: 1236830 - RNA, 13 nt, Human
aggagugugugug

SEQ ID NO: 1236831 - RNA, 22 nt, Human
aggaguuaguggauuacugcca

SEQ ID NO: 1236832 - RNA, 13 nt, Human
aggagucugaggu

SEQ ID NO: 1236833 - RNA, 15 nt, Human
aggagucugaggucc

SEQ ID NO: 1236834 - RNA, 16 nt, Human
aggagucugagguccu

SEQ ID NO: 1236835 - RNA, 17 nt, Human
aggagucugagguccug

SEQ ID NO: 1236836 - RNA, 18 nt, Human
aggagucugagguccuga

SEQ ID NO: 1236837 - RNA, 19 nt, Human
aggagucugagguccugag

SEQ ID NO: 1236838 - RNA, 20 nt, Human
aggagucugagguccugagc

SEQ ID NO: 1236839 - RNA, 21 nt, Human
aggagucugagguccugagca

SEQ ID NO: 1236840 - RNA, 22 nt, Human
aggaguggguggggaguggggg

SEQ ID NO: 1236841 - RNA, 23 nt, Human
aggacccaggacaggauccaggc

SEQ ID NO: 1236842 - RNA, 18 nt, Human
aggacccaggacaggauc

SEQ ID NO: 1236843 - RNA, 12 nt, Human
aggacccagggc

SEQ ID NO: 1236844 - RNA, 13 nt, Human
aggacccagggcu

SEQ ID NO: 1236845 - RNA, 14 nt, Human
aggacccagggcuc

SEQ ID NO: 1236846 - RNA, 15 nt, Human
aggacccagggcucu

SEQ ID NO: 1236847 - RNA, 14 nt, Human
aggacccaggacag

SEQ ID NO: 1236848 - RNA, 13 nt, Human
aggacccaggaca

SEQ ID NO: 1236849 - RNA, 12 nt, Human
aggacccaggac

SEQ ID NO: 1236850 - RNA, 14 nt, Human
aggacccaggaaag

SEQ ID NO: 1236851 - RNA, 17 nt, Human
aggacccagggcucugu

SEQ ID NO: 1236852 - RNA, 17 nt, Human
aggacccuggacccagc

SEQ ID NO: 1236853 - RNA, 13 nt, Human
aggacccagagga

SEQ ID NO: 1236854 - RNA, 15 nt, Human
aggacccagaggaag

SEQ ID NO: 1236855 - RNA, 20 nt, Human
agcuucuguugcugccucau

SEQ ID NO: 1236856 - RNA, 17 nt, Human
agcuuuucuauuuuaau

SEQ ID NO: 1236857 - RNA, 13 nt, Human
agcuuuugucuac

SEQ ID NO: 1236858 - RNA, 21 nt, Human
agcuuuugugggggacuguaa

SEQ ID NO: 1236859 - RNA, 22 nt, Human
agcuuuugugggggacuguaag

SEQ ID NO: 1236860 - RNA, 24 nt, Human
agcuuuugugggggacuguaaguu

SEQ ID NO: 1236861 - RNA, 22 nt, Human
agcuuuuuauuccuccugcuca

SEQ ID NO: 1236862 - RNA, 19 nt, Human
agcuuuuuccagaggcuau

SEQ ID NO: 1236863 - RNA, 13 nt, Human
agcuccuuccugg

SEQ ID NO: 1236864 - RNA, 15 nt, Human
agcuccuuccuggag

SEQ ID NO: 1236865 - RNA, 19 nt, Human
agcuccuuccuggagacug

SEQ ID NO: 1236866 - RNA, 14 nt, Human
agcucuuugucagg

SEQ ID NO: 1236867 - RNA, 15 nt, Human
agcucuuugucaggg

SEQ ID NO: 1236868 - RNA, 22 nt, Human
agcuccuuaaggcucuuuugua

SEQ ID NO: 1236869 - RNA, 16 nt, Human
agcugagcaaaucacc

SEQ ID NO: 1236870 - RNA, 20 nt, Human
agcugagcaaaucaccacaa

SEQ ID NO: 1236871 - RNA, 15 nt, Human
agcugagcaggccac

SEQ ID NO: 1236872 - RNA, 13 nt, Human
agcugagcagggc

SEQ ID NO: 1236873 - RNA, 23 nt, Human
agcugagauuauaggcaccuacc

SEQ ID NO: 1236874 - RNA, 16 nt, Human
agcugagagaaaauaa

SEQ ID NO: 1236875 - RNA, 16 nt, Human
agcucuuugucaggga

SEQ ID NO: 1236876 - RNA, 17 nt, Human
agcucuuugucagggag

SEQ ID NO: 1236877 - RNA, 12 nt, Human
agcugaaaauau

SEQ ID NO: 1236878 - RNA, 16 nt, Human
agcucccugugccccc

SEQ ID NO: 1236879 - RNA, 21 nt, Human
agcucccugugcccccagggu

SEQ ID NO: 1236880 - RNA, 19 nt, Human
agcucccugugcccccagg

SEQ ID NO: 1236881 - RNA, 16 nt, Human
agcucccuucuucccu

SEQ ID NO: 1236882 - RNA, 14 nt, Human
agcugagcagggcc

SEQ ID NO: 1236883 - RNA, 15 nt, Human
agcugagcagggccg

SEQ ID NO: 1236884 - RNA, 14 nt, Human
agcugcuccccacg

SEQ ID NO: 1236885 - RNA, 17 nt, Human
agcugcuccccacguca

SEQ ID NO: 1236886 - RNA, 16 nt, Human
agcugcucaacuugca

SEQ ID NO: 1236887 - RNA, 20 nt, Human
agcugcucaacuugcaaaau

SEQ ID NO: 1236888 - RNA, 19 nt, Human
agcuucuguugcugccuca

SEQ ID NO: 1236889 - RNA, 12 nt, Human
agcuuccuucag

SEQ ID NO: 1236890 - RNA, 13 nt, Human
agcuuccuucaga

SEQ ID NO: 1236891 - RNA, 15 nt, Human
agcuuccuucagaga

SEQ ID NO: 1236892 - RNA, 14 nt, Human
agcuuccuucagag

SEQ ID NO: 1236893 - RNA, 22 nt, Human
agcuuccaugauucuauuuaua

SEQ ID NO: 1236894 - RNA, 21 nt, Human
agcuucccuccccucuaguuu

SEQ ID NO: 1236895 - RNA, 12 nt, Human
aggucccuaaua

SEQ ID NO: 1236896 - RNA, 17 nt, Human
agguaauuuuuuucacc

SEQ ID NO: 1236897 - RNA, 17 nt, Human
agguacaaccuguucug

SEQ ID NO: 1236898 - RNA, 23 nt, Human
agguaaaucagacuaugaaguuu

SEQ ID NO: 1236899 - RNA, 14 nt, Human
agguaaauaaaaag

SEQ ID NO: 1236900 - RNA, 20 nt, Human
agguaaauaaaaagaaaggc

SEQ ID NO: 1236901 - RNA, 21 nt, Human
agguaaucgaccugccucggc

SEQ ID NO: 1236902 - RNA, 18 nt, Human
agguaaaucagacuauga

SEQ ID NO: 1236903 - RNA, 14 nt, Human
agguaaaaugccau

SEQ ID NO: 1236904 - RNA, 15 nt, Human
agguaaaaugccaug

SEQ ID NO: 1236905 - RNA, 16 nt, Human
agguaaaaugccauga

SEQ ID NO: 1236906 - RNA, 14 nt, Human
agguaaaacagggc

SEQ ID NO: 1236907 - RNA, 13 nt, Human
agguaaaaugcca

SEQ ID NO: 1236908 - RNA, 22 nt, Human
agguaaaaugccaugaugccuc

SEQ ID NO: 1236909 - RNA, 20 nt, Human
agguaaaagcaucacaugaa

SEQ ID NO: 1236910 - RNA, 16 nt, Human
aggucccuaauaaagc

SEQ ID NO: 1236911 - RNA, 16 nt, Human
agguacacagcucuag

SEQ ID NO: 1236912 - RNA, 16 nt, Human
agguacaagaagcauu

SEQ ID NO: 1236913 - RNA, 15 nt, Human
aggucccuaauaaag

SEQ ID NO: 1236914 - RNA, 13 nt, Human
aggucccuaauaa

SEQ ID NO: 1236915 - RNA, 23 nt, Human
aggucugaaauuuuucuucuuga

SEQ ID NO: 1236916 - RNA, 13 nt, Human
aggucugaaauuu

SEQ ID NO: 1236917 - RNA, 18 nt, Human
agguuauuaugauuagcu

SEQ ID NO: 1236918 - RNA, 19 nt, Human
agguuaucuacuuuuacuc

SEQ ID NO: 1236919 - RNA, 15 nt, Human
agguuaucagugcuu

SEQ ID NO: 1236920 - RNA, 18 nt, Human
agguuccgcuuggagcag

SEQ ID NO: 1236921 - RNA, 21 nt, Human
agguuccgcuuggagcagagg

SEQ ID NO: 1236922 - RNA, 23 nt, Human
agguuccgcuuggagcagagggg

SEQ ID NO: 1236923 - RNA, 15 nt, Human
agguuacaagccugc

SEQ ID NO: 1236924 - RNA, 21 nt, Human
agguuacaagccugcacaaua

SEQ ID NO: 1236925 - RNA, 22 nt, Human
agguguuuuguucaccauuaua

SEQ ID NO: 1236926 - RNA, 15 nt, Human
agguggaucuauuuc

SEQ ID NO: 1236927 - RNA, 16 nt, Human
agguggaucuauuuca

SEQ ID NO: 1236928 - RNA, 15 nt, Human
agguggauggcccca

SEQ ID NO: 1236929 - RNA, 18 nt, Human
agguguuuuguucaccau

SEQ ID NO: 1236930 - RNA, 20 nt, Human
aggugcuacacccuuuucca

SEQ ID NO: 1236931 - RNA, 21 nt, Human
aggugcuacacccuuuuccag

SEQ ID NO: 1236932 - RNA, 14 nt, Human
agggucccucugug

SEQ ID NO: 1236933 - RNA, 15 nt, Human
agggucccucugugu

SEQ ID NO: 1236934 - RNA, 18 nt, Human
agggucccucuguguauu

SEQ ID NO: 1236935 - RNA, 20 nt, Human
agggucccucuguguauuug

SEQ ID NO: 1236936 - RNA, 23 nt, Human
agggucccccacucuaaagcaaa

SEQ ID NO: 1236937 - RNA, 12 nt, Human
agggucccucug

SEQ ID NO: 1236938 - RNA, 12 nt, Human
aggguccugggg

SEQ ID NO: 1236939 - RNA, 15 nt, Human
aggguccuggggaac

SEQ ID NO: 1236940 - RNA, 21 nt, Human
aggguccuggggaaccugacc

SEQ ID NO: 1236941 - RNA, 23 nt, Human
aggguccuggggaaccugacccc

SEQ ID NO: 1236942 - RNA, 13 nt, Human
aggguccugggag

SEQ ID NO: 1236943 - RNA, 16 nt, Human
aggggccuccaugggc

SEQ ID NO: 1236944 - RNA, 22 nt, Human
aggggccuccaugggccccagg

SEQ ID NO: 1236945 - RNA, 12 nt, Human
agggucaggccu

SEQ ID NO: 1236946 - RNA, 13 nt, Human
agggucaggccuu

SEQ ID NO: 1236947 - RNA, 14 nt, Human
agggucaggccuuu

SEQ ID NO: 1236948 - RNA, 22 nt, Human
agggucaggccuuugagcucag

SEQ ID NO: 1236949 - RNA, 22 nt, Human
agggucauaucacucaggcccu

SEQ ID NO: 1236950 - RNA, 17 nt, Human
aggguccaacauagagc

SEQ ID NO: 1236951 - RNA, 22 nt, Human
agggaccggcggaccccagcca

SEQ ID NO: 1236952 - RNA, 22 nt, Human
agggacagaugaaugccgugga

SEQ ID NO: 1236953 - RNA, 15 nt, Human
aggcuguaacuacuu

SEQ ID NO: 1236954 - RNA, 15 nt, Human
aggcuguccuguaca

SEQ ID NO: 1236955 - RNA, 16 nt, Human
aggcuguccuguacau

SEQ ID NO: 1236956 - RNA, 21 nt, Human
aggcuguccuguacauugugg

SEQ ID NO: 1236957 - RNA, 16 nt, Human
aggcugucuguuguau

SEQ ID NO: 1236958 - RNA, 15 nt, Human
aggcuagauguaugu

SEQ ID NO: 1236959 - RNA, 16 nt, Human
aggcuagauguaugua

SEQ ID NO: 1236960 - RNA, 17 nt, Human
aggcuagauguauguac

SEQ ID NO: 1236961 - RNA, 12 nt, Human
aggcuguaacua

SEQ ID NO: 1236962 - RNA, 18 nt, Human
agggacgccugggggugc

SEQ ID NO: 1236963 - RNA, 22 nt, Human
agggacgccugggggugccagg

SEQ ID NO: 1236964 - RNA, 13 nt, Human
agggacgccuggg

SEQ ID NO: 1236965 - RNA, 15 nt, Human
agggacgccuggggg

SEQ ID NO: 1236966 - RNA, 23 nt, Human
agggacgccugggggugccagga

SEQ ID NO: 1236967 - RNA, 23 nt, Human
aggcuacuguaaggcaaucaugg

SEQ ID NO: 1236968 - RNA, 21 nt, Human
aggcuagaaccaccugccuau

SEQ ID NO: 1236969 - RNA, 17 nt, Human
aggcuacuucggggcug

SEQ ID NO: 1236970 - RNA, 20 nt, Human
aggcuacuucggggcuggga

SEQ ID NO: 1236971 - RNA, 22 nt, Human
aggcuacuucggggcugggaag

SEQ ID NO: 1236972 - RNA, 21 nt, Human
aggcgugagccaccgugccug

SEQ ID NO: 1236973 - RNA, 18 nt, Human
aggcgugagccaccucgc

SEQ ID NO: 1236974 - RNA, 17 nt, Human
aggcgugagccaccucg

SEQ ID NO: 1236975 - RNA, 18 nt, Human
aggcgugagccaccaugc

SEQ ID NO: 1236976 - RNA, 19 nt, Human
aggcccuuccucuccacug

SEQ ID NO: 1236977 - RNA, 23 nt, Human
aggccgaagcuaacagggaaggc

SEQ ID NO: 1236978 - RNA, 13 nt, Human
aggcccuuccucu

SEQ ID NO: 1236979 - RNA, 15 nt, Human
aggcccuuccucucc

SEQ ID NO: 1236980 - RNA, 17 nt, Human
aggcccuuccucuccac

SEQ ID NO: 1236981 - RNA, 18 nt, Human
aggcccuuccucuccacu

SEQ ID NO: 1236982 - RNA, 20 nt, Human
aggcccuuauuuucaagaaa

SEQ ID NO: 1236983 - RNA, 22 nt, Human
aggcccuuauuuucaagaaacu

SEQ ID NO: 1236984 - RNA, 13 nt, Human
accccuccacucu

SEQ ID NO: 1236985 - RNA, 12 nt, Human
accccuccccuc

SEQ ID NO: 1236986 - RNA, 13 nt, Human
accccuccccucc

SEQ ID NO: 1236987 - RNA, 14 nt, Human
accccuccccucca

SEQ ID NO: 1236988 - RNA, 19 nt, Human
accccuccccuccaucccu

SEQ ID NO: 1236989 - RNA, 20 nt, Human
accccuccccuccaucccug

SEQ ID NO: 1236990 - RNA, 17 nt, Human
accccuccacucuuucu

SEQ ID NO: 1236991 - RNA, 17 nt, Human
accccucauagcccuca

SEQ ID NO: 1236992 - RNA, 13 nt, Human
acccccugugccu

SEQ ID NO: 1236993 - RNA, 15 nt, Human
acccccugcagcuug

SEQ ID NO: 1236994 - RNA, 13 nt, Human
acccccugcagcu

SEQ ID NO: 1236995 - RNA, 18 nt, Human
acccccuucuccauccac

SEQ ID NO: 1236996 - RNA, 19 nt, Human
acccccuucuccauccaca

SEQ ID NO: 1236997 - RNA, 14 nt, Human
acccagugcugaau

SEQ ID NO: 1236998 - RNA, 14 nt, Human
acccagugcccucu

SEQ ID NO: 1236999 - RNA, 15 nt, Human
acccagugcccucuc

SEQ ID NO: 1237000 - RNA, 22 nt, Human
acccagugcccucuccccucag

SEQ ID NO: 1237001 - RNA, 17 nt, Human
acccaguugccaucugc

SEQ ID NO: 1237002 - RNA, 18 nt, Human
acccaguugccaucugcg

SEQ ID NO: 1237003 - RNA, 17 nt, Human
acccaguuuccuuggga

SEQ ID NO: 1237004 - RNA, 20 nt, Human
acccaguuucuaaacuggag

SEQ ID NO: 1237005 - RNA, 21 nt, Human
acccaguuucuaaacuggaga

SEQ ID NO: 1237006 - RNA, 21 nt, Human
acccaccugcuagugugaauu

SEQ ID NO: 1237007 - RNA, 22 nt, Human
acccauuagcagucccuccaca

SEQ ID NO: 1237008 - RNA, 15 nt, Human
acccauuuguucaua

SEQ ID NO: 1237009 - RNA, 23 nt, Human
acccauuuaaauuuuuuuccuua

SEQ ID NO: 1237010 - RNA, 20 nt, Human
acccauuuaaauuuuuuucc

SEQ ID NO: 1237011 - RNA, 13 nt, Human
acccauuccuucc

SEQ ID NO: 1237012 - RNA, 15 nt, Human
acccauuccuuccca

SEQ ID NO: 1237013 - RNA, 23 nt, Human
acccauuccuucccagaggggcc

SEQ ID NO: 1237014 - RNA, 16 nt, Human
acccauuccuucccag

SEQ ID NO: 1237015 - RNA, 14 nt, Human
acccccugcaaagc

SEQ ID NO: 1237016 - RNA, 17 nt, Human
acccccugcaaagccca

SEQ ID NO: 1237017 - RNA, 18 nt, Human
acccccugcaaagcccag

SEQ ID NO: 1237018 - RNA, 20 nt, Human
acccccugcaaagcccagcu

SEQ ID NO: 1237019 - RNA, 22 nt, Human
acccccugcaaagcccagcuug

SEQ ID NO: 1237020 - RNA, 14 nt, Human
acccauuuguucau

SEQ ID NO: 1237021 - RNA, 12 nt, Human
acccccugcagc

SEQ ID NO: 1237022 - RNA, 18 nt, Human
accauccuaggcugacac

SEQ ID NO: 1237023 - RNA, 15 nt, Human
accaucgcuuuauug

SEQ ID NO: 1237024 - RNA, 19 nt, Human
accaucgucuucuuggcca

SEQ ID NO: 1237025 - RNA, 20 nt, Human
accaucucccuggugcuuau

SEQ ID NO: 1237026 - RNA, 17 nt, Human
acccacaagaaaugaaa

SEQ ID NO: 1237027 - RNA, 21 nt, Human
acccacaagaaaugaaagcag

SEQ ID NO: 1237028 - RNA, 11 nt, Human
accaucucccu

SEQ ID NO: 1237029 - RNA, 12 nt, Human
accaucucccug

SEQ ID NO: 1237030 - RNA, 13 nt, Human
accaucucccugg

SEQ ID NO: 1237031 - RNA, 14 nt, Human
accaucucccuggu

SEQ ID NO: 1237032 - RNA, 16 nt, Human
accaucucccuggugc

SEQ ID NO: 1237033 - RNA, 17 nt, Human
accaucucccuggugcu

SEQ ID NO: 1237034 - RNA, 18 nt, Human
accaucucccuggugcuu

SEQ ID NO: 1237035 - RNA, 18 nt, Human
acccacacaaauaacaag

SEQ ID NO: 1237036 - RNA, 22 nt, Human
acccacacucagauccuccuca

SEQ ID NO: 1237037 - RNA, 23 nt, Human
acccaccgggccacuccuuccug

SEQ ID NO: 1237038 - RNA, 13 nt, Human
accagaucauugu

SEQ ID NO: 1237039 - RNA, 14 nt, Human
accagauaacuuuu

SEQ ID NO: 1237040 - RNA, 13 nt, Human
accagauaacuuu

SEQ ID NO: 1237041 - RNA, 22 nt, Human
accagagugcugaaggaaugga

SEQ ID NO: 1237042 - RNA, 23 nt, Human
accaccucucaauauucaauaaa

SEQ ID NO: 1237043 - RNA, 15 nt, Human
accaccucucaauau

SEQ ID NO: 1237044 - RNA, 17 nt, Human
accaccucuccagaggc

SEQ ID NO: 1237045 - RNA, 21 nt, Human
accaccgcgcccagccuuuuu

SEQ ID NO: 1237046 - RNA, 14 nt, Human
accagaugcagcuc

SEQ ID NO: 1237047 - RNA, 10 nt, Human
accagaugcu

SEQ ID NO: 1237048 - RNA, 11 nt, Human
accagaugcug

SEQ ID NO: 1237049 - RNA, 12 nt, Human
accagaugcuga

SEQ ID NO: 1237050 - RNA, 14 nt, Human
accagaugcugaaa

SEQ ID NO: 1237051 - RNA, 21 nt, Human
accagccauuggcuauuuaaa

SEQ ID NO: 1237052 - RNA, 17 nt, Human
accaauaaagugacccu

SEQ ID NO: 1237053 - RNA, 12 nt, Human
accaauaaagug

SEQ ID NO: 1237054 - RNA, 11 nt, Human
accaauaaagu

SEQ ID NO: 1237055 - RNA, 23 nt, Human
accaauagggcugagcucucugu

SEQ ID NO: 1237056 - RNA, 14 nt, Human
accacccugcucau

SEQ ID NO: 1237057 - RNA, 17 nt, Human
accaauaaaauaauuuu

SEQ ID NO: 1237058 - RNA, 23 nt, Human
accaaguuucagguauuaagaaa

SEQ ID NO: 1237059 - RNA, 23 nt, Human
accaaguuggaacauccuuggaa

SEQ ID NO: 1237060 - RNA, 20 nt, Human
accaagccaagggaaccugu

SEQ ID NO: 1237061 - RNA, 23 nt, Human
accaagccaagggaaccuguguc

SEQ ID NO: 1237062 - RNA, 17 nt, Human
accaaggcuuucucuac

SEQ ID NO: 1237063 - RNA, 23 nt, Human
accaaggcuuucucuacugauuc

SEQ ID NO: 1237064 - RNA, 14 nt, Human
accaagcacagcag

SEQ ID NO: 1237065 - RNA, 16 nt, Human
accaagcacagcagcc

SEQ ID NO: 1237066 - RNA, 17 nt, Human
accaagcacagcagccu

SEQ ID NO: 1237067 - RNA, 13 nt, Human
accaagcaggaaa

SEQ ID NO: 1237068 - RNA, 14 nt, Human
accaagcaucuugg

SEQ ID NO: 1237069 - RNA, 20 nt, Human
acauuuuaaaaaauggucac

SEQ ID NO: 1237070 - RNA, 16 nt, Human
acauuuuaaaagugcc

SEQ ID NO: 1237071 - RNA, 16 nt, Human
acauuuuaaacacauu

SEQ ID NO: 1237072 - RNA, 19 nt, Human
acauuuuaaaagugccauu

SEQ ID NO: 1237073 - RNA, 19 nt, Human
accaagauggcccauccug

SEQ ID NO: 1237074 - RNA, 19 nt, Human
accaagauuggccugaggc

SEQ ID NO: 1237075 - RNA, 19 nt, Human
acauuuguucuauagcuuu

SEQ ID NO: 1237076 - RNA, 13 nt, Human
acauuuauuuccu

SEQ ID NO: 1237077 - RNA, 14 nt, Human
acauuuauuuccuc

SEQ ID NO: 1237078 - RNA, 15 nt, Human
acauuuauuuccucc

SEQ ID NO: 1237079 - RNA, 16 nt, Human
acauuuauuuugacau

SEQ ID NO: 1237080 - RNA, 17 nt, Human
acaggcacacaccacca

SEQ ID NO: 1237081 - RNA, 14 nt, Human
acagggucugcucu

SEQ ID NO: 1237082 - RNA, 15 nt, Human
acagggucugcucuu

SEQ ID NO: 1237083 - RNA, 22 nt, Human
acagggucugcucuuucucugc

SEQ ID NO: 1237084 - RNA, 23 nt, Human
acagggucugcucuuucucugcc

SEQ ID NO: 1237085 - RNA, 24 nt, Human
acagggucugcucuuucucugcca

SEQ ID NO: 1237086 - RNA, 15 nt, Human
acaggguuucaccau

SEQ ID NO: 1237087 - RNA, 16 nt, Human
acagguaaaacagggc

SEQ ID NO: 1237088 - RNA, 14 nt, Human
acagguaaaacagg

SEQ ID NO: 1237089 - RNA, 15 nt, Human
acagguaaaacaggg

SEQ ID NO: 1237090 - RNA, 22 nt, Human
acauguuucuuuguaaugaaaa

SEQ ID NO: 1237091 - RNA, 19 nt, Human
acauguuucuuuguaauga

SEQ ID NO: 1237092 - RNA, 21 nt, Human
acaugugacauuuauauauug

SEQ ID NO: 1237093 - RNA, 13 nt, Human
acauguuuccagc

SEQ ID NO: 1237094 - RNA, 14 nt, Human
acauguuuccagca

SEQ ID NO: 1237095 - RNA, 21 nt, Human
acauguuuccagcauucccag

SEQ ID NO: 1237096 - RNA, 22 nt, Human
acauguuuccagcauucccagg

SEQ ID NO: 1237097 - RNA, 11 nt, Human
acauguuuccu

SEQ ID NO: 1237098 - RNA, 23 nt, Human
acauguuucuuuguaaugaaaac

SEQ ID NO: 1237099 - RNA, 23 nt, Human
acauguuuccagcauucccaggu

SEQ ID NO: 1237100 - RNA, 16 nt, Human
acauguuuccucuagu

SEQ ID NO: 1237101 - RNA, 13 nt, Human
acaucagcaaaca

SEQ ID NO: 1237102 - RNA, 13 nt, Human
acaugauucauuu

SEQ ID NO: 1237103 - RNA, 19 nt, Human
acaugauuccagccaucac

SEQ ID NO: 1237104 - RNA, 13 nt, Human
acaugauuuccuu

SEQ ID NO: 1237105 - RNA, 20 nt, Human
acaugcauuacugcaugcac

SEQ ID NO: 1237106 - RNA, 13 nt, Human
acaugugacauuu

SEQ ID NO: 1237107 - RNA, 14 nt, Human
acaugugacauuua

SEQ ID NO: 1237108 - RNA, 15 nt, Human
acaugugacauuuau

SEQ ID NO: 1237109 - RNA, 16 nt, Human
acaugugacauuuaua

SEQ ID NO: 1237110 - RNA, 16 nt, Human
acaugcauuacugcau

SEQ ID NO: 1237111 - RNA, 16 nt, Human
acaugauuuccuugaa

SEQ ID NO: 1237112 - RNA, 17 nt, Human
acaugauuuccuugaau

SEQ ID NO: 1237113 - RNA, 19 nt, Human
acagccaacuauggccugu

SEQ ID NO: 1237114 - RNA, 19 nt, Human
acagccaacuagccccugg

SEQ ID NO: 1237115 - RNA, 20 nt, Human
acagccaacuagccccuggg

SEQ ID NO: 1237116 - RNA, 17 nt, Human
acagccaacuauggccu

SEQ ID NO: 1237117 - RNA, 24 nt, Human
acagccaacacgcaccugccucag

SEQ ID NO: 1237118 - RNA, 15 nt, Human
acagccaaauuuaaa

SEQ ID NO: 1237119 - RNA, 16 nt, Human
acagccaacuagcccc

SEQ ID NO: 1237120 - RNA, 17 nt, Human
acagccaacuagccccu

SEQ ID NO: 1237121 - RNA, 18 nt, Human
acagccaacuagccccug

SEQ ID NO: 1237122 - RNA, 19 nt, Human
acagagucuuccucugucu

SEQ ID NO: 1237123 - RNA, 13 nt, Human
acagcaucagggu

SEQ ID NO: 1237124 - RNA, 20 nt, Human
acagccaacacgcaccugcc

SEQ ID NO: 1237125 - RNA, 21 nt, Human
acagccaacacgcaccugccu

SEQ ID NO: 1237126 - RNA, 22 nt, Human
acagccaacacgcaccugccuc

SEQ ID NO: 1237127 - RNA, 14 nt, Human
acagagucuuccuc

SEQ ID NO: 1237128 - RNA, 15 nt, Human
acagaggcccucaag

SEQ ID NO: 1237129 - RNA, 15 nt, Human
acacuggucugcugu

SEQ ID NO: 1237130 - RNA, 20 nt, Human
acacuggucugcuguuccag

SEQ ID NO: 1237131 - RNA, 16 nt, Human
acacuggucugcuguc

SEQ ID NO: 1237132 - RNA, 19 nt, Human
acacuguaguaaauaaugc

SEQ ID NO: 1237133 - RNA, 22 nt, Human
acacuguaguaaauaaugcuuu

SEQ ID NO: 1237134 - RNA, 22 nt, Human
acagaauuacuguaacugauua

SEQ ID NO: 1237135 - RNA, 18 nt, Human
acagaaugugauaaggaa

SEQ ID NO: 1237136 - RNA, 16 nt, Human
acagaauugcuuguuu

SEQ ID NO: 1237137 - RNA, 18 nt, Human
acagaauuuuauggugca

SEQ ID NO: 1237138 - RNA, 15 nt, Human
acagaggccccagcc

SEQ ID NO: 1237139 - RNA, 16 nt, Human
acagaggccccagccu

SEQ ID NO: 1237140 - RNA, 17 nt, Human
acagaggccccagccuc

SEQ ID NO: 1237141 - RNA, 18 nt, Human
acagaggccccagccucc

SEQ ID NO: 1237142 - RNA, 22 nt, Human
acagaggccccagccucccuga

SEQ ID NO: 1237143 - RNA, 20 nt, Human
acagaggcccucaagucuuu

SEQ ID NO: 1237144 - RNA, 11 nt, Human
acacugccagc

SEQ ID NO: 1237145 - RNA, 18 nt, Human
acacugcagccccaccca

SEQ ID NO: 1237146 - RNA, 16 nt, Human
acacugcacaauaacu

SEQ ID NO: 1237147 - RNA, 13 nt, Human
acacuggccccuc

SEQ ID NO: 1237148 - RNA, 14 nt, Human
acacuggccccuca

SEQ ID NO: 1237149 - RNA, 13 nt, Human
acacuggguggug

SEQ ID NO: 1237150 - RNA, 18 nt, Human
acacugggugguggccug

SEQ ID NO: 1237151 - RNA, 19 nt, Human
acacugggugguggccugg

SEQ ID NO: 1237152 - RNA, 23 nt, Human
acacugggugguggccugguccc

SEQ ID NO: 1237153 - RNA, 20 nt, Human
acacugggugguggccuggu

SEQ ID NO: 1237154 - RNA, 23 nt, Human
acacugcacaauaacuccuccca

SEQ ID NO: 1237155 - RNA, 21 nt, Human
acaggaugaugacuauggaaa

SEQ ID NO: 1237156 - RNA, 13 nt, Human
acaggauccaggc

SEQ ID NO: 1237157 - RNA, 12 nt, Human
acaggauccagg

SEQ ID NO: 1237158 - RNA, 19 nt, Human
acaggaucaguuaacuauu

SEQ ID NO: 1237159 - RNA, 18 nt, Human
acaggauccaggccggcu

SEQ ID NO: 1237160 - RNA, 22 nt, Human
acaggaugguucccuugaugaa

SEQ ID NO: 1237161 - RNA, 19 nt, Human
acaggcaaaauccuugcuu

SEQ ID NO: 1237162 - RNA, 21 nt, Human
acagccaacuagccccugggg

SEQ ID NO: 1237163 - RNA, 13 nt, Human
aauuuuguugcug

SEQ ID NO: 1237164 - RNA, 18 nt, Human
aauuuuguguaagaaaua

SEQ ID NO: 1237165 - RNA, 22 nt, Human
aauuuuguguaagaaauacaga

SEQ ID NO: 1237166 - RNA, 13 nt, Human
aauuuugugaagc

SEQ ID NO: 1237167 - RNA, 18 nt, Human
aauuuugugguuuucgag

SEQ ID NO: 1237168 - RNA, 14 nt, Human
aauuuuguguaaga

SEQ ID NO: 1237169 - RNA, 15 nt, Human
aauuuuguguaagaa

SEQ ID NO: 1237170 - RNA, 17 nt, Human
aauuuuguguaagaaau

SEQ ID NO: 1237171 - RNA, 15 nt, Human
aauuuuguaacgaag

SEQ ID NO: 1237172 - RNA, 12 nt, Human
aauuuucuuuca

SEQ ID NO: 1237173 - RNA, 18 nt, Human
aauuuuguaauguaucaa

SEQ ID NO: 1237174 - RNA, 22 nt, Human
aauuuuccuguccucuuucagc

SEQ ID NO: 1237175 - RNA, 19 nt, Human
aauuuuccuaauaaaguuc

SEQ ID NO: 1237176 - RNA, 23 nt, Human
aauuuuccuguccucuuucagcu

SEQ ID NO: 1237177 - RNA, 22 nt, Human
aauuuucuggaauacaugaaau

SEQ ID NO: 1237178 - RNA, 22 nt, Human
acaacggagucaaaaauuaaac

SEQ ID NO: 1237179 - RNA, 20 nt, Human
acaacggagucaaaaauuaa

SEQ ID NO: 1237180 - RNA, 14 nt, Human
acaacggagucaaa

SEQ ID NO: 1237181 - RNA, 12 nt, Human
acaaaauguuau

SEQ ID NO: 1237182 - RNA, 11 nt, Human
acaaaauguua

SEQ ID NO: 1237183 - RNA, 16 nt, Human
acaaaauguaugucug

SEQ ID NO: 1237184 - RNA, 17 nt, Human
acaaaauguuauuuccc

SEQ ID NO: 1237185 - RNA, 22 nt, Human
acaacuaagugauuuguauguc

SEQ ID NO: 1237186 - RNA, 22 nt, Human
acaacgugcucuuuguuuugug

SEQ ID NO: 1237187 - RNA, 10 nt, Human
acaacuaagu

SEQ ID NO: 1237188 - RNA, 18 nt, Human
acaacgugcucuuuguuu

SEQ ID NO: 1237189 - RNA, 22 nt, Human
acaagaaaggcugcuguacuga

SEQ ID NO: 1237190 - RNA, 21 nt, Human
acaagaaaggcugcuguacug

SEQ ID NO: 1237191 - RNA, 19 nt, Human
acaagaaaauaagagcuca

SEQ ID NO: 1237192 - RNA, 16 nt, Human
acaagaaaaauaaaga

SEQ ID NO: 1237193 - RNA, 17 nt, Human
acaagaaaaauaaagaa

SEQ ID NO: 1237194 - RNA, 18 nt, Human
acaagaaaaauaaagaaa

SEQ ID NO: 1237195 - RNA, 20 nt, Human
acaagaaaaauaaagaaaag

SEQ ID NO: 1237196 - RNA, 23 nt, Human
acaagaaaaauaaagaaaagaug

SEQ ID NO: 1237197 - RNA, 23 nt, Human
acaagaaaauaagagcucaggau

SEQ ID NO: 1237198 - RNA, 13 nt, Human
acaagaaaugaaa

SEQ ID NO: 1237199 - RNA, 19 nt, Human
aauuuuguuuauaagaaau

SEQ ID NO: 1237200 - RNA, 15 nt, Human
acaaggcagcaaggc

SEQ ID NO: 1237201 - RNA, 16 nt, Human
acaaggcagcaaggcc

SEQ ID NO: 1237202 - RNA, 18 nt, Human
acaaggcagcaaggcccg

SEQ ID NO: 1237203 - RNA, 22 nt, Human
acaaggcagcaaggcccgagca

SEQ ID NO: 1237204 - RNA, 21 nt, Human
acaaggcagcaaggcccgagc

SEQ ID NO: 1237205 - RNA, 18 nt, Human
acaaggccaucugggcuc

SEQ ID NO: 1237206 - RNA, 22 nt, Human
acaauugagguaaguuuuuuga

SEQ ID NO: 1237207 - RNA, 16 nt, Human
acaauugaaguaaacu

SEQ ID NO: 1237208 - RNA, 19 nt, Human
acaauugaaguaaacuuuu

SEQ ID NO: 1237209 - RNA, 22 nt, Human
acaauugaaguaaacuuuuugu

SEQ ID NO: 1237210 - RNA, 17 nt, Human
acaauugaagucaauua

SEQ ID NO: 1237211 - RNA, 20 nt, Human
acaauugggagcugccaaga

SEQ ID NO: 1237212 - RNA, 13 nt, Human
acaauugaaguaa

SEQ ID NO: 1237213 - RNA, 13 nt, Human
acaauugggagcu

SEQ ID NO: 1237214 - RNA, 14 nt, Human
acaauuguguagcc

SEQ ID NO: 1237215 - RNA, 16 nt, Human
acaauuguguagccuu

SEQ ID NO: 1237216 - RNA, 17 nt, Human
acaauuguguagccuuu

SEQ ID NO: 1237217 - RNA, 18 nt, Human
acaauuguguagccuuuu

SEQ ID NO: 1237218 - RNA, 23 nt, Human
acaauuguguagccuuuuuguau

SEQ ID NO: 1237219 - RNA, 21 nt, Human
acaauuguguagccuuuuugu

SEQ ID NO: 1237220 - RNA, 17 nt, Human
acacagauuugagcuca

SEQ ID NO: 1237221 - RNA, 17 nt, Human
acaccaacauaaaaaug

SEQ ID NO: 1237222 - RNA, 14 nt, Human
acaccaagcacagc

SEQ ID NO: 1237223 - RNA, 15 nt, Human
acacauuuuuuagga

SEQ ID NO: 1237224 - RNA, 16 nt, Human
acacauuuuuuaggaa

SEQ ID NO: 1237225 - RNA, 19 nt, Human
acacauuuuuuaggaaaug

SEQ ID NO: 1237226 - RNA, 14 nt, Human
acaccaaaguucua

SEQ ID NO: 1237227 - RNA, 15 nt, Human
acaccaaaguucuaa

SEQ ID NO: 1237228 - RNA, 18 nt, Human
acaccaacauaaaaauga

SEQ ID NO: 1237229 - RNA, 16 nt, Human
acacgcuccuuccucu

SEQ ID NO: 1237230 - RNA, 14 nt, Human
acacgcuccuuccu

SEQ ID NO: 1237231 - RNA, 22 nt, Human
acacgcgguuugguuugcagcg

SEQ ID NO: 1237232 - RNA, 17 nt, Human
accuguguuucuugccu

SEQ ID NO: 1237233 - RNA, 18 nt, Human
accuguguuucuugccuc

SEQ ID NO: 1237234 - RNA, 19 nt, Human
accuguguuucuugccuca

SEQ ID NO: 1237235 - RNA, 20 nt, Human
accuguguuucuugccucau

SEQ ID NO: 1237236 - RNA, 21 nt, Human
accuguguuucuugccucauu

SEQ ID NO: 1237237 - RNA, 12 nt, Human
accugucugucu

SEQ ID NO: 1237238 - RNA, 11 nt, Human
accugucuguc

SEQ ID NO: 1237239 - RNA, 18 nt, Human
accugucucaccuggacu

SEQ ID NO: 1237240 - RNA, 11 nt, Human
accuguccaau

SEQ ID NO: 1237241 - RNA, 16 nt, Human
accugccgagagucca

SEQ ID NO: 1237242 - RNA, 23 nt, Human
accugccgagaguccaucagccu

SEQ ID NO: 1237243 - RNA, 13 nt, Human
accugccucagga

SEQ ID NO: 1237244 - RNA, 20 nt, Human
accugcccugcugaguccca

SEQ ID NO: 1237245 - RNA, 21 nt, Human
accucuguauuugaaucagcc

SEQ ID NO: 1237246 - RNA, 18 nt, Human
accucuggguugggauca

SEQ ID NO: 1237247 - RNA, 15 nt, Human
accucugcugccucc

SEQ ID NO: 1237248 - RNA, 11 nt, Human
accuuucauac

SEQ ID NO: 1237249 - RNA, 18 nt, Human
accuuuccaccacagcca

SEQ ID NO: 1237250 - RNA, 11 nt, Human
accuuucuagu

SEQ ID NO: 1237251 - RNA, 15 nt, Human
accuuucuaguugaa

SEQ ID NO: 1237252 - RNA, 14 nt, Human
accuuuagguucuu

SEQ ID NO: 1237253 - RNA, 21 nt, Human
accuguugagcaucacagaau

SEQ ID NO: 1237254 - RNA, 17 nt, Human
accuguuaccuacuuug

SEQ ID NO: 1237255 - RNA, 18 nt, Human
accuguuaccuacuuuga

SEQ ID NO: 1237256 - RNA, 17 nt, Human
accuguuagcagacagg

SEQ ID NO: 1237257 - RNA, 14 nt, Human
accuguugagcauc

SEQ ID NO: 1237258 - RNA, 19 nt, Human
accuguugagcaucacaga

SEQ ID NO: 1237259 - RNA, 20 nt, Human
accuguugagcaucacagaa

SEQ ID NO: 1237260 - RNA, 22 nt, Human
accuguugagcaucacagaaug

SEQ ID NO: 1237261 - RNA, 23 nt, Human
accuuggguuagaccuacagggg

SEQ ID NO: 1237262 - RNA, 17 nt, Human
accuuggguuagaccua

SEQ ID NO: 1237263 - RNA, 22 nt, Human
acggaagaagagaucaggaaga

SEQ ID NO: 1237264 - RNA, 14 nt, Human
acggaacucaaaua

SEQ ID NO: 1237265 - RNA, 18 nt, Human
acgcuuuccugaauccaa

SEQ ID NO: 1237266 - RNA, 11 nt, Human
acgcuuugauu

SEQ ID NO: 1237267 - RNA, 15 nt, Human
acggaaagugcuguc

SEQ ID NO: 1237268 - RNA, 17 nt, Human
acgcuuuuugaaaaagc

SEQ ID NO: 1237269 - RNA, 14 nt, Human
acgcuuuugugaug

SEQ ID NO: 1237270 - RNA, 23 nt, Human
acgcuuuugugauggagugcugu

SEQ ID NO: 1237271 - RNA, 12 nt, Human
acgcuuugauuc

SEQ ID NO: 1237272 - RNA, 13 nt, Human
acgcuuugauuca

SEQ ID NO: 1237273 - RNA, 14 nt, Human
acgcuuugauucau

SEQ ID NO: 1237274 - RNA, 16 nt, Human
acgcuuugauucauag

SEQ ID NO: 1237275 - RNA, 17 nt, Human
acgccacagcccuuuug

SEQ ID NO: 1237276 - RNA, 22 nt, Human
acgccacagcccuuuugucucu

SEQ ID NO: 1237277 - RNA, 22 nt, Human
acgcaucuaguuccccuguuua

SEQ ID NO: 1237278 - RNA, 12 nt, Human
acgccacagccc

SEQ ID NO: 1237279 - RNA, 21 nt, Human
acgcaugcaguguuggggaug

SEQ ID NO: 1237280 - RNA, 13 nt, Human
acuaagagagaau

SEQ ID NO: 1237281 - RNA, 15 nt, Human
acuaagagagaauga

SEQ ID NO: 1237282 - RNA, 16 nt, Human
acuaagagaaguugua

SEQ ID NO: 1237283 - RNA, 17 nt, Human
acuaagagaaguuguaa

SEQ ID NO: 1237284 - RNA, 21 nt, Human
acgugacacaaacacacacaa

SEQ ID NO: 1237285 - RNA, 21 nt, Human
acgugaccggacuuuucugca

SEQ ID NO: 1237286 - RNA, 15 nt, Human
acuaauuccacaccu

SEQ ID NO: 1237287 - RNA, 18 nt, Human
acuaagccagcaccggac

SEQ ID NO: 1237288 - RNA, 20 nt, Human
acuaauuucaaaaugcuuuu

SEQ ID NO: 1237289 - RNA, 16 nt, Human
acuaauuucaaaaugc

SEQ ID NO: 1237290 - RNA, 19 nt, Human
acuaauuucaaaaugcuuu

SEQ ID NO: 1237291 - RNA, 23 nt, Human
acuaauuccacaccuuuuauuga

SEQ ID NO: 1237292 - RNA, 14 nt, Human
acuaauuucaaaau

SEQ ID NO: 1237293 - RNA, 20 nt, Human
acuaguauuucuaugaaaua

SEQ ID NO: 1237294 - RNA, 14 nt, Human
acuagccaaaccag

SEQ ID NO: 1237295 - RNA, 18 nt, Human
acuagccaaaccaggacc

SEQ ID NO: 1237296 - RNA, 15 nt, Human
acuagccaaaccuca

SEQ ID NO: 1237297 - RNA, 16 nt, Human
acuagccaaaccucac

SEQ ID NO: 1237298 - RNA, 17 nt, Human
acuauucuugauguaaa

SEQ ID NO: 1237299 - RNA, 11 nt, Human
acuauuuaaag

SEQ ID NO: 1237300 - RNA, 20 nt, Human
acuauuuaaagccuccucau

SEQ ID NO: 1237301 - RNA, 12 nt, Human
acuauuuaacug

SEQ ID NO: 1237302 - RNA, 13 nt, Human
acuauuuaacuga

SEQ ID NO: 1237303 - RNA, 14 nt, Human
acuauuuaacugac

SEQ ID NO: 1237304 - RNA, 15 nt, Human
acuauuuaacugacu

SEQ ID NO: 1237305 - RNA, 16 nt, Human
acuauuuaacugacua

SEQ ID NO: 1237306 - RNA, 17 nt, Human
acuauuuaacugacuau

SEQ ID NO: 1237307 - RNA, 17 nt, Human
acucagucucucuucuc

SEQ ID NO: 1237308 - RNA, 14 nt, Human
acucaguaauuugu

SEQ ID NO: 1237309 - RNA, 16 nt, Human
acucagggcuccuggg

SEQ ID NO: 1237310 - RNA, 18 nt, Human
acucagggcuucuaguuu

SEQ ID NO: 1237311 - RNA, 15 nt, Human
acucagguggcccua

SEQ ID NO: 1237312 - RNA, 20 nt, Human
acucagcuuucuuuaaaguu

SEQ ID NO: 1237313 - RNA, 16 nt, Human
acucaggagccuguga

SEQ ID NO: 1237314 - RNA, 17 nt, Human
acucagccacccugagu

SEQ ID NO: 1237315 - RNA, 18 nt, Human
acucagccacccugaguu

SEQ ID NO: 1237316 - RNA, 11 nt, Human
acucagcaugg

SEQ ID NO: 1237317 - RNA, 20 nt, Human
acucaaaugugaguguuuuu

SEQ ID NO: 1237318 - RNA, 16 nt, Human
acucaaauguucuaag

SEQ ID NO: 1237319 - RNA, 17 nt, Human
acucaaauguucuaagu

SEQ ID NO: 1237320 - RNA, 18 nt, Human
acucaaauguucuaaguu

SEQ ID NO: 1237321 - RNA, 17 nt, Human
acucaaaugaguaacau

SEQ ID NO: 1237322 - RNA, 14 nt, Human
acucaaaugaguaa

SEQ ID NO: 1237323 - RNA, 16 nt, Human
acucaaaugaguaaca

SEQ ID NO: 1237324 - RNA, 17 nt, Human
acucaaauggggccaga

SEQ ID NO: 1237325 - RNA, 20 nt, Human
acucaaauggggccagaucc

SEQ ID NO: 1237326 - RNA, 21 nt, Human
acucaaauggggccagaucca

SEQ ID NO: 1237327 - RNA, 22 nt, Human
acucaaauggggccagauccag

SEQ ID NO: 1237328 - RNA, 23 nt, Human
acucaaauggggccagauccagc

SEQ ID NO: 1237329 - RNA, 20 nt, Human
acuagauggaccugccugca

SEQ ID NO: 1237330 - RNA, 18 nt, Human
acuagauggaccugccug

SEQ ID NO: 1237331 - RNA, 12 nt, Human
acuagauguagu

SEQ ID NO: 1237332 - RNA, 13 nt, Human
acuagauguagua

SEQ ID NO: 1237333 - RNA, 16 nt, Human
acuagauguaguauuu

SEQ ID NO: 1237334 - RNA, 17 nt, Human
acuagauguaguauuuu

SEQ ID NO: 1237335 - RNA, 15 nt, Human
acucauauuuucaug

SEQ ID NO: 1237336 - RNA, 20 nt, Human
acucaucaauggggccaguc

SEQ ID NO: 1237337 - RNA, 23 nt, Human
acucauacacucguaugauacuu

SEQ ID NO: 1237338 - RNA, 18 nt, Human
acucauagacacugaucu

SEQ ID NO: 1237339 - RNA, 17 nt, Human
acucauauaauuauaug

SEQ ID NO: 1237340 - RNA, 18 nt, Human
acucauauaauuauaugu

SEQ ID NO: 1237341 - RNA, 19 nt, Human
acucauauaauuauauguu

SEQ ID NO: 1237342 - RNA, 23 nt, Human
acucauauaauuauauguuguaa

SEQ ID NO: 1237343 - RNA, 17 nt, Human
acucuauguucuaagaa

SEQ ID NO: 1237344 - RNA, 17 nt, Human
acucuagucaaugacau

SEQ ID NO: 1237345 - RNA, 13 nt, Human
acucuguaauugc

SEQ ID NO: 1237346 - RNA, 14 nt, Human
acucuguaauugca

SEQ ID NO: 1237347 - RNA, 15 nt, Human
acucuguaauugcaa

SEQ ID NO: 1237348 - RNA, 11 nt, Human
acucuguccug

SEQ ID NO: 1237349 - RNA, 13 nt, Human
acucuagucaaug

SEQ ID NO: 1237350 - RNA, 15 nt, Human
acucuagucaaugac

SEQ ID NO: 1237351 - RNA, 12 nt, Human
acucuauucuuu

SEQ ID NO: 1237352 - RNA, 20 nt, Human
acucuggugagucaccacuu

SEQ ID NO: 1237353 - RNA, 19 nt, Human
acucugguggcacaggagu

SEQ ID NO: 1237354 - RNA, 14 nt, Human
acucuggugccucc

SEQ ID NO: 1237355 - RNA, 16 nt, Human
acucuggugccuccag

SEQ ID NO: 1237356 - RNA, 17 nt, Human
acucuggugccuccaga

SEQ ID NO: 1237357 - RNA, 12 nt, Human
acucuguaauug

SEQ ID NO: 1237358 - RNA, 19 nt, Human
acuguaagaaaauaucacu

SEQ ID NO: 1237359 - RNA, 14 nt, Human
acugguuuucacau

SEQ ID NO: 1237360 - RNA, 13 nt, Human
acuguaagaaaau

SEQ ID NO: 1237361 - RNA, 22 nt, Human
acuguaagaaaauaucacuugu

SEQ ID NO: 1237362 - RNA, 13 nt, Human
acuggucugcugu

SEQ ID NO: 1237363 - RNA, 20 nt, Human
acugguuugaagaauguuaa

SEQ ID NO: 1237364 - RNA, 20 nt, Human
acugucucaagagggcacug

SEQ ID NO: 1237365 - RNA, 21 nt, Human
acugucucaagagggcacugg

SEQ ID NO: 1237366 - RNA, 23 nt, Human
acugucucaagagggcacuggug

SEQ ID NO: 1237367 - RNA, 17 nt, Human
acugguuugaagaaugu

SEQ ID NO: 1237368 - RNA, 22 nt, Human
acugucuccauggcccugcaaa

SEQ ID NO: 1237369 - RNA, 21 nt, Human
acugucucgaugcaaugaaca

SEQ ID NO: 1237370 - RNA, 15 nt, Human
acugucucucaugaa

SEQ ID NO: 1237371 - RNA, 17 nt, Human
acugucucucaugaacc

SEQ ID NO: 1237372 - RNA, 18 nt, Human
acugucucucaugaaccu

SEQ ID NO: 1237373 - RNA, 15 nt, Human
acugugaaggacccu

SEQ ID NO: 1237374 - RNA, 16 nt, Human
acugugaaggacccuu

SEQ ID NO: 1237375 - RNA, 19 nt, Human
acugugacccccagcuccg

SEQ ID NO: 1237376 - RNA, 21 nt, Human
acugugacccccagcuccggc

SEQ ID NO: 1237377 - RNA, 20 nt, Human
acugugccucagagaccagg

SEQ ID NO: 1237378 - RNA, 22 nt, Human
acugugccucagagaccagggc

SEQ ID NO: 1237379 - RNA, 23 nt, Human
acugugccucagagaccagggcu

SEQ ID NO: 1237380 - RNA, 16 nt, Human
acugcccccucugccc

SEQ ID NO: 1237381 - RNA, 17 nt, Human
acugcccccucugcccu

SEQ ID NO: 1237382 - RNA, 16 nt, Human
acuggaagcuaauuug

SEQ ID NO: 1237383 - RNA, 14 nt, Human
acugcccccucugc

SEQ ID NO: 1237384 - RNA, 15 nt, Human
acugcccccucugcc

SEQ ID NO: 1237385 - RNA, 21 nt, Human
acugcccauggacaggcuggc

SEQ ID NO: 1237386 - RNA, 19 nt, Human
acugcccauggacaggcug

SEQ ID NO: 1237387 - RNA, 21 nt, Human
acugccaggagggacaaagga

SEQ ID NO: 1237388 - RNA, 15 nt, Human
acugccaggagggac

SEQ ID NO: 1237389 - RNA, 12 nt, Human
acugccaggagg

SEQ ID NO: 1237390 - RNA, 13 nt, Human
acugccaggaggg

SEQ ID NO: 1237391 - RNA, 14 nt, Human
acugccaggaggga

SEQ ID NO: 1237392 - RNA, 19 nt, Human
acuggaagcuaauuugcau

SEQ ID NO: 1237393 - RNA, 20 nt, Human
acuggaagcuaauuugcauu

SEQ ID NO: 1237394 - RNA, 13 nt, Human
acuggagacugug

SEQ ID NO: 1237395 - RNA, 21 nt, Human
acuggagacugugugugcccu

SEQ ID NO: 1237396 - RNA, 12 nt, Human
acuggagcacaa

SEQ ID NO: 1237397 - RNA, 15 nt, Human
acuggagcagaaggg

SEQ ID NO: 1237398 - RNA, 18 nt, Human
acugguaggaaacuaggu

SEQ ID NO: 1237399 - RNA, 15 nt, Human
acugguaggaccaag

SEQ ID NO: 1237400 - RNA, 18 nt, Human
acugguauguaaaagaaa

SEQ ID NO: 1237401 - RNA, 21 nt, Human
acugguccaaaagauugcuga

SEQ ID NO: 1237402 - RNA, 22 nt, Human
acugguccaaaagauugcugaa

SEQ ID NO: 1237403 - RNA, 22 nt, Human
acuggucacggauuugugucug

SEQ ID NO: 1237404 - RNA, 12 nt, Human
acuggucucucu

SEQ ID NO: 1237405 - RNA, 15 nt, Human
acuggucuguaggga

SEQ ID NO: 1237406 - RNA, 12 nt, Human
acugccagcauu

SEQ ID NO: 1237407 - RNA, 20 nt, Human
acucugucucaguccaugaa

SEQ ID NO: 1237408 - RNA, 22 nt, Human
acucuguccugaaggccugagg

SEQ ID NO: 1237409 - RNA, 15 nt, Human
acucugucuuguguu

SEQ ID NO: 1237410 - RNA, 11 nt, Human
acucugugcca

SEQ ID NO: 1237411 - RNA, 18 nt, Human
acucugucucaguccaug

SEQ ID NO: 1237412 - RNA, 12 nt, Human
acucuguccuga

SEQ ID NO: 1237413 - RNA, 13 nt, Human
acucuguccugaa

SEQ ID NO: 1237414 - RNA, 19 nt, Human
acucuguccugaaggccug

SEQ ID NO: 1237415 - RNA, 20 nt, Human
acucuguccugaaggccuga

SEQ ID NO: 1237416 - RNA, 23 nt, Human
acucuguccugaaggccugaggu

SEQ ID NO: 1237417 - RNA, 14 nt, Human
acucugugccagag

SEQ ID NO: 1237418 - RNA, 18 nt, Human
acuuguaaaggaauuuaa

SEQ ID NO: 1237419 - RNA, 23 nt, Human
acuuggggaguuaagaccuggca

SEQ ID NO: 1237420 - RNA, 20 nt, Human
acuugguugguaggguggga

SEQ ID NO: 1237421 - RNA, 14 nt, Human
acuugguuuugcua

SEQ ID NO: 1237422 - RNA, 13 nt, Human
acuucuugaaggu

SEQ ID NO: 1237423 - RNA, 16 nt, Human
acuucuugaaggugcu

SEQ ID NO: 1237424 - RNA, 13 nt, Human
acuugggcacccc

SEQ ID NO: 1237425 - RNA, 17 nt, Human
acuugggcacccccagc

SEQ ID NO: 1237426 - RNA, 20 nt, Human
acuugggcacccccagccug

SEQ ID NO: 1237427 - RNA, 21 nt, Human
acuugggcacccccagccugg

SEQ ID NO: 1237428 - RNA, 22 nt, Human
acuugggcacccccagccuggg

SEQ ID NO: 1237429 - RNA, 23 nt, Human
acuugggcacccccagccugggc

SEQ ID NO: 1237430 - RNA, 21 nt, Human
acuuggggaguuaagaccugg

SEQ ID NO: 1237431 - RNA, 16 nt, Human
acuucuuauggaauug

SEQ ID NO: 1237432 - RNA, 17 nt, Human
acuucuuauggaauuga

SEQ ID NO: 1237433 - RNA, 20 nt, Human
acuucuuauggaauugauuu

SEQ ID NO: 1237434 - RNA, 21 nt, Human
acuucuuauggaauugauuug

SEQ ID NO: 1237435 - RNA, 23 nt, Human
acuucuuauggaauugauuugca

SEQ ID NO: 1237436 - RNA, 12 nt, Human
acuucuugaagg

SEQ ID NO: 1237437 - RNA, 12 nt, Human
acuucagacaua

SEQ ID NO: 1237438 - RNA, 17 nt, Human
acuucugggcuucaucu

SEQ ID NO: 1237439 - RNA, 19 nt, Human
acuucugggcuucaucugg

SEQ ID NO: 1237440 - RNA, 22 nt, Human
acuucugggcuucaucuggcaa

SEQ ID NO: 1237441 - RNA, 15 nt, Human
acuucuguaauugug

SEQ ID NO: 1237442 - RNA, 21 nt, Human
acuucuguaauuguguggauu

SEQ ID NO: 1237443 - RNA, 22 nt, Human
acuucacugugcuguuguuaug

SEQ ID NO: 1237444 - RNA, 12 nt, Human
acuucagaaaga

SEQ ID NO: 1237445 - RNA, 16 nt, Human
acuucagaaagacuug

SEQ ID NO: 1237446 - RNA, 24 nt, Human
acuucacugugcuguuguuaugau

SEQ ID NO: 1237447 - RNA, 21 nt, Human
acuucacugugcuguuguuau

SEQ ID NO: 1237448 - RNA, 20 nt, Human
acuucacugugcuguuguua

SEQ ID NO: 1237449 - RNA, 19 nt, Human
acuucacugugcuguuguu

SEQ ID NO: 1237450 - RNA, 17 nt, Human
acuucacugugcuguug

SEQ ID NO: 1237451 - RNA, 14 nt, Human
acuucacugugcug

SEQ ID NO: 1237452 - RNA, 13 nt, Human
acuucacugugcu

SEQ ID NO: 1237453 - RNA, 15 nt, Human
acuucaaaaguuugu

SEQ ID NO: 1237454 - RNA, 14 nt, Human
acuguuucuuuaaa

SEQ ID NO: 1237455 - RNA, 21 nt, Human
acuguuugccuucuacuuuua

SEQ ID NO: 1237456 - RNA, 22 nt, Human
acuguuugccuucuacuuuuaa

SEQ ID NO: 1237457 - RNA, 23 nt, Human
acuguuuggaaauugauuuugaa

SEQ ID NO: 1237458 - RNA, 17 nt, Human
acuuauuuaugaaccug

SEQ ID NO: 1237459 - RNA, 19 nt, Human
acuguuuggaaauaaaucu

SEQ ID NO: 1237460 - RNA, 14 nt, Human
acuuauuuuugaca

SEQ ID NO: 1237461 - RNA, 16 nt, Human
acuuauuuuugacagu

SEQ ID NO: 1237462 - RNA, 19 nt, Human
acuuauuuuugacaguguu

SEQ ID NO: 1237463 - RNA, 22 nt, Human
acuuauuuuugacaguguugaa

SEQ ID NO: 1237464 - RNA, 14 nt, Human
acuuuuggaaggua

SEQ ID NO: 1237465 - RNA, 22 nt, Human
acuuuugcuguaauguuaauau

SEQ ID NO: 1237466 - RNA, 17 nt, Human
agaaaauaaucauucuu

SEQ ID NO: 1237467 - RNA, 22 nt, Human
agaaaauaaggcacccaucugu

SEQ ID NO: 1237468 - RNA, 12 nt, Human
acuuuugacaaa

SEQ ID NO: 1237469 - RNA, 15 nt, Human
acuuuugcccuuuga

SEQ ID NO: 1237470 - RNA, 16 nt, Human
agaaaaucaggcuggc

SEQ ID NO: 1237471 - RNA, 23 nt, Human
acuuuuaugauacuugaaaauua

SEQ ID NO: 1237472 - RNA, 16 nt, Human
acuuuuaguaaaguca

SEQ ID NO: 1237473 - RNA, 23 nt, Human
acuuuuauuuccagugaaaucag

SEQ ID NO: 1237474 - RNA, 14 nt, Human
acuuuucccacucc

SEQ ID NO: 1237475 - RNA, 15 nt, Human
acuuuucccacucca

SEQ ID NO: 1237476 - RNA, 16 nt, Human
acuuuuaugauacuug

SEQ ID NO: 1237477 - RNA, 12 nt, Human
acuuuuaugaua

SEQ ID NO: 1237478 - RNA, 13 nt, Human
acuuuuacaagua

SEQ ID NO: 1237479 - RNA, 14 nt, Human
acuuuuacaaguaa

SEQ ID NO: 1237480 - RNA, 21 nt, Human
acuuuuacaaguaacaaaaau

SEQ ID NO: 1237481 - RNA, 15 nt, Human
acuuuuacucugccu

SEQ ID NO: 1237482 - RNA, 16 nt, Human
acuuuuacucugccua

SEQ ID NO: 1237483 - RNA, 19 nt, Human
acuuuuacucugccuacag

SEQ ID NO: 1237484 - RNA, 21 nt, Human
acuuuuacucugccuacagaa

SEQ ID NO: 1237485 - RNA, 15 nt, Human
acuuuauuuuguguu

SEQ ID NO: 1237486 - RNA, 20 nt, Human
acuuuuaaacuguguacaua

SEQ ID NO: 1237487 - RNA, 18 nt, Human
acuuuuaaugaacaaaug

SEQ ID NO: 1237488 - RNA, 13 nt, Human
acuuuuaauucau

SEQ ID NO: 1237489 - RNA, 22 nt, Human
acuuuaucuugaauaauguaag

SEQ ID NO: 1237490 - RNA, 15 nt, Human
acuuuaucacuuaaa

SEQ ID NO: 1237491 - RNA, 13 nt, Human
acuuuaucacuua

SEQ ID NO: 1237492 - RNA, 22 nt, Human
acuuuauccucauuccauaaau

SEQ ID NO: 1237493 - RNA, 22 nt, Human
acuuuauuuucuauaauuuaaa

SEQ ID NO: 1237494 - RNA, 17 nt, Human
agaaauaaauuuauuuc

SEQ ID NO: 1237495 - RNA, 19 nt, Human
agaaauaagugcccucucc

SEQ ID NO: 1237496 - RNA, 13 nt, Human
agaaauaaguuuu

SEQ ID NO: 1237497 - RNA, 14 nt, Human
agaaauaaguuuuu

SEQ ID NO: 1237498 - RNA, 16 nt, Human
agaaauaaguuuuugu

SEQ ID NO: 1237499 - RNA, 23 nt, Human
agaaauaaguuuuuguuucacag

SEQ ID NO: 1237500 - RNA, 12 nt, Human
agaaaguugauu

SEQ ID NO: 1237501 - RNA, 17 nt, Human
agaaauaaaaggaagcc

SEQ ID NO: 1237502 - RNA, 18 nt, Human
agaaauaaaaggaagcca

SEQ ID NO: 1237503 - RNA, 11 nt, Human
agaaaguguau

SEQ ID NO: 1237504 - RNA, 13 nt, Human
agaaaguguauuu

SEQ ID NO: 1237505 - RNA, 16 nt, Human
agaaaguguauuugga

SEQ ID NO: 1237506 - RNA, 17 nt, Human
agaaaguguauuuggaa

SEQ ID NO: 1237507 - RNA, 23 nt, Human
agaaagggcccugggccugccuc

SEQ ID NO: 1237508 - RNA, 16 nt, Human
agaaagguuaguauca

SEQ ID NO: 1237509 - RNA, 14 nt, Human
agaaagugagcagu

SEQ ID NO: 1237510 - RNA, 15 nt, Human
agaaagugccugaca

SEQ ID NO: 1237511 - RNA, 16 nt, Human
agaaagugagcagugu

SEQ ID NO: 1237512 - RNA, 19 nt, Human
agaaagucuuauuuauuca

SEQ ID NO: 1237513 - RNA, 22 nt, Human
agaaagucuuauuuauucauau

SEQ ID NO: 1237514 - RNA, 19 nt, Human
agaaagugccugacacacu

SEQ ID NO: 1237515 - RNA, 22 nt, Human
agaaagugccugacacacuaac

SEQ ID NO: 1237516 - RNA, 14 nt, Human
agaaagugccuuuc

SEQ ID NO: 1237517 - RNA, 16 nt, Human
agaaagugccuuucag

SEQ ID NO: 1237518 - RNA, 17 nt, Human
agaaagugccuuucagg

SEQ ID NO: 1237519 - RNA, 18 nt, Human
agaaagugccuuucagga

SEQ ID NO: 1237520 - RNA, 21 nt, Human
agaaagugccuuucaggaucu

SEQ ID NO: 1237521 - RNA, 22 nt, Human
agaaagugccuuucaggaucua

SEQ ID NO: 1237522 - RNA, 19 nt, Human
agaaaguggaaaacaagga

SEQ ID NO: 1237523 - RNA, 20 nt, Human
agaaaguggaaaacaaggaa

SEQ ID NO: 1237524 - RNA, 23 nt, Human
agaaaguggaaaacaaggaaguc

SEQ ID NO: 1237525 - RNA, 15 nt, Human
agaaaggcugcugua

SEQ ID NO: 1237526 - RNA, 15 nt, Human
agaaaggcuguuaaa

SEQ ID NO: 1237527 - RNA, 16 nt, Human
agaaaggcuguuaaau

SEQ ID NO: 1237528 - RNA, 21 nt, Human
agaaaggcuguuaaauacagg

SEQ ID NO: 1237529 - RNA, 22 nt, Human
agaaaggcuguuaaauacagga

SEQ ID NO: 1237530 - RNA, 13 nt, Human
agaaagggagggc

SEQ ID NO: 1237531 - RNA, 14 nt, Human
agaaagggagggcu

SEQ ID NO: 1237532 - RNA, 15 nt, Human
agaaagggagggcuc

SEQ ID NO: 1237533 - RNA, 16 nt, Human
agaaagggagggcucu

SEQ ID NO: 1237534 - RNA, 17 nt, Human
agaaagggagggcucug

SEQ ID NO: 1237535 - RNA, 18 nt, Human
agaaagggagggcucuga

SEQ ID NO: 1237536 - RNA, 19 nt, Human
agaaagggagggcucugag

SEQ ID NO: 1237537 - RNA, 21 nt, Human
agaaagggagggcucugaggc

SEQ ID NO: 1237538 - RNA, 20 nt, Human
agaaagggagggcucugagg

SEQ ID NO: 1237539 - RNA, 16 nt, Human
agaaagggcccugggc

SEQ ID NO: 1237540 - RNA, 20 nt, Human
agaaagggcccugggccugc

SEQ ID NO: 1237541 - RNA, 22 nt, Human
agaaagggcccugggccugccu

SEQ ID NO: 1237542 - RNA, 14 nt, Human
agaaaggggagccc

SEQ ID NO: 1237543 - RNA, 15 nt, Human
agaaaggggagccca

SEQ ID NO: 1237544 - RNA, 16 nt, Human
agaaaggggagcccac

SEQ ID NO: 1237545 - RNA, 17 nt, Human
agaaaggggagcccacu

SEQ ID NO: 1237546 - RNA, 13 nt, Human
agaaaaucacuua

SEQ ID NO: 1237547 - RNA, 15 nt, Human
agaaaaucuuuauaa

SEQ ID NO: 1237548 - RNA, 16 nt, Human
agaaaaugauacagca

SEQ ID NO: 1237549 - RNA, 22 nt, Human
agaaaaugcgguuauaaaaaau

SEQ ID NO: 1237550 - RNA, 20 nt, Human
aauguuuuuuuuuaaagacu

SEQ ID NO: 1237551 - RNA, 15 nt, Human
aauguuuuuuuuuaa

SEQ ID NO: 1237552 - RNA, 22 nt, Human
aauguuuuuuuuuaaagacuuu

SEQ ID NO: 1237553 - RNA, 14 nt, Human
aauguuugcauaua

SEQ ID NO: 1237554 - RNA, 13 nt, Human
aauguuugcauau

SEQ ID NO: 1237555 - RNA, 16 nt, Human
aauguuucuggauuuc

SEQ ID NO: 1237556 - RNA, 21 nt, Human
aauuaaaaaaaaagaucuguu

SEQ ID NO: 1237557 - RNA, 13 nt, Human
aauuaaaaaagau

SEQ ID NO: 1237558 - RNA, 15 nt, Human
aauuaaaaaagauaa

SEQ ID NO: 1237559 - RNA, 16 nt, Human
aauuaaaaaagauaaa

SEQ ID NO: 1237560 - RNA, 17 nt, Human
aauuaaaaaagauaaac

SEQ ID NO: 1237561 - RNA, 18 nt, Human
aauuaaaaaagauaaaca

SEQ ID NO: 1237562 - RNA, 19 nt, Human
aauuaaaaaagauaaacac

SEQ ID NO: 1237563 - RNA, 20 nt, Human
aauuaaaaaagauaaacaca

SEQ ID NO: 1237564 - RNA, 24 nt, Human
aauuaaaaaagauaaacacaagau

SEQ ID NO: 1237565 - RNA, 23 nt, Human
aauguuucaaacauauauaacaa

SEQ ID NO: 1237566 - RNA, 22 nt, Human
aauguuuacagauccccaagcc

SEQ ID NO: 1237567 - RNA, 22 nt, Human
aauguuucuucuagguucuaaa

SEQ ID NO: 1237568 - RNA, 23 nt, Human
aauguuucuucuagguucuaaaa

SEQ ID NO: 1237569 - RNA, 15 nt, Human
aauguuuaaaccuuu

SEQ ID NO: 1237570 - RNA, 23 nt, Human
aauguuuaaucauauaaauagaa

SEQ ID NO: 1237571 - RNA, 20 nt, Human
aauguuuacacucuuuguaa

SEQ ID NO: 1237572 - RNA, 23 nt, Human
aauguuuacacucuuuguaagag

SEQ ID NO: 1237573 - RNA, 20 nt, Human
aauguuuaaucauauaaaua

SEQ ID NO: 1237574 - RNA, 18 nt, Human
aauguuuaaucauauaaa

SEQ ID NO: 1237575 - RNA, 17 nt, Human
aauguuuaaucauauaa

SEQ ID NO: 1237576 - RNA, 16 nt, Human
aauguuuaaucauaua

SEQ ID NO: 1237577 - RNA, 14 nt, Human
aauguuuaaucaua

SEQ ID NO: 1237578 - RNA, 13 nt, Human
aauguuuaaucau

SEQ ID NO: 1237579 - RNA, 18 nt, Human
aauguccauucuuuauca

SEQ ID NO: 1237580 - RNA, 17 nt, Human
aaugucuuuaaugcaau

SEQ ID NO: 1237581 - RNA, 20 nt, Human
aaugucuuuaaugcaauaua

SEQ ID NO: 1237582 - RNA, 21 nt, Human
aaugucuuuaaugcaauauac

SEQ ID NO: 1237583 - RNA, 22 nt, Human
aaugcuggcuauagaugucuuu

SEQ ID NO: 1237584 - RNA, 19 nt, Human
aaugguguagaacacuaau

SEQ ID NO: 1237585 - RNA, 23 nt, Human
aaugcuggcuauagaugucuuuu

SEQ ID NO: 1237586 - RNA, 14 nt, Human
aauggugugggaga

SEQ ID NO: 1237587 - RNA, 23 nt, Human
aaugcuauaacuauguugauaaa

SEQ ID NO: 1237588 - RNA, 13 nt, Human
aaugcuagguucu

SEQ ID NO: 1237589 - RNA, 14 nt, Human
aaugcuagguucua

SEQ ID NO: 1237590 - RNA, 15 nt, Human
aaugcuagguucuac

SEQ ID NO: 1237591 - RNA, 17 nt, Human
aaugcuagguucuaccu

SEQ ID NO: 1237592 - RNA, 22 nt, Human
aaugcugcaaguuaugaaauau

SEQ ID NO: 1237593 - RNA, 15 nt, Human
aaugucaugcugccu

SEQ ID NO: 1237594 - RNA, 16 nt, Human
aaugucaugcugccuu

SEQ ID NO: 1237595 - RNA, 19 nt, Human
aaugucaugcugccuuauu

SEQ ID NO: 1237596 - RNA, 17 nt, Human
aaugucaugcugccuua

SEQ ID NO: 1237597 - RNA, 14 nt, Human
aaugucauugaaaa

SEQ ID NO: 1237598 - RNA, 19 nt, Human
aaugucauugaaaaacuaa

SEQ ID NO: 1237599 - RNA, 14 nt, Human
aaugucauuuuggu

SEQ ID NO: 1237600 - RNA, 19 nt, Human
aaugucauuuugguacuuu

SEQ ID NO: 1237601 - RNA, 22 nt, Human
aaugguucagaauuaaacuuuu

SEQ ID NO: 1237602 - RNA, 15 nt, Human
aaugguucagaauua

SEQ ID NO: 1237603 - RNA, 20 nt, Human
aaugucacuuuuugaggcaa

SEQ ID NO: 1237604 - RNA, 19 nt, Human
aaugucacuuuuugaggca

SEQ ID NO: 1237605 - RNA, 18 nt, Human
aaugcgggugagaguaau

SEQ ID NO: 1237606 - RNA, 21 nt, Human
aaugcgguuauaaaaaauggu

SEQ ID NO: 1237607 - RNA, 22 nt, Human
aaugcgguuauaaaaaaugguu

SEQ ID NO: 1237608 - RNA, 23 nt, Human
aaugcgguuauaaaaaaugguuc

SEQ ID NO: 1237609 - RNA, 22 nt, Human
aaugcgcaggcuggcccugccc

SEQ ID NO: 1237610 - RNA, 15 nt, Human
aaugccuuuucccaa

SEQ ID NO: 1237611 - RNA, 12 nt, Human
aaguugcugcuu

SEQ ID NO: 1237612 - RNA, 14 nt, Human
aaguugcugcuucu

SEQ ID NO: 1237613 - RNA, 21 nt, Human
aaguugcugcuucucccaggc

SEQ ID NO: 1237614 - RNA, 23 nt, Human
aaguugcugcuucucccaggcaa

SEQ ID NO: 1237615 - RNA, 13 nt, Human
aauacucuuauau

SEQ ID NO: 1237616 - RNA, 15 nt, Human
aauacugaacaucug

SEQ ID NO: 1237617 - RNA, 17 nt, Human
aauacuaccuugaaaau

SEQ ID NO: 1237618 - RNA, 18 nt, Human
aauacuaccuugaaaaua

SEQ ID NO: 1237619 - RNA, 21 nt, Human
aauacuaccuugaaaauaaga

SEQ ID NO: 1237620 - RNA, 20 nt, Human
aauacucaaaugaguaacau

SEQ ID NO: 1237621 - RNA, 13 nt, Human
aauacucaaauga

SEQ ID NO: 1237622 - RNA, 15 nt, Human
aauacuugucuguuu

SEQ ID NO: 1237623 - RNA, 14 nt, Human
aauacuuugaaugu

SEQ ID NO: 1237624 - RNA, 15 nt, Human
aauacuuugaaugug

SEQ ID NO: 1237625 - RNA, 16 nt, Human
aauacuuugaaugugu

SEQ ID NO: 1237626 - RNA, 23 nt, Human
aauacuuugcagcacagcugaga

SEQ ID NO: 1237627 - RNA, 17 nt, Human
aauacuuugaauguguu

SEQ ID NO: 1237628 - RNA, 20 nt, Human
aauacuuugaauguguuuca

SEQ ID NO: 1237629 - RNA, 15 nt, Human
aauacuuuuacucug

SEQ ID NO: 1237630 - RNA, 18 nt, Human
aauacuuuuacucugccu

SEQ ID NO: 1237631 - RNA, 20 nt, Human
aauacuuuuacucugccuac

SEQ ID NO: 1237632 - RNA, 11 nt, Human
aauacuuuugc

SEQ ID NO: 1237633 - RNA, 15 nt, Human
aauacuuuuuacaau

SEQ ID NO: 1237634 - RNA, 10 nt, Human
aauacuuuuu

SEQ ID NO: 1237635 - RNA, 16 nt, Human
aauacugagaaaaccu

SEQ ID NO: 1237636 - RNA, 18 nt, Human
aauacugagaaaaccugu

SEQ ID NO: 1237637 - RNA, 14 nt, Human
aauacugcaaauca

SEQ ID NO: 1237638 - RNA, 23 nt, Human
aauacugcuacagcaauuucuaa

SEQ ID NO: 1237639 - RNA, 13 nt, Human
aauacugcugaga

SEQ ID NO: 1237640 - RNA, 15 nt, Human
aauacugcugagaua

SEQ ID NO: 1237641 - RNA, 18 nt, Human
aauacugcugagauacau

SEQ ID NO: 1237642 - RNA, 21 nt, Human
aauacugcugagauacauaca

SEQ ID NO: 1237643 - RNA, 16 nt, Human
aauacuguauuuugua

SEQ ID NO: 1237644 - RNA, 21 nt, Human
aauauuagugaccucagcuuu

SEQ ID NO: 1237645 - RNA, 18 nt, Human
aaucaccacaaacuguaa

SEQ ID NO: 1237646 - RNA, 23 nt, Human
aaucaaguuggcuucuaaucaaa

SEQ ID NO: 1237647 - RNA, 21 nt, Human
aaucaagucuguuuacugcaa

SEQ ID NO: 1237648 - RNA, 18 nt, Human
aaucacaugaauuauuac

SEQ ID NO: 1237649 - RNA, 19 nt, Human
aaucacauucgaguguuuc

SEQ ID NO: 1237650 - RNA, 14 nt, Human
aaucaagggucagg

SEQ ID NO: 1237651 - RNA, 15 nt, Human
aaucaagggucaggc

SEQ ID NO: 1237652 - RNA, 18 nt, Human
aaucaagggucaggccuu

SEQ ID NO: 1237653 - RNA, 15 nt, Human
aaucaagucuguuua

SEQ ID NO: 1237654 - RNA, 17 nt, Human
aaucaagucuguuuacu

SEQ ID NO: 1237655 - RNA, 16 nt, Human
aauagaauguaaaugu

SEQ ID NO: 1237656 - RNA, 16 nt, Human
aauagaauuauaacug

SEQ ID NO: 1237657 - RNA, 14 nt, Human
aauagacaaauaga

SEQ ID NO: 1237658 - RNA, 19 nt, Human
aauagacaaauagaaaaug

SEQ ID NO: 1237659 - RNA, 14 nt, Human
aauagaauguaaau

SEQ ID NO: 1237660 - RNA, 13 nt, Human
aauagaaggugau

SEQ ID NO: 1237661 - RNA, 15 nt, Human
aauagaauaaaggca

SEQ ID NO: 1237662 - RNA, 16 nt, Human
aauagaauaaaggcag

SEQ ID NO: 1237663 - RNA, 14 nt, Human
aauagaaggugaug

SEQ ID NO: 1237664 - RNA, 17 nt, Human
aauauacuauauuuaug

SEQ ID NO: 1237665 - RNA, 22 nt, Human
aauagacaaauagaaaaugguc

SEQ ID NO: 1237666 - RNA, 13 nt, Human
aauauauauuaua

SEQ ID NO: 1237667 - RNA, 14 nt, Human
aauauauauuauac

SEQ ID NO: 1237668 - RNA, 16 nt, Human
aauauauauuauacuu

SEQ ID NO: 1237669 - RNA, 19 nt, Human
aauauauauuauacuugua

SEQ ID NO: 1237670 - RNA, 21 nt, Human
aauauauauuauacuuguaau

SEQ ID NO: 1237671 - RNA, 23 nt, Human
aauauauauuauacuuguaauua

SEQ ID NO: 1237672 - RNA, 13 nt, Human
aauauauauuauc

SEQ ID NO: 1237673 - RNA, 15 nt, Human
aauauauauuaucuu

SEQ ID NO: 1237674 - RNA, 16 nt, Human
aauauauauuaucuuu

SEQ ID NO: 1237675 - RNA, 19 nt, Human
aauauauauuaucuuuuca

SEQ ID NO: 1237676 - RNA, 18 nt, Human
aauauauauuaucuuuuc

SEQ ID NO: 1237677 - RNA, 20 nt, Human
aauauaucuaccccagacua

SEQ ID NO: 1237678 - RNA, 18 nt, Human
aauccaagcaaaugugaa

SEQ ID NO: 1237679 - RNA, 17 nt, Human
aauccaagcaaauguga

SEQ ID NO: 1237680 - RNA, 21 nt, Human
aaugauuaugaauuacauuug

SEQ ID NO: 1237681 - RNA, 23 nt, Human
aaugauuaugaauuacauuugua

SEQ ID NO: 1237682 - RNA, 15 nt, Human
aaugauuaugaauua

SEQ ID NO: 1237683 - RNA, 19 nt, Human
aaugauccuguauucagac

SEQ ID NO: 1237684 - RNA, 21 nt, Human
aaugauccuguauucagacag

SEQ ID NO: 1237685 - RNA, 23 nt, Human
aaugauccuguauucagacagau

SEQ ID NO: 1237686 - RNA, 21 nt, Human
aaugaaauccugcuucagugu

SEQ ID NO: 1237687 - RNA, 17 nt, Human
aaugaaguuguagguaa

SEQ ID NO: 1237688 - RNA, 13 nt, Human
aauccagccugcu

SEQ ID NO: 1237689 - RNA, 23 nt, Human
aauccaaguagauaggaagaaag

SEQ ID NO: 1237690 - RNA, 20 nt, Human
aauccaggcagauccaggac

SEQ ID NO: 1237691 - RNA, 15 nt, Human
aauccaaugaaauga

SEQ ID NO: 1237692 - RNA, 17 nt, Human
aauccaggcagauccag

SEQ ID NO: 1237693 - RNA, 18 nt, Human
aauccaggcagauccagg

SEQ ID NO: 1237694 - RNA, 21 nt, Human
aaucucuacaaacccucugua

SEQ ID NO: 1237695 - RNA, 16 nt, Human
aaucucuccacuuuca

SEQ ID NO: 1237696 - RNA, 18 nt, Human
aaucucuccacuuucagc

SEQ ID NO: 1237697 - RNA, 23 nt, Human
aaucucuccacuuucagcugucu

SEQ ID NO: 1237698 - RNA, 19 nt, Human
aaucucuccacuuucagcu

SEQ ID NO: 1237699 - RNA, 20 nt, Human
aaucucuccacuuucagcug

SEQ ID NO: 1237700 - RNA, 22 nt, Human
aaucucuccacuuucagcuguc

SEQ ID NO: 1237701 - RNA, 13 nt, Human
aaucucugggggc

SEQ ID NO: 1237702 - RNA, 12 nt, Human
aaucucuguaaa

SEQ ID NO: 1237703 - RNA, 13 nt, Human
aaucucuguaaag

SEQ ID NO: 1237704 - RNA, 13 nt, Human
aaucucugugccu

SEQ ID NO: 1237705 - RNA, 20 nt, Human
aaucucuuuuugcuuucgaa

SEQ ID NO: 1237706 - RNA, 18 nt, Human
aaugaaagcuacucauag

SEQ ID NO: 1237707 - RNA, 20 nt, Human
aaggugaggagcuugaaacc

SEQ ID NO: 1237708 - RNA, 14 nt, Human
aaggucggaccagc

SEQ ID NO: 1237709 - RNA, 21 nt, Human
aagguccgguguucuaagaug

SEQ ID NO: 1237710 - RNA, 19 nt, Human
aagguccacaggucuagac

SEQ ID NO: 1237711 - RNA, 19 nt, Human
aagguccgguguucuaaga

SEQ ID NO: 1237712 - RNA, 20 nt, Human
aagguccucugucagucaca

SEQ ID NO: 1237713 - RNA, 20 nt, Human
aaggucguuuuuuucauucc

SEQ ID NO: 1237714 - RNA, 18 nt, Human
aaggucguuuuuuucauu

SEQ ID NO: 1237715 - RNA, 21 nt, Human
aaggugacaucggaaaaauaa

SEQ ID NO: 1237716 - RNA, 19 nt, Human
aaggugcucucuuucuguc

SEQ ID NO: 1237717 - RNA, 14 nt, Human
aaguaguccuguga

SEQ ID NO: 1237718 - RNA, 18 nt, Human
aaguccaagcauuuagau

SEQ ID NO: 1237719 - RNA, 12 nt, Human
aaguccaaugug

SEQ ID NO: 1237720 - RNA, 17 nt, Human
aaguccuacaagcuaaa

SEQ ID NO: 1237721 - RNA, 18 nt, Human
aaguccggccccaguaca

SEQ ID NO: 1237722 - RNA, 14 nt, Human
aagucuccaaaguc

SEQ ID NO: 1237723 - RNA, 11 nt, Human
aagucucagcu

SEQ ID NO: 1237724 - RNA, 12 nt, Human
aagucucagcua

SEQ ID NO: 1237725 - RNA, 20 nt, Human
aagucuaccaaccuguucaa

SEQ ID NO: 1237726 - RNA, 24 nt, Human
aagucguccuuacuccugugggag

SEQ ID NO: 1237727 - RNA, 22 nt, Human
aagucguccuuacuccuguggg

SEQ ID NO: 1237728 - RNA, 21 nt, Human
aaguccuuuuuuuccaucuuu

SEQ ID NO: 1237729 - RNA, 14 nt, Human
aagucgguuagugg

SEQ ID NO: 1237730 - RNA, 19 nt, Human
aagucguccuuacuccugu

SEQ ID NO: 1237731 - RNA, 20 nt, Human
aagucguccuuacuccugug

SEQ ID NO: 1237732 - RNA, 21 nt, Human
aagucguccuuacuccugugg

SEQ ID NO: 1237733 - RNA, 9 nt, Human
aagggagcc

SEQ ID NO: 1237734 - RNA, 11 nt, Human
aagggagccaa

SEQ ID NO: 1237735 - RNA, 12 nt, Human
aagggagccaag

SEQ ID NO: 1237736 - RNA, 13 nt, Human
aagggagccaagg

SEQ ID NO: 1237737 - RNA, 14 nt, Human
aagggagccaaggg

SEQ ID NO: 1237738 - RNA, 18 nt, Human
aagggagccaagggaugg

SEQ ID NO: 1237739 - RNA, 19 nt, Human
aagggagccaagggaugga

SEQ ID NO: 1237740 - RNA, 21 nt, Human
aagggagccaagggauggaca

SEQ ID NO: 1237741 - RNA, 20 nt, Human
aagggaaguaguuaucaugu

SEQ ID NO: 1237742 - RNA, 22 nt, Human
aagggaaguaguuaucauguua

SEQ ID NO: 1237743 - RNA, 15 nt, Human
aagggaaccuguguc

SEQ ID NO: 1237744 - RNA, 17 nt, Human
aagggccagagccaggg

SEQ ID NO: 1237745 - RNA, 13 nt, Human
aagggagggggag

SEQ ID NO: 1237746 - RNA, 21 nt, Human
aagggagggcucugaggcgcc

SEQ ID NO: 1237747 - RNA, 16 nt, Human
aagggagggcucugag

SEQ ID NO: 1237748 - RNA, 17 nt, Human
aagggagggcucugagg

SEQ ID NO: 1237749 - RNA, 18 nt, Human
aagggagggcucugaggc

SEQ ID NO: 1237750 - RNA, 19 nt, Human
aagggagggcucugaggcg

SEQ ID NO: 1237751 - RNA, 16 nt, Human
aagggaggcugcugcu

SEQ ID NO: 1237752 - RNA, 13 nt, Human
aagggagggcaga

SEQ ID NO: 1237753 - RNA, 18 nt, Human
aagggagggcagagcugg

SEQ ID NO: 1237754 - RNA, 19 nt, Human
aagggagggcagagcuggu

SEQ ID NO: 1237755 - RNA, 20 nt, Human
aagggagggcagagcuggug

SEQ ID NO: 1237756 - RNA, 21 nt, Human
aagggagggcagagcuggugc

SEQ ID NO: 1237757 - RNA, 13 nt, Human
aagggagggcucu

SEQ ID NO: 1237758 - RNA, 14 nt, Human
aagggagggcucug

SEQ ID NO: 1237759 - RNA, 12 nt, Human
aagggccaaaga

SEQ ID NO: 1237760 - RNA, 20 nt, Human
aagggccaaagaaccaaaga

SEQ ID NO: 1237761 - RNA, 22 nt, Human
aagggccaaagaaccaaagaag

SEQ ID NO: 1237762 - RNA, 11 nt, Human
aagggccagag

SEQ ID NO: 1237763 - RNA, 12 nt, Human
aagggccagagc

SEQ ID NO: 1237764 - RNA, 13 nt, Human
aagggccagagcc

SEQ ID NO: 1237765 - RNA, 14 nt, Human
aagggccagagcca

SEQ ID NO: 1237766 - RNA, 15 nt, Human
aagggccagagccag

SEQ ID NO: 1237767 - RNA, 16 nt, Human
aagggccagagccagg

SEQ ID NO: 1237768 - RNA, 16 nt, Human
aagggaaaagucucuu

SEQ ID NO: 1237769 - RNA, 15 nt, Human
aagucuccaaagucu

SEQ ID NO: 1237770 - RNA, 19 nt, Human
aagucucagcuaagcucac

SEQ ID NO: 1237771 - RNA, 17 nt, Human
aagucucaucuggggag

SEQ ID NO: 1237772 - RNA, 13 nt, Human
aagucuguccuug

SEQ ID NO: 1237773 - RNA, 16 nt, Human
aagucuguccuugaag

SEQ ID NO: 1237774 - RNA, 21 nt, Human
aagucuguccuugaaggacua

SEQ ID NO: 1237775 - RNA, 22 nt, Human
aagucugugagauucauucaug

SEQ ID NO: 1237776 - RNA, 18 nt, Human
aagucuguccuugaagga

SEQ ID NO: 1237777 - RNA, 20 nt, Human
aagucuguugauuaaagaug

SEQ ID NO: 1237778 - RNA, 13 nt, Human
aagucuguuuacu

SEQ ID NO: 1237779 - RNA, 14 nt, Human
aagucuguuuacug

SEQ ID NO: 1237780 - RNA, 16 nt, Human
aagucuguuuacugca

SEQ ID NO: 1237781 - RNA, 13 nt, Human
aaguugaggggcu

SEQ ID NO: 1237782 - RNA, 23 nt, Human
aaguugacuuauaguacaugaua

SEQ ID NO: 1237783 - RNA, 16 nt, Human
aaguugagauaguuuu

SEQ ID NO: 1237784 - RNA, 18 nt, Human
aaguugagauaguuuuca

SEQ ID NO: 1237785 - RNA, 23 nt, Human
aaguugagauaguuuucauccau

SEQ ID NO: 1237786 - RNA, 19 nt, Human
aaguugagauaguuuucau

SEQ ID NO: 1237787 - RNA, 21 nt, Human
aaguugacuuauaguacauga

SEQ ID NO: 1237788 - RNA, 20 nt, Human
aaguugacuuauaguacaug

SEQ ID NO: 1237789 - RNA, 19 nt, Human
aaguugacuuauaguacau

SEQ ID NO: 1237790 - RNA, 16 nt, Human
aaguugacuuauagua

SEQ ID NO: 1237791 - RNA, 14 nt, Human
aaguguaaugaaua

SEQ ID NO: 1237792 - RNA, 14 nt, Human
aaguguaauugaga

SEQ ID NO: 1237793 - RNA, 14 nt, Human
aaguguacauaugu

SEQ ID NO: 1237794 - RNA, 13 nt, Human
aagugcuuucuuc

SEQ ID NO: 1237795 - RNA, 20 nt, Human
aaguggaacgaaaaugaaag

SEQ ID NO: 1237796 - RNA, 18 nt, Human
aaguggacaaauuuugag

SEQ ID NO: 1237797 - RNA, 17 nt, Human
aaggacaucagcaaaca

SEQ ID NO: 1237798 - RNA, 17 nt, Human
aaggacuuccuguccag

SEQ ID NO: 1237799 - RNA, 20 nt, Human
aaggacuuccuguccagcuc

SEQ ID NO: 1237800 - RNA, 21 nt, Human
aaggacuuccuguccagcucc

SEQ ID NO: 1237801 - RNA, 22 nt, Human
aaggacuuccuguccagcucca

SEQ ID NO: 1237802 - RNA, 15 nt, Human
aaggacaucagcaaa

SEQ ID NO: 1237803 - RNA, 14 nt, Human
aaggacaucagcaa

SEQ ID NO: 1237804 - RNA, 13 nt, Human
aaggacagccccu

SEQ ID NO: 1237805 - RNA, 19 nt, Human
aaggacagccccuccucca

SEQ ID NO: 1237806 - RNA, 18 nt, Human
aagcuguguggcagucug

SEQ ID NO: 1237807 - RNA, 16 nt, Human
aagcugguuuaauguu

SEQ ID NO: 1237808 - RNA, 19 nt, Human
aagcuacugugugugugaa

SEQ ID NO: 1237809 - RNA, 14 nt, Human
aaggcagggaggag

SEQ ID NO: 1237810 - RNA, 23 nt, Human
aaggacuuccuguccagcuccaa

SEQ ID NO: 1237811 - RNA, 20 nt, Human
aaggauucugcuggccucug

SEQ ID NO: 1237812 - RNA, 22 nt, Human
aaggauucugcuggccucugcg

SEQ ID NO: 1237813 - RNA, 12 nt, Human
aaggcagggagg

SEQ ID NO: 1237814 - RNA, 21 nt, Human
aaggcaggcagggcucuccug

SEQ ID NO: 1237815 - RNA, 14 nt, Human
aaggcaggcagggc

SEQ ID NO: 1237816 - RNA, 16 nt, Human
aaggcaggcagggcuc

SEQ ID NO: 1237817 - RNA, 17 nt, Human
aaggcaggcagggcucu

SEQ ID NO: 1237818 - RNA, 18 nt, Human
aaggcaggcagggcucuc

SEQ ID NO: 1237819 - RNA, 22 nt, Human
aaggcaggcagggcucuccugg

SEQ ID NO: 1237820 - RNA, 20 nt, Human
aaggcagcucuaaaugucaa

SEQ ID NO: 1237821 - RNA, 20 nt, Human
aagcuacagaagaaacuggg

SEQ ID NO: 1237822 - RNA, 15 nt, Human
aagcuaauuugcauu

SEQ ID NO: 1237823 - RNA, 22 nt, Human
aagcuaauuugcauuaaauuca

SEQ ID NO: 1237824 - RNA, 23 nt, Human
aagcuaauuugcauuaaauucac

SEQ ID NO: 1237825 - RNA, 20 nt, Human
aagcgccuccaacccuagca

SEQ ID NO: 1237826 - RNA, 16 nt, Human
aagcgccuccaacccu

SEQ ID NO: 1237827 - RNA, 22 nt, Human
aagcgcuagaggaagcagccaa

SEQ ID NO: 1237828 - RNA, 14 nt, Human
aagcuaauuugcau

SEQ ID NO: 1237829 - RNA, 15 nt, Human
aagcgccuccaaccc

SEQ ID NO: 1237830 - RNA, 14 nt, Human
aagcgccuccaacc

SEQ ID NO: 1237831 - RNA, 14 nt, Human
aagauacugaaaua

SEQ ID NO: 1237832 - RNA, 20 nt, Human
aagauacuaaggacguuguu

SEQ ID NO: 1237833 - RNA, 18 nt, Human
aagaugugcagcauuuca

SEQ ID NO: 1237834 - RNA, 20 nt, Human
aagaugugcagcauuucacu

SEQ ID NO: 1237835 - RNA, 21 nt, Human
aagaugugcagcauuucacuu

SEQ ID NO: 1237836 - RNA, 21 nt, Human
aagaugugauauucuaagacu

SEQ ID NO: 1237837 - RNA, 16 nt, Human
aagauguuaugguguu

SEQ ID NO: 1237838 - RNA, 15 nt, Human
aagauguucuggaua

SEQ ID NO: 1237839 - RNA, 20 nt, Human
aagauguucuggauaccauu

SEQ ID NO: 1237840 - RNA, 20 nt, Human
aagauguuaugguguuuaga

SEQ ID NO: 1237841 - RNA, 20 nt, Human
aagauuacaaaucagaaguc

SEQ ID NO: 1237842 - RNA, 21 nt, Human
aagauuacaaaucagaaguca

SEQ ID NO: 1237843 - RNA, 20 nt, Human
aagauuacucaguaauuugu

SEQ ID NO: 1237844 - RNA, 21 nt, Human
aagauuccggauccuaagcau

SEQ ID NO: 1237845 - RNA, 24 nt, Human
aagauuccggauccuaagcaucua

SEQ ID NO: 1237846 - RNA, 11 nt, Human
aagauucuaaa

SEQ ID NO: 1237847 - RNA, 12 nt, Human
aagauucuaaag

SEQ ID NO: 1237848 - RNA, 13 nt, Human
aagauucuaaagg

SEQ ID NO: 1237849 - RNA, 14 nt, Human
aagauucuaaugau

SEQ ID NO: 1237850 - RNA, 16 nt, Human
aagauucuaaugauga

SEQ ID NO: 1237851 - RNA, 11 nt, Human
aagauucuaga

SEQ ID NO: 1237852 - RNA, 12 nt, Human
aagauucuagau

SEQ ID NO: 1237853 - RNA, 13 nt, Human
aagauucuagauc

SEQ ID NO: 1237854 - RNA, 20 nt, Human
aagauucuagaucagaugcu

SEQ ID NO: 1237855 - RNA, 13 nt, Human
aagauucuagaug

SEQ ID NO: 1237856 - RNA, 14 nt, Human
aagauucuagauga

SEQ ID NO: 1237857 - RNA, 15 nt, Human
aagauucuagaugau

SEQ ID NO: 1237858 - RNA, 17 nt, Human
aagauucuauaguucua

SEQ ID NO: 1237859 - RNA, 19 nt, Human
aagauucuauaguucuaga

SEQ ID NO: 1237860 - RNA, 13 nt, Human
aagauacugaaau

SEQ ID NO: 1237861 - RNA, 21 nt, Human
aagauaaacguggauguuacu

SEQ ID NO: 1237862 - RNA, 13 nt, Human
aagauaaacauua

SEQ ID NO: 1237863 - RNA, 22 nt, Human
aagauaaacacaagauuggugu

SEQ ID NO: 1237864 - RNA, 14 nt, Human
aagaguuuugggag

SEQ ID NO: 1237865 - RNA, 17 nt, Human
aagauaaacacaagauu

SEQ ID NO: 1237866 - RNA, 13 nt, Human
aagaguuuuggga

SEQ ID NO: 1237867 - RNA, 23 nt, Human
aagaguuuugggaguuguaguua

SEQ ID NO: 1237868 - RNA, 16 nt, Human
aacuuuccaaacacca

SEQ ID NO: 1237869 - RNA, 14 nt, Human
aacuuuccucgccu

SEQ ID NO: 1237870 - RNA, 19 nt, Human
aacuuucauuccuucagau

SEQ ID NO: 1237871 - RNA, 14 nt, Human
aagagucuagauuc

SEQ ID NO: 1237872 - RNA, 20 nt, Human
aagagucuagauucaaaggu

SEQ ID NO: 1237873 - RNA, 23 nt, Human
aagagucuagauucaaagguucu

SEQ ID NO: 1237874 - RNA, 18 nt, Human
aagagugaauucccucac

SEQ ID NO: 1237875 - RNA, 23 nt, Human
aagagugauagucuuuugcuuuu

SEQ ID NO: 1237876 - RNA, 22 nt, Human
aagaguuugaugaggcccucca

SEQ ID NO: 1237877 - RNA, 19 nt, Human
aagccagcguccuccucug

SEQ ID NO: 1237878 - RNA, 14 nt, Human
aagccagcguccuc

SEQ ID NO: 1237879 - RNA, 17 nt, Human
aagccagcguccuccuc

SEQ ID NO: 1237880 - RNA, 16 nt, Human
aagcagccucucccca

SEQ ID NO: 1237881 - RNA, 17 nt, Human
aagcagccucuccccag

SEQ ID NO: 1237882 - RNA, 22 nt, Human
aagcagccucuccccaggucca

SEQ ID NO: 1237883 - RNA, 20 nt, Human
aagauucuauaguucuagac

SEQ ID NO: 1237884 - RNA, 14 nt, Human
aagcagcaacuauu

SEQ ID NO: 1237885 - RNA, 16 nt, Human
aagcagcaacuauuca

SEQ ID NO: 1237886 - RNA, 19 nt, Human
aagcagcaacuuguccuag

SEQ ID NO: 1237887 - RNA, 16 nt, Human
aagcagcacuuauaaa

SEQ ID NO: 1237888 - RNA, 12 nt, Human
aagcagcagccu

SEQ ID NO: 1237889 - RNA, 14 nt, Human
aagcagcagccucg

SEQ ID NO: 1237890 - RNA, 16 nt, Human
aagcagcagccucgcc

SEQ ID NO: 1237891 - RNA, 21 nt, Human
aagcagcagccucgccccugg

SEQ ID NO: 1237892 - RNA, 19 nt, Human
aagcagcgaccgcccccuc

SEQ ID NO: 1237893 - RNA, 20 nt, Human
aagcagcgaccgcccccucc

SEQ ID NO: 1237894 - RNA, 17 nt, Human
aagccaauucagacagg

SEQ ID NO: 1237895 - RNA, 14 nt, Human
aagccaauuucaau

SEQ ID NO: 1237896 - RNA, 21 nt, Human
aagccaauuucaaucuuauuu

SEQ ID NO: 1237897 - RNA, 12 nt, Human
aaaucuggaagc

SEQ ID NO: 1237898 - RNA, 14 nt, Human
aaaucuggcuucug

SEQ ID NO: 1237899 - RNA, 18 nt, Human
aaaucuggcuucuggcca

SEQ ID NO: 1237900 - RNA, 21 nt, Human
aaaucuggcuucuggccagga

SEQ ID NO: 1237901 - RNA, 20 nt, Human
aaaucaaucuguaaaacuaa

SEQ ID NO: 1237902 - RNA, 23 nt, Human
aaaucaaguauuugggaagugaa

SEQ ID NO: 1237903 - RNA, 18 nt, Human
aaaucaaguauuugggaa

SEQ ID NO: 1237904 - RNA, 19 nt, Human
aaaucaaugcuauaacuau

SEQ ID NO: 1237905 - RNA, 19 nt, Human
aaaucaauuacugguccaa

SEQ ID NO: 1237906 - RNA, 23 nt, Human
aaaucaauuacugguccaaaaga

SEQ ID NO: 1237907 - RNA, 19 nt, Human
aaaucacauauuuuaaaau

SEQ ID NO: 1237908 - RNA, 15 nt, Human
aaauauuuauuuuaa

SEQ ID NO: 1237909 - RNA, 13 nt, Human
aaauauuuauuuu

SEQ ID NO: 1237910 - RNA, 20 nt, Human
aaauauuuauuuuaauaaug

SEQ ID NO: 1237911 - RNA, 14 nt, Human
aaauaguuuggaua

SEQ ID NO: 1237912 - RNA, 17 nt, Human
aaauagcuuuuuucucu

SEQ ID NO: 1237913 - RNA, 23 nt, Human
aaauagcuuggguagcgcacucu

SEQ ID NO: 1237914 - RNA, 16 nt, Human
aaauagcuuaugaaaa

SEQ ID NO: 1237915 - RNA, 21 nt, Human
aaauagcguucuuguaauuuu

SEQ ID NO: 1237916 - RNA, 20 nt, Human
aaauagcguucuuguaauuu

SEQ ID NO: 1237917 - RNA, 20 nt, Human
aaauagcuuuuuucucugau

SEQ ID NO: 1237918 - RNA, 15 nt, Human
aaauagcuuaugaaa

SEQ ID NO: 1237919 - RNA, 15 nt, Human
aaauaggguauauuu

SEQ ID NO: 1237920 - RNA, 14 nt, Human
aaauaggcaggaag

SEQ ID NO: 1237921 - RNA, 16 nt, Human
aaauagggucuaacuc

SEQ ID NO: 1237922 - RNA, 20 nt, Human
aaauaggguauauuuuccua

SEQ ID NO: 1237923 - RNA, 17 nt, Human
aaauaguuaagacauga

SEQ ID NO: 1237924 - RNA, 22 nt, Human
aaauaguuaagacaugauuucc

SEQ ID NO: 1237925 - RNA, 15 nt, Human
aaauagcguucuugu

SEQ ID NO: 1237926 - RNA, 17 nt, Human
aaauagcguucuuguaa

SEQ ID NO: 1237927 - RNA, 18 nt, Human
aaauagcguucuuguaau

SEQ ID NO: 1237928 - RNA, 19 nt, Human
aaauagcguucuuguaauu

SEQ ID NO: 1237929 - RNA, 17 nt, Human
aaauaaaaggaagccaa

SEQ ID NO: 1237930 - RNA, 13 nt, Human
aaaguggaacgaa

SEQ ID NO: 1237931 - RNA, 20 nt, Human
aaaguggaacgaaaaugaaa

SEQ ID NO: 1237932 - RNA, 19 nt, Human
aaaguggccaagaagcagu

SEQ ID NO: 1237933 - RNA, 19 nt, Human
aaaguggaaaacaaggaag

SEQ ID NO: 1237934 - RNA, 20 nt, Human
aaaguggaaaacaaggaagu

SEQ ID NO: 1237935 - RNA, 16 nt, Human
aaaguccuuuuuuucc

SEQ ID NO: 1237936 - RNA, 18 nt, Human
aaaguccuuuuuuuccau

SEQ ID NO: 1237937 - RNA, 22 nt, Human
aaaguccuuuuuuuccaucuuu

SEQ ID NO: 1237938 - RNA, 15 nt, Human
aaauaaauguaucau

SEQ ID NO: 1237939 - RNA, 21 nt, Human
aaaggccuaauucuaugccug

SEQ ID NO: 1237940 - RNA, 10 nt, Human
aaaggccugg

SEQ ID NO: 1237941 - RNA, 11 nt, Human
aaaggccuggg

SEQ ID NO: 1237942 - RNA, 12 nt, Human
aaaggccugggg

SEQ ID NO: 1237943 - RNA, 13 nt, Human
aaaggccuggggu

SEQ ID NO: 1237944 - RNA, 19 nt, Human
aaaggcagaagcaacccaa

SEQ ID NO: 1237945 - RNA, 14 nt, Human
aaaggcagaagcaa

SEQ ID NO: 1237946 - RNA, 21 nt, Human
aaaggcacccccgucaagagu

SEQ ID NO: 1237947 - RNA, 22 nt, Human
aaagcccuuccaugucgccucu

SEQ ID NO: 1237948 - RNA, 23 nt, Human
aaagcccuuccaugucgccucug

SEQ ID NO: 1237949 - RNA, 15 nt, Human
aaagccaggucccuc

SEQ ID NO: 1237950 - RNA, 20 nt, Human
aaagccucaagguuuuaggu

SEQ ID NO: 1237951 - RNA, 12 nt, Human
aaaggcaaaggc

SEQ ID NO: 1237952 - RNA, 14 nt, Human
aaaggcaagcacuu

SEQ ID NO: 1237953 - RNA, 13 nt, Human
aaaggcaaggucc

SEQ ID NO: 1237954 - RNA, 19 nt, Human
aaagccaggucccucucau

SEQ ID NO: 1237955 - RNA, 21 nt, Human
aaagccagcguccuccucugu

SEQ ID NO: 1237956 - RNA, 23 nt, Human
aaagccaaggagucacugagacc

SEQ ID NO: 1237957 - RNA, 14 nt, Human
aaagccaagggcaa

SEQ ID NO: 1237958 - RNA, 13 nt, Human
aaaaguugaauuu

SEQ ID NO: 1237959 - RNA, 19 nt, Human
aaaauaaaauuaaagcuga

SEQ ID NO: 1237960 - RNA, 12 nt, Human
aaaauaaacaaa

SEQ ID NO: 1237961 - RNA, 14 nt, Human
aaaauaaacaaaua

SEQ ID NO: 1237962 - RNA, 18 nt, Human
aaaaguucugcagauaaa

SEQ ID NO: 1237963 - RNA, 13 nt, Human
aaaaguuccaaga

SEQ ID NO: 1237964 - RNA, 15 nt, Human
aaaaguuccaagagu

SEQ ID NO: 1237965 - RNA, 22 nt, Human
aaaaguuccaagagucuaaaga

SEQ ID NO: 1237966 - RNA, 23 nt, Human
aaaaguuccaagagucuaaagau

SEQ ID NO: 1237967 - RNA, 18 nt, Human
aaaaguuacauguuugca

SEQ ID NO: 1237968 - RNA, 19 nt, Human
aaaaguuacauguuugcac

SEQ ID NO: 1237969 - RNA, 12 nt, Human
aaaaguuauaac

SEQ ID NO: 1237970 - RNA, 21 nt, Human
aaaaucuacacuccagugaga

SEQ ID NO: 1237971 - RNA, 13 nt, Human
aaaauccuugcuu

SEQ ID NO: 1237972 - RNA, 20 nt, Human
aaaauccuugcuuaugacau

SEQ ID NO: 1237973 - RNA, 20 nt, Human
aaaauaaacaggucaaugaa

SEQ ID NO: 1237974 - RNA, 16 nt, Human
aaaauaaagaaaagau

SEQ ID NO: 1237975 - RNA, 14 nt, Human
aaaauaaagaaaua

SEQ ID NO: 1237976 - RNA, 21 nt, Human
aaaauaaagaaaagaugcacu

SEQ ID NO: 1237977 - RNA, 12 nt, Human
aaaauaaagaau

SEQ ID NO: 1237978 - RNA, 13 nt, Human
aaaauaaagaaug

SEQ ID NO: 1237979 - RNA, 21 nt, Human
aaaaucagguggcuuuugcgg

SEQ ID NO: 1237980 - RNA, 15 nt, Human
aaaaucaucagaaag

SEQ ID NO: 1237981 - RNA, 13 nt, Human
aaaaucaucagaa

SEQ ID NO: 1237982 - RNA, 16 nt, Human
aaaaagaaacauuugg

SEQ ID NO: 1237983 - RNA, 23 nt, Human
aaaaacucaauuaaaauuuuguu

SEQ ID NO: 1237984 - RNA, 14 nt, Human
aaaaagaagaaucu

SEQ ID NO: 1237985 - RNA, 19 nt, Human
aaaaagaaaggcuguuaaa

SEQ ID NO: 1237986 - RNA, 23 nt, Human
aaaaagaaaggcuguuaaauaca

SEQ ID NO: 1237987 - RNA, 20 nt, Human
aaaagugccauuaacaaaug

SEQ ID NO: 1237988 - RNA, 18 nt, Human
aaaagugggcuugauucu

SEQ ID NO: 1237989 - RNA, 17 nt, Human
aaaagugggcuugauuc

SEQ ID NO: 1237990 - RNA, 23 nt, Human
aaaaguggguuuuuuaguugaau

SEQ ID NO: 1237991 - RNA, 21 nt, Human
aaacacugggagaaaugaaaa

SEQ ID NO: 1237992 - RNA, 22 nt, Human
aaacacucaaguugauuagaaa

SEQ ID NO: 1237993 - RNA, 22 nt, Human
aaacacugggagaaaugaaaaa

SEQ ID NO: 1237994 - RNA, 13 nt, Human
aaacacugugcac

SEQ ID NO: 1237995 - RNA, 12 nt, Human
aaacacuuguaa

SEQ ID NO: 1237996 - RNA, 21 nt, Human
aaaauugaugggauuugguca

SEQ ID NO: 1237997 - RNA, 15 nt, Human
aaaauugcaaaucuu

SEQ ID NO: 1237998 - RNA, 16 nt, Human
aaaaucucaauauuuc

SEQ ID NO: 1237999 - RNA, 17 nt, Human
aaaaucucaauauuuca

SEQ ID NO: 1238000 - RNA, 12 nt, Human
aaacagaagccu

SEQ ID NO: 1238001 - RNA, 12 nt, Human
aaacagacacug

SEQ ID NO: 1238002 - RNA, 14 nt, Human
aaacagaacacuua

SEQ ID NO: 1238003 - RNA, 13 nt, Human
aaacagaacacuu

SEQ ID NO: 1238004 - RNA, 13 nt, Human
aaacagaaugucu

SEQ ID NO: 1238005 - RNA, 13 nt, Human
aaacagaaacaaa

SEQ ID NO: 1238006 - RNA, 19 nt, Human
aaacagaaacaaaaacacu

SEQ ID NO: 1238007 - RNA, 21 nt, Human
aaacagaaacaaaaacacuaa

SEQ ID NO: 1238008 - RNA, 12 nt, Human
aaacagaacacu

SEQ ID NO: 1238009 - RNA, 17 nt, Human
aaagaaauauaccuaaa

SEQ ID NO: 1238010 - RNA, 14 nt, Human
aaacugaggaauuu

SEQ ID NO: 1238011 - RNA, 19 nt, Human
aaacugaggaauuucaccu

SEQ ID NO: 1238012 - RNA, 18 nt, Human
aaacugaggaauuuucuu

SEQ ID NO: 1238013 - RNA, 19 nt, Human
aaacugaggaauuuucuuu

SEQ ID NO: 1238014 - RNA, 21 nt, Human
aaagagucuagauucaaaggu

SEQ ID NO: 1238015 - RNA, 15 nt, Human
aaagagucuagauuc

SEQ ID NO: 1238016 - RNA, 21 nt, Human
aaagaagggcugguauuguuc

SEQ ID NO: 1238017 - RNA, 15 nt, Human
aaagaaguaaaagca

SEQ ID NO: 1238018 - RNA, 20 nt, Human
aaagaguccauuguuuaaaa

SEQ ID NO: 1238019 - RNA, 21 nt, Human
aaagaguccauuguuuaaaaa

SEQ ID NO: 1238020 - RNA, 13 nt, Human
aaagagucuagau

SEQ ID NO: 1238021 - RNA, 14 nt, Human
aaagagucuagauu

SEQ ID NO: 1238022 - RNA, 20 nt, Human
aaagaagguuucagaaagaa

SEQ ID NO: 1238023 - RNA, 16 nt, Human
aaagaagcccccagcu

SEQ ID NO: 1238024 - RNA, 14 nt, Human
aaagaagaccugag

SEQ ID NO: 1238025 - RNA, 18 nt, Human
aaagaagaccugagaaug

SEQ ID NO: 1238026 - RNA, 22 nt, Human
aaagaagaccugagaauguauc

SEQ ID NO: 1238027 - RNA, 20 nt, Human
aaagaagaccugagaaugua

SEQ ID NO: 1238028 - RNA, 22 nt, Human
aaagaagagcgagagaucaaag

SEQ ID NO: 1238029 - RNA, 14 nt, Human
aaagaguucaagaa

SEQ ID NO: 1238030 - RNA, 20 nt, Human
aaagaguucaagaaauaagu

SEQ ID NO: 1238031 - RNA, 16 nt, Human
aaagaguucaagaaau

SEQ ID NO: 1238032 - RNA, 12 nt, Human
aaagauaaacac

SEQ ID NO: 1238033 - RNA, 16 nt, Human
aaagauaaacacaaga

SEQ ID NO: 1238034 - RNA, 17 nt, Human
aaagauaaacacaagau

SEQ ID NO: 1238035 - RNA, 18 nt, Human
aaagauaaacacaagauu

SEQ ID NO: 1238036 - RNA, 23 nt, Human
aaaccaucucccuggugcuuaug

SEQ ID NO: 1238037 - RNA, 23 nt, Human
aaaccaugaagagauuuuucaug

SEQ ID NO: 1238038 - RNA, 22 nt, Human
aaaccaucaaguugugccaaau

SEQ ID NO: 1238039 - RNA, 13 nt, Human
aaaccaucucccu

SEQ ID NO: 1238040 - RNA, 15 nt, Human
aaaccaucucccugg

SEQ ID NO: 1238041 - RNA, 19 nt, Human
aaaccaucucccuggugcu

SEQ ID NO: 1238042 - RNA, 22 nt, Human
aaaccaucucccuggugcuuau

SEQ ID NO: 1238043 - RNA, 15 nt, Human
aaaccaugcaaaugc

SEQ ID NO: 1238044 - RNA, 13 nt, Human
aaaccauguagaa

SEQ ID NO: 1238045 - RNA, 22 nt, Human
aaaccaugcucuggcauguuga

SEQ ID NO: 1238046 - RNA, 18 nt, Human
aaaccccuguaggccuca

SEQ ID NO: 1238047 - RNA, 16 nt, Human
aaacccuauugguaaa

SEQ ID NO: 1238048 - RNA, 15 nt, Human
aaacccuagccuugc

SEQ ID NO: 1238049 - RNA, 16 nt, Human
aaacccuagccuugcu

SEQ ID NO: 1238050 - RNA, 18 nt, Human
aaacccuagccuugcuug

SEQ ID NO: 1238051 - RNA, 13 nt, Human
aaacccuagccuu

SEQ ID NO: 1238052 - RNA, 14 nt, Human
aaacccuagccuug

SEQ ID NO: 1238053 - RNA, 17 nt, Human
aaacccuagccuugcuu

SEQ ID NO: 1238054 - RNA, 12 nt, Human
aacagcuggugu

SEQ ID NO: 1238055 - RNA, 13 nt, Human
aacagcuggugua

SEQ ID NO: 1238056 - RNA, 16 nt, Human
aacagcugguguagcu

SEQ ID NO: 1238057 - RNA, 17 nt, Human
aacagcugguguagcua

SEQ ID NO: 1238058 - RNA, 20 nt, Human
aacagcugguguagcuacag

SEQ ID NO: 1238059 - RNA, 21 nt, Human
aacagcugguguagcuacaga

SEQ ID NO: 1238060 - RNA, 23 nt, Human
aacagcugguguagcuacagaga

SEQ ID NO: 1238061 - RNA, 10 nt, Human
aacagcaucu

SEQ ID NO: 1238062 - RNA, 15 nt, Human
aacagcaucuccaag

SEQ ID NO: 1238063 - RNA, 19 nt, Human
aacagcaucuccaagcagc

SEQ ID NO: 1238064 - RNA, 21 nt, Human
aacagcaucuccaagcagcuu

SEQ ID NO: 1238065 - RNA, 22 nt, Human
aacagcauguacggauuuucag

SEQ ID NO: 1238066 - RNA, 20 nt, Human
aacagcaccaaaucaaaauc

SEQ ID NO: 1238067 - RNA, 19 nt, Human
aacagcagacucagcucug

SEQ ID NO: 1238068 - RNA, 20 nt, Human
aacagcagacucagcucuga

SEQ ID NO: 1238069 - RNA, 17 nt, Human
aaccuagggugauauua

SEQ ID NO: 1238070 - RNA, 23 nt, Human
aaccuacagagaugcuaagagaa

SEQ ID NO: 1238071 - RNA, 20 nt, Human
aaccuacaguuuuaacugug

SEQ ID NO: 1238072 - RNA, 11 nt, Human
aaccuagagau

SEQ ID NO: 1238073 - RNA, 14 nt, Human
aacccuagcaaaag

SEQ ID NO: 1238074 - RNA, 17 nt, Human
aacccguggaggcugcu

SEQ ID NO: 1238075 - RNA, 13 nt, Human
aacccuagccuug

SEQ ID NO: 1238076 - RNA, 23 nt, Human
aacccuaaauaauaaaaauaaac

SEQ ID NO: 1238077 - RNA, 18 nt, Human
aacccguggaggcugcuc

SEQ ID NO: 1238078 - RNA, 16 nt, Human
aacccuagccuugcuu

SEQ ID NO: 1238079 - RNA, 18 nt, Human
aacccuagccuugcuugu

SEQ ID NO: 1238080 - RNA, 19 nt, Human
aacccuagccuugcuuguu

SEQ ID NO: 1238081 - RNA, 21 nt, Human
aacccuauacuguaguauucu

SEQ ID NO: 1238082 - RNA, 12 nt, Human
aaccagaucauu

SEQ ID NO: 1238083 - RNA, 16 nt, Human
aaccagauauauauuc

SEQ ID NO: 1238084 - RNA, 15 nt, Human
aacccgucuggccca

SEQ ID NO: 1238085 - RNA, 14 nt, Human
aacccgugccaagu

SEQ ID NO: 1238086 - RNA, 13 nt, Human
aacccguggaggc

SEQ ID NO: 1238087 - RNA, 14 nt, Human
aacccguggaggcu

SEQ ID NO: 1238088 - RNA, 15 nt, Human
aacccguggaggcug

SEQ ID NO: 1238089 - RNA, 21 nt, Human
aaccgaacugauguaaguaaa

SEQ ID NO: 1238090 - RNA, 16 nt, Human
aacccuuugugugcuc

SEQ ID NO: 1238091 - RNA, 20 nt, Human
aacccuuugugugcucucca

SEQ ID NO: 1238092 - RNA, 20 nt, Human
aacccucacaucagagugac

SEQ ID NO: 1238093 - RNA, 14 nt, Human
aacccuugggccag

SEQ ID NO: 1238094 - RNA, 15 nt, Human
aacccuugggccaga

SEQ ID NO: 1238095 - RNA, 18 nt, Human
aacccuugggccagaagu

SEQ ID NO: 1238096 - RNA, 20 nt, Human
aacccuugggccagaaguac

SEQ ID NO: 1238097 - RNA, 15 nt, Human
aacccuauugguaaa

SEQ ID NO: 1238098 - RNA, 12 nt, Human
aacccucagagc

SEQ ID NO: 1238099 - RNA, 21 nt, Human
aacccuuggagccaauggaga

SEQ ID NO: 1238100 - RNA, 15 nt, Human
aacaucccuccuggg

SEQ ID NO: 1238101 - RNA, 22 nt, Human
aacagcugguguagcuacagag

SEQ ID NO: 1238102 - RNA, 16 nt, Human
aacagcuucucaauuu

SEQ ID NO: 1238103 - RNA, 11 nt, Human
aacauccaaaa

SEQ ID NO: 1238104 - RNA, 15 nt, Human
aacauccaaaaucuu

SEQ ID NO: 1238105 - RNA, 15 nt, Human
aaccagagugcugaa

SEQ ID NO: 1238106 - RNA, 14 nt, Human
aaccagacucuugc

SEQ ID NO: 1238107 - RNA, 17 nt, Human
aaccacuuuuugcagcu

SEQ ID NO: 1238108 - RNA, 15 nt, Human
aaccacuuuuugcag

SEQ ID NO: 1238109 - RNA, 14 nt, Human
aaccacuuuuugca

SEQ ID NO: 1238110 - RNA, 21 nt, Human
aaccacuuucuuauuuuuuuc

SEQ ID NO: 1238111 - RNA, 22 nt, Human
aaccacuuucuuauuuuuuucu

SEQ ID NO: 1238112 - RNA, 15 nt, Human
aaccacgccucuuga

SEQ ID NO: 1238113 - RNA, 17 nt, Human
aacacuaacaugauuug

SEQ ID NO: 1238114 - RNA, 18 nt, Human
aacacuaacauauaaugu

SEQ ID NO: 1238115 - RNA, 13 nt, Human
aacacggccacau

SEQ ID NO: 1238116 - RNA, 21 nt, Human
aacacggccacaucaaagagg

SEQ ID NO: 1238117 - RNA, 21 nt, Human
aacacguaucccaccugacau

SEQ ID NO: 1238118 - RNA, 14 nt, Human
aacacuaaaaauaa

SEQ ID NO: 1238119 - RNA, 15 nt, Human
aacacuaaaaauaaa

SEQ ID NO: 1238120 - RNA, 18 nt, Human
aaauuuuuuuuacauuuu

SEQ ID NO: 1238121 - RNA, 17 nt, Human
aaauuuuuuuuacauuu

SEQ ID NO: 1238122 - RNA, 16 nt, Human
aaauuuuuuuuacauu

SEQ ID NO: 1238123 - RNA, 19 nt, Human
aacaaaaacacuaaaaaua

SEQ ID NO: 1238124 - RNA, 18 nt, Human
aacaaauuuacagagaca

SEQ ID NO: 1238125 - RNA, 14 nt, Human
aacaacacuguagu

SEQ ID NO: 1238126 - RNA, 20 nt, Human
aacaacauguuuccagcauu

SEQ ID NO: 1238127 - RNA, 14 nt, Human
aacaaccucaacug

SEQ ID NO: 1238128 - RNA, 18 nt, Human
aacaaccucaacugccua

SEQ ID NO: 1238129 - RNA, 14 nt, Human
aacacauuucaaau

SEQ ID NO: 1238130 - RNA, 16 nt, Human
aacacauuucaaauga

SEQ ID NO: 1238131 - RNA, 21 nt, Human
aacacauuucaaaugaguuuu

SEQ ID NO: 1238132 - RNA, 20 nt, Human
aacaccauagguagaaugua

SEQ ID NO: 1238133 - RNA, 18 nt, Human
aacaccaugauuccuuua

SEQ ID NO: 1238134 - RNA, 19 nt, Human
aacaccaugauuccuuuaa

SEQ ID NO: 1238135 - RNA, 20 nt, Human
aacaccaugauuccuuuaac

SEQ ID NO: 1238136 - RNA, 15 nt, Human
aacaccauugaaggc

SEQ ID NO: 1238137 - RNA, 17 nt, Human
aacaccauugaaggcuu

SEQ ID NO: 1238138 - RNA, 19 nt, Human
aacaccauugaaggcuuaa

SEQ ID NO: 1238139 - RNA, 15 nt, Human
aaaugccuuuguacu

SEQ ID NO: 1238140 - RNA, 15 nt, Human
aaaugcgguuauaaa

SEQ ID NO: 1238141 - RNA, 22 nt, Human
aaaugcgguuauaaaaaauggu

SEQ ID NO: 1238142 - RNA, 23 nt, Human
aaaugcgguuauaaaaaaugguu

SEQ ID NO: 1238143 - RNA, 16 nt, Human
aaaugccuuuucccaa

SEQ ID NO: 1238144 - RNA, 21 nt, Human
aaaugccuuuucccaaaaugu

SEQ ID NO: 1238145 - RNA, 16 nt, Human
aaaugcgggguggggg

SEQ ID NO: 1238146 - RNA, 17 nt, Human
aaaucuuauaauuuaaa

SEQ ID NO: 1238147 - RNA, 16 nt, Human
aaaucuuauaguucua

SEQ ID NO: 1238148 - RNA, 17 nt, Human
aaaucuuauaguucuag

SEQ ID NO: 1238149 - RNA, 18 nt, Human
aaaucuuauaguucuagg

SEQ ID NO: 1238150 - RNA, 19 nt, Human
aaaucuuauaguucuaggc

SEQ ID NO: 1238151 - RNA, 20 nt, Human
aaaucuuauaguucuaggca

SEQ ID NO: 1238152 - RNA, 18 nt, Human
aaauguuuaaucauauaa

SEQ ID NO: 1238153 - RNA, 19 nt, Human
aaauguuuaaucauauaaa

SEQ ID NO: 1238154 - RNA, 17 nt, Human
aaauguuuaaucauaua

SEQ ID NO: 1238155 - RNA, 15 nt, Human
aaauguuuaaucaua

SEQ ID NO: 1238156 - RNA, 14 nt, Human
aaauguuuaaucau

SEQ ID NO: 1238157 - RNA, 13 nt, Human
aaauguuuaauca

SEQ ID NO: 1238158 - RNA, 11 nt, Human
aaauguuuaau

SEQ ID NO: 1238159 - RNA, 17 nt, Human
aaauguuggucauuuua

SEQ ID NO: 1238160 - RNA, 19 nt, Human
aaauguuggucauuuuaug

SEQ ID NO: 1238161 - RNA, 15 nt, Human
aaauuuuuuuuacau

SEQ ID NO: 1238162 - RNA, 19 nt, Human
aaauugcugacuguagcuu

SEQ ID NO: 1238163 - RNA, 23 nt, Human
aaauugcugacuguagcuuugga

SEQ ID NO: 1238164 - RNA, 14 nt, Human
aaauugcuccuuga

SEQ ID NO: 1238165 - RNA, 13 nt, Human
aaauugcuccuug

SEQ ID NO: 1238166 - RNA, 14 nt, Human
aaauugaaugcaaa

SEQ ID NO: 1238167 - RNA, 22 nt, Human
aaauugacacuuaaaaaugguu

SEQ ID NO: 1238168 - RNA, 19 nt, Human
aaauugacacuuaaaaaug

SEQ ID NO: 1238169 - RNA, 14 nt, Human
aaauugaauacuuu

SEQ ID NO: 1238170 - RNA, 17 nt, Human
aaauugaauacuuugaa

SEQ ID NO: 1238171 - RNA, 18 nt, Human
aaauugaauacuuugaau

SEQ ID NO: 1238172 - RNA, 19 nt, Human
aaauugaauacuuugaaug

SEQ ID NO: 1238173 - RNA, 21 nt, Human
aaauugaauacuuugaaugug

SEQ ID NO: 1238174 - RNA, 15 nt, Human
aaauugaaugcaaac

SEQ ID NO: 1238175 - RNA, 20 nt, Human
aaauugaauacuuugaaugu

SEQ ID NO: 1238176 - RNA, 13 nt, Human
aaauugaaugcaa

SEQ ID NO: 1238177 - RNA, 19 nt, Human
aaauuaaaccggaccaucu

SEQ ID NO: 1238178 - RNA, 19 nt, Human
aaauuaaacuuauuuacaa

SEQ ID NO: 1238179 - RNA, 13 nt, Human
aaauuaaagcauu

SEQ ID NO: 1238180 - RNA, 13 nt, Human
aaauuaaagcuga

SEQ ID NO: 1238181 - RNA, 17 nt, Human
aaauuaaagcugaaaac

SEQ ID NO: 1238182 - RNA, 13 nt, Human
aaauucuuucauu

SEQ ID NO: 1238183 - RNA, 20 nt, Human
aaauucuuucccagucuguc

SEQ ID NO: 1238184 - RNA, 13 nt, Human
aaauugaaaugua

SEQ ID NO: 1238185 - RNA, 20 nt, Human
aaauugaaauguaaggcugu

SEQ ID NO: 1238186 - RNA, 12 nt, Human
aaauugaaccuu

SEQ ID NO: 1238187 - RNA, 15 nt, Human
aaauugaaccuuugu

SEQ ID NO: 1238188 - RNA, 22 nt, Human
aaauugaaccuuugugcccuau

SEQ ID NO: 1238189 - RNA, 21 nt, Human
aacuauugcauuuauauguac

SEQ ID NO: 1238190 - RNA, 16 nt, Human
aacuauugcauuuaua

SEQ ID NO: 1238191 - RNA, 15 nt, Human
aacggauuccaaaga

SEQ ID NO: 1238192 - RNA, 17 nt, Human
aacuauuuucaaagacu

SEQ ID NO: 1238193 - RNA, 18 nt, Human
aacuauuuucaaagacuu

SEQ ID NO: 1238194 - RNA, 12 nt, Human
aacuauuuucag

SEQ ID NO: 1238195 - RNA, 13 nt, Human
aacuauuuucaga

SEQ ID NO: 1238196 - RNA, 14 nt, Human
aacuauuuucagau

SEQ ID NO: 1238197 - RNA, 20 nt, Human
aacuauuuucagaugugaac

SEQ ID NO: 1238198 - RNA, 16 nt, Human
aacuauuuucagaugu

SEQ ID NO: 1238199 - RNA, 15 nt, Human
aacucaaaauauuug

SEQ ID NO: 1238200 - RNA, 17 nt, Human
aacucacuccuuuuaaa

SEQ ID NO: 1238201 - RNA, 20 nt, Human
aacucacuccuuuuaaagaa

SEQ ID NO: 1238202 - RNA, 14 nt, Human
aacucacuuuccuc

SEQ ID NO: 1238203 - RNA, 12 nt, Human
aacggagucaaa

SEQ ID NO: 1238204 - RNA, 14 nt, Human
aacggaagaagaga

SEQ ID NO: 1238205 - RNA, 21 nt, Human
aacggaccaaagcaagacccu

SEQ ID NO: 1238206 - RNA, 14 nt, Human
aacggaccaaagca

SEQ ID NO: 1238207 - RNA, 11 nt, Human
aacgcagcccu

SEQ ID NO: 1238208 - RNA, 19 nt, Human
aacgcaaguucccaguugg

SEQ ID NO: 1238209 - RNA, 22 nt, Human
aacgcaaguucccaguuggagc

SEQ ID NO: 1238210 - RNA, 12 nt, Human
aacgcagcccug

SEQ ID NO: 1238211 - RNA, 20 nt, Human
aacgcucuagguacgaugac

SEQ ID NO: 1238212 - RNA, 15 nt, Human
aacgcugauuuaaag

SEQ ID NO: 1238213 - RNA, 14 nt, Human
aacgauuuuuaaaa

SEQ ID NO: 1238214 - RNA, 15 nt, Human
aacgauuuuuaaaau

SEQ ID NO: 1238215 - RNA, 19 nt, Human
aacgauuuuuaaaauguac

SEQ ID NO: 1238216 - RNA, 18 nt, Human
aacgauuuuuaaaaugua

SEQ ID NO: 1238217 - RNA, 15 nt, Human
aacugacucuuaaga

SEQ ID NO: 1238218 - RNA, 18 nt, Human
aacugacucuuaagaaga

SEQ ID NO: 1238219 - RNA, 12 nt, Human
aacucagaucca

SEQ ID NO: 1238220 - RNA, 13 nt, Human
aacucagauccag

SEQ ID NO: 1238221 - RNA, 14 nt, Human
aacucagauccagg

SEQ ID NO: 1238222 - RNA, 15 nt, Human
aacucagauccaggg

SEQ ID NO: 1238223 - RNA, 22 nt, Human
aacucagauccagggacagagg

SEQ ID NO: 1238224 - RNA, 19 nt, Human
aacugacucuuaagaagac

SEQ ID NO: 1238225 - RNA, 20 nt, Human
aacugacucuuaagaagacu

SEQ ID NO: 1238226 - RNA, 20 nt, Human
aacugacuauucuugaugua

SEQ ID NO: 1238227 - RNA, 22 nt, Human
aacugacuauucuugauguaaa

SEQ ID NO: 1238228 - RNA, 23 nt, Human
aacugacuauucuugauguaaaa

SEQ ID NO: 1238229 - RNA, 19 nt, Human
aacuuaaauuuuaguucuu

SEQ ID NO: 1238230 - RNA, 15 nt, Human
aacuuaaauguuauu

SEQ ID NO: 1238231 - RNA, 19 nt, Human
aacuuaaauguuauuaucu

SEQ ID NO: 1238232 - RNA, 21 nt, Human
aacuuaaauguuauuaucugg

SEQ ID NO: 1238233 - RNA, 13 nt, Human
aacuuaagccaau

SEQ ID NO: 1238234 - RNA, 22 nt, Human
aacuuaagccaauuucaaucuu

SEQ ID NO: 1238235 - RNA, 17 nt, Human
aacuuaaggcauuuguu

SEQ ID NO: 1238236 - RNA, 16 nt, Human
aacugagugccuuuug

SEQ ID NO: 1238237 - RNA, 20 nt, Human
aacugaggaauuuucuuugu

SEQ ID NO: 1238238 - RNA, 17 nt, Human
aacuuaauuuaauauuu

SEQ ID NO: 1238239 - RNA, 21 nt, Human
aacuuacaaagauucucuaug

SEQ ID NO: 1238240 - RNA, 20 nt, Human
aacuuuaugcuaagugaaau

SEQ ID NO: 1238241 - RNA, 21 nt, Human
aacuuuaugcuaagugaaaua

SEQ ID NO: 1238242 - RNA, 14 nt, Human
aacuuuaucacuua

SEQ ID NO: 1238243 - RNA, 15 nt, Human
ggcugcgcacugugu

SEQ ID NO: 1238244 - RNA, 14 nt, Human
ggcugcgcacugug

SEQ ID NO: 1238245 - RNA, 22 nt, Human
ggcugcucggggugcacaggag

SEQ ID NO: 1238246 - RNA, 21 nt, Human
ggcugcucggggugcacagga

SEQ ID NO: 1238247 - RNA, 22 nt, Human
ggcugacaugaagcuguugugu

SEQ ID NO: 1238248 - RNA, 13 nt, Human
ggcugaccacagc

SEQ ID NO: 1238249 - RNA, 15 nt, Human
ggcugaccacagcac

SEQ ID NO: 1238250 - RNA, 16 nt, Human
ggcugaccacagcaca

SEQ ID NO: 1238251 - RNA, 17 nt, Human
ggcugaccacagcacag

SEQ ID NO: 1238252 - RNA, 18 nt, Human
ggcugaccacagcacagc

SEQ ID NO: 1238253 - RNA, 22 nt, Human
ggcugaccacagcacagccaac

SEQ ID NO: 1238254 - RNA, 14 nt, Human
ggcucuucuccuuu

SEQ ID NO: 1238255 - RNA, 15 nt, Human
ggcucuucuccuuuc

SEQ ID NO: 1238256 - RNA, 23 nt, Human
ggcucuucuccuuucacaaccuu

SEQ ID NO: 1238257 - RNA, 16 nt, Human
ggcucuucuccuuuca

SEQ ID NO: 1238258 - RNA, 16 nt, Human
ggcugaauagcagaag

SEQ ID NO: 1238259 - RNA, 22 nt, Human
ggcugacagacagcccuccauc

SEQ ID NO: 1238260 - RNA, 13 nt, Human
ggcugcccuggug

SEQ ID NO: 1238261 - RNA, 19 nt, Human
ggcugaccacagcacagcc

SEQ ID NO: 1238262 - RNA, 21 nt, Human
ggcugcauugaaaagagcuga

SEQ ID NO: 1238263 - RNA, 14 nt, Human
ggcugcccuggugc

SEQ ID NO: 1238264 - RNA, 15 nt, Human
ggcugcccuggugcu

SEQ ID NO: 1238265 - RNA, 16 nt, Human
ggcugcccuggugcug

SEQ ID NO: 1238266 - RNA, 19 nt, Human
ggcugcccuggugcugcca

SEQ ID NO: 1238267 - RNA, 16 nt, Human
ggcugccuuagaaccu

SEQ ID NO: 1238268 - RNA, 16 nt, Human
ggcugccuucuggccu

SEQ ID NO: 1238269 - RNA, 22 nt, Human
ggcugcccuggugcugccacac

SEQ ID NO: 1238270 - RNA, 20 nt, Human
ggcugcauugaaaagagcug

SEQ ID NO: 1238271 - RNA, 23 nt, Human
ggcugccugagucgugaccugcu

SEQ ID NO: 1238272 - RNA, 20 nt, Human
ggcugccucccuuguggcag

SEQ ID NO: 1238273 - RNA, 12 nt, Human
ggcugccugagu

SEQ ID NO: 1238274 - RNA, 21 nt, Human
ggcucuuagcagcuuccagau

SEQ ID NO: 1238275 - RNA, 12 nt, Human
ggcucuucuccu

SEQ ID NO: 1238276 - RNA, 13 nt, Human
ggcucuucuccuu

SEQ ID NO: 1238277 - RNA, 18 nt, Human
ggcucuuagcagcuucca

SEQ ID NO: 1238278 - RNA, 19 nt, Human
ggcucuuagcagcuuccag

SEQ ID NO: 1238279 - RNA, 20 nt, Human
ggcucuuagcagcuuccaga

SEQ ID NO: 1238280 - RNA, 18 nt, Human
ggcucuaugagucuagau

SEQ ID NO: 1238281 - RNA, 23 nt, Human
ggcucuaugagucuagauguuua

SEQ ID NO: 1238282 - RNA, 18 nt, Human
ggcucuguccccagccug

SEQ ID NO: 1238283 - RNA, 23 nt, Human
ggcucuguccccagccugggaaa

SEQ ID NO: 1238284 - RNA, 16 nt, Human
ggcuccuugugccaga

SEQ ID NO: 1238285 - RNA, 19 nt, Human
ggcuccuugugccagagaa

SEQ ID NO: 1238286 - RNA, 17 nt, Human
ggcuccuugugggccug

SEQ ID NO: 1238287 - RNA, 19 nt, Human
ggcuccuugugggccuggg

SEQ ID NO: 1238288 - RNA, 17 nt, Human
ggcucuacuuccccaug

SEQ ID NO: 1238289 - RNA, 11 nt, Human
ggcucuagauc

SEQ ID NO: 1238290 - RNA, 22 nt, Human
ggcucuagaucauaaggcuuca

SEQ ID NO: 1238291 - RNA, 10 nt, Human
ggcuccuggu

SEQ ID NO: 1238292 - RNA, 23 nt, Human
ggcuccuggucaccuaggaagcc

SEQ ID NO: 1238293 - RNA, 14 nt, Human
ggcuccuguuuugc

SEQ ID NO: 1238294 - RNA, 15 nt, Human
ggcuccuguuuugca

SEQ ID NO: 1238295 - RNA, 20 nt, Human
ggcuccuucccaucgcuguc

SEQ ID NO: 1238296 - RNA, 17 nt, Human
ggcuccuugguucuuga

SEQ ID NO: 1238297 - RNA, 11 nt, Human
ggcuccuggac

SEQ ID NO: 1238298 - RNA, 12 nt, Human
ggcuccuggacc

SEQ ID NO: 1238299 - RNA, 14 nt, Human
ggcuccuggacccc

SEQ ID NO: 1238300 - RNA, 16 nt, Human
ggcucagauuguaaua

SEQ ID NO: 1238301 - RNA, 15 nt, Human
ggcucaggcaggggc

SEQ ID NO: 1238302 - RNA, 17 nt, Human
ggcucaggcaggggccu

SEQ ID NO: 1238303 - RNA, 21 nt, Human
ggcucaggcaggggccuccau

SEQ ID NO: 1238304 - RNA, 16 nt, Human
ggcucaggucacauaa

SEQ ID NO: 1238305 - RNA, 18 nt, Human
ggcucagugaaguugcug

SEQ ID NO: 1238306 - RNA, 19 nt, Human
ggcucagugaaguugcugc

SEQ ID NO: 1238307 - RNA, 21 nt, Human
ggcucagugaaguugcugcuu

SEQ ID NO: 1238308 - RNA, 20 nt, Human
ggcucagugaaguugcugcu

SEQ ID NO: 1238309 - RNA, 18 nt, Human
ggcucagagccggggugg

SEQ ID NO: 1238310 - RNA, 20 nt, Human
ggcucagaggguguccugca

SEQ ID NO: 1238311 - RNA, 16 nt, Human
ggcuccacuuggucug

SEQ ID NO: 1238312 - RNA, 14 nt, Human
ggcuccacuugguc

SEQ ID NO: 1238313 - RNA, 20 nt, Human
gggacagucaccucauggaa

SEQ ID NO: 1238314 - RNA, 21 nt, Human
gggacagucaccucauggaau

SEQ ID NO: 1238315 - RNA, 22 nt, Human
gggacagucaccucauggaauu

SEQ ID NO: 1238316 - RNA, 17 nt, Human
gggacagguccucagug

SEQ ID NO: 1238317 - RNA, 13 nt, Human
gggacagagcaga

SEQ ID NO: 1238318 - RNA, 17 nt, Human
gggacagaggccccagc

SEQ ID NO: 1238319 - RNA, 18 nt, Human
gggacagaggccccagcc

SEQ ID NO: 1238320 - RNA, 19 nt, Human
gggacagaggccccagccu

SEQ ID NO: 1238321 - RNA, 20 nt, Human
gggacagaggccccagccuc

SEQ ID NO: 1238322 - RNA, 21 nt, Human
gggacagaggccccagccucc

SEQ ID NO: 1238323 - RNA, 21 nt, Human
gggaacuggccaagcugaggu

SEQ ID NO: 1238324 - RNA, 20 nt, Human
gggaacuggccaagcugagg

SEQ ID NO: 1238325 - RNA, 11 nt, Human
gggaagacagu

SEQ ID NO: 1238326 - RNA, 12 nt, Human
gggaagacagug

SEQ ID NO: 1238327 - RNA, 14 nt, Human
gggaagacaguggc

SEQ ID NO: 1238328 - RNA, 22 nt, Human
gggacaccuaggcuaggguggg

SEQ ID NO: 1238329 - RNA, 22 nt, Human
gggaagacccauuccuucccag

SEQ ID NO: 1238330 - RNA, 16 nt, Human
gggaagacaguggccc

SEQ ID NO: 1238331 - RNA, 22 nt, Human
gggaagacuccuagcuguccuu

SEQ ID NO: 1238332 - RNA, 18 nt, Human
gggaagagacagcccagg

SEQ ID NO: 1238333 - RNA, 22 nt, Human
ggcuucccgcucagcccucccu

SEQ ID NO: 1238334 - RNA, 14 nt, Human
ggcuucucucugug

SEQ ID NO: 1238335 - RNA, 22 nt, Human
ggcuucugagcagcgagccugc

SEQ ID NO: 1238336 - RNA, 13 nt, Human
ggcuucugagcag

SEQ ID NO: 1238337 - RNA, 14 nt, Human
ggcuucugagcagc

SEQ ID NO: 1238338 - RNA, 12 nt, Human
ggcuucugcugg

SEQ ID NO: 1238339 - RNA, 15 nt, Human
ggcuucugcuggggc

SEQ ID NO: 1238340 - RNA, 19 nt, Human
ggcuucugcuggggccugg

SEQ ID NO: 1238341 - RNA, 21 nt, Human
ggcuucugcuggggccuggga

SEQ ID NO: 1238342 - RNA, 18 nt, Human
ggcuucuggccaggaagc

SEQ ID NO: 1238343 - RNA, 20 nt, Human
ggcuucugcuggggccuggg

SEQ ID NO: 1238344 - RNA, 20 nt, Human
gggaacagugugcaaggcag

SEQ ID NO: 1238345 - RNA, 12 nt, Human
gggaacaugggg

SEQ ID NO: 1238346 - RNA, 16 nt, Human
gggaacauggggagga

SEQ ID NO: 1238347 - RNA, 14 nt, Human
gggaacauggggag

SEQ ID NO: 1238348 - RNA, 12 nt, Human
gggaacuggcca

SEQ ID NO: 1238349 - RNA, 13 nt, Human
gggaacuggccaa

SEQ ID NO: 1238350 - RNA, 15 nt, Human
gggaacuggccaagc

SEQ ID NO: 1238351 - RNA, 16 nt, Human
gggaacuggccaagcu

SEQ ID NO: 1238352 - RNA, 18 nt, Human
gggaacuggccaagcuga

SEQ ID NO: 1238353 - RNA, 19 nt, Human
gggaacuggccaagcugag

SEQ ID NO: 1238354 - RNA, 16 nt, Human
gggaacucagauccag

SEQ ID NO: 1238355 - RNA, 13 nt, Human
gggaaccugaccc

SEQ ID NO: 1238356 - RNA, 13 nt, Human
gggaaccuguguc

SEQ ID NO: 1238357 - RNA, 14 nt, Human
gggaaccugugucc

SEQ ID NO: 1238358 - RNA, 15 nt, Human
gggaaccuguguccg

SEQ ID NO: 1238359 - RNA, 14 nt, Human
gggaaccccuuucc

SEQ ID NO: 1238360 - RNA, 17 nt, Human
gggaaccccuuucccac

SEQ ID NO: 1238361 - RNA, 19 nt, Human
gggaacccugcccacuccc

SEQ ID NO: 1238362 - RNA, 23 nt, Human
gggaacccugcccacucccagga

SEQ ID NO: 1238363 - RNA, 18 nt, Human
ggcuguaacugccaggcu

SEQ ID NO: 1238364 - RNA, 14 nt, Human
ggcuguaaggcucu

SEQ ID NO: 1238365 - RNA, 15 nt, Human
ggcuguaaggcucua

SEQ ID NO: 1238366 - RNA, 15 nt, Human
ggcuguaacugccag

SEQ ID NO: 1238367 - RNA, 16 nt, Human
ggcuguaacugccagg

SEQ ID NO: 1238368 - RNA, 17 nt, Human
ggcuguaacugccaggc

SEQ ID NO: 1238369 - RNA, 19 nt, Human
ggcuucccgcucagcccuc

SEQ ID NO: 1238370 - RNA, 21 nt, Human
ggcuucccgcucagcccuccc

SEQ ID NO: 1238371 - RNA, 15 nt, Human
ggcuucccgcucagc

SEQ ID NO: 1238372 - RNA, 16 nt, Human
ggcuucccgcucagcc

SEQ ID NO: 1238373 - RNA, 17 nt, Human
ggcuucccgcucagccc

SEQ ID NO: 1238374 - RNA, 18 nt, Human
ggcuucccgcucagcccu

SEQ ID NO: 1238375 - RNA, 14 nt, Human
ggcuucccgcucag

SEQ ID NO: 1238376 - RNA, 20 nt, Human
ggcugggucgcccuggacug

SEQ ID NO: 1238377 - RNA, 17 nt, Human
ggcugggucgcccugga

SEQ ID NO: 1238378 - RNA, 14 nt, Human
ggcugggucgcccu

SEQ ID NO: 1238379 - RNA, 22 nt, Human
aaaaauaagaagaaugcuuaau

SEQ ID NO: 1238380 - RNA, 21 nt, Human
aaaaauaagucaacaguaaac

SEQ ID NO: 1238381 - RNA, 12 nt, Human
aaaaauaauaau

SEQ ID NO: 1238382 - RNA, 18 nt, Human
aaaaauaagucaacagua

SEQ ID NO: 1238383 - RNA, 16 nt, Human
ggcuggggucccagca

SEQ ID NO: 1238384 - RNA, 17 nt, Human
ggcuggggucccagcag

SEQ ID NO: 1238385 - RNA, 18 nt, Human
ggcuggggucccagcagc

SEQ ID NO: 1238386 - RNA, 21 nt, Human
ggcuggggucccagcagcugc

SEQ ID NO: 1238387 - RNA, 14 nt, Human
aaaaauaacaauga

SEQ ID NO: 1238388 - RNA, 18 nt, Human
aaaaauaaauauaucuac

SEQ ID NO: 1238389 - RNA, 24 nt, Human
aaaaauaaauauaucuaccccaga

SEQ ID NO: 1238390 - RNA, 14 nt, Human
aaaaauaagaagaa

SEQ ID NO: 1238391 - RNA, 16 nt, Human
aaaaauaagaagaaug

SEQ ID NO: 1238392 - RNA, 13 nt, Human
aaaaggaaagaaa

SEQ ID NO: 1238393 - RNA, 18 nt, Human
aaaaggaagccaaagagu

SEQ ID NO: 1238394 - RNA, 14 nt, Human
aaaaggaaagaaaa

SEQ ID NO: 1238395 - RNA, 14 nt, Human
aaaagcuuuuuauu

SEQ ID NO: 1238396 - RNA, 13 nt, Human
aaaagcuuuuguc

SEQ ID NO: 1238397 - RNA, 21 nt, Human
aaaagcuuugaacccugggac

SEQ ID NO: 1238398 - RNA, 16 nt, Human
aaaagcauuuuguaau

SEQ ID NO: 1238399 - RNA, 14 nt, Human
aaaagcauuuugua

SEQ ID NO: 1238400 - RNA, 15 nt, Human
aaaagcauuuuguaa

SEQ ID NO: 1238401 - RNA, 23 nt, Human
aaaagccagguuccacagaggac

SEQ ID NO: 1238402 - RNA, 19 nt, Human
aaaagcccaccauuuggca

SEQ ID NO: 1238403 - RNA, 21 nt, Human
aaaagcccuagacuggugcua

SEQ ID NO: 1238404 - RNA, 13 nt, Human
gggacuugugucu

SEQ ID NO: 1238405 - RNA, 14 nt, Human
gggacuugugucug

SEQ ID NO: 1238406 - RNA, 15 nt, Human
gggacuugugucugc

SEQ ID NO: 1238407 - RNA, 23 nt, Human
gggagaaauagucggugaagaaa

SEQ ID NO: 1238408 - RNA, 13 nt, Human
gggagagcccagg

SEQ ID NO: 1238409 - RNA, 16 nt, Human
gggagagcccaggagc

SEQ ID NO: 1238410 - RNA, 17 nt, Human
gggagagcccaggagcu

SEQ ID NO: 1238411 - RNA, 18 nt, Human
gggagagcccaggagcuc

SEQ ID NO: 1238412 - RNA, 20 nt, Human
gggagagcccaggagcuccc

SEQ ID NO: 1238413 - RNA, 21 nt, Human
gggagaggcagcccaggaagu

SEQ ID NO: 1238414 - RNA, 12 nt, Human
gggagaggcagc

SEQ ID NO: 1238415 - RNA, 14 nt, Human
gggagagggcgcag

SEQ ID NO: 1238416 - RNA, 9 nt, Human
gggagccaa

SEQ ID NO: 1238417 - RNA, 11 nt, Human
gggagccaagg

SEQ ID NO: 1238418 - RNA, 12 nt, Human
gggagccaaggg

SEQ ID NO: 1238419 - RNA, 13 nt, Human
gggagccaaggga

SEQ ID NO: 1238420 - RNA, 14 nt, Human
gggagccaagggau

SEQ ID NO: 1238421 - RNA, 15 nt, Human
gggagccaagggaug

SEQ ID NO: 1238422 - RNA, 19 nt, Human
gggagccaugcgcccccuc

SEQ ID NO: 1238423 - RNA, 15 nt, Human
gggagccauuugaga

SEQ ID NO: 1238424 - RNA, 10 nt, Human
gggagcccac

SEQ ID NO: 1238425 - RNA, 20 nt, Human
gggaggcuggaagcugggag

SEQ ID NO: 1238426 - RNA, 15 nt, Human
gggagggaagggagc

SEQ ID NO: 1238427 - RNA, 18 nt, Human
gggagggaagggagccaa

SEQ ID NO: 1238428 - RNA, 22 nt, Human
gggagggauucugguuccaggg

SEQ ID NO: 1238429 - RNA, 11 nt, Human
gggagggcaga

SEQ ID NO: 1238430 - RNA, 13 nt, Human
gggagggggcaga

SEQ ID NO: 1238431 - RNA, 14 nt, Human
gggagggggcagaa

SEQ ID NO: 1238432 - RNA, 15 nt, Human
gggagggggcagaag

SEQ ID NO: 1238433 - RNA, 19 nt, Human
gggaugacuaaaauauuua

SEQ ID NO: 1238434 - RNA, 20 nt, Human
gggaugacuaaaauauuuau

SEQ ID NO: 1238435 - RNA, 16 nt, Human
gggaggguaggcagga

SEQ ID NO: 1238436 - RNA, 15 nt, Human
gggaggguaccagca

SEQ ID NO: 1238437 - RNA, 14 nt, Human
gggaggucauuuug

SEQ ID NO: 1238438 - RNA, 19 nt, Human
gggacauuugcucauggaa

SEQ ID NO: 1238439 - RNA, 19 nt, Human
gggacaugcuuagcagucc

SEQ ID NO: 1238440 - RNA, 20 nt, Human
gggacauuccaaagaacagc

SEQ ID NO: 1238441 - RNA, 17 nt, Human
aaaaaugguuuaaaugg

SEQ ID NO: 1238442 - RNA, 17 nt, Human
gggaccacccugagccg

SEQ ID NO: 1238443 - RNA, 20 nt, Human
gggaccagcagccccacacc

SEQ ID NO: 1238444 - RNA, 19 nt, Human
gggaccacccugagccggc

SEQ ID NO: 1238445 - RNA, 18 nt, Human
gggaccaggagugggugg

SEQ ID NO: 1238446 - RNA, 12 nt, Human
gggaccaggagu

SEQ ID NO: 1238447 - RNA, 13 nt, Human
aaaaaugguaauu

SEQ ID NO: 1238448 - RNA, 14 nt, Human
aaaacaucuuugaa

SEQ ID NO: 1238449 - RNA, 16 nt, Human
aaaacaucuuugaaau

SEQ ID NO: 1238450 - RNA, 24 nt, Human
aaaacaucuuugaaauuauguaaa

SEQ ID NO: 1238451 - RNA, 23 nt, Human
aaaacaugcagaacaaaugaaga

SEQ ID NO: 1238452 - RNA, 21 nt, Human
aaaacaugcagaacaaaugaa

SEQ ID NO: 1238453 - RNA, 20 nt, Human
aaaaccacauggcacagaga

SEQ ID NO: 1238454 - RNA, 11 nt, Human
aaaaauguagg

SEQ ID NO: 1238455 - RNA, 12 nt, Human
aaaaauguagga

SEQ ID NO: 1238456 - RNA, 16 nt, Human
aaaaauguauaugcac

SEQ ID NO: 1238457 - RNA, 18 nt, Human
aaaaauguaggagacugu

SEQ ID NO: 1238458 - RNA, 12 nt, Human
aaaaauguauuu

SEQ ID NO: 1238459 - RNA, 16 nt, Human
aaaaauguauuuuaug

SEQ ID NO: 1238460 - RNA, 20 nt, Human
aaaacuucguuuaaugaaug

SEQ ID NO: 1238461 - RNA, 15 nt, Human
aaaacuucagacaua

SEQ ID NO: 1238462 - RNA, 21 nt, Human
aaaacuuaugcugauuuauuu

SEQ ID NO: 1238463 - RNA, 21 nt, Human
aaaacuucaguuucacagaaa

SEQ ID NO: 1238464 - RNA, 21 nt, Human
aaaagauugaaguauuuugcu

SEQ ID NO: 1238465 - RNA, 14 nt, Human
aaaagauugcugaa

SEQ ID NO: 1238466 - RNA, 16 nt, Human
aaaagauugcugaaau

SEQ ID NO: 1238467 - RNA, 18 nt, Human
aaaagauugcugaaauuu

SEQ ID NO: 1238468 - RNA, 21 nt, Human
aaaagauugcugaaauuuuau

SEQ ID NO: 1238469 - RNA, 16 nt, Human
aaaagcaaaaaagaaa

SEQ ID NO: 1238470 - RNA, 21 nt, Human
aaaacucuacuuaauccaaug

SEQ ID NO: 1238471 - RNA, 19 nt, Human
aaaacucuuauaaauuucu

SEQ ID NO: 1238472 - RNA, 15 nt, Human
aaaacucuuucggua

SEQ ID NO: 1238473 - RNA, 12 nt, Human
aaaacucuuuga

SEQ ID NO: 1238474 - RNA, 11 nt, Human
aaaaccuguuc

SEQ ID NO: 1238475 - RNA, 14 nt, Human
aaaaccuuuugaaa

SEQ ID NO: 1238476 - RNA, 22 nt, Human
aaaaccuuccaugucaagauuc

SEQ ID NO: 1238477 - RNA, 23 nt, Human
aaaaccuguucaagucuaccaac

SEQ ID NO: 1238478 - RNA, 22 nt, Human
aaaaccugagauuuauuaaaga

SEQ ID NO: 1238479 - RNA, 17 nt, Human
aaaaccaucaaguugug

SEQ ID NO: 1238480 - RNA, 22 nt, Human
ggagacugcugagucaacccaa

SEQ ID NO: 1238481 - RNA, 15 nt, Human
ggagacugcccagcu

SEQ ID NO: 1238482 - RNA, 17 nt, Human
ggagagacacugguggg

SEQ ID NO: 1238483 - RNA, 21 nt, Human
ggcagcagggcuacccugagc

SEQ ID NO: 1238484 - RNA, 22 nt, Human
ggcagcagggguuggggaaaca

SEQ ID NO: 1238485 - RNA, 15 nt, Human
ggcagcagggguugg

SEQ ID NO: 1238486 - RNA, 13 nt, Human
ggcagcaguguga

SEQ ID NO: 1238487 - RNA, 14 nt, Human
ggcagcagugugag

SEQ ID NO: 1238488 - RNA, 19 nt, Human
ggcagcagugugaggccag

SEQ ID NO: 1238489 - RNA, 20 nt, Human
ggcagcagugugaggccagg

SEQ ID NO: 1238490 - RNA, 20 nt, Human
ggcagacauugugcuagugc

SEQ ID NO: 1238491 - RNA, 18 nt, Human
ggcagacucuuuaugcuu

SEQ ID NO: 1238492 - RNA, 19 nt, Human
ggcagacucuuuaugcuug

SEQ ID NO: 1238493 - RNA, 14 nt, Human
ggcagcagccagcc

SEQ ID NO: 1238494 - RNA, 15 nt, Human
ggcagcagccagccc

SEQ ID NO: 1238495 - RNA, 16 nt, Human
ggcagcagccagcccu

SEQ ID NO: 1238496 - RNA, 17 nt, Human
ggcagcagccagcccug

SEQ ID NO: 1238497 - RNA, 18 nt, Human
ggcagcagccagcccugc

SEQ ID NO: 1238498 - RNA, 19 nt, Human
ggcagcagccagcccugcc

SEQ ID NO: 1238499 - RNA, 20 nt, Human
ggcagcagccagcccugccu

SEQ ID NO: 1238500 - RNA, 21 nt, Human
ggcagcagccagcccugccug

SEQ ID NO: 1238501 - RNA, 23 nt, Human
ggcagcagccagcccugccugga

SEQ ID NO: 1238502 - RNA, 22 nt, Human
ggcagcagccagcccugccugg

SEQ ID NO: 1238503 - RNA, 12 nt, Human
ggcagcagcccc

SEQ ID NO: 1238504 - RNA, 14 nt, Human
ggcagcagccccca

SEQ ID NO: 1238505 - RNA, 15 nt, Human
ggcagcagcccccag

SEQ ID NO: 1238506 - RNA, 23 nt, Human
ggcagcagcccccagcucccacc

SEQ ID NO: 1238507 - RNA, 13 nt, Human
ggcagcagggcua

SEQ ID NO: 1238508 - RNA, 18 nt, Human
ggcagcagggcuacccug

SEQ ID NO: 1238509 - RNA, 15 nt, Human
ggcacugguggcccg

SEQ ID NO: 1238510 - RNA, 20 nt, Human
ggcacugcccugguggcccu

SEQ ID NO: 1238511 - RNA, 12 nt, Human
ggcacugcccug

SEQ ID NO: 1238512 - RNA, 14 nt, Human
ggcacugcccuggu

SEQ ID NO: 1238513 - RNA, 24 nt, Human
ggcacugcccugguggcccucucc

SEQ ID NO: 1238514 - RNA, 13 nt, Human
ggcacuguacaaa

SEQ ID NO: 1238515 - RNA, 17 nt, Human
ggcacuguaguucuaag

SEQ ID NO: 1238516 - RNA, 18 nt, Human
ggcacuguaguucuaaga

SEQ ID NO: 1238517 - RNA, 14 nt, Human
ggcacuuaaagcuu

SEQ ID NO: 1238518 - RNA, 20 nt, Human
ggcacuguaguucuaagacu

SEQ ID NO: 1238519 - RNA, 17 nt, Human
ggcacuuggcagccuug

SEQ ID NO: 1238520 - RNA, 18 nt, Human
ggcacuuggcagccuugu

SEQ ID NO: 1238521 - RNA, 22 nt, Human
ggcacuuugaaggggccucacc

SEQ ID NO: 1238522 - RNA, 12 nt, Human
ggcacagggucu

SEQ ID NO: 1238523 - RNA, 17 nt, Human
ggcacagggucugcucu

SEQ ID NO: 1238524 - RNA, 18 nt, Human
ggcacagggucugcucuu

SEQ ID NO: 1238525 - RNA, 19 nt, Human
ggcacagggucugcucuuu

SEQ ID NO: 1238526 - RNA, 13 nt, Human
ggcacucuagauu

SEQ ID NO: 1238527 - RNA, 19 nt, Human
ggcagggcgggcagagggc

SEQ ID NO: 1238528 - RNA, 21 nt, Human
ggcagggcgggcagagggcug

SEQ ID NO: 1238529 - RNA, 23 nt, Human
ggcagggcgggcagagggcugga

SEQ ID NO: 1238530 - RNA, 22 nt, Human
ggcagggcgggcagagggcugg

SEQ ID NO: 1238531 - RNA, 19 nt, Human
ggcagggcucuccuggcuu

SEQ ID NO: 1238532 - RNA, 12 nt, Human
ggcagggcucuc

SEQ ID NO: 1238533 - RNA, 13 nt, Human
ggcagggcucucc

SEQ ID NO: 1238534 - RNA, 16 nt, Human
ggcagggcucuccugg

SEQ ID NO: 1238535 - RNA, 17 nt, Human
ggcagggcucuccuggc

SEQ ID NO: 1238536 - RNA, 18 nt, Human
ggcagggcucuccuggcu

SEQ ID NO: 1238537 - RNA, 20 nt, Human
ggcagggcucuccuggcuuc

SEQ ID NO: 1238538 - RNA, 14 nt, Human
ggcaggggacagga

SEQ ID NO: 1238539 - RNA, 21 nt, Human
ggcaguguagggaguuguggg

SEQ ID NO: 1238540 - RNA, 16 nt, Human
ggcaguuaccauuaaa

SEQ ID NO: 1238541 - RNA, 22 nt, Human
ggcaguuaccauuaaaccaucu

SEQ ID NO: 1238542 - RNA, 24 nt, Human
ggcaguuaccauuaaaccaucucc

SEQ ID NO: 1238543 - RNA, 23 nt, Human
ggcaguuaccauuaaaccaucuc

SEQ ID NO: 1238544 - RNA, 12 nt, Human
ggcaguuauauu

SEQ ID NO: 1238545 - RNA, 14 nt, Human
ggcaguuauauuuu

SEQ ID NO: 1238546 - RNA, 16 nt, Human
ggcaguuauauuuugc

SEQ ID NO: 1238547 - RNA, 15 nt, Human
ggcaguucgcagcca

SEQ ID NO: 1238548 - RNA, 16 nt, Human
ggcaguucgcagccac

SEQ ID NO: 1238549 - RNA, 17 nt, Human
ggcaguucgcagccacc

SEQ ID NO: 1238550 - RNA, 18 nt, Human
ggcaguucgcagccaccc

SEQ ID NO: 1238551 - RNA, 19 nt, Human
ggcaguucgcagccacccu

SEQ ID NO: 1238552 - RNA, 20 nt, Human
ggcaguucgcagccacccug

SEQ ID NO: 1238553 - RNA, 21 nt, Human
ggcaguucgcagccacccuga

SEQ ID NO: 1238554 - RNA, 22 nt, Human
ggcaguucgcagccacccugag

SEQ ID NO: 1238555 - RNA, 23 nt, Human
ggcaguucgcagccacccugagg

SEQ ID NO: 1238556 - RNA, 10 nt, Human
ggcaguuuuu

SEQ ID NO: 1238557 - RNA, 22 nt, Human
ggcauacgagagcagaggucuc

SEQ ID NO: 1238558 - RNA, 17 nt, Human
ggcauacuauguggaug

SEQ ID NO: 1238559 - RNA, 15 nt, Human
ggccagucuguggau

SEQ ID NO: 1238560 - RNA, 18 nt, Human
ggccagucuguggaucag

SEQ ID NO: 1238561 - RNA, 23 nt, Human
ggccagucuguggaucagagaug

SEQ ID NO: 1238562 - RNA, 13 nt, Human
ggccagucugugg

SEQ ID NO: 1238563 - RNA, 14 nt, Human
ggccagucugugga

SEQ ID NO: 1238564 - RNA, 14 nt, Human
ggccaguguuuaaa

SEQ ID NO: 1238565 - RNA, 19 nt, Human
ggccaguguuuaaaacuuc

SEQ ID NO: 1238566 - RNA, 19 nt, Human
ggcccuugaguccccauug

SEQ ID NO: 1238567 - RNA, 18 nt, Human
ggccgaagcuaacaggga

SEQ ID NO: 1238568 - RNA, 19 nt, Human
ggccucacuaggcuucugg

SEQ ID NO: 1238569 - RNA, 12 nt, Human
ggccucacccac

SEQ ID NO: 1238570 - RNA, 13 nt, Human
ggccucacccacc

SEQ ID NO: 1238571 - RNA, 17 nt, Human
ggccucacccaccccug

SEQ ID NO: 1238572 - RNA, 18 nt, Human
ggccucacccaccccugc

SEQ ID NO: 1238573 - RNA, 18 nt, Human
ggccucaccgaguggggg

SEQ ID NO: 1238574 - RNA, 20 nt, Human
ggccgaagcuaacagggaag

SEQ ID NO: 1238575 - RNA, 16 nt, Human
ggccuccauccugagg

SEQ ID NO: 1238576 - RNA, 15 nt, Human
ggccuccauccugag

SEQ ID NO: 1238577 - RNA, 14 nt, Human
ggccuccauccuga

SEQ ID NO: 1238578 - RNA, 19 nt, Human
ggccucaccgagugggggc

SEQ ID NO: 1238579 - RNA, 18 nt, Human
ggccucagcucccacaag

SEQ ID NO: 1238580 - RNA, 13 nt, Human
ggcccggcagggc

SEQ ID NO: 1238581 - RNA, 14 nt, Human
ggcccggcagggcg

SEQ ID NO: 1238582 - RNA, 18 nt, Human
ggcccggcagggcgggca

SEQ ID NO: 1238583 - RNA, 15 nt, Human
ggcccucgcugccag

SEQ ID NO: 1238584 - RNA, 16 nt, Human
ggcccucgcugccagc

SEQ ID NO: 1238585 - RNA, 19 nt, Human
ggcccucgcugccagcucu

SEQ ID NO: 1238586 - RNA, 21 nt, Human
ggcccucgcugccagcucugu

SEQ ID NO: 1238587 - RNA, 22 nt, Human
ggcccucgcugccagcucugua

SEQ ID NO: 1238588 - RNA, 23 nt, Human
ggcccucgcugccagcucuguau

SEQ ID NO: 1238589 - RNA, 21 nt, Human
guacuucaaauccuugaagau

SEQ ID NO: 1238590 - RNA, 22 nt, Human
guacuucaaauccuugaagauu

SEQ ID NO: 1238591 - RNA, 15 nt, Human
guacuucaugcuguc

SEQ ID NO: 1238592 - RNA, 23 nt, Human
guacuguaugaucaaauguuuaa

SEQ ID NO: 1238593 - RNA, 14 nt, Human
guacuguucugugu

SEQ ID NO: 1238594 - RNA, 15 nt, Human
guacuguucuguguc

SEQ ID NO: 1238595 - RNA, 22 nt, Human
guacuguaugaucaaauguuua

SEQ ID NO: 1238596 - RNA, 21 nt, Human
guacuguaugaucaaauguuu

SEQ ID NO: 1238597 - RNA, 20 nt, Human
guacuguaugaucaaauguu

SEQ ID NO: 1238598 - RNA, 18 nt, Human
guacuguaugaucaaaug

SEQ ID NO: 1238599 - RNA, 18 nt, Human
guacuguucugugucuuu

SEQ ID NO: 1238600 - RNA, 17 nt, Human
guacuguucugugucuu

SEQ ID NO: 1238601 - RNA, 19 nt, Human
guacuggcugauggaguaa

SEQ ID NO: 1238602 - RNA, 17 nt, Human
guacuguaugaucaaau

SEQ ID NO: 1238603 - RNA, 14 nt, Human
guacuguaugauca

SEQ ID NO: 1238604 - RNA, 15 nt, Human
guacuguacagcugg

SEQ ID NO: 1238605 - RNA, 19 nt, Human
guacuguacagcuggcucu

SEQ ID NO: 1238606 - RNA, 20 nt, Human
guacuguacagcuggcucua

SEQ ID NO: 1238607 - RNA, 20 nt, Human
guacugggauuacaggcgug

SEQ ID NO: 1238608 - RNA, 13 nt, Human
guacugcauuauu

SEQ ID NO: 1238609 - RNA, 11 nt, Human
guacugccugc

SEQ ID NO: 1238610 - RNA, 13 nt, Human
guacugccugcuu

SEQ ID NO: 1238611 - RNA, 16 nt, Human
guacugccugcuuggg

SEQ ID NO: 1238612 - RNA, 15 nt, Human
guacugcauuauuug

SEQ ID NO: 1238613 - RNA, 13 nt, Human
guacugcagccuc

SEQ ID NO: 1238614 - RNA, 15 nt, Human
guacugauucaauuu

SEQ ID NO: 1238615 - RNA, 16 nt, Human
guacugauucaauuug

SEQ ID NO: 1238616 - RNA, 19 nt, Human
guacugaccccaucaccua

SEQ ID NO: 1238617 - RNA, 14 nt, Human
guacugacuuugcu

SEQ ID NO: 1238618 - RNA, 17 nt, Human
guacugacuuugcuugc

SEQ ID NO: 1238619 - RNA, 20 nt, Human
guacugacuuugcuugcuuu

SEQ ID NO: 1238620 - RNA, 18 nt, Human
guacugacuuugcuugcu

SEQ ID NO: 1238621 - RNA, 16 nt, Human
guacugagccuuguaa

SEQ ID NO: 1238622 - RNA, 14 nt, Human
guacuauuuaacug

SEQ ID NO: 1238623 - RNA, 18 nt, Human
guacuauuuaacugacua

SEQ ID NO: 1238624 - RNA, 15 nt, Human
guacucaaauguagc

SEQ ID NO: 1238625 - RNA, 14 nt, Human
guacuccucccagg

SEQ ID NO: 1238626 - RNA, 15 nt, Human
guacucccucucagg

SEQ ID NO: 1238627 - RNA, 16 nt, Human
guacucccucucagga

SEQ ID NO: 1238628 - RNA, 20 nt, Human
guacucccucucaggaucca

SEQ ID NO: 1238629 - RNA, 15 nt, Human
guacuauuuaacuga

SEQ ID NO: 1238630 - RNA, 18 nt, Human
guacuccacacugcacaa

SEQ ID NO: 1238631 - RNA, 19 nt, Human
guacuccacacugcacaau

SEQ ID NO: 1238632 - RNA, 21 nt, Human
guacuccacacugcacaauaa

SEQ ID NO: 1238633 - RNA, 19 nt, Human
guacuccacauauuucagu

SEQ ID NO: 1238634 - RNA, 19 nt, Human
guacccaccgggccacucc

SEQ ID NO: 1238635 - RNA, 15 nt, Human
guagaacacuaauuc

SEQ ID NO: 1238636 - RNA, 17 nt, Human
guagaacacuaauucau

SEQ ID NO: 1238637 - RNA, 18 nt, Human
guagaacacuaauucaua

SEQ ID NO: 1238638 - RNA, 14 nt, Human
guagaagggaaagc

SEQ ID NO: 1238639 - RNA, 18 nt, Human
guagaagggaaagcccau

SEQ ID NO: 1238640 - RNA, 16 nt, Human
guagaauguaaagcuu

SEQ ID NO: 1238641 - RNA, 21 nt, Human
guagaauguaaagcuugucug

SEQ ID NO: 1238642 - RNA, 19 nt, Human
guagaauguaaagcuuguc

SEQ ID NO: 1238643 - RNA, 17 nt, Human
guagaauuaucuaauuu

SEQ ID NO: 1238644 - RNA, 22 nt, Human
guagaauuaucuaauuuauaaa

SEQ ID NO: 1238645 - RNA, 14 nt, Human
guagaauugcauug

SEQ ID NO: 1238646 - RNA, 15 nt, Human
guagaauugcauuga

SEQ ID NO: 1238647 - RNA, 11 nt, Human
guagagacagg

SEQ ID NO: 1238648 - RNA, 21 nt, Human
guagacggcucaguauagaua

SEQ ID NO: 1238649 - RNA, 18 nt, Human
guagacaguauauaacua

SEQ ID NO: 1238650 - RNA, 14 nt, Human
guagaccaaaauaa

SEQ ID NO: 1238651 - RNA, 15 nt, Human
guagaccaaaauaaa

SEQ ID NO: 1238652 - RNA, 16 nt, Human
guagaccaaaauaaaa

SEQ ID NO: 1238653 - RNA, 15 nt, Human
guagaccacugccau

SEQ ID NO: 1238654 - RNA, 19 nt, Human
guagaccuuguuacuucug

SEQ ID NO: 1238655 - RNA, 20 nt, Human
guagaccuuguuacuucuga

SEQ ID NO: 1238656 - RNA, 21 nt, Human
guagaccuuguuacuucugag

SEQ ID NO: 1238657 - RNA, 22 nt, Human
guagaccuuguuacuucugagg

SEQ ID NO: 1238658 - RNA, 21 nt, Human
guagccucaaucgagugagac

SEQ ID NO: 1238659 - RNA, 15 nt, Human
aaauccauacauuug

SEQ ID NO: 1238660 - RNA, 18 nt, Human
aaauccauacauuugugu

SEQ ID NO: 1238661 - RNA, 18 nt, Human
guacaucuauuuuggauu

SEQ ID NO: 1238662 - RNA, 20 nt, Human
guacaucuauuuuggauugu

SEQ ID NO: 1238663 - RNA, 11 nt, Human
guacaugagaa

SEQ ID NO: 1238664 - RNA, 17 nt, Human
guacauggugcugggag

SEQ ID NO: 1238665 - RNA, 23 nt, Human
guaccaagacuacuagggaaaug

SEQ ID NO: 1238666 - RNA, 20 nt, Human
guaccaagacuacuagggaa

SEQ ID NO: 1238667 - RNA, 17 nt, Human
guaccaaccauccaauu

SEQ ID NO: 1238668 - RNA, 21 nt, Human
guaccaagaaucuugguuugc

SEQ ID NO: 1238669 - RNA, 14 nt, Human
guaccaaucauuuu

SEQ ID NO: 1238670 - RNA, 15 nt, Human
guaccaaucauuuua

SEQ ID NO: 1238671 - RNA, 21 nt, Human
guaccaaucauuuuaauuauu

SEQ ID NO: 1238672 - RNA, 22 nt, Human
guacauuugggaguuuuuauga

SEQ ID NO: 1238673 - RNA, 15 nt, Human
guacauuuuguaaca

SEQ ID NO: 1238674 - RNA, 23 nt, Human
guaccauuuaauggggaggacaa

SEQ ID NO: 1238675 - RNA, 13 nt, Human
guaccauuuuaaa

SEQ ID NO: 1238676 - RNA, 22 nt, Human
guaccaguuaauuuuuccaacu

SEQ ID NO: 1238677 - RNA, 23 nt, Human
guaccaguuaauuuuuccaacua

SEQ ID NO: 1238678 - RNA, 22 nt, Human
guaccauuuaauggggaggaca

SEQ ID NO: 1238679 - RNA, 15 nt, Human
guaccagauaacuuu

SEQ ID NO: 1238680 - RNA, 16 nt, Human
guaccagauaacuuuu

SEQ ID NO: 1238681 - RNA, 17 nt, Human
guaccagaugcagcuca

SEQ ID NO: 1238682 - RNA, 17 nt, Human
guaccagauaacuuuuu

SEQ ID NO: 1238683 - RNA, 10 nt, Human
guaccaguua

SEQ ID NO: 1238684 - RNA, 11 nt, Human
guaccaguuaa

SEQ ID NO: 1238685 - RNA, 16 nt, Human
guaccaguuaauuuuu

SEQ ID NO: 1238686 - RNA, 20 nt, Human
guaccaguuaauuuuuccaa

SEQ ID NO: 1238687 - RNA, 21 nt, Human
aaaucagacuaugaaguuuuu

SEQ ID NO: 1238688 - RNA, 14 nt, Human
aaaucagacuauga

SEQ ID NO: 1238689 - RNA, 18 nt, Human
aaaucagaagucaucuug

SEQ ID NO: 1238690 - RNA, 21 nt, Human
aaaucagaagucaucuugcua

SEQ ID NO: 1238691 - RNA, 17 nt, Human
aaaucacgcuuuuugaa

SEQ ID NO: 1238692 - RNA, 15 nt, Human
aaauauuccugcauu

SEQ ID NO: 1238693 - RNA, 18 nt, Human
aaauauucccuagaaacu

SEQ ID NO: 1238694 - RNA, 19 nt, Human
aaauauucccuagaaacuu

SEQ ID NO: 1238695 - RNA, 19 nt, Human
aaaucaccacaaacuguaa

SEQ ID NO: 1238696 - RNA, 20 nt, Human
aaaucaccacaaacuguaau

SEQ ID NO: 1238697 - RNA, 20 nt, Human
aaaucacgcuuuuugaaaaa

SEQ ID NO: 1238698 - RNA, 12 nt, Human
aaaucagaaguc

SEQ ID NO: 1238699 - RNA, 17 nt, Human
aaauauuaugagaugcu

SEQ ID NO: 1238700 - RNA, 17 nt, Human
aaauauuauguuaaaac

SEQ ID NO: 1238701 - RNA, 16 nt, Human
aaauauuaugagaugc

SEQ ID NO: 1238702 - RNA, 14 nt, Human
aaauauuagaaaca

SEQ ID NO: 1238703 - RNA, 17 nt, Human
aaauauuagaaacagcu

SEQ ID NO: 1238704 - RNA, 13 nt, Human
aaauauacuuuua

SEQ ID NO: 1238705 - RNA, 15 nt, Human
aaauccacuuuaucu

SEQ ID NO: 1238706 - RNA, 17 nt, Human
aaaucauuuuaugucaa

SEQ ID NO: 1238707 - RNA, 14 nt, Human
aaaucauuuugcaa

SEQ ID NO: 1238708 - RNA, 15 nt, Human
aaaucauuuuauguc

SEQ ID NO: 1238709 - RNA, 14 nt, Human
aaaucauuuuaugu

SEQ ID NO: 1238710 - RNA, 12 nt, Human
aaaucauuuguu

SEQ ID NO: 1238711 - RNA, 22 nt, Human
aaaucaggcuuuuguuuccuuu

SEQ ID NO: 1238712 - RNA, 23 nt, Human
aaaucaggcuuuuguuuccuuuu

SEQ ID NO: 1238713 - RNA, 11 nt, Human
aaaucaguaag

SEQ ID NO: 1238714 - RNA, 13 nt, Human
aaaucaguaagag

SEQ ID NO: 1238715 - RNA, 15 nt, Human
aaaucaguaagaggu

SEQ ID NO: 1238716 - RNA, 19 nt, Human
aaaucaguaagagguguua

SEQ ID NO: 1238717 - RNA, 16 nt, Human
aaaucaguaagaggug

SEQ ID NO: 1238718 - RNA, 22 nt, Human
aaaucauaagauauuuuucaug

SEQ ID NO: 1238719 - RNA, 20 nt, Human
guaauaggcguaacuaauuu

SEQ ID NO: 1238720 - RNA, 15 nt, Human
guaacugcuuucugu

SEQ ID NO: 1238721 - RNA, 17 nt, Human
guaacugcuuucuguuc

SEQ ID NO: 1238722 - RNA, 19 nt, Human
guaacugcuuucuguucca

SEQ ID NO: 1238723 - RNA, 20 nt, Human
guaacugcuuucuguuccaa

SEQ ID NO: 1238724 - RNA, 22 nt, Human
guaacugcuuucuguuccaaau

SEQ ID NO: 1238725 - RNA, 15 nt, Human
guaacucaucuguca

SEQ ID NO: 1238726 - RNA, 12 nt, Human
guaacugccagg

SEQ ID NO: 1238727 - RNA, 14 nt, Human
guaacugccuagaa

SEQ ID NO: 1238728 - RNA, 16 nt, Human
guaacugccuagaaac

SEQ ID NO: 1238729 - RNA, 20 nt, Human
guaacugccuagaaacaaca

SEQ ID NO: 1238730 - RNA, 17 nt, Human
guaacugccuagaaaca

SEQ ID NO: 1238731 - RNA, 14 nt, Human
guaacugcuuucug

SEQ ID NO: 1238732 - RNA, 16 nt, Human
guaaacuuuuugugcu

SEQ ID NO: 1238733 - RNA, 20 nt, Human
guaaacuguguauuccaaga

SEQ ID NO: 1238734 - RNA, 13 nt, Human
guaaacuguuucu

SEQ ID NO: 1238735 - RNA, 15 nt, Human
guaaacuguuucuuu

SEQ ID NO: 1238736 - RNA, 19 nt, Human
guaaacuuuaucacuuaaa

SEQ ID NO: 1238737 - RNA, 17 nt, Human
guaaacuuuaucacuua

SEQ ID NO: 1238738 - RNA, 21 nt, Human
guaauccaagcaaaugugaau

SEQ ID NO: 1238739 - RNA, 16 nt, Human
guaauauugacuugua

SEQ ID NO: 1238740 - RNA, 20 nt, Human
guaauuguguuuacauuuua

SEQ ID NO: 1238741 - RNA, 18 nt, Human
guaauuguguuuacauuu

SEQ ID NO: 1238742 - RNA, 17 nt, Human
guaauuguguuuacauu

SEQ ID NO: 1238743 - RNA, 21 nt, Human
guaauuguugcuaaucuucuu

SEQ ID NO: 1238744 - RNA, 15 nt, Human
guaauuguguuuaca

SEQ ID NO: 1238745 - RNA, 13 nt, Human
guaauuguguuua

SEQ ID NO: 1238746 - RNA, 15 nt, Human
guaauuguguggauu

SEQ ID NO: 1238747 - RNA, 21 nt, Human
guaauuguguggauucuuuaa

SEQ ID NO: 1238748 - RNA, 21 nt, Human
guaauuuaaaauaauuauaua

SEQ ID NO: 1238749 - RNA, 12 nt, Human
guaauuuaacuu

SEQ ID NO: 1238750 - RNA, 18 nt, Human
guaauuuagaaaucauuu

SEQ ID NO: 1238751 - RNA, 18 nt, Human
guaauuuggaucucuucu

SEQ ID NO: 1238752 - RNA, 16 nt, Human
guaauuugaggacaac

SEQ ID NO: 1238753 - RNA, 23 nt, Human
guaauuugagagaaauaugaaga

SEQ ID NO: 1238754 - RNA, 18 nt, Human
aaauacauuguauauaug

SEQ ID NO: 1238755 - RNA, 13 nt, Human
aaauacaugcuaa

SEQ ID NO: 1238756 - RNA, 18 nt, Human
aaauacaugcuaagagaa

SEQ ID NO: 1238757 - RNA, 17 nt, Human
aaauacauuuaaaacau

SEQ ID NO: 1238758 - RNA, 23 nt, Human
aaauacuaaugaaaacagaaugu

SEQ ID NO: 1238759 - RNA, 20 nt, Human
aaauacuauuuaaagccucc

SEQ ID NO: 1238760 - RNA, 15 nt, Human
aaauacugcaaauca

SEQ ID NO: 1238761 - RNA, 13 nt, Human
aaauacaagacug

SEQ ID NO: 1238762 - RNA, 13 nt, Human
aaauacaauuuuu

SEQ ID NO: 1238763 - RNA, 15 nt, Human
aaauacagacuggau

SEQ ID NO: 1238764 - RNA, 13 nt, Human
aaauacaggaaac

SEQ ID NO: 1238765 - RNA, 14 nt, Human
aaauacaggaaaca

SEQ ID NO: 1238766 - RNA, 16 nt, Human
aaauacaggaaacagu

SEQ ID NO: 1238767 - RNA, 22 nt, Human
aaauacagucuuccauuugcaa

SEQ ID NO: 1238768 - RNA, 23 nt, Human
aaauacagucuuccauuugcaag

SEQ ID NO: 1238769 - RNA, 13 nt, Human
aaauacaugacau

SEQ ID NO: 1238770 - RNA, 14 nt, Human
aaauacaagacugc

SEQ ID NO: 1238771 - RNA, 15 nt, Human
aaauacaaaaauacu

SEQ ID NO: 1238772 - RNA, 11 nt, Human
aaauacaaaaa

SEQ ID NO: 1238773 - RNA, 22 nt, Human
aaauaauuuuuauauuugaaau

SEQ ID NO: 1238774 - RNA, 23 nt, Human
aaauaauuuuuauauuugaaaua

SEQ ID NO: 1238775 - RNA, 23 nt, Human
guacacugccuucucaacuccaa

SEQ ID NO: 1238776 - RNA, 13 nt, Human
guacacucugcug

SEQ ID NO: 1238777 - RNA, 18 nt, Human
guacacucugcuguuuga

SEQ ID NO: 1238778 - RNA, 14 nt, Human
guacacucugcugu

SEQ ID NO: 1238779 - RNA, 18 nt, Human
guacacagcaccagaaug

SEQ ID NO: 1238780 - RNA, 20 nt, Human
guacacagcucuagacacug

SEQ ID NO: 1238781 - RNA, 20 nt, Human
guaauuuuguguaagaaaua

SEQ ID NO: 1238782 - RNA, 21 nt, Human
guaauuuuuuuaauuuacaaa

SEQ ID NO: 1238783 - RNA, 22 nt, Human
guaauuuuacacgcuuuuguga

SEQ ID NO: 1238784 - RNA, 20 nt, Human
guaauuuuacacgcuuuugu

SEQ ID NO: 1238785 - RNA, 14 nt, Human
guaauuuuggauuu

SEQ ID NO: 1238786 - RNA, 17 nt, Human
guaauuuuggauuuugc

SEQ ID NO: 1238787 - RNA, 14 nt, Human
guaauuuuguguaa

SEQ ID NO: 1238788 - RNA, 16 nt, Human
guaauuuuguguaaga

SEQ ID NO: 1238789 - RNA, 22 nt, Human
aaaguugcuauuugaacuuuuu

SEQ ID NO: 1238790 - RNA, 17 nt, Human
aaaguugguaaaccuuu

SEQ ID NO: 1238791 - RNA, 16 nt, Human
aaaguugguaaaccuu

SEQ ID NO: 1238792 - RNA, 13 nt, Human
aaaguuguuguaa

SEQ ID NO: 1238793 - RNA, 12 nt, Human
aaaguuuaauaa

SEQ ID NO: 1238794 - RNA, 15 nt, Human
aaaguuuaauaaauu

SEQ ID NO: 1238795 - RNA, 20 nt, Human
aaaguuuaaaacagaagccu

SEQ ID NO: 1238796 - RNA, 16 nt, Human
aaauaaaaagugcuuu

SEQ ID NO: 1238797 - RNA, 13 nt, Human
aaauaaaaagaaa

SEQ ID NO: 1238798 - RNA, 19 nt, Human
aaauaaaaagaaaggcugu

SEQ ID NO: 1238799 - RNA, 20 nt, Human
aaauaaaaagaaaggcuguu

SEQ ID NO: 1238800 - RNA, 17 nt, Human
aaauaacagauuucuca

SEQ ID NO: 1238801 - RNA, 19 nt, Human
aaauaaccaauccuggaca

SEQ ID NO: 1238802 - RNA, 13 nt, Human
aaauaacuggaaa

SEQ ID NO: 1238803 - RNA, 16 nt, Human
aaauaacuggaaaaca

SEQ ID NO: 1238804 - RNA, 19 nt, Human
aaauaacuggaaaacagaa

SEQ ID NO: 1238805 - RNA, 20 nt, Human
aaauaacuggaaaacagaac

SEQ ID NO: 1238806 - RNA, 21 nt, Human
aaauaacuggaaaacagaaca

SEQ ID NO: 1238807 - RNA, 13 nt, Human
aaauaauaauuuu

SEQ ID NO: 1238808 - RNA, 13 nt, Human
aaauaauacauua

SEQ ID NO: 1238809 - RNA, 17 nt, Human
aaauaauacugcugaga

SEQ ID NO: 1238810 - RNA, 13 nt, Human
aaauaaguuuuug

SEQ ID NO: 1238811 - RNA, 16 nt, Human
aaauaaguuuuuguuu

SEQ ID NO: 1238812 - RNA, 14 nt, Human
aaauaaucaaaagc

SEQ ID NO: 1238813 - RNA, 14 nt, Human
aaauaaucauucuu

SEQ ID NO: 1238814 - RNA, 15 nt, Human
aaauaaucaaaagcu

SEQ ID NO: 1238815 - RNA, 24 nt, Human
aaauaagaaacaacucuuugagaa

SEQ ID NO: 1238816 - RNA, 12 nt, Human
aaauaagaaacu

SEQ ID NO: 1238817 - RNA, 14 nt, Human
aaauaagaaacuuu

SEQ ID NO: 1238818 - RNA, 21 nt, Human
aaauaagaaacuuuuuuauuu

SEQ ID NO: 1238819 - RNA, 15 nt, Human
aaauaagaaacuuuu

SEQ ID NO: 1238820 - RNA, 14 nt, Human
aaauaagaagaaug

SEQ ID NO: 1238821 - RNA, 15 nt, Human
aaauaagaagaaugc

SEQ ID NO: 1238822 - RNA, 20 nt, Human
aaauaagaagaaugcuuaau

SEQ ID NO: 1238823 - RNA, 14 nt, Human
aaauaagaauagaa

SEQ ID NO: 1238824 - RNA, 17 nt, Human
aaauaagaauagaaaua

SEQ ID NO: 1238825 - RNA, 23 nt, Human
aaauaagacggauuuauuuuucc

SEQ ID NO: 1238826 - RNA, 17 nt, Human
aaauaagagcucaggau

SEQ ID NO: 1238827 - RNA, 12 nt, Human
aaauaagauucu

SEQ ID NO: 1238828 - RNA, 13 nt, Human
aaauaagauucua

SEQ ID NO: 1238829 - RNA, 13 nt, Human
guaaaccuuuuau

SEQ ID NO: 1238830 - RNA, 20 nt, Human
guaaaccacugaaaaaauau

SEQ ID NO: 1238831 - RNA, 18 nt, Human
guaaaccacugaaaaaau

SEQ ID NO: 1238832 - RNA, 19 nt, Human
guaaaccacugaaaaaaua

SEQ ID NO: 1238833 - RNA, 22 nt, Human
guaaaccacugaaaaaauauau

SEQ ID NO: 1238834 - RNA, 23 nt, Human
guaaaccaauccuaugcaugguu

SEQ ID NO: 1238835 - RNA, 12 nt, Human
guaaaccacuga

SEQ ID NO: 1238836 - RNA, 13 nt, Human
guaaaccacugaa

SEQ ID NO: 1238837 - RNA, 14 nt, Human
guaaaccacugaaa

SEQ ID NO: 1238838 - RNA, 16 nt, Human
guaaaccacugaaaaa

SEQ ID NO: 1238839 - RNA, 19 nt, Human
aaauaauuuuaucucuuuc

SEQ ID NO: 1238840 - RNA, 12 nt, Human
aaauaauuuugu

SEQ ID NO: 1238841 - RNA, 15 nt, Human
aaauaauuuuuauau

SEQ ID NO: 1238842 - RNA, 20 nt, Human
guaaacagauggcacuuuga

SEQ ID NO: 1238843 - RNA, 13 nt, Human
aaauaauuuugua

SEQ ID NO: 1238844 - RNA, 14 nt, Human
aaauaauuuuguaa

SEQ ID NO: 1238845 - RNA, 13 nt, Human
aaauaauuguugu

SEQ ID NO: 1238846 - RNA, 15 nt, Human
aaauaauuguuguuc

SEQ ID NO: 1238847 - RNA, 12 nt, Human
aaauaauuuuaa

SEQ ID NO: 1238848 - RNA, 17 nt, Human
aaauaauuguuguucug

SEQ ID NO: 1238849 - RNA, 14 nt, Human
aaauaauuuuaaac

SEQ ID NO: 1238850 - RNA, 18 nt, Human
aaauaauuuuaaacaaag

SEQ ID NO: 1238851 - RNA, 20 nt, Human
aaauaauuuuaaacaaaggu

SEQ ID NO: 1238852 - RNA, 12 nt, Human
aaaguauguucu

SEQ ID NO: 1238853 - RNA, 15 nt, Human
aaaguauuaaaaugc

SEQ ID NO: 1238854 - RNA, 19 nt, Human
aaaguauguucuaaccuuu

SEQ ID NO: 1238855 - RNA, 12 nt, Human
aaaguauucuuc

SEQ ID NO: 1238856 - RNA, 22 nt, Human
aaaguauucuucucuuccuuuu

SEQ ID NO: 1238857 - RNA, 16 nt, Human
aaaguuaccagugccu

SEQ ID NO: 1238858 - RNA, 22 nt, Human
aaaguuaccagugccuuaaacu

SEQ ID NO: 1238859 - RNA, 23 nt, Human
aaaguugcagcuguuuuguugac

SEQ ID NO: 1238860 - RNA, 21 nt, Human
aaaguucuguacucaaaugua

SEQ ID NO: 1238861 - RNA, 23 nt, Human
aaaguucugcagauaaacaguag

SEQ ID NO: 1238862 - RNA, 18 nt, Human
aaaguucuaauaauuucu

SEQ ID NO: 1238863 - RNA, 19 nt, Human
aaaguucuaauaauuucua

SEQ ID NO: 1238864 - RNA, 20 nt, Human
aaaguucuaauaauuucuaa

SEQ ID NO: 1238865 - RNA, 21 nt, Human
aaaguucuaauaauuucuaau

SEQ ID NO: 1238866 - RNA, 14 nt, Human
aaaguucuguacuc

SEQ ID NO: 1238867 - RNA, 18 nt, Human
aaaguuaguaucuuuuga

SEQ ID NO: 1238868 - RNA, 21 nt, Human
aaaguuaguaucuuuugauau

SEQ ID NO: 1238869 - RNA, 20 nt, Human
aaaguuaguaucuuuugaua

SEQ ID NO: 1238870 - RNA, 15 nt, Human
aaaguucuaagauuc

SEQ ID NO: 1238871 - RNA, 16 nt, Human
aaaguucuaagauucu

SEQ ID NO: 1238872 - RNA, 17 nt, Human
aaaguucuaagauucug

SEQ ID NO: 1238873 - RNA, 18 nt, Human
aaaguauguuagugcaaa

SEQ ID NO: 1238874 - RNA, 16 nt, Human
aaaguaguccugugaa

SEQ ID NO: 1238875 - RNA, 21 nt, Human
aaagguccacaggucuagacu

SEQ ID NO: 1238876 - RNA, 20 nt, Human
aaagguauuuuaaucaccaa

SEQ ID NO: 1238877 - RNA, 19 nt, Human
aaagguccacaggucuaga

SEQ ID NO: 1238878 - RNA, 20 nt, Human
aaagguccacaggucuagac

SEQ ID NO: 1238879 - RNA, 19 nt, Human
ggugcugggccccugccuc

SEQ ID NO: 1238880 - RNA, 22 nt, Human
ggugcuucuaguucugccagga

SEQ ID NO: 1238881 - RNA, 14 nt, Human
ggugcuucuccucu

SEQ ID NO: 1238882 - RNA, 15 nt, Human
gguggaacaagcaca

SEQ ID NO: 1238883 - RNA, 21 nt, Human
gguggaaaggugugagacugg

SEQ ID NO: 1238884 - RNA, 19 nt, Human
gguggaagcuuggggaaga

SEQ ID NO: 1238885 - RNA, 13 nt, Human
gguggagggccac

SEQ ID NO: 1238886 - RNA, 23 nt, Human
gguggagggccacaugggaggcu

SEQ ID NO: 1238887 - RNA, 16 nt, Human
ggugcugggccccugc

SEQ ID NO: 1238888 - RNA, 15 nt, Human
ggugcugggccccug

SEQ ID NO: 1238889 - RNA, 13 nt, Human
ggugcugggcccc

SEQ ID NO: 1238890 - RNA, 11 nt, Human
ggugcugggcc

SEQ ID NO: 1238891 - RNA, 21 nt, Human
ggugcauauuuauaaaaauaa

SEQ ID NO: 1238892 - RNA, 16 nt, Human
ggugcagggauguggg

SEQ ID NO: 1238893 - RNA, 20 nt, Human
ggucgcccuggacugugugc

SEQ ID NO: 1238894 - RNA, 22 nt, Human
ggucgaggaguaacaauacaaa

SEQ ID NO: 1238895 - RNA, 19 nt, Human
ggugaaacauuuucucccu

SEQ ID NO: 1238896 - RNA, 20 nt, Human
ggugaaacauuuucucccug

SEQ ID NO: 1238897 - RNA, 13 nt, Human
ggugaaaggaaau

SEQ ID NO: 1238898 - RNA, 14 nt, Human
ggucgcccuggacu

SEQ ID NO: 1238899 - RNA, 16 nt, Human
ggucgaggaguaacaa

SEQ ID NO: 1238900 - RNA, 15 nt, Human
gguccuuugggguga

SEQ ID NO: 1238901 - RNA, 16 nt, Human
gguccuuuugacacug

SEQ ID NO: 1238902 - RNA, 18 nt, Human
gguccuuuugacacugcu

SEQ ID NO: 1238903 - RNA, 18 nt, Human
ggugaacaaagcagccac

SEQ ID NO: 1238904 - RNA, 19 nt, Human
ggugaacaaagcagccacg

SEQ ID NO: 1238905 - RNA, 14 nt, Human
aaagguaaaucaga

SEQ ID NO: 1238906 - RNA, 14 nt, Human
aaagguacuucaaa

SEQ ID NO: 1238907 - RNA, 17 nt, Human
aaagggagucugccagg

SEQ ID NO: 1238908 - RNA, 12 nt, Human
aaaggagccugu

SEQ ID NO: 1238909 - RNA, 21 nt, Human
aaagggagaagugacauugca

SEQ ID NO: 1238910 - RNA, 11 nt, Human
aaaggagccug

SEQ ID NO: 1238911 - RNA, 17 nt, Human
aaagggagggcucugag

SEQ ID NO: 1238912 - RNA, 18 nt, Human
aaagggagggcucugagg

SEQ ID NO: 1238913 - RNA, 19 nt, Human
aaagggagggcucugaggc

SEQ ID NO: 1238914 - RNA, 22 nt, Human
aaagggagggcucugaggcgcc

SEQ ID NO: 1238915 - RNA, 22 nt, Human
aaaggaagcauuguaaaauaau

SEQ ID NO: 1238916 - RNA, 15 nt, Human
aaaggaaaucaaaug

SEQ ID NO: 1238917 - RNA, 17 nt, Human
aaaggaaaucaaaugaa

SEQ ID NO: 1238918 - RNA, 17 nt, Human
aaaggaagcauuguaaa

SEQ ID NO: 1238919 - RNA, 20 nt, Human
aaaggaagcauuguaaaaua

SEQ ID NO: 1238920 - RNA, 12 nt, Human
aaaggaagccaa

SEQ ID NO: 1238921 - RNA, 14 nt, Human
aaaggaagccaaag

SEQ ID NO: 1238922 - RNA, 15 nt, Human
aaaggaagccaaaga

SEQ ID NO: 1238923 - RNA, 23 nt, Human
aaagcugcugagaaucuagccuc

SEQ ID NO: 1238924 - RNA, 12 nt, Human
aaagcugaaaac

SEQ ID NO: 1238925 - RNA, 10 nt, Human
aaagcugccu

SEQ ID NO: 1238926 - RNA, 16 nt, Human
aaagcugguuuaaugu

SEQ ID NO: 1238927 - RNA, 15 nt, Human
aaagcugguuuaaug

SEQ ID NO: 1238928 - RNA, 13 nt, Human
aaagcuuucagaa

SEQ ID NO: 1238929 - RNA, 12 nt, Human
aaagcuuuccug

SEQ ID NO: 1238930 - RNA, 13 nt, Human
aaagcuuuccugc

SEQ ID NO: 1238931 - RNA, 14 nt, Human
aaagcuuuccugcc

SEQ ID NO: 1238932 - RNA, 22 nt, Human
aaagcuuuccugccccaggccu

SEQ ID NO: 1238933 - RNA, 23 nt, Human
aaagcuuuccugccccaggccug

SEQ ID NO: 1238934 - RNA, 17 nt, Human
aaagcucaaagguuugg

SEQ ID NO: 1238935 - RNA, 23 nt, Human
aaagcucaaagguuuggaaggag

SEQ ID NO: 1238936 - RNA, 15 nt, Human
aaagcugaaaacugc

SEQ ID NO: 1238937 - RNA, 14 nt, Human
aaagcucuagaauc

SEQ ID NO: 1238938 - RNA, 20 nt, Human
gguggaugauccccacgcca

SEQ ID NO: 1238939 - RNA, 19 nt, Human
aaagcacgaaauguuauuu

SEQ ID NO: 1238940 - RNA, 17 nt, Human
aaagcacgacaguggau

SEQ ID NO: 1238941 - RNA, 13 nt, Human
aaagacagugaaa

SEQ ID NO: 1238942 - RNA, 16 nt, Human
aaagacaugaagccac

SEQ ID NO: 1238943 - RNA, 19 nt, Human
aaagacauucaggacugcu

SEQ ID NO: 1238944 - RNA, 14 nt, Human
aaagaccaggccaa

SEQ ID NO: 1238945 - RNA, 15 nt, Human
aaagaccauuuuucc

SEQ ID NO: 1238946 - RNA, 14 nt, Human
aaagacccuggcuu

SEQ ID NO: 1238947 - RNA, 18 nt, Human
aaagacccuggcuuucau

SEQ ID NO: 1238948 - RNA, 18 nt, Human
aaagacguuuuauaagca

SEQ ID NO: 1238949 - RNA, 20 nt, Human
aaacuuguaauuuuuuuaau

SEQ ID NO: 1238950 - RNA, 18 nt, Human
aaacuuuccucgccugac

SEQ ID NO: 1238951 - RNA, 20 nt, Human
aaacuuucauuccuucagau

SEQ ID NO: 1238952 - RNA, 16 nt, Human
aaacuuugaaguuagc

SEQ ID NO: 1238953 - RNA, 19 nt, Human
aaacuuuggaaccagacuc

SEQ ID NO: 1238954 - RNA, 12 nt, Human
aaacuuuguagu

SEQ ID NO: 1238955 - RNA, 16 nt, Human
aaacuuuuaauucauu

SEQ ID NO: 1238956 - RNA, 16 nt, Human
aaacuuguauuaugug

SEQ ID NO: 1238957 - RNA, 16 nt, Human
aaacuuguaauuuuuu

SEQ ID NO: 1238958 - RNA, 19 nt, Human
aaacuugcaucacuuaacg

SEQ ID NO: 1238959 - RNA, 13 nt, Human
aaacuuggauacu

SEQ ID NO: 1238960 - RNA, 17 nt, Human
aaacuuggauacuugga

SEQ ID NO: 1238961 - RNA, 18 nt, Human
aaacuuggauacuuggau

SEQ ID NO: 1238962 - RNA, 20 nt, Human
aaacuuggauacuuggauuu

SEQ ID NO: 1238963 - RNA, 24 nt, Human
aaacuuggcucgaaucucugugcc

SEQ ID NO: 1238964 - RNA, 19 nt, Human
aaacuuggauacuuggauu

SEQ ID NO: 1238965 - RNA, 23 nt, Human
aaacuucagcgguuuauauaagc

SEQ ID NO: 1238966 - RNA, 22 nt, Human
aaacuucaguuucacagaaaau

SEQ ID NO: 1238967 - RNA, 20 nt, Human
aaacuucaguuucacagaaa

SEQ ID NO: 1238968 - RNA, 15 nt, Human
ggguggggggggugc

SEQ ID NO: 1238969 - RNA, 14 nt, Human
ggguggggagagac

SEQ ID NO: 1238970 - RNA, 18 nt, Human
ggguggggagagacgggc

SEQ ID NO: 1238971 - RNA, 14 nt, Human
gggugggggcagca

SEQ ID NO: 1238972 - RNA, 21 nt, Human
gguccugagcacugccaggag

SEQ ID NO: 1238973 - RNA, 22 nt, Human
gguccugagcacugccaggagg

SEQ ID NO: 1238974 - RNA, 23 nt, Human
gguccugagcacugccaggaggg

SEQ ID NO: 1238975 - RNA, 21 nt, Human
gguccugguggggcagcuccu

SEQ ID NO: 1238976 - RNA, 10 nt, Human
gguccuucaa

SEQ ID NO: 1238977 - RNA, 21 nt, Human
aaagauggcugugccucugcc

SEQ ID NO: 1238978 - RNA, 22 nt, Human
aaagauggcugugccucugccu

SEQ ID NO: 1238979 - RNA, 19 nt, Human
aaagaugcuuuuaacagag

SEQ ID NO: 1238980 - RNA, 15 nt, Human
aaagauggaguuucu

SEQ ID NO: 1238981 - RNA, 16 nt, Human
aaagauggaguuucua

SEQ ID NO: 1238982 - RNA, 17 nt, Human
aaagauggaguuucuaa

SEQ ID NO: 1238983 - RNA, 18 nt, Human
aaagauggaguuucuaag

SEQ ID NO: 1238984 - RNA, 19 nt, Human
aaagauggaguuucuaagg

SEQ ID NO: 1238985 - RNA, 21 nt, Human
aaagauggaguuucuaagguc

SEQ ID NO: 1238986 - RNA, 23 nt, Human
aaagauggcugugccucugccug

SEQ ID NO: 1238987 - RNA, 19 nt, Human
aaagcaagcugauuaaaug

SEQ ID NO: 1238988 - RNA, 20 nt, Human
aaagcaagcugauuaaauga

SEQ ID NO: 1238989 - RNA, 14 nt, Human
aaagcaaggaaacu

SEQ ID NO: 1238990 - RNA, 20 nt, Human
aaagcaaggaaacuauguaa

SEQ ID NO: 1238991 - RNA, 14 nt, Human
aaagcaauaugcau

SEQ ID NO: 1238992 - RNA, 19 nt, Human
aaagaggcaccaggaagcc

SEQ ID NO: 1238993 - RNA, 12 nt, Human
aaagaugcuuuu

SEQ ID NO: 1238994 - RNA, 13 nt, Human
aaagaugcuuuua

SEQ ID NO: 1238995 - RNA, 15 nt, Human
aaagaggaaugaagu

SEQ ID NO: 1238996 - RNA, 23 nt, Human
aaagacgcacuuuggcuuauaau

SEQ ID NO: 1238997 - RNA, 15 nt, Human
aaagacguuuuauaa

SEQ ID NO: 1238998 - RNA, 12 nt, Human
aaagacuggcuu

SEQ ID NO: 1238999 - RNA, 13 nt, Human
aaagacuggcuuu

SEQ ID NO: 1239000 - RNA, 21 nt, Human
aaagacuggcuuuuauuaaug

SEQ ID NO: 1239001 - RNA, 23 nt, Human
aaagacuggcuuuuauuaaugca

SEQ ID NO: 1239002 - RNA, 14 nt, Human
aaagagauacagag

SEQ ID NO: 1239003 - RNA, 15 nt, Human
gggucgcccuggacu

SEQ ID NO: 1239004 - RNA, 13 nt, Human
gggucgcccugga

SEQ ID NO: 1239005 - RNA, 14 nt, Human
gggucggcugacca

SEQ ID NO: 1239006 - RNA, 15 nt, Human
gggucggcugaccau

SEQ ID NO: 1239007 - RNA, 20 nt, Human
gggucggcugaccaugcuca

SEQ ID NO: 1239008 - RNA, 12 nt, Human
ggguccaugggc

SEQ ID NO: 1239009 - RNA, 13 nt, Human
gggucccagcagc

SEQ ID NO: 1239010 - RNA, 19 nt, Human
ggguccuuuugacacugcu

SEQ ID NO: 1239011 - RNA, 22 nt, Human
ggguccuuuugacacugcucua

SEQ ID NO: 1239012 - RNA, 14 nt, Human
gggucgaaagcucu

SEQ ID NO: 1239013 - RNA, 16 nt, Human
gggucgaaagcucuag

SEQ ID NO: 1239014 - RNA, 19 nt, Human
gggggugcugggccccugc

SEQ ID NO: 1239015 - RNA, 20 nt, Human
ggggguccuccuccagggac

SEQ ID NO: 1239016 - RNA, 12 nt, Human
gggggucuggcu

SEQ ID NO: 1239017 - RNA, 16 nt, Human
gggggucuggcuggug

SEQ ID NO: 1239018 - RNA, 17 nt, Human
gggggucuggcuggugu

SEQ ID NO: 1239019 - RNA, 22 nt, Human
gggggucuggcugguguuaaca

SEQ ID NO: 1239020 - RNA, 18 nt, Human
gggggugaugagggcagc

SEQ ID NO: 1239021 - RNA, 20 nt, Human
gggggugaugagggcagcag

SEQ ID NO: 1239022 - RNA, 22 nt, Human
gggggugaugagggcagcagcc

SEQ ID NO: 1239023 - RNA, 13 nt, Human
ggggguggccagg

SEQ ID NO: 1239024 - RNA, 20 nt, Human
ggggguggccaggccgggaa

SEQ ID NO: 1239025 - RNA, 13 nt, Human
ggggguggccgcu

SEQ ID NO: 1239026 - RNA, 11 nt, Human
ggguccaggag

SEQ ID NO: 1239027 - RNA, 12 nt, Human
ggguccaggagg

SEQ ID NO: 1239028 - RNA, 18 nt, Human
gggggcgcggcugggagg

SEQ ID NO: 1239029 - RNA, 20 nt, Human
gggggccuggcuggcugagg

SEQ ID NO: 1239030 - RNA, 15 nt, Human
gggggcgccuguggu

SEQ ID NO: 1239031 - RNA, 11 nt, Human
gggggccuggc

SEQ ID NO: 1239032 - RNA, 12 nt, Human
gggggccuggcu

SEQ ID NO: 1239033 - RNA, 13 nt, Human
gggggccuggcug

SEQ ID NO: 1239034 - RNA, 14 nt, Human
gggggccuggcugg

SEQ ID NO: 1239035 - RNA, 15 nt, Human
gggggccuggcuggc

SEQ ID NO: 1239036 - RNA, 17 nt, Human
gggggccuggcuggcug

SEQ ID NO: 1239037 - RNA, 15 nt, Human
gggggcggccuauga

SEQ ID NO: 1239038 - RNA, 16 nt, Human
ggggguccuccuccag

SEQ ID NO: 1239039 - RNA, 18 nt, Human
ggggguccuccuccaggg

SEQ ID NO: 1239040 - RNA, 19 nt, Human
ggggguccuccuccaggga

SEQ ID NO: 1239041 - RNA, 18 nt, Human
aaaccuuuuauauuuagu

SEQ ID NO: 1239042 - RNA, 18 nt, Human
aaaccuuuguuugcaucu

SEQ ID NO: 1239043 - RNA, 17 nt, Human
aaaccuuucuucaccaa

SEQ ID NO: 1239044 - RNA, 13 nt, Human
aaaccuuuugaaa

SEQ ID NO: 1239045 - RNA, 18 nt, Human
aaaccugaccccugcuca

SEQ ID NO: 1239046 - RNA, 16 nt, Human
aaaccugagauuuauu

SEQ ID NO: 1239047 - RNA, 21 nt, Human
aaaccugagauuuauuaaaga

SEQ ID NO: 1239048 - RNA, 22 nt, Human
aaaccugagauuuauuaaagaa

SEQ ID NO: 1239049 - RNA, 23 nt, Human
aaaccugagauuuauuaaagaaa

SEQ ID NO: 1239050 - RNA, 16 nt, Human
aaaccaauugcugcua

SEQ ID NO: 1239051 - RNA, 17 nt, Human
aaaccaauccuaugcau

SEQ ID NO: 1239052 - RNA, 14 nt, Human
aaaccucaccaacu

SEQ ID NO: 1239053 - RNA, 15 nt, Human
aaacauuaugaugug

SEQ ID NO: 1239054 - RNA, 18 nt, Human
aaacauuauuaaguaacu

SEQ ID NO: 1239055 - RNA, 12 nt, Human
aaacauucuauc

SEQ ID NO: 1239056 - RNA, 20 nt, Human
aaacauuaauagcagccuuu

SEQ ID NO: 1239057 - RNA, 22 nt, Human
aaacauuaauagcagccuuucu

SEQ ID NO: 1239058 - RNA, 21 nt, Human
aaacauuaauagcagccuuuc

SEQ ID NO: 1239059 - RNA, 15 nt, Human
aaacucguuaauuug

SEQ ID NO: 1239060 - RNA, 16 nt, Human
aaacucagggcuucua

SEQ ID NO: 1239061 - RNA, 21 nt, Human
aaacucauucauuagucaugu

SEQ ID NO: 1239062 - RNA, 13 nt, Human
aaacucaaaauau

SEQ ID NO: 1239063 - RNA, 21 nt, Human
aaacucaaaauauuuguacau

SEQ ID NO: 1239064 - RNA, 22 nt, Human
aaacuaggugcauauuuauaaa

SEQ ID NO: 1239065 - RNA, 18 nt, Human
aaacuagggccaagccca

SEQ ID NO: 1239066 - RNA, 22 nt, Human
aaacuauaagcaagaaggcaaa

SEQ ID NO: 1239067 - RNA, 16 nt, Human
aaacuaucuuggugaa

SEQ ID NO: 1239068 - RNA, 13 nt, Human
aaacgucuuaaau

SEQ ID NO: 1239069 - RNA, 18 nt, Human
aaacuaggugcauauuua

SEQ ID NO: 1239070 - RNA, 14 nt, Human
aaacgucuuaaaua

SEQ ID NO: 1239071 - RNA, 15 nt, Human
aaacgucuuaaauau

SEQ ID NO: 1239072 - RNA, 13 nt, Human
ggguggcagcaac

SEQ ID NO: 1239073 - RNA, 12 nt, Human
ggguggccaggc

SEQ ID NO: 1239074 - RNA, 13 nt, Human
ggguggccaggcc

SEQ ID NO: 1239075 - RNA, 14 nt, Human
ggguggccaggccg

SEQ ID NO: 1239076 - RNA, 18 nt, Human
ggguggccaggccgggaa

SEQ ID NO: 1239077 - RNA, 20 nt, Human
ggguggccaggccgggaaaa

SEQ ID NO: 1239078 - RNA, 17 nt, Human
ggguggccgcugagugg

SEQ ID NO: 1239079 - RNA, 21 nt, Human
ggguggccgcugaguggcagg

SEQ ID NO: 1239080 - RNA, 19 nt, Human
aaacuguguauuccaagac

SEQ ID NO: 1239081 - RNA, 22 nt, Human
aaacugcccccucugcccugcg

SEQ ID NO: 1239082 - RNA, 16 nt, Human
aaacucguuuuuuaca

SEQ ID NO: 1239083 - RNA, 12 nt, Human
aaacugugcacc

SEQ ID NO: 1239084 - RNA, 10 nt, Human
aaacugugua

SEQ ID NO: 1239085 - RNA, 14 nt, Human
aaacuguguaacug

SEQ ID NO: 1239086 - RNA, 17 nt, Human
aaacuguguaacugccc

SEQ ID NO: 1239087 - RNA, 20 nt, Human
aaacuguguaacugcccaaa

SEQ ID NO: 1239088 - RNA, 20 nt, Human
aaacuguguacauaacugaa

SEQ ID NO: 1239089 - RNA, 21 nt, Human
aaacuguguacauaacugaaa

SEQ ID NO: 1239090 - RNA, 16 nt, Human
aaacuguguauuccaa

SEQ ID NO: 1239091 - RNA, 18 nt, Human
aaacuguguauuccaaga

SEQ ID NO: 1239092 - RNA, 19 nt, Human
ggggaauugaggacacuga

SEQ ID NO: 1239093 - RNA, 19 nt, Human
ggggacacauguauuuggu

SEQ ID NO: 1239094 - RNA, 14 nt, Human
ggggaccagcagcc

SEQ ID NO: 1239095 - RNA, 13 nt, Human
ggggaaggcaggg

SEQ ID NO: 1239096 - RNA, 19 nt, Human
ggggaagagagccugcagg

SEQ ID NO: 1239097 - RNA, 21 nt, Human
ggggaagacccauuccuuccc

SEQ ID NO: 1239098 - RNA, 22 nt, Human
ggggaagacccauuccuuccca

SEQ ID NO: 1239099 - RNA, 20 nt, Human
ggggaagagagccugcagga

SEQ ID NO: 1239100 - RNA, 14 nt, Human
aaacaguagugaua

SEQ ID NO: 1239101 - RNA, 23 nt, Human
aaacagguauauacuuugaaagg

SEQ ID NO: 1239102 - RNA, 22 nt, Human
aaacaggucaaugaaugaaacu

SEQ ID NO: 1239103 - RNA, 21 nt, Human
ggggaccaggagugggugggg

SEQ ID NO: 1239104 - RNA, 17 nt, Human
ggggacacauguauuug

SEQ ID NO: 1239105 - RNA, 12 nt, Human
ggggaccaggag

SEQ ID NO: 1239106 - RNA, 13 nt, Human
ggggaccaggagu

SEQ ID NO: 1239107 - RNA, 21 nt, Human
ggggacuguaaguugggcuug

SEQ ID NO: 1239108 - RNA, 19 nt, Human
ggggacuuacaugauucau

SEQ ID NO: 1239109 - RNA, 15 nt, Human
ggggacuuggccucu

SEQ ID NO: 1239110 - RNA, 18 nt, Human
ggggacuuggccucucuc

SEQ ID NO: 1239111 - RNA, 19 nt, Human
ggggccgaugcccagagac

SEQ ID NO: 1239112 - RNA, 21 nt, Human
ggggccgaugcccagagacac

SEQ ID NO: 1239113 - RNA, 17 nt, Human
ggggccgggggcagucu

SEQ ID NO: 1239114 - RNA, 15 nt, Human
aaaauuuuuaaucuu

SEQ ID NO: 1239115 - RNA, 20 nt, Human
aaacaaaggccuaauucuau

SEQ ID NO: 1239116 - RNA, 17 nt, Human
aaacaaagguugagaug

SEQ ID NO: 1239117 - RNA, 12 nt, Human
aaaauuuauaac

SEQ ID NO: 1239118 - RNA, 20 nt, Human
aaaauuuauauuguaaauau

SEQ ID NO: 1239119 - RNA, 15 nt, Human
aaaauguuauuuccc

SEQ ID NO: 1239120 - RNA, 22 nt, Human
aaaauguuaucuucucaaguuc

SEQ ID NO: 1239121 - RNA, 16 nt, Human
aaaauguucagaaggu

SEQ ID NO: 1239122 - RNA, 16 nt, Human
aaaauguuauuucccu

SEQ ID NO: 1239123 - RNA, 15 nt, Human
aaaauguucuguuug

SEQ ID NO: 1239124 - RNA, 15 nt, Human
aaaauguucuuugga

SEQ ID NO: 1239125 - RNA, 12 nt, Human
aaaauguucuuu

SEQ ID NO: 1239126 - RNA, 13 nt, Human
aaaauguugaaau

SEQ ID NO: 1239127 - RNA, 14 nt, Human
aaaauguugagaau

SEQ ID NO: 1239128 - RNA, 17 nt, Human
aaaauguugcugaaaaa

SEQ ID NO: 1239129 - RNA, 17 nt, Human
aaaauguugaaauauga

SEQ ID NO: 1239130 - RNA, 21 nt, Human
aaaauguuggucauuuuaugu

SEQ ID NO: 1239131 - RNA, 22 nt, Human
aaaauguuuuuggucuuuuaua

SEQ ID NO: 1239132 - RNA, 17 nt, Human
aaacacauuaggaaaag

SEQ ID NO: 1239133 - RNA, 20 nt, Human
aaacaggguaacuaacuaaa

SEQ ID NO: 1239134 - RNA, 18 nt, Human
aaacagguauauacuuug

SEQ ID NO: 1239135 - RNA, 21 nt, Human
aaacagguauauacuuugaaa

SEQ ID NO: 1239136 - RNA, 15 nt, Human
aaacagggcugccuu

SEQ ID NO: 1239137 - RNA, 22 nt, Human
aaacagggcugccuucuggccu

SEQ ID NO: 1239138 - RNA, 16 nt, Human
aaaauuuuguuuauaa

SEQ ID NO: 1239139 - RNA, 14 nt, Human
aaacaauguuuaaa

SEQ ID NO: 1239140 - RNA, 12 nt, Human
aaacaauaccug

SEQ ID NO: 1239141 - RNA, 14 nt, Human
aaacaauauagucu

SEQ ID NO: 1239142 - RNA, 16 nt, Human
aaacaacaauuucuac

SEQ ID NO: 1239143 - RNA, 22 nt, Human
aaacaacaauuucuacuuugaa

SEQ ID NO: 1239144 - RNA, 16 nt, Human
gcuuugagagagaaag

SEQ ID NO: 1239145 - RNA, 15 nt, Human
gcuuugacucaggag

SEQ ID NO: 1239146 - RNA, 16 nt, Human
gcuuugacucaggagc

SEQ ID NO: 1239147 - RNA, 24 nt, Human
gcuuugacucaggagccugugaca

SEQ ID NO: 1239148 - RNA, 20 nt, Human
gcuuugacucaggagccugu

SEQ ID NO: 1239149 - RNA, 17 nt, Human
gcuuguaacuaaaauaa

SEQ ID NO: 1239150 - RNA, 22 nt, Human
gcuuguaacuaaaauaauuuug

SEQ ID NO: 1239151 - RNA, 23 nt, Human
gcuuguaacuaaaauaauuuugu

SEQ ID NO: 1239152 - RNA, 12 nt, Human
gcuucuugccuc

SEQ ID NO: 1239153 - RNA, 13 nt, Human
gcuucuugccucu

SEQ ID NO: 1239154 - RNA, 14 nt, Human
gcuucuugccucug

SEQ ID NO: 1239155 - RNA, 15 nt, Human
gcuucuugccucugu

SEQ ID NO: 1239156 - RNA, 16 nt, Human
gcuucuugccucugug

SEQ ID NO: 1239157 - RNA, 17 nt, Human
gcuucuugccucugugc

SEQ ID NO: 1239158 - RNA, 18 nt, Human
gcuucuugccucugugcu

SEQ ID NO: 1239159 - RNA, 19 nt, Human
gcuucuugccucugugcug

SEQ ID NO: 1239160 - RNA, 20 nt, Human
gcuugagaaauauggacacu

SEQ ID NO: 1239161 - RNA, 15 nt, Human
gcuugagccaggagg

SEQ ID NO: 1239162 - RNA, 21 nt, Human
gcuugagagcccugaggccua

SEQ ID NO: 1239163 - RNA, 15 nt, Human
gcuuguagccagccg

SEQ ID NO: 1239164 - RNA, 16 nt, Human
gcuuguagccagccgg

SEQ ID NO: 1239165 - RNA, 22 nt, Human
gcuuguagccagccggggcgag

SEQ ID NO: 1239166 - RNA, 22 nt, Human
gcuuguaggggaggggcuccuu

SEQ ID NO: 1239167 - RNA, 17 nt, Human
gcuuguagccagccggg

SEQ ID NO: 1239168 - RNA, 15 nt, Human
gcuuugaaacagaaa

SEQ ID NO: 1239169 - RNA, 19 nt, Human
gcuuugaaauugaaccuuu

SEQ ID NO: 1239170 - RNA, 17 nt, Human
gcuuugaaauugaaccu

SEQ ID NO: 1239171 - RNA, 16 nt, Human
gcuucuaguucugcca

SEQ ID NO: 1239172 - RNA, 17 nt, Human
gcuucuaguucugccag

SEQ ID NO: 1239173 - RNA, 21 nt, Human
gcuuccuccuccccaacugug

SEQ ID NO: 1239174 - RNA, 12 nt, Human
gcuuccuccugg

SEQ ID NO: 1239175 - RNA, 13 nt, Human
gcuuccuccugga

SEQ ID NO: 1239176 - RNA, 16 nt, Human
gcuuccuccuggaaau

SEQ ID NO: 1239177 - RNA, 14 nt, Human
gcuucguuuauuuu

SEQ ID NO: 1239178 - RNA, 16 nt, Human
gcuucguuuauuuuca

SEQ ID NO: 1239179 - RNA, 17 nt, Human
gcuucguuuauuuucaa

SEQ ID NO: 1239180 - RNA, 16 nt, Human
gcuucuaaguaaauac

SEQ ID NO: 1239181 - RNA, 18 nt, Human
gcuucuaaguaaauacaa

SEQ ID NO: 1239182 - RNA, 19 nt, Human
gcuucuaaguaaauacaau

SEQ ID NO: 1239183 - RNA, 20 nt, Human
gcuucuaaguaaauacaauu

SEQ ID NO: 1239184 - RNA, 21 nt, Human
gcuucuaaguaaauacaauuu

SEQ ID NO: 1239185 - RNA, 22 nt, Human
gcuucuaaguaaauacaauuuu

SEQ ID NO: 1239186 - RNA, 12 nt, Human
gcuuauguuaac

SEQ ID NO: 1239187 - RNA, 20 nt, Human
gcuuaugguaccagaugcag

SEQ ID NO: 1239188 - RNA, 15 nt, Human
gcuuauuuauuguau

SEQ ID NO: 1239189 - RNA, 15 nt, Human
gcuuauuccaugacu

SEQ ID NO: 1239190 - RNA, 17 nt, Human
gcuuauuccaugacugc

SEQ ID NO: 1239191 - RNA, 18 nt, Human
gcuuauuccaugacugcu

SEQ ID NO: 1239192 - RNA, 19 nt, Human
gcuuauuccaugacugcuu

SEQ ID NO: 1239193 - RNA, 20 nt, Human
gcuuauuuauuguauucugg

SEQ ID NO: 1239194 - RNA, 17 nt, Human
gcuuauuuauuguauuc

SEQ ID NO: 1239195 - RNA, 15 nt, Human
gcuucagcugccagu

SEQ ID NO: 1239196 - RNA, 20 nt, Human
gcuggaggcaggggcuuccu

SEQ ID NO: 1239197 - RNA, 21 nt, Human
gcuggaggcaggggcuuccug

SEQ ID NO: 1239198 - RNA, 22 nt, Human
gcuggaggcaggggcuuccugg

SEQ ID NO: 1239199 - RNA, 23 nt, Human
gcuggaggcaggggcuuccuggu

SEQ ID NO: 1239200 - RNA, 12 nt, Human
gcuggaggccca

SEQ ID NO: 1239201 - RNA, 13 nt, Human
gcuggaggcccag

SEQ ID NO: 1239202 - RNA, 14 nt, Human
gcuggaggcccagg

SEQ ID NO: 1239203 - RNA, 15 nt, Human
gcuggaggcccaggc

SEQ ID NO: 1239204 - RNA, 20 nt, Human
gcuggaggcccaggcuggga

SEQ ID NO: 1239205 - RNA, 16 nt, Human
gcuggaggcccaggcu

SEQ ID NO: 1239206 - RNA, 15 nt, Human
gcuggagugcagugg

SEQ ID NO: 1239207 - RNA, 14 nt, Human
gcucugggccauuc

SEQ ID NO: 1239208 - RNA, 20 nt, Human
gcucugggccauucuccaca

SEQ ID NO: 1239209 - RNA, 23 nt, Human
gcucugggccauucuccacagca

SEQ ID NO: 1239210 - RNA, 19 nt, Human
gcucuggggugggcaguuu

SEQ ID NO: 1239211 - RNA, 21 nt, Human
gcucuggggugggcaguuuuu

SEQ ID NO: 1239212 - RNA, 13 nt, Human
gcugcugcugggc

SEQ ID NO: 1239213 - RNA, 15 nt, Human
gcugcugcugggcuc

SEQ ID NO: 1239214 - RNA, 16 nt, Human
gcugcugcugggcuca

SEQ ID NO: 1239215 - RNA, 17 nt, Human
gcugcugcugggcucag

SEQ ID NO: 1239216 - RNA, 23 nt, Human
gcugggccccugccucucugcag

SEQ ID NO: 1239217 - RNA, 12 nt, Human
gcugggccuggu

SEQ ID NO: 1239218 - RNA, 13 nt, Human
gcugggccugguc

SEQ ID NO: 1239219 - RNA, 22 nt, Human
gcugggccuggucucacccugg

SEQ ID NO: 1239220 - RNA, 14 nt, Human
gcugggcucaguga

SEQ ID NO: 1239221 - RNA, 22 nt, Human
gcugggccccugccucucugca

SEQ ID NO: 1239222 - RNA, 21 nt, Human
gcugggccccugccucucugc

SEQ ID NO: 1239223 - RNA, 12 nt, Human
gcugggucgccc

SEQ ID NO: 1239224 - RNA, 16 nt, Human
gcugggucaggcaggg

SEQ ID NO: 1239225 - RNA, 19 nt, Human
gcuggguccaauuguggca

SEQ ID NO: 1239226 - RNA, 23 nt, Human
gcuggguccauaucacacacauu

SEQ ID NO: 1239227 - RNA, 13 nt, Human
gcugggucaggca

SEQ ID NO: 1239228 - RNA, 14 nt, Human
gcugggucaggcag

SEQ ID NO: 1239229 - RNA, 15 nt, Human
gcugggucaggcagg

SEQ ID NO: 1239230 - RNA, 14 nt, Human
gcuggcuggccuca

SEQ ID NO: 1239231 - RNA, 14 nt, Human
gcuggcuccagaug

SEQ ID NO: 1239232 - RNA, 17 nt, Human
gcuggcuccagaugcag

SEQ ID NO: 1239233 - RNA, 21 nt, Human
gcuggcuccagaugcagggca

SEQ ID NO: 1239234 - RNA, 22 nt, Human
gcuggcuccagaugcagggcag

SEQ ID NO: 1239235 - RNA, 23 nt, Human
gcuggcuccagaugcagggcagu

SEQ ID NO: 1239236 - RNA, 12 nt, Human
gcuggcucugag

SEQ ID NO: 1239237 - RNA, 15 nt, Human
ggacaggauccaggc

SEQ ID NO: 1239238 - RNA, 12 nt, Human
ggacagcuugug

SEQ ID NO: 1239239 - RNA, 17 nt, Human
ggacaggauguguuugc

SEQ ID NO: 1239240 - RNA, 18 nt, Human
ggacaggauguguuugcu

SEQ ID NO: 1239241 - RNA, 19 nt, Human
ggacaggacuaacacucag

SEQ ID NO: 1239242 - RNA, 20 nt, Human
ggacaggauguguuugcuuu

SEQ ID NO: 1239243 - RNA, 18 nt, Human
ggagaaaugaaaaaauau

SEQ ID NO: 1239244 - RNA, 22 nt, Human
ggagaaaucuggcuucuggcca

SEQ ID NO: 1239245 - RNA, 14 nt, Human
ggagaaagcugacu

SEQ ID NO: 1239246 - RNA, 15 nt, Human
ggagaaagcugacuu

SEQ ID NO: 1239247 - RNA, 22 nt, Human
ggagaaagcugacuuggcuggu

SEQ ID NO: 1239248 - RNA, 23 nt, Human
ggagaaagcugacuuggcuggug

SEQ ID NO: 1239249 - RNA, 16 nt, Human
ggagaaagggcccugg

SEQ ID NO: 1239250 - RNA, 22 nt, Human
ggacuuugcagccggcacaggg

SEQ ID NO: 1239251 - RNA, 16 nt, Human
ggacuuugcagccggc

SEQ ID NO: 1239252 - RNA, 17 nt, Human
ggacuuugcagccggca

SEQ ID NO: 1239253 - RNA, 13 nt, Human
ggagaaacuggaa

SEQ ID NO: 1239254 - RNA, 12 nt, Human
ggacuccucugu

SEQ ID NO: 1239255 - RNA, 23 nt, Human
ggacuccaggcccaaggcucccg

SEQ ID NO: 1239256 - RNA, 22 nt, Human
ggacuccaggcccaaggcuccc

SEQ ID NO: 1239257 - RNA, 19 nt, Human
ggacuugcaaaaaggguca

SEQ ID NO: 1239258 - RNA, 20 nt, Human
ggacuuuauagaucagccag

SEQ ID NO: 1239259 - RNA, 15 nt, Human
ggacuugaacccagg

SEQ ID NO: 1239260 - RNA, 18 nt, Human
ggacuaacacucagaagc

SEQ ID NO: 1239261 - RNA, 19 nt, Human
ggacuaacacucagaagcc

SEQ ID NO: 1239262 - RNA, 20 nt, Human
ggacuaacacucagaagccu

SEQ ID NO: 1239263 - RNA, 21 nt, Human
ggacuaacacucagaagccug

SEQ ID NO: 1239264 - RNA, 22 nt, Human
ggacuaacacucagaagccugg

SEQ ID NO: 1239265 - RNA, 23 nt, Human
ggacuaacacucagaagccuggg

SEQ ID NO: 1239266 - RNA, 19 nt, Human
ggacguggcucagccagca

SEQ ID NO: 1239267 - RNA, 14 nt, Human
ggacguuguuuugg

SEQ ID NO: 1239268 - RNA, 23 nt, Human
ggacuauauuugggccugcucca

SEQ ID NO: 1239269 - RNA, 19 nt, Human
ggacuaugaaaagcuagaa

SEQ ID NO: 1239270 - RNA, 18 nt, Human
ggacucaagccccggacu

SEQ ID NO: 1239271 - RNA, 17 nt, Human
ggacucagccuucagac

SEQ ID NO: 1239272 - RNA, 21 nt, Human
ggacucagccuucagacagag

SEQ ID NO: 1239273 - RNA, 13 nt, Human
ggacucagggcag

SEQ ID NO: 1239274 - RNA, 15 nt, Human
ggacucagggcagcg

SEQ ID NO: 1239275 - RNA, 22 nt, Human
ggacucagggcagcgccaggcu

SEQ ID NO: 1239276 - RNA, 20 nt, Human
ggacucagguggcccuacug

SEQ ID NO: 1239277 - RNA, 16 nt, Human
ggacucaucuuucccu

SEQ ID NO: 1239278 - RNA, 19 nt, Human
ggacucaucuuucccuccu

SEQ ID NO: 1239279 - RNA, 20 nt, Human
ggacucaucuuucccuccuu

SEQ ID NO: 1239280 - RNA, 21 nt, Human
ggacucaucuuucccuccuug

SEQ ID NO: 1239281 - RNA, 23 nt, Human
ggacucaucuuucccuccuuggu

SEQ ID NO: 1239282 - RNA, 22 nt, Human
ggacucaucuuucccuccuugg

SEQ ID NO: 1239283 - RNA, 14 nt, Human
ggacuccaggccca

SEQ ID NO: 1239284 - RNA, 15 nt, Human
ggacuccaggcccaa

SEQ ID NO: 1239285 - RNA, 13 nt, Human
ggacccugaaggg

SEQ ID NO: 1239286 - RNA, 11 nt, Human
ggacccugacc

SEQ ID NO: 1239287 - RNA, 13 nt, Human
ggacccuguccaa

SEQ ID NO: 1239288 - RNA, 15 nt, Human
ggacccugugagccg

SEQ ID NO: 1239289 - RNA, 13 nt, Human
ggacccugugagc

SEQ ID NO: 1239290 - RNA, 18 nt, Human
ggacguggcucagccagc

SEQ ID NO: 1239291 - RNA, 17 nt, Human
ggacggugcccaagcca

SEQ ID NO: 1239292 - RNA, 19 nt, Human
ggacggugcccaagccaga

SEQ ID NO: 1239293 - RNA, 21 nt, Human
ggacggugcccaagccagagg

SEQ ID NO: 1239294 - RNA, 21 nt, Human
ggacguacguaauaagguuuu

SEQ ID NO: 1239295 - RNA, 21 nt, Human
ggacccuccgcucuguagugc

SEQ ID NO: 1239296 - RNA, 23 nt, Human
ggaccccccuuucacaggcagcc

SEQ ID NO: 1239297 - RNA, 16 nt, Human
ggaagcuaauuugcau

SEQ ID NO: 1239298 - RNA, 18 nt, Human
ggaagcuagacacaugaa

SEQ ID NO: 1239299 - RNA, 22 nt, Human
ggaagcuagacacaugaaggua

SEQ ID NO: 1239300 - RNA, 19 nt, Human
ggaagcuagacacaugaag

SEQ ID NO: 1239301 - RNA, 15 nt, Human
ggaagcuagucuuuu

SEQ ID NO: 1239302 - RNA, 16 nt, Human
ggaagcuagucuuuug

SEQ ID NO: 1239303 - RNA, 17 nt, Human
ggaagcuagucuuuugc

SEQ ID NO: 1239304 - RNA, 19 nt, Human
ggaagcuagucuuuugcuu

SEQ ID NO: 1239305 - RNA, 18 nt, Human
ggaagcccauccugacca

SEQ ID NO: 1239306 - RNA, 20 nt, Human
ggaagcccauccugaccagc

SEQ ID NO: 1239307 - RNA, 13 nt, Human
ggaagcccccacc

SEQ ID NO: 1239308 - RNA, 21 nt, Human
ggaagcccccaccgugggcag

SEQ ID NO: 1239309 - RNA, 22 nt, Human
ggaagcccccaccgugggcagg

SEQ ID NO: 1239310 - RNA, 13 nt, Human
ggaagccccuggg

SEQ ID NO: 1239311 - RNA, 14 nt, Human
ggaagccccugggc

SEQ ID NO: 1239312 - RNA, 15 nt, Human
ggaagccccugggcc

SEQ ID NO: 1239313 - RNA, 18 nt, Human
ggaagccccugggcccag

SEQ ID NO: 1239314 - RNA, 19 nt, Human
ggaagccccugggcccagu

SEQ ID NO: 1239315 - RNA, 18 nt, Human
ggaaguugacuuauagua

SEQ ID NO: 1239316 - RNA, 15 nt, Human
ggaaguuuagcucug

SEQ ID NO: 1239317 - RNA, 16 nt, Human
ggaaguuuagcucuga

SEQ ID NO: 1239318 - RNA, 18 nt, Human
ggaaguuuagcucugaga

SEQ ID NO: 1239319 - RNA, 17 nt, Human
ggaaguuuagcucugag

SEQ ID NO: 1239320 - RNA, 21 nt, Human
ggaagcuuuggugagaaccug

SEQ ID NO: 1239321 - RNA, 20 nt, Human
ggaagcuuuggugagaaccu

SEQ ID NO: 1239322 - RNA, 23 nt, Human
ggaagcuagucuuuugcuuuugc

SEQ ID NO: 1239323 - RNA, 14 nt, Human
ggaagcuuggggaa

SEQ ID NO: 1239324 - RNA, 21 nt, Human
ggaagcucuuggagcugugag

SEQ ID NO: 1239325 - RNA, 17 nt, Human
ggaagcugcccugccca

SEQ ID NO: 1239326 - RNA, 20 nt, Human
ggaagcucuuggagcuguga

SEQ ID NO: 1239327 - RNA, 20 nt, Human
ggaagcugugcgugugugug

SEQ ID NO: 1239328 - RNA, 18 nt, Human
ggaaugaagcaaugcuuc

SEQ ID NO: 1239329 - RNA, 19 nt, Human
ggaaugaagauacugaaau

SEQ ID NO: 1239330 - RNA, 21 nt, Human
ggacaacugcucccaccuccu

SEQ ID NO: 1239331 - RNA, 22 nt, Human
ggacaacugcucccaccuccug

SEQ ID NO: 1239332 - RNA, 23 nt, Human
ggacaacugcucccaccuccuga

SEQ ID NO: 1239333 - RNA, 16 nt, Human
ggacaagacccccagc

SEQ ID NO: 1239334 - RNA, 13 nt, Human
ggacaagcauggu

SEQ ID NO: 1239335 - RNA, 18 nt, Human
ggaauaagcucccagggc

SEQ ID NO: 1239336 - RNA, 13 nt, Human
ggaauaauaccua

SEQ ID NO: 1239337 - RNA, 24 nt, Human
ggaaucauuucuauuucuccucca

SEQ ID NO: 1239338 - RNA, 19 nt, Human
ggaauaagguacaagaagc

SEQ ID NO: 1239339 - RNA, 17 nt, Human
ggacaccugcccugccc

SEQ ID NO: 1239340 - RNA, 19 nt, Human
ggacaccugggagaaaucu

SEQ ID NO: 1239341 - RNA, 19 nt, Human
ggacaaggacuaggguccu

SEQ ID NO: 1239342 - RNA, 18 nt, Human
ggacaagcuucugagacg

SEQ ID NO: 1239343 - RNA, 20 nt, Human
ggacaaguggacucagggca

SEQ ID NO: 1239344 - RNA, 23 nt, Human
ggacaauggaccggagagugggg

SEQ ID NO: 1239345 - RNA, 16 nt, Human
ggacaauggaccggag

SEQ ID NO: 1239346 - RNA, 16 nt, Human
ggacacgcucaguggg

SEQ ID NO: 1239347 - RNA, 22 nt, Human
ggacacgcucaguggggcagag

SEQ ID NO: 1239348 - RNA, 23 nt, Human
ggacacgcucaguggggcagagg

SEQ ID NO: 1239349 - RNA, 23 nt, Human
ggacacgggccuguccacaggcu

SEQ ID NO: 1239350 - RNA, 21 nt, Human
ggacacgggccuguccacagg

SEQ ID NO: 1239351 - RNA, 11 nt, Human
ggacagcugug

SEQ ID NO: 1239352 - RNA, 12 nt, Human
ggacagcugugc

SEQ ID NO: 1239353 - RNA, 14 nt, Human
ggacagcugugccu

SEQ ID NO: 1239354 - RNA, 15 nt, Human
ggacagcugugccuc

SEQ ID NO: 1239355 - RNA, 17 nt, Human
ggacagcugugccucgc

SEQ ID NO: 1239356 - RNA, 22 nt, Human
ggacagcuuguggcaagugaau

SEQ ID NO: 1239357 - RNA, 20 nt, Human
ggacagcugugccucgcucc

SEQ ID NO: 1239358 - RNA, 17 nt, Human
ggaagagaaggagcaga

SEQ ID NO: 1239359 - RNA, 12 nt, Human
ggaagagaagga

SEQ ID NO: 1239360 - RNA, 16 nt, Human
ggaagagacagcccag

SEQ ID NO: 1239361 - RNA, 17 nt, Human
ggaagagacagcccagg

SEQ ID NO: 1239362 - RNA, 21 nt, Human
ggaagagagccugcaggaucu

SEQ ID NO: 1239363 - RNA, 18 nt, Human
ggaagagagccugcagga

SEQ ID NO: 1239364 - RNA, 14 nt, Human
ggaacuugaacuga

SEQ ID NO: 1239365 - RNA, 16 nt, Human
ggaacuugaacugauu

SEQ ID NO: 1239366 - RNA, 18 nt, Human
ggaacuugaacugauuca

SEQ ID NO: 1239367 - RNA, 17 nt, Human
ggaacuugccugccuuu

SEQ ID NO: 1239368 - RNA, 22 nt, Human
ggaacuuggggaguuaagaccu

SEQ ID NO: 1239369 - RNA, 20 nt, Human
ggaacuugccugccuuucca

SEQ ID NO: 1239370 - RNA, 14 nt, Human
ggaagacaguggcc

SEQ ID NO: 1239371 - RNA, 15 nt, Human
ggaagacaguggccc

SEQ ID NO: 1239372 - RNA, 21 nt, Human
ggaacacuggggacuuggccu

SEQ ID NO: 1239373 - RNA, 17 nt, Human
ggaacuggaauccuuuc

SEQ ID NO: 1239374 - RNA, 11 nt, Human
ggaacuggagg

SEQ ID NO: 1239375 - RNA, 12 nt, Human
ggaacuggaggc

SEQ ID NO: 1239376 - RNA, 15 nt, Human
ggaacuggaggcagg

SEQ ID NO: 1239377 - RNA, 14 nt, Human
ggaacuggccaagc

SEQ ID NO: 1239378 - RNA, 16 nt, Human
ggaacuggccaagcug

SEQ ID NO: 1239379 - RNA, 17 nt, Human
ggaacuggccaagcuga

SEQ ID NO: 1239380 - RNA, 22 nt, Human
ggaacuggccaagcugaggugc

SEQ ID NO: 1239381 - RNA, 19 nt, Human
ggaacuggccaagcugagg

SEQ ID NO: 1239382 - RNA, 16 nt, Human
gccugaaagaggcuga

SEQ ID NO: 1239383 - RNA, 19 nt, Human
gccugcccaguugcacuca

SEQ ID NO: 1239384 - RNA, 12 nt, Human
gccugcccccac

SEQ ID NO: 1239385 - RNA, 19 nt, Human
gccugcccccaccccauuc

SEQ ID NO: 1239386 - RNA, 18 nt, Human
gccugcccccaccccauu

SEQ ID NO: 1239387 - RNA, 21 nt, Human
gccugccccuacccuggacuu

SEQ ID NO: 1239388 - RNA, 22 nt, Human
gccugccccuacccuggacuug

SEQ ID NO: 1239389 - RNA, 19 nt, Human
gccuccuuagaaaaaaaau

SEQ ID NO: 1239390 - RNA, 13 nt, Human
gccucccaaagug

SEQ ID NO: 1239391 - RNA, 16 nt, Human
gccucccaaagugcug

SEQ ID NO: 1239392 - RNA, 16 nt, Human
gccuccauccaaggcc

SEQ ID NO: 1239393 - RNA, 13 nt, Human
gccuccaugggcc

SEQ ID NO: 1239394 - RNA, 15 nt, Human
gccuccaugggcccc

SEQ ID NO: 1239395 - RNA, 19 nt, Human
gccuccaugggccccaggg

SEQ ID NO: 1239396 - RNA, 23 nt, Human
gccuccauccuacccccugugcc

SEQ ID NO: 1239397 - RNA, 15 nt, Human
gccuccauccaaggc

SEQ ID NO: 1239398 - RNA, 12 nt, Human
gccuccauccug

SEQ ID NO: 1239399 - RNA, 15 nt, Human
gccucuuagaugcag

SEQ ID NO: 1239400 - RNA, 13 nt, Human
gccuccuuccucu

SEQ ID NO: 1239401 - RNA, 14 nt, Human
gccuccuuccucuu

SEQ ID NO: 1239402 - RNA, 19 nt, Human
gccucuuaaauaaaccuuu

SEQ ID NO: 1239403 - RNA, 24 nt, Human
gccuccuuccucuuuuccuuccca

SEQ ID NO: 1239404 - RNA, 13 nt, Human
gccucuucccucu

SEQ ID NO: 1239405 - RNA, 21 nt, Human
gccucuuccagucuuccugac

SEQ ID NO: 1239406 - RNA, 23 nt, Human
gccucuuucaagcagucgugccu

SEQ ID NO: 1239407 - RNA, 13 nt, Human
gccuggccuggcc

SEQ ID NO: 1239408 - RNA, 15 nt, Human
gccugugccagguga

SEQ ID NO: 1239409 - RNA, 19 nt, Human
gccuguggcgccgucucca

SEQ ID NO: 1239410 - RNA, 19 nt, Human
gccugugccaggugagguc

SEQ ID NO: 1239411 - RNA, 22 nt, Human
gccugugccaggugaggucagc

SEQ ID NO: 1239412 - RNA, 19 nt, Human
gccugugccuccucacccc

SEQ ID NO: 1239413 - RNA, 21 nt, Human
gccuguggcgccgucuccagg

SEQ ID NO: 1239414 - RNA, 23 nt, Human
gccuguggcgccgucuccagggg

SEQ ID NO: 1239415 - RNA, 12 nt, Human
gccugugguucu

SEQ ID NO: 1239416 - RNA, 16 nt, Human
gccugugguucugaga

SEQ ID NO: 1239417 - RNA, 21 nt, Human
gccugugguucugagauggcu

SEQ ID NO: 1239418 - RNA, 23 nt, Human
gccuguucccauucuugcauggc

SEQ ID NO: 1239419 - RNA, 22 nt, Human
gccuguguagcugugaccugcu

SEQ ID NO: 1239420 - RNA, 19 nt, Human
gccuguguccaugcgcuca

SEQ ID NO: 1239421 - RNA, 19 nt, Human
gccuguucccauucuugca

SEQ ID NO: 1239422 - RNA, 12 nt, Human
gccuguguccau

SEQ ID NO: 1239423 - RNA, 14 nt, Human
gccuguguccaugc

SEQ ID NO: 1239424 - RNA, 15 nt, Human
gccuguguagcugug

SEQ ID NO: 1239425 - RNA, 16 nt, Human
gccuguguagcuguga

SEQ ID NO: 1239426 - RNA, 20 nt, Human
gccuguguagcugugaccug

SEQ ID NO: 1239427 - RNA, 21 nt, Human
gccuguguagcugugaccugc

SEQ ID NO: 1239428 - RNA, 14 nt, Human
gcgaucucagcuca

SEQ ID NO: 1239429 - RNA, 17 nt, Human
gcgaucucggcucacug

SEQ ID NO: 1239430 - RNA, 12 nt, Human
gcgagccugcua

SEQ ID NO: 1239431 - RNA, 13 nt, Human
gcgaugccagcca

SEQ ID NO: 1239432 - RNA, 14 nt, Human
gcgaugccagccaa

SEQ ID NO: 1239433 - RNA, 13 nt, Human
gcgauguggaacu

SEQ ID NO: 1239434 - RNA, 19 nt, Human
gcgauguggaacugcugcc

SEQ ID NO: 1239435 - RNA, 20 nt, Human
gcgauguggaacugcugcca

SEQ ID NO: 1239436 - RNA, 21 nt, Human
gcgauguggaacugcugccac

SEQ ID NO: 1239437 - RNA, 23 nt, Human
gcgauguggaacugcugccacug

SEQ ID NO: 1239438 - RNA, 22 nt, Human
gcgauguggaacugcugccacu

SEQ ID NO: 1239439 - RNA, 14 nt, Human
gcgauucccucucc

SEQ ID NO: 1239440 - RNA, 18 nt, Human
gcgauucccucucccagg

SEQ ID NO: 1239441 - RNA, 19 nt, Human
gcgauucccucucccaggc

SEQ ID NO: 1239442 - RNA, 22 nt, Human
gcgauucccucucccaggcccc

SEQ ID NO: 1239443 - RNA, 22 nt, Human
gcgcacugugacccccagcucc

SEQ ID NO: 1239444 - RNA, 20 nt, Human
gccuucggccuccauccuga

SEQ ID NO: 1239445 - RNA, 23 nt, Human
gccuucggccuccauccugaggc

SEQ ID NO: 1239446 - RNA, 21 nt, Human
gccuucggccuccauccugag

SEQ ID NO: 1239447 - RNA, 13 nt, Human
gcgagccugcuag

SEQ ID NO: 1239448 - RNA, 19 nt, Human
gcgaggagaugcuccuugg

SEQ ID NO: 1239449 - RNA, 20 nt, Human
gcgaggagaugcuccuuggg

SEQ ID NO: 1239450 - RNA, 15 nt, Human
gcgaggaggcuccag

SEQ ID NO: 1239451 - RNA, 16 nt, Human
gcgaggaggcuccaga

SEQ ID NO: 1239452 - RNA, 17 nt, Human
gcgaggaggcuccagag

SEQ ID NO: 1239453 - RNA, 18 nt, Human
gcgaggaggcuccagagg

SEQ ID NO: 1239454 - RNA, 14 nt, Human
gccuugccagagau

SEQ ID NO: 1239455 - RNA, 17 nt, Human
gccuugccagagaucca

SEQ ID NO: 1239456 - RNA, 16 nt, Human
gccuugcggcuccuca

SEQ ID NO: 1239457 - RNA, 17 nt, Human
gccuugcggcuccucag

SEQ ID NO: 1239458 - RNA, 20 nt, Human
gccuugcggcuccucaggga

SEQ ID NO: 1239459 - RNA, 18 nt, Human
gccuugcggcuccucagg

SEQ ID NO: 1239460 - RNA, 16 nt, Human
gcccccaccuggcuca

SEQ ID NO: 1239461 - RNA, 12 nt, Human
gcccccacugac

SEQ ID NO: 1239462 - RNA, 17 nt, Human
gcccccacugaccagaa

SEQ ID NO: 1239463 - RNA, 18 nt, Human
gcccccacccuguuccug

SEQ ID NO: 1239464 - RNA, 22 nt, Human
gcccccacccuguuccugcugc

SEQ ID NO: 1239465 - RNA, 23 nt, Human
gcccccacccuguuccugcugcu

SEQ ID NO: 1239466 - RNA, 17 nt, Human
gcccccaccgugggcag

SEQ ID NO: 1239467 - RNA, 18 nt, Human
gcccccaccgugggcagg

SEQ ID NO: 1239468 - RNA, 20 nt, Human
gcccccaccgugggcaggga

SEQ ID NO: 1239469 - RNA, 22 nt, Human
gcccccaccgugggcagggagc

SEQ ID NO: 1239470 - RNA, 19 nt, Human
gcccccacugccuuugacc

SEQ ID NO: 1239471 - RNA, 16 nt, Human
gccccccagccucugg

SEQ ID NO: 1239472 - RNA, 23 nt, Human
gccccugccaccuccugccucag

SEQ ID NO: 1239473 - RNA, 23 nt, Human
gccccugccucucugcagguccc

SEQ ID NO: 1239474 - RNA, 20 nt, Human
gccccugccucucugcaggu

SEQ ID NO: 1239475 - RNA, 21 nt, Human
gccccugccauuguagcgucu

SEQ ID NO: 1239476 - RNA, 17 nt, Human
gcccgguaagagcaaaa

SEQ ID NO: 1239477 - RNA, 16 nt, Human
gcccuaaugcgcaggc

SEQ ID NO: 1239478 - RNA, 17 nt, Human
gcccuaaugcgcaggcu

SEQ ID NO: 1239479 - RNA, 19 nt, Human
gcccuaaugcgcaggcugg

SEQ ID NO: 1239480 - RNA, 20 nt, Human
gcccuaaugcgcaggcuggc

SEQ ID NO: 1239481 - RNA, 13 nt, Human
gcccguccugccu

SEQ ID NO: 1239482 - RNA, 14 nt, Human
gcccguccugccug

SEQ ID NO: 1239483 - RNA, 12 nt, Human
gcccuaagcaga

SEQ ID NO: 1239484 - RNA, 15 nt, Human
gcccuaagcagaaag

SEQ ID NO: 1239485 - RNA, 16 nt, Human
gcccuaagcagaaagu

SEQ ID NO: 1239486 - RNA, 17 nt, Human
gcccuaagcagaaagug

SEQ ID NO: 1239487 - RNA, 18 nt, Human
gcccuaagcagaaagugc

SEQ ID NO: 1239488 - RNA, 21 nt, Human
gcccuaagcagaaagugccuu

SEQ ID NO: 1239489 - RNA, 23 nt, Human
gcccuaaugcgcaggcuggcccu

SEQ ID NO: 1239490 - RNA, 23 nt, Human
gcccucaagacccuuuuggguuu

SEQ ID NO: 1239491 - RNA, 14 nt, Human
gcccucaagucuuu

SEQ ID NO: 1239492 - RNA, 15 nt, Human
gcccucacccugggg

SEQ ID NO: 1239493 - RNA, 16 nt, Human
gcccucacacacccug

SEQ ID NO: 1239494 - RNA, 14 nt, Human
gcccucacccgccc

SEQ ID NO: 1239495 - RNA, 17 nt, Human
gcccugccaccugucug

SEQ ID NO: 1239496 - RNA, 16 nt, Human
gcccugccaccugucu

SEQ ID NO: 1239497 - RNA, 15 nt, Human
gcccugccaccuguc

SEQ ID NO: 1239498 - RNA, 14 nt, Human
gcccugccaccugu

SEQ ID NO: 1239499 - RNA, 13 nt, Human
gcccugccaccug

SEQ ID NO: 1239500 - RNA, 18 nt, Human
gcccugccaccugucugu

SEQ ID NO: 1239501 - RNA, 17 nt, Human
gcccugcccugccaccu

SEQ ID NO: 1239502 - RNA, 13 nt, Human
gcccugcccugcc

SEQ ID NO: 1239503 - RNA, 11 nt, Human
gcccugcccug

SEQ ID NO: 1239504 - RNA, 12 nt, Human
gcccugcccugg

SEQ ID NO: 1239505 - RNA, 16 nt, Human
gcccugcccugguuuc

SEQ ID NO: 1239506 - RNA, 18 nt, Human
gcccugcccugguuuccu

SEQ ID NO: 1239507 - RNA, 21 nt, Human
gcccugugcaaccucuuggcc

SEQ ID NO: 1239508 - RNA, 22 nt, Human
gcccugugccccuugacaacug

SEQ ID NO: 1239509 - RNA, 22 nt, Human
gcccuguccugccuaaggcuga

SEQ ID NO: 1239510 - RNA, 13 nt, Human
gcccuguccuggu

SEQ ID NO: 1239511 - RNA, 17 nt, Human
gcccuguccugguggua

SEQ ID NO: 1239512 - RNA, 22 nt, Human
gcccuguccuggugguauuuuc

SEQ ID NO: 1239513 - RNA, 19 nt, Human
gcccugugaggcugggucc

SEQ ID NO: 1239514 - RNA, 20 nt, Human
gcccugugccccuugacaac

SEQ ID NO: 1239515 - RNA, 17 nt, Human
gccgcccccugcccccc

SEQ ID NO: 1239516 - RNA, 23 nt, Human
gccgcccccugccccccagccuc

SEQ ID NO: 1239517 - RNA, 18 nt, Human
gccgcccugcgggugaac

SEQ ID NO: 1239518 - RNA, 13 nt, Human
gccgccgccucuu

SEQ ID NO: 1239519 - RNA, 12 nt, Human
gccuaggccugg

SEQ ID NO: 1239520 - RNA, 16 nt, Human
gccuaggccugggcag

SEQ ID NO: 1239521 - RNA, 17 nt, Human
gccuaggccugggcagu

SEQ ID NO: 1239522 - RNA, 19 nt, Human
gccuaggccugggcagugg

SEQ ID NO: 1239523 - RNA, 12 nt, Human
gccuaggcugca

SEQ ID NO: 1239524 - RNA, 15 nt, Human
gccuaggaggguccu

SEQ ID NO: 1239525 - RNA, 16 nt, Human
gccuaggaggguccuc

SEQ ID NO: 1239526 - RNA, 12 nt, Human
gccuaggauucu

SEQ ID NO: 1239527 - RNA, 13 nt, Human
gccuaggauucua

SEQ ID NO: 1239528 - RNA, 14 nt, Human
gccuaggauucuaa

SEQ ID NO: 1239529 - RNA, 15 nt, Human
gccuaggauucuaaa

SEQ ID NO: 1239530 - RNA, 16 nt, Human
gccuaggauucuaaaa

SEQ ID NO: 1239531 - RNA, 17 nt, Human
gccuaggccuaguccug

SEQ ID NO: 1239532 - RNA, 16 nt, Human
gccuaguauugacaaa

SEQ ID NO: 1239533 - RNA, 14 nt, Human
gccuaggcugcauu

SEQ ID NO: 1239534 - RNA, 14 nt, Human
gccuaguauugaca

SEQ ID NO: 1239535 - RNA, 19 nt, Human
gccuagugaaggcuucucu

SEQ ID NO: 1239536 - RNA, 22 nt, Human
gccuagugaaggcuucucucug

SEQ ID NO: 1239537 - RNA, 23 nt, Human
gccuagugaaggcuucucucugu

SEQ ID NO: 1239538 - RNA, 15 nt, Human
gcuccacuuggucug

SEQ ID NO: 1239539 - RNA, 17 nt, Human
gcuccacucugcuucuc

SEQ ID NO: 1239540 - RNA, 19 nt, Human
gcuccacucugcuucucug

SEQ ID NO: 1239541 - RNA, 20 nt, Human
gcuccacucugcuucucuga

SEQ ID NO: 1239542 - RNA, 21 nt, Human
gcuccacucugcuucucugac

SEQ ID NO: 1239543 - RNA, 13 nt, Human
gcuccacucugcu

SEQ ID NO: 1239544 - RNA, 15 nt, Human
gcuccacucugcuuc

SEQ ID NO: 1239545 - RNA, 16 nt, Human
gcuccacucugcuucu

SEQ ID NO: 1239546 - RNA, 16 nt, Human
gcuccacccuggccga

SEQ ID NO: 1239547 - RNA, 19 nt, Human
gcuccacccuggccgaguc

SEQ ID NO: 1239548 - RNA, 16 nt, Human
gcucccacaggcccuu

SEQ ID NO: 1239549 - RNA, 17 nt, Human
gcucccacaggcccuuc

SEQ ID NO: 1239550 - RNA, 20 nt, Human
gcucccacaggcccuuccuc

SEQ ID NO: 1239551 - RNA, 21 nt, Human
gcucccacaggcccuuccucu

SEQ ID NO: 1239552 - RNA, 23 nt, Human
gcuccacucugcuucucugacuu

SEQ ID NO: 1239553 - RNA, 19 nt, Human
gcuccacuuggucugugag

SEQ ID NO: 1239554 - RNA, 18 nt, Human
gcuccacuuggucuguga

SEQ ID NO: 1239555 - RNA, 12 nt, Human
gcuccccaugug

SEQ ID NO: 1239556 - RNA, 14 nt, Human
gcuccccauguguc

SEQ ID NO: 1239557 - RNA, 22 nt, Human
gcucccccagcaaagcccccag

SEQ ID NO: 1239558 - RNA, 21 nt, Human
gcuccccccagcccccuaaga

SEQ ID NO: 1239559 - RNA, 22 nt, Human
gcucccacaggcccuuccucuc

SEQ ID NO: 1239560 - RNA, 22 nt, Human
gcucccacagucccaucugcuu

SEQ ID NO: 1239561 - RNA, 15 nt, Human
gcucccaccuccuga

SEQ ID NO: 1239562 - RNA, 22 nt, Human
gcucccaccuccugacacccuu

SEQ ID NO: 1239563 - RNA, 16 nt, Human
gcucccaccuccugac

SEQ ID NO: 1239564 - RNA, 16 nt, Human
gcucccaggaccacag

SEQ ID NO: 1239565 - RNA, 21 nt, Human
gcuccugccaccacgcccggc

SEQ ID NO: 1239566 - RNA, 11 nt, Human
gcuccugcagc

SEQ ID NO: 1239567 - RNA, 11 nt, Human
gcuccuggacc

SEQ ID NO: 1239568 - RNA, 19 nt, Human
gcuccuggaccccccuuuc

SEQ ID NO: 1239569 - RNA, 15 nt, Human
gcuccuggcccagcc

SEQ ID NO: 1239570 - RNA, 16 nt, Human
gcuccuggcccagccu

SEQ ID NO: 1239571 - RNA, 17 nt, Human
gcuccuggcccagccuu

SEQ ID NO: 1239572 - RNA, 19 nt, Human
gcuccuggcccagccuuug

SEQ ID NO: 1239573 - RNA, 12 nt, Human
gcuccugccacc

SEQ ID NO: 1239574 - RNA, 18 nt, Human
gcuccugccaccacgccc

SEQ ID NO: 1239575 - RNA, 12 nt, Human
gcuccugcacuu

SEQ ID NO: 1239576 - RNA, 20 nt, Human
gcuccugcacuuacuugcuu

SEQ ID NO: 1239577 - RNA, 13 nt, Human
gcucugaucccuc

SEQ ID NO: 1239578 - RNA, 22 nt, Human
gcucugaucccucuacagagcu

SEQ ID NO: 1239579 - RNA, 23 nt, Human
gcucugaucccucuacagagcuu

SEQ ID NO: 1239580 - RNA, 13 nt, Human
gcucugaugaaaa

SEQ ID NO: 1239581 - RNA, 23 nt, Human
gcucugaugaaaaauugcugacu

SEQ ID NO: 1239582 - RNA, 11 nt, Human
gcucugaugca

SEQ ID NO: 1239583 - RNA, 16 nt, Human
gcucugaugcaucaga

SEQ ID NO: 1239584 - RNA, 19 nt, Human
gcucugaugcaucagaaag

SEQ ID NO: 1239585 - RNA, 20 nt, Human
gcucugaugcaucagaaagg

SEQ ID NO: 1239586 - RNA, 17 nt, Human
gcucugcaauuccccuc

SEQ ID NO: 1239587 - RNA, 14 nt, Human
gcucugagcgccuc

SEQ ID NO: 1239588 - RNA, 17 nt, Human
gcucugagcgccuccau

SEQ ID NO: 1239589 - RNA, 18 nt, Human
gcucugagcgccuccauc

SEQ ID NO: 1239590 - RNA, 12 nt, Human
gcucugagcugu

SEQ ID NO: 1239591 - RNA, 13 nt, Human
gcucugagcuguc

SEQ ID NO: 1239592 - RNA, 14 nt, Human
gcucugagcuguca

SEQ ID NO: 1239593 - RNA, 9 nt, Human
gcucugagg

SEQ ID NO: 1239594 - RNA, 10 nt, Human
gcucugaggc

SEQ ID NO: 1239595 - RNA, 23 nt, Human
gcucugaggcgccccaacccgug

SEQ ID NO: 1239596 - RNA, 20 nt, Human
gcucugaggcgccccaaccc

SEQ ID NO: 1239597 - RNA, 11 nt, Human
gcucugaggga

SEQ ID NO: 1239598 - RNA, 13 nt, Human
gcucugagggaaa

SEQ ID NO: 1239599 - RNA, 17 nt, Human
gcucugagggaaagggc

SEQ ID NO: 1239600 - RNA, 22 nt, Human
gcucugaguaccccugcuuugg

SEQ ID NO: 1239601 - RNA, 13 nt, Human
gcucuaacgccug

SEQ ID NO: 1239602 - RNA, 14 nt, Human
gcucuaacgccuga

SEQ ID NO: 1239603 - RNA, 15 nt, Human
gcucuaacgccugag

SEQ ID NO: 1239604 - RNA, 16 nt, Human
gcucuaacgccugagc

SEQ ID NO: 1239605 - RNA, 17 nt, Human
gcucuaacgccugagcc

SEQ ID NO: 1239606 - RNA, 18 nt, Human
gcucuaacgccugagccc

SEQ ID NO: 1239607 - RNA, 18 nt, Human
gcucggggugcacaggag

SEQ ID NO: 1239608 - RNA, 19 nt, Human
gcucggggugcacaggagg

SEQ ID NO: 1239609 - RNA, 20 nt, Human
gcucggggugcacaggaggg

SEQ ID NO: 1239610 - RNA, 21 nt, Human
gcucggggugcacaggagggg

SEQ ID NO: 1239611 - RNA, 19 nt, Human
gcucguccccaagugaccu

SEQ ID NO: 1239612 - RNA, 22 nt, Human
gcucguggacugagugggaagc

SEQ ID NO: 1239613 - RNA, 15 nt, Human
gcucuaacagcccuc

SEQ ID NO: 1239614 - RNA, 12 nt, Human
gcuagucuuuug

SEQ ID NO: 1239615 - RNA, 15 nt, Human
gcuagucuuuugcuu

SEQ ID NO: 1239616 - RNA, 17 nt, Human
gcuagucuuuugcuuuu

SEQ ID NO: 1239617 - RNA, 14 nt, Human
gcuagugacuugug

SEQ ID NO: 1239618 - RNA, 22 nt, Human
gcuagucuuuugcuuuugccca

SEQ ID NO: 1239619 - RNA, 21 nt, Human
gcuagugacuugugucccaug

SEQ ID NO: 1239620 - RNA, 20 nt, Human
gcucacugcaaccucugccu

SEQ ID NO: 1239621 - RNA, 23 nt, Human
gcucacucaucaauggggccagu

SEQ ID NO: 1239622 - RNA, 16 nt, Human
gcucacugcauccucc

SEQ ID NO: 1239623 - RNA, 19 nt, Human
gcuauuccagcuguccccc

SEQ ID NO: 1239624 - RNA, 14 nt, Human
gcuauucugucccu

SEQ ID NO: 1239625 - RNA, 19 nt, Human
gcuauucugucccuaggug

SEQ ID NO: 1239626 - RNA, 16 nt, Human
gcuauucugucccuag

SEQ ID NO: 1239627 - RNA, 14 nt, Human
gcuauuugaagugu

SEQ ID NO: 1239628 - RNA, 15 nt, Human
gcuauuugauguaau

SEQ ID NO: 1239629 - RNA, 19 nt, Human
gcuauuugauguaauacuu

SEQ ID NO: 1239630 - RNA, 17 nt, Human
gcuauuugauguaauac

SEQ ID NO: 1239631 - RNA, 15 nt, Human
gcuauuuguaaaucu

SEQ ID NO: 1239632 - RNA, 17 nt, Human
gcuauuuguaaaucugc

SEQ ID NO: 1239633 - RNA, 14 nt, Human
gcuauuugucaucu

SEQ ID NO: 1239634 - RNA, 19 nt, Human
gcuauuuguaaaucugcca

SEQ ID NO: 1239635 - RNA, 18 nt, Human
gcuauuuuauauuacacu

SEQ ID NO: 1239636 - RNA, 23 nt, Human
gcuauuuuauauuacacuacaca

SEQ ID NO: 1239637 - RNA, 13 nt, Human
gcuauuuuccagg

SEQ ID NO: 1239638 - RNA, 15 nt, Human
gcuauuuuccaggcu

SEQ ID NO: 1239639 - RNA, 24 nt, Human
gcuauuuuccaggcuucugcuggg

SEQ ID NO: 1239640 - RNA, 13 nt, Human
gcuauuuugugaa

SEQ ID NO: 1239641 - RNA, 21 nt, Human
gcuauuuuucuaacuacaaag

SEQ ID NO: 1239642 - RNA, 13 nt, Human
gcuauuuuucuaa

SEQ ID NO: 1239643 - RNA, 14 nt, Human
gcucacucagcacu

SEQ ID NO: 1239644 - RNA, 15 nt, Human
gcucacucagccacc

SEQ ID NO: 1239645 - RNA, 20 nt, Human
gcucacucagccacccugag

SEQ ID NO: 1239646 - RNA, 20 nt, Human
gcucagggccaugcugaggc

SEQ ID NO: 1239647 - RNA, 18 nt, Human
gcucagggaccauggcuu

SEQ ID NO: 1239648 - RNA, 20 nt, Human
gcucaggaugagggaaaaga

SEQ ID NO: 1239649 - RNA, 12 nt, Human
gcucaggcaggg

SEQ ID NO: 1239650 - RNA, 16 nt, Human
gcucaggcaggggccu

SEQ ID NO: 1239651 - RNA, 19 nt, Human
gcucaggcaggggccucca

SEQ ID NO: 1239652 - RNA, 24 nt, Human
gcucaggcaggggccuccaugggc

SEQ ID NO: 1239653 - RNA, 22 nt, Human
gcucaggcaggggccuccaugg

SEQ ID NO: 1239654 - RNA, 19 nt, Human
gcucagggccaugcugagg

SEQ ID NO: 1239655 - RNA, 20 nt, Human
gcucacugcauccuccgccu

SEQ ID NO: 1239656 - RNA, 19 nt, Human
gcucacugaccugccugua

SEQ ID NO: 1239657 - RNA, 16 nt, Human
gcucaggaaccgaggc

SEQ ID NO: 1239658 - RNA, 19 nt, Human
gcucaggaaccgaggcagg

SEQ ID NO: 1239659 - RNA, 20 nt, Human
gcucaggaaccgaggcaggg

SEQ ID NO: 1239660 - RNA, 21 nt, Human
gcucaggaaccgaggcaggga

SEQ ID NO: 1239661 - RNA, 17 nt, Human
gcucaggacagaugcca

SEQ ID NO: 1239662 - RNA, 20 nt, Human
gcucaggacagaugccacac

SEQ ID NO: 1239663 - RNA, 18 nt, Human
gcuagaacucccuuucaa

SEQ ID NO: 1239664 - RNA, 16 nt, Human
gcuagaacucccuuuc

SEQ ID NO: 1239665 - RNA, 20 nt, Human
gcuaauucucagaaaggcaa

SEQ ID NO: 1239666 - RNA, 15 nt, Human
gcuagaacucccuuu

SEQ ID NO: 1239667 - RNA, 14 nt, Human
gcuagaacucccuu

SEQ ID NO: 1239668 - RNA, 13 nt, Human
gcuagaacucccu

SEQ ID NO: 1239669 - RNA, 12 nt, Human
gcuagaacuccc

SEQ ID NO: 1239670 - RNA, 19 nt, Human
gcuacucuaguauuccaga

SEQ ID NO: 1239671 - RNA, 20 nt, Human
gcuacucuaguauuccagac

SEQ ID NO: 1239672 - RNA, 21 nt, Human
gcuacucuaguauuccagacc

SEQ ID NO: 1239673 - RNA, 22 nt, Human
gcuacucuccccacgagggcug

SEQ ID NO: 1239674 - RNA, 23 nt, Human
gcuacucuccccacgagggcugg

SEQ ID NO: 1239675 - RNA, 13 nt, Human
gcuacucugugcc

SEQ ID NO: 1239676 - RNA, 14 nt, Human
gcuacucugugcca

SEQ ID NO: 1239677 - RNA, 15 nt, Human
gcuacucugugccag

SEQ ID NO: 1239678 - RNA, 16 nt, Human
gcuacucugugccaga

SEQ ID NO: 1239679 - RNA, 17 nt, Human
gcuacucugugccagag

SEQ ID NO: 1239680 - RNA, 18 nt, Human
gcuacucugugccagagc

SEQ ID NO: 1239681 - RNA, 19 nt, Human
gcuacucugugccagagcc

SEQ ID NO: 1239682 - RNA, 20 nt, Human
gcuacucugugccagagccu

SEQ ID NO: 1239683 - RNA, 21 nt, Human
gcuacucugugccagagccug

SEQ ID NO: 1239684 - RNA, 23 nt, Human
gcuacucugugccagagccuggg

SEQ ID NO: 1239685 - RNA, 22 nt, Human
gcuacucugugccagagccugg

SEQ ID NO: 1239686 - RNA, 19 nt, Human
gcguuuuuuaaauguauac

SEQ ID NO: 1239687 - RNA, 22 nt, Human
gcguuugaccuuuuauguagua

SEQ ID NO: 1239688 - RNA, 11 nt, Human
gcgugcagaug

SEQ ID NO: 1239689 - RNA, 16 nt, Human
gcgggauggggcuccc

SEQ ID NO: 1239690 - RNA, 18 nt, Human
gcgugguggucccugggu

SEQ ID NO: 1239691 - RNA, 17 nt, Human
gcgugucaccugugcuu

SEQ ID NO: 1239692 - RNA, 15 nt, Human
gcgugugcaggagcg

SEQ ID NO: 1239693 - RNA, 17 nt, Human
gcgugguggucccuggg

SEQ ID NO: 1239694 - RNA, 21 nt, Human
gcuaauaaaaagcuuuugucu

SEQ ID NO: 1239695 - RNA, 17 nt, Human
gcuaaaacaaugaauaa

SEQ ID NO: 1239696 - RNA, 12 nt, Human
gcuaaaagaaac

SEQ ID NO: 1239697 - RNA, 15 nt, Human
gcuaaaagaaacuuu

SEQ ID NO: 1239698 - RNA, 16 nt, Human
gcuaaaagaaacuuuc

SEQ ID NO: 1239699 - RNA, 17 nt, Human
gcuaaaauaaagaaaua

SEQ ID NO: 1239700 - RNA, 14 nt, Human
gcuaaucagcauuc

SEQ ID NO: 1239701 - RNA, 23 nt, Human
gcuaauauuuuccuccugagugc

SEQ ID NO: 1239702 - RNA, 15 nt, Human
gcuaauaacugaucu

SEQ ID NO: 1239703 - RNA, 16 nt, Human
gcuaaucagcauucuc

SEQ ID NO: 1239704 - RNA, 17 nt, Human
gcuaaucagcauucuca

SEQ ID NO: 1239705 - RNA, 22 nt, Human
gcuaaucagcauucucacuccu

SEQ ID NO: 1239706 - RNA, 17 nt, Human
gcuaauucaaggaauuu

SEQ ID NO: 1239707 - RNA, 22 nt, Human
gcuaauucaaggaauuucuuaa

SEQ ID NO: 1239708 - RNA, 16 nt, Human
gcuaauucuacucaca

SEQ ID NO: 1239709 - RNA, 14 nt, Human
cugccucccuucau

SEQ ID NO: 1239710 - RNA, 22 nt, Human
cugccuccccuuaaaggggaga

SEQ ID NO: 1239711 - RNA, 20 nt, Human
cugccuccccucuccuuccu

SEQ ID NO: 1239712 - RNA, 20 nt, Human
cugaucugaugcaagcaaga

SEQ ID NO: 1239713 - RNA, 15 nt, Human
cugaucuggcugcag

SEQ ID NO: 1239714 - RNA, 22 nt, Human
cugaugaaaaauugcugacugu

SEQ ID NO: 1239715 - RNA, 12 nt, Human
cugaugaaaaua

SEQ ID NO: 1239716 - RNA, 13 nt, Human
cugaugaaaauaa

SEQ ID NO: 1239717 - RNA, 14 nt, Human
cugaugaaaauaaa

SEQ ID NO: 1239718 - RNA, 16 nt, Human
cugaugaaaauaaaga

SEQ ID NO: 1239719 - RNA, 17 nt, Human
cugaugaaaauaaagaa

SEQ ID NO: 1239720 - RNA, 18 nt, Human
cugaugaaaauaaagaau

SEQ ID NO: 1239721 - RNA, 19 nt, Human
cugaugaaaauaaagaaug

SEQ ID NO: 1239722 - RNA, 20 nt, Human
cugaugaaaauaaagaaugg

SEQ ID NO: 1239723 - RNA, 21 nt, Human
cugaugaacucuuaaucaaau

SEQ ID NO: 1239724 - RNA, 23 nt, Human
cugccucccuucaugcauggaaa

SEQ ID NO: 1239725 - RNA, 21 nt, Human
cugccucccuucaugcaugga

SEQ ID NO: 1239726 - RNA, 19 nt, Human
cugccucccuucaugcaug

SEQ ID NO: 1239727 - RNA, 18 nt, Human
cugccucccuucaugcau

SEQ ID NO: 1239728 - RNA, 17 nt, Human
cugccucccuucaugca

SEQ ID NO: 1239729 - RNA, 15 nt, Human
cugccucccuucaug

SEQ ID NO: 1239730 - RNA, 13 nt, Human
cugccuccucuuc

SEQ ID NO: 1239731 - RNA, 14 nt, Human
cugccuccucuuca

SEQ ID NO: 1239732 - RNA, 15 nt, Human
cugccuccucuucaa

SEQ ID NO: 1239733 - RNA, 24 nt, Human
cugccuccucuucaacugaccagc

SEQ ID NO: 1239734 - RNA, 16 nt, Human
cugccucccuuguggc

SEQ ID NO: 1239735 - RNA, 21 nt, Human
cugccucccuuguggcagcaa

SEQ ID NO: 1239736 - RNA, 18 nt, Human
cugccucucccaggcagg

SEQ ID NO: 1239737 - RNA, 19 nt, Human
cugccucucccaggcaggg

SEQ ID NO: 1239738 - RNA, 20 nt, Human
cugccucucccaggcagggg

SEQ ID NO: 1239739 - RNA, 20 nt, Human
cugccuggugcccagcacau

SEQ ID NO: 1239740 - RNA, 21 nt, Human
cugccucucccaggcaggggc

SEQ ID NO: 1239741 - RNA, 12 nt, Human
cugcuaggccag

SEQ ID NO: 1239742 - RNA, 15 nt, Human
cugcuaggccagagc

SEQ ID NO: 1239743 - RNA, 17 nt, Human
cugcucaggaaacgaga

SEQ ID NO: 1239744 - RNA, 16 nt, Human
cugcuaggccagagcc

SEQ ID NO: 1239745 - RNA, 18 nt, Human
cugcuaggccagagccca

SEQ ID NO: 1239746 - RNA, 19 nt, Human
cugcuaggccagagcccac

SEQ ID NO: 1239747 - RNA, 20 nt, Human
cugcuaggccagagcccacu

SEQ ID NO: 1239748 - RNA, 21 nt, Human
cugcuaggccagagcccacuc

SEQ ID NO: 1239749 - RNA, 13 nt, Human
cugcugaccugcu

SEQ ID NO: 1239750 - RNA, 14 nt, Human
cugcugaccugcug

SEQ ID NO: 1239751 - RNA, 15 nt, Human
cugcugaccugcuga

SEQ ID NO: 1239752 - RNA, 21 nt, Human
cugcugaccugcugaccugug

SEQ ID NO: 1239753 - RNA, 15 nt, Human
cugcugaccugugca

SEQ ID NO: 1239754 - RNA, 16 nt, Human
cugcugaccugugcac

SEQ ID NO: 1239755 - RNA, 12 nt, Human
cugcugagaacc

SEQ ID NO: 1239756 - RNA, 14 nt, Human
cugcugagaaccug

SEQ ID NO: 1239757 - RNA, 13 nt, Human
cugcugagaaccu

SEQ ID NO: 1239758 - RNA, 18 nt, Human
cugcucaguaaagcacuu

SEQ ID NO: 1239759 - RNA, 19 nt, Human
cugcucaguaaagcacuug

SEQ ID NO: 1239760 - RNA, 15 nt, Human
cugcucauauuguga

SEQ ID NO: 1239761 - RNA, 19 nt, Human
cugcucauauugugauucu

SEQ ID NO: 1239762 - RNA, 16 nt, Human
cugcucaucauucucu

SEQ ID NO: 1239763 - RNA, 17 nt, Human
cugcucaucauucucug

SEQ ID NO: 1239764 - RNA, 18 nt, Human
cugcucaucauucucugu

SEQ ID NO: 1239765 - RNA, 22 nt, Human
cugcucaucauucucugucuca

SEQ ID NO: 1239766 - RNA, 13 nt, Human
cugcucauccacu

SEQ ID NO: 1239767 - RNA, 19 nt, Human
cuggacuuggccccugcca

SEQ ID NO: 1239768 - RNA, 13 nt, Human
cuggacuuuccug

SEQ ID NO: 1239769 - RNA, 18 nt, Human
cuggacuuggccccugcc

SEQ ID NO: 1239770 - RNA, 17 nt, Human
cuggacuuggccccugc

SEQ ID NO: 1239771 - RNA, 14 nt, Human
cuggacuuuccugc

SEQ ID NO: 1239772 - RNA, 15 nt, Human
cuggacuuuccugca

SEQ ID NO: 1239773 - RNA, 16 nt, Human
cuggacuuuccugcaa

SEQ ID NO: 1239774 - RNA, 18 nt, Human
cuggacuuuccugcaacu

SEQ ID NO: 1239775 - RNA, 16 nt, Human
cuggacuugccucugc

SEQ ID NO: 1239776 - RNA, 20 nt, Human
cuggaguugaucuggaaccc

SEQ ID NO: 1239777 - RNA, 22 nt, Human
cuggaguugaucuggaacccag

SEQ ID NO: 1239778 - RNA, 15 nt, Human
cuggacuugccucug

SEQ ID NO: 1239779 - RNA, 14 nt, Human
cuggaacuugggga

SEQ ID NO: 1239780 - RNA, 21 nt, Human
cuggaagacgcaagggccuga

SEQ ID NO: 1239781 - RNA, 23 nt, Human
cuggaagauggggaccagcagcc

SEQ ID NO: 1239782 - RNA, 16 nt, Human
cuggaagagcagcccu

SEQ ID NO: 1239783 - RNA, 15 nt, Human
cuggaagauagcugu

SEQ ID NO: 1239784 - RNA, 16 nt, Human
cuggaagauagcugug

SEQ ID NO: 1239785 - RNA, 19 nt, Human
cuggaagauagcugugacu

SEQ ID NO: 1239786 - RNA, 14 nt, Human
cuggaagauccugc

SEQ ID NO: 1239787 - RNA, 18 nt, Human
cuggaagauccugcgggu

SEQ ID NO: 1239788 - RNA, 13 nt, Human
cuggaagaugggg

SEQ ID NO: 1239789 - RNA, 14 nt, Human
cuggaagaugggga

SEQ ID NO: 1239790 - RNA, 13 nt, Human
cuggaguuucaug

SEQ ID NO: 1239791 - RNA, 22 nt, Human
cuggaguuucauguacaagaug

SEQ ID NO: 1239792 - RNA, 18 nt, Human
cuggaguuucauguacaa

SEQ ID NO: 1239793 - RNA, 17 nt, Human
cuggauaacuuccacag

SEQ ID NO: 1239794 - RNA, 22 nt, Human
cuggauaacuuccacagggucc

SEQ ID NO: 1239795 - RNA, 18 nt, Human
cuggauaacuuccacagg

SEQ ID NO: 1239796 - RNA, 15 nt, Human
cuggaucagaacagg

SEQ ID NO: 1239797 - RNA, 13 nt, Human
cuggaucagcgug

SEQ ID NO: 1239798 - RNA, 14 nt, Human
cuggaucagcgugg

SEQ ID NO: 1239799 - RNA, 16 nt, Human
cuggaucagcguggcc

SEQ ID NO: 1239800 - RNA, 17 nt, Human
cuggaucagcguggccu

SEQ ID NO: 1239801 - RNA, 18 nt, Human
cuggaucagcguggccuu

SEQ ID NO: 1239802 - RNA, 12 nt, Human
cuggggcaggcu

SEQ ID NO: 1239803 - RNA, 14 nt, Human
cuggggcaggcugg

SEQ ID NO: 1239804 - RNA, 15 nt, Human
cuggggcaggcuggg

SEQ ID NO: 1239805 - RNA, 15 nt, Human
cuggggagcaggcag

SEQ ID NO: 1239806 - RNA, 16 nt, Human
cuggggagcaggcagc

SEQ ID NO: 1239807 - RNA, 17 nt, Human
cuggggagcaggcagcc

SEQ ID NO: 1239808 - RNA, 21 nt, Human
cuggggagcaggcagccagca

SEQ ID NO: 1239809 - RNA, 12 nt, Human
cuggggagcccg

SEQ ID NO: 1239810 - RNA, 15 nt, Human
cuggggagcccgucu

SEQ ID NO: 1239811 - RNA, 20 nt, Human
cuggggagcccgucucagug

SEQ ID NO: 1239812 - RNA, 22 nt, Human
cuggggagcgggucugcuccca

SEQ ID NO: 1239813 - RNA, 14 nt, Human
cuggggagcggguc

SEQ ID NO: 1239814 - RNA, 12 nt, Human
cugggccagaau

SEQ ID NO: 1239815 - RNA, 19 nt, Human
cugggccaacucaccugag

SEQ ID NO: 1239816 - RNA, 14 nt, Human
cugggccagaauuu

SEQ ID NO: 1239817 - RNA, 11 nt, Human
cuggggagcag

SEQ ID NO: 1239818 - RNA, 20 nt, Human
cuggggcugaggcugaggca

SEQ ID NO: 1239819 - RNA, 13 nt, Human
cuggggcucagag

SEQ ID NO: 1239820 - RNA, 14 nt, Human
cuggggcucagagc

SEQ ID NO: 1239821 - RNA, 17 nt, Human
cuggggcucagagccgg

SEQ ID NO: 1239822 - RNA, 16 nt, Human
cuggggcucagagccg

SEQ ID NO: 1239823 - RNA, 19 nt, Human
cuggggcucuaacgccuga

SEQ ID NO: 1239824 - RNA, 20 nt, Human
cuggggcucuaacgccugag

SEQ ID NO: 1239825 - RNA, 21 nt, Human
cuggggcucuaacgccugagc

SEQ ID NO: 1239826 - RNA, 22 nt, Human
cuggggcucuaacgccugagcc

SEQ ID NO: 1239827 - RNA, 23 nt, Human
cuggggcucuaacgccugagccc

SEQ ID NO: 1239828 - RNA, 18 nt, Human
cuggggccaggcuggguc

SEQ ID NO: 1239829 - RNA, 18 nt, Human
cuggggcuagggggagcc

SEQ ID NO: 1239830 - RNA, 12 nt, Human
cuggggcucaga

SEQ ID NO: 1239831 - RNA, 15 nt, Human
cuggggccaggcugg

SEQ ID NO: 1239832 - RNA, 16 nt, Human
cuggggcaggcugggc

SEQ ID NO: 1239833 - RNA, 17 nt, Human
cuggggcaggcugggcc

SEQ ID NO: 1239834 - RNA, 18 nt, Human
cuggggcaggcugggcca

SEQ ID NO: 1239835 - RNA, 19 nt, Human
cuggggcaggcugggccau

SEQ ID NO: 1239836 - RNA, 21 nt, Human
cuggggcaggcugggccaugu

SEQ ID NO: 1239837 - RNA, 17 nt, Human
cuggggcauggaaggca

SEQ ID NO: 1239838 - RNA, 15 nt, Human
cuggguggcuacucu

SEQ ID NO: 1239839 - RNA, 17 nt, Human
cuggguggcuacucugu

SEQ ID NO: 1239840 - RNA, 19 nt, Human
cuggguggcuacucugugc

SEQ ID NO: 1239841 - RNA, 20 nt, Human
cuggguggcuacucugugcc

SEQ ID NO: 1239842 - RNA, 21 nt, Human
cuggguggcuacucugugcca

SEQ ID NO: 1239843 - RNA, 22 nt, Human
cuggguggcuacucugugccag

SEQ ID NO: 1239844 - RNA, 15 nt, Human
cuggguggcucacuc

SEQ ID NO: 1239845 - RNA, 17 nt, Human
cuggguggcucacucag

SEQ ID NO: 1239846 - RNA, 16 nt, Human
cugggugguacccucu

SEQ ID NO: 1239847 - RNA, 18 nt, Human
cugggacuugcaaaaagg

SEQ ID NO: 1239848 - RNA, 23 nt, Human
cugggacuauaggcaugcgccac

SEQ ID NO: 1239849 - RNA, 13 nt, Human
cugggacucagcc

SEQ ID NO: 1239850 - RNA, 18 nt, Human
cugggacaacugcuccca

SEQ ID NO: 1239851 - RNA, 22 nt, Human
cugggacaacugcucccaccuc

SEQ ID NO: 1239852 - RNA, 14 nt, Human
cugggacucagccu

SEQ ID NO: 1239853 - RNA, 15 nt, Human
cugggacucagccuu

SEQ ID NO: 1239854 - RNA, 16 nt, Human
cugggacucagccuuc

SEQ ID NO: 1239855 - RNA, 17 nt, Human
cugggacucagccuuca

SEQ ID NO: 1239856 - RNA, 18 nt, Human
cugggacucagccuucag

SEQ ID NO: 1239857 - RNA, 21 nt, Human
cugggacucagccuucagaca

SEQ ID NO: 1239858 - RNA, 23 nt, Human
cugggaauggaggggcagagcca

SEQ ID NO: 1239859 - RNA, 20 nt, Human
cugggaauggaggggcagag

SEQ ID NO: 1239860 - RNA, 13 nt, Human
cugggaauggagg

SEQ ID NO: 1239861 - RNA, 23 nt, Human
cugggaagucguccuuacuccug

SEQ ID NO: 1239862 - RNA, 24 nt, Human
cuggcucugagcgccuccauccaa

SEQ ID NO: 1239863 - RNA, 15 nt, Human
cuggcccugcccugg

SEQ ID NO: 1239864 - RNA, 16 nt, Human
cuggccgggagccuga

SEQ ID NO: 1239865 - RNA, 19 nt, Human
cuggccuagaccagcagac

SEQ ID NO: 1239866 - RNA, 20 nt, Human
cuggccuagaccagcagaca

SEQ ID NO: 1239867 - RNA, 22 nt, Human
cuggccuagaccagcagacaga

SEQ ID NO: 1239868 - RNA, 13 nt, Human
cuggcucuccugg

SEQ ID NO: 1239869 - RNA, 17 nt, Human
cuggcucuccuggcccu

SEQ ID NO: 1239870 - RNA, 15 nt, Human
cuggcucuccuggcc

SEQ ID NO: 1239871 - RNA, 12 nt, Human
cuggcucugagc

SEQ ID NO: 1239872 - RNA, 13 nt, Human
cuggcucugagcg

SEQ ID NO: 1239873 - RNA, 20 nt, Human
cuggcucugagcgccuccau

SEQ ID NO: 1239874 - RNA, 21 nt, Human
cuggcucugagcgccuccauc

SEQ ID NO: 1239875 - RNA, 20 nt, Human
cuggcagccucccauccagg

SEQ ID NO: 1239876 - RNA, 22 nt, Human
cuggcagccucccauccagggc

SEQ ID NO: 1239877 - RNA, 23 nt, Human
cuggcagccucccauccagggcc

SEQ ID NO: 1239878 - RNA, 13 nt, Human
cuggccccucucc

SEQ ID NO: 1239879 - RNA, 14 nt, Human
cuggccccucuccc

SEQ ID NO: 1239880 - RNA, 15 nt, Human
cuggccccucucccu

SEQ ID NO: 1239881 - RNA, 24 nt, Human
cuggccccucucccuugggcucug

SEQ ID NO: 1239882 - RNA, 11 nt, Human
cuggcccugcc

SEQ ID NO: 1239883 - RNA, 13 nt, Human
cuggcccugcccu

SEQ ID NO: 1239884 - RNA, 14 nt, Human
cuggcccugcccug

SEQ ID NO: 1239885 - RNA, 14 nt, Human
cuggcagaggaggg

SEQ ID NO: 1239886 - RNA, 18 nt, Human
cuggcagagaugccuccc

SEQ ID NO: 1239887 - RNA, 20 nt, Human
cuggcagagaugccucccug

SEQ ID NO: 1239888 - RNA, 12 nt, Human
cuggcagccaca

SEQ ID NO: 1239889 - RNA, 14 nt, Human
cuggcagccacacu

SEQ ID NO: 1239890 - RNA, 15 nt, Human
cuggcagccacacuu

SEQ ID NO: 1239891 - RNA, 22 nt, Human
cuggcagccacacuucucagga

SEQ ID NO: 1239892 - RNA, 23 nt, Human
cuggcagccacacuucucaggac

SEQ ID NO: 1239893 - RNA, 20 nt, Human
cuggcagccgugccuucagc

SEQ ID NO: 1239894 - RNA, 21 nt, Human
cuggcagccgugccuucagcu

SEQ ID NO: 1239895 - RNA, 22 nt, Human
cuggcagccgugccuucagcuc

SEQ ID NO: 1239896 - RNA, 12 nt, Human
cuggcagccucc

SEQ ID NO: 1239897 - RNA, 14 nt, Human
cuggcagccuccca

SEQ ID NO: 1239898 - RNA, 15 nt, Human
cuggcagccucccau

SEQ ID NO: 1239899 - RNA, 14 nt, Human
cuggcagagaugcc

SEQ ID NO: 1239900 - RNA, 17 nt, Human
cuggcagagaugccucc

SEQ ID NO: 1239901 - RNA, 13 nt, Human
cuguuauaaucuu

SEQ ID NO: 1239902 - RNA, 19 nt, Human
cuguuauaaucuuucacag

SEQ ID NO: 1239903 - RNA, 12 nt, Human
cugugucuaaga

SEQ ID NO: 1239904 - RNA, 13 nt, Human
cugugucuaagau

SEQ ID NO: 1239905 - RNA, 13 nt, Human
cuguuagucauuu

SEQ ID NO: 1239906 - RNA, 14 nt, Human
cuguuagucauuug

SEQ ID NO: 1239907 - RNA, 15 nt, Human
cuguuagucauuugc

SEQ ID NO: 1239908 - RNA, 18 nt, Human
cuguuagucauuugcuga

SEQ ID NO: 1239909 - RNA, 14 nt, Human
cugugcgcccaggg

SEQ ID NO: 1239910 - RNA, 14 nt, Human
cugugucacccagg

SEQ ID NO: 1239911 - RNA, 23 nt, Human
cugugccuuguuuuuuguuuguu

SEQ ID NO: 1239912 - RNA, 17 nt, Human
cugugcgcccagggcug

SEQ ID NO: 1239913 - RNA, 20 nt, Human
cugugccuugucacgccaga

SEQ ID NO: 1239914 - RNA, 15 nt, Human
cugugccugaauauu

SEQ ID NO: 1239915 - RNA, 14 nt, Human
cugugaccugcuga

SEQ ID NO: 1239916 - RNA, 15 nt, Human
cugugaccugcugag

SEQ ID NO: 1239917 - RNA, 16 nt, Human
cugugaccugcugagc

SEQ ID NO: 1239918 - RNA, 17 nt, Human
cugugaccugcugagcu

SEQ ID NO: 1239919 - RNA, 18 nt, Human
cugugaccugcugagcuc

SEQ ID NO: 1239920 - RNA, 19 nt, Human
cugugaccugcugagcucu

SEQ ID NO: 1239921 - RNA, 20 nt, Human
cugugaccugcugagcucug

SEQ ID NO: 1239922 - RNA, 21 nt, Human
cugugaccugcugagcucuga

SEQ ID NO: 1239923 - RNA, 22 nt, Human
cugugaccugcugagcucugag

SEQ ID NO: 1239924 - RNA, 13 nt, Human
cugugacccccag

SEQ ID NO: 1239925 - RNA, 15 nt, Human
cugugacccccagcu

SEQ ID NO: 1239926 - RNA, 16 nt, Human
cugugacccccagcuc

SEQ ID NO: 1239927 - RNA, 17 nt, Human
cugugacccccagcucc

SEQ ID NO: 1239928 - RNA, 18 nt, Human
cugugacccccagcuccg

SEQ ID NO: 1239929 - RNA, 21 nt, Human
cugugacccccagcuccggcc

SEQ ID NO: 1239930 - RNA, 17 nt, Human
cugugaccucuccccug

SEQ ID NO: 1239931 - RNA, 18 nt, Human
cuguagacggcucaguau

SEQ ID NO: 1239932 - RNA, 23 nt, Human
cuguagaaaaaaaaauucacaug

SEQ ID NO: 1239933 - RNA, 18 nt, Human
cuguagaacucaaccucu

SEQ ID NO: 1239934 - RNA, 15 nt, Human
cuguagguugcacac

SEQ ID NO: 1239935 - RNA, 16 nt, Human
cuguagguugcacacu

SEQ ID NO: 1239936 - RNA, 24 nt, Human
cuguaggguaauuaguaacaugug

SEQ ID NO: 1239937 - RNA, 17 nt, Human
cuguagguugcacacuu

SEQ ID NO: 1239938 - RNA, 19 nt, Human
cuguagguugcacacuuug

SEQ ID NO: 1239939 - RNA, 22 nt, Human
cuguagguugcacacuuuggua

SEQ ID NO: 1239940 - RNA, 20 nt, Human
cuguagguugcacacuuugg

SEQ ID NO: 1239941 - RNA, 17 nt, Human
cuguaguaaauaaugcu

SEQ ID NO: 1239942 - RNA, 22 nt, Human
cuguaguaaauaaugcuuugaa

SEQ ID NO: 1239943 - RNA, 18 nt, Human
cuguaguaaauaaugcuu

SEQ ID NO: 1239944 - RNA, 19 nt, Human
cuguaguaaauaaugcuuu

SEQ ID NO: 1239945 - RNA, 20 nt, Human
cuguaguaaauaaugcuuug

SEQ ID NO: 1239946 - RNA, 22 nt, Human
cuguaguaggcauuuuuaccau

SEQ ID NO: 1239947 - RNA, 18 nt, Human
cuguaguaggcauuuuua

SEQ ID NO: 1239948 - RNA, 21 nt, Human
cuguacugauucaauuugaug

SEQ ID NO: 1239949 - RNA, 17 nt, Human
cuguacugauucaauuu

SEQ ID NO: 1239950 - RNA, 14 nt, Human
cuguacugauucaa

SEQ ID NO: 1239951 - RNA, 12 nt, Human
cuguacugccug

SEQ ID NO: 1239952 - RNA, 13 nt, Human
cuguacugccugc

SEQ ID NO: 1239953 - RNA, 14 nt, Human
cuguacugccugcu

SEQ ID NO: 1239954 - RNA, 13 nt, Human
cuguacugauuca

SEQ ID NO: 1239955 - RNA, 19 nt, Human
cuguacugaaguaaaacaa

SEQ ID NO: 1239956 - RNA, 20 nt, Human
cuguacugaaguaaaacaaa

SEQ ID NO: 1239957 - RNA, 15 nt, Human
cuguacugccugcuu

SEQ ID NO: 1239958 - RNA, 16 nt, Human
cuguacugccugcuug

SEQ ID NO: 1239959 - RNA, 17 nt, Human
cuguacugccugcuugg

SEQ ID NO: 1239960 - RNA, 18 nt, Human
cuguacugccugcuuggg

SEQ ID NO: 1239961 - RNA, 19 nt, Human
cuguacugccugcuugggg

SEQ ID NO: 1239962 - RNA, 17 nt, Human
cuguacuguucuguguc

SEQ ID NO: 1239963 - RNA, 20 nt, Human
cuguacuguucugugucuuu

SEQ ID NO: 1239964 - RNA, 19 nt, Human
cuguaacauacuggccugg

SEQ ID NO: 1239965 - RNA, 15 nt, Human
cuguaaccucuucag

SEQ ID NO: 1239966 - RNA, 19 nt, Human
cuguaaccucuucagaggc

SEQ ID NO: 1239967 - RNA, 20 nt, Human
cuguaaccucuucagaggcc

SEQ ID NO: 1239968 - RNA, 22 nt, Human
cuguaaccucuucagaggcccu

SEQ ID NO: 1239969 - RNA, 23 nt, Human
cuguaaccucuucagaggcccuc

SEQ ID NO: 1239970 - RNA, 15 nt, Human
cuguaacauucagga

SEQ ID NO: 1239971 - RNA, 16 nt, Human
cuguaacuacuuuaua

SEQ ID NO: 1239972 - RNA, 17 nt, Human
cuguaacuacuuuauaa

SEQ ID NO: 1239973 - RNA, 19 nt, Human
cuguaacuacuuuauaacu

SEQ ID NO: 1239974 - RNA, 14 nt, Human
cuguaacugccagg

SEQ ID NO: 1239975 - RNA, 15 nt, Human
cuguaacugccaggc

SEQ ID NO: 1239976 - RNA, 16 nt, Human
cuguaacugccaggcu

SEQ ID NO: 1239977 - RNA, 13 nt, Human
cuguaacugucac

SEQ ID NO: 1239978 - RNA, 15 nt, Human
cuggugaagcucacu

SEQ ID NO: 1239979 - RNA, 20 nt, Human
cuggugacaucagguuuuuc

SEQ ID NO: 1239980 - RNA, 18 nt, Human
cuggucuuguggaauugg

SEQ ID NO: 1239981 - RNA, 20 nt, Human
cuggucuuguggaauuggga

SEQ ID NO: 1239982 - RNA, 20 nt, Human
cuggugaagcucacuucugg

SEQ ID NO: 1239983 - RNA, 19 nt, Human
cuguaaacuuuaucacuua

SEQ ID NO: 1239984 - RNA, 18 nt, Human
cuguaaacuuuaucacuu

SEQ ID NO: 1239985 - RNA, 14 nt, Human
cuguaaacugugua

SEQ ID NO: 1239986 - RNA, 20 nt, Human
cuguaaacuguguauuccaa

SEQ ID NO: 1239987 - RNA, 13 nt, Human
cugguuuccugcc

SEQ ID NO: 1239988 - RNA, 14 nt, Human
cugguuuccugccc

SEQ ID NO: 1239989 - RNA, 16 nt, Human
cugguuuccugcccug

SEQ ID NO: 1239990 - RNA, 12 nt, Human
cuguaaacugug

SEQ ID NO: 1239991 - RNA, 13 nt, Human
cuguaaacugugu

SEQ ID NO: 1239992 - RNA, 16 nt, Human
cugguuguuaugugau

SEQ ID NO: 1239993 - RNA, 16 nt, Human
cugguuguuucuguuc

SEQ ID NO: 1239994 - RNA, 19 nt, Human
cugguuguuucuguuccaa

SEQ ID NO: 1239995 - RNA, 14 nt, Human
cugguuuaauguuu

SEQ ID NO: 1239996 - RNA, 21 nt, Human
cugguuguuucuguuccaaau

SEQ ID NO: 1239997 - RNA, 16 nt, Human
cugucacaaccaagaa

SEQ ID NO: 1239998 - RNA, 15 nt, Human
cugucacaaccaaga

SEQ ID NO: 1239999 - RNA, 19 nt, Human
cugucaguucuaaccuccu

SEQ ID NO: 1240000 - RNA, 14 nt, Human
cugucauagaaauu

SEQ ID NO: 1240001 - RNA, 16 nt, Human
cugucauagaaauuac

SEQ ID NO: 1240002 - RNA, 22 nt, Human
cugucauaugcucugauuuauc

SEQ ID NO: 1240003 - RNA, 16 nt, Human
cugucaucaauuaaag

SEQ ID NO: 1240004 - RNA, 23 nt, Human
cugucaucaauuaaaggcaaagg

SEQ ID NO: 1240005 - RNA, 16 nt, Human
cugucaucaucauggc

SEQ ID NO: 1240006 - RNA, 17 nt, Human
cugucaucaucauggcc

SEQ ID NO: 1240007 - RNA, 19 nt, Human
cugucaucaucauggccag

SEQ ID NO: 1240008 - RNA, 20 nt, Human
cugucaucaucauggccagc

SEQ ID NO: 1240009 - RNA, 21 nt, Human
cugucaucaucauggccagcu

SEQ ID NO: 1240010 - RNA, 17 nt, Human
cugucauccagcucacu

SEQ ID NO: 1240011 - RNA, 20 nt, Human
cugucauccucaaagaaagu

SEQ ID NO: 1240012 - RNA, 21 nt, Human
cugucauccucaaagaaagug

SEQ ID NO: 1240013 - RNA, 22 nt, Human
cugucauccucaaagaaagugu

SEQ ID NO: 1240014 - RNA, 23 nt, Human
cugucauccucaaagaaagugua

SEQ ID NO: 1240015 - RNA, 19 nt, Human
cuguccucccgagcuccuc

SEQ ID NO: 1240016 - RNA, 21 nt, Human
cuguccucccgagcuccucuu

SEQ ID NO: 1240017 - RNA, 13 nt, Human
cuguccucuuuca

SEQ ID NO: 1240018 - RNA, 15 nt, Human
cuguccucuuucagc

SEQ ID NO: 1240019 - RNA, 16 nt, Human
cuguccucuuucagcu

SEQ ID NO: 1240020 - RNA, 17 nt, Human
cuguccucuuucagcuc

SEQ ID NO: 1240021 - RNA, 18 nt, Human
cuguccucuuucagcucc

SEQ ID NO: 1240022 - RNA, 19 nt, Human
cuguccucuuucagcuccu

SEQ ID NO: 1240023 - RNA, 20 nt, Human
cuguccucuuucagcuccug

SEQ ID NO: 1240024 - RNA, 21 nt, Human
cuguccucuuucagcuccuga

SEQ ID NO: 1240025 - RNA, 22 nt, Human
cuguccucuuucagcuccugac

SEQ ID NO: 1240026 - RNA, 13 nt, Human
cuguccugggccu

SEQ ID NO: 1240027 - RNA, 14 nt, Human
cuguccugggccug

SEQ ID NO: 1240028 - RNA, 18 nt, Human
cuguccugggccugcaga

SEQ ID NO: 1240029 - RNA, 22 nt, Human
cuguccuguacauugugggaug

SEQ ID NO: 1240030 - RNA, 21 nt, Human
cuguccuggugguauuuucaa

SEQ ID NO: 1240031 - RNA, 15 nt, Human
cugucgcucucaguu

SEQ ID NO: 1240032 - RNA, 16 nt, Human
cugucgcucucaguuc

SEQ ID NO: 1240033 - RNA, 14 nt, Human
cuguccugguggua

SEQ ID NO: 1240034 - RNA, 17 nt, Human
cuguccuggugguauuu

SEQ ID NO: 1240035 - RNA, 19 nt, Human
cuguccuggugguauuuuc

SEQ ID NO: 1240036 - RNA, 20 nt, Human
cuguccuggugguauuuuca

SEQ ID NO: 1240037 - RNA, 23 nt, Human
cuguccuggugguauuuucaaua

SEQ ID NO: 1240038 - RNA, 14 nt, Human
cuguccuguacauu

SEQ ID NO: 1240039 - RNA, 14 nt, Human
cuguccugucauca

SEQ ID NO: 1240040 - RNA, 13 nt, Human
cugucgcugcuuc

SEQ ID NO: 1240041 - RNA, 14 nt, Human
cugucgcugcuucg

SEQ ID NO: 1240042 - RNA, 17 nt, Human
cugucgcugcuucgugg

SEQ ID NO: 1240043 - RNA, 19 nt, Human
cuuagcuaguuuuauucuu

SEQ ID NO: 1240044 - RNA, 16 nt, Human
cuuagcucaaugagca

SEQ ID NO: 1240045 - RNA, 18 nt, Human
cuuagcucaaugagcaug

SEQ ID NO: 1240046 - RNA, 19 nt, Human
cuuagcucaaugagcaugu

SEQ ID NO: 1240047 - RNA, 20 nt, Human
cuuagcucaaugagcauguu

SEQ ID NO: 1240048 - RNA, 13 nt, Human
cuuagcugggaga

SEQ ID NO: 1240049 - RNA, 14 nt, Human
cuuagcugucugcu

SEQ ID NO: 1240050 - RNA, 19 nt, Human
cuuagcucucccaacucuu

SEQ ID NO: 1240051 - RNA, 22 nt, Human
cuuagcucaaugagcauguuua

SEQ ID NO: 1240052 - RNA, 17 nt, Human
cuuagcugucugcucag

SEQ ID NO: 1240053 - RNA, 20 nt, Human
cuuagcuuuagaaacagugc

SEQ ID NO: 1240054 - RNA, 16 nt, Human
cuuagcuuuagaaaca

SEQ ID NO: 1240055 - RNA, 13 nt, Human
cuuagccuggacc

SEQ ID NO: 1240056 - RNA, 17 nt, Human
cuuagccuggaccucug

SEQ ID NO: 1240057 - RNA, 18 nt, Human
cuuagccuggaccucuga

SEQ ID NO: 1240058 - RNA, 19 nt, Human
cuuagccuggaccucugac

SEQ ID NO: 1240059 - RNA, 21 nt, Human
cuuagccuggaccucugacag

SEQ ID NO: 1240060 - RNA, 20 nt, Human
cuuagccuggaccucugaca

SEQ ID NO: 1240061 - RNA, 19 nt, Human
cuuagcauuuucugcaucu

SEQ ID NO: 1240062 - RNA, 21 nt, Human
cuuagcauuuucugcaucucc

SEQ ID NO: 1240063 - RNA, 19 nt, Human
cuuaccaggcaccaaaaga

SEQ ID NO: 1240064 - RNA, 20 nt, Human
cuuaccaggcaccaaaagaa

SEQ ID NO: 1240065 - RNA, 18 nt, Human
cuuagcaguccccuuccc

SEQ ID NO: 1240066 - RNA, 12 nt, Human
cuuagcaguccc

SEQ ID NO: 1240067 - RNA, 17 nt, Human
cuuagcaguccccuucc

SEQ ID NO: 1240068 - RNA, 16 nt, Human
cuuaggaagagccuuc

SEQ ID NO: 1240069 - RNA, 20 nt, Human
cuuaggaagagccuuccacc

SEQ ID NO: 1240070 - RNA, 23 nt, Human
cuuaggaagagccuuccacccag

SEQ ID NO: 1240071 - RNA, 21 nt, Human
cuuagggacagucaaaaccaa

SEQ ID NO: 1240072 - RNA, 15 nt, Human
cuuagggcaccaggg

SEQ ID NO: 1240073 - RNA, 16 nt, Human
cuguucaaagcugccu

SEQ ID NO: 1240074 - RNA, 14 nt, Human
cuguuuaagagaca

SEQ ID NO: 1240075 - RNA, 12 nt, Human
cuguuuaagaga

SEQ ID NO: 1240076 - RNA, 15 nt, Human
cuguuguagaagaca

SEQ ID NO: 1240077 - RNA, 16 nt, Human
cuguuuaaaaaaccac

SEQ ID NO: 1240078 - RNA, 20 nt, Human
cuguuuaaaaaaccacaugg

SEQ ID NO: 1240079 - RNA, 18 nt, Human
cuguuuaaaaaaccacau

SEQ ID NO: 1240080 - RNA, 12 nt, Human
cuguugggagag

SEQ ID NO: 1240081 - RNA, 17 nt, Human
cuuaaauaagaaacuuu

SEQ ID NO: 1240082 - RNA, 13 nt, Human
cuuaaauaagaaa

SEQ ID NO: 1240083 - RNA, 16 nt, Human
cuuaaauaagaaacuu

SEQ ID NO: 1240084 - RNA, 14 nt, Human
cuuacaaaugaaaa

SEQ ID NO: 1240085 - RNA, 21 nt, Human
cuuaaaaauuaaauuggaaag

SEQ ID NO: 1240086 - RNA, 21 nt, Human
cuuacauuagcaguuugcuuu

SEQ ID NO: 1240087 - RNA, 22 nt, Human
cuuacauuagcaguuugcuuug

SEQ ID NO: 1240088 - RNA, 18 nt, Human
cuuacaagccuaagaauc

SEQ ID NO: 1240089 - RNA, 22 nt, Human
cuuacauuuacaaacugaagag

SEQ ID NO: 1240090 - RNA, 20 nt, Human
cuuugaccugccucccuuca

SEQ ID NO: 1240091 - RNA, 17 nt, Human
cuuucucacuaaaucuu

SEQ ID NO: 1240092 - RNA, 22 nt, Human
cuuucucacuaaaucuuuuaua

SEQ ID NO: 1240093 - RNA, 15 nt, Human
cuuucucaguuuuca

SEQ ID NO: 1240094 - RNA, 16 nt, Human
cuuucucaguuuucau

SEQ ID NO: 1240095 - RNA, 17 nt, Human
cuuucucaguuuucaua

SEQ ID NO: 1240096 - RNA, 20 nt, Human
cuuucucaguuuucauaagu

SEQ ID NO: 1240097 - RNA, 23 nt, Human
cuuugaccugccucccuucaugc

SEQ ID NO: 1240098 - RNA, 13 nt, Human
cuuugacucagga

SEQ ID NO: 1240099 - RNA, 23 nt, Human
cuuugacucaggagccugugaca

SEQ ID NO: 1240100 - RNA, 21 nt, Human
cuuugacucuuuugccauuaa

SEQ ID NO: 1240101 - RNA, 18 nt, Human
cuuucucaauaagccuca

SEQ ID NO: 1240102 - RNA, 22 nt, Human
cuuuguauuguauauuacaaug

SEQ ID NO: 1240103 - RNA, 13 nt, Human
cuuuguauucaaa

SEQ ID NO: 1240104 - RNA, 12 nt, Human
cuuuuauaauuc

SEQ ID NO: 1240105 - RNA, 21 nt, Human
cuuuuauaauucucauuaaaa

SEQ ID NO: 1240106 - RNA, 12 nt, Human
cuuuuauacucu

SEQ ID NO: 1240107 - RNA, 15 nt, Human
cuuuguaaugaaaac

SEQ ID NO: 1240108 - RNA, 14 nt, Human
cuuuguaaugaaaa

SEQ ID NO: 1240109 - RNA, 22 nt, Human
cuuugcacgugcuguuugcugu

SEQ ID NO: 1240110 - RNA, 13 nt, Human
cuuugguucuaag

SEQ ID NO: 1240111 - RNA, 14 nt, Human
cuuugguucuaagg

SEQ ID NO: 1240112 - RNA, 15 nt, Human
cuuugguucuaagga

SEQ ID NO: 1240113 - RNA, 16 nt, Human
cuuugguucuaaggac

SEQ ID NO: 1240114 - RNA, 16 nt, Human
cuuuguaaugaaaacc

SEQ ID NO: 1240115 - RNA, 12 nt, Human
cuuuguaugcac

SEQ ID NO: 1240116 - RNA, 14 nt, Human
cuuugacuuuuugc

SEQ ID NO: 1240117 - RNA, 15 nt, Human
cuuugacuuuuugca

SEQ ID NO: 1240118 - RNA, 17 nt, Human
cuuugacuuuuugcauu

SEQ ID NO: 1240119 - RNA, 12 nt, Human
cuuugagagaga

SEQ ID NO: 1240120 - RNA, 15 nt, Human
cuuugagagagaaag

SEQ ID NO: 1240121 - RNA, 18 nt, Human
cuuugagagagaaaggac

SEQ ID NO: 1240122 - RNA, 18 nt, Human
cuuugcacagcucuccgg

SEQ ID NO: 1240123 - RNA, 14 nt, Human
cuuugcacgugcug

SEQ ID NO: 1240124 - RNA, 14 nt, Human
cuuugguucagcua

SEQ ID NO: 1240125 - RNA, 19 nt, Human
cuuucagcaagauaaacau

SEQ ID NO: 1240126 - RNA, 21 nt, Human
cuuucagcaagauaaacauua

SEQ ID NO: 1240127 - RNA, 20 nt, Human
cuuucagcaagacuucucuu

SEQ ID NO: 1240128 - RNA, 16 nt, Human
cuuuacccauuugggu

SEQ ID NO: 1240129 - RNA, 20 nt, Human
cuuucacuaaaacacacagg

SEQ ID NO: 1240130 - RNA, 17 nt, Human
cuuuacaugaggacucu

SEQ ID NO: 1240131 - RNA, 19 nt, Human
cuuuaccaaagaugaauga

SEQ ID NO: 1240132 - RNA, 16 nt, Human
cuuuaccaaagaugaa

SEQ ID NO: 1240133 - RNA, 17 nt, Human
cuugugcccucccuguc

SEQ ID NO: 1240134 - RNA, 15 nt, Human
cuugugcaguguuga

SEQ ID NO: 1240135 - RNA, 20 nt, Human
cuugugcccucccuguccuu

SEQ ID NO: 1240136 - RNA, 18 nt, Human
cuuguggaauugggagcu

SEQ ID NO: 1240137 - RNA, 13 nt, Human
cuuuaauguuuuu

SEQ ID NO: 1240138 - RNA, 17 nt, Human
cuuuaauguuuuuugcc

SEQ ID NO: 1240139 - RNA, 23 nt, Human
cuuuaauguuuuuugccacagcu

SEQ ID NO: 1240140 - RNA, 18 nt, Human
cuuuaauuaccaaccugu

SEQ ID NO: 1240141 - RNA, 19 nt, Human
cuuuaauuaccaaccuguu

SEQ ID NO: 1240142 - RNA, 21 nt, Human
cuuuaauguuuuuugccacag

SEQ ID NO: 1240143 - RNA, 14 nt, Human
cuuuaauucuguau

SEQ ID NO: 1240144 - RNA, 18 nt, Human
cuuuaauucuguaucugu

SEQ ID NO: 1240145 - RNA, 13 nt, Human
cuugucuuuauuu

SEQ ID NO: 1240146 - RNA, 19 nt, Human
cuugugaaucaagggucag

SEQ ID NO: 1240147 - RNA, 20 nt, Human
cuugugaaucaagggucagg

SEQ ID NO: 1240148 - RNA, 22 nt, Human
cuugugaaucaagggucaggcc

SEQ ID NO: 1240149 - RNA, 16 nt, Human
cuugucuauaaagcau

SEQ ID NO: 1240150 - RNA, 17 nt, Human
cuugucuauaaagcauu

SEQ ID NO: 1240151 - RNA, 20 nt, Human
cuugucuauaaagcauuuaa

SEQ ID NO: 1240152 - RNA, 20 nt, Human
cuuggugaauuuuuuuuucc

SEQ ID NO: 1240153 - RNA, 22 nt, Human
cuuggugaauuuuuuuuuccua

SEQ ID NO: 1240154 - RNA, 19 nt, Human
cuuggugauuccgcaguga

SEQ ID NO: 1240155 - RNA, 15 nt, Human
cuuggguuagaccua

SEQ ID NO: 1240156 - RNA, 16 nt, Human
cuuggguuagaccuac

SEQ ID NO: 1240157 - RNA, 18 nt, Human
cuuggguuagaccuacag

SEQ ID NO: 1240158 - RNA, 22 nt, Human
cuuggguuagaccuacaggggg

SEQ ID NO: 1240159 - RNA, 19 nt, Human
cuuggguuagaccuacagg

SEQ ID NO: 1240160 - RNA, 16 nt, Human
cuuggucugugagaug

SEQ ID NO: 1240161 - RNA, 19 nt, Human
cuuggucugugagaugcua

SEQ ID NO: 1240162 - RNA, 16 nt, Human
cuuggguagcgcacuc

SEQ ID NO: 1240163 - RNA, 18 nt, Human
cuuggggguucaggcccg

SEQ ID NO: 1240164 - RNA, 23 nt, Human
cuuggggguucaggcccggcagg

SEQ ID NO: 1240165 - RNA, 16 nt, Human
cuugaaggacuaauag

SEQ ID NO: 1240166 - RNA, 13 nt, Human
cuugaagggccag

SEQ ID NO: 1240167 - RNA, 14 nt, Human
cuugaagggccaga

SEQ ID NO: 1240168 - RNA, 15 nt, Human
cuugaagggccagag

SEQ ID NO: 1240169 - RNA, 16 nt, Human
cuugaagggccagagc

SEQ ID NO: 1240170 - RNA, 17 nt, Human
cuugaagggccagagcc

SEQ ID NO: 1240171 - RNA, 18 nt, Human
cuugaagggccagagcca

SEQ ID NO: 1240172 - RNA, 19 nt, Human
cuugaagggccagagccag

SEQ ID NO: 1240173 - RNA, 21 nt, Human
cuugaagggccagagccaggg

SEQ ID NO: 1240174 - RNA, 21 nt, Human
cuugaauuguaacuguucuug

SEQ ID NO: 1240175 - RNA, 22 nt, Human
cuugaauuguaacuguucuuga

SEQ ID NO: 1240176 - RNA, 20 nt, Human
cuugacaguggaacuacauu

SEQ ID NO: 1240177 - RNA, 23 nt, Human
cuugaagguauaucuagguuuau

SEQ ID NO: 1240178 - RNA, 20 nt, Human
cuugaagggccagagccagg

SEQ ID NO: 1240179 - RNA, 14 nt, Human
cuugaaggugcuga

SEQ ID NO: 1240180 - RNA, 22 nt, Human
cuugaaggugcugacggccagg

SEQ ID NO: 1240181 - RNA, 19 nt, Human
cuugaauguggcuugagaa

SEQ ID NO: 1240182 - RNA, 22 nt, Human
cuugaauguggcuugagaaaua

SEQ ID NO: 1240183 - RNA, 20 nt, Human
cuugaauguggcuugagaaa

SEQ ID NO: 1240184 - RNA, 17 nt, Human
cuugaauuguaacuguu

SEQ ID NO: 1240185 - RNA, 20 nt, Human
cuugaauuguaacuguucuu

SEQ ID NO: 1240186 - RNA, 23 nt, Human
cuugaucagccccacccuggccu

SEQ ID NO: 1240187 - RNA, 18 nt, Human
cuugaucaguuaagaaau

SEQ ID NO: 1240188 - RNA, 22 nt, Human
cuugaucaguuaagaaauuuca

SEQ ID NO: 1240189 - RNA, 16 nt, Human
cuugauccauuucuaa

SEQ ID NO: 1240190 - RNA, 18 nt, Human
cuugauccauuucuaauu

SEQ ID NO: 1240191 - RNA, 17 nt, Human
cuugauccauuucuaau

SEQ ID NO: 1240192 - RNA, 16 nt, Human
cuugauuauccauauu

SEQ ID NO: 1240193 - RNA, 15 nt, Human
cuugcaaaaaggguc

SEQ ID NO: 1240194 - RNA, 12 nt, Human
cuugauuuuugc

SEQ ID NO: 1240195 - RNA, 16 nt, Human
cuugcaaaaaggguca

SEQ ID NO: 1240196 - RNA, 15 nt, Human
cuugcaaaaucaguu

SEQ ID NO: 1240197 - RNA, 22 nt, Human
cuugcaaaaucaguuuuccucu

SEQ ID NO: 1240198 - RNA, 17 nt, Human
cuugcaaaaucaguuuu

SEQ ID NO: 1240199 - RNA, 16 nt, Human
cuugcaaaaucaguuu

SEQ ID NO: 1240200 - RNA, 19 nt, Human
cuugauuuuagccuucucu

SEQ ID NO: 1240201 - RNA, 20 nt, Human
cuugauuuuagccuucucug

SEQ ID NO: 1240202 - RNA, 21 nt, Human
cuugauuuuagccuucucugu

SEQ ID NO: 1240203 - RNA, 20 nt, Human
cuugcgguuccggcauggac

SEQ ID NO: 1240204 - RNA, 13 nt, Human
cuugcuaccagua

SEQ ID NO: 1240205 - RNA, 17 nt, Human
cuugcuaccaguauuua

SEQ ID NO: 1240206 - RNA, 18 nt, Human
cuugcuaccaguauuuag

SEQ ID NO: 1240207 - RNA, 20 nt, Human
cuugcuaccaguauuuagaa

SEQ ID NO: 1240208 - RNA, 13 nt, Human
cuugcuauucugu

SEQ ID NO: 1240209 - RNA, 14 nt, Human
cuugcuauucuguc

SEQ ID NO: 1240210 - RNA, 15 nt, Human
cuugcuauucugucc

SEQ ID NO: 1240211 - RNA, 17 nt, Human
cuugcuauucugucccu

SEQ ID NO: 1240212 - RNA, 23 nt, Human
cuugcuauucugucccuaggugu

SEQ ID NO: 1240213 - RNA, 20 nt, Human
cuugcuauucugucccuagg

SEQ ID NO: 1240214 - RNA, 16 nt, Human
cuuggauuuaguuuca

SEQ ID NO: 1240215 - RNA, 14 nt, Human
cuuggccucccaag

SEQ ID NO: 1240216 - RNA, 14 nt, Human
cuuggccucucucu

SEQ ID NO: 1240217 - RNA, 16 nt, Human
cuuggccucucucuag

SEQ ID NO: 1240218 - RNA, 17 nt, Human
cuuggccugaucagacc

SEQ ID NO: 1240219 - RNA, 13 nt, Human
cuuggccuggagc

SEQ ID NO: 1240220 - RNA, 14 nt, Human
cuuggccuggagca

SEQ ID NO: 1240221 - RNA, 15 nt, Human
cuuggccuggagcac

SEQ ID NO: 1240222 - RNA, 14 nt, Human
cuuggcgaugccag

SEQ ID NO: 1240223 - RNA, 15 nt, Human
cuuggcgaugccagc

SEQ ID NO: 1240224 - RNA, 17 nt, Human
cuuggcgaugccagcca

SEQ ID NO: 1240225 - RNA, 18 nt, Human
cuuggcgaugccagccaa

SEQ ID NO: 1240226 - RNA, 19 nt, Human
cuucugacauaauccagua

SEQ ID NO: 1240227 - RNA, 14 nt, Human
cuucugacagccuc

SEQ ID NO: 1240228 - RNA, 15 nt, Human
cuucugacagccuca

SEQ ID NO: 1240229 - RNA, 22 nt, Human
cuucugaauaaagcaauuagca

SEQ ID NO: 1240230 - RNA, 18 nt, Human
cuucugaauaaagcaauu

SEQ ID NO: 1240231 - RNA, 16 nt, Human
cuucugaauaaagcaa

SEQ ID NO: 1240232 - RNA, 15 nt, Human
cuucugaauaaagca

SEQ ID NO: 1240233 - RNA, 16 nt, Human
cuucucuuguuaggua

SEQ ID NO: 1240234 - RNA, 22 nt, Human
cuucucuuccuuuuaucaguag

SEQ ID NO: 1240235 - RNA, 19 nt, Human
cuucugacagccucaguga

SEQ ID NO: 1240236 - RNA, 16 nt, Human
cuucuuaauguacaua

SEQ ID NO: 1240237 - RNA, 15 nt, Human
cuucuuaauguacau

SEQ ID NO: 1240238 - RNA, 18 nt, Human
cuucuuaauguacauagu

SEQ ID NO: 1240239 - RNA, 21 nt, Human
cuucuuacaauaauucuauga

SEQ ID NO: 1240240 - RNA, 20 nt, Human
cuucuuaauguacauagugc

SEQ ID NO: 1240241 - RNA, 13 nt, Human
cuucuucaccauu

SEQ ID NO: 1240242 - RNA, 20 nt, Human
cuucucacauuuauauuuuu

SEQ ID NO: 1240243 - RNA, 13 nt, Human
cuucucacauuua

SEQ ID NO: 1240244 - RNA, 19 nt, Human
cuucuaguucugccaggag

SEQ ID NO: 1240245 - RNA, 13 nt, Human
cuucucuguucau

SEQ ID NO: 1240246 - RNA, 14 nt, Human
cuucucuguucauu

SEQ ID NO: 1240247 - RNA, 17 nt, Human
cuucucuguucauuucc

SEQ ID NO: 1240248 - RNA, 16 nt, Human
cuucuaguucugccag

SEQ ID NO: 1240249 - RNA, 16 nt, Human
cuucuagguucuaaaa

SEQ ID NO: 1240250 - RNA, 17 nt, Human
cuucuaguucugccagg

SEQ ID NO: 1240251 - RNA, 18 nt, Human
cuucuaguucugccagga

SEQ ID NO: 1240252 - RNA, 23 nt, Human
cuucuaaauggcaaaggaaggug

SEQ ID NO: 1240253 - RNA, 15 nt, Human
cuuccugacacuuua

SEQ ID NO: 1240254 - RNA, 16 nt, Human
cuuccugacacuuuaa

SEQ ID NO: 1240255 - RNA, 17 nt, Human
cuuccugacacuuuaau

SEQ ID NO: 1240256 - RNA, 18 nt, Human
cuuccugacacuuuaauu

SEQ ID NO: 1240257 - RNA, 13 nt, Human
cuucuaagacuuu

SEQ ID NO: 1240258 - RNA, 22 nt, Human
cuuccucugaggcugaaauuca

SEQ ID NO: 1240259 - RNA, 19 nt, Human
cuuccucuuuuccuuccca

SEQ ID NO: 1240260 - RNA, 16 nt, Human
cuuccucugaggcuga

SEQ ID NO: 1240261 - RNA, 13 nt, Human
cuuccucuccacu

SEQ ID NO: 1240262 - RNA, 14 nt, Human
cuuccucuccacug

SEQ ID NO: 1240263 - RNA, 15 nt, Human
cuuccucuccacugc

SEQ ID NO: 1240264 - RNA, 14 nt, Human
cuuccucugagccu

SEQ ID NO: 1240265 - RNA, 15 nt, Human
cuuccucugagccuu

SEQ ID NO: 1240266 - RNA, 20 nt, Human
cuuccucucgcggcccucag

SEQ ID NO: 1240267 - RNA, 21 nt, Human
cuuccucucgcggcccucagu

SEQ ID NO: 1240268 - RNA, 17 nt, Human
gaagcacagugaucaag

SEQ ID NO: 1240269 - RNA, 21 nt, Human
gaagaccuuuuucugcacuau

SEQ ID NO: 1240270 - RNA, 21 nt, Human
gaagacgugaugccaggacca

SEQ ID NO: 1240271 - RNA, 23 nt, Human
gaagacuaucuuacuauuucaca

SEQ ID NO: 1240272 - RNA, 19 nt, Human
gaagcacgugguaaaacac

SEQ ID NO: 1240273 - RNA, 18 nt, Human
gaagcagcaacuuguccu

SEQ ID NO: 1240274 - RNA, 19 nt, Human
gaagcagcaacuuguccua

SEQ ID NO: 1240275 - RNA, 12 nt, Human
gaagcagccucu

SEQ ID NO: 1240276 - RNA, 22 nt, Human
gaagcagccucuccccaggucc

SEQ ID NO: 1240277 - RNA, 13 nt, Human
gaagcagcagccu

SEQ ID NO: 1240278 - RNA, 12 nt, Human
gaagcagguucc

SEQ ID NO: 1240279 - RNA, 19 nt, Human
gaagcagguucccaagcuc

SEQ ID NO: 1240280 - RNA, 10 nt, Human
gaagacagug

SEQ ID NO: 1240281 - RNA, 12 nt, Human
gaagacaguggc

SEQ ID NO: 1240282 - RNA, 15 nt, Human
gaagacaguggcccc

SEQ ID NO: 1240283 - RNA, 13 nt, Human
gaagacaguggcc

SEQ ID NO: 1240284 - RNA, 17 nt, Human
gaagaccuuuuucugca

SEQ ID NO: 1240285 - RNA, 14 nt, Human
gaagaccuuuuucu

SEQ ID NO: 1240286 - RNA, 14 nt, Human
gaagaccugagaau

SEQ ID NO: 1240287 - RNA, 17 nt, Human
gaagaccugagaaugua

SEQ ID NO: 1240288 - RNA, 20 nt, Human
gaagacccauuccuucccag

SEQ ID NO: 1240289 - RNA, 22 nt, Human
gaagacccauuccuucccagag

SEQ ID NO: 1240290 - RNA, 14 nt, Human
gaagacccuccccg

SEQ ID NO: 1240291 - RNA, 16 nt, Human
gaagacagaaccacag

SEQ ID NO: 1240292 - RNA, 18 nt, Human
gaagacagaaccacaggg

SEQ ID NO: 1240293 - RNA, 17 nt, Human
gaagacagaaguuugca

SEQ ID NO: 1240294 - RNA, 12 nt, Human
gaaccaucagaa

SEQ ID NO: 1240295 - RNA, 19 nt, Human
gaaccaguccccccacccu

SEQ ID NO: 1240296 - RNA, 13 nt, Human
gaaccacuuucuu

SEQ ID NO: 1240297 - RNA, 15 nt, Human
gaaccacuuucuuau

SEQ ID NO: 1240298 - RNA, 20 nt, Human
gaaccacuuucuuauuuuuu

SEQ ID NO: 1240299 - RNA, 11 nt, Human
gaaccagacuc

SEQ ID NO: 1240300 - RNA, 16 nt, Human
gaaccagacucuugcc

SEQ ID NO: 1240301 - RNA, 17 nt, Human
gaaccagacucuugccu

SEQ ID NO: 1240302 - RNA, 21 nt, Human
gaaccccuacaugaaacagaa

SEQ ID NO: 1240303 - RNA, 17 nt, Human
gaaccccuucauccucu

SEQ ID NO: 1240304 - RNA, 20 nt, Human
gaaccccggggugcccacag

SEQ ID NO: 1240305 - RNA, 18 nt, Human
gaacccagcccacccccg

SEQ ID NO: 1240306 - RNA, 11 nt, Human
gaacccaggac

SEQ ID NO: 1240307 - RNA, 12 nt, Human
gaacccaggaca

SEQ ID NO: 1240308 - RNA, 13 nt, Human
gaacccaggacaa

SEQ ID NO: 1240309 - RNA, 19 nt, Human
gaacccaggacaagcaugg

SEQ ID NO: 1240310 - RNA, 16 nt, Human
gaacccaggacaagca

SEQ ID NO: 1240311 - RNA, 16 nt, Human
gaaccauuaaccagau

SEQ ID NO: 1240312 - RNA, 13 nt, Human
gaacccagacuca

SEQ ID NO: 1240313 - RNA, 16 nt, Human
gaacccagacucagac

SEQ ID NO: 1240314 - RNA, 17 nt, Human
gaacccagacucagaca

SEQ ID NO: 1240315 - RNA, 19 nt, Human
gaacccagacucagacauu

SEQ ID NO: 1240316 - RNA, 16 nt, Human
gaacccagcccacccc

SEQ ID NO: 1240317 - RNA, 17 nt, Human
gaacccagcccaccccc

SEQ ID NO: 1240318 - RNA, 13 nt, Human
gaacugaaaucau

SEQ ID NO: 1240319 - RNA, 17 nt, Human
gaacugauguaaguaaa

SEQ ID NO: 1240320 - RNA, 23 nt, Human
gaacugauucacaucucauuuuu

SEQ ID NO: 1240321 - RNA, 21 nt, Human
gaacugauucacaucucauuu

SEQ ID NO: 1240322 - RNA, 12 nt, Human
gaacugcaggcc

SEQ ID NO: 1240323 - RNA, 14 nt, Human
gaacugcaggcccu

SEQ ID NO: 1240324 - RNA, 16 nt, Human
gaacugcaggcccugg

SEQ ID NO: 1240325 - RNA, 17 nt, Human
gaacugcaggcccuggc

SEQ ID NO: 1240326 - RNA, 18 nt, Human
gaacugcaggcccuggcc

SEQ ID NO: 1240327 - RNA, 19 nt, Human
gaacugcaggcccuggccu

SEQ ID NO: 1240328 - RNA, 21 nt, Human
gaacugcaggcccuggccucc

SEQ ID NO: 1240329 - RNA, 23 nt, Human
gaacugcaggcccuggccucccc

SEQ ID NO: 1240330 - RNA, 14 nt, Human
gaacuccugaccuc

SEQ ID NO: 1240331 - RNA, 14 nt, Human
gaaccccuuuccca

SEQ ID NO: 1240332 - RNA, 15 nt, Human
gaacuccugaccuca

SEQ ID NO: 1240333 - RNA, 19 nt, Human
gaacccgggaggcagaggu

SEQ ID NO: 1240334 - RNA, 17 nt, Human
gaacccgggaggcagag

SEQ ID NO: 1240335 - RNA, 17 nt, Human
gaacuccugccauaguc

SEQ ID NO: 1240336 - RNA, 14 nt, Human
gaacucugguggca

SEQ ID NO: 1240337 - RNA, 18 nt, Human
gaacucugguggcacagg

SEQ ID NO: 1240338 - RNA, 19 nt, Human
gaacucugguggcacagga

SEQ ID NO: 1240339 - RNA, 13 nt, Human
gaacucuuaauca

SEQ ID NO: 1240340 - RNA, 20 nt, Human
gaacucuuaaucaaauagca

SEQ ID NO: 1240341 - RNA, 16 nt, Human
gaaagaacggaagaag

SEQ ID NO: 1240342 - RNA, 20 nt, Human
gaaagaacgcugauuuaaag

SEQ ID NO: 1240343 - RNA, 13 nt, Human
gaaagggagggcu

SEQ ID NO: 1240344 - RNA, 14 nt, Human
gaaagggagggcuc

SEQ ID NO: 1240345 - RNA, 15 nt, Human
gaaagggagggcucu

SEQ ID NO: 1240346 - RNA, 16 nt, Human
gaaagggagggcucug

SEQ ID NO: 1240347 - RNA, 17 nt, Human
gaaagggagggcucuga

SEQ ID NO: 1240348 - RNA, 18 nt, Human
gaaagggagggcucugag

SEQ ID NO: 1240349 - RNA, 18 nt, Human
gaaagaaaaucaggcugg

SEQ ID NO: 1240350 - RNA, 14 nt, Human
gaaacuggccaugg

SEQ ID NO: 1240351 - RNA, 18 nt, Human
gaaacuggccauggccug

SEQ ID NO: 1240352 - RNA, 19 nt, Human
gaaacuggccauggccugc

SEQ ID NO: 1240353 - RNA, 20 nt, Human
gaaacuggccauggccugca

SEQ ID NO: 1240354 - RNA, 21 nt, Human
gaaacuggccauggccugcaa

SEQ ID NO: 1240355 - RNA, 11 nt, Human
gaaaugaaaaa

SEQ ID NO: 1240356 - RNA, 20 nt, Human
gaaaucugugccugagaaca

SEQ ID NO: 1240357 - RNA, 20 nt, Human
gaaaucuggcuucuggccag

SEQ ID NO: 1240358 - RNA, 22 nt, Human
gaaaucuggcuucuggccagga

SEQ ID NO: 1240359 - RNA, 23 nt, Human
gaaaucuggcuucuggccaggaa

SEQ ID NO: 1240360 - RNA, 17 nt, Human
gaaaugaaagcagggac

SEQ ID NO: 1240361 - RNA, 14 nt, Human
gaacaaagcagcca

SEQ ID NO: 1240362 - RNA, 15 nt, Human
gaacaaagcagccac

SEQ ID NO: 1240363 - RNA, 16 nt, Human
gaacaaagcagccacg

SEQ ID NO: 1240364 - RNA, 19 nt, Human
gaacaaagcagccacgagg

SEQ ID NO: 1240365 - RNA, 19 nt, Human
gaaagggagggcucugagg

SEQ ID NO: 1240366 - RNA, 20 nt, Human
gaaagggagggcucugaggc

SEQ ID NO: 1240367 - RNA, 21 nt, Human
gaaagggagggcucugaggcg

SEQ ID NO: 1240368 - RNA, 20 nt, Human
gaaagggcccuccuuccuaa

SEQ ID NO: 1240369 - RNA, 21 nt, Human
gaaagggcccugggccugccu

SEQ ID NO: 1240370 - RNA, 13 nt, Human
gaaaggggagccc

SEQ ID NO: 1240371 - RNA, 15 nt, Human
gaaaggggagcccac

SEQ ID NO: 1240372 - RNA, 16 nt, Human
gaaaggggagcccacu

SEQ ID NO: 1240373 - RNA, 21 nt, Human
gaaaucuaguuauuuacagga

SEQ ID NO: 1240374 - RNA, 13 nt, Human
gaaaucccuucau

SEQ ID NO: 1240375 - RNA, 14 nt, Human
gaaaucccuucaua

SEQ ID NO: 1240376 - RNA, 15 nt, Human
gaaaucccuucauac

SEQ ID NO: 1240377 - RNA, 19 nt, Human
gaaaucccuucauacuuga

SEQ ID NO: 1240378 - RNA, 20 nt, Human
gaaaucccuucauacuugaa

SEQ ID NO: 1240379 - RNA, 19 nt, Human
gaacacuagacaagccaga

SEQ ID NO: 1240380 - RNA, 19 nt, Human
gaacaccauugaaggcuua

SEQ ID NO: 1240381 - RNA, 20 nt, Human
gaacaccauugaaggcuuaa

SEQ ID NO: 1240382 - RNA, 16 nt, Human
gaacacccuauauuuu

SEQ ID NO: 1240383 - RNA, 18 nt, Human
gaacaccuaugcaaagau

SEQ ID NO: 1240384 - RNA, 21 nt, Human
gaacaccuaugcaaagaugaa

SEQ ID NO: 1240385 - RNA, 14 nt, Human
gaacacggccacau

SEQ ID NO: 1240386 - RNA, 22 nt, Human
gaacacggccacaucaaagagg

SEQ ID NO: 1240387 - RNA, 15 nt, Human
gaacacuaauucaua

SEQ ID NO: 1240388 - RNA, 18 nt, Human
gaacacuaauucauaauc

SEQ ID NO: 1240389 - RNA, 15 nt, Human
gaacacuagacaagc

SEQ ID NO: 1240390 - RNA, 17 nt, Human
gaacacuagacaagcca

SEQ ID NO: 1240391 - RNA, 18 nt, Human
gaacacuagacaagccag

SEQ ID NO: 1240392 - RNA, 20 nt, Human
gaacacuagacaagccagaa

SEQ ID NO: 1240393 - RNA, 15 nt, Human
gaacaaauggccuuu

SEQ ID NO: 1240394 - RNA, 23 nt, Human
gaacaaauguuuauuaagcauca

SEQ ID NO: 1240395 - RNA, 13 nt, Human
gaacaaaugaaga

SEQ ID NO: 1240396 - RNA, 21 nt, Human
gaacaaugugcuaugugaaga

SEQ ID NO: 1240397 - RNA, 13 nt, Human
gaacaauugaagu

SEQ ID NO: 1240398 - RNA, 17 nt, Human
gaacaauugaaguaaac

SEQ ID NO: 1240399 - RNA, 20 nt, Human
gaacaauugaaguaaacuuu

SEQ ID NO: 1240400 - RNA, 15 nt, Human
gaacaauuuggcaau

SEQ ID NO: 1240401 - RNA, 19 nt, Human
gaacaauuuggcaauuuug

SEQ ID NO: 1240402 - RNA, 20 nt, Human
gaacaauuuggcaauuuugu

SEQ ID NO: 1240403 - RNA, 17 nt, Human
gaacacaaacuguaaau

SEQ ID NO: 1240404 - RNA, 17 nt, Human
gaacacauaauucagga

SEQ ID NO: 1240405 - RNA, 20 nt, Human
gaacacauaauucaggaagc

SEQ ID NO: 1240406 - RNA, 21 nt, Human
gaacaccagagaccucaaauu

SEQ ID NO: 1240407 - RNA, 20 nt, Human
gaacaccauagguagaaugu

SEQ ID NO: 1240408 - RNA, 16 nt, Human
gaacaccauugaaggc

SEQ ID NO: 1240409 - RNA, 19 nt, Human
gaacacaaacuguaaauaa

SEQ ID NO: 1240410 - RNA, 17 nt, Human
gaacacaggcaaaaucc

SEQ ID NO: 1240411 - RNA, 13 nt, Human
gaacacagaacug

SEQ ID NO: 1240412 - RNA, 20 nt, Human
gaacacagcaguucugcaga

SEQ ID NO: 1240413 - RNA, 21 nt, Human
gaaacaagucagucauucaga

SEQ ID NO: 1240414 - RNA, 14 nt, Human
gaaacaacuuggaa

SEQ ID NO: 1240415 - RNA, 14 nt, Human
gaaacaacacugua

SEQ ID NO: 1240416 - RNA, 15 nt, Human
gaaacaacacuguag

SEQ ID NO: 1240417 - RNA, 16 nt, Human
gaaacaacacuguagu

SEQ ID NO: 1240418 - RNA, 16 nt, Human
gaaacaaccaugucau

SEQ ID NO: 1240419 - RNA, 17 nt, Human
gaaacaacucuuugaga

SEQ ID NO: 1240420 - RNA, 20 nt, Human
gaaacaacucuuugagaaac

SEQ ID NO: 1240421 - RNA, 16 nt, Human
gaaaauuauuugcaua

SEQ ID NO: 1240422 - RNA, 20 nt, Human
gaaacaaagacaauuuauaa

SEQ ID NO: 1240423 - RNA, 23 nt, Human
gaaacaaagaguucaagaaauaa

SEQ ID NO: 1240424 - RNA, 12 nt, Human
gaaacaaagaug

SEQ ID NO: 1240425 - RNA, 17 nt, Human
gaaacaacacuguagua

SEQ ID NO: 1240426 - RNA, 22 nt, Human
gaaaacuuguauuauguguguu

SEQ ID NO: 1240427 - RNA, 19 nt, Human
gaaaacuuguauuaugugu

SEQ ID NO: 1240428 - RNA, 15 nt, Human
gaaaagaaagcuaca

SEQ ID NO: 1240429 - RNA, 21 nt, Human
gaaaagaaaauuuuuguagua

SEQ ID NO: 1240430 - RNA, 16 nt, Human
gaaaacuuuaaagcgu

SEQ ID NO: 1240431 - RNA, 21 nt, Human
gaaaacuuuaugcuaagugaa

SEQ ID NO: 1240432 - RNA, 12 nt, Human
gaaaacuuuaaa

SEQ ID NO: 1240433 - RNA, 13 nt, Human
gaaaaaaauguau

SEQ ID NO: 1240434 - RNA, 14 nt, Human
gaaaaaaauguauu

SEQ ID NO: 1240435 - RNA, 15 nt, Human
gaaaaaaauguauuu

SEQ ID NO: 1240436 - RNA, 20 nt, Human
gaaaaaaauguauuuuaugu

SEQ ID NO: 1240437 - RNA, 19 nt, Human
gaaaaaaauguauuuuaug

SEQ ID NO: 1240438 - RNA, 12 nt, Human
gaaaaaaauuga

SEQ ID NO: 1240439 - RNA, 14 nt, Human
gaaaaaaauugaaa

SEQ ID NO: 1240440 - RNA, 15 nt, Human
gaaaaaaauugaaau

SEQ ID NO: 1240441 - RNA, 16 nt, Human
gaaaaaaauugaaaug

SEQ ID NO: 1240442 - RNA, 19 nt, Human
gaaaaaaauugaaauguaa

SEQ ID NO: 1240443 - RNA, 18 nt, Human
gaaaaaaauugaaaugua

SEQ ID NO: 1240444 - RNA, 14 nt, Human
gaaaagaauagaag

SEQ ID NO: 1240445 - RNA, 22 nt, Human
gaaaagaauuguuggggguuuu

SEQ ID NO: 1240446 - RNA, 21 nt, Human
gaaaagacacauuuuuuagga

SEQ ID NO: 1240447 - RNA, 11 nt, Human
gaaaagaugca

SEQ ID NO: 1240448 - RNA, 22 nt, Human
gaaaagaugcacuuugcuuuaa

SEQ ID NO: 1240449 - RNA, 12 nt, Human
gaaaaugugugu

SEQ ID NO: 1240450 - RNA, 15 nt, Human
gaaaaugugugugug

SEQ ID NO: 1240451 - RNA, 20 nt, Human
gaaaagcaacauucauaguc

SEQ ID NO: 1240452 - RNA, 14 nt, Human
gaaaauguccagga

SEQ ID NO: 1240453 - RNA, 14 nt, Human
gaaaaugucuugug

SEQ ID NO: 1240454 - RNA, 16 nt, Human
gaaaagcaacauucau

SEQ ID NO: 1240455 - RNA, 17 nt, Human
gaaaauguccuugugau

SEQ ID NO: 1240456 - RNA, 15 nt, Human
gaaaauguccaggaa

SEQ ID NO: 1240457 - RNA, 21 nt, Human
gaaaauguucuguuugcugug

SEQ ID NO: 1240458 - RNA, 15 nt, Human
gaaaauguugagaau

SEQ ID NO: 1240459 - RNA, 17 nt, Human
gaaaauguugagaaucc

SEQ ID NO: 1240460 - RNA, 20 nt, Human
gaaaauguugagaaucccaa

SEQ ID NO: 1240461 - RNA, 15 nt, Human
gaaaauguucuguuu

SEQ ID NO: 1240462 - RNA, 13 nt, Human
gaaaauuauuuaa

SEQ ID NO: 1240463 - RNA, 23 nt, Human
gaaaauuauuuaaaccgcuaaaa

SEQ ID NO: 1240464 - RNA, 15 nt, Human
gaaaauuauuugcau

SEQ ID NO: 1240465 - RNA, 22 nt, Human
gacuauuaggugcaauuucaag

SEQ ID NO: 1240466 - RNA, 15 nt, Human
gacucaaauguucua

SEQ ID NO: 1240467 - RNA, 16 nt, Human
gacucaaauguucuaa

SEQ ID NO: 1240468 - RNA, 17 nt, Human
gacucaaauguucuaag

SEQ ID NO: 1240469 - RNA, 18 nt, Human
gacucaaauguucuaagu

SEQ ID NO: 1240470 - RNA, 19 nt, Human
gacucaaauguucuaaguu

SEQ ID NO: 1240471 - RNA, 23 nt, Human
gacucaaauguucuaaguuucua

SEQ ID NO: 1240472 - RNA, 18 nt, Human
gacucaagaagugaagaa

SEQ ID NO: 1240473 - RNA, 20 nt, Human
gacucaagaagugaagaaug

SEQ ID NO: 1240474 - RNA, 19 nt, Human
gacucaagaagugaagaau

SEQ ID NO: 1240475 - RNA, 19 nt, Human
gacuauauuugggccugcu

SEQ ID NO: 1240476 - RNA, 21 nt, Human
gacuauauuugggccugcucc

SEQ ID NO: 1240477 - RNA, 22 nt, Human
gacccuccaccgcagaaggaag

SEQ ID NO: 1240478 - RNA, 21 nt, Human
gacccuccaccgcagaaggaa

SEQ ID NO: 1240479 - RNA, 15 nt, Human
gacccuccccgcacc

SEQ ID NO: 1240480 - RNA, 17 nt, Human
gacccuccccgcacccc

SEQ ID NO: 1240481 - RNA, 18 nt, Human
gacccuccccaaaggcuu

SEQ ID NO: 1240482 - RNA, 19 nt, Human
gacccuccaccgcagaagg

SEQ ID NO: 1240483 - RNA, 20 nt, Human
gacccuaugggucuaggaca

SEQ ID NO: 1240484 - RNA, 20 nt, Human
gacccucaucuuucuuccaa

SEQ ID NO: 1240485 - RNA, 15 nt, Human
gacccucaucuuucu

SEQ ID NO: 1240486 - RNA, 19 nt, Human
gacccucaucuuucuucca

SEQ ID NO: 1240487 - RNA, 16 nt, Human
gacuuuggcugcaugc

SEQ ID NO: 1240488 - RNA, 15 nt, Human
gacuuugcuugcuuu

SEQ ID NO: 1240489 - RNA, 17 nt, Human
gacuuugcuugcuuuga

SEQ ID NO: 1240490 - RNA, 12 nt, Human
gacuuugcuugc

SEQ ID NO: 1240491 - RNA, 14 nt, Human
gacuuugcuugcuu

SEQ ID NO: 1240492 - RNA, 19 nt, Human
gacuuuggcugcaugcgag

SEQ ID NO: 1240493 - RNA, 13 nt, Human
gacuuuucugcaa

SEQ ID NO: 1240494 - RNA, 14 nt, Human
gacuuuucugcaaa

SEQ ID NO: 1240495 - RNA, 12 nt, Human
gacuuuucugua

SEQ ID NO: 1240496 - RNA, 13 nt, Human
gacuuuucuguaa

SEQ ID NO: 1240497 - RNA, 18 nt, Human
gacuuuucuguaauucag

SEQ ID NO: 1240498 - RNA, 19 nt, Human
gacuguuuucucucggcuc

SEQ ID NO: 1240499 - RNA, 21 nt, Human
gacuguuuucucucggcuccc

SEQ ID NO: 1240500 - RNA, 18 nt, Human
gacuguuuuucggacagu

SEQ ID NO: 1240501 - RNA, 19 nt, Human
gacuguuuuucggacaguu

SEQ ID NO: 1240502 - RNA, 16 nt, Human
gacuuucugccuggag

SEQ ID NO: 1240503 - RNA, 18 nt, Human
gacuuucugccuggagug

SEQ ID NO: 1240504 - RNA, 19 nt, Human
gacuuucuuuuuguagcug

SEQ ID NO: 1240505 - RNA, 23 nt, Human
gacuuucuuuuuguagcuggggc

SEQ ID NO: 1240506 - RNA, 18 nt, Human
gacuuucuuuuuugauau

SEQ ID NO: 1240507 - RNA, 21 nt, Human
gacuuucuuuuuugauauaga

SEQ ID NO: 1240508 - RNA, 23 nt, Human
gacuuucuuuuuugauauagaag

SEQ ID NO: 1240509 - RNA, 22 nt, Human
gacuuucuuuuuugauauagaa

SEQ ID NO: 1240510 - RNA, 21 nt, Human
gacuuugcagccggcacaggg

SEQ ID NO: 1240511 - RNA, 20 nt, Human
gacugugugcucaggagccc

SEQ ID NO: 1240512 - RNA, 17 nt, Human
gacugugugcucaggag

SEQ ID NO: 1240513 - RNA, 16 nt, Human
gacugugugcucagga

SEQ ID NO: 1240514 - RNA, 14 nt, Human
gacugugugcucag

SEQ ID NO: 1240515 - RNA, 18 nt, Human
gacuguacuccucccagg

SEQ ID NO: 1240516 - RNA, 20 nt, Human
gacuguaaguugggcuugcu

SEQ ID NO: 1240517 - RNA, 21 nt, Human
gacuguaaguugggcuugcua

SEQ ID NO: 1240518 - RNA, 21 nt, Human
gacugucucaagagggcacug

SEQ ID NO: 1240519 - RNA, 15 nt, Human
gacugucauagaaau

SEQ ID NO: 1240520 - RNA, 22 nt, Human
gacugucucaagagggcacugg

SEQ ID NO: 1240521 - RNA, 23 nt, Human
gacugucucaagagggcacuggu

SEQ ID NO: 1240522 - RNA, 18 nt, Human
gacugucuccauggcccu

SEQ ID NO: 1240523 - RNA, 16 nt, Human
gacuguacuccuccca

SEQ ID NO: 1240524 - RNA, 17 nt, Human
gacuguacuccucccag

SEQ ID NO: 1240525 - RNA, 14 nt, Human
gacucacaccugaa

SEQ ID NO: 1240526 - RNA, 22 nt, Human
gacugguguuaucaccgugggc

SEQ ID NO: 1240527 - RNA, 23 nt, Human
gacucacaccugaacugaacacc

SEQ ID NO: 1240528 - RNA, 19 nt, Human
gacucacaccacuagccuc

SEQ ID NO: 1240529 - RNA, 17 nt, Human
gacuguaaacacagaca

SEQ ID NO: 1240530 - RNA, 18 nt, Human
gacuguaaacacagacag

SEQ ID NO: 1240531 - RNA, 13 nt, Human
gacuguaaguugg

SEQ ID NO: 1240532 - RNA, 17 nt, Human
gacuguaaguugggcuu

SEQ ID NO: 1240533 - RNA, 14 nt, Human
gacucaagccccgg

SEQ ID NO: 1240534 - RNA, 15 nt, Human
gacucaagccccgga

SEQ ID NO: 1240535 - RNA, 14 nt, Human
gaagcaguggccuu

SEQ ID NO: 1240536 - RNA, 13 nt, Human
gacacucagaccu

SEQ ID NO: 1240537 - RNA, 15 nt, Human
gacacucagaccuga

SEQ ID NO: 1240538 - RNA, 16 nt, Human
gacacucauauaauua

SEQ ID NO: 1240539 - RNA, 21 nt, Human
gacagcccuucuuuccacaga

SEQ ID NO: 1240540 - RNA, 15 nt, Human
gacagccgccuggag

SEQ ID NO: 1240541 - RNA, 19 nt, Human
gacagccucagugacccug

SEQ ID NO: 1240542 - RNA, 18 nt, Human
gacagccucccccugucc

SEQ ID NO: 1240543 - RNA, 21 nt, Human
gacagaaagcagaacagugau

SEQ ID NO: 1240544 - RNA, 16 nt, Human
gacagaaaacauguuu

SEQ ID NO: 1240545 - RNA, 20 nt, Human
gacagaaagcagaacaguga

SEQ ID NO: 1240546 - RNA, 14 nt, Human
gacagaaagcagaa

SEQ ID NO: 1240547 - RNA, 21 nt, Human
gacacucgaggucgggcagca

SEQ ID NO: 1240548 - RNA, 16 nt, Human
gacacuccccgaaguc

SEQ ID NO: 1240549 - RNA, 21 nt, Human
gacacuccccgaagucuuuug

SEQ ID NO: 1240550 - RNA, 15 nt, Human
gacacucccuugggc

SEQ ID NO: 1240551 - RNA, 21 nt, Human
gacacucccuugggcucccug

SEQ ID NO: 1240552 - RNA, 11 nt, Human
gacagccuggc

SEQ ID NO: 1240553 - RNA, 12 nt, Human
gacagccuggca

SEQ ID NO: 1240554 - RNA, 13 nt, Human
gacagccuggcac

SEQ ID NO: 1240555 - RNA, 20 nt, Human
gacagccucccccugucccc

SEQ ID NO: 1240556 - RNA, 19 nt, Human
gacagggcggggguggcgg

SEQ ID NO: 1240557 - RNA, 19 nt, Human
gacaguaauuguguuuaca

SEQ ID NO: 1240558 - RNA, 18 nt, Human
gacaguaauuguguuuac

SEQ ID NO: 1240559 - RNA, 15 nt, Human
gacaguaauuguguu

SEQ ID NO: 1240560 - RNA, 20 nt, Human
gacaguaauuguguuuacau

SEQ ID NO: 1240561 - RNA, 22 nt, Human
gacaguaauuguguuuacauuu

SEQ ID NO: 1240562 - RNA, 14 nt, Human
gacaguauauaacu

SEQ ID NO: 1240563 - RNA, 17 nt, Human
gacaggguuucaccaug

SEQ ID NO: 1240564 - RNA, 12 nt, Human
gacaggguuuca

SEQ ID NO: 1240565 - RNA, 20 nt, Human
gacaguauggcagcuuuccu

SEQ ID NO: 1240566 - RNA, 21 nt, Human
gaccauggacacuacacccag

SEQ ID NO: 1240567 - RNA, 16 nt, Human
gaccauggacacuaca

SEQ ID NO: 1240568 - RNA, 15 nt, Human
gaccauaauguuaca

SEQ ID NO: 1240569 - RNA, 22 nt, Human
gaccaugcucaucugcuggucc

SEQ ID NO: 1240570 - RNA, 23 nt, Human
gaccauggacacuacacccagca

SEQ ID NO: 1240571 - RNA, 18 nt, Human
gaccauggaguggcagcc

SEQ ID NO: 1240572 - RNA, 20 nt, Human
gaccauggaguggcagccca

SEQ ID NO: 1240573 - RNA, 21 nt, Human
gaccauggaguggcagcccag

SEQ ID NO: 1240574 - RNA, 22 nt, Human
gaccauggaguggcagcccagc

SEQ ID NO: 1240575 - RNA, 22 nt, Human
gaccaugguuaagaguccaaga

SEQ ID NO: 1240576 - RNA, 23 nt, Human
gaccccugcucaguaaagcacuu

SEQ ID NO: 1240577 - RNA, 13 nt, Human
gaccccuggcuuu

SEQ ID NO: 1240578 - RNA, 21 nt, Human
gaccccuggcuuuucacugcu

SEQ ID NO: 1240579 - RNA, 22 nt, Human
gaccccuggcuuuucacugcug

SEQ ID NO: 1240580 - RNA, 16 nt, Human
gaccccuguucaugcc

SEQ ID NO: 1240581 - RNA, 18 nt, Human
gacccuaugggucuagga

SEQ ID NO: 1240582 - RNA, 21 nt, Human
gacccggcacccccugcagcu

SEQ ID NO: 1240583 - RNA, 22 nt, Human
gacccguucaacuuuuccuuug

SEQ ID NO: 1240584 - RNA, 23 nt, Human
gacccguucaugggggagggggc

SEQ ID NO: 1240585 - RNA, 16 nt, Human
gacccuaaaucuugac

SEQ ID NO: 1240586 - RNA, 19 nt, Human
gacccguucaugggggagg

SEQ ID NO: 1240587 - RNA, 16 nt, Human
gaccagucccagagca

SEQ ID NO: 1240588 - RNA, 14 nt, Human
gaccaguugcaguc

SEQ ID NO: 1240589 - RNA, 22 nt, Human
gaccaguugcagucacucuagu

SEQ ID NO: 1240590 - RNA, 19 nt, Human
gaccaguugcagucacucu

SEQ ID NO: 1240591 - RNA, 10 nt, Human
gaccaggagu

SEQ ID NO: 1240592 - RNA, 11 nt, Human
gaccaggagug

SEQ ID NO: 1240593 - RNA, 18 nt, Human
gaccaggagugggugggg

SEQ ID NO: 1240594 - RNA, 23 nt, Human
gaccaggcauccuccacaauagc

SEQ ID NO: 1240595 - RNA, 16 nt, Human
gaccaggcaccaggca

SEQ ID NO: 1240596 - RNA, 15 nt, Human
gaccaggcugccucc

SEQ ID NO: 1240597 - RNA, 13 nt, Human
gaccaggcuguag

SEQ ID NO: 1240598 - RNA, 15 nt, Human
gaccaggcuguagga

SEQ ID NO: 1240599 - RNA, 17 nt, Human
gaccagucaaccugggc

SEQ ID NO: 1240600 - RNA, 18 nt, Human
gaccagucaaccugggca

SEQ ID NO: 1240601 - RNA, 17 nt, Human
gaccagucccagagcag

SEQ ID NO: 1240602 - RNA, 21 nt, Human
gagcagugggaggguaccagc

SEQ ID NO: 1240603 - RNA, 18 nt, Human
gagcaguccuuggccugc

SEQ ID NO: 1240604 - RNA, 22 nt, Human
gagcaguccuuggccugcuaag

SEQ ID NO: 1240605 - RNA, 21 nt, Human
gagcagugaaugauucagugu

SEQ ID NO: 1240606 - RNA, 23 nt, Human
gagcaguccuuggccugcuaagg

SEQ ID NO: 1240607 - RNA, 13 nt, Human
gagcagugcuuuu

SEQ ID NO: 1240608 - RNA, 15 nt, Human
gagcagugcuuuugg

SEQ ID NO: 1240609 - RNA, 21 nt, Human
gagcagugcuuuuggcgggga

SEQ ID NO: 1240610 - RNA, 23 nt, Human
gagcagugcuuuuggcggggagg

SEQ ID NO: 1240611 - RNA, 14 nt, Human
gagcaguggcuggu

SEQ ID NO: 1240612 - RNA, 23 nt, Human
gagcaguggcugguccagggcua

SEQ ID NO: 1240613 - RNA, 22 nt, Human
gagaagcugcucaacuugcaaa

SEQ ID NO: 1240614 - RNA, 13 nt, Human
gagaagcugcuca

SEQ ID NO: 1240615 - RNA, 17 nt, Human
gagaagcucagcugcau

SEQ ID NO: 1240616 - RNA, 19 nt, Human
gagaagcuccucuccccag

SEQ ID NO: 1240617 - RNA, 22 nt, Human
gagaagcuccucuccccagccc

SEQ ID NO: 1240618 - RNA, 13 nt, Human
gagaagcucugaa

SEQ ID NO: 1240619 - RNA, 15 nt, Human
gagcgacagugagac

SEQ ID NO: 1240620 - RNA, 14 nt, Human
gagccuuccaccca

SEQ ID NO: 1240621 - RNA, 15 nt, Human
gagccuuccacccag

SEQ ID NO: 1240622 - RNA, 17 nt, Human
gagcgagagaucaaaga

SEQ ID NO: 1240623 - RNA, 19 nt, Human
gagcgagagaucaaagaug

SEQ ID NO: 1240624 - RNA, 20 nt, Human
gagcgagagaucaaagauga

SEQ ID NO: 1240625 - RNA, 18 nt, Human
gagcgaggagaugcuccu

SEQ ID NO: 1240626 - RNA, 21 nt, Human
gagcgaggagaugcuccuugg

SEQ ID NO: 1240627 - RNA, 13 nt, Human
gagcaucaugccu

SEQ ID NO: 1240628 - RNA, 14 nt, Human
gagcaucaugccuc

SEQ ID NO: 1240629 - RNA, 16 nt, Human
gagcaucaugccucug

SEQ ID NO: 1240630 - RNA, 17 nt, Human
gagcaucaugccucuga

SEQ ID NO: 1240631 - RNA, 18 nt, Human
gagcaucaugccucugag

SEQ ID NO: 1240632 - RNA, 19 nt, Human
gagcaucaugccucugagg

SEQ ID NO: 1240633 - RNA, 20 nt, Human
gagcaucaugccucugaggc

SEQ ID NO: 1240634 - RNA, 21 nt, Human
gagcaucaugccucugaggcc

SEQ ID NO: 1240635 - RNA, 22 nt, Human
gagcaucaugccucugaggcca

SEQ ID NO: 1240636 - RNA, 23 nt, Human
gagcaucaugccucugaggccag

SEQ ID NO: 1240637 - RNA, 24 nt, Human
gagcaucaugccucugaggccagc

SEQ ID NO: 1240638 - RNA, 15 nt, Human
gagcccgaggaggug

SEQ ID NO: 1240639 - RNA, 20 nt, Human
gagcccgaggaggugucuca

SEQ ID NO: 1240640 - RNA, 24 nt, Human
gagcccgaggaggugucucaggcu

SEQ ID NO: 1240641 - RNA, 22 nt, Human
gagcccgaggaggugucucagg

SEQ ID NO: 1240642 - RNA, 19 nt, Human
gagccugugccuccucacc

SEQ ID NO: 1240643 - RNA, 20 nt, Human
gagcugugaguucucccugu

SEQ ID NO: 1240644 - RNA, 21 nt, Human
gagcugugaguucucccugua

SEQ ID NO: 1240645 - RNA, 20 nt, Human
gagcuggugcggcuggccau

SEQ ID NO: 1240646 - RNA, 18 nt, Human
gagcuguauuaagccacu

SEQ ID NO: 1240647 - RNA, 18 nt, Human
gagcugugcaggugggga

SEQ ID NO: 1240648 - RNA, 18 nt, Human
gagucauucguucugugg

SEQ ID NO: 1240649 - RNA, 14 nt, Human
gagucauuuuuaca

SEQ ID NO: 1240650 - RNA, 12 nt, Human
gaguccaagcug

SEQ ID NO: 1240651 - RNA, 14 nt, Human
gaguccaagcuggg

SEQ ID NO: 1240652 - RNA, 19 nt, Human
gaguccaagguuuaaagag

SEQ ID NO: 1240653 - RNA, 14 nt, Human
gagugagacagacu

SEQ ID NO: 1240654 - RNA, 22 nt, Human
gagugagacccagcccucaucc

SEQ ID NO: 1240655 - RNA, 23 nt, Human
gagugagacccagcccucauccc

SEQ ID NO: 1240656 - RNA, 15 nt, Human
gaguccaagaaucca

SEQ ID NO: 1240657 - RNA, 16 nt, Human
gaguugaggccacugu

SEQ ID NO: 1240658 - RNA, 14 nt, Human
gagucacugagacc

SEQ ID NO: 1240659 - RNA, 15 nt, Human
gagucacugagacca

SEQ ID NO: 1240660 - RNA, 12 nt, Human
gaggggaccagg

SEQ ID NO: 1240661 - RNA, 13 nt, Human
gaggggaccagga

SEQ ID NO: 1240662 - RNA, 14 nt, Human
gaggggaccaggag

SEQ ID NO: 1240663 - RNA, 15 nt, Human
gaggggaccaggagu

SEQ ID NO: 1240664 - RNA, 16 nt, Human
gaggggaccaggagug

SEQ ID NO: 1240665 - RNA, 20 nt, Human
gaggcucuggagcccacugu

SEQ ID NO: 1240666 - RNA, 14 nt, Human
gaggcugccccucu

SEQ ID NO: 1240667 - RNA, 15 nt, Human
gaggcugccccucuc

SEQ ID NO: 1240668 - RNA, 18 nt, Human
gaggcugccccucucacc

SEQ ID NO: 1240669 - RNA, 19 nt, Human
gaggcugccccucucacca

SEQ ID NO: 1240670 - RNA, 13 nt, Human
gaggcugcccucc

SEQ ID NO: 1240671 - RNA, 14 nt, Human
gaggcugcccuccu

SEQ ID NO: 1240672 - RNA, 15 nt, Human
gaggcugcccuccug

SEQ ID NO: 1240673 - RNA, 23 nt, Human
gaggcugcccuccugugcucagc

SEQ ID NO: 1240674 - RNA, 15 nt, Human
gagggcgcaggccgu

SEQ ID NO: 1240675 - RNA, 13 nt, Human
gagggcggcaggg

SEQ ID NO: 1240676 - RNA, 19 nt, Human
gagggcggcaggggccugg

SEQ ID NO: 1240677 - RNA, 23 nt, Human
gagggcggcaggggccuggagau

SEQ ID NO: 1240678 - RNA, 12 nt, Human
gagggcgugucu

SEQ ID NO: 1240679 - RNA, 12 nt, Human
gaggggaagagg

SEQ ID NO: 1240680 - RNA, 16 nt, Human
gaggggaagaggccug

SEQ ID NO: 1240681 - RNA, 15 nt, Human
gaggggaagaggccu

SEQ ID NO: 1240682 - RNA, 14 nt, Human
gagggcucacucag

SEQ ID NO: 1240683 - RNA, 17 nt, Human
gagggcucacucagcca

SEQ ID NO: 1240684 - RNA, 19 nt, Human
gagggcucgaggggugggc

SEQ ID NO: 1240685 - RNA, 21 nt, Human
gagggcucgaggggugggcug

SEQ ID NO: 1240686 - RNA, 11 nt, Human
gagggcucuga

SEQ ID NO: 1240687 - RNA, 12 nt, Human
gagggcucugag

SEQ ID NO: 1240688 - RNA, 19 nt, Human
gaggcucuggagcccacug

SEQ ID NO: 1240689 - RNA, 14 nt, Human
gaggcucuggagcc

SEQ ID NO: 1240690 - RNA, 15 nt, Human
gaggccagccuggcc

SEQ ID NO: 1240691 - RNA, 16 nt, Human
gaggccagccuggccu

SEQ ID NO: 1240692 - RNA, 17 nt, Human
gaggccagccuggccuc

SEQ ID NO: 1240693 - RNA, 17 nt, Human
gaggcuccagagggcac

SEQ ID NO: 1240694 - RNA, 21 nt, Human
gaggccagaggcccccagccc

SEQ ID NO: 1240695 - RNA, 11 nt, Human
gaggccagccu

SEQ ID NO: 1240696 - RNA, 13 nt, Human
gaggccagccugg

SEQ ID NO: 1240697 - RNA, 14 nt, Human
gaggccagccuggc

SEQ ID NO: 1240698 - RNA, 21 nt, Human
gccaaggcagaggccugggcu

SEQ ID NO: 1240699 - RNA, 21 nt, Human
gccaaggagucacugagacca

SEQ ID NO: 1240700 - RNA, 14 nt, Human
gccaaggcagaggc

SEQ ID NO: 1240701 - RNA, 15 nt, Human
gccaaggcagaggcc

SEQ ID NO: 1240702 - RNA, 16 nt, Human
gccaaggcagaggccu

SEQ ID NO: 1240703 - RNA, 22 nt, Human
gccaagcaccuagccucgcucu

SEQ ID NO: 1240704 - RNA, 21 nt, Human
gccaagccauggguagccugg

SEQ ID NO: 1240705 - RNA, 16 nt, Human
gccaagcuccaagccc

SEQ ID NO: 1240706 - RNA, 14 nt, Human
gccaagcugaggug

SEQ ID NO: 1240707 - RNA, 15 nt, Human
gccaagcugaggugc

SEQ ID NO: 1240708 - RNA, 18 nt, Human
gccaagcugaggugccca

SEQ ID NO: 1240709 - RNA, 21 nt, Human
gccaagcugaggugcccagga

SEQ ID NO: 1240710 - RNA, 23 nt, Human
gccaagcugaggugcccaggaga

SEQ ID NO: 1240711 - RNA, 22 nt, Human
gccaagcugaggugcccaggag

SEQ ID NO: 1240712 - RNA, 14 nt, Human
gccaaggaaaggca

SEQ ID NO: 1240713 - RNA, 15 nt, Human
gccaaggaccugaga

SEQ ID NO: 1240714 - RNA, 19 nt, Human
gccaacuauggccugugga

SEQ ID NO: 1240715 - RNA, 16 nt, Human
gccaacuagccccugg

SEQ ID NO: 1240716 - RNA, 17 nt, Human
gccaacuagccccuggg

SEQ ID NO: 1240717 - RNA, 18 nt, Human
gccaacuaugauuauuaa

SEQ ID NO: 1240718 - RNA, 20 nt, Human
gccaacuagccccuggggug

SEQ ID NO: 1240719 - RNA, 15 nt, Human
gccaacuauggccug

SEQ ID NO: 1240720 - RNA, 14 nt, Human
gccaacuauggccu

SEQ ID NO: 1240721 - RNA, 15 nt, Human
gccaacuagccccug

SEQ ID NO: 1240722 - RNA, 21 nt, Human
gccaacuuuccccacguuaaa

SEQ ID NO: 1240723 - RNA, 15 nt, Human
gccaagaaacgucuu

SEQ ID NO: 1240724 - RNA, 21 nt, Human
gccaagaaacgucuucuaaac

SEQ ID NO: 1240725 - RNA, 22 nt, Human
gccaagaaacgucuucuaaacu

SEQ ID NO: 1240726 - RNA, 15 nt, Human
gccaagaagcagugg

SEQ ID NO: 1240727 - RNA, 16 nt, Human
gccaagaagcaguggc

SEQ ID NO: 1240728 - RNA, 19 nt, Human
gccaagaagcaguggccuu

SEQ ID NO: 1240729 - RNA, 20 nt, Human
gccaagaagcaguggccuua

SEQ ID NO: 1240730 - RNA, 14 nt, Human
gccaagacugcugu

SEQ ID NO: 1240731 - RNA, 15 nt, Human
gccaagacugcugug

SEQ ID NO: 1240732 - RNA, 20 nt, Human
gccaagacugcuguggccag

SEQ ID NO: 1240733 - RNA, 21 nt, Human
gccaagacugcuguggccagg

SEQ ID NO: 1240734 - RNA, 22 nt, Human
gccaagacugcuguggccagga

SEQ ID NO: 1240735 - RNA, 23 nt, Human
gccaagacugcuguggccaggag

SEQ ID NO: 1240736 - RNA, 18 nt, Human
gccaagagaaacuuccua

SEQ ID NO: 1240737 - RNA, 12 nt, Human
gcauuuccuggg

SEQ ID NO: 1240738 - RNA, 13 nt, Human
gcauuuccugggu

SEQ ID NO: 1240739 - RNA, 14 nt, Human
gcauuuccugggug

SEQ ID NO: 1240740 - RNA, 21 nt, Human
gcauuuccuggguggcuacuc

SEQ ID NO: 1240741 - RNA, 15 nt, Human
gccaaccuaaaacuc

SEQ ID NO: 1240742 - RNA, 17 nt, Human
gcauugugauuggccug

SEQ ID NO: 1240743 - RNA, 22 nt, Human
gcauugugauuggccuguagag

SEQ ID NO: 1240744 - RNA, 18 nt, Human
gcauuucccuuccuuccu

SEQ ID NO: 1240745 - RNA, 21 nt, Human
gcauuuccuaucaccuauuuc

SEQ ID NO: 1240746 - RNA, 18 nt, Human
gcauuuaaaacagacacu

SEQ ID NO: 1240747 - RNA, 22 nt, Human
gcauuucacuuucccgguguuc

SEQ ID NO: 1240748 - RNA, 23 nt, Human
gcaugucccuaccgagucucuuc

SEQ ID NO: 1240749 - RNA, 19 nt, Human
gcauguccuguaaagguua

SEQ ID NO: 1240750 - RNA, 10 nt, Human
gcauuguaaa

SEQ ID NO: 1240751 - RNA, 20 nt, Human
gcauuguaaaagcauuuugu

SEQ ID NO: 1240752 - RNA, 16 nt, Human
gcauuguaaaauaauu

SEQ ID NO: 1240753 - RNA, 12 nt, Human
gcauuguccucu

SEQ ID NO: 1240754 - RNA, 19 nt, Human
gcauggcauccuccagccc

SEQ ID NO: 1240755 - RNA, 21 nt, Human
gcauguacggauuuucaguua

SEQ ID NO: 1240756 - RNA, 13 nt, Human
gcauguaguaaca

SEQ ID NO: 1240757 - RNA, 16 nt, Human
gcauguaguaacacua

SEQ ID NO: 1240758 - RNA, 17 nt, Human
gcauguaguaacacuaa

SEQ ID NO: 1240759 - RNA, 21 nt, Human
gcauguaguaacacuaauaua

SEQ ID NO: 1240760 - RNA, 22 nt, Human
gcauguaguaacacuaauauau

SEQ ID NO: 1240761 - RNA, 24 nt, Human
gcauguaguaacacuaauauauuu

SEQ ID NO: 1240762 - RNA, 23 nt, Human
gcauguaguaacacuaauauauu

SEQ ID NO: 1240763 - RNA, 13 nt, Human
gcaucgcaaugua

SEQ ID NO: 1240764 - RNA, 18 nt, Human
gcaucgcaccauucugac

SEQ ID NO: 1240765 - RNA, 13 nt, Human
gcauggccaggug

SEQ ID NO: 1240766 - RNA, 17 nt, Human
gcauggcauccuccagc

SEQ ID NO: 1240767 - RNA, 18 nt, Human
gcauggcauccuccagcc

SEQ ID NO: 1240768 - RNA, 21 nt, Human
gcauggcauccuccagccccu

SEQ ID NO: 1240769 - RNA, 14 nt, Human
gcauggccaggugg

SEQ ID NO: 1240770 - RNA, 17 nt, Human
gcauggccagguggcca

SEQ ID NO: 1240771 - RNA, 20 nt, Human
gcaucgcaccauucugacuc

SEQ ID NO: 1240772 - RNA, 22 nt, Human
gcaucggacaagacccccagca

SEQ ID NO: 1240773 - RNA, 21 nt, Human
gcauggcagggggcugcugcu

SEQ ID NO: 1240774 - RNA, 18 nt, Human
gcauggcagggggcugcu

SEQ ID NO: 1240775 - RNA, 19 nt, Human
gcauggcagggggcugcug

SEQ ID NO: 1240776 - RNA, 20 nt, Human
gcauggcagggggcugcugc

SEQ ID NO: 1240777 - RNA, 17 nt, Human
gcacuuugcuuuaauau

SEQ ID NO: 1240778 - RNA, 19 nt, Human
gcacuuugcuuuaauauaa

SEQ ID NO: 1240779 - RNA, 20 nt, Human
gcacuuugcuuuaauauaaa

SEQ ID NO: 1240780 - RNA, 21 nt, Human
gcacuuugcuuuaauauaaau

SEQ ID NO: 1240781 - RNA, 16 nt, Human
gcacuuuggcuuauaa

SEQ ID NO: 1240782 - RNA, 17 nt, Human
gcacuuuggcuuauaau

SEQ ID NO: 1240783 - RNA, 21 nt, Human
gcacuuuggcuuauaauucuu

SEQ ID NO: 1240784 - RNA, 20 nt, Human
gcacuuuggcuuauaauucu

SEQ ID NO: 1240785 - RNA, 15 nt, Human
gcacucuucauggug

SEQ ID NO: 1240786 - RNA, 22 nt, Human
gcacugaaagucacggcugcgc

SEQ ID NO: 1240787 - RNA, 17 nt, Human
gcacugaagugcuuagu

SEQ ID NO: 1240788 - RNA, 20 nt, Human
gcacuuucuauccucuguaa

SEQ ID NO: 1240789 - RNA, 13 nt, Human
gcacucuucaugg

SEQ ID NO: 1240790 - RNA, 15 nt, Human
gcacucuagauucca

SEQ ID NO: 1240791 - RNA, 22 nt, Human
gcaggcuggccaguccaggcug

SEQ ID NO: 1240792 - RNA, 17 nt, Human
gcagggaacauggggag

SEQ ID NO: 1240793 - RNA, 18 nt, Human
gcagggaacauggggagg

SEQ ID NO: 1240794 - RNA, 13 nt, Human
gcaggcuggcccu

SEQ ID NO: 1240795 - RNA, 14 nt, Human
gcaggcuggcccug

SEQ ID NO: 1240796 - RNA, 12 nt, Human
gcaggcuggcca

SEQ ID NO: 1240797 - RNA, 14 nt, Human
gcaggcuggccagu

SEQ ID NO: 1240798 - RNA, 21 nt, Human
gcagcuucugcccccugcaga

SEQ ID NO: 1240799 - RNA, 19 nt, Human
gcaggcugagugcauuugg

SEQ ID NO: 1240800 - RNA, 12 nt, Human
gcaggcugauuu

SEQ ID NO: 1240801 - RNA, 17 nt, Human
gcaggcugauuucuagg

SEQ ID NO: 1240802 - RNA, 16 nt, Human
gcagcuucugcccccu

SEQ ID NO: 1240803 - RNA, 17 nt, Human
gcagcuucugcccccug

SEQ ID NO: 1240804 - RNA, 20 nt, Human
gcagcuucugcccccugcag

SEQ ID NO: 1240805 - RNA, 22 nt, Human
gcagcuucugcccccugcagaa

SEQ ID NO: 1240806 - RNA, 15 nt, Human
gcagcuuauucacaa

SEQ ID NO: 1240807 - RNA, 20 nt, Human
gcagcuguuuuguugacauu

SEQ ID NO: 1240808 - RNA, 12 nt, Human
gcagcuuccaga

SEQ ID NO: 1240809 - RNA, 17 nt, Human
gcagcuguuuuguugac

SEQ ID NO: 1240810 - RNA, 19 nt, Human
gcagcuuagaguuggccau

SEQ ID NO: 1240811 - RNA, 13 nt, Human
gcauaaauuauug

SEQ ID NO: 1240812 - RNA, 16 nt, Human
gcauaacaauuccucu

SEQ ID NO: 1240813 - RNA, 17 nt, Human
gcauaacaauuccucua

SEQ ID NO: 1240814 - RNA, 20 nt, Human
gcauacaaguuucauucucc

SEQ ID NO: 1240815 - RNA, 23 nt, Human
gcaguuuuuuuuuucuugucuau

SEQ ID NO: 1240816 - RNA, 15 nt, Human
gcauaaaagaugaaa

SEQ ID NO: 1240817 - RNA, 19 nt, Human
gcagggacuugaacccaua

SEQ ID NO: 1240818 - RNA, 20 nt, Human
gcagggacuguaaacacaga

SEQ ID NO: 1240819 - RNA, 13 nt, Human
gcagguucccaag

SEQ ID NO: 1240820 - RNA, 15 nt, Human
gcagguucccaagcu

SEQ ID NO: 1240821 - RNA, 16 nt, Human
gcagguucccaagcuc

SEQ ID NO: 1240822 - RNA, 18 nt, Human
gcagguucccaagcucag

SEQ ID NO: 1240823 - RNA, 19 nt, Human
gcagguucccaagcucaga

SEQ ID NO: 1240824 - RNA, 12 nt, Human
gcagguucccac

SEQ ID NO: 1240825 - RNA, 23 nt, Human
gcagguucccacuuaaaaauuaa

SEQ ID NO: 1240826 - RNA, 17 nt, Human
gcaguugagacaagaaa

SEQ ID NO: 1240827 - RNA, 23 nt, Human
gaucuggaaccucagccuggcca

SEQ ID NO: 1240828 - RNA, 13 nt, Human
gaucuggcugcag

SEQ ID NO: 1240829 - RNA, 12 nt, Human
gaucuggcaugu

SEQ ID NO: 1240830 - RNA, 16 nt, Human
gaucugggucucuaau

SEQ ID NO: 1240831 - RNA, 22 nt, Human
gaugaggccagaccauggacac

SEQ ID NO: 1240832 - RNA, 15 nt, Human
gaugaggcccuccac

SEQ ID NO: 1240833 - RNA, 15 nt, Human
gaugaggccagacca

SEQ ID NO: 1240834 - RNA, 13 nt, Human
gaugaggccagac

SEQ ID NO: 1240835 - RNA, 19 nt, Human
gaugaggcccuccacaccu

SEQ ID NO: 1240836 - RNA, 20 nt, Human
gaugaggcccuccacaccug

SEQ ID NO: 1240837 - RNA, 22 nt, Human
gaugaggcccuccacaccugcg

SEQ ID NO: 1240838 - RNA, 21 nt, Human
gaugaggcccuccacaccugc

SEQ ID NO: 1240839 - RNA, 18 nt, Human
gaugagcucccacaagcc

SEQ ID NO: 1240840 - RNA, 20 nt, Human
gaugagcucccacaagccug

SEQ ID NO: 1240841 - RNA, 21 nt, Human
gaugagcucccacaagccuga

SEQ ID NO: 1240842 - RNA, 23 nt, Human
gaugagcucccacaagccugagg

SEQ ID NO: 1240843 - RNA, 13 nt, Human
gaugaggcaaccc

SEQ ID NO: 1240844 - RNA, 14 nt, Human
gaugaugacuaugg

SEQ ID NO: 1240845 - RNA, 21 nt, Human
gaugagggaaaagaaaaagau

SEQ ID NO: 1240846 - RNA, 23 nt, Human
gaugauuaaauaagauucuaacg

SEQ ID NO: 1240847 - RNA, 16 nt, Human
gaugcuugggaagacu

SEQ ID NO: 1240848 - RNA, 15 nt, Human
gaugcuuuuaacaga

SEQ ID NO: 1240849 - RNA, 14 nt, Human
gaugcuuuuaacag

SEQ ID NO: 1240850 - RNA, 23 nt, Human
gauggaggaaaaccaagccgugg

SEQ ID NO: 1240851 - RNA, 15 nt, Human
gauggagugcuguuu

SEQ ID NO: 1240852 - RNA, 13 nt, Human
gauggaguuucua

SEQ ID NO: 1240853 - RNA, 15 nt, Human
gauggaguuucuaag

SEQ ID NO: 1240854 - RNA, 17 nt, Human
gauggaguuucuaaggu

SEQ ID NO: 1240855 - RNA, 14 nt, Human
gauguaaagauguu

SEQ ID NO: 1240856 - RNA, 17 nt, Human
gauguagaggagaaacu

SEQ ID NO: 1240857 - RNA, 19 nt, Human
gauguaauuuuguguaaga

SEQ ID NO: 1240858 - RNA, 12 nt, Human
gauguaaaguga

SEQ ID NO: 1240859 - RNA, 17 nt, Human
gauguaaggaugggcau

SEQ ID NO: 1240860 - RNA, 13 nt, Human
gauguaauacuuc

SEQ ID NO: 1240861 - RNA, 22 nt, Human
gauguaauacuucuugugugua

SEQ ID NO: 1240862 - RNA, 14 nt, Human
gauguaauacuucu

SEQ ID NO: 1240863 - RNA, 15 nt, Human
gauguaauacuucuu

SEQ ID NO: 1240864 - RNA, 13 nt, Human
gauguaauuuugu

SEQ ID NO: 1240865 - RNA, 17 nt, Human
gaugucccaacuuguaa

SEQ ID NO: 1240866 - RNA, 18 nt, Human
gauguacucuaaauacug

SEQ ID NO: 1240867 - RNA, 15 nt, Human
gaugucauacagaga

SEQ ID NO: 1240868 - RNA, 16 nt, Human
gaugucauacagagaa

SEQ ID NO: 1240869 - RNA, 17 nt, Human
gaugucauacagagaag

SEQ ID NO: 1240870 - RNA, 18 nt, Human
gaugucauacagagaagu

SEQ ID NO: 1240871 - RNA, 20 nt, Human
gaugucauacagagaaguca

SEQ ID NO: 1240872 - RNA, 18 nt, Human
gaugucccaacuuguaaa

SEQ ID NO: 1240873 - RNA, 11 nt, Human
gauguccccag

SEQ ID NO: 1240874 - RNA, 13 nt, Human
gauguccccagca

SEQ ID NO: 1240875 - RNA, 15 nt, Human
gauguccccagcaga

SEQ ID NO: 1240876 - RNA, 19 nt, Human
gaugucuccuaagcaccug

SEQ ID NO: 1240877 - RNA, 15 nt, Human
gaugucuccuaagca

SEQ ID NO: 1240878 - RNA, 13 nt, Human
gaugucuuggaac

SEQ ID NO: 1240879 - RNA, 21 nt, Human
gaugucuuggaacauuggaau

SEQ ID NO: 1240880 - RNA, 22 nt, Human
gaugucuuggaacauuggaaug

SEQ ID NO: 1240881 - RNA, 16 nt, Human
gaugucuuuguuaaga

SEQ ID NO: 1240882 - RNA, 12 nt, Human
gaugucuuuguu

SEQ ID NO: 1240883 - RNA, 19 nt, Human
gaugugaguugcacagcua

SEQ ID NO: 1240884 - RNA, 11 nt, Human
gaugugauaua

SEQ ID NO: 1240885 - RNA, 18 nt, Human
gaugugauauauaagugu

SEQ ID NO: 1240886 - RNA, 15 nt, Human
gaugugauauucuaa

SEQ ID NO: 1240887 - RNA, 15 nt, Human
gaugugauuguggaa

SEQ ID NO: 1240888 - RNA, 16 nt, Human
gaugugauuguggaau

SEQ ID NO: 1240889 - RNA, 18 nt, Human
gaugugauuguggaaugg

SEQ ID NO: 1240890 - RNA, 19 nt, Human
gaugugcacguaaaguacu

SEQ ID NO: 1240891 - RNA, 18 nt, Human
gaugugcagcauuucacu

SEQ ID NO: 1240892 - RNA, 19 nt, Human
gaugugcagcauuucacuu

SEQ ID NO: 1240893 - RNA, 11 nt, Human
gaugugcauuc

SEQ ID NO: 1240894 - RNA, 12 nt, Human
gauucuguacau

SEQ ID NO: 1240895 - RNA, 17 nt, Human
gauucuuuccauuugca

SEQ ID NO: 1240896 - RNA, 18 nt, Human
gauucuuuccauuugcau

SEQ ID NO: 1240897 - RNA, 19 nt, Human
gauucuuuccauuugcauu

SEQ ID NO: 1240898 - RNA, 14 nt, Human
gcaaaaaagaaaac

SEQ ID NO: 1240899 - RNA, 13 nt, Human
gcaaaaaagaaaa

SEQ ID NO: 1240900 - RNA, 21 nt, Human
gauuuuuuuuuuuuuccuguc

SEQ ID NO: 1240901 - RNA, 20 nt, Human
gauuuuuuuuuuuuuuuccu

SEQ ID NO: 1240902 - RNA, 21 nt, Human
gauuuuuuuuuuuuuuuccuu

SEQ ID NO: 1240903 - RNA, 19 nt, Human
gauuucaguucuaggaaaa

SEQ ID NO: 1240904 - RNA, 15 nt, Human
gauuucauacuguaa

SEQ ID NO: 1240905 - RNA, 15 nt, Human
gauuucauaguucag

SEQ ID NO: 1240906 - RNA, 18 nt, Human
gauuucauaguucagaau

SEQ ID NO: 1240907 - RNA, 17 nt, Human
gauuucauaguucagaa

SEQ ID NO: 1240908 - RNA, 16 nt, Human
gauuuuuuuuuuuucu

SEQ ID NO: 1240909 - RNA, 21 nt, Human
gauuuuuuuuuuuucucucaa

SEQ ID NO: 1240910 - RNA, 15 nt, Human
gauuucagcucacug

SEQ ID NO: 1240911 - RNA, 17 nt, Human
gauuucagcucacugca

SEQ ID NO: 1240912 - RNA, 20 nt, Human
gauuucagcucacugcaacc

SEQ ID NO: 1240913 - RNA, 20 nt, Human
gauucuuucccaauucacau

SEQ ID NO: 1240914 - RNA, 22 nt, Human
gauucuuuccauuugcauuugu

SEQ ID NO: 1240915 - RNA, 18 nt, Human
gauuuaacauuaucuagu

SEQ ID NO: 1240916 - RNA, 20 nt, Human
gauuuaagggcccaggucag

SEQ ID NO: 1240917 - RNA, 17 nt, Human
gcacucccaccugacac

SEQ ID NO: 1240918 - RNA, 18 nt, Human
gcacucccaccugacaca

SEQ ID NO: 1240919 - RNA, 22 nt, Human
gcacucccaccugacacaccag

SEQ ID NO: 1240920 - RNA, 11 nt, Human
gcacucuagau

SEQ ID NO: 1240921 - RNA, 12 nt, Human
gcacucuagauu

SEQ ID NO: 1240922 - RNA, 13 nt, Human
gcacucuagauuc

SEQ ID NO: 1240923 - RNA, 18 nt, Human
gcacuauaugcaaacagg

SEQ ID NO: 1240924 - RNA, 15 nt, Human
gcacuauaugcaaac

SEQ ID NO: 1240925 - RNA, 15 nt, Human
gcacuaucuuuaaac

SEQ ID NO: 1240926 - RNA, 19 nt, Human
gcacuaucuuuaaacgaaa

SEQ ID NO: 1240927 - RNA, 18 nt, Human
gcacuaucuuucagcucc

SEQ ID NO: 1240928 - RNA, 14 nt, Human
gcacuauaugcaaa

SEQ ID NO: 1240929 - RNA, 19 nt, Human
gcacuaucuuucagcucca

SEQ ID NO: 1240930 - RNA, 19 nt, Human
gcacucaaccuuaagaccu

SEQ ID NO: 1240931 - RNA, 12 nt, Human
gcaccuccucag

SEQ ID NO: 1240932 - RNA, 14 nt, Human
gcaccuccucagcc

SEQ ID NO: 1240933 - RNA, 15 nt, Human
gcaccuccucagccu

SEQ ID NO: 1240934 - RNA, 17 nt, Human
gcaccuccucagccuga

SEQ ID NO: 1240935 - RNA, 16 nt, Human
gcaccuccucagccug

SEQ ID NO: 1240936 - RNA, 17 nt, Human
gcaauacaaguuucauc

SEQ ID NO: 1240937 - RNA, 11 nt, Human
gcacacagcac

SEQ ID NO: 1240938 - RNA, 23 nt, Human
gcacacagcacgggggccaagga

SEQ ID NO: 1240939 - RNA, 18 nt, Human
gcacacagaggggaguca

SEQ ID NO: 1240940 - RNA, 18 nt, Human
gcacacagcuacucuccc

SEQ ID NO: 1240941 - RNA, 13 nt, Human
gcacacagcuacu

SEQ ID NO: 1240942 - RNA, 13 nt, Human
gcacacagggcag

SEQ ID NO: 1240943 - RNA, 14 nt, Human
gcaccggaccagcc

SEQ ID NO: 1240944 - RNA, 15 nt, Human
gcaccggaccagccu

SEQ ID NO: 1240945 - RNA, 16 nt, Human
gcaccggaccagccug

SEQ ID NO: 1240946 - RNA, 17 nt, Human
gcaccggaccagccugg

SEQ ID NO: 1240947 - RNA, 19 nt, Human
gcaccggaccagccuggcc

SEQ ID NO: 1240948 - RNA, 21 nt, Human
gcaccggaccagccuggccca

SEQ ID NO: 1240949 - RNA, 17 nt, Human
gcaccuaauccaggcag

SEQ ID NO: 1240950 - RNA, 18 nt, Human
gcaccuaauccaggcaga

SEQ ID NO: 1240951 - RNA, 17 nt, Human
gcaccuaccaccacgcc

SEQ ID NO: 1240952 - RNA, 18 nt, Human
gcaccuaccaccacgccc

SEQ ID NO: 1240953 - RNA, 18 nt, Human
gcaccuccacauccucca

SEQ ID NO: 1240954 - RNA, 22 nt, Human
gcaccuaauccaggcagaucca

SEQ ID NO: 1240955 - RNA, 23 nt, Human
gcaccuaauccaggcagauccag

SEQ ID NO: 1240956 - RNA, 11 nt, Human
gcaauagagac

SEQ ID NO: 1240957 - RNA, 22 nt, Human
gcacacaccaccacgccuggcu

SEQ ID NO: 1240958 - RNA, 22 nt, Human
gcaauagucaaauugugugaaa

SEQ ID NO: 1240959 - RNA, 18 nt, Human
gcaauagucaaauugugu

SEQ ID NO: 1240960 - RNA, 13 nt, Human
gcaauacauacca

SEQ ID NO: 1240961 - RNA, 18 nt, Human
gcaaguuuccaucaucua

SEQ ID NO: 1240962 - RNA, 13 nt, Human
gcaaccuccaccu

SEQ ID NO: 1240963 - RNA, 23 nt, Human
gcaaccguggcccuuccuggaca

SEQ ID NO: 1240964 - RNA, 19 nt, Human
gcaaccuaccuguugagca

SEQ ID NO: 1240965 - RNA, 19 nt, Human
gcaaccucaguaauuuaga

SEQ ID NO: 1240966 - RNA, 16 nt, Human
gcaaccuccaccuccu

SEQ ID NO: 1240967 - RNA, 17 nt, Human
gcaaccuccaccuccug

SEQ ID NO: 1240968 - RNA, 18 nt, Human
gcaaccguggcccuuccu

SEQ ID NO: 1240969 - RNA, 19 nt, Human
gcaaccguggcccuuccug

SEQ ID NO: 1240970 - RNA, 20 nt, Human
gcaaccguggcccuuccugg

SEQ ID NO: 1240971 - RNA, 21 nt, Human
gcaaccguggcccuuccugga

SEQ ID NO: 1240972 - RNA, 22 nt, Human
gcaaccguggcccuuccuggac

SEQ ID NO: 1240973 - RNA, 24 nt, Human
gcaaccguggcccuuccuggacag

SEQ ID NO: 1240974 - RNA, 18 nt, Human
gcaacccgugccaagucc

SEQ ID NO: 1240975 - RNA, 19 nt, Human
gcaacccgugccaagucca

SEQ ID NO: 1240976 - RNA, 22 nt, Human
gcaacccgugccaaguccaggu

SEQ ID NO: 1240977 - RNA, 23 nt, Human
gcaaccgucuguuaugcugugac

SEQ ID NO: 1240978 - RNA, 11 nt, Human
gcaaaagaaga

SEQ ID NO: 1240979 - RNA, 15 nt, Human
gcaaaagaagaaguu

SEQ ID NO: 1240980 - RNA, 19 nt, Human
gcaaaagaauggcagaaaa

SEQ ID NO: 1240981 - RNA, 17 nt, Human
gcaaaacucuacuuaau

SEQ ID NO: 1240982 - RNA, 22 nt, Human
gcaaaacucuacuuaauccaau

SEQ ID NO: 1240983 - RNA, 23 nt, Human
gcaaaacucuacuuaauccaaug

SEQ ID NO: 1240984 - RNA, 15 nt, Human
gcaacccgugccaag

SEQ ID NO: 1240985 - RNA, 23 nt, Human
cugacccuccaccgcagaaggaa

SEQ ID NO: 1240986 - RNA, 17 nt, Human
cugacccuaugggucua

SEQ ID NO: 1240987 - RNA, 15 nt, Human
cugacccuccccaaa

SEQ ID NO: 1240988 - RNA, 18 nt, Human
cugacccuccaccgcaga

SEQ ID NO: 1240989 - RNA, 16 nt, Human
cugaccccugcucagu

SEQ ID NO: 1240990 - RNA, 18 nt, Human
cugacccucaucuuucuu

SEQ ID NO: 1240991 - RNA, 13 nt, Human
cugaccccugcuc

SEQ ID NO: 1240992 - RNA, 14 nt, Human
cugaccccugcuca

SEQ ID NO: 1240993 - RNA, 22 nt, Human
cugacccuccccaaaggcuuug

SEQ ID NO: 1240994 - RNA, 18 nt, Human
cugagcugaggcagcagu

SEQ ID NO: 1240995 - RNA, 13 nt, Human
cugagcugugcag

SEQ ID NO: 1240996 - RNA, 22 nt, Human
cugaggaacccuuacaguagga

SEQ ID NO: 1240997 - RNA, 16 nt, Human
cugaggaacugucucg

SEQ ID NO: 1240998 - RNA, 22 nt, Human
cugagcuugcagagaugaggcc

SEQ ID NO: 1240999 - RNA, 15 nt, Human
cugagcugugcaggu

SEQ ID NO: 1241000 - RNA, 11 nt, Human
cugagcuguca

SEQ ID NO: 1241001 - RNA, 18 nt, Human
cugaggggcuaccaggaa

SEQ ID NO: 1241002 - RNA, 16 nt, Human
cugaggggggauccag

SEQ ID NO: 1241003 - RNA, 20 nt, Human
cugaggggcuaccaggaaag

SEQ ID NO: 1241004 - RNA, 12 nt, Human
cugagggucugu

SEQ ID NO: 1241005 - RNA, 16 nt, Human
cugagggucuguaggu

SEQ ID NO: 1241006 - RNA, 14 nt, Human
cugagggucuguag

SEQ ID NO: 1241007 - RNA, 21 nt, Human
cugaggaagacaagugaugcu

SEQ ID NO: 1241008 - RNA, 13 nt, Human
cugagguccugag

SEQ ID NO: 1241009 - RNA, 14 nt, Human
cugagguccugagc

SEQ ID NO: 1241010 - RNA, 15 nt, Human
cugagguccugagca

SEQ ID NO: 1241011 - RNA, 16 nt, Human
cugagguccugagcac

SEQ ID NO: 1241012 - RNA, 18 nt, Human
cugagguccugagcacug

SEQ ID NO: 1241013 - RNA, 19 nt, Human
cugagguccugagcacugc

SEQ ID NO: 1241014 - RNA, 20 nt, Human
cugagguccugagcacugcc

SEQ ID NO: 1241015 - RNA, 24 nt, Human
cugagguccugagcacugccagga

SEQ ID NO: 1241016 - RNA, 21 nt, Human
cugagguccugagcacugcca

SEQ ID NO: 1241017 - RNA, 17 nt, Human
cugaggggcuaccagga

SEQ ID NO: 1241018 - RNA, 16 nt, Human
cugaggaauuucaccu

SEQ ID NO: 1241019 - RNA, 16 nt, Human
cugaggaauuuucuuu

SEQ ID NO: 1241020 - RNA, 17 nt, Human
cugaguaccccugcuuu

SEQ ID NO: 1241021 - RNA, 21 nt, Human
cugagguuacuggaaauuagg

SEQ ID NO: 1241022 - RNA, 17 nt, Human
cugagguuacuggaaau

SEQ ID NO: 1241023 - RNA, 19 nt, Human
cugagguuacuggaaauua

SEQ ID NO: 1241024 - RNA, 24 nt, Human
cugaaaauauuguuuuacaauagu

SEQ ID NO: 1241025 - RNA, 22 nt, Human
cugaaaauauuguuuuacaaua

SEQ ID NO: 1241026 - RNA, 20 nt, Human
cugaaaauauuguuuuacaa

SEQ ID NO: 1241027 - RNA, 17 nt, Human
cugaaaauauuguuuua

SEQ ID NO: 1241028 - RNA, 22 nt, Human
cugaaaauauaaccagccauug

SEQ ID NO: 1241029 - RNA, 17 nt, Human
cugaaagaggaaugaag

SEQ ID NO: 1241030 - RNA, 13 nt, Human
cugaaagaggaau

SEQ ID NO: 1241031 - RNA, 15 nt, Human
cugaaaaaaaaccug

SEQ ID NO: 1241032 - RNA, 13 nt, Human
cugaaaaaauaua

SEQ ID NO: 1241033 - RNA, 15 nt, Human
cugaaaaaauauaug

SEQ ID NO: 1241034 - RNA, 19 nt, Human
cugaaaaaucuaagugaua

SEQ ID NO: 1241035 - RNA, 22 nt, Human
cugaaaaaucuaagugauauaa

SEQ ID NO: 1241036 - RNA, 21 nt, Human
cugaaaaaugguaauuguugc

SEQ ID NO: 1241037 - RNA, 17 nt, Human
cugaaaagguuuaugaa

SEQ ID NO: 1241038 - RNA, 13 nt, Human
cugaaaauauaac

SEQ ID NO: 1241039 - RNA, 15 nt, Human
cugaaaauauaacca

SEQ ID NO: 1241040 - RNA, 13 nt, Human
cucuugauuuuca

SEQ ID NO: 1241041 - RNA, 21 nt, Human
cucuugcacagucacugcucu

SEQ ID NO: 1241042 - RNA, 20 nt, Human
cucuugcacagucacugcuc

SEQ ID NO: 1241043 - RNA, 20 nt, Human
cucuugccucaaccucccaa

SEQ ID NO: 1241044 - RNA, 18 nt, Human
cucuugccucaaccuccc

SEQ ID NO: 1241045 - RNA, 17 nt, Human
cucuuuuuucguuuguu

SEQ ID NO: 1241046 - RNA, 18 nt, Human
cucuugauaccccccucu

SEQ ID NO: 1241047 - RNA, 19 nt, Human
cucuugauaccccccucug

SEQ ID NO: 1241048 - RNA, 21 nt, Human
cucuugauaccccccucuguc

SEQ ID NO: 1241049 - RNA, 23 nt, Human
cucuugauaccccccucugucuu

SEQ ID NO: 1241050 - RNA, 23 nt, Human
cucuugaguuugucgcucaugug

SEQ ID NO: 1241051 - RNA, 14 nt, Human
cugaaagaggcuga

SEQ ID NO: 1241052 - RNA, 22 nt, Human
cugaaagaggcugaggccugga

SEQ ID NO: 1241053 - RNA, 22 nt, Human
cugaaagaguccauuguuuaaa

SEQ ID NO: 1241054 - RNA, 14 nt, Human
cugaagcagccucu

SEQ ID NO: 1241055 - RNA, 15 nt, Human
cugaagcagccucuc

SEQ ID NO: 1241056 - RNA, 16 nt, Human
cugaagcagccucucc

SEQ ID NO: 1241057 - RNA, 20 nt, Human
cugaagcagccucuccccag

SEQ ID NO: 1241058 - RNA, 19 nt, Human
cugaagcagguucccaagc

SEQ ID NO: 1241059 - RNA, 20 nt, Human
cugaagcagguucccaagcu

SEQ ID NO: 1241060 - RNA, 21 nt, Human
cugaagcagguucccaagcuc

SEQ ID NO: 1241061 - RNA, 15 nt, Human
cugaagcccucccag

SEQ ID NO: 1241062 - RNA, 20 nt, Human
cugacacugcuggagaggcc

SEQ ID NO: 1241063 - RNA, 13 nt, Human
cugacacugcugg

SEQ ID NO: 1241064 - RNA, 14 nt, Human
cugacacugcugga

SEQ ID NO: 1241065 - RNA, 15 nt, Human
cugacacugcuggag

SEQ ID NO: 1241066 - RNA, 21 nt, Human
cugacacugcuggagaggccc

SEQ ID NO: 1241067 - RNA, 19 nt, Human
cugacacuuuaauuaccaa

SEQ ID NO: 1241068 - RNA, 16 nt, Human
cugacacccuucuccc

SEQ ID NO: 1241069 - RNA, 17 nt, Human
cugacacccuucuccca

SEQ ID NO: 1241070 - RNA, 21 nt, Human
cugacacccuucucccacucu

SEQ ID NO: 1241071 - RNA, 16 nt, Human
cugacaccuaacucuu

SEQ ID NO: 1241072 - RNA, 19 nt, Human
cugacaccuaacucuucuu

SEQ ID NO: 1241073 - RNA, 17 nt, Human
cugacacucccuugggc

SEQ ID NO: 1241074 - RNA, 14 nt, Human
cugacacaccaggc

SEQ ID NO: 1241075 - RNA, 17 nt, Human
cugacacaccaggcgcu

SEQ ID NO: 1241076 - RNA, 19 nt, Human
cugacacaccaggcgcuaa

SEQ ID NO: 1241077 - RNA, 23 nt, Human
cugacacaccaggcgcuaauuca

SEQ ID NO: 1241078 - RNA, 13 nt, Human
cugacacacuaac

SEQ ID NO: 1241079 - RNA, 16 nt, Human
cugacacacuaaccaa

SEQ ID NO: 1241080 - RNA, 19 nt, Human
cugacacacuaaccaagcu

SEQ ID NO: 1241081 - RNA, 20 nt, Human
cugacacacuaaccaagcug

SEQ ID NO: 1241082 - RNA, 23 nt, Human
cugacacacuaaccaagcugagu

SEQ ID NO: 1241083 - RNA, 22 nt, Human
cugacacacuaaccaagcugag

SEQ ID NO: 1241084 - RNA, 17 nt, Human
cugaccccucauagccc

SEQ ID NO: 1241085 - RNA, 18 nt, Human
cugaccccaucaccuacu

SEQ ID NO: 1241086 - RNA, 20 nt, Human
cugaccccucauagcccuca

SEQ ID NO: 1241087 - RNA, 21 nt, Human
cugaccccucauagcccucac

SEQ ID NO: 1241088 - RNA, 16 nt, Human
cugaccccaucaccua

SEQ ID NO: 1241089 - RNA, 21 nt, Human
cucguggacaccugcccugcc

SEQ ID NO: 1241090 - RNA, 20 nt, Human
cucguggacaccugcccugc

SEQ ID NO: 1241091 - RNA, 19 nt, Human
cucguggacaccugcccug

SEQ ID NO: 1241092 - RNA, 17 nt, Human
cucguggacaccugccc

SEQ ID NO: 1241093 - RNA, 18 nt, Human
cucguccccaagugaccu

SEQ ID NO: 1241094 - RNA, 20 nt, Human
cucguauaugucucaggucc

SEQ ID NO: 1241095 - RNA, 13 nt, Human
cucguauagcaug

SEQ ID NO: 1241096 - RNA, 14 nt, Human
cucguauagcaugc

SEQ ID NO: 1241097 - RNA, 18 nt, Human
cucggggugcacaggagg

SEQ ID NO: 1241098 - RNA, 18 nt, Human
cucguauaugucucaggu

SEQ ID NO: 1241099 - RNA, 16 nt, Human
cucguaagauuuccuu

SEQ ID NO: 1241100 - RNA, 18 nt, Human
cucgguauaguuuuguca

SEQ ID NO: 1241101 - RNA, 13 nt, Human
cucgguuucucca

SEQ ID NO: 1241102 - RNA, 16 nt, Human
cucggggauguguccu

SEQ ID NO: 1241103 - RNA, 19 nt, Human
cucggggauguguccugac

SEQ ID NO: 1241104 - RNA, 15 nt, Human
cucggggugcacagg

SEQ ID NO: 1241105 - RNA, 16 nt, Human
cucggggugcacagga

SEQ ID NO: 1241106 - RNA, 17 nt, Human
cucggggugcacaggag

SEQ ID NO: 1241107 - RNA, 19 nt, Human
cucggggugcacaggaggg

SEQ ID NO: 1241108 - RNA, 14 nt, Human
cuccuuucuggcuu

SEQ ID NO: 1241109 - RNA, 18 nt, Human
cuccuuuccauaaauccu

SEQ ID NO: 1241110 - RNA, 15 nt, Human
cuccuaggaaaauac

SEQ ID NO: 1241111 - RNA, 18 nt, Human
cuccuuucaucacacugg

SEQ ID NO: 1241112 - RNA, 10 nt, Human
cuccuuucca

SEQ ID NO: 1241113 - RNA, 14 nt, Human
cuccuagcuguccu

SEQ ID NO: 1241114 - RNA, 21 nt, Human
cuccuagcuguccuuuuuccu

SEQ ID NO: 1241115 - RNA, 13 nt, Human
cuccuuuuaaaga

SEQ ID NO: 1241116 - RNA, 14 nt, Human
cuccuuuuaaagaa

SEQ ID NO: 1241117 - RNA, 13 nt, Human
cucgaacuccuga

SEQ ID NO: 1241118 - RNA, 20 nt, Human
cucgaaacacagaaaccuuu

SEQ ID NO: 1241119 - RNA, 14 nt, Human
cucgaaacacagaa

SEQ ID NO: 1241120 - RNA, 15 nt, Human
cucgaaacacagaaa

SEQ ID NO: 1241121 - RNA, 19 nt, Human
cucgaaacacagaaaccuu

SEQ ID NO: 1241122 - RNA, 23 nt, Human
cuccuuuuaaagaaaaaaauuga

SEQ ID NO: 1241123 - RNA, 13 nt, Human
cuccuuuucccaa

SEQ ID NO: 1241124 - RNA, 13 nt, Human
cuccuuuuuccau

SEQ ID NO: 1241125 - RNA, 16 nt, Human
cucgaacuccugaccu

SEQ ID NO: 1241126 - RNA, 17 nt, Human
cucgaacuccugaccuu

SEQ ID NO: 1241127 - RNA, 20 nt, Human
cucgaacuauuuucaaagac

SEQ ID NO: 1241128 - RNA, 21 nt, Human
cucgaacuauuuucaaagacu

SEQ ID NO: 1241129 - RNA, 14 nt, Human
cucucccuugggcu

SEQ ID NO: 1241130 - RNA, 16 nt, Human
cucucccuugggcucu

SEQ ID NO: 1241131 - RNA, 17 nt, Human
cucucccuugggcucug

SEQ ID NO: 1241132 - RNA, 18 nt, Human
cucucccuugggcucuga

SEQ ID NO: 1241133 - RNA, 19 nt, Human
cucucccuugggcucugau

SEQ ID NO: 1241134 - RNA, 21 nt, Human
cucucccuugggcucugauga

SEQ ID NO: 1241135 - RNA, 23 nt, Human
cucucccuugggcucugaugaaa

SEQ ID NO: 1241136 - RNA, 17 nt, Human
cucucuggccuucggcc

SEQ ID NO: 1241137 - RNA, 22 nt, Human
cucucuggccuucggccuccau

SEQ ID NO: 1241138 - RNA, 19 nt, Human
cucucuggccuucggccuc

SEQ ID NO: 1241139 - RNA, 17 nt, Human
cucucuuuauacagcug

SEQ ID NO: 1241140 - RNA, 18 nt, Human
cucucuuuauacagcugu

SEQ ID NO: 1241141 - RNA, 19 nt, Human
cucucuuuauacagcugua

SEQ ID NO: 1241142 - RNA, 16 nt, Human
cucucuuugcauggau

SEQ ID NO: 1241143 - RNA, 18 nt, Human
cucucuuugcauggauuu

SEQ ID NO: 1241144 - RNA, 23 nt, Human
cucucuuugcccaguuggagacu

SEQ ID NO: 1241145 - RNA, 15 nt, Human
cucucuuugcccagu

SEQ ID NO: 1241146 - RNA, 12 nt, Human
cucugaaaccag

SEQ ID NO: 1241147 - RNA, 17 nt, Human
cucugaaaccaguguua

SEQ ID NO: 1241148 - RNA, 13 nt, Human
cucugaaagagaa

SEQ ID NO: 1241149 - RNA, 14 nt, Human
cucugaaagagaaa

SEQ ID NO: 1241150 - RNA, 16 nt, Human
cucugaaagagaaaca

SEQ ID NO: 1241151 - RNA, 21 nt, Human
cucugaaagagaaacacguau

SEQ ID NO: 1241152 - RNA, 11 nt, Human
cucugaaauac

SEQ ID NO: 1241153 - RNA, 17 nt, Human
cucugaaagagaaacac

SEQ ID NO: 1241154 - RNA, 12 nt, Human
cucugaacacau

SEQ ID NO: 1241155 - RNA, 13 nt, Human
cucugaacacauu

SEQ ID NO: 1241156 - RNA, 14 nt, Human
cuccgucaacucau

SEQ ID NO: 1241157 - RNA, 15 nt, Human
cuccgggaccuggug

SEQ ID NO: 1241158 - RNA, 19 nt, Human
cuccccaugauguuuagaa

SEQ ID NO: 1241159 - RNA, 22 nt, Human
cuccccagggaagcagcagccu

SEQ ID NO: 1241160 - RNA, 20 nt, Human
cuccccagggaagcagcagc

SEQ ID NO: 1241161 - RNA, 16 nt, Human
cuccccagguccagcu

SEQ ID NO: 1241162 - RNA, 17 nt, Human
cuccccagguccagcuc

SEQ ID NO: 1241163 - RNA, 18 nt, Human
cuccccagguccagcucu

SEQ ID NO: 1241164 - RNA, 19 nt, Human
cuccccagguccagcucug

SEQ ID NO: 1241165 - RNA, 20 nt, Human
cuccccagguccagcucugg

SEQ ID NO: 1241166 - RNA, 21 nt, Human
cuccccagguccagcucugga

SEQ ID NO: 1241167 - RNA, 23 nt, Human
cuccccagguccagcucuggagg

SEQ ID NO: 1241168 - RNA, 11 nt, Human
cuccccaguuc

SEQ ID NO: 1241169 - RNA, 17 nt, Human
cucccuccccuugccug

SEQ ID NO: 1241170 - RNA, 18 nt, Human
cucccuccccuugccugu

SEQ ID NO: 1241171 - RNA, 21 nt, Human
cucccuccccuugccugugcc

SEQ ID NO: 1241172 - RNA, 14 nt, Human
cucccucccucucc

SEQ ID NO: 1241173 - RNA, 15 nt, Human
cucccucccucuccg

SEQ ID NO: 1241174 - RNA, 19 nt, Human
cuccauagaccuuuucauu

SEQ ID NO: 1241175 - RNA, 19 nt, Human
cucccagaggagccaccag

SEQ ID NO: 1241176 - RNA, 21 nt, Human
cucccagaggagccaccaguu

SEQ ID NO: 1241177 - RNA, 22 nt, Human
cucccagaggagccaccaguuc

SEQ ID NO: 1241178 - RNA, 23 nt, Human
cucccagaggagccaccaguucu

SEQ ID NO: 1241179 - RNA, 14 nt, Human
cuccagggacagca

SEQ ID NO: 1241180 - RNA, 23 nt, Human
cuccagggacagcaacuaucaga

SEQ ID NO: 1241181 - RNA, 13 nt, Human
cuccaguguccug

SEQ ID NO: 1241182 - RNA, 14 nt, Human
cuccaguguccuga

SEQ ID NO: 1241183 - RNA, 16 nt, Human
cuccaguguccugagc

SEQ ID NO: 1241184 - RNA, 17 nt, Human
cuccaguguccugagcu

SEQ ID NO: 1241185 - RNA, 18 nt, Human
cuccaguguccugagcuc

SEQ ID NO: 1241186 - RNA, 19 nt, Human
cuccaguguccugagcuca

SEQ ID NO: 1241187 - RNA, 20 nt, Human
cuccaguguccugagcucag

SEQ ID NO: 1241188 - RNA, 21 nt, Human
cuccaguguccugagcucagc

SEQ ID NO: 1241189 - RNA, 22 nt, Human
cuccaguguccugagcucagcg

SEQ ID NO: 1241190 - RNA, 17 nt, Human
cucagacauuggcaccu

SEQ ID NO: 1241191 - RNA, 13 nt, Human
cucagacauuggc

SEQ ID NO: 1241192 - RNA, 18 nt, Human
cucagaccacaugcccca

SEQ ID NO: 1241193 - RNA, 15 nt, Human
cuaaacuuuuuuucu

SEQ ID NO: 1241194 - RNA, 14 nt, Human
cguuaccaggcagg

SEQ ID NO: 1241195 - RNA, 21 nt, Human
cguuacuagcagucacuugau

SEQ ID NO: 1241196 - RNA, 14 nt, Human
cguuaaaaacagau

SEQ ID NO: 1241197 - RNA, 21 nt, Human
cguuaaaaacagauuuggaaa

SEQ ID NO: 1241198 - RNA, 13 nt, Human
cgugucuggcaca

SEQ ID NO: 1241199 - RNA, 13 nt, Human
cguguccaccccc

SEQ ID NO: 1241200 - RNA, 21 nt, Human
cguguuuggguuuuuuuccuu

SEQ ID NO: 1241201 - RNA, 17 nt, Human
cguguccgacucuucug

SEQ ID NO: 1241202 - RNA, 22 nt, Human
cguguccccuauccuacuuccc

SEQ ID NO: 1241203 - RNA, 16 nt, Human
cgugucaccugugcuu

SEQ ID NO: 1241204 - RNA, 14 nt, Human
cguguccaccccca

SEQ ID NO: 1241205 - RNA, 17 nt, Human
cuaaagaaaaacaaacu

SEQ ID NO: 1241206 - RNA, 21 nt, Human
cuaaagaagguuucagaaaga

SEQ ID NO: 1241207 - RNA, 20 nt, Human
cuaaagaaaaacaaacucgu

SEQ ID NO: 1241208 - RNA, 17 nt, Human
cuaaacuuuuuuucugu

SEQ ID NO: 1241209 - RNA, 18 nt, Human
cuaaacuuuuuuucugua

SEQ ID NO: 1241210 - RNA, 21 nt, Human
cuaaacuuuuuuucuguacca

SEQ ID NO: 1241211 - RNA, 13 nt, Human
cuaaagaaaaaca

SEQ ID NO: 1241212 - RNA, 17 nt, Human
cuaaagcugguuuaaug

SEQ ID NO: 1241213 - RNA, 18 nt, Human
cuaaagcugguuuaaugu

SEQ ID NO: 1241214 - RNA, 14 nt, Human
cuaaaggaaaaaac

SEQ ID NO: 1241215 - RNA, 19 nt, Human
cuaaaggaaaaaaccaucc

SEQ ID NO: 1241216 - RNA, 19 nt, Human
cuaaaggaaaucaaaugaa

SEQ ID NO: 1241217 - RNA, 16 nt, Human
cuaaaggaguuuaugu

SEQ ID NO: 1241218 - RNA, 13 nt, Human
cuaaaggaguuua

SEQ ID NO: 1241219 - RNA, 15 nt, Human
cuaaagguccacagg

SEQ ID NO: 1241220 - RNA, 19 nt, Human
cuaaagguccacaggucua

SEQ ID NO: 1241221 - RNA, 20 nt, Human
cuaaagguccacaggucuag

SEQ ID NO: 1241222 - RNA, 21 nt, Human
cuaaagguccacaggucuaga

SEQ ID NO: 1241223 - RNA, 23 nt, Human
cuaaagguccacaggucuagacu

SEQ ID NO: 1241224 - RNA, 11 nt, Human
cuaaaguucua

SEQ ID NO: 1241225 - RNA, 12 nt, Human
cuaaaguucuaa

SEQ ID NO: 1241226 - RNA, 13 nt, Human
cuaaaguucuaag

SEQ ID NO: 1241227 - RNA, 14 nt, Human
cuaaaguucuaaga

SEQ ID NO: 1241228 - RNA, 15 nt, Human
cuaaaguucuaagau

SEQ ID NO: 1241229 - RNA, 17 nt, Human
cuaaaguucuaagauuc

SEQ ID NO: 1241230 - RNA, 18 nt, Human
cuaaaguucuaagauucu

SEQ ID NO: 1241231 - RNA, 19 nt, Human
cuaaaguucuaagauucug

SEQ ID NO: 1241232 - RNA, 20 nt, Human
cuaaaguucuaagauucuga

SEQ ID NO: 1241233 - RNA, 20 nt, Human
cuaacuacaaagguuuaaau

SEQ ID NO: 1241234 - RNA, 23 nt, Human
cuaacuacaaagguuuaaaugaa

SEQ ID NO: 1241235 - RNA, 15 nt, Human
cuaacuagacaccaa

SEQ ID NO: 1241236 - RNA, 21 nt, Human
cuaacuagacaccaaaguucu

SEQ ID NO: 1241237 - RNA, 22 nt, Human
cuaacuagacaccaaaguucua

SEQ ID NO: 1241238 - RNA, 23 nt, Human
cuaacuagacaccaaaguucuaa

SEQ ID NO: 1241239 - RNA, 17 nt, Human
cuaacucuucuuucauu

SEQ ID NO: 1241240 - RNA, 15 nt, Human
cuaacugcauacacu

SEQ ID NO: 1241241 - RNA, 15 nt, Human
cgguuuauauaagcu

SEQ ID NO: 1241242 - RNA, 20 nt, Human
cgguuaugaaauucaccccc

SEQ ID NO: 1241243 - RNA, 20 nt, Human
cgguucaggaaaauugaaug

SEQ ID NO: 1241244 - RNA, 21 nt, Human
cgguugaguuuugacugcuug

SEQ ID NO: 1241245 - RNA, 13 nt, Human
cguaauaagguuu

SEQ ID NO: 1241246 - RNA, 15 nt, Human
cguaauaagguuuua

SEQ ID NO: 1241247 - RNA, 23 nt, Human
cguaauaagguuuuaauuuagua

SEQ ID NO: 1241248 - RNA, 23 nt, Human
cggagaagugugccuucucucuc

SEQ ID NO: 1241249 - RNA, 13 nt, Human
cggugggccuggu

SEQ ID NO: 1241250 - RNA, 12 nt, Human
cggugggccugg

SEQ ID NO: 1241251 - RNA, 10 nt, Human
cggugggggu

SEQ ID NO: 1241252 - RNA, 11 nt, Human
cggugggggua

SEQ ID NO: 1241253 - RNA, 19 nt, Human
cgguggggguagggggcug

SEQ ID NO: 1241254 - RNA, 22 nt, Human
cgguggggguagggggcuggag

SEQ ID NO: 1241255 - RNA, 11 nt, Human
cggugucucuc

SEQ ID NO: 1241256 - RNA, 15 nt, Human
cggugugcaccaggg

SEQ ID NO: 1241257 - RNA, 16 nt, Human
cggugugcaccagggu

SEQ ID NO: 1241258 - RNA, 12 nt, Human
cguaauuuaacu

SEQ ID NO: 1241259 - RNA, 13 nt, Human
cgcugcugucaca

SEQ ID NO: 1241260 - RNA, 18 nt, Human
cgcugcuucgugggauac

SEQ ID NO: 1241261 - RNA, 20 nt, Human
cgcuggacucucagucucug

SEQ ID NO: 1241262 - RNA, 22 nt, Human
cgcaucuaguuccccuguuuau

SEQ ID NO: 1241263 - RNA, 12 nt, Human
cgauagagucuc

SEQ ID NO: 1241264 - RNA, 12 nt, Human
cgcaguuuuuuu

SEQ ID NO: 1241265 - RNA, 23 nt, Human
cgauacugcgacuuucugccugg

SEQ ID NO: 1241266 - RNA, 20 nt, Human
cgcaguuuuuuuuuucuugu

SEQ ID NO: 1241267 - RNA, 21 nt, Human
cgcaguuuuuuuuuucuuguc

SEQ ID NO: 1241268 - RNA, 15 nt, Human
cgcauaggaccuuuc

SEQ ID NO: 1241269 - RNA, 19 nt, Human
cgauacugcgacuuucugc

SEQ ID NO: 1241270 - RNA, 20 nt, Human
cgauacugcgacuuucugcc

SEQ ID NO: 1241271 - RNA, 22 nt, Human
cgauacugcgacuuucugccug

SEQ ID NO: 1241272 - RNA, 14 nt, Human
cgccuuccccaccc

SEQ ID NO: 1241273 - RNA, 19 nt, Human
cgaguagcugagauuauag

SEQ ID NO: 1241274 - RNA, 15 nt, Human
cgaguaauaugccug

SEQ ID NO: 1241275 - RNA, 18 nt, Human
cgauacaccgggccugga

SEQ ID NO: 1241276 - RNA, 20 nt, Human
cgauacaccgggccuggaga

SEQ ID NO: 1241277 - RNA, 21 nt, Human
cgauacaccgggccuggagaa

SEQ ID NO: 1241278 - RNA, 22 nt, Human
cgaggucgggcagcacaagugu

SEQ ID NO: 1241279 - RNA, 20 nt, Human
cuacuagggaaaugccuuug

SEQ ID NO: 1241280 - RNA, 13 nt, Human
cuacucaaagcau

SEQ ID NO: 1241281 - RNA, 13 nt, Human
cuacucacacagg

SEQ ID NO: 1241282 - RNA, 14 nt, Human
cuacucacacaggc

SEQ ID NO: 1241283 - RNA, 15 nt, Human
cuacucacacaggca

SEQ ID NO: 1241284 - RNA, 23 nt, Human
cuacucacacaggcauuuccugg

SEQ ID NO: 1241285 - RNA, 22 nt, Human
cuacucacacaggcauuuccug

SEQ ID NO: 1241286 - RNA, 23 nt, Human
cuacuaacaaucagcuccuuccu

SEQ ID NO: 1241287 - RNA, 17 nt, Human
cuacuaauagaauaaag

SEQ ID NO: 1241288 - RNA, 18 nt, Human
cuacuaauagaauaaagg

SEQ ID NO: 1241289 - RNA, 12 nt, Human
cuacuaauucca

SEQ ID NO: 1241290 - RNA, 15 nt, Human
cuacuaauuccacac

SEQ ID NO: 1241291 - RNA, 17 nt, Human
cuacuaauuccacaccu

SEQ ID NO: 1241292 - RNA, 17 nt, Human
cuacuaccuguaaugac

SEQ ID NO: 1241293 - RNA, 22 nt, Human
cuacuagagucugaacagcugu

SEQ ID NO: 1241294 - RNA, 18 nt, Human
cuaccuuccaguuccuca

SEQ ID NO: 1241295 - RNA, 13 nt, Human
cuaccuucucccc

SEQ ID NO: 1241296 - RNA, 16 nt, Human
cuaccuucuccccagc

SEQ ID NO: 1241297 - RNA, 21 nt, Human
cuaccuucuccccagcuccca

SEQ ID NO: 1241298 - RNA, 20 nt, Human
cuaccuucuccccagcuccc

SEQ ID NO: 1241299 - RNA, 14 nt, Human
cuaccuugaaaaua

SEQ ID NO: 1241300 - RNA, 19 nt, Human
cuaccuugaaaauaagaau

SEQ ID NO: 1241301 - RNA, 21 nt, Human
cuaccuugguucccccacuga

SEQ ID NO: 1241302 - RNA, 21 nt, Human
cuagacccacuggacucaccu

SEQ ID NO: 1241303 - RNA, 17 nt, Human
cuagaccagcagacaga

SEQ ID NO: 1241304 - RNA, 18 nt, Human
cuagaccagcagacagag

SEQ ID NO: 1241305 - RNA, 20 nt, Human
cuagaccagcagacagagcc

SEQ ID NO: 1241306 - RNA, 21 nt, Human
cuagaccagcagacagagcca

SEQ ID NO: 1241307 - RNA, 23 nt, Human
cuagacauggagguucuaaggcc

SEQ ID NO: 1241308 - RNA, 22 nt, Human
cuagacauggagguucuaaggc

SEQ ID NO: 1241309 - RNA, 11 nt, Human
cuagaccaaua

SEQ ID NO: 1241310 - RNA, 12 nt, Human
cuagaccaauaa

SEQ ID NO: 1241311 - RNA, 22 nt, Human
cuagacacaugaagguaaauaa

SEQ ID NO: 1241312 - RNA, 23 nt, Human
cuagacacaugaagguaaauaaa

SEQ ID NO: 1241313 - RNA, 15 nt, Human
cuagacaccaaaguu

SEQ ID NO: 1241314 - RNA, 16 nt, Human
cuagacaccaaaguuc

SEQ ID NO: 1241315 - RNA, 17 nt, Human
cuagacaccaaaguucu

SEQ ID NO: 1241316 - RNA, 18 nt, Human
cuagacaccaaaguucua

SEQ ID NO: 1241317 - RNA, 19 nt, Human
cuagacaccaaaguucuaa

SEQ ID NO: 1241318 - RNA, 13 nt, Human
cuagacacugcca

SEQ ID NO: 1241319 - RNA, 21 nt, Human
cuagacaccaaaguucuaaua

SEQ ID NO: 1241320 - RNA, 17 nt, Human
cuagacauggagguucu

SEQ ID NO: 1241321 - RNA, 18 nt, Human
cuagacauggagguucua

SEQ ID NO: 1241322 - RNA, 19 nt, Human
cuagacauggagguucuaa

SEQ ID NO: 1241323 - RNA, 20 nt, Human
cuagacauggagguucuaag

SEQ ID NO: 1241324 - RNA, 21 nt, Human
cuagacauggagguucuaagg

SEQ ID NO: 1241325 - RNA, 19 nt, Human
cuagaaucugcaauucaaa

SEQ ID NO: 1241326 - RNA, 16 nt, Human
cuagaauugaguguuu

SEQ ID NO: 1241327 - RNA, 19 nt, Human
cuagaauugaguguuuaaa

SEQ ID NO: 1241328 - RNA, 21 nt, Human
cuagaauugaguguuuaaagu

SEQ ID NO: 1241329 - RNA, 22 nt, Human
cuagaccagcagacagagccag

SEQ ID NO: 1241330 - RNA, 23 nt, Human
cuagaccagcagacagagccagg

SEQ ID NO: 1241331 - RNA, 21 nt, Human
cuagccauacgcucagcucau

SEQ ID NO: 1241332 - RNA, 18 nt, Human
cuagcccaaugaaaugaa

SEQ ID NO: 1241333 - RNA, 19 nt, Human
cuaggcccccacuugccuc

SEQ ID NO: 1241334 - RNA, 20 nt, Human
cuaggcccccacuugccucu

SEQ ID NO: 1241335 - RNA, 22 nt, Human
cuaggcccccacuugccucuuc

SEQ ID NO: 1241336 - RNA, 23 nt, Human
cuaggcccccacuugccucuucc

SEQ ID NO: 1241337 - RNA, 15 nt, Human
cuaggccuaguccug

SEQ ID NO: 1241338 - RNA, 15 nt, Human
cuaggccugggcagu

SEQ ID NO: 1241339 - RNA, 21 nt, Human
cuaggccuugcggcuccucag

SEQ ID NO: 1241340 - RNA, 16 nt, Human
cuaggccugggcagug

SEQ ID NO: 1241341 - RNA, 11 nt, Human
cuaguuuuuua

SEQ ID NO: 1241342 - RNA, 19 nt, Human
cuaguuuuuucuuccuuuu

SEQ ID NO: 1241343 - RNA, 23 nt, Human
cuaguuuuuucuuccuuuucacu

SEQ ID NO: 1241344 - RNA, 14 nt, Human
cuauaaagcaguau

SEQ ID NO: 1241345 - RNA, 16 nt, Human
cuauaaagcaguauuu

SEQ ID NO: 1241346 - RNA, 18 nt, Human
cuauaaagcaguauuuuu

SEQ ID NO: 1241347 - RNA, 19 nt, Human
cuauaaagcaguauuuuuc

SEQ ID NO: 1241348 - RNA, 11 nt, Human
cuauaaagcau

SEQ ID NO: 1241349 - RNA, 13 nt, Human
cuauaaagcauuu

SEQ ID NO: 1241350 - RNA, 14 nt, Human
cuauaaagcauuua

SEQ ID NO: 1241351 - RNA, 15 nt, Human
cuauaaagcauuuaa

SEQ ID NO: 1241352 - RNA, 14 nt, Human
cuaguucugccagg

SEQ ID NO: 1241353 - RNA, 15 nt, Human
cuaguucugccagga

SEQ ID NO: 1241354 - RNA, 16 nt, Human
cuaguucugccaggag

SEQ ID NO: 1241355 - RNA, 16 nt, Human
cuaguucuagaaaaac

SEQ ID NO: 1241356 - RNA, 23 nt, Human
cuaguucuagaaaaacaggcacu

SEQ ID NO: 1241357 - RNA, 15 nt, Human
cuaggguggggagag

SEQ ID NO: 1241358 - RNA, 21 nt, Human
cuaguuccccuguuuauucau

SEQ ID NO: 1241359 - RNA, 13 nt, Human
cuaguucugccag

SEQ ID NO: 1241360 - RNA, 20 nt, Human
cuaguuccccuguuuauuca

SEQ ID NO: 1241361 - RNA, 14 nt, Human
cuaguucuagaaaa

SEQ ID NO: 1241362 - RNA, 15 nt, Human
cuaguucuagaaaaa

SEQ ID NO: 1241363 - RNA, 13 nt, Human
cuaggguccuggg

SEQ ID NO: 1241364 - RNA, 14 nt, Human
cuaggguccugggg

SEQ ID NO: 1241365 - RNA, 15 nt, Human
cuaggguccugggga

SEQ ID NO: 1241366 - RNA, 17 nt, Human
cuaggguacauggugcu

SEQ ID NO: 1241367 - RNA, 21 nt, Human
cuaggguacauggugcuggga

SEQ ID NO: 1241368 - RNA, 15 nt, Human
cuaggcucugucugg

SEQ ID NO: 1241369 - RNA, 22 nt, Human
cuaggcucugucuggaagaugg

SEQ ID NO: 1241370 - RNA, 23 nt, Human
cuaggcugcauugaaaagagcug

SEQ ID NO: 1241371 - RNA, 15 nt, Human
cuaggcuaggguggg

SEQ ID NO: 1241372 - RNA, 13 nt, Human
cuaggcuccaccc

SEQ ID NO: 1241373 - RNA, 21 nt, Human
cuaggcugacaccuaacucuu

SEQ ID NO: 1241374 - RNA, 14 nt, Human
cuagggagccaugu

SEQ ID NO: 1241375 - RNA, 18 nt, Human
cuagggagccauuugaga

SEQ ID NO: 1241376 - RNA, 17 nt, Human
cuagggagccauuugag

SEQ ID NO: 1241377 - RNA, 22 nt, Human
cuagggaggcauggucugcccu

SEQ ID NO: 1241378 - RNA, 23 nt, Human
cuagggaggcauggucugcccuc

SEQ ID NO: 1241379 - RNA, 23 nt, Human
cuagggggagccccuucugcuca

SEQ ID NO: 1241380 - RNA, 19 nt, Human
cucagaaaacaaggaugaa

SEQ ID NO: 1241381 - RNA, 23 nt, Human
cucagaaaacaaggaugaauuaa

SEQ ID NO: 1241382 - RNA, 18 nt, Human
cucacuuuucccacucca

SEQ ID NO: 1241383 - RNA, 20 nt, Human
cucagaaaauaucccuccug

SEQ ID NO: 1241384 - RNA, 13 nt, Human
cucagaaaggcaa

SEQ ID NO: 1241385 - RNA, 10 nt, Human
cucagaaagu

SEQ ID NO: 1241386 - RNA, 15 nt, Human
cucagaaagugccug

SEQ ID NO: 1241387 - RNA, 16 nt, Human
cucagaaagugccuga

SEQ ID NO: 1241388 - RNA, 17 nt, Human
cucagaaagugccugac

SEQ ID NO: 1241389 - RNA, 18 nt, Human
cucagaaagugccugaca

SEQ ID NO: 1241390 - RNA, 11 nt, Human
cucagaaguaa

SEQ ID NO: 1241391 - RNA, 12 nt, Human
cucagaaguaaa

SEQ ID NO: 1241392 - RNA, 13 nt, Human
cucagaaguaaag

SEQ ID NO: 1241393 - RNA, 16 nt, Human
cucagaagucuuucag

SEQ ID NO: 1241394 - RNA, 21 nt, Human
cucagaagugcaucuggagag

SEQ ID NO: 1241395 - RNA, 16 nt, Human
cucagaaguuucuucu

SEQ ID NO: 1241396 - RNA, 19 nt, Human
cucagaaguuucuucuuua

SEQ ID NO: 1241397 - RNA, 22 nt, Human
cucagaagugcaucuggagaga

SEQ ID NO: 1241398 - RNA, 18 nt, Human
cucacuuguuuuauuuaa

SEQ ID NO: 1241399 - RNA, 20 nt, Human
cucacuuuccuccugaggcu

SEQ ID NO: 1241400 - RNA, 21 nt, Human
cucacuuuuaaugaacaaaug

SEQ ID NO: 1241401 - RNA, 22 nt, Human
cucacuuuuaaugaacaaaugg

SEQ ID NO: 1241402 - RNA, 12 nt, Human
cucacuuuuccc

SEQ ID NO: 1241403 - RNA, 14 nt, Human
cucacuuuucccac

SEQ ID NO: 1241404 - RNA, 15 nt, Human
cucacuuuucccacu

SEQ ID NO: 1241405 - RNA, 16 nt, Human
cucacuuuucccacuc

SEQ ID NO: 1241406 - RNA, 17 nt, Human
cucacuuuucccacucc

SEQ ID NO: 1241407 - RNA, 21 nt, Human
cucacuuuucccacuccaagc

SEQ ID NO: 1241408 - RNA, 19 nt, Human
cucaccuuggcaccagaca

SEQ ID NO: 1241409 - RNA, 21 nt, Human
cucaccuugugcuggggacag

SEQ ID NO: 1241410 - RNA, 12 nt, Human
cucacuucaggu

SEQ ID NO: 1241411 - RNA, 20 nt, Human
cucacuucugggcuucaucu

SEQ ID NO: 1241412 - RNA, 13 nt, Human
cucaccuggacuu

SEQ ID NO: 1241413 - RNA, 17 nt, Human
cucaccuggcccugcuu

SEQ ID NO: 1241414 - RNA, 15 nt, Human
cucaccuuccucauc

SEQ ID NO: 1241415 - RNA, 14 nt, Human
cucaccuucugagu

SEQ ID NO: 1241416 - RNA, 21 nt, Human
cucaccuucugaguacagagu

SEQ ID NO: 1241417 - RNA, 16 nt, Human
cucaccuuggcaccag

SEQ ID NO: 1241418 - RNA, 17 nt, Human
cucaccuuggcaccaga

SEQ ID NO: 1241419 - RNA, 16 nt, Human
cucaccucccccaucu

SEQ ID NO: 1241420 - RNA, 13 nt, Human
cucaccggcucuc

SEQ ID NO: 1241421 - RNA, 21 nt, Human
cucaccggcucucaccuggcc

SEQ ID NO: 1241422 - RNA, 19 nt, Human
cucaccugagucacccuac

SEQ ID NO: 1241423 - RNA, 22 nt, Human
cucaccucuagguccccauacu

SEQ ID NO: 1241424 - RNA, 23 nt, Human
cucaccucuagguccccauacuc

SEQ ID NO: 1241425 - RNA, 17 nt, Human
cucaccugcacuaacag

SEQ ID NO: 1241426 - RNA, 20 nt, Human
cucaccugcacuaacagagu

SEQ ID NO: 1241427 - RNA, 12 nt, Human
cucaccuggacu

SEQ ID NO: 1241428 - RNA, 14 nt, Human
cucacccuggggcu

SEQ ID NO: 1241429 - RNA, 21 nt, Human
cucacccugccuuaucuugca

SEQ ID NO: 1241430 - RNA, 15 nt, Human
cucacccuggaggca

SEQ ID NO: 1241431 - RNA, 13 nt, Human
cucacccugccuu

SEQ ID NO: 1241432 - RNA, 14 nt, Human
cucacccugccuua

SEQ ID NO: 1241433 - RNA, 15 nt, Human
cucacccugccuuau

SEQ ID NO: 1241434 - RNA, 21 nt, Human
cucacccgccccacucccucc

SEQ ID NO: 1241435 - RNA, 23 nt, Human
cucaaauacgugggcauucaaau

SEQ ID NO: 1241436 - RNA, 17 nt, Human
cucacaacagcugccug

SEQ ID NO: 1241437 - RNA, 21 nt, Human
cucaaauaaaaagugcuuuug

SEQ ID NO: 1241438 - RNA, 19 nt, Human
cucaaauaaaaagugcuuu

SEQ ID NO: 1241439 - RNA, 13 nt, Human
cucacaaggcagc

SEQ ID NO: 1241440 - RNA, 14 nt, Human
cucacaaggcagca

SEQ ID NO: 1241441 - RNA, 15 nt, Human
cucacaaggcagcaa

SEQ ID NO: 1241442 - RNA, 16 nt, Human
cucacaaggcagcaag

SEQ ID NO: 1241443 - RNA, 17 nt, Human
cucacaaggcagcaagg

SEQ ID NO: 1241444 - RNA, 19 nt, Human
cucacaaggcagcaaggcc

SEQ ID NO: 1241445 - RNA, 20 nt, Human
cucacaaggcagcaaggccc

SEQ ID NO: 1241446 - RNA, 21 nt, Human
cucacaaggcagcaaggcccg

SEQ ID NO: 1241447 - RNA, 19 nt, Human
cucacaaguggguaccccc

SEQ ID NO: 1241448 - RNA, 21 nt, Human
cucacaaguggguacccccag

SEQ ID NO: 1241449 - RNA, 20 nt, Human
cucacaaguggguaccccca

SEQ ID NO: 1241450 - RNA, 23 nt, Human
cucacacacccugucugccccgc

SEQ ID NO: 1241451 - RNA, 23 nt, Human
cucacacaggcauuuccugggug

SEQ ID NO: 1241452 - RNA, 21 nt, Human
cucacacaggcauuuccuggg

SEQ ID NO: 1241453 - RNA, 22 nt, Human
cucacacaggcauuuccugggu

SEQ ID NO: 1241454 - RNA, 12 nt, Human
cucacacaggca

SEQ ID NO: 1241455 - RNA, 13 nt, Human
cucacacaggcau

SEQ ID NO: 1241456 - RNA, 21 nt, Human
cuaucucugugugcacaaaua

SEQ ID NO: 1241457 - RNA, 16 nt, Human
cuaucugggaagcuau

SEQ ID NO: 1241458 - RNA, 15 nt, Human
cuaucucccugccuc

SEQ ID NO: 1241459 - RNA, 17 nt, Human
cuaucucccugccuccu

SEQ ID NO: 1241460 - RNA, 18 nt, Human
cuaucucccugccuccug

SEQ ID NO: 1241461 - RNA, 17 nt, Human
cuaucucugugugcaca

SEQ ID NO: 1241462 - RNA, 23 nt, Human
cuauguggaaguggggcgggcuu

SEQ ID NO: 1241463 - RNA, 19 nt, Human
cuauguggaaguggggcgg

SEQ ID NO: 1241464 - RNA, 23 nt, Human
cuaugucauuugcuggagcucug

SEQ ID NO: 1241465 - RNA, 16 nt, Human
cuaugucauuucauuu

SEQ ID NO: 1241466 - RNA, 18 nt, Human
cuaugucauuucauuucc

SEQ ID NO: 1241467 - RNA, 17 nt, Human
cuauuuugugaagccau

SEQ ID NO: 1241468 - RNA, 19 nt, Human
cuauuuuuaauguuuguac

SEQ ID NO: 1241469 - RNA, 14 nt, Human
cuauuuuuaucuga

SEQ ID NO: 1241470 - RNA, 13 nt, Human
cuauuuuuggagg

SEQ ID NO: 1241471 - RNA, 20 nt, Human
cuauuuuuggagguuuauua

SEQ ID NO: 1241472 - RNA, 18 nt, Human
cuauuuuuggcagucuga

SEQ ID NO: 1241473 - RNA, 21 nt, Human
cuauuuuuggcagucugaauu

SEQ ID NO: 1241474 - RNA, 13 nt, Human
cucaaaacaaagg

SEQ ID NO: 1241475 - RNA, 17 nt, Human
cuauuuuucauccuaaa

SEQ ID NO: 1241476 - RNA, 12 nt, Human
cuauuuuucuaa

SEQ ID NO: 1241477 - RNA, 15 nt, Human
cuauuuuucuaacua

SEQ ID NO: 1241478 - RNA, 20 nt, Human
cuauuuuucuaacuacaaag

SEQ ID NO: 1241479 - RNA, 22 nt, Human
cuauuuuuggcagucugaauuu

SEQ ID NO: 1241480 - RNA, 14 nt, Human
cucaaaacaaaggc

SEQ ID NO: 1241481 - RNA, 19 nt, Human
cucaaacugaggaauuuca

SEQ ID NO: 1241482 - RNA, 22 nt, Human
cucaaacugaggaauuucaccu

SEQ ID NO: 1241483 - RNA, 13 nt, Human
cucaaagaaagug

SEQ ID NO: 1241484 - RNA, 16 nt, Human
cucaaagaaaguguau

SEQ ID NO: 1241485 - RNA, 17 nt, Human
cucaaagaaaguguauu

SEQ ID NO: 1241486 - RNA, 18 nt, Human
cucaaagagggagugcau

SEQ ID NO: 1241487 - RNA, 19 nt, Human
cucaaagcaagcauucaga

SEQ ID NO: 1241488 - RNA, 20 nt, Human
cucaaagcaugggauuauua

SEQ ID NO: 1241489 - RNA, 17 nt, Human
cucaaagguuuggaagg

SEQ ID NO: 1241490 - RNA, 18 nt, Human
cucaaagguuuggaagga

SEQ ID NO: 1241491 - RNA, 19 nt, Human
cucaaagguuuggaaggag

SEQ ID NO: 1241492 - RNA, 23 nt, Human
cucaaagguuuggaaggagcaga

SEQ ID NO: 1241493 - RNA, 22 nt, Human
cucaaagguuuggaaggagcag

SEQ ID NO: 1241494 - RNA, 15 nt, Human
ccugccucucugcag

SEQ ID NO: 1241495 - RNA, 14 nt, Human
ccugccucucugca

SEQ ID NO: 1241496 - RNA, 18 nt, Human
ccugcugagucccaggcu

SEQ ID NO: 1241497 - RNA, 19 nt, Human
ccugcugagucccaggcug

SEQ ID NO: 1241498 - RNA, 20 nt, Human
ccugcugagucccaggcuga

SEQ ID NO: 1241499 - RNA, 13 nt, Human
ccugccucucugc

SEQ ID NO: 1241500 - RNA, 15 nt, Human
ccugccucucccagg

SEQ ID NO: 1241501 - RNA, 18 nt, Human
ccugccucucccaggcag

SEQ ID NO: 1241502 - RNA, 21 nt, Human
ccugccucucccaggcagggg

SEQ ID NO: 1241503 - RNA, 17 nt, Human
ccugccucagccucccg

SEQ ID NO: 1241504 - RNA, 12 nt, Human
ccugccucagga

SEQ ID NO: 1241505 - RNA, 23 nt, Human
ccugccucucaucaacugaauga

SEQ ID NO: 1241506 - RNA, 14 nt, Human
ccugccucucccag

SEQ ID NO: 1241507 - RNA, 16 nt, Human
ccugccucagccuccc

SEQ ID NO: 1241508 - RNA, 22 nt, Human
ccugccauuguagcgucuuucu

SEQ ID NO: 1241509 - RNA, 23 nt, Human
ccugaccccaaguuauccaccug

SEQ ID NO: 1241510 - RNA, 17 nt, Human
ccucuuucuucccauga

SEQ ID NO: 1241511 - RNA, 23 nt, Human
ccucuugccacugccucuuccuc

SEQ ID NO: 1241512 - RNA, 22 nt, Human
ccucuugccacugccucuuccu

SEQ ID NO: 1241513 - RNA, 22 nt, Human
ccucggccucccaaagugcugg

SEQ ID NO: 1241514 - RNA, 22 nt, Human
ccugcaggaucucaccaggcag

SEQ ID NO: 1241515 - RNA, 23 nt, Human
ccugcaggaucucaccaggcagc

SEQ ID NO: 1241516 - RNA, 20 nt, Human
ccugaguugcuuuucagcug

SEQ ID NO: 1241517 - RNA, 18 nt, Human
ccugacccucaucuuucu

SEQ ID NO: 1241518 - RNA, 16 nt, Human
ccugaccccugcucag

SEQ ID NO: 1241519 - RNA, 18 nt, Human
ccugaccccucauagccc

SEQ ID NO: 1241520 - RNA, 14 nt, Human
ccugaccccugcuc

SEQ ID NO: 1241521 - RNA, 15 nt, Human
ccugaccccugcuca

SEQ ID NO: 1241522 - RNA, 19 nt, Human
ccugacccucaucuuucuu

SEQ ID NO: 1241523 - RNA, 22 nt, Human
ccugacccucaucuuucuucca

SEQ ID NO: 1241524 - RNA, 21 nt, Human
ccugagaugggcuucccaagg

SEQ ID NO: 1241525 - RNA, 17 nt, Human
ccugagauucagauguc

SEQ ID NO: 1241526 - RNA, 18 nt, Human
ccugagaugggcuuccca

SEQ ID NO: 1241527 - RNA, 14 nt, Human
ccugagauuuauua

SEQ ID NO: 1241528 - RNA, 15 nt, Human
ccugagauuuauuaa

SEQ ID NO: 1241529 - RNA, 19 nt, Human
ccugagauuuauuaaagaa

SEQ ID NO: 1241530 - RNA, 21 nt, Human
ccugagauuuauuaaagaaaa

SEQ ID NO: 1241531 - RNA, 22 nt, Human
ccugagauuuauuaaagaaaaa

SEQ ID NO: 1241532 - RNA, 23 nt, Human
ccugagauuuauuaaagaaaaaa

SEQ ID NO: 1241533 - RNA, 13 nt, Human
ccugagcaacucu

SEQ ID NO: 1241534 - RNA, 16 nt, Human
ccugaggcugugguca

SEQ ID NO: 1241535 - RNA, 17 nt, Human
ccugaggcuguggucac

SEQ ID NO: 1241536 - RNA, 19 nt, Human
ccugagggucuguagguug

SEQ ID NO: 1241537 - RNA, 22 nt, Human
ccugaggucaggaguucaagac

SEQ ID NO: 1241538 - RNA, 20 nt, Human
ccugaggcuuuggauuugac

SEQ ID NO: 1241539 - RNA, 22 nt, Human
ccugaggcuuuggauuugacau

SEQ ID NO: 1241540 - RNA, 13 nt, Human
ccugagggaaagg

SEQ ID NO: 1241541 - RNA, 18 nt, Human
ccugagggaaaggccagc

SEQ ID NO: 1241542 - RNA, 19 nt, Human
ccugagggaaaggccagca

SEQ ID NO: 1241543 - RNA, 20 nt, Human
ccugagggaaaggccagcac

SEQ ID NO: 1241544 - RNA, 22 nt, Human
ccugagggaaaggccagcacuc

SEQ ID NO: 1241545 - RNA, 21 nt, Human
ccugagggaaaggccagcacu

SEQ ID NO: 1241546 - RNA, 12 nt, Human
ccugagggucug

SEQ ID NO: 1241547 - RNA, 13 nt, Human
ccugagggucugu

SEQ ID NO: 1241548 - RNA, 18 nt, Human
ccugagggucuguagguu

SEQ ID NO: 1241549 - RNA, 18 nt, Human
ccuggauggggcaggcca

SEQ ID NO: 1241550 - RNA, 14 nt, Human
ccuggauuugcaua

SEQ ID NO: 1241551 - RNA, 16 nt, Human
ccuggauuuuuaccag

SEQ ID NO: 1241552 - RNA, 13 nt, Human
ccuggccccucuc

SEQ ID NO: 1241553 - RNA, 12 nt, Human
ccuggccccucu

SEQ ID NO: 1241554 - RNA, 14 nt, Human
ccuggccuccccca

SEQ ID NO: 1241555 - RNA, 17 nt, Human
ccuggccucccccacuu

SEQ ID NO: 1241556 - RNA, 18 nt, Human
ccuggccucccccacuuu

SEQ ID NO: 1241557 - RNA, 15 nt, Human
ccuggccuccccugc

SEQ ID NO: 1241558 - RNA, 17 nt, Human
ccuggccuccccugcca

SEQ ID NO: 1241559 - RNA, 18 nt, Human
ccuggccuccccugccac

SEQ ID NO: 1241560 - RNA, 19 nt, Human
ccuggccuccccugccacc

SEQ ID NO: 1241561 - RNA, 20 nt, Human
ccuggccuccccugccacca

SEQ ID NO: 1241562 - RNA, 13 nt, Human
ccuggccuccugc

SEQ ID NO: 1241563 - RNA, 16 nt, Human
ccuggccuccugccuc

SEQ ID NO: 1241564 - RNA, 14 nt, Human
ccuggccuccugcc

SEQ ID NO: 1241565 - RNA, 15 nt, Human
ccuggccuccugccu

SEQ ID NO: 1241566 - RNA, 12 nt, Human
ccuggggcucua

SEQ ID NO: 1241567 - RNA, 18 nt, Human
ccuggggaaccugacccc

SEQ ID NO: 1241568 - RNA, 14 nt, Human
ccugggcuggaauc

SEQ ID NO: 1241569 - RNA, 20 nt, Human
ccugggcuggaaucaggaau

SEQ ID NO: 1241570 - RNA, 14 nt, Human
ccugggcugggaaa

SEQ ID NO: 1241571 - RNA, 13 nt, Human
ccugggcugggaa

SEQ ID NO: 1241572 - RNA, 15 nt, Human
ccugggcgcuggucc

SEQ ID NO: 1241573 - RNA, 11 nt, Human
ccuggccuuca

SEQ ID NO: 1241574 - RNA, 18 nt, Human
ccuggccuucaguguacc

SEQ ID NO: 1241575 - RNA, 18 nt, Human
ccugggccuugggcuccg

SEQ ID NO: 1241576 - RNA, 16 nt, Human
ccugggcgcugguccu

SEQ ID NO: 1241577 - RNA, 14 nt, Human
ccugggcuccugga

SEQ ID NO: 1241578 - RNA, 16 nt, Human
ccugggcuccuggacc

SEQ ID NO: 1241579 - RNA, 15 nt, Human
ccugggcuccuggac

SEQ ID NO: 1241580 - RNA, 21 nt, Human
ccuggugguggcucgggaggc

SEQ ID NO: 1241581 - RNA, 18 nt, Human
ccugguuuccugcccugg

SEQ ID NO: 1241582 - RNA, 19 nt, Human
ccugguuuccugcccuggg

SEQ ID NO: 1241583 - RNA, 20 nt, Human
ccugguuuccugcccuggga

SEQ ID NO: 1241584 - RNA, 21 nt, Human
ccugguuuccugcccugggag

SEQ ID NO: 1241585 - RNA, 20 nt, Human
ccugguuaaauaaggcaggg

SEQ ID NO: 1241586 - RNA, 13 nt, Human
ccugguucccguu

SEQ ID NO: 1241587 - RNA, 22 nt, Human
ccugguucccguuucuccaccu

SEQ ID NO: 1241588 - RNA, 20 nt, Human
ccuggggcucuaacgccuga

SEQ ID NO: 1241589 - RNA, 21 nt, Human
ccuggggcucuaacgccugag

SEQ ID NO: 1241590 - RNA, 23 nt, Human
ccuggggcucuaacgccugagcc

SEQ ID NO: 1241591 - RNA, 22 nt, Human
ccuggggcucuaacgccugagc

SEQ ID NO: 1241592 - RNA, 15 nt, Human
ccuggggcuggccuc

SEQ ID NO: 1241593 - RNA, 16 nt, Human
ccuggggcuggccucc

SEQ ID NO: 1241594 - RNA, 17 nt, Human
ccuggggcuggccuccc

SEQ ID NO: 1241595 - RNA, 19 nt, Human
ccuggggcuggccucccaa

SEQ ID NO: 1241596 - RNA, 14 nt, Human
ccugguggggcagc

SEQ ID NO: 1241597 - RNA, 15 nt, Human
ccugguggggcagcu

SEQ ID NO: 1241598 - RNA, 16 nt, Human
ccugguggggcagcuc

SEQ ID NO: 1241599 - RNA, 18 nt, Human
ccuggugguggcucggga

SEQ ID NO: 1241600 - RNA, 16 nt, Human
ccuggugguauuuuca

SEQ ID NO: 1241601 - RNA, 18 nt, Human
ccuggugguauuuucaau

SEQ ID NO: 1241602 - RNA, 19 nt, Human
ccuggugguauuuucaaua

SEQ ID NO: 1241603 - RNA, 21 nt, Human
ccuggugguauuuucaauagc

SEQ ID NO: 1241604 - RNA, 18 nt, Human
ccugguggggcagcuccu

SEQ ID NO: 1241605 - RNA, 19 nt, Human
ccugguggggcagcuccuc

SEQ ID NO: 1241606 - RNA, 23 nt, Human
ccugguggggcagcuccucuguc

SEQ ID NO: 1241607 - RNA, 21 nt, Human
ccugguggggcagcuccucug

SEQ ID NO: 1241608 - RNA, 21 nt, Human
ccugucucccuccucugcccg

SEQ ID NO: 1241609 - RNA, 10 nt, Human
ccuguaacuu

SEQ ID NO: 1241610 - RNA, 19 nt, Human
ccuguaacauacuggccug

SEQ ID NO: 1241611 - RNA, 23 nt, Human
ccuguaacauacuggccuggacu

SEQ ID NO: 1241612 - RNA, 16 nt, Human
ccuguaaccucuucag

SEQ ID NO: 1241613 - RNA, 21 nt, Human
ccuguaaccucuucagaggcc

SEQ ID NO: 1241614 - RNA, 17 nt, Human
ccugucucuacuaaaaa

SEQ ID NO: 1241615 - RNA, 22 nt, Human
ccugguuuccugcccugggagg

SEQ ID NO: 1241616 - RNA, 12 nt, Human
ccuguaaaccug

SEQ ID NO: 1241617 - RNA, 13 nt, Human
ccuguaaaccuga

SEQ ID NO: 1241618 - RNA, 12 nt, Human
ccuguaaacuuu

SEQ ID NO: 1241619 - RNA, 20 nt, Human
ccuguaaacuuuaucacuua

SEQ ID NO: 1241620 - RNA, 16 nt, Human
ccuguaacaagccaga

SEQ ID NO: 1241621 - RNA, 19 nt, Human
ccuguaaacuuuaucacuu

SEQ ID NO: 1241622 - RNA, 20 nt, Human
ccugucucucagggccaggc

SEQ ID NO: 1241623 - RNA, 19 nt, Human
ccugucucucagggccagg

SEQ ID NO: 1241624 - RNA, 14 nt, Human
ccucaaccucaucc

SEQ ID NO: 1241625 - RNA, 13 nt, Human
ccucaaccucauc

SEQ ID NO: 1241626 - RNA, 23 nt, Human
ccucaaccccuccccuccauccc

SEQ ID NO: 1241627 - RNA, 14 nt, Human
ccucaaccccuccc

SEQ ID NO: 1241628 - RNA, 17 nt, Human
ccucaaauuacuuugug

SEQ ID NO: 1241629 - RNA, 18 nt, Human
ccucaaauaaaaagugcu

SEQ ID NO: 1241630 - RNA, 22 nt, Human
ccucaaauaaaaagugcuuuug

SEQ ID NO: 1241631 - RNA, 21 nt, Human
ccucaaauaaaaagugcuuuu

SEQ ID NO: 1241632 - RNA, 15 nt, Human
ccucaaaucguccag

SEQ ID NO: 1241633 - RNA, 17 nt, Human
ccucagcucucaguugc

SEQ ID NO: 1241634 - RNA, 14 nt, Human
ccucagcucccaca

SEQ ID NO: 1241635 - RNA, 20 nt, Human
ccucagcucccacaagccuc

SEQ ID NO: 1241636 - RNA, 15 nt, Human
ccucagcucccacaa

SEQ ID NO: 1241637 - RNA, 14 nt, Human
ccucaagucuuucu

SEQ ID NO: 1241638 - RNA, 15 nt, Human
ccucaagucuuucuc

SEQ ID NO: 1241639 - RNA, 21 nt, Human
ccucaagucuuucucuuuccc

SEQ ID NO: 1241640 - RNA, 22 nt, Human
ccucagccuugccagagaucca

SEQ ID NO: 1241641 - RNA, 19 nt, Human
ccucaagucuuucucuuuc

SEQ ID NO: 1241642 - RNA, 14 nt, Human
ccucaaccucccaa

SEQ ID NO: 1241643 - RNA, 14 nt, Human
ccucaacugccuac

SEQ ID NO: 1241644 - RNA, 15 nt, Human
ccucaacugccuacu

SEQ ID NO: 1241645 - RNA, 16 nt, Human
ccucaagaaauaaaag

SEQ ID NO: 1241646 - RNA, 12 nt, Human
ccucaaccuccc

SEQ ID NO: 1241647 - RNA, 20 nt, Human
ccucaagguuuuagguucua

SEQ ID NO: 1241648 - RNA, 22 nt, Human
ccucaagguuuuagguucuaaa

SEQ ID NO: 1241649 - RNA, 23 nt, Human
ccucaagguuuuagguucuaaag

SEQ ID NO: 1241650 - RNA, 13 nt, Human
ccucaagucuuuc

SEQ ID NO: 1241651 - RNA, 21 nt, Human
ccucauuccaccuucccaugc

SEQ ID NO: 1241652 - RNA, 23 nt, Human
ccucauuauuuauguccaggugu

SEQ ID NO: 1241653 - RNA, 15 nt, Human
ccucccauccagggc

SEQ ID NO: 1241654 - RNA, 12 nt, Human
ccucccaggguu

SEQ ID NO: 1241655 - RNA, 13 nt, Human
ccucccaggguuu

SEQ ID NO: 1241656 - RNA, 18 nt, Human
ccucccaggguuuuaacu

SEQ ID NO: 1241657 - RNA, 19 nt, Human
ccucccaggguuuuaacuu

SEQ ID NO: 1241658 - RNA, 21 nt, Human
ccucccaggguuuuaacuuug

SEQ ID NO: 1241659 - RNA, 19 nt, Human
ccuccuaucagaaguuucu

SEQ ID NO: 1241660 - RNA, 13 nt, Human
ccuccucaccccc

SEQ ID NO: 1241661 - RNA, 14 nt, Human
ccuccucaccccca

SEQ ID NO: 1241662 - RNA, 16 nt, Human
ccuccucacccccagc

SEQ ID NO: 1241663 - RNA, 13 nt, Human
ccuccuuuuucca

SEQ ID NO: 1241664 - RNA, 21 nt, Human
ccuccuuuuuccaugcccuaa

SEQ ID NO: 1241665 - RNA, 16 nt, Human
ccucgaaacacagaaa

SEQ ID NO: 1241666 - RNA, 20 nt, Human
ccucgaaacacagaaaccuu

SEQ ID NO: 1241667 - RNA, 23 nt, Human
ccucgcaacccgugccaagucca

SEQ ID NO: 1241668 - RNA, 19 nt, Human
ccucggacuuagcugggag

SEQ ID NO: 1241669 - RNA, 20 nt, Human
ccucggacuuagcugggaga

SEQ ID NO: 1241670 - RNA, 18 nt, Human
ccucgcuggacucucagu

SEQ ID NO: 1241671 - RNA, 20 nt, Human
ccucgcccagcggcaucagg

SEQ ID NO: 1241672 - RNA, 21 nt, Human
ccucgcccagcggcaucaggc

SEQ ID NO: 1241673 - RNA, 16 nt, Human
ccucgccccuggcaga

SEQ ID NO: 1241674 - RNA, 15 nt, Human
ccucgccccuggcag

SEQ ID NO: 1241675 - RNA, 17 nt, Human
ccucgcuggacucucag

SEQ ID NO: 1241676 - RNA, 16 nt, Human
ccucccuucucuucac

SEQ ID NO: 1241677 - RNA, 20 nt, Human
ccucccuuggggccuaugca

SEQ ID NO: 1241678 - RNA, 13 nt, Human
ccuaauaaagcug

SEQ ID NO: 1241679 - RNA, 12 nt, Human
ccuaauaaagcu

SEQ ID NO: 1241680 - RNA, 14 nt, Human
ccguccugccugug

SEQ ID NO: 1241681 - RNA, 19 nt, Human
ccgucuuucuuuuauacug

SEQ ID NO: 1241682 - RNA, 16 nt, Human
ccgucuuuuccuguuu

SEQ ID NO: 1241683 - RNA, 19 nt, Human
ccgugaaugggugcccaca

SEQ ID NO: 1241684 - RNA, 14 nt, Human
ccgugacgucuggg

SEQ ID NO: 1241685 - RNA, 16 nt, Human
ccgugacgucugggug

SEQ ID NO: 1241686 - RNA, 15 nt, Human
ccgugagcauguuug

SEQ ID NO: 1241687 - RNA, 22 nt, Human
ccgugagccaaucccucaccuu

SEQ ID NO: 1241688 - RNA, 20 nt, Human
ccuaauucaauucaaagcug

SEQ ID NO: 1241689 - RNA, 16 nt, Human
ccuaauucaauucaaa

SEQ ID NO: 1241690 - RNA, 13 nt, Human
ccuagcccucuca

SEQ ID NO: 1241691 - RNA, 21 nt, Human
ccuaaugcgcaggcuggcccu

SEQ ID NO: 1241692 - RNA, 13 nt, Human
ccuaauuccacag

SEQ ID NO: 1241693 - RNA, 13 nt, Human
ccuaauguguuua

SEQ ID NO: 1241694 - RNA, 22 nt, Human
ccggcagcuucugcccccugca

SEQ ID NO: 1241695 - RNA, 18 nt, Human
ccggcagcuucugccccc

SEQ ID NO: 1241696 - RNA, 19 nt, Human
ccggcagcuucugcccccu

SEQ ID NO: 1241697 - RNA, 20 nt, Human
ccggcagcuucugcccccug

SEQ ID NO: 1241698 - RNA, 11 nt, Human
ccggcagggcg

SEQ ID NO: 1241699 - RNA, 16 nt, Human
ccggcacccccugcag

SEQ ID NO: 1241700 - RNA, 17 nt, Human
ccggcacccccugcagc

SEQ ID NO: 1241701 - RNA, 18 nt, Human
ccggcacccccugcagcu

SEQ ID NO: 1241702 - RNA, 19 nt, Human
ccggcacccccugcagcuu

SEQ ID NO: 1241703 - RNA, 21 nt, Human
ccggcacccccugcagcuugu

SEQ ID NO: 1241704 - RNA, 20 nt, Human
ccggcacccccugcagcuug

SEQ ID NO: 1241705 - RNA, 16 nt, Human
ccggcagcagccccca

SEQ ID NO: 1241706 - RNA, 16 nt, Human
ccggcagggcgggcag

SEQ ID NO: 1241707 - RNA, 21 nt, Human
ccggcagggcgggcagagggc

SEQ ID NO: 1241708 - RNA, 23 nt, Human
ccggcagggcgggcagagggcug

SEQ ID NO: 1241709 - RNA, 11 nt, Human
ccggccagccc

SEQ ID NO: 1241710 - RNA, 15 nt, Human
ccgguguucuaagau

SEQ ID NO: 1241711 - RNA, 14 nt, Human
ccgucccccucugg

SEQ ID NO: 1241712 - RNA, 15 nt, Human
ccguccccuagaguc

SEQ ID NO: 1241713 - RNA, 18 nt, Human
ccguccccuagaguccca

SEQ ID NO: 1241714 - RNA, 13 nt, Human
ccguccugccugu

SEQ ID NO: 1241715 - RNA, 15 nt, Human
ccguccugccugugg

SEQ ID NO: 1241716 - RNA, 12 nt, Human
ccguaauuuaac

SEQ ID NO: 1241717 - RNA, 13 nt, Human
ccguaauuuaacu

SEQ ID NO: 1241718 - RNA, 14 nt, Human
ccguaauuuaacuu

SEQ ID NO: 1241719 - RNA, 19 nt, Human
ccggcacagggucugcucu

SEQ ID NO: 1241720 - RNA, 20 nt, Human
ccggcacagggucugcucuu

SEQ ID NO: 1241721 - RNA, 14 nt, Human
ccggcacccccugc

SEQ ID NO: 1241722 - RNA, 15 nt, Human
ccggcacccccugca

SEQ ID NO: 1241723 - RNA, 21 nt, Human
cccuucuccauggcccugcca

SEQ ID NO: 1241724 - RNA, 23 nt, Human
cccuucuccauccacaugggagc

SEQ ID NO: 1241725 - RNA, 21 nt, Human
cccuucuauacccacccagaa

SEQ ID NO: 1241726 - RNA, 23 nt, Human
cccuucuauuuggggcuugauga

SEQ ID NO: 1241727 - RNA, 20 nt, Human
cccuucuauacccacccaga

SEQ ID NO: 1241728 - RNA, 19 nt, Human
cccuucuauacccacccag

SEQ ID NO: 1241729 - RNA, 18 nt, Human
cccuucuauacccaccca

SEQ ID NO: 1241730 - RNA, 13 nt, Human
cccuucuauaccc

SEQ ID NO: 1241731 - RNA, 14 nt, Human
cccuccuuccuaaa

SEQ ID NO: 1241732 - RNA, 11 nt, Human
cccuccuuccu

SEQ ID NO: 1241733 - RNA, 21 nt, Human
cccuccugugcucagcccuga

SEQ ID NO: 1241734 - RNA, 20 nt, Human
cccuccugugcucagcccug

SEQ ID NO: 1241735 - RNA, 20 nt, Human
cccuccuguugggagagggc

SEQ ID NO: 1241736 - RNA, 21 nt, Human
cccuccuucccaagugagucu

SEQ ID NO: 1241737 - RNA, 13 nt, Human
cccuccuucccaa

SEQ ID NO: 1241738 - RNA, 14 nt, Human
cccuucucccacuc

SEQ ID NO: 1241739 - RNA, 20 nt, Human
cccuucucccacucuccuag

SEQ ID NO: 1241740 - RNA, 14 nt, Human
cccuucuccccugc

SEQ ID NO: 1241741 - RNA, 15 nt, Human
cccuucuccccugca

SEQ ID NO: 1241742 - RNA, 16 nt, Human
cccuucuccccugcac

SEQ ID NO: 1241743 - RNA, 18 nt, Human
cccuucuccccugcacug

SEQ ID NO: 1241744 - RNA, 21 nt, Human
cccuucuccccugcacuguaa

SEQ ID NO: 1241745 - RNA, 12 nt, Human
ccgacagccugg

SEQ ID NO: 1241746 - RNA, 19 nt, Human
ccgaaggaaaagggcuuuc

SEQ ID NO: 1241747 - RNA, 13 nt, Human
ccgacagccuggc

SEQ ID NO: 1241748 - RNA, 14 nt, Human
ccgacagccuggca

SEQ ID NO: 1241749 - RNA, 15 nt, Human
ccgacagccuggcac

SEQ ID NO: 1241750 - RNA, 22 nt, Human
ccgacagccuggcacagggcag

SEQ ID NO: 1241751 - RNA, 23 nt, Human
ccgaaauaucuauguuuuaccaa

SEQ ID NO: 1241752 - RNA, 18 nt, Human
ccgaagccgccuguggac

SEQ ID NO: 1241753 - RNA, 21 nt, Human
ccgaagcuaacagggaaggca

SEQ ID NO: 1241754 - RNA, 23 nt, Human
ccgaagcuaacagggaaggcagg

SEQ ID NO: 1241755 - RNA, 15 nt, Human
ccgcagcccccaccc

SEQ ID NO: 1241756 - RNA, 21 nt, Human
ccgcagcccccacccccaagg

SEQ ID NO: 1241757 - RNA, 20 nt, Human
cccaagcaccugggauuaca

SEQ ID NO: 1241758 - RNA, 20 nt, Human
cccaagagcaucaugccucu

SEQ ID NO: 1241759 - RNA, 21 nt, Human
cccaagagcaucaugccucug

SEQ ID NO: 1241760 - RNA, 23 nt, Human
cccaagagcuacguauuuaauag

SEQ ID NO: 1241761 - RNA, 22 nt, Human
cccaagagcaucaugccucuga

SEQ ID NO: 1241762 - RNA, 20 nt, Human
cccaagaugggcaucuuuug

SEQ ID NO: 1241763 - RNA, 22 nt, Human
cccaagaugggcaucuuuugua

SEQ ID NO: 1241764 - RNA, 17 nt, Human
cccaagauugagcucuc

SEQ ID NO: 1241765 - RNA, 21 nt, Human
cccaagauugagcucucugcc

SEQ ID NO: 1241766 - RNA, 16 nt, Human
cccacccacuucugca

SEQ ID NO: 1241767 - RNA, 23 nt, Human
cccacccagaugccccuuucugg

SEQ ID NO: 1241768 - RNA, 13 nt, Human
cccacccaggcca

SEQ ID NO: 1241769 - RNA, 15 nt, Human
cccacccaggccagg

SEQ ID NO: 1241770 - RNA, 17 nt, Human
cccacccaggccaggca

SEQ ID NO: 1241771 - RNA, 21 nt, Human
cccacccaggccaggcaugug

SEQ ID NO: 1241772 - RNA, 18 nt, Human
cccaccccaaccugcucu

SEQ ID NO: 1241773 - RNA, 19 nt, Human
cccaccccaaccugcucuc

SEQ ID NO: 1241774 - RNA, 22 nt, Human
cccaccccaaccugcucuccuc

SEQ ID NO: 1241775 - RNA, 13 nt, Human
cccaacuccagaa

SEQ ID NO: 1241776 - RNA, 20 nt, Human
cccaacuaauuuuuguauuu

SEQ ID NO: 1241777 - RNA, 23 nt, Human
cccaacuacccccagcugugcuu

SEQ ID NO: 1241778 - RNA, 15 nt, Human
cccaacuccuuccag

SEQ ID NO: 1241779 - RNA, 16 nt, Human
cccaacuccuuccagc

SEQ ID NO: 1241780 - RNA, 18 nt, Human
cccaacuccuuccagcua

SEQ ID NO: 1241781 - RNA, 15 nt, Human
cccaacucuccccug

SEQ ID NO: 1241782 - RNA, 18 nt, Human
cccaagagcaucaugccu

SEQ ID NO: 1241783 - RNA, 15 nt, Human
cccaccccagggcag

SEQ ID NO: 1241784 - RNA, 13 nt, Human
cccaccccauucc

SEQ ID NO: 1241785 - RNA, 17 nt, Human
cccaccccauucccgca

SEQ ID NO: 1241786 - RNA, 13 nt, Human
cccacccccaagg

SEQ ID NO: 1241787 - RNA, 12 nt, Human
cccaccccugca

SEQ ID NO: 1241788 - RNA, 15 nt, Human
cccaccccugcacag

SEQ ID NO: 1241789 - RNA, 14 nt, Human
cccacucugcucug

SEQ ID NO: 1241790 - RNA, 15 nt, Human
cccacucugcucuga

SEQ ID NO: 1241791 - RNA, 16 nt, Human
cccacucugcucugau

SEQ ID NO: 1241792 - RNA, 17 nt, Human
cccacucugcucugaug

SEQ ID NO: 1241793 - RNA, 19 nt, Human
cccacucugcucugaugca

SEQ ID NO: 1241794 - RNA, 18 nt, Human
cccacucugcucugaugc

SEQ ID NO: 1241795 - RNA, 14 nt, Human
cccacugaccagaa

SEQ ID NO: 1241796 - RNA, 15 nt, Human
cccacugagaggaca

SEQ ID NO: 1241797 - RNA, 23 nt, Human
cccacuccucugcugaccugcug

SEQ ID NO: 1241798 - RNA, 12 nt, Human
cccacucuccua

SEQ ID NO: 1241799 - RNA, 14 nt, Human
cccacucuccuagg

SEQ ID NO: 1241800 - RNA, 15 nt, Human
cccacucuccuaggc

SEQ ID NO: 1241801 - RNA, 21 nt, Human
cccacucuccuaggcauucug

SEQ ID NO: 1241802 - RNA, 13 nt, Human
cccacucugcucu

SEQ ID NO: 1241803 - RNA, 21 nt, Human
ccauuucauuugugccagaau

SEQ ID NO: 1241804 - RNA, 22 nt, Human
ccauuucauuugugccagaaug

SEQ ID NO: 1241805 - RNA, 15 nt, Human
ccauuggaucucauu

SEQ ID NO: 1241806 - RNA, 19 nt, Human
ccauuggcuauuuaaaacu

SEQ ID NO: 1241807 - RNA, 20 nt, Human
ccauuggcuauuuaaaacuu

SEQ ID NO: 1241808 - RNA, 21 nt, Human
ccauuggcuauuuaaaacuug

SEQ ID NO: 1241809 - RNA, 13 nt, Human
ccauuucagagag

SEQ ID NO: 1241810 - RNA, 12 nt, Human
ccauucuuuccc

SEQ ID NO: 1241811 - RNA, 20 nt, Human
ccauucuuccuaguuuucuc

SEQ ID NO: 1241812 - RNA, 14 nt, Human
ccauucuuucccaa

SEQ ID NO: 1241813 - RNA, 20 nt, Human
ccauucuuucccaacaccuc

SEQ ID NO: 1241814 - RNA, 14 nt, Human
ccauucuuccuagu

SEQ ID NO: 1241815 - RNA, 19 nt, Human
ccauucuuccuaguuuucu

SEQ ID NO: 1241816 - RNA, 21 nt, Human
ccaugaguuggggucuggcag

SEQ ID NO: 1241817 - RNA, 22 nt, Human
ccaugaguuggggucuggcagc

SEQ ID NO: 1241818 - RNA, 23 nt, Human
ccaugaguuggggucuggcagcc

SEQ ID NO: 1241819 - RNA, 14 nt, Human
ccaugaucccugug

SEQ ID NO: 1241820 - RNA, 16 nt, Human
ccaugaucccuguguu

SEQ ID NO: 1241821 - RNA, 12 nt, Human
ccaugucgccuc

SEQ ID NO: 1241822 - RNA, 23 nt, Human
ccauguccaaagaggcugccccu

SEQ ID NO: 1241823 - RNA, 15 nt, Human
ccaugucgccucugc

SEQ ID NO: 1241824 - RNA, 16 nt, Human
ccaugucgccucugca

SEQ ID NO: 1241825 - RNA, 17 nt, Human
ccaugucgccucugcau

SEQ ID NO: 1241826 - RNA, 19 nt, Human
ccaugucgccucugcauuc

SEQ ID NO: 1241827 - RNA, 17 nt, Human
ccaugaucccuguguug

SEQ ID NO: 1241828 - RNA, 22 nt, Human
ccaugaucccuguguugucucu

SEQ ID NO: 1241829 - RNA, 19 nt, Human
ccaugaguuccagaaagua

SEQ ID NO: 1241830 - RNA, 21 nt, Human
ccaugaugacuuaguacaaag

SEQ ID NO: 1241831 - RNA, 14 nt, Human
ccaugaugccucug

SEQ ID NO: 1241832 - RNA, 20 nt, Human
ccaugaugccucugucuucu

SEQ ID NO: 1241833 - RNA, 20 nt, Human
ccauguaauggcaguuauau

SEQ ID NO: 1241834 - RNA, 23 nt, Human
ccauguaauggcaguuauauuuu

SEQ ID NO: 1241835 - RNA, 16 nt, Human
ccauguacaugaagaa

SEQ ID NO: 1241836 - RNA, 15 nt, Human
ccauguagaaaauuu

SEQ ID NO: 1241837 - RNA, 16 nt, Human
ccauguagaaaauuug

SEQ ID NO: 1241838 - RNA, 14 nt, Human
ccauaaucuggacu

SEQ ID NO: 1241839 - RNA, 21 nt, Human
ccauaaucuggacuccucugu

SEQ ID NO: 1241840 - RNA, 23 nt, Human
ccaguuggaguuuuuuguaccaa

SEQ ID NO: 1241841 - RNA, 15 nt, Human
ccaguuggaguuuuu

SEQ ID NO: 1241842 - RNA, 13 nt, Human
ccauccauggcca

SEQ ID NO: 1241843 - RNA, 14 nt, Human
ccauccauggccag

SEQ ID NO: 1241844 - RNA, 15 nt, Human
ccauccauggccagc

SEQ ID NO: 1241845 - RNA, 16 nt, Human
ccauccauggccagca

SEQ ID NO: 1241846 - RNA, 17 nt, Human
ccauccauggccagcag

SEQ ID NO: 1241847 - RNA, 18 nt, Human
ccauccauggccagcagc

SEQ ID NO: 1241848 - RNA, 13 nt, Human
ccauccccagcga

SEQ ID NO: 1241849 - RNA, 13 nt, Human
ccaucccaugcug

SEQ ID NO: 1241850 - RNA, 23 nt, Human
ccauccccuugaggucucagccc

SEQ ID NO: 1241851 - RNA, 22 nt, Human
ccauccccuugaggucucagcc

SEQ ID NO: 1241852 - RNA, 16 nt, Human
ccaucccuccccaguu

SEQ ID NO: 1241853 - RNA, 21 nt, Human
ccaguugcugcuucaauuuau

SEQ ID NO: 1241854 - RNA, 19 nt, Human
ccaguuggagcuccagccu

SEQ ID NO: 1241855 - RNA, 22 nt, Human
ccaguuggagcuccagccugac

SEQ ID NO: 1241856 - RNA, 15 nt, Human
ccaguugccaucugc

SEQ ID NO: 1241857 - RNA, 19 nt, Human
ccaguugcagucacucuag

SEQ ID NO: 1241858 - RNA, 14 nt, Human
ccaguugccuuuua

SEQ ID NO: 1241859 - RNA, 19 nt, Human
ccaguucuucgacuguugu

SEQ ID NO: 1241860 - RNA, 18 nt, Human
ccaguugcacucagguga

SEQ ID NO: 1241861 - RNA, 12 nt, Human
ccaguugcaguc

SEQ ID NO: 1241862 - RNA, 18 nt, Human
ccaggcuggagugcagug

SEQ ID NO: 1241863 - RNA, 17 nt, Human
ccaggcuggagugcagu

SEQ ID NO: 1241864 - RNA, 21 nt, Human
ccaggcugcucuugaacuccu

SEQ ID NO: 1241865 - RNA, 14 nt, Human
ccaggcugccgucc

SEQ ID NO: 1241866 - RNA, 21 nt, Human
ccaggcugccguccccuagag

SEQ ID NO: 1241867 - RNA, 14 nt, Human
ccaggcugccgugg

SEQ ID NO: 1241868 - RNA, 15 nt, Human
ccaggcugccguggg

SEQ ID NO: 1241869 - RNA, 18 nt, Human
ccaggcugccguggggcc

SEQ ID NO: 1241870 - RNA, 13 nt, Human
ccaggcugccucc

SEQ ID NO: 1241871 - RNA, 23 nt, Human
ccaggcugccucccuuguggcag

SEQ ID NO: 1241872 - RNA, 17 nt, Human
ccaggcaggucugaagc

SEQ ID NO: 1241873 - RNA, 19 nt, Human
ccaggggaacacuggggac

SEQ ID NO: 1241874 - RNA, 15 nt, Human
ccaggggagcagagg

SEQ ID NO: 1241875 - RNA, 20 nt, Human
ccaggggagcagaggggcag

SEQ ID NO: 1241876 - RNA, 19 nt, Human
ccaggggagcagaggggca

SEQ ID NO: 1241877 - RNA, 20 nt, Human
ccaggauacuggcacagagg

SEQ ID NO: 1241878 - RNA, 21 nt, Human
ccaggauacuggcacagaggu

SEQ ID NO: 1241879 - RNA, 16 nt, Human
ccaggauagagacugg

SEQ ID NO: 1241880 - RNA, 18 nt, Human
ccaggauagagacuggaa

SEQ ID NO: 1241881 - RNA, 18 nt, Human
ccaggaucguuuuuuccc

SEQ ID NO: 1241882 - RNA, 21 nt, Human
ccaggauggaacacggccaca

SEQ ID NO: 1241883 - RNA, 17 nt, Human
ccaggggggugaggagc

SEQ ID NO: 1241884 - RNA, 19 nt, Human
ccaggggggugaggagcug

SEQ ID NO: 1241885 - RNA, 20 nt, Human
ccaggggggugaggagcugg

SEQ ID NO: 1241886 - RNA, 15 nt, Human
ccagucaggcccagg

SEQ ID NO: 1241887 - RNA, 13 nt, Human
ccaguccaggcug

SEQ ID NO: 1241888 - RNA, 14 nt, Human
ccaguccaggcugc

SEQ ID NO: 1241889 - RNA, 15 nt, Human
ccaguccaggcugcc

SEQ ID NO: 1241890 - RNA, 16 nt, Human
ccaguccaggcugccg

SEQ ID NO: 1241891 - RNA, 19 nt, Human
ccaguccaggcugccgugg

SEQ ID NO: 1241892 - RNA, 18 nt, Human
ccagucccccugccccag

SEQ ID NO: 1241893 - RNA, 17 nt, Human
ccaguccaccugaggaa

SEQ ID NO: 1241894 - RNA, 14 nt, Human
ccaguccaguccua

SEQ ID NO: 1241895 - RNA, 13 nt, Human
ccagucccagagc

SEQ ID NO: 1241896 - RNA, 15 nt, Human
ccagucccagagcag

SEQ ID NO: 1241897 - RNA, 16 nt, Human
ccaguccuaucugggc

SEQ ID NO: 1241898 - RNA, 17 nt, Human
ccaguccuaucugggcu

SEQ ID NO: 1241899 - RNA, 18 nt, Human
ccaguccuaucugggcuu

SEQ ID NO: 1241900 - RNA, 21 nt, Human
ccaguccuaucugggcuuccu

SEQ ID NO: 1241901 - RNA, 19 nt, Human
ccaguccuaucugggcuuc

SEQ ID NO: 1241902 - RNA, 23 nt, Human
ccagcuuuucccaaaagcccauu

SEQ ID NO: 1241903 - RNA, 13 nt, Human
ccagcuuuuccca

SEQ ID NO: 1241904 - RNA, 13 nt, Human
ccagcuuuucaaa

SEQ ID NO: 1241905 - RNA, 20 nt, Human
ccagcuuugcuaccaaagca

SEQ ID NO: 1241906 - RNA, 18 nt, Human
ccagcagacagagccagg

SEQ ID NO: 1241907 - RNA, 19 nt, Human
ccagcagacagagccagga

SEQ ID NO: 1241908 - RNA, 20 nt, Human
ccagcagacagagccaggag

SEQ ID NO: 1241909 - RNA, 22 nt, Human
ccagcagacagagccaggagaa

SEQ ID NO: 1241910 - RNA, 16 nt, Human
ccagcacuuguccagc

SEQ ID NO: 1241911 - RNA, 19 nt, Human
ccagcacuuguccagcuga

SEQ ID NO: 1241912 - RNA, 20 nt, Human
ccagcacuuguccagcugag

SEQ ID NO: 1241913 - RNA, 22 nt, Human
ccacuccucugcugaccugcug

SEQ ID NO: 1241914 - RNA, 13 nt, Human
ccacuccuuccug

SEQ ID NO: 1241915 - RNA, 14 nt, Human
ccacuccuuccugc

SEQ ID NO: 1241916 - RNA, 18 nt, Human
ccacuccuuccugcccca

SEQ ID NO: 1241917 - RNA, 16 nt, Human
ccacuccuuccugccc

SEQ ID NO: 1241918 - RNA, 15 nt, Human
ccacucuaaagcaaa

SEQ ID NO: 1241919 - RNA, 17 nt, Human
ccagcacuuccauggga

SEQ ID NO: 1241920 - RNA, 21 nt, Human
ccagcagacagagccaggaga

SEQ ID NO: 1241921 - RNA, 13 nt, Human
ccagccccucugg

SEQ ID NO: 1241922 - RNA, 14 nt, Human
ccagccccucuggu

SEQ ID NO: 1241923 - RNA, 15 nt, Human
ccagcuacuuccucc

SEQ ID NO: 1241924 - RNA, 17 nt, Human
ccagcuacuuccuccuc

SEQ ID NO: 1241925 - RNA, 23 nt, Human
ccagcuaggaagagcaggacucc

SEQ ID NO: 1241926 - RNA, 14 nt, Human
ccagcuagugaccc

SEQ ID NO: 1241927 - RNA, 18 nt, Human
ccagcuagugacccacau

SEQ ID NO: 1241928 - RNA, 20 nt, Human
ccagcuagugacccacaugc

SEQ ID NO: 1241929 - RNA, 22 nt, Human
ccagcuagugacccacaugcca

SEQ ID NO: 1241930 - RNA, 22 nt, Human
ccagcuauguuauauugaaaaa

SEQ ID NO: 1241931 - RNA, 21 nt, Human
ccagcuagugacccacaugcc

SEQ ID NO: 1241932 - RNA, 17 nt, Human
ccagcucaauggacugg

SEQ ID NO: 1241933 - RNA, 14 nt, Human
ccagcuccaaccug

SEQ ID NO: 1241934 - RNA, 15 nt, Human
ccagcuccaaccugc

SEQ ID NO: 1241935 - RNA, 20 nt, Human
ccagcuccaaccugcaaaga

SEQ ID NO: 1241936 - RNA, 22 nt, Human
ccagcuccaaggggaaucagaa

SEQ ID NO: 1241937 - RNA, 15 nt, Human
ccagcucccaccucc

SEQ ID NO: 1241938 - RNA, 19 nt, Human
ccagcucccaccuccccuu

SEQ ID NO: 1241939 - RNA, 22 nt, Human
ccagcucccaccuccccuuggg

SEQ ID NO: 1241940 - RNA, 12 nt, Human
ccagcucccagg

SEQ ID NO: 1241941 - RNA, 13 nt, Human
ccagcucccagga

SEQ ID NO: 1241942 - RNA, 20 nt, Human
ccagcucccaggaccacagg

SEQ ID NO: 1241943 - RNA, 21 nt, Human
ccagcucccaggaccacaggc

SEQ ID NO: 1241944 - RNA, 23 nt, Human
ccagcucccaggaccacaggcuc

SEQ ID NO: 1241945 - RNA, 16 nt, Human
ccagcucccccucccu

SEQ ID NO: 1241946 - RNA, 15 nt, Human
ccagcucccccuccc

SEQ ID NO: 1241947 - RNA, 21 nt, Human
ccagcuuguuuacaugcuuau

SEQ ID NO: 1241948 - RNA, 12 nt, Human
ccagcuuucccu

SEQ ID NO: 1241949 - RNA, 14 nt, Human
ccagcuuucccugc

SEQ ID NO: 1241950 - RNA, 18 nt, Human
ccagcuuucccugccucu

SEQ ID NO: 1241951 - RNA, 23 nt, Human
ccagcuuguuuacaugcuuauuc

SEQ ID NO: 1241952 - RNA, 12 nt, Human
ccagcuuuccug

SEQ ID NO: 1241953 - RNA, 17 nt, Human
ccccugaauuuaaauag

SEQ ID NO: 1241954 - RNA, 17 nt, Human
ccccugaccacucagag

SEQ ID NO: 1241955 - RNA, 18 nt, Human
ccccugcaaagcccagcu

SEQ ID NO: 1241956 - RNA, 20 nt, Human
ccccugcaaagcccagcuug

SEQ ID NO: 1241957 - RNA, 13 nt, Human
ccccugcacucca

SEQ ID NO: 1241958 - RNA, 21 nt, Human
ccccugcaaagcccagcuuga

SEQ ID NO: 1241959 - RNA, 16 nt, Human
ccccugaccacucaga

SEQ ID NO: 1241960 - RNA, 13 nt, Human
ccccugaauuuaa

SEQ ID NO: 1241961 - RNA, 23 nt, Human
ccccucuuggagaagucucagcu

SEQ ID NO: 1241962 - RNA, 16 nt, Human
ccccucuggcuccagc

SEQ ID NO: 1241963 - RNA, 18 nt, Human
ccccucuggcuccagcug

SEQ ID NO: 1241964 - RNA, 14 nt, Human
ccccucuuggagaa

SEQ ID NO: 1241965 - RNA, 22 nt, Human
ccccucuuggagaagucucagc

SEQ ID NO: 1241966 - RNA, 17 nt, Human
ccccugccaccuccugc

SEQ ID NO: 1241967 - RNA, 15 nt, Human
ccccugccaccuccu

SEQ ID NO: 1241968 - RNA, 12 nt, Human
ccccugccacca

SEQ ID NO: 1241969 - RNA, 20 nt, Human
ccccugccaccaggccaccu

SEQ ID NO: 1241970 - RNA, 14 nt, Human
ccccugccagggca

SEQ ID NO: 1241971 - RNA, 15 nt, Human
ccccugccagggcag

SEQ ID NO: 1241972 - RNA, 19 nt, Human
ccccugccagggcagggcc

SEQ ID NO: 1241973 - RNA, 23 nt, Human
ccccugccagggcagggccccag

SEQ ID NO: 1241974 - RNA, 11 nt, Human
ccccugccccc

SEQ ID NO: 1241975 - RNA, 17 nt, Human
ccccugccccccagccu

SEQ ID NO: 1241976 - RNA, 23 nt, Human
ccccucugcccugcgggucacag

SEQ ID NO: 1241977 - RNA, 16 nt, Human
ccccucugcugcuguc

SEQ ID NO: 1241978 - RNA, 15 nt, Human
ccccucugcccugcg

SEQ ID NO: 1241979 - RNA, 20 nt, Human
ccccucugcccugcggguca

SEQ ID NO: 1241980 - RNA, 18 nt, Human
cccucaaccucauccucu

SEQ ID NO: 1241981 - RNA, 16 nt, Human
cccucacccuggggcu

SEQ ID NO: 1241982 - RNA, 14 nt, Human
cccucaccuccucu

SEQ ID NO: 1241983 - RNA, 17 nt, Human
cccggcuaauuuuugua

SEQ ID NO: 1241984 - RNA, 23 nt, Human
cccucagccucuccccugccugc

SEQ ID NO: 1241985 - RNA, 21 nt, Human
cccucaccuguagcagccagu

SEQ ID NO: 1241986 - RNA, 16 nt, Human
cccucaccuucugagu

SEQ ID NO: 1241987 - RNA, 20 nt, Human
cccucaccuuggcaccagac

SEQ ID NO: 1241988 - RNA, 21 nt, Human
cccucaccuuggcaccagaca

SEQ ID NO: 1241989 - RNA, 23 nt, Human
cccucaccuuggcaccagacacc

SEQ ID NO: 1241990 - RNA, 17 nt, Human
cccucacucgucucccc

SEQ ID NO: 1241991 - RNA, 20 nt, Human
cccucagccucuccccugcc

SEQ ID NO: 1241992 - RNA, 20 nt, Human
cccggcuaauuuuuguauuu

SEQ ID NO: 1241993 - RNA, 15 nt, Human
ccccugcccccugca

SEQ ID NO: 1241994 - RNA, 16 nt, Human
cccuccucucugcccu

SEQ ID NO: 1241995 - RNA, 15 nt, Human
cccuccucucugccc

SEQ ID NO: 1241996 - RNA, 13 nt, Human
cccuccuggcucu

SEQ ID NO: 1241997 - RNA, 17 nt, Human
cccuccuggugccaccu

SEQ ID NO: 1241998 - RNA, 18 nt, Human
cccuccugugcucagccc

SEQ ID NO: 1241999 - RNA, 19 nt, Human
cccuccugugcucagcccu

SEQ ID NO: 1242000 - RNA, 18 nt, Human
cccagcacagcuugaccu

SEQ ID NO: 1242001 - RNA, 19 nt, Human
cccagcacagcuugaccug

SEQ ID NO: 1242002 - RNA, 16 nt, Human
cccacuggacucaccu

SEQ ID NO: 1242003 - RNA, 12 nt, Human
cccacuggagca

SEQ ID NO: 1242004 - RNA, 13 nt, Human
cccacuggagcag

SEQ ID NO: 1242005 - RNA, 22 nt, Human
cccacuggagcagaaggggaga

SEQ ID NO: 1242006 - RNA, 19 nt, Human
cccagcacaugugcugccc

SEQ ID NO: 1242007 - RNA, 23 nt, Human
cccagccagcgucggucugugcc

SEQ ID NO: 1242008 - RNA, 11 nt, Human
cccagccagcg

SEQ ID NO: 1242009 - RNA, 13 nt, Human
cccagccaggccc

SEQ ID NO: 1242010 - RNA, 17 nt, Human
cccagccaggcccagcc

SEQ ID NO: 1242011 - RNA, 13 nt, Human
cccagccauccag

SEQ ID NO: 1242012 - RNA, 19 nt, Human
cccagccagggcucaaucu

SEQ ID NO: 1242013 - RNA, 21 nt, Human
cccagccagggcucaaucucu

SEQ ID NO: 1242014 - RNA, 14 nt, Human
cccagccaggccca

SEQ ID NO: 1242015 - RNA, 15 nt, Human
cccagccaggcccag

SEQ ID NO: 1242016 - RNA, 16 nt, Human
cccagccaggcccagc

SEQ ID NO: 1242017 - RNA, 16 nt, Human
cccagccagggcucaa

SEQ ID NO: 1242018 - RNA, 22 nt, Human
cccagccagggcucaaucucug

SEQ ID NO: 1242019 - RNA, 20 nt, Human
cccagcuggggccaggcugg

SEQ ID NO: 1242020 - RNA, 16 nt, Human
cccaggcugagccuca

SEQ ID NO: 1242021 - RNA, 17 nt, Human
cccaggcugagccucag

SEQ ID NO: 1242022 - RNA, 15 nt, Human
cccagggaagcagca

SEQ ID NO: 1242023 - RNA, 17 nt, Human
cccagggaagcagcagc

SEQ ID NO: 1242024 - RNA, 19 nt, Human
cccagggaagcagcagccu

SEQ ID NO: 1242025 - RNA, 20 nt, Human
cccagggaagcagcagccuc

SEQ ID NO: 1242026 - RNA, 18 nt, Human
cccaggcugagccucagu

SEQ ID NO: 1242027 - RNA, 12 nt, Human
cccaggcugccg

SEQ ID NO: 1242028 - RNA, 14 nt, Human
cccaggcugccguc

SEQ ID NO: 1242029 - RNA, 15 nt, Human
cccaggcugccgucc

SEQ ID NO: 1242030 - RNA, 13 nt, Human
cccaggcuggagu

SEQ ID NO: 1242031 - RNA, 22 nt, Human
cccaggcugccguccccuagag

SEQ ID NO: 1242032 - RNA, 23 nt, Human
cccagggaagcagcagccucgcc

SEQ ID NO: 1242033 - RNA, 18 nt, Human
cccagggacaccugggag

SEQ ID NO: 1242034 - RNA, 19 nt, Human
cccagggacaccugggaga

SEQ ID NO: 1242035 - RNA, 20 nt, Human
cccaucaccuacucacacag

SEQ ID NO: 1242036 - RNA, 21 nt, Human
cccaucaccuacucacacagg

SEQ ID NO: 1242037 - RNA, 22 nt, Human
cccaucaccuacucacacaggc

SEQ ID NO: 1242038 - RNA, 23 nt, Human
cccaucaccuacucacacaggca

SEQ ID NO: 1242039 - RNA, 22 nt, Human
cccaucagugcucccucacaug

SEQ ID NO: 1242040 - RNA, 23 nt, Human
cccaucagugcucccucacaugu

SEQ ID NO: 1242041 - RNA, 14 nt, Human
cccaucaggguagg

SEQ ID NO: 1242042 - RNA, 15 nt, Human
cccaucccuccccag

SEQ ID NO: 1242043 - RNA, 16 nt, Human
cccaucccuccccagu

SEQ ID NO: 1242044 - RNA, 15 nt, Human
cccauccugaccagc

SEQ ID NO: 1242045 - RNA, 18 nt, Human
cccauccuguggucacug

SEQ ID NO: 1242046 - RNA, 22 nt, Human
cccauccuguguguuaagcucu

SEQ ID NO: 1242047 - RNA, 17 nt, Human
ccccagaggcuggguga

SEQ ID NO: 1242048 - RNA, 11 nt, Human
ccccagauauc

SEQ ID NO: 1242049 - RNA, 20 nt, Human
ccccagcccagggcuccugc

SEQ ID NO: 1242050 - RNA, 21 nt, Human
ccccagcccagggcuccugca

SEQ ID NO: 1242051 - RNA, 12 nt, Human
ccccagcccaga

SEQ ID NO: 1242052 - RNA, 13 nt, Human
ccccagcccagag

SEQ ID NO: 1242053 - RNA, 15 nt, Human
ccccagcccagagac

SEQ ID NO: 1242054 - RNA, 16 nt, Human
ccccagcccagagaca

SEQ ID NO: 1242055 - RNA, 12 nt, Human
ccccagcccagg

SEQ ID NO: 1242056 - RNA, 14 nt, Human
ccccagcccagggc

SEQ ID NO: 1242057 - RNA, 15 nt, Human
ccccagcccagggcu

SEQ ID NO: 1242058 - RNA, 19 nt, Human
ccccauggagcugggcuaa

SEQ ID NO: 1242059 - RNA, 13 nt, Human
ccccauggcccug

SEQ ID NO: 1242060 - RNA, 16 nt, Human
ccccauggcccugagc

SEQ ID NO: 1242061 - RNA, 17 nt, Human
ccccauggcccugagcg

SEQ ID NO: 1242062 - RNA, 19 nt, Human
ccccauggucagcccuagg

SEQ ID NO: 1242063 - RNA, 21 nt, Human
ccccauggugcuaggaagagg

SEQ ID NO: 1242064 - RNA, 20 nt, Human
ccccauggugcuaggaagag

SEQ ID NO: 1242065 - RNA, 14 nt, Human
ccccauguguccug

SEQ ID NO: 1242066 - RNA, 16 nt, Human
ccccauguguccuggu

SEQ ID NO: 1242067 - RNA, 18 nt, Human
ccccauguguccugguuc

SEQ ID NO: 1242068 - RNA, 23 nt, Human
ccccauguguccugguucccguu

SEQ ID NO: 1242069 - RNA, 15 nt, Human
ccccauguucugucc

SEQ ID NO: 1242070 - RNA, 13 nt, Human
ccccauucccgca

SEQ ID NO: 1242071 - RNA, 13 nt, Human
cccauuucugagg

SEQ ID NO: 1242072 - RNA, 17 nt, Human
cccauuuugaaucacau

SEQ ID NO: 1242073 - RNA, 12 nt, Human
cccauuuuuccu

SEQ ID NO: 1242074 - RNA, 13 nt, Human
cccauuuuuccuu

SEQ ID NO: 1242075 - RNA, 14 nt, Human
ccccgcagacaccu

SEQ ID NO: 1242076 - RNA, 20 nt, Human
cccccuuuccuggacacuca

SEQ ID NO: 1242077 - RNA, 14 nt, Human
cccccuugaguggg

SEQ ID NO: 1242078 - RNA, 20 nt, Human
cccccuuuagaucucugaag

SEQ ID NO: 1242079 - RNA, 21 nt, Human
cccccuuuagaucucugaagc

SEQ ID NO: 1242080 - RNA, 17 nt, Human
cccccuuucacaggcag

SEQ ID NO: 1242081 - RNA, 22 nt, Human
cccccuuucacaggcagccagu

SEQ ID NO: 1242082 - RNA, 18 nt, Human
cccccuuucacaggcagc

SEQ ID NO: 1242083 - RNA, 12 nt, Human
cccccuuuccug

SEQ ID NO: 1242084 - RNA, 21 nt, Human
cacucuguucauuccuccagg

SEQ ID NO: 1242085 - RNA, 20 nt, Human
cacucuguucauuccuccag

SEQ ID NO: 1242086 - RNA, 19 nt, Human
cacucuguucauuccucca

SEQ ID NO: 1242087 - RNA, 18 nt, Human
cacucuguucauuccucc

SEQ ID NO: 1242088 - RNA, 17 nt, Human
cacucuguucauuccuc

SEQ ID NO: 1242089 - RNA, 23 nt, Human
cacuaccgaaugugucuuuagau

SEQ ID NO: 1242090 - RNA, 23 nt, Human
cacuccagccugagcgacaguga

SEQ ID NO: 1242091 - RNA, 20 nt, Human
cacuaccgaaugugucuuua

SEQ ID NO: 1242092 - RNA, 13 nt, Human
cacuccagccuga

SEQ ID NO: 1242093 - RNA, 21 nt, Human
cacuacacccagcaauagaga

SEQ ID NO: 1242094 - RNA, 12 nt, Human
cacggccuuucu

SEQ ID NO: 1242095 - RNA, 20 nt, Human
cacggccuuucuagccuggc

SEQ ID NO: 1242096 - RNA, 20 nt, Human
cacggccacacagcugccgg

SEQ ID NO: 1242097 - RNA, 16 nt, Human
cacggccacacagcug

SEQ ID NO: 1242098 - RNA, 17 nt, Human
cacggccacacagcugc

SEQ ID NO: 1242099 - RNA, 18 nt, Human
cacggccacacagcugcc

SEQ ID NO: 1242100 - RNA, 19 nt, Human
cacggccacacagcugccg

SEQ ID NO: 1242101 - RNA, 13 nt, Human
cacggccacauca

SEQ ID NO: 1242102 - RNA, 19 nt, Human
cacggccacaucaaagagg

SEQ ID NO: 1242103 - RNA, 22 nt, Human
cacucuguucauuccuccaggu

SEQ ID NO: 1242104 - RNA, 14 nt, Human
cacucuucauggug

SEQ ID NO: 1242105 - RNA, 23 nt, Human
caccuuuauucuggcagaggagg

SEQ ID NO: 1242106 - RNA, 13 nt, Human
caccugcccaacc

SEQ ID NO: 1242107 - RNA, 17 nt, Human
caccucagauggcagcu

SEQ ID NO: 1242108 - RNA, 18 nt, Human
caccucagauggcagcuu

SEQ ID NO: 1242109 - RNA, 19 nt, Human
caccucagauggcagcuuu

SEQ ID NO: 1242110 - RNA, 20 nt, Human
caccucagauggcagcuuuu

SEQ ID NO: 1242111 - RNA, 18 nt, Human
caccugcccaaccugcuc

SEQ ID NO: 1242112 - RNA, 19 nt, Human
caccugcccaaccugcucu

SEQ ID NO: 1242113 - RNA, 21 nt, Human
caccucagauggcagcuuuua

SEQ ID NO: 1242114 - RNA, 15 nt, Human
caccugccccaacuc

SEQ ID NO: 1242115 - RNA, 16 nt, Human
caccugccccaacucu

SEQ ID NO: 1242116 - RNA, 17 nt, Human
caccuuuguuucucccc

SEQ ID NO: 1242117 - RNA, 12 nt, Human
caccuuucuagu

SEQ ID NO: 1242118 - RNA, 13 nt, Human
caccuuucuaguu

SEQ ID NO: 1242119 - RNA, 17 nt, Human
caccuuucuaguugaaa

SEQ ID NO: 1242120 - RNA, 17 nt, Human
cacgaaauguuauuuuu

SEQ ID NO: 1242121 - RNA, 13 nt, Human
cacgaaauguuau

SEQ ID NO: 1242122 - RNA, 15 nt, Human
cacgaaauguuauuu

SEQ ID NO: 1242123 - RNA, 16 nt, Human
cacgaaauguuauuuu

SEQ ID NO: 1242124 - RNA, 19 nt, Human
caccuuuguuucuccccca

SEQ ID NO: 1242125 - RNA, 17 nt, Human
caccuuuuuucaacagu

SEQ ID NO: 1242126 - RNA, 20 nt, Human
caccucagagacauacaccu

SEQ ID NO: 1242127 - RNA, 12 nt, Human
caccucagaugg

SEQ ID NO: 1242128 - RNA, 13 nt, Human
caccucagauggc

SEQ ID NO: 1242129 - RNA, 17 nt, Human
caccuaggcuagggugg

SEQ ID NO: 1242130 - RNA, 14 nt, Human
caccuagcagcacc

SEQ ID NO: 1242131 - RNA, 13 nt, Human
caccuagcugaau

SEQ ID NO: 1242132 - RNA, 14 nt, Human
caccuagcugaaug

SEQ ID NO: 1242133 - RNA, 18 nt, Human
caccuagcugaauguuuu

SEQ ID NO: 1242134 - RNA, 19 nt, Human
caccuagcugaauguuuuu

SEQ ID NO: 1242135 - RNA, 21 nt, Human
caccuagcugaauguuuuucu

SEQ ID NO: 1242136 - RNA, 22 nt, Human
caccuagcugaauguuuuucua

SEQ ID NO: 1242137 - RNA, 23 nt, Human
caccuagcugaauguuuuucuaa

SEQ ID NO: 1242138 - RNA, 17 nt, Human
caccuaggaagccucag

SEQ ID NO: 1242139 - RNA, 18 nt, Human
caccuaggaagccucaga

SEQ ID NO: 1242140 - RNA, 24 nt, Human
caccuaggaagccucagauuccuu

SEQ ID NO: 1242141 - RNA, 19 nt, Human
caccuaggaagccucagau

SEQ ID NO: 1242142 - RNA, 12 nt, Human
caccuacugagu

SEQ ID NO: 1242143 - RNA, 18 nt, Human
cacuuuagaauaugccuu

SEQ ID NO: 1242144 - RNA, 20 nt, Human
cacuuuaauuaccaaccugu

SEQ ID NO: 1242145 - RNA, 22 nt, Human
cacuuuacacaauagaauuaua

SEQ ID NO: 1242146 - RNA, 17 nt, Human
cacuuguguuuugcaag

SEQ ID NO: 1242147 - RNA, 19 nt, Human
cacuuguugauuaauggaa

SEQ ID NO: 1242148 - RNA, 19 nt, Human
cacuuuaaaauaucuacau

SEQ ID NO: 1242149 - RNA, 15 nt, Human
cacuuaauguauguu

SEQ ID NO: 1242150 - RNA, 22 nt, Human
cacuuguggguuuuuguuuugu

SEQ ID NO: 1242151 - RNA, 20 nt, Human
cacuuaaguuaguuccacug

SEQ ID NO: 1242152 - RNA, 22 nt, Human
cacuuaaguuaguuccacugag

SEQ ID NO: 1242153 - RNA, 12 nt, Human
cacuuaauguau

SEQ ID NO: 1242154 - RNA, 14 nt, Human
cacuuaauguaugu

SEQ ID NO: 1242155 - RNA, 12 nt, Human
cacuuaacaaac

SEQ ID NO: 1242156 - RNA, 18 nt, Human
cacuuaacaaacaaauuu

SEQ ID NO: 1242157 - RNA, 23 nt, Human
cacuuaaccaagacaaaaagcca

SEQ ID NO: 1242158 - RNA, 19 nt, Human
cacugggagaaaugaaaaa

SEQ ID NO: 1242159 - RNA, 13 nt, Human
cacugggcuucua

SEQ ID NO: 1242160 - RNA, 20 nt, Human
cacugggaggcuccccuucu

SEQ ID NO: 1242161 - RNA, 18 nt, Human
cacugggaggcuccccuu

SEQ ID NO: 1242162 - RNA, 14 nt, Human
cacugggugguggc

SEQ ID NO: 1242163 - RNA, 15 nt, Human
cacugggugguggcc

SEQ ID NO: 1242164 - RNA, 17 nt, Human
cacugggugguggccug

SEQ ID NO: 1242165 - RNA, 18 nt, Human
cacugggugguggccugg

SEQ ID NO: 1242166 - RNA, 22 nt, Human
cacugggugguggccugguccc

SEQ ID NO: 1242167 - RNA, 20 nt, Human
cacugggugguggccugguc

SEQ ID NO: 1242168 - RNA, 20 nt, Human
cacugguagaccaaaauaaa

SEQ ID NO: 1242169 - RNA, 15 nt, Human
cacuuaaaaaugguu

SEQ ID NO: 1242170 - RNA, 23 nt, Human
cacuguuuucuaguguaucaaaa

SEQ ID NO: 1242171 - RNA, 21 nt, Human
cacuguuuucuaguguaucaa

SEQ ID NO: 1242172 - RNA, 15 nt, Human
cacuuaaacuugcau

SEQ ID NO: 1242173 - RNA, 17 nt, Human
cacuguuuucuagugua

SEQ ID NO: 1242174 - RNA, 16 nt, Human
cacuguuuucuagugu

SEQ ID NO: 1242175 - RNA, 14 nt, Human
cacuguuuucuagu

SEQ ID NO: 1242176 - RNA, 11 nt, Human
cacuguuuaag

SEQ ID NO: 1242177 - RNA, 22 nt, Human
cacuguuuguuuacaaaaucag

SEQ ID NO: 1242178 - RNA, 18 nt, Human
cacugccauaugauuuac

SEQ ID NO: 1242179 - RNA, 14 nt, Human
cagaaauacaauuu

SEQ ID NO: 1242180 - RNA, 14 nt, Human
cagaaauacuacug

SEQ ID NO: 1242181 - RNA, 22 nt, Human
cagaaagggagggcucugaggc

SEQ ID NO: 1242182 - RNA, 12 nt, Human
cagaaagugccu

SEQ ID NO: 1242183 - RNA, 14 nt, Human
cagaaagugccuga

SEQ ID NO: 1242184 - RNA, 15 nt, Human
cagaaagugccugac

SEQ ID NO: 1242185 - RNA, 16 nt, Human
cagaaagugccugaca

SEQ ID NO: 1242186 - RNA, 19 nt, Human
cagaaagugccugacacac

SEQ ID NO: 1242187 - RNA, 23 nt, Human
cagaaagugccugacacacuaac

SEQ ID NO: 1242188 - RNA, 15 nt, Human
cagaaagugccuuuc

SEQ ID NO: 1242189 - RNA, 16 nt, Human
cagaaagugccuuuca

SEQ ID NO: 1242190 - RNA, 17 nt, Human
cagaaagugccuuucag

SEQ ID NO: 1242191 - RNA, 18 nt, Human
cagaaagugccuuucagg

SEQ ID NO: 1242192 - RNA, 19 nt, Human
cagaaagugccuuucagga

SEQ ID NO: 1242193 - RNA, 22 nt, Human
cagaaagugccuuucaggaucu

SEQ ID NO: 1242194 - RNA, 23 nt, Human
cagaaagugccuuucaggaucua

SEQ ID NO: 1242195 - RNA, 16 nt, Human
cagaaaggaaaaacaa

SEQ ID NO: 1242196 - RNA, 17 nt, Human
cagaaaggaaaaacaaa

SEQ ID NO: 1242197 - RNA, 19 nt, Human
cagaaaggaaaaacaaacu

SEQ ID NO: 1242198 - RNA, 15 nt, Human
cagaaagggagggcu

SEQ ID NO: 1242199 - RNA, 20 nt, Human
cagaaaggacuccuccuuuu

SEQ ID NO: 1242200 - RNA, 16 nt, Human
cagaaagggagggcuc

SEQ ID NO: 1242201 - RNA, 17 nt, Human
cagaaagggagggcucu

SEQ ID NO: 1242202 - RNA, 18 nt, Human
cagaaagggagggcucug

SEQ ID NO: 1242203 - RNA, 19 nt, Human
cagaaagggagggcucuga

SEQ ID NO: 1242204 - RNA, 20 nt, Human
cagaaagggagggcucugag

SEQ ID NO: 1242205 - RNA, 21 nt, Human
cagaaagggagggcucugagg

SEQ ID NO: 1242206 - RNA, 23 nt, Human
cagaaagggagggcucugaggcg

SEQ ID NO: 1242207 - RNA, 18 nt, Human
cagaacagugauuaccag

SEQ ID NO: 1242208 - RNA, 19 nt, Human
cagaaguuucucagcuccc

SEQ ID NO: 1242209 - RNA, 17 nt, Human
cagaacagugauuacca

SEQ ID NO: 1242210 - RNA, 12 nt, Human
cagaacagugau

SEQ ID NO: 1242211 - RNA, 11 nt, Human
cagaacaguga

SEQ ID NO: 1242212 - RNA, 22 nt, Human
cagaaauauuugugacaaaaaa

SEQ ID NO: 1242213 - RNA, 21 nt, Human
cagaaauauuugugacaaaaa

SEQ ID NO: 1242214 - RNA, 21 nt, Human
cagaaaugaggagacacaccu

SEQ ID NO: 1242215 - RNA, 23 nt, Human
cagaaaugaggccauggacucug

SEQ ID NO: 1242216 - RNA, 20 nt, Human
cagaaaugaggccauggacu

SEQ ID NO: 1242217 - RNA, 20 nt, Human
caauaaaauccauacauuug

SEQ ID NO: 1242218 - RNA, 23 nt, Human
caauaaaauccauacauuugugu

SEQ ID NO: 1242219 - RNA, 20 nt, Human
caauaaaaauguuuaacggu

SEQ ID NO: 1242220 - RNA, 14 nt, Human
caauaaaacauuaa

SEQ ID NO: 1242221 - RNA, 15 nt, Human
caauaaaacauuaau

SEQ ID NO: 1242222 - RNA, 16 nt, Human
caaguuucauccagaa

SEQ ID NO: 1242223 - RNA, 20 nt, Human
caaguuucauccagaacuac

SEQ ID NO: 1242224 - RNA, 13 nt, Human
caaguuucaucca

SEQ ID NO: 1242225 - RNA, 22 nt, Human
caaguuuaucaguaaauaacug

SEQ ID NO: 1242226 - RNA, 20 nt, Human
caaguuuaucaguaaauaac

SEQ ID NO: 1242227 - RNA, 21 nt, Human
caaggccugguguuucuugau

SEQ ID NO: 1242228 - RNA, 22 nt, Human
caaggccugguguuucuugaua

SEQ ID NO: 1242229 - RNA, 22 nt, Human
caaggccuuauuggaaagcagu

SEQ ID NO: 1242230 - RNA, 15 nt, Human
caaggcucugagcaa

SEQ ID NO: 1242231 - RNA, 13 nt, Human
caaggcggugcuu

SEQ ID NO: 1242232 - RNA, 16 nt, Human
caaggcggugcuugau

SEQ ID NO: 1242233 - RNA, 21 nt, Human
caagucagucauucagauaug

SEQ ID NO: 1242234 - RNA, 23 nt, Human
caagucaguccaggaugcuaaca

SEQ ID NO: 1242235 - RNA, 20 nt, Human
caagucauagguuaauauuu

SEQ ID NO: 1242236 - RNA, 19 nt, Human
caagucaggcccuuauuuu

SEQ ID NO: 1242237 - RNA, 22 nt, Human
caagauuguuccugcuuuuccc

SEQ ID NO: 1242238 - RNA, 14 nt, Human
caaggcacucuaga

SEQ ID NO: 1242239 - RNA, 15 nt, Human
caaggcacucuagau

SEQ ID NO: 1242240 - RNA, 13 nt, Human
caagauucuagau

SEQ ID NO: 1242241 - RNA, 14 nt, Human
caagauucuagaug

SEQ ID NO: 1242242 - RNA, 17 nt, Human
caagauucuagaugauu

SEQ ID NO: 1242243 - RNA, 18 nt, Human
caagauucuagaugauua

SEQ ID NO: 1242244 - RNA, 16 nt, Human
caagauugagcucucu

SEQ ID NO: 1242245 - RNA, 17 nt, Human
caagauugagcucucug

SEQ ID NO: 1242246 - RNA, 19 nt, Human
caagauugagcucucugcc

SEQ ID NO: 1242247 - RNA, 20 nt, Human
caagauugagcucucugccc

SEQ ID NO: 1242248 - RNA, 23 nt, Human
caagauugagcucucugcccuug

SEQ ID NO: 1242249 - RNA, 20 nt, Human
caagauugguguuuuuuucu

SEQ ID NO: 1242250 - RNA, 21 nt, Human
caagauugguguuuuuuucua

SEQ ID NO: 1242251 - RNA, 22 nt, Human
caagauugguguuuuuuucuau

SEQ ID NO: 1242252 - RNA, 15 nt, Human
caagauuguguccca

SEQ ID NO: 1242253 - RNA, 20 nt, Human
caagauugugucccauuccc

SEQ ID NO: 1242254 - RNA, 16 nt, Human
caaggcacucuagauu

SEQ ID NO: 1242255 - RNA, 17 nt, Human
caaggcacucuagauuc

SEQ ID NO: 1242256 - RNA, 19 nt, Human
caaggcacucuagauucca

SEQ ID NO: 1242257 - RNA, 13 nt, Human
caaggcccgagca

SEQ ID NO: 1242258 - RNA, 14 nt, Human
caaggcccgagcag

SEQ ID NO: 1242259 - RNA, 16 nt, Human
caaggcccgagcagcu

SEQ ID NO: 1242260 - RNA, 17 nt, Human
caaggcccgagcagcug

SEQ ID NO: 1242261 - RNA, 18 nt, Human
caaggcccgagcagcuga

SEQ ID NO: 1242262 - RNA, 19 nt, Human
caaggcccgagcagcugag

SEQ ID NO: 1242263 - RNA, 21 nt, Human
caaggcccgagcagcugagca

SEQ ID NO: 1242264 - RNA, 20 nt, Human
caaggcccgagcagcugagc

SEQ ID NO: 1242265 - RNA, 20 nt, Human
caauaaaaucuugaaaaugc

SEQ ID NO: 1242266 - RNA, 20 nt, Human
caauaaaauuauagcucuaa

SEQ ID NO: 1242267 - RNA, 13 nt, Human
caauaaaauuaua

SEQ ID NO: 1242268 - RNA, 23 nt, Human
caauaaaauuauagcucuaaugu

SEQ ID NO: 1242269 - RNA, 23 nt, Human
caauugagaaaaauauauacuaa

SEQ ID NO: 1242270 - RNA, 14 nt, Human
caauugagaaaaau

SEQ ID NO: 1242271 - RNA, 21 nt, Human
caauugacaacaguuacauaa

SEQ ID NO: 1242272 - RNA, 22 nt, Human
caauugacaacaguuacauaau

SEQ ID NO: 1242273 - RNA, 19 nt, Human
caauugacugucacuguuc

SEQ ID NO: 1242274 - RNA, 21 nt, Human
caauugcacgcggagugaguu

SEQ ID NO: 1242275 - RNA, 14 nt, Human
caauugcaucuccc

SEQ ID NO: 1242276 - RNA, 15 nt, Human
caauugcaucuccca

SEQ ID NO: 1242277 - RNA, 17 nt, Human
caauugcaucucccaga

SEQ ID NO: 1242278 - RNA, 23 nt, Human
caauugcacgcggagugaguuuu

SEQ ID NO: 1242279 - RNA, 17 nt, Human
caauugcugcuacuuau

SEQ ID NO: 1242280 - RNA, 13 nt, Human
caauuucggauuu

SEQ ID NO: 1242281 - RNA, 17 nt, Human
caauuucggauuuuuuc

SEQ ID NO: 1242282 - RNA, 21 nt, Human
caauuucggauuuuuuccaaa

SEQ ID NO: 1242283 - RNA, 22 nt, Human
caauuucggauuuuuuccaaaa

SEQ ID NO: 1242284 - RNA, 17 nt, Human
caauuucuaauuuuuaa

SEQ ID NO: 1242285 - RNA, 15 nt, Human
caauugaaguaaacu

SEQ ID NO: 1242286 - RNA, 17 nt, Human
caauugaaguaaacuuu

SEQ ID NO: 1242287 - RNA, 21 nt, Human
caauugaaguaaacuuuuugu

SEQ ID NO: 1242288 - RNA, 18 nt, Human
caauugaaguaaacuuuu

SEQ ID NO: 1242289 - RNA, 14 nt, Human
caauugacaacagu

SEQ ID NO: 1242290 - RNA, 20 nt, Human
caauuucuacaaaauccuga

SEQ ID NO: 1242291 - RNA, 16 nt, Human
caauuucuacuuugaa

SEQ ID NO: 1242292 - RNA, 20 nt, Human
caauuucuacuuugaaguca

SEQ ID NO: 1242293 - RNA, 21 nt, Human
caauuucuacuuugaagucau

SEQ ID NO: 1242294 - RNA, 19 nt, Human
caauuucuaauuuuuaaga

SEQ ID NO: 1242295 - RNA, 13 nt, Human
caauuucugaaca

SEQ ID NO: 1242296 - RNA, 15 nt, Human
caauuucuguguugc

SEQ ID NO: 1242297 - RNA, 22 nt, Human
caauuucuguguugccaagcuc

SEQ ID NO: 1242298 - RNA, 20 nt, Human
caauuucuguguugccaagc

SEQ ID NO: 1242299 - RNA, 18 nt, Human
cacaagauggaauuuauc

SEQ ID NO: 1242300 - RNA, 22 nt, Human
caaucccuuaauauccuaaaca

SEQ ID NO: 1242301 - RNA, 20 nt, Human
caaucccucaccuucugagu

SEQ ID NO: 1242302 - RNA, 23 nt, Human
caaucccaccaacccucagagcc

SEQ ID NO: 1242303 - RNA, 16 nt, Human
caaucccaccaacccu

SEQ ID NO: 1242304 - RNA, 17 nt, Human
caaucccaccaacccuc

SEQ ID NO: 1242305 - RNA, 22 nt, Human
caaucccaccaacccucagagc

SEQ ID NO: 1242306 - RNA, 17 nt, Human
caaucauuuuaauuauu

SEQ ID NO: 1242307 - RNA, 20 nt, Human
caauccaguggacuucgcag

SEQ ID NO: 1242308 - RNA, 22 nt, Human
cacaagauggaauuuaucaaac

SEQ ID NO: 1242309 - RNA, 13 nt, Human
caccagggaaggg

SEQ ID NO: 1242310 - RNA, 20 nt, Human
caccaggcuugccugcaggc

SEQ ID NO: 1242311 - RNA, 18 nt, Human
caccagggaaggggacaa

SEQ ID NO: 1242312 - RNA, 21 nt, Human
caccagggaaggggacaagga

SEQ ID NO: 1242313 - RNA, 16 nt, Human
caccagggcaucucug

SEQ ID NO: 1242314 - RNA, 17 nt, Human
caccagggcaucucugg

SEQ ID NO: 1242315 - RNA, 18 nt, Human
caccagggcaucucuggg

SEQ ID NO: 1242316 - RNA, 19 nt, Human
caccagggcaucucugggc

SEQ ID NO: 1242317 - RNA, 20 nt, Human
caccagggcaucucugggcu

SEQ ID NO: 1242318 - RNA, 23 nt, Human
caccagggcaucucugggcugga

SEQ ID NO: 1242319 - RNA, 21 nt, Human
caccagggcaucucugggcug

SEQ ID NO: 1242320 - RNA, 22 nt, Human
caccagggcaucucugggcugg

SEQ ID NO: 1242321 - RNA, 19 nt, Human
cacccagccccagccaggg

SEQ ID NO: 1242322 - RNA, 15 nt, Human
caccccaauccuccc

SEQ ID NO: 1242323 - RNA, 21 nt, Human
caccccacccacuucugcacu

SEQ ID NO: 1242324 - RNA, 19 nt, Human
caccccaauccucccagaa

SEQ ID NO: 1242325 - RNA, 15 nt, Human
cacccauuuuuccuu

SEQ ID NO: 1242326 - RNA, 18 nt, Human
cacccauuuuuccuuuug

SEQ ID NO: 1242327 - RNA, 18 nt, Human
caccccaaagcuuuccug

SEQ ID NO: 1242328 - RNA, 19 nt, Human
caccccaaagcuuuccugc

SEQ ID NO: 1242329 - RNA, 15 nt, Human
caccccaaccugcuc

SEQ ID NO: 1242330 - RNA, 16 nt, Human
caccccaaccugcucu

SEQ ID NO: 1242331 - RNA, 20 nt, Human
caccccaaccugcucuccuc

SEQ ID NO: 1242332 - RNA, 21 nt, Human
caccccaaccugcucuccucu

SEQ ID NO: 1242333 - RNA, 22 nt, Human
caccccaaccugcucuccucuu

SEQ ID NO: 1242334 - RNA, 13 nt, Human
caccaacccucag

SEQ ID NO: 1242335 - RNA, 14 nt, Human
caccaacccucagg

SEQ ID NO: 1242336 - RNA, 15 nt, Human
caccaacccucaggg

SEQ ID NO: 1242337 - RNA, 16 nt, Human
caccaacccucagggc

SEQ ID NO: 1242338 - RNA, 13 nt, Human
caccaaaugugcu

SEQ ID NO: 1242339 - RNA, 14 nt, Human
caccaaaguucuaa

SEQ ID NO: 1242340 - RNA, 16 nt, Human
caccaaaguucuaaua

SEQ ID NO: 1242341 - RNA, 17 nt, Human
caccaaaguucuaauaa

SEQ ID NO: 1242342 - RNA, 22 nt, Human
caccaaaguucuaauaauuucu

SEQ ID NO: 1242343 - RNA, 14 nt, Human
caccaaaucaaaau

SEQ ID NO: 1242344 - RNA, 16 nt, Human
caccaaaucaaaaucu

SEQ ID NO: 1242345 - RNA, 18 nt, Human
caccaaaucaaaaucucu

SEQ ID NO: 1242346 - RNA, 21 nt, Human
caccaaaucaaaaucucucca

SEQ ID NO: 1242347 - RNA, 17 nt, Human
caccaaagagaaugccc

SEQ ID NO: 1242348 - RNA, 13 nt, Human
caccaaagagaau

SEQ ID NO: 1242349 - RNA, 12 nt, Human
caccaaaguucu

SEQ ID NO: 1242350 - RNA, 13 nt, Human
caccaaaguucua

SEQ ID NO: 1242351 - RNA, 15 nt, Human
caccaaaagaaguaa

SEQ ID NO: 1242352 - RNA, 13 nt, Human
cacaucucaacag

SEQ ID NO: 1242353 - RNA, 14 nt, Human
cacaucucaacagg

SEQ ID NO: 1242354 - RNA, 20 nt, Human
cacaucucaacaggccucag

SEQ ID NO: 1242355 - RNA, 21 nt, Human
cacaucucaacaggccucagg

SEQ ID NO: 1242356 - RNA, 23 nt, Human
cacaucucaacaggccucagggc

SEQ ID NO: 1242357 - RNA, 12 nt, Human
cacaucuguguc

SEQ ID NO: 1242358 - RNA, 16 nt, Human
cacaucugugucuugu

SEQ ID NO: 1242359 - RNA, 17 nt, Human
cacaucugugucuuguu

SEQ ID NO: 1242360 - RNA, 18 nt, Human
cacaucugugucuuguuu

SEQ ID NO: 1242361 - RNA, 23 nt, Human
cacaucugugucuuguuuggaau

SEQ ID NO: 1242362 - RNA, 13 nt, Human
cacacauugcugu

SEQ ID NO: 1242363 - RNA, 14 nt, Human
cacagaaaauaagg

SEQ ID NO: 1242364 - RNA, 17 nt, Human
cacagaaaauaaggcac

SEQ ID NO: 1242365 - RNA, 17 nt, Human
cacacuuugguaccaga

SEQ ID NO: 1242366 - RNA, 12 nt, Human
cacacuuuggua

SEQ ID NO: 1242367 - RNA, 16 nt, Human
cacagaaaccaauuuu

SEQ ID NO: 1242368 - RNA, 12 nt, Human
cacagaaaccuu

SEQ ID NO: 1242369 - RNA, 23 nt, Human
cacagaaaauaaggcacccaucu

SEQ ID NO: 1242370 - RNA, 13 nt, Human
cacagaacccuug

SEQ ID NO: 1242371 - RNA, 10 nt, Human
cacagcuccu

SEQ ID NO: 1242372 - RNA, 15 nt, Human
cacagcuccucccac

SEQ ID NO: 1242373 - RNA, 20 nt, Human
cacagcucuccggucucucu

SEQ ID NO: 1242374 - RNA, 21 nt, Human
cacagcucuccggucucucuc

SEQ ID NO: 1242375 - RNA, 17 nt, Human
cacaggcuucugagcag

SEQ ID NO: 1242376 - RNA, 18 nt, Human
cacaggccuguguagcug

SEQ ID NO: 1242377 - RNA, 21 nt, Human
cacaggccuguguagcuguga

SEQ ID NO: 1242378 - RNA, 22 nt, Human
cacaggccuguguagcugugac

SEQ ID NO: 1242379 - RNA, 23 nt, Human
cacaggccuguguagcugugacc

SEQ ID NO: 1242380 - RNA, 24 nt, Human
cacaggccuguguagcugugaccu

SEQ ID NO: 1242381 - RNA, 13 nt, Human
cacaggcucaggc

SEQ ID NO: 1242382 - RNA, 14 nt, Human
cacaggcucaggca

SEQ ID NO: 1242383 - RNA, 15 nt, Human
cacaggcucaggcag

SEQ ID NO: 1242384 - RNA, 19 nt, Human
cacaggcucaggcaggggc

SEQ ID NO: 1242385 - RNA, 16 nt, Human
cacaggcucaggcagg

SEQ ID NO: 1242386 - RNA, 18 nt, Human
cacaggcuucugagcagc

SEQ ID NO: 1242387 - RNA, 17 nt, Human
auuaugggucacaggaa

SEQ ID NO: 1242388 - RNA, 22 nt, Human
auuauggagucauuuuuacaau

SEQ ID NO: 1242389 - RNA, 15 nt, Human
auuaugggucacagg

SEQ ID NO: 1242390 - RNA, 16 nt, Human
auuaugggucacagga

SEQ ID NO: 1242391 - RNA, 19 nt, Human
auuaugccuuuuuugauca

SEQ ID NO: 1242392 - RNA, 18 nt, Human
auuauggaaaaaaaauau

SEQ ID NO: 1242393 - RNA, 16 nt, Human
auucaaaugucuauaa

SEQ ID NO: 1242394 - RNA, 13 nt, Human
auucaaauuuuau

SEQ ID NO: 1242395 - RNA, 12 nt, Human
auucaacaaaca

SEQ ID NO: 1242396 - RNA, 13 nt, Human
auucaacaaacau

SEQ ID NO: 1242397 - RNA, 22 nt, Human
auucaaucuguaaacuguguau

SEQ ID NO: 1242398 - RNA, 17 nt, Human
auucaaucuguaaacug

SEQ ID NO: 1242399 - RNA, 18 nt, Human
auucaaucuguaaacugu

SEQ ID NO: 1242400 - RNA, 14 nt, Human
auucaaucuguaaa

SEQ ID NO: 1242401 - RNA, 15 nt, Human
auucaaucuguaaac

SEQ ID NO: 1242402 - RNA, 16 nt, Human
auucaaucuguaaacu

SEQ ID NO: 1242403 - RNA, 20 nt, Human
auuaguacuccccuccuuga

SEQ ID NO: 1242404 - RNA, 18 nt, Human
auuaguaagcuagcaaau

SEQ ID NO: 1242405 - RNA, 16 nt, Human
auuaguaacauguguu

SEQ ID NO: 1242406 - RNA, 17 nt, Human
auuaguaacauguguua

SEQ ID NO: 1242407 - RNA, 22 nt, Human
auuaggcuguaacuacuuuaua

SEQ ID NO: 1242408 - RNA, 23 nt, Human
auuaggcuguaacuacuuuauaa

SEQ ID NO: 1242409 - RNA, 13 nt, Human
auuaggccagcaa

SEQ ID NO: 1242410 - RNA, 13 nt, Human
auuaguaacaugu

SEQ ID NO: 1242411 - RNA, 19 nt, Human
auuaugaauuacauuugua

SEQ ID NO: 1242412 - RNA, 20 nt, Human
auuaugaauuacauuuguau

SEQ ID NO: 1242413 - RNA, 22 nt, Human
auuaugaauuacauuuguauaa

SEQ ID NO: 1242414 - RNA, 19 nt, Human
auuaguacacagcaccaga

SEQ ID NO: 1242415 - RNA, 16 nt, Human
auuaugcauuauauca

SEQ ID NO: 1242416 - RNA, 14 nt, Human
auuaggauuucaug

SEQ ID NO: 1242417 - RNA, 16 nt, Human
auuaggauuucaugau

SEQ ID NO: 1242418 - RNA, 14 nt, Human
auuaggcagacucu

SEQ ID NO: 1242419 - RNA, 21 nt, Human
auuaggcagacucuuuaugcu

SEQ ID NO: 1242420 - RNA, 14 nt, Human
auuaggcuguaacu

SEQ ID NO: 1242421 - RNA, 15 nt, Human
auuaggcuguaacua

SEQ ID NO: 1242422 - RNA, 17 nt, Human
auuaggcuguaacuacu

SEQ ID NO: 1242423 - RNA, 21 nt, Human
auuaggcuguaacuacuuuau

SEQ ID NO: 1242424 - RNA, 15 nt, Human
auuaaaugacacuca

SEQ ID NO: 1242425 - RNA, 13 nt, Human
auuaaauuacaga

SEQ ID NO: 1242426 - RNA, 17 nt, Human
auucuugccaaauauaa

SEQ ID NO: 1242427 - RNA, 21 nt, Human
auucucugugucuaagauucu

SEQ ID NO: 1242428 - RNA, 19 nt, Human
auucuugauguaaaaucuu

SEQ ID NO: 1242429 - RNA, 20 nt, Human
auucuugauguaaaaucuug

SEQ ID NO: 1242430 - RNA, 17 nt, Human
auuccuucagcacuuua

SEQ ID NO: 1242431 - RNA, 15 nt, Human
auuccuucagauuug

SEQ ID NO: 1242432 - RNA, 16 nt, Human
auuccuucccagaggg

SEQ ID NO: 1242433 - RNA, 15 nt, Human
auuccuucagcacuu

SEQ ID NO: 1242434 - RNA, 12 nt, Human
auuccuucccau

SEQ ID NO: 1242435 - RNA, 17 nt, Human
auuccugggaaauauuc

SEQ ID NO: 1242436 - RNA, 22 nt, Human
auuccugggaaauauucccuag

SEQ ID NO: 1242437 - RNA, 22 nt, Human
auuccuguggauguaaagugau

SEQ ID NO: 1242438 - RNA, 19 nt, Human
auuccuuagacucuuuucc

SEQ ID NO: 1242439 - RNA, 22 nt, Human
auuccuuagacucuuuuccuuc

SEQ ID NO: 1242440 - RNA, 11 nt, Human
auuccuccagg

SEQ ID NO: 1242441 - RNA, 23 nt, Human
auuccucaugaauguaaauuugu

SEQ ID NO: 1242442 - RNA, 16 nt, Human
auuccucaugaaugua

SEQ ID NO: 1242443 - RNA, 17 nt, Human
auuccucaugaauguaa

SEQ ID NO: 1242444 - RNA, 18 nt, Human
auuccucaugaauguaaa

SEQ ID NO: 1242445 - RNA, 19 nt, Human
auuccucaugaauguaaau

SEQ ID NO: 1242446 - RNA, 13 nt, Human
auuccuccugcuc

SEQ ID NO: 1242447 - RNA, 14 nt, Human
auuccuccugcuca

SEQ ID NO: 1242448 - RNA, 15 nt, Human
auuccuccugcucau

SEQ ID NO: 1242449 - RNA, 16 nt, Human
auuccuccugcucaua

SEQ ID NO: 1242450 - RNA, 15 nt, Human
auuccugcauuugug

SEQ ID NO: 1242451 - RNA, 20 nt, Human
auuccuccugcucauauugu

SEQ ID NO: 1242452 - RNA, 22 nt, Human
auuccucaugaauguaaauuug

SEQ ID NO: 1242453 - RNA, 18 nt, Human
auuccugcauuugugaaa

SEQ ID NO: 1242454 - RNA, 22 nt, Human
auuccuauugugcaauguaaau

SEQ ID NO: 1242455 - RNA, 17 nt, Human
auuccucaacguauugu

SEQ ID NO: 1242456 - RNA, 20 nt, Human
auuccuuuaacaacauguuu

SEQ ID NO: 1242457 - RNA, 17 nt, Human
auucucugagcugugca

SEQ ID NO: 1242458 - RNA, 18 nt, Human
auucucugagcugugcag

SEQ ID NO: 1242459 - RNA, 17 nt, Human
auucucuggcuguaagg

SEQ ID NO: 1242460 - RNA, 19 nt, Human
auucucuggcuguaaggcu

SEQ ID NO: 1242461 - RNA, 20 nt, Human
auucucuggcuguaaggcuc

SEQ ID NO: 1242462 - RNA, 21 nt, Human
auucucuggcuguaaggcucu

SEQ ID NO: 1242463 - RNA, 22 nt, Human
auucucuggcuguaaggcucua

SEQ ID NO: 1242464 - RNA, 12 nt, Human
auucucugucuc

SEQ ID NO: 1242465 - RNA, 13 nt, Human
auucucugucuca

SEQ ID NO: 1242466 - RNA, 14 nt, Human
auucucugucucau

SEQ ID NO: 1242467 - RNA, 16 nt, Human
auucucugucucaucc

SEQ ID NO: 1242468 - RNA, 17 nt, Human
auucucugucucaucca

SEQ ID NO: 1242469 - RNA, 18 nt, Human
auucucugucucauccau

SEQ ID NO: 1242470 - RNA, 19 nt, Human
auucucugucucauccauc

SEQ ID NO: 1242471 - RNA, 17 nt, Human
auucucugugucuaaga

SEQ ID NO: 1242472 - RNA, 18 nt, Human
auucucugugucuaagau

SEQ ID NO: 1242473 - RNA, 20 nt, Human
auucucugugucuaagauuc

SEQ ID NO: 1242474 - RNA, 20 nt, Human
auuguguucccauuucagcu

SEQ ID NO: 1242475 - RNA, 18 nt, Human
auuguaagcaugcacaaa

SEQ ID NO: 1242476 - RNA, 13 nt, Human
auuguaacuguuc

SEQ ID NO: 1242477 - RNA, 15 nt, Human
auuguaacuguucuu

SEQ ID NO: 1242478 - RNA, 19 nt, Human
auuguaacuguucuugaau

SEQ ID NO: 1242479 - RNA, 10 nt, Human
auuguaacuc

SEQ ID NO: 1242480 - RNA, 22 nt, Human
auuguguuuacauuuuauggug

SEQ ID NO: 1242481 - RNA, 14 nt, Human
auuguuaaaggcua

SEQ ID NO: 1242482 - RNA, 17 nt, Human
auuguuaauuuuuccua

SEQ ID NO: 1242483 - RNA, 20 nt, Human
auuguuacauuauguggaaa

SEQ ID NO: 1242484 - RNA, 15 nt, Human
auuguuacagaagcu

SEQ ID NO: 1242485 - RNA, 13 nt, Human
auuguuguucugu

SEQ ID NO: 1242486 - RNA, 14 nt, Human
auuguuguucuguu

SEQ ID NO: 1242487 - RNA, 18 nt, Human
auuguuguucuguuaacu

SEQ ID NO: 1242488 - RNA, 21 nt, Human
auuguuguucuguuaacugaa

SEQ ID NO: 1242489 - RNA, 19 nt, Human
auuguuguucuguuaacug

SEQ ID NO: 1242490 - RNA, 23 nt, Human
auuguguuuacauuuuauggugc

SEQ ID NO: 1242491 - RNA, 19 nt, Human
auuguguuuacauuuuaug

SEQ ID NO: 1242492 - RNA, 18 nt, Human
auuguguuuacauuuuau

SEQ ID NO: 1242493 - RNA, 15 nt, Human
auuguguuuacauuu

SEQ ID NO: 1242494 - RNA, 14 nt, Human
auuguguuuacauu

SEQ ID NO: 1242495 - RNA, 12 nt, Human
auuguguuuaca

SEQ ID NO: 1242496 - RNA, 20 nt, Human
auuguguuaccuguagauuc

SEQ ID NO: 1242497 - RNA, 15 nt, Human
auuguguucccauuu

SEQ ID NO: 1242498 - RNA, 13 nt, Human
auuguguuugugu

SEQ ID NO: 1242499 - RNA, 14 nt, Human
auugcuguccugga

SEQ ID NO: 1242500 - RNA, 21 nt, Human
auugcuuacaagccuaagaau

SEQ ID NO: 1242501 - RNA, 18 nt, Human
auuguaacccugucugga

SEQ ID NO: 1242502 - RNA, 22 nt, Human
auuguuuaaaaaucuuaaugua

SEQ ID NO: 1242503 - RNA, 11 nt, Human
auuucuauuaa

SEQ ID NO: 1242504 - RNA, 15 nt, Human
auuucuauuucuccu

SEQ ID NO: 1242505 - RNA, 18 nt, Human
auuucuauuucuccucca

SEQ ID NO: 1242506 - RNA, 20 nt, Human
auuucuauuucuccuccaug

SEQ ID NO: 1242507 - RNA, 18 nt, Human
auuucugcauauguugaa

SEQ ID NO: 1242508 - RNA, 22 nt, Human
auuucugcauauguugaauacu

SEQ ID NO: 1242509 - RNA, 23 nt, Human
auuucugcauauguugaauacuu

SEQ ID NO: 1242510 - RNA, 13 nt, Human
auuucugccuccc

SEQ ID NO: 1242511 - RNA, 16 nt, Human
auuucugccuccccuu

SEQ ID NO: 1242512 - RNA, 19 nt, Human
auuucauaguucagaauuu

SEQ ID NO: 1242513 - RNA, 23 nt, Human
auuucuauagccaaaaauagcua

SEQ ID NO: 1242514 - RNA, 14 nt, Human
auuucuaugaaaua

SEQ ID NO: 1242515 - RNA, 21 nt, Human
auuucagaaguuaguuuguau

SEQ ID NO: 1242516 - RNA, 12 nt, Human
auuucagacucc

SEQ ID NO: 1242517 - RNA, 16 nt, Human
auuucaguucuaggaa

SEQ ID NO: 1242518 - RNA, 17 nt, Human
auuucaguucuaggaaa

SEQ ID NO: 1242519 - RNA, 18 nt, Human
auuucaguucuaggaaaa

SEQ ID NO: 1242520 - RNA, 19 nt, Human
auuucaguucuaggaaaau

SEQ ID NO: 1242521 - RNA, 23 nt, Human
auuucauacuguaacauucagga

SEQ ID NO: 1242522 - RNA, 13 nt, Human
auuucauaguuca

SEQ ID NO: 1242523 - RNA, 14 nt, Human
auuucauaguucag

SEQ ID NO: 1242524 - RNA, 15 nt, Human
auuucauaguucaga

SEQ ID NO: 1242525 - RNA, 16 nt, Human
auuucauaguucagaa

SEQ ID NO: 1242526 - RNA, 17 nt, Human
auuucauaguucagaau

SEQ ID NO: 1242527 - RNA, 11 nt, Human
auuucuguguu

SEQ ID NO: 1242528 - RNA, 22 nt, Human
auuuaugcauauuauuuuaugu

SEQ ID NO: 1242529 - RNA, 16 nt, Human
auuuaugcauauuauu

SEQ ID NO: 1242530 - RNA, 12 nt, Human
auuucacuggag

SEQ ID NO: 1242531 - RNA, 14 nt, Human
auuucacuggagca

SEQ ID NO: 1242532 - RNA, 16 nt, Human
auuucacuggagcaca

SEQ ID NO: 1242533 - RNA, 17 nt, Human
auuucacuggagcacaa

SEQ ID NO: 1242534 - RNA, 19 nt, Human
auuucacuggagcacaaua

SEQ ID NO: 1242535 - RNA, 19 nt, Human
auuucacuguagcucuaaa

SEQ ID NO: 1242536 - RNA, 24 nt, Human
auuucacuguagcucuaaaaucug

SEQ ID NO: 1242537 - RNA, 13 nt, Human
auuucacugucuu

SEQ ID NO: 1242538 - RNA, 22 nt, Human
auuucacugucuuuaauucugu

SEQ ID NO: 1242539 - RNA, 23 nt, Human
auuucacugucuuuaauucugua

SEQ ID NO: 1242540 - RNA, 16 nt, Human
auuucacuuauuuaga

SEQ ID NO: 1242541 - RNA, 12 nt, Human
auuucacuuguc

SEQ ID NO: 1242542 - RNA, 12 nt, Human
auuucagaaguu

SEQ ID NO: 1242543 - RNA, 19 nt, Human
auuucagaaguuaguuugu

SEQ ID NO: 1242544 - RNA, 13 nt, Human
auuuauauugaua

SEQ ID NO: 1242545 - RNA, 20 nt, Human
auuuauauugauaagaucuu

SEQ ID NO: 1242546 - RNA, 21 nt, Human
auuuauauugauaagaucuuu

SEQ ID NO: 1242547 - RNA, 22 nt, Human
auuuauauugauaagaucuuuu

SEQ ID NO: 1242548 - RNA, 15 nt, Human
auuuauauuguaaau

SEQ ID NO: 1242549 - RNA, 15 nt, Human
auuuauaucacaugu

SEQ ID NO: 1242550 - RNA, 15 nt, Human
auuuauauguacaug

SEQ ID NO: 1242551 - RNA, 16 nt, Human
auuuauauguacauga

SEQ ID NO: 1242552 - RNA, 17 nt, Human
auuuauauguacaugag

SEQ ID NO: 1242553 - RNA, 19 nt, Human
auuuaucugagucaacucc

SEQ ID NO: 1242554 - RNA, 18 nt, Human
auuuauauuguaaauauu

SEQ ID NO: 1242555 - RNA, 22 nt, Human
auuuaucuuuacuuuuaaacag

SEQ ID NO: 1242556 - RNA, 21 nt, Human
auuuaugaaaguauuaaaaug

SEQ ID NO: 1242557 - RNA, 23 nt, Human
auuuaugaauugaauuaucuugg

SEQ ID NO: 1242558 - RNA, 17 nt, Human
auuuaugagcucuucau

SEQ ID NO: 1242559 - RNA, 15 nt, Human
auuuaauaaucugua

SEQ ID NO: 1242560 - RNA, 17 nt, Human
caacucauauuuucaug

SEQ ID NO: 1242561 - RNA, 20 nt, Human
caacucacuccuuuuaaaga

SEQ ID NO: 1242562 - RNA, 21 nt, Human
caacucacuccuuuuaaagaa

SEQ ID NO: 1242563 - RNA, 23 nt, Human
caacucacuccuuuuaaagaaaa

SEQ ID NO: 1242564 - RNA, 15 nt, Human
caacuaggaucagaa

SEQ ID NO: 1242565 - RNA, 15 nt, Human
caacucacuccuuuu

SEQ ID NO: 1242566 - RNA, 16 nt, Human
caacucacuccuuuua

SEQ ID NO: 1242567 - RNA, 17 nt, Human
caacucacuccuuuuaa

SEQ ID NO: 1242568 - RNA, 18 nt, Human
caacucacuccuuuuaaa

SEQ ID NO: 1242569 - RNA, 21 nt, Human
caacuaccugagcuaaauaaa

SEQ ID NO: 1242570 - RNA, 17 nt, Human
caacuacuguguuaugc

SEQ ID NO: 1242571 - RNA, 18 nt, Human
caacuagccccuggggug

SEQ ID NO: 1242572 - RNA, 18 nt, Human
caacuaauuuuuguauuu

SEQ ID NO: 1242573 - RNA, 19 nt, Human
caacuacagucuaaagcug

SEQ ID NO: 1242574 - RNA, 15 nt, Human
caacuacagucuaaa

SEQ ID NO: 1242575 - RNA, 17 nt, Human
caacuacccccagcugu

SEQ ID NO: 1242576 - RNA, 19 nt, Human
caacuacccccagcugugc

SEQ ID NO: 1242577 - RNA, 20 nt, Human
caacuacccccagcugugcu

SEQ ID NO: 1242578 - RNA, 11 nt, Human
caacuaccuga

SEQ ID NO: 1242579 - RNA, 15 nt, Human
caacuaccugagcua

SEQ ID NO: 1242580 - RNA, 13 nt, Human
caacuacuaauag

SEQ ID NO: 1242581 - RNA, 15 nt, Human
caacuacuaauagaa

SEQ ID NO: 1242582 - RNA, 21 nt, Human
caacuacuaauagaauaaagg

SEQ ID NO: 1242583 - RNA, 19 nt, Human
caacuacuaccuguaauga

SEQ ID NO: 1242584 - RNA, 14 nt, Human
caaccauccaauua

SEQ ID NO: 1242585 - RNA, 13 nt, Human
caaccaucgcuuu

SEQ ID NO: 1242586 - RNA, 18 nt, Human
caaccaugagaccacugu

SEQ ID NO: 1242587 - RNA, 23 nt, Human
caaccaugagaccacuguuauca

SEQ ID NO: 1242588 - RNA, 21 nt, Human
caaccagaccauugucucaga

SEQ ID NO: 1242589 - RNA, 19 nt, Human
caaccagauugucagcucc

SEQ ID NO: 1242590 - RNA, 20 nt, Human
caaccagauugucagcuccu

SEQ ID NO: 1242591 - RNA, 21 nt, Human
caaccccuccccuccaucccu

SEQ ID NO: 1242592 - RNA, 22 nt, Human
caaccccuccccuccaucccug

SEQ ID NO: 1242593 - RNA, 22 nt, Human
caagauggggagugagaggcug

SEQ ID NO: 1242594 - RNA, 15 nt, Human
caagauggcccaucc

SEQ ID NO: 1242595 - RNA, 16 nt, Human
caagaugggcaucuuu

SEQ ID NO: 1242596 - RNA, 17 nt, Human
caagaugggcaucuuuu

SEQ ID NO: 1242597 - RNA, 18 nt, Human
caagaugggcaucuuuug

SEQ ID NO: 1242598 - RNA, 19 nt, Human
caagauggaauuuaucaaa

SEQ ID NO: 1242599 - RNA, 20 nt, Human
caagaugggcaucuuuugua

SEQ ID NO: 1242600 - RNA, 21 nt, Human
caagaugggcaucuuuuguau

SEQ ID NO: 1242601 - RNA, 20 nt, Human
caagaauuucuaggacugaa

SEQ ID NO: 1242602 - RNA, 19 nt, Human
caagacccaaaaggcagaa

SEQ ID NO: 1242603 - RNA, 14 nt, Human
caacucgcuuuagg

SEQ ID NO: 1242604 - RNA, 19 nt, Human
caacucgcuuuaggucagc

SEQ ID NO: 1242605 - RNA, 17 nt, Human
caacuccuuccagcuag

SEQ ID NO: 1242606 - RNA, 16 nt, Human
caacucguauagcaug

SEQ ID NO: 1242607 - RNA, 22 nt, Human
caacucacuccuuuuaaagaaa

SEQ ID NO: 1242608 - RNA, 16 nt, Human
caacuccuaguucuag

SEQ ID NO: 1242609 - RNA, 19 nt, Human
caacuccuaguucuagaaa

SEQ ID NO: 1242610 - RNA, 20 nt, Human
caacuccuaguucuagaaaa

SEQ ID NO: 1242611 - RNA, 22 nt, Human
caacuccuaguucuagaaaaac

SEQ ID NO: 1242612 - RNA, 23 nt, Human
caacuccuaguucuagaaaaaca

SEQ ID NO: 1242613 - RNA, 14 nt, Human
caagaauggaucac

SEQ ID NO: 1242614 - RNA, 21 nt, Human
caagaauggaucacaagaugg

SEQ ID NO: 1242615 - RNA, 22 nt, Human
caagaauggaucacaagaugga

SEQ ID NO: 1242616 - RNA, 21 nt, Human
caagaauuggaagcugcccug

SEQ ID NO: 1242617 - RNA, 19 nt, Human
caacucguauagcaugcau

SEQ ID NO: 1242618 - RNA, 18 nt, Human
caacucuccccugaccug

SEQ ID NO: 1242619 - RNA, 24 nt, Human
caacucuccccugaccugugagcc

SEQ ID NO: 1242620 - RNA, 13 nt, Human
caagaauggauca

SEQ ID NO: 1242621 - RNA, 18 nt, Human
caacacacacaugcuucc

SEQ ID NO: 1242622 - RNA, 14 nt, Human
caacacagaggcag

SEQ ID NO: 1242623 - RNA, 15 nt, Human
caacaccaagcacag

SEQ ID NO: 1242624 - RNA, 13 nt, Human
caacaccaagcac

SEQ ID NO: 1242625 - RNA, 23 nt, Human
caacacacacaugcuucccuuuc

SEQ ID NO: 1242626 - RNA, 15 nt, Human
caacacacacaugcu

SEQ ID NO: 1242627 - RNA, 21 nt, Human
caacacacagauuugagcuca

SEQ ID NO: 1242628 - RNA, 22 nt, Human
caacacacagauuugagcucag

SEQ ID NO: 1242629 - RNA, 19 nt, Human
caacaaccucaacugccua

SEQ ID NO: 1242630 - RNA, 18 nt, Human
caacaaccucaacugccu

SEQ ID NO: 1242631 - RNA, 21 nt, Human
caacaagaagggacugagaga

SEQ ID NO: 1242632 - RNA, 20 nt, Human
caacaagaagggacugagag

SEQ ID NO: 1242633 - RNA, 22 nt, Human
caaagguaaaucagacuaugaa

SEQ ID NO: 1242634 - RNA, 13 nt, Human
caaaggguggaau

SEQ ID NO: 1242635 - RNA, 14 nt, Human
caaagguaaaucag

SEQ ID NO: 1242636 - RNA, 22 nt, Human
caaagucaggaaucaucaggaa

SEQ ID NO: 1242637 - RNA, 18 nt, Human
caaagucauaauugcauu

SEQ ID NO: 1242638 - RNA, 18 nt, Human
caaagucaggaaucauca

SEQ ID NO: 1242639 - RNA, 23 nt, Human
caaagucauaauugcauugacuu

SEQ ID NO: 1242640 - RNA, 23 nt, Human
caaagcaucuugcauuaugcaau

SEQ ID NO: 1242641 - RNA, 16 nt, Human
caaagcaugaaaugga

SEQ ID NO: 1242642 - RNA, 19 nt, Human
caaaguccugggauuacag

SEQ ID NO: 1242643 - RNA, 14 nt, Human
caaaguccuuuuuu

SEQ ID NO: 1242644 - RNA, 17 nt, Human
caaaguccuuuuuuucc

SEQ ID NO: 1242645 - RNA, 19 nt, Human
caaaguccuuuuuuuccau

SEQ ID NO: 1242646 - RNA, 23 nt, Human
caaaguccuuuuuuuccaucuuu

SEQ ID NO: 1242647 - RNA, 13 nt, Human
caaaucuggaagc

SEQ ID NO: 1242648 - RNA, 19 nt, Human
caaaugaagacaaaacaua

SEQ ID NO: 1242649 - RNA, 18 nt, Human
caaaugaaauauauuuaa

SEQ ID NO: 1242650 - RNA, 19 nt, Human
caaaugaaauauauuuaaa

SEQ ID NO: 1242651 - RNA, 20 nt, Human
caaaugaaauauauuuaaaa

SEQ ID NO: 1242652 - RNA, 12 nt, Human
caaaucuugaaa

SEQ ID NO: 1242653 - RNA, 19 nt, Human
caaaucuugaaauuaagaa

SEQ ID NO: 1242654 - RNA, 13 nt, Human
caaaucuugaaau

SEQ ID NO: 1242655 - RNA, 22 nt, Human
caaaucuugguugaugccaaaa

SEQ ID NO: 1242656 - RNA, 14 nt, Human
caacaaagaacacu

SEQ ID NO: 1242657 - RNA, 12 nt, Human
caaaugagccau

SEQ ID NO: 1242658 - RNA, 13 nt, Human
caaaugagccaug

SEQ ID NO: 1242659 - RNA, 21 nt, Human
caaaugccaaauuaaaaaaga

SEQ ID NO: 1242660 - RNA, 14 nt, Human
auuuuauguugcau

SEQ ID NO: 1242661 - RNA, 13 nt, Human
auuuuauguuaua

SEQ ID NO: 1242662 - RNA, 14 nt, Human
auuuuauguuauau

SEQ ID NO: 1242663 - RNA, 15 nt, Human
auuuuauguuauaua

SEQ ID NO: 1242664 - RNA, 17 nt, Human
auuuuauguuauauaua

SEQ ID NO: 1242665 - RNA, 23 nt, Human
auuuuauguuauauauaaauaua

SEQ ID NO: 1242666 - RNA, 18 nt, Human
auuuuauguuauauauaa

SEQ ID NO: 1242667 - RNA, 19 nt, Human
auuuucugguaggaauagc

SEQ ID NO: 1242668 - RNA, 14 nt, Human
auuuucugguucua

SEQ ID NO: 1242669 - RNA, 19 nt, Human
auuuucugguucuaacauu

SEQ ID NO: 1242670 - RNA, 15 nt, Human
auuuucugguucuaa

SEQ ID NO: 1242671 - RNA, 17 nt, Human
auuuucugguucuaaca

SEQ ID NO: 1242672 - RNA, 16 nt, Human
auuuucugugccugaa

SEQ ID NO: 1242673 - RNA, 18 nt, Human
auuuucugugccugaaua

SEQ ID NO: 1242674 - RNA, 20 nt, Human
auuuucugugccugaauauu

SEQ ID NO: 1242675 - RNA, 22 nt, Human
auuuuauggugccuaguauuga

SEQ ID NO: 1242676 - RNA, 14 nt, Human
auuuuauggugcau

SEQ ID NO: 1242677 - RNA, 22 nt, Human
auuuuauguuaagggaagaauu

SEQ ID NO: 1242678 - RNA, 16 nt, Human
auuuuauggugcauua

SEQ ID NO: 1242679 - RNA, 12 nt, Human
auuuuauguuau

SEQ ID NO: 1242680 - RNA, 15 nt, Human
auuuuauaugcuuac

SEQ ID NO: 1242681 - RNA, 16 nt, Human
auuuuauaugcuuacu

SEQ ID NO: 1242682 - RNA, 18 nt, Human
auuuuauaugcuuacuga

SEQ ID NO: 1242683 - RNA, 19 nt, Human
auuuuagggguagcauuug

SEQ ID NO: 1242684 - RNA, 18 nt, Human
auuuuaggagcuaaggcu

SEQ ID NO: 1242685 - RNA, 19 nt, Human
auuuuaggagcuaaggcuc

SEQ ID NO: 1242686 - RNA, 20 nt, Human
auuuuaggagcuaaggcucu

SEQ ID NO: 1242687 - RNA, 21 nt, Human
auuuuaggagcuaaggcucua

SEQ ID NO: 1242688 - RNA, 22 nt, Human
auuuuaggagcuaaggcucuau

SEQ ID NO: 1242689 - RNA, 21 nt, Human
auuuuauaucaauuuaaaaaa

SEQ ID NO: 1242690 - RNA, 18 nt, Human
auuuuagcgugcucacug

SEQ ID NO: 1242691 - RNA, 13 nt, Human
auuuuagcuuuug

SEQ ID NO: 1242692 - RNA, 18 nt, Human
auuuugaaucaauaauau

SEQ ID NO: 1242693 - RNA, 11 nt, Human
auuuugaauca

SEQ ID NO: 1242694 - RNA, 12 nt, Human
auuuugaaucaa

SEQ ID NO: 1242695 - RNA, 13 nt, Human
auuuugaaucaau

SEQ ID NO: 1242696 - RNA, 14 nt, Human
auuuugaaucaaua

SEQ ID NO: 1242697 - RNA, 15 nt, Human
auuuugaaucaauaa

SEQ ID NO: 1242698 - RNA, 17 nt, Human
auuuugaaucaauaaua

SEQ ID NO: 1242699 - RNA, 21 nt, Human
auuuucugugccugaauauuu

SEQ ID NO: 1242700 - RNA, 20 nt, Human
auuuugaaccugaugaaaau

SEQ ID NO: 1242701 - RNA, 22 nt, Human
auuuugaaccugaugaaaauaa

SEQ ID NO: 1242702 - RNA, 13 nt, Human
auuuugaagugcu

SEQ ID NO: 1242703 - RNA, 19 nt, Human
auuuugaagugcuguuuau

SEQ ID NO: 1242704 - RNA, 22 nt, Human
auuuugaagugcuguuuauuaa

SEQ ID NO: 1242705 - RNA, 18 nt, Human
auuuuuaauauauacuau

SEQ ID NO: 1242706 - RNA, 19 nt, Human
auuuuuaauauauacuaug

SEQ ID NO: 1242707 - RNA, 21 nt, Human
auuuuuagauaguuagaaccu

SEQ ID NO: 1242708 - RNA, 16 nt, Human
auuuuuauaaauacug

SEQ ID NO: 1242709 - RNA, 13 nt, Human
caaaagaagcccc

SEQ ID NO: 1242710 - RNA, 16 nt, Human
caaaagaagcccccag

SEQ ID NO: 1242711 - RNA, 17 nt, Human
caaaagaagcccccagc

SEQ ID NO: 1242712 - RNA, 18 nt, Human
caaaagaagcccccagcu

SEQ ID NO: 1242713 - RNA, 19 nt, Human
caaaagaagcccccagcua

SEQ ID NO: 1242714 - RNA, 20 nt, Human
caaaagaagcccggcuccug

SEQ ID NO: 1242715 - RNA, 22 nt, Human
caaaagaagcccggcuccuggu

SEQ ID NO: 1242716 - RNA, 12 nt, Human
caaaagaaguaa

SEQ ID NO: 1242717 - RNA, 19 nt, Human
caaaagaaguaaaagcaaa

SEQ ID NO: 1242718 - RNA, 17 nt, Human
caaaagaaguaaaagca

SEQ ID NO: 1242719 - RNA, 18 nt, Human
caaaagaaguaaaagcaa

SEQ ID NO: 1242720 - RNA, 19 nt, Human
caaaagaauggcagaaaag

SEQ ID NO: 1242721 - RNA, 20 nt, Human
caaaagaauggcagaaaagu

SEQ ID NO: 1242722 - RNA, 18 nt, Human
caaaagcuuacaaauacu

SEQ ID NO: 1242723 - RNA, 23 nt, Human
auuuuuauauuaaccagauauau

SEQ ID NO: 1242724 - RNA, 15 nt, Human
auuuuuauauuugaa

SEQ ID NO: 1242725 - RNA, 16 nt, Human
auuuuuauauuugaaa

SEQ ID NO: 1242726 - RNA, 14 nt, Human
auuuuuauauuuaa

SEQ ID NO: 1242727 - RNA, 21 nt, Human
caaaaggauaaugaauacuuu

SEQ ID NO: 1242728 - RNA, 13 nt, Human
caaaagcuuuuua

SEQ ID NO: 1242729 - RNA, 17 nt, Human
caaacauauauaacaau

SEQ ID NO: 1242730 - RNA, 17 nt, Human
caaaccaaaucacugaa

SEQ ID NO: 1242731 - RNA, 12 nt, Human
caaacauuuuga

SEQ ID NO: 1242732 - RNA, 15 nt, Human
caaacauuuugaaag

SEQ ID NO: 1242733 - RNA, 18 nt, Human
caaaccccgaccaccugc

SEQ ID NO: 1242734 - RNA, 18 nt, Human
caaacccuagccuugcuu

SEQ ID NO: 1242735 - RNA, 20 nt, Human
caaacccuagccuugcuugu

SEQ ID NO: 1242736 - RNA, 21 nt, Human
caaaccccgaccaccugccca

SEQ ID NO: 1242737 - RNA, 15 nt, Human
caaacccuagccuug

SEQ ID NO: 1242738 - RNA, 20 nt, Human
caaacauuuugaaagucugu

SEQ ID NO: 1242739 - RNA, 18 nt, Human
caaacauuuucuggccag

SEQ ID NO: 1242740 - RNA, 23 nt, Human
caaacauuuucuggccaguguuu

SEQ ID NO: 1242741 - RNA, 21 nt, Human
caaagaguucaagaaauaagu

SEQ ID NO: 1242742 - RNA, 18 nt, Human
caaagaguuugaugaggc

SEQ ID NO: 1242743 - RNA, 17 nt, Human
caaagauaucucaucuc

SEQ ID NO: 1242744 - RNA, 23 nt, Human
cauccuucaucuggauuccagag

SEQ ID NO: 1242745 - RNA, 18 nt, Human
cauccuuccucacaccag

SEQ ID NO: 1242746 - RNA, 16 nt, Human
caucugcgugacaaua

SEQ ID NO: 1242747 - RNA, 18 nt, Human
caucugcgugacaauaaa

SEQ ID NO: 1242748 - RNA, 19 nt, Human
caucugcgugacaauaaaa

SEQ ID NO: 1242749 - RNA, 22 nt, Human
caucugcgugacaauaaaacau

SEQ ID NO: 1242750 - RNA, 23 nt, Human
caucugcgugacaauaaaacauu

SEQ ID NO: 1242751 - RNA, 10 nt, Human
caucugcucc

SEQ ID NO: 1242752 - RNA, 11 nt, Human
caucugcuccu

SEQ ID NO: 1242753 - RNA, 22 nt, Human
caucugcuccuggaucucccug

SEQ ID NO: 1242754 - RNA, 14 nt, Human
caucugcuccugga

SEQ ID NO: 1242755 - RNA, 20 nt, Human
caucugggaacuugucacag

SEQ ID NO: 1242756 - RNA, 21 nt, Human
caucugggaacuugucacaga

SEQ ID NO: 1242757 - RNA, 15 nt, Human
caucugggccuuggc

SEQ ID NO: 1242758 - RNA, 23 nt, Human
cauccaugccucagaagugcauc

SEQ ID NO: 1242759 - RNA, 14 nt, Human
cauccauggccagc

SEQ ID NO: 1242760 - RNA, 15 nt, Human
cauccauggccagca

SEQ ID NO: 1242761 - RNA, 18 nt, Human
cauccauggccagcagca

SEQ ID NO: 1242762 - RNA, 21 nt, Human
cauccauggccagcagcaccu

SEQ ID NO: 1242763 - RNA, 22 nt, Human
cauccauggccagcagcaccug

SEQ ID NO: 1242764 - RNA, 18 nt, Human
cauccauguccaaccccc

SEQ ID NO: 1242765 - RNA, 18 nt, Human
cauccauguuccgagaag

SEQ ID NO: 1242766 - RNA, 19 nt, Human
cauccauguuccgagaaga

SEQ ID NO: 1242767 - RNA, 18 nt, Human
caucugggccuuggccug

SEQ ID NO: 1242768 - RNA, 20 nt, Human
caucugggccuuggccugga

SEQ ID NO: 1242769 - RNA, 23 nt, Human
caucugggccuuggccuggagca

SEQ ID NO: 1242770 - RNA, 16 nt, Human
caucugggcuccucca

SEQ ID NO: 1242771 - RNA, 17 nt, Human
caucugggcuccuccag

SEQ ID NO: 1242772 - RNA, 20 nt, Human
caucugggcuccuccagggu

SEQ ID NO: 1242773 - RNA, 18 nt, Human
caucuggggagcaggcag

SEQ ID NO: 1242774 - RNA, 23 nt, Human
caucuggggagcaggcagccagc

SEQ ID NO: 1242775 - RNA, 19 nt, Human
caucuggggagcaggcagc

SEQ ID NO: 1242776 - RNA, 16 nt, Human
cauaugcuaccaccag

SEQ ID NO: 1242777 - RNA, 17 nt, Human
cauaugcuaccaccagc

SEQ ID NO: 1242778 - RNA, 18 nt, Human
cauaugcuaccaccagcu

SEQ ID NO: 1242779 - RNA, 19 nt, Human
cauaugcuaccaccagcug

SEQ ID NO: 1242780 - RNA, 20 nt, Human
cauaugcuaccaccagcugu

SEQ ID NO: 1242781 - RNA, 12 nt, Human
cauaauugcauu

SEQ ID NO: 1242782 - RNA, 21 nt, Human
cauaauugugauuagacagaa

SEQ ID NO: 1242783 - RNA, 22 nt, Human
cauaauuuaguuucauauaaag

SEQ ID NO: 1242784 - RNA, 18 nt, Human
cauaauugcauugacuuu

SEQ ID NO: 1242785 - RNA, 15 nt, Human
cauaauuuggaggga

SEQ ID NO: 1242786 - RNA, 20 nt, Human
cauacaccuaugucauuuca

SEQ ID NO: 1242787 - RNA, 23 nt, Human
cauacacuuauuggaacucugcu

SEQ ID NO: 1242788 - RNA, 14 nt, Human
cauacacuuuuucu

SEQ ID NO: 1242789 - RNA, 23 nt, Human
cauacagaauuacuguaacugau

SEQ ID NO: 1242790 - RNA, 11 nt, Human
cauacagagaa

SEQ ID NO: 1242791 - RNA, 12 nt, Human
cauacagagaag

SEQ ID NO: 1242792 - RNA, 13 nt, Human
cauacagagaagu

SEQ ID NO: 1242793 - RNA, 15 nt, Human
cauacagagaaguca

SEQ ID NO: 1242794 - RNA, 17 nt, Human
cauacagagaagucaca

SEQ ID NO: 1242795 - RNA, 22 nt, Human
cauagcaccuaacaacauugua

SEQ ID NO: 1242796 - RNA, 12 nt, Human
cauagcucuggg

SEQ ID NO: 1242797 - RNA, 13 nt, Human
cauagcucugggg

SEQ ID NO: 1242798 - RNA, 20 nt, Human
cauagcucuggggugggcag

SEQ ID NO: 1242799 - RNA, 12 nt, Human
caugcacaaauu

SEQ ID NO: 1242800 - RNA, 14 nt, Human
caugcacaguauuu

SEQ ID NO: 1242801 - RNA, 17 nt, Human
caugcacaguauuugua

SEQ ID NO: 1242802 - RNA, 18 nt, Human
caugcacaguauuuguaa

SEQ ID NO: 1242803 - RNA, 19 nt, Human
caugcacaguauuuguaau

SEQ ID NO: 1242804 - RNA, 20 nt, Human
caugcacaguauuuguaauu

SEQ ID NO: 1242805 - RNA, 13 nt, Human
caugacagccucc

SEQ ID NO: 1242806 - RNA, 14 nt, Human
caugacagccucca

SEQ ID NO: 1242807 - RNA, 16 nt, Human
caugcacccucauaca

SEQ ID NO: 1242808 - RNA, 20 nt, Human
caugcacccucauacacaga

SEQ ID NO: 1242809 - RNA, 22 nt, Human
caugcacaguauuuguaauuaa

SEQ ID NO: 1242810 - RNA, 16 nt, Human
caugcucaucugcugg

SEQ ID NO: 1242811 - RNA, 17 nt, Human
caugcucaucugcuggu

SEQ ID NO: 1242812 - RNA, 18 nt, Human
caugcucaucugcugguc

SEQ ID NO: 1242813 - RNA, 19 nt, Human
caugcucaucugcuggucc

SEQ ID NO: 1242814 - RNA, 22 nt, Human
caugcuccagauuagagccugu

SEQ ID NO: 1242815 - RNA, 14 nt, Human
caugcuccucuucc

SEQ ID NO: 1242816 - RNA, 16 nt, Human
caugcuccucuucccc

SEQ ID NO: 1242817 - RNA, 17 nt, Human
caugcuccucuucccca

SEQ ID NO: 1242818 - RNA, 18 nt, Human
caugcuccucuuccccag

SEQ ID NO: 1242819 - RNA, 16 nt, Human
caugaaggugucauac

SEQ ID NO: 1242820 - RNA, 22 nt, Human
caugaagguaaauaaaaagaaa

SEQ ID NO: 1242821 - RNA, 13 nt, Human
caugaaguauuuu

SEQ ID NO: 1242822 - RNA, 21 nt, Human
caugaaguauuuuuucaguau

SEQ ID NO: 1242823 - RNA, 14 nt, Human
caugaaguauuuuu

SEQ ID NO: 1242824 - RNA, 15 nt, Human
caugaagcuguugug

SEQ ID NO: 1242825 - RNA, 14 nt, Human
caugaagguaaaua

SEQ ID NO: 1242826 - RNA, 16 nt, Human
caugaagguaaauaaa

SEQ ID NO: 1242827 - RNA, 17 nt, Human
caugaagguaaauaaaa

SEQ ID NO: 1242828 - RNA, 20 nt, Human
caugaagguaaauaaaaaga

SEQ ID NO: 1242829 - RNA, 21 nt, Human
caugaagguaaauaaaaagaa

SEQ ID NO: 1242830 - RNA, 16 nt, Human
cauggccagcuaauuu

SEQ ID NO: 1242831 - RNA, 14 nt, Human
cauggccagcugga

SEQ ID NO: 1242832 - RNA, 20 nt, Human
cauggccagcuggaggcagg

SEQ ID NO: 1242833 - RNA, 13 nt, Human
cauggccaggugg

SEQ ID NO: 1242834 - RNA, 19 nt, Human
cauggcauccuccagcccc

SEQ ID NO: 1242835 - RNA, 13 nt, Human
cauggccagcagc

SEQ ID NO: 1242836 - RNA, 14 nt, Human
cauggccagcagca

SEQ ID NO: 1242837 - RNA, 20 nt, Human
cauggccagcagcaccugcc

SEQ ID NO: 1242838 - RNA, 22 nt, Human
cauggccagcagcaccugcccu

SEQ ID NO: 1242839 - RNA, 23 nt, Human
cauggccagcagcaccugcccua

SEQ ID NO: 1242840 - RNA, 14 nt, Human
cauggccagguggc

SEQ ID NO: 1242841 - RNA, 21 nt, Human
cauggccagcuggaggcaggg

SEQ ID NO: 1242842 - RNA, 19 nt, Human
caugcuccucuuccccaga

SEQ ID NO: 1242843 - RNA, 15 nt, Human
cauggcauccaagac

SEQ ID NO: 1242844 - RNA, 14 nt, Human
cauggcauccucca

SEQ ID NO: 1242845 - RNA, 15 nt, Human
cauggcauccuccag

SEQ ID NO: 1242846 - RNA, 16 nt, Human
cauggcauccuccagc

SEQ ID NO: 1242847 - RNA, 18 nt, Human
cauggcauccuccagccc

SEQ ID NO: 1242848 - RNA, 22 nt, Human
cauggcauccuccagccccugu

SEQ ID NO: 1242849 - RNA, 12 nt, Human
cauuccuuccca

SEQ ID NO: 1242850 - RNA, 22 nt, Human
cauuccuucccagaggggccug

SEQ ID NO: 1242851 - RNA, 15 nt, Human
cauuccuugcugaaa

SEQ ID NO: 1242852 - RNA, 22 nt, Human
cauucgcuacuaugauuuaauu

SEQ ID NO: 1242853 - RNA, 15 nt, Human
cauuccuucccagag

SEQ ID NO: 1242854 - RNA, 18 nt, Human
cauucuagguuugcaaga

SEQ ID NO: 1242855 - RNA, 14 nt, Human
cauucuauuguuaa

SEQ ID NO: 1242856 - RNA, 13 nt, Human
cauucucacuccu

SEQ ID NO: 1242857 - RNA, 20 nt, Human
cauucucacaggucccaaau

SEQ ID NO: 1242858 - RNA, 14 nt, Human
cauucucacuccua

SEQ ID NO: 1242859 - RNA, 22 nt, Human
cauguugcccccgugagccaau

SEQ ID NO: 1242860 - RNA, 21 nt, Human
cauuaguacacagcaccagaa

SEQ ID NO: 1242861 - RNA, 24 nt, Human
cauuaucuaguucauugaaucauu

SEQ ID NO: 1242862 - RNA, 21 nt, Human
cauuagucauguuuaucugcu

SEQ ID NO: 1242863 - RNA, 22 nt, Human
cauuagucauguuuaucugcuu

SEQ ID NO: 1242864 - RNA, 22 nt, Human
cauuagucucagugaagacuau

SEQ ID NO: 1242865 - RNA, 19 nt, Human
caugucaagauucagcuag

SEQ ID NO: 1242866 - RNA, 18 nt, Human
caugucaaggguucaaga

SEQ ID NO: 1242867 - RNA, 20 nt, Human
caugucaaggguucaagauu

SEQ ID NO: 1242868 - RNA, 17 nt, Human
caugucaagauucagcu

SEQ ID NO: 1242869 - RNA, 14 nt, Human
caugucaagauuca

SEQ ID NO: 1242870 - RNA, 23 nt, Human
cauguaucuaugcauuuucugga

SEQ ID NO: 1242871 - RNA, 20 nt, Human
cauguaucuaugcauuuucu

SEQ ID NO: 1242872 - RNA, 22 nt, Human
caugucaacagcguuccuagag

SEQ ID NO: 1242873 - RNA, 17 nt, Human
cauguaguaacacuaau

SEQ ID NO: 1242874 - RNA, 19 nt, Human
cauguaguaacacuaauau

SEQ ID NO: 1242875 - RNA, 21 nt, Human
cauguaguaacacuaauauau

SEQ ID NO: 1242876 - RNA, 22 nt, Human
cauguaguaacacuaauauauu

SEQ ID NO: 1242877 - RNA, 23 nt, Human
cauguaguaacacuaauauauuu

SEQ ID NO: 1242878 - RNA, 13 nt, Human
cauuuauauguac

SEQ ID NO: 1242879 - RNA, 13 nt, Human
cauuuauauugau

SEQ ID NO: 1242880 - RNA, 15 nt, Human
cauuuauauauugaa

SEQ ID NO: 1242881 - RNA, 22 nt, Human
cauuuauauauugaauuaauau

SEQ ID NO: 1242882 - RNA, 22 nt, Human
cauuucagaguucuuuuugaag

SEQ ID NO: 1242883 - RNA, 23 nt, Human
cauuucagaaguuaguuuguaua

SEQ ID NO: 1242884 - RNA, 21 nt, Human
cauuucaucuaccauuuucug

SEQ ID NO: 1242885 - RNA, 14 nt, Human
cauuugugaaauga

SEQ ID NO: 1242886 - RNA, 16 nt, Human
cauuugugaaaugaug

SEQ ID NO: 1242887 - RNA, 23 nt, Human
cauuuggaguguuccccuuccac

SEQ ID NO: 1242888 - RNA, 21 nt, Human
cauuuggauccuguguggaga

SEQ ID NO: 1242889 - RNA, 20 nt, Human
cauuuggcaaugccaucauc

SEQ ID NO: 1242890 - RNA, 17 nt, Human
cauuuggaauacuuuuu

SEQ ID NO: 1242891 - RNA, 15 nt, Human
cauuuggaauacuuu

SEQ ID NO: 1242892 - RNA, 11 nt, Human
cauugcuuuuc

SEQ ID NO: 1242893 - RNA, 18 nt, Human
cauuggaaauuuagcauu

SEQ ID NO: 1242894 - RNA, 15 nt, Human
cauuguaaacaaacu

SEQ ID NO: 1242895 - RNA, 12 nt, Human
cauuuauauauu

SEQ ID NO: 1242896 - RNA, 13 nt, Human
cauuuauauauug

SEQ ID NO: 1242897 - RNA, 19 nt, Human
cauuggaaauuuagcauug

SEQ ID NO: 1242898 - RNA, 20 nt, Human
cauuggaaauuuagcauugu

SEQ ID NO: 1242899 - RNA, 21 nt, Human
cauuggaaauuuagcauugua

SEQ ID NO: 1242900 - RNA, 14 nt, Human
cauuggaacuggag

SEQ ID NO: 1242901 - RNA, 15 nt, Human
cauuggaacuggagg

SEQ ID NO: 1242902 - RNA, 16 nt, Human
cauuggaacuggaggc

SEQ ID NO: 1242903 - RNA, 19 nt, Human
cauuggaacuggaggcagg

SEQ ID NO: 1242904 - RNA, 15 nt, Human
cauuguaaaagcauu

SEQ ID NO: 1242905 - RNA, 20 nt, Human
cauuguaaaagcauuuugua

SEQ ID NO: 1242906 - RNA, 21 nt, Human
cauuguaaaagcauuuuguaa

SEQ ID NO: 1242907 - RNA, 22 nt, Human
cauuguaaaagcauuuuguaau

SEQ ID NO: 1242908 - RNA, 23 nt, Human
cauuguaaaagcauuuuguaaua

SEQ ID NO: 1242909 - RNA, 13 nt, Human
cauuguaaaauaa

SEQ ID NO: 1242910 - RNA, 14 nt, Human
cauuguaaaauaau

SEQ ID NO: 1242911 - RNA, 15 nt, Human
cauuguaaaauaauu

SEQ ID NO: 1242912 - RNA, 16 nt, Human
cauuguaaaauaauuc

SEQ ID NO: 1242913 - RNA, 18 nt, Human
ccaaggaugccccguccc

SEQ ID NO: 1242914 - RNA, 15 nt, Human
ccaaggcagaggccu

SEQ ID NO: 1242915 - RNA, 16 nt, Human
ccaaggcagaggccug

SEQ ID NO: 1242916 - RNA, 20 nt, Human
ccaaggcagaggccugggcu

SEQ ID NO: 1242917 - RNA, 18 nt, Human
ccaagaagcaguggccuu

SEQ ID NO: 1242918 - RNA, 15 nt, Human
ccaacgcuccaaagu

SEQ ID NO: 1242919 - RNA, 11 nt, Human
ccaacuuuucu

SEQ ID NO: 1242920 - RNA, 14 nt, Human
ccaacuuuucuauu

SEQ ID NO: 1242921 - RNA, 14 nt, Human
ccaagaaacgucuu

SEQ ID NO: 1242922 - RNA, 14 nt, Human
ccaagaagcagugg

SEQ ID NO: 1242923 - RNA, 13 nt, Human
ccaaaugcagcuu

SEQ ID NO: 1242924 - RNA, 15 nt, Human
ccaaaugcagcuuua

SEQ ID NO: 1242925 - RNA, 18 nt, Human
ccaaaugcagcuuuaaaa

SEQ ID NO: 1242926 - RNA, 19 nt, Human
ccaaauacuaaugaaaaca

SEQ ID NO: 1242927 - RNA, 13 nt, Human
ccaaauauguccu

SEQ ID NO: 1242928 - RNA, 15 nt, Human
ccaaauauguccugg

SEQ ID NO: 1242929 - RNA, 11 nt, Human
ccaaaguucua

SEQ ID NO: 1242930 - RNA, 12 nt, Human
ccaaaguucuaa

SEQ ID NO: 1242931 - RNA, 14 nt, Human
ccaaaguucuaaua

SEQ ID NO: 1242932 - RNA, 19 nt, Human
ccaaaguucuaauaauuuc

SEQ ID NO: 1242933 - RNA, 20 nt, Human
ccaaaguucuaauaauuucu

SEQ ID NO: 1242934 - RNA, 23 nt, Human
ccaaaguucuaauaauuucuaau

SEQ ID NO: 1242935 - RNA, 15 nt, Human
ccaaaguuguuguaa

SEQ ID NO: 1242936 - RNA, 23 nt, Human
ccaaaguuguuguaaccugcugu

SEQ ID NO: 1242937 - RNA, 19 nt, Human
ccaaaguuguuguaaccug

SEQ ID NO: 1242938 - RNA, 21 nt, Human
ccaaggcagaggccugggcug

SEQ ID NO: 1242939 - RNA, 22 nt, Human
ccaaggcagaggccugggcugg

SEQ ID NO: 1242940 - RNA, 13 nt, Human
ccaauccuauguu

SEQ ID NO: 1242941 - RNA, 14 nt, Human
ccaauccuauguuu

SEQ ID NO: 1242942 - RNA, 23 nt, Human
ccaauccuaugcaugguuucagc

SEQ ID NO: 1242943 - RNA, 16 nt, Human
ccaauccucccagaaa

SEQ ID NO: 1242944 - RNA, 23 nt, Human
ccaaugaaaaaauguauaugcac

SEQ ID NO: 1242945 - RNA, 15 nt, Human
ccaaugaaaaaaugu

SEQ ID NO: 1242946 - RNA, 16 nt, Human
ccacagaagcuccagg

SEQ ID NO: 1242947 - RNA, 21 nt, Human
ccacacuucaggcucuucucc

SEQ ID NO: 1242948 - RNA, 16 nt, Human
ccacacuucaggcucu

SEQ ID NO: 1242949 - RNA, 20 nt, Human
ccacacuucaggcucuucuc

SEQ ID NO: 1242950 - RNA, 14 nt, Human
ccacacuucaaacu

SEQ ID NO: 1242951 - RNA, 17 nt, Human
ccacacuucaaacuacu

SEQ ID NO: 1242952 - RNA, 18 nt, Human
ccacacuucaaacuacuu

SEQ ID NO: 1242953 - RNA, 18 nt, Human
ccaccagucugacuguuu

SEQ ID NO: 1242954 - RNA, 16 nt, Human
ccaccagggcaucucu

SEQ ID NO: 1242955 - RNA, 19 nt, Human
ccaccagggcaucucuggg

SEQ ID NO: 1242956 - RNA, 21 nt, Human
ccaccagggcaucucugggcu

SEQ ID NO: 1242957 - RNA, 15 nt, Human
ccaccacgcccggcu

SEQ ID NO: 1242958 - RNA, 16 nt, Human
ccacagcccugucagc

SEQ ID NO: 1242959 - RNA, 17 nt, Human
ccacagcccugucagca

SEQ ID NO: 1242960 - RNA, 20 nt, Human
ccacagcccugucagcauga

SEQ ID NO: 1242961 - RNA, 19 nt, Human
ccacagcccugucagcaug

SEQ ID NO: 1242962 - RNA, 18 nt, Human
ccacagcccuuuugucuc

SEQ ID NO: 1242963 - RNA, 20 nt, Human
ccacagcccuuuugucucug

SEQ ID NO: 1242964 - RNA, 18 nt, Human
ccacagaagcuccaggua

SEQ ID NO: 1242965 - RNA, 16 nt, Human
ccacagaagugcuuuc

SEQ ID NO: 1242966 - RNA, 18 nt, Human
ccacagacggaaggguaa

SEQ ID NO: 1242967 - RNA, 21 nt, Human
ccacagacggaaggguaaaca

SEQ ID NO: 1242968 - RNA, 22 nt, Human
ccacagacggaaggguaaacaa

SEQ ID NO: 1242969 - RNA, 13 nt, Human
ccacagccagggg

SEQ ID NO: 1242970 - RNA, 16 nt, Human
ccacagauaacugaaa

SEQ ID NO: 1242971 - RNA, 18 nt, Human
ccacagauaacugaaaau

SEQ ID NO: 1242972 - RNA, 23 nt, Human
ccacagacggaaggguaaacaau

SEQ ID NO: 1242973 - RNA, 13 nt, Human
ccacagaggacac

SEQ ID NO: 1242974 - RNA, 12 nt, Human
ccacagcccugu

SEQ ID NO: 1242975 - RNA, 14 nt, Human
ccacagcccuguca

SEQ ID NO: 1242976 - RNA, 15 nt, Human
ccacagcccugucag

SEQ ID NO: 1242977 - RNA, 20 nt, Human
ccaccagggcaucucugggc

SEQ ID NO: 1242978 - RNA, 19 nt, Human
ccaccgggcugggagcucu

SEQ ID NO: 1242979 - RNA, 15 nt, Human
ccaccgggccacucc

SEQ ID NO: 1242980 - RNA, 18 nt, Human
ccaccgggccacuccuuc

SEQ ID NO: 1242981 - RNA, 19 nt, Human
ccaccgggccacuccuucc

SEQ ID NO: 1242982 - RNA, 20 nt, Human
ccaccgggccacuccuuccu

SEQ ID NO: 1242983 - RNA, 13 nt, Human
ccaccgggccacu

SEQ ID NO: 1242984 - RNA, 14 nt, Human
ccaccgggccacuc

SEQ ID NO: 1242985 - RNA, 22 nt, Human
ccaccgggcugggagcucugca

SEQ ID NO: 1242986 - RNA, 21 nt, Human
ccaccgggccacuccuuccug

SEQ ID NO: 1242987 - RNA, 22 nt, Human
ccaccgggccacuccuuccugc

SEQ ID NO: 1242988 - RNA, 21 nt, Human
ccaccuagacuguaaaccucu

SEQ ID NO: 1242989 - RNA, 13 nt, Human
ccaccuagcagca

SEQ ID NO: 1242990 - RNA, 14 nt, Human
ccaccuagcagcac

SEQ ID NO: 1242991 - RNA, 23 nt, Human
ccaccuagcagcaccguucugug

SEQ ID NO: 1242992 - RNA, 18 nt, Human
ccacgccucuugaccagg

SEQ ID NO: 1242993 - RNA, 19 nt, Human
ccacgccucuugaccaggc

SEQ ID NO: 1242994 - RNA, 21 nt, Human
ccacgccucuugaccaggcug

SEQ ID NO: 1242995 - RNA, 18 nt, Human
ccacgcuagggcuggcuc

SEQ ID NO: 1242996 - RNA, 15 nt, Human
ccacgcucacccccu

SEQ ID NO: 1242997 - RNA, 12 nt, Human
ccacgcuccagc

SEQ ID NO: 1242998 - RNA, 13 nt, Human
ccacgcuccagcu

SEQ ID NO: 1242999 - RNA, 16 nt, Human
ccacgcuccagcugcc

SEQ ID NO: 1243000 - RNA, 18 nt, Human
ccaccucagaccccgggg

SEQ ID NO: 1243001 - RNA, 12 nt, Human
ccacgagggcug

SEQ ID NO: 1243002 - RNA, 13 nt, Human
ccacgccacagcc

SEQ ID NO: 1243003 - RNA, 14 nt, Human
ccacgccacagccc

SEQ ID NO: 1243004 - RNA, 18 nt, Human
ccacgccacagcccuuuu

SEQ ID NO: 1243005 - RNA, 21 nt, Human
ccacgccacagcccuuuuguc

SEQ ID NO: 1243006 - RNA, 12 nt, Human
ccacgccacagc

SEQ ID NO: 1243007 - RNA, 14 nt, Human
ccacgagggcuggc

SEQ ID NO: 1243008 - RNA, 15 nt, Human
ccacgagggcuggcu

SEQ ID NO: 1243009 - RNA, 17 nt, Human
ccacgagggcuggcugg

SEQ ID NO: 1243010 - RNA, 19 nt, Human
ccacgagggcuggcuggcc

SEQ ID NO: 1243011 - RNA, 22 nt, Human
ccacgagggcuggcuggccuca

SEQ ID NO: 1243012 - RNA, 20 nt, Human
ccacgagggcuggcuggccu

SEQ ID NO: 1243013 - RNA, 14 nt, Human
ccacuccucugacu

SEQ ID NO: 1243014 - RNA, 20 nt, Human
ccacuccucugacucagggc

SEQ ID NO: 1243015 - RNA, 14 nt, Human
ccacuccucugcug

SEQ ID NO: 1243016 - RNA, 15 nt, Human
ccacuccucugcuga

SEQ ID NO: 1243017 - RNA, 22 nt, Human
cagugcacuaauguguaagaca

SEQ ID NO: 1243018 - RNA, 14 nt, Human
cagugcacugaaag

SEQ ID NO: 1243019 - RNA, 17 nt, Human
cagugcaccugucauau

SEQ ID NO: 1243020 - RNA, 19 nt, Human
cagugggacagggcauggc

SEQ ID NO: 1243021 - RNA, 22 nt, Human
cagugggagcaaacugcaugcc

SEQ ID NO: 1243022 - RNA, 18 nt, Human
cagugccaggaacccuua

SEQ ID NO: 1243023 - RNA, 18 nt, Human
cagucugagagaggccau

SEQ ID NO: 1243024 - RNA, 22 nt, Human
cagucugaugagaacucugagc

SEQ ID NO: 1243025 - RNA, 14 nt, Human
cagucucccucccu

SEQ ID NO: 1243026 - RNA, 19 nt, Human
cagucucagaaugucauuu

SEQ ID NO: 1243027 - RNA, 13 nt, Human
cagucgugccugu

SEQ ID NO: 1243028 - RNA, 14 nt, Human
cagucgugccugug

SEQ ID NO: 1243029 - RNA, 21 nt, Human
cagucucagaaugucauuuug

SEQ ID NO: 1243030 - RNA, 13 nt, Human
caguccuuggccu

SEQ ID NO: 1243031 - RNA, 15 nt, Human
caguccuuggccugc

SEQ ID NO: 1243032 - RNA, 16 nt, Human
caguccuuggccugcu

SEQ ID NO: 1243033 - RNA, 19 nt, Human
caguccuuggccugcuaag

SEQ ID NO: 1243034 - RNA, 15 nt, Human
cagucgauagagcug

SEQ ID NO: 1243035 - RNA, 16 nt, Human
cagucgauagagcugu

SEQ ID NO: 1243036 - RNA, 15 nt, Human
caguauugcucaccc

SEQ ID NO: 1243037 - RNA, 22 nt, Human
cagguuucuaagcauaaaagau

SEQ ID NO: 1243038 - RNA, 21 nt, Human
caguauugcucacccagugcc

SEQ ID NO: 1243039 - RNA, 17 nt, Human
caguauuuuuuuuuuua

SEQ ID NO: 1243040 - RNA, 24 nt, Human
cagucaaaaccaagucacuuaggu

SEQ ID NO: 1243041 - RNA, 14 nt, Human
cagucaaccugggc

SEQ ID NO: 1243042 - RNA, 15 nt, Human
cagucaaccugggca

SEQ ID NO: 1243043 - RNA, 16 nt, Human
cagucaaccugggcaa

SEQ ID NO: 1243044 - RNA, 22 nt, Human
cagucaaccugggcaaagccua

SEQ ID NO: 1243045 - RNA, 15 nt, Human
cagucaccucaugga

SEQ ID NO: 1243046 - RNA, 21 nt, Human
cagucaaccugggcaaagccu

SEQ ID NO: 1243047 - RNA, 23 nt, Human
caggugcagcccccacugccuuu

SEQ ID NO: 1243048 - RNA, 16 nt, Human
cagguuggcucugcca

SEQ ID NO: 1243049 - RNA, 17 nt, Human
cagguuggcucugccag

SEQ ID NO: 1243050 - RNA, 18 nt, Human
cagguuggcucugccagu

SEQ ID NO: 1243051 - RNA, 21 nt, Human
cagguuggcucugccaguccu

SEQ ID NO: 1243052 - RNA, 23 nt, Human
cagguuggcucugccaguccugu

SEQ ID NO: 1243053 - RNA, 22 nt, Human
cagguuggcucugccaguccug

SEQ ID NO: 1243054 - RNA, 20 nt, Human
caggugcuaauuuguuuugg

SEQ ID NO: 1243055 - RNA, 21 nt, Human
caggugcuacacccuuuucca

SEQ ID NO: 1243056 - RNA, 20 nt, Human
caggugcagcccccacugcc

SEQ ID NO: 1243057 - RNA, 18 nt, Human
caggugcagcccccacug

SEQ ID NO: 1243058 - RNA, 21 nt, Human
caggugaggucagcacaucuc

SEQ ID NO: 1243059 - RNA, 16 nt, Human
caggugaggucuguuc

SEQ ID NO: 1243060 - RNA, 21 nt, Human
caggugaggucuguuccuuuu

SEQ ID NO: 1243061 - RNA, 13 nt, Human
cagggucugcucu

SEQ ID NO: 1243062 - RNA, 14 nt, Human
cagggucugcucuu

SEQ ID NO: 1243063 - RNA, 17 nt, Human
cagggucugcucuuucu

SEQ ID NO: 1243064 - RNA, 20 nt, Human
cagggucugcucuuucucug

SEQ ID NO: 1243065 - RNA, 16 nt, Human
cagggugggcuugugg

SEQ ID NO: 1243066 - RNA, 21 nt, Human
cagggucugcucuuucucugc

SEQ ID NO: 1243067 - RNA, 22 nt, Human
cagggucugcucuuucucugcc

SEQ ID NO: 1243068 - RNA, 23 nt, Human
cagggucugcucuuucucugcca

SEQ ID NO: 1243069 - RNA, 13 nt, Human
cagggugugugcu

SEQ ID NO: 1243070 - RNA, 15 nt, Human
caggguuaagaagac

SEQ ID NO: 1243071 - RNA, 19 nt, Human
caggguugaccccagagga

SEQ ID NO: 1243072 - RNA, 20 nt, Human
caggguugaccccagaggau

SEQ ID NO: 1243073 - RNA, 17 nt, Human
caggcagccagcaucug

SEQ ID NO: 1243074 - RNA, 13 nt, Human
caggcagccagca

SEQ ID NO: 1243075 - RNA, 14 nt, Human
caggcagccagcau

SEQ ID NO: 1243076 - RNA, 16 nt, Human
caggcagccagcaucu

SEQ ID NO: 1243077 - RNA, 18 nt, Human
caggcagccagcaucugg

SEQ ID NO: 1243078 - RNA, 17 nt, Human
caggagcuuuggaccua

SEQ ID NO: 1243079 - RNA, 15 nt, Human
caggaggaauacuga

SEQ ID NO: 1243080 - RNA, 14 nt, Human
caggacccugaagg

SEQ ID NO: 1243081 - RNA, 15 nt, Human
caggacccugaaggg

SEQ ID NO: 1243082 - RNA, 16 nt, Human
caggacccugaagggg

SEQ ID NO: 1243083 - RNA, 13 nt, Human
caggacccugaag

SEQ ID NO: 1243084 - RNA, 19 nt, Human
caggagggacaaaggagcc

SEQ ID NO: 1243085 - RNA, 20 nt, Human
caggagggacaaaggagccu

SEQ ID NO: 1243086 - RNA, 21 nt, Human
caggagggacaaaggagccug

SEQ ID NO: 1243087 - RNA, 22 nt, Human
caggagggacaaaggagccugu

SEQ ID NO: 1243088 - RNA, 24 nt, Human
caggagggacaaaggagccuguga

SEQ ID NO: 1243089 - RNA, 15 nt, Human
caggagggaggggga

SEQ ID NO: 1243090 - RNA, 23 nt, Human
caggagggacaaaggagccugug

SEQ ID NO: 1243091 - RNA, 23 nt, Human
caggagggagggggaaggcaggg

SEQ ID NO: 1243092 - RNA, 21 nt, Human
caggagggcggccuccuucug

SEQ ID NO: 1243093 - RNA, 22 nt, Human
caggagggcggccuccuucuga

SEQ ID NO: 1243094 - RNA, 15 nt, Human
caggaggggggaggg

SEQ ID NO: 1243095 - RNA, 23 nt, Human
caggaggggggagggaagggagc

SEQ ID NO: 1243096 - RNA, 16 nt, Human
caggagggggucgugg

SEQ ID NO: 1243097 - RNA, 18 nt, Human
caggagggggucguggag

SEQ ID NO: 1243098 - RNA, 19 nt, Human
caggagggggucguggaga

SEQ ID NO: 1243099 - RNA, 20 nt, Human
caggagggggucguggagag

SEQ ID NO: 1243100 - RNA, 21 nt, Human
caggagggggucguggagagc

SEQ ID NO: 1243101 - RNA, 23 nt, Human
caggagggggucguggagagcua

SEQ ID NO: 1243102 - RNA, 20 nt, Human
caggaggugccacuggagug

SEQ ID NO: 1243103 - RNA, 17 nt, Human
caggaggugccacugga

SEQ ID NO: 1243104 - RNA, 19 nt, Human
caggaggugccacuggagu

SEQ ID NO: 1243105 - RNA, 15 nt, Human
caggcagauccagga

SEQ ID NO: 1243106 - RNA, 17 nt, Human
caggcagauccaggacu

SEQ ID NO: 1243107 - RNA, 18 nt, Human
caggcagauccaggacua

SEQ ID NO: 1243108 - RNA, 14 nt, Human
cagggagggccugg

SEQ ID NO: 1243109 - RNA, 16 nt, Human
cagggagggccugggc

SEQ ID NO: 1243110 - RNA, 17 nt, Human
cagggagggccugggcc

SEQ ID NO: 1243111 - RNA, 16 nt, Human
cagggaggcugguccu

SEQ ID NO: 1243112 - RNA, 22 nt, Human
cagggaggcugguccuauggcc

SEQ ID NO: 1243113 - RNA, 20 nt, Human
caggcuggcccugcccuggu

SEQ ID NO: 1243114 - RNA, 17 nt, Human
caggcgccccuuccccc

SEQ ID NO: 1243115 - RNA, 15 nt, Human
caggcgcuaauucaa

SEQ ID NO: 1243116 - RNA, 18 nt, Human
caggcuggcccugcccug

SEQ ID NO: 1243117 - RNA, 19 nt, Human
caggcuggcccugcccugg

SEQ ID NO: 1243118 - RNA, 18 nt, Human
cagggaggacgcucucug

SEQ ID NO: 1243119 - RNA, 17 nt, Human
cagggaggacgcucucu

SEQ ID NO: 1243120 - RNA, 19 nt, Human
cagggaggacgcucucugg

SEQ ID NO: 1243121 - RNA, 17 nt, Human
cagggagcugggcuucc

SEQ ID NO: 1243122 - RNA, 12 nt, Human
cagggagggccu

SEQ ID NO: 1243123 - RNA, 13 nt, Human
cagggagggccug

SEQ ID NO: 1243124 - RNA, 17 nt, Human
cagggaggcccugugcc

SEQ ID NO: 1243125 - RNA, 12 nt, Human
cagggaggccga

SEQ ID NO: 1243126 - RNA, 15 nt, Human
cagggaggccgaagc

SEQ ID NO: 1243127 - RNA, 23 nt, Human
cagggaggccgaagcuaacaggg

SEQ ID NO: 1243128 - RNA, 13 nt, Human
cagggaggcuggu

SEQ ID NO: 1243129 - RNA, 14 nt, Human
caggccucagggcu

SEQ ID NO: 1243130 - RNA, 16 nt, Human
caggccucagggcucc

SEQ ID NO: 1243131 - RNA, 20 nt, Human
caggccugccuguucccauu

SEQ ID NO: 1243132 - RNA, 15 nt, Human
caggcgccccuuccc

SEQ ID NO: 1243133 - RNA, 23 nt, Human
caggccugaaagaggcugaggcc

SEQ ID NO: 1243134 - RNA, 20 nt, Human
caggccuagaggccugacug

SEQ ID NO: 1243135 - RNA, 17 nt, Human
caggccucagggcuccu

SEQ ID NO: 1243136 - RNA, 16 nt, Human
cagcuccaagaauuuc

SEQ ID NO: 1243137 - RNA, 17 nt, Human
cagcuccaaccugcaaa

SEQ ID NO: 1243138 - RNA, 20 nt, Human
cagcuccaaccugcaaagau

SEQ ID NO: 1243139 - RNA, 19 nt, Human
cagcuccaagaauuucuag

SEQ ID NO: 1243140 - RNA, 23 nt, Human
cagcuccaaccugcaaagaucug

SEQ ID NO: 1243141 - RNA, 13 nt, Human
cagcuccacccug

SEQ ID NO: 1243142 - RNA, 15 nt, Human
cagcuccacccuggc

SEQ ID NO: 1243143 - RNA, 21 nt, Human
cagcucccaaggcucugagca

SEQ ID NO: 1243144 - RNA, 16 nt, Human
cagcuccaguuggagu

SEQ ID NO: 1243145 - RNA, 12 nt, Human
cagcucccacaa

SEQ ID NO: 1243146 - RNA, 17 nt, Human
cagcucccacaagccuc

SEQ ID NO: 1243147 - RNA, 17 nt, Human
cagcuccagguggcucu

SEQ ID NO: 1243148 - RNA, 21 nt, Human
cagcuccagguggcucugagg

SEQ ID NO: 1243149 - RNA, 19 nt, Human
cagcugccucuucccucuu

SEQ ID NO: 1243150 - RNA, 22 nt, Human
cagcugccccggccccuccccc

SEQ ID NO: 1243151 - RNA, 19 nt, Human
cagcugccccggccccucc

SEQ ID NO: 1243152 - RNA, 12 nt, Human
cagcugcacuga

SEQ ID NO: 1243153 - RNA, 18 nt, Human
cagcugcacugaugcugc

SEQ ID NO: 1243154 - RNA, 16 nt, Human
cagcugcauuccgcag

SEQ ID NO: 1243155 - RNA, 15 nt, Human
cagcugccaggagca

SEQ ID NO: 1243156 - RNA, 19 nt, Human
cagcugccaggagcacggc

SEQ ID NO: 1243157 - RNA, 11 nt, Human
cagcugccagu

SEQ ID NO: 1243158 - RNA, 15 nt, Human
cagcugccagugucc

SEQ ID NO: 1243159 - RNA, 16 nt, Human
cagcugcccccagagc

SEQ ID NO: 1243160 - RNA, 17 nt, Human
cagcugcccccagagcc

SEQ ID NO: 1243161 - RNA, 18 nt, Human
cagcugcccccagagcca

SEQ ID NO: 1243162 - RNA, 20 nt, Human
cagcugcccccagagccaca

SEQ ID NO: 1243163 - RNA, 22 nt, Human
cagcugcccccagagccacagu

SEQ ID NO: 1243164 - RNA, 21 nt, Human
cagcugcccccagagccacag

SEQ ID NO: 1243165 - RNA, 17 nt, Human
cagcugccccggccccu

SEQ ID NO: 1243166 - RNA, 21 nt, Human
cagcucccacaagccucugcc

SEQ ID NO: 1243167 - RNA, 19 nt, Human
cagcucccacaagccucug

SEQ ID NO: 1243168 - RNA, 19 nt, Human
cagcugcaagguacucugg

SEQ ID NO: 1243169 - RNA, 20 nt, Human
cagcugcaagguacucuggu

SEQ ID NO: 1243170 - RNA, 22 nt, Human
cagcugcaagguacucugguga

SEQ ID NO: 1243171 - RNA, 19 nt, Human
caggaaagcgccuccaacc

SEQ ID NO: 1243172 - RNA, 15 nt, Human
caggaaaggaaucau

SEQ ID NO: 1243173 - RNA, 18 nt, Human
caggaaaggcccagccac

SEQ ID NO: 1243174 - RNA, 20 nt, Human
caggaaagcgccuccaaccc

SEQ ID NO: 1243175 - RNA, 13 nt, Human
cagcuucagugau

SEQ ID NO: 1243176 - RNA, 19 nt, Human
caggaaaggaaucauuucu

SEQ ID NO: 1243177 - RNA, 13 nt, Human
caggaaaugaaaa

SEQ ID NO: 1243178 - RNA, 20 nt, Human
caggaaaugaaaaugucuug

SEQ ID NO: 1243179 - RNA, 21 nt, Human
caggaaaugaaaaugucuugu

SEQ ID NO: 1243180 - RNA, 14 nt, Human
caggaacaaacagg

SEQ ID NO: 1243181 - RNA, 22 nt, Human
caggaacaaacagggcugccuu

SEQ ID NO: 1243182 - RNA, 15 nt, Human
caggaacaaacaggg

SEQ ID NO: 1243183 - RNA, 11 nt, Human
cagcugugccu

SEQ ID NO: 1243184 - RNA, 12 nt, Human
cagcugugccuc

SEQ ID NO: 1243185 - RNA, 13 nt, Human
cagcugugccucg

SEQ ID NO: 1243186 - RNA, 14 nt, Human
cagcugugccucgc

SEQ ID NO: 1243187 - RNA, 12 nt, Human
cagcugccugca

SEQ ID NO: 1243188 - RNA, 16 nt, Human
cagcugucuuuuggag

SEQ ID NO: 1243189 - RNA, 18 nt, Human
cagcugucuuuuggagga

SEQ ID NO: 1243190 - RNA, 17 nt, Human
cagcugucuuuuggagg

SEQ ID NO: 1243191 - RNA, 17 nt, Human
cagcugugccucgcucc

SEQ ID NO: 1243192 - RNA, 20 nt, Human
cagcugugccucgcucccca

SEQ ID NO: 1243193 - RNA, 15 nt, Human
cagcccuucuuucca

SEQ ID NO: 1243194 - RNA, 23 nt, Human
cagcccuuaugcgguuaauuuug

SEQ ID NO: 1243195 - RNA, 16 nt, Human
cagcccuuccaaacuc

SEQ ID NO: 1243196 - RNA, 19 nt, Human
cagcccuucuuuccacaga

SEQ ID NO: 1243197 - RNA, 20 nt, Human
cagcccuucuuuccacagaa

SEQ ID NO: 1243198 - RNA, 16 nt, Human
cagccgagcaggaggc

SEQ ID NO: 1243199 - RNA, 17 nt, Human
cagccgagcaggaggcc

SEQ ID NO: 1243200 - RNA, 18 nt, Human
cagccgagcaggaggccu

SEQ ID NO: 1243201 - RNA, 19 nt, Human
cagccgagcaggaggccua

SEQ ID NO: 1243202 - RNA, 23 nt, Human
cagccgagcaggaggccuaggag

SEQ ID NO: 1243203 - RNA, 21 nt, Human
cagccgagcaggaggccuagg

SEQ ID NO: 1243204 - RNA, 11 nt, Human
cagccgcuugg

SEQ ID NO: 1243205 - RNA, 12 nt, Human
cagccgcuuggc

SEQ ID NO: 1243206 - RNA, 21 nt, Human
cagccgcuuggcgaugccagc

SEQ ID NO: 1243207 - RNA, 13 nt, Human
cagccggcacagg

SEQ ID NO: 1243208 - RNA, 15 nt, Human
cagccggcacagggu

SEQ ID NO: 1243209 - RNA, 17 nt, Human
cagccggcacagggucu

SEQ ID NO: 1243210 - RNA, 18 nt, Human
cagccggcacagggucug

SEQ ID NO: 1243211 - RNA, 23 nt, Human
cagccggcacagggucugcucuu

SEQ ID NO: 1243212 - RNA, 23 nt, Human
cagccgcuuggcgaugccagcca

SEQ ID NO: 1243213 - RNA, 23 nt, Human
cagccucugggggguggccaggc

SEQ ID NO: 1243214 - RNA, 16 nt, Human
cagccugagcaacucu

SEQ ID NO: 1243215 - RNA, 20 nt, Human
cagccugagcaacucuugau

SEQ ID NO: 1243216 - RNA, 22 nt, Human
cagccugagcgacagugagacu

SEQ ID NO: 1243217 - RNA, 19 nt, Human
cagccugagcgacagugag

SEQ ID NO: 1243218 - RNA, 18 nt, Human
cagccugagcgacaguga

SEQ ID NO: 1243219 - RNA, 22 nt, Human
cagccugaaccccagggcugua

SEQ ID NO: 1243220 - RNA, 20 nt, Human
cagccugaaccccagggcug

SEQ ID NO: 1243221 - RNA, 19 nt, Human
cagcgucggucugugcccc

SEQ ID NO: 1243222 - RNA, 15 nt, Human
cagcgugcuuuaaaa

SEQ ID NO: 1243223 - RNA, 21 nt, Human
cagccugagcaacucuugauu

SEQ ID NO: 1243224 - RNA, 22 nt, Human
cagcggugggaccuagggaggc

SEQ ID NO: 1243225 - RNA, 19 nt, Human
cagcggugggaccuaggga

SEQ ID NO: 1243226 - RNA, 15 nt, Human
cagcguccuccucug

SEQ ID NO: 1243227 - RNA, 16 nt, Human
cagcguccuccucugu

SEQ ID NO: 1243228 - RNA, 18 nt, Human
cagcguccuccucuguga

SEQ ID NO: 1243229 - RNA, 18 nt, Human
cagcgucggucugugccc

SEQ ID NO: 1243230 - RNA, 22 nt, Human
cagcacagccucuuagaugcag

SEQ ID NO: 1243231 - RNA, 19 nt, Human
cagcacacagggcagugag

SEQ ID NO: 1243232 - RNA, 22 nt, Human
cagcaccggaccagccuggccc

SEQ ID NO: 1243233 - RNA, 13 nt, Human
cagcacagccaac

SEQ ID NO: 1243234 - RNA, 15 nt, Human
cagcaccggaccagc

SEQ ID NO: 1243235 - RNA, 17 nt, Human
cagcaccggaccagccu

SEQ ID NO: 1243236 - RNA, 18 nt, Human
cagcaccggaccagccug

SEQ ID NO: 1243237 - RNA, 19 nt, Human
cagcaccggaccagccugg

SEQ ID NO: 1243238 - RNA, 20 nt, Human
cagcaccggaccagccuggc

SEQ ID NO: 1243239 - RNA, 21 nt, Human
cagcaccggaccagccuggcc

SEQ ID NO: 1243240 - RNA, 16 nt, Human
cagcaccguucugugc

SEQ ID NO: 1243241 - RNA, 17 nt, Human
cagcaccguucugugca

SEQ ID NO: 1243242 - RNA, 18 nt, Human
cagcaccguucugugcac

SEQ ID NO: 1243243 - RNA, 16 nt, Human
cagauaugauucaaau

SEQ ID NO: 1243244 - RNA, 17 nt, Human
cagauaugauucaaaug

SEQ ID NO: 1243245 - RNA, 19 nt, Human
cagauaugauucaaauguc

SEQ ID NO: 1243246 - RNA, 15 nt, Human
cagauauuugucaug

SEQ ID NO: 1243247 - RNA, 22 nt, Human
cagaggggccugccaccuggac

SEQ ID NO: 1243248 - RNA, 21 nt, Human
cagaggggccugccaccugga

SEQ ID NO: 1243249 - RNA, 14 nt, Human
cagaggggccugcc

SEQ ID NO: 1243250 - RNA, 17 nt, Human
cagaggggccugccacc

SEQ ID NO: 1243251 - RNA, 20 nt, Human
cagaggggccugccaccugg

SEQ ID NO: 1243252 - RNA, 23 nt, Human
cagagcuucccugacucauucug

SEQ ID NO: 1243253 - RNA, 10 nt, Human
cagagggcug

SEQ ID NO: 1243254 - RNA, 11 nt, Human
cagagggcugg

SEQ ID NO: 1243255 - RNA, 12 nt, Human
cagagggcugga

SEQ ID NO: 1243256 - RNA, 13 nt, Human
cagagggcuggag

SEQ ID NO: 1243257 - RNA, 14 nt, Human
cagagggcuggagg

SEQ ID NO: 1243258 - RNA, 15 nt, Human
cagagggcuggaggc

SEQ ID NO: 1243259 - RNA, 17 nt, Human
cagagggcuggaggccc

SEQ ID NO: 1243260 - RNA, 18 nt, Human
cagagggcuggaggccca

SEQ ID NO: 1243261 - RNA, 19 nt, Human
cagagggcuggaggcccag

SEQ ID NO: 1243262 - RNA, 20 nt, Human
cagagggcuggaggcccagg

SEQ ID NO: 1243263 - RNA, 16 nt, Human
cagaggggcagaggcc

SEQ ID NO: 1243264 - RNA, 21 nt, Human
cagagggcuggaggcccaggc

SEQ ID NO: 1243265 - RNA, 11 nt, Human
cagagcuggug

SEQ ID NO: 1243266 - RNA, 12 nt, Human
cagagcuggugc

SEQ ID NO: 1243267 - RNA, 13 nt, Human
cagagcuggugcg

SEQ ID NO: 1243268 - RNA, 18 nt, Human
cagagcuggugcggcugg

SEQ ID NO: 1243269 - RNA, 19 nt, Human
cagagcuggugcggcuggc

SEQ ID NO: 1243270 - RNA, 20 nt, Human
cagagcuggugcggcuggcc

SEQ ID NO: 1243271 - RNA, 21 nt, Human
cagagcuggugcggcuggcca

SEQ ID NO: 1243272 - RNA, 22 nt, Human
cagagcuggugcggcuggccau

SEQ ID NO: 1243273 - RNA, 23 nt, Human
cagagcuggugcggcuggccaug

SEQ ID NO: 1243274 - RNA, 13 nt, Human
cagagcuucccug

SEQ ID NO: 1243275 - RNA, 14 nt, Human
cagagcuucccuga

SEQ ID NO: 1243276 - RNA, 18 nt, Human
cagagcuucccugacuca

SEQ ID NO: 1243277 - RNA, 17 nt, Human
auuccagagcacugcuc

SEQ ID NO: 1243278 - RNA, 20 nt, Human
auucaggaaaaggccugggg

SEQ ID NO: 1243279 - RNA, 17 nt, Human
auuccagccaucaccuu

SEQ ID NO: 1243280 - RNA, 21 nt, Human
auuccagagaguggcuccucc

SEQ ID NO: 1243281 - RNA, 19 nt, Human
auuccagagaguggcuccu

SEQ ID NO: 1243282 - RNA, 13 nt, Human
auuccagccccuc

SEQ ID NO: 1243283 - RNA, 14 nt, Human
auuccagccccucu

SEQ ID NO: 1243284 - RNA, 17 nt, Human
auuccagccccucuggu

SEQ ID NO: 1243285 - RNA, 17 nt, Human
auucccagagcaaaaua

SEQ ID NO: 1243286 - RNA, 19 nt, Human
auucccagagcaaaauaau

SEQ ID NO: 1243287 - RNA, 19 nt, Human
auucccagguaggccaagg

SEQ ID NO: 1243288 - RNA, 23 nt, Human
auucccagguaggccaagguguc

SEQ ID NO: 1243289 - RNA, 13 nt, Human
auucccccagugc

SEQ ID NO: 1243290 - RNA, 23 nt, Human
auuccccgucucugguuccuccc

SEQ ID NO: 1243291 - RNA, 13 nt, Human
auuccccucugcu

SEQ ID NO: 1243292 - RNA, 15 nt, Human
auuccccucugcugc

SEQ ID NO: 1243293 - RNA, 22 nt, Human
auuccccucugcugcugucccu

SEQ ID NO: 1243294 - RNA, 15 nt, Human
auucccgcaguggga

SEQ ID NO: 1243295 - RNA, 16 nt, Human
auucccguuuugucac

SEQ ID NO: 1243296 - RNA, 18 nt, Human
auucccguuuugucacuu

SEQ ID NO: 1243297 - RNA, 21 nt, Human
auucccguuuugucacuuuuu

SEQ ID NO: 1243298 - RNA, 23 nt, Human
auucccguuuugucacuuuuucu

SEQ ID NO: 1243299 - RNA, 17 nt, Human
auucccuagaaacuucc

SEQ ID NO: 1243300 - RNA, 20 nt, Human
auucccuagaaacuuccaaa

SEQ ID NO: 1243301 - RNA, 21 nt, Human
auucccuagaaacuuccaaau

SEQ ID NO: 1243302 - RNA, 18 nt, Human
auucuaacggucuguucu

SEQ ID NO: 1243303 - RNA, 12 nt, Human
auucuaagacuu

SEQ ID NO: 1243304 - RNA, 20 nt, Human
auucuaagacuuacucuaag

SEQ ID NO: 1243305 - RNA, 22 nt, Human
auucuaagacuuacucuaagau

SEQ ID NO: 1243306 - RNA, 15 nt, Human
auucuaagugaaauu

SEQ ID NO: 1243307 - RNA, 23 nt, Human
auucuaagacuuacucuaagauc

SEQ ID NO: 1243308 - RNA, 23 nt, Human
auucuaaugaugaucaauuauag

SEQ ID NO: 1243309 - RNA, 20 nt, Human
auucacauuguauucagagu

SEQ ID NO: 1243310 - RNA, 13 nt, Human
auucacauuguau

SEQ ID NO: 1243311 - RNA, 23 nt, Human
auucagaaccccaacuacugugu

SEQ ID NO: 1243312 - RNA, 14 nt, Human
auucagaagaaaaa

SEQ ID NO: 1243313 - RNA, 16 nt, Human
auucagaagaaaaaga

SEQ ID NO: 1243314 - RNA, 17 nt, Human
auucagaagaaaaagaa

SEQ ID NO: 1243315 - RNA, 18 nt, Human
auucagaagaaaaagaag

SEQ ID NO: 1243316 - RNA, 13 nt, Human
auucagacagaug

SEQ ID NO: 1243317 - RNA, 22 nt, Human
auucaggaagcagcuuucccca

SEQ ID NO: 1243318 - RNA, 18 nt, Human
auucaggaaaaggccugg

SEQ ID NO: 1243319 - RNA, 19 nt, Human
auucaggaaaaggccuggg

SEQ ID NO: 1243320 - RNA, 21 nt, Human
auucaggaaaaggccuggggu

SEQ ID NO: 1243321 - RNA, 14 nt, Human
auucagacagauga

SEQ ID NO: 1243322 - RNA, 20 nt, Human
auucagacagaugaggcuuu

SEQ ID NO: 1243323 - RNA, 17 nt, Human
auucaggaaaaggccug

SEQ ID NO: 1243324 - RNA, 16 nt, Human
auuauuauucuucaua

SEQ ID NO: 1243325 - RNA, 15 nt, Human
auuauuauuuguguu

SEQ ID NO: 1243326 - RNA, 21 nt, Human
auuauuugagaagcugcucaa

SEQ ID NO: 1243327 - RNA, 13 nt, Human
auuauuugagaag

SEQ ID NO: 1243328 - RNA, 11 nt, Human
auuauuugcau

SEQ ID NO: 1243329 - RNA, 12 nt, Human
auuauuuugaug

SEQ ID NO: 1243330 - RNA, 12 nt, Human
auuauuuuguga

SEQ ID NO: 1243331 - RNA, 23 nt, Human
auucacaguucuuugggccagac

SEQ ID NO: 1243332 - RNA, 17 nt, Human
auucacaucuaaccuca

SEQ ID NO: 1243333 - RNA, 20 nt, Human
auucacaucuaaccucaucu

SEQ ID NO: 1243334 - RNA, 18 nt, Human
auucacaucgcagauucu

SEQ ID NO: 1243335 - RNA, 15 nt, Human
auucacaucucauuu

SEQ ID NO: 1243336 - RNA, 16 nt, Human
auucacaucucauuuu

SEQ ID NO: 1243337 - RNA, 15 nt, Human
auuauuauuuggccc

SEQ ID NO: 1243338 - RNA, 15 nt, Human
auuauuauucuucau

SEQ ID NO: 1243339 - RNA, 19 nt, Human
auuauuacuuguaaauaua

SEQ ID NO: 1243340 - RNA, 20 nt, Human
auuauuacuuguaaauauaa

SEQ ID NO: 1243341 - RNA, 23 nt, Human
auuauuacuuguaaauauaaaga

SEQ ID NO: 1243342 - RNA, 22 nt, Human
auuauuacuuguaaauauaaag

SEQ ID NO: 1243343 - RNA, 14 nt, Human
auuauuacuuuugc

SEQ ID NO: 1243344 - RNA, 15 nt, Human
auuauuacuuuugcu

SEQ ID NO: 1243345 - RNA, 23 nt, Human
auuauuagaaucaaacauuuuga

SEQ ID NO: 1243346 - RNA, 17 nt, Human
auuauuagaaucaaaca

SEQ ID NO: 1243347 - RNA, 22 nt, Human
auuauuaguuuugauuuaaugu

SEQ ID NO: 1243348 - RNA, 20 nt, Human
auuauuacuuauuuuugaca

SEQ ID NO: 1243349 - RNA, 21 nt, Human
auuauuacuuauuuuugacag

SEQ ID NO: 1243350 - RNA, 13 nt, Human
auuauuacuugua

SEQ ID NO: 1243351 - RNA, 14 nt, Human
auuauuacuuguaa

SEQ ID NO: 1243352 - RNA, 16 nt, Human
auuauuacuuguaaau

SEQ ID NO: 1243353 - RNA, 17 nt, Human
auuauuacuuguaaaua

SEQ ID NO: 1243354 - RNA, 15 nt, Human
auuauauuuauuacu

SEQ ID NO: 1243355 - RNA, 18 nt, Human
auuauauuuauuacugua

SEQ ID NO: 1243356 - RNA, 23 nt, Human
auuauauuucuauuuuauuauga

SEQ ID NO: 1243357 - RNA, 22 nt, Human
auuauauuucuauuuuauuaug

SEQ ID NO: 1243358 - RNA, 13 nt, Human
auuaucuaauuua

SEQ ID NO: 1243359 - RNA, 14 nt, Human
auuaucuaauuuau

SEQ ID NO: 1243360 - RNA, 18 nt, Human
auuauauguucagauuau

SEQ ID NO: 1243361 - RNA, 16 nt, Human
auuauacuuguaauua

SEQ ID NO: 1243362 - RNA, 17 nt, Human
auuauacuuguaauuau

SEQ ID NO: 1243363 - RNA, 17 nt, Human
auuauauguuguaagca

SEQ ID NO: 1243364 - RNA, 18 nt, Human
auuauacuuguaauuaug

SEQ ID NO: 1243365 - RNA, 14 nt, Human
auuauacgcuggca

SEQ ID NO: 1243366 - RNA, 14 nt, Human
auuauacuuguaau

SEQ ID NO: 1243367 - RNA, 19 nt, Human
auuauacccccugcaaagc

SEQ ID NO: 1243368 - RNA, 18 nt, Human
auuauaccaaaauguugc

SEQ ID NO: 1243369 - RNA, 19 nt, Human
auuauaccaaaauguugcu

SEQ ID NO: 1243370 - RNA, 20 nt, Human
auuauaccaaaauguugcug

SEQ ID NO: 1243371 - RNA, 15 nt, Human
auuauaccaaaaugu

SEQ ID NO: 1243372 - RNA, 16 nt, Human
auuauaccaaaauguu

SEQ ID NO: 1243373 - RNA, 14 nt, Human
auuauauuaugaag

SEQ ID NO: 1243374 - RNA, 20 nt, Human
auuauauuauuaguuuugau

SEQ ID NO: 1243375 - RNA, 15 nt, Human
auuauauuuacaaau

SEQ ID NO: 1243376 - RNA, 11 nt, Human
uuuguggaaaa

SEQ ID NO: 1243377 - RNA, 12 nt, Human
auuaguuauaua

SEQ ID NO: 1243378 - RNA, 12 nt, Human
auuaguuuccuu

SEQ ID NO: 1243379 - RNA, 17 nt, Human
auuaguuuccuuuuuaa

SEQ ID NO: 1243380 - RNA, 18 nt, Human
auuaguuuccuuuuuaau

SEQ ID NO: 1243381 - RNA, 11 nt, Human
auuaguuuuaa

SEQ ID NO: 1243382 - RNA, 16 nt, Human
auuaguuuuaaaauga

SEQ ID NO: 1243383 - RNA, 20 nt, Human
auuaguuuccuuuuuaauau

SEQ ID NO: 1243384 - RNA, 20 nt, Human
auuauacuuguaauuaugga

SEQ ID NO: 1243385 - RNA, 20 nt, Human
auucuucccuaucuuugcca

SEQ ID NO: 1243386 - RNA, 12 nt, Human
auucuuccuagu

SEQ ID NO: 1243387 - RNA, 21 nt, Human
auucuucccuaucuuugccac

SEQ ID NO: 1243388 - RNA, 17 nt, Human
auucuuccuaguuuucu

SEQ ID NO: 1243389 - RNA, 19 nt, Human
auucuuccuaguuuucucc

SEQ ID NO: 1243390 - RNA, 13 nt, Human
auucuuccaucug

SEQ ID NO: 1243391 - RNA, 14 nt, Human
auucuuccaucuga

SEQ ID NO: 1243392 - RNA, 15 nt, Human
auucuuccaucugau

SEQ ID NO: 1243393 - RNA, 23 nt, Human
auucuuccaucugauugugaugu

SEQ ID NO: 1243394 - RNA, 19 nt, Human
auugaaaaaauagagccug

SEQ ID NO: 1243395 - RNA, 22 nt, Human
auugaaaaaauagagccugagg

SEQ ID NO: 1243396 - RNA, 14 nt, Human
auugaaaaaauaga

SEQ ID NO: 1243397 - RNA, 18 nt, Human
auugaaaaaauagagccu

SEQ ID NO: 1243398 - RNA, 14 nt, Human
auugaaauguaagg

SEQ ID NO: 1243399 - RNA, 17 nt, Human
auugacacuuaaaaaug

SEQ ID NO: 1243400 - RNA, 15 nt, Human
auugacacuuaaaaa

SEQ ID NO: 1243401 - RNA, 17 nt, Human
auugacaacacccauuu

SEQ ID NO: 1243402 - RNA, 12 nt, Human
auugacacagaa

SEQ ID NO: 1243403 - RNA, 14 nt, Human
auugacacagaaaa

SEQ ID NO: 1243404 - RNA, 23 nt, Human
auugaaccuuugugcccuaucac

SEQ ID NO: 1243405 - RNA, 18 nt, Human
auugaaccuuugugcccu

SEQ ID NO: 1243406 - RNA, 17 nt, Human
auugacaacaguuacau

SEQ ID NO: 1243407 - RNA, 20 nt, Human
auugacacuuaaaaaugguu

SEQ ID NO: 1243408 - RNA, 19 nt, Human
auugacacuuaaaaauggu

SEQ ID NO: 1243409 - RNA, 17 nt, Human
auugacacagaaaaugu

SEQ ID NO: 1243410 - RNA, 18 nt, Human
auugacacaguaccauuu

SEQ ID NO: 1243411 - RNA, 22 nt, Human
auugacgacaagugcugaacag

SEQ ID NO: 1243412 - RNA, 21 nt, Human
auugacgacaagugcugaaca

SEQ ID NO: 1243413 - RNA, 14 nt, Human
auugaccuggaugg

SEQ ID NO: 1243414 - RNA, 11 nt, Human
auugacuucuu

SEQ ID NO: 1243415 - RNA, 14 nt, Human
auugacuuguauau

SEQ ID NO: 1243416 - RNA, 22 nt, Human
auugacuuuccccaccagaugc

SEQ ID NO: 1243417 - RNA, 19 nt, Human
auucugccuuugccaggug

SEQ ID NO: 1243418 - RNA, 16 nt, Human
auucugccuuugccag

SEQ ID NO: 1243419 - RNA, 15 nt, Human
auucugccucucuag

SEQ ID NO: 1243420 - RNA, 16 nt, Human
auucugccucucuagg

SEQ ID NO: 1243421 - RNA, 17 nt, Human
auucugccucucuagga

SEQ ID NO: 1243422 - RNA, 22 nt, Human
auucucauuggaaauuuagcau

SEQ ID NO: 1243423 - RNA, 23 nt, Human
auucucauuggaaauuuagcauu

SEQ ID NO: 1243424 - RNA, 13 nt, Human
auucuccacagca

SEQ ID NO: 1243425 - RNA, 14 nt, Human
auucuccacagcaa

SEQ ID NO: 1243426 - RNA, 16 nt, Human
auucuccacagcaacc

SEQ ID NO: 1243427 - RNA, 22 nt, Human
auucucaugccucagccuccug

SEQ ID NO: 1243428 - RNA, 12 nt, Human
auucucauuaaa

SEQ ID NO: 1243429 - RNA, 19 nt, Human
auucucauuaaaagaauau

SEQ ID NO: 1243430 - RNA, 18 nt, Human
auucucauuaaaagaaua

SEQ ID NO: 1243431 - RNA, 11 nt, Human
auucucauugg

SEQ ID NO: 1243432 - RNA, 21 nt, Human
auucucauuggaaauuuagca

SEQ ID NO: 1243433 - RNA, 15 nt, Human
auucuagcuuugagc

SEQ ID NO: 1243434 - RNA, 14 nt, Human
auuuuguuuauaag

SEQ ID NO: 1243435 - RNA, 18 nt, Human
auuuuguuuuuccuucca

SEQ ID NO: 1243436 - RNA, 21 nt, Human
auuuuuauuuuugcugagacu

SEQ ID NO: 1243437 - RNA, 22 nt, Human
auuuuucaauagcacauaugga

SEQ ID NO: 1243438 - RNA, 21 nt, Human
auuuuuccaacuacuaauaga

SEQ ID NO: 1243439 - RNA, 10 nt, Human
auuuuuccua

SEQ ID NO: 1243440 - RNA, 20 nt, Human
auuuuuccuccacugaacua

SEQ ID NO: 1243441 - RNA, 12 nt, Human
auuuuucuaacu

SEQ ID NO: 1243442 - RNA, 19 nt, Human
auuuuucuaacuacaaagg

SEQ ID NO: 1243443 - RNA, 15 nt, Human
auuuuucacuucaaa

SEQ ID NO: 1243444 - RNA, 17 nt, Human
auuuuucagagaauaga

SEQ ID NO: 1243445 - RNA, 20 nt, Human
auuuuucaauagcacauaug

SEQ ID NO: 1243446 - RNA, 15 nt, Human
auuuuucauccuaaa

SEQ ID NO: 1243447 - RNA, 18 nt, Human
auuuuucaugauaaugaa

SEQ ID NO: 1243448 - RNA, 19 nt, Human
auuuuucaugauuuugaaa

SEQ ID NO: 1243449 - RNA, 13 nt, Human
auuuuuccaacua

SEQ ID NO: 1243450 - RNA, 14 nt, Human
auuuuucuucuuga

SEQ ID NO: 1243451 - RNA, 15 nt, Human
auuuuucuuuaacug

SEQ ID NO: 1243452 - RNA, 16 nt, Human
auuuuucuuuaacugc

SEQ ID NO: 1243453 - RNA, 13 nt, Human
auuuuucuuuaca

SEQ ID NO: 1243454 - RNA, 14 nt, Human
auuuuucuuuacaa

SEQ ID NO: 1243455 - RNA, 15 nt, Human
auuuuucuuuacaaa

SEQ ID NO: 1243456 - RNA, 16 nt, Human
auuuuucuuuacaaaa

SEQ ID NO: 1243457 - RNA, 15 nt, Human
auuuuugacaguguu

SEQ ID NO: 1243458 - RNA, 21 nt, Human
auuuuugauaaagccucaagg

SEQ ID NO: 1243459 - RNA, 21 nt, Human
auuuuugauacuaagcauuga

SEQ ID NO: 1243460 - RNA, 19 nt, Human
auuuuugauacuaagcauu

SEQ ID NO: 1243461 - RNA, 12 nt, Human
auuuuugccucu

SEQ ID NO: 1243462 - RNA, 18 nt, Human
auuuuugccucuuccagu

SEQ ID NO: 1243463 - RNA, 21 nt, Human
auuuuugccucuuccagucuu

SEQ ID NO: 1243464 - RNA, 15 nt, Human
auuuuugcugagacu

SEQ ID NO: 1243465 - RNA, 23 nt, Human
auuuuuggaagaggacuccuuaa

SEQ ID NO: 1243466 - RNA, 17 nt, Human
auuuuuggagguuuauu

SEQ ID NO: 1243467 - RNA, 19 nt, Human
auuuuuggagguuuauuac

SEQ ID NO: 1243468 - RNA, 21 nt, Human
auuuuuggggggaguaaagaa

SEQ ID NO: 1243469 - RNA, 19 nt, Human
auuuuuggcagucugaauu

SEQ ID NO: 1243470 - RNA, 18 nt, Human
auuuuuggucauuguaau

SEQ ID NO: 1243471 - RNA, 18 nt, Human
auuuuuggagguuuauua

SEQ ID NO: 1243472 - RNA, 19 nt, Human
auuuuuugaaaagcagaca

SEQ ID NO: 1243473 - RNA, 16 nt, Human
auuuuuugaaaagcag

SEQ ID NO: 1243474 - RNA, 20 nt, Human
auuuuuucucuaggaaauau

SEQ ID NO: 1243475 - RNA, 23 nt, Human
auuuuuucucuaggaaauauuua

SEQ ID NO: 1243476 - RNA, 22 nt, Human
auuuuuugggcagcaauuuaaa

SEQ ID NO: 1243477 - RNA, 14 nt, Human
auuuuuuguauaau

SEQ ID NO: 1243478 - RNA, 15 nt, Human
auuuuuuguauaauu

SEQ ID NO: 1243479 - RNA, 18 nt, Human
auuuuuuguuaaaugauu

SEQ ID NO: 1243480 - RNA, 16 nt, Human
auuuuuuguauaauug

SEQ ID NO: 1243481 - RNA, 12 nt, Human
auuuuuuguuga

SEQ ID NO: 1243482 - RNA, 14 nt, Human
auuuuuuguugaca

SEQ ID NO: 1243483 - RNA, 16 nt, Human
auuuuuuguugacauu

SEQ ID NO: 1243484 - RNA, 21 nt, Human
auuuuuuguugacauuagucu

SEQ ID NO: 1243485 - RNA, 17 nt, Human
auuuuuuguugacauua

SEQ ID NO: 1243486 - RNA, 19 nt, Human
auuuuuuacagcugccugc

SEQ ID NO: 1243487 - RNA, 15 nt, Human
auuuuuuaauuauua

SEQ ID NO: 1243488 - RNA, 20 nt, Human
auuuuuuaauuauuauuuau

SEQ ID NO: 1243489 - RNA, 13 nt, Human
auuuuuuaggaaa

SEQ ID NO: 1243490 - RNA, 14 nt, Human
auuuuuuaggaaau

SEQ ID NO: 1243491 - RNA, 17 nt, Human
auuuuuuauaaaauaca

SEQ ID NO: 1243492 - RNA, 21 nt, Human
auuuuuuaagugaaaauauag

SEQ ID NO: 1243493 - RNA, 14 nt, Human
auuuuuuaauaauu

SEQ ID NO: 1243494 - RNA, 16 nt, Human
auuuuuuagugacuaa

SEQ ID NO: 1243495 - RNA, 16 nt, Human
auuuuuuaucaugcau

SEQ ID NO: 1243496 - RNA, 21 nt, Human
auuuuuuaucaugcauguccu

SEQ ID NO: 1243497 - RNA, 15 nt, Human
auuuuuucaguauua

SEQ ID NO: 1243498 - RNA, 22 nt, Human
auuuuuucaguauuauauguac

SEQ ID NO: 1243499 - RNA, 12 nt, Human
auuuuuuccaaa

SEQ ID NO: 1243500 - RNA, 13 nt, Human
auuuuuuccaaaa

SEQ ID NO: 1243501 - RNA, 23 nt, Human
auuuuuuccaaaaucucccauuu

SEQ ID NO: 1243502 - RNA, 14 nt, Human
auuuuuuccaaaau

SEQ ID NO: 1243503 - RNA, 20 nt, Human
auuuuuuccuucaaaguuua

SEQ ID NO: 1243504 - RNA, 21 nt, Human
auuuuuuccuucaaaguuuaa

SEQ ID NO: 1243505 - RNA, 23 nt, Human
auuuuuuccuucaaaguuuaaua

SEQ ID NO: 1243506 - RNA, 22 nt, Human
auuuuugugauuuugugauuga

SEQ ID NO: 1243507 - RNA, 15 nt, Human
auuuuuguaguagcg

SEQ ID NO: 1243508 - RNA, 12 nt, Human
auuuuuguaauu

SEQ ID NO: 1243509 - RNA, 18 nt, Human
auuuuuuaaauugaauuc

SEQ ID NO: 1243510 - RNA, 13 nt, Human
auuuuuuaaauuc

SEQ ID NO: 1243511 - RNA, 21 nt, Human
auuuuuguuuuguuuuuacaa

SEQ ID NO: 1243512 - RNA, 14 nt, Human
auuuuuuaaaaaag

SEQ ID NO: 1243513 - RNA, 17 nt, Human
auuuuuuaaaaaagcuu

SEQ ID NO: 1243514 - RNA, 18 nt, Human
auuuuuuaaaaaagcuua

SEQ ID NO: 1243515 - RNA, 19 nt, Human
auuuuuuaaaaaagcuuaa

SEQ ID NO: 1243516 - RNA, 20 nt, Human
auuuuuuaaaaaagcuuaaa

SEQ ID NO: 1243517 - RNA, 15 nt, Human
auuuuuuaaaaagca

SEQ ID NO: 1243518 - RNA, 16 nt, Human
auuuuuuaaaaagcaa

SEQ ID NO: 1243519 - RNA, 18 nt, Human
auuuuuuaaaaagcaaaa

SEQ ID NO: 1243520 - RNA, 17 nt, Human
auuuuaauaaacacucu

SEQ ID NO: 1243521 - RNA, 16 nt, Human
auuuuaauaaacacuc

SEQ ID NO: 1243522 - RNA, 15 nt, Human
auuuuaauaaacacu

SEQ ID NO: 1243523 - RNA, 15 nt, Human
auuuuaauaaaaaua

SEQ ID NO: 1243524 - RNA, 18 nt, Human
auuuuaauaaaaauaauu

SEQ ID NO: 1243525 - RNA, 12 nt, Human
auuuuaauaaug

SEQ ID NO: 1243526 - RNA, 13 nt, Human
auuuuaauaauau

SEQ ID NO: 1243527 - RNA, 15 nt, Human
auuuucuauaauuua

SEQ ID NO: 1243528 - RNA, 14 nt, Human
auuuucuauaauuu

SEQ ID NO: 1243529 - RNA, 18 nt, Human
auuuuccuggugccaauu

SEQ ID NO: 1243530 - RNA, 22 nt, Human
auuuuccuggugccaauuucaa

SEQ ID NO: 1243531 - RNA, 14 nt, Human
auuuugaugaacaa

SEQ ID NO: 1243532 - RNA, 23 nt, Human
auuuuccuggugccaauuucaag

SEQ ID NO: 1243533 - RNA, 16 nt, Human
auuuuccuguccucuu

SEQ ID NO: 1243534 - RNA, 19 nt, Human
auuuuccuguccucuuuca

SEQ ID NO: 1243535 - RNA, 21 nt, Human
auuuuccuguccucuuucagc

SEQ ID NO: 1243536 - RNA, 22 nt, Human
auuuuccuguccucuuucagcu

SEQ ID NO: 1243537 - RNA, 23 nt, Human
auuuuccuguccucuuucagcuc

SEQ ID NO: 1243538 - RNA, 19 nt, Human
auuuuccuguugucaagaa

SEQ ID NO: 1243539 - RNA, 17 nt, Human
auuuugauguaaagaug

SEQ ID NO: 1243540 - RNA, 18 nt, Human
auuuugauguaaagaugu

SEQ ID NO: 1243541 - RNA, 20 nt, Human
auuuugccaagggcauaaau

SEQ ID NO: 1243542 - RNA, 14 nt, Human
auuuugcuggaaua

SEQ ID NO: 1243543 - RNA, 18 nt, Human
auuuugccagugggaacu

SEQ ID NO: 1243544 - RNA, 19 nt, Human
auuuugccaagggcauaaa

SEQ ID NO: 1243545 - RNA, 13 nt, Human
auuuugcaaagau

SEQ ID NO: 1243546 - RNA, 16 nt, Human
auuuugcaaagauuua

SEQ ID NO: 1243547 - RNA, 21 nt, Human
auuuugcaaagauuuaaucug

SEQ ID NO: 1243548 - RNA, 21 nt, Human
auuuugcaaucccuuaauauc

SEQ ID NO: 1243549 - RNA, 18 nt, Human
auuuugcaaggugcauuu

SEQ ID NO: 1243550 - RNA, 17 nt, Human
auuuuguguuuaggaac

SEQ ID NO: 1243551 - RNA, 18 nt, Human
auuuugugaugcaaauaa

SEQ ID NO: 1243552 - RNA, 16 nt, Human
auuuuguuucagugca

SEQ ID NO: 1243553 - RNA, 15 nt, Human
auuuuguuuaaauua

SEQ ID NO: 1243554 - RNA, 11 nt, Human
auuuuguuuac

SEQ ID NO: 1243555 - RNA, 12 nt, Human
auuuuguuuaca

SEQ ID NO: 1243556 - RNA, 19 nt, Human
auuuuguugcuguuuugau

SEQ ID NO: 1243557 - RNA, 23 nt, Human
auuuuguugcuguuuugauuugu

SEQ ID NO: 1243558 - RNA, 15 nt, Human
auuuuguuggcauag

SEQ ID NO: 1243559 - RNA, 21 nt, Human
auuuuguuggcauagcucugg

SEQ ID NO: 1243560 - RNA, 17 nt, Human
auuuugugaugcaaaua

SEQ ID NO: 1243561 - RNA, 23 nt, Human
auuuugugguuuucgagauuauc

SEQ ID NO: 1243562 - RNA, 16 nt, Human
auuuuguguaagaaau

SEQ ID NO: 1243563 - RNA, 17 nt, Human
auuuuguguaagaaaua

SEQ ID NO: 1243564 - RNA, 18 nt, Human
auuuuguguaagaaauac

SEQ ID NO: 1243565 - RNA, 20 nt, Human
auuuuguguaagaaauacag

SEQ ID NO: 1243566 - RNA, 12 nt, Human
auuuuggaauuu

SEQ ID NO: 1243567 - RNA, 11 nt, Human
auuuuggaauu

SEQ ID NO: 1243568 - RNA, 20 nt, Human
auuuuguaaacucaaaauau

SEQ ID NO: 1243569 - RNA, 18 nt, Human
auuuuguaacgaagacac

SEQ ID NO: 1243570 - RNA, 19 nt, Human
auuuuguaacgaagacaca

SEQ ID NO: 1243571 - RNA, 17 nt, Human
auuuuguaacuuucucu

SEQ ID NO: 1243572 - RNA, 12 nt, Human
auuuuguaaguu

SEQ ID NO: 1243573 - RNA, 14 nt, Human
auuuuguaauaaua

SEQ ID NO: 1243574 - RNA, 19 nt, Human
auuuuguaauaauaaagaa

SEQ ID NO: 1243575 - RNA, 22 nt, Human
auuuuguaauaauaaagaauag

SEQ ID NO: 1243576 - RNA, 20 nt, Human
auuuuguaauguaucaaaua

SEQ ID NO: 1243577 - RNA, 23 nt, Human
auuuuguaauguaucaaauacau

SEQ ID NO: 1243578 - RNA, 16 nt, Human
auuuuguaucuugaug

SEQ ID NO: 1243579 - RNA, 19 nt, Human
auuuuguauuguuucaauu

SEQ ID NO: 1243580 - RNA, 14 nt, Human
auuuuggaauuugc

SEQ ID NO: 1243581 - RNA, 22 nt, Human
auuuguaguguuggagaagaac

SEQ ID NO: 1243582 - RNA, 14 nt, Human
auuuguauaaaaua

SEQ ID NO: 1243583 - RNA, 15 nt, Human
auuuguauaaaauaa

SEQ ID NO: 1243584 - RNA, 19 nt, Human
auuugucaugcugggauuu

SEQ ID NO: 1243585 - RNA, 23 nt, Human
auuuguaacccacugagaggaca

SEQ ID NO: 1243586 - RNA, 12 nt, Human
auuuguaaaucu

SEQ ID NO: 1243587 - RNA, 16 nt, Human
auuuguaaaucugcca

SEQ ID NO: 1243588 - RNA, 17 nt, Human
auuuguaaaucugccac

SEQ ID NO: 1243589 - RNA, 17 nt, Human
auuugggagacauguga

SEQ ID NO: 1243590 - RNA, 19 nt, Human
auuugggagacaugugaca

SEQ ID NO: 1243591 - RNA, 19 nt, Human
auuugggccugcuccagac

SEQ ID NO: 1243592 - RNA, 21 nt, Human
auuugggccugcuccagaccu

SEQ ID NO: 1243593 - RNA, 22 nt, Human
auuugggccugcuccagaccug

SEQ ID NO: 1243594 - RNA, 23 nt, Human
auuugggccugcuccagaccuga

SEQ ID NO: 1243595 - RNA, 15 nt, Human
auuugacuuuucugu

SEQ ID NO: 1243596 - RNA, 22 nt, Human
auuugacuuuucuguaauucag

SEQ ID NO: 1243597 - RNA, 16 nt, Human
auuugacuuuucugua

SEQ ID NO: 1243598 - RNA, 19 nt, Human
auuuggcuugacaaaggca

SEQ ID NO: 1243599 - RNA, 14 nt, Human
auuugggaagugaa

SEQ ID NO: 1243600 - RNA, 18 nt, Human
auuugggaagugaagacu

SEQ ID NO: 1243601 - RNA, 23 nt, Human
auuuuaaaagaaugauuaugaau

SEQ ID NO: 1243602 - RNA, 18 nt, Human
auuuuaaaauagcguucu

SEQ ID NO: 1243603 - RNA, 20 nt, Human
auuuuaaaauagcguucuug

SEQ ID NO: 1243604 - RNA, 22 nt, Human
auuuuaaaauagcguucuugua

SEQ ID NO: 1243605 - RNA, 23 nt, Human
auuuuaaaauagcguucuuguaa

SEQ ID NO: 1243606 - RNA, 13 nt, Human
auuuuaaaaucag

SEQ ID NO: 1243607 - RNA, 22 nt, Human
auuuuaaccuaugauauuuucu

SEQ ID NO: 1243608 - RNA, 21 nt, Human
auuugugaagguggaaauaaa

SEQ ID NO: 1243609 - RNA, 18 nt, Human
auuugugaagguggaaau

SEQ ID NO: 1243610 - RNA, 16 nt, Human
auuuuaaaagaaugau

SEQ ID NO: 1243611 - RNA, 23 nt, Human
auuugugaagguggaaauaaacu

SEQ ID NO: 1243612 - RNA, 23 nt, Human
auuugugaaaugauggugaaagu

SEQ ID NO: 1243613 - RNA, 17 nt, Human
auuucuaggacugaauu

SEQ ID NO: 1243614 - RNA, 18 nt, Human
auuucuaggacugaauua

SEQ ID NO: 1243615 - RNA, 14 nt, Human
auuucccucucuca

SEQ ID NO: 1243616 - RNA, 20 nt, Human
auuucccuuccuuccucucc

SEQ ID NO: 1243617 - RNA, 16 nt, Human
auuucccuuccuuccu

SEQ ID NO: 1243618 - RNA, 20 nt, Human
auuucccuacauuaaacaug

SEQ ID NO: 1243619 - RNA, 17 nt, Human
auuucccuacauuaaac

SEQ ID NO: 1243620 - RNA, 15 nt, Human
auuucccuacauuaa

SEQ ID NO: 1243621 - RNA, 20 nt, Human
auuucuaggacugaauuaug

SEQ ID NO: 1243622 - RNA, 23 nt, Human
auuucuaggacugaauuaugaaa

SEQ ID NO: 1243623 - RNA, 11 nt, Human
auuucuaggua

SEQ ID NO: 1243624 - RNA, 20 nt, Human
auuucuagguaggaaaugug

SEQ ID NO: 1243625 - RNA, 19 nt, Human
auuucuagguaggaaaugu

SEQ ID NO: 1243626 - RNA, 18 nt, Human
auuugaaacacuuugcau

SEQ ID NO: 1243627 - RNA, 20 nt, Human
auuucuugagguaaaagcau

SEQ ID NO: 1243628 - RNA, 17 nt, Human
auuucuauagccaaaaa

SEQ ID NO: 1243629 - RNA, 19 nt, Human
auuucuuccuaccaaguca

SEQ ID NO: 1243630 - RNA, 20 nt, Human
auuucuuccuaccaagucaa

SEQ ID NO: 1243631 - RNA, 23 nt, Human
auuucuuccuaccaagucaaacu

SEQ ID NO: 1243632 - RNA, 14 nt, Human
auuucuucuuacca

SEQ ID NO: 1243633 - RNA, 14 nt, Human
auuuauuuuaauaa

SEQ ID NO: 1243634 - RNA, 17 nt, Human
auuuauuuuaauaaugu

SEQ ID NO: 1243635 - RNA, 23 nt, Human
auuucauuuuucaauagcacaua

SEQ ID NO: 1243636 - RNA, 16 nt, Human
auuuauuugaaugauu

SEQ ID NO: 1243637 - RNA, 12 nt, Human
auuuauuuccuc

SEQ ID NO: 1243638 - RNA, 17 nt, Human
auuuauuuccucccucu

SEQ ID NO: 1243639 - RNA, 15 nt, Human
auuuauuuccucccu

SEQ ID NO: 1243640 - RNA, 13 nt, Human
auuuauuugaaug

SEQ ID NO: 1243641 - RNA, 21 nt, Human
auuuauuugaaugauuuuucu

SEQ ID NO: 1243642 - RNA, 14 nt, Human
auuuauuuaaaaua

SEQ ID NO: 1243643 - RNA, 16 nt, Human
auuuauuuaaaauagc

SEQ ID NO: 1243644 - RNA, 19 nt, Human
auuuccaacucgaaucugu

SEQ ID NO: 1243645 - RNA, 20 nt, Human
auuuccaacucgaaucugug

SEQ ID NO: 1243646 - RNA, 18 nt, Human
auuucccaacacaaagau

SEQ ID NO: 1243647 - RNA, 19 nt, Human
auuucccaacacaaagauu

SEQ ID NO: 1243648 - RNA, 12 nt, Human
auuucccaggac

SEQ ID NO: 1243649 - RNA, 13 nt, Human
auuucccaggacc

SEQ ID NO: 1243650 - RNA, 14 nt, Human
auuucccaggaccc

SEQ ID NO: 1243651 - RNA, 16 nt, Human
auuucccaggacccug

SEQ ID NO: 1243652 - RNA, 19 nt, Human
auuucccaggacccugaag

SEQ ID NO: 1243653 - RNA, 19 nt, Human
auuggcaccgaagcccaga

SEQ ID NO: 1243654 - RNA, 18 nt, Human
auuggcaccgaagcccag

SEQ ID NO: 1243655 - RNA, 20 nt, Human
auuggcaccuaauccaggca

SEQ ID NO: 1243656 - RNA, 14 nt, Human
auuggauuuccuaa

SEQ ID NO: 1243657 - RNA, 15 nt, Human
auuggauuuccuaau

SEQ ID NO: 1243658 - RNA, 22 nt, Human
auuggauuuccuaauacuguca

SEQ ID NO: 1243659 - RNA, 23 nt, Human
auuggauuuccuaauacugucau

SEQ ID NO: 1243660 - RNA, 18 nt, Human
auugggagcuugggaaug

SEQ ID NO: 1243661 - RNA, 21 nt, Human
auugggagcuugggaauggau

SEQ ID NO: 1243662 - RNA, 18 nt, Human
auugguaaagaauggaag

SEQ ID NO: 1243663 - RNA, 19 nt, Human
auuggguuuuuggacuucu

SEQ ID NO: 1243664 - RNA, 22 nt, Human
auuggguuuuuggacuucuggg

SEQ ID NO: 1243665 - RNA, 15 nt, Human
auugguuuaaagaaa

SEQ ID NO: 1243666 - RNA, 17 nt, Human
auugguuuaaagaaagu

SEQ ID NO: 1243667 - RNA, 18 nt, Human
auugguuuaaagaaagug

SEQ ID NO: 1243668 - RNA, 19 nt, Human
auuggacaguaaaauccac

SEQ ID NO: 1243669 - RNA, 13 nt, Human
auuggaaacaagu

SEQ ID NO: 1243670 - RNA, 18 nt, Human
auuggaauguucucagau

SEQ ID NO: 1243671 - RNA, 17 nt, Human
auuggacaaagaaccuu

SEQ ID NO: 1243672 - RNA, 14 nt, Human
auuggacccuucca

SEQ ID NO: 1243673 - RNA, 22 nt, Human
auuggauauuuuuuacuuuaga

SEQ ID NO: 1243674 - RNA, 11 nt, Human
auuggauauuu

SEQ ID NO: 1243675 - RNA, 13 nt, Human
auugacuuuuuau

SEQ ID NO: 1243676 - RNA, 18 nt, Human
auugacuuuuuauggcac

SEQ ID NO: 1243677 - RNA, 13 nt, Human
auugauuguauug

SEQ ID NO: 1243678 - RNA, 16 nt, Human
auugauuguauuguug

SEQ ID NO: 1243679 - RNA, 21 nt, Human
auugcuuuguauuguauauua

SEQ ID NO: 1243680 - RNA, 19 nt, Human
auuguuuuacaauaguucu

SEQ ID NO: 1243681 - RNA, 14 nt, Human
auuguuuuacaaua

SEQ ID NO: 1243682 - RNA, 13 nt, Human
auuguuuuacaau

SEQ ID NO: 1243683 - RNA, 16 nt, Human
auuguggguguuaauu

SEQ ID NO: 1243684 - RNA, 18 nt, Human
auuguuuuacaauaguuc

SEQ ID NO: 1243685 - RNA, 17 nt, Human
auuguuuuacaauaguu

SEQ ID NO: 1243686 - RNA, 15 nt, Human
auuguuuuacaauag

SEQ ID NO: 1243687 - RNA, 18 nt, Human
auuuaaaccgcuaaaaga

SEQ ID NO: 1243688 - RNA, 19 nt, Human
auuuaaaccgcuaaaagaa

SEQ ID NO: 1243689 - RNA, 20 nt, Human
auuuaaaccgcuaaaagaaa

SEQ ID NO: 1243690 - RNA, 21 nt, Human
auuuaaaccgcuaaaagaaac

SEQ ID NO: 1243691 - RNA, 22 nt, Human
auuuaaaccgcuaaaagaaacu

SEQ ID NO: 1243692 - RNA, 23 nt, Human
auuuaaaccgcuaaaagaaacuu

SEQ ID NO: 1243693 - RNA, 24 nt, Human
auuuaaaccgcuaaaagaaacuuu

SEQ ID NO: 1243694 - RNA, 12 nt, Human
auuuaaacuaua

SEQ ID NO: 1243695 - RNA, 19 nt, Human
auuuaaacuauaagcaaga

SEQ ID NO: 1243696 - RNA, 20 nt, Human
auuuaaacuauaagcaagaa

SEQ ID NO: 1243697 - RNA, 19 nt, Human
auuuaaagaacacccuaua

SEQ ID NO: 1243698 - RNA, 13 nt, Human
auugucuagugaa

SEQ ID NO: 1243699 - RNA, 15 nt, Human
auuguccuuuugcaa

SEQ ID NO: 1243700 - RNA, 16 nt, Human
auuguccuuuugcaaa

SEQ ID NO: 1243701 - RNA, 18 nt, Human
auuguccuuuugcaaaga

SEQ ID NO: 1243702 - RNA, 17 nt, Human
auuguccuuuugcaaag

SEQ ID NO: 1243703 - RNA, 12 nt, Human
auugucucagag

SEQ ID NO: 1243704 - RNA, 14 nt, Human
auugucucagagca

SEQ ID NO: 1243705 - RNA, 20 nt, Human
auuguggggaugaugaaaua

SEQ ID NO: 1243706 - RNA, 21 nt, Human
auuguggggaugaugaaauaa

SEQ ID NO: 1243707 - RNA, 17 nt, Human
uuugaaauuaugugaca

SEQ ID NO: 1243708 - RNA, 15 nt, Human
uuugaaauuauguga

SEQ ID NO: 1243709 - RNA, 18 nt, Human
uuugaaauuaaccucuca

SEQ ID NO: 1243710 - RNA, 16 nt, Human
uuugaaauuauguaaa

SEQ ID NO: 1243711 - RNA, 17 nt, Human
uuugaaauuauguaaau

SEQ ID NO: 1243712 - RNA, 22 nt, Human
uuugaaauuaugugacauuuua

SEQ ID NO: 1243713 - RNA, 21 nt, Human
uuugaaauuauguaaauuaug

SEQ ID NO: 1243714 - RNA, 15 nt, Human
auggggcaggccacc

SEQ ID NO: 1243715 - RNA, 17 nt, Human
auggggcaggccaccug

SEQ ID NO: 1243716 - RNA, 23 nt, Human
auggggcaggccaccuggcucuc

SEQ ID NO: 1243717 - RNA, 21 nt, Human
auggggcauccucuuuuucca

SEQ ID NO: 1243718 - RNA, 23 nt, Human
uuucuuuuuacccauuuguucau

SEQ ID NO: 1243719 - RNA, 15 nt, Human
uuucuuuuuugauau

SEQ ID NO: 1243720 - RNA, 16 nt, Human
uuugaaaaaaaauaaa

SEQ ID NO: 1243721 - RNA, 15 nt, Human
uuugaaaaagcgaaa

SEQ ID NO: 1243722 - RNA, 23 nt, Human
uuugaaaaagcgaaaaaaucagg

SEQ ID NO: 1243723 - RNA, 20 nt, Human
uuugaaaaagcgaaaaaauc

SEQ ID NO: 1243724 - RNA, 17 nt, Human
uuugaaaacauguuuau

SEQ ID NO: 1243725 - RNA, 19 nt, Human
uuugaaaacauguuuauuu

SEQ ID NO: 1243726 - RNA, 14 nt, Human
auggggguuucacc

SEQ ID NO: 1243727 - RNA, 14 nt, Human
auggggguaaaguu

SEQ ID NO: 1243728 - RNA, 15 nt, Human
augggguggaaggca

SEQ ID NO: 1243729 - RNA, 12 nt, Human
auggguagggua

SEQ ID NO: 1243730 - RNA, 16 nt, Human
auggguaggguaaauc

SEQ ID NO: 1243731 - RNA, 17 nt, Human
auggguaggguaaauca

SEQ ID NO: 1243732 - RNA, 12 nt, Human
augggucacagg

SEQ ID NO: 1243733 - RNA, 14 nt, Human
augggucacaggaa

SEQ ID NO: 1243734 - RNA, 13 nt, Human
augggucacagga

SEQ ID NO: 1243735 - RNA, 17 nt, Human
augggggcacugaggac

SEQ ID NO: 1243736 - RNA, 18 nt, Human
augggggaacucagaucc

SEQ ID NO: 1243737 - RNA, 19 nt, Human
augggggaacucagaucca

SEQ ID NO: 1243738 - RNA, 21 nt, Human
augggggaacucagauccagg

SEQ ID NO: 1243739 - RNA, 18 nt, Human
augggggagggggcagaa

SEQ ID NO: 1243740 - RNA, 13 nt, Human
auggggccagauc

SEQ ID NO: 1243741 - RNA, 14 nt, Human
auggggccagaucc

SEQ ID NO: 1243742 - RNA, 15 nt, Human
auggggccagaucca

SEQ ID NO: 1243743 - RNA, 19 nt, Human
auggggccagauccagccu

SEQ ID NO: 1243744 - RNA, 21 nt, Human
auggggccagauccagccugg

SEQ ID NO: 1243745 - RNA, 22 nt, Human
auggggccagauccagccuggg

SEQ ID NO: 1243746 - RNA, 21 nt, Human
augggggaaagcaaagcacag

SEQ ID NO: 1243747 - RNA, 23 nt, Human
augggggaaagcaaagcacagag

SEQ ID NO: 1243748 - RNA, 19 nt, Human
auggcuaacuuacaaagau

SEQ ID NO: 1243749 - RNA, 18 nt, Human
augggaugguggagggcc

SEQ ID NO: 1243750 - RNA, 17 nt, Human
augggauucuggacagg

SEQ ID NO: 1243751 - RNA, 14 nt, Human
augggauucuggac

SEQ ID NO: 1243752 - RNA, 21 nt, Human
uuucucccccauguucugucc

SEQ ID NO: 1243753 - RNA, 17 nt, Human
uuucugcacuauaugca

SEQ ID NO: 1243754 - RNA, 14 nt, Human
uuucugcacuauau

SEQ ID NO: 1243755 - RNA, 17 nt, Human
uuucuguauaaaugucu

SEQ ID NO: 1243756 - RNA, 17 nt, Human
uuucuguauauacuuuu

SEQ ID NO: 1243757 - RNA, 14 nt, Human
uuucuguaccaguu

SEQ ID NO: 1243758 - RNA, 15 nt, Human
uuucuguaccaguua

SEQ ID NO: 1243759 - RNA, 15 nt, Human
uuucugguucuaaca

SEQ ID NO: 1243760 - RNA, 21 nt, Human
uuucugguuguuaugugauca

SEQ ID NO: 1243761 - RNA, 22 nt, Human
uuucugguucuuguguuggcug

SEQ ID NO: 1243762 - RNA, 22 nt, Human
uuucuguaagaaaccuacugcc

SEQ ID NO: 1243763 - RNA, 19 nt, Human
uuucuguaauucagguuuu

SEQ ID NO: 1243764 - RNA, 23 nt, Human
uuucuguaauucagguuuuuccu

SEQ ID NO: 1243765 - RNA, 23 nt, Human
uuucugggagacagaaaacaugu

SEQ ID NO: 1243766 - RNA, 23 nt, Human
uuucugggcaccggggccucgga

SEQ ID NO: 1243767 - RNA, 16 nt, Human
uuucugggauaaguaa

SEQ ID NO: 1243768 - RNA, 19 nt, Human
uuucugggcugucuauucu

SEQ ID NO: 1243769 - RNA, 21 nt, Human
uuucugggcugucuauucuag

SEQ ID NO: 1243770 - RNA, 15 nt, Human
uuucugguggucugu

SEQ ID NO: 1243771 - RNA, 17 nt, Human
uuucugguggucuguug

SEQ ID NO: 1243772 - RNA, 20 nt, Human
uuucugguggucuguuggca

SEQ ID NO: 1243773 - RNA, 17 nt, Human
uuucugugccugaauau

SEQ ID NO: 1243774 - RNA, 9 nt, Human
uuucuguuc

SEQ ID NO: 1243775 - RNA, 12 nt, Human
uuucuguuccaa

SEQ ID NO: 1243776 - RNA, 14 nt, Human
uuucuguuccaaau

SEQ ID NO: 1243777 - RNA, 15 nt, Human
uuucuguuccaaauu

SEQ ID NO: 1243778 - RNA, 16 nt, Human
uuucuguuccaaauuc

SEQ ID NO: 1243779 - RNA, 20 nt, Human
uuucuguuccaaauucaguu

SEQ ID NO: 1243780 - RNA, 22 nt, Human
uuucuguuccaaauucaguuuc

SEQ ID NO: 1243781 - RNA, 14 nt, Human
uuucuguucuaguu

SEQ ID NO: 1243782 - RNA, 13 nt, Human
uuucuuucuuucu

SEQ ID NO: 1243783 - RNA, 20 nt, Human
uuucuuugaaaaaaaauaaa

SEQ ID NO: 1243784 - RNA, 21 nt, Human
uuucuuugaaaaaaaauaaau

SEQ ID NO: 1243785 - RNA, 13 nt, Human
uuucuuugaauaa

SEQ ID NO: 1243786 - RNA, 15 nt, Human
uuucuuugaauaaau

SEQ ID NO: 1243787 - RNA, 14 nt, Human
uuucuuugaauaaa

SEQ ID NO: 1243788 - RNA, 13 nt, Human
auguaaauauuuu

SEQ ID NO: 1243789 - RNA, 15 nt, Human
auguaaauauuuuaa

SEQ ID NO: 1243790 - RNA, 19 nt, Human
auguaaauauuuuaaagaa

SEQ ID NO: 1243791 - RNA, 20 nt, Human
auguaaauauuuuaaagaau

SEQ ID NO: 1243792 - RNA, 21 nt, Human
auguaaauauuuuaaagaauu

SEQ ID NO: 1243793 - RNA, 23 nt, Human
auguaaauauuuuaaagaauugu

SEQ ID NO: 1243794 - RNA, 20 nt, Human
auguaaaggagucaaaacua

SEQ ID NO: 1243795 - RNA, 16 nt, Human
auguaaagugauauuu

SEQ ID NO: 1243796 - RNA, 17 nt, Human
auguaaauaauacauua

SEQ ID NO: 1243797 - RNA, 21 nt, Human
auguaaaugucucacugagca

SEQ ID NO: 1243798 - RNA, 23 nt, Human
auguaaaugucucacugagcacu

SEQ ID NO: 1243799 - RNA, 19 nt, Human
auguaaaugucucacugag

SEQ ID NO: 1243800 - RNA, 18 nt, Human
auguaaaugucucacuga

SEQ ID NO: 1243801 - RNA, 14 nt, Human
auguaaauuaugua

SEQ ID NO: 1243802 - RNA, 23 nt, Human
auguaaauuaucaggcaaauuug

SEQ ID NO: 1243803 - RNA, 12 nt, Human
auguaaauuugu

SEQ ID NO: 1243804 - RNA, 13 nt, Human
auguaaauuugua

SEQ ID NO: 1243805 - RNA, 14 nt, Human
auguacauuaauua

SEQ ID NO: 1243806 - RNA, 20 nt, Human
auguaaaacauuuauuuuga

SEQ ID NO: 1243807 - RNA, 21 nt, Human
auguaaaacauuuauuuugac

SEQ ID NO: 1243808 - RNA, 17 nt, Human
auguaaaagaaaaucca

SEQ ID NO: 1243809 - RNA, 21 nt, Human
auguaaaagguauuaaauuga

SEQ ID NO: 1243810 - RNA, 12 nt, Human
auguaaaaucuu

SEQ ID NO: 1243811 - RNA, 13 nt, Human
auguaaaaucuug

SEQ ID NO: 1243812 - RNA, 14 nt, Human
auguaaaaucuugu

SEQ ID NO: 1243813 - RNA, 15 nt, Human
auguaaaaucuuguc

SEQ ID NO: 1243814 - RNA, 16 nt, Human
auguaaaaucuuguca

SEQ ID NO: 1243815 - RNA, 20 nt, Human
auguaaaaucuugucaugug

SEQ ID NO: 1243816 - RNA, 21 nt, Human
auguaaaaucuugucaugugu

SEQ ID NO: 1243817 - RNA, 22 nt, Human
auguaaaaucuugucaugugua

SEQ ID NO: 1243818 - RNA, 23 nt, Human
auguaaaaucuugucauguguau

SEQ ID NO: 1243819 - RNA, 14 nt, Human
auguaaacugugca

SEQ ID NO: 1243820 - RNA, 19 nt, Human
auguaaacuguuucuuuaa

SEQ ID NO: 1243821 - RNA, 20 nt, Human
auguaaacuguuucuuuaaa

SEQ ID NO: 1243822 - RNA, 22 nt, Human
auguaaacuguuucuuuaaaau

SEQ ID NO: 1243823 - RNA, 19 nt, Human
auguaaagaacauaaauaa

SEQ ID NO: 1243824 - RNA, 13 nt, Human
auguaaagacaaa

SEQ ID NO: 1243825 - RNA, 19 nt, Human
auguaaagacaaaaaacua

SEQ ID NO: 1243826 - RNA, 14 nt, Human
auguaaagauauuu

SEQ ID NO: 1243827 - RNA, 21 nt, Human
auguaaagauauuuuuaucuu

SEQ ID NO: 1243828 - RNA, 17 nt, Human
auguaaagaucaauaaa

SEQ ID NO: 1243829 - RNA, 13 nt, Human
auguaaagccaug

SEQ ID NO: 1243830 - RNA, 14 nt, Human
auguaaagccaugc

SEQ ID NO: 1243831 - RNA, 14 nt, Human
auguaaagcuuguc

SEQ ID NO: 1243832 - RNA, 16 nt, Human
auguaaagcuugucug

SEQ ID NO: 1243833 - RNA, 13 nt, Human
augguuguacaua

SEQ ID NO: 1243834 - RNA, 21 nt, Human
augguuuacauccuucacugc

SEQ ID NO: 1243835 - RNA, 13 nt, Human
augguuucagcac

SEQ ID NO: 1243836 - RNA, 14 nt, Human
augguuucagcacu

SEQ ID NO: 1243837 - RNA, 22 nt, Human
augguuucagcacuagccaaac

SEQ ID NO: 1243838 - RNA, 21 nt, Human
augguucccuugaugaagaag

SEQ ID NO: 1243839 - RNA, 19 nt, Human
augguuccccuguucacuc

SEQ ID NO: 1243840 - RNA, 20 nt, Human
augguuccccuguucacucu

SEQ ID NO: 1243841 - RNA, 18 nt, Human
augguucuggcuguuuga

SEQ ID NO: 1243842 - RNA, 19 nt, Human
augguucuggcuguuugag

SEQ ID NO: 1243843 - RNA, 15 nt, Human
augguuucagcacua

SEQ ID NO: 1243844 - RNA, 14 nt, Human
augguuuucuccaa

SEQ ID NO: 1243845 - RNA, 20 nt, Human
augguuuucuccaagagcua

SEQ ID NO: 1243846 - RNA, 21 nt, Human
augguuuucuccaagagcuac

SEQ ID NO: 1243847 - RNA, 17 nt, Human
augguuuuugagauauu

SEQ ID NO: 1243848 - RNA, 18 nt, Human
augguuuuugagauauua

SEQ ID NO: 1243849 - RNA, 13 nt, Human
auguaaaacauuu

SEQ ID NO: 1243850 - RNA, 14 nt, Human
auguaaaacauuua

SEQ ID NO: 1243851 - RNA, 15 nt, Human
auguaaaacauuuau

SEQ ID NO: 1243852 - RNA, 14 nt, Human
auggugaugaaaug

SEQ ID NO: 1243853 - RNA, 17 nt, Human
augggugcccacagugu

SEQ ID NO: 1243854 - RNA, 16 nt, Human
auggugaugaaaugua

SEQ ID NO: 1243855 - RNA, 17 nt, Human
auggugaugaaauguaa

SEQ ID NO: 1243856 - RNA, 19 nt, Human
auggugcauuacgugggca

SEQ ID NO: 1243857 - RNA, 14 nt, Human
auggugccccagga

SEQ ID NO: 1243858 - RNA, 20 nt, Human
auggugccuaguauugacaa

SEQ ID NO: 1243859 - RNA, 21 nt, Human
auggugccuaguauugacaaa

SEQ ID NO: 1243860 - RNA, 19 nt, Human
auggugccuaguauugaca

SEQ ID NO: 1243861 - RNA, 16 nt, Human
auggugccuaguauug

SEQ ID NO: 1243862 - RNA, 15 nt, Human
auggugccccaggac

SEQ ID NO: 1243863 - RNA, 16 nt, Human
auggugccccaggacc

SEQ ID NO: 1243864 - RNA, 17 nt, Human
auggugccccaggacca

SEQ ID NO: 1243865 - RNA, 18 nt, Human
auggugccccaggaccag

SEQ ID NO: 1243866 - RNA, 19 nt, Human
auggugccccaggaccagc

SEQ ID NO: 1243867 - RNA, 20 nt, Human
auggugccccaggaccagcu

SEQ ID NO: 1243868 - RNA, 21 nt, Human
auggugccccaggaccagcuc

SEQ ID NO: 1243869 - RNA, 22 nt, Human
auggugccccaggaccagcuca

SEQ ID NO: 1243870 - RNA, 20 nt, Human
augguggacucgccuguaau

SEQ ID NO: 1243871 - RNA, 13 nt, Human
augguggagggcc

SEQ ID NO: 1243872 - RNA, 14 nt, Human
augguggagggcca

SEQ ID NO: 1243873 - RNA, 19 nt, Human
augguggaugauccccacg

SEQ ID NO: 1243874 - RNA, 22 nt, Human
augguggaugauccccacgcca

SEQ ID NO: 1243875 - RNA, 14 nt, Human
auggugccuucauu

SEQ ID NO: 1243876 - RNA, 16 nt, Human
auggugccuucauuug

SEQ ID NO: 1243877 - RNA, 13 nt, Human
auggugcugggag

SEQ ID NO: 1243878 - RNA, 15 nt, Human
augguguucuccugc

SEQ ID NO: 1243879 - RNA, 18 nt, Human
auggugucucuucuuuag

SEQ ID NO: 1243880 - RNA, 16 nt, Human
augguguagaacacua

SEQ ID NO: 1243881 - RNA, 18 nt, Human
augguguagaacacuaau

SEQ ID NO: 1243882 - RNA, 19 nt, Human
augguguagaacacuaauu

SEQ ID NO: 1243883 - RNA, 22 nt, Human
augguguagaacacuaauucau

SEQ ID NO: 1243884 - RNA, 22 nt, Human
augguguucuccugcugcuccc

SEQ ID NO: 1243885 - RNA, 13 nt, Human
augguuaacuaau

SEQ ID NO: 1243886 - RNA, 18 nt, Human
augguuaagaguccaaga

SEQ ID NO: 1243887 - RNA, 23 nt, Human
augguuaagaguccaagaaucca

SEQ ID NO: 1243888 - RNA, 17 nt, Human
augguuaccaugucuuu

SEQ ID NO: 1243889 - RNA, 22 nt, Human
augguuaccaugucuuucucuc

SEQ ID NO: 1243890 - RNA, 20 nt, Human
augguucagaauuaaacuuu

SEQ ID NO: 1243891 - RNA, 21 nt, Human
augguucagaauuaaacuuuu

SEQ ID NO: 1243892 - RNA, 15 nt, Human
uuugugaauuaggcu

SEQ ID NO: 1243893 - RNA, 22 nt, Human
uuugugaauuaggcuguaacua

SEQ ID NO: 1243894 - RNA, 20 nt, Human
uuugugaagguggaaauaaa

SEQ ID NO: 1243895 - RNA, 18 nt, Human
uuugugaauagaacucug

SEQ ID NO: 1243896 - RNA, 17 nt, Human
uuugugaagcaaaauuu

SEQ ID NO: 1243897 - RNA, 22 nt, Human
uuugugaaaugauggugaaagu

SEQ ID NO: 1243898 - RNA, 14 nt, Human
uuuguaaugaaaac

SEQ ID NO: 1243899 - RNA, 13 nt, Human
uuuguaaugaaaa

SEQ ID NO: 1243900 - RNA, 21 nt, Human
uuuguaauaauaaagaauagc

SEQ ID NO: 1243901 - RNA, 23 nt, Human
uuuguaaugucuugagcucuauu

SEQ ID NO: 1243902 - RNA, 14 nt, Human
uuuguaauuaaaag

SEQ ID NO: 1243903 - RNA, 23 nt, Human
uuuguaauuaaaagcaaaucauu

SEQ ID NO: 1243904 - RNA, 22 nt, Human
uuuguaauuaaaagcaaaucau

SEQ ID NO: 1243905 - RNA, 12 nt, Human
uuuguauaaaag

SEQ ID NO: 1243906 - RNA, 14 nt, Human
uuuguaguugaaua

SEQ ID NO: 1243907 - RNA, 15 nt, Human
uuuguaguugaauau

SEQ ID NO: 1243908 - RNA, 19 nt, Human
uuuguaguguuggagaaga

SEQ ID NO: 1243909 - RNA, 21 nt, Human
uuuguaguguuggagaagaac

SEQ ID NO: 1243910 - RNA, 18 nt, Human
augugacauuuuacauua

SEQ ID NO: 1243911 - RNA, 19 nt, Human
augugaccacucugucuug

SEQ ID NO: 1243912 - RNA, 12 nt, Human
augugacucuuu

SEQ ID NO: 1243913 - RNA, 16 nt, Human
augugacucuuuccaa

SEQ ID NO: 1243914 - RNA, 16 nt, Human
augugacauuuuacau

SEQ ID NO: 1243915 - RNA, 16 nt, Human
augucucuuccuggua

SEQ ID NO: 1243916 - RNA, 15 nt, Human
augucucuuccuggu

SEQ ID NO: 1243917 - RNA, 13 nt, Human
augucucuucuga

SEQ ID NO: 1243918 - RNA, 16 nt, Human
augucucuucugagcu

SEQ ID NO: 1243919 - RNA, 17 nt, Human
augucucuucugagcua

SEQ ID NO: 1243920 - RNA, 21 nt, Human
augugacucuuuccaaccggc

SEQ ID NO: 1243921 - RNA, 15 nt, Human
augugcaaguuuauc

SEQ ID NO: 1243922 - RNA, 13 nt, Human
augugcaauagaa

SEQ ID NO: 1243923 - RNA, 18 nt, Human
augugcaauagaagguga

SEQ ID NO: 1243924 - RNA, 19 nt, Human
uuuguaauaauaaagaaua

SEQ ID NO: 1243925 - RNA, 14 nt, Human
augugauguucuaa

SEQ ID NO: 1243926 - RNA, 15 nt, Human
augugauguucuaag

SEQ ID NO: 1243927 - RNA, 16 nt, Human
augugauguucuaagg

SEQ ID NO: 1243928 - RNA, 17 nt, Human
augugauguucuaaggc

SEQ ID NO: 1243929 - RNA, 19 nt, Human
augugauguucuaaggcuc

SEQ ID NO: 1243930 - RNA, 20 nt, Human
augugauguucuaaggcucu

SEQ ID NO: 1243931 - RNA, 21 nt, Human
augugauguucuaaggcucug

SEQ ID NO: 1243932 - RNA, 14 nt, Human
augugauuguggaa

SEQ ID NO: 1243933 - RNA, 15 nt, Human
augugauuguggaau

SEQ ID NO: 1243934 - RNA, 17 nt, Human
augugauuguggaaugg

SEQ ID NO: 1243935 - RNA, 22 nt, Human
augugauuguggaauggagauu

SEQ ID NO: 1243936 - RNA, 13 nt, Human
uuuggcaggugca

SEQ ID NO: 1243937 - RNA, 23 nt, Human
uuuggcaucccugggccuugggc

SEQ ID NO: 1243938 - RNA, 18 nt, Human
auguaugagguacaaccu

SEQ ID NO: 1243939 - RNA, 15 nt, Human
auguaugcauguugu

SEQ ID NO: 1243940 - RNA, 19 nt, Human
auguaugcauguugucuaa

SEQ ID NO: 1243941 - RNA, 16 nt, Human
uuuggcaucccugggc

SEQ ID NO: 1243942 - RNA, 18 nt, Human
uuuggcaucccugggccu

SEQ ID NO: 1243943 - RNA, 22 nt, Human
auguauuacaguggggaaugaa

SEQ ID NO: 1243944 - RNA, 12 nt, Human
auguauguuacc

SEQ ID NO: 1243945 - RNA, 13 nt, Human
auguauguuacca

SEQ ID NO: 1243946 - RNA, 14 nt, Human
auguauguuaccaa

SEQ ID NO: 1243947 - RNA, 17 nt, Human
auguccacugguucuuc

SEQ ID NO: 1243948 - RNA, 15 nt, Human
augucagugcugaug

SEQ ID NO: 1243949 - RNA, 12 nt, Human
auguccaggaaa

SEQ ID NO: 1243950 - RNA, 16 nt, Human
auguccugccuauuau

SEQ ID NO: 1243951 - RNA, 20 nt, Human
auguccugccuauuaucugu

SEQ ID NO: 1243952 - RNA, 21 nt, Human
auguccugccuauuaucuguc

SEQ ID NO: 1243953 - RNA, 22 nt, Human
auguccugccuauuaucuguca

SEQ ID NO: 1243954 - RNA, 13 nt, Human
auguccuguaaag

SEQ ID NO: 1243955 - RNA, 13 nt, Human
augucgccucugc

SEQ ID NO: 1243956 - RNA, 14 nt, Human
augucgccucugca

SEQ ID NO: 1243957 - RNA, 14 nt, Human
auguccuguaaagg

SEQ ID NO: 1243958 - RNA, 16 nt, Human
auguccuucugagccc

SEQ ID NO: 1243959 - RNA, 15 nt, Human
augucgccucugcau

SEQ ID NO: 1243960 - RNA, 18 nt, Human
augucucacugagcacug

SEQ ID NO: 1243961 - RNA, 15 nt, Human
augucucacugagca

SEQ ID NO: 1243962 - RNA, 14 nt, Human
augucucacugagc

SEQ ID NO: 1243963 - RNA, 23 nt, Human
auguccuugugaugugcacguaa

SEQ ID NO: 1243964 - RNA, 17 nt, Human
augucucaggucccugc

SEQ ID NO: 1243965 - RNA, 22 nt, Human
augucucaggucccugcagggc

SEQ ID NO: 1243966 - RNA, 17 nt, Human
augucucugagcauuag

SEQ ID NO: 1243967 - RNA, 22 nt, Human
augucucacugagcacuguuuu

SEQ ID NO: 1243968 - RNA, 14 nt, Human
augucuccuaagca

SEQ ID NO: 1243969 - RNA, 20 nt, Human
augucucacugagcacuguu

SEQ ID NO: 1243970 - RNA, 19 nt, Human
augucucacugagcacugu

SEQ ID NO: 1243971 - RNA, 15 nt, Human
augucuccuaagcac

SEQ ID NO: 1243972 - RNA, 18 nt, Human
augucuccuaagcaccug

SEQ ID NO: 1243973 - RNA, 20 nt, Human
augucuccuaagcaccugua

SEQ ID NO: 1243974 - RNA, 16 nt, Human
auguaccguaggcuuu

SEQ ID NO: 1243975 - RNA, 16 nt, Human
auguacccaccgggcc

SEQ ID NO: 1243976 - RNA, 20 nt, Human
auguacccaccgggccacuc

SEQ ID NO: 1243977 - RNA, 15 nt, Human
auguaccauguacau

SEQ ID NO: 1243978 - RNA, 21 nt, Human
auguaccauguacaugaagaa

SEQ ID NO: 1243979 - RNA, 21 nt, Human
auguacccaccgggccacucc

SEQ ID NO: 1243980 - RNA, 17 nt, Human
auguacccucugaaaua

SEQ ID NO: 1243981 - RNA, 18 nt, Human
auguacccucugaaauac

SEQ ID NO: 1243982 - RNA, 18 nt, Human
auguacggauuuucaguu

SEQ ID NO: 1243983 - RNA, 16 nt, Human
auguacuucaugcugu

SEQ ID NO: 1243984 - RNA, 15 nt, Human
auguacugcauuauu

SEQ ID NO: 1243985 - RNA, 19 nt, Human
auguacuguauauuacaga

SEQ ID NO: 1243986 - RNA, 20 nt, Human
auguacugcauuauuugaga

SEQ ID NO: 1243987 - RNA, 13 nt, Human
auguacugcauua

SEQ ID NO: 1243988 - RNA, 18 nt, Human
auguacugagccuuguaa

SEQ ID NO: 1243989 - RNA, 19 nt, Human
auguagauaacaagaccuc

SEQ ID NO: 1243990 - RNA, 19 nt, Human
auguagaggagaaacugga

SEQ ID NO: 1243991 - RNA, 17 nt, Human
auguagaggagaaacug

SEQ ID NO: 1243992 - RNA, 13 nt, Human
auguagaggagaa

SEQ ID NO: 1243993 - RNA, 12 nt, Human
auguagaggaga

SEQ ID NO: 1243994 - RNA, 14 nt, Human
auguagaaaauuug

SEQ ID NO: 1243995 - RNA, 19 nt, Human
auguagccccucuccugga

SEQ ID NO: 1243996 - RNA, 12 nt, Human
auguagcucuuu

SEQ ID NO: 1243997 - RNA, 22 nt, Human
auguagcucuuugucagggagu

SEQ ID NO: 1243998 - RNA, 22 nt, Human
auguaggaaagaccauuuuucc

SEQ ID NO: 1243999 - RNA, 14 nt, Human
auguaggaaguagg

SEQ ID NO: 1244000 - RNA, 21 nt, Human
auguagcucuuugucagggag

SEQ ID NO: 1244001 - RNA, 12 nt, Human
auguaggaggga

SEQ ID NO: 1244002 - RNA, 21 nt, Human
auguagcaaaauacaugacau

SEQ ID NO: 1244003 - RNA, 14 nt, Human
auguagcaugcuug

SEQ ID NO: 1244004 - RNA, 19 nt, Human
auguagcaugcuuguugca

SEQ ID NO: 1244005 - RNA, 20 nt, Human
uuugacauugcguuugaccu

SEQ ID NO: 1244006 - RNA, 18 nt, Human
uuugacaguguugaaaau

SEQ ID NO: 1244007 - RNA, 19 nt, Human
uuugacaguguugaaaaug

SEQ ID NO: 1244008 - RNA, 13 nt, Human
uuugacaguguuu

SEQ ID NO: 1244009 - RNA, 13 nt, Human
auguaggagggac

SEQ ID NO: 1244010 - RNA, 12 nt, Human
auguaguaacac

SEQ ID NO: 1244011 - RNA, 13 nt, Human
auguaguaacacu

SEQ ID NO: 1244012 - RNA, 14 nt, Human
auguaguaacacua

SEQ ID NO: 1244013 - RNA, 15 nt, Human
auguaguaacacuaa

SEQ ID NO: 1244014 - RNA, 16 nt, Human
auguaguaacacuaau

SEQ ID NO: 1244015 - RNA, 17 nt, Human
auguaguaacacuaaua

SEQ ID NO: 1244016 - RNA, 22 nt, Human
auguaguaacacuaauauauuu

SEQ ID NO: 1244017 - RNA, 13 nt, Human
auguaguaauuga

SEQ ID NO: 1244018 - RNA, 16 nt, Human
auguaguaauugacau

SEQ ID NO: 1244019 - RNA, 17 nt, Human
auguaguaauugacaug

SEQ ID NO: 1244020 - RNA, 18 nt, Human
auguaguaauugacaugu

SEQ ID NO: 1244021 - RNA, 20 nt, Human
auguaguaacacuaauauau

SEQ ID NO: 1244022 - RNA, 14 nt, Human
uuugcaagccagau

SEQ ID NO: 1244023 - RNA, 23 nt, Human
uuugcaaccaggaacagcaaaug

SEQ ID NO: 1244024 - RNA, 17 nt, Human
uuugcaacuuaauacuc

SEQ ID NO: 1244025 - RNA, 20 nt, Human
uuugcaagggaaaagucucu

SEQ ID NO: 1244026 - RNA, 21 nt, Human
uuugcaagggaaaagucucuu

SEQ ID NO: 1244027 - RNA, 21 nt, Human
uuugcaaggugcauuuuuacu

SEQ ID NO: 1244028 - RNA, 14 nt, Human
uuugccucaaauaa

SEQ ID NO: 1244029 - RNA, 15 nt, Human
uuugauucauaguaa

SEQ ID NO: 1244030 - RNA, 20 nt, Human
uuugauucauaguaacuucu

SEQ ID NO: 1244031 - RNA, 14 nt, Human
uuugcaaagugcaa

SEQ ID NO: 1244032 - RNA, 14 nt, Human
uuugcaaccaggaa

SEQ ID NO: 1244033 - RNA, 15 nt, Human
uuugcaaccaggaac

SEQ ID NO: 1244034 - RNA, 14 nt, Human
uuugcaaccucgcu

SEQ ID NO: 1244035 - RNA, 23 nt, Human
uuugccucaaauaaaaagugcuu

SEQ ID NO: 1244036 - RNA, 17 nt, Human
uuugccucuuccagucu

SEQ ID NO: 1244037 - RNA, 12 nt, Human
uuugccuguaac

SEQ ID NO: 1244038 - RNA, 21 nt, Human
uuugccuguaacaagccagau

SEQ ID NO: 1244039 - RNA, 13 nt, Human
uuugccuguaaca

SEQ ID NO: 1244040 - RNA, 14 nt, Human
uuugccuguaacaa

SEQ ID NO: 1244041 - RNA, 18 nt, Human
uuugcucuucaagaaauc

SEQ ID NO: 1244042 - RNA, 20 nt, Human
uuugcucuucaagaaaucug

SEQ ID NO: 1244043 - RNA, 17 nt, Human
uuugcugacccucccca

SEQ ID NO: 1244044 - RNA, 19 nt, Human
uuugcugacccuccccaaa

SEQ ID NO: 1244045 - RNA, 21 nt, Human
uuugcugacccuccccaaagg

SEQ ID NO: 1244046 - RNA, 12 nt, Human
uuugcugagacu

SEQ ID NO: 1244047 - RNA, 19 nt, Human
uuugcugagcauguacuga

SEQ ID NO: 1244048 - RNA, 20 nt, Human
uuugcugcuaauauuuuccu

SEQ ID NO: 1244049 - RNA, 22 nt, Human
uuugcugcugcccauguuucaa

SEQ ID NO: 1244050 - RNA, 15 nt, Human
uuugcuggaauaagu

SEQ ID NO: 1244051 - RNA, 17 nt, Human
uuuggcaaugccaucau

SEQ ID NO: 1244052 - RNA, 16 nt, Human
uuuggcaauuuugugg

SEQ ID NO: 1244053 - RNA, 19 nt, Human
uuugaccuuuuauguagua

SEQ ID NO: 1244054 - RNA, 19 nt, Human
uuugacuagaugauggaug

SEQ ID NO: 1244055 - RNA, 12 nt, Human
uuugacucuuuu

SEQ ID NO: 1244056 - RNA, 20 nt, Human
uuugauguaaagauguucug

SEQ ID NO: 1244057 - RNA, 12 nt, Human
uuugauguaaua

SEQ ID NO: 1244058 - RNA, 15 nt, Human
uuugauguuccuucc

SEQ ID NO: 1244059 - RNA, 17 nt, Human
uuugauguuccuuccag

SEQ ID NO: 1244060 - RNA, 20 nt, Human
uuuaaauacagucuuccauu

SEQ ID NO: 1244061 - RNA, 18 nt, Human
uuuaaauauaugcuaagu

SEQ ID NO: 1244062 - RNA, 13 nt, Human
uuuaaguauuuag

SEQ ID NO: 1244063 - RNA, 18 nt, Human
uuuaaguauuuagguuuu

SEQ ID NO: 1244064 - RNA, 15 nt, Human
uuuaagucucucgua

SEQ ID NO: 1244065 - RNA, 15 nt, Human
uuuaagugaaaaugg

SEQ ID NO: 1244066 - RNA, 17 nt, Human
uuuaagugaaaaugguc

SEQ ID NO: 1244067 - RNA, 23 nt, Human
uuuaauuauuauuuauauaugua

SEQ ID NO: 1244068 - RNA, 14 nt, Human
uuuaauuauuauuc

SEQ ID NO: 1244069 - RNA, 23 nt, Human
uuuaauuauuauucuucauaaca

SEQ ID NO: 1244070 - RNA, 14 nt, Human
uuuaauuaauuggg

SEQ ID NO: 1244071 - RNA, 22 nt, Human
uuuaauuaauugggccagcuuu

SEQ ID NO: 1244072 - RNA, 20 nt, Human
uuuaauuaauugggccagcu

SEQ ID NO: 1244073 - RNA, 20 nt, Human
uuuaauguauaguaaaucac

SEQ ID NO: 1244074 - RNA, 16 nt, Human
uuuaauguuuaaaaca

SEQ ID NO: 1244075 - RNA, 17 nt, Human
uuuaauguuuaaaacau

SEQ ID NO: 1244076 - RNA, 21 nt, Human
uuuaauguuuaaaacaucauu

SEQ ID NO: 1244077 - RNA, 13 nt, Human
augcagcucaaga

SEQ ID NO: 1244078 - RNA, 15 nt, Human
augcagcuguggcag

SEQ ID NO: 1244079 - RNA, 15 nt, Human
augcagcuuauacga

SEQ ID NO: 1244080 - RNA, 21 nt, Human
augcagcuuauacgaaauaau

SEQ ID NO: 1244081 - RNA, 16 nt, Human
augcagcuuauacgaa

SEQ ID NO: 1244082 - RNA, 17 nt, Human
augcagcaucuaaguaa

SEQ ID NO: 1244083 - RNA, 22 nt, Human
uuuaauuuaguaaaccaauccu

SEQ ID NO: 1244084 - RNA, 18 nt, Human
uuuaauuuaguaaaccaa

SEQ ID NO: 1244085 - RNA, 16 nt, Human
uuuaauuugaaauaug

SEQ ID NO: 1244086 - RNA, 15 nt, Human
uuuacaaaaauauaa

SEQ ID NO: 1244087 - RNA, 16 nt, Human
uuuacaaaaauauaaa

SEQ ID NO: 1244088 - RNA, 18 nt, Human
uuuacaaaacaaacucau

SEQ ID NO: 1244089 - RNA, 19 nt, Human
uuuacaaaacuacaugaga

SEQ ID NO: 1244090 - RNA, 13 nt, Human
uuuacaaacugaa

SEQ ID NO: 1244091 - RNA, 14 nt, Human
uuuacaaacugaag

SEQ ID NO: 1244092 - RNA, 16 nt, Human
uuuacaaacugaagag

SEQ ID NO: 1244093 - RNA, 15 nt, Human
uuuacaaacugaaga

SEQ ID NO: 1244094 - RNA, 21 nt, Human
uuuacaaauguuaaaaugugu

SEQ ID NO: 1244095 - RNA, 20 nt, Human
uuuacaaauguuaaaaugug

SEQ ID NO: 1244096 - RNA, 13 nt, Human
augcaguucugaa

SEQ ID NO: 1244097 - RNA, 15 nt, Human
augcauuugggucca

SEQ ID NO: 1244098 - RNA, 17 nt, Human
augcauuuggguccagg

SEQ ID NO: 1244099 - RNA, 18 nt, Human
augcauuuggguccagga

SEQ ID NO: 1244100 - RNA, 19 nt, Human
augcauuuggguccaggag

SEQ ID NO: 1244101 - RNA, 20 nt, Human
augcauuuggguccaggagg

SEQ ID NO: 1244102 - RNA, 22 nt, Human
augcauuuggguccaggaggaa

SEQ ID NO: 1244103 - RNA, 17 nt, Human
augccaaaaaaaaauac

SEQ ID NO: 1244104 - RNA, 18 nt, Human
augccaaaaaaaaauaca

SEQ ID NO: 1244105 - RNA, 19 nt, Human
augccaaaaaaaaauacau

SEQ ID NO: 1244106 - RNA, 17 nt, Human
augccaauauuaaaucu

SEQ ID NO: 1244107 - RNA, 22 nt, Human
augccaauuagcaauugacugu

SEQ ID NO: 1244108 - RNA, 16 nt, Human
augccacaaggacuuc

SEQ ID NO: 1244109 - RNA, 19 nt, Human
augccacaaggacuuccug

SEQ ID NO: 1244110 - RNA, 13 nt, Human
augccacagcccu

SEQ ID NO: 1244111 - RNA, 14 nt, Human
augccacagcccug

SEQ ID NO: 1244112 - RNA, 15 nt, Human
augccacagcccugu

SEQ ID NO: 1244113 - RNA, 17 nt, Human
augccacagcccuguca

SEQ ID NO: 1244114 - RNA, 18 nt, Human
augccacagcccugucag

SEQ ID NO: 1244115 - RNA, 19 nt, Human
augccacagcccugucagc

SEQ ID NO: 1244116 - RNA, 15 nt, Human
augccacauucaaaa

SEQ ID NO: 1244117 - RNA, 14 nt, Human
augccaugaugccu

SEQ ID NO: 1244118 - RNA, 12 nt, Human
augccacauuca

SEQ ID NO: 1244119 - RNA, 16 nt, Human
augccauuuguacuga

SEQ ID NO: 1244120 - RNA, 14 nt, Human
augcccuggaucca

SEQ ID NO: 1244121 - RNA, 23 nt, Human
augcccugcucugaacacgaagc

SEQ ID NO: 1244122 - RNA, 12 nt, Human
augcccugugca

SEQ ID NO: 1244123 - RNA, 13 nt, Human
augcccugugcaa

SEQ ID NO: 1244124 - RNA, 23 nt, Human
augcccugugcaaccucuuggcc

SEQ ID NO: 1244125 - RNA, 16 nt, Human
augccucagccuccug

SEQ ID NO: 1244126 - RNA, 19 nt, Human
augccgauauacucuagau

SEQ ID NO: 1244127 - RNA, 12 nt, Human
augcccuucacu

SEQ ID NO: 1244128 - RNA, 16 nt, Human
augcccuucuccuuau

SEQ ID NO: 1244129 - RNA, 21 nt, Human
augcgguuauaaaaaaugguu

SEQ ID NO: 1244130 - RNA, 21 nt, Human
augcguauuauaccaaaaugu

SEQ ID NO: 1244131 - RNA, 14 nt, Human
augcgguagccagc

SEQ ID NO: 1244132 - RNA, 15 nt, Human
augcgguagccagca

SEQ ID NO: 1244133 - RNA, 18 nt, Human
augcgguagccagcacac

SEQ ID NO: 1244134 - RNA, 20 nt, Human
augcgguagccagcacacag

SEQ ID NO: 1244135 - RNA, 21 nt, Human
augcgguagccagcacacagg

SEQ ID NO: 1244136 - RNA, 19 nt, Human
augcgguuaauuuugaagu

SEQ ID NO: 1244137 - RNA, 14 nt, Human
augccucccugagc

SEQ ID NO: 1244138 - RNA, 19 nt, Human
augauugaauuauauguuc

SEQ ID NO: 1244139 - RNA, 22 nt, Human
augauucugauguacucuaaau

SEQ ID NO: 1244140 - RNA, 15 nt, Human
augauuacuggccuu

SEQ ID NO: 1244141 - RNA, 19 nt, Human
augauuacuggccuuuuuc

SEQ ID NO: 1244142 - RNA, 22 nt, Human
augauuacuggccuuuuucauu

SEQ ID NO: 1244143 - RNA, 22 nt, Human
augauuagaaauuaccugugga

SEQ ID NO: 1244144 - RNA, 22 nt, Human
augauucuauuuauauguacau

SEQ ID NO: 1244145 - RNA, 23 nt, Human
augauucuauuuauauguacaug

SEQ ID NO: 1244146 - RNA, 15 nt, Human
augcaaccauuugaa

SEQ ID NO: 1244147 - RNA, 20 nt, Human
augcacccucauacacagaa

SEQ ID NO: 1244148 - RNA, 14 nt, Human
augcaccuaaagaa

SEQ ID NO: 1244149 - RNA, 15 nt, Human
augcaccuaaagaaa

SEQ ID NO: 1244150 - RNA, 16 nt, Human
augcaccuaaagaaaa

SEQ ID NO: 1244151 - RNA, 18 nt, Human
augcaccuaaagaaaaac

SEQ ID NO: 1244152 - RNA, 23 nt, Human
augcaccuaaagaaaaacaaacu

SEQ ID NO: 1244153 - RNA, 20 nt, Human
uuguuuugcacacuuugcca

SEQ ID NO: 1244154 - RNA, 22 nt, Human
uuguuuuggcugaaauucuccu

SEQ ID NO: 1244155 - RNA, 14 nt, Human
uuguuuuggaugcc

SEQ ID NO: 1244156 - RNA, 17 nt, Human
uuuaaaaauagacacuc

SEQ ID NO: 1244157 - RNA, 18 nt, Human
uuuaaaaaucuuaaugua

SEQ ID NO: 1244158 - RNA, 14 nt, Human
uuuaaagaaagugu

SEQ ID NO: 1244159 - RNA, 16 nt, Human
uuuaaagaaaguguau

SEQ ID NO: 1244160 - RNA, 17 nt, Human
uuuaaagaagaaaaaaa

SEQ ID NO: 1244161 - RNA, 13 nt, Human
uuuaaagaauugu

SEQ ID NO: 1244162 - RNA, 12 nt, Human
uuuaaagaauug

SEQ ID NO: 1244163 - RNA, 18 nt, Human
uuuaaagacaauguuaaa

SEQ ID NO: 1244164 - RNA, 13 nt, Human
uuuaaagagucua

SEQ ID NO: 1244165 - RNA, 15 nt, Human
uuuaaagagucuaga

SEQ ID NO: 1244166 - RNA, 16 nt, Human
uuuaaagagucuagau

SEQ ID NO: 1244167 - RNA, 17 nt, Human
uuuaaagagucuagauu

SEQ ID NO: 1244168 - RNA, 18 nt, Human
uuuaaagagucuagauuc

SEQ ID NO: 1244169 - RNA, 21 nt, Human
uuuaaagagucuagauucaaa

SEQ ID NO: 1244170 - RNA, 23 nt, Human
uuuaaagagucuagauucaaagg

SEQ ID NO: 1244171 - RNA, 12 nt, Human
uuuaaagauuuu

SEQ ID NO: 1244172 - RNA, 18 nt, Human
uuuaaagucucaguuucu

SEQ ID NO: 1244173 - RNA, 22 nt, Human
uuuaaagugacuaauggcauga

SEQ ID NO: 1244174 - RNA, 22 nt, Human
uuuaaaguuaguaucuuuugau

SEQ ID NO: 1244175 - RNA, 15 nt, Human
uuuaaaguucaaacu

SEQ ID NO: 1244176 - RNA, 17 nt, Human
uuuaaaguuguuugugc

SEQ ID NO: 1244177 - RNA, 23 nt, Human
augauacuucgacacuguucuua

SEQ ID NO: 1244178 - RNA, 17 nt, Human
augauaugcuuguaacu

SEQ ID NO: 1244179 - RNA, 23 nt, Human
augauaugcuuguaacuaaaaua

SEQ ID NO: 1244180 - RNA, 21 nt, Human
augauccaacuaaugccuuac

SEQ ID NO: 1244181 - RNA, 21 nt, Human
augauacuugaaaauuaacau

SEQ ID NO: 1244182 - RNA, 16 nt, Human
augauacuucgacacu

SEQ ID NO: 1244183 - RNA, 18 nt, Human
augauacuucgacacugu

SEQ ID NO: 1244184 - RNA, 17 nt, Human
augauacuugaaaauua

SEQ ID NO: 1244185 - RNA, 17 nt, Human
augauacagcagagcua

SEQ ID NO: 1244186 - RNA, 15 nt, Human
augauacauccaaag

SEQ ID NO: 1244187 - RNA, 19 nt, Human
augauacuaauaaacuaau

SEQ ID NO: 1244188 - RNA, 14 nt, Human
augauuaaguaaug

SEQ ID NO: 1244189 - RNA, 18 nt, Human
augauuaaguaaugauaa

SEQ ID NO: 1244190 - RNA, 14 nt, Human
augauuacuggccu

SEQ ID NO: 1244191 - RNA, 18 nt, Human
augauccccacgccacag

SEQ ID NO: 1244192 - RNA, 19 nt, Human
augauccccacgccacagc

SEQ ID NO: 1244193 - RNA, 23 nt, Human
augauccccacgccacagcccuu

SEQ ID NO: 1244194 - RNA, 13 nt, Human
augaucccugugu

SEQ ID NO: 1244195 - RNA, 15 nt, Human
augauaacuggaaac

SEQ ID NO: 1244196 - RNA, 12 nt, Human
uuguugacauua

SEQ ID NO: 1244197 - RNA, 12 nt, Human
uuguugacauuc

SEQ ID NO: 1244198 - RNA, 15 nt, Human
uuguugacauucuga

SEQ ID NO: 1244199 - RNA, 16 nt, Human
uuguugacauucugaa

SEQ ID NO: 1244200 - RNA, 17 nt, Human
uuguugacauucugaau

SEQ ID NO: 1244201 - RNA, 20 nt, Human
uuguugacauucugaaugcu

SEQ ID NO: 1244202 - RNA, 18 nt, Human
uuguugagcuauugcugu

SEQ ID NO: 1244203 - RNA, 15 nt, Human
augauaauagauucu

SEQ ID NO: 1244204 - RNA, 19 nt, Human
augauaauagauucucuug

SEQ ID NO: 1244205 - RNA, 15 nt, Human
augauaaugaacaga

SEQ ID NO: 1244206 - RNA, 12 nt, Human
augauaaugaac

SEQ ID NO: 1244207 - RNA, 17 nt, Human
uuguuccccacuggagc

SEQ ID NO: 1244208 - RNA, 16 nt, Human
uuguuccccacuggag

SEQ ID NO: 1244209 - RNA, 14 nt, Human
uuguucuuguauuu

SEQ ID NO: 1244210 - RNA, 15 nt, Human
uuguucuuguauuua

SEQ ID NO: 1244211 - RNA, 22 nt, Human
uuguugaaaaaguuuguuuuug

SEQ ID NO: 1244212 - RNA, 16 nt, Human
uuguugaaaaaguuug

SEQ ID NO: 1244213 - RNA, 19 nt, Human
uuguucauauuaagaauga

SEQ ID NO: 1244214 - RNA, 17 nt, Human
uuguucauauuaagaau

SEQ ID NO: 1244215 - RNA, 21 nt, Human
uuguuccaaauacuaaugaaa

SEQ ID NO: 1244216 - RNA, 18 nt, Human
uuuaucaugugaaaucau

SEQ ID NO: 1244217 - RNA, 14 nt, Human
uuuaucauucaagu

SEQ ID NO: 1244218 - RNA, 15 nt, Human
uuuaucauucaagug

SEQ ID NO: 1244219 - RNA, 17 nt, Human
uuuaucauucaagugua

SEQ ID NO: 1244220 - RNA, 12 nt, Human
uuuaucauuuuc

SEQ ID NO: 1244221 - RNA, 17 nt, Human
uuuaucaugugaaauca

SEQ ID NO: 1244222 - RNA, 16 nt, Human
uuuaucaugcaugucc

SEQ ID NO: 1244223 - RNA, 22 nt, Human
uuuaucaugcauguccuguaaa

SEQ ID NO: 1244224 - RNA, 23 nt, Human
uuuaucaugcauguccuguaaag

SEQ ID NO: 1244225 - RNA, 21 nt, Human
uuuaucaaacccuagccuugc

SEQ ID NO: 1244226 - RNA, 22 nt, Human
uuuaucaaacccuagccuugcu

SEQ ID NO: 1244227 - RNA, 19 nt, Human
uuuauauuguaaauauugu

SEQ ID NO: 1244228 - RNA, 14 nt, Human
uuuauauuguaaau

SEQ ID NO: 1244229 - RNA, 16 nt, Human
uuuauauuguaaauau

SEQ ID NO: 1244230 - RNA, 14 nt, Human
uuuauauuuaaaug

SEQ ID NO: 1244231 - RNA, 16 nt, Human
uuuauauuacacuaca

SEQ ID NO: 1244232 - RNA, 22 nt, Human
uuuauauugauaagaucuuuua

SEQ ID NO: 1244233 - RNA, 13 nt, Human
augcuaagugaaa

SEQ ID NO: 1244234 - RNA, 13 nt, Human
uuuauauguugua

SEQ ID NO: 1244235 - RNA, 15 nt, Human
augcuaagagaagua

SEQ ID NO: 1244236 - RNA, 16 nt, Human
augcuaagagaaguag

SEQ ID NO: 1244237 - RNA, 17 nt, Human
augcuaagagaaguaga

SEQ ID NO: 1244238 - RNA, 22 nt, Human
augcuaagagaaguagaaauca

SEQ ID NO: 1244239 - RNA, 18 nt, Human
augcuaagagaaguagaa

SEQ ID NO: 1244240 - RNA, 16 nt, Human
augcuaagacucagug

SEQ ID NO: 1244241 - RNA, 19 nt, Human
augcuaacaucuaaaaaua

SEQ ID NO: 1244242 - RNA, 14 nt, Human
augcuaacaucuaa

SEQ ID NO: 1244243 - RNA, 16 nt, Human
augcuaacaucuaaaa

SEQ ID NO: 1244244 - RNA, 17 nt, Human
augcuaacaucuaaaaa

SEQ ID NO: 1244245 - RNA, 16 nt, Human
augcuccaagauucua

SEQ ID NO: 1244246 - RNA, 17 nt, Human
augcuccaagauucuag

SEQ ID NO: 1244247 - RNA, 18 nt, Human
augcuccaagauucuaga

SEQ ID NO: 1244248 - RNA, 19 nt, Human
augcuccaagauucuagau

SEQ ID NO: 1244249 - RNA, 22 nt, Human
augcuccagauuagagccugua

SEQ ID NO: 1244250 - RNA, 20 nt, Human
augcuccaagauucuagaug

SEQ ID NO: 1244251 - RNA, 13 nt, Human
augcuagguucua

SEQ ID NO: 1244252 - RNA, 14 nt, Human
augcuagguucuac

SEQ ID NO: 1244253 - RNA, 13 nt, Human
augcuaucucugu

SEQ ID NO: 1244254 - RNA, 19 nt, Human
uuuauuaaucuuaguguau

SEQ ID NO: 1244255 - RNA, 12 nt, Human
uuuauuaaugca

SEQ ID NO: 1244256 - RNA, 17 nt, Human
uuuauuaaugcacuuuc

SEQ ID NO: 1244257 - RNA, 16 nt, Human
uuuauuaauaaacauu

SEQ ID NO: 1244258 - RNA, 21 nt, Human
uuuauuaauaaacauucuauc

SEQ ID NO: 1244259 - RNA, 19 nt, Human
uuuauuaauauauauuauc

SEQ ID NO: 1244260 - RNA, 17 nt, Human
uuuauuaauauauauua

SEQ ID NO: 1244261 - RNA, 13 nt, Human
uuuauuaaucuua

SEQ ID NO: 1244262 - RNA, 22 nt, Human
augcuagaacucccuuucaaca

SEQ ID NO: 1244263 - RNA, 21 nt, Human
augcuagaacucccuuucaac

SEQ ID NO: 1244264 - RNA, 20 nt, Human
augcuagaacucccuuucaa

SEQ ID NO: 1244265 - RNA, 17 nt, Human
augcuguucaugaaaga

SEQ ID NO: 1244266 - RNA, 20 nt, Human
augcugugcgcccagggcug

SEQ ID NO: 1244267 - RNA, 21 nt, Human
augcuguggcaugggugaaga

SEQ ID NO: 1244268 - RNA, 18 nt, Human
augcugugcgcccagggc

SEQ ID NO: 1244269 - RNA, 21 nt, Human
augcugcuggggaagacagug

SEQ ID NO: 1244270 - RNA, 20 nt, Human
augcugcuggggaagacagu

SEQ ID NO: 1244271 - RNA, 13 nt, Human
augcugcugggga

SEQ ID NO: 1244272 - RNA, 14 nt, Human
augcugcuggggaa

SEQ ID NO: 1244273 - RNA, 16 nt, Human
augcugcuggggaaga

SEQ ID NO: 1244274 - RNA, 17 nt, Human
augcugcuggggaagac

SEQ ID NO: 1244275 - RNA, 18 nt, Human
augcugcuggggaagaca

SEQ ID NO: 1244276 - RNA, 19 nt, Human
augcugcuggggaagacag

SEQ ID NO: 1244277 - RNA, 16 nt, Human
augcuucccuuuccug

SEQ ID NO: 1244278 - RNA, 15 nt, Human
augcuuccucccagc

SEQ ID NO: 1244279 - RNA, 15 nt, Human
augcuucuaaguaaa

SEQ ID NO: 1244280 - RNA, 19 nt, Human
augcuucuaaguaaauaca

SEQ ID NO: 1244281 - RNA, 23 nt, Human
augcuguucaugaaagauucaau

SEQ ID NO: 1244282 - RNA, 14 nt, Human
augcugugugacuc

SEQ ID NO: 1244283 - RNA, 19 nt, Human
augcuguucaugaaagauu

SEQ ID NO: 1244284 - RNA, 20 nt, Human
augcuucuaaguaaauacaa

SEQ ID NO: 1244285 - RNA, 21 nt, Human
augcuucuaaguaaauacaau

SEQ ID NO: 1244286 - RNA, 22 nt, Human
augcuucuaaguaaauacaauu

SEQ ID NO: 1244287 - RNA, 23 nt, Human
augcuucuaaguaaauacaauuu

SEQ ID NO: 1244288 - RNA, 13 nt, Human
uuucaaaagaaag

SEQ ID NO: 1244289 - RNA, 18 nt, Human
uuucaaaaccuuuugaaa

SEQ ID NO: 1244290 - RNA, 12 nt, Human
uuucaaaaccag

SEQ ID NO: 1244291 - RNA, 13 nt, Human
uuucaaaaccagg

SEQ ID NO: 1244292 - RNA, 17 nt, Human
uuuauuuuucauuuagu

SEQ ID NO: 1244293 - RNA, 22 nt, Human
uuuauuuuuccauuuacaacaa

SEQ ID NO: 1244294 - RNA, 17 nt, Human
uuuauuuuucuugucuu

SEQ ID NO: 1244295 - RNA, 12 nt, Human
uuuauuuuucau

SEQ ID NO: 1244296 - RNA, 20 nt, Human
uuuauuuuguguuuaggaac

SEQ ID NO: 1244297 - RNA, 22 nt, Human
uuucaaaauuguuacaaauugu

SEQ ID NO: 1244298 - RNA, 16 nt, Human
uuucaaacauauauaa

SEQ ID NO: 1244299 - RNA, 21 nt, Human
uuucaaaaccagguccaauga

SEQ ID NO: 1244300 - RNA, 12 nt, Human
uuucaaaaugcu

SEQ ID NO: 1244301 - RNA, 13 nt, Human
uuucaaaaugcuu

SEQ ID NO: 1244302 - RNA, 15 nt, Human
uuucaaaaugcuuuu

SEQ ID NO: 1244303 - RNA, 17 nt, Human
uuucaaacauauauaac

SEQ ID NO: 1244304 - RNA, 22 nt, Human
auggacacuacacccagcaaua

SEQ ID NO: 1244305 - RNA, 13 nt, Human
auggacuaucugu

SEQ ID NO: 1244306 - RNA, 17 nt, Human
auggacuaucugucugg

SEQ ID NO: 1244307 - RNA, 20 nt, Human
auggacuaucugucuggugg

SEQ ID NO: 1244308 - RNA, 21 nt, Human
auggacuaucugucugguggc

SEQ ID NO: 1244309 - RNA, 22 nt, Human
auggacuaucugucugguggcc

SEQ ID NO: 1244310 - RNA, 19 nt, Human
auggacacuacacccagca

SEQ ID NO: 1244311 - RNA, 18 nt, Human
auggacacuacacccagc

SEQ ID NO: 1244312 - RNA, 17 nt, Human
auggacacuacacccag

SEQ ID NO: 1244313 - RNA, 16 nt, Human
auggacacuacaccca

SEQ ID NO: 1244314 - RNA, 15 nt, Human
auggacacuacaccc

SEQ ID NO: 1244315 - RNA, 13 nt, Human
auggacaauggac

SEQ ID NO: 1244316 - RNA, 15 nt, Human
auggacaauggaccg

SEQ ID NO: 1244317 - RNA, 19 nt, Human
uuucccggacuuagaaaac

SEQ ID NO: 1244318 - RNA, 19 nt, Human
auggaauuuugcaaagauu

SEQ ID NO: 1244319 - RNA, 14 nt, Human
auggacugcucagg

SEQ ID NO: 1244320 - RNA, 16 nt, Human
auggacucuguccuga

SEQ ID NO: 1244321 - RNA, 15 nt, Human
auggacucuguccug

SEQ ID NO: 1244322 - RNA, 13 nt, Human
auggacucugucc

SEQ ID NO: 1244323 - RNA, 14 nt, Human
auggacucuguccu

SEQ ID NO: 1244324 - RNA, 13 nt, Human
auggagaaggaag

SEQ ID NO: 1244325 - RNA, 12 nt, Human
auggagaaggaa

SEQ ID NO: 1244326 - RNA, 16 nt, Human
auggagaaagcugacu

SEQ ID NO: 1244327 - RNA, 23 nt, Human
auggagaaagcugacuuggcugg

SEQ ID NO: 1244328 - RNA, 12 nt, Human
auggagaaagcu

SEQ ID NO: 1244329 - RNA, 13 nt, Human
auggagaaagcug

SEQ ID NO: 1244330 - RNA, 14 nt, Human
auggagaaagcuga

SEQ ID NO: 1244331 - RNA, 15 nt, Human
auggagaaagcugac

SEQ ID NO: 1244332 - RNA, 17 nt, Human
uuucaacagugaagaca

SEQ ID NO: 1244333 - RNA, 20 nt, Human
uuucaacagugaagacagaa

SEQ ID NO: 1244334 - RNA, 21 nt, Human
uuucauuaauacagggcauuu

SEQ ID NO: 1244335 - RNA, 19 nt, Human
uuucaacagugaagacaga

SEQ ID NO: 1244336 - RNA, 13 nt, Human
uuucaaagaugcu

SEQ ID NO: 1244337 - RNA, 14 nt, Human
uuucaaagaugcug

SEQ ID NO: 1244338 - RNA, 19 nt, Human
uuucaaagaugcugugagu

SEQ ID NO: 1244339 - RNA, 17 nt, Human
uuucaaagcuuuuucca

SEQ ID NO: 1244340 - RNA, 19 nt, Human
uuucaaauagggucuaacu

SEQ ID NO: 1244341 - RNA, 20 nt, Human
uuucaaauagggucuaacuc

SEQ ID NO: 1244342 - RNA, 21 nt, Human
uuucaaauuggagcuucaugg

SEQ ID NO: 1244343 - RNA, 18 nt, Human
uuucccccuagccugccu

SEQ ID NO: 1244344 - RNA, 19 nt, Human
uuuccaugcguguuucuga

SEQ ID NO: 1244345 - RNA, 23 nt, Human
uuuccaugcacccucauacacag

SEQ ID NO: 1244346 - RNA, 19 nt, Human
uuuccauccauggccagca

SEQ ID NO: 1244347 - RNA, 12 nt, Human
uuuccaucuuua

SEQ ID NO: 1244348 - RNA, 15 nt, Human
auggagaaggaaggc

SEQ ID NO: 1244349 - RNA, 14 nt, Human
auggagaaggaagg

SEQ ID NO: 1244350 - RNA, 18 nt, Human
auggagacugucucaaga

SEQ ID NO: 1244351 - RNA, 14 nt, Human
auggcacuaguauu

SEQ ID NO: 1244352 - RNA, 16 nt, Human
auggcacuaguauuuc

SEQ ID NO: 1244353 - RNA, 19 nt, Human
auggcagauguaggaggga

SEQ ID NO: 1244354 - RNA, 20 nt, Human
auggcagauguaggagggac

SEQ ID NO: 1244355 - RNA, 21 nt, Human
auggcagauguaggagggacu

SEQ ID NO: 1244356 - RNA, 11 nt, Human
auggcagcagg

SEQ ID NO: 1244357 - RNA, 13 nt, Human
auggcagcagggg

SEQ ID NO: 1244358 - RNA, 17 nt, Human
auggcaggaaggcuugu

SEQ ID NO: 1244359 - RNA, 18 nt, Human
auggcagcuuuuaaaaga

SEQ ID NO: 1244360 - RNA, 15 nt, Human
auggcagggggcugc

SEQ ID NO: 1244361 - RNA, 16 nt, Human
auggcagggggcugcu

SEQ ID NO: 1244362 - RNA, 17 nt, Human
auggcagggggcugcug

SEQ ID NO: 1244363 - RNA, 19 nt, Human
auggcagggggcugcugcu

SEQ ID NO: 1244364 - RNA, 20 nt, Human
auggcagggggcugcugcug

SEQ ID NO: 1244365 - RNA, 22 nt, Human
auggcagggggcugcugcuggg

SEQ ID NO: 1244366 - RNA, 17 nt, Human
auggcaggggguggaau

SEQ ID NO: 1244367 - RNA, 24 nt, Human
auggcaggggguggaauuauuacu

SEQ ID NO: 1244368 - RNA, 15 nt, Human
auggcaguuauauuu

SEQ ID NO: 1244369 - RNA, 16 nt, Human
auggcauaaccugucu

SEQ ID NO: 1244370 - RNA, 17 nt, Human
auggcauaaccugucuc

SEQ ID NO: 1244371 - RNA, 16 nt, Human
auggcauccuccagcc

SEQ ID NO: 1244372 - RNA, 15 nt, Human
auggcaugagaaaua

SEQ ID NO: 1244373 - RNA, 17 nt, Human
auggcaugagaaauaca

SEQ ID NO: 1244374 - RNA, 18 nt, Human
auggcaugagaaauacaa

SEQ ID NO: 1244375 - RNA, 22 nt, Human
auggccauggaguguacaagua

SEQ ID NO: 1244376 - RNA, 15 nt, Human
auggcccauccugug

SEQ ID NO: 1244377 - RNA, 14 nt, Human
auggccccagcaca

SEQ ID NO: 1244378 - RNA, 15 nt, Human
auggccccagcacag

SEQ ID NO: 1244379 - RNA, 17 nt, Human
auggccccagcacagcu

SEQ ID NO: 1244380 - RNA, 18 nt, Human
auggccccagcacagcuu

SEQ ID NO: 1244381 - RNA, 20 nt, Human
auggccccagcacagcuuga

SEQ ID NO: 1244382 - RNA, 18 nt, Human
augggagggaggcucagg

SEQ ID NO: 1244383 - RNA, 21 nt, Human
augggagcugguuagaaaugc

SEQ ID NO: 1244384 - RNA, 23 nt, Human
augggaggcucacccccuucucc

SEQ ID NO: 1244385 - RNA, 21 nt, Human
augggaggccuuucccuaagc

SEQ ID NO: 1244386 - RNA, 20 nt, Human
augggagcugguuagaaaug

SEQ ID NO: 1244387 - RNA, 22 nt, Human
augggagcugguuagaaaugca

SEQ ID NO: 1244388 - RNA, 17 nt, Human
augggagacccuugaca

SEQ ID NO: 1244389 - RNA, 18 nt, Human
augggagacccuugacac

SEQ ID NO: 1244390 - RNA, 12 nt, Human
auggcucccagg

SEQ ID NO: 1244391 - RNA, 19 nt, Human
auggcuauguuuuuaaugu

SEQ ID NO: 1244392 - RNA, 13 nt, Human
auggcuauuuuau

SEQ ID NO: 1244393 - RNA, 19 nt, Human
auggcuaagcaaaauguga

SEQ ID NO: 1244394 - RNA, 20 nt, Human
auggcguaaguacagagaag

SEQ ID NO: 1244395 - RNA, 21 nt, Human
auggcguaaguacagagaagc

SEQ ID NO: 1244396 - RNA, 23 nt, Human
auggcguaaguacagagaagcca

SEQ ID NO: 1244397 - RNA, 22 nt, Human
auggcguaaguacagagaagcc

SEQ ID NO: 1244398 - RNA, 11 nt, Human
auggccccucu

SEQ ID NO: 1244399 - RNA, 18 nt, Human
auggccccucugaccugc

SEQ ID NO: 1244400 - RNA, 23 nt, Human
auggccccucugaccugcacugg

SEQ ID NO: 1244401 - RNA, 17 nt, Human
auggcguaaguacagag

SEQ ID NO: 1244402 - RNA, 18 nt, Human
auggcguaaguacagaga

SEQ ID NO: 1244403 - RNA, 19 nt, Human
auggcguaaguacagagaa

SEQ ID NO: 1244404 - RNA, 17 nt, Human
aucaggguuaguauugu

SEQ ID NO: 1244405 - RNA, 16 nt, Human
aucaggcuuuuguuuc

SEQ ID NO: 1244406 - RNA, 18 nt, Human
aucagggaggucauuuug

SEQ ID NO: 1244407 - RNA, 20 nt, Human
aucagggguaggaauggaaa

SEQ ID NO: 1244408 - RNA, 23 nt, Human
aucagguaacuaacugcauacac

SEQ ID NO: 1244409 - RNA, 16 nt, Human
aucagguccucagaga

SEQ ID NO: 1244410 - RNA, 20 nt, Human
aucagguccucagagaauuu

SEQ ID NO: 1244411 - RNA, 19 nt, Human
aucaggccuagaggccuga

SEQ ID NO: 1244412 - RNA, 14 nt, Human
aucaggccuagagg

SEQ ID NO: 1244413 - RNA, 14 nt, Human
aucaggcuuucuua

SEQ ID NO: 1244414 - RNA, 22 nt, Human
aucaggcuuucuuaaagugaga

SEQ ID NO: 1244415 - RNA, 14 nt, Human
aucaggcuuucuuu

SEQ ID NO: 1244416 - RNA, 22 nt, Human
aucaggcuuucuuuuuuuucuu

SEQ ID NO: 1244417 - RNA, 22 nt, Human
aucagaauagccacauuuggaa

SEQ ID NO: 1244418 - RNA, 19 nt, Human
aucagaauaucacagaaaa

SEQ ID NO: 1244419 - RNA, 22 nt, Human
aucagaugcuccaagauucuag

SEQ ID NO: 1244420 - RNA, 23 nt, Human
aucagaugcuccaagauucuaga

SEQ ID NO: 1244421 - RNA, 21 nt, Human
aucagcaaaccggggccuacu

SEQ ID NO: 1244422 - RNA, 13 nt, Human
uucuaggacugaa

SEQ ID NO: 1244423 - RNA, 14 nt, Human
uucuaggacugaau

SEQ ID NO: 1244424 - RNA, 22 nt, Human
uucuagcuuaucuacuuccaaa

SEQ ID NO: 1244425 - RNA, 11 nt, Human
uucuaggaaaa

SEQ ID NO: 1244426 - RNA, 16 nt, Human
uucuaggaaaauaaaa

SEQ ID NO: 1244427 - RNA, 12 nt, Human
uucuaggaaaau

SEQ ID NO: 1244428 - RNA, 16 nt, Human
uucuaggacugaauua

SEQ ID NO: 1244429 - RNA, 23 nt, Human
uucuaggacugaauuaugaaacu

SEQ ID NO: 1244430 - RNA, 18 nt, Human
uucucacaggucccaaau

SEQ ID NO: 1244431 - RNA, 18 nt, Human
uucucacuccuaccuggu

SEQ ID NO: 1244432 - RNA, 16 nt, Human
uucucaggacacaggc

SEQ ID NO: 1244433 - RNA, 18 nt, Human
uucucaggacacaggccu

SEQ ID NO: 1244434 - RNA, 19 nt, Human
uucucaggacacaggccug

SEQ ID NO: 1244435 - RNA, 20 nt, Human
uucucaggacacaggccugu

SEQ ID NO: 1244436 - RNA, 22 nt, Human
uucucaggacacaggccugugu

SEQ ID NO: 1244437 - RNA, 23 nt, Human
uucucaggacacaggccugugua

SEQ ID NO: 1244438 - RNA, 16 nt, Human
uucucacuccuaccug

SEQ ID NO: 1244439 - RNA, 15 nt, Human
uucucacuaauuugu

SEQ ID NO: 1244440 - RNA, 15 nt, Human
uucucacuaaaucuu

SEQ ID NO: 1244441 - RNA, 22 nt, Human
aucacuugucaauaaaauccau

SEQ ID NO: 1244442 - RNA, 21 nt, Human
aucacuuguacaaaauaaaca

SEQ ID NO: 1244443 - RNA, 16 nt, Human
aucacuuucucaguuu

SEQ ID NO: 1244444 - RNA, 18 nt, Human
aucacuuucucaguuuuc

SEQ ID NO: 1244445 - RNA, 18 nt, Human
aucagaaguuucucagcu

SEQ ID NO: 1244446 - RNA, 19 nt, Human
aucagaagucaucuugcua

SEQ ID NO: 1244447 - RNA, 19 nt, Human
aucagaauagccacauuug

SEQ ID NO: 1244448 - RNA, 16 nt, Human
uucucagguguugcca

SEQ ID NO: 1244449 - RNA, 17 nt, Human
uucucagguguugccaa

SEQ ID NO: 1244450 - RNA, 19 nt, Human
uucucagguguugccaaau

SEQ ID NO: 1244451 - RNA, 14 nt, Human
aucacuuguacaaa

SEQ ID NO: 1244452 - RNA, 16 nt, Human
aucacuuguacaaaau

SEQ ID NO: 1244453 - RNA, 17 nt, Human
aucacuuguacaaaaua

SEQ ID NO: 1244454 - RNA, 18 nt, Human
aucacuuguacaaaauaa

SEQ ID NO: 1244455 - RNA, 13 nt, Human
uucuaaaguaaaa

SEQ ID NO: 1244456 - RNA, 18 nt, Human
uucggccccauguaucuc

SEQ ID NO: 1244457 - RNA, 13 nt, Human
uucuaaaggucca

SEQ ID NO: 1244458 - RNA, 16 nt, Human
uucuaaagguccacag

SEQ ID NO: 1244459 - RNA, 12 nt, Human
uucuaaaugaau

SEQ ID NO: 1244460 - RNA, 15 nt, Human
uucuaaaugaauguu

SEQ ID NO: 1244461 - RNA, 18 nt, Human
uucuaaaugaauguuuac

SEQ ID NO: 1244462 - RNA, 21 nt, Human
uucuaaaugaauguuuacacu

SEQ ID NO: 1244463 - RNA, 15 nt, Human
uucggccuccauccu

SEQ ID NO: 1244464 - RNA, 17 nt, Human
uucggccccauguaucu

SEQ ID NO: 1244465 - RNA, 16 nt, Human
aucacugcucacacug

SEQ ID NO: 1244466 - RNA, 14 nt, Human
uucggccuccaucc

SEQ ID NO: 1244467 - RNA, 19 nt, Human
uucggacaguuuauuuguu

SEQ ID NO: 1244468 - RNA, 20 nt, Human
uucggacaguuuauuuguug

SEQ ID NO: 1244469 - RNA, 14 nt, Human
uucgcucuuugaga

SEQ ID NO: 1244470 - RNA, 22 nt, Human
uucgcuucuugccucugugcug

SEQ ID NO: 1244471 - RNA, 23 nt, Human
uucggaaagaagaaggugggagg

SEQ ID NO: 1244472 - RNA, 16 nt, Human
uucuagcgcaguuuuu

SEQ ID NO: 1244473 - RNA, 12 nt, Human
uucuagaugauu

SEQ ID NO: 1244474 - RNA, 22 nt, Human
uucuagaugauuaaauaagauu

SEQ ID NO: 1244475 - RNA, 23 nt, Human
uucuaagaagugaaaaucuacac

SEQ ID NO: 1244476 - RNA, 12 nt, Human
uucuaagacuca

SEQ ID NO: 1244477 - RNA, 13 nt, Human
uucuaagacucaa

SEQ ID NO: 1244478 - RNA, 16 nt, Human
uucuaagacucaaaug

SEQ ID NO: 1244479 - RNA, 20 nt, Human
uucuaagacucaaauguucu

SEQ ID NO: 1244480 - RNA, 21 nt, Human
uucuaagacucaaauguucua

SEQ ID NO: 1244481 - RNA, 22 nt, Human
uucuaagacucaaauguucuaa

SEQ ID NO: 1244482 - RNA, 20 nt, Human
uucuaagacuuacucuaaga

SEQ ID NO: 1244483 - RNA, 17 nt, Human
uucuaagacuuuacuua

SEQ ID NO: 1244484 - RNA, 21 nt, Human
uucuaagacuuacucuaagau

SEQ ID NO: 1244485 - RNA, 20 nt, Human
uucuaaggccuaggauucua

SEQ ID NO: 1244486 - RNA, 21 nt, Human
uucuaaggccuaggauucuaa

SEQ ID NO: 1244487 - RNA, 22 nt, Human
uucuaaggccuaggauucuaaa

SEQ ID NO: 1244488 - RNA, 12 nt, Human
uucuaaggcucu

SEQ ID NO: 1244489 - RNA, 13 nt, Human
uucuaaggcucug

SEQ ID NO: 1244490 - RNA, 16 nt, Human
uucuaaggcucugaga

SEQ ID NO: 1244491 - RNA, 17 nt, Human
uucuaaggcucugagag

SEQ ID NO: 1244492 - RNA, 18 nt, Human
uucuaaggcucugagagu

SEQ ID NO: 1244493 - RNA, 20 nt, Human
uucuaaggcucugagagucu

SEQ ID NO: 1244494 - RNA, 20 nt, Human
uucuaagguccgguguucua

SEQ ID NO: 1244495 - RNA, 21 nt, Human
uucuaagguccgguguucuaa

SEQ ID NO: 1244496 - RNA, 23 nt, Human
uucuaagguccgguguucuaaga

SEQ ID NO: 1244497 - RNA, 24 nt, Human
uucuagaucagaugcuccaagauu

SEQ ID NO: 1244498 - RNA, 20 nt, Human
uuccuaaauauauuuuaaga

SEQ ID NO: 1244499 - RNA, 15 nt, Human
uuccguguccacccc

SEQ ID NO: 1244500 - RNA, 17 nt, Human
uuccguguccaccccca

SEQ ID NO: 1244501 - RNA, 16 nt, Human
uuccuaauuccacagc

SEQ ID NO: 1244502 - RNA, 17 nt, Human
uuccuaauuccacagcu

SEQ ID NO: 1244503 - RNA, 18 nt, Human
uuccuaauuccacagcug

SEQ ID NO: 1244504 - RNA, 14 nt, Human
uuccucugagccuu

SEQ ID NO: 1244505 - RNA, 17 nt, Human
uuccucugagccuuggg

SEQ ID NO: 1244506 - RNA, 21 nt, Human
uuccucugaggcugaaauuca

SEQ ID NO: 1244507 - RNA, 11 nt, Human
uuccucugccc

SEQ ID NO: 1244508 - RNA, 20 nt, Human
uuccucugcccuuccugcag

SEQ ID NO: 1244509 - RNA, 15 nt, Human
uuccugaacaggaua

SEQ ID NO: 1244510 - RNA, 15 nt, Human
uuccugaagaaccag

SEQ ID NO: 1244511 - RNA, 16 nt, Human
uuccugaagaaccagu

SEQ ID NO: 1244512 - RNA, 19 nt, Human
uuccugaagaaccaguccc

SEQ ID NO: 1244513 - RNA, 19 nt, Human
uuccguagguuauuuucag

SEQ ID NO: 1244514 - RNA, 20 nt, Human
uucccucacucgucuccccc

SEQ ID NO: 1244515 - RNA, 21 nt, Human
uucccucacucgucuccccca

SEQ ID NO: 1244516 - RNA, 19 nt, Human
uucccucccagaggagcca

SEQ ID NO: 1244517 - RNA, 22 nt, Human
uuccggauccuaagcaucuaag

SEQ ID NO: 1244518 - RNA, 22 nt, Human
uuccggcauggacaauggaccg

SEQ ID NO: 1244519 - RNA, 13 nt, Human
uuccggccccucc

SEQ ID NO: 1244520 - RNA, 17 nt, Human
uuccggccccuccccuc

SEQ ID NO: 1244521 - RNA, 21 nt, Human
uuccggccccuccccuccaaa

SEQ ID NO: 1244522 - RNA, 18 nt, Human
uuccggccccuccccucc

SEQ ID NO: 1244523 - RNA, 21 nt, Human
uuccgucaccacgacuggcca

SEQ ID NO: 1244524 - RNA, 18 nt, Human
uuccgugacgucacugga

SEQ ID NO: 1244525 - RNA, 21 nt, Human
uucccucaccuuggcaccaga

SEQ ID NO: 1244526 - RNA, 16 nt, Human
uucccgcucagcccuc

SEQ ID NO: 1244527 - RNA, 18 nt, Human
uucccgcucagcccuccc

SEQ ID NO: 1244528 - RNA, 21 nt, Human
uucccgcucagcccucccugc

SEQ ID NO: 1244529 - RNA, 22 nt, Human
uucccgcucagcccucccugcc

SEQ ID NO: 1244530 - RNA, 15 nt, Human
auagcaaaagaagaa

SEQ ID NO: 1244531 - RNA, 16 nt, Human
auagcaaaagaagaag

SEQ ID NO: 1244532 - RNA, 17 nt, Human
auagcaaaagaagaagu

SEQ ID NO: 1244533 - RNA, 18 nt, Human
auagcaaaagaagaaguu

SEQ ID NO: 1244534 - RNA, 19 nt, Human
auagcaaaagaagaaguuu

SEQ ID NO: 1244535 - RNA, 13 nt, Human
auagcaaagaauu

SEQ ID NO: 1244536 - RNA, 14 nt, Human
auagcaaagaauug

SEQ ID NO: 1244537 - RNA, 15 nt, Human
auagcaaagaauuga

SEQ ID NO: 1244538 - RNA, 16 nt, Human
aucaaggguacacugc

SEQ ID NO: 1244539 - RNA, 18 nt, Human
aucaaggccuuauuggaa

SEQ ID NO: 1244540 - RNA, 22 nt, Human
aucaaggccuuauuggaaagca

SEQ ID NO: 1244541 - RNA, 20 nt, Human
aucaccuuagaccaccaagc

SEQ ID NO: 1244542 - RNA, 22 nt, Human
aucaaucuuuaaaccaauugcu

SEQ ID NO: 1244543 - RNA, 21 nt, Human
aucaaucuguaaaacuaagaa

SEQ ID NO: 1244544 - RNA, 16 nt, Human
aucaaucuugcaugua

SEQ ID NO: 1244545 - RNA, 17 nt, Human
aucaaucuugcauguaa

SEQ ID NO: 1244546 - RNA, 18 nt, Human
aucaaucuugcauguaac

SEQ ID NO: 1244547 - RNA, 19 nt, Human
aucaccuuagaccaccaag

SEQ ID NO: 1244548 - RNA, 14 nt, Human
aucacgcuuuccug

SEQ ID NO: 1244549 - RNA, 18 nt, Human
aucacgcuuuccugaauc

SEQ ID NO: 1244550 - RNA, 18 nt, Human
aucacgcuuuuugaaaaa

SEQ ID NO: 1244551 - RNA, 15 nt, Human
aucacugaguuuucc

SEQ ID NO: 1244552 - RNA, 16 nt, Human
aucacugaguuuucca

SEQ ID NO: 1244553 - RNA, 17 nt, Human
aucacugaguuuuccau

SEQ ID NO: 1244554 - RNA, 18 nt, Human
aucacugaguuuuccaug

SEQ ID NO: 1244555 - RNA, 15 nt, Human
uuccugugcacagcc

SEQ ID NO: 1244556 - RNA, 14 nt, Human
uuccugugcacagc

SEQ ID NO: 1244557 - RNA, 21 nt, Human
uuccuguggauguaaagugau

SEQ ID NO: 1244558 - RNA, 13 nt, Human
uuccuguggcucc

SEQ ID NO: 1244559 - RNA, 19 nt, Human
uuccuguccucuuucagcu

SEQ ID NO: 1244560 - RNA, 20 nt, Human
uuccuguccucuuucagcuc

SEQ ID NO: 1244561 - RNA, 24 nt, Human
uuccuguccucuuucagcuccuga

SEQ ID NO: 1244562 - RNA, 21 nt, Human
uuccuguccucuuucagcucc

SEQ ID NO: 1244563 - RNA, 19 nt, Human
uuccugucuuauccuccac

SEQ ID NO: 1244564 - RNA, 14 nt, Human
auauuuuuaucuuu

SEQ ID NO: 1244565 - RNA, 15 nt, Human
auauuuuuaucuuua

SEQ ID NO: 1244566 - RNA, 20 nt, Human
auauuuuuaucuuuauauga

SEQ ID NO: 1244567 - RNA, 22 nt, Human
auauuuuuaucuuuauaugaag

SEQ ID NO: 1244568 - RNA, 14 nt, Human
aucaacagauaaau

SEQ ID NO: 1244569 - RNA, 16 nt, Human
aucaacaaaaauuguc

SEQ ID NO: 1244570 - RNA, 21 nt, Human
aucaaauuuguaggguuucua

SEQ ID NO: 1244571 - RNA, 14 nt, Human
aucaacauuucuca

SEQ ID NO: 1244572 - RNA, 18 nt, Human
auauuuuuuguuaaauga

SEQ ID NO: 1244573 - RNA, 20 nt, Human
auauuuuuuguuaaaugauu

SEQ ID NO: 1244574 - RNA, 22 nt, Human
aucaaauguuuaaucauauaaa

SEQ ID NO: 1244575 - RNA, 20 nt, Human
uugaaauuaugugacauuuu

SEQ ID NO: 1244576 - RNA, 17 nt, Human
uugaaauuaugugacau

SEQ ID NO: 1244577 - RNA, 18 nt, Human
uugaaauuaaccucucac

SEQ ID NO: 1244578 - RNA, 21 nt, Human
uugaaauguaaggcuguguaa

SEQ ID NO: 1244579 - RNA, 20 nt, Human
uugaaauuaagaaggcaaaa

SEQ ID NO: 1244580 - RNA, 21 nt, Human
uugaaagggguugugaagagg

SEQ ID NO: 1244581 - RNA, 21 nt, Human
uugaaagguuuuuuuucaguu

SEQ ID NO: 1244582 - RNA, 22 nt, Human
uugaaagguuuuuuuucaguug

SEQ ID NO: 1244583 - RNA, 11 nt, Human
uugaaauguaa

SEQ ID NO: 1244584 - RNA, 17 nt, Human
uugaaauguaaggcugu

SEQ ID NO: 1244585 - RNA, 20 nt, Human
uugaaauguaaggcugugua

SEQ ID NO: 1244586 - RNA, 17 nt, Human
uugaaauuguauuacaa

SEQ ID NO: 1244587 - RNA, 19 nt, Human
uugaacccgggaggcagag

SEQ ID NO: 1244588 - RNA, 18 nt, Human
uugaaauugaaccuuugu

SEQ ID NO: 1244589 - RNA, 18 nt, Human
uugaaccugaugaaaaua

SEQ ID NO: 1244590 - RNA, 20 nt, Human
uugaaccugaugaaaauaaa

SEQ ID NO: 1244591 - RNA, 19 nt, Human
uugaaccugaugaaaauaa

SEQ ID NO: 1244592 - RNA, 17 nt, Human
uugaaccuuugugcccu

SEQ ID NO: 1244593 - RNA, 19 nt, Human
uugaaccuuugugcccuau

SEQ ID NO: 1244594 - RNA, 16 nt, Human
uugaacguuuucuaau

SEQ ID NO: 1244595 - RNA, 17 nt, Human
uugaacguuuucuaauu

SEQ ID NO: 1244596 - RNA, 18 nt, Human
uugaacguuuucuaauug

SEQ ID NO: 1244597 - RNA, 19 nt, Human
uugaacguuuucuaauugc

SEQ ID NO: 1244598 - RNA, 20 nt, Human
uugaacguuuucuaauugcu

SEQ ID NO: 1244599 - RNA, 21 nt, Human
uugaacguuuucuaauugcuu

SEQ ID NO: 1244600 - RNA, 17 nt, Human
auccgacugcuuuggac

SEQ ID NO: 1244601 - RNA, 14 nt, Human
auccuaaacaucau

SEQ ID NO: 1244602 - RNA, 17 nt, Human
auccuaagcaucuaagu

SEQ ID NO: 1244603 - RNA, 18 nt, Human
auccuacaagacacagug

SEQ ID NO: 1244604 - RNA, 19 nt, Human
auccuacaagacacaguga

SEQ ID NO: 1244605 - RNA, 13 nt, Human
auccuaaagaaca

SEQ ID NO: 1244606 - RNA, 16 nt, Human
auccuaaagaacaaag

SEQ ID NO: 1244607 - RNA, 18 nt, Human
auccuaaagaacaaagua

SEQ ID NO: 1244608 - RNA, 14 nt, Human
auccgccaauauua

SEQ ID NO: 1244609 - RNA, 13 nt, Human
auccggaaagaag

SEQ ID NO: 1244610 - RNA, 22 nt, Human
auccggcaacaucaacccgagu

SEQ ID NO: 1244611 - RNA, 21 nt, Human
auccgucuuuggccuccucca

SEQ ID NO: 1244612 - RNA, 17 nt, Human
auccgugccucuuuuua

SEQ ID NO: 1244613 - RNA, 20 nt, Human
auccgugccucuuuuuaaag

SEQ ID NO: 1244614 - RNA, 16 nt, Human
auccuagauccuaagg

SEQ ID NO: 1244615 - RNA, 11 nt, Human
auccuccucau

SEQ ID NO: 1244616 - RNA, 11 nt, Human
auccuccuccc

SEQ ID NO: 1244617 - RNA, 14 nt, Human
auccuacccccugu

SEQ ID NO: 1244618 - RNA, 21 nt, Human
auccuaccacaaugcagugcc

SEQ ID NO: 1244619 - RNA, 22 nt, Human
auccuaccacaaugcagugccu

SEQ ID NO: 1244620 - RNA, 18 nt, Human
auccuaagcaucuaaguu

SEQ ID NO: 1244621 - RNA, 16 nt, Human
auccuacccccugugc

SEQ ID NO: 1244622 - RNA, 15 nt, Human
auccuagauccuaag

SEQ ID NO: 1244623 - RNA, 16 nt, Human
uucuuuguaaugaaaa

SEQ ID NO: 1244624 - RNA, 22 nt, Human
uucuuugguuucccaagagcua

SEQ ID NO: 1244625 - RNA, 18 nt, Human
uucuuuuugggagagacu

SEQ ID NO: 1244626 - RNA, 15 nt, Human
uucuuuguaaugaaa

SEQ ID NO: 1244627 - RNA, 13 nt, Human
uucuuugggccag

SEQ ID NO: 1244628 - RNA, 14 nt, Human
uucuuuuuuuguga

SEQ ID NO: 1244629 - RNA, 23 nt, Human
uucuuuuuugauauagaaguaua

SEQ ID NO: 1244630 - RNA, 19 nt, Human
uucuuuuugggagagacuu

SEQ ID NO: 1244631 - RNA, 21 nt, Human
uucuuuuugggagagacuugu

SEQ ID NO: 1244632 - RNA, 23 nt, Human
uucuuuuuguagcuggggcuuug

SEQ ID NO: 1244633 - RNA, 22 nt, Human
uucuuuuuugauauagaaguau

SEQ ID NO: 1244634 - RNA, 23 nt, Human
uucuuuuuuggccaucugcuccu

SEQ ID NO: 1244635 - RNA, 16 nt, Human
uucuuuuuuuagagaa

SEQ ID NO: 1244636 - RNA, 20 nt, Human
uucuucugaacucaaacuga

SEQ ID NO: 1244637 - RNA, 23 nt, Human
uucuucugaacucaaacugagga

SEQ ID NO: 1244638 - RNA, 14 nt, Human
uucuucuucucguc

SEQ ID NO: 1244639 - RNA, 16 nt, Human
uucuucuugaggggaa

SEQ ID NO: 1244640 - RNA, 16 nt, Human
uucuuuggaaaguaca

SEQ ID NO: 1244641 - RNA, 20 nt, Human
uucuuuggaaaguacacucu

SEQ ID NO: 1244642 - RNA, 21 nt, Human
aucccaucgucucggccuuca

SEQ ID NO: 1244643 - RNA, 23 nt, Human
aucccaucgucucggccuucaca

SEQ ID NO: 1244644 - RNA, 11 nt, Human
aucccucaucu

SEQ ID NO: 1244645 - RNA, 13 nt, Human
uucuuaacuucuu

SEQ ID NO: 1244646 - RNA, 16 nt, Human
uucuuaacuucuugcu

SEQ ID NO: 1244647 - RNA, 17 nt, Human
uucuuaacuucuugcuu

SEQ ID NO: 1244648 - RNA, 13 nt, Human
uucuucugaacuc

SEQ ID NO: 1244649 - RNA, 13 nt, Human
auccaucaggcca

SEQ ID NO: 1244650 - RNA, 14 nt, Human
auccaucaucaugu

SEQ ID NO: 1244651 - RNA, 18 nt, Human
auccauauugagucaaau

SEQ ID NO: 1244652 - RNA, 20 nt, Human
auccauauugagucaaaugg

SEQ ID NO: 1244653 - RNA, 18 nt, Human
auccaguuuugucaaugc

SEQ ID NO: 1244654 - RNA, 16 nt, Human
auccagugauccuuac

SEQ ID NO: 1244655 - RNA, 21 nt, Human
auccagugauccuuacaaguu

SEQ ID NO: 1244656 - RNA, 16 nt, Human
auccaguucaugagaa

SEQ ID NO: 1244657 - RNA, 15 nt, Human
auccacauuucuaaa

SEQ ID NO: 1244658 - RNA, 16 nt, Human
auccacauuucuaaaa

SEQ ID NO: 1244659 - RNA, 14 nt, Human
aucccagcugccua

SEQ ID NO: 1244660 - RNA, 13 nt, Human
aucccagcugccu

SEQ ID NO: 1244661 - RNA, 24 nt, Human
aucccagcccccugaccacucaga

SEQ ID NO: 1244662 - RNA, 19 nt, Human
aucccagcccccugaccac

SEQ ID NO: 1244663 - RNA, 20 nt, Human
aucccaaaguuguuguaacc

SEQ ID NO: 1244664 - RNA, 22 nt, Human
aucccaaaguuguuguaaccug

SEQ ID NO: 1244665 - RNA, 14 nt, Human
aucccagcccccug

SEQ ID NO: 1244666 - RNA, 16 nt, Human
aucccagcccccugac

SEQ ID NO: 1244667 - RNA, 16 nt, Human
aucccaaaggacagcc

SEQ ID NO: 1244668 - RNA, 20 nt, Human
aucccaaaggacagccgccu

SEQ ID NO: 1244669 - RNA, 15 nt, Human
aucccaaaguuguug

SEQ ID NO: 1244670 - RNA, 21 nt, Human
auccaagcaccaccaaacaca

SEQ ID NO: 1244671 - RNA, 23 nt, Human
aucauuuuaugucaagggcagcu

SEQ ID NO: 1244672 - RNA, 14 nt, Human
aucauuuuauguca

SEQ ID NO: 1244673 - RNA, 22 nt, Human
aucauuuugcaaucccuuaaua

SEQ ID NO: 1244674 - RNA, 15 nt, Human
uucugggccugacca

SEQ ID NO: 1244675 - RNA, 16 nt, Human
uucugggcuucaucug

SEQ ID NO: 1244676 - RNA, 17 nt, Human
uucuggggcaggcuggg

SEQ ID NO: 1244677 - RNA, 18 nt, Human
uucuggggcaggcugggc

SEQ ID NO: 1244678 - RNA, 19 nt, Human
uucuggggcaggcugggcc

SEQ ID NO: 1244679 - RNA, 20 nt, Human
uucuggggcaggcugggcca

SEQ ID NO: 1244680 - RNA, 21 nt, Human
uucuggggcaggcugggccau

SEQ ID NO: 1244681 - RNA, 17 nt, Human
uucuccuuucacaaccu

SEQ ID NO: 1244682 - RNA, 12 nt, Human
uucucuaggaaa

SEQ ID NO: 1244683 - RNA, 20 nt, Human
uucucuuccuuuuaucagua

SEQ ID NO: 1244684 - RNA, 13 nt, Human
uucucuugccuca

SEQ ID NO: 1244685 - RNA, 14 nt, Human
aucagguuuuuccc

SEQ ID NO: 1244686 - RNA, 14 nt, Human
aucaguaaauaacu

SEQ ID NO: 1244687 - RNA, 18 nt, Human
aucaguaaauaacuggaa

SEQ ID NO: 1244688 - RNA, 17 nt, Human
aucaguaagagguguua

SEQ ID NO: 1244689 - RNA, 23 nt, Human
aucaguaagagguguuauuugga

SEQ ID NO: 1244690 - RNA, 16 nt, Human
aucaguaguucacaua

SEQ ID NO: 1244691 - RNA, 23 nt, Human
uucuccugcugcucccucagacu

SEQ ID NO: 1244692 - RNA, 23 nt, Human
aucaguaguucacauacaaauca

SEQ ID NO: 1244693 - RNA, 16 nt, Human
uucuccugcugcuccc

SEQ ID NO: 1244694 - RNA, 19 nt, Human
uucuccugcugcucccuca

SEQ ID NO: 1244695 - RNA, 20 nt, Human
uucuccugcugcucccucag

SEQ ID NO: 1244696 - RNA, 21 nt, Human
uucuccugcugcucccucaga

SEQ ID NO: 1244697 - RNA, 22 nt, Human
uucuccugcugcucccucagac

SEQ ID NO: 1244698 - RNA, 10 nt, Human
uucuccugga

SEQ ID NO: 1244699 - RNA, 14 nt, Human
uucugccuggagac

SEQ ID NO: 1244700 - RNA, 15 nt, Human
uucuggcuguuugag

SEQ ID NO: 1244701 - RNA, 14 nt, Human
uucugggagggcag

SEQ ID NO: 1244702 - RNA, 21 nt, Human
uucugggagggcagcagggcu

SEQ ID NO: 1244703 - RNA, 17 nt, Human
uucucuugggaacugaa

SEQ ID NO: 1244704 - RNA, 22 nt, Human
uucucuugggaacugaacucac

SEQ ID NO: 1244705 - RNA, 19 nt, Human
uucucuuguauaagauccu

SEQ ID NO: 1244706 - RNA, 16 nt, Human
uucugaacucaaacug

SEQ ID NO: 1244707 - RNA, 17 nt, Human
uucugaacucaaacuga

SEQ ID NO: 1244708 - RNA, 18 nt, Human
uucugaacucaaacugag

SEQ ID NO: 1244709 - RNA, 22 nt, Human
uucugaacucaaacugaggaau

SEQ ID NO: 1244710 - RNA, 13 nt, Human
uucugccaggaga

SEQ ID NO: 1244711 - RNA, 16 nt, Human
uucugcccccugcaga

SEQ ID NO: 1244712 - RNA, 15 nt, Human
uucugcccugcccac

SEQ ID NO: 1244713 - RNA, 19 nt, Human
uucugcccccugcagaacc

SEQ ID NO: 1244714 - RNA, 14 nt, Human
aucucauuuccaag

SEQ ID NO: 1244715 - RNA, 16 nt, Human
aucucauugcuuacaa

SEQ ID NO: 1244716 - RNA, 17 nt, Human
aucucauugcuuacaag

SEQ ID NO: 1244717 - RNA, 14 nt, Human
aucucauuggaccc

SEQ ID NO: 1244718 - RNA, 15 nt, Human
aucucauuggacccu

SEQ ID NO: 1244719 - RNA, 19 nt, Human
aucucauuggacccuucca

SEQ ID NO: 1244720 - RNA, 20 nt, Human
aucucauuggacccuuccau

SEQ ID NO: 1244721 - RNA, 22 nt, Human
aucucaguaugaauuauucaau

SEQ ID NO: 1244722 - RNA, 18 nt, Human
aucucaguaugaauuauu

SEQ ID NO: 1244723 - RNA, 21 nt, Human
aucucaugccccuggcuggga

SEQ ID NO: 1244724 - RNA, 23 nt, Human
aucucaugccccuggcugggacg

SEQ ID NO: 1244725 - RNA, 13 nt, Human
aucuacuuccaaa

SEQ ID NO: 1244726 - RNA, 15 nt, Human
aucuacuuccaaacu

SEQ ID NO: 1244727 - RNA, 19 nt, Human
aucuacuuccaaacuaauu

SEQ ID NO: 1244728 - RNA, 19 nt, Human
aucuacuucuguaauugug

SEQ ID NO: 1244729 - RNA, 20 nt, Human
aucuacuucuguaauugugu

SEQ ID NO: 1244730 - RNA, 23 nt, Human
aucuacuucuguaauugugugga

SEQ ID NO: 1244731 - RNA, 19 nt, Human
aucuacuuuuacucauaag

SEQ ID NO: 1244732 - RNA, 21 nt, Human
aucuagaacacaggcaaaauc

SEQ ID NO: 1244733 - RNA, 17 nt, Human
aucuagaggcuuccuuc

SEQ ID NO: 1244734 - RNA, 19 nt, Human
aucuagaggcuuccuucau

SEQ ID NO: 1244735 - RNA, 23 nt, Human
aucuagaggcuuccuucauuucc

SEQ ID NO: 1244736 - RNA, 15 nt, Human
aucuccacuccagau

SEQ ID NO: 1244737 - RNA, 21 nt, Human
aucucuucuggguuccuuccu

SEQ ID NO: 1244738 - RNA, 17 nt, Human
aucucuucuuaauguac

SEQ ID NO: 1244739 - RNA, 13 nt, Human
aucucuucuuaau

SEQ ID NO: 1244740 - RNA, 15 nt, Human
aucuccaagcagcuu

SEQ ID NO: 1244741 - RNA, 17 nt, Human
aucuccaagcagcuuag

SEQ ID NO: 1244742 - RNA, 23 nt, Human
aucuccaagcagcuuagaguugg

SEQ ID NO: 1244743 - RNA, 20 nt, Human
aucucuucuuaauguacaua

SEQ ID NO: 1244744 - RNA, 14 nt, Human
aucucuucuuuuaa

SEQ ID NO: 1244745 - RNA, 22 nt, Human
aucucuucuuaauguacauagu

SEQ ID NO: 1244746 - RNA, 19 nt, Human
aucucuucuuaauguacau

SEQ ID NO: 1244747 - RNA, 18 nt, Human
aucucuucuuaauguaca

SEQ ID NO: 1244748 - RNA, 22 nt, Human
uugcaagggaaaagucucuugu

SEQ ID NO: 1244749 - RNA, 23 nt, Human
uugcauauaagggaaguaguuau

SEQ ID NO: 1244750 - RNA, 22 nt, Human
uugcaucacuuaacggaccaaa

SEQ ID NO: 1244751 - RNA, 14 nt, Human
uugcauugaacaca

SEQ ID NO: 1244752 - RNA, 15 nt, Human
uugcauugaacacaa

SEQ ID NO: 1244753 - RNA, 18 nt, Human
uugcauugaacacaaacu

SEQ ID NO: 1244754 - RNA, 22 nt, Human
uugcauugaacacaaacuguaa

SEQ ID NO: 1244755 - RNA, 23 nt, Human
uugcauugaacacaaacuguaaa

SEQ ID NO: 1244756 - RNA, 21 nt, Human
uugcauugaccgcgacuaauu

SEQ ID NO: 1244757 - RNA, 13 nt, Human
uugcauugacuuu

SEQ ID NO: 1244758 - RNA, 19 nt, Human
uugcauugacuuuccccac

SEQ ID NO: 1244759 - RNA, 15 nt, Human
uugcauuuaaaacag

SEQ ID NO: 1244760 - RNA, 20 nt, Human
uugcauuuaaaacagacacu

SEQ ID NO: 1244761 - RNA, 21 nt, Human
uugcauuuaaaacagacacug

SEQ ID NO: 1244762 - RNA, 12 nt, Human
aucugaauuuuu

SEQ ID NO: 1244763 - RNA, 14 nt, Human
aucugaauuuuuaa

SEQ ID NO: 1244764 - RNA, 18 nt, Human
aucugaauuuuuaaacaa

SEQ ID NO: 1244765 - RNA, 19 nt, Human
aucugaauuuuuaaacaag

SEQ ID NO: 1244766 - RNA, 20 nt, Human
aucugaauuuuuaaacaagu

SEQ ID NO: 1244767 - RNA, 12 nt, Human
aucugacccagu

SEQ ID NO: 1244768 - RNA, 13 nt, Human
aucugacccagug

SEQ ID NO: 1244769 - RNA, 13 nt, Human
uugauuaaagaug

SEQ ID NO: 1244770 - RNA, 14 nt, Human
uugauuaaagauga

SEQ ID NO: 1244771 - RNA, 14 nt, Human
uugauuacagugca

SEQ ID NO: 1244772 - RNA, 17 nt, Human
uugauuacagugcagug

SEQ ID NO: 1244773 - RNA, 21 nt, Human
uugauuauccauauugaguca

SEQ ID NO: 1244774 - RNA, 15 nt, Human
uugauuauucagugu

SEQ ID NO: 1244775 - RNA, 17 nt, Human
uugauuauucaguguca

SEQ ID NO: 1244776 - RNA, 13 nt, Human
uugcaagggaaaa

SEQ ID NO: 1244777 - RNA, 19 nt, Human
uugcaagggaaaagucucu

SEQ ID NO: 1244778 - RNA, 18 nt, Human
uugacuuauaguacauga

SEQ ID NO: 1244779 - RNA, 13 nt, Human
uugacuuucccca

SEQ ID NO: 1244780 - RNA, 19 nt, Human
uugacuuuccccaccagau

SEQ ID NO: 1244781 - RNA, 23 nt, Human
uugacuuuccccaccagaugcug

SEQ ID NO: 1244782 - RNA, 22 nt, Human
uugacuuuccccaccagaugcu

SEQ ID NO: 1244783 - RNA, 16 nt, Human
uugagucaaaaaaucu

SEQ ID NO: 1244784 - RNA, 14 nt, Human
uugagucugugcca

SEQ ID NO: 1244785 - RNA, 16 nt, Human
uugagauguguucaca

SEQ ID NO: 1244786 - RNA, 23 nt, Human
uugagagaaauaugaagaacuga

SEQ ID NO: 1244787 - RNA, 21 nt, Human
uugagauggagucuugcucug

SEQ ID NO: 1244788 - RNA, 20 nt, Human
uugaguugguuacuucauau

SEQ ID NO: 1244789 - RNA, 11 nt, Human
uugaguuuguc

SEQ ID NO: 1244790 - RNA, 23 nt, Human
uugaguuugucgcucaugugugc

SEQ ID NO: 1244791 - RNA, 14 nt, Human
uugaguuuucagug

SEQ ID NO: 1244792 - RNA, 19 nt, Human
uugaguuuucaguggggca

SEQ ID NO: 1244793 - RNA, 15 nt, Human
uugauacuaagcauu

SEQ ID NO: 1244794 - RNA, 13 nt, Human
uugauaccccccu

SEQ ID NO: 1244795 - RNA, 15 nt, Human
uugauaccccccucu

SEQ ID NO: 1244796 - RNA, 22 nt, Human
aucuaauaucccagaaaaagua

SEQ ID NO: 1244797 - RNA, 16 nt, Human
aucuaauauggccaca

SEQ ID NO: 1244798 - RNA, 23 nt, Human
aucuaauauggccacaguagucu

SEQ ID NO: 1244799 - RNA, 18 nt, Human
aucuacacuccagugaga

SEQ ID NO: 1244800 - RNA, 19 nt, Human
aucuacacuccagugagac

SEQ ID NO: 1244801 - RNA, 14 nt, Human
aucuacacacggug

SEQ ID NO: 1244802 - RNA, 17 nt, Human
uugaagggaaauuucag

SEQ ID NO: 1244803 - RNA, 11 nt, Human
uugaaggcuua

SEQ ID NO: 1244804 - RNA, 12 nt, Human
uugaaggcuuaa

SEQ ID NO: 1244805 - RNA, 13 nt, Human
uugaagccuuugu

SEQ ID NO: 1244806 - RNA, 15 nt, Human
uugaagccacugccu

SEQ ID NO: 1244807 - RNA, 12 nt, Human
uugaaggcaaaa

SEQ ID NO: 1244808 - RNA, 15 nt, Human
uugaaggcaaaauug

SEQ ID NO: 1244809 - RNA, 17 nt, Human
uugaaggcaaaauugca

SEQ ID NO: 1244810 - RNA, 13 nt, Human
uugaaucacagua

SEQ ID NO: 1244811 - RNA, 14 nt, Human
uugaaucaauaaua

SEQ ID NO: 1244812 - RNA, 22 nt, Human
uugaaucaauaauauauuuucu

SEQ ID NO: 1244813 - RNA, 15 nt, Human
uugaauacuuugaau

SEQ ID NO: 1244814 - RNA, 17 nt, Human
uugaauacuuugaaugu

SEQ ID NO: 1244815 - RNA, 18 nt, Human
uugaauacuuugaaugug

SEQ ID NO: 1244816 - RNA, 23 nt, Human
uugaauauuauuccucaaaaaau

SEQ ID NO: 1244817 - RNA, 10 nt, Human
uugaaucaau

SEQ ID NO: 1244818 - RNA, 13 nt, Human
uugaauaaauguc

SEQ ID NO: 1244819 - RNA, 14 nt, Human
uugaauaaauguca

SEQ ID NO: 1244820 - RNA, 15 nt, Human
uugaauaaggaaaug

SEQ ID NO: 1244821 - RNA, 17 nt, Human
uugaauaaaugucacuu

SEQ ID NO: 1244822 - RNA, 23 nt, Human
uugaaucaauaauauauuuucug

SEQ ID NO: 1244823 - RNA, 15 nt, Human
uugaaucacaugaau

SEQ ID NO: 1244824 - RNA, 15 nt, Human
uugaauccucucucu

SEQ ID NO: 1244825 - RNA, 21 nt, Human
auccucuccacagcugccucu

SEQ ID NO: 1244826 - RNA, 13 nt, Human
auccucucuuccu

SEQ ID NO: 1244827 - RNA, 15 nt, Human
auccucucuuccucu

SEQ ID NO: 1244828 - RNA, 16 nt, Human
auccucucuuccucuu

SEQ ID NO: 1244829 - RNA, 17 nt, Human
auccucucuuccucuuc

SEQ ID NO: 1244830 - RNA, 18 nt, Human
auccucugagugugacca

SEQ ID NO: 1244831 - RNA, 20 nt, Human
auccucucuuccucuucccc

SEQ ID NO: 1244832 - RNA, 17 nt, Human
auccucuggagccagcc

SEQ ID NO: 1244833 - RNA, 14 nt, Human
auccuccucccacc

SEQ ID NO: 1244834 - RNA, 11 nt, Human
auccuccugca

SEQ ID NO: 1244835 - RNA, 13 nt, Human
auccucuggcuug

SEQ ID NO: 1244836 - RNA, 20 nt, Human
auccucuguaaacuuuuugu

SEQ ID NO: 1244837 - RNA, 19 nt, Human
aucuaaaaauagacuuaaa

SEQ ID NO: 1244838 - RNA, 18 nt, Human
aucguucucucuuugcau

SEQ ID NO: 1244839 - RNA, 14 nt, Human
aucguugcccccau

SEQ ID NO: 1244840 - RNA, 14 nt, Human
aucguuuucuuaaa

SEQ ID NO: 1244841 - RNA, 17 nt, Human
aucguuuucuuaaagug

SEQ ID NO: 1244842 - RNA, 18 nt, Human
aucguuuucuuaaagugc

SEQ ID NO: 1244843 - RNA, 14 nt, Human
aucuuauaauuuaa

SEQ ID NO: 1244844 - RNA, 14 nt, Human
aucuuauaauuguu

SEQ ID NO: 1244845 - RNA, 16 nt, Human
aucuuauaauuguucu

SEQ ID NO: 1244846 - RNA, 17 nt, Human
aucuugaugucuuuguu

SEQ ID NO: 1244847 - RNA, 24 nt, Human
aucuugcaccccaaagcuuuccug

SEQ ID NO: 1244848 - RNA, 24 nt, Human
aucuugcaguaucggcacuguaca

SEQ ID NO: 1244849 - RNA, 13 nt, Human
aucuugcauguaa

SEQ ID NO: 1244850 - RNA, 22 nt, Human
aucuugcaguaucggcacugua

SEQ ID NO: 1244851 - RNA, 21 nt, Human
aucuugcaguaucggcacugu

SEQ ID NO: 1244852 - RNA, 14 nt, Human
aucuugcauguaac

SEQ ID NO: 1244853 - RNA, 18 nt, Human
aucuugcauuaugcaauu

SEQ ID NO: 1244854 - RNA, 19 nt, Human
aucuugcccgcucaggcug

SEQ ID NO: 1244855 - RNA, 14 nt, Human
aucuugcuaccagu

SEQ ID NO: 1244856 - RNA, 16 nt, Human
aucuugcuaccaguau

SEQ ID NO: 1244857 - RNA, 19 nt, Human
aucuugcuaccaguauuua

SEQ ID NO: 1244858 - RNA, 23 nt, Human
aucuugcuaccaguauuuagaag

SEQ ID NO: 1244859 - RNA, 20 nt, Human
aucuugguugaugccaaaaa

SEQ ID NO: 1244860 - RNA, 21 nt, Human
aucuugguugaugccaaaaaa

SEQ ID NO: 1244861 - RNA, 21 nt, Human
aucuugguuugccuuccagaa

SEQ ID NO: 1244862 - RNA, 22 nt, Human
aucugucuguggcaaaaguuua

SEQ ID NO: 1244863 - RNA, 19 nt, Human
aucuguuugagaaagucag

SEQ ID NO: 1244864 - RNA, 14 nt, Human
aucuguuugagaaa

SEQ ID NO: 1244865 - RNA, 13 nt, Human
aucuguuugagaa

SEQ ID NO: 1244866 - RNA, 15 nt, Human
aucuguuugagaaag

SEQ ID NO: 1244867 - RNA, 17 nt, Human
aucuguuuugaaggcaa

SEQ ID NO: 1244868 - RNA, 18 nt, Human
aucuguuuugaaggcaaa

SEQ ID NO: 1244869 - RNA, 19 nt, Human
aucuguuuugaaggcaaaa

SEQ ID NO: 1244870 - RNA, 13 nt, Human
aucuuaguguaug

SEQ ID NO: 1244871 - RNA, 14 nt, Human
aucuuaguguauga

SEQ ID NO: 1244872 - RNA, 15 nt, Human
aucuuaguguaugau

SEQ ID NO: 1244873 - RNA, 16 nt, Human
aucuuaguguaugauu

SEQ ID NO: 1244874 - RNA, 19 nt, Human
aucuuaguguaugauuacu

SEQ ID NO: 1244875 - RNA, 12 nt, Human
uugcuccuugac

SEQ ID NO: 1244876 - RNA, 11 nt, Human
uugcuccuccu

SEQ ID NO: 1244877 - RNA, 16 nt, Human
uugcucauauuuccca

SEQ ID NO: 1244878 - RNA, 13 nt, Human
uugcucacccagu

SEQ ID NO: 1244879 - RNA, 12 nt, Human
uugcucacccag

SEQ ID NO: 1244880 - RNA, 19 nt, Human
uugcucacccagugcccuc

SEQ ID NO: 1244881 - RNA, 12 nt, Human
uugcuucuuucu

SEQ ID NO: 1244882 - RNA, 17 nt, Human
uugcuucuuucuagaaa

SEQ ID NO: 1244883 - RNA, 20 nt, Human
uugcuucuuucuagaaagag

SEQ ID NO: 1244884 - RNA, 14 nt, Human
aucuugguuugccu

SEQ ID NO: 1244885 - RNA, 17 nt, Human
aucuugguuugccuucc

SEQ ID NO: 1244886 - RNA, 20 nt, Human
aucuugguuugccuuccaga

SEQ ID NO: 1244887 - RNA, 11 nt, Human
aucuugucaug

SEQ ID NO: 1244888 - RNA, 12 nt, Human
aucuugucaugu

SEQ ID NO: 1244889 - RNA, 14 nt, Human
aucuugucaugugu

SEQ ID NO: 1244890 - RNA, 15 nt, Human
aucuugucaugugua

SEQ ID NO: 1244891 - RNA, 16 nt, Human
aucuugucauguguau

SEQ ID NO: 1244892 - RNA, 17 nt, Human
aucuugucauguguaua

SEQ ID NO: 1244893 - RNA, 14 nt, Human
aucuuguccccaac

SEQ ID NO: 1244894 - RNA, 17 nt, Human
aucuuguccccaacacc

SEQ ID NO: 1244895 - RNA, 19 nt, Human
aucuugucauguguauaaa

SEQ ID NO: 1244896 - RNA, 12 nt, Human
uugcuauucugu

SEQ ID NO: 1244897 - RNA, 13 nt, Human
uugcuauucuguc

SEQ ID NO: 1244898 - RNA, 14 nt, Human
uugcuauucugucc

SEQ ID NO: 1244899 - RNA, 15 nt, Human
uugcuauucuguccc

SEQ ID NO: 1244900 - RNA, 16 nt, Human
uugcuauucugucccu

SEQ ID NO: 1244901 - RNA, 17 nt, Human
uugcuauucugucccua

SEQ ID NO: 1244902 - RNA, 19 nt, Human
uugcuauucugucccuagg

SEQ ID NO: 1244903 - RNA, 20 nt, Human
uugcauuuauauguaccgua

SEQ ID NO: 1244904 - RNA, 15 nt, Human
uugcauuuauaugua

SEQ ID NO: 1244905 - RNA, 22 nt, Human
uugcauuuaaaacagacacugg

SEQ ID NO: 1244906 - RNA, 14 nt, Human
uugcauuuguuuau

SEQ ID NO: 1244907 - RNA, 20 nt, Human
uugcauuuguuuauguaauu

SEQ ID NO: 1244908 - RNA, 22 nt, Human
uugcauuuguuuuguuuacaga

SEQ ID NO: 1244909 - RNA, 18 nt, Human
uugcauuuguuuuguuua

SEQ ID NO: 1244910 - RNA, 18 nt, Human
uugccaaaaagugaaaua

SEQ ID NO: 1244911 - RNA, 19 nt, Human
uugccaaaaagugaaauaa

SEQ ID NO: 1244912 - RNA, 23 nt, Human
uugccaaaaagugaaauaaugug

SEQ ID NO: 1244913 - RNA, 15 nt, Human
aucugccacaaaaac

SEQ ID NO: 1244914 - RNA, 16 nt, Human
aucugccaagggccga

SEQ ID NO: 1244915 - RNA, 15 nt, Human
aucugcccaccucag

SEQ ID NO: 1244916 - RNA, 23 nt, Human
aucugcccaccucagccucccaa

SEQ ID NO: 1244917 - RNA, 15 nt, Human
aucugcgugugugca

SEQ ID NO: 1244918 - RNA, 18 nt, Human
aucugcuaccaaaacagu

SEQ ID NO: 1244919 - RNA, 17 nt, Human
aucugcgugacaauaaa

SEQ ID NO: 1244920 - RNA, 21 nt, Human
aucugcgugacaauaaaacau

SEQ ID NO: 1244921 - RNA, 22 nt, Human
aucugcgugacaauaaaacauu

SEQ ID NO: 1244922 - RNA, 23 nt, Human
aucugcgugacaauaaaacauua

SEQ ID NO: 1244923 - RNA, 16 nt, Human
aucugcgugacaauaa

SEQ ID NO: 1244924 - RNA, 18 nt, Human
aucugccucucuuguaau

SEQ ID NO: 1244925 - RNA, 15 nt, Human
aucugccucucuugu

SEQ ID NO: 1244926 - RNA, 12 nt, Human
aucugccucccu

SEQ ID NO: 1244927 - RNA, 18 nt, Human
aucuguauacccucuguu

SEQ ID NO: 1244928 - RNA, 14 nt, Human
aucugucugguggc

SEQ ID NO: 1244929 - RNA, 16 nt, Human
aucugucugguggccc

SEQ ID NO: 1244930 - RNA, 15 nt, Human
aucugucuguggcaa

SEQ ID NO: 1244931 - RNA, 19 nt, Human
aucugucuguggcaaaagu

SEQ ID NO: 1244932 - RNA, 15 nt, Human
aucuguccucagccu

SEQ ID NO: 1244933 - RNA, 16 nt, Human
aucuguccucagccuu

SEQ ID NO: 1244934 - RNA, 17 nt, Human
aucuguccucagccuug

SEQ ID NO: 1244935 - RNA, 18 nt, Human
aucuguccucagccuugc

SEQ ID NO: 1244936 - RNA, 21 nt, Human
aucuguccucagccuugccag

SEQ ID NO: 1244937 - RNA, 19 nt, Human
aucugucugccaaccuaaa

SEQ ID NO: 1244938 - RNA, 23 nt, Human
aucugucugccaaccuaaaacuc

SEQ ID NO: 1244939 - RNA, 22 nt, Human
aucugucugccaaccuaaaacu

SEQ ID NO: 1244940 - RNA, 15 nt, Human
aucugucccccuuua

SEQ ID NO: 1244941 - RNA, 18 nt, Human
aucugucccccuuuagau

SEQ ID NO: 1244942 - RNA, 14 nt, Human
aucuguccucagcc

SEQ ID NO: 1244943 - RNA, 22 nt, Human
augaacuugaggacacaugucc

SEQ ID NO: 1244944 - RNA, 21 nt, Human
augaacuugaggacacauguc

SEQ ID NO: 1244945 - RNA, 20 nt, Human
augaacuugaggacacaugu

SEQ ID NO: 1244946 - RNA, 19 nt, Human
augaagaccuuuuucugca

SEQ ID NO: 1244947 - RNA, 19 nt, Human
augaacuugaggacacaug

SEQ ID NO: 1244948 - RNA, 18 nt, Human
augaacuugaggacacau

SEQ ID NO: 1244949 - RNA, 17 nt, Human
augaacuugaggacaca

SEQ ID NO: 1244950 - RNA, 16 nt, Human
augaacuugaggacac

SEQ ID NO: 1244951 - RNA, 18 nt, Human
augaacuuguaaaggaau

SEQ ID NO: 1244952 - RNA, 16 nt, Human
augaauauuuaguguu

SEQ ID NO: 1244953 - RNA, 16 nt, Human
augaagagauuuuuca

SEQ ID NO: 1244954 - RNA, 11 nt, Human
augaagaggag

SEQ ID NO: 1244955 - RNA, 20 nt, Human
augaagagauuuuucaugau

SEQ ID NO: 1244956 - RNA, 22 nt, Human
augaagaccuuuuucugcacua

SEQ ID NO: 1244957 - RNA, 21 nt, Human
augaagaccuuuuucugcacu

SEQ ID NO: 1244958 - RNA, 24 nt, Human
augaagaccuuuuucugcacuaua

SEQ ID NO: 1244959 - RNA, 15 nt, Human
augaacuugaggaca

SEQ ID NO: 1244960 - RNA, 13 nt, Human
augaacuugagga

SEQ ID NO: 1244961 - RNA, 13 nt, Human
augaaauuccauu

SEQ ID NO: 1244962 - RNA, 21 nt, Human
augaaaugugcacuuuauccu

SEQ ID NO: 1244963 - RNA, 13 nt, Human
aucuuuuguauua

SEQ ID NO: 1244964 - RNA, 16 nt, Human
aucuuuuguauuaaga

SEQ ID NO: 1244965 - RNA, 16 nt, Human
augaaaguauuaaaau

SEQ ID NO: 1244966 - RNA, 15 nt, Human
augaauuacauuugu

SEQ ID NO: 1244967 - RNA, 16 nt, Human
augaauguaaauuugu

SEQ ID NO: 1244968 - RNA, 19 nt, Human
augaauguaaauuuguacu

SEQ ID NO: 1244969 - RNA, 21 nt, Human
augaauguaaauuuguacuau

SEQ ID NO: 1244970 - RNA, 20 nt, Human
augaaugcuuaaagaauuca

SEQ ID NO: 1244971 - RNA, 21 nt, Human
augaaugcuuaaagaauucaa

SEQ ID NO: 1244972 - RNA, 12 nt, Human
augaauguaaau

SEQ ID NO: 1244973 - RNA, 13 nt, Human
augaauguaaauu

SEQ ID NO: 1244974 - RNA, 15 nt, Human
augaauguaaauuug

SEQ ID NO: 1244975 - RNA, 21 nt, Human
augaauauuuaguguucauaa

SEQ ID NO: 1244976 - RNA, 23 nt, Human
augaauggcuaagcaaaauguga

SEQ ID NO: 1244977 - RNA, 16 nt, Human
augaauuacauuugua

SEQ ID NO: 1244978 - RNA, 17 nt, Human
augaauuacauuuguau

SEQ ID NO: 1244979 - RNA, 22 nt, Human
uuggggaagagagccugcagga

SEQ ID NO: 1244980 - RNA, 23 nt, Human
uuggggaagagagccugcaggau

SEQ ID NO: 1244981 - RNA, 18 nt, Human
uuggggaagggccugccc

SEQ ID NO: 1244982 - RNA, 14 nt, Human
uuggggacacaugu

SEQ ID NO: 1244983 - RNA, 20 nt, Human
uuggggacacauguauuugg

SEQ ID NO: 1244984 - RNA, 21 nt, Human
uuggggaguuaagaccuggca

SEQ ID NO: 1244985 - RNA, 14 nt, Human
uuggugagaaccug

SEQ ID NO: 1244986 - RNA, 17 nt, Human
uuggggaguuaagaccu

SEQ ID NO: 1244987 - RNA, 19 nt, Human
uuggggaguuaagaccugg

SEQ ID NO: 1244988 - RNA, 20 nt, Human
uuggggaguuaagaccuggc

SEQ ID NO: 1244989 - RNA, 16 nt, Human
uuggugauuccgcagu

SEQ ID NO: 1244990 - RNA, 20 nt, Human
uuggugauuccgcagugaga

SEQ ID NO: 1244991 - RNA, 22 nt, Human
uuggugcacagcacaaauuagu

SEQ ID NO: 1244992 - RNA, 16 nt, Human
uuggugcacagcacaa

SEQ ID NO: 1244993 - RNA, 11 nt, Human
uuggagacaga

SEQ ID NO: 1244994 - RNA, 22 nt, Human
uuggagacugucuggccccccu

SEQ ID NO: 1244995 - RNA, 15 nt, Human
uuggagaguuuccug

SEQ ID NO: 1244996 - RNA, 16 nt, Human
uuggagaguuuccuga

SEQ ID NO: 1244997 - RNA, 18 nt, Human
uuggagaguuuccugaaa

SEQ ID NO: 1244998 - RNA, 13 nt, Human
uuggagucacucu

SEQ ID NO: 1244999 - RNA, 23 nt, Human
uuggaguccccucaccuccucua

SEQ ID NO: 1245000 - RNA, 21 nt, Human
uuggagucacucuuaugcugu

SEQ ID NO: 1245001 - RNA, 19 nt, Human
uuggccgcuguaugucuua

SEQ ID NO: 1245002 - RNA, 16 nt, Human
uuggccucucucuagg

SEQ ID NO: 1245003 - RNA, 17 nt, Human
uuggccugaucagacca

SEQ ID NO: 1245004 - RNA, 16 nt, Human
uuggcuauuuaaaacu

SEQ ID NO: 1245005 - RNA, 17 nt, Human
uuggcuauuuaaaacuu

SEQ ID NO: 1245006 - RNA, 14 nt, Human
aucuuuucauacau

SEQ ID NO: 1245007 - RNA, 23 nt, Human
aucuuuugauaugcauauuuguu

SEQ ID NO: 1245008 - RNA, 22 nt, Human
aucuuuuguauuaagaaaggaa

SEQ ID NO: 1245009 - RNA, 18 nt, Human
uuggcucacacucgacau

SEQ ID NO: 1245010 - RNA, 17 nt, Human
uuggcucgaaucucugu

SEQ ID NO: 1245011 - RNA, 20 nt, Human
uuggcucgaaucucugugcc

SEQ ID NO: 1245012 - RNA, 21 nt, Human
uuggcucgaaucucugugccu

SEQ ID NO: 1245013 - RNA, 21 nt, Human
aucuuugaaagguuagagaau

SEQ ID NO: 1245014 - RNA, 22 nt, Human
aucuuugaaagguuagagaaua

SEQ ID NO: 1245015 - RNA, 16 nt, Human
aucuuugaaauuaugu

SEQ ID NO: 1245016 - RNA, 17 nt, Human
aucuuugaaauuaugua

SEQ ID NO: 1245017 - RNA, 19 nt, Human
aucuuugaaauuauguaaa

SEQ ID NO: 1245018 - RNA, 20 nt, Human
aucuuugaaauuauguaaau

SEQ ID NO: 1245019 - RNA, 14 nt, Human
auaauuuuaaaugu

SEQ ID NO: 1245020 - RNA, 14 nt, Human
auaauuuuaaauuc

SEQ ID NO: 1245021 - RNA, 17 nt, Human
auaauuugaauuuuaug

SEQ ID NO: 1245022 - RNA, 21 nt, Human
uuagauguuccaguaaucuaa

SEQ ID NO: 1245023 - RNA, 22 nt, Human
uuagauguuccaguaaucuaau

SEQ ID NO: 1245024 - RNA, 13 nt, Human
uuagauguucuaa

SEQ ID NO: 1245025 - RNA, 20 nt, Human
uuagauguucuaagucuuuc

SEQ ID NO: 1245026 - RNA, 22 nt, Human
uuagauguucuaagucuuucca

SEQ ID NO: 1245027 - RNA, 13 nt, Human
auaauuuuaaaug

SEQ ID NO: 1245028 - RNA, 12 nt, Human
auaauuuuaaau

SEQ ID NO: 1245029 - RNA, 12 nt, Human
auaauuucuaau

SEQ ID NO: 1245030 - RNA, 14 nt, Human
auaauuucuaaugu

SEQ ID NO: 1245031 - RNA, 15 nt, Human
auaauuuuaaacaaa

SEQ ID NO: 1245032 - RNA, 14 nt, Human
auaauuuagauggu

SEQ ID NO: 1245033 - RNA, 20 nt, Human
auaauuuaguuucauauaaa

SEQ ID NO: 1245034 - RNA, 17 nt, Human
auaauuuaguuucauau

SEQ ID NO: 1245035 - RNA, 20 nt, Human
auaauucaggaagcagcuuu

SEQ ID NO: 1245036 - RNA, 22 nt, Human
auaauucacuguacuaucaggu

SEQ ID NO: 1245037 - RNA, 23 nt, Human
auaauucacauuguauucagagu

SEQ ID NO: 1245038 - RNA, 14 nt, Human
auaaucuuucacag

SEQ ID NO: 1245039 - RNA, 21 nt, Human
auaaucuuucacaggggacag

SEQ ID NO: 1245040 - RNA, 20 nt, Human
auaaucuucugccuucucau

SEQ ID NO: 1245041 - RNA, 11 nt, Human
auaagauucua

SEQ ID NO: 1245042 - RNA, 12 nt, Human
auaagauucuaa

SEQ ID NO: 1245043 - RNA, 17 nt, Human
auaagcagguggaucua

SEQ ID NO: 1245044 - RNA, 22 nt, Human
auaagcagguggaucuauuuca

SEQ ID NO: 1245045 - RNA, 14 nt, Human
auaagcaucauuau

SEQ ID NO: 1245046 - RNA, 15 nt, Human
auaagcaucauuauu

SEQ ID NO: 1245047 - RNA, 19 nt, Human
auaagcaucauuauuuaug

SEQ ID NO: 1245048 - RNA, 17 nt, Human
auaagcaucauuauuua

SEQ ID NO: 1245049 - RNA, 14 nt, Human
auaagccagacauc

SEQ ID NO: 1245050 - RNA, 19 nt, Human
auaauauauuuuaaauauu

SEQ ID NO: 1245051 - RNA, 13 nt, Human
auaauauauuuuc

SEQ ID NO: 1245052 - RNA, 17 nt, Human
auaaucuuauaauuguu

SEQ ID NO: 1245053 - RNA, 14 nt, Human
auaaucuucugccu

SEQ ID NO: 1245054 - RNA, 15 nt, Human
auaaucuucugccuu

SEQ ID NO: 1245055 - RNA, 17 nt, Human
auaaucuucugccuucu

SEQ ID NO: 1245056 - RNA, 15 nt, Human
auaauauauuuucug

SEQ ID NO: 1245057 - RNA, 18 nt, Human
auaauauuuuuaauauau

SEQ ID NO: 1245058 - RNA, 14 nt, Human
uuaggguuaugauu

SEQ ID NO: 1245059 - RNA, 16 nt, Human
uuaggguuaugauuaa

SEQ ID NO: 1245060 - RNA, 17 nt, Human
uuagggcaccagggguu

SEQ ID NO: 1245061 - RNA, 19 nt, Human
uuagauuaagaaauagaca

SEQ ID NO: 1245062 - RNA, 15 nt, Human
uuagauuaagaaaua

SEQ ID NO: 1245063 - RNA, 14 nt, Human
uuaguaaucauauu

SEQ ID NO: 1245064 - RNA, 13 nt, Human
uuaguaaucauau

SEQ ID NO: 1245065 - RNA, 19 nt, Human
uuagguucuaaaguucuaa

SEQ ID NO: 1245066 - RNA, 20 nt, Human
uuagguucuaaaguucuaag

SEQ ID NO: 1245067 - RNA, 22 nt, Human
uuagguucuaaaguucuaagau

SEQ ID NO: 1245068 - RNA, 17 nt, Human
uuagguaauuuuuuuca

SEQ ID NO: 1245069 - RNA, 23 nt, Human
uuagguaagaaguuuuaaaaagc

SEQ ID NO: 1245070 - RNA, 14 nt, Human
uuagguuaggacuu

SEQ ID NO: 1245071 - RNA, 12 nt, Human
uuagguucuaaa

SEQ ID NO: 1245072 - RNA, 13 nt, Human
uuagguucuaaag

SEQ ID NO: 1245073 - RNA, 14 nt, Human
uuagguucuaaagu

SEQ ID NO: 1245074 - RNA, 16 nt, Human
uuagguucuaaaguuc

SEQ ID NO: 1245075 - RNA, 18 nt, Human
uuagguucuaaaguucua

SEQ ID NO: 1245076 - RNA, 22 nt, Human
uuauaaaaauaaaaaacacugg

SEQ ID NO: 1245077 - RNA, 21 nt, Human
uuauaaaaauaaaaaacacug

SEQ ID NO: 1245078 - RNA, 15 nt, Human
uuauaaaaaaugguu

SEQ ID NO: 1245079 - RNA, 18 nt, Human
uuauaaaaaaugguucag

SEQ ID NO: 1245080 - RNA, 19 nt, Human
uuauaaaaagguguuuuga

SEQ ID NO: 1245081 - RNA, 17 nt, Human
uuauaaaaaaugguuca

SEQ ID NO: 1245082 - RNA, 16 nt, Human
uuauaaaaguguucau

SEQ ID NO: 1245083 - RNA, 12 nt, Human
uuauaaaagugu

SEQ ID NO: 1245084 - RNA, 19 nt, Human
uuaguacuccccuccuuga

SEQ ID NO: 1245085 - RNA, 17 nt, Human
uuaguaauaccucuaau

SEQ ID NO: 1245086 - RNA, 16 nt, Human
uuaguaauaccucuaa

SEQ ID NO: 1245087 - RNA, 14 nt, Human
uuaguaauaccucu

SEQ ID NO: 1245088 - RNA, 14 nt, Human
uuaguacaaaguuu

SEQ ID NO: 1245089 - RNA, 17 nt, Human
uuaguacaaaguuucaa

SEQ ID NO: 1245090 - RNA, 15 nt, Human
uuauaaaaauaaaaa

SEQ ID NO: 1245091 - RNA, 14 nt, Human
uuauaaaaaauggu

SEQ ID NO: 1245092 - RNA, 17 nt, Human
uuaguagagacaggguu

SEQ ID NO: 1245093 - RNA, 12 nt, Human
auaaaugcaaau

SEQ ID NO: 1245094 - RNA, 14 nt, Human
auaaaugcaaauaa

SEQ ID NO: 1245095 - RNA, 13 nt, Human
auaaaugcaaaua

SEQ ID NO: 1245096 - RNA, 16 nt, Human
auaaaugauucuuagu

SEQ ID NO: 1245097 - RNA, 18 nt, Human
auaaaugauucuuaguga

SEQ ID NO: 1245098 - RNA, 13 nt, Human
auaaauugcuccu

SEQ ID NO: 1245099 - RNA, 16 nt, Human
auaaauugcuccuuga

SEQ ID NO: 1245100 - RNA, 19 nt, Human
auaaauugauuuuuauaaa

SEQ ID NO: 1245101 - RNA, 21 nt, Human
auaaauugcacaccuuggaau

SEQ ID NO: 1245102 - RNA, 13 nt, Human
auaaauugcucaa

SEQ ID NO: 1245103 - RNA, 18 nt, Human
uuaauuuuuccaacuacu

SEQ ID NO: 1245104 - RNA, 13 nt, Human
uuaauuuuuccua

SEQ ID NO: 1245105 - RNA, 12 nt, Human
uuaauuuuugau

SEQ ID NO: 1245106 - RNA, 13 nt, Human
uuaauuuuugaua

SEQ ID NO: 1245107 - RNA, 15 nt, Human
uuaauuuuugauacu

SEQ ID NO: 1245108 - RNA, 16 nt, Human
uuacaaacugaagagu

SEQ ID NO: 1245109 - RNA, 18 nt, Human
uuacaaagcccuuuuaua

SEQ ID NO: 1245110 - RNA, 13 nt, Human
uuacaaacugaag

SEQ ID NO: 1245111 - RNA, 16 nt, Human
uuacaaaucagaaguc

SEQ ID NO: 1245112 - RNA, 17 nt, Human
uuacaaaucagaaguca

SEQ ID NO: 1245113 - RNA, 22 nt, Human
uuacaaaucagaagucaucuug

SEQ ID NO: 1245114 - RNA, 21 nt, Human
uuacaaaugaaaaauuccacu

SEQ ID NO: 1245115 - RNA, 15 nt, Human
auaaaucugacccag

SEQ ID NO: 1245116 - RNA, 16 nt, Human
auaaaucugacccagu

SEQ ID NO: 1245117 - RNA, 18 nt, Human
auaaaucugacccagugc

SEQ ID NO: 1245118 - RNA, 19 nt, Human
auaaaucugacccagugcc

SEQ ID NO: 1245119 - RNA, 17 nt, Human
uuacaguggggaaugaa

SEQ ID NO: 1245120 - RNA, 17 nt, Human
uuacaguaggagcccag

SEQ ID NO: 1245121 - RNA, 14 nt, Human
uuacagugcagugc

SEQ ID NO: 1245122 - RNA, 12 nt, Human
uuacaguguuua

SEQ ID NO: 1245123 - RNA, 11 nt, Human
uuacaguucug

SEQ ID NO: 1245124 - RNA, 12 nt, Human
uuacaguucugu

SEQ ID NO: 1245125 - RNA, 13 nt, Human
uuacaguucugug

SEQ ID NO: 1245126 - RNA, 14 nt, Human
uuacaguucugugg

SEQ ID NO: 1245127 - RNA, 22 nt, Human
uuacaguucugugguuucaugu

SEQ ID NO: 1245128 - RNA, 21 nt, Human
uuaccaggcaccaaaagaagu

SEQ ID NO: 1245129 - RNA, 23 nt, Human
uuaccaggcaccaaaagaaguaa

SEQ ID NO: 1245130 - RNA, 12 nt, Human
auaacuccuccc

SEQ ID NO: 1245131 - RNA, 14 nt, Human
auaacuccucccag

SEQ ID NO: 1245132 - RNA, 16 nt, Human
auaacuccucccaggg

SEQ ID NO: 1245133 - RNA, 18 nt, Human
auaacuccucccaggguu

SEQ ID NO: 1245134 - RNA, 22 nt, Human
auaacuccucccaggguuuuaa

SEQ ID NO: 1245135 - RNA, 18 nt, Human
auaaauugcuccuugaca

SEQ ID NO: 1245136 - RNA, 17 nt, Human
auaaauuguacagccgg

SEQ ID NO: 1245137 - RNA, 15 nt, Human
auaacuauguugaua

SEQ ID NO: 1245138 - RNA, 15 nt, Human
auaacuccucauugu

SEQ ID NO: 1245139 - RNA, 17 nt, Human
auaacuccucauuguaa

SEQ ID NO: 1245140 - RNA, 23 nt, Human
auaacuuuuuuuuuucuuuauaa

SEQ ID NO: 1245141 - RNA, 19 nt, Human
auaagauccuagauccuaa

SEQ ID NO: 1245142 - RNA, 13 nt, Human
auaagaucuuuua

SEQ ID NO: 1245143 - RNA, 15 nt, Human
auaagaucuuuuauu

SEQ ID NO: 1245144 - RNA, 17 nt, Human
auaagaucuuuuauuuu

SEQ ID NO: 1245145 - RNA, 20 nt, Human
auaagaucuuuuauuuugcc

SEQ ID NO: 1245146 - RNA, 13 nt, Human
auaagaaacuuuu

SEQ ID NO: 1245147 - RNA, 14 nt, Human
auaagaaacuuuuu

SEQ ID NO: 1245148 - RNA, 22 nt, Human
auaagaaacuuuuuuauuuaaa

SEQ ID NO: 1245149 - RNA, 21 nt, Human
auaagaaacuuuuuuauuuaa

SEQ ID NO: 1245150 - RNA, 11 nt, Human
auaagaaagcc

SEQ ID NO: 1245151 - RNA, 13 nt, Human
auaagaaagccug

SEQ ID NO: 1245152 - RNA, 14 nt, Human
auaagaaagccuga

SEQ ID NO: 1245153 - RNA, 15 nt, Human
auaagaaagccugag

SEQ ID NO: 1245154 - RNA, 18 nt, Human
auaagauauuuuucauga

SEQ ID NO: 1245155 - RNA, 17 nt, Human
uuacugucuuuuuucua

SEQ ID NO: 1245156 - RNA, 20 nt, Human
uuacuggccuuuuucauuua

SEQ ID NO: 1245157 - RNA, 23 nt, Human
uuagaaucaaacauuuugaaagu

SEQ ID NO: 1245158 - RNA, 19 nt, Human
uuagaauauuaucuucaua

SEQ ID NO: 1245159 - RNA, 17 nt, Human
uuagaaucaaacauuuu

SEQ ID NO: 1245160 - RNA, 18 nt, Human
uuagaaucaaacauuuug

SEQ ID NO: 1245161 - RNA, 20 nt, Human
uuagaaucaaacauuuugaa

SEQ ID NO: 1245162 - RNA, 12 nt, Human
uuagaauuauuu

SEQ ID NO: 1245163 - RNA, 13 nt, Human
uuagaauuauuua

SEQ ID NO: 1245164 - RNA, 15 nt, Human
uuagaauuauuuaaa

SEQ ID NO: 1245165 - RNA, 16 nt, Human
uuagaauuauuuaaac

SEQ ID NO: 1245166 - RNA, 20 nt, Human
uuacugcuuaauucaaauaa

SEQ ID NO: 1245167 - RNA, 14 nt, Human
uuacugcucugaga

SEQ ID NO: 1245168 - RNA, 15 nt, Human
uuacugcucugagaa

SEQ ID NO: 1245169 - RNA, 13 nt, Human
uuacuggccuuuu

SEQ ID NO: 1245170 - RNA, 16 nt, Human
uuacuggccuuuuuca

SEQ ID NO: 1245171 - RNA, 18 nt, Human
uuacuggccuuuuucauu

SEQ ID NO: 1245172 - RNA, 23 nt, Human
uuacuguacagacagaaaaaacu

SEQ ID NO: 1245173 - RNA, 19 nt, Human
uuacuccugugggagccuc

SEQ ID NO: 1245174 - RNA, 12 nt, Human
uuacucuaagau

SEQ ID NO: 1245175 - RNA, 14 nt, Human
uuacucuaagaucu

SEQ ID NO: 1245176 - RNA, 19 nt, Human
uuacucuaagaucuuagau

SEQ ID NO: 1245177 - RNA, 21 nt, Human
uuacucuaagaucuuagauuc

SEQ ID NO: 1245178 - RNA, 22 nt, Human
uuacucuaagaucuuagauucu

SEQ ID NO: 1245179 - RNA, 24 nt, Human
uuacuccaaaacuucguuuaauga

SEQ ID NO: 1245180 - RNA, 16 nt, Human
uuacucaguaauuugu

SEQ ID NO: 1245181 - RNA, 21 nt, Human
uuaccaguauuuaacuucuga

SEQ ID NO: 1245182 - RNA, 18 nt, Human
uuaccagugccuuaaacu

SEQ ID NO: 1245183 - RNA, 19 nt, Human
uuaccaguugccuuuuauc

SEQ ID NO: 1245184 - RNA, 14 nt, Human
uuaccaguugccuu

SEQ ID NO: 1245185 - RNA, 14 nt, Human
uuaccauguaaugg

SEQ ID NO: 1245186 - RNA, 17 nt, Human
uuaaucuuuaauuuuac

SEQ ID NO: 1245187 - RNA, 17 nt, Human
uuaaucuuugaaagguu

SEQ ID NO: 1245188 - RNA, 13 nt, Human
uuaaucuuuaauu

SEQ ID NO: 1245189 - RNA, 19 nt, Human
uuaaucuuaguguaugauu

SEQ ID NO: 1245190 - RNA, 21 nt, Human
uuaaucuuaguguaugauuac

SEQ ID NO: 1245191 - RNA, 14 nt, Human
uuaauuuauuauua

SEQ ID NO: 1245192 - RNA, 14 nt, Human
uuaauuuaugcaga

SEQ ID NO: 1245193 - RNA, 13 nt, Human
uuaauuugaaaua

SEQ ID NO: 1245194 - RNA, 15 nt, Human
uuaauuugaaauaug

SEQ ID NO: 1245195 - RNA, 18 nt, Human
uuaauuuuuauuucuucc

SEQ ID NO: 1245196 - RNA, 13 nt, Human
uuaauuuuuccaa

SEQ ID NO: 1245197 - RNA, 15 nt, Human
uuaauuuuuccaacu

SEQ ID NO: 1245198 - RNA, 20 nt, Human
uuaauuuugaagugcuguuu

SEQ ID NO: 1245199 - RNA, 23 nt, Human
uuaauuuugaagugcuguuuauu

SEQ ID NO: 1245200 - RNA, 15 nt, Human
uuaauuuuaguuuuu

SEQ ID NO: 1245201 - RNA, 17 nt, Human
uuaauuuuaguuuuuca

SEQ ID NO: 1245202 - RNA, 21 nt, Human
uuaauuuuaguuuuucauuaa

SEQ ID NO: 1245203 - RNA, 23 nt, Human
uuaauuuuauuuuuuauaaaaua

SEQ ID NO: 1245204 - RNA, 13 nt, Human
uuaauuuuccugg

SEQ ID NO: 1245205 - RNA, 19 nt, Human
uuaauuuugaagugcuguu

SEQ ID NO: 1245206 - RNA, 16 nt, Human
uuaauuugguuuucac

SEQ ID NO: 1245207 - RNA, 22 nt, Human
uuaagacgaaacauuuguucua

SEQ ID NO: 1245208 - RNA, 22 nt, Human
uuaagagagucuauuuacggaa

SEQ ID NO: 1245209 - RNA, 22 nt, Human
uuaagaccuacuguucuaaagc

SEQ ID NO: 1245210 - RNA, 17 nt, Human
uuaagacuugacagugg

SEQ ID NO: 1245211 - RNA, 13 nt, Human
uuaagacuugaca

SEQ ID NO: 1245212 - RNA, 17 nt, Human
uuaaguuucucugcaga

SEQ ID NO: 1245213 - RNA, 14 nt, Human
uuaauaaaaauaau

SEQ ID NO: 1245214 - RNA, 11 nt, Human
uuaauaaaaga

SEQ ID NO: 1245215 - RNA, 12 nt, Human
uuaauaaaagaa

SEQ ID NO: 1245216 - RNA, 14 nt, Human
uuaauaaaagaaaa

SEQ ID NO: 1245217 - RNA, 20 nt, Human
uuaauaaaagaaaauuacaa

SEQ ID NO: 1245218 - RNA, 20 nt, Human
uuaauccgccaauauuagua

SEQ ID NO: 1245219 - RNA, 12 nt, Human
uuaauccaaugg

SEQ ID NO: 1245220 - RNA, 19 nt, Human
uuaaucauauaaauagaau

SEQ ID NO: 1245221 - RNA, 17 nt, Human
uuaaucauauaaauaga

SEQ ID NO: 1245222 - RNA, 16 nt, Human
uuaaucauauaaauag

SEQ ID NO: 1245223 - RNA, 15 nt, Human
uuaaucauauaaaua

SEQ ID NO: 1245224 - RNA, 15 nt, Human
uuaaucaucaagaga

SEQ ID NO: 1245225 - RNA, 16 nt, Human
uuaaucaucaagagaa

SEQ ID NO: 1245226 - RNA, 17 nt, Human
uuaaucaucaagagaau

SEQ ID NO: 1245227 - RNA, 13 nt, Human
uuaaucauauaaa

SEQ ID NO: 1245228 - RNA, 17 nt, Human
uuaaucagauagauauu

SEQ ID NO: 1245229 - RNA, 22 nt, Human
uuaaucaguucauuagaaauau

SEQ ID NO: 1245230 - RNA, 20 nt, Human
uuaaucagguccucagagaa

SEQ ID NO: 1245231 - RNA, 17 nt, Human
uuaauaaaagaaaauua

SEQ ID NO: 1245232 - RNA, 15 nt, Human
aguuuuuuuuauaca

SEQ ID NO: 1245233 - RNA, 21 nt, Human
aguuuuuugaaauuaugugac

SEQ ID NO: 1245234 - RNA, 20 nt, Human
aguuuuuucuuccuuuucac

SEQ ID NO: 1245235 - RNA, 23 nt, Human
aguuuuuucuuccuuuucacugc

SEQ ID NO: 1245236 - RNA, 22 nt, Human
aguuuuuugaaaaugggcucaa

SEQ ID NO: 1245237 - RNA, 23 nt, Human
aguuuuuucaucuucaguugucu

SEQ ID NO: 1245238 - RNA, 20 nt, Human
aguuuuuucaucuucaguug

SEQ ID NO: 1245239 - RNA, 21 nt, Human
aguuuuuuacuuuuguuuauu

SEQ ID NO: 1245240 - RNA, 17 nt, Human
aguuuuuuauuaugcau

SEQ ID NO: 1245241 - RNA, 12 nt, Human
aguuuuuucauc

SEQ ID NO: 1245242 - RNA, 13 nt, Human
aguuuuuucaucu

SEQ ID NO: 1245243 - RNA, 14 nt, Human
aguuuuuucaucuu

SEQ ID NO: 1245244 - RNA, 15 nt, Human
aguuuuuaaacauca

SEQ ID NO: 1245245 - RNA, 9 nt, Human
aguuuuuca

SEQ ID NO: 1245246 - RNA, 18 nt, Human
aguuuuucauuaaauaaa

SEQ ID NO: 1245247 - RNA, 20 nt, Human
aguuuuucauuaaauaaauu

SEQ ID NO: 1245248 - RNA, 22 nt, Human
aguuuuucauuaaauaaauuug

SEQ ID NO: 1245249 - RNA, 19 nt, Human
aguuuuguguuuguuguag

SEQ ID NO: 1245250 - RNA, 21 nt, Human
aguuuuguguuuguuguagau

SEQ ID NO: 1245251 - RNA, 22 nt, Human
aguuuuguguuuguuguagauu

SEQ ID NO: 1245252 - RNA, 12 nt, Human
aguuuuaucauu

SEQ ID NO: 1245253 - RNA, 13 nt, Human
aguuuuaucauuu

SEQ ID NO: 1245254 - RNA, 14 nt, Human
aguuuuaucauuuu

SEQ ID NO: 1245255 - RNA, 12 nt, Human
aguuuuguguuu

SEQ ID NO: 1245256 - RNA, 16 nt, Human
aguuuuguguuuguug

SEQ ID NO: 1245257 - RNA, 16 nt, Human
aguuuuauaugcuucu

SEQ ID NO: 1245258 - RNA, 14 nt, Human
aguuuuauauauua

SEQ ID NO: 1245259 - RNA, 16 nt, Human
aguuuuauauauuaua

SEQ ID NO: 1245260 - RNA, 20 nt, Human
aguuuuauauauuauaugga

SEQ ID NO: 1245261 - RNA, 21 nt, Human
aguuuuauauauuauauggaa

SEQ ID NO: 1245262 - RNA, 19 nt, Human
aguuuuacuuuuaaacugu

SEQ ID NO: 1245263 - RNA, 20 nt, Human
aguuuuacuuuuaaacugug

SEQ ID NO: 1245264 - RNA, 12 nt, Human
aguuuuauauau

SEQ ID NO: 1245265 - RNA, 13 nt, Human
aguuuuauauauu

SEQ ID NO: 1245266 - RNA, 20 nt, Human
auaaaagccuguuuaagaga

SEQ ID NO: 1245267 - RNA, 19 nt, Human
aguuuuuuuuuucuugucu

SEQ ID NO: 1245268 - RNA, 15 nt, Human
auaaaaggaagccaa

SEQ ID NO: 1245269 - RNA, 17 nt, Human
auaaaaggaagccaaag

SEQ ID NO: 1245270 - RNA, 23 nt, Human
aguuuuuugaaauuaugugacau

SEQ ID NO: 1245271 - RNA, 18 nt, Human
aguuuuuuuuuucuuguc

SEQ ID NO: 1245272 - RNA, 15 nt, Human
aguuuuuuguaccaa

SEQ ID NO: 1245273 - RNA, 22 nt, Human
aguuuuuuuuuucuugucuaua

SEQ ID NO: 1245274 - RNA, 22 nt, Human
auaaaagggacugagaaauuua

SEQ ID NO: 1245275 - RNA, 19 nt, Human
auaaaaggaagccaaagag

SEQ ID NO: 1245276 - RNA, 20 nt, Human
auaaaaggaagccaaagagu

SEQ ID NO: 1245277 - RNA, 19 nt, Human
uuaagacgaaacauuuguu

SEQ ID NO: 1245278 - RNA, 20 nt, Human
uuaagaccuacuguucuaaa

SEQ ID NO: 1245279 - RNA, 21 nt, Human
uuaagaccuacuguucuaaag

SEQ ID NO: 1245280 - RNA, 11 nt, Human
uuaagaccugg

SEQ ID NO: 1245281 - RNA, 14 nt, Human
uuaagaccuggcag

SEQ ID NO: 1245282 - RNA, 18 nt, Human
uuaagaccuggcagcucu

SEQ ID NO: 1245283 - RNA, 18 nt, Human
uuaagacauuuuuggaag

SEQ ID NO: 1245284 - RNA, 15 nt, Human
uuaagaaugaucuga

SEQ ID NO: 1245285 - RNA, 16 nt, Human
uuaagacaugauuucc

SEQ ID NO: 1245286 - RNA, 23 nt, Human
uuaagacauuuuuggaaggggac

SEQ ID NO: 1245287 - RNA, 18 nt, Human
uuaagacaugauuuccuu

SEQ ID NO: 1245288 - RNA, 18 nt, Human
uuaagaccuacuguucua

SEQ ID NO: 1245289 - RNA, 18 nt, Human
uuaagaaggcaaaaaugu

SEQ ID NO: 1245290 - RNA, 10 nt, Human
uuaagaauau

SEQ ID NO: 1245291 - RNA, 20 nt, Human
uuaagaauaucuguaauggu

SEQ ID NO: 1245292 - RNA, 19 nt, Human
uuaagaaugaucugauuga

SEQ ID NO: 1245293 - RNA, 19 nt, Human
uuaagaauugaguaauggu

SEQ ID NO: 1245294 - RNA, 20 nt, Human
uuaagacacugaaaaaucua

SEQ ID NO: 1245295 - RNA, 20 nt, Human
aguuuaaauuguaauaggcg

SEQ ID NO: 1245296 - RNA, 17 nt, Human
aguuuaaauuguaauag

SEQ ID NO: 1245297 - RNA, 15 nt, Human
aguuagcuuuaacuu

SEQ ID NO: 1245298 - RNA, 20 nt, Human
aguuagcuuuaacuuaaaua

SEQ ID NO: 1245299 - RNA, 22 nt, Human
aguuagcuuuaacuuaaauagu

SEQ ID NO: 1245300 - RNA, 21 nt, Human
aguuagcuuuaacuuaaauag

SEQ ID NO: 1245301 - RNA, 20 nt, Human
aguuuaccaguugccuuuua

SEQ ID NO: 1245302 - RNA, 15 nt, Human
aguuuagcuggaaaa

SEQ ID NO: 1245303 - RNA, 14 nt, Human
aguuuaccuuguau

SEQ ID NO: 1245304 - RNA, 20 nt, Human
aguuuaccuuguauacugua

SEQ ID NO: 1245305 - RNA, 16 nt, Human
aguuuagcuggaaaag

SEQ ID NO: 1245306 - RNA, 14 nt, Human
aguuuagcucugag

SEQ ID NO: 1245307 - RNA, 12 nt, Human
uuaaaaaagaua

SEQ ID NO: 1245308 - RNA, 13 nt, Human
uuaaaaaagauaa

SEQ ID NO: 1245309 - RNA, 15 nt, Human
uuaaaaaagauaaac

SEQ ID NO: 1245310 - RNA, 17 nt, Human
uuaaaaaagauaaacac

SEQ ID NO: 1245311 - RNA, 18 nt, Human
uuaaaaaagauaaacaca

SEQ ID NO: 1245312 - RNA, 21 nt, Human
uuaaaaaagauaaacacaaga

SEQ ID NO: 1245313 - RNA, 21 nt, Human
uuaaaaaagcuuaaaacuuug

SEQ ID NO: 1245314 - RNA, 12 nt, Human
uuaaaaaagcuu

SEQ ID NO: 1245315 - RNA, 19 nt, Human
uuaaaaaagcuuaaaacuu

SEQ ID NO: 1245316 - RNA, 17 nt, Human
uuaaaccaucucccugg

SEQ ID NO: 1245317 - RNA, 18 nt, Human
uuaaaccaucucccuggu

SEQ ID NO: 1245318 - RNA, 21 nt, Human
uuaaaccaucucccuggugcu

SEQ ID NO: 1245319 - RNA, 22 nt, Human
uuaaaccaucucccuggugcuu

SEQ ID NO: 1245320 - RNA, 17 nt, Human
uuaaaauguaugcaugu

SEQ ID NO: 1245321 - RNA, 14 nt, Human
uuaaaccaucuccc

SEQ ID NO: 1245322 - RNA, 15 nt, Human
uuaaaccaucucccu

SEQ ID NO: 1245323 - RNA, 17 nt, Human
uuaaaauguaagauuau

SEQ ID NO: 1245324 - RNA, 24 nt, Human
uuaaaauguaagauuauagauucu

SEQ ID NO: 1245325 - RNA, 14 nt, Human
uuaaaauguaugca

SEQ ID NO: 1245326 - RNA, 19 nt, Human
uuaaaauguaugcauguug

SEQ ID NO: 1245327 - RNA, 19 nt, Human
uuaaaaugagaaaucuaaa

SEQ ID NO: 1245328 - RNA, 12 nt, Human
uuaaaaugagaa

SEQ ID NO: 1245329 - RNA, 16 nt, Human
uuaaaauguaaagcca

SEQ ID NO: 1245330 - RNA, 17 nt, Human
uuaaaauguaaagccau

SEQ ID NO: 1245331 - RNA, 20 nt, Human
uuaaaaaugguuuaaauggu

SEQ ID NO: 1245332 - RNA, 12 nt, Human
uuaaaauccuca

SEQ ID NO: 1245333 - RNA, 13 nt, Human
uuaaaauccucaa

SEQ ID NO: 1245334 - RNA, 23 nt, Human
uuaaaccaucucccuggugcuua

SEQ ID NO: 1245335 - RNA, 23 nt, Human
uuaaaguuaguaucuuuugauau

SEQ ID NO: 1245336 - RNA, 14 nt, Human
uuaaaguucaaacu

SEQ ID NO: 1245337 - RNA, 15 nt, Human
uuaaaguucaaacuc

SEQ ID NO: 1245338 - RNA, 15 nt, Human
uuaaaguuguuugug

SEQ ID NO: 1245339 - RNA, 17 nt, Human
uuaaauuuuuuuuacau

SEQ ID NO: 1245340 - RNA, 16 nt, Human
uuaaauuuuuuuuaca

SEQ ID NO: 1245341 - RNA, 15 nt, Human
aguuuauauuuaacu

SEQ ID NO: 1245342 - RNA, 16 nt, Human
aguuuauauuuaacuc

SEQ ID NO: 1245343 - RNA, 18 nt, Human
aguuuauauuuaacucuc

SEQ ID NO: 1245344 - RNA, 18 nt, Human
aguuuaucaguaaauaac

SEQ ID NO: 1245345 - RNA, 19 nt, Human
aguuuaucaguaaauaacu

SEQ ID NO: 1245346 - RNA, 14 nt, Human
aguuuaucauucaa

SEQ ID NO: 1245347 - RNA, 15 nt, Human
aguuuaucauucaag

SEQ ID NO: 1245348 - RNA, 16 nt, Human
aguuuaucauucaagu

SEQ ID NO: 1245349 - RNA, 17 nt, Human
aguuuaucauucaagug

SEQ ID NO: 1245350 - RNA, 18 nt, Human
uuaaauuuuuuguugaca

SEQ ID NO: 1245351 - RNA, 16 nt, Human
uuaaauuuuuuguuga

SEQ ID NO: 1245352 - RNA, 15 nt, Human
aguuuguugaaacac

SEQ ID NO: 1245353 - RNA, 13 nt, Human
aguuuguuuuugc

SEQ ID NO: 1245354 - RNA, 22 nt, Human
aguuuuaaaaagccaguuuggg

SEQ ID NO: 1245355 - RNA, 13 nt, Human
aguuuuaacugug

SEQ ID NO: 1245356 - RNA, 18 nt, Human
aguuuuaacuguggauau

SEQ ID NO: 1245357 - RNA, 14 nt, Human
aguuugugugucuu

SEQ ID NO: 1245358 - RNA, 15 nt, Human
aguuugugugucuua

SEQ ID NO: 1245359 - RNA, 16 nt, Human
aguuugugugucuuaa

SEQ ID NO: 1245360 - RNA, 22 nt, Human
aguuugugugucuuaauuauua

SEQ ID NO: 1245361 - RNA, 14 nt, Human
aguuuguguguugu

SEQ ID NO: 1245362 - RNA, 21 nt, Human
aguuuguguguugucucuuga

SEQ ID NO: 1245363 - RNA, 13 nt, Human
aguuucucagcuc

SEQ ID NO: 1245364 - RNA, 15 nt, Human
aguuucucagcuccc

SEQ ID NO: 1245365 - RNA, 23 nt, Human
aguuucucugcagaaacuacuga

SEQ ID NO: 1245366 - RNA, 14 nt, Human
aguuucugaguuuu

SEQ ID NO: 1245367 - RNA, 17 nt, Human
aguuucugaguuuuacc

SEQ ID NO: 1245368 - RNA, 18 nt, Human
aguuucugaguuuuacca

SEQ ID NO: 1245369 - RNA, 19 nt, Human
aguuucugaguuuuaccaa

SEQ ID NO: 1245370 - RNA, 20 nt, Human
aguuucugaguuuuaccaaa

SEQ ID NO: 1245371 - RNA, 13 nt, Human
aguuuauuuguug

SEQ ID NO: 1245372 - RNA, 16 nt, Human
aguuuauuuguugaga

SEQ ID NO: 1245373 - RNA, 18 nt, Human
aguuucuaaacuggagac

SEQ ID NO: 1245374 - RNA, 19 nt, Human
aguuucuaaacuggagacu

SEQ ID NO: 1245375 - RNA, 20 nt, Human
aguuucuaaacuggagacug

SEQ ID NO: 1245376 - RNA, 14 nt, Human
aguuucuaagauuc

SEQ ID NO: 1245377 - RNA, 15 nt, Human
aguuucuaagauucu

SEQ ID NO: 1245378 - RNA, 16 nt, Human
aguuucuaagauucua

SEQ ID NO: 1245379 - RNA, 17 nt, Human
aguuucuaagauucuaa

SEQ ID NO: 1245380 - RNA, 18 nt, Human
aguuucuaagauucuaaa

SEQ ID NO: 1245381 - RNA, 19 nt, Human
aguuucuaagauucuaaag

SEQ ID NO: 1245382 - RNA, 20 nt, Human
aguuucuaagauucuaaagg

SEQ ID NO: 1245383 - RNA, 11 nt, Human
aguuucuaagg

SEQ ID NO: 1245384 - RNA, 12 nt, Human
aguuucuaaggu

SEQ ID NO: 1245385 - RNA, 23 nt, Human
aguuucuaagguccgguguucua

SEQ ID NO: 1245386 - RNA, 12 nt, Human
auagauucuaaa

SEQ ID NO: 1245387 - RNA, 13 nt, Human
auagauucuaaag

SEQ ID NO: 1245388 - RNA, 14 nt, Human
auagauucuaaaga

SEQ ID NO: 1245389 - RNA, 15 nt, Human
auagauucuaaagau

SEQ ID NO: 1245390 - RNA, 16 nt, Human
auagauucuaaagauu

SEQ ID NO: 1245391 - RNA, 19 nt, Human
auagauucucuuguauaag

SEQ ID NO: 1245392 - RNA, 18 nt, Human
auagauucuaaagauucu

SEQ ID NO: 1245393 - RNA, 14 nt, Human
auagauuguccuuu

SEQ ID NO: 1245394 - RNA, 20 nt, Human
auagauuguccuuuugcaaa

SEQ ID NO: 1245395 - RNA, 21 nt, Human
auagauuguccuuuugcaaag

SEQ ID NO: 1245396 - RNA, 14 nt, Human
auagaugucuuuuc

SEQ ID NO: 1245397 - RNA, 17 nt, Human
auagaugucuuuuccca

SEQ ID NO: 1245398 - RNA, 12 nt, Human
auagauguuuga

SEQ ID NO: 1245399 - RNA, 13 nt, Human
auagaugucuuuu

SEQ ID NO: 1245400 - RNA, 23 nt, Human
auagaugcuggcccagggcccag

SEQ ID NO: 1245401 - RNA, 22 nt, Human
auagaugggggaaagcaaagca

SEQ ID NO: 1245402 - RNA, 14 nt, Human
auagaguguuauca

SEQ ID NO: 1245403 - RNA, 20 nt, Human
auagauaagaguagaaacug

SEQ ID NO: 1245404 - RNA, 21 nt, Human
auagauaaaacaucuuugaaa

SEQ ID NO: 1245405 - RNA, 20 nt, Human
auagauaaaacaucuuugaa

SEQ ID NO: 1245406 - RNA, 21 nt, Human
auagauacccuacgcugucca

SEQ ID NO: 1245407 - RNA, 15 nt, Human
auagaugcuggccca

SEQ ID NO: 1245408 - RNA, 16 nt, Human
auagaugcuggcccag

SEQ ID NO: 1245409 - RNA, 17 nt, Human
auagaugcuggcccagg

SEQ ID NO: 1245410 - RNA, 20 nt, Human
auagaugcuggcccagggcc

SEQ ID NO: 1245411 - RNA, 22 nt, Human
auagagcuagcuaaucucuaca

SEQ ID NO: 1245412 - RNA, 13 nt, Human
auagagcuguauu

SEQ ID NO: 1245413 - RNA, 22 nt, Human
auagaggauggucuuacagcag

SEQ ID NO: 1245414 - RNA, 18 nt, Human
auagauaggucagugcaa

SEQ ID NO: 1245415 - RNA, 14 nt, Human
auagagacgggacu

SEQ ID NO: 1245416 - RNA, 16 nt, Human
auagagacuugggaau

SEQ ID NO: 1245417 - RNA, 18 nt, Human
auagacccacaagaggca

SEQ ID NO: 1245418 - RNA, 17 nt, Human
auagaccuuuucauuug

SEQ ID NO: 1245419 - RNA, 15 nt, Human
auagacuuaaaucuc

SEQ ID NO: 1245420 - RNA, 19 nt, Human
auagagccgggugucccca

SEQ ID NO: 1245421 - RNA, 20 nt, Human
auagagccggguguccccaa

SEQ ID NO: 1245422 - RNA, 13 nt, Human
auagagccugagg

SEQ ID NO: 1245423 - RNA, 15 nt, Human
auagagccugaggga

SEQ ID NO: 1245424 - RNA, 14 nt, Human
auagagcuguauua

SEQ ID NO: 1245425 - RNA, 14 nt, Human
auagaacaaggcug

SEQ ID NO: 1245426 - RNA, 16 nt, Human
auacuguaguauucuu

SEQ ID NO: 1245427 - RNA, 19 nt, Human
auacuguauauucaggacu

SEQ ID NO: 1245428 - RNA, 19 nt, Human
auacuguauuuuguauugu

SEQ ID NO: 1245429 - RNA, 13 nt, Human
auagaaguaaaaa

SEQ ID NO: 1245430 - RNA, 18 nt, Human
auagaaguauaaagaauu

SEQ ID NO: 1245431 - RNA, 13 nt, Human
auagaaggugaug

SEQ ID NO: 1245432 - RNA, 14 nt, Human
auagaaguuuagau

SEQ ID NO: 1245433 - RNA, 18 nt, Human
auagaacucugaaaugaa

SEQ ID NO: 1245434 - RNA, 14 nt, Human
auagaacugaauga

SEQ ID NO: 1245435 - RNA, 18 nt, Human
auagaacuggauuuucag

SEQ ID NO: 1245436 - RNA, 22 nt, Human
auagaauaaaauuuuuaaucuu

SEQ ID NO: 1245437 - RNA, 12 nt, Human
auagaauaaagg

SEQ ID NO: 1245438 - RNA, 17 nt, Human
auagaauaaaggcaguu

SEQ ID NO: 1245439 - RNA, 18 nt, Human
auagaauaaaggcaguuu

SEQ ID NO: 1245440 - RNA, 19 nt, Human
auagaauaaaggcaguuuu

SEQ ID NO: 1245441 - RNA, 19 nt, Human
auagaauaaaauuuuuaau

SEQ ID NO: 1245442 - RNA, 14 nt, Human
auagaauaaaauuu

SEQ ID NO: 1245443 - RNA, 17 nt, Human
auagaauuaacacauga

SEQ ID NO: 1245444 - RNA, 17 nt, Human
auagaauguaaaugucu

SEQ ID NO: 1245445 - RNA, 15 nt, Human
auagaauguaaaugu

SEQ ID NO: 1245446 - RNA, 14 nt, Human
auagaauguaaaug

SEQ ID NO: 1245447 - RNA, 13 nt, Human
auagaaugacagu

SEQ ID NO: 1245448 - RNA, 18 nt, Human
auagaaugguaucaauaa

SEQ ID NO: 1245449 - RNA, 20 nt, Human
auagaauaaaggcaguuuuc

SEQ ID NO: 1245450 - RNA, 22 nt, Human
auagaauaaaggcaguuuucua

SEQ ID NO: 1245451 - RNA, 12 nt, Human
auagacacgcac

SEQ ID NO: 1245452 - RNA, 22 nt, Human
auagacacuccccgaagucuuu

SEQ ID NO: 1245453 - RNA, 21 nt, Human
auagacaauugagguaaguuu

SEQ ID NO: 1245454 - RNA, 19 nt, Human
auagacaaauagaaaaugg

SEQ ID NO: 1245455 - RNA, 13 nt, Human
auagacagaagaa

SEQ ID NO: 1245456 - RNA, 14 nt, Human
auagacagaagaaa

SEQ ID NO: 1245457 - RNA, 16 nt, Human
auagacagaagaaaca

SEQ ID NO: 1245458 - RNA, 17 nt, Human
auagacagaagaaacaa

SEQ ID NO: 1245459 - RNA, 19 nt, Human
auagacagaagaaacaagg

SEQ ID NO: 1245460 - RNA, 15 nt, Human
auagacagcaugaga

SEQ ID NO: 1245461 - RNA, 18 nt, Human
auagacagaagaaacaag

SEQ ID NO: 1245462 - RNA, 14 nt, Human
auagacaauugagg

SEQ ID NO: 1245463 - RNA, 16 nt, Human
auagacaaauagaaaa

SEQ ID NO: 1245464 - RNA, 17 nt, Human
auagacaaauagaaaau

SEQ ID NO: 1245465 - RNA, 20 nt, Human
auagaauguaaaugucucac

SEQ ID NO: 1245466 - RNA, 19 nt, Human
auagaauguaaaugucuca

SEQ ID NO: 1245467 - RNA, 22 nt, Human
auagaauuauaacuggaaagaa

SEQ ID NO: 1245468 - RNA, 13 nt, Human
auacuggcacaga

SEQ ID NO: 1245469 - RNA, 15 nt, Human
auacuggcacagagg

SEQ ID NO: 1245470 - RNA, 14 nt, Human
auacuggccuggac

SEQ ID NO: 1245471 - RNA, 15 nt, Human
auacuggccuggacu

SEQ ID NO: 1245472 - RNA, 19 nt, Human
auacugcgacuuucugccu

SEQ ID NO: 1245473 - RNA, 20 nt, Human
auacugcgacuuucugccug

SEQ ID NO: 1245474 - RNA, 22 nt, Human
auacugcgacuuucugccugga

SEQ ID NO: 1245475 - RNA, 15 nt, Human
auacugcuacagcaa

SEQ ID NO: 1245476 - RNA, 19 nt, Human
auacugcuacagcaauuuc

SEQ ID NO: 1245477 - RNA, 22 nt, Human
auacugcuacagcaauuucuaa

SEQ ID NO: 1245478 - RNA, 12 nt, Human
auacugcugaga

SEQ ID NO: 1245479 - RNA, 18 nt, Human
auacugcugagauacaua

SEQ ID NO: 1245480 - RNA, 19 nt, Human
auacugcugagauacauac

SEQ ID NO: 1245481 - RNA, 21 nt, Human
auacugcugagauacauacag

SEQ ID NO: 1245482 - RNA, 10 nt, Human
auacugcuug

SEQ ID NO: 1245483 - RNA, 22 nt, Human
auacugcugagauacauacaga

SEQ ID NO: 1245484 - RNA, 15 nt, Human
auacugcuuggagcu

SEQ ID NO: 1245485 - RNA, 20 nt, Human
auacugcuuggagcugagca

SEQ ID NO: 1245486 - RNA, 21 nt, Human
auacugcuuggagcugagcaa

SEQ ID NO: 1245487 - RNA, 14 nt, Human
auacuggaaagcuu

SEQ ID NO: 1245488 - RNA, 17 nt, Human
auacugccacuaaccuu

SEQ ID NO: 1245489 - RNA, 15 nt, Human
auacugcauacuuuu

SEQ ID NO: 1245490 - RNA, 21 nt, Human
auacugcauacuuuuuaaaug

SEQ ID NO: 1245491 - RNA, 17 nt, Human
auacugagaaaaccugu

SEQ ID NO: 1245492 - RNA, 14 nt, Human
auacucuuucugua

SEQ ID NO: 1245493 - RNA, 15 nt, Human
auacucuuucuguau

SEQ ID NO: 1245494 - RNA, 16 nt, Human
auacucuuucuguaua

SEQ ID NO: 1245495 - RNA, 17 nt, Human
auacucuuucuguauau

SEQ ID NO: 1245496 - RNA, 22 nt, Human
auacucuuucuguauauacuuu

SEQ ID NO: 1245497 - RNA, 23 nt, Human
auacucuuucuguauauacuuuu

SEQ ID NO: 1245498 - RNA, 15 nt, Human
auacugaacaucuga

SEQ ID NO: 1245499 - RNA, 20 nt, Human
auacugaacaucugaguccu

SEQ ID NO: 1245500 - RNA, 23 nt, Human
auacugaacaucugaguccugga

SEQ ID NO: 1245501 - RNA, 22 nt, Human
auacugaacaucugaguccugg

SEQ ID NO: 1245502 - RNA, 14 nt, Human
auacucuuauaucu

SEQ ID NO: 1245503 - RNA, 18 nt, Human
auacucuuauaucuauau

SEQ ID NO: 1245504 - RNA, 18 nt, Human
auacucuuauagacaaca

SEQ ID NO: 1245505 - RNA, 20 nt, Human
auacucucaccauuuggauc

SEQ ID NO: 1245506 - RNA, 17 nt, Human
auacucauuuuucauga

SEQ ID NO: 1245507 - RNA, 17 nt, Human
auacucuagaugaaguu

SEQ ID NO: 1245508 - RNA, 23 nt, Human
auacucuagaugaaguuuuacau

SEQ ID NO: 1245509 - RNA, 16 nt, Human
auacucauuaggaugg

SEQ ID NO: 1245510 - RNA, 16 nt, Human
uuauuccuccugcuca

SEQ ID NO: 1245511 - RNA, 20 nt, Human
uuauuccuccugcucauauu

SEQ ID NO: 1245512 - RNA, 18 nt, Human
uuauucccuuccugccag

SEQ ID NO: 1245513 - RNA, 17 nt, Human
uuauuccagaaugcugu

SEQ ID NO: 1245514 - RNA, 20 nt, Human
uuauuccagaaugcuguaca

SEQ ID NO: 1245515 - RNA, 22 nt, Human
uuauuccagaaugcuguacauc

SEQ ID NO: 1245516 - RNA, 13 nt, Human
uuauuccaugacu

SEQ ID NO: 1245517 - RNA, 16 nt, Human
uuauuccaugacugcu

SEQ ID NO: 1245518 - RNA, 23 nt, Human
uuauuccaugacugcuugcccua

SEQ ID NO: 1245519 - RNA, 20 nt, Human
uuauuccccauucuuccuag

SEQ ID NO: 1245520 - RNA, 13 nt, Human
uuauucccuuccu

SEQ ID NO: 1245521 - RNA, 23 nt, Human
uuauucccuuccugccagccccu

SEQ ID NO: 1245522 - RNA, 16 nt, Human
uuauuaguauuguugu

SEQ ID NO: 1245523 - RNA, 19 nt, Human
uuauuaguauuguuguccu

SEQ ID NO: 1245524 - RNA, 18 nt, Human
uuauuaguauuguugucc

SEQ ID NO: 1245525 - RNA, 14 nt, Human
uuauuauauuuaca

SEQ ID NO: 1245526 - RNA, 19 nt, Human
uuauguuaaaacugggaca

SEQ ID NO: 1245527 - RNA, 17 nt, Human
uuauguuaaaucaauaa

SEQ ID NO: 1245528 - RNA, 22 nt, Human
uuauguuaagggaagaauucca

SEQ ID NO: 1245529 - RNA, 13 nt, Human
uuauguuauauau

SEQ ID NO: 1245530 - RNA, 15 nt, Human
uuauguuauauauaa

SEQ ID NO: 1245531 - RNA, 16 nt, Human
uuauguuauauauaaa

SEQ ID NO: 1245532 - RNA, 17 nt, Human
uuauguuauauauaaau

SEQ ID NO: 1245533 - RNA, 18 nt, Human
uuauguuauauauaaaua

SEQ ID NO: 1245534 - RNA, 21 nt, Human
uuauuauaaucuuauaauugu

SEQ ID NO: 1245535 - RNA, 22 nt, Human
uuauuauaaucuuauaauuguu

SEQ ID NO: 1245536 - RNA, 15 nt, Human
uuauuauauuuacaa

SEQ ID NO: 1245537 - RNA, 13 nt, Human
uuauuaugaagaa

SEQ ID NO: 1245538 - RNA, 12 nt, Human
uuauucauaauu

SEQ ID NO: 1245539 - RNA, 13 nt, Human
uuauucaguguca

SEQ ID NO: 1245540 - RNA, 14 nt, Human
uuauucagugucac

SEQ ID NO: 1245541 - RNA, 15 nt, Human
uuauucauaugcaua

SEQ ID NO: 1245542 - RNA, 16 nt, Human
uuauucauaugcauau

SEQ ID NO: 1245543 - RNA, 14 nt, Human
uuauucauaugcau

SEQ ID NO: 1245544 - RNA, 15 nt, Human
uuauucagggaagga

SEQ ID NO: 1245545 - RNA, 17 nt, Human
uuauucaauuuauuuga

SEQ ID NO: 1245546 - RNA, 18 nt, Human
uuauucaauuuauuugaa

SEQ ID NO: 1245547 - RNA, 20 nt, Human
uuauucaauuuauuugaaug

SEQ ID NO: 1245548 - RNA, 21 nt, Human
uuauucaauuuauuugaauga

SEQ ID NO: 1245549 - RNA, 20 nt, Human
uuauucacuuuuauuuagca

SEQ ID NO: 1245550 - RNA, 14 nt, Human
uuauucacaaaaau

SEQ ID NO: 1245551 - RNA, 22 nt, Human
uuauuauuuguguuuuaauuua

SEQ ID NO: 1245552 - RNA, 14 nt, Human
uuauuaugcauuau

SEQ ID NO: 1245553 - RNA, 16 nt, Human
uuauuauuauuuuuua

SEQ ID NO: 1245554 - RNA, 13 nt, Human
uuaugugaaacau

SEQ ID NO: 1245555 - RNA, 17 nt, Human
uuaugucuguggauuuu

SEQ ID NO: 1245556 - RNA, 11 nt, Human
uuaugucuggg

SEQ ID NO: 1245557 - RNA, 20 nt, Human
uuauguauugugcaaugugu

SEQ ID NO: 1245558 - RNA, 14 nt, Human
uuauguauugugca

SEQ ID NO: 1245559 - RNA, 15 nt, Human
uuaugucucuucuga

SEQ ID NO: 1245560 - RNA, 22 nt, Human
uuauguaaauuaucaggcaaau

SEQ ID NO: 1245561 - RNA, 17 nt, Human
uuauguaaauuauguaa

SEQ ID NO: 1245562 - RNA, 13 nt, Human
uuauguaauuuca

SEQ ID NO: 1245563 - RNA, 11 nt, Human
uuauguaauuu

SEQ ID NO: 1245564 - RNA, 13 nt, Human
uuauguagcucuu

SEQ ID NO: 1245565 - RNA, 16 nt, Human
uuauguagcucuuugu

SEQ ID NO: 1245566 - RNA, 15 nt, Human
uuauguaguaauuga

SEQ ID NO: 1245567 - RNA, 16 nt, Human
uuauguaguaauugac

SEQ ID NO: 1245568 - RNA, 19 nt, Human
uuauguaguaauugacaug

SEQ ID NO: 1245569 - RNA, 18 nt, Human
uuauguagcucuuuguca

SEQ ID NO: 1245570 - RNA, 11 nt, Human
uuauguaguuu

SEQ ID NO: 1245571 - RNA, 21 nt, Human
uuauguaguuuuuauauguug

SEQ ID NO: 1245572 - RNA, 20 nt, Human
uuaugugacauuuuacauua

SEQ ID NO: 1245573 - RNA, 22 nt, Human
uuaugugccagauuuaugcaua

SEQ ID NO: 1245574 - RNA, 19 nt, Human
uuaugugacauuuuacauu

SEQ ID NO: 1245575 - RNA, 14 nt, Human
uuaugugacauuuu

SEQ ID NO: 1245576 - RNA, 15 nt, Human
uuaugugaaacaugu

SEQ ID NO: 1245577 - RNA, 16 nt, Human
uuaugugaucaugugu

SEQ ID NO: 1245578 - RNA, 16 nt, Human
uuaugugguuuuagau

SEQ ID NO: 1245579 - RNA, 18 nt, Human
uuaugugguuuuagauuu

SEQ ID NO: 1245580 - RNA, 19 nt, Human
uuaugugguuuuagauuuu

SEQ ID NO: 1245581 - RNA, 20 nt, Human
uuaugugguuuuagauuuuc

SEQ ID NO: 1245582 - RNA, 11 nt, Human
uuaugggucac

SEQ ID NO: 1245583 - RNA, 13 nt, Human
uuaugggucacag

SEQ ID NO: 1245584 - RNA, 15 nt, Human
uuaugggucacagga

SEQ ID NO: 1245585 - RNA, 21 nt, Human
uuaugguaacugcuuucuguu

SEQ ID NO: 1245586 - RNA, 22 nt, Human
uuaugguaacugcuuucuguuc

SEQ ID NO: 1245587 - RNA, 23 nt, Human
uuaugguaacugcuuucuguucc

SEQ ID NO: 1245588 - RNA, 18 nt, Human
uuaugauaauagauucuc

SEQ ID NO: 1245589 - RNA, 13 nt, Human
uuaugaucuggcc

SEQ ID NO: 1245590 - RNA, 21 nt, Human
uuaugaucuggcccuugcuua

SEQ ID NO: 1245591 - RNA, 19 nt, Human
uuaugauuaaguaaugaua

SEQ ID NO: 1245592 - RNA, 18 nt, Human
uuaugaugugcuuaacag

SEQ ID NO: 1245593 - RNA, 17 nt, Human
uuaugaugugcuuaaca

SEQ ID NO: 1245594 - RNA, 16 nt, Human
uuaugaugugcuuaac

SEQ ID NO: 1245595 - RNA, 14 nt, Human
uuaugaugugcuua

SEQ ID NO: 1245596 - RNA, 13 nt, Human
uuaugaugugcuu

SEQ ID NO: 1245597 - RNA, 11 nt, Human
uuaugaugugc

SEQ ID NO: 1245598 - RNA, 22 nt, Human
uuaugauuaaguaaugauaacu

SEQ ID NO: 1245599 - RNA, 23 nt, Human
uuaugggaaccccuucauccucu

SEQ ID NO: 1245600 - RNA, 16 nt, Human
uuaucccagcugccua

SEQ ID NO: 1245601 - RNA, 18 nt, Human
uuaugaaaaagaagaauc

SEQ ID NO: 1245602 - RNA, 19 nt, Human
uuaugaaaaagaagaaucu

SEQ ID NO: 1245603 - RNA, 14 nt, Human
uuaugaaacuuuug

SEQ ID NO: 1245604 - RNA, 17 nt, Human
uuaugaaacuuuuggaa

SEQ ID NO: 1245605 - RNA, 18 nt, Human
uuaugaaacuuuuggaag

SEQ ID NO: 1245606 - RNA, 20 nt, Human
uuaugaagcuuuuaugugaa

SEQ ID NO: 1245607 - RNA, 22 nt, Human
uuaugaagaaggugaauagcca

SEQ ID NO: 1245608 - RNA, 19 nt, Human
uuaugaaacuuuuggaagg

SEQ ID NO: 1245609 - RNA, 19 nt, Human
uuaugaaauucacccccuu

SEQ ID NO: 1245610 - RNA, 18 nt, Human
uuaucaccgugggcuccc

SEQ ID NO: 1245611 - RNA, 12 nt, Human
uuaucauuuuca

SEQ ID NO: 1245612 - RNA, 16 nt, Human
uuaucauuuucaaaau

SEQ ID NO: 1245613 - RNA, 17 nt, Human
uuauccauauugaguca

SEQ ID NO: 1245614 - RNA, 19 nt, Human
uuauccauauugagucaaa

SEQ ID NO: 1245615 - RNA, 23 nt, Human
uuaucccaaaguuguuguaaccu

SEQ ID NO: 1245616 - RNA, 13 nt, Human
uuaucccagcugc

SEQ ID NO: 1245617 - RNA, 15 nt, Human
uuaucccagcugccu

SEQ ID NO: 1245618 - RNA, 15 nt, Human
uuaucccucaccugu

SEQ ID NO: 1245619 - RNA, 17 nt, Human
uuaucccucaccuguag

SEQ ID NO: 1245620 - RNA, 20 nt, Human
uuaucccucaccuguagcag

SEQ ID NO: 1245621 - RNA, 16 nt, Human
uuaugauaauagauuc

SEQ ID NO: 1245622 - RNA, 17 nt, Human
uuaugauaauagauucu

SEQ ID NO: 1245623 - RNA, 22 nt, Human
uuaugauagcaaauggccucau

SEQ ID NO: 1245624 - RNA, 20 nt, Human
uuaugauacuugaaaauuaa

SEQ ID NO: 1245625 - RNA, 16 nt, Human
uuaugacuauguaaac

SEQ ID NO: 1245626 - RNA, 15 nt, Human
uuaugacuauguaaa

SEQ ID NO: 1245627 - RNA, 15 nt, Human
uuaugacugccaaga

SEQ ID NO: 1245628 - RNA, 13 nt, Human
uuaugagaaacuu

SEQ ID NO: 1245629 - RNA, 22 nt, Human
uuaugagaaacuuaaauguuau

SEQ ID NO: 1245630 - RNA, 15 nt, Human
uuaugagaaagccuu

SEQ ID NO: 1245631 - RNA, 18 nt, Human
uuaugagcucuucauguu

SEQ ID NO: 1245632 - RNA, 14 nt, Human
uuaugaauuacauu

SEQ ID NO: 1245633 - RNA, 17 nt, Human
uuaugaaugugaagccu

SEQ ID NO: 1245634 - RNA, 18 nt, Human
uuaugaaugugaagccuu

SEQ ID NO: 1245635 - RNA, 16 nt, Human
uuaugaauuacauuug

SEQ ID NO: 1245636 - RNA, 17 nt, Human
uuaugaauuacauuugu

SEQ ID NO: 1245637 - RNA, 21 nt, Human
uuaugaauuacauuuguauaa

SEQ ID NO: 1245638 - RNA, 24 nt, Human
uuaugacaguaauuguguuuacau

SEQ ID NO: 1245639 - RNA, 16 nt, Human
uuaugacaguaauugu

SEQ ID NO: 1245640 - RNA, 15 nt, Human
uuaugacaguaauug

SEQ ID NO: 1245641 - RNA, 13 nt, Human
uuaugacaguaau

SEQ ID NO: 1245642 - RNA, 19 nt, Human
uuaugaaugugaagccuuc

SEQ ID NO: 1245643 - RNA, 20 nt, Human
uuaugaaugugaagccuucc

SEQ ID NO: 1245644 - RNA, 16 nt, Human
uuaugacaucacuugu

SEQ ID NO: 1245645 - RNA, 18 nt, Human
uuaugacaucacuuguac

SEQ ID NO: 1245646 - RNA, 21 nt, Human
uuaugacaucacuuguacaaa

SEQ ID NO: 1245647 - RNA, 23 nt, Human
uuaugacaucacuuguacaaaau

SEQ ID NO: 1245648 - RNA, 21 nt, Human
auacaggaugaugacuaugga

SEQ ID NO: 1245649 - RNA, 17 nt, Human
auacaggagauucucuu

SEQ ID NO: 1245650 - RNA, 16 nt, Human
auacaggaaacaguug

SEQ ID NO: 1245651 - RNA, 19 nt, Human
auacagucuuccauuugca

SEQ ID NO: 1245652 - RNA, 20 nt, Human
auacagucuuccauuugcaa

SEQ ID NO: 1245653 - RNA, 23 nt, Human
auacagagaagucacagggcagu

SEQ ID NO: 1245654 - RNA, 13 nt, Human
auacagauauauu

SEQ ID NO: 1245655 - RNA, 14 nt, Human
auacagauauauuu

SEQ ID NO: 1245656 - RNA, 17 nt, Human
auacagaucaucuugga

SEQ ID NO: 1245657 - RNA, 18 nt, Human
auacagauauauuuucuu

SEQ ID NO: 1245658 - RNA, 13 nt, Human
auacaggaaacag

SEQ ID NO: 1245659 - RNA, 14 nt, Human
auacaggaaacagu

SEQ ID NO: 1245660 - RNA, 15 nt, Human
auacaggaaacaguu

SEQ ID NO: 1245661 - RNA, 22 nt, Human
auacauguaauucuaccaaggu

SEQ ID NO: 1245662 - RNA, 22 nt, Human
auacaugcuaagagaaguagaa

SEQ ID NO: 1245663 - RNA, 18 nt, Human
auacaugcuaagagaagu

SEQ ID NO: 1245664 - RNA, 18 nt, Human
auacauagggauaugcgu

SEQ ID NO: 1245665 - RNA, 17 nt, Human
auacauacagaauuacu

SEQ ID NO: 1245666 - RNA, 12 nt, Human
auacauacagaa

SEQ ID NO: 1245667 - RNA, 15 nt, Human
auacauacuaugaaa

SEQ ID NO: 1245668 - RNA, 22 nt, Human
uuauaaacuuuuuucuuacugu

SEQ ID NO: 1245669 - RNA, 19 nt, Human
uuauaaauacugcaaauca

SEQ ID NO: 1245670 - RNA, 15 nt, Human
uuauaaauauauuua

SEQ ID NO: 1245671 - RNA, 16 nt, Human
uuauaaacuuuuuucu

SEQ ID NO: 1245672 - RNA, 12 nt, Human
uuauaaacuuuu

SEQ ID NO: 1245673 - RNA, 14 nt, Human
auacagagaaguca

SEQ ID NO: 1245674 - RNA, 15 nt, Human
auacagagaagucac

SEQ ID NO: 1245675 - RNA, 14 nt, Human
auacaaguuucauc

SEQ ID NO: 1245676 - RNA, 13 nt, Human
auacaaguuucau

SEQ ID NO: 1245677 - RNA, 12 nt, Human
auacaagacugc

SEQ ID NO: 1245678 - RNA, 14 nt, Human
auacagaacucuuu

SEQ ID NO: 1245679 - RNA, 15 nt, Human
auacagaacucuuuc

SEQ ID NO: 1245680 - RNA, 16 nt, Human
auacagaacucuuuca

SEQ ID NO: 1245681 - RNA, 18 nt, Human
auacagaacucuuucaaa

SEQ ID NO: 1245682 - RNA, 20 nt, Human
auacagaacucuuucaaaac

SEQ ID NO: 1245683 - RNA, 23 nt, Human
auacagaacucuuucaaaaccuu

SEQ ID NO: 1245684 - RNA, 20 nt, Human
auacagaauuacuguaacug

SEQ ID NO: 1245685 - RNA, 18 nt, Human
auacgugggcauucaaau

SEQ ID NO: 1245686 - RNA, 19 nt, Human
auacgugggcauucaaaug

SEQ ID NO: 1245687 - RNA, 14 nt, Human
auacgcucagcuca

SEQ ID NO: 1245688 - RNA, 21 nt, Human
auacgcucagcucauccaugc

SEQ ID NO: 1245689 - RNA, 23 nt, Human
auacgcucagcucauccaugccu

SEQ ID NO: 1245690 - RNA, 21 nt, Human
auacgcuggcaacacagaggc

SEQ ID NO: 1245691 - RNA, 13 nt, Human
auacggugggggu

SEQ ID NO: 1245692 - RNA, 16 nt, Human
auacgagagcagaggu

SEQ ID NO: 1245693 - RNA, 17 nt, Human
auacgagagcagagguc

SEQ ID NO: 1245694 - RNA, 20 nt, Human
auacgagagcagaggucucc

SEQ ID NO: 1245695 - RNA, 19 nt, Human
auacgagagcagaggucuc

SEQ ID NO: 1245696 - RNA, 17 nt, Human
auaccacgcuagggcug

SEQ ID NO: 1245697 - RNA, 14 nt, Human
auaccacucuguaa

SEQ ID NO: 1245698 - RNA, 15 nt, Human
auaccacucuguaau

SEQ ID NO: 1245699 - RNA, 17 nt, Human
auaccacucuguaauug

SEQ ID NO: 1245700 - RNA, 18 nt, Human
auaccacucuguaauugc

SEQ ID NO: 1245701 - RNA, 19 nt, Human
auaccacucuguaauugca

SEQ ID NO: 1245702 - RNA, 14 nt, Human
auacgaaauaauug

SEQ ID NO: 1245703 - RNA, 15 nt, Human
auacgaaauaauugu

SEQ ID NO: 1245704 - RNA, 18 nt, Human
auacgaaauaauuguugu

SEQ ID NO: 1245705 - RNA, 19 nt, Human
auacgaaauaauuguuguu

SEQ ID NO: 1245706 - RNA, 21 nt, Human
auacgaaauaauuguuguucu

SEQ ID NO: 1245707 - RNA, 16 nt, Human
auacgacaguacacug

SEQ ID NO: 1245708 - RNA, 19 nt, Human
uuauauuugaaauauugac

SEQ ID NO: 1245709 - RNA, 21 nt, Human
auacuauuaaaaagguuuaca

SEQ ID NO: 1245710 - RNA, 15 nt, Human
uuauauuuugcaguu

SEQ ID NO: 1245711 - RNA, 15 nt, Human
uuaucaaaacuuucu

SEQ ID NO: 1245712 - RNA, 19 nt, Human
uuaucacacaaagcagaau

SEQ ID NO: 1245713 - RNA, 13 nt, Human
uuaucacacaaag

SEQ ID NO: 1245714 - RNA, 14 nt, Human
auacuauaguacca

SEQ ID NO: 1245715 - RNA, 14 nt, Human
auacuauauuuaug

SEQ ID NO: 1245716 - RNA, 19 nt, Human
auacuaaaaagaagugcug

SEQ ID NO: 1245717 - RNA, 21 nt, Human
auacuagggagccauuugaga

SEQ ID NO: 1245718 - RNA, 16 nt, Human
auacuaugaaauaugu

SEQ ID NO: 1245719 - RNA, 15 nt, Human
auacuauauuuuagg

SEQ ID NO: 1245720 - RNA, 19 nt, Human
auacuauguggaugugaca

SEQ ID NO: 1245721 - RNA, 23 nt, Human
auacuauguggaugugacagugg

SEQ ID NO: 1245722 - RNA, 22 nt, Human
auacuauuaaaaagguuuacag

SEQ ID NO: 1245723 - RNA, 15 nt, Human
auacgguggggguag

SEQ ID NO: 1245724 - RNA, 13 nt, Human
auacuaaaaagaa

SEQ ID NO: 1245725 - RNA, 17 nt, Human
auacuaaaaagaagugc

SEQ ID NO: 1245726 - RNA, 16 nt, Human
aguggggaaugaagau

SEQ ID NO: 1245727 - RNA, 16 nt, Human
agugggcuugauucug

SEQ ID NO: 1245728 - RNA, 22 nt, Human
agugggcuugauucugcaguaa

SEQ ID NO: 1245729 - RNA, 15 nt, Human
aguggggacagagca

SEQ ID NO: 1245730 - RNA, 14 nt, Human
aguggggaggggcu

SEQ ID NO: 1245731 - RNA, 21 nt, Human
aguggcagcccagccagcguc

SEQ ID NO: 1245732 - RNA, 12 nt, Human
aguggggguggg

SEQ ID NO: 1245733 - RNA, 16 nt, Human
aguggggguggggggu

SEQ ID NO: 1245734 - RNA, 19 nt, Human
aguggggguggggguaggg

SEQ ID NO: 1245735 - RNA, 18 nt, Human
agugggguuaucucugug

SEQ ID NO: 1245736 - RNA, 19 nt, Human
agugggguuaucucugugu

SEQ ID NO: 1245737 - RNA, 20 nt, Human
agugggguggugucagaccc

SEQ ID NO: 1245738 - RNA, 20 nt, Human
agugggguuaucucuguguu

SEQ ID NO: 1245739 - RNA, 13 nt, Human
aguggacucaggg

SEQ ID NO: 1245740 - RNA, 16 nt, Human
aguggacucagggcag

SEQ ID NO: 1245741 - RNA, 17 nt, Human
aguggauggaaggggcu

SEQ ID NO: 1245742 - RNA, 16 nt, Human
aguggaugcugggucc

SEQ ID NO: 1245743 - RNA, 22 nt, Human
aguggacuggccucaaagcaag

SEQ ID NO: 1245744 - RNA, 13 nt, Human
aguggcagcccag

SEQ ID NO: 1245745 - RNA, 14 nt, Human
aguggcagcccagc

SEQ ID NO: 1245746 - RNA, 15 nt, Human
aguggcagcccagcc

SEQ ID NO: 1245747 - RNA, 16 nt, Human
aguggcagcccagcca

SEQ ID NO: 1245748 - RNA, 17 nt, Human
aguggcagcccagccag

SEQ ID NO: 1245749 - RNA, 20 nt, Human
aguggcagcccagccagcgu

SEQ ID NO: 1245750 - RNA, 18 nt, Human
uguuacaaauuguagaag

SEQ ID NO: 1245751 - RNA, 17 nt, Human
uguuacaaauuguagaa

SEQ ID NO: 1245752 - RNA, 13 nt, Human
uguuaauauugau

SEQ ID NO: 1245753 - RNA, 18 nt, Human
uguuacacuuuuuggaag

SEQ ID NO: 1245754 - RNA, 22 nt, Human
uguuaaguugauggugaugaaa

SEQ ID NO: 1245755 - RNA, 17 nt, Human
uguuaaguuauagugaa

SEQ ID NO: 1245756 - RNA, 21 nt, Human
uguuaaguuauagugaauacu

SEQ ID NO: 1245757 - RNA, 16 nt, Human
uguuaauaaucucaca

SEQ ID NO: 1245758 - RNA, 19 nt, Human
uguuaauauugauuuauua

SEQ ID NO: 1245759 - RNA, 23 nt, Human
uguguuaccugaaaacacugugc

SEQ ID NO: 1245760 - RNA, 23 nt, Human
uguguuacuaaaaaaaagaugaa

SEQ ID NO: 1245761 - RNA, 16 nt, Human
uguuaacugagugccu

SEQ ID NO: 1245762 - RNA, 22 nt, Human
uguuaacugagugccuuuuggu

SEQ ID NO: 1245763 - RNA, 12 nt, Human
uguuaacugaau

SEQ ID NO: 1245764 - RNA, 14 nt, Human
uguuaacugaauac

SEQ ID NO: 1245765 - RNA, 15 nt, Human
uguuaacugaauacc

SEQ ID NO: 1245766 - RNA, 17 nt, Human
uguuaacugaauaccac

SEQ ID NO: 1245767 - RNA, 18 nt, Human
uguuaacugaauaccacu

SEQ ID NO: 1245768 - RNA, 22 nt, Human
uguuaacugaauaccacucugu

SEQ ID NO: 1245769 - RNA, 15 nt, Human
uguuaagacuugaca

SEQ ID NO: 1245770 - RNA, 17 nt, Human
uguuaagacuugacagu

SEQ ID NO: 1245771 - RNA, 20 nt, Human
uguuaagacuugacagugga

SEQ ID NO: 1245772 - RNA, 17 nt, Human
uguguguugauacuguu

SEQ ID NO: 1245773 - RNA, 19 nt, Human
uguguguugauacuguugc

SEQ ID NO: 1245774 - RNA, 20 nt, Human
uguguguugauacuguugca

SEQ ID NO: 1245775 - RNA, 21 nt, Human
uguguguugauacuguugcac

SEQ ID NO: 1245776 - RNA, 18 nt, Human
uguguguugucucuugag

SEQ ID NO: 1245777 - RNA, 15 nt, Human
ugugucuaagauucu

SEQ ID NO: 1245778 - RNA, 14 nt, Human
ugugucugcucagu

SEQ ID NO: 1245779 - RNA, 14 nt, Human
ugugucuuaauuau

SEQ ID NO: 1245780 - RNA, 16 nt, Human
ugugucuuaauuauua

SEQ ID NO: 1245781 - RNA, 16 nt, Human
uguguccaaaacugcc

SEQ ID NO: 1245782 - RNA, 17 nt, Human
uguguccacgacugucu

SEQ ID NO: 1245783 - RNA, 18 nt, Human
uguguccacgacugucuc

SEQ ID NO: 1245784 - RNA, 19 nt, Human
uguguccacgacugucucc

SEQ ID NO: 1245785 - RNA, 20 nt, Human
uguguccaugcgcucagggc

SEQ ID NO: 1245786 - RNA, 21 nt, Human
ugugucccagaagaugacuga

SEQ ID NO: 1245787 - RNA, 23 nt, Human
ugugucccagaagaugacugagg

SEQ ID NO: 1245788 - RNA, 19 nt, Human
ugugucccaugaucccugu

SEQ ID NO: 1245789 - RNA, 20 nt, Human
ugugucccaugaucccugug

SEQ ID NO: 1245790 - RNA, 16 nt, Human
ugugucccccucuguc

SEQ ID NO: 1245791 - RNA, 18 nt, Human
ugugucccccucugucca

SEQ ID NO: 1245792 - RNA, 21 nt, Human
ugugucccccucuguccaggc

SEQ ID NO: 1245793 - RNA, 17 nt, Human
uguguccugacacugca

SEQ ID NO: 1245794 - RNA, 14 nt, Human
uguguccugacacu

SEQ ID NO: 1245795 - RNA, 14 nt, Human
uguguccugguucc

SEQ ID NO: 1245796 - RNA, 20 nt, Human
uguggucacaggaaguagag

SEQ ID NO: 1245797 - RNA, 15 nt, Human
uguggucacagcugu

SEQ ID NO: 1245798 - RNA, 23 nt, Human
uguggucacagcggaggugugga

SEQ ID NO: 1245799 - RNA, 23 nt, Human
uguggucacagcuguauagcugc

SEQ ID NO: 1245800 - RNA, 18 nt, Human
ugugguuuucgagauuau

SEQ ID NO: 1245801 - RNA, 19 nt, Human
ugugguuuucuuuugccau

SEQ ID NO: 1245802 - RNA, 21 nt, Human
ugugguuuucuuuugccauga

SEQ ID NO: 1245803 - RNA, 20 nt, Human
ugugguuuucuuuugccaug

SEQ ID NO: 1245804 - RNA, 17 nt, Human
uguguccaaaaccgcca

SEQ ID NO: 1245805 - RNA, 19 nt, Human
uguguccaaaaccgccagc

SEQ ID NO: 1245806 - RNA, 21 nt, Human
uguguccaaaaccgccagcuc

SEQ ID NO: 1245807 - RNA, 23 nt, Human
uguguccaaaaccgccagcucug

SEQ ID NO: 1245808 - RNA, 16 nt, Human
agugcccuccaggaua

SEQ ID NO: 1245809 - RNA, 12 nt, Human
agugcccucucc

SEQ ID NO: 1245810 - RNA, 16 nt, Human
agugccauuaacaaau

SEQ ID NO: 1245811 - RNA, 23 nt, Human
agugccaguauuuuaaaauagcg

SEQ ID NO: 1245812 - RNA, 18 nt, Human
agugcccccacugaccag

SEQ ID NO: 1245813 - RNA, 20 nt, Human
uguggguuuuuauuuccuau

SEQ ID NO: 1245814 - RNA, 21 nt, Human
agugcccucucccacccucuu

SEQ ID NO: 1245815 - RNA, 22 nt, Human
agugcccucucccacccucuuc

SEQ ID NO: 1245816 - RNA, 13 nt, Human
agugcccucuccc

SEQ ID NO: 1245817 - RNA, 15 nt, Human
agugcccucucccac

SEQ ID NO: 1245818 - RNA, 18 nt, Human
agugcccucucccacccu

SEQ ID NO: 1245819 - RNA, 19 nt, Human
agugcccucucccacccuc

SEQ ID NO: 1245820 - RNA, 23 nt, Human
agugcccucucccacccucuucc

SEQ ID NO: 1245821 - RNA, 20 nt, Human
ugugguaagcaacauggcuu

SEQ ID NO: 1245822 - RNA, 21 nt, Human
ugugguacaagcauucugucu

SEQ ID NO: 1245823 - RNA, 21 nt, Human
ugugguaagcaacauggcuuu

SEQ ID NO: 1245824 - RNA, 12 nt, Human
ugugguacagag

SEQ ID NO: 1245825 - RNA, 13 nt, Human
ugugguacagaga

SEQ ID NO: 1245826 - RNA, 14 nt, Human
ugugguacagagaa

SEQ ID NO: 1245827 - RNA, 15 nt, Human
ugugguacagagaag

SEQ ID NO: 1245828 - RNA, 16 nt, Human
ugugguacagagaagc

SEQ ID NO: 1245829 - RNA, 17 nt, Human
ugugguacagagaagcc

SEQ ID NO: 1245830 - RNA, 18 nt, Human
ugugguacagagaagcca

SEQ ID NO: 1245831 - RNA, 19 nt, Human
ugugguacagagaagccag

SEQ ID NO: 1245832 - RNA, 20 nt, Human
ugugguacagagaagccagc

SEQ ID NO: 1245833 - RNA, 21 nt, Human
ugugguacagagaagccagcu

SEQ ID NO: 1245834 - RNA, 19 nt, Human
ugugguacaugguguuugu

SEQ ID NO: 1245835 - RNA, 23 nt, Human
ugugguacagagaagccagcuug

SEQ ID NO: 1245836 - RNA, 16 nt, Human
ugugguacaugguguu

SEQ ID NO: 1245837 - RNA, 20 nt, Human
uguuaugacuauguaaacua

SEQ ID NO: 1245838 - RNA, 18 nt, Human
uguuaugacuauguaaac

SEQ ID NO: 1245839 - RNA, 17 nt, Human
uguuaugacuauguaaa

SEQ ID NO: 1245840 - RNA, 16 nt, Human
uguuaugacuauguaa

SEQ ID NO: 1245841 - RNA, 10 nt, Human
uguuccaaau

SEQ ID NO: 1245842 - RNA, 22 nt, Human
uguuaucuucucaaguucuaag

SEQ ID NO: 1245843 - RNA, 23 nt, Human
uguuaucuucucaaguucuaaga

SEQ ID NO: 1245844 - RNA, 12 nt, Human
uguuccugcugc

SEQ ID NO: 1245845 - RNA, 13 nt, Human
uguuccugcugcu

SEQ ID NO: 1245846 - RNA, 16 nt, Human
uguuccugcugcuguc

SEQ ID NO: 1245847 - RNA, 17 nt, Human
uguuccaaauucaguuu

SEQ ID NO: 1245848 - RNA, 18 nt, Human
uguuccaaauucaguuuc

SEQ ID NO: 1245849 - RNA, 19 nt, Human
uguuccaaauucaguuuca

SEQ ID NO: 1245850 - RNA, 20 nt, Human
uguuccaaauucaguuucau

SEQ ID NO: 1245851 - RNA, 22 nt, Human
uguuccaaauucaguuucauaa

SEQ ID NO: 1245852 - RNA, 21 nt, Human
uguuccaaauucaguuucaua

SEQ ID NO: 1245853 - RNA, 19 nt, Human
uguuccuuaagucagaaca

SEQ ID NO: 1245854 - RNA, 22 nt, Human
uguuccuuccagugucauuucu

SEQ ID NO: 1245855 - RNA, 17 nt, Human
uguuccuucccugugcc

SEQ ID NO: 1245856 - RNA, 18 nt, Human
uguuccuucccugugccu

SEQ ID NO: 1245857 - RNA, 19 nt, Human
uguuccuuccgcuuggagc

SEQ ID NO: 1245858 - RNA, 20 nt, Human
uguucgcauggucacacacu

SEQ ID NO: 1245859 - RNA, 22 nt, Human
uguucgcauggucacacacuga

SEQ ID NO: 1245860 - RNA, 23 nt, Human
uguucgcauggucacacacugau

SEQ ID NO: 1245861 - RNA, 19 nt, Human
uguucgggccaaggaccug

SEQ ID NO: 1245862 - RNA, 22 nt, Human
uguucgggccaaggaccugaga

SEQ ID NO: 1245863 - RNA, 13 nt, Human
uguucuaaagcuc

SEQ ID NO: 1245864 - RNA, 14 nt, Human
uguucuaaagcucu

SEQ ID NO: 1245865 - RNA, 16 nt, Human
uguucuaaagcucuga

SEQ ID NO: 1245866 - RNA, 17 nt, Human
agugugaccaaaaguua

SEQ ID NO: 1245867 - RNA, 19 nt, Human
agugugaccaaaaguuaca

SEQ ID NO: 1245868 - RNA, 14 nt, Human
agugugaccaggca

SEQ ID NO: 1245869 - RNA, 22 nt, Human
agugugaccaaaaguuacaugu

SEQ ID NO: 1245870 - RNA, 15 nt, Human
agugugaggccaggg

SEQ ID NO: 1245871 - RNA, 15 nt, Human
agugguaucuugcag

SEQ ID NO: 1245872 - RNA, 23 nt, Human
aguggguuuuuuaguugaauuuu

SEQ ID NO: 1245873 - RNA, 19 nt, Human
agugguaaaaaggccuccu

SEQ ID NO: 1245874 - RNA, 17 nt, Human
agugguaagcuaugucc

SEQ ID NO: 1245875 - RNA, 18 nt, Human
agugugaggccagggcag

SEQ ID NO: 1245876 - RNA, 14 nt, Human
agugugccuucucu

SEQ ID NO: 1245877 - RNA, 17 nt, Human
agugugcggcugugugu

SEQ ID NO: 1245878 - RNA, 20 nt, Human
agugugcgugguggucccug

SEQ ID NO: 1245879 - RNA, 22 nt, Human
agugugcgugguggucccuggg

SEQ ID NO: 1245880 - RNA, 23 nt, Human
agugugcgugguggucccugggu

SEQ ID NO: 1245881 - RNA, 22 nt, Human
agugugcuucuguuaucaaaca

SEQ ID NO: 1245882 - RNA, 14 nt, Human
aguguggacucugg

SEQ ID NO: 1245883 - RNA, 15 nt, Human
aguguggaggccacu

SEQ ID NO: 1245884 - RNA, 19 nt, Human
aguguguguuuuucauaaa

SEQ ID NO: 1245885 - RNA, 18 nt, Human
aguguguguuuuucauaa

SEQ ID NO: 1245886 - RNA, 21 nt, Human
aguguuccccuuccacugagg

SEQ ID NO: 1245887 - RNA, 14 nt, Human
aguguucccuaucc

SEQ ID NO: 1245888 - RNA, 15 nt, Human
aguguucccuaucca

SEQ ID NO: 1245889 - RNA, 16 nt, Human
aguguuccccuuccac

SEQ ID NO: 1245890 - RNA, 16 nt, Human
aguguugaaaauguuc

SEQ ID NO: 1245891 - RNA, 17 nt, Human
aguguugaaaauguuca

SEQ ID NO: 1245892 - RNA, 23 nt, Human
aguguucccuauccaaucaaucu

SEQ ID NO: 1245893 - RNA, 22 nt, Human
aguguucccuauccaaucaauc

SEQ ID NO: 1245894 - RNA, 19 nt, Human
aguguucugucugacuuuc

SEQ ID NO: 1245895 - RNA, 23 nt, Human
aguuacuaucaugucaaacguga

SEQ ID NO: 1245896 - RNA, 11 nt, Human
aguuagcacca

SEQ ID NO: 1245897 - RNA, 18 nt, Human
aguuagcuaauaaaaagc

SEQ ID NO: 1245898 - RNA, 15 nt, Human
uguugcauagaauaa

SEQ ID NO: 1245899 - RNA, 19 nt, Human
uguugccaaauauguccug

SEQ ID NO: 1245900 - RNA, 20 nt, Human
uguugccaaauauguccugg

SEQ ID NO: 1245901 - RNA, 22 nt, Human
uguugccaaauauguccugggg

SEQ ID NO: 1245902 - RNA, 23 nt, Human
uguugccaaauauguccuggggu

SEQ ID NO: 1245903 - RNA, 18 nt, Human
uguugccaagcuccaagc

SEQ ID NO: 1245904 - RNA, 20 nt, Human
uguugccaagcuccaagccc

SEQ ID NO: 1245905 - RNA, 15 nt, Human
uguucuaagaaguga

SEQ ID NO: 1245906 - RNA, 18 nt, Human
uguucuaaagcucugaca

SEQ ID NO: 1245907 - RNA, 19 nt, Human
uguucuaaagcucugacau

SEQ ID NO: 1245908 - RNA, 16 nt, Human
uguucuaaccuuuaca

SEQ ID NO: 1245909 - RNA, 13 nt, Human
uguucuaagaugu

SEQ ID NO: 1245910 - RNA, 14 nt, Human
uguucuaagaugug

SEQ ID NO: 1245911 - RNA, 22 nt, Human
uguucuaagaugugauauucua

SEQ ID NO: 1245912 - RNA, 16 nt, Human
uguucuaagaugugau

SEQ ID NO: 1245913 - RNA, 12 nt, Human
uguucuaaggcu

SEQ ID NO: 1245914 - RNA, 14 nt, Human
uguucuaaggcucu

SEQ ID NO: 1245915 - RNA, 14 nt, Human
uguugcacgugugu

SEQ ID NO: 1245916 - RNA, 21 nt, Human
uguugcacguguguuuuucua

SEQ ID NO: 1245917 - RNA, 22 nt, Human
uguugcccacagcuguaugauu

SEQ ID NO: 1245918 - RNA, 17 nt, Human
uguugccaguuguccuc

SEQ ID NO: 1245919 - RNA, 19 nt, Human
uguugccaguuguccuccu

SEQ ID NO: 1245920 - RNA, 18 nt, Human
uguugccaguuguccucc

SEQ ID NO: 1245921 - RNA, 21 nt, Human
aguguguggcuuucagagccu

SEQ ID NO: 1245922 - RNA, 18 nt, Human
agugccagcaccugccca

SEQ ID NO: 1245923 - RNA, 18 nt, Human
agugccacuuaauguaug

SEQ ID NO: 1245924 - RNA, 20 nt, Human
agugccacuuaauguauguu

SEQ ID NO: 1245925 - RNA, 21 nt, Human
agugccacuuaauguauguua

SEQ ID NO: 1245926 - RNA, 22 nt, Human
agugcauuuaugagcucuucau

SEQ ID NO: 1245927 - RNA, 17 nt, Human
agugcacuaauguguaa

SEQ ID NO: 1245928 - RNA, 21 nt, Human
agugcacuaauguguaagaca

SEQ ID NO: 1245929 - RNA, 21 nt, Human
agugcacugaaagucacggcu

SEQ ID NO: 1245930 - RNA, 14 nt, Human
agugcaaggaccua

SEQ ID NO: 1245931 - RNA, 16 nt, Human
agugcacuugcuggaa

SEQ ID NO: 1245932 - RNA, 20 nt, Human
agugcacuugcuggaagacg

SEQ ID NO: 1245933 - RNA, 18 nt, Human
agugcacuugcuggaaga

SEQ ID NO: 1245934 - RNA, 20 nt, Human
agugcaauaaaucugaccca

SEQ ID NO: 1245935 - RNA, 21 nt, Human
agugcaauaaaucugacccag

SEQ ID NO: 1245936 - RNA, 22 nt, Human
agugcaauaaaucugacccagu

SEQ ID NO: 1245937 - RNA, 23 nt, Human
agugcaauaaaucugacccagug

SEQ ID NO: 1245938 - RNA, 23 nt, Human
agugcaguggcaucaucucagcu

SEQ ID NO: 1245939 - RNA, 23 nt, Human
agugcaguccugaucagagccgu

SEQ ID NO: 1245940 - RNA, 23 nt, Human
agugcaguggcgugaucucagcu

SEQ ID NO: 1245941 - RNA, 23 nt, Human
agugcaguggcgcgaucucagcu

SEQ ID NO: 1245942 - RNA, 17 nt, Human
agugcaguuauuugcuu

SEQ ID NO: 1245943 - RNA, 15 nt, Human
agugcaguuauuugc

SEQ ID NO: 1245944 - RNA, 23 nt, Human
agugcauagcuacuaaaaucagu

SEQ ID NO: 1245945 - RNA, 19 nt, Human
agugcagaaugcuccucca

SEQ ID NO: 1245946 - RNA, 14 nt, Human
agugcaaauuguca

SEQ ID NO: 1245947 - RNA, 21 nt, Human
agugauuuuuaugccaccuga

SEQ ID NO: 1245948 - RNA, 13 nt, Human
agugcaacacugg

SEQ ID NO: 1245949 - RNA, 16 nt, Human
agugcaacacuggucu

SEQ ID NO: 1245950 - RNA, 21 nt, Human
agugcaacacuggucugcugu

SEQ ID NO: 1245951 - RNA, 16 nt, Human
agugauuuuuaugcca

SEQ ID NO: 1245952 - RNA, 20 nt, Human
agugauuuuuaugccaccug

SEQ ID NO: 1245953 - RNA, 20 nt, Human
agugauagucuuuugcuuuu

SEQ ID NO: 1245954 - RNA, 21 nt, Human
agugauagucuuuugcuuuug

SEQ ID NO: 1245955 - RNA, 14 nt, Human
agugauauaaauca

SEQ ID NO: 1245956 - RNA, 15 nt, Human
agugaguuuuuuagu

SEQ ID NO: 1245957 - RNA, 19 nt, Human
agugaguuuuuuagugcgu

SEQ ID NO: 1245958 - RNA, 15 nt, Human
agugauagucuuuug

SEQ ID NO: 1245959 - RNA, 17 nt, Human
agugauagucuuuugcu

SEQ ID NO: 1245960 - RNA, 14 nt, Human
uguggauucuuuaa

SEQ ID NO: 1245961 - RNA, 21 nt, Human
ugugcucaggagcccugggag

SEQ ID NO: 1245962 - RNA, 19 nt, Human
ugugccuauugcuagagcu

SEQ ID NO: 1245963 - RNA, 21 nt, Human
ugugcucuccauucugcuccu

SEQ ID NO: 1245964 - RNA, 16 nt, Human
ugugauucaaucugua

SEQ ID NO: 1245965 - RNA, 20 nt, Human
ugugauucaaucuguaaacu

SEQ ID NO: 1245966 - RNA, 22 nt, Human
ugugauucaaucuguaaacugu

SEQ ID NO: 1245967 - RNA, 23 nt, Human
ugugauucagaaaauguucuguu

SEQ ID NO: 1245968 - RNA, 20 nt, Human
ugugauucagaaaauguucu

SEQ ID NO: 1245969 - RNA, 14 nt, Human
ugugauuggccugu

SEQ ID NO: 1245970 - RNA, 15 nt, Human
ugugauuggccugua

SEQ ID NO: 1245971 - RNA, 17 nt, Human
ugugauuggccuguaga

SEQ ID NO: 1245972 - RNA, 12 nt, Human
ugugcccucugg

SEQ ID NO: 1245973 - RNA, 13 nt, Human
ugugcccucuggg

SEQ ID NO: 1245974 - RNA, 14 nt, Human
ugugcccucugggc

SEQ ID NO: 1245975 - RNA, 15 nt, Human
ugugcccucugggcu

SEQ ID NO: 1245976 - RNA, 17 nt, Human
ugugcccucugggcucu

SEQ ID NO: 1245977 - RNA, 21 nt, Human
ugugcccucugggcucugagu

SEQ ID NO: 1245978 - RNA, 18 nt, Human
ugugcccucugggcucug

SEQ ID NO: 1245979 - RNA, 22 nt, Human
ugugccuauugcuagagcuccu

SEQ ID NO: 1245980 - RNA, 21 nt, Human
uguggaucaaauccagccugc

SEQ ID NO: 1245981 - RNA, 19 nt, Human
uguggaucaaccaucgcuu

SEQ ID NO: 1245982 - RNA, 20 nt, Human
uguggaucaaccaucgcuuu

SEQ ID NO: 1245983 - RNA, 17 nt, Human
uguggaucagagaugca

SEQ ID NO: 1245984 - RNA, 14 nt, Human
uguggaucagagau

SEQ ID NO: 1245985 - RNA, 19 nt, Human
ugugcugugcuauggugcu

SEQ ID NO: 1245986 - RNA, 12 nt, Human
ugugcugugugu

SEQ ID NO: 1245987 - RNA, 15 nt, Human
ugugcugugugugac

SEQ ID NO: 1245988 - RNA, 18 nt, Human
agugacuuuggcugcaug

SEQ ID NO: 1245989 - RNA, 17 nt, Human
agugacuucugagaucu

SEQ ID NO: 1245990 - RNA, 15 nt, Human
agugacuucugagau

SEQ ID NO: 1245991 - RNA, 16 nt, Human
agugacuuguguccca

SEQ ID NO: 1245992 - RNA, 18 nt, Human
agugacuugugucccaug

SEQ ID NO: 1245993 - RNA, 18 nt, Human
agugacucuauauagcug

SEQ ID NO: 1245994 - RNA, 12 nt, Human
agugacuucuga

SEQ ID NO: 1245995 - RNA, 13 nt, Human
agugacuucugag

SEQ ID NO: 1245996 - RNA, 14 nt, Human
agugacuucugaga

SEQ ID NO: 1245997 - RNA, 12 nt, Human
agugagaggcug

SEQ ID NO: 1245998 - RNA, 11 nt, Human
agugagccuga

SEQ ID NO: 1245999 - RNA, 21 nt, Human
agugagccugaauuuuguugc

SEQ ID NO: 1246000 - RNA, 18 nt, Human
agucuuucacauuuaaau

SEQ ID NO: 1246001 - RNA, 21 nt, Human
agugaacaaauuuacagagac

SEQ ID NO: 1246002 - RNA, 16 nt, Human
agucuuucacauuuaa

SEQ ID NO: 1246003 - RNA, 23 nt, Human
agugaacaaauuuacagagacag

SEQ ID NO: 1246004 - RNA, 22 nt, Human
agugaacaaauuuacagagaca

SEQ ID NO: 1246005 - RNA, 18 nt, Human
agugaacuuaguccuguu

SEQ ID NO: 1246006 - RNA, 16 nt, Human
agugacuaauggcaug

SEQ ID NO: 1246007 - RNA, 17 nt, Human
agugacuaauggcauga

SEQ ID NO: 1246008 - RNA, 20 nt, Human
agucugaaccuauuucuuaa

SEQ ID NO: 1246009 - RNA, 15 nt, Human
agucugaacagcugu

SEQ ID NO: 1246010 - RNA, 16 nt, Human
agucugaacagcugua

SEQ ID NO: 1246011 - RNA, 18 nt, Human
agucugaacagcuguaau

SEQ ID NO: 1246012 - RNA, 21 nt, Human
agucucuucuccacuggaugg

SEQ ID NO: 1246013 - RNA, 19 nt, Human
agucucuucuccacuggau

SEQ ID NO: 1246014 - RNA, 20 nt, Human
agucucgucucuuuuacccu

SEQ ID NO: 1246015 - RNA, 14 nt, Human
agucucuaauucua

SEQ ID NO: 1246016 - RNA, 21 nt, Human
ugugagaagugaaugcuggga

SEQ ID NO: 1246017 - RNA, 22 nt, Human
ugugagaagugaaugcugggac

SEQ ID NO: 1246018 - RNA, 23 nt, Human
ugugagaagugaaugcugggacu

SEQ ID NO: 1246019 - RNA, 24 nt, Human
ugugagaagugaaugcugggacuc

SEQ ID NO: 1246020 - RNA, 18 nt, Human
ugugacuucagcucuguu

SEQ ID NO: 1246021 - RNA, 19 nt, Human
ugugacuucagcucuguuu

SEQ ID NO: 1246022 - RNA, 17 nt, Human
ugugacuggcuaaagcu

SEQ ID NO: 1246023 - RNA, 20 nt, Human
ugugacuggcuaaagcucga

SEQ ID NO: 1246024 - RNA, 18 nt, Human
ugugacuggcuaaagcuc

SEQ ID NO: 1246025 - RNA, 23 nt, Human
ugugacuucuauuuuaaagacaa

SEQ ID NO: 1246026 - RNA, 16 nt, Human
ugugacuuuugugaaa

SEQ ID NO: 1246027 - RNA, 13 nt, Human
ugucucaugccag

SEQ ID NO: 1246028 - RNA, 15 nt, Human
ugucuccauggcccu

SEQ ID NO: 1246029 - RNA, 13 nt, Human
ugucuccuaagca

SEQ ID NO: 1246030 - RNA, 16 nt, Human
ugucuccuaagcaccu

SEQ ID NO: 1246031 - RNA, 21 nt, Human
ugucuccuaagcaccuguaau

SEQ ID NO: 1246032 - RNA, 16 nt, Human
ugucuccuaccucugc

SEQ ID NO: 1246033 - RNA, 14 nt, Human
agucaccagagacu

SEQ ID NO: 1246034 - RNA, 17 nt, Human
aguauuuuaaaauagcg

SEQ ID NO: 1246035 - RNA, 20 nt, Human
aguauuuuagugaacuugaa

SEQ ID NO: 1246036 - RNA, 18 nt, Human
aguauuuuagugaacuug

SEQ ID NO: 1246037 - RNA, 13 nt, Human
aguauuuucuaaa

SEQ ID NO: 1246038 - RNA, 21 nt, Human
aguauuuuccuguugucaaga

SEQ ID NO: 1246039 - RNA, 17 nt, Human
aguauuuugcuggaaua

SEQ ID NO: 1246040 - RNA, 19 nt, Human
aguauuuagaagccaacua

SEQ ID NO: 1246041 - RNA, 16 nt, Human
aguauuucaaauugga

SEQ ID NO: 1246042 - RNA, 20 nt, Human
aguauuucaaauuggagcuu

SEQ ID NO: 1246043 - RNA, 13 nt, Human
aguauuuguuaau

SEQ ID NO: 1246044 - RNA, 14 nt, Human
aguauuuguuaauu

SEQ ID NO: 1246045 - RNA, 15 nt, Human
aguauuuguuaauuu

SEQ ID NO: 1246046 - RNA, 18 nt, Human
aguauuuguuaauuuaga

SEQ ID NO: 1246047 - RNA, 16 nt, Human
aguauuuuaaaauagc

SEQ ID NO: 1246048 - RNA, 19 nt, Human
uguauauuacaaugaucac

SEQ ID NO: 1246049 - RNA, 19 nt, Human
uguauauuaagguguggcu

SEQ ID NO: 1246050 - RNA, 13 nt, Human
uguauauuguaau

SEQ ID NO: 1246051 - RNA, 14 nt, Human
uguauauuguaauu

SEQ ID NO: 1246052 - RNA, 17 nt, Human
uguauauuguaauuuaa

SEQ ID NO: 1246053 - RNA, 20 nt, Human
uguauauuguguuuguguau

SEQ ID NO: 1246054 - RNA, 19 nt, Human
aguauuaaaauguaugcau

SEQ ID NO: 1246055 - RNA, 13 nt, Human
aguauuaaaaugu

SEQ ID NO: 1246056 - RNA, 14 nt, Human
aguauuaaaaugua

SEQ ID NO: 1246057 - RNA, 15 nt, Human
aguauuaaaauguau

SEQ ID NO: 1246058 - RNA, 18 nt, Human
aguauuaaaauguaugca

SEQ ID NO: 1246059 - RNA, 20 nt, Human
aguauuccagaccugaagaa

SEQ ID NO: 1246060 - RNA, 19 nt, Human
aguauaagacuacugaauc

SEQ ID NO: 1246061 - RNA, 15 nt, Human
aguauaccugauuuu

SEQ ID NO: 1246062 - RNA, 23 nt, Human
aguauacuagggagccauuugag

SEQ ID NO: 1246063 - RNA, 24 nt, Human
ugucagauccaggagcuccagugu

SEQ ID NO: 1246064 - RNA, 18 nt, Human
ugucagauccaggagcuc

SEQ ID NO: 1246065 - RNA, 20 nt, Human
ugucagauccaggagcucca

SEQ ID NO: 1246066 - RNA, 21 nt, Human
ugucagauccaggagcuccag

SEQ ID NO: 1246067 - RNA, 23 nt, Human
ugucauuugcuggagcucugccc

SEQ ID NO: 1246068 - RNA, 16 nt, Human
ugucagcagggacugu

SEQ ID NO: 1246069 - RNA, 16 nt, Human
uguccaaaacugccuc

SEQ ID NO: 1246070 - RNA, 11 nt, Human
uguccaaagag

SEQ ID NO: 1246071 - RNA, 17 nt, Human
uguccaaagaggcugcc

SEQ ID NO: 1246072 - RNA, 19 nt, Human
uguccaaagaggcugcccc

SEQ ID NO: 1246073 - RNA, 20 nt, Human
uguccaaagaggcugccccu

SEQ ID NO: 1246074 - RNA, 21 nt, Human
uguccaaagaggcugccccuc

SEQ ID NO: 1246075 - RNA, 14 nt, Human
uguccaacuggccc

SEQ ID NO: 1246076 - RNA, 19 nt, Human
uguccaacuggcccuauuu

SEQ ID NO: 1246077 - RNA, 14 nt, Human
uguccaauccuaug

SEQ ID NO: 1246078 - RNA, 22 nt, Human
uguccagacagagcccugugag

SEQ ID NO: 1246079 - RNA, 21 nt, Human
uguccagacagagcccuguga

SEQ ID NO: 1246080 - RNA, 17 nt, Human
ugucccgauuguaacuc

SEQ ID NO: 1246081 - RNA, 16 nt, Human
ugucccgauuguaacu

SEQ ID NO: 1246082 - RNA, 11 nt, Human
uguccagcucc

SEQ ID NO: 1246083 - RNA, 15 nt, Human
agucuauuuacggaa

SEQ ID NO: 1246084 - RNA, 20 nt, Human
agucuauuuacggaacucaa

SEQ ID NO: 1246085 - RNA, 22 nt, Human
agucuaucaaccccagacacug

SEQ ID NO: 1246086 - RNA, 23 nt, Human
agucuaucaaccccagacacugg

SEQ ID NO: 1246087 - RNA, 18 nt, Human
agucuaucaaucaacuua

SEQ ID NO: 1246088 - RNA, 11 nt, Human
agucuaccaau

SEQ ID NO: 1246089 - RNA, 21 nt, Human
agucuaccaaccuguucaagu

SEQ ID NO: 1246090 - RNA, 19 nt, Human
agucucacuuugucgccca

SEQ ID NO: 1246091 - RNA, 19 nt, Human
agucucagaaugucauuuu

SEQ ID NO: 1246092 - RNA, 11 nt, Human
agucucagcua

SEQ ID NO: 1246093 - RNA, 18 nt, Human
agucucagcuaagcucac

SEQ ID NO: 1246094 - RNA, 13 nt, Human
agucucagcuaag

SEQ ID NO: 1246095 - RNA, 11 nt, Human
ugucucaucca

SEQ ID NO: 1246096 - RNA, 16 nt, Human
ugucucauccaucauc

SEQ ID NO: 1246097 - RNA, 17 nt, Human
ugucucauccaucauca

SEQ ID NO: 1246098 - RNA, 21 nt, Human
ugucucauccaucaucaugug

SEQ ID NO: 1246099 - RNA, 21 nt, Human
ugucucaugccaguaacaggc

SEQ ID NO: 1246100 - RNA, 12 nt, Human
agucggauuaga

SEQ ID NO: 1246101 - RNA, 18 nt, Human
agucguacagaaagcugc

SEQ ID NO: 1246102 - RNA, 17 nt, Human
agucguccuuacuccug

SEQ ID NO: 1246103 - RNA, 19 nt, Human
agucguccuuacuccugug

SEQ ID NO: 1246104 - RNA, 20 nt, Human
agucguccuuacuccugugg

SEQ ID NO: 1246105 - RNA, 22 nt, Human
agucguccuuacuccuguggga

SEQ ID NO: 1246106 - RNA, 21 nt, Human
agucguccuuacuccuguggg

SEQ ID NO: 1246107 - RNA, 23 nt, Human
agucuaaagauggaguuucuaag

SEQ ID NO: 1246108 - RNA, 21 nt, Human
agucuaaagcugguuuaaugu

SEQ ID NO: 1246109 - RNA, 20 nt, Human
agucuaaagcugguuuaaug

SEQ ID NO: 1246110 - RNA, 16 nt, Human
agucccccugccccag

SEQ ID NO: 1246111 - RNA, 16 nt, Human
aguccccucaccuccu

SEQ ID NO: 1246112 - RNA, 20 nt, Human
aguccuacaagcuaaaauua

SEQ ID NO: 1246113 - RNA, 15 nt, Human
aguccuaucugggcu

SEQ ID NO: 1246114 - RNA, 16 nt, Human
aguccuaucugggcuu

SEQ ID NO: 1246115 - RNA, 19 nt, Human
aguccuaucugggcuuccu

SEQ ID NO: 1246116 - RNA, 20 nt, Human
aguccuaucugggcuuccug

SEQ ID NO: 1246117 - RNA, 22 nt, Human
aguccuaucugggcuuccugga

SEQ ID NO: 1246118 - RNA, 23 nt, Human
aguccuaucugggcuuccuggag

SEQ ID NO: 1246119 - RNA, 24 nt, Human
aguccuaucugggcuuccuggagc

SEQ ID NO: 1246120 - RNA, 14 nt, Human
agucaggaaagaga

SEQ ID NO: 1246121 - RNA, 15 nt, Human
agucaggaaagagaa

SEQ ID NO: 1246122 - RNA, 22 nt, Human
agucagaacagcagacucagcu

SEQ ID NO: 1246123 - RNA, 12 nt, Human
agucagaacagc

SEQ ID NO: 1246124 - RNA, 14 nt, Human
agucagaacagcag

SEQ ID NO: 1246125 - RNA, 15 nt, Human
agucagaacagcaga

SEQ ID NO: 1246126 - RNA, 17 nt, Human
agucagaacagcagacu

SEQ ID NO: 1246127 - RNA, 12 nt, Human
agucacugcucu

SEQ ID NO: 1246128 - RNA, 23 nt, Human
agucacuggucuguuugcauuug

SEQ ID NO: 1246129 - RNA, 14 nt, Human
ugucgccucugcau

SEQ ID NO: 1246130 - RNA, 16 nt, Human
ugucccuuaaacaaaa

SEQ ID NO: 1246131 - RNA, 14 nt, Human
ugucgcucaugugu

SEQ ID NO: 1246132 - RNA, 15 nt, Human
ugucgcucaugugug

SEQ ID NO: 1246133 - RNA, 16 nt, Human
ugucgcucaugugugc

SEQ ID NO: 1246134 - RNA, 22 nt, Human
ugucgcucaugugugcaacagg

SEQ ID NO: 1246135 - RNA, 15 nt, Human
ugucgcugcuucgug

SEQ ID NO: 1246136 - RNA, 12 nt, Human
ugucgcugcuuc

SEQ ID NO: 1246137 - RNA, 17 nt, Human
agucccaggcugagccu

SEQ ID NO: 1246138 - RNA, 18 nt, Human
agucccaggcugagccuc

SEQ ID NO: 1246139 - RNA, 19 nt, Human
agucccaggcugagccuca

SEQ ID NO: 1246140 - RNA, 20 nt, Human
agucccaggcugagccucag

SEQ ID NO: 1246141 - RNA, 18 nt, Human
aguccccauugaggcuug

SEQ ID NO: 1246142 - RNA, 14 nt, Human
agucccaagcggug

SEQ ID NO: 1246143 - RNA, 19 nt, Human
agucccaagcggugucucu

SEQ ID NO: 1246144 - RNA, 20 nt, Human
agucccaagcggugucucuc

SEQ ID NO: 1246145 - RNA, 13 nt, Human
agucauaauugca

SEQ ID NO: 1246146 - RNA, 17 nt, Human
agucauaauugcauuga

SEQ ID NO: 1246147 - RNA, 14 nt, Human
agucauaccaauga

SEQ ID NO: 1246148 - RNA, 17 nt, Human
agucauaccaaugaaaa

SEQ ID NO: 1246149 - RNA, 23 nt, Human
agucauaccaaugaaaaaaugua

SEQ ID NO: 1246150 - RNA, 16 nt, Human
agucauagguuaauau

SEQ ID NO: 1246151 - RNA, 22 nt, Human
agucauagguuaauauuuaaga

SEQ ID NO: 1246152 - RNA, 20 nt, Human
agucauauauaucacccaga

SEQ ID NO: 1246153 - RNA, 23 nt, Human
aguaccaguaggggcuuauaaua

SEQ ID NO: 1246154 - RNA, 14 nt, Human
aguaccagacuaga

SEQ ID NO: 1246155 - RNA, 20 nt, Human
aguagauugcagaaaauucu

SEQ ID NO: 1246156 - RNA, 15 nt, Human
aguaccaaucauuuu

SEQ ID NO: 1246157 - RNA, 16 nt, Human
aguaccaaucauuuua

SEQ ID NO: 1246158 - RNA, 15 nt, Human
aguagauuuuccaaa

SEQ ID NO: 1246159 - RNA, 21 nt, Human
aguagcaauuauggaaaaaaa

SEQ ID NO: 1246160 - RNA, 23 nt, Human
aguagcacaaguuauuuaaaucu

SEQ ID NO: 1246161 - RNA, 14 nt, Human
aguagcagugauug

SEQ ID NO: 1246162 - RNA, 22 nt, Human
aguagcagugauugucuuaaua

SEQ ID NO: 1246163 - RNA, 22 nt, Human
uguagggagggcggcaggggcc

SEQ ID NO: 1246164 - RNA, 21 nt, Human
uguaggggaggggcuccuuuc

SEQ ID NO: 1246165 - RNA, 23 nt, Human
uguaggggaggggcuccuuucca

SEQ ID NO: 1246166 - RNA, 13 nt, Human
uguaggguuucua

SEQ ID NO: 1246167 - RNA, 22 nt, Human
uguaggggaggggcuccuuucc

SEQ ID NO: 1246168 - RNA, 20 nt, Human
uguagugauuuuuaugccac

SEQ ID NO: 1246169 - RNA, 21 nt, Human
uguagugauuuuuaugccacc

SEQ ID NO: 1246170 - RNA, 17 nt, Human
uguaguguuggagaaga

SEQ ID NO: 1246171 - RNA, 18 nt, Human
uguaguguuggagaagaa

SEQ ID NO: 1246172 - RNA, 19 nt, Human
uguaguguuggagaagaac

SEQ ID NO: 1246173 - RNA, 15 nt, Human
uguauaguuaacaca

SEQ ID NO: 1246174 - RNA, 16 nt, Human
uguauaguuaacacac

SEQ ID NO: 1246175 - RNA, 17 nt, Human
uguauaguuaacacacu

SEQ ID NO: 1246176 - RNA, 14 nt, Human
uguauaguucacgu

SEQ ID NO: 1246177 - RNA, 15 nt, Human
uguauauuacaauga

SEQ ID NO: 1246178 - RNA, 14 nt, Human
uguauauuacaaug

SEQ ID NO: 1246179 - RNA, 16 nt, Human
uguauauuaaggugug

SEQ ID NO: 1246180 - RNA, 20 nt, Human
uguauauauuauuauaaucu

SEQ ID NO: 1246181 - RNA, 14 nt, Human
uguauauauuauua

SEQ ID NO: 1246182 - RNA, 12 nt, Human
uguauauacuuu

SEQ ID NO: 1246183 - RNA, 13 nt, Human
uguauauacuuuu

SEQ ID NO: 1246184 - RNA, 15 nt, Human
uguauauauauauau

SEQ ID NO: 1246185 - RNA, 14 nt, Human
aguaaaaaggcuaa

SEQ ID NO: 1246186 - RNA, 16 nt, Human
agguuuuuuuucaguu

SEQ ID NO: 1246187 - RNA, 23 nt, Human
aguaaaaacaaagaaauuaugug

SEQ ID NO: 1246188 - RNA, 16 nt, Human
aguaaaaacaaagaaa

SEQ ID NO: 1246189 - RNA, 17 nt, Human
agguuuuuuuucaguug

SEQ ID NO: 1246190 - RNA, 20 nt, Human
uguacauagugcuaacauga

SEQ ID NO: 1246191 - RNA, 16 nt, Human
uguacaugagaaggaa

SEQ ID NO: 1246192 - RNA, 22 nt, Human
uguacaugaagaagcuaaaucc

SEQ ID NO: 1246193 - RNA, 23 nt, Human
aguaauaccucuaauaguauaaa

SEQ ID NO: 1246194 - RNA, 22 nt, Human
aguaauaccucuaauaguauaa

SEQ ID NO: 1246195 - RNA, 21 nt, Human
aguaauaccucuaauaguaua

SEQ ID NO: 1246196 - RNA, 20 nt, Human
aguaauaccucuaauaguau

SEQ ID NO: 1246197 - RNA, 13 nt, Human
aguaauacaaacu

SEQ ID NO: 1246198 - RNA, 22 nt, Human
aguaauaaaauucaacaaacau

SEQ ID NO: 1246199 - RNA, 15 nt, Human
aguaauaaaauucaa

SEQ ID NO: 1246200 - RNA, 23 nt, Human
aguaauaaaauucaacaaacauu

SEQ ID NO: 1246201 - RNA, 13 nt, Human
aguaaugauaacu

SEQ ID NO: 1246202 - RNA, 12 nt, Human
aguaauccugua

SEQ ID NO: 1246203 - RNA, 19 nt, Human
aguaaucuaauauggccac

SEQ ID NO: 1246204 - RNA, 13 nt, Human
aguaaucugcauu

SEQ ID NO: 1246205 - RNA, 23 nt, Human
aguaaucugcauuauuggaauau

SEQ ID NO: 1246206 - RNA, 12 nt, Human
aguaauuggaaa

SEQ ID NO: 1246207 - RNA, 13 nt, Human
aguaauuggaaag

SEQ ID NO: 1246208 - RNA, 18 nt, Human
aguaauugacaugugcca

SEQ ID NO: 1246209 - RNA, 20 nt, Human
aguaauugacaugugccagg

SEQ ID NO: 1246210 - RNA, 12 nt, Human
aguaauuuagaa

SEQ ID NO: 1246211 - RNA, 14 nt, Human
aguaauuuagaaau

SEQ ID NO: 1246212 - RNA, 23 nt, Human
aguaauuuagaaaucauuuugca

SEQ ID NO: 1246213 - RNA, 23 nt, Human
aguaauuguguuuacauuuuaug

SEQ ID NO: 1246214 - RNA, 22 nt, Human
aguaauuguguuuacauuuuau

SEQ ID NO: 1246215 - RNA, 21 nt, Human
aguaauuguguuuacauuuua

SEQ ID NO: 1246216 - RNA, 18 nt, Human
aguaauuguguuuacauu

SEQ ID NO: 1246217 - RNA, 16 nt, Human
aguaauuguguuuaca

SEQ ID NO: 1246218 - RNA, 22 nt, Human
aguaauugguccgaucuuugac

SEQ ID NO: 1246219 - RNA, 17 nt, Human
aguaauuuagaaaucau

SEQ ID NO: 1246220 - RNA, 12 nt, Human
aguacagagaag

SEQ ID NO: 1246221 - RNA, 13 nt, Human
aguacagagaagc

SEQ ID NO: 1246222 - RNA, 14 nt, Human
aguacagagaagcc

SEQ ID NO: 1246223 - RNA, 15 nt, Human
aguacagagaagcca

SEQ ID NO: 1246224 - RNA, 16 nt, Human
aguacagagaagccau

SEQ ID NO: 1246225 - RNA, 20 nt, Human
aguacagagaagccaucacc

SEQ ID NO: 1246226 - RNA, 17 nt, Human
aguacagagaagccauc

SEQ ID NO: 1246227 - RNA, 13 nt, Human
agguugaaaaaca

SEQ ID NO: 1246228 - RNA, 18 nt, Human
agguucuuguuggugcac

SEQ ID NO: 1246229 - RNA, 17 nt, Human
agguucuuguuggugca

SEQ ID NO: 1246230 - RNA, 18 nt, Human
agguggggagacugggcu

SEQ ID NO: 1246231 - RNA, 20 nt, Human
agguguagccacaccaggau

SEQ ID NO: 1246232 - RNA, 15 nt, Human
aggugucauacagau

SEQ ID NO: 1246233 - RNA, 21 nt, Human
aggugucauacagauuugcaa

SEQ ID NO: 1246234 - RNA, 11 nt, Human
aggugggagga

SEQ ID NO: 1246235 - RNA, 13 nt, Human
aggugggaggaug

SEQ ID NO: 1246236 - RNA, 20 nt, Human
aggugggaggaugugaauug

SEQ ID NO: 1246237 - RNA, 17 nt, Human
aggugcuaauuuguuuu

SEQ ID NO: 1246238 - RNA, 20 nt, Human
aggugcuaauuuguuuugga

SEQ ID NO: 1246239 - RNA, 23 nt, Human
aggugcuaauuuguuuuggauau

SEQ ID NO: 1246240 - RNA, 13 nt, Human
ugggcugcccugg

SEQ ID NO: 1246241 - RNA, 14 nt, Human
ugggcugcccuggu

SEQ ID NO: 1246242 - RNA, 15 nt, Human
ugggcugcccuggug

SEQ ID NO: 1246243 - RNA, 16 nt, Human
ugggcugcccuggugc

SEQ ID NO: 1246244 - RNA, 20 nt, Human
ugggcucugcaauuccccuc

SEQ ID NO: 1246245 - RNA, 22 nt, Human
ugggcucugcaauuccccucug

SEQ ID NO: 1246246 - RNA, 15 nt, Human
ugggcucugaugaaa

SEQ ID NO: 1246247 - RNA, 12 nt, Human
ugggcugaggga

SEQ ID NO: 1246248 - RNA, 16 nt, Human
ugggcugagggagccu

SEQ ID NO: 1246249 - RNA, 20 nt, Human
agguuucacuguguuggcca

SEQ ID NO: 1246250 - RNA, 17 nt, Human
agguuucaaagaugcug

SEQ ID NO: 1246251 - RNA, 22 nt, Human
agguuuaugacaguaauugugu

SEQ ID NO: 1246252 - RNA, 13 nt, Human
agguuucaaagau

SEQ ID NO: 1246253 - RNA, 14 nt, Human
agguuucaaagaug

SEQ ID NO: 1246254 - RNA, 19 nt, Human
agguuucugaguuccugca

SEQ ID NO: 1246255 - RNA, 21 nt, Human
agguuucugaguuccugcaug

SEQ ID NO: 1246256 - RNA, 14 nt, Human
uguaaggcucuaga

SEQ ID NO: 1246257 - RNA, 15 nt, Human
uguaaggcucuagau

SEQ ID NO: 1246258 - RNA, 18 nt, Human
uguaaggcucuagaucau

SEQ ID NO: 1246259 - RNA, 14 nt, Human
uguaaggcugugua

SEQ ID NO: 1246260 - RNA, 20 nt, Human
uguaaggcuguguaagauuu

SEQ ID NO: 1246261 - RNA, 21 nt, Human
uguaaggcuguguaagauuug

SEQ ID NO: 1246262 - RNA, 18 nt, Human
uguaagggccagaaauau

SEQ ID NO: 1246263 - RNA, 19 nt, Human
uguaauucagguuuuuccu

SEQ ID NO: 1246264 - RNA, 13 nt, Human
uguaauucuaaau

SEQ ID NO: 1246265 - RNA, 14 nt, Human
uguaauucuaaaug

SEQ ID NO: 1246266 - RNA, 15 nt, Human
uguaauucuaaauga

SEQ ID NO: 1246267 - RNA, 16 nt, Human
uguaauucuaaaugaa

SEQ ID NO: 1246268 - RNA, 17 nt, Human
uguaauugaauauuauu

SEQ ID NO: 1246269 - RNA, 19 nt, Human
uguaauugaauauuauucc

SEQ ID NO: 1246270 - RNA, 14 nt, Human
uguacauauaagug

SEQ ID NO: 1246271 - RNA, 21 nt, Human
uguacauagugcuaacaugaa

SEQ ID NO: 1246272 - RNA, 18 nt, Human
uguacauaguuauuuauu

SEQ ID NO: 1246273 - RNA, 19 nt, Human
uguacauagugcuaacaug

SEQ ID NO: 1246274 - RNA, 17 nt, Human
uguacauagugcuaaca

SEQ ID NO: 1246275 - RNA, 14 nt, Human
uguacauagugcua

SEQ ID NO: 1246276 - RNA, 17 nt, Human
uguacauaacugaaaau

SEQ ID NO: 1246277 - RNA, 18 nt, Human
uguacauaacugaaaaug

SEQ ID NO: 1246278 - RNA, 19 nt, Human
uguacauaacugaaaaugu

SEQ ID NO: 1246279 - RNA, 15 nt, Human
agguuggcucugcca

SEQ ID NO: 1246280 - RNA, 21 nt, Human
uguacauacccuggccgcccc

SEQ ID NO: 1246281 - RNA, 19 nt, Human
uguacaucuauuuuggauu

SEQ ID NO: 1246282 - RNA, 20 nt, Human
uguacaucuauuuuggauug

SEQ ID NO: 1246283 - RNA, 21 nt, Human
uguacaucuauuuuggauugu

SEQ ID NO: 1246284 - RNA, 23 nt, Human
uguacaucuauuuuggauuguau

SEQ ID NO: 1246285 - RNA, 22 nt, Human
uguacaaaaaaaucuuccaauu

SEQ ID NO: 1246286 - RNA, 13 nt, Human
uguacaaaauaaa

SEQ ID NO: 1246287 - RNA, 21 nt, Human
uguacaaaaaaaucuuccaau

SEQ ID NO: 1246288 - RNA, 17 nt, Human
uguacaaaaaaaucuuc

SEQ ID NO: 1246289 - RNA, 16 nt, Human
uguaauuguguggauu

SEQ ID NO: 1246290 - RNA, 20 nt, Human
uguaauuguguggauucuuu

SEQ ID NO: 1246291 - RNA, 21 nt, Human
uguaauuguguggauucuuua

SEQ ID NO: 1246292 - RNA, 15 nt, Human
uguaauuuuguguaa

SEQ ID NO: 1246293 - RNA, 16 nt, Human
uguaauuuuguguaag

SEQ ID NO: 1246294 - RNA, 20 nt, Human
uguaauuuuguguaagaaau

SEQ ID NO: 1246295 - RNA, 22 nt, Human
uguacaaaauaaacaaauaaca

SEQ ID NO: 1246296 - RNA, 17 nt, Human
uguacaaaauaaacaaa

SEQ ID NO: 1246297 - RNA, 13 nt, Human
uguacauaacuga

SEQ ID NO: 1246298 - RNA, 14 nt, Human
uguacauaacugaa

SEQ ID NO: 1246299 - RNA, 15 nt, Human
uguacauaacugaaa

SEQ ID NO: 1246300 - RNA, 18 nt, Human
ugggaaacaaaaggauaa

SEQ ID NO: 1246301 - RNA, 14 nt, Human
uggcuguuugagau

SEQ ID NO: 1246302 - RNA, 20 nt, Human
ugggaacaccauaggucacc

SEQ ID NO: 1246303 - RNA, 17 nt, Human
ugggaaaaauguaggag

SEQ ID NO: 1246304 - RNA, 16 nt, Human
ugggaaaaauguagga

SEQ ID NO: 1246305 - RNA, 18 nt, Human
ugggaaacuuggcucgaa

SEQ ID NO: 1246306 - RNA, 20 nt, Human
uggcugacuuacaucaugug

SEQ ID NO: 1246307 - RNA, 19 nt, Human
uggcugagauaugaacaua

SEQ ID NO: 1246308 - RNA, 14 nt, Human
uggcugugccucug

SEQ ID NO: 1246309 - RNA, 15 nt, Human
uggcugugccucugc

SEQ ID NO: 1246310 - RNA, 16 nt, Human
uggcugugccucugcc

SEQ ID NO: 1246311 - RNA, 17 nt, Human
uggcugugccucugccu

SEQ ID NO: 1246312 - RNA, 12 nt, Human
uggcugcagccu

SEQ ID NO: 1246313 - RNA, 13 nt, Human
uggcugcagccuc

SEQ ID NO: 1246314 - RNA, 15 nt, Human
uggcugcagccucag

SEQ ID NO: 1246315 - RNA, 16 nt, Human
uggcugcagccucagg

SEQ ID NO: 1246316 - RNA, 17 nt, Human
uggcugcagccucagga

SEQ ID NO: 1246317 - RNA, 20 nt, Human
uggcugcagccucaggacug

SEQ ID NO: 1246318 - RNA, 23 nt, Human
uggcugcagccucaggacuggga

SEQ ID NO: 1246319 - RNA, 14 nt, Human
uggcugcaggaauc

SEQ ID NO: 1246320 - RNA, 16 nt, Human
uggcugcaggaaucuu

SEQ ID NO: 1246321 - RNA, 19 nt, Human
uggcugcaggaaucuuuaa

SEQ ID NO: 1246322 - RNA, 17 nt, Human
uggcuguggcauccaga

SEQ ID NO: 1246323 - RNA, 14 nt, Human
uggcuguggcaggc

SEQ ID NO: 1246324 - RNA, 20 nt, Human
uggcuguggccuaaccugcc

SEQ ID NO: 1246325 - RNA, 22 nt, Human
uggcugugccucugccugucuc

SEQ ID NO: 1246326 - RNA, 18 nt, Human
uggcugugccucugccug

SEQ ID NO: 1246327 - RNA, 19 nt, Human
uggcugugccucugccugu

SEQ ID NO: 1246328 - RNA, 18 nt, Human
uggcuaagcaaaauguga

SEQ ID NO: 1246329 - RNA, 13 nt, Human
aggcuccccuucu

SEQ ID NO: 1246330 - RNA, 14 nt, Human
uggcuaaccaagag

SEQ ID NO: 1246331 - RNA, 13 nt, Human
aggcuccugccac

SEQ ID NO: 1246332 - RNA, 15 nt, Human
aggcucccagggaca

SEQ ID NO: 1246333 - RNA, 15 nt, Human
aggcuccagagggca

SEQ ID NO: 1246334 - RNA, 16 nt, Human
aggcuccagagggcac

SEQ ID NO: 1246335 - RNA, 17 nt, Human
uggcuaacuuacaaaga

SEQ ID NO: 1246336 - RNA, 20 nt, Human
uggcuaacuuacaaagauuc

SEQ ID NO: 1246337 - RNA, 14 nt, Human
uggcuacucugugc

SEQ ID NO: 1246338 - RNA, 15 nt, Human
uggcuacucugugcc

SEQ ID NO: 1246339 - RNA, 16 nt, Human
uggcuacucugugcca

SEQ ID NO: 1246340 - RNA, 17 nt, Human
uggcuacucugugccag

SEQ ID NO: 1246341 - RNA, 18 nt, Human
uggcuacucugugccaga

SEQ ID NO: 1246342 - RNA, 19 nt, Human
uggcuacucugugccagag

SEQ ID NO: 1246343 - RNA, 20 nt, Human
uggcuacucugugccagagc

SEQ ID NO: 1246344 - RNA, 21 nt, Human
uggcuacucugugccagagcc

SEQ ID NO: 1246345 - RNA, 22 nt, Human
uggcuacucugugccagagccu

SEQ ID NO: 1246346 - RNA, 23 nt, Human
uggcuacucugugccagagccug

SEQ ID NO: 1246347 - RNA, 24 nt, Human
uggcuacucugugccagagccugg

SEQ ID NO: 1246348 - RNA, 22 nt, Human
uggcuauagaugucuuuuccca

SEQ ID NO: 1246349 - RNA, 19 nt, Human
uggcucacaugguuuacau

SEQ ID NO: 1246350 - RNA, 17 nt, Human
uggcucacacucgacau

SEQ ID NO: 1246351 - RNA, 17 nt, Human
uggcucacgccuguaau

SEQ ID NO: 1246352 - RNA, 22 nt, Human
uggcucacucagcacuuggccc

SEQ ID NO: 1246353 - RNA, 17 nt, Human
uggcucacucagcacuu

SEQ ID NO: 1246354 - RNA, 19 nt, Human
uggcuauagaugucuuuuc

SEQ ID NO: 1246355 - RNA, 17 nt, Human
uggcuauagaugucuuu

SEQ ID NO: 1246356 - RNA, 18 nt, Human
uggcuauagaugucuuuu

SEQ ID NO: 1246357 - RNA, 21 nt, Human
uggcucacacucgacaugaaa

SEQ ID NO: 1246358 - RNA, 12 nt, Human
uggcucagccag

SEQ ID NO: 1246359 - RNA, 13 nt, Human
uggcucagccagc

SEQ ID NO: 1246360 - RNA, 16 nt, Human
uggcucagccagcacu

SEQ ID NO: 1246361 - RNA, 18 nt, Human
uggcucacucagcacuug

SEQ ID NO: 1246362 - RNA, 19 nt, Human
uggcucuugauaccccccu

SEQ ID NO: 1246363 - RNA, 20 nt, Human
uggcucuugauaccccccuc

SEQ ID NO: 1246364 - RNA, 21 nt, Human
uggcucuugauaccccccucu

SEQ ID NO: 1246365 - RNA, 23 nt, Human
uggcucuugauaccccccucugu

SEQ ID NO: 1246366 - RNA, 16 nt, Human
uggcugaaaggaagcu

SEQ ID NO: 1246367 - RNA, 22 nt, Human
uggcugaaaggaagcugugcgu

SEQ ID NO: 1246368 - RNA, 16 nt, Human
uggcugaaauucuccu

SEQ ID NO: 1246369 - RNA, 18 nt, Human
uggcugaaauucuccugg

SEQ ID NO: 1246370 - RNA, 19 nt, Human
uggcugaaauucuccugga

SEQ ID NO: 1246371 - RNA, 20 nt, Human
uggcugaaauucuccuggag

SEQ ID NO: 1246372 - RNA, 21 nt, Human
uggcugaaauucuccuggagg

SEQ ID NO: 1246373 - RNA, 22 nt, Human
uggcugaaauucuccuggaggu

SEQ ID NO: 1246374 - RNA, 21 nt, Human
uggcugaauagcuucuccaaa

SEQ ID NO: 1246375 - RNA, 18 nt, Human
uggcugacaugaagcugu

SEQ ID NO: 1246376 - RNA, 21 nt, Human
aggcugggucgcccuggacug

SEQ ID NO: 1246377 - RNA, 20 nt, Human
aggcugggucgcccuggacu

SEQ ID NO: 1246378 - RNA, 18 nt, Human
aggcugggucgcccugga

SEQ ID NO: 1246379 - RNA, 15 nt, Human
aggcugggucgcccu

SEQ ID NO: 1246380 - RNA, 10 nt, Human
aggcuggguc

SEQ ID NO: 1246381 - RNA, 20 nt, Human
ugggaaccccuucauccucu

SEQ ID NO: 1246382 - RNA, 22 nt, Human
ugggaaccccuucauccucuga

SEQ ID NO: 1246383 - RNA, 10 nt, Human
aggcugggcc

SEQ ID NO: 1246384 - RNA, 12 nt, Human
aggcugggccau

SEQ ID NO: 1246385 - RNA, 18 nt, Human
aggcugggccauguccaa

SEQ ID NO: 1246386 - RNA, 20 nt, Human
aggcugggccauguccaaag

SEQ ID NO: 1246387 - RNA, 21 nt, Human
aggcugggccauguccaaaga

SEQ ID NO: 1246388 - RNA, 22 nt, Human
aggcugggccauguccaaagag

SEQ ID NO: 1246389 - RNA, 18 nt, Human
agggaaaacauuccaucc

SEQ ID NO: 1246390 - RNA, 16 nt, Human
agggaaaacauuccau

SEQ ID NO: 1246391 - RNA, 15 nt, Human
agggaaaacauucca

SEQ ID NO: 1246392 - RNA, 19 nt, Human
aggcuuuggauuugacauu

SEQ ID NO: 1246393 - RNA, 22 nt, Human
aggcuuuuguuuccuuuuucag

SEQ ID NO: 1246394 - RNA, 21 nt, Human
aggcuuuuuuaucaugugaaa

SEQ ID NO: 1246395 - RNA, 18 nt, Human
aggcuuuuuuaucaugug

SEQ ID NO: 1246396 - RNA, 15 nt, Human
aggcuuuuuuaucau

SEQ ID NO: 1246397 - RNA, 13 nt, Human
aggcuuucucuac

SEQ ID NO: 1246398 - RNA, 13 nt, Human
aggcuuugcccug

SEQ ID NO: 1246399 - RNA, 18 nt, Human
aggcuuugcccugcugcc

SEQ ID NO: 1246400 - RNA, 20 nt, Human
aggcuuugcccugcugcccu

SEQ ID NO: 1246401 - RNA, 14 nt, Human
aggcuuguugugcu

SEQ ID NO: 1246402 - RNA, 16 nt, Human
aggcuuguugugcuuu

SEQ ID NO: 1246403 - RNA, 15 nt, Human
aggcuuguugugcuu

SEQ ID NO: 1246404 - RNA, 22 nt, Human
aggcuuuaugauaauagauucu

SEQ ID NO: 1246405 - RNA, 23 nt, Human
aggcuuuaugauaauagauucuc

SEQ ID NO: 1246406 - RNA, 18 nt, Human
agggaaaauaggcaggaa

SEQ ID NO: 1246407 - RNA, 20 nt, Human
agggaaaauaggcaggaagc

SEQ ID NO: 1246408 - RNA, 18 nt, Human
agggaaaauuauuugcau

SEQ ID NO: 1246409 - RNA, 14 nt, Human
aggcuuaguuugug

SEQ ID NO: 1246410 - RNA, 15 nt, Human
aggcuuaguuugugu

SEQ ID NO: 1246411 - RNA, 19 nt, Human
aggcuucaaaauguuaucu

SEQ ID NO: 1246412 - RNA, 23 nt, Human
aggcuuccacguacugcagccuc

SEQ ID NO: 1246413 - RNA, 14 nt, Human
aggcuuccuucauu

SEQ ID NO: 1246414 - RNA, 16 nt, Human
aggcuuccuucauuuc

SEQ ID NO: 1246415 - RNA, 18 nt, Human
aggcuuccuucauuuccu

SEQ ID NO: 1246416 - RNA, 19 nt, Human
aggcuuccuucauuuccuc

SEQ ID NO: 1246417 - RNA, 23 nt, Human
aggcuucugguugaugccuguga

SEQ ID NO: 1246418 - RNA, 14 nt, Human
aggcuucugcuggg

SEQ ID NO: 1246419 - RNA, 17 nt, Human
aggcuucugcuggggcc

SEQ ID NO: 1246420 - RNA, 18 nt, Human
aggcuucugcuggggccu

SEQ ID NO: 1246421 - RNA, 19 nt, Human
aggcuucugcuggggccug

SEQ ID NO: 1246422 - RNA, 16 nt, Human
aggcuucucucugugg

SEQ ID NO: 1246423 - RNA, 15 nt, Human
aggcuucugagcagc

SEQ ID NO: 1246424 - RNA, 21 nt, Human
aggcuuccuucauuuccuccg

SEQ ID NO: 1246425 - RNA, 21 nt, Human
aggcuucugcuggggccuggg

SEQ ID NO: 1246426 - RNA, 15 nt, Human
aggcuugccugcagg

SEQ ID NO: 1246427 - RNA, 16 nt, Human
aggcuugccugcaggc

SEQ ID NO: 1246428 - RNA, 17 nt, Human
aggcuugccugcaggca

SEQ ID NO: 1246429 - RNA, 21 nt, Human
aggcuugggauuugcugugua

SEQ ID NO: 1246430 - RNA, 17 nt, Human
aggcuuggggcuggaga

SEQ ID NO: 1246431 - RNA, 14 nt, Human
aggcuugguuccuu

SEQ ID NO: 1246432 - RNA, 19 nt, Human
aggcuugguuccuucccaa

SEQ ID NO: 1246433 - RNA, 20 nt, Human
aggcuugguuccuucccaau

SEQ ID NO: 1246434 - RNA, 14 nt, Human
ugggcauucaaaug

SEQ ID NO: 1246435 - RNA, 19 nt, Human
ugggcaaugauggcaauuu

SEQ ID NO: 1246436 - RNA, 15 nt, Human
ugggcaauugucuga

SEQ ID NO: 1246437 - RNA, 14 nt, Human
ugggagggcagcag

SEQ ID NO: 1246438 - RNA, 17 nt, Human
ugggagggcagcagggc

SEQ ID NO: 1246439 - RNA, 18 nt, Human
ugggagggcagcagggcu

SEQ ID NO: 1246440 - RNA, 19 nt, Human
ugggagggcagcagggcua

SEQ ID NO: 1246441 - RNA, 22 nt, Human
ugggcaagcuggcggcuggggu

SEQ ID NO: 1246442 - RNA, 15 nt, Human
ugggcaaagccuagu

SEQ ID NO: 1246443 - RNA, 21 nt, Human
ugggcaaagccuagugaaggc

SEQ ID NO: 1246444 - RNA, 23 nt, Human
ugggaggcucuggagcccacugu

SEQ ID NO: 1246445 - RNA, 17 nt, Human
ugggaggcucuggagcc

SEQ ID NO: 1246446 - RNA, 14 nt, Human
ugggaggcucugga

SEQ ID NO: 1246447 - RNA, 20 nt, Human
ugggaggcucacccccuucu

SEQ ID NO: 1246448 - RNA, 22 nt, Human
ugggaggcucacccccuucucc

SEQ ID NO: 1246449 - RNA, 14 nt, Human
ugggaggcuccccu

SEQ ID NO: 1246450 - RNA, 15 nt, Human
ugggaggcuccccuu

SEQ ID NO: 1246451 - RNA, 19 nt, Human
ugggaggcugagaugggag

SEQ ID NO: 1246452 - RNA, 16 nt, Human
ugggagggaggcucag

SEQ ID NO: 1246453 - RNA, 17 nt, Human
ugggagggaggcucagg

SEQ ID NO: 1246454 - RNA, 22 nt, Human
ugggagggaggcucaggucccu

SEQ ID NO: 1246455 - RNA, 16 nt, Human
ugggagaaaugaaaaa

SEQ ID NO: 1246456 - RNA, 19 nt, Human
ugggagaaaucuggcuucu

SEQ ID NO: 1246457 - RNA, 15 nt, Human
ugggaggaugugaau

SEQ ID NO: 1246458 - RNA, 20 nt, Human
ugggaggccuuucccuaagc

SEQ ID NO: 1246459 - RNA, 13 nt, Human
ugggaggcucacc

SEQ ID NO: 1246460 - RNA, 21 nt, Human
agggagacuggguaggaaaga

SEQ ID NO: 1246461 - RNA, 13 nt, Human
agggagaagcucc

SEQ ID NO: 1246462 - RNA, 20 nt, Human
agggagacacuggccccuca

SEQ ID NO: 1246463 - RNA, 13 nt, Human
agggaaauuucag

SEQ ID NO: 1246464 - RNA, 22 nt, Human
agggaaagcccauaugcuacca

SEQ ID NO: 1246465 - RNA, 13 nt, Human
agggaaagcccau

SEQ ID NO: 1246466 - RNA, 13 nt, Human
agggaaaggccag

SEQ ID NO: 1246467 - RNA, 18 nt, Human
agggaaaggccagcacuc

SEQ ID NO: 1246468 - RNA, 22 nt, Human
agggacuucaggaucaaguccu

SEQ ID NO: 1246469 - RNA, 15 nt, Human
ugggagaaaugaaaa

SEQ ID NO: 1246470 - RNA, 14 nt, Human
ugggacuggccucu

SEQ ID NO: 1246471 - RNA, 16 nt, Human
ugggacuggccucugc

SEQ ID NO: 1246472 - RNA, 17 nt, Human
ugggacuagccuggcuu

SEQ ID NO: 1246473 - RNA, 19 nt, Human
ugggacuagccuggcuugg

SEQ ID NO: 1246474 - RNA, 21 nt, Human
agggagcggccggccagcccc

SEQ ID NO: 1246475 - RNA, 22 nt, Human
agggagcggccggccagccccu

SEQ ID NO: 1246476 - RNA, 14 nt, Human
agggagccuggccc

SEQ ID NO: 1246477 - RNA, 19 nt, Human
agggagcggccggccagcc

SEQ ID NO: 1246478 - RNA, 18 nt, Human
agggagcaucagugcccu

SEQ ID NO: 1246479 - RNA, 10 nt, Human
agggagccaa

SEQ ID NO: 1246480 - RNA, 11 nt, Human
agggagccaag

SEQ ID NO: 1246481 - RNA, 12 nt, Human
agggagccaagg

SEQ ID NO: 1246482 - RNA, 13 nt, Human
agggagccaaggg

SEQ ID NO: 1246483 - RNA, 14 nt, Human
agggagccaaggga

SEQ ID NO: 1246484 - RNA, 15 nt, Human
agggagccaagggau

SEQ ID NO: 1246485 - RNA, 16 nt, Human
agggagccaagggaug

SEQ ID NO: 1246486 - RNA, 17 nt, Human
agggagccaagggaugg

SEQ ID NO: 1246487 - RNA, 20 nt, Human
agggagccaagggauggaca

SEQ ID NO: 1246488 - RNA, 21 nt, Human
agggagccaagggauggacau

SEQ ID NO: 1246489 - RNA, 16 nt, Human
agggagccauguuuca

SEQ ID NO: 1246490 - RNA, 15 nt, Human
agggagccauuugag

SEQ ID NO: 1246491 - RNA, 17 nt, Human
agggagccauuugagag

SEQ ID NO: 1246492 - RNA, 22 nt, Human
agggcuguuauaaucuuucaca

SEQ ID NO: 1246493 - RNA, 18 nt, Human
agggcuguaacugccagg

SEQ ID NO: 1246494 - RNA, 20 nt, Human
agggcuguaacugccaggcu

SEQ ID NO: 1246495 - RNA, 18 nt, Human
agggcugucaucugugca

SEQ ID NO: 1246496 - RNA, 19 nt, Human
agggcugucaucugugcac

SEQ ID NO: 1246497 - RNA, 20 nt, Human
agggcugucaucugugcacu

SEQ ID NO: 1246498 - RNA, 19 nt, Human
agggcuguaacugccaggc

SEQ ID NO: 1246499 - RNA, 18 nt, Human
ugggcucaaccagaaaag

SEQ ID NO: 1246500 - RNA, 15 nt, Human
agggcuggaggccca

SEQ ID NO: 1246501 - RNA, 16 nt, Human
agggcuggaggcccag

SEQ ID NO: 1246502 - RNA, 17 nt, Human
agggcuggaggcccagg

SEQ ID NO: 1246503 - RNA, 18 nt, Human
agggcuggaggcccaggc

SEQ ID NO: 1246504 - RNA, 19 nt, Human
agggcuggaggcccaggcu

SEQ ID NO: 1246505 - RNA, 21 nt, Human
agggcuggaggcccaggcugg

SEQ ID NO: 1246506 - RNA, 17 nt, Human
agggcuggcucaauuga

SEQ ID NO: 1246507 - RNA, 12 nt, Human
agggcuggcugg

SEQ ID NO: 1246508 - RNA, 13 nt, Human
agggcuggcuggc

SEQ ID NO: 1246509 - RNA, 20 nt, Human
agggcuggcuggccucaccc

SEQ ID NO: 1246510 - RNA, 17 nt, Human
agggcuggcuggccuca

SEQ ID NO: 1246511 - RNA, 12 nt, Human
agggcugggagg

SEQ ID NO: 1246512 - RNA, 14 nt, Human
agggcugggaggaa

SEQ ID NO: 1246513 - RNA, 16 nt, Human
agggcugggaggaagg

SEQ ID NO: 1246514 - RNA, 18 nt, Human
agggcugggaggaaggac

SEQ ID NO: 1246515 - RNA, 14 nt, Human
ugggcucagugaag

SEQ ID NO: 1246516 - RNA, 19 nt, Human
ugggcucagugaaguugcu

SEQ ID NO: 1246517 - RNA, 11 nt, Human
ugggcucccug

SEQ ID NO: 1246518 - RNA, 15 nt, Human
ugggcucccugacug

SEQ ID NO: 1246519 - RNA, 19 nt, Human
ugggcucccugacugggag

SEQ ID NO: 1246520 - RNA, 21 nt, Human
ugggcuccggaggacucacca

SEQ ID NO: 1246521 - RNA, 13 nt, Human
ugggcuccuccag

SEQ ID NO: 1246522 - RNA, 15 nt, Human
ugggcuccuccaggg

SEQ ID NO: 1246523 - RNA, 23 nt, Human
ugggcuccuccagggugugugcu

SEQ ID NO: 1246524 - RNA, 18 nt, Human
ugggcuccgugugggaga

SEQ ID NO: 1246525 - RNA, 11 nt, Human
ugggcuccugg

SEQ ID NO: 1246526 - RNA, 12 nt, Human
ugggcuccugga

SEQ ID NO: 1246527 - RNA, 13 nt, Human
ugggcuccuggac

SEQ ID NO: 1246528 - RNA, 18 nt, Human
ugggcuccuggacccccc

SEQ ID NO: 1246529 - RNA, 21 nt, Human
ugggcucugaguaccccugcu

SEQ ID NO: 1246530 - RNA, 11 nt, Human
ugggcucugau

SEQ ID NO: 1246531 - RNA, 13 nt, Human
ugggcucugauga

SEQ ID NO: 1246532 - RNA, 14 nt, Human
ugggcucugaugaa

SEQ ID NO: 1246533 - RNA, 15 nt, Human
agggcuccuauucaa

SEQ ID NO: 1246534 - RNA, 15 nt, Human
agggcuccagccccu

SEQ ID NO: 1246535 - RNA, 20 nt, Human
agggcuccagccccucuugg

SEQ ID NO: 1246536 - RNA, 23 nt, Human
agggcuccagccccucuuggaga

SEQ ID NO: 1246537 - RNA, 11 nt, Human
agggcuccugc

SEQ ID NO: 1246538 - RNA, 12 nt, Human
agggcuccuggg

SEQ ID NO: 1246539 - RNA, 17 nt, Human
agggcugagcucucugu

SEQ ID NO: 1246540 - RNA, 16 nt, Human
agggcugagcugggga

SEQ ID NO: 1246541 - RNA, 18 nt, Human
agggcuccuugugggccu

SEQ ID NO: 1246542 - RNA, 20 nt, Human
agggcugccuucuggccuug

SEQ ID NO: 1246543 - RNA, 20 nt, Human
agggcugcuucccugaagcu

SEQ ID NO: 1246544 - RNA, 19 nt, Human
agggccacaucccacugcc

SEQ ID NO: 1246545 - RNA, 17 nt, Human
agggcccagagcccagc

SEQ ID NO: 1246546 - RNA, 18 nt, Human
agggcccagagcccagcu

SEQ ID NO: 1246547 - RNA, 19 nt, Human
agggcccagagcccagcuc

SEQ ID NO: 1246548 - RNA, 20 nt, Human
agggcccagagcccagcucc

SEQ ID NO: 1246549 - RNA, 21 nt, Human
agggcccagagcccagcucca

SEQ ID NO: 1246550 - RNA, 18 nt, Human
agggccccucuccccagg

SEQ ID NO: 1246551 - RNA, 12 nt, Human
agggccccucuc

SEQ ID NO: 1246552 - RNA, 13 nt, Human
agggccccucucc

SEQ ID NO: 1246553 - RNA, 14 nt, Human
agggcuccagcccc

SEQ ID NO: 1246554 - RNA, 18 nt, Human
agggccacauagaugcug

SEQ ID NO: 1246555 - RNA, 19 nt, Human
agggccccucacccugccu

SEQ ID NO: 1246556 - RNA, 20 nt, Human
agggcagaccacauugcuuu

SEQ ID NO: 1246557 - RNA, 17 nt, Human
agggcacugguggcccg

SEQ ID NO: 1246558 - RNA, 17 nt, Human
agggaguguucccuauc

SEQ ID NO: 1246559 - RNA, 12 nt, Human
agggcagagcug

SEQ ID NO: 1246560 - RNA, 13 nt, Human
agggcagagcugg

SEQ ID NO: 1246561 - RNA, 14 nt, Human
agggcagagcuggu

SEQ ID NO: 1246562 - RNA, 15 nt, Human
agggcagagcuggug

SEQ ID NO: 1246563 - RNA, 17 nt, Human
agggcagagcuggugcg

SEQ ID NO: 1246564 - RNA, 16 nt, Human
agggcagagcuggugc

SEQ ID NO: 1246565 - RNA, 12 nt, Human
agggcagaguga

SEQ ID NO: 1246566 - RNA, 19 nt, Human
agggcagagugagacccag

SEQ ID NO: 1246567 - RNA, 14 nt, Human
agggcaguucgcag

SEQ ID NO: 1246568 - RNA, 16 nt, Human
agggcaguucgcagcc

SEQ ID NO: 1246569 - RNA, 17 nt, Human
agggcaguucgcagcca

SEQ ID NO: 1246570 - RNA, 18 nt, Human
agggcaguucgcagccac

SEQ ID NO: 1246571 - RNA, 19 nt, Human
agggcaguucgcagccacc

SEQ ID NO: 1246572 - RNA, 20 nt, Human
agggcaguucgcagccaccc

SEQ ID NO: 1246573 - RNA, 21 nt, Human
agggcaguucgcagccacccu

SEQ ID NO: 1246574 - RNA, 13 nt, Human
agggccaaagaac

SEQ ID NO: 1246575 - RNA, 23 nt, Human
agggccaaagaaccaaagaagaa

SEQ ID NO: 1246576 - RNA, 16 nt, Human
agggccaaagaaccaa

SEQ ID NO: 1246577 - RNA, 21 nt, Human
agggccaagcccagcacugcu

SEQ ID NO: 1246578 - RNA, 23 nt, Human
agggcaguucgcagccacccuga

SEQ ID NO: 1246579 - RNA, 16 nt, Human
agggcauaaauuauug

SEQ ID NO: 1246580 - RNA, 22 nt, Human
agggcaguucgcagccacccug

SEQ ID NO: 1246581 - RNA, 13 nt, Human
agggagggccugg

SEQ ID NO: 1246582 - RNA, 15 nt, Human
agggagggccugggc

SEQ ID NO: 1246583 - RNA, 23 nt, Human
ugggccaacaaagaacacuaacu

SEQ ID NO: 1246584 - RNA, 16 nt, Human
ugggccaacucaccug

SEQ ID NO: 1246585 - RNA, 13 nt, Human
agggagggagugg

SEQ ID NO: 1246586 - RNA, 12 nt, Human
agggagggcaga

SEQ ID NO: 1246587 - RNA, 16 nt, Human
agggagggcagagcug

SEQ ID NO: 1246588 - RNA, 17 nt, Human
agggagggcagagcugg

SEQ ID NO: 1246589 - RNA, 18 nt, Human
agggagggcagagcuggu

SEQ ID NO: 1246590 - RNA, 19 nt, Human
agggagggcagagcuggug

SEQ ID NO: 1246591 - RNA, 20 nt, Human
agggagggcagagcuggugc

SEQ ID NO: 1246592 - RNA, 21 nt, Human
agggagggcagagcuggugcg

SEQ ID NO: 1246593 - RNA, 12 nt, Human
agggagggcucu

SEQ ID NO: 1246594 - RNA, 13 nt, Human
agggagggcucug

SEQ ID NO: 1246595 - RNA, 14 nt, Human
agggagggcucuga

SEQ ID NO: 1246596 - RNA, 15 nt, Human
agggagggcucugag

SEQ ID NO: 1246597 - RNA, 16 nt, Human
agggagggcucugagg

SEQ ID NO: 1246598 - RNA, 17 nt, Human
agggagggcucugaggc

SEQ ID NO: 1246599 - RNA, 18 nt, Human
agggagggcucugaggcg

SEQ ID NO: 1246600 - RNA, 20 nt, Human
agggagggcucugaggcgcc

SEQ ID NO: 1246601 - RNA, 15 nt, Human
agggagggcugucau

SEQ ID NO: 1246602 - RNA, 13 nt, Human
agggagucugcca

SEQ ID NO: 1246603 - RNA, 14 nt, Human
agggagucugccag

SEQ ID NO: 1246604 - RNA, 23 nt, Human
uggaagugacuuuggcugcaugc

SEQ ID NO: 1246605 - RNA, 17 nt, Human
uggaagugacuuuggcu

SEQ ID NO: 1246606 - RNA, 15 nt, Human
uggaagugacuuugg

SEQ ID NO: 1246607 - RNA, 18 nt, Human
uggaagugaaaacuuugu

SEQ ID NO: 1246608 - RNA, 19 nt, Human
uggaagugaaaacuuugua

SEQ ID NO: 1246609 - RNA, 14 nt, Human
uggaagugcuaauu

SEQ ID NO: 1246610 - RNA, 19 nt, Human
uggaaguggggcgggcuuc

SEQ ID NO: 1246611 - RNA, 19 nt, Human
aggaguuucguuuucaaaa

SEQ ID NO: 1246612 - RNA, 14 nt, Human
aggaguuuggagga

SEQ ID NO: 1246613 - RNA, 16 nt, Human
ugcugcccauguuuca

SEQ ID NO: 1246614 - RNA, 18 nt, Human
ugcugccccaucagugcu

SEQ ID NO: 1246615 - RNA, 19 nt, Human
ugcugccccaucagugcuc

SEQ ID NO: 1246616 - RNA, 21 nt, Human
ugcugccccaucagugcuccc

SEQ ID NO: 1246617 - RNA, 17 nt, Human
ugcugcccauguuucaa

SEQ ID NO: 1246618 - RNA, 23 nt, Human
ugcugcccucccccuccucucca

SEQ ID NO: 1246619 - RNA, 16 nt, Human
uggaacacagaacuga

SEQ ID NO: 1246620 - RNA, 20 nt, Human
uggaacacagaacugaacug

SEQ ID NO: 1246621 - RNA, 14 nt, Human
uggaacaccaggcu

SEQ ID NO: 1246622 - RNA, 15 nt, Human
uggaacaccaggcug

SEQ ID NO: 1246623 - RNA, 15 nt, Human
uggaacacggccaca

SEQ ID NO: 1246624 - RNA, 17 nt, Human
uggaacacggccacauc

SEQ ID NO: 1246625 - RNA, 20 nt, Human
uggaacacuagacaagccag

SEQ ID NO: 1246626 - RNA, 22 nt, Human
uggaacacuagacaagccagaa

SEQ ID NO: 1246627 - RNA, 16 nt, Human
uggaagcuaauuugca

SEQ ID NO: 1246628 - RNA, 17 nt, Human
uggaagcuaauuugcau

SEQ ID NO: 1246629 - RNA, 18 nt, Human
uggaagcuaauuugcauu

SEQ ID NO: 1246630 - RNA, 21 nt, Human
uggaacacuagacaagccaga

SEQ ID NO: 1246631 - RNA, 19 nt, Human
uggaagcuagacacaugaa

SEQ ID NO: 1246632 - RNA, 23 nt, Human
uggaagcuagacacaugaaggua

SEQ ID NO: 1246633 - RNA, 20 nt, Human
uggaagcuagacacaugaag

SEQ ID NO: 1246634 - RNA, 17 nt, Human
uggaagcugcccugccc

SEQ ID NO: 1246635 - RNA, 18 nt, Human
uggaagcugcccugccca

SEQ ID NO: 1246636 - RNA, 17 nt, Human
uggaaguccaauguggc

SEQ ID NO: 1246637 - RNA, 17 nt, Human
uggacaaaauggaauac

SEQ ID NO: 1246638 - RNA, 14 nt, Human
uggacaaaaugacu

SEQ ID NO: 1246639 - RNA, 19 nt, Human
uggacaaaacaagaaagac

SEQ ID NO: 1246640 - RNA, 15 nt, Human
uggacaaagaaccuu

SEQ ID NO: 1246641 - RNA, 15 nt, Human
uggacaaaucacaua

SEQ ID NO: 1246642 - RNA, 21 nt, Human
uggacaaaucacauauuuuaa

SEQ ID NO: 1246643 - RNA, 23 nt, Human
uggacaaaucacauauuuuaaaa

SEQ ID NO: 1246644 - RNA, 14 nt, Human
uggacaaaauggaa

SEQ ID NO: 1246645 - RNA, 23 nt, Human
uggaauuuugcaaagauuuaauc

SEQ ID NO: 1246646 - RNA, 15 nt, Human
uggaauuuugcaaag

SEQ ID NO: 1246647 - RNA, 22 nt, Human
uggaauuuugcaaagauuuaau

SEQ ID NO: 1246648 - RNA, 16 nt, Human
uggacaccugcccugc

SEQ ID NO: 1246649 - RNA, 15 nt, Human
uggacaccugcccug

SEQ ID NO: 1246650 - RNA, 14 nt, Human
uggacaccugcccu

SEQ ID NO: 1246651 - RNA, 13 nt, Human
uggacaccugccc

SEQ ID NO: 1246652 - RNA, 12 nt, Human
uggacaccugcc

SEQ ID NO: 1246653 - RNA, 11 nt, Human
uggacaccugc

SEQ ID NO: 1246654 - RNA, 10 nt, Human
uggacaccug

SEQ ID NO: 1246655 - RNA, 22 nt, Human
uggacaaaucacauauuuuaaa

SEQ ID NO: 1246656 - RNA, 17 nt, Human
uggaauuugccugcugg

SEQ ID NO: 1246657 - RNA, 14 nt, Human
uggaauuugaaaca

SEQ ID NO: 1246658 - RNA, 16 nt, Human
uggaauuugccugcug

SEQ ID NO: 1246659 - RNA, 16 nt, Human
aggcaacuugggaacu

SEQ ID NO: 1246660 - RNA, 18 nt, Human
aggaucuauuuuuggagg

SEQ ID NO: 1246661 - RNA, 19 nt, Human
aggaucuauuuuuggaggu

SEQ ID NO: 1246662 - RNA, 20 nt, Human
aggaucuauuuuuggagguu

SEQ ID NO: 1246663 - RNA, 21 nt, Human
aggaucuauuuuuggagguuu

SEQ ID NO: 1246664 - RNA, 17 nt, Human
aggaucucaccaggcag

SEQ ID NO: 1246665 - RNA, 23 nt, Human
aggaucucaccaggcagccucug

SEQ ID NO: 1246666 - RNA, 18 nt, Human
aggaucucaccaggcagc

SEQ ID NO: 1246667 - RNA, 22 nt, Human
aggaugcuaacaucuaaaaaua

SEQ ID NO: 1246668 - RNA, 23 nt, Human
aggaugcuaacaucuaaaaauag

SEQ ID NO: 1246669 - RNA, 13 nt, Human
aggaugcuuggga

SEQ ID NO: 1246670 - RNA, 12 nt, Human
aggauuggggaa

SEQ ID NO: 1246671 - RNA, 21 nt, Human
aggauuggggaagagagccug

SEQ ID NO: 1246672 - RNA, 17 nt, Human
aggauuuauuuaaaaua

SEQ ID NO: 1246673 - RNA, 19 nt, Human
aggauuucaugauuucauu

SEQ ID NO: 1246674 - RNA, 20 nt, Human
aggauuucaugauuucauuu

SEQ ID NO: 1246675 - RNA, 20 nt, Human
aggauuugguccgucauaac

SEQ ID NO: 1246676 - RNA, 17 nt, Human
uggagccgaggccuacc

SEQ ID NO: 1246677 - RNA, 12 nt, Human
uggagccgaggc

SEQ ID NO: 1246678 - RNA, 12 nt, Human
uggagcugagca

SEQ ID NO: 1246679 - RNA, 21 nt, Human
uggagcuucauggcagaaggc

SEQ ID NO: 1246680 - RNA, 21 nt, Human
uggaggaaaaccaagccgugg

SEQ ID NO: 1246681 - RNA, 23 nt, Human
uggaggaaaaccaagccguggcu

SEQ ID NO: 1246682 - RNA, 12 nt, Human
aggcaauuagac

SEQ ID NO: 1246683 - RNA, 21 nt, Human
aggcaauuagacacuuuggaa

SEQ ID NO: 1246684 - RNA, 16 nt, Human
aggcacaugucagcaa

SEQ ID NO: 1246685 - RNA, 17 nt, Human
aggcaccaaaagaagua

SEQ ID NO: 1246686 - RNA, 20 nt, Human
aggcaccaaaagaaguaaaa

SEQ ID NO: 1246687 - RNA, 18 nt, Human
aggcaccaaaagaaguaa

SEQ ID NO: 1246688 - RNA, 11 nt, Human
aggcaccagga

SEQ ID NO: 1246689 - RNA, 12 nt, Human
aggcaccaggaa

SEQ ID NO: 1246690 - RNA, 13 nt, Human
aggcaccaggaag

SEQ ID NO: 1246691 - RNA, 23 nt, Human
uggagcccacuguacuugcucuu

SEQ ID NO: 1246692 - RNA, 19 nt, Human
uggagcccacuguacuugc

SEQ ID NO: 1246693 - RNA, 16 nt, Human
uggagcccacuguacu

SEQ ID NO: 1246694 - RNA, 16 nt, Human
uggagaagaacugaaa

SEQ ID NO: 1246695 - RNA, 17 nt, Human
uggagaagacccucccc

SEQ ID NO: 1246696 - RNA, 23 nt, Human
uggacaccugcccugcccugcca

SEQ ID NO: 1246697 - RNA, 18 nt, Human
uggacaccugcccugccc

SEQ ID NO: 1246698 - RNA, 17 nt, Human
uggacaccugcccugcc

SEQ ID NO: 1246699 - RNA, 15 nt, Human
uggaccccccuuuca

SEQ ID NO: 1246700 - RNA, 17 nt, Human
uggaccccccuuucaca

SEQ ID NO: 1246701 - RNA, 20 nt, Human
uggaccccccuuucacaggc

SEQ ID NO: 1246702 - RNA, 22 nt, Human
uggaccccccuuucacaggcag

SEQ ID NO: 1246703 - RNA, 23 nt, Human
uggaccccccuuucacaggcagc

SEQ ID NO: 1246704 - RNA, 22 nt, Human
uggacccguucaugggggaggg

SEQ ID NO: 1246705 - RNA, 21 nt, Human
uggacccguucaugggggagg

SEQ ID NO: 1246706 - RNA, 12 nt, Human
uggaccccugca

SEQ ID NO: 1246707 - RNA, 13 nt, Human
uggaccccugcau

SEQ ID NO: 1246708 - RNA, 16 nt, Human
uggaccccugcauugg

SEQ ID NO: 1246709 - RNA, 20 nt, Human
uggacccguucaugggggag

SEQ ID NO: 1246710 - RNA, 19 nt, Human
aggcaguucaaagcaggau

SEQ ID NO: 1246711 - RNA, 18 nt, Human
aggcaguucaaagcagga

SEQ ID NO: 1246712 - RNA, 24 nt, Human
aggcaguuaccauuaaaccaucuc

SEQ ID NO: 1246713 - RNA, 18 nt, Human
aggcaguuaccauuaaac

SEQ ID NO: 1246714 - RNA, 21 nt, Human
aggcaguuaccauuaaaccau

SEQ ID NO: 1246715 - RNA, 22 nt, Human
aggcaguuaccauuaaaccauc

SEQ ID NO: 1246716 - RNA, 23 nt, Human
aggcaguuaccauuaaaccaucu

SEQ ID NO: 1246717 - RNA, 14 nt, Human
aggcagggugcagu

SEQ ID NO: 1246718 - RNA, 20 nt, Human
aggcagcucuaaaugucaau

SEQ ID NO: 1246719 - RNA, 15 nt, Human
aggcagccucugggg

SEQ ID NO: 1246720 - RNA, 16 nt, Human
aggcagccucuggggg

SEQ ID NO: 1246721 - RNA, 22 nt, Human
aggcagccucugggggguggcc

SEQ ID NO: 1246722 - RNA, 21 nt, Human
aggcagccucugggggguggc

SEQ ID NO: 1246723 - RNA, 23 nt, Human
aggcagccgugggccccacccuc

SEQ ID NO: 1246724 - RNA, 13 nt, Human
aggcagccucugg

SEQ ID NO: 1246725 - RNA, 14 nt, Human
aggcagccucuggg

SEQ ID NO: 1246726 - RNA, 14 nt, Human
aggcaccaggaagc

SEQ ID NO: 1246727 - RNA, 15 nt, Human
aggcaccaggaagcc

SEQ ID NO: 1246728 - RNA, 16 nt, Human
aggcaccaggaagccg

SEQ ID NO: 1246729 - RNA, 22 nt, Human
aggcagggaggaggcagagaag

SEQ ID NO: 1246730 - RNA, 17 nt, Human
aggcaggagaaucacuu

SEQ ID NO: 1246731 - RNA, 23 nt, Human
aggcagggaacauggggaggagg

SEQ ID NO: 1246732 - RNA, 16 nt, Human
aggcagggagggccug

SEQ ID NO: 1246733 - RNA, 20 nt, Human
aggcaggaguuucguuuuca

SEQ ID NO: 1246734 - RNA, 21 nt, Human
aggcaggaccuucgggcugug

SEQ ID NO: 1246735 - RNA, 22 nt, Human
aggcaggaccuucgggcugugc

SEQ ID NO: 1246736 - RNA, 23 nt, Human
aggcaggaccuucgggcugugcc

SEQ ID NO: 1246737 - RNA, 18 nt, Human
uggcaucaucucagcuca

SEQ ID NO: 1246738 - RNA, 20 nt, Human
uggcauccagagucccugcc

SEQ ID NO: 1246739 - RNA, 21 nt, Human
uggcauccagagucccugccu

SEQ ID NO: 1246740 - RNA, 22 nt, Human
uggcauccagagucccugccug

SEQ ID NO: 1246741 - RNA, 16 nt, Human
aggccugacugccaag

SEQ ID NO: 1246742 - RNA, 18 nt, Human
aggccuggacuuuccugc

SEQ ID NO: 1246743 - RNA, 19 nt, Human
aggccuggacuuuccugca

SEQ ID NO: 1246744 - RNA, 22 nt, Human
aggccuggacuuuccugcaacu

SEQ ID NO: 1246745 - RNA, 20 nt, Human
aggccguggcugcuguggga

SEQ ID NO: 1246746 - RNA, 15 nt, Human
aggccguggcugcug

SEQ ID NO: 1246747 - RNA, 19 nt, Human
aggccuaauucuaugccug

SEQ ID NO: 1246748 - RNA, 22 nt, Human
aggccuaauucuaugccugucu

SEQ ID NO: 1246749 - RNA, 16 nt, Human
aggccuaccccgcaga

SEQ ID NO: 1246750 - RNA, 19 nt, Human
aggccuaccccgcagacac

SEQ ID NO: 1246751 - RNA, 22 nt, Human
aggccuaccccgcagacaccuu

SEQ ID NO: 1246752 - RNA, 14 nt, Human
aggccuagacucug

SEQ ID NO: 1246753 - RNA, 16 nt, Human
aggccuagacucuguc

SEQ ID NO: 1246754 - RNA, 17 nt, Human
aggccuagacucugucu

SEQ ID NO: 1246755 - RNA, 21 nt, Human
aggccuagacucugucuaccu

SEQ ID NO: 1246756 - RNA, 15 nt, Human
aggccuagaggccug

SEQ ID NO: 1246757 - RNA, 17 nt, Human
aggccuaggaggguccu

SEQ ID NO: 1246758 - RNA, 18 nt, Human
aggccuaggaggguccuc

SEQ ID NO: 1246759 - RNA, 21 nt, Human
aggccuaggaggguccucuga

SEQ ID NO: 1246760 - RNA, 15 nt, Human
aggccuaggauucua

SEQ ID NO: 1246761 - RNA, 16 nt, Human
aggccuaggauucuaa

SEQ ID NO: 1246762 - RNA, 17 nt, Human
aggccuaggauucuaaa

SEQ ID NO: 1246763 - RNA, 15 nt, Human
aggccuaguccugcg

SEQ ID NO: 1246764 - RNA, 17 nt, Human
aggccuaguccugcgaa

SEQ ID NO: 1246765 - RNA, 17 nt, Human
aggccugaaagaggcug

SEQ ID NO: 1246766 - RNA, 21 nt, Human
aggccugaaagaggcugaggc

SEQ ID NO: 1246767 - RNA, 23 nt, Human
aggccugaaagaggcugaggccu

SEQ ID NO: 1246768 - RNA, 14 nt, Human
aggcccgagcagcu

SEQ ID NO: 1246769 - RNA, 18 nt, Human
aggccgggaaaaagccca

SEQ ID NO: 1246770 - RNA, 14 nt, Human
aggccgggaaaaag

SEQ ID NO: 1246771 - RNA, 17 nt, Human
aggccgugacgucuggg

SEQ ID NO: 1246772 - RNA, 20 nt, Human
aggccgugacgucugggugg

SEQ ID NO: 1246773 - RNA, 21 nt, Human
aggccgugacgucuggguggc

SEQ ID NO: 1246774 - RNA, 22 nt, Human
aggccgugacgucuggguggcc

SEQ ID NO: 1246775 - RNA, 13 nt, Human
uggcagcaacaau

SEQ ID NO: 1246776 - RNA, 20 nt, Human
uggcagcaacggcacagcua

SEQ ID NO: 1246777 - RNA, 15 nt, Human
uggcagauguaggag

SEQ ID NO: 1246778 - RNA, 17 nt, Human
uggcagauguaggaggg

SEQ ID NO: 1246779 - RNA, 18 nt, Human
uggcagauguaggaggga

SEQ ID NO: 1246780 - RNA, 19 nt, Human
uggcagauguaggagggac

SEQ ID NO: 1246781 - RNA, 20 nt, Human
uggcagauguaggagggacu

SEQ ID NO: 1246782 - RNA, 17 nt, Human
uggcagccgugccuuca

SEQ ID NO: 1246783 - RNA, 23 nt, Human
uggcaccagacacccaggacuua

SEQ ID NO: 1246784 - RNA, 22 nt, Human
uggcacagccuggcuguggccu

SEQ ID NO: 1246785 - RNA, 14 nt, Human
uggcacaggacaug

SEQ ID NO: 1246786 - RNA, 23 nt, Human
uggcacagagguagucucacugc

SEQ ID NO: 1246787 - RNA, 15 nt, Human
uggcacagggcagug

SEQ ID NO: 1246788 - RNA, 21 nt, Human
uggcacaggaguguccucuuc

SEQ ID NO: 1246789 - RNA, 16 nt, Human
uggcacaggcccccuu

SEQ ID NO: 1246790 - RNA, 16 nt, Human
uggcacagggcagugg

SEQ ID NO: 1246791 - RNA, 20 nt, Human
uggcaccagacacccaggac

SEQ ID NO: 1246792 - RNA, 21 nt, Human
uggcaccagacacccaggacu

SEQ ID NO: 1246793 - RNA, 20 nt, Human
aggcauccuuccucacacca

SEQ ID NO: 1246794 - RNA, 18 nt, Human
aggcauccuuccucacac

SEQ ID NO: 1246795 - RNA, 18 nt, Human
uggcagccgugccuucag

SEQ ID NO: 1246796 - RNA, 19 nt, Human
uggcagccgugccuucagc

SEQ ID NO: 1246797 - RNA, 20 nt, Human
uggcagccgugccuucagcu

SEQ ID NO: 1246798 - RNA, 21 nt, Human
uggcagccgugccuucagcuc

SEQ ID NO: 1246799 - RNA, 22 nt, Human
uggcagccgugccuucagcucu

SEQ ID NO: 1246800 - RNA, 14 nt, Human
aggccagagccaag

SEQ ID NO: 1246801 - RNA, 14 nt, Human
aggccagagcccac

SEQ ID NO: 1246802 - RNA, 15 nt, Human
aggccagagcccacu

SEQ ID NO: 1246803 - RNA, 18 nt, Human
aggccagaggcccccagc

SEQ ID NO: 1246804 - RNA, 17 nt, Human
aggccagagcccacucc

SEQ ID NO: 1246805 - RNA, 14 nt, Human
aggccauucuuucc

SEQ ID NO: 1246806 - RNA, 15 nt, Human
aggccauucuuuccc

SEQ ID NO: 1246807 - RNA, 20 nt, Human
aggccauuccccgucucugg

SEQ ID NO: 1246808 - RNA, 13 nt, Human
aggccauuauugu

SEQ ID NO: 1246809 - RNA, 12 nt, Human
uggcauguguuu

SEQ ID NO: 1246810 - RNA, 20 nt, Human
uggcauguuagcccuuccuc

SEQ ID NO: 1246811 - RNA, 19 nt, Human
uggcauuacagcuggagaa

SEQ ID NO: 1246812 - RNA, 17 nt, Human
uggcauuagaauuauuu

SEQ ID NO: 1246813 - RNA, 12 nt, Human
uggcccugcccu

SEQ ID NO: 1246814 - RNA, 15 nt, Human
uggcccugcaaaagg

SEQ ID NO: 1246815 - RNA, 21 nt, Human
uggcccucuccccugcccccu

SEQ ID NO: 1246816 - RNA, 16 nt, Human
uggcccucuccccugc

SEQ ID NO: 1246817 - RNA, 17 nt, Human
uggcccucuccccugcc

SEQ ID NO: 1246818 - RNA, 18 nt, Human
uggcccucuccccugccc

SEQ ID NO: 1246819 - RNA, 19 nt, Human
uggcccucuccccugcccc

SEQ ID NO: 1246820 - RNA, 11 nt, Human
uggcccagccu

SEQ ID NO: 1246821 - RNA, 12 nt, Human
uggcccagccuu

SEQ ID NO: 1246822 - RNA, 13 nt, Human
uggcccagccuuu

SEQ ID NO: 1246823 - RNA, 21 nt, Human
uggccucugcugauccuccca

SEQ ID NO: 1246824 - RNA, 15 nt, Human
uggccgaguccaagc

SEQ ID NO: 1246825 - RNA, 20 nt, Human
uggcccuuccuggacagcug

SEQ ID NO: 1246826 - RNA, 12 nt, Human
uggccucugcuu

SEQ ID NO: 1246827 - RNA, 13 nt, Human
uggcccugcccug

SEQ ID NO: 1246828 - RNA, 21 nt, Human
uggcccuuaugacugccaaga

SEQ ID NO: 1246829 - RNA, 13 nt, Human
uggcccuuccugg

SEQ ID NO: 1246830 - RNA, 15 nt, Human
uggcccuuccuggac

SEQ ID NO: 1246831 - RNA, 16 nt, Human
uggcccuuccuggaca

SEQ ID NO: 1246832 - RNA, 17 nt, Human
uggcccuuccuggacag

SEQ ID NO: 1246833 - RNA, 18 nt, Human
uggcccuuccuggacagc

SEQ ID NO: 1246834 - RNA, 21 nt, Human
uggcccuuccuggacagcugu

SEQ ID NO: 1246835 - RNA, 19 nt, Human
uggcccuugcuuaccucuc

SEQ ID NO: 1246836 - RNA, 14 nt, Human
uggccucugcuuuc

SEQ ID NO: 1246837 - RNA, 22 nt, Human
uggccugaucagaccacggcuc

SEQ ID NO: 1246838 - RNA, 15 nt, Human
uggccugcaaacugg

SEQ ID NO: 1246839 - RNA, 16 nt, Human
uggccugcaaacuggg

SEQ ID NO: 1246840 - RNA, 17 nt, Human
uggccugcaaacuggga

SEQ ID NO: 1246841 - RNA, 18 nt, Human
uggccugcaaacugggaa

SEQ ID NO: 1246842 - RNA, 19 nt, Human
uggccugcaaacugggaac

SEQ ID NO: 1246843 - RNA, 23 nt, Human
uggccugcaaacugggaaccccu

SEQ ID NO: 1246844 - RNA, 20 nt, Human
uggccugcaaacugggaacc

SEQ ID NO: 1246845 - RNA, 20 nt, Human
uggccugcuaaggucuugga

SEQ ID NO: 1246846 - RNA, 13 nt, Human
uggccuggacugu

SEQ ID NO: 1246847 - RNA, 15 nt, Human
uggccuguagaguug

SEQ ID NO: 1246848 - RNA, 18 nt, Human
uggccuguagaguugcug

SEQ ID NO: 1246849 - RNA, 16 nt, Human
uggccugugucacuca

SEQ ID NO: 1246850 - RNA, 19 nt, Human
uggccuguguucuuccugg

SEQ ID NO: 1246851 - RNA, 19 nt, Human
aggccuugcggcuccucag

SEQ ID NO: 1246852 - RNA, 20 nt, Human
aggccuugcggcuccucagg

SEQ ID NO: 1246853 - RNA, 23 nt, Human
aggccuugcggcuccucagggac

SEQ ID NO: 1246854 - RNA, 22 nt, Human
aggccuugcggcuccucaggga

SEQ ID NO: 1246855 - RNA, 18 nt, Human
aggcgaagcguuguccuc

SEQ ID NO: 1246856 - RNA, 16 nt, Human
aggccuuuuggaaugu

SEQ ID NO: 1246857 - RNA, 19 nt, Human
aggcgagaagggcugcuuc

SEQ ID NO: 1246858 - RNA, 18 nt, Human
aggcgagaagggcugcuu

SEQ ID NO: 1246859 - RNA, 14 nt, Human
aggccuuucccuaa

SEQ ID NO: 1246860 - RNA, 15 nt, Human
aggccuuucccuaag

SEQ ID NO: 1246861 - RNA, 16 nt, Human
aggccuuucccuaagc

SEQ ID NO: 1246862 - RNA, 18 nt, Human
aggccuuucccuaagcca

SEQ ID NO: 1246863 - RNA, 20 nt, Human
aggccuuucccuaagccagc

SEQ ID NO: 1246864 - RNA, 14 nt, Human
aggcgccccuuccc

SEQ ID NO: 1246865 - RNA, 21 nt, Human
aggcgccccaacccguggagg

SEQ ID NO: 1246866 - RNA, 22 nt, Human
aggcgccccaacccguggaggc

SEQ ID NO: 1246867 - RNA, 21 nt, Human
aggcgcacugugacccccagc

SEQ ID NO: 1246868 - RNA, 22 nt, Human
aggcgcacugugacccccagcu

SEQ ID NO: 1246869 - RNA, 16 nt, Human
aggcuauuauuuucac

SEQ ID NO: 1246870 - RNA, 18 nt, Human
aggcuauuauuuucacug

SEQ ID NO: 1246871 - RNA, 19 nt, Human
aggcuauuauuuucacugu

SEQ ID NO: 1246872 - RNA, 11 nt, Human
aggcuauuugu

SEQ ID NO: 1246873 - RNA, 16 nt, Human
aggcuauuuguaaauc

SEQ ID NO: 1246874 - RNA, 17 nt, Human
aggcuauuuguaaaucu

SEQ ID NO: 1246875 - RNA, 21 nt, Human
aggcuauuuguaaaucugcca

SEQ ID NO: 1246876 - RNA, 22 nt, Human
aggcuauuuguaaaucugccac

SEQ ID NO: 1246877 - RNA, 23 nt, Human
aggcucaaacaaugacaaagcag

SEQ ID NO: 1246878 - RNA, 22 nt, Human
aggcuccaccccauccaguuca

SEQ ID NO: 1246879 - RNA, 13 nt, Human
aggcuccagaggg

SEQ ID NO: 1246880 - RNA, 14 nt, Human
aggcuccagagggc

SEQ ID NO: 1246881 - RNA, 22 nt, Human
aggcuccacuuggucugugaga

SEQ ID NO: 1246882 - RNA, 21 nt, Human
aggcuccacuuggucugugag

SEQ ID NO: 1246883 - RNA, 17 nt, Human
aggcuccacuuggucug

SEQ ID NO: 1246884 - RNA, 11 nt, Human
aggcuccacuu

SEQ ID NO: 1246885 - RNA, 18 nt, Human
aggcucagaggguguccu

SEQ ID NO: 1246886 - RNA, 14 nt, Human
aggcucacugguca

SEQ ID NO: 1246887 - RNA, 15 nt, Human
aggcucaaacaauga

SEQ ID NO: 1246888 - RNA, 16 nt, Human
aggcucacccccuucu

SEQ ID NO: 1246889 - RNA, 19 nt, Human
aggcucacccccuucucca

SEQ ID NO: 1246890 - RNA, 21 nt, Human
aggcucacccccuucuccauc

SEQ ID NO: 1246891 - RNA, 23 nt, Human
aggcucacccccuucuccaucca

SEQ ID NO: 1246892 - RNA, 19 nt, Human
aggcucagaggguguccug

SEQ ID NO: 1246893 - RNA, 20 nt, Human
aggcucagaggguguccugc

SEQ ID NO: 1246894 - RNA, 14 nt, Human
aggcucaggcaggg

SEQ ID NO: 1246895 - RNA, 21 nt, Human
aggcucaggcaggggccucca

SEQ ID NO: 1246896 - RNA, 10 nt, Human
aggcucaggu

SEQ ID NO: 1246897 - RNA, 16 nt, Human
aggcucaggucccugg

SEQ ID NO: 1246898 - RNA, 20 nt, Human
aggcucaggcaggggccucc

SEQ ID NO: 1246899 - RNA, 20 nt, Human
agcuggggccaggcuggguc

SEQ ID NO: 1246900 - RNA, 22 nt, Human
agcuggggcuuugauguuccuu

SEQ ID NO: 1246901 - RNA, 14 nt, Human
agcuggggugcagg

SEQ ID NO: 1246902 - RNA, 15 nt, Human
agcuggggugcaggg

SEQ ID NO: 1246903 - RNA, 18 nt, Human
agcuggggugcagggaug

SEQ ID NO: 1246904 - RNA, 22 nt, Human
agcuggggugcagggauguggg

SEQ ID NO: 1246905 - RNA, 17 nt, Human
agcugucuuuuggagga

SEQ ID NO: 1246906 - RNA, 19 nt, Human
agcugucuuuuggaggacg

SEQ ID NO: 1246907 - RNA, 17 nt, Human
agcugugaccucucccc

SEQ ID NO: 1246908 - RNA, 14 nt, Human
agcugugaccugcu

SEQ ID NO: 1246909 - RNA, 15 nt, Human
agcugugaccugcug

SEQ ID NO: 1246910 - RNA, 16 nt, Human
agcugugaccugcuga

SEQ ID NO: 1246911 - RNA, 17 nt, Human
agcugugaccugcugag

SEQ ID NO: 1246912 - RNA, 18 nt, Human
agcugugaccugcugagc

SEQ ID NO: 1246913 - RNA, 19 nt, Human
agcugugaccugcugagcu

SEQ ID NO: 1246914 - RNA, 20 nt, Human
agcugugaccugcugagcuc

SEQ ID NO: 1246915 - RNA, 22 nt, Human
agcugugaccugcugagcucug

SEQ ID NO: 1246916 - RNA, 23 nt, Human
agcugugaccugcugagcucuga

SEQ ID NO: 1246917 - RNA, 19 nt, Human
agcugugacuucuauuuua

SEQ ID NO: 1246918 - RNA, 19 nt, Human
agcugugaguucucccugu

SEQ ID NO: 1246919 - RNA, 10 nt, Human
agcugugcag

SEQ ID NO: 1246920 - RNA, 12 nt, Human
agcugugcaggu

SEQ ID NO: 1246921 - RNA, 18 nt, Human
agcugugcagguggggag

SEQ ID NO: 1246922 - RNA, 19 nt, Human
agcugugcagguggggaga

SEQ ID NO: 1246923 - RNA, 21 nt, Human
ugccuuagaaccuuucuuaca

SEQ ID NO: 1246924 - RNA, 17 nt, Human
ugccuugucacgccaga

SEQ ID NO: 1246925 - RNA, 14 nt, Human
ugccuuagaaccuu

SEQ ID NO: 1246926 - RNA, 17 nt, Human
ugccuuagaaccuuucu

SEQ ID NO: 1246927 - RNA, 15 nt, Human
ugccuuacucuucuu

SEQ ID NO: 1246928 - RNA, 18 nt, Human
ugccuuacucuucuugaa

SEQ ID NO: 1246929 - RNA, 19 nt, Human
ugccuuacucuucuugaaa

SEQ ID NO: 1246930 - RNA, 17 nt, Human
ugccuuuauuuccacug

SEQ ID NO: 1246931 - RNA, 16 nt, Human
ugccuuucaggaucua

SEQ ID NO: 1246932 - RNA, 13 nt, Human
ugccuuguuucau

SEQ ID NO: 1246933 - RNA, 20 nt, Human
ugccuuguuuuuuguuuguu

SEQ ID NO: 1246934 - RNA, 16 nt, Human
ugccuuguuuuuuguu

SEQ ID NO: 1246935 - RNA, 22 nt, Human
ugccuuuuuauuuuuguuuuua

SEQ ID NO: 1246936 - RNA, 20 nt, Human
ugccuuuuuucuguauaaau

SEQ ID NO: 1246937 - RNA, 22 nt, Human
ugccuuuuuucuguauaaaugu

SEQ ID NO: 1246938 - RNA, 23 nt, Human
ugccuuuuuucuguauaaauguc

SEQ ID NO: 1246939 - RNA, 14 nt, Human
ugccuuuuuugauc

SEQ ID NO: 1246940 - RNA, 16 nt, Human
ugcgagagaugugugu

SEQ ID NO: 1246941 - RNA, 17 nt, Human
ugcgagagauguguguu

SEQ ID NO: 1246942 - RNA, 23 nt, Human
ugcgagagauguguguugauacu

SEQ ID NO: 1246943 - RNA, 15 nt, Human
ugcgacuuucugccu

SEQ ID NO: 1246944 - RNA, 16 nt, Human
ugcgacuuucugccug

SEQ ID NO: 1246945 - RNA, 17 nt, Human
ugcgacuuucugccugg

SEQ ID NO: 1246946 - RNA, 18 nt, Human
ugcgacuuucugccugga

SEQ ID NO: 1246947 - RNA, 21 nt, Human
ugcgacuuucugccuggagug

SEQ ID NO: 1246948 - RNA, 12 nt, Human
ugcgagagaugu

SEQ ID NO: 1246949 - RNA, 13 nt, Human
ugcgagagaugug

SEQ ID NO: 1246950 - RNA, 14 nt, Human
ugcgagagaugugu

SEQ ID NO: 1246951 - RNA, 15 nt, Human
ugcgagagaugugug

SEQ ID NO: 1246952 - RNA, 19 nt, Human
agcugccucuucccucuuc

SEQ ID NO: 1246953 - RNA, 15 nt, Human
agcugccucuucccu

SEQ ID NO: 1246954 - RNA, 23 nt, Human
agcugccuccccucuccuuccug

SEQ ID NO: 1246955 - RNA, 20 nt, Human
agcugccuccccucuccuuc

SEQ ID NO: 1246956 - RNA, 21 nt, Human
ugccucucugcaggucccuaa

SEQ ID NO: 1246957 - RNA, 12 nt, Human
ugccucucuagg

SEQ ID NO: 1246958 - RNA, 15 nt, Human
ugccucucuaggacc

SEQ ID NO: 1246959 - RNA, 12 nt, Human
ugccucugagag

SEQ ID NO: 1246960 - RNA, 22 nt, Human
ugccucugagagcaucaggccu

SEQ ID NO: 1246961 - RNA, 11 nt, Human
ugccucugagg

SEQ ID NO: 1246962 - RNA, 20 nt, Human
agcugccuggaagagcagcc

SEQ ID NO: 1246963 - RNA, 21 nt, Human
agcugccuggaagagcagccc

SEQ ID NO: 1246964 - RNA, 13 nt, Human
agcugccuggacc

SEQ ID NO: 1246965 - RNA, 14 nt, Human
agcugccuggaccc

SEQ ID NO: 1246966 - RNA, 15 nt, Human
agcugccugguauau

SEQ ID NO: 1246967 - RNA, 15 nt, Human
agcugccuggacccg

SEQ ID NO: 1246968 - RNA, 14 nt, Human
agcuggacccugac

SEQ ID NO: 1246969 - RNA, 15 nt, Human
agcuggacccugacc

SEQ ID NO: 1246970 - RNA, 17 nt, Human
agcuggacccugaccag

SEQ ID NO: 1246971 - RNA, 15 nt, Human
agcuggaccucacca

SEQ ID NO: 1246972 - RNA, 16 nt, Human
agcuggaccucaccaa

SEQ ID NO: 1246973 - RNA, 17 nt, Human
agcuggggccaggcugg

SEQ ID NO: 1246974 - RNA, 14 nt, Human
agcuggggaccugg

SEQ ID NO: 1246975 - RNA, 15 nt, Human
agcuggggaucccuc

SEQ ID NO: 1246976 - RNA, 22 nt, Human
agcuggggaucccuccccccca

SEQ ID NO: 1246977 - RNA, 13 nt, Human
agcugggccuggu

SEQ ID NO: 1246978 - RNA, 17 nt, Human
agcugggcuaaguaaau

SEQ ID NO: 1246979 - RNA, 15 nt, Human
agcugggcucugcaa

SEQ ID NO: 1246980 - RNA, 15 nt, Human
agcugggccuggucu

SEQ ID NO: 1246981 - RNA, 22 nt, Human
agcugggauuacaggcuccugc

SEQ ID NO: 1246982 - RNA, 23 nt, Human
agcugggauuacaggcuccugcc

SEQ ID NO: 1246983 - RNA, 18 nt, Human
agcugggauuacaggcuc

SEQ ID NO: 1246984 - RNA, 21 nt, Human
agcugggauuacaggcuccug

SEQ ID NO: 1246985 - RNA, 22 nt, Human
agcugggaucacauguggacuu

SEQ ID NO: 1246986 - RNA, 15 nt, Human
agcuggagaagaccc

SEQ ID NO: 1246987 - RNA, 20 nt, Human
ugccucucugcaggucccua

SEQ ID NO: 1246988 - RNA, 19 nt, Human
ugccucucugcaggucccu

SEQ ID NO: 1246989 - RNA, 18 nt, Human
ugccucucugcagguccc

SEQ ID NO: 1246990 - RNA, 16 nt, Human
ugccucucugcagguc

SEQ ID NO: 1246991 - RNA, 12 nt, Human
ugccucucuaca

SEQ ID NO: 1246992 - RNA, 14 nt, Human
agcugccaagagug

SEQ ID NO: 1246993 - RNA, 11 nt, Human
agcugcacuga

SEQ ID NO: 1246994 - RNA, 15 nt, Human
agcugcauuccgcag

SEQ ID NO: 1246995 - RNA, 18 nt, Human
agcugcauuccgcagccc

SEQ ID NO: 1246996 - RNA, 15 nt, Human
ugcccuuucugggca

SEQ ID NO: 1246997 - RNA, 20 nt, Human
ugcccuuguuuggggcagga

SEQ ID NO: 1246998 - RNA, 23 nt, Human
ugcccuuguuuggggcaggagua

SEQ ID NO: 1246999 - RNA, 24 nt, Human
ugcccuuguuuggggcaggaguag

SEQ ID NO: 1247000 - RNA, 16 nt, Human
ugccggggcagccccc

SEQ ID NO: 1247001 - RNA, 16 nt, Human
ugccucauuuuuuucc

SEQ ID NO: 1247002 - RNA, 21 nt, Human
ugccucauuuuuuuccuugca

SEQ ID NO: 1247003 - RNA, 19 nt, Human
agcugauggagaaggaagg

SEQ ID NO: 1247004 - RNA, 16 nt, Human
agcugauuaaaugaca

SEQ ID NO: 1247005 - RNA, 17 nt, Human
agcugauggagaaggaa

SEQ ID NO: 1247006 - RNA, 16 nt, Human
agcugauggagaagga

SEQ ID NO: 1247007 - RNA, 15 nt, Human
agcugauggagaagg

SEQ ID NO: 1247008 - RNA, 14 nt, Human
agcugauggagaag

SEQ ID NO: 1247009 - RNA, 23 nt, Human
agcucugcuauuaggccagcaag

SEQ ID NO: 1247010 - RNA, 12 nt, Human
agcucuguauca

SEQ ID NO: 1247011 - RNA, 22 nt, Human
agcucuguaucaggacccagag

SEQ ID NO: 1247012 - RNA, 23 nt, Human
agcucuguaucaggacccagagg

SEQ ID NO: 1247013 - RNA, 14 nt, Human
agcucuucuccauc

SEQ ID NO: 1247014 - RNA, 18 nt, Human
agcucuucuuaaaguauu

SEQ ID NO: 1247015 - RNA, 21 nt, Human
agcucucaguugcagcccugc

SEQ ID NO: 1247016 - RNA, 17 nt, Human
agcucucaguugcagcc

SEQ ID NO: 1247017 - RNA, 19 nt, Human
agcucuauuaugaauguga

SEQ ID NO: 1247018 - RNA, 22 nt, Human
agcucuaucaccaaggagccaa

SEQ ID NO: 1247019 - RNA, 16 nt, Human
agcucuauuaugaaug

SEQ ID NO: 1247020 - RNA, 21 nt, Human
ugcccucauggccccucugac

SEQ ID NO: 1247021 - RNA, 18 nt, Human
ugcccucauuuuauguca

SEQ ID NO: 1247022 - RNA, 18 nt, Human
agcucuccggucucucuc

SEQ ID NO: 1247023 - RNA, 17 nt, Human
agcucuggacagcccca

SEQ ID NO: 1247024 - RNA, 14 nt, Human
aggaaauauuuauu

SEQ ID NO: 1247025 - RNA, 18 nt, Human
aggaaauauuuauuuuaa

SEQ ID NO: 1247026 - RNA, 24 nt, Human
aggaaagcgccuccaacccuagca

SEQ ID NO: 1247027 - RNA, 13 nt, Human
aggaaagcaagaa

SEQ ID NO: 1247028 - RNA, 15 nt, Human
ugcugagucccaggc

SEQ ID NO: 1247029 - RNA, 18 nt, Human
ugcugagucccaggcuga

SEQ ID NO: 1247030 - RNA, 22 nt, Human
ugcugagucccaggcugagccu

SEQ ID NO: 1247031 - RNA, 15 nt, Human
ugcucuuagcugucu

SEQ ID NO: 1247032 - RNA, 12 nt, Human
ugcucuuagcug

SEQ ID NO: 1247033 - RNA, 13 nt, Human
ugcucugaucccu

SEQ ID NO: 1247034 - RNA, 14 nt, Human
ugcucugaucccuc

SEQ ID NO: 1247035 - RNA, 16 nt, Human
ugcucugaucccucua

SEQ ID NO: 1247036 - RNA, 19 nt, Human
ugcucugaucccucuacag

SEQ ID NO: 1247037 - RNA, 18 nt, Human
ugcucugaugaagaggag

SEQ ID NO: 1247038 - RNA, 19 nt, Human
ugcucugaugaagaggagu

SEQ ID NO: 1247039 - RNA, 16 nt, Human
ugcucugaugcaucag

SEQ ID NO: 1247040 - RNA, 17 nt, Human
ugcucugaugcaucaga

SEQ ID NO: 1247041 - RNA, 14 nt, Human
ugcucugauuuauc

SEQ ID NO: 1247042 - RNA, 18 nt, Human
ugcucugaugcaucagaa

SEQ ID NO: 1247043 - RNA, 17 nt, Human
ugcuaucauuauucgua

SEQ ID NO: 1247044 - RNA, 21 nt, Human
ugcucuguuaauaaucucaca

SEQ ID NO: 1247045 - RNA, 13 nt, Human
ugcucuuaauugc

SEQ ID NO: 1247046 - RNA, 15 nt, Human
ugcucuuaauugcca

SEQ ID NO: 1247047 - RNA, 16 nt, Human
ugcucuuaauugccac

SEQ ID NO: 1247048 - RNA, 21 nt, Human
ugcucuuaauugccaccucua

SEQ ID NO: 1247049 - RNA, 14 nt, Human
ugcucuguagccua

SEQ ID NO: 1247050 - RNA, 23 nt, Human
ugcucugguuguuucuguuccaa

SEQ ID NO: 1247051 - RNA, 18 nt, Human
ugcucugguuguuucugu

SEQ ID NO: 1247052 - RNA, 19 nt, Human
ugcucugguuguuucuguu

SEQ ID NO: 1247053 - RNA, 21 nt, Human
ugcucugguuguuucuguucc

SEQ ID NO: 1247054 - RNA, 23 nt, Human
aggaaugaaauccugcuucagug

SEQ ID NO: 1247055 - RNA, 23 nt, Human
aggaauugacccacaagaaauga

SEQ ID NO: 1247056 - RNA, 19 nt, Human
aggaauugacccacaagaa

SEQ ID NO: 1247057 - RNA, 19 nt, Human
aggaaucugugggucuggg

SEQ ID NO: 1247058 - RNA, 22 nt, Human
aggaaucugugggucugggagu

SEQ ID NO: 1247059 - RNA, 22 nt, Human
aggaaucuuuaaaagaugcuuu

SEQ ID NO: 1247060 - RNA, 16 nt, Human
aggaaucuuuaaaaga

SEQ ID NO: 1247061 - RNA, 17 nt, Human
aggaagagaaggagcag

SEQ ID NO: 1247062 - RNA, 16 nt, Human
aggaagagaaggagca

SEQ ID NO: 1247063 - RNA, 14 nt, Human
aggaagagaaggag

SEQ ID NO: 1247064 - RNA, 12 nt, Human
aggaagagaagg

SEQ ID NO: 1247065 - RNA, 22 nt, Human
aggaauuuuauuuuuuucugaa

SEQ ID NO: 1247066 - RNA, 14 nt, Human
aggaauuuucuuug

SEQ ID NO: 1247067 - RNA, 16 nt, Human
aggaauuuucuuugug

SEQ ID NO: 1247068 - RNA, 14 nt, Human
aggacaaccauucc

SEQ ID NO: 1247069 - RNA, 22 nt, Human
ugcugccacacuucaggcucuu

SEQ ID NO: 1247070 - RNA, 14 nt, Human
ugcugccacugagg

SEQ ID NO: 1247071 - RNA, 15 nt, Human
ugcugccacacuuca

SEQ ID NO: 1247072 - RNA, 16 nt, Human
ugcugccacacuucag

SEQ ID NO: 1247073 - RNA, 19 nt, Human
ugcugccacacuucaggcu

SEQ ID NO: 1247074 - RNA, 14 nt, Human
ugcugcccagccuc

SEQ ID NO: 1247075 - RNA, 16 nt, Human
ugcugcccagccucca

SEQ ID NO: 1247076 - RNA, 21 nt, Human
agcuuauugucuagugaaacu

SEQ ID NO: 1247077 - RNA, 20 nt, Human
agcuuauguuaacugacaag

SEQ ID NO: 1247078 - RNA, 15 nt, Human
agcuuaugaaaagaa

SEQ ID NO: 1247079 - RNA, 16 nt, Human
agcuuaugaaaagaau

SEQ ID NO: 1247080 - RNA, 19 nt, Human
agcuuagcuuuagaaacag

SEQ ID NO: 1247081 - RNA, 18 nt, Human
agcuuauacgaaauaauu

SEQ ID NO: 1247082 - RNA, 20 nt, Human
agcuuauacgaaauaauugu

SEQ ID NO: 1247083 - RNA, 23 nt, Human
agcuuaucuacuuccaaacuaau

SEQ ID NO: 1247084 - RNA, 12 nt, Human
agcuugggaaug

SEQ ID NO: 1247085 - RNA, 14 nt, Human
agcuugggaaugga

SEQ ID NO: 1247086 - RNA, 20 nt, Human
agcuugggaaaggugguguu

SEQ ID NO: 1247087 - RNA, 12 nt, Human
agcuuucugaac

SEQ ID NO: 1247088 - RNA, 15 nt, Human
agcuuucugaacagc

SEQ ID NO: 1247089 - RNA, 16 nt, Human
agcuuucugaacagcu

SEQ ID NO: 1247090 - RNA, 17 nt, Human
agcuuucugaacagcug

SEQ ID NO: 1247091 - RNA, 18 nt, Human
agcuuucugaacagcugg

SEQ ID NO: 1247092 - RNA, 19 nt, Human
agcuuucugaacagcuggu

SEQ ID NO: 1247093 - RNA, 20 nt, Human
agcuuucugaacagcuggug

SEQ ID NO: 1247094 - RNA, 21 nt, Human
agcuuucugaacagcuggugu

SEQ ID NO: 1247095 - RNA, 22 nt, Human
agcuuucugaacagcuggugua

SEQ ID NO: 1247096 - RNA, 17 nt, Human
agcuuaaaauacaagac

SEQ ID NO: 1247097 - RNA, 18 nt, Human
agcuuaaaauacaagacu

SEQ ID NO: 1247098 - RNA, 20 nt, Human
agcuuaaaauacaagacugc

SEQ ID NO: 1247099 - RNA, 22 nt, Human
agcuuagaguuggccauauuua

SEQ ID NO: 1247100 - RNA, 13 nt, Human
agcuuagauuuca

SEQ ID NO: 1247101 - RNA, 15 nt, Human
agcuuagauuucaua

SEQ ID NO: 1247102 - RNA, 16 nt, Human
agcuuagauuucauag

SEQ ID NO: 1247103 - RNA, 18 nt, Human
agcuuagcuuuagaaaca

SEQ ID NO: 1247104 - RNA, 14 nt, Human
agcuguuuucuucu

SEQ ID NO: 1247105 - RNA, 23 nt, Human
agcuguuuuguugacauucugaa

SEQ ID NO: 1247106 - RNA, 14 nt, Human
agcuguuuuguuga

SEQ ID NO: 1247107 - RNA, 12 nt, Human
agcuuaaaacuu

SEQ ID NO: 1247108 - RNA, 13 nt, Human
agcuuaaaacuuu

SEQ ID NO: 1247109 - RNA, 14 nt, Human
agcuuaaaacuuug

SEQ ID NO: 1247110 - RNA, 22 nt, Human
agcuuaaaacuuugaaguuagc

SEQ ID NO: 1247111 - RNA, 16 nt, Human
agcuuaaaacuuugaa

SEQ ID NO: 1247112 - RNA, 13 nt, Human
agcuuaaaauaca

SEQ ID NO: 1247113 - RNA, 14 nt, Human
agcuuaaaauacaa

SEQ ID NO: 1247114 - RNA, 15 nt, Human
agcuuaaaauacaag

SEQ ID NO: 1247115 - RNA, 21 nt, Human
agcuuagcuuuagaaacagug

SEQ ID NO: 1247116 - RNA, 21 nt, Human
agcuuauacgaaauaauuguu

SEQ ID NO: 1247117 - RNA, 17 nt, Human
aggaaaaggccuggggu

SEQ ID NO: 1247118 - RNA, 15 nt, Human
agcuuugacucagga

SEQ ID NO: 1247119 - RNA, 16 nt, Human
agcuuugacucaggag

SEQ ID NO: 1247120 - RNA, 20 nt, Human
agcuuugacucaggagccug

SEQ ID NO: 1247121 - RNA, 21 nt, Human
agcuuugacucaggagccugu

SEQ ID NO: 1247122 - RNA, 13 nt, Human
aggaaaaggccug

SEQ ID NO: 1247123 - RNA, 14 nt, Human
aggaaaaggccugg

SEQ ID NO: 1247124 - RNA, 15 nt, Human
aggaaaaggccuggg

SEQ ID NO: 1247125 - RNA, 16 nt, Human
aggaaaaggccugggg

SEQ ID NO: 1247126 - RNA, 18 nt, Human
aggaaaaggccuggggug

SEQ ID NO: 1247127 - RNA, 15 nt, Human
aggaaacgagacuuu

SEQ ID NO: 1247128 - RNA, 13 nt, Human
aggaaagaaaaca

SEQ ID NO: 1247129 - RNA, 12 nt, Human
aggaaagaaaac

SEQ ID NO: 1247130 - RNA, 22 nt, Human
aggaaacuccugugaccacaac

SEQ ID NO: 1247131 - RNA, 20 nt, Human
aggaaacgagacuuuccauu

SEQ ID NO: 1247132 - RNA, 21 nt, Human
aggaaacucugcauucuagua

SEQ ID NO: 1247133 - RNA, 13 nt, Human
aggaaagagaacu

SEQ ID NO: 1247134 - RNA, 19 nt, Human
aggaaagagaacuuccaga

SEQ ID NO: 1247135 - RNA, 16 nt, Human
ugcuaguaauuggaaa

SEQ ID NO: 1247136 - RNA, 21 nt, Human
ugcuauaacuauguugauaaa

SEQ ID NO: 1247137 - RNA, 11 nt, Human
ugcuaguguga

SEQ ID NO: 1247138 - RNA, 13 nt, Human
ugcuauacugcau

SEQ ID NO: 1247139 - RNA, 17 nt, Human
aggaaagaggaagcaaa

SEQ ID NO: 1247140 - RNA, 14 nt, Human
ugcuaguaauugga

SEQ ID NO: 1247141 - RNA, 15 nt, Human
ugcauaauggucaga

SEQ ID NO: 1247142 - RNA, 17 nt, Human
ugcauaauguuucugga

SEQ ID NO: 1247143 - RNA, 18 nt, Human
ugcauaauguuucuggau

SEQ ID NO: 1247144 - RNA, 22 nt, Human
ugcauaacguauaaaagccugu

SEQ ID NO: 1247145 - RNA, 17 nt, Human
ugcauaacaauuccucu

SEQ ID NO: 1247146 - RNA, 18 nt, Human
ugcauaacaauuccucua

SEQ ID NO: 1247147 - RNA, 19 nt, Human
ugcagugagccgagauugu

SEQ ID NO: 1247148 - RNA, 11 nt, Human
ugcauaaaaug

SEQ ID NO: 1247149 - RNA, 20 nt, Human
ugcaggucccuaauaaagcu

SEQ ID NO: 1247150 - RNA, 19 nt, Human
ugcaggucccuaauaaagc

SEQ ID NO: 1247151 - RNA, 18 nt, Human
ugcaggucccuaauaaag

SEQ ID NO: 1247152 - RNA, 14 nt, Human
ugcagcuuguagcc

SEQ ID NO: 1247153 - RNA, 16 nt, Human
ugcagcuuguagccag

SEQ ID NO: 1247154 - RNA, 17 nt, Human
ugcagcuuguagccagc

SEQ ID NO: 1247155 - RNA, 18 nt, Human
ugcagcuuguagccagcc

SEQ ID NO: 1247156 - RNA, 19 nt, Human
ugcagcuuguagccagccg

SEQ ID NO: 1247157 - RNA, 20 nt, Human
ugcagcuuguagccagccgg

SEQ ID NO: 1247158 - RNA, 21 nt, Human
ugcaggucccuaauaaagcug

SEQ ID NO: 1247159 - RNA, 21 nt, Human
ugcagcuuguagccagccggg

SEQ ID NO: 1247160 - RNA, 14 nt, Human
ugcagugaacuucc

SEQ ID NO: 1247161 - RNA, 19 nt, Human
ugcagugaacuuccagaca

SEQ ID NO: 1247162 - RNA, 14 nt, Human
ugcagugagccgag

SEQ ID NO: 1247163 - RNA, 19 nt, Human
agccugagcgacagugaga

SEQ ID NO: 1247164 - RNA, 22 nt, Human
ugcagcccugcugcugccugcc

SEQ ID NO: 1247165 - RNA, 14 nt, Human
ugcagccgcugagc

SEQ ID NO: 1247166 - RNA, 17 nt, Human
ugcagccggcacagggu

SEQ ID NO: 1247167 - RNA, 18 nt, Human
ugcagccggcacaggguc

SEQ ID NO: 1247168 - RNA, 19 nt, Human
ugcagccggcacagggucu

SEQ ID NO: 1247169 - RNA, 19 nt, Human
ugcagcugagagaaaauaa

SEQ ID NO: 1247170 - RNA, 20 nt, Human
ugcagcuguggcagaguuac

SEQ ID NO: 1247171 - RNA, 22 nt, Human
ugcagcuguggcagaguuacag

SEQ ID NO: 1247172 - RNA, 15 nt, Human
ugcagcuguuuuguu

SEQ ID NO: 1247173 - RNA, 18 nt, Human
ugcagcuguuuuguugac

SEQ ID NO: 1247174 - RNA, 23 nt, Human
ugcagcuguuuuguugacauucu

SEQ ID NO: 1247175 - RNA, 21 nt, Human
ugcagcuguuuuguugacauu

SEQ ID NO: 1247176 - RNA, 16 nt, Human
agccugagcaacucuu

SEQ ID NO: 1247177 - RNA, 21 nt, Human
agccugagcaacucuugauua

SEQ ID NO: 1247178 - RNA, 18 nt, Human
agccugagcgacagugag

SEQ ID NO: 1247179 - RNA, 19 nt, Human
agccugacccucaucuuuc

SEQ ID NO: 1247180 - RNA, 19 nt, Human
agccugaucaccugcccug

SEQ ID NO: 1247181 - RNA, 18 nt, Human
agccugaucaccugcccu

SEQ ID NO: 1247182 - RNA, 14 nt, Human
agccugcaggaucu

SEQ ID NO: 1247183 - RNA, 22 nt, Human
agccugcaggaucucaccaggc

SEQ ID NO: 1247184 - RNA, 23 nt, Human
agccugcaggaucucaccaggca

SEQ ID NO: 1247185 - RNA, 15 nt, Human
agccugcauugagcu

SEQ ID NO: 1247186 - RNA, 22 nt, Human
agccugcauugagcuugcaugc

SEQ ID NO: 1247187 - RNA, 23 nt, Human
agccugcauugagcuugcaugcu

SEQ ID NO: 1247188 - RNA, 12 nt, Human
agccugcccucc

SEQ ID NO: 1247189 - RNA, 13 nt, Human
ugcauacucauua

SEQ ID NO: 1247190 - RNA, 23 nt, Human
ugcaucuccacuuggcauuagcu

SEQ ID NO: 1247191 - RNA, 13 nt, Human
ugcaucucccaga

SEQ ID NO: 1247192 - RNA, 18 nt, Human
ugcaucucccagauaaug

SEQ ID NO: 1247193 - RNA, 17 nt, Human
ugcaucuggagagaaca

SEQ ID NO: 1247194 - RNA, 21 nt, Human
ugcaucuggagagaacagguu

SEQ ID NO: 1247195 - RNA, 18 nt, Human
agcccuucuuuccacaga

SEQ ID NO: 1247196 - RNA, 19 nt, Human
agcccuucuuuccacagaa

SEQ ID NO: 1247197 - RNA, 23 nt, Human
agccguuuguuccccaagacauu

SEQ ID NO: 1247198 - RNA, 18 nt, Human
agccuaaggcuccuguuu

SEQ ID NO: 1247199 - RNA, 19 nt, Human
agccuaaggcuccuguuuu

SEQ ID NO: 1247200 - RNA, 12 nt, Human
agccuaagggau

SEQ ID NO: 1247201 - RNA, 21 nt, Human
agccuaagggauccugccugc

SEQ ID NO: 1247202 - RNA, 16 nt, Human
agccuaagggauccug

SEQ ID NO: 1247203 - RNA, 13 nt, Human
agccuacaggccu

SEQ ID NO: 1247204 - RNA, 14 nt, Human
agccuacaggccuc

SEQ ID NO: 1247205 - RNA, 17 nt, Human
agccuaggccuaguccu

SEQ ID NO: 1247206 - RNA, 19 nt, Human
agccuaggccuaguccugc

SEQ ID NO: 1247207 - RNA, 22 nt, Human
agccuaggccuaguccugcgaa

SEQ ID NO: 1247208 - RNA, 14 nt, Human
agccuagugaaggc

SEQ ID NO: 1247209 - RNA, 23 nt, Human
agccuagugaaggcuucucucug

SEQ ID NO: 1247210 - RNA, 20 nt, Human
agccuagugaaggcuucucu

SEQ ID NO: 1247211 - RNA, 20 nt, Human
agccucaaaacaaaggccua

SEQ ID NO: 1247212 - RNA, 18 nt, Human
agccucaaaacaaaggcc

SEQ ID NO: 1247213 - RNA, 20 nt, Human
ugcagaaagcaucccucacc

SEQ ID NO: 1247214 - RNA, 13 nt, Human
ugcagaaagcauc

SEQ ID NO: 1247215 - RNA, 17 nt, Human
ugcagaaaauucugugc

SEQ ID NO: 1247216 - RNA, 15 nt, Human
ugcagaaacuacuga

SEQ ID NO: 1247217 - RNA, 15 nt, Human
ugcagaacaaaugaa

SEQ ID NO: 1247218 - RNA, 14 nt, Human
ugcagaacaaauga

SEQ ID NO: 1247219 - RNA, 14 nt, Human
ugcagaacacauuu

SEQ ID NO: 1247220 - RNA, 21 nt, Human
ugcagaacacauuucaaauga

SEQ ID NO: 1247221 - RNA, 20 nt, Human
ugcagaaccggagagccagc

SEQ ID NO: 1247222 - RNA, 21 nt, Human
ugcagaaccggagagccagcu

SEQ ID NO: 1247223 - RNA, 17 nt, Human
ugcacucccaccugaca

SEQ ID NO: 1247224 - RNA, 19 nt, Human
ugcacucccaccugacaca

SEQ ID NO: 1247225 - RNA, 18 nt, Human
ugcagaaaauucugugcc

SEQ ID NO: 1247226 - RNA, 18 nt, Human
ugcagaacaaaugaagac

SEQ ID NO: 1247227 - RNA, 15 nt, Human
ugcagacuucccagc

SEQ ID NO: 1247228 - RNA, 22 nt, Human
ugcagacuucccagcuaggaag

SEQ ID NO: 1247229 - RNA, 16 nt, Human
ugcagacuucccagcu

SEQ ID NO: 1247230 - RNA, 13 nt, Human
agcccuucauuug

SEQ ID NO: 1247231 - RNA, 14 nt, Human
agcccuucauuugg

SEQ ID NO: 1247232 - RNA, 21 nt, Human
agcccuuaugcgguuaauuuu

SEQ ID NO: 1247233 - RNA, 22 nt, Human
agcccuuaugcgguuaauuuug

SEQ ID NO: 1247234 - RNA, 19 nt, Human
agcccuuccaugucgccuc

SEQ ID NO: 1247235 - RNA, 22 nt, Human
agcccuuccaugucgccucugc

SEQ ID NO: 1247236 - RNA, 23 nt, Human
agcccuuccaugucgccucugca

SEQ ID NO: 1247237 - RNA, 16 nt, Human
agcagcaacuuguccu

SEQ ID NO: 1247238 - RNA, 18 nt, Human
agcagcaccguucugugc

SEQ ID NO: 1247239 - RNA, 14 nt, Human
ugcacaagaaugga

SEQ ID NO: 1247240 - RNA, 15 nt, Human
ugcacaagaauggau

SEQ ID NO: 1247241 - RNA, 16 nt, Human
ugcacaagaauggauc

SEQ ID NO: 1247242 - RNA, 23 nt, Human
ugcacaagaauggaucacaagau

SEQ ID NO: 1247243 - RNA, 20 nt, Human
ugcacaagaauggaucacaa

SEQ ID NO: 1247244 - RNA, 15 nt, Human
ugcacaauaaaaaug

SEQ ID NO: 1247245 - RNA, 20 nt, Human
ugcacaauaaaaauguuuaa

SEQ ID NO: 1247246 - RNA, 21 nt, Human
ugcacaauaaaaauguuuaac

SEQ ID NO: 1247247 - RNA, 18 nt, Human
ugcacaauaacuccuccc

SEQ ID NO: 1247248 - RNA, 19 nt, Human
ugcacaauaacuccuccca

SEQ ID NO: 1247249 - RNA, 22 nt, Human
ugcacaauaacuccucccaggg

SEQ ID NO: 1247250 - RNA, 21 nt, Human
ugcacaauaacuccucccagg

SEQ ID NO: 1247251 - RNA, 13 nt, Human
ugcacaauguaga

SEQ ID NO: 1247252 - RNA, 14 nt, Human
ugcacaugaacuua

SEQ ID NO: 1247253 - RNA, 21 nt, Human
ugcacaugaacuuagauuuua

SEQ ID NO: 1247254 - RNA, 21 nt, Human
ugcacaugacucggggguggg

SEQ ID NO: 1247255 - RNA, 17 nt, Human
ugcacaugaacuuagau

SEQ ID NO: 1247256 - RNA, 22 nt, Human
ugcaccaagcaggaaaugaaaa

SEQ ID NO: 1247257 - RNA, 12 nt, Human
ugcaccaccaag

SEQ ID NO: 1247258 - RNA, 14 nt, Human
ugcaccaccaagcc

SEQ ID NO: 1247259 - RNA, 15 nt, Human
ugcaccaccaagcca

SEQ ID NO: 1247260 - RNA, 14 nt, Human
ugcaccaagcagga

SEQ ID NO: 1247261 - RNA, 16 nt, Human
ugcaccaccaagccaa

SEQ ID NO: 1247262 - RNA, 18 nt, Human
ugcaccaccaagccaagg

SEQ ID NO: 1247263 - RNA, 19 nt, Human
ugcaccaccaagccaaggg

SEQ ID NO: 1247264 - RNA, 15 nt, Human
ugcacuacugacaug

SEQ ID NO: 1247265 - RNA, 16 nt, Human
ugcacuacugacaugu

SEQ ID NO: 1247266 - RNA, 18 nt, Human
ugcacuacugacaugugg

SEQ ID NO: 1247267 - RNA, 14 nt, Human
ugcacucccaccug

SEQ ID NO: 1247268 - RNA, 15 nt, Human
ugcacucccaccuga

SEQ ID NO: 1247269 - RNA, 14 nt, Human
ugcacguggccucu

SEQ ID NO: 1247270 - RNA, 15 nt, Human
ugcacguggccucuu

SEQ ID NO: 1247271 - RNA, 16 nt, Human
ugcacguggccucuug

SEQ ID NO: 1247272 - RNA, 17 nt, Human
ugcacguggccucuuga

SEQ ID NO: 1247273 - RNA, 17 nt, Human
ugcacuaacagaguggc

SEQ ID NO: 1247274 - RNA, 14 nt, Human
ugcacuacugacau

SEQ ID NO: 1247275 - RNA, 23 nt, Human
ugccacaccccccaccccuagga

SEQ ID NO: 1247276 - RNA, 21 nt, Human
ugccacaccccccaccccuag

SEQ ID NO: 1247277 - RNA, 19 nt, Human
ugccacacgagaaccugaa

SEQ ID NO: 1247278 - RNA, 18 nt, Human
ugccaauauuaaaucugc

SEQ ID NO: 1247279 - RNA, 19 nt, Human
ugccaauauuaaaucugcu

SEQ ID NO: 1247280 - RNA, 19 nt, Human
ugccacaaggacuuccugu

SEQ ID NO: 1247281 - RNA, 22 nt, Human
ugccacacaaggauagaugcug

SEQ ID NO: 1247282 - RNA, 14 nt, Human
ugcauuuccugaca

SEQ ID NO: 1247283 - RNA, 22 nt, Human
ugcauugaacacaaacuguaaa

SEQ ID NO: 1247284 - RNA, 19 nt, Human
ugcauugaacacaaacugu

SEQ ID NO: 1247285 - RNA, 21 nt, Human
ugcauugaacacaaacuguaa

SEQ ID NO: 1247286 - RNA, 16 nt, Human
ugcauucuggauuuua

SEQ ID NO: 1247287 - RNA, 15 nt, Human
ugcauucuucucugu

SEQ ID NO: 1247288 - RNA, 16 nt, Human
ugcauucuucucuguu

SEQ ID NO: 1247289 - RNA, 16 nt, Human
ugcauucuucugagca

SEQ ID NO: 1247290 - RNA, 20 nt, Human
ugcauucuucugagcacugu

SEQ ID NO: 1247291 - RNA, 17 nt, Human
ugcauugaaaagagcug

SEQ ID NO: 1247292 - RNA, 18 nt, Human
ugcauugaaaagagcuga

SEQ ID NO: 1247293 - RNA, 20 nt, Human
ugcauugaaaagagcugaag

SEQ ID NO: 1247294 - RNA, 13 nt, Human
ugcauugaacaca

SEQ ID NO: 1247295 - RNA, 14 nt, Human
ugcauugaacacaa

SEQ ID NO: 1247296 - RNA, 15 nt, Human
ugcauugaacacaaa

SEQ ID NO: 1247297 - RNA, 17 nt, Human
ugcauugaacacaaacu

SEQ ID NO: 1247298 - RNA, 18 nt, Human
ugcauugaacacaaacug

SEQ ID NO: 1247299 - RNA, 10 nt, Human
agccugcuca

SEQ ID NO: 1247300 - RNA, 20 nt, Human
agcgcccacuagacccacug

SEQ ID NO: 1247301 - RNA, 12 nt, Human
agcgccaggcug

SEQ ID NO: 1247302 - RNA, 21 nt, Human
agcgccaggcugaccacagca

SEQ ID NO: 1247303 - RNA, 17 nt, Human
agccugccgagcaaccg

SEQ ID NO: 1247304 - RNA, 21 nt, Human
agccugcgccaccgcccagag

SEQ ID NO: 1247305 - RNA, 22 nt, Human
agcgcccaaaggacgcacugag

SEQ ID NO: 1247306 - RNA, 14 nt, Human
agcgcccagcuccu

SEQ ID NO: 1247307 - RNA, 16 nt, Human
agcgcccagcuccuga

SEQ ID NO: 1247308 - RNA, 19 nt, Human
agcgcuagaggaagcagcc

SEQ ID NO: 1247309 - RNA, 20 nt, Human
agcgcuagaggaagcagcca

SEQ ID NO: 1247310 - RNA, 13 nt, Human
agcgcuaucuccc

SEQ ID NO: 1247311 - RNA, 18 nt, Human
agcgcuaucucccugccu

SEQ ID NO: 1247312 - RNA, 17 nt, Human
agcgcuaucucccugcc

SEQ ID NO: 1247313 - RNA, 14 nt, Human
agcggcagaugggg

SEQ ID NO: 1247314 - RNA, 15 nt, Human
agcggcaucaggcuu

SEQ ID NO: 1247315 - RNA, 13 nt, Human
agcggcaucaggc

SEQ ID NO: 1247316 - RNA, 14 nt, Human
agcggcccugucau

SEQ ID NO: 1247317 - RNA, 11 nt, Human
agcggccggcc

SEQ ID NO: 1247318 - RNA, 18 nt, Human
agcggccggccagccccu

SEQ ID NO: 1247319 - RNA, 22 nt, Human
agcggccggccagccccuggcc

SEQ ID NO: 1247320 - RNA, 18 nt, Human
agcggcccugucauccag

SEQ ID NO: 1247321 - RNA, 23 nt, Human
ugccacugccucuuccucccuca

SEQ ID NO: 1247322 - RNA, 12 nt, Human
ugccacacuuca

SEQ ID NO: 1247323 - RNA, 19 nt, Human
ugccacugccuucgcuucu

SEQ ID NO: 1247324 - RNA, 21 nt, Human
ugccacugccuucgcuucuug

SEQ ID NO: 1247325 - RNA, 22 nt, Human
ugccacugccuucgcuucuugc

SEQ ID NO: 1247326 - RNA, 13 nt, Human
ugccacuggagug

SEQ ID NO: 1247327 - RNA, 19 nt, Human
ugccacuggggaaaacucc

SEQ ID NO: 1247328 - RNA, 14 nt, Human
ugccacuuaaugua

SEQ ID NO: 1247329 - RNA, 17 nt, Human
ugccacuuaauguaugu

SEQ ID NO: 1247330 - RNA, 18 nt, Human
ugccacuuaauguauguu

SEQ ID NO: 1247331 - RNA, 20 nt, Human
ugccacuuaauguauguuac

SEQ ID NO: 1247332 - RNA, 23 nt, Human
ugccacuuaauguauguuaccaa

SEQ ID NO: 1247333 - RNA, 17 nt, Human
ugccagucccccugccc

SEQ ID NO: 1247334 - RNA, 12 nt, Human
ugccacuguugu

SEQ ID NO: 1247335 - RNA, 19 nt, Human
ugccagucccccugcccca

SEQ ID NO: 1247336 - RNA, 20 nt, Human
ugccagucccccugccccag

SEQ ID NO: 1247337 - RNA, 17 nt, Human
ugccauagucuuaacug

SEQ ID NO: 1247338 - RNA, 20 nt, Human
ugccauagucuuaacugguc

SEQ ID NO: 1247339 - RNA, 18 nt, Human
ugccauaugauuuacauu

SEQ ID NO: 1247340 - RNA, 14 nt, Human
ugccauauuaaauu

SEQ ID NO: 1247341 - RNA, 16 nt, Human
ugccauauuaaauuuu

SEQ ID NO: 1247342 - RNA, 23 nt, Human
ugccauauuaaauuuuuuguuga

SEQ ID NO: 1247343 - RNA, 17 nt, Human
agcgugcuuuaaaaaau

SEQ ID NO: 1247344 - RNA, 14 nt, Human
agcguggaggggua

SEQ ID NO: 1247345 - RNA, 20 nt, Human
agcguggagggguaggggcu

SEQ ID NO: 1247346 - RNA, 18 nt, Human
agcguggccuuguucugu

SEQ ID NO: 1247347 - RNA, 22 nt, Human
agcguggccuuguucugucacc

SEQ ID NO: 1247348 - RNA, 17 nt, Human
agcuauauaagacaaga

SEQ ID NO: 1247349 - RNA, 11 nt, Human
agcuauauaag

SEQ ID NO: 1247350 - RNA, 19 nt, Human
agcuauggugucauaggcu

SEQ ID NO: 1247351 - RNA, 15 nt, Human
agcuauuuaaagcau

SEQ ID NO: 1247352 - RNA, 13 nt, Human
agcuauuucaucu

SEQ ID NO: 1247353 - RNA, 14 nt, Human
agcuauuucaucua

SEQ ID NO: 1247354 - RNA, 17 nt, Human
agcuauuucaucuauuu

SEQ ID NO: 1247355 - RNA, 21 nt, Human
agcuauuucaucuauuuuugg

SEQ ID NO: 1247356 - RNA, 23 nt, Human
agcuacucuccccacgagggcug

SEQ ID NO: 1247357 - RNA, 22 nt, Human
agcuacucuccccacgagggcu

SEQ ID NO: 1247358 - RNA, 23 nt, Human
agcuacugccgucagugcugugc

SEQ ID NO: 1247359 - RNA, 15 nt, Human
agcuacugugugugu

SEQ ID NO: 1247360 - RNA, 19 nt, Human
agcuacugugugugugaau

SEQ ID NO: 1247361 - RNA, 20 nt, Human
agcuacugugugugugaaug

SEQ ID NO: 1247362 - RNA, 23 nt, Human
agcuacugugugugugaaugaac

SEQ ID NO: 1247363 - RNA, 15 nt, Human
agcuacuuccuccuc

SEQ ID NO: 1247364 - RNA, 16 nt, Human
agcuacuuccuccucc

SEQ ID NO: 1247365 - RNA, 21 nt, Human
agcuacuuccuccuccccacu

SEQ ID NO: 1247366 - RNA, 22 nt, Human
agcuaguuuuauucuugguuuu

SEQ ID NO: 1247367 - RNA, 18 nt, Human
agcuauaaaaugaauaca

SEQ ID NO: 1247368 - RNA, 22 nt, Human
agcuauaaagcaguauuuuucu

SEQ ID NO: 1247369 - RNA, 13 nt, Human
agcuauuuuucua

SEQ ID NO: 1247370 - RNA, 14 nt, Human
ugccauuaaagaau

SEQ ID NO: 1247371 - RNA, 14 nt, Human
ugccauuaacaaau

SEQ ID NO: 1247372 - RNA, 16 nt, Human
ugccauucacuucaua

SEQ ID NO: 1247373 - RNA, 18 nt, Human
ugcccaaccugcucuccu

SEQ ID NO: 1247374 - RNA, 22 nt, Human
ugcccaaccugcucuccucuug

SEQ ID NO: 1247375 - RNA, 19 nt, Human
ugccauugggguaguugug

SEQ ID NO: 1247376 - RNA, 20 nt, Human
ugcccaacccuucccucacc

SEQ ID NO: 1247377 - RNA, 22 nt, Human
ugcccaacccuucccucaccuu

SEQ ID NO: 1247378 - RNA, 23 nt, Human
ugcccaaccugcucuccucuugc

SEQ ID NO: 1247379 - RNA, 24 nt, Human
ugcccaaccugcucuccucuugcc

SEQ ID NO: 1247380 - RNA, 11 nt, Human
ugccauuguag

SEQ ID NO: 1247381 - RNA, 23 nt, Human
ugcccaagccagaggcuggguuc

SEQ ID NO: 1247382 - RNA, 15 nt, Human
agcuauuugauguaa

SEQ ID NO: 1247383 - RNA, 17 nt, Human
agcuauuugauguaaua

SEQ ID NO: 1247384 - RNA, 20 nt, Human
agcuauuugauguaauacuu

SEQ ID NO: 1247385 - RNA, 12 nt, Human
agcuauuuucca

SEQ ID NO: 1247386 - RNA, 13 nt, Human
agcuauuuuccag

SEQ ID NO: 1247387 - RNA, 13 nt, Human
agcuauuuuguga

SEQ ID NO: 1247388 - RNA, 21 nt, Human
agcuauuuuccaggcuucugc

SEQ ID NO: 1247389 - RNA, 14 nt, Human
agcuauuuuucuaa

SEQ ID NO: 1247390 - RNA, 15 nt, Human
ugcccaggccugccu

SEQ ID NO: 1247391 - RNA, 17 nt, Human
ugcccaggccugccugu

SEQ ID NO: 1247392 - RNA, 17 nt, Human
ugcccccaccccauucc

SEQ ID NO: 1247393 - RNA, 22 nt, Human
ugcccccaccccauucccgcag

SEQ ID NO: 1247394 - RNA, 19 nt, Human
ugcccccaccccauucccg

SEQ ID NO: 1247395 - RNA, 17 nt, Human
ugcccccacugaccaga

SEQ ID NO: 1247396 - RNA, 14 nt, Human
ugcccccagagcca

SEQ ID NO: 1247397 - RNA, 16 nt, Human
ugcccccagagccaca

SEQ ID NO: 1247398 - RNA, 18 nt, Human
ugcccccagagccacagu

SEQ ID NO: 1247399 - RNA, 17 nt, Human
ugcccccagagccacag

SEQ ID NO: 1247400 - RNA, 17 nt, Human
ugccccuacccuggacu

SEQ ID NO: 1247401 - RNA, 19 nt, Human
ugcccuaucacccaacgcu

SEQ ID NO: 1247402 - RNA, 17 nt, Human
ugcccucauggccccuc

SEQ ID NO: 1247403 - RNA, 19 nt, Human
ugcccucauggccccucug

SEQ ID NO: 1247404 - RNA, 23 nt, Human
ugcccucauggccccucugaccu

SEQ ID NO: 1247405 - RNA, 16 nt, Human
ugccccgucccccucu

SEQ ID NO: 1247406 - RNA, 18 nt, Human
ugccccgucccccucugg

SEQ ID NO: 1247407 - RNA, 12 nt, Human
ugccccccagcc

SEQ ID NO: 1247408 - RNA, 18 nt, Human
ugcccccaggguccuggg

SEQ ID NO: 1247409 - RNA, 21 nt, Human
ugcccccaggguccugggagg

SEQ ID NO: 1247410 - RNA, 22 nt, Human
ugcccccaggguccugggagga

SEQ ID NO: 1247411 - RNA, 18 nt, Human
ugcccccauuucugaggu

SEQ ID NO: 1247412 - RNA, 15 nt, Human
ugcccccauuucuga

SEQ ID NO: 1247413 - RNA, 14 nt, Human
ugccccccagccuc

SEQ ID NO: 1247414 - RNA, 15 nt, Human
ugccccccagccucu

SEQ ID NO: 1247415 - RNA, 19 nt, Human
ugccccccagccucuggca

SEQ ID NO: 1247416 - RNA, 20 nt, Human
ugccccccagccucuggcau

SEQ ID NO: 1247417 - RNA, 14 nt, Human
ugcccccugcagga

SEQ ID NO: 1247418 - RNA, 16 nt, Human
ugcccccugcaggaag

SEQ ID NO: 1247419 - RNA, 17 nt, Human
ugcccccugcaggaagg

SEQ ID NO: 1247420 - RNA, 18 nt, Human
ugcccccugcaggaagga

SEQ ID NO: 1247421 - RNA, 21 nt, Human
ugcccccugcaggaaggagcu

SEQ ID NO: 1247422 - RNA, 23 nt, Human
ugcccccugcaggaaggagcugc

SEQ ID NO: 1247423 - RNA, 22 nt, Human
ugcccccugcaggaaggagcug

SEQ ID NO: 1247424 - RNA, 14 nt, Human
agaagcuccaggua

SEQ ID NO: 1247425 - RNA, 13 nt, Human
agaagcugcucaa

SEQ ID NO: 1247426 - RNA, 18 nt, Human
agaagcucagcugcauuc

SEQ ID NO: 1247427 - RNA, 23 nt, Human
agaagcugcucaacuugcaaaau

SEQ ID NO: 1247428 - RNA, 18 nt, Human
agaagcuaagguuuagau

SEQ ID NO: 1247429 - RNA, 13 nt, Human
agaagcucagcug

SEQ ID NO: 1247430 - RNA, 17 nt, Human
agaagcucagcugcauu

SEQ ID NO: 1247431 - RNA, 21 nt, Human
ucuggcagccucccauccagg

SEQ ID NO: 1247432 - RNA, 18 nt, Human
ucuggcauuagaauuauu

SEQ ID NO: 1247433 - RNA, 17 nt, Human
ucuggccaggaagcuuu

SEQ ID NO: 1247434 - RNA, 16 nt, Human
ucuggccaggaagcuu

SEQ ID NO: 1247435 - RNA, 14 nt, Human
ucuggcccaccagg

SEQ ID NO: 1247436 - RNA, 16 nt, Human
ucuggcccaccagggu

SEQ ID NO: 1247437 - RNA, 21 nt, Human
ucuggccaguguuuaaaacuu

SEQ ID NO: 1247438 - RNA, 22 nt, Human
ucuggccccccugguccccucc

SEQ ID NO: 1247439 - RNA, 12 nt, Human
ucuggccccccu

SEQ ID NO: 1247440 - RNA, 10 nt, Human
agaagccugc

SEQ ID NO: 1247441 - RNA, 11 nt, Human
agaagccugca

SEQ ID NO: 1247442 - RNA, 21 nt, Human
agaagccugcauaauguuucu

SEQ ID NO: 1247443 - RNA, 11 nt, Human
agaagccuggg

SEQ ID NO: 1247444 - RNA, 12 nt, Human
agaagccugggg

SEQ ID NO: 1247445 - RNA, 13 nt, Human
agaagccuggggg

SEQ ID NO: 1247446 - RNA, 14 nt, Human
agaagccugggggc

SEQ ID NO: 1247447 - RNA, 17 nt, Human
agaagccugggggccug

SEQ ID NO: 1247448 - RNA, 18 nt, Human
agaagccugggggccugg

SEQ ID NO: 1247449 - RNA, 19 nt, Human
agaagccugggggccuggc

SEQ ID NO: 1247450 - RNA, 20 nt, Human
agaagccugggggccuggcu

SEQ ID NO: 1247451 - RNA, 21 nt, Human
agaagccugggggccuggcug

SEQ ID NO: 1247452 - RNA, 11 nt, Human
agaagccuuca

SEQ ID NO: 1247453 - RNA, 15 nt, Human
agaagccuucaagcu

SEQ ID NO: 1247454 - RNA, 17 nt, Human
agaagccuucaagcucu

SEQ ID NO: 1247455 - RNA, 18 nt, Human
agaagccuucaagcucug

SEQ ID NO: 1247456 - RNA, 19 nt, Human
agaagccuucaagcucuga

SEQ ID NO: 1247457 - RNA, 20 nt, Human
agaagccuucaagcucugag

SEQ ID NO: 1247458 - RNA, 21 nt, Human
agaagccuucaagcucugagg

SEQ ID NO: 1247459 - RNA, 23 nt, Human
agaagccuucaagcucugaggga

SEQ ID NO: 1247460 - RNA, 18 nt, Human
ucuggauuauauuaugaa

SEQ ID NO: 1247461 - RNA, 12 nt, Human
ucuggauuauau

SEQ ID NO: 1247462 - RNA, 18 nt, Human
ucuggauaacuuccacag

SEQ ID NO: 1247463 - RNA, 21 nt, Human
ucuggauaacuuccacagggu

SEQ ID NO: 1247464 - RNA, 23 nt, Human
ucuggauaacuuccacagggucc

SEQ ID NO: 1247465 - RNA, 19 nt, Human
ucuggauuauucugggggc

SEQ ID NO: 1247466 - RNA, 11 nt, Human
ucuggcagcca

SEQ ID NO: 1247467 - RNA, 12 nt, Human
ucuggcagccac

SEQ ID NO: 1247468 - RNA, 13 nt, Human
ucuggcagccaca

SEQ ID NO: 1247469 - RNA, 15 nt, Human
ucuggcagccacacu

SEQ ID NO: 1247470 - RNA, 18 nt, Human
ucuggcagccacacuucu

SEQ ID NO: 1247471 - RNA, 21 nt, Human
ucuggcagccacacuucucag

SEQ ID NO: 1247472 - RNA, 22 nt, Human
ucuggcagccacacuucucagg

SEQ ID NO: 1247473 - RNA, 23 nt, Human
ucuggcagccacacuucucagga

SEQ ID NO: 1247474 - RNA, 16 nt, Human
ucuggcagccucccau

SEQ ID NO: 1247475 - RNA, 13 nt, Human
ucuggaacccaga

SEQ ID NO: 1247476 - RNA, 14 nt, Human
ucuggaacccagac

SEQ ID NO: 1247477 - RNA, 15 nt, Human
ucuggaacccagacu

SEQ ID NO: 1247478 - RNA, 16 nt, Human
ucuggaacccagacuc

SEQ ID NO: 1247479 - RNA, 17 nt, Human
ucuggaacccagacuca

SEQ ID NO: 1247480 - RNA, 18 nt, Human
ucuggaacccagacucag

SEQ ID NO: 1247481 - RNA, 22 nt, Human
ucuggaacccagacucagacau

SEQ ID NO: 1247482 - RNA, 23 nt, Human
ucuggaacccagacucagacauu

SEQ ID NO: 1247483 - RNA, 15 nt, Human
ucuggaaccucagcc

SEQ ID NO: 1247484 - RNA, 16 nt, Human
ucuggaaccucagccu

SEQ ID NO: 1247485 - RNA, 17 nt, Human
ucuggaguauucuauaa

SEQ ID NO: 1247486 - RNA, 21 nt, Human
ucuggagucucacuugucuca

SEQ ID NO: 1247487 - RNA, 16 nt, Human
ucuggaguugaucugg

SEQ ID NO: 1247488 - RNA, 17 nt, Human
ucuggaguugaucugga

SEQ ID NO: 1247489 - RNA, 21 nt, Human
ucuggaguugaucuggaaccc

SEQ ID NO: 1247490 - RNA, 21 nt, Human
agaagaacugaaaucauacuu

SEQ ID NO: 1247491 - RNA, 18 nt, Human
agaagaaagaacggaaga

SEQ ID NO: 1247492 - RNA, 13 nt, Human
agaagaaacaagg

SEQ ID NO: 1247493 - RNA, 16 nt, Human
agaagaaagaacggaa

SEQ ID NO: 1247494 - RNA, 21 nt, Human
agaagaaacaagguuuucagu

SEQ ID NO: 1247495 - RNA, 20 nt, Human
ucugccuucucaugauccaa

SEQ ID NO: 1247496 - RNA, 15 nt, Human
ucugccuuugccagg

SEQ ID NO: 1247497 - RNA, 21 nt, Human
ucugccuuugccaggugacug

SEQ ID NO: 1247498 - RNA, 22 nt, Human
ucugccuuuggggacuuuucuu

SEQ ID NO: 1247499 - RNA, 16 nt, Human
ucugcuacuuugcugc

SEQ ID NO: 1247500 - RNA, 14 nt, Human
ucugcucagcucug

SEQ ID NO: 1247501 - RNA, 16 nt, Human
ucugcucagcucuggg

SEQ ID NO: 1247502 - RNA, 22 nt, Human
ucugcucaguaauuugaggaca

SEQ ID NO: 1247503 - RNA, 12 nt, Human
ucugcucaucau

SEQ ID NO: 1247504 - RNA, 14 nt, Human
ucugcuucucugac

SEQ ID NO: 1247505 - RNA, 16 nt, Human
ucugcuucucugacuu

SEQ ID NO: 1247506 - RNA, 19 nt, Human
ucugcuucucugacuucug

SEQ ID NO: 1247507 - RNA, 22 nt, Human
ucugcuucucugacuucugccu

SEQ ID NO: 1247508 - RNA, 18 nt, Human
ucugcuugauuuuugccu

SEQ ID NO: 1247509 - RNA, 14 nt, Human
ucugcucaucauuc

SEQ ID NO: 1247510 - RNA, 15 nt, Human
ucugcucaucauucu

SEQ ID NO: 1247511 - RNA, 18 nt, Human
ucugcucaucauucucug

SEQ ID NO: 1247512 - RNA, 22 nt, Human
ucugcucaucauucucugucuc

SEQ ID NO: 1247513 - RNA, 23 nt, Human
ucugcucaucauucucugucuca

SEQ ID NO: 1247514 - RNA, 13 nt, Human
ucugcuguagaaa

SEQ ID NO: 1247515 - RNA, 12 nt, Human
ucugcuguagaa

SEQ ID NO: 1247516 - RNA, 14 nt, Human
ucugcuguuccagu

SEQ ID NO: 1247517 - RNA, 15 nt, Human
ucugcuguuccagug

SEQ ID NO: 1247518 - RNA, 16 nt, Human
ucugcuguuccagugg

SEQ ID NO: 1247519 - RNA, 21 nt, Human
ucugaggggcuaccaggaaag

SEQ ID NO: 1247520 - RNA, 20 nt, Human
ucugaggggcuaccaggaaa

SEQ ID NO: 1247521 - RNA, 19 nt, Human
ucugaggggcuaccaggaa

SEQ ID NO: 1247522 - RNA, 14 nt, Human
ucugagguccugag

SEQ ID NO: 1247523 - RNA, 15 nt, Human
ucugagguccugagc

SEQ ID NO: 1247524 - RNA, 16 nt, Human
ucugagguccugagca

SEQ ID NO: 1247525 - RNA, 17 nt, Human
ucugagguccugagcac

SEQ ID NO: 1247526 - RNA, 18 nt, Human
ucugagguccugagcacu

SEQ ID NO: 1247527 - RNA, 19 nt, Human
ucugagguccugagcacug

SEQ ID NO: 1247528 - RNA, 20 nt, Human
ucugagguccugagcacugc

SEQ ID NO: 1247529 - RNA, 23 nt, Human
ucugacuuucuuuuuugauauag

SEQ ID NO: 1247530 - RNA, 22 nt, Human
ucugagaaaagcuuugaacccu

SEQ ID NO: 1247531 - RNA, 16 nt, Human
ucugauacagaaaagu

SEQ ID NO: 1247532 - RNA, 17 nt, Human
ucugauacagaaaaguu

SEQ ID NO: 1247533 - RNA, 21 nt, Human
ucugagguccugagcacugcc

SEQ ID NO: 1247534 - RNA, 22 nt, Human
ucugauaggguuugugacaggg

SEQ ID NO: 1247535 - RNA, 21 nt, Human
ucugauaggguuugugacagg

SEQ ID NO: 1247536 - RNA, 15 nt, Human
ucugaucaaggccuu

SEQ ID NO: 1247537 - RNA, 14 nt, Human
ucugaccuccauga

SEQ ID NO: 1247538 - RNA, 18 nt, Human
ucugaccugcacugggga

SEQ ID NO: 1247539 - RNA, 21 nt, Human
ucugacuguuuccaucaaggg

SEQ ID NO: 1247540 - RNA, 12 nt, Human
ucugacuucugc

SEQ ID NO: 1247541 - RNA, 14 nt, Human
ucugacuucugccu

SEQ ID NO: 1247542 - RNA, 15 nt, Human
ucugacuucugccug

SEQ ID NO: 1247543 - RNA, 16 nt, Human
ucugacuucugccugg

SEQ ID NO: 1247544 - RNA, 17 nt, Human
ucugacuucugccugga

SEQ ID NO: 1247545 - RNA, 19 nt, Human
ucugacuucugccuggaga

SEQ ID NO: 1247546 - RNA, 20 nt, Human
ucugacuucugccuggagac

SEQ ID NO: 1247547 - RNA, 20 nt, Human
ucugacuuucuuuuuugaua

SEQ ID NO: 1247548 - RNA, 13 nt, Human
agaacguggucag

SEQ ID NO: 1247549 - RNA, 15 nt, Human
agaacucccuuucaa

SEQ ID NO: 1247550 - RNA, 14 nt, Human
agaacucccuuuca

SEQ ID NO: 1247551 - RNA, 13 nt, Human
agaacucucugga

SEQ ID NO: 1247552 - RNA, 21 nt, Human
agaacucucuggaagccccug

SEQ ID NO: 1247553 - RNA, 16 nt, Human
agaacucucuggaagc

SEQ ID NO: 1247554 - RNA, 14 nt, Human
agaacucuuucaaa

SEQ ID NO: 1247555 - RNA, 15 nt, Human
agaacugaaugagaa

SEQ ID NO: 1247556 - RNA, 13 nt, Human
agaagaaaaagaa

SEQ ID NO: 1247557 - RNA, 15 nt, Human
agaagaaaaagaagc

SEQ ID NO: 1247558 - RNA, 19 nt, Human
agaagaaaagguucuuacu

SEQ ID NO: 1247559 - RNA, 15 nt, Human
ucugcagauaaacag

SEQ ID NO: 1247560 - RNA, 19 nt, Human
ucugcagacuucccagcua

SEQ ID NO: 1247561 - RNA, 12 nt, Human
ucugcagagcag

SEQ ID NO: 1247562 - RNA, 23 nt, Human
ucugcacuugcgguuccggcaug

SEQ ID NO: 1247563 - RNA, 16 nt, Human
ucugcagacuucccag

SEQ ID NO: 1247564 - RNA, 18 nt, Human
ucugcagacuucccagcu

SEQ ID NO: 1247565 - RNA, 14 nt, Human
agaaauuguauauu

SEQ ID NO: 1247566 - RNA, 16 nt, Human
agaaauuguauauugu

SEQ ID NO: 1247567 - RNA, 17 nt, Human
agaaauuguauauugua

SEQ ID NO: 1247568 - RNA, 20 nt, Human
agaaauuguauauuguaauu

SEQ ID NO: 1247569 - RNA, 21 nt, Human
agaaauuguauauuguaauuu

SEQ ID NO: 1247570 - RNA, 13 nt, Human
agaaauuuaaacu

SEQ ID NO: 1247571 - RNA, 16 nt, Human
agaaauuuaaacuaua

SEQ ID NO: 1247572 - RNA, 20 nt, Human
agaaauuuaaacuauaagca

SEQ ID NO: 1247573 - RNA, 17 nt, Human
agaaauuuaauucagaa

SEQ ID NO: 1247574 - RNA, 24 nt, Human
agaaauuuaaacuauaagcaagaa

SEQ ID NO: 1247575 - RNA, 18 nt, Human
agaaccggagagccagcu

SEQ ID NO: 1247576 - RNA, 19 nt, Human
agaaccguagaugauuuca

SEQ ID NO: 1247577 - RNA, 14 nt, Human
agaaccuaauucaa

SEQ ID NO: 1247578 - RNA, 15 nt, Human
agaaccuaauucaau

SEQ ID NO: 1247579 - RNA, 19 nt, Human
agaaccuaauucaauucaa

SEQ ID NO: 1247580 - RNA, 22 nt, Human
acuuuuuuuuuuuaagaguaaa

SEQ ID NO: 1247581 - RNA, 23 nt, Human
acuuuuuuucuguaccaguuaau

SEQ ID NO: 1247582 - RNA, 20 nt, Human
acuuuuuuucuguaccaguu

SEQ ID NO: 1247583 - RNA, 21 nt, Human
acuuuuuuucuguaccaguua

SEQ ID NO: 1247584 - RNA, 17 nt, Human
acuuuuugcagcuuucu

SEQ ID NO: 1247585 - RNA, 13 nt, Human
acuuuuugcauuu

SEQ ID NO: 1247586 - RNA, 15 nt, Human
acuuuuugcagcuuu

SEQ ID NO: 1247587 - RNA, 13 nt, Human
acuuuuugcagcu

SEQ ID NO: 1247588 - RNA, 12 nt, Human
acuuuuugcagc

SEQ ID NO: 1247589 - RNA, 15 nt, Human
acuuuuugaggcaaa

SEQ ID NO: 1247590 - RNA, 16 nt, Human
acuuuuugaggcaaaa

SEQ ID NO: 1247591 - RNA, 23 nt, Human
acuuuuuguucugguccuuuuug

SEQ ID NO: 1247592 - RNA, 19 nt, Human
acuuuuugaggcaaaagaa

SEQ ID NO: 1247593 - RNA, 18 nt, Human
acuuuuuguucugguccu

SEQ ID NO: 1247594 - RNA, 15 nt, Human
acuuuuuuauuuaaa

SEQ ID NO: 1247595 - RNA, 23 nt, Human
acuuuuuuauuuaaaaaacuaaa

SEQ ID NO: 1247596 - RNA, 14 nt, Human
acuuuuggcauuuu

SEQ ID NO: 1247597 - RNA, 17 nt, Human
acuuuggggcuaauuua

SEQ ID NO: 1247598 - RNA, 19 nt, Human
acuuugguaccagauaacu

SEQ ID NO: 1247599 - RNA, 16 nt, Human
acuuugguaccagaua

SEQ ID NO: 1247600 - RNA, 17 nt, Human
acuuugguaccagauaa

SEQ ID NO: 1247601 - RNA, 17 nt, Human
acuuuuguaagacaaag

SEQ ID NO: 1247602 - RNA, 12 nt, Human
acuuuuguaaga

SEQ ID NO: 1247603 - RNA, 12 nt, Human
acuuuugugaaa

SEQ ID NO: 1247604 - RNA, 22 nt, Human
acuuuugugaauuaggcuguaa

SEQ ID NO: 1247605 - RNA, 15 nt, Human
acuuuuuauugauuu

SEQ ID NO: 1247606 - RNA, 11 nt, Human
acuuuuucuga

SEQ ID NO: 1247607 - RNA, 12 nt, Human
acuuuuucugau

SEQ ID NO: 1247608 - RNA, 17 nt, Human
acuuuggcugcaugcga

SEQ ID NO: 1247609 - RNA, 14 nt, Human
acuuuggcugcaug

SEQ ID NO: 1247610 - RNA, 19 nt, Human
acuuuggcuuauaauucuu

SEQ ID NO: 1247611 - RNA, 21 nt, Human
acuuuggcuuauaauucuuuc

SEQ ID NO: 1247612 - RNA, 22 nt, Human
acuuuggcuuauaauucuuuca

SEQ ID NO: 1247613 - RNA, 23 nt, Human
acuuuggcuuauaauucuuucaa

SEQ ID NO: 1247614 - RNA, 21 nt, Human
acuuugacuuuuugcauuuaa

SEQ ID NO: 1247615 - RNA, 23 nt, Human
acuuguuggcguaggcuacagag

SEQ ID NO: 1247616 - RNA, 22 nt, Human
acuuguuggcguaggcuacaga

SEQ ID NO: 1247617 - RNA, 16 nt, Human
acuuguuucugaucua

SEQ ID NO: 1247618 - RNA, 15 nt, Human
acuuugacuuuuugc

SEQ ID NO: 1247619 - RNA, 20 nt, Human
acuuugacuuuuugcauuua

SEQ ID NO: 1247620 - RNA, 23 nt, Human
acuugugucccaugaucccugug

SEQ ID NO: 1247621 - RNA, 19 nt, Human
acuuguugauuaauggaaa

SEQ ID NO: 1247622 - RNA, 21 nt, Human
acuuguugauuaauggaaaug

SEQ ID NO: 1247623 - RNA, 22 nt, Human
acuugugucccuaauguguuua

SEQ ID NO: 1247624 - RNA, 14 nt, Human
acuugugucucugu

SEQ ID NO: 1247625 - RNA, 16 nt, Human
acuugugucucugugc

SEQ ID NO: 1247626 - RNA, 21 nt, Human
acuugugucucugugcuuuua

SEQ ID NO: 1247627 - RNA, 22 nt, Human
acuugugucucugugcuuuuaa

SEQ ID NO: 1247628 - RNA, 11 nt, Human
acuugugucug

SEQ ID NO: 1247629 - RNA, 20 nt, Human
ucuccguuagcuccuguggc

SEQ ID NO: 1247630 - RNA, 16 nt, Human
ucuccguuagcuccug

SEQ ID NO: 1247631 - RNA, 17 nt, Human
ucuccguuagcuccugu

SEQ ID NO: 1247632 - RNA, 18 nt, Human
ucuccguuagcuccugug

SEQ ID NO: 1247633 - RNA, 19 nt, Human
ucuccguuagcuccugugg

SEQ ID NO: 1247634 - RNA, 19 nt, Human
ucuccauugugccuaaguc

SEQ ID NO: 1247635 - RNA, 21 nt, Human
ucuccauucugcuccuucccc

SEQ ID NO: 1247636 - RNA, 16 nt, Human
acuguauauuacagau

SEQ ID NO: 1247637 - RNA, 18 nt, Human
ucuccauucugcuccuuc

SEQ ID NO: 1247638 - RNA, 14 nt, Human
acuguagcucuaaa

SEQ ID NO: 1247639 - RNA, 19 nt, Human
acuguagcucuaaaaucug

SEQ ID NO: 1247640 - RNA, 15 nt, Human
acuguagcuuuggaa

SEQ ID NO: 1247641 - RNA, 15 nt, Human
acuguaggcacacuu

SEQ ID NO: 1247642 - RNA, 13 nt, Human
acuguagggaggg

SEQ ID NO: 1247643 - RNA, 16 nt, Human
acuguaguaaauaaug

SEQ ID NO: 1247644 - RNA, 18 nt, Human
acuguaguaaauaaugcu

SEQ ID NO: 1247645 - RNA, 19 nt, Human
acuguaguaaauaaugcuu

SEQ ID NO: 1247646 - RNA, 20 nt, Human
acuguaguaaauaaugcuuu

SEQ ID NO: 1247647 - RNA, 21 nt, Human
acuguaguaaauaaugcuuug

SEQ ID NO: 1247648 - RNA, 22 nt, Human
acuguaguaaauaaugcuuuga

SEQ ID NO: 1247649 - RNA, 13 nt, Human
acuguaguucuaa

SEQ ID NO: 1247650 - RNA, 15 nt, Human
acuguaguucuaaga

SEQ ID NO: 1247651 - RNA, 16 nt, Human
acuguaguucuaagac

SEQ ID NO: 1247652 - RNA, 17 nt, Human
acuguaguucuaagacu

SEQ ID NO: 1247653 - RNA, 18 nt, Human
ucucccaaaaaacuacuu

SEQ ID NO: 1247654 - RNA, 18 nt, Human
ucucccaaagugcuggga

SEQ ID NO: 1247655 - RNA, 19 nt, Human
ucucccaacucuugcacag

SEQ ID NO: 1247656 - RNA, 22 nt, Human
ucucccaacucuugcacaguca

SEQ ID NO: 1247657 - RNA, 19 nt, Human
ucucccaggcaaggcugug

SEQ ID NO: 1247658 - RNA, 13 nt, Human
ucucccaggcagg

SEQ ID NO: 1247659 - RNA, 20 nt, Human
ucucccaggcaaggcugugg

SEQ ID NO: 1247660 - RNA, 12 nt, Human
ucucccaggccc

SEQ ID NO: 1247661 - RNA, 13 nt, Human
ucucccaggcccc

SEQ ID NO: 1247662 - RNA, 14 nt, Human
ucucccaggcccca

SEQ ID NO: 1247663 - RNA, 17 nt, Human
ucucccaggccccauga

SEQ ID NO: 1247664 - RNA, 20 nt, Human
ucucccaggccccaugaccu

SEQ ID NO: 1247665 - RNA, 21 nt, Human
ucucccaggccccaugaccuc

SEQ ID NO: 1247666 - RNA, 23 nt, Human
ucucccaggccccaugaccucca

SEQ ID NO: 1247667 - RNA, 11 nt, Human
ucucccaguug

SEQ ID NO: 1247668 - RNA, 13 nt, Human
agaaacccugcac

SEQ ID NO: 1247669 - RNA, 21 nt, Human
agaaaccagcuuccuucagag

SEQ ID NO: 1247670 - RNA, 19 nt, Human
agaaaccagcuuccuucag

SEQ ID NO: 1247671 - RNA, 20 nt, Human
agaaaccagcuuccuucaga

SEQ ID NO: 1247672 - RNA, 22 nt, Human
agaaaccagcuuccuucagaga

SEQ ID NO: 1247673 - RNA, 19 nt, Human
agaaaacuuguauuaugug

SEQ ID NO: 1247674 - RNA, 13 nt, Human
agaaaccagcuuc

SEQ ID NO: 1247675 - RNA, 14 nt, Human
agaaaccagcuucc

SEQ ID NO: 1247676 - RNA, 15 nt, Human
agaaaccagcuuccu

SEQ ID NO: 1247677 - RNA, 16 nt, Human
agaaaccagcuuccuu

SEQ ID NO: 1247678 - RNA, 20 nt, Human
agaaaacaugcagaacaaau

SEQ ID NO: 1247679 - RNA, 13 nt, Human
agaaaacauguuu

SEQ ID NO: 1247680 - RNA, 22 nt, Human
agaaaacaggcacugcccuggu

SEQ ID NO: 1247681 - RNA, 15 nt, Human
agaaaacaugccucu

SEQ ID NO: 1247682 - RNA, 16 nt, Human
agaaaaccagcucagc

SEQ ID NO: 1247683 - RNA, 21 nt, Human
agaaaaccagcucagcacugc

SEQ ID NO: 1247684 - RNA, 20 nt, Human
agaaaaccagcucagcacug

SEQ ID NO: 1247685 - RNA, 19 nt, Human
agaaaacccuugggccaga

SEQ ID NO: 1247686 - RNA, 20 nt, Human
agaaaacccuugggccagaa

SEQ ID NO: 1247687 - RNA, 22 nt, Human
agaaaacccuugggccagaagu

SEQ ID NO: 1247688 - RNA, 16 nt, Human
agaaaaccuuucuuca

SEQ ID NO: 1247689 - RNA, 20 nt, Human
agaaagaacggaagaagaga

SEQ ID NO: 1247690 - RNA, 18 nt, Human
agaaacugaggaauuuuc

SEQ ID NO: 1247691 - RNA, 15 nt, Human
agaaacugcagggaa

SEQ ID NO: 1247692 - RNA, 22 nt, Human
agaaagaagacaaacuuugcau

SEQ ID NO: 1247693 - RNA, 15 nt, Human
agaaacuggaacucu

SEQ ID NO: 1247694 - RNA, 13 nt, Human
agaaacuggaacu

SEQ ID NO: 1247695 - RNA, 23 nt, Human
agaaaccuacugcccaggcacug

SEQ ID NO: 1247696 - RNA, 15 nt, Human
agaaaccuacugccc

SEQ ID NO: 1247697 - RNA, 16 nt, Human
agaaaccuacugccca

SEQ ID NO: 1247698 - RNA, 13 nt, Human
agaaacugaggaa

SEQ ID NO: 1247699 - RNA, 16 nt, Human
agaaacugaggaauuu

SEQ ID NO: 1247700 - RNA, 19 nt, Human
agaaaacaaggaugaauua

SEQ ID NO: 1247701 - RNA, 20 nt, Human
agaaaacaggcacugcccug

SEQ ID NO: 1247702 - RNA, 23 nt, Human
agaaaacauaaucuucugccuuc

SEQ ID NO: 1247703 - RNA, 17 nt, Human
agaaaaauauauacuaa

SEQ ID NO: 1247704 - RNA, 20 nt, Human
agaaaaauaaagaaaagaug

SEQ ID NO: 1247705 - RNA, 19 nt, Human
agaaaaauaugaccacacu

SEQ ID NO: 1247706 - RNA, 13 nt, Human
agaaaaauaaaga

SEQ ID NO: 1247707 - RNA, 14 nt, Human
agaaaaauaaagaa

SEQ ID NO: 1247708 - RNA, 16 nt, Human
agaaaaauauguacca

SEQ ID NO: 1247709 - RNA, 14 nt, Human
ucucuucuuaaugu

SEQ ID NO: 1247710 - RNA, 16 nt, Human
ucucuuuauacagcug

SEQ ID NO: 1247711 - RNA, 17 nt, Human
ucucuuuauacagcugu

SEQ ID NO: 1247712 - RNA, 19 nt, Human
ucucuuuaugucuguggau

SEQ ID NO: 1247713 - RNA, 12 nt, Human
ucucuuuccaug

SEQ ID NO: 1247714 - RNA, 14 nt, Human
ucucuuucccuggu

SEQ ID NO: 1247715 - RNA, 16 nt, Human
ucucuuucccuggucc

SEQ ID NO: 1247716 - RNA, 17 nt, Human
ucucuuucccugguccc

SEQ ID NO: 1247717 - RNA, 19 nt, Human
ucucuuucccuggucccuu

SEQ ID NO: 1247718 - RNA, 12 nt, Human
ucucuuucuguc

SEQ ID NO: 1247719 - RNA, 18 nt, Human
ucucuucuuaauguacau

SEQ ID NO: 1247720 - RNA, 22 nt, Human
ucucugcccuugaucagcccca

SEQ ID NO: 1247721 - RNA, 22 nt, Human
ucucugcccuaaugcgcaggcu

SEQ ID NO: 1247722 - RNA, 11 nt, Human
ucucugcccua

SEQ ID NO: 1247723 - RNA, 20 nt, Human
ucucugcccuugaucagccc

SEQ ID NO: 1247724 - RNA, 17 nt, Human
ucucuggccuucggccu

SEQ ID NO: 1247725 - RNA, 16 nt, Human
ucucuggccuucggcc

SEQ ID NO: 1247726 - RNA, 23 nt, Human
ucucugcucugcgugucaccugu

SEQ ID NO: 1247727 - RNA, 21 nt, Human
ucucuucuggguuccuuccuc

SEQ ID NO: 1247728 - RNA, 22 nt, Human
ucucugcucugcgugucaccug

SEQ ID NO: 1247729 - RNA, 18 nt, Human
ucucugcucugcguguca

SEQ ID NO: 1247730 - RNA, 21 nt, Human
ucucugcucugcgugucaccu

SEQ ID NO: 1247731 - RNA, 21 nt, Human
ucucuucugagcuauuucauc

SEQ ID NO: 1247732 - RNA, 22 nt, Human
ucucuucugagcuauuucaucu

SEQ ID NO: 1247733 - RNA, 18 nt, Human
ucucuucuggguuccuuc

SEQ ID NO: 1247734 - RNA, 19 nt, Human
ucucuucuggguuccuucc

SEQ ID NO: 1247735 - RNA, 20 nt, Human
ucucuucuggguuccuuccu

SEQ ID NO: 1247736 - RNA, 13 nt, Human
ucuccuuccugug

SEQ ID NO: 1247737 - RNA, 14 nt, Human
ucuccuuccugugu

SEQ ID NO: 1247738 - RNA, 21 nt, Human
ucuccuucaugacagccucca

SEQ ID NO: 1247739 - RNA, 16 nt, Human
ucuccuuccugugugu

SEQ ID NO: 1247740 - RNA, 22 nt, Human
ucucuccacuuucagcugucuu

SEQ ID NO: 1247741 - RNA, 15 nt, Human
ucucuccuuguucug

SEQ ID NO: 1247742 - RNA, 19 nt, Human
ucucuccuuguucugauaa

SEQ ID NO: 1247743 - RNA, 14 nt, Human
ucucugccagugac

SEQ ID NO: 1247744 - RNA, 15 nt, Human
ucucugccagugaca

SEQ ID NO: 1247745 - RNA, 21 nt, Human
ucucugccagugacagacagg

SEQ ID NO: 1247746 - RNA, 12 nt, Human
ucucugcccaac

SEQ ID NO: 1247747 - RNA, 13 nt, Human
ucucugcccaacc

SEQ ID NO: 1247748 - RNA, 20 nt, Human
ucuguuuuauaauuuuguga

SEQ ID NO: 1247749 - RNA, 16 nt, Human
ucuguuuuaaaaaccu

SEQ ID NO: 1247750 - RNA, 18 nt, Human
ucuguuuuauaauuuugu

SEQ ID NO: 1247751 - RNA, 13 nt, Human
ucuguucuaguuu

SEQ ID NO: 1247752 - RNA, 15 nt, Human
ucuguucuaguuuuu

SEQ ID NO: 1247753 - RNA, 20 nt, Human
ucuguucuaguuuuuuacuu

SEQ ID NO: 1247754 - RNA, 13 nt, Human
ucuguuugcugug

SEQ ID NO: 1247755 - RNA, 18 nt, Human
ucuguuugcuguggaacu

SEQ ID NO: 1247756 - RNA, 14 nt, Human
ucuguuuuacaagu

SEQ ID NO: 1247757 - RNA, 12 nt, Human
agaauugugguu

SEQ ID NO: 1247758 - RNA, 22 nt, Human
agaauugugguuuauauauuua

SEQ ID NO: 1247759 - RNA, 23 nt, Human
agaauugugguuuauauauuuaa

SEQ ID NO: 1247760 - RNA, 19 nt, Human
agaauugugucagacuguu

SEQ ID NO: 1247761 - RNA, 23 nt, Human
agaauugugucagacuguuuagu

SEQ ID NO: 1247762 - RNA, 20 nt, Human
agaauugugucagacuguuu

SEQ ID NO: 1247763 - RNA, 16 nt, Human
agaauuguugagauac

SEQ ID NO: 1247764 - RNA, 17 nt, Human
agaauuguugagauacu

SEQ ID NO: 1247765 - RNA, 23 nt, Human
agaauuguuggggguuuuuuugg

SEQ ID NO: 1247766 - RNA, 13 nt, Human
agaauuucuagga

SEQ ID NO: 1247767 - RNA, 21 nt, Human
agaauuucuaggacugaauua

SEQ ID NO: 1247768 - RNA, 21 nt, Human
agaauuucuaccauuucagag

SEQ ID NO: 1247769 - RNA, 16 nt, Human
agaauuucuaccauuu

SEQ ID NO: 1247770 - RNA, 20 nt, Human
agaauuucuaccauuucaga

SEQ ID NO: 1247771 - RNA, 21 nt, Human
agaauuguuggggguuuuuuu

SEQ ID NO: 1247772 - RNA, 14 nt, Human
agaauuuaguguau

SEQ ID NO: 1247773 - RNA, 17 nt, Human
ucuguucauuccuccag

SEQ ID NO: 1247774 - RNA, 16 nt, Human
ucuguucauuccucca

SEQ ID NO: 1247775 - RNA, 12 nt, Human
ucugugcugugu

SEQ ID NO: 1247776 - RNA, 13 nt, Human
ucugugcuggcca

SEQ ID NO: 1247777 - RNA, 12 nt, Human
ucuguuccacau

SEQ ID NO: 1247778 - RNA, 19 nt, Human
ucuguuccaaauucaguuu

SEQ ID NO: 1247779 - RNA, 22 nt, Human
ucuguuccaaauucaguuucau

SEQ ID NO: 1247780 - RNA, 23 nt, Human
ucuguuccaaauucaguuucaua

SEQ ID NO: 1247781 - RNA, 18 nt, Human
ucuguucauuuccucaaa

SEQ ID NO: 1247782 - RNA, 12 nt, Human
ucuguuccaaau

SEQ ID NO: 1247783 - RNA, 13 nt, Human
ucuguuccaaaug

SEQ ID NO: 1247784 - RNA, 13 nt, Human
ucuguuccaaauu

SEQ ID NO: 1247785 - RNA, 14 nt, Human
ucuguuccaaauuc

SEQ ID NO: 1247786 - RNA, 17 nt, Human
ucuguuccaaauucagu

SEQ ID NO: 1247787 - RNA, 20 nt, Human
ucuguucuacauagaugcuu

SEQ ID NO: 1247788 - RNA, 24 nt, Human
ucuguccaggcacugcugcccagc

SEQ ID NO: 1247789 - RNA, 20 nt, Human
ucugugccccuuccgccacu

SEQ ID NO: 1247790 - RNA, 15 nt, Human
ucugugccugaauau

SEQ ID NO: 1247791 - RNA, 17 nt, Human
ucugugccugaauauuu

SEQ ID NO: 1247792 - RNA, 16 nt, Human
ucugugccuucgucuu

SEQ ID NO: 1247793 - RNA, 17 nt, Human
ucugugccuuguuuuuu

SEQ ID NO: 1247794 - RNA, 18 nt, Human
ucugugccccuuccgcca

SEQ ID NO: 1247795 - RNA, 15 nt, Human
ucuguauaaaugucu

SEQ ID NO: 1247796 - RNA, 20 nt, Human
ucuguauaaaugucuuuaau

SEQ ID NO: 1247797 - RNA, 15 nt, Human
ucuguagguugcaca

SEQ ID NO: 1247798 - RNA, 16 nt, Human
ucuguagguugcacac

SEQ ID NO: 1247799 - RNA, 17 nt, Human
ucuguagguugcacacu

SEQ ID NO: 1247800 - RNA, 18 nt, Human
ucuguagguugcacacuu

SEQ ID NO: 1247801 - RNA, 19 nt, Human
ucuguagguugcacacuuu

SEQ ID NO: 1247802 - RNA, 20 nt, Human
ucuguagguugcacacuuug

SEQ ID NO: 1247803 - RNA, 21 nt, Human
ucuguagguugcacacuuugg

SEQ ID NO: 1247804 - RNA, 23 nt, Human
ucuguagguugcacacuuuggua

SEQ ID NO: 1247805 - RNA, 14 nt, Human
ucuggucucgaacu

SEQ ID NO: 1247806 - RNA, 22 nt, Human
ucuguaggccaguaguucucaa

SEQ ID NO: 1247807 - RNA, 23 nt, Human
ucuguaggccaguaguucucaaa

SEQ ID NO: 1247808 - RNA, 22 nt, Human
ucuguagggauuuuuggcuaca

SEQ ID NO: 1247809 - RNA, 20 nt, Human
ucuguaggguaauuaguaac

SEQ ID NO: 1247810 - RNA, 13 nt, Human
ucugucagcugca

SEQ ID NO: 1247811 - RNA, 14 nt, Human
ucugucagcugcaa

SEQ ID NO: 1247812 - RNA, 13 nt, Human
ucugucagucaca

SEQ ID NO: 1247813 - RNA, 17 nt, Human
ucugucagucacagcca

SEQ ID NO: 1247814 - RNA, 19 nt, Human
ucugucagucacagccacc

SEQ ID NO: 1247815 - RNA, 12 nt, Human
ucugucaguucu

SEQ ID NO: 1247816 - RNA, 21 nt, Human
agaaggaaggcagggaggagg

SEQ ID NO: 1247817 - RNA, 20 nt, Human
agaaggaaggcagggaggag

SEQ ID NO: 1247818 - RNA, 17 nt, Human
ucuggggagcaggcagc

SEQ ID NO: 1247819 - RNA, 19 nt, Human
ucuggggagcaggcagcca

SEQ ID NO: 1247820 - RNA, 21 nt, Human
ucuggggagcaggcagccagc

SEQ ID NO: 1247821 - RNA, 22 nt, Human
ucuggggagcaggcagccagca

SEQ ID NO: 1247822 - RNA, 19 nt, Human
ucuggggagcgggucugcu

SEQ ID NO: 1247823 - RNA, 23 nt, Human
ucuggggagcgggucugcuccca

SEQ ID NO: 1247824 - RNA, 17 nt, Human
ucuggggcaggcugggc

SEQ ID NO: 1247825 - RNA, 18 nt, Human
ucuggggcaggcugggcc

SEQ ID NO: 1247826 - RNA, 19 nt, Human
ucuggggcaggcugggcca

SEQ ID NO: 1247827 - RNA, 20 nt, Human
ucuggggcaggcugggccau

SEQ ID NO: 1247828 - RNA, 21 nt, Human
ucuggggcaggcugggccaug

SEQ ID NO: 1247829 - RNA, 19 nt, Human
agaaggaaggcagggagga

SEQ ID NO: 1247830 - RNA, 17 nt, Human
agaaggaaggcagggag

SEQ ID NO: 1247831 - RNA, 11 nt, Human
agaaggaaggc

SEQ ID NO: 1247832 - RNA, 21 nt, Human
agaaggaaaauuuuagcgugc

SEQ ID NO: 1247833 - RNA, 16 nt, Human
ucuggguuccuuccuc

SEQ ID NO: 1247834 - RNA, 13 nt, Human
ucuggguggcccu

SEQ ID NO: 1247835 - RNA, 22 nt, Human
ucuggguggcucacucagcacu

SEQ ID NO: 1247836 - RNA, 14 nt, Human
ucuggguggcucac

SEQ ID NO: 1247837 - RNA, 13 nt, Human
ucugguccuuuuu

SEQ ID NO: 1247838 - RNA, 15 nt, Human
ucuggucgcuccugc

SEQ ID NO: 1247839 - RNA, 17 nt, Human
ucuggucgcuccugccc

SEQ ID NO: 1247840 - RNA, 18 nt, Human
ucugggugcuacugggga

SEQ ID NO: 1247841 - RNA, 19 nt, Human
ucugggugcuacuggggaa

SEQ ID NO: 1247842 - RNA, 20 nt, Human
agacagaaucucagucuguc

SEQ ID NO: 1247843 - RNA, 18 nt, Human
agacagaaucucgcucug

SEQ ID NO: 1247844 - RNA, 22 nt, Human
agacagaaucucgcucugucgc

SEQ ID NO: 1247845 - RNA, 22 nt, Human
agacacuccccgaagucuuuug

SEQ ID NO: 1247846 - RNA, 23 nt, Human
agacacuccccgaagucuuuugu

SEQ ID NO: 1247847 - RNA, 18 nt, Human
agacacugaaaaaucuaa

SEQ ID NO: 1247848 - RNA, 14 nt, Human
agacagacuagaag

SEQ ID NO: 1247849 - RNA, 22 nt, Human
agacagcuucucauccugcagg

SEQ ID NO: 1247850 - RNA, 23 nt, Human
agacagcuucucauccugcaggc

SEQ ID NO: 1247851 - RNA, 17 nt, Human
agaauuugauaugugaa

SEQ ID NO: 1247852 - RNA, 17 nt, Human
agaauuugagugcucug

SEQ ID NO: 1247853 - RNA, 18 nt, Human
agaauuugauaugugaac

SEQ ID NO: 1247854 - RNA, 19 nt, Human
agaauuugauaugugaaca

SEQ ID NO: 1247855 - RNA, 20 nt, Human
agaauuugauaugugaacag

SEQ ID NO: 1247856 - RNA, 21 nt, Human
agaauuugauaugugaacagu

SEQ ID NO: 1247857 - RNA, 18 nt, Human
agaauuugagugcucuga

SEQ ID NO: 1247858 - RNA, 13 nt, Human
agacaccaaaguu

SEQ ID NO: 1247859 - RNA, 14 nt, Human
agacaccaaaguuc

SEQ ID NO: 1247860 - RNA, 15 nt, Human
agacaccaaaguucu

SEQ ID NO: 1247861 - RNA, 16 nt, Human
agacaccaaaguucua

SEQ ID NO: 1247862 - RNA, 17 nt, Human
agacaccaaaguucuaa

SEQ ID NO: 1247863 - RNA, 18 nt, Human
agacaccaaaguucuaau

SEQ ID NO: 1247864 - RNA, 12 nt, Human
agacacccagga

SEQ ID NO: 1247865 - RNA, 13 nt, Human
agacacccaggac

SEQ ID NO: 1247866 - RNA, 14 nt, Human
agacacccaggacu

SEQ ID NO: 1247867 - RNA, 15 nt, Human
agacacccaggacuu

SEQ ID NO: 1247868 - RNA, 16 nt, Human
agacacccaggacuua

SEQ ID NO: 1247869 - RNA, 17 nt, Human
agacaccguucauucag

SEQ ID NO: 1247870 - RNA, 19 nt, Human
agacaccguucauucaggc

SEQ ID NO: 1247871 - RNA, 20 nt, Human
agacacuccccgaagucuuu

SEQ ID NO: 1247872 - RNA, 19 nt, Human
ucuuaauauguucuuuuaa

SEQ ID NO: 1247873 - RNA, 18 nt, Human
agacaguauauaacuaac

SEQ ID NO: 1247874 - RNA, 23 nt, Human
agacaggguuucaccauguugcc

SEQ ID NO: 1247875 - RNA, 22 nt, Human
agacagggaauuaggcccccau

SEQ ID NO: 1247876 - RNA, 22 nt, Human
agacaggucccuccccuucucu

SEQ ID NO: 1247877 - RNA, 15 nt, Human
agacaggcucuuagc

SEQ ID NO: 1247878 - RNA, 20 nt, Human
agacaggcucuuagcagcuu

SEQ ID NO: 1247879 - RNA, 15 nt, Human
agacaggcuggaaga

SEQ ID NO: 1247880 - RNA, 22 nt, Human
agacaggcuggaagauagcugu

SEQ ID NO: 1247881 - RNA, 21 nt, Human
agacagggaauuaggccccca

SEQ ID NO: 1247882 - RNA, 19 nt, Human
agacagggucaaaguguuu

SEQ ID NO: 1247883 - RNA, 22 nt, Human
ucuuagaugcaguucugaagaa

SEQ ID NO: 1247884 - RNA, 12 nt, Human
ucuuaauuauua

SEQ ID NO: 1247885 - RNA, 20 nt, Human
ucuuaauuauuauuuguguu

SEQ ID NO: 1247886 - RNA, 21 nt, Human
ucuucccuggaaaccuuccac

SEQ ID NO: 1247887 - RNA, 16 nt, Human
ucuucccucucugcag

SEQ ID NO: 1247888 - RNA, 22 nt, Human
ucuuccauauggauccacuggc

SEQ ID NO: 1247889 - RNA, 22 nt, Human
ucuuccaguuugcuuugcccuu

SEQ ID NO: 1247890 - RNA, 18 nt, Human
ucuuccagucuuccugac

SEQ ID NO: 1247891 - RNA, 21 nt, Human
ucuuccagucuuccugacacu

SEQ ID NO: 1247892 - RNA, 20 nt, Human
ucuuccaguuugcuuugccc

SEQ ID NO: 1247893 - RNA, 17 nt, Human
ucuucaaaaugagcccu

SEQ ID NO: 1247894 - RNA, 16 nt, Human
ucuuauuuuuuucuau

SEQ ID NO: 1247895 - RNA, 14 nt, Human
ucuucaaaugccug

SEQ ID NO: 1247896 - RNA, 17 nt, Human
ucuucaccauuuggcaa

SEQ ID NO: 1247897 - RNA, 16 nt, Human
ucuucaccaaaucuug

SEQ ID NO: 1247898 - RNA, 20 nt, Human
ucuugaugccuggcggggug

SEQ ID NO: 1247899 - RNA, 13 nt, Human
ucuugaugcaugc

SEQ ID NO: 1247900 - RNA, 21 nt, Human
ucuugaugcaugcacuguucc

SEQ ID NO: 1247901 - RNA, 14 nt, Human
ucuugaugccuggc

SEQ ID NO: 1247902 - RNA, 12 nt, Human
ucuugaugacca

SEQ ID NO: 1247903 - RNA, 23 nt, Human
agaccugauccuggaggcccagu

SEQ ID NO: 1247904 - RNA, 23 nt, Human
ucuugaucaguuaagaaauuuca

SEQ ID NO: 1247905 - RNA, 18 nt, Human
ucuugaucaguuaagaaa

SEQ ID NO: 1247906 - RNA, 14 nt, Human
ucuugcuuucuuug

SEQ ID NO: 1247907 - RNA, 12 nt, Human
ucuuggagaagu

SEQ ID NO: 1247908 - RNA, 16 nt, Human
ucuuggagaagucuca

SEQ ID NO: 1247909 - RNA, 17 nt, Human
ucuuggagaagucucag

SEQ ID NO: 1247910 - RNA, 21 nt, Human
ucuuggaacauuggaauguuc

SEQ ID NO: 1247911 - RNA, 15 nt, Human
ucuuggaacuugccu

SEQ ID NO: 1247912 - RNA, 20 nt, Human
ucuuggaacuugccugccuu

SEQ ID NO: 1247913 - RNA, 16 nt, Human
ucuuggaacuugccug

SEQ ID NO: 1247914 - RNA, 15 nt, Human
ucuuggacaaaucac

SEQ ID NO: 1247915 - RNA, 12 nt, Human
agaccugccccu

SEQ ID NO: 1247916 - RNA, 17 nt, Human
agacuaucuuacuauuu

SEQ ID NO: 1247917 - RNA, 13 nt, Human
agaccugccccuc

SEQ ID NO: 1247918 - RNA, 18 nt, Human
agaccugauccuggaggc

SEQ ID NO: 1247919 - RNA, 19 nt, Human
agaccugauccuggaggcc

SEQ ID NO: 1247920 - RNA, 21 nt, Human
agaccugauccuggaggccca

SEQ ID NO: 1247921 - RNA, 22 nt, Human
agaccugauccuggaggcccag

SEQ ID NO: 1247922 - RNA, 18 nt, Human
agaccuacuguucuaaag

SEQ ID NO: 1247923 - RNA, 19 nt, Human
agaccuacuguucuaaagc

SEQ ID NO: 1247924 - RNA, 16 nt, Human
agaccugagaauguau

SEQ ID NO: 1247925 - RNA, 14 nt, Human
agaccugauccugg

SEQ ID NO: 1247926 - RNA, 15 nt, Human
agaccugauccugga

SEQ ID NO: 1247927 - RNA, 16 nt, Human
agaccugauccuggag

SEQ ID NO: 1247928 - RNA, 12 nt, Human
agacccugcccu

SEQ ID NO: 1247929 - RNA, 20 nt, Human
ucuuccggccccuccccucc

SEQ ID NO: 1247930 - RNA, 23 nt, Human
ucuuccggccccuccccuccaaa

SEQ ID NO: 1247931 - RNA, 21 nt, Human
ucuuccuaccaagucaaacuu

SEQ ID NO: 1247932 - RNA, 20 nt, Human
ucuuccuaccaagucaaacu

SEQ ID NO: 1247933 - RNA, 17 nt, Human
ucuuccuaccuauccca

SEQ ID NO: 1247934 - RNA, 17 nt, Human
ucuuccuacuggucucu

SEQ ID NO: 1247935 - RNA, 20 nt, Human
ucuuccuacuggucucucua

SEQ ID NO: 1247936 - RNA, 19 nt, Human
ucuuccuaguuuucuccuc

SEQ ID NO: 1247937 - RNA, 21 nt, Human
ucuuccuaguuuucuccuccc

SEQ ID NO: 1247938 - RNA, 23 nt, Human
ucuuccuaguuuucuccucccag

SEQ ID NO: 1247939 - RNA, 12 nt, Human
ucuuccucagcc

SEQ ID NO: 1247940 - RNA, 13 nt, Human
ucuuccucagcca

SEQ ID NO: 1247941 - RNA, 15 nt, Human
ucuuccucagccagc

SEQ ID NO: 1247942 - RNA, 14 nt, Human
ucuuccucagccag

SEQ ID NO: 1247943 - RNA, 18 nt, Human
agacaugucuguucuaca

SEQ ID NO: 1247944 - RNA, 20 nt, Human
agacaugucuguucuacaua

SEQ ID NO: 1247945 - RNA, 12 nt, Human
agacaugugaca

SEQ ID NO: 1247946 - RNA, 13 nt, Human
agacaugugacau

SEQ ID NO: 1247947 - RNA, 14 nt, Human
agacaugugacauu

SEQ ID NO: 1247948 - RNA, 15 nt, Human
agacaugugacauuu

SEQ ID NO: 1247949 - RNA, 16 nt, Human
agacaugugacauuua

SEQ ID NO: 1247950 - RNA, 17 nt, Human
agacaugugacauuuau

SEQ ID NO: 1247951 - RNA, 12 nt, Human
agacccuggagg

SEQ ID NO: 1247952 - RNA, 14 nt, Human
agacccuggaggcc

SEQ ID NO: 1247953 - RNA, 21 nt, Human
agacccuuauugcuguccugg

SEQ ID NO: 1247954 - RNA, 18 nt, Human
agacccuugacaccugcu

SEQ ID NO: 1247955 - RNA, 22 nt, Human
agacccuuucuucagcucugaa

SEQ ID NO: 1247956 - RNA, 22 nt, Human
agacccuuauugcuguccugga

SEQ ID NO: 1247957 - RNA, 19 nt, Human
agaccuaaucucuguaaag

SEQ ID NO: 1247958 - RNA, 21 nt, Human
agaccuaaucucuguaaagcu

SEQ ID NO: 1247959 - RNA, 11 nt, Human
agaccuacagg

SEQ ID NO: 1247960 - RNA, 14 nt, Human
agaccuacaggggg

SEQ ID NO: 1247961 - RNA, 19 nt, Human
agaccuacagggggucugg

SEQ ID NO: 1247962 - RNA, 21 nt, Human
agaccuacagggggucuggcu

SEQ ID NO: 1247963 - RNA, 23 nt, Human
agaccuacagggggucuggcugg

SEQ ID NO: 1247964 - RNA, 22 nt, Human
agaccuacagggggucuggcug

SEQ ID NO: 1247965 - RNA, 15 nt, Human
agaccuacuguucua

SEQ ID NO: 1247966 - RNA, 16 nt, Human
agaccuacuguucuaa

SEQ ID NO: 1247967 - RNA, 17 nt, Human
agaccuacuguucuaaa

SEQ ID NO: 1247968 - RNA, 20 nt, Human
ucuuuaaaauuacaacuaag

SEQ ID NO: 1247969 - RNA, 15 nt, Human
ucuuuaaaauuacaa

SEQ ID NO: 1247970 - RNA, 20 nt, Human
ucuuuaaaauguaaagccau

SEQ ID NO: 1247971 - RNA, 23 nt, Human
ucuuuaaagugacuaauggcaug

SEQ ID NO: 1247972 - RNA, 14 nt, Human
ucuuuaaaguucuu

SEQ ID NO: 1247973 - RNA, 20 nt, Human
ucuuggagaagucucagcua

SEQ ID NO: 1247974 - RNA, 19 nt, Human
ucuuggagaagucucagcu

SEQ ID NO: 1247975 - RNA, 23 nt, Human
ucuuggagcugugaguucucccu

SEQ ID NO: 1247976 - RNA, 14 nt, Human
ucuuggagcuguga

SEQ ID NO: 1247977 - RNA, 15 nt, Human
ucuuggagcugugag

SEQ ID NO: 1247978 - RNA, 14 nt, Human
ucuuuacaaaacaa

SEQ ID NO: 1247979 - RNA, 22 nt, Human
ucuuuacaaaacaaacucauuc

SEQ ID NO: 1247980 - RNA, 23 nt, Human
ucuuuacaaaacaaacucauuca

SEQ ID NO: 1247981 - RNA, 12 nt, Human
ucuuuacuuuua

SEQ ID NO: 1247982 - RNA, 11 nt, Human
ucuuuagaaca

SEQ ID NO: 1247983 - RNA, 20 nt, Human
ucuuuagauagcccuguccu

SEQ ID NO: 1247984 - RNA, 23 nt, Human
ucuuuagauagcccuguccuggu

SEQ ID NO: 1247985 - RNA, 21 nt, Human
ucuuuagauagcccuguccug

SEQ ID NO: 1247986 - RNA, 18 nt, Human
agacucggaaucuauuuu

SEQ ID NO: 1247987 - RNA, 12 nt, Human
agacucuaagaa

SEQ ID NO: 1247988 - RNA, 18 nt, Human
agagacacacugaagaag

SEQ ID NO: 1247989 - RNA, 20 nt, Human
agagacacacugaagaagca

SEQ ID NO: 1247990 - RNA, 13 nt, Human
agagaccagggcu

SEQ ID NO: 1247991 - RNA, 14 nt, Human
agagaccagggcuc

SEQ ID NO: 1247992 - RNA, 19 nt, Human
agagaccagggcuccagcc

SEQ ID NO: 1247993 - RNA, 20 nt, Human
agagaccagggcuccagccc

SEQ ID NO: 1247994 - RNA, 15 nt, Human
ucuuugggccagaca

SEQ ID NO: 1247995 - RNA, 16 nt, Human
ucuuugggccagacau

SEQ ID NO: 1247996 - RNA, 20 nt, Human
ucuuugggccagacaugcca

SEQ ID NO: 1247997 - RNA, 16 nt, Human
ucuuuggggugccccu

SEQ ID NO: 1247998 - RNA, 17 nt, Human
agagacacacugaagaa

SEQ ID NO: 1247999 - RNA, 21 nt, Human
agagaaugcccuucuccuuau

SEQ ID NO: 1248000 - RNA, 15 nt, Human
agagaaugagagaca

SEQ ID NO: 1248001 - RNA, 22 nt, Human
agacuuugcuaaagacaugaag

SEQ ID NO: 1248002 - RNA, 19 nt, Human
agacuucaagcauggcuau

SEQ ID NO: 1248003 - RNA, 22 nt, Human
agacuucaagcauggcuauuuu

SEQ ID NO: 1248004 - RNA, 12 nt, Human
agacuugacagu

SEQ ID NO: 1248005 - RNA, 13 nt, Human
agacuugacagug

SEQ ID NO: 1248006 - RNA, 14 nt, Human
agacuugacagugg

SEQ ID NO: 1248007 - RNA, 15 nt, Human
agacuugacagugga

SEQ ID NO: 1248008 - RNA, 21 nt, Human
agacuuggauucuuuccauuu

SEQ ID NO: 1248009 - RNA, 15 nt, Human
agacuuggauucuuu

SEQ ID NO: 1248010 - RNA, 16 nt, Human
agacucuaagaaagaa

SEQ ID NO: 1248011 - RNA, 17 nt, Human
agacucuaagaaagaac

SEQ ID NO: 1248012 - RNA, 18 nt, Human
agacugucuggccccccu

SEQ ID NO: 1248013 - RNA, 16 nt, Human
agacugugauucagaa

SEQ ID NO: 1248014 - RNA, 17 nt, Human
agacugugauucagaaa

SEQ ID NO: 1248015 - RNA, 16 nt, Human
agacugugugugcccu

SEQ ID NO: 1248016 - RNA, 17 nt, Human
agacugugugugcccuc

SEQ ID NO: 1248017 - RNA, 18 nt, Human
agacugugugugcccucu

SEQ ID NO: 1248018 - RNA, 19 nt, Human
agacugugugugcccucug

SEQ ID NO: 1248019 - RNA, 20 nt, Human
agacugugugugcccucugg

SEQ ID NO: 1248020 - RNA, 22 nt, Human
agacugugugugcccucugggc

SEQ ID NO: 1248021 - RNA, 23 nt, Human
agacugugugugcccucugggcu

SEQ ID NO: 1248022 - RNA, 21 nt, Human
agaggcgcaugaauuugugaa

SEQ ID NO: 1248023 - RNA, 11 nt, Human
agaggcaccag

SEQ ID NO: 1248024 - RNA, 13 nt, Human
agaggcaccagga

SEQ ID NO: 1248025 - RNA, 14 nt, Human
agaggcaccaggaa

SEQ ID NO: 1248026 - RNA, 18 nt, Human
agaggcaccugucccaga

SEQ ID NO: 1248027 - RNA, 17 nt, Human
agaggcaccaggaagcc

SEQ ID NO: 1248028 - RNA, 19 nt, Human
agaggccuuuuggaaugug

SEQ ID NO: 1248029 - RNA, 21 nt, Human
agagggacgccugggggugcc

SEQ ID NO: 1248030 - RNA, 15 nt, Human
agagggacgccuggg

SEQ ID NO: 1248031 - RNA, 15 nt, Human
agaggugaccccagg

SEQ ID NO: 1248032 - RNA, 16 nt, Human
agaggugaccccaggg

SEQ ID NO: 1248033 - RNA, 17 nt, Human
agaggugaccccagggc

SEQ ID NO: 1248034 - RNA, 18 nt, Human
agaggugaccccagggca

SEQ ID NO: 1248035 - RNA, 23 nt, Human
agaggugaccccagggcacagga

SEQ ID NO: 1248036 - RNA, 24 nt, Human
agaggugaccccagggcacaggag

SEQ ID NO: 1248037 - RNA, 17 nt, Human
agaggugagaaauuuaa

SEQ ID NO: 1248038 - RNA, 16 nt, Human
agaggugagaaauuua

SEQ ID NO: 1248039 - RNA, 12 nt, Human
agagggaaugug

SEQ ID NO: 1248040 - RNA, 13 nt, Human
agagggaauguga

SEQ ID NO: 1248041 - RNA, 14 nt, Human
agagggaaugugaa

SEQ ID NO: 1248042 - RNA, 15 nt, Human
agagggaaugugaaa

SEQ ID NO: 1248043 - RNA, 16 nt, Human
agagggaaugugaaau

SEQ ID NO: 1248044 - RNA, 12 nt, Human
agagggacagau

SEQ ID NO: 1248045 - RNA, 18 nt, Human
agagggaaugugaaauuu

SEQ ID NO: 1248046 - RNA, 18 nt, Human
ugaagauguagaggagaa

SEQ ID NO: 1248047 - RNA, 16 nt, Human
ugaagauucuuuccca

SEQ ID NO: 1248048 - RNA, 21 nt, Human
ugaagauucuuucccaauuca

SEQ ID NO: 1248049 - RNA, 13 nt, Human
ugaagcagccucu

SEQ ID NO: 1248050 - RNA, 15 nt, Human
ugaagcagccucucc

SEQ ID NO: 1248051 - RNA, 20 nt, Human
ugaagcagccucuccccagg

SEQ ID NO: 1248052 - RNA, 15 nt, Human
agagguggaaaaaca

SEQ ID NO: 1248053 - RNA, 13 nt, Human
agaggugggccag

SEQ ID NO: 1248054 - RNA, 21 nt, Human
agaggugggccagucugugga

SEQ ID NO: 1248055 - RNA, 19 nt, Human
ugaagcagguucccaagcu

SEQ ID NO: 1248056 - RNA, 20 nt, Human
ugaagcagguucccaagcuc

SEQ ID NO: 1248057 - RNA, 21 nt, Human
ugaagccaugaguuccagaaa

SEQ ID NO: 1248058 - RNA, 15 nt, Human
ugaagcccucccagg

SEQ ID NO: 1248059 - RNA, 15 nt, Human
ugaagcuguugugug

SEQ ID NO: 1248060 - RNA, 16 nt, Human
ugaagcuguuguguga

SEQ ID NO: 1248061 - RNA, 19 nt, Human
ugaagcuguugugugaggu

SEQ ID NO: 1248062 - RNA, 22 nt, Human
ugaagaagcaccaaucaugaau

SEQ ID NO: 1248063 - RNA, 23 nt, Human
ugaagaacugcaggcccuggccu

SEQ ID NO: 1248064 - RNA, 14 nt, Human
ugaagaagauggua

SEQ ID NO: 1248065 - RNA, 20 nt, Human
ugaagaagcaccaaucauga

SEQ ID NO: 1248066 - RNA, 15 nt, Human
ucuuuguaaugaaaa

SEQ ID NO: 1248067 - RNA, 13 nt, Human
ucuuuguaaugaa

SEQ ID NO: 1248068 - RNA, 16 nt, Human
ucuuuguaaugaaaac

SEQ ID NO: 1248069 - RNA, 12 nt, Human
ucuuuguaauga

SEQ ID NO: 1248070 - RNA, 13 nt, Human
agagcuggcucug

SEQ ID NO: 1248071 - RNA, 15 nt, Human
agagcuggcucugag

SEQ ID NO: 1248072 - RNA, 16 nt, Human
agagcuggcucugagc

SEQ ID NO: 1248073 - RNA, 11 nt, Human
agagcuggugc

SEQ ID NO: 1248074 - RNA, 15 nt, Human
agagcuucuggcacu

SEQ ID NO: 1248075 - RNA, 17 nt, Human
agagcuucccugacuca

SEQ ID NO: 1248076 - RNA, 20 nt, Human
agagcuucccugacucauuc

SEQ ID NO: 1248077 - RNA, 13 nt, Human
agagcuucccuga

SEQ ID NO: 1248078 - RNA, 16 nt, Human
agagcuucccugacuc

SEQ ID NO: 1248079 - RNA, 19 nt, Human
agagcuucuguugcugccu

SEQ ID NO: 1248080 - RNA, 20 nt, Human
agagcuucuguugcugccuc

SEQ ID NO: 1248081 - RNA, 21 nt, Human
agagcuucuguugcugccuca

SEQ ID NO: 1248082 - RNA, 22 nt, Human
agagcuucuguugcugccucau

SEQ ID NO: 1248083 - RNA, 18 nt, Human
ugaagguggaaauaaacu

SEQ ID NO: 1248084 - RNA, 19 nt, Human
ugaaggugcugacggccag

SEQ ID NO: 1248085 - RNA, 20 nt, Human
ugaaggugcugacggccagg

SEQ ID NO: 1248086 - RNA, 22 nt, Human
ugaaggugauuuaagggcccag

SEQ ID NO: 1248087 - RNA, 16 nt, Human
ugaagcuuuuauguga

SEQ ID NO: 1248088 - RNA, 21 nt, Human
ugaaggugaaacauuuucucc

SEQ ID NO: 1248089 - RNA, 15 nt, Human
ugaaggugcugacgg

SEQ ID NO: 1248090 - RNA, 15 nt, Human
ugaagguuguggccu

SEQ ID NO: 1248091 - RNA, 18 nt, Human
ugaagguuguggccuuug

SEQ ID NO: 1248092 - RNA, 21 nt, Human
ugaauauacagcaggugcuca

SEQ ID NO: 1248093 - RNA, 15 nt, Human
ugaaugcauaaaaug

SEQ ID NO: 1248094 - RNA, 16 nt, Human
ugaaugcauaaaaugu

SEQ ID NO: 1248095 - RNA, 15 nt, Human
ugaaugccacugccu

SEQ ID NO: 1248096 - RNA, 21 nt, Human
ugaaugccacugccuucgcuu

SEQ ID NO: 1248097 - RNA, 22 nt, Human
ugaaugccacugccuucgcuuc

SEQ ID NO: 1248098 - RNA, 23 nt, Human
ugaaugcuucuaaguaaauacaa

SEQ ID NO: 1248099 - RNA, 17 nt, Human
ugaaugcuucuaaguaa

SEQ ID NO: 1248100 - RNA, 18 nt, Human
agagucuauuuacggaac

SEQ ID NO: 1248101 - RNA, 14 nt, Human
agagucuagauucu

SEQ ID NO: 1248102 - RNA, 14 nt, Human
agagugaagggaag

SEQ ID NO: 1248103 - RNA, 22 nt, Human
agagugaagggaagagacagcc

SEQ ID NO: 1248104 - RNA, 16 nt, Human
agagugaauucccuca

SEQ ID NO: 1248105 - RNA, 22 nt, Human
agagugaacaaauuuacagaga

SEQ ID NO: 1248106 - RNA, 15 nt, Human
agagucuagauucaa

SEQ ID NO: 1248107 - RNA, 17 nt, Human
agagucuagauucaaag

SEQ ID NO: 1248108 - RNA, 19 nt, Human
agagucuagauucaaaggu

SEQ ID NO: 1248109 - RNA, 21 nt, Human
agagucuagauucaaagguuc

SEQ ID NO: 1248110 - RNA, 22 nt, Human
agagucuagauucaaagguucu

SEQ ID NO: 1248111 - RNA, 23 nt, Human
agagucuagauucaaagguucua

SEQ ID NO: 1248112 - RNA, 15 nt, Human
agagucuagauucuc

SEQ ID NO: 1248113 - RNA, 23 nt, Human
ugaauggccuucauaucauccac

SEQ ID NO: 1248114 - RNA, 20 nt, Human
ugaauggcuauguuuuuaau

SEQ ID NO: 1248115 - RNA, 21 nt, Human
ugaauggcuauguuuuuaaug

SEQ ID NO: 1248116 - RNA, 12 nt, Human
agagucuaaaga

SEQ ID NO: 1248117 - RNA, 13 nt, Human
agagucuaaagau

SEQ ID NO: 1248118 - RNA, 14 nt, Human
agagucuaaagaug

SEQ ID NO: 1248119 - RNA, 17 nt, Human
agagucuaaagauggag

SEQ ID NO: 1248120 - RNA, 22 nt, Human
agagucuaaagauggaguuucu

SEQ ID NO: 1248121 - RNA, 23 nt, Human
agagucuaaagauggaguuucua

SEQ ID NO: 1248122 - RNA, 11 nt, Human
agagucuagau

SEQ ID NO: 1248123 - RNA, 12 nt, Human
agagucuagauu

SEQ ID NO: 1248124 - RNA, 13 nt, Human
agagucuagauuc

SEQ ID NO: 1248125 - RNA, 18 nt, Human
agauaagguaaaaugcca

SEQ ID NO: 1248126 - RNA, 18 nt, Human
agauaauucuagcuuuga

SEQ ID NO: 1248127 - RNA, 19 nt, Human
agauaaugugauauuauac

SEQ ID NO: 1248128 - RNA, 19 nt, Human
agauaauuaccuacucugg

SEQ ID NO: 1248129 - RNA, 12 nt, Human
agauaauuauaa

SEQ ID NO: 1248130 - RNA, 13 nt, Human
agauaaucccugu

SEQ ID NO: 1248131 - RNA, 16 nt, Human
agauaaucuagaacac

SEQ ID NO: 1248132 - RNA, 23 nt, Human
agauaaucuagaacacaggcaaa

SEQ ID NO: 1248133 - RNA, 12 nt, Human
agauaaugugaa

SEQ ID NO: 1248134 - RNA, 13 nt, Human
agauaaugugaaa

SEQ ID NO: 1248135 - RNA, 18 nt, Human
agauaaugugaaaauggu

SEQ ID NO: 1248136 - RNA, 20 nt, Human
agauaaacguggauguuacu

SEQ ID NO: 1248137 - RNA, 12 nt, Human
agauaaacauua

SEQ ID NO: 1248138 - RNA, 14 nt, Human
agauaaacauuauu

SEQ ID NO: 1248139 - RNA, 14 nt, Human
agauaaacacaaga

SEQ ID NO: 1248140 - RNA, 15 nt, Human
agauaaacacaagau

SEQ ID NO: 1248141 - RNA, 17 nt, Human
agagugaauucccucac

SEQ ID NO: 1248142 - RNA, 18 nt, Human
agagugagacucagucuu

SEQ ID NO: 1248143 - RNA, 22 nt, Human
agagugagagacauuaacucau

SEQ ID NO: 1248144 - RNA, 13 nt, Human
agagugagagaca

SEQ ID NO: 1248145 - RNA, 12 nt, Human
agaguuuuggga

SEQ ID NO: 1248146 - RNA, 14 nt, Human
agauaauucacugu

SEQ ID NO: 1248147 - RNA, 18 nt, Human
agauacagaacucuuuca

SEQ ID NO: 1248148 - RNA, 20 nt, Human
agauacagaacucuuucaaa

SEQ ID NO: 1248149 - RNA, 14 nt, Human
agauaccagcgagg

SEQ ID NO: 1248150 - RNA, 19 nt, Human
agauaccagcgaggaggcu

SEQ ID NO: 1248151 - RNA, 21 nt, Human
agauaccagcgaggaggcucc

SEQ ID NO: 1248152 - RNA, 23 nt, Human
agauaccagcgaggaggcuccag

SEQ ID NO: 1248153 - RNA, 22 nt, Human
agauacccuacgcuguccagaa

SEQ ID NO: 1248154 - RNA, 23 nt, Human
agauacccuacgcuguccagaaa

SEQ ID NO: 1248155 - RNA, 17 nt, Human
agauauuuuuaucuuua

SEQ ID NO: 1248156 - RNA, 19 nt, Human
agauauuuuuaucuuuaua

SEQ ID NO: 1248157 - RNA, 20 nt, Human
agauauuuuuaucuuuauau

SEQ ID NO: 1248158 - RNA, 21 nt, Human
agauauuuuuaucuuuauaug

SEQ ID NO: 1248159 - RNA, 12 nt, Human
agauauuuuuca

SEQ ID NO: 1248160 - RNA, 13 nt, Human
agauauuuuucau

SEQ ID NO: 1248161 - RNA, 16 nt, Human
agauauuuuucaugau

SEQ ID NO: 1248162 - RNA, 19 nt, Human
agauauuuuucaugauuuu

SEQ ID NO: 1248163 - RNA, 19 nt, Human
agauauuuuuccauuuuuu

SEQ ID NO: 1248164 - RNA, 11 nt, Human
agaucacuuuc

SEQ ID NO: 1248165 - RNA, 21 nt, Human
agaucauugugaaauuauuca

SEQ ID NO: 1248166 - RNA, 14 nt, Human
ugaccacagcacag

SEQ ID NO: 1248167 - RNA, 18 nt, Human
agauccaaaagaagcccc

SEQ ID NO: 1248168 - RNA, 23 nt, Human
agauccaaaagaagcccccagcu

SEQ ID NO: 1248169 - RNA, 21 nt, Human
agauccaaaagaagcccccag

SEQ ID NO: 1248170 - RNA, 12 nt, Human
ugaccacacucc

SEQ ID NO: 1248171 - RNA, 17 nt, Human
ugaccacacuccagcug

SEQ ID NO: 1248172 - RNA, 19 nt, Human
ugaccacacuccagcuggg

SEQ ID NO: 1248173 - RNA, 20 nt, Human
ugaccacacuccagcuggga

SEQ ID NO: 1248174 - RNA, 13 nt, Human
agauccagccugg

SEQ ID NO: 1248175 - RNA, 14 nt, Human
agauccagccuggg

SEQ ID NO: 1248176 - RNA, 13 nt, Human
agauccaggacua

SEQ ID NO: 1248177 - RNA, 12 nt, Human
agauccaggacu

SEQ ID NO: 1248178 - RNA, 16 nt, Human
agaugauggaugccaa

SEQ ID NO: 1248179 - RNA, 19 nt, Human
agaugauggaugccaauau

SEQ ID NO: 1248180 - RNA, 18 nt, Human
agaugauuaaauaagauu

SEQ ID NO: 1248181 - RNA, 19 nt, Human
agaugauuaaauaagauuc

SEQ ID NO: 1248182 - RNA, 20 nt, Human
agaugauuaaauaagauucu

SEQ ID NO: 1248183 - RNA, 21 nt, Human
agaugauuaaauaagauucua

SEQ ID NO: 1248184 - RNA, 22 nt, Human
agaugauuaaauaagauucuaa

SEQ ID NO: 1248185 - RNA, 20 nt, Human
agaugauuucaguucuagga

SEQ ID NO: 1248186 - RNA, 23 nt, Human
agaugauuucaguucuaggaaaa

SEQ ID NO: 1248187 - RNA, 16 nt, Human
ugacauuuuacauuaa

SEQ ID NO: 1248188 - RNA, 15 nt, Human
ugacauuuuacauua

SEQ ID NO: 1248189 - RNA, 15 nt, Human
ugaccaaaaguuaca

SEQ ID NO: 1248190 - RNA, 16 nt, Human
ugaccaaaaguuacau

SEQ ID NO: 1248191 - RNA, 22 nt, Human
ugaccaaaaguuacauguuugc

SEQ ID NO: 1248192 - RNA, 23 nt, Human
ugaccaaaaguuacauguuugca

SEQ ID NO: 1248193 - RNA, 14 nt, Human
ugaccaaaguccuu

SEQ ID NO: 1248194 - RNA, 16 nt, Human
ugaccaaaguccuuuu

SEQ ID NO: 1248195 - RNA, 14 nt, Human
ugacauuuuacauu

SEQ ID NO: 1248196 - RNA, 12 nt, Human
ugacauuuuaca

SEQ ID NO: 1248197 - RNA, 22 nt, Human
ugacauuguagagcuucuggca

SEQ ID NO: 1248198 - RNA, 18 nt, Human
ugacauuguagagcuucu

SEQ ID NO: 1248199 - RNA, 21 nt, Human
ugacaguauuauacgcuggca

SEQ ID NO: 1248200 - RNA, 18 nt, Human
ugacaguccgucaaaaca

SEQ ID NO: 1248201 - RNA, 22 nt, Human
ugacaguccgucaaaacagauu

SEQ ID NO: 1248202 - RNA, 19 nt, Human
ugacauucugaaugcuucu

SEQ ID NO: 1248203 - RNA, 20 nt, Human
ugacauucugaaugcuucua

SEQ ID NO: 1248204 - RNA, 15 nt, Human
ugacauugcguuuga

SEQ ID NO: 1248205 - RNA, 19 nt, Human
ugacauugcguuugaccuu

SEQ ID NO: 1248206 - RNA, 15 nt, Human
ugacaguaauugugu

SEQ ID NO: 1248207 - RNA, 14 nt, Human
ugacaguaauugug

SEQ ID NO: 1248208 - RNA, 22 nt, Human
ugacaguaauuguguuuacauu

SEQ ID NO: 1248209 - RNA, 21 nt, Human
ugacaguaauuguguuuacau

SEQ ID NO: 1248210 - RNA, 20 nt, Human
ugacaguaauuguguuuaca

SEQ ID NO: 1248211 - RNA, 22 nt, Human
ugacaguauuauacgcuggcaa

SEQ ID NO: 1248212 - RNA, 18 nt, Human
agaucacuuucucaguuu

SEQ ID NO: 1248213 - RNA, 19 nt, Human
agaucacuuucucaguuuu

SEQ ID NO: 1248214 - RNA, 23 nt, Human
agaucacuuucucaguuuucaua

SEQ ID NO: 1248215 - RNA, 18 nt, Human
agaucagaugcuccaaga

SEQ ID NO: 1248216 - RNA, 22 nt, Human
agaucagaugcuccaagauucu

SEQ ID NO: 1248217 - RNA, 20 nt, Human
agaucagcaaaccggggccu

SEQ ID NO: 1248218 - RNA, 23 nt, Human
agaucagaugcuccaagauucua

SEQ ID NO: 1248219 - RNA, 19 nt, Human
ugaauuuaauaaucuguag

SEQ ID NO: 1248220 - RNA, 15 nt, Human
ugaauuuagugagca

SEQ ID NO: 1248221 - RNA, 21 nt, Human
ugaauuuagugagcauaggug

SEQ ID NO: 1248222 - RNA, 17 nt, Human
ugaauuuagugagcaua

SEQ ID NO: 1248223 - RNA, 18 nt, Human
agauguguucacaaugga

SEQ ID NO: 1248224 - RNA, 15 nt, Human
agauguguucacaau

SEQ ID NO: 1248225 - RNA, 13 nt, Human
agauguguguuga

SEQ ID NO: 1248226 - RNA, 15 nt, Human
agauguguguugaua

SEQ ID NO: 1248227 - RNA, 17 nt, Human
agauguguguugauacu

SEQ ID NO: 1248228 - RNA, 18 nt, Human
agauguguguugauacug

SEQ ID NO: 1248229 - RNA, 19 nt, Human
agauguguguugauacugu

SEQ ID NO: 1248230 - RNA, 20 nt, Human
agauguguguugauacuguu

SEQ ID NO: 1248231 - RNA, 21 nt, Human
agauguguguugauacuguug

SEQ ID NO: 1248232 - RNA, 22 nt, Human
agauguguguugauacuguugc

SEQ ID NO: 1248233 - RNA, 23 nt, Human
ugacccagugcccccacugacca

SEQ ID NO: 1248234 - RNA, 17 nt, Human
ugacccagugcccccac

SEQ ID NO: 1248235 - RNA, 18 nt, Human
ugacccagugcccccacu

SEQ ID NO: 1248236 - RNA, 16 nt, Human
ugacccagugccccca

SEQ ID NO: 1248237 - RNA, 23 nt, Human
agauguguguugauacuguugca

SEQ ID NO: 1248238 - RNA, 24 nt, Human
agauguguguugauacuguugcac

SEQ ID NO: 1248239 - RNA, 19 nt, Human
ugaccccucauagcccuca

SEQ ID NO: 1248240 - RNA, 20 nt, Human
ugaccccucauagcccucac

SEQ ID NO: 1248241 - RNA, 22 nt, Human
ugacccccaaccaaguggcucc

SEQ ID NO: 1248242 - RNA, 22 nt, Human
ugaccccagggcacaggagcua

SEQ ID NO: 1248243 - RNA, 14 nt, Human
ugacccccagcucc

SEQ ID NO: 1248244 - RNA, 17 nt, Human
ugaccccucauagcccu

SEQ ID NO: 1248245 - RNA, 23 nt, Human
ugaccccucauagcccucacccu

SEQ ID NO: 1248246 - RNA, 11 nt, Human
agaugcuuuua

SEQ ID NO: 1248247 - RNA, 20 nt, Human
agaugcuuuuaacagagucu

SEQ ID NO: 1248248 - RNA, 18 nt, Human
agaugcuuuuaacagagu

SEQ ID NO: 1248249 - RNA, 18 nt, Human
agauggaaaauucauuuu

SEQ ID NO: 1248250 - RNA, 22 nt, Human
agauggaaaauucauuuuuuaa

SEQ ID NO: 1248251 - RNA, 23 nt, Human
agaugcuagaacucccuuucaac

SEQ ID NO: 1248252 - RNA, 13 nt, Human
agaugcuccaaga

SEQ ID NO: 1248253 - RNA, 15 nt, Human
agaugcuccaagauu

SEQ ID NO: 1248254 - RNA, 18 nt, Human
agaugcuccaagauucua

SEQ ID NO: 1248255 - RNA, 19 nt, Human
agaugcuccaagauucuag

SEQ ID NO: 1248256 - RNA, 20 nt, Human
agaugcuccaagauucuaga

SEQ ID NO: 1248257 - RNA, 21 nt, Human
agaugcuccaagauucuagau

SEQ ID NO: 1248258 - RNA, 22 nt, Human
agaugcuccaagauucuagaug

SEQ ID NO: 1248259 - RNA, 23 nt, Human
agaugcuccaagauucuagauga

SEQ ID NO: 1248260 - RNA, 14 nt, Human
agaugucuauauug

SEQ ID NO: 1248261 - RNA, 23 nt, Human
agauguccaucagaugacaagaa

SEQ ID NO: 1248262 - RNA, 21 nt, Human
agauguccaucagaugacaag

SEQ ID NO: 1248263 - RNA, 23 nt, Human
agaugucauuuaguucagcaucc

SEQ ID NO: 1248264 - RNA, 17 nt, Human
agaugcuuuuugaucua

SEQ ID NO: 1248265 - RNA, 13 nt, Human
agauggaguuucu

SEQ ID NO: 1248266 - RNA, 14 nt, Human
agauggaguuucua

SEQ ID NO: 1248267 - RNA, 15 nt, Human
agauggaguuucuaa

SEQ ID NO: 1248268 - RNA, 16 nt, Human
agauggaguuucuaag

SEQ ID NO: 1248269 - RNA, 17 nt, Human
agauggaguuucuaagg

SEQ ID NO: 1248270 - RNA, 18 nt, Human
agauggaguuucuaaggu

SEQ ID NO: 1248271 - RNA, 14 nt, Human
agauggcacuuuga

SEQ ID NO: 1248272 - RNA, 23 nt, Human
agauuauauauauuuuuuucuga

SEQ ID NO: 1248273 - RNA, 20 nt, Human
agauuauaggcaccuaccac

SEQ ID NO: 1248274 - RNA, 23 nt, Human
agauuauagauucuaaagauucu

SEQ ID NO: 1248275 - RNA, 15 nt, Human
agauuaucguuuucu

SEQ ID NO: 1248276 - RNA, 16 nt, Human
agauuaucguuuucuu

SEQ ID NO: 1248277 - RNA, 17 nt, Human
agauuaucguuuucuua

SEQ ID NO: 1248278 - RNA, 19 nt, Human
agauuaucguuuucuuaaa

SEQ ID NO: 1248279 - RNA, 22 nt, Human
ugacuugggcacccccagccug

SEQ ID NO: 1248280 - RNA, 14 nt, Human
agauucaaagguuc

SEQ ID NO: 1248281 - RNA, 15 nt, Human
agauucaaagguucu

SEQ ID NO: 1248282 - RNA, 16 nt, Human
agauucaaagguucua

SEQ ID NO: 1248283 - RNA, 17 nt, Human
agauucaaagguucuag

SEQ ID NO: 1248284 - RNA, 18 nt, Human
agauucaaagguucuagg

SEQ ID NO: 1248285 - RNA, 19 nt, Human
agauucaaagguucuaggu

SEQ ID NO: 1248286 - RNA, 21 nt, Human
agauucaaugccccugaauuu

SEQ ID NO: 1248287 - RNA, 16 nt, Human
agauucaaucccagga

SEQ ID NO: 1248288 - RNA, 22 nt, Human
agauucaaugccccugaauuua

SEQ ID NO: 1248289 - RNA, 21 nt, Human
agauucaaagguucuagguuu

SEQ ID NO: 1248290 - RNA, 22 nt, Human
ugacuugaagacuuacagcaaa

SEQ ID NO: 1248291 - RNA, 18 nt, Human
ugacuucugccuggagac

SEQ ID NO: 1248292 - RNA, 12 nt, Human
ugacuuggcugg

SEQ ID NO: 1248293 - RNA, 13 nt, Human
ugacuuggcuggu

SEQ ID NO: 1248294 - RNA, 15 nt, Human
ugacuuggcuggugu

SEQ ID NO: 1248295 - RNA, 16 nt, Human
ugacuuggcuggugug

SEQ ID NO: 1248296 - RNA, 21 nt, Human
ugacuuggcuggugugguaca

SEQ ID NO: 1248297 - RNA, 17 nt, Human
ugacuugggcaccccca

SEQ ID NO: 1248298 - RNA, 19 nt, Human
ugacuugggcacccccagc

SEQ ID NO: 1248299 - RNA, 21 nt, Human
ugacuugggcacccccagccu

SEQ ID NO: 1248300 - RNA, 23 nt, Human
ugacuugggcacccccagccugg

SEQ ID NO: 1248301 - RNA, 12 nt, Human
ugacuuguauau

SEQ ID NO: 1248302 - RNA, 19 nt, Human
ugacuuguauauuuuaaga

SEQ ID NO: 1248303 - RNA, 15 nt, Human
ugacuugugucccau

SEQ ID NO: 1248304 - RNA, 13 nt, Human
ugacuucugagau

SEQ ID NO: 1248305 - RNA, 12 nt, Human
ugacuucugccu

SEQ ID NO: 1248306 - RNA, 13 nt, Human
ugacuucugccug

SEQ ID NO: 1248307 - RNA, 15 nt, Human
ugacuucugccugga

SEQ ID NO: 1248308 - RNA, 16 nt, Human
ugacuucugccuggag

SEQ ID NO: 1248309 - RNA, 15 nt, Human
ugacuguuuccauca

SEQ ID NO: 1248310 - RNA, 14 nt, Human
ugacugucugggga

SEQ ID NO: 1248311 - RNA, 22 nt, Human
ugacugucuggggagcgggucu

SEQ ID NO: 1248312 - RNA, 21 nt, Human
ugacugugguagccagcaucg

SEQ ID NO: 1248313 - RNA, 13 nt, Human
ugacugucacugu

SEQ ID NO: 1248314 - RNA, 16 nt, Human
ugacugucacuguucc

SEQ ID NO: 1248315 - RNA, 17 nt, Human
ugacugucacuguuccu

SEQ ID NO: 1248316 - RNA, 12 nt, Human
ugacugucuggg

SEQ ID NO: 1248317 - RNA, 12 nt, Human
ugacucaggagc

SEQ ID NO: 1248318 - RNA, 14 nt, Human
ugacucaggagccu

SEQ ID NO: 1248319 - RNA, 15 nt, Human
ugacucaggagccug

SEQ ID NO: 1248320 - RNA, 19 nt, Human
ugacucaggagccugugac

SEQ ID NO: 1248321 - RNA, 21 nt, Human
ugacucaggagccugugacau

SEQ ID NO: 1248322 - RNA, 13 nt, Human
ugacucagggcuc

SEQ ID NO: 1248323 - RNA, 14 nt, Human
ugacucagggcucc

SEQ ID NO: 1248324 - RNA, 15 nt, Human
ugacucagggcuccu

SEQ ID NO: 1248325 - RNA, 17 nt, Human
ugacucagggcuccugg

SEQ ID NO: 1248326 - RNA, 18 nt, Human
ugacucagggcuccuggg

SEQ ID NO: 1248327 - RNA, 19 nt, Human
ugacucagggcuccugggu

SEQ ID NO: 1248328 - RNA, 20 nt, Human
ugacucauucugaaggagcc

SEQ ID NO: 1248329 - RNA, 14 nt, Human
agauuuuccugaaa

SEQ ID NO: 1248330 - RNA, 19 nt, Human
agauuuucagcaaacucuu

SEQ ID NO: 1248331 - RNA, 21 nt, Human
agcaacaauuuaugaauugaa

SEQ ID NO: 1248332 - RNA, 12 nt, Human
agcaacauggcu

SEQ ID NO: 1248333 - RNA, 13 nt, Human
agcaacauggcuu

SEQ ID NO: 1248334 - RNA, 15 nt, Human
agcaacauucauagu

SEQ ID NO: 1248335 - RNA, 14 nt, Human
agcaacauggcuuu

SEQ ID NO: 1248336 - RNA, 14 nt, Human
agcaaccccaggcu

SEQ ID NO: 1248337 - RNA, 15 nt, Human
agcaaccccaggcug

SEQ ID NO: 1248338 - RNA, 16 nt, Human
agcaaccccaggcuga

SEQ ID NO: 1248339 - RNA, 14 nt, Human
agauuuaugcauau

SEQ ID NO: 1248340 - RNA, 16 nt, Human
agauuuaauauuacag

SEQ ID NO: 1248341 - RNA, 18 nt, Human
agauuuaauauuacagau

SEQ ID NO: 1248342 - RNA, 20 nt, Human
agauuuaaucugccaagggc

SEQ ID NO: 1248343 - RNA, 16 nt, Human
agauuuaccacuugug

SEQ ID NO: 1248344 - RNA, 13 nt, Human
agauuguccuuuu

SEQ ID NO: 1248345 - RNA, 20 nt, Human
agauuguccuuuugcaaaga

SEQ ID NO: 1248346 - RNA, 23 nt, Human
agauuuaauauaaaguuuuauau

SEQ ID NO: 1248347 - RNA, 21 nt, Human
agauugugccccugcacucca

SEQ ID NO: 1248348 - RNA, 16 nt, Human
agauugugccccugca

SEQ ID NO: 1248349 - RNA, 22 nt, Human
agauucacuuaacaaacaaauu

SEQ ID NO: 1248350 - RNA, 14 nt, Human
agauugguguuuuu

SEQ ID NO: 1248351 - RNA, 19 nt, Human
agauugguguuuuuuucua

SEQ ID NO: 1248352 - RNA, 20 nt, Human
agauugguguuuuuuucuau

SEQ ID NO: 1248353 - RNA, 14 nt, Human
agauuuauuaaaga

SEQ ID NO: 1248354 - RNA, 15 nt, Human
agauuuauuaaagaa

SEQ ID NO: 1248355 - RNA, 16 nt, Human
agauuuauuaaagaaa

SEQ ID NO: 1248356 - RNA, 17 nt, Human
agauuuauuaaagaaaa

SEQ ID NO: 1248357 - RNA, 18 nt, Human
agauuuauuaaagaaaaa

SEQ ID NO: 1248358 - RNA, 15 nt, Human
agauuuauuccuuug

SEQ ID NO: 1248359 - RNA, 16 nt, Human
agauuuauuccuuugu

SEQ ID NO: 1248360 - RNA, 17 nt, Human
agauuuauuccuuuguu

SEQ ID NO: 1248361 - RNA, 19 nt, Human
agauuuauuaaagaaaaaa

SEQ ID NO: 1248362 - RNA, 17 nt, Human
agauuuggcuugacaaa

SEQ ID NO: 1248363 - RNA, 15 nt, Human
ugagguaaguuuuuu

SEQ ID NO: 1248364 - RNA, 17 nt, Human
ugagguacugagaguga

SEQ ID NO: 1248365 - RNA, 23 nt, Human
ugagggucuguagguugcacacu

SEQ ID NO: 1248366 - RNA, 22 nt, Human
ugagggucuguagguugcacac

SEQ ID NO: 1248367 - RNA, 22 nt, Human
ugagguacugagagugaacaaa

SEQ ID NO: 1248368 - RNA, 19 nt, Human
ugagguacaaccuguucug

SEQ ID NO: 1248369 - RNA, 24 nt, Human
agcagauucagaaaugaggccaug

SEQ ID NO: 1248370 - RNA, 17 nt, Human
agcagcaacuuguccua

SEQ ID NO: 1248371 - RNA, 23 nt, Human
agcagagcugauggagaaggaag

SEQ ID NO: 1248372 - RNA, 22 nt, Human
agcagagcugauggagaaggaa

SEQ ID NO: 1248373 - RNA, 21 nt, Human
agcagagcugauggagaagga

SEQ ID NO: 1248374 - RNA, 19 nt, Human
agcagagcugauggagaag

SEQ ID NO: 1248375 - RNA, 17 nt, Human
agcagagcugauggaga

SEQ ID NO: 1248376 - RNA, 18 nt, Human
agcagagcuagguggaaa

SEQ ID NO: 1248377 - RNA, 13 nt, Human
agcagaggucucc

SEQ ID NO: 1248378 - RNA, 14 nt, Human
agcagaggggcuga

SEQ ID NO: 1248379 - RNA, 20 nt, Human
agcagaggggcagaggccca

SEQ ID NO: 1248380 - RNA, 19 nt, Human
ugaggggcuaccaggaaag

SEQ ID NO: 1248381 - RNA, 17 nt, Human
ugaggggcuaccaggaa

SEQ ID NO: 1248382 - RNA, 16 nt, Human
ugaggggcuaccagga

SEQ ID NO: 1248383 - RNA, 20 nt, Human
ugagggggggcucccugggg

SEQ ID NO: 1248384 - RNA, 13 nt, Human
ugagggguuccuc

SEQ ID NO: 1248385 - RNA, 15 nt, Human
ugagggguuccuccc

SEQ ID NO: 1248386 - RNA, 16 nt, Human
ugagggguuccucccc

SEQ ID NO: 1248387 - RNA, 17 nt, Human
ugagggguuccuccccu

SEQ ID NO: 1248388 - RNA, 22 nt, Human
ugagggguuccuccccuccagc

SEQ ID NO: 1248389 - RNA, 14 nt, Human
ugaggguaaguauu

SEQ ID NO: 1248390 - RNA, 18 nt, Human
ugagggguuccuccccuc

SEQ ID NO: 1248391 - RNA, 15 nt, Human
ugagggucuguaggu

SEQ ID NO: 1248392 - RNA, 18 nt, Human
ugagggucuguagguugc

SEQ ID NO: 1248393 - RNA, 18 nt, Human
ugaggggaagcuagucuu

SEQ ID NO: 1248394 - RNA, 13 nt, Human
ugaggggaccagg

SEQ ID NO: 1248395 - RNA, 14 nt, Human
ugaggggaccagga

SEQ ID NO: 1248396 - RNA, 15 nt, Human
ugaggggaccaggag

SEQ ID NO: 1248397 - RNA, 16 nt, Human
ugaggggaccaggagu

SEQ ID NO: 1248398 - RNA, 18 nt, Human
ugaggggaccaggagugg

SEQ ID NO: 1248399 - RNA, 22 nt, Human
ugaggggaccaggagugggugg

SEQ ID NO: 1248400 - RNA, 11 nt, Human
ugagggcaguc

SEQ ID NO: 1248401 - RNA, 18 nt, Human
ugagggcaguucgcagcc

SEQ ID NO: 1248402 - RNA, 19 nt, Human
ugagggcaguucgcagcca

SEQ ID NO: 1248403 - RNA, 20 nt, Human
ugagggcaguucgcagccac

SEQ ID NO: 1248404 - RNA, 21 nt, Human
ugagggcaguucgcagccacc

SEQ ID NO: 1248405 - RNA, 23 nt, Human
ugagggcaguucgcagccacccu

SEQ ID NO: 1248406 - RNA, 15 nt, Human
ugagggauuaucuuu

SEQ ID NO: 1248407 - RNA, 12 nt, Human
ugagggcagcag

SEQ ID NO: 1248408 - RNA, 13 nt, Human
ugagggcagcagc

SEQ ID NO: 1248409 - RNA, 14 nt, Human
ugagggcagcagcc

SEQ ID NO: 1248410 - RNA, 15 nt, Human
ugagggcagcagcca

SEQ ID NO: 1248411 - RNA, 16 nt, Human
ugagggcagcagccag

SEQ ID NO: 1248412 - RNA, 17 nt, Human
ugagggcagcagccagc

SEQ ID NO: 1248413 - RNA, 18 nt, Human
ugagggcagcagccagcc

SEQ ID NO: 1248414 - RNA, 20 nt, Human
ugagggcagcagccagcccu

SEQ ID NO: 1248415 - RNA, 21 nt, Human
ugagggcagcagccagcccug

SEQ ID NO: 1248416 - RNA, 22 nt, Human
ugagggcagcagccagcccugc

SEQ ID NO: 1248417 - RNA, 23 nt, Human
ugagggcagcagccagcccugcc

SEQ ID NO: 1248418 - RNA, 23 nt, Human
ugaggcccuccacaccugcggcc

SEQ ID NO: 1248419 - RNA, 16 nt, Human
ugaggccuagacucug

SEQ ID NO: 1248420 - RNA, 12 nt, Human
ugaggcccucca

SEQ ID NO: 1248421 - RNA, 13 nt, Human
ugaggcccuccac

SEQ ID NO: 1248422 - RNA, 17 nt, Human
ugaggcccuccacaccu

SEQ ID NO: 1248423 - RNA, 18 nt, Human
ugaggcccuccacaccug

SEQ ID NO: 1248424 - RNA, 19 nt, Human
ugaggcccuccacaccugc

SEQ ID NO: 1248425 - RNA, 21 nt, Human
ugaggcccuccacaccugcgg

SEQ ID NO: 1248426 - RNA, 22 nt, Human
ugaggcccuccacaccugcggc

SEQ ID NO: 1248427 - RNA, 14 nt, Human
ugagcuaggaauug

SEQ ID NO: 1248428 - RNA, 13 nt, Human
ugagcuuucugaa

SEQ ID NO: 1248429 - RNA, 14 nt, Human
ugagcuuucugaac

SEQ ID NO: 1248430 - RNA, 16 nt, Human
ugagcuuucugaacag

SEQ ID NO: 1248431 - RNA, 17 nt, Human
ugagcuuucugaacagc

SEQ ID NO: 1248432 - RNA, 18 nt, Human
ugagcuuucugaacagcu

SEQ ID NO: 1248433 - RNA, 19 nt, Human
ugagcuuucugaacagcug

SEQ ID NO: 1248434 - RNA, 20 nt, Human
ugagcuuucugaacagcugg

SEQ ID NO: 1248435 - RNA, 22 nt, Human
ugagcuuucugaacagcuggug

SEQ ID NO: 1248436 - RNA, 23 nt, Human
ugagcuuucugaacagcuggugu

SEQ ID NO: 1248437 - RNA, 16 nt, Human
ugagcuacaaaugcau

SEQ ID NO: 1248438 - RNA, 15 nt, Human
ugagcgugacacuca

SEQ ID NO: 1248439 - RNA, 21 nt, Human
ugagcuaaauaaagauauugu

SEQ ID NO: 1248440 - RNA, 24 nt, Human
ugagcuacugccgucagugcugug

SEQ ID NO: 1248441 - RNA, 21 nt, Human
ugagcuacugccgucagugcu

SEQ ID NO: 1248442 - RNA, 16 nt, Human
ugagcuagaacccucu

SEQ ID NO: 1248443 - RNA, 18 nt, Human
ugagcuagaacccucugu

SEQ ID NO: 1248444 - RNA, 17 nt, Human
ugagcuagaacccucug

SEQ ID NO: 1248445 - RNA, 14 nt, Human
ugagcuacaaaugc

SEQ ID NO: 1248446 - RNA, 13 nt, Human
ugagcuacaaaug

SEQ ID NO: 1248447 - RNA, 13 nt, Human
ugagccuuguaau

SEQ ID NO: 1248448 - RNA, 16 nt, Human
ugagccuuuucccucu

SEQ ID NO: 1248449 - RNA, 22 nt, Human
ugagcgaggagaugcuccuugg

SEQ ID NO: 1248450 - RNA, 23 nt, Human
ugagcgaggagaugcuccuuggg

SEQ ID NO: 1248451 - RNA, 21 nt, Human
ugagcgaguggagucugccac

SEQ ID NO: 1248452 - RNA, 23 nt, Human
ugagcgaguggagucugccaccc

SEQ ID NO: 1248453 - RNA, 12 nt, Human
ugagcgccagga

SEQ ID NO: 1248454 - RNA, 18 nt, Human
ugagcgccuccauccaag

SEQ ID NO: 1248455 - RNA, 23 nt, Human
ugagcgccuccauccaaggccag

SEQ ID NO: 1248456 - RNA, 20 nt, Human
ugagcgccuccauccaaggc

SEQ ID NO: 1248457 - RNA, 18 nt, Human
ugaggaacggaucagaug

SEQ ID NO: 1248458 - RNA, 18 nt, Human
ugaggaaagcaagaauca

SEQ ID NO: 1248459 - RNA, 19 nt, Human
ugaggaaagcauguauuca

SEQ ID NO: 1248460 - RNA, 13 nt, Human
ugaggccagacca

SEQ ID NO: 1248461 - RNA, 21 nt, Human
ugaggccacuguguuccuucc

SEQ ID NO: 1248462 - RNA, 12 nt, Human
ugaggccagccu

SEQ ID NO: 1248463 - RNA, 13 nt, Human
ugaggccagccug

SEQ ID NO: 1248464 - RNA, 14 nt, Human
ugaggccagccugg

SEQ ID NO: 1248465 - RNA, 15 nt, Human
ugaggccagccuggc

SEQ ID NO: 1248466 - RNA, 16 nt, Human
ugaggccagccuggcc

SEQ ID NO: 1248467 - RNA, 17 nt, Human
ugaggccagccuggccu

SEQ ID NO: 1248468 - RNA, 18 nt, Human
ugaggccagccuggccuc

SEQ ID NO: 1248469 - RNA, 20 nt, Human
ugaggccagccuggccuccu

SEQ ID NO: 1248470 - RNA, 21 nt, Human
ugaggccagccuggccuccug

SEQ ID NO: 1248471 - RNA, 22 nt, Human
ugaggccagccuggccuccugc

SEQ ID NO: 1248472 - RNA, 13 nt, Human
ugaggccagggca

SEQ ID NO: 1248473 - RNA, 14 nt, Human
ugaggccagggcag

SEQ ID NO: 1248474 - RNA, 15 nt, Human
ugaggccagggcaga

SEQ ID NO: 1248475 - RNA, 16 nt, Human
ugaggccagggcagag

SEQ ID NO: 1248476 - RNA, 14 nt, Human
ugaggccauggacu

SEQ ID NO: 1248477 - RNA, 20 nt, Human
ugaggccauggacucugucc

SEQ ID NO: 1248478 - RNA, 23 nt, Human
ugaggccauggacucuguccuga

SEQ ID NO: 1248479 - RNA, 16 nt, Human
ugaggacacaugucca

SEQ ID NO: 1248480 - RNA, 15 nt, Human
ugaggacagaugccu

SEQ ID NO: 1248481 - RNA, 18 nt, Human
ugaggacagaugccuccu

SEQ ID NO: 1248482 - RNA, 20 nt, Human
ugaggacagaugccuccuuc

SEQ ID NO: 1248483 - RNA, 15 nt, Human
ugaggacacugauau

SEQ ID NO: 1248484 - RNA, 15 nt, Human
ugaggacacaugucc

SEQ ID NO: 1248485 - RNA, 14 nt, Human
ugaggacacauguc

SEQ ID NO: 1248486 - RNA, 13 nt, Human
ugaggacacaugu

SEQ ID NO: 1248487 - RNA, 12 nt, Human
ugaggacacaug

SEQ ID NO: 1248488 - RNA, 20 nt, Human
ugaggccacacucagcacaa

SEQ ID NO: 1248489 - RNA, 23 nt, Human
ugaggccacacucagcacaaggc

SEQ ID NO: 1248490 - RNA, 16 nt, Human
ugaggccacccagagg

SEQ ID NO: 1248491 - RNA, 15 nt, Human
ugaggccacuguguu

SEQ ID NO: 1248492 - RNA, 12 nt, Human
ugaggccacacu

SEQ ID NO: 1248493 - RNA, 13 nt, Human
ugaggccacacuc

SEQ ID NO: 1248494 - RNA, 19 nt, Human
ugaggccacacucagcaca

SEQ ID NO: 1248495 - RNA, 15 nt, Human
ugaggaauuucaccu

SEQ ID NO: 1248496 - RNA, 21 nt, Human
ugaggaauuucaccuguaaac

SEQ ID NO: 1248497 - RNA, 22 nt, Human
ugaggaauuucaccuguaaacc

SEQ ID NO: 1248498 - RNA, 13 nt, Human
ugaggaauuuucu

SEQ ID NO: 1248499 - RNA, 14 nt, Human
ugaggaauuuucuu

SEQ ID NO: 1248500 - RNA, 18 nt, Human
ugaggaauuuucuuugug

SEQ ID NO: 1248501 - RNA, 19 nt, Human
ugaggacaaccauuccaga

SEQ ID NO: 1248502 - RNA, 20 nt, Human
ugaggacaaccauuccagac

SEQ ID NO: 1248503 - RNA, 13 nt, Human
ugaggacaagaga

SEQ ID NO: 1248504 - RNA, 22 nt, Human
ugaggacaagagaaaaaagcca

SEQ ID NO: 1248505 - RNA, 15 nt, Human
agcacagugaucaag

SEQ ID NO: 1248506 - RNA, 16 nt, Human
agcacagcuuagauuu

SEQ ID NO: 1248507 - RNA, 18 nt, Human
agcacagcuuagauuuca

SEQ ID NO: 1248508 - RNA, 20 nt, Human
agcacagcuuagauuucaua

SEQ ID NO: 1248509 - RNA, 16 nt, Human
agcacauauggaauuu

SEQ ID NO: 1248510 - RNA, 22 nt, Human
agcacagccucuuagaugcagu

SEQ ID NO: 1248511 - RNA, 12 nt, Human
agcacagcccuu

SEQ ID NO: 1248512 - RNA, 12 nt, Human
agcacagccuag

SEQ ID NO: 1248513 - RNA, 16 nt, Human
agcaccaaucaugaau

SEQ ID NO: 1248514 - RNA, 17 nt, Human
agcaccaaaucaaaauc

SEQ ID NO: 1248515 - RNA, 18 nt, Human
agcaccaaaucaaaaucu

SEQ ID NO: 1248516 - RNA, 22 nt, Human
agcaccaaaucaaaaucucucc

SEQ ID NO: 1248517 - RNA, 22 nt, Human
agcaccaccaaacacaguguau

SEQ ID NO: 1248518 - RNA, 20 nt, Human
agcacaucucaacaggccuc

SEQ ID NO: 1248519 - RNA, 15 nt, Human
agcacaucucaacag

SEQ ID NO: 1248520 - RNA, 16 nt, Human
agcacaucucaacagg

SEQ ID NO: 1248521 - RNA, 19 nt, Human
agcacaucucaacaggccu

SEQ ID NO: 1248522 - RNA, 23 nt, Human
agcacaucucaacaggccucagg

SEQ ID NO: 1248523 - RNA, 15 nt, Human
agcaaguucgucugu

SEQ ID NO: 1248524 - RNA, 21 nt, Human
agcacagcagccccugcacaa

SEQ ID NO: 1248525 - RNA, 13 nt, Human
agcacagcagccu

SEQ ID NO: 1248526 - RNA, 15 nt, Human
agcacagcagccugg

SEQ ID NO: 1248527 - RNA, 23 nt, Human
agcacagcagccuggggcuggcc

SEQ ID NO: 1248528 - RNA, 12 nt, Human
agcacagccaac

SEQ ID NO: 1248529 - RNA, 13 nt, Human
agcacagccaaca

SEQ ID NO: 1248530 - RNA, 23 nt, Human
agcacagccaacacgcaccugcc

SEQ ID NO: 1248531 - RNA, 18 nt, Human
agcaaguucgucuguugu

SEQ ID NO: 1248532 - RNA, 10 nt, Human
agcacagcag

SEQ ID NO: 1248533 - RNA, 12 nt, Human
agcacagcagcc

SEQ ID NO: 1248534 - RNA, 22 nt, Human
ugagccagggucuccagaaagc

SEQ ID NO: 1248535 - RNA, 13 nt, Human
ugagccagggucu

SEQ ID NO: 1248536 - RNA, 21 nt, Human
ugagcaacgcuauuccagcug

SEQ ID NO: 1248537 - RNA, 16 nt, Human
ugagcaacucuugauu

SEQ ID NO: 1248538 - RNA, 18 nt, Human
ugagcaacucuugauuau

SEQ ID NO: 1248539 - RNA, 16 nt, Human
ugagcaaauguggcuc

SEQ ID NO: 1248540 - RNA, 18 nt, Human
ugagcaaauguggcuccu

SEQ ID NO: 1248541 - RNA, 19 nt, Human
ugagcaaauguggcuccug

SEQ ID NO: 1248542 - RNA, 15 nt, Human
agcaaccguggcccu

SEQ ID NO: 1248543 - RNA, 16 nt, Human
agcaaccguggcccuu

SEQ ID NO: 1248544 - RNA, 19 nt, Human
agcaaccguggcccuuccu

SEQ ID NO: 1248545 - RNA, 20 nt, Human
agcaaccguggcccuuccug

SEQ ID NO: 1248546 - RNA, 21 nt, Human
agcaaccguggcccuuccugg

SEQ ID NO: 1248547 - RNA, 22 nt, Human
agcaaccguggcccuuccugga

SEQ ID NO: 1248548 - RNA, 15 nt, Human
agcaaccucaguaau

SEQ ID NO: 1248549 - RNA, 23 nt, Human
agcaaccguggcccuuccuggac

SEQ ID NO: 1248550 - RNA, 15 nt, Human
agcaaccuguagagu

SEQ ID NO: 1248551 - RNA, 17 nt, Human
ugagcacagccuagggc

SEQ ID NO: 1248552 - RNA, 15 nt, Human
ugagccaccacgccc

SEQ ID NO: 1248553 - RNA, 14 nt, Human
ugagccaccgugcc

SEQ ID NO: 1248554 - RNA, 16 nt, Human
ugagcaucuguccccc

SEQ ID NO: 1248555 - RNA, 21 nt, Human
ugagcacuguuuucuagugua

SEQ ID NO: 1248556 - RNA, 15 nt, Human
ugagcacuguuuucu

SEQ ID NO: 1248557 - RNA, 14 nt, Human
ugagcacuguuuuc

SEQ ID NO: 1248558 - RNA, 22 nt, Human
ugagcacuguuuucuaguguau

SEQ ID NO: 1248559 - RNA, 13 nt, Human
ugagcacuguuuu

SEQ ID NO: 1248560 - RNA, 22 nt, Human
ugagcacuguuuauacacugug

SEQ ID NO: 1248561 - RNA, 19 nt, Human
ugagcacugccaggaggga

SEQ ID NO: 1248562 - RNA, 15 nt, Human
ugagcacuguuuaua

SEQ ID NO: 1248563 - RNA, 17 nt, Human
ugagcacugccaggagg

SEQ ID NO: 1248564 - RNA, 18 nt, Human
ugagcacugccaggaggg

SEQ ID NO: 1248565 - RNA, 22 nt, Human
ugagcacugccaggagggacaa

SEQ ID NO: 1248566 - RNA, 13 nt, Human
ugagcacugccag

SEQ ID NO: 1248567 - RNA, 14 nt, Human
ugagcacugccagg

SEQ ID NO: 1248568 - RNA, 15 nt, Human
ugagcacugccagga

SEQ ID NO: 1248569 - RNA, 16 nt, Human
ugagcacugccaggag

SEQ ID NO: 1248570 - RNA, 18 nt, Human
ugagccaccgugccuggc

SEQ ID NO: 1248571 - RNA, 19 nt, Human
ugagccaccgugccuggcc

SEQ ID NO: 1248572 - RNA, 20 nt, Human
ugagccaccgugccuggcca

SEQ ID NO: 1248573 - RNA, 21 nt, Human
ugagccaccgugccuggccac

SEQ ID NO: 1248574 - RNA, 11 nt, Human
agcagacauuu

SEQ ID NO: 1248575 - RNA, 22 nt, Human
agcagaccaccccgccugcccu

SEQ ID NO: 1248576 - RNA, 13 nt, Human
agcagacuacagc

SEQ ID NO: 1248577 - RNA, 17 nt, Human
agcagacuacagcuggg

SEQ ID NO: 1248578 - RNA, 22 nt, Human
agcagacuacagcuggggugca

SEQ ID NO: 1248579 - RNA, 23 nt, Human
agcagacuacagcuggggugcag

SEQ ID NO: 1248580 - RNA, 16 nt, Human
agcagacucagcucug

SEQ ID NO: 1248581 - RNA, 19 nt, Human
agcagacucagcucugaca

SEQ ID NO: 1248582 - RNA, 20 nt, Human
agcagacucagcucugacau

SEQ ID NO: 1248583 - RNA, 14 nt, Human
agcagacagagcca

SEQ ID NO: 1248584 - RNA, 15 nt, Human
agcagacagagccag

SEQ ID NO: 1248585 - RNA, 16 nt, Human
agcagacagagccagg

SEQ ID NO: 1248586 - RNA, 17 nt, Human
agcagacagagccagga

SEQ ID NO: 1248587 - RNA, 18 nt, Human
agcagacagagccaggag

SEQ ID NO: 1248588 - RNA, 19 nt, Human
agcagacagagccaggaga

SEQ ID NO: 1248589 - RNA, 12 nt, Human
agcagacaggcc

SEQ ID NO: 1248590 - RNA, 21 nt, Human
agcagacaguguuuucuggga

SEQ ID NO: 1248591 - RNA, 23 nt, Human
agcagacagagccaggagaagcu

SEQ ID NO: 1248592 - RNA, 20 nt, Human
ugagcgacagugagacucug

SEQ ID NO: 1248593 - RNA, 16 nt, Human
ugagcgacagugagac

SEQ ID NO: 1248594 - RNA, 14 nt, Human
ugagcgacagugag

SEQ ID NO: 1248595 - RNA, 13 nt, Human
ugagcgacaguga

SEQ ID NO: 1248596 - RNA, 21 nt, Human
agcacuuuagaauaugccuug

SEQ ID NO: 1248597 - RNA, 14 nt, Human
agcacuuuagaaua

SEQ ID NO: 1248598 - RNA, 21 nt, Human
agcacuuguggguuuuuguuu

SEQ ID NO: 1248599 - RNA, 15 nt, Human
agcacuuggcccuuc

SEQ ID NO: 1248600 - RNA, 16 nt, Human
agcacuuguccagcug

SEQ ID NO: 1248601 - RNA, 20 nt, Human
agcacuuuagaauaugccuu

SEQ ID NO: 1248602 - RNA, 15 nt, Human
agcagaaaacccuug

SEQ ID NO: 1248603 - RNA, 21 nt, Human
agcagaaaacccuugggccag

SEQ ID NO: 1248604 - RNA, 22 nt, Human
agcagaaaacccuugggccaga

SEQ ID NO: 1248605 - RNA, 14 nt, Human
agcagaaagugccu

SEQ ID NO: 1248606 - RNA, 15 nt, Human
agcagaaagugccuu

SEQ ID NO: 1248607 - RNA, 18 nt, Human
agcagaaagugccuuuca

SEQ ID NO: 1248608 - RNA, 19 nt, Human
agcagaaagugccuuucag

SEQ ID NO: 1248609 - RNA, 20 nt, Human
agcagaaagugccuuucagg

SEQ ID NO: 1248610 - RNA, 23 nt, Human
agcagaaagugccuuucaggauc

SEQ ID NO: 1248611 - RNA, 18 nt, Human
agcagaaauccaagcacc

SEQ ID NO: 1248612 - RNA, 21 nt, Human
agcagaaagugccuuucagga

SEQ ID NO: 1248613 - RNA, 14 nt, Human
agcagaacagugau

SEQ ID NO: 1248614 - RNA, 23 nt, Human
agcagaacugcuauuuuucaucc

SEQ ID NO: 1248615 - RNA, 14 nt, Human
agcagaagcagcaa

SEQ ID NO: 1248616 - RNA, 13 nt, Human
agcagaagcagca

SEQ ID NO: 1248617 - RNA, 17 nt, Human
agcagaaggggagaugg

SEQ ID NO: 1248618 - RNA, 23 nt, Human
agcagaaggggagauggacgaca

SEQ ID NO: 1248619 - RNA, 10 nt, Human
agcaccaggg

SEQ ID NO: 1248620 - RNA, 12 nt, Human
agcaccagggaa

SEQ ID NO: 1248621 - RNA, 13 nt, Human
agcaccagggaag

SEQ ID NO: 1248622 - RNA, 14 nt, Human
agcaccaagcaugu

SEQ ID NO: 1248623 - RNA, 14 nt, Human
agcaccagaaugua

SEQ ID NO: 1248624 - RNA, 15 nt, Human
agcaccugcugucug

SEQ ID NO: 1248625 - RNA, 14 nt, Human
agcaccugcugucu

SEQ ID NO: 1248626 - RNA, 17 nt, Human
agcacgaaauguuauuu

SEQ ID NO: 1248627 - RNA, 18 nt, Human
agcacgaaauguuauuuu

SEQ ID NO: 1248628 - RNA, 17 nt, Human
agcacgacaguggaugc

SEQ ID NO: 1248629 - RNA, 14 nt, Human
agcacuuggcccuu

SEQ ID NO: 1248630 - RNA, 22 nt, Human
agcacuuggggguucaggcccg

SEQ ID NO: 1248631 - RNA, 16 nt, Human
acuguaaggcaaucau

SEQ ID NO: 1248632 - RNA, 14 nt, Human
acuggggcaggggc

SEQ ID NO: 1248633 - RNA, 15 nt, Human
acugggcaugagggg

SEQ ID NO: 1248634 - RNA, 19 nt, Human
acuggggaaaacuccaccu

SEQ ID NO: 1248635 - RNA, 15 nt, Human
acuggggaaacuggc

SEQ ID NO: 1248636 - RNA, 18 nt, Human
acuggggaaacuggccau

SEQ ID NO: 1248637 - RNA, 15 nt, Human
acuggggacuuggcc

SEQ ID NO: 1248638 - RNA, 17 nt, Human
acuggggacuuggccuc

SEQ ID NO: 1248639 - RNA, 18 nt, Human
acuggggacuuggccucu

SEQ ID NO: 1248640 - RNA, 13 nt, Human
acuggggagcccg

SEQ ID NO: 1248641 - RNA, 17 nt, Human
acuggggagcccgucuc

SEQ ID NO: 1248642 - RNA, 21 nt, Human
acuggggagcccgucucagug

SEQ ID NO: 1248643 - RNA, 19 nt, Human
acuggggacuuggccucuc

SEQ ID NO: 1248644 - RNA, 16 nt, Human
ucgcuccucaaccccu

SEQ ID NO: 1248645 - RNA, 18 nt, Human
ucgcuccucaaccccucc

SEQ ID NO: 1248646 - RNA, 19 nt, Human
ucgcuccucaaccccuccc

SEQ ID NO: 1248647 - RNA, 22 nt, Human
ucgcuccucaaccccuccccuc

SEQ ID NO: 1248648 - RNA, 14 nt, Human
ucgcuccugcccac

SEQ ID NO: 1248649 - RNA, 15 nt, Human
ucgcuccugcagccc

SEQ ID NO: 1248650 - RNA, 15 nt, Human
acugggagcccccag

SEQ ID NO: 1248651 - RNA, 17 nt, Human
acugggagcccccagcc

SEQ ID NO: 1248652 - RNA, 18 nt, Human
acugggagcccccagccu

SEQ ID NO: 1248653 - RNA, 19 nt, Human
acugggagcccccagccug

SEQ ID NO: 1248654 - RNA, 20 nt, Human
acugggagcccccagccugu

SEQ ID NO: 1248655 - RNA, 21 nt, Human
acugggagcccccagccuguc

SEQ ID NO: 1248656 - RNA, 12 nt, Human
acugggaggcuc

SEQ ID NO: 1248657 - RNA, 17 nt, Human
acugggaggcuccccuu

SEQ ID NO: 1248658 - RNA, 13 nt, Human
acugggcaaugau

SEQ ID NO: 1248659 - RNA, 18 nt, Human
acugggcaaugauggcaa

SEQ ID NO: 1248660 - RNA, 23 nt, Human
acugggcaugagggguuccuccc

SEQ ID NO: 1248661 - RNA, 22 nt, Human
acuguaaucuuauuuaggaagu

SEQ ID NO: 1248662 - RNA, 19 nt, Human
acuguaaucuuauuuagga

SEQ ID NO: 1248663 - RNA, 16 nt, Human
acuguaaguugggcuu

SEQ ID NO: 1248664 - RNA, 22 nt, Human
acuguacaaaaaaaucuuccaa

SEQ ID NO: 1248665 - RNA, 19 nt, Human
acuguacaaaaaaaucuuc

SEQ ID NO: 1248666 - RNA, 17 nt, Human
acuguacaaaaaaaucu

SEQ ID NO: 1248667 - RNA, 13 nt, Human
acuguacagcugg

SEQ ID NO: 1248668 - RNA, 14 nt, Human
acuguacagcuggc

SEQ ID NO: 1248669 - RNA, 18 nt, Human
acuguacagcuggcucua

SEQ ID NO: 1248670 - RNA, 17 nt, Human
acuguacagugucuuuu

SEQ ID NO: 1248671 - RNA, 21 nt, Human
acuguacagugucuuuuuuug

SEQ ID NO: 1248672 - RNA, 11 nt, Human
acuguacagug

SEQ ID NO: 1248673 - RNA, 12 nt, Human
acuguacagugu

SEQ ID NO: 1248674 - RNA, 15 nt, Human
acuguacagugucuu

SEQ ID NO: 1248675 - RNA, 16 nt, Human
acuguacagugucuuu

SEQ ID NO: 1248676 - RNA, 13 nt, Human
acuguacuccucc

SEQ ID NO: 1248677 - RNA, 14 nt, Human
acuguacuccuccc

SEQ ID NO: 1248678 - RNA, 15 nt, Human
acuguacuccuccca

SEQ ID NO: 1248679 - RNA, 18 nt, Human
acuguagaaugauuucau

SEQ ID NO: 1248680 - RNA, 19 nt, Human
acuguagaaugauuucaug

SEQ ID NO: 1248681 - RNA, 20 nt, Human
acuguagaaugauuucaugc

SEQ ID NO: 1248682 - RNA, 20 nt, Human
uccuuucacaaccuucugug

SEQ ID NO: 1248683 - RNA, 16 nt, Human
uccuuucacaaccuuc

SEQ ID NO: 1248684 - RNA, 18 nt, Human
uccuuucacaaccuucug

SEQ ID NO: 1248685 - RNA, 19 nt, Human
uccuuucacaaccuucugu

SEQ ID NO: 1248686 - RNA, 16 nt, Human
uccuuuagguaagaag

SEQ ID NO: 1248687 - RNA, 19 nt, Human
uccuuucauauaguuagcu

SEQ ID NO: 1248688 - RNA, 14 nt, Human
ucgaggaguaacaa

SEQ ID NO: 1248689 - RNA, 20 nt, Human
ucgaggaguaacaauacaaa

SEQ ID NO: 1248690 - RNA, 17 nt, Human
ucgaggaguaacaauac

SEQ ID NO: 1248691 - RNA, 21 nt, Human
ucgcuccccacucugcucuga

SEQ ID NO: 1248692 - RNA, 20 nt, Human
ucgcuccccacucugcucug

SEQ ID NO: 1248693 - RNA, 12 nt, Human
ucgccuucccca

SEQ ID NO: 1248694 - RNA, 23 nt, Human
ucgccuuucccaggugcuacacc

SEQ ID NO: 1248695 - RNA, 22 nt, Human
ucgagaucccaacacugccagc

SEQ ID NO: 1248696 - RNA, 23 nt, Human
ucgagaucccaacacugccagca

SEQ ID NO: 1248697 - RNA, 19 nt, Human
ucgagauuaucguuuucuu

SEQ ID NO: 1248698 - RNA, 20 nt, Human
ucgagauuaucguuuucuua

SEQ ID NO: 1248699 - RNA, 17 nt, Human
ucgagcagcauuuuauu

SEQ ID NO: 1248700 - RNA, 22 nt, Human
ucgacacuguucuuagcucaau

SEQ ID NO: 1248701 - RNA, 13 nt, Human
ucgaccugccucg

SEQ ID NO: 1248702 - RNA, 23 nt, Human
ucgacucugugcuggccagcgag

SEQ ID NO: 1248703 - RNA, 20 nt, Human
ucgacucugugcuggccagc

SEQ ID NO: 1248704 - RNA, 14 nt, Human
uccuucccugcugu

SEQ ID NO: 1248705 - RNA, 18 nt, Human
uccuuccaaugucuggag

SEQ ID NO: 1248706 - RNA, 14 nt, Human
uccuucccucucug

SEQ ID NO: 1248707 - RNA, 19 nt, Human
uccuucccugugccuccuc

SEQ ID NO: 1248708 - RNA, 16 nt, Human
uccuucccuuuucugu

SEQ ID NO: 1248709 - RNA, 17 nt, Human
uccuucccuuuucuguu

SEQ ID NO: 1248710 - RNA, 15 nt, Human
uccuucauuuccucc

SEQ ID NO: 1248711 - RNA, 20 nt, Human
uccuuccaaugucuggagac

SEQ ID NO: 1248712 - RNA, 14 nt, Human
uccuucccauggag

SEQ ID NO: 1248713 - RNA, 12 nt, Human
uccuucccucuc

SEQ ID NO: 1248714 - RNA, 16 nt, Human
uccuuccucugagccu

SEQ ID NO: 1248715 - RNA, 21 nt, Human
uccuuccucacaccaggcuug

SEQ ID NO: 1248716 - RNA, 16 nt, Human
uccuuccgcuuggagc

SEQ ID NO: 1248717 - RNA, 23 nt, Human
uccuuccgcuuggagcuauuuuc

SEQ ID NO: 1248718 - RNA, 23 nt, Human
uccuuccuaaauuuuccuguccu

SEQ ID NO: 1248719 - RNA, 16 nt, Human
uccuuccucacaccag

SEQ ID NO: 1248720 - RNA, 17 nt, Human
uccuuccucugagccuu

SEQ ID NO: 1248721 - RNA, 16 nt, Human
uccuuccucugaggcu

SEQ ID NO: 1248722 - RNA, 10 nt, Human
uccuuccugc

SEQ ID NO: 1248723 - RNA, 12 nt, Human
uccuuccugccc

SEQ ID NO: 1248724 - RNA, 14 nt, Human
uccuuccugcccca

SEQ ID NO: 1248725 - RNA, 13 nt, Human
uccuucagccuga

SEQ ID NO: 1248726 - RNA, 19 nt, Human
uccuucaugacagccucca

SEQ ID NO: 1248727 - RNA, 11 nt, Human
uccuucauuuc

SEQ ID NO: 1248728 - RNA, 14 nt, Human
uccuucauuuccuc

SEQ ID NO: 1248729 - RNA, 15 nt, Human
uccuucagcacuuua

SEQ ID NO: 1248730 - RNA, 18 nt, Human
uccuucagcacuuuagaa

SEQ ID NO: 1248731 - RNA, 22 nt, Human
uccuucagagagcagugcuuuu

SEQ ID NO: 1248732 - RNA, 14 nt, Human
uccuucagauuugg

SEQ ID NO: 1248733 - RNA, 13 nt, Human
uccuucagagagc

SEQ ID NO: 1248734 - RNA, 19 nt, Human
uccuucagagagcagugcu

SEQ ID NO: 1248735 - RNA, 20 nt, Human
uccuucagagagcagugcuu

SEQ ID NO: 1248736 - RNA, 21 nt, Human
uccuucagagagcagugcuuu

SEQ ID NO: 1248737 - RNA, 23 nt, Human
uccuucagagagcagugcuuuug

SEQ ID NO: 1248738 - RNA, 17 nt, Human
acuggcucuccuggccc

SEQ ID NO: 1248739 - RNA, 15 nt, Human
acuggcucuccuggc

SEQ ID NO: 1248740 - RNA, 23 nt, Human
acuggccucugcugauccuccca

SEQ ID NO: 1248741 - RNA, 21 nt, Human
acuggcauggauauaguuuua

SEQ ID NO: 1248742 - RNA, 23 nt, Human
acuggcauggauauaguuuuacu

SEQ ID NO: 1248743 - RNA, 18 nt, Human
acuggccuuuuucauuua

SEQ ID NO: 1248744 - RNA, 19 nt, Human
acuggcgacacguagcagc

SEQ ID NO: 1248745 - RNA, 15 nt, Human
acuggcggggggccc

SEQ ID NO: 1248746 - RNA, 21 nt, Human
acuggcaggcaggcucccagg

SEQ ID NO: 1248747 - RNA, 21 nt, Human
acugcucuccuccaccucaac

SEQ ID NO: 1248748 - RNA, 15 nt, Human
acugcucuccuccac

SEQ ID NO: 1248749 - RNA, 12 nt, Human
acugcucugaug

SEQ ID NO: 1248750 - RNA, 15 nt, Human
acugcucccaccucc

SEQ ID NO: 1248751 - RNA, 16 nt, Human
acugcucccaccuccu

SEQ ID NO: 1248752 - RNA, 19 nt, Human
acugcucccaccuccugac

SEQ ID NO: 1248753 - RNA, 18 nt, Human
acugcucccaccuccuga

SEQ ID NO: 1248754 - RNA, 12 nt, Human
acugcucugaga

SEQ ID NO: 1248755 - RNA, 13 nt, Human
acugcucugagaa

SEQ ID NO: 1248756 - RNA, 18 nt, Human
acugcugagauacauaca

SEQ ID NO: 1248757 - RNA, 19 nt, Human
acugcugagauacauacag

SEQ ID NO: 1248758 - RNA, 20 nt, Human
acugcugagauacauacaga

SEQ ID NO: 1248759 - RNA, 22 nt, Human
acugcugagauacauacagaau

SEQ ID NO: 1248760 - RNA, 12 nt, Human
acugcugccacu

SEQ ID NO: 1248761 - RNA, 13 nt, Human
acugcugccacug

SEQ ID NO: 1248762 - RNA, 12 nt, Human
acugcuauuuuu

SEQ ID NO: 1248763 - RNA, 21 nt, Human
acugcuauuuuucauccuaaa

SEQ ID NO: 1248764 - RNA, 23 nt, Human
acugcgcccuuaacugcauccag

SEQ ID NO: 1248765 - RNA, 19 nt, Human
acugcgacuuucugccugg

SEQ ID NO: 1248766 - RNA, 21 nt, Human
acugcgacuuucugccuggag

SEQ ID NO: 1248767 - RNA, 22 nt, Human
acugcgacuuucugccuggagu

SEQ ID NO: 1248768 - RNA, 23 nt, Human
acugcgacuuucugccuggagug

SEQ ID NO: 1248769 - RNA, 13 nt, Human
acugccuuugacc

SEQ ID NO: 1248770 - RNA, 15 nt, Human
acugcgacuuucugc

SEQ ID NO: 1248771 - RNA, 17 nt, Human
acugcgacuuucugccu

SEQ ID NO: 1248772 - RNA, 18 nt, Human
acugcgacuuucugccug

SEQ ID NO: 1248773 - RNA, 11 nt, Human
acugccuuuga

SEQ ID NO: 1248774 - RNA, 22 nt, Human
acugccuucucaacuccaaacu

SEQ ID NO: 1248775 - RNA, 18 nt, Human
acugcuuggagcugagca

SEQ ID NO: 1248776 - RNA, 13 nt, Human
acugcuuggagcu

SEQ ID NO: 1248777 - RNA, 16 nt, Human
acugcuuggagcugag

SEQ ID NO: 1248778 - RNA, 13 nt, Human
acugcuggcugcc

SEQ ID NO: 1248779 - RNA, 14 nt, Human
acugcuggcugccu

SEQ ID NO: 1248780 - RNA, 22 nt, Human
acugcuggagaggccccagccg

SEQ ID NO: 1248781 - RNA, 23 nt, Human
acugcuugaacuaggcugagcaa

SEQ ID NO: 1248782 - RNA, 14 nt, Human
acugcuugaggaaa

SEQ ID NO: 1248783 - RNA, 15 nt, Human
acugcuugaggaaaa

SEQ ID NO: 1248784 - RNA, 18 nt, Human
acugcuugaggaaaacaa

SEQ ID NO: 1248785 - RNA, 16 nt, Human
acugcuugcccuaagc

SEQ ID NO: 1248786 - RNA, 20 nt, Human
acugcuugcccuaagcagaa

SEQ ID NO: 1248787 - RNA, 22 nt, Human
acugcuugcccuaagcagaaag

SEQ ID NO: 1248788 - RNA, 16 nt, Human
acugcugcccagccuc

SEQ ID NO: 1248789 - RNA, 18 nt, Human
acugcugcccagccucca

SEQ ID NO: 1248790 - RNA, 21 nt, Human
acugcugcccagccuccaagc

SEQ ID NO: 1248791 - RNA, 14 nt, Human
acugcugccacuga

SEQ ID NO: 1248792 - RNA, 17 nt, Human
acugcugccacugaggg

SEQ ID NO: 1248793 - RNA, 12 nt, Human
acugcuggcugc

SEQ ID NO: 1248794 - RNA, 16 nt, Human
acugcuggagaggccc

SEQ ID NO: 1248795 - RNA, 21 nt, Human
acugcuggagaggccccagcc

SEQ ID NO: 1248796 - RNA, 16 nt, Human
acugcaaccucugccu

SEQ ID NO: 1248797 - RNA, 15 nt, Human
acugcaaccuucacc

SEQ ID NO: 1248798 - RNA, 14 nt, Human
acugcacaauaacu

SEQ ID NO: 1248799 - RNA, 21 nt, Human
acugcacaauaacuccuccca

SEQ ID NO: 1248800 - RNA, 20 nt, Human
acugcacaauaacuccuccc

SEQ ID NO: 1248801 - RNA, 16 nt, Human
acugcacagugcaucu

SEQ ID NO: 1248802 - RNA, 18 nt, Human
acugcacagugcaucuca

SEQ ID NO: 1248803 - RNA, 22 nt, Human
acugcacagugcaucucagccc

SEQ ID NO: 1248804 - RNA, 20 nt, Human
uccugaguagcugggauuac

SEQ ID NO: 1248805 - RNA, 13 nt, Human
uccugaguagcug

SEQ ID NO: 1248806 - RNA, 15 nt, Human
uccugaguggugcca

SEQ ID NO: 1248807 - RNA, 15 nt, Human
uccugagugcuugcu

SEQ ID NO: 1248808 - RNA, 14 nt, Human
uccugaucagagcc

SEQ ID NO: 1248809 - RNA, 20 nt, Human
uccugcaccggggccugggc

SEQ ID NO: 1248810 - RNA, 18 nt, Human
uccugcaacucaaggacu

SEQ ID NO: 1248811 - RNA, 17 nt, Human
uccugcaacucaaggac

SEQ ID NO: 1248812 - RNA, 21 nt, Human
uccugcaccggggccugggca

SEQ ID NO: 1248813 - RNA, 21 nt, Human
uccugcacuuacuugcuuauu

SEQ ID NO: 1248814 - RNA, 17 nt, Human
uccugcagaccacgccc

SEQ ID NO: 1248815 - RNA, 13 nt, Human
uccugcagcccca

SEQ ID NO: 1248816 - RNA, 12 nt, Human
uccugcagcccc

SEQ ID NO: 1248817 - RNA, 13 nt, Human
uccugcggguggg

SEQ ID NO: 1248818 - RNA, 14 nt, Human
uccugcgggugggg

SEQ ID NO: 1248819 - RNA, 17 nt, Human
uccugcuaaaacaauga

SEQ ID NO: 1248820 - RNA, 20 nt, Human
uccugcuaacggugcucagg

SEQ ID NO: 1248821 - RNA, 18 nt, Human
uccugcuaaguuaauguu

SEQ ID NO: 1248822 - RNA, 15 nt, Human
uccugcucauauugu

SEQ ID NO: 1248823 - RNA, 16 nt, Human
uccugcucauauugug

SEQ ID NO: 1248824 - RNA, 22 nt, Human
uccugcaggcaggaacaaacag

SEQ ID NO: 1248825 - RNA, 17 nt, Human
uccugcaggcaggaaca

SEQ ID NO: 1248826 - RNA, 14 nt, Human
acugaggaucagag

SEQ ID NO: 1248827 - RNA, 15 nt, Human
acugaggaccagcca

SEQ ID NO: 1248828 - RNA, 20 nt, Human
acugaggaauuuucuuugug

SEQ ID NO: 1248829 - RNA, 22 nt, Human
acugaggggaggggagcauggg

SEQ ID NO: 1248830 - RNA, 17 nt, Human
acugaggggaggggagc

SEQ ID NO: 1248831 - RNA, 12 nt, Human
acugagggcagu

SEQ ID NO: 1248832 - RNA, 14 nt, Human
uccucuccccagcc

SEQ ID NO: 1248833 - RNA, 15 nt, Human
uccucuccccagccc

SEQ ID NO: 1248834 - RNA, 16 nt, Human
uccucuccccagccca

SEQ ID NO: 1248835 - RNA, 17 nt, Human
uccucuccccagcccag

SEQ ID NO: 1248836 - RNA, 18 nt, Human
uccucuccccagcccaga

SEQ ID NO: 1248837 - RNA, 19 nt, Human
uccucuccccagcccagag

SEQ ID NO: 1248838 - RNA, 20 nt, Human
uccucuccccagcccagaga

SEQ ID NO: 1248839 - RNA, 17 nt, Human
acugaggaauuucaccu

SEQ ID NO: 1248840 - RNA, 19 nt, Human
acugaggaauuucaccugu

SEQ ID NO: 1248841 - RNA, 16 nt, Human
acugaggaauuuucuu

SEQ ID NO: 1248842 - RNA, 20 nt, Human
acugcaaccuccaccucgca

SEQ ID NO: 1248843 - RNA, 18 nt, Human
acugcaaccuccaccucc

SEQ ID NO: 1248844 - RNA, 17 nt, Human
acugcaaccuccaccuc

SEQ ID NO: 1248845 - RNA, 16 nt, Human
acugcaaccuccaccu

SEQ ID NO: 1248846 - RNA, 20 nt, Human
acugcaaccuucgccaccug

SEQ ID NO: 1248847 - RNA, 23 nt, Human
acugcaaccuucgccaccugggu

SEQ ID NO: 1248848 - RNA, 15 nt, Human
acugagugggaagcc

SEQ ID NO: 1248849 - RNA, 16 nt, Human
acugagugggaagccc

SEQ ID NO: 1248850 - RNA, 18 nt, Human
acugaguuuuccauggca

SEQ ID NO: 1248851 - RNA, 22 nt, Human
acugcaaaucaggcuuuuguuu

SEQ ID NO: 1248852 - RNA, 13 nt, Human
acugaguuuucca

SEQ ID NO: 1248853 - RNA, 13 nt, Human
acugcaaccucca

SEQ ID NO: 1248854 - RNA, 14 nt, Human
acugcaaccuccac

SEQ ID NO: 1248855 - RNA, 16 nt, Human
acugagugccuuuugg

SEQ ID NO: 1248856 - RNA, 12 nt, Human
acugagugacuc

SEQ ID NO: 1248857 - RNA, 23 nt, Human
acugagugacucuauauagcuga

SEQ ID NO: 1248858 - RNA, 13 nt, Human
acugagugggaag

SEQ ID NO: 1248859 - RNA, 14 nt, Human
acugagugggaagc

SEQ ID NO: 1248860 - RNA, 20 nt, Human
acugaggggggauccaguuu

SEQ ID NO: 1248861 - RNA, 24 nt, Human
acugagggugaguuggcuuaccug

SEQ ID NO: 1248862 - RNA, 21 nt, Human
acugagguucauggauuuucc

SEQ ID NO: 1248863 - RNA, 23 nt, Human
acugagggcagucgauagagcug

SEQ ID NO: 1248864 - RNA, 16 nt, Human
uccugggcccucucug

SEQ ID NO: 1248865 - RNA, 17 nt, Human
uccugggcccucucugc

SEQ ID NO: 1248866 - RNA, 21 nt, Human
uccugggcccucucugcucug

SEQ ID NO: 1248867 - RNA, 23 nt, Human
uccugggcccucucugcucugcg

SEQ ID NO: 1248868 - RNA, 12 nt, Human
uccugggccugc

SEQ ID NO: 1248869 - RNA, 18 nt, Human
uccuggggaaccugaccc

SEQ ID NO: 1248870 - RNA, 19 nt, Human
uccuggggaaccugacccc

SEQ ID NO: 1248871 - RNA, 13 nt, Human
uccugggccugca

SEQ ID NO: 1248872 - RNA, 15 nt, Human
uccugggccugcaga

SEQ ID NO: 1248873 - RNA, 16 nt, Human
uccugggccugcagaa

SEQ ID NO: 1248874 - RNA, 21 nt, Human
uccuggggguucuuucuuccu

SEQ ID NO: 1248875 - RNA, 22 nt, Human
uccuggggguucuuucuuccuc

SEQ ID NO: 1248876 - RNA, 23 nt, Human
uccuggggguucuuucuuccucu

SEQ ID NO: 1248877 - RNA, 18 nt, Human
uccugugacuucagcucu

SEQ ID NO: 1248878 - RNA, 20 nt, Human
uccugugaaugccacugccu

SEQ ID NO: 1248879 - RNA, 22 nt, Human
uccugugaaugccacugccuuc

SEQ ID NO: 1248880 - RNA, 14 nt, Human
uccugugcacagcc

SEQ ID NO: 1248881 - RNA, 13 nt, Human
uccugugcacagc

SEQ ID NO: 1248882 - RNA, 18 nt, Human
uccugugcucagcccuga

SEQ ID NO: 1248883 - RNA, 15 nt, Human
uccugugcucagccc

SEQ ID NO: 1248884 - RNA, 16 nt, Human
uccugugcucagcccu

SEQ ID NO: 1248885 - RNA, 12 nt, Human
uccuguggcccc

SEQ ID NO: 1248886 - RNA, 22 nt, Human
uccuguggccccacccugggcc

SEQ ID NO: 1248887 - RNA, 23 nt, Human
uccuguggccccacccugggccc

SEQ ID NO: 1248888 - RNA, 12 nt, Human
uccuguggcucc

SEQ ID NO: 1248889 - RNA, 14 nt, Human
uccuguggcucccu

SEQ ID NO: 1248890 - RNA, 13 nt, Human
uccugugggagcc

SEQ ID NO: 1248891 - RNA, 14 nt, Human
uccugugggagccu

SEQ ID NO: 1248892 - RNA, 15 nt, Human
uccugugggagccuc

SEQ ID NO: 1248893 - RNA, 16 nt, Human
uccugugggagccucg

SEQ ID NO: 1248894 - RNA, 18 nt, Human
uccugugggagccucgca

SEQ ID NO: 1248895 - RNA, 23 nt, Human
uccugggguauaaaacuuuccuc

SEQ ID NO: 1248896 - RNA, 13 nt, Human
uccuggguggcua

SEQ ID NO: 1248897 - RNA, 15 nt, Human
uccuggguggcuacu

SEQ ID NO: 1248898 - RNA, 17 nt, Human
uccuggguggcuacucu

SEQ ID NO: 1248899 - RNA, 22 nt, Human
uccuggguggcuacucugugcc

SEQ ID NO: 1248900 - RNA, 24 nt, Human
uccuggguggcuacucugugccag

SEQ ID NO: 1248901 - RNA, 23 nt, Human
uccuggguggcuacucugugcca

SEQ ID NO: 1248902 - RNA, 17 nt, Human
uccuggguuuuguauuc

SEQ ID NO: 1248903 - RNA, 20 nt, Human
uccuggguuuuguauucucu

SEQ ID NO: 1248904 - RNA, 21 nt, Human
uccuggguuuuguauucucug

SEQ ID NO: 1248905 - RNA, 22 nt, Human
uccuggguuuuguauucucuga

SEQ ID NO: 1248906 - RNA, 23 nt, Human
uccuggguuuuguauucucugag

SEQ ID NO: 1248907 - RNA, 13 nt, Human
uccugguagaaua

SEQ ID NO: 1248908 - RNA, 16 nt, Human
uccuggucaccuagga

SEQ ID NO: 1248909 - RNA, 14 nt, Human
uccugucuuauccu

SEQ ID NO: 1248910 - RNA, 21 nt, Human
uccugucuuauccuccaccgu

SEQ ID NO: 1248911 - RNA, 16 nt, Human
uccugugaaugccacu

SEQ ID NO: 1248912 - RNA, 12 nt, Human
acugcaggcccu

SEQ ID NO: 1248913 - RNA, 13 nt, Human
acugcaggcccug

SEQ ID NO: 1248914 - RNA, 14 nt, Human
acugcaggcccugg

SEQ ID NO: 1248915 - RNA, 15 nt, Human
acugcaggcccuggc

SEQ ID NO: 1248916 - RNA, 16 nt, Human
acugcaggcccuggcc

SEQ ID NO: 1248917 - RNA, 16 nt, Human
acugcagggacugcca

SEQ ID NO: 1248918 - RNA, 10 nt, Human
acugcaggga

SEQ ID NO: 1248919 - RNA, 23 nt, Human
acugcagggaaaauuauuugcau

SEQ ID NO: 1248920 - RNA, 17 nt, Human
acugcaggcccuggccu

SEQ ID NO: 1248921 - RNA, 18 nt, Human
acugcaggcccuggccuc

SEQ ID NO: 1248922 - RNA, 19 nt, Human
acugcaggcccuggccucc

SEQ ID NO: 1248923 - RNA, 22 nt, Human
acugcaggcccuggccuccccu

SEQ ID NO: 1248924 - RNA, 17 nt, Human
acugcagggacugccag

SEQ ID NO: 1248925 - RNA, 18 nt, Human
acugcagggacugccagu

SEQ ID NO: 1248926 - RNA, 17 nt, Human
uccuguuuugcacagcc

SEQ ID NO: 1248927 - RNA, 18 nt, Human
uccuuaaaauguaagauu

SEQ ID NO: 1248928 - RNA, 15 nt, Human
uccuguguggagagg

SEQ ID NO: 1248929 - RNA, 16 nt, Human
uccuguguggagaggg

SEQ ID NO: 1248930 - RNA, 18 nt, Human
uccuguguggagagggaa

SEQ ID NO: 1248931 - RNA, 22 nt, Human
uccuguguggagagggaaugug

SEQ ID NO: 1248932 - RNA, 22 nt, Human
uccuguguguccaaaacugccu

SEQ ID NO: 1248933 - RNA, 21 nt, Human
uccuguguggagagggaaugu

SEQ ID NO: 1248934 - RNA, 12 nt, Human
uccuguguguua

SEQ ID NO: 1248935 - RNA, 18 nt, Human
uccuguguguuaagcucu

SEQ ID NO: 1248936 - RNA, 19 nt, Human
uccuguguguuaagcucug

SEQ ID NO: 1248937 - RNA, 20 nt, Human
uccuguguguuaagcucugc

SEQ ID NO: 1248938 - RNA, 21 nt, Human
uccuguguguuaagcucugcu

SEQ ID NO: 1248939 - RNA, 22 nt, Human
uccuguguguuaagcucugcua

SEQ ID NO: 1248940 - RNA, 14 nt, Human
uccuguguuuguga

SEQ ID NO: 1248941 - RNA, 15 nt, Human
uccuguucacaccag

SEQ ID NO: 1248942 - RNA, 13 nt, Human
uccuguugggaga

SEQ ID NO: 1248943 - RNA, 14 nt, Human
uccuguugggagag

SEQ ID NO: 1248944 - RNA, 17 nt, Human
uccuguugucaagaaua

SEQ ID NO: 1248945 - RNA, 21 nt, Human
uccuguugggagagggcgcag

SEQ ID NO: 1248946 - RNA, 18 nt, Human
uccuguuuccuagcugug

SEQ ID NO: 1248947 - RNA, 13 nt, Human
uccuguuugucua

SEQ ID NO: 1248948 - RNA, 17 nt, Human
uccuguuugucuacaua

SEQ ID NO: 1248949 - RNA, 21 nt, Human
uccuguuuugcacagccaaau

SEQ ID NO: 1248950 - RNA, 14 nt, Human
uccuguuuuucaca

SEQ ID NO: 1248951 - RNA, 23 nt, Human
acucuuauaucuauauuuuacau

SEQ ID NO: 1248952 - RNA, 22 nt, Human
acucugcuucucugacuucugc

SEQ ID NO: 1248953 - RNA, 15 nt, Human
acucugcuugauuuu

SEQ ID NO: 1248954 - RNA, 16 nt, Human
acucugcuugauuuuu

SEQ ID NO: 1248955 - RNA, 18 nt, Human
acucugcuugauuuuugc

SEQ ID NO: 1248956 - RNA, 13 nt, Human
acucugcuuguua

SEQ ID NO: 1248957 - RNA, 12 nt, Human
acucugcagccu

SEQ ID NO: 1248958 - RNA, 13 nt, Human
acucugcagccuc

SEQ ID NO: 1248959 - RNA, 14 nt, Human
acucugcagccuca

SEQ ID NO: 1248960 - RNA, 15 nt, Human
acucugcagccucag

SEQ ID NO: 1248961 - RNA, 17 nt, Human
acucugcagccucagag

SEQ ID NO: 1248962 - RNA, 16 nt, Human
acucugcagccucaga

SEQ ID NO: 1248963 - RNA, 16 nt, Human
acucugcauucuagua

SEQ ID NO: 1248964 - RNA, 17 nt, Human
acucugcuucucugacu

SEQ ID NO: 1248965 - RNA, 18 nt, Human
acucugcuucucugacuu

SEQ ID NO: 1248966 - RNA, 20 nt, Human
acucugcuucucugacuucu

SEQ ID NO: 1248967 - RNA, 21 nt, Human
acucugcuucucugacuucug

SEQ ID NO: 1248968 - RNA, 21 nt, Human
acucuccccacgagggcuggc

SEQ ID NO: 1248969 - RNA, 21 nt, Human
acucucuuauugccucacuuc

SEQ ID NO: 1248970 - RNA, 23 nt, Human
acucucuuauugccucacuucag

SEQ ID NO: 1248971 - RNA, 13 nt, Human
acucugacaacag

SEQ ID NO: 1248972 - RNA, 16 nt, Human
acucugaaaugaagau

SEQ ID NO: 1248973 - RNA, 19 nt, Human
acucuccccacgagggcug

SEQ ID NO: 1248974 - RNA, 20 nt, Human
acucuccccacgagggcugg

SEQ ID NO: 1248975 - RNA, 22 nt, Human
acucuccccacgagggcuggcu

SEQ ID NO: 1248976 - RNA, 23 nt, Human
acucgcuagcaguggcaggcaga

SEQ ID NO: 1248977 - RNA, 17 nt, Human
acucggaaucuauuuuc

SEQ ID NO: 1248978 - RNA, 22 nt, Human
acucggcagcccuuccaaacuc

SEQ ID NO: 1248979 - RNA, 21 nt, Human
acucggccucccaaagugcug

SEQ ID NO: 1248980 - RNA, 22 nt, Human
acucggccucccaaagugcugg

SEQ ID NO: 1248981 - RNA, 12 nt, Human
acucgguuucuc

SEQ ID NO: 1248982 - RNA, 21 nt, Human
uccuagcacagauggccagcc

SEQ ID NO: 1248983 - RNA, 20 nt, Human
uccuagcacagauggccagc

SEQ ID NO: 1248984 - RNA, 20 nt, Human
uccuaggcuccaccccaucc

SEQ ID NO: 1248985 - RNA, 22 nt, Human
uccuaggcuccaccccauccag

SEQ ID NO: 1248986 - RNA, 14 nt, Human
acucgcuagcagug

SEQ ID NO: 1248987 - RNA, 16 nt, Human
acucgcuagcaguggc

SEQ ID NO: 1248988 - RNA, 18 nt, Human
acucgcuagcaguggcag

SEQ ID NO: 1248989 - RNA, 16 nt, Human
uccuccccuccuccug

SEQ ID NO: 1248990 - RNA, 18 nt, Human
uccuccccuccuccugga

SEQ ID NO: 1248991 - RNA, 20 nt, Human
uccuccccuccuccuggacu

SEQ ID NO: 1248992 - RNA, 22 nt, Human
uccuccccuccuccuggacucc

SEQ ID NO: 1248993 - RNA, 13 nt, Human
uccuccccuggag

SEQ ID NO: 1248994 - RNA, 15 nt, Human
uccuccccuggaggg

SEQ ID NO: 1248995 - RNA, 14 nt, Human
uccuccccuggagg

SEQ ID NO: 1248996 - RNA, 16 nt, Human
uccucagccagccucg

SEQ ID NO: 1248997 - RNA, 12 nt, Human
uccucagccuga

SEQ ID NO: 1248998 - RNA, 14 nt, Human
uccucagccugaac

SEQ ID NO: 1248999 - RNA, 11 nt, Human
uccucagccuu

SEQ ID NO: 1249000 - RNA, 21 nt, Human
uccucagccugaaccccaggg

SEQ ID NO: 1249001 - RNA, 18 nt, Human
uccucagccuugccagag

SEQ ID NO: 1249002 - RNA, 15 nt, Human
uccucuccacugccu

SEQ ID NO: 1249003 - RNA, 16 nt, Human
uccucuccacugccuu

SEQ ID NO: 1249004 - RNA, 12 nt, Human
uccucuccacug

SEQ ID NO: 1249005 - RNA, 13 nt, Human
uccucuccacugc

SEQ ID NO: 1249006 - RNA, 14 nt, Human
uccucuccacugcc

SEQ ID NO: 1249007 - RNA, 21 nt, Human
acucuuaugcuguacccaguu

SEQ ID NO: 1249008 - RNA, 15 nt, Human
uccucaaagaaagug

SEQ ID NO: 1249009 - RNA, 16 nt, Human
uccucaaagaaagugu

SEQ ID NO: 1249010 - RNA, 18 nt, Human
uccucaaagaaaguguau

SEQ ID NO: 1249011 - RNA, 19 nt, Human
uccucaaagaaaguguauu

SEQ ID NO: 1249012 - RNA, 17 nt, Human
uccucaacacccaacug

SEQ ID NO: 1249013 - RNA, 22 nt, Human
uccucaaccccuccccuccauc

SEQ ID NO: 1249014 - RNA, 17 nt, Human
uccucaagaaauaaaag

SEQ ID NO: 1249015 - RNA, 23 nt, Human
uccucaagaaauaaaaggaagcc

SEQ ID NO: 1249016 - RNA, 19 nt, Human
uccucaaccccuccccucc

SEQ ID NO: 1249017 - RNA, 12 nt, Human
uccucaauccag

SEQ ID NO: 1249018 - RNA, 13 nt, Human
uccucaauccagc

SEQ ID NO: 1249019 - RNA, 14 nt, Human
uccucaauccagcu

SEQ ID NO: 1249020 - RNA, 14 nt, Human
uccucacuguaucc

SEQ ID NO: 1249021 - RNA, 16 nt, Human
uccucagacucuaaga

SEQ ID NO: 1249022 - RNA, 21 nt, Human
uccucagacucuaagaaagaa

SEQ ID NO: 1249023 - RNA, 11 nt, Human
uccucagcccc

SEQ ID NO: 1249024 - RNA, 10 nt, Human
uccucagcca

SEQ ID NO: 1249025 - RNA, 12 nt, Human
uccucagccagc

SEQ ID NO: 1249026 - RNA, 13 nt, Human
uccucagccagcc

SEQ ID NO: 1249027 - RNA, 15 nt, Human
uccucagccagccuc

SEQ ID NO: 1249028 - RNA, 17 nt, Human
uccucagagaauuucua

SEQ ID NO: 1249029 - RNA, 20 nt, Human
uccucagagaauuucuacca

SEQ ID NO: 1249030 - RNA, 17 nt, Human
uccucagacucuaagaa

SEQ ID NO: 1249031 - RNA, 13 nt, Human
uccucacccccag

SEQ ID NO: 1249032 - RNA, 16 nt, Human
uccucacccccagcuu

SEQ ID NO: 1249033 - RNA, 20 nt, Human
uccucacccccagcuuugcu

SEQ ID NO: 1249034 - RNA, 18 nt, Human
acuccugaccucaaguga

SEQ ID NO: 1249035 - RNA, 14 nt, Human
acuccugaccucag

SEQ ID NO: 1249036 - RNA, 15 nt, Human
acuccugaccucagg

SEQ ID NO: 1249037 - RNA, 16 nt, Human
acuccugaccucaggc

SEQ ID NO: 1249038 - RNA, 16 nt, Human
acuccuagcuguccuu

SEQ ID NO: 1249039 - RNA, 23 nt, Human
acuccuagcuguccuuuuuccuc

SEQ ID NO: 1249040 - RNA, 16 nt, Human
acuccuaggaaaauac

SEQ ID NO: 1249041 - RNA, 17 nt, Human
acuccugaccucaggca

SEQ ID NO: 1249042 - RNA, 19 nt, Human
acuccagugagacagcucu

SEQ ID NO: 1249043 - RNA, 21 nt, Human
acuccaggcccaaggcucccg

SEQ ID NO: 1249044 - RNA, 16 nt, Human
acuccaggcccaaggc

SEQ ID NO: 1249045 - RNA, 17 nt, Human
acuccaggcccaaggcu

SEQ ID NO: 1249046 - RNA, 19 nt, Human
acuccaggcccaaggcucc

SEQ ID NO: 1249047 - RNA, 14 nt, Human
acuccuaccuggua

SEQ ID NO: 1249048 - RNA, 20 nt, Human
acuccagcuggguuggaaaa

SEQ ID NO: 1249049 - RNA, 13 nt, Human
acuccaggcccaa

SEQ ID NO: 1249050 - RNA, 14 nt, Human
acuccaggcccaag

SEQ ID NO: 1249051 - RNA, 14 nt, Human
acuccacacugcac

SEQ ID NO: 1249052 - RNA, 16 nt, Human
acuccacacugcacaa

SEQ ID NO: 1249053 - RNA, 21 nt, Human
acuccacacugcacaauaacu

SEQ ID NO: 1249054 - RNA, 17 nt, Human
acuccacacugcacaau

SEQ ID NO: 1249055 - RNA, 14 nt, Human
acuccaacucuucc

SEQ ID NO: 1249056 - RNA, 15 nt, Human
acuccaagcccagcc

SEQ ID NO: 1249057 - RNA, 17 nt, Human
acuccaagcccagccca

SEQ ID NO: 1249058 - RNA, 18 nt, Human
acuccaagcccagcccau

SEQ ID NO: 1249059 - RNA, 12 nt, Human
acuccacacugc

SEQ ID NO: 1249060 - RNA, 13 nt, Human
acuccacacugca

SEQ ID NO: 1249061 - RNA, 21 nt, Human
acucaucuagguaaauuacag

SEQ ID NO: 1249062 - RNA, 17 nt, Human
acucaucuuucccuccu

SEQ ID NO: 1249063 - RNA, 18 nt, Human
acucaucuuucccuccuu

SEQ ID NO: 1249064 - RNA, 21 nt, Human
acucaucuuucccuccuuggu

SEQ ID NO: 1249065 - RNA, 20 nt, Human
acucaucuuucccuccuugg

SEQ ID NO: 1249066 - RNA, 15 nt, Human
acucaugugacucuu

SEQ ID NO: 1249067 - RNA, 16 nt, Human
acucaugugacucuuu

SEQ ID NO: 1249068 - RNA, 16 nt, Human
acucaugcauuguccu

SEQ ID NO: 1249069 - RNA, 17 nt, Human
acucaugcauuguccuc

SEQ ID NO: 1249070 - RNA, 17 nt, Human
acucaugugacucuuuc

SEQ ID NO: 1249071 - RNA, 18 nt, Human
acucaucuagguaaauua

SEQ ID NO: 1249072 - RNA, 16 nt, Human
acucaucuagguaaau

SEQ ID NO: 1249073 - RNA, 23 nt, Human
ucccucauuccaccuucccaugc

SEQ ID NO: 1249074 - RNA, 21 nt, Human
ucccucaucugucccuccggg

SEQ ID NO: 1249075 - RNA, 14 nt, Human
ucccucaccuucug

SEQ ID NO: 1249076 - RNA, 15 nt, Human
ucccucaccuuggca

SEQ ID NO: 1249077 - RNA, 21 nt, Human
ucccucaccuuggcaccagac

SEQ ID NO: 1249078 - RNA, 20 nt, Human
ucccucaccuuggcaccaga

SEQ ID NO: 1249079 - RNA, 16 nt, Human
ucccucagugcccuca

SEQ ID NO: 1249080 - RNA, 15 nt, Human
ucccucaccuucuga

SEQ ID NO: 1249081 - RNA, 16 nt, Human
ucccucaucugucccu

SEQ ID NO: 1249082 - RNA, 16 nt, Human
uccguucacaugugug

SEQ ID NO: 1249083 - RNA, 23 nt, Human
uccgucaaaacagauuguuugca

SEQ ID NO: 1249084 - RNA, 16 nt, Human
uccgucaaaacagauu

SEQ ID NO: 1249085 - RNA, 14 nt, Human
uccguccccugccc

SEQ ID NO: 1249086 - RNA, 18 nt, Human
uccguccccugcccaugc

SEQ ID NO: 1249087 - RNA, 17 nt, Human
ucccuuugcccagaaag

SEQ ID NO: 1249088 - RNA, 12 nt, Human
uccuagcacaga

SEQ ID NO: 1249089 - RNA, 15 nt, Human
uccuagcacagaugg

SEQ ID NO: 1249090 - RNA, 16 nt, Human
uccuagcacagauggc

SEQ ID NO: 1249091 - RNA, 13 nt, Human
uccuagauccuaa

SEQ ID NO: 1249092 - RNA, 14 nt, Human
uccuagauccuaag

SEQ ID NO: 1249093 - RNA, 13 nt, Human
uccuagaugcucu

SEQ ID NO: 1249094 - RNA, 23 nt, Human
uccuagauccuaagggucgaaag

SEQ ID NO: 1249095 - RNA, 13 nt, Human
uccguuggccacu

SEQ ID NO: 1249096 - RNA, 15 nt, Human
uccguuggccacucc

SEQ ID NO: 1249097 - RNA, 16 nt, Human
uccgugccucuuuuua

SEQ ID NO: 1249098 - RNA, 21 nt, Human
uccuaaacaucauucauuuuu

SEQ ID NO: 1249099 - RNA, 23 nt, Human
uccuaaacugagacaaugccuug

SEQ ID NO: 1249100 - RNA, 17 nt, Human
uccuaaagaacaaagua

SEQ ID NO: 1249101 - RNA, 23 nt, Human
acuccugcacacgcuccuuccuc

SEQ ID NO: 1249102 - RNA, 14 nt, Human
ucccuguaaccucu

SEQ ID NO: 1249103 - RNA, 18 nt, Human
ucccuguaaccucuucag

SEQ ID NO: 1249104 - RNA, 19 nt, Human
ucccuguaaccucuucaga

SEQ ID NO: 1249105 - RNA, 22 nt, Human
ucccuguaaccucuucagaggc

SEQ ID NO: 1249106 - RNA, 23 nt, Human
ucccuguaaccucuucagaggcc

SEQ ID NO: 1249107 - RNA, 15 nt, Human
ucccuguaacuugau

SEQ ID NO: 1249108 - RNA, 12 nt, Human
ucccuguaacuu

SEQ ID NO: 1249109 - RNA, 17 nt, Human
ucccuguguugucucua

SEQ ID NO: 1249110 - RNA, 15 nt, Human
ucccuguuccccaga

SEQ ID NO: 1249111 - RNA, 16 nt, Human
ucccuguuccccagag

SEQ ID NO: 1249112 - RNA, 18 nt, Human
ucccuguuccccagagaa

SEQ ID NO: 1249113 - RNA, 17 nt, Human
ucccuguuccccagaga

SEQ ID NO: 1249114 - RNA, 22 nt, Human
ucccuguuucuuccacagugcc

SEQ ID NO: 1249115 - RNA, 11 nt, Human
ucccuucaacc

SEQ ID NO: 1249116 - RNA, 21 nt, Human
ucccuucaaccauuccccaug

SEQ ID NO: 1249117 - RNA, 22 nt, Human
ucccuucaaccauuccccaugg

SEQ ID NO: 1249118 - RNA, 15 nt, Human
ucccuuguagcuccu

SEQ ID NO: 1249119 - RNA, 16 nt, Human
ucccuuguagcuccuc

SEQ ID NO: 1249120 - RNA, 15 nt, Human
ucccuuguauccccu

SEQ ID NO: 1249121 - RNA, 16 nt, Human
ucccuuguauccccug

SEQ ID NO: 1249122 - RNA, 21 nt, Human
ucccuuguauccccugcaggc

SEQ ID NO: 1249123 - RNA, 19 nt, Human
ucccuuguauccccugcag

SEQ ID NO: 1249124 - RNA, 14 nt, Human
ucccucacccaucc

SEQ ID NO: 1249125 - RNA, 12 nt, Human
ucccucaccugu

SEQ ID NO: 1249126 - RNA, 13 nt, Human
ucccucaccugua

SEQ ID NO: 1249127 - RNA, 14 nt, Human
ucccucaccuguag

SEQ ID NO: 1249128 - RNA, 20 nt, Human
ucccucaccuguagcagcca

SEQ ID NO: 1249129 - RNA, 18 nt, Human
ucccucacccauccuaga

SEQ ID NO: 1249130 - RNA, 12 nt, Human
ucccucacccau

SEQ ID NO: 1249131 - RNA, 14 nt, Human
ucccucacaagugg

SEQ ID NO: 1249132 - RNA, 19 nt, Human
ucccucaaccucauccucu

SEQ ID NO: 1249133 - RNA, 13 nt, Human
ucccucacaagug

SEQ ID NO: 1249134 - RNA, 18 nt, Human
ucccucaaccucauccuc

SEQ ID NO: 1249135 - RNA, 18 nt, Human
ucccggagguuggguggg

SEQ ID NO: 1249136 - RNA, 15 nt, Human
ucccgauuguaacuc

SEQ ID NO: 1249137 - RNA, 19 nt, Human
ucccgcagugggagcaaac

SEQ ID NO: 1249138 - RNA, 20 nt, Human
ucccgcagugggagcaaacu

SEQ ID NO: 1249139 - RNA, 13 nt, Human
ucccgcucagccc

SEQ ID NO: 1249140 - RNA, 14 nt, Human
ucccgcucagcccu

SEQ ID NO: 1249141 - RNA, 15 nt, Human
ucccgcucagcccuc

SEQ ID NO: 1249142 - RNA, 16 nt, Human
ucccgcucagcccucc

SEQ ID NO: 1249143 - RNA, 20 nt, Human
ucccgcucagcccucccugc

SEQ ID NO: 1249144 - RNA, 20 nt, Human
uccccuugaggucucagccc

SEQ ID NO: 1249145 - RNA, 21 nt, Human
uccccuugaggucucagcccc

SEQ ID NO: 1249146 - RNA, 20 nt, Human
uccccuucuccccugcacug

SEQ ID NO: 1249147 - RNA, 18 nt, Human
uccccuucuccccugcac

SEQ ID NO: 1249148 - RNA, 13 nt, Human
uccccuucucugu

SEQ ID NO: 1249149 - RNA, 18 nt, Human
uccccuugaacucuucac

SEQ ID NO: 1249150 - RNA, 17 nt, Human
uccccuugaggucucag

SEQ ID NO: 1249151 - RNA, 18 nt, Human
uccccuugaggucucagc

SEQ ID NO: 1249152 - RNA, 19 nt, Human
uccccuugaggucucagcc

SEQ ID NO: 1249153 - RNA, 23 nt, Human
acucaaccuuaagaccuacuguu

SEQ ID NO: 1249154 - RNA, 23 nt, Human
acucaagaagugaagaaugcaca

SEQ ID NO: 1249155 - RNA, 17 nt, Human
acucaagaagugaagaa

SEQ ID NO: 1249156 - RNA, 15 nt, Human
uccccucaccuccuc

SEQ ID NO: 1249157 - RNA, 17 nt, Human
uccccucaccuccucua

SEQ ID NO: 1249158 - RNA, 19 nt, Human
uccccuccaaaaugugccu

SEQ ID NO: 1249159 - RNA, 18 nt, Human
acuauaugcaaacagggu

SEQ ID NO: 1249160 - RNA, 14 nt, Human
acuauaugcaaaca

SEQ ID NO: 1249161 - RNA, 13 nt, Human
acuauauguaugg

SEQ ID NO: 1249162 - RNA, 13 nt, Human
acuauaugcaaac

SEQ ID NO: 1249163 - RNA, 17 nt, Human
uccccagggaagcagca

SEQ ID NO: 1249164 - RNA, 19 nt, Human
uccccagggaagcagcagc

SEQ ID NO: 1249165 - RNA, 20 nt, Human
uccccagggaagcagcagcc

SEQ ID NO: 1249166 - RNA, 21 nt, Human
uccccagggaagcagcagccu

SEQ ID NO: 1249167 - RNA, 23 nt, Human
uccccagggaagcagcagccucg

SEQ ID NO: 1249168 - RNA, 15 nt, Human
uccccacgagggcug

SEQ ID NO: 1249169 - RNA, 16 nt, Human
uccccacgagggcugg

SEQ ID NO: 1249170 - RNA, 17 nt, Human
uccccacgagggcuggc

SEQ ID NO: 1249171 - RNA, 20 nt, Human
uccccacgagggcuggcugg

SEQ ID NO: 1249172 - RNA, 14 nt, Human
uccccacgccacag

SEQ ID NO: 1249173 - RNA, 15 nt, Human
uccccacgccacagc

SEQ ID NO: 1249174 - RNA, 16 nt, Human
uccccacgccacagcc

SEQ ID NO: 1249175 - RNA, 17 nt, Human
uccccacgccacagccc

SEQ ID NO: 1249176 - RNA, 16 nt, Human
uccccaggcaccucac

SEQ ID NO: 1249177 - RNA, 22 nt, Human
uccccacgccacagcccuuuug

SEQ ID NO: 1249178 - RNA, 19 nt, Human
uccccacgccacagcccuu

SEQ ID NO: 1249179 - RNA, 22 nt, Human
acuaugaaguuuuuuuuauaca

SEQ ID NO: 1249180 - RNA, 16 nt, Human
acuaugaaaagcuaga

SEQ ID NO: 1249181 - RNA, 19 nt, Human
acuaugaaaagcuagaauu

SEQ ID NO: 1249182 - RNA, 20 nt, Human
acuaugaaaagcuagaauug

SEQ ID NO: 1249183 - RNA, 21 nt, Human
acuaugaaaagcuagaauuga

SEQ ID NO: 1249184 - RNA, 16 nt, Human
acuaugaaaaugcugg

SEQ ID NO: 1249185 - RNA, 18 nt, Human
acuaugaaaaugcuggcu

SEQ ID NO: 1249186 - RNA, 18 nt, Human
acuaucccggcugcccuu

SEQ ID NO: 1249187 - RNA, 20 nt, Human
acuaucuuacuauuucacaa

SEQ ID NO: 1249188 - RNA, 16 nt, Human
acuaucuuggugaauu

SEQ ID NO: 1249189 - RNA, 18 nt, Human
acuaucuuucagcuccag

SEQ ID NO: 1249190 - RNA, 22 nt, Human
acuaucaugucaaacgugaaaa

SEQ ID NO: 1249191 - RNA, 17 nt, Human
acuaucaucuuauucag

SEQ ID NO: 1249192 - RNA, 16 nt, Human
acuaucccggcugccc

SEQ ID NO: 1249193 - RNA, 17 nt, Human
acuaucccggcugcccu

SEQ ID NO: 1249194 - RNA, 22 nt, Human
acuauuaaaaagguuuacagaa

SEQ ID NO: 1249195 - RNA, 22 nt, Human
acuauuaggugcaauuucaagg

SEQ ID NO: 1249196 - RNA, 18 nt, Human
acuauuauccccauuucu

SEQ ID NO: 1249197 - RNA, 22 nt, Human
acucaaauguucuaaguuucua

SEQ ID NO: 1249198 - RNA, 19 nt, Human
uccagccuggggcugaggc

SEQ ID NO: 1249199 - RNA, 17 nt, Human
uccagccuggggucugg

SEQ ID NO: 1249200 - RNA, 14 nt, Human
uccagcggcccugu

SEQ ID NO: 1249201 - RNA, 15 nt, Human
uccagcuagugaccc

SEQ ID NO: 1249202 - RNA, 20 nt, Human
uccagcuagugacccacaug

SEQ ID NO: 1249203 - RNA, 22 nt, Human
acguuuagcugacaaaauacuu

SEQ ID NO: 1249204 - RNA, 23 nt, Human
acguuuaagccaaaacaauguuu

SEQ ID NO: 1249205 - RNA, 19 nt, Human
acguuuaagccaaaacaau

SEQ ID NO: 1249206 - RNA, 17 nt, Human
acguuuagcugacaaaa

SEQ ID NO: 1249207 - RNA, 14 nt, Human
acguuuuauaagca

SEQ ID NO: 1249208 - RNA, 21 nt, Human
acguuuuauaagcaucauuau

SEQ ID NO: 1249209 - RNA, 20 nt, Human
acguuuuauaagcaucauua

SEQ ID NO: 1249210 - RNA, 12 nt, Human
acguuuucuaau

SEQ ID NO: 1249211 - RNA, 13 nt, Human
acguuuucuaauu

SEQ ID NO: 1249212 - RNA, 16 nt, Human
acguuuucuaauugcu

SEQ ID NO: 1249213 - RNA, 17 nt, Human
acguuuucuaauugcuu

SEQ ID NO: 1249214 - RNA, 18 nt, Human
acguuuucuaauugcuua

SEQ ID NO: 1249215 - RNA, 19 nt, Human
acguuuucuaauugcuuau

SEQ ID NO: 1249216 - RNA, 13 nt, Human
acuaaaaauacaa

SEQ ID NO: 1249217 - RNA, 15 nt, Human
acuaaaaaaaagaug

SEQ ID NO: 1249218 - RNA, 16 nt, Human
acuaaaaaaaagauga

SEQ ID NO: 1249219 - RNA, 19 nt, Human
acuaaaacaaagccacuuu

SEQ ID NO: 1249220 - RNA, 17 nt, Human
acuaaaaaaaagaugaa

SEQ ID NO: 1249221 - RNA, 21 nt, Human
acuaaccauguguuauguuuu

SEQ ID NO: 1249222 - RNA, 16 nt, Human
acuaaaacaaagccac

SEQ ID NO: 1249223 - RNA, 14 nt, Human
acuaaaauaauuuu

SEQ ID NO: 1249224 - RNA, 15 nt, Human
acuaaaauaauuuug

SEQ ID NO: 1249225 - RNA, 16 nt, Human
acuaaaauaauuuugu

SEQ ID NO: 1249226 - RNA, 17 nt, Human
acuaaaauaauuuugua

SEQ ID NO: 1249227 - RNA, 19 nt, Human
acuaaaauaauuuuguaau

SEQ ID NO: 1249228 - RNA, 20 nt, Human
acuaaaauaauuuuguaaug

SEQ ID NO: 1249229 - RNA, 14 nt, Human
acuaaaauauuuau

SEQ ID NO: 1249230 - RNA, 18 nt, Human
acuaaacacgugacacaa

SEQ ID NO: 1249231 - RNA, 17 nt, Human
acuaaacucuuaccaua

SEQ ID NO: 1249232 - RNA, 13 nt, Human
acuaaacuuaauu

SEQ ID NO: 1249233 - RNA, 16 nt, Human
acuaaagccaaacaua

SEQ ID NO: 1249234 - RNA, 17 nt, Human
acuaaagccaaacauau

SEQ ID NO: 1249235 - RNA, 23 nt, Human
acuaaagccaaacauauauauac

SEQ ID NO: 1249236 - RNA, 12 nt, Human
acuaaagccuuu

SEQ ID NO: 1249237 - RNA, 22 nt, Human
acuaaaguuagaaaguugauuu

SEQ ID NO: 1249238 - RNA, 22 nt, Human
ucccaguuggagcuccagccug

SEQ ID NO: 1249239 - RNA, 21 nt, Human
ucccaguuggagcuccagccu

SEQ ID NO: 1249240 - RNA, 17 nt, Human
ucccauagccaggaaac

SEQ ID NO: 1249241 - RNA, 13 nt, Human
ucccaucgcuguc

SEQ ID NO: 1249242 - RNA, 22 nt, Human
ucccaucgucucggccuucaca

SEQ ID NO: 1249243 - RNA, 20 nt, Human
ucccaucgucucggccuuca

SEQ ID NO: 1249244 - RNA, 13 nt, Human
ucccaucuaggga

SEQ ID NO: 1249245 - RNA, 18 nt, Human
ucccauuuuggaauuugc

SEQ ID NO: 1249246 - RNA, 19 nt, Human
uccccaaaagcgugagcuu

SEQ ID NO: 1249247 - RNA, 14 nt, Human
uccccaaaggcuuu

SEQ ID NO: 1249248 - RNA, 22 nt, Human
uccccaaaggcuuugcccugcu

SEQ ID NO: 1249249 - RNA, 23 nt, Human
uccccaaaggcuuugcccugcug

SEQ ID NO: 1249250 - RNA, 15 nt, Human
uccccaacagcgccc

SEQ ID NO: 1249251 - RNA, 16 nt, Human
uccccaacagcgccca

SEQ ID NO: 1249252 - RNA, 17 nt, Human
uccccaacagcgcccaa

SEQ ID NO: 1249253 - RNA, 20 nt, Human
uccccaacagcgcccaaagg

SEQ ID NO: 1249254 - RNA, 18 nt, Human
uccccaacauguaauaag

SEQ ID NO: 1249255 - RNA, 15 nt, Human
uccccaagccuggca

SEQ ID NO: 1249256 - RNA, 14 nt, Human
uccccaacugacca

SEQ ID NO: 1249257 - RNA, 19 nt, Human
uccccaacugaccaccuuu

SEQ ID NO: 1249258 - RNA, 16 nt, Human
uccccaacccccaacu

SEQ ID NO: 1249259 - RNA, 18 nt, Human
uccccaacugaccaccuu

SEQ ID NO: 1249260 - RNA, 22 nt, Human
uccccaaguacaaccacaccca

SEQ ID NO: 1249261 - RNA, 15 nt, Human
acuacagucaggaaa

SEQ ID NO: 1249262 - RNA, 20 nt, Human
acuacaugagaacaaacaga

SEQ ID NO: 1249263 - RNA, 12 nt, Human
acuacaugcacu

SEQ ID NO: 1249264 - RNA, 14 nt, Human
acuacaugcacuug

SEQ ID NO: 1249265 - RNA, 13 nt, Human
acuacauucauuu

SEQ ID NO: 1249266 - RNA, 18 nt, Human
ucccaggggcucccuccg

SEQ ID NO: 1249267 - RNA, 14 nt, Human
ucccaggguuuuaa

SEQ ID NO: 1249268 - RNA, 18 nt, Human
ucccaggguuuuaacuuu

SEQ ID NO: 1249269 - RNA, 19 nt, Human
ucccaggguuuuaacuuug

SEQ ID NO: 1249270 - RNA, 20 nt, Human
ucccaggguuuuaacuuugu

SEQ ID NO: 1249271 - RNA, 15 nt, Human
ucccagguguuaaca

SEQ ID NO: 1249272 - RNA, 21 nt, Human
ucccagguguuaacauuccaa

SEQ ID NO: 1249273 - RNA, 22 nt, Human
ucccagguguuaacauuccaag

SEQ ID NO: 1249274 - RNA, 23 nt, Human
ucccagguguuaacauuccaaga

SEQ ID NO: 1249275 - RNA, 15 nt, Human
ucccagguuggcucu

SEQ ID NO: 1249276 - RNA, 16 nt, Human
ucccagguuggcucug

SEQ ID NO: 1249277 - RNA, 15 nt, Human
ucaugcauggaaauu

SEQ ID NO: 1249278 - RNA, 18 nt, Human
ucaugcauguccuguaaa

SEQ ID NO: 1249279 - RNA, 16 nt, Human
ucaugcauuguccucu

SEQ ID NO: 1249280 - RNA, 17 nt, Human
ucaugauaaugaacaga

SEQ ID NO: 1249281 - RNA, 21 nt, Human
ucaugauaaugaacagaacau

SEQ ID NO: 1249282 - RNA, 13 nt, Human
ucaugauccaacu

SEQ ID NO: 1249283 - RNA, 16 nt, Human
ucaugaggagauucug

SEQ ID NO: 1249284 - RNA, 20 nt, Human
ucaugaggagauucugccuu

SEQ ID NO: 1249285 - RNA, 21 nt, Human
ucaugaggagauucugccuuu

SEQ ID NO: 1249286 - RNA, 23 nt, Human
ucaugaggagauucugccuuugc

SEQ ID NO: 1249287 - RNA, 22 nt, Human
ucaugaggagauucugccuuug

SEQ ID NO: 1249288 - RNA, 18 nt, Human
ucaugagugaauaaaugu

SEQ ID NO: 1249289 - RNA, 17 nt, Human
ucaugauaauucagcag

SEQ ID NO: 1249290 - RNA, 12 nt, Human
ucaugccagcua

SEQ ID NO: 1249291 - RNA, 21 nt, Human
ucaugccagcuacuuccuccu

SEQ ID NO: 1249292 - RNA, 23 nt, Human
ucaugccagcuacuuccuccucc

SEQ ID NO: 1249293 - RNA, 15 nt, Human
ucaugaccaguaaag

SEQ ID NO: 1249294 - RNA, 14 nt, Human
ucaugaccaguaaa

SEQ ID NO: 1249295 - RNA, 14 nt, Human
ucaugacagccucc

SEQ ID NO: 1249296 - RNA, 22 nt, Human
ucaugaauuaguuuuauaugcu

SEQ ID NO: 1249297 - RNA, 16 nt, Human
ucaugugaaaucauuc

SEQ ID NO: 1249298 - RNA, 17 nt, Human
ucaugugucccagaaga

SEQ ID NO: 1249299 - RNA, 18 nt, Human
ucaugugucccagaagau

SEQ ID NO: 1249300 - RNA, 20 nt, Human
ucaugugugcaacaggguau

SEQ ID NO: 1249301 - RNA, 22 nt, Human
ucaugugucccagaagaugacu

SEQ ID NO: 1249302 - RNA, 12 nt, Human
ucaugugugucc

SEQ ID NO: 1249303 - RNA, 14 nt, Human
ucaugugaaaucau

SEQ ID NO: 1249304 - RNA, 21 nt, Human
ucauguuaguaauaccucuaa

SEQ ID NO: 1249305 - RNA, 19 nt, Human
ucauguuaguaauaccucu

SEQ ID NO: 1249306 - RNA, 18 nt, Human
ucauguuaguaauaccuc

SEQ ID NO: 1249307 - RNA, 15 nt, Human
ucauguuaguuaccu

SEQ ID NO: 1249308 - RNA, 19 nt, Human
ucauguuaguuaccuuaua

SEQ ID NO: 1249309 - RNA, 23 nt, Human
ucauguuaguuaccuuauaguua

SEQ ID NO: 1249310 - RNA, 17 nt, Human
ucauguuaguaauaccu

SEQ ID NO: 1249311 - RNA, 14 nt, Human
ucauguuaguaaua

SEQ ID NO: 1249312 - RNA, 22 nt, Human
ucauguuaaauaggcggggcuu

SEQ ID NO: 1249313 - RNA, 16 nt, Human
ucauguguguccacga

SEQ ID NO: 1249314 - RNA, 21 nt, Human
ucauguguguccacgacuguc

SEQ ID NO: 1249315 - RNA, 23 nt, Human
ucauguguguccacgacugucuc

SEQ ID NO: 1249316 - RNA, 12 nt, Human
ucauguguguua

SEQ ID NO: 1249317 - RNA, 17 nt, Human
ucauguugaagccacug

SEQ ID NO: 1249318 - RNA, 14 nt, Human
ucauguuuaagaaa

SEQ ID NO: 1249319 - RNA, 16 nt, Human
ucauguuuaagaaauu

SEQ ID NO: 1249320 - RNA, 15 nt, Human
ucauguuuuugauca

SEQ ID NO: 1249321 - RNA, 12 nt, Human
ucauguuuuuga

SEQ ID NO: 1249322 - RNA, 12 nt, Human
ucauuaaauaaa

SEQ ID NO: 1249323 - RNA, 15 nt, Human
ucauuaaauggggcu

SEQ ID NO: 1249324 - RNA, 13 nt, Human
ucauuaaauaaau

SEQ ID NO: 1249325 - RNA, 14 nt, Human
ucauuaaauaaauu

SEQ ID NO: 1249326 - RNA, 19 nt, Human
ucauuaaauaaauuugacu

SEQ ID NO: 1249327 - RNA, 17 nt, Human
ucauuccuucagauuug

SEQ ID NO: 1249328 - RNA, 12 nt, Human
accucucaauau

SEQ ID NO: 1249329 - RNA, 21 nt, Human
accucuccccuggaacugucu

SEQ ID NO: 1249330 - RNA, 19 nt, Human
accucuagguccccauacu

SEQ ID NO: 1249331 - RNA, 19 nt, Human
accucuaauaguauaaacc

SEQ ID NO: 1249332 - RNA, 21 nt, Human
accucuaaauucuuucauuuu

SEQ ID NO: 1249333 - RNA, 15 nt, Human
accucuaacagcacc

SEQ ID NO: 1249334 - RNA, 16 nt, Human
accucuaacagcacca

SEQ ID NO: 1249335 - RNA, 20 nt, Human
accucuaauaguauaaaccc

SEQ ID NO: 1249336 - RNA, 17 nt, Human
accucuaauaguauaaa

SEQ ID NO: 1249337 - RNA, 16 nt, Human
accucuaauaguauaa

SEQ ID NO: 1249338 - RNA, 12 nt, Human
accucuaauagu

SEQ ID NO: 1249339 - RNA, 19 nt, Human
accucuaacagcaccaaau

SEQ ID NO: 1249340 - RNA, 21 nt, Human
accucugacagcagcaucucu

SEQ ID NO: 1249341 - RNA, 13 nt, Human
accucugacagca

SEQ ID NO: 1249342 - RNA, 14 nt, Human
accucugacagcag

SEQ ID NO: 1249343 - RNA, 15 nt, Human
accucugacagcagc

SEQ ID NO: 1249344 - RNA, 17 nt, Human
accucugacagcagcau

SEQ ID NO: 1249345 - RNA, 19 nt, Human
accucugacagcagcaucu

SEQ ID NO: 1249346 - RNA, 20 nt, Human
accucugacagcagcaucuc

SEQ ID NO: 1249347 - RNA, 18 nt, Human
accucuaaauucuuucau

SEQ ID NO: 1249348 - RNA, 18 nt, Human
accucgcuggacucucag

SEQ ID NO: 1249349 - RNA, 15 nt, Human
accucgggccugcug

SEQ ID NO: 1249350 - RNA, 23 nt, Human
accucgcccagcggcaucaggcu

SEQ ID NO: 1249351 - RNA, 14 nt, Human
accucgcuggacuc

SEQ ID NO: 1249352 - RNA, 16 nt, Human
accucgcuggacucuc

SEQ ID NO: 1249353 - RNA, 14 nt, Human
ucauuggaaauuua

SEQ ID NO: 1249354 - RNA, 15 nt, Human
ucauuggaaauuuag

SEQ ID NO: 1249355 - RNA, 19 nt, Human
ucauuggaaauuuagcauu

SEQ ID NO: 1249356 - RNA, 21 nt, Human
ucauuggaaauuuagcauugu

SEQ ID NO: 1249357 - RNA, 16 nt, Human
ucauuguaaacaaacu

SEQ ID NO: 1249358 - RNA, 13 nt, Human
ucauuguaaucac

SEQ ID NO: 1249359 - RNA, 22 nt, Human
accuccuuucaucacacugggu

SEQ ID NO: 1249360 - RNA, 19 nt, Human
accuccuuucaucacacug

SEQ ID NO: 1249361 - RNA, 23 nt, Human
ucauucgcuacuaugauuuaauu

SEQ ID NO: 1249362 - RNA, 15 nt, Human
ucauucguucugugg

SEQ ID NO: 1249363 - RNA, 13 nt, Human
ucauugcuuacaa

SEQ ID NO: 1249364 - RNA, 12 nt, Human
accggaccaucu

SEQ ID NO: 1249365 - RNA, 15 nt, Human
accggacuuuucugc

SEQ ID NO: 1249366 - RNA, 16 nt, Human
accggacuuuucugca

SEQ ID NO: 1249367 - RNA, 19 nt, Human
accggagaguggggguggg

SEQ ID NO: 1249368 - RNA, 18 nt, Human
accguggcccuuccugga

SEQ ID NO: 1249369 - RNA, 19 nt, Human
accguggcccuuccuggac

SEQ ID NO: 1249370 - RNA, 20 nt, Human
accguggcccuuccuggaca

SEQ ID NO: 1249371 - RNA, 22 nt, Human
accguggcccuuccuggacagc

SEQ ID NO: 1249372 - RNA, 16 nt, Human
accgugggcagggagc

SEQ ID NO: 1249373 - RNA, 18 nt, Human
accgugggcagggagcgg

SEQ ID NO: 1249374 - RNA, 15 nt, Human
accggaccagccugg

SEQ ID NO: 1249375 - RNA, 16 nt, Human
accggaccagccuggc

SEQ ID NO: 1249376 - RNA, 18 nt, Human
accggaccagccuggccc

SEQ ID NO: 1249377 - RNA, 23 nt, Human
accgcccagcggcuugccugccu

SEQ ID NO: 1249378 - RNA, 11 nt, Human
accgcccccuc

SEQ ID NO: 1249379 - RNA, 12 nt, Human
accgcccccucc

SEQ ID NO: 1249380 - RNA, 14 nt, Human
accgcccccuccuc

SEQ ID NO: 1249381 - RNA, 19 nt, Human
accgcccccuccucuagcu

SEQ ID NO: 1249382 - RNA, 19 nt, Human
accgcccccugucucucag

SEQ ID NO: 1249383 - RNA, 20 nt, Human
accgcccagcggcuugccug

SEQ ID NO: 1249384 - RNA, 20 nt, Human
accgagucucuucuccacug

SEQ ID NO: 1249385 - RNA, 21 nt, Human
accgagucucuucuccacugg

SEQ ID NO: 1249386 - RNA, 24 nt, Human
accgagucucuucuccacuggaug

SEQ ID NO: 1249387 - RNA, 12 nt, Human
accgccagcucu

SEQ ID NO: 1249388 - RNA, 13 nt, Human
accgccagcucug

SEQ ID NO: 1249389 - RNA, 14 nt, Human
accgccagcucugu

SEQ ID NO: 1249390 - RNA, 16 nt, Human
accgccagcucuguuc

SEQ ID NO: 1249391 - RNA, 21 nt, Human
accgccagcucuguucuuccu

SEQ ID NO: 1249392 - RNA, 17 nt, Human
acccuuuucaugauuuu

SEQ ID NO: 1249393 - RNA, 19 nt, Human
acccuuuuggguuucugcc

SEQ ID NO: 1249394 - RNA, 22 nt, Human
acccuuugcugugaggcugucc

SEQ ID NO: 1249395 - RNA, 23 nt, Human
acccuuugcugugaggcuguccu

SEQ ID NO: 1249396 - RNA, 23 nt, Human
acccuuugugugcucuccauucu

SEQ ID NO: 1249397 - RNA, 19 nt, Human
acccuuugugugcucucca

SEQ ID NO: 1249398 - RNA, 11 nt, Human
acccuuuucau

SEQ ID NO: 1249399 - RNA, 12 nt, Human
acccuuuuccag

SEQ ID NO: 1249400 - RNA, 22 nt, Human
ucauauuaagaaugaucugauu

SEQ ID NO: 1249401 - RNA, 18 nt, Human
ucauauuaagaaugaucu

SEQ ID NO: 1249402 - RNA, 17 nt, Human
ucauauuaagaaugauc

SEQ ID NO: 1249403 - RNA, 15 nt, Human
ucauauuaagaauga

SEQ ID NO: 1249404 - RNA, 14 nt, Human
ucauauuaagaaug

SEQ ID NO: 1249405 - RNA, 12 nt, Human
accgaagcccag

SEQ ID NO: 1249406 - RNA, 13 nt, Human
accgaagcccaga

SEQ ID NO: 1249407 - RNA, 18 nt, Human
accgaagcccagaggguc

SEQ ID NO: 1249408 - RNA, 15 nt, Human
accgaaugugucuuu

SEQ ID NO: 1249409 - RNA, 16 nt, Human
accgaaugugucuuua

SEQ ID NO: 1249410 - RNA, 22 nt, Human
accgaaugugucuuuagauagc

SEQ ID NO: 1249411 - RNA, 19 nt, Human
accgaaugugucuuuagau

SEQ ID NO: 1249412 - RNA, 12 nt, Human
accuagauuuuu

SEQ ID NO: 1249413 - RNA, 20 nt, Human
accuaauccaggcagaucca

SEQ ID NO: 1249414 - RNA, 21 nt, Human
accuaauccaggcagauccag

SEQ ID NO: 1249415 - RNA, 11 nt, Human
accuaauccaa

SEQ ID NO: 1249416 - RNA, 15 nt, Human
accuaauccaggcag

SEQ ID NO: 1249417 - RNA, 17 nt, Human
accuaacucuucuuuca

SEQ ID NO: 1249418 - RNA, 18 nt, Human
accuaacucuucuuucau

SEQ ID NO: 1249419 - RNA, 21 nt, Human
accuaagauuacaaaucagaa

SEQ ID NO: 1249420 - RNA, 16 nt, Human
accguguuggucugua

SEQ ID NO: 1249421 - RNA, 22 nt, Human
accguguuggucuguacugauu

SEQ ID NO: 1249422 - RNA, 14 nt, Human
accgugggcucccu

SEQ ID NO: 1249423 - RNA, 16 nt, Human
accgugggcucccuga

SEQ ID NO: 1249424 - RNA, 14 nt, Human
accguucugugcac

SEQ ID NO: 1249425 - RNA, 13 nt, Human
accguugucucau

SEQ ID NO: 1249426 - RNA, 21 nt, Human
accuagauguauaacuaggag

SEQ ID NO: 1249427 - RNA, 13 nt, Human
accuagauuuaau

SEQ ID NO: 1249428 - RNA, 14 nt, Human
accuagcagcaccg

SEQ ID NO: 1249429 - RNA, 21 nt, Human
accuagcagcaccguucugug

SEQ ID NO: 1249430 - RNA, 22 nt, Human
accuagcagcaccguucugugc

SEQ ID NO: 1249431 - RNA, 23 nt, Human
accuagcagcaccguucugugca

SEQ ID NO: 1249432 - RNA, 17 nt, Human
accuagauuuaauauaa

SEQ ID NO: 1249433 - RNA, 21 nt, Human
accuagcgggauggggcuccc

SEQ ID NO: 1249434 - RNA, 18 nt, Human
accuagcugaauguuuuu

SEQ ID NO: 1249435 - RNA, 19 nt, Human
accuagcugaauguuuuuc

SEQ ID NO: 1249436 - RNA, 20 nt, Human
accuagcugaauguuuuucu

SEQ ID NO: 1249437 - RNA, 21 nt, Human
accuagcugaauguuuuucua

SEQ ID NO: 1249438 - RNA, 22 nt, Human
accuagcugaauguuuuucuaa

SEQ ID NO: 1249439 - RNA, 23 nt, Human
accuagcugaauguuuuucuaaa

SEQ ID NO: 1249440 - RNA, 18 nt, Human
accuagcuggcucuguga

SEQ ID NO: 1249441 - RNA, 15 nt, Human
accuauaccuguguu

SEQ ID NO: 1249442 - RNA, 18 nt, Human
accuauaccuguguuucu

SEQ ID NO: 1249443 - RNA, 17 nt, Human
accuaucccaccuccau

SEQ ID NO: 1249444 - RNA, 14 nt, Human
accuaucccaccuc

SEQ ID NO: 1249445 - RNA, 19 nt, Human
accuaugauauuuucugug

SEQ ID NO: 1249446 - RNA, 12 nt, Human
accuaugucauu

SEQ ID NO: 1249447 - RNA, 15 nt, Human
accuaugucauuuca

SEQ ID NO: 1249448 - RNA, 16 nt, Human
accuaugucauuucau

SEQ ID NO: 1249449 - RNA, 18 nt, Human
accuaugucauuucauuu

SEQ ID NO: 1249450 - RNA, 19 nt, Human
accuaugucauuucauuuc

SEQ ID NO: 1249451 - RNA, 13 nt, Human
accucaauguccc

SEQ ID NO: 1249452 - RNA, 20 nt, Human
accucaauuuucacuguguc

SEQ ID NO: 1249453 - RNA, 23 nt, Human
accucaagugaucugcccaccuc

SEQ ID NO: 1249454 - RNA, 19 nt, Human
accucaaucagucucagaa

SEQ ID NO: 1249455 - RNA, 21 nt, Human
accucaaucagucucagaaug

SEQ ID NO: 1249456 - RNA, 16 nt, Human
accucaagcugcaucu

SEQ ID NO: 1249457 - RNA, 19 nt, Human
accucaagugaucugccca

SEQ ID NO: 1249458 - RNA, 18 nt, Human
accucaauuuucacugug

SEQ ID NO: 1249459 - RNA, 15 nt, Human
accucaccaacuccu

SEQ ID NO: 1249460 - RNA, 16 nt, Human
accucaccaacuccua

SEQ ID NO: 1249461 - RNA, 17 nt, Human
accucaccaacuccuag

SEQ ID NO: 1249462 - RNA, 17 nt, Human
accucaccaagcugcug

SEQ ID NO: 1249463 - RNA, 19 nt, Human
accucaccaacuccuaguu

SEQ ID NO: 1249464 - RNA, 20 nt, Human
accucagauggcagcuuuua

SEQ ID NO: 1249465 - RNA, 21 nt, Human
accucagauggcagcuuuuaa

SEQ ID NO: 1249466 - RNA, 22 nt, Human
accucagauggcagcuuuuaaa

SEQ ID NO: 1249467 - RNA, 13 nt, Human
accucagaaguaa

SEQ ID NO: 1249468 - RNA, 17 nt, Human
accucagaccccggggu

SEQ ID NO: 1249469 - RNA, 20 nt, Human
accucagaaguaaaggaauu

SEQ ID NO: 1249470 - RNA, 14 nt, Human
accucagauggcag

SEQ ID NO: 1249471 - RNA, 15 nt, Human
accucagauggcagc

SEQ ID NO: 1249472 - RNA, 16 nt, Human
accucagauggcagcu

SEQ ID NO: 1249473 - RNA, 18 nt, Human
accucagauggcagcuuu

SEQ ID NO: 1249474 - RNA, 19 nt, Human
accucagauggcagcuuuu

SEQ ID NO: 1249475 - RNA, 19 nt, Human
accuccuauggguugucac

SEQ ID NO: 1249476 - RNA, 13 nt, Human
accuccucagccu

SEQ ID NO: 1249477 - RNA, 14 nt, Human
accuccucagccug

SEQ ID NO: 1249478 - RNA, 15 nt, Human
accuccucagccuga

SEQ ID NO: 1249479 - RNA, 23 nt, Human
accuccucagccugaaccccagg

SEQ ID NO: 1249480 - RNA, 20 nt, Human
ucauuuuagggguagcauuu

SEQ ID NO: 1249481 - RNA, 20 nt, Human
ucauuuuaacaucugagaaa

SEQ ID NO: 1249482 - RNA, 13 nt, Human
ucauuuuaauuau

SEQ ID NO: 1249483 - RNA, 14 nt, Human
ucauuuuaauuauu

SEQ ID NO: 1249484 - RNA, 15 nt, Human
ucauuuguuggaaug

SEQ ID NO: 1249485 - RNA, 12 nt, Human
ucauuuguuuaa

SEQ ID NO: 1249486 - RNA, 13 nt, Human
ucauuuguuuaaa

SEQ ID NO: 1249487 - RNA, 17 nt, Human
ucauuuguuuaaaaagg

SEQ ID NO: 1249488 - RNA, 21 nt, Human
ucauuuguuuaaaaaggcagu

SEQ ID NO: 1249489 - RNA, 22 nt, Human
ucauuuuaacaucugagaaaag

SEQ ID NO: 1249490 - RNA, 18 nt, Human
ucauuugugccagaaugc

SEQ ID NO: 1249491 - RNA, 18 nt, Human
ucauuuguggguuuuuau

SEQ ID NO: 1249492 - RNA, 15 nt, Human
ucauuugcuuuggaa

SEQ ID NO: 1249493 - RNA, 14 nt, Human
ucauuugcuuugga

SEQ ID NO: 1249494 - RNA, 22 nt, Human
ucauuuguggguuuuuauuucc

SEQ ID NO: 1249495 - RNA, 23 nt, Human
ucauuuguggguuuuuauuuccu

SEQ ID NO: 1249496 - RNA, 23 nt, Human
uccaaagucucuggaauuugaaa

SEQ ID NO: 1249497 - RNA, 13 nt, Human
uccaaagucucua

SEQ ID NO: 1249498 - RNA, 14 nt, Human
uccaaagucucuaa

SEQ ID NO: 1249499 - RNA, 17 nt, Human
uccaaagucucuaauuc

SEQ ID NO: 1249500 - RNA, 18 nt, Human
uccaaagucucuaauucu

SEQ ID NO: 1249501 - RNA, 15 nt, Human
ucauuuuuuuccuug

SEQ ID NO: 1249502 - RNA, 18 nt, Human
ucauuuuuuuccuugcaa

SEQ ID NO: 1249503 - RNA, 14 nt, Human
ucauuuuaugucaa

SEQ ID NO: 1249504 - RNA, 15 nt, Human
ucauuuuauguuaag

SEQ ID NO: 1249505 - RNA, 16 nt, Human
ucauuuuuuaaaaaag

SEQ ID NO: 1249506 - RNA, 18 nt, Human
accuggaagcauuuguuu

SEQ ID NO: 1249507 - RNA, 23 nt, Human
accuggaagcauuuguuucuacu

SEQ ID NO: 1249508 - RNA, 19 nt, Human
accugcucuccucuugcca

SEQ ID NO: 1249509 - RNA, 16 nt, Human
accugcugaccugugc

SEQ ID NO: 1249510 - RNA, 18 nt, Human
accugcugaccugugcac

SEQ ID NO: 1249511 - RNA, 17 nt, Human
accugcugaccugugca

SEQ ID NO: 1249512 - RNA, 11 nt, Human
accugcugagc

SEQ ID NO: 1249513 - RNA, 12 nt, Human
accugcugagcu

SEQ ID NO: 1249514 - RNA, 13 nt, Human
accugcugagcuc

SEQ ID NO: 1249515 - RNA, 14 nt, Human
accugcugagcucu

SEQ ID NO: 1249516 - RNA, 15 nt, Human
accugcugagcucug

SEQ ID NO: 1249517 - RNA, 16 nt, Human
accugcugagcucuga

SEQ ID NO: 1249518 - RNA, 17 nt, Human
accugcugagcucugag

SEQ ID NO: 1249519 - RNA, 15 nt, Human
accugcuuuucaaug

SEQ ID NO: 1249520 - RNA, 16 nt, Human
accugcuuuucaaugu

SEQ ID NO: 1249521 - RNA, 19 nt, Human
accugcuuuucaauguguu

SEQ ID NO: 1249522 - RNA, 18 nt, Human
accuggaacuuggggagu

SEQ ID NO: 1249523 - RNA, 18 nt, Human
accugcucuccucuugcc

SEQ ID NO: 1249524 - RNA, 17 nt, Human
accugcucuccucuugc

SEQ ID NO: 1249525 - RNA, 18 nt, Human
accugaauaaagaaugaa

SEQ ID NO: 1249526 - RNA, 15 nt, Human
accugaaggguugac

SEQ ID NO: 1249527 - RNA, 16 nt, Human
accugaaugcucugua

SEQ ID NO: 1249528 - RNA, 21 nt, Human
uccaacuaucucauuuccaag

SEQ ID NO: 1249529 - RNA, 22 nt, Human
uccaacuaaugccuuacucuuc

SEQ ID NO: 1249530 - RNA, 20 nt, Human
uccaacuacuaauagaauaa

SEQ ID NO: 1249531 - RNA, 21 nt, Human
uccaacuacuaauagaauaaa

SEQ ID NO: 1249532 - RNA, 23 nt, Human
uccaacuacuaauagaauaaagg

SEQ ID NO: 1249533 - RNA, 18 nt, Human
uccaagcuccaucuccac

SEQ ID NO: 1249534 - RNA, 22 nt, Human
uccaagcucacuccccaacccc

SEQ ID NO: 1249535 - RNA, 14 nt, Human
uccaaaugcagcuu

SEQ ID NO: 1249536 - RNA, 15 nt, Human
uccaaaugcagcuuu

SEQ ID NO: 1249537 - RNA, 17 nt, Human
uccaaauacuaaugaaa

SEQ ID NO: 1249538 - RNA, 17 nt, Human
uccaacaccaagcacag

SEQ ID NO: 1249539 - RNA, 21 nt, Human
uccaacaccaagcacagcagc

SEQ ID NO: 1249540 - RNA, 23 nt, Human
uccaacaccaagcacagcagccu

SEQ ID NO: 1249541 - RNA, 15 nt, Human
uccaacaguuuaaug

SEQ ID NO: 1249542 - RNA, 18 nt, Human
uccaacaguuuaaugaag

SEQ ID NO: 1249543 - RNA, 21 nt, Human
uccaacaguuuaaugaagauc

SEQ ID NO: 1249544 - RNA, 23 nt, Human
uccaacaguuuaaugaagaucua

SEQ ID NO: 1249545 - RNA, 20 nt, Human
uccaacaucacagcccagcc

SEQ ID NO: 1249546 - RNA, 15 nt, Human
uccaacuaaugccuu

SEQ ID NO: 1249547 - RNA, 19 nt, Human
uccaacuaaugccuuacuc

SEQ ID NO: 1249548 - RNA, 12 nt, Human
uccaagcuggga

SEQ ID NO: 1249549 - RNA, 22 nt, Human
uccaagcugggagauucaaggg

SEQ ID NO: 1249550 - RNA, 14 nt, Human
uccaaguuaaaugu

SEQ ID NO: 1249551 - RNA, 15 nt, Human
uccaaguuaaaugua

SEQ ID NO: 1249552 - RNA, 16 nt, Human
uccaaguuaaauguag

SEQ ID NO: 1249553 - RNA, 17 nt, Human
uccaaguuaaauguaga

SEQ ID NO: 1249554 - RNA, 22 nt, Human
uccaaguuguucgggccaagga

SEQ ID NO: 1249555 - RNA, 17 nt, Human
uccaaguuguucgggcc

SEQ ID NO: 1249556 - RNA, 19 nt, Human
uccaaucaaucuugcaugu

SEQ ID NO: 1249557 - RNA, 21 nt, Human
uccaaucaaucuugcauguaa

SEQ ID NO: 1249558 - RNA, 20 nt, Human
uccaaucaaucuugcaugua

SEQ ID NO: 1249559 - RNA, 15 nt, Human
uccacagggucccac

SEQ ID NO: 1249560 - RNA, 16 nt, Human
uccacagggucccaca

SEQ ID NO: 1249561 - RNA, 17 nt, Human
uccacagggucccacag

SEQ ID NO: 1249562 - RNA, 18 nt, Human
uccacagggucccacagc

SEQ ID NO: 1249563 - RNA, 20 nt, Human
uccacagggucccacagcca

SEQ ID NO: 1249564 - RNA, 21 nt, Human
uccacagggucccacagccac

SEQ ID NO: 1249565 - RNA, 14 nt, Human
uccacaggucuaga

SEQ ID NO: 1249566 - RNA, 15 nt, Human
uccacaggucuagac

SEQ ID NO: 1249567 - RNA, 16 nt, Human
uccacaggucuagacu

SEQ ID NO: 1249568 - RNA, 17 nt, Human
uccacaggucuagacua

SEQ ID NO: 1249569 - RNA, 19 nt, Human
uccaccaaaugugcuuuga

SEQ ID NO: 1249570 - RNA, 15 nt, Human
uccacauuucuaaaa

SEQ ID NO: 1249571 - RNA, 13 nt, Human
uccacauuucuaa

SEQ ID NO: 1249572 - RNA, 14 nt, Human
uccacauuucuaaa

SEQ ID NO: 1249573 - RNA, 16 nt, Human
uccacauuucuaaaau

SEQ ID NO: 1249574 - RNA, 14 nt, Human
accuuccacccagu

SEQ ID NO: 1249575 - RNA, 15 nt, Human
accuuccagaaauac

SEQ ID NO: 1249576 - RNA, 23 nt, Human
accuuccagaaauacuacugugu

SEQ ID NO: 1249577 - RNA, 13 nt, Human
accuuccagcucc

SEQ ID NO: 1249578 - RNA, 14 nt, Human
accuuccagcuccu

SEQ ID NO: 1249579 - RNA, 20 nt, Human
accuuccaugucaagauuca

SEQ ID NO: 1249580 - RNA, 17 nt, Human
accuuccagcuccugua

SEQ ID NO: 1249581 - RNA, 12 nt, Human
accuuccaccca

SEQ ID NO: 1249582 - RNA, 22 nt, Human
accuuauaguuacuguguaauu

SEQ ID NO: 1249583 - RNA, 23 nt, Human
accuuauaguuacuguguaauua

SEQ ID NO: 1249584 - RNA, 15 nt, Human
accuucuccccagcu

SEQ ID NO: 1249585 - RNA, 18 nt, Human
accuucuccccagcuccc

SEQ ID NO: 1249586 - RNA, 19 nt, Human
accuucuccccagcuccca

SEQ ID NO: 1249587 - RNA, 21 nt, Human
accuucuccccagcucccagg

SEQ ID NO: 1249588 - RNA, 23 nt, Human
accuucuccccagcucccaggac

SEQ ID NO: 1249589 - RNA, 22 nt, Human
accuucuccccagcucccagga

SEQ ID NO: 1249590 - RNA, 14 nt, Human
accuucuccccagc

SEQ ID NO: 1249591 - RNA, 12 nt, Human
accuucuguggc

SEQ ID NO: 1249592 - RNA, 13 nt, Human
accuucuguggcu

SEQ ID NO: 1249593 - RNA, 15 nt, Human
accuucuguggcuca

SEQ ID NO: 1249594 - RNA, 16 nt, Human
accuucuguggcucac

SEQ ID NO: 1249595 - RNA, 23 nt, Human
accuugaaaaaaaacaguggauc

SEQ ID NO: 1249596 - RNA, 16 nt, Human
accuugaaaaaaaaca

SEQ ID NO: 1249597 - RNA, 18 nt, Human
accuugaaaaaaaacagu

SEQ ID NO: 1249598 - RNA, 14 nt, Human
accuuagaauacag

SEQ ID NO: 1249599 - RNA, 14 nt, Human
accuuagccugccc

SEQ ID NO: 1249600 - RNA, 21 nt, Human
accuuagcuggcauuacagcu

SEQ ID NO: 1249601 - RNA, 22 nt, Human
accuuagcuggcauuacagcug

SEQ ID NO: 1249602 - RNA, 17 nt, Human
accuuagugcaguuauu

SEQ ID NO: 1249603 - RNA, 12 nt, Human
accuuauaguua

SEQ ID NO: 1249604 - RNA, 14 nt, Human
accuuauaguuacu

SEQ ID NO: 1249605 - RNA, 18 nt, Human
accuuauaguuacugugu

SEQ ID NO: 1249606 - RNA, 19 nt, Human
accuuauaguuacugugua

SEQ ID NO: 1249607 - RNA, 20 nt, Human
accuuauaguuacuguguaa

SEQ ID NO: 1249608 - RNA, 21 nt, Human
accuuagugcaguuauuugcu

SEQ ID NO: 1249609 - RNA, 22 nt, Human
accuggucacaggacucugccu

SEQ ID NO: 1249610 - RNA, 23 nt, Human
accuggucacaggacucugccuc

SEQ ID NO: 1249611 - RNA, 14 nt, Human
accuggucucuccu

SEQ ID NO: 1249612 - RNA, 16 nt, Human
accuggugcugccucu

SEQ ID NO: 1249613 - RNA, 12 nt, Human
accuuaagaccu

SEQ ID NO: 1249614 - RNA, 22 nt, Human
accuuaagaccuacuguucuaa

SEQ ID NO: 1249615 - RNA, 15 nt, Human
accuuaauuuauuau

SEQ ID NO: 1249616 - RNA, 14 nt, Human
accuuaauuuauua

SEQ ID NO: 1249617 - RNA, 16 nt, Human
uccacucuuucuuuca

SEQ ID NO: 1249618 - RNA, 15 nt, Human
uccacucuuucuuuc

SEQ ID NO: 1249619 - RNA, 13 nt, Human
uccacucuuucuu

SEQ ID NO: 1249620 - RNA, 21 nt, Human
uccacucugcuucucugacuu

SEQ ID NO: 1249621 - RNA, 23 nt, Human
uccacucugcuucucugacuucu

SEQ ID NO: 1249622 - RNA, 24 nt, Human
uccacucugcuucucugacuucug

SEQ ID NO: 1249623 - RNA, 12 nt, Human
uccacucugcuu

SEQ ID NO: 1249624 - RNA, 14 nt, Human
uccacucugcuucu

SEQ ID NO: 1249625 - RNA, 15 nt, Human
uccacucugcuucuc

SEQ ID NO: 1249626 - RNA, 19 nt, Human
uccacucugcuucucugac

SEQ ID NO: 1249627 - RNA, 20 nt, Human
uccacucugcuucucugacu

SEQ ID NO: 1249628 - RNA, 15 nt, Human
uccacugagggcagu

SEQ ID NO: 1249629 - RNA, 14 nt, Human
uccagaagugugac

SEQ ID NO: 1249630 - RNA, 15 nt, Human
uccagaagugugacu

SEQ ID NO: 1249631 - RNA, 20 nt, Human
uccagaagugugacuggcua

SEQ ID NO: 1249632 - RNA, 19 nt, Human
uccagaagugugacuggcu

SEQ ID NO: 1249633 - RNA, 13 nt, Human
uccagaaugcugu

SEQ ID NO: 1249634 - RNA, 15 nt, Human
uccagaaugcuguac

SEQ ID NO: 1249635 - RNA, 16 nt, Human
uccagaaugcuguaca

SEQ ID NO: 1249636 - RNA, 17 nt, Human
uccagaaugcuguacau

SEQ ID NO: 1249637 - RNA, 22 nt, Human
accuugaaaaaaaacaguggau

SEQ ID NO: 1249638 - RNA, 15 nt, Human
uccacguacugcagc

SEQ ID NO: 1249639 - RNA, 17 nt, Human
uccacguacugcagccu

SEQ ID NO: 1249640 - RNA, 18 nt, Human
uccacguacugcagccuc

SEQ ID NO: 1249641 - RNA, 19 nt, Human
uccacguucugcucaucau

SEQ ID NO: 1249642 - RNA, 20 nt, Human
uccacguucugcucaucauu

SEQ ID NO: 1249643 - RNA, 21 nt, Human
uccacguucugcucaucauuc

SEQ ID NO: 1249644 - RNA, 15 nt, Human
uccagaccccuggcu

SEQ ID NO: 1249645 - RNA, 16 nt, Human
uccagaccccuggcuu

SEQ ID NO: 1249646 - RNA, 17 nt, Human
uccagaccccuggcuuu

SEQ ID NO: 1249647 - RNA, 18 nt, Human
uccagaccccuggcuuuu

SEQ ID NO: 1249648 - RNA, 23 nt, Human
uccagaccccuggcuuuucacug

SEQ ID NO: 1249649 - RNA, 20 nt, Human
uccagccugagcgacaguga

SEQ ID NO: 1249650 - RNA, 21 nt, Human
uccagccugagcgacagugag

SEQ ID NO: 1249651 - RNA, 11 nt, Human
uccagccugac

SEQ ID NO: 1249652 - RNA, 13 nt, Human
uccagccugacau

SEQ ID NO: 1249653 - RNA, 21 nt, Human
uccagccugacaucaaaaaag

SEQ ID NO: 1249654 - RNA, 16 nt, Human
ucaggaagagaaggag

SEQ ID NO: 1249655 - RNA, 15 nt, Human
ucaggaagagaagga

SEQ ID NO: 1249656 - RNA, 22 nt, Human
ucaggaacguuuagcugacaaa

SEQ ID NO: 1249657 - RNA, 23 nt, Human
ucaggaacguuuagcugacaaaa

SEQ ID NO: 1249658 - RNA, 18 nt, Human
ucaggaacguuuagcuga

SEQ ID NO: 1249659 - RNA, 16 nt, Human
ucagccugggcgcugg

SEQ ID NO: 1249660 - RNA, 19 nt, Human
ucagccugggcgcuggucc

SEQ ID NO: 1249661 - RNA, 18 nt, Human
ucaggaaccgaggcaggg

SEQ ID NO: 1249662 - RNA, 20 nt, Human
ucagccuggccagacacagg

SEQ ID NO: 1249663 - RNA, 13 nt, Human
ucagccugggcgc

SEQ ID NO: 1249664 - RNA, 20 nt, Human
ucaggaagagaaggagcaga

SEQ ID NO: 1249665 - RNA, 20 nt, Human
ucaggcauuggauauuuuuu

SEQ ID NO: 1249666 - RNA, 19 nt, Human
ucaggcccuuauuuucaag

SEQ ID NO: 1249667 - RNA, 22 nt, Human
ucaggcccccgccuuggccugu

SEQ ID NO: 1249668 - RNA, 16 nt, Human
ucaggcccggcagggc

SEQ ID NO: 1249669 - RNA, 21 nt, Human
ucaggcccggcagggcgggca

SEQ ID NO: 1249670 - RNA, 12 nt, Human
ucaggcccaggc

SEQ ID NO: 1249671 - RNA, 15 nt, Human
ucaggcccaggcacu

SEQ ID NO: 1249672 - RNA, 20 nt, Human
ucaggcccccaccuggcuca

SEQ ID NO: 1249673 - RNA, 21 nt, Human
ucaggcccccaccuggcucac

SEQ ID NO: 1249674 - RNA, 19 nt, Human
ucaggcccccgccuuggcc

SEQ ID NO: 1249675 - RNA, 20 nt, Human
ucaggcccccgccuuggccu

SEQ ID NO: 1249676 - RNA, 21 nt, Human
acccuccaccgcagaaggaag

SEQ ID NO: 1249677 - RNA, 20 nt, Human
acccuccaccgcagaaggaa

SEQ ID NO: 1249678 - RNA, 18 nt, Human
acccuccaccgcagaagg

SEQ ID NO: 1249679 - RNA, 15 nt, Human
acccuccagagacaa

SEQ ID NO: 1249680 - RNA, 11 nt, Human
acccuccuggc

SEQ ID NO: 1249681 - RNA, 13 nt, Human
acccuccuggcuc

SEQ ID NO: 1249682 - RNA, 15 nt, Human
ucaggguaggcugga

SEQ ID NO: 1249683 - RNA, 21 nt, Human
accccuugucgccccucccuc

SEQ ID NO: 1249684 - RNA, 13 nt, Human
accccuuucccac

SEQ ID NO: 1249685 - RNA, 14 nt, Human
accccuuucccacc

SEQ ID NO: 1249686 - RNA, 17 nt, Human
accccuuucccacccca

SEQ ID NO: 1249687 - RNA, 16 nt, Human
accccuuucccacccc

SEQ ID NO: 1249688 - RNA, 19 nt, Human
accccuuucuagaccaaua

SEQ ID NO: 1249689 - RNA, 21 nt, Human
accccuuucuagaccaauaaa

SEQ ID NO: 1249690 - RNA, 16 nt, Human
acccgaggcugagaau

SEQ ID NO: 1249691 - RNA, 21 nt, Human
acccgagucauucguucugug

SEQ ID NO: 1249692 - RNA, 23 nt, Human
acccucuggagggguguggcucc

SEQ ID NO: 1249693 - RNA, 14 nt, Human
acccucuguuccuu

SEQ ID NO: 1249694 - RNA, 20 nt, Human
acccucuguuccuucccugu

SEQ ID NO: 1249695 - RNA, 21 nt, Human
acccucuguuccuucccugug

SEQ ID NO: 1249696 - RNA, 13 nt, Human
acccucuucaugg

SEQ ID NO: 1249697 - RNA, 16 nt, Human
acccucuuccuacugg

SEQ ID NO: 1249698 - RNA, 15 nt, Human
acccucuuccuacug

SEQ ID NO: 1249699 - RNA, 15 nt, Human
acccuuauugcuguc

SEQ ID NO: 1249700 - RNA, 17 nt, Human
acccuuauugcuguccu

SEQ ID NO: 1249701 - RNA, 21 nt, Human
acccuuauugcuguccuggag

SEQ ID NO: 1249702 - RNA, 19 nt, Human
acccuuauugcuguccugg

SEQ ID NO: 1249703 - RNA, 14 nt, Human
acccuucucccacu

SEQ ID NO: 1249704 - RNA, 15 nt, Human
acccuucucccacuc

SEQ ID NO: 1249705 - RNA, 16 nt, Human
acccuucucccacucu

SEQ ID NO: 1249706 - RNA, 17 nt, Human
acccuucucccacucuc

SEQ ID NO: 1249707 - RNA, 18 nt, Human
acccuucucccacucucc

SEQ ID NO: 1249708 - RNA, 20 nt, Human
acccuucucccacucuccua

SEQ ID NO: 1249709 - RNA, 15 nt, Human
ucagccccaccccag

SEQ ID NO: 1249710 - RNA, 18 nt, Human
ucagccccaccccagggc

SEQ ID NO: 1249711 - RNA, 19 nt, Human
ucagccccaccccagggca

SEQ ID NO: 1249712 - RNA, 18 nt, Human
ucagccccacccuggccu

SEQ ID NO: 1249713 - RNA, 23 nt, Human
ucagccccaccccagggcagcca

SEQ ID NO: 1249714 - RNA, 16 nt, Human
ucagccccgcguggaa

SEQ ID NO: 1249715 - RNA, 18 nt, Human
ucagcccucccugccccu

SEQ ID NO: 1249716 - RNA, 19 nt, Human
ucagcccucccugccccuc

SEQ ID NO: 1249717 - RNA, 13 nt, Human
ucagcccugagga

SEQ ID NO: 1249718 - RNA, 14 nt, Human
ucagcccugcacca

SEQ ID NO: 1249719 - RNA, 20 nt, Human
acccagguuggagugcagug

SEQ ID NO: 1249720 - RNA, 17 nt, Human
acccaguaacucaucug

SEQ ID NO: 1249721 - RNA, 18 nt, Human
acccaguaacucaucugu

SEQ ID NO: 1249722 - RNA, 16 nt, Human
acccaguccacaaaau

SEQ ID NO: 1249723 - RNA, 17 nt, Human
acccagguuaagaaaau

SEQ ID NO: 1249724 - RNA, 19 nt, Human
acccagguuggagugcagu

SEQ ID NO: 1249725 - RNA, 14 nt, Human
acccaggacaggau

SEQ ID NO: 1249726 - RNA, 11 nt, Human
acccaggacag

SEQ ID NO: 1249727 - RNA, 10 nt, Human
acccaggaca

SEQ ID NO: 1249728 - RNA, 14 nt, Human
acccaggacaagca

SEQ ID NO: 1249729 - RNA, 16 nt, Human
acccaggacaagcaug

SEQ ID NO: 1249730 - RNA, 17 nt, Human
acccaggacaagcaugg

SEQ ID NO: 1249731 - RNA, 20 nt, Human
acccagcucccuucuucccu

SEQ ID NO: 1249732 - RNA, 15 nt, Human
ucagcccugcaccau

SEQ ID NO: 1249733 - RNA, 14 nt, Human
ucagauucccagag

SEQ ID NO: 1249734 - RNA, 15 nt, Human
ucagauggcagcuuu

SEQ ID NO: 1249735 - RNA, 16 nt, Human
ucagauggcagcuuuu

SEQ ID NO: 1249736 - RNA, 17 nt, Human
ucagauggcagcuuuua

SEQ ID NO: 1249737 - RNA, 18 nt, Human
ucagauggcagcuuuuaa

SEQ ID NO: 1249738 - RNA, 18 nt, Human
ucagaagaaaaagaagca

SEQ ID NO: 1249739 - RNA, 17 nt, Human
ucagaagaaaaagaagc

SEQ ID NO: 1249740 - RNA, 15 nt, Human
ucagaacuagaauuu

SEQ ID NO: 1249741 - RNA, 21 nt, Human
ucagaacucaaauggggccag

SEQ ID NO: 1249742 - RNA, 22 nt, Human
ucagaacucaaauggggccaga

SEQ ID NO: 1249743 - RNA, 13 nt, Human
ucagaagaaaaag

SEQ ID NO: 1249744 - RNA, 16 nt, Human
ucagaagaaaaagaag

SEQ ID NO: 1249745 - RNA, 19 nt, Human
ucagccuggcuucaaauug

SEQ ID NO: 1249746 - RNA, 15 nt, Human
accccuggcuuuuca

SEQ ID NO: 1249747 - RNA, 17 nt, Human
accccuggcuuuucacu

SEQ ID NO: 1249748 - RNA, 13 nt, Human
accccuguuucug

SEQ ID NO: 1249749 - RNA, 12 nt, Human
accccuggcuuu

SEQ ID NO: 1249750 - RNA, 17 nt, Human
acccccgucaagaguga

SEQ ID NO: 1249751 - RNA, 13 nt, Human
acccccucacccc

SEQ ID NO: 1249752 - RNA, 13 nt, Human
acccccagccugg

SEQ ID NO: 1249753 - RNA, 14 nt, Human
acccccagccuggg

SEQ ID NO: 1249754 - RNA, 15 nt, Human
acccccagccugggc

SEQ ID NO: 1249755 - RNA, 16 nt, Human
acccccagccugggcc

SEQ ID NO: 1249756 - RNA, 17 nt, Human
acccccagccugggccu

SEQ ID NO: 1249757 - RNA, 21 nt, Human
accccauggugcuaggaagag

SEQ ID NO: 1249758 - RNA, 13 nt, Human
accccauucccgc

SEQ ID NO: 1249759 - RNA, 14 nt, Human
accccauucccgca

SEQ ID NO: 1249760 - RNA, 15 nt, Human
accccauucccgcag

SEQ ID NO: 1249761 - RNA, 15 nt, Human
acccagugcccccac

SEQ ID NO: 1249762 - RNA, 18 nt, Human
acccagugcccccacuga

SEQ ID NO: 1249763 - RNA, 22 nt, Human
acccagugcccccacugaccag

SEQ ID NO: 1249764 - RNA, 19 nt, Human
accccauggagcugggcua

SEQ ID NO: 1249765 - RNA, 22 nt, Human
accccauggcagugggaaaaau

SEQ ID NO: 1249766 - RNA, 15 nt, Human
acccccaggaccaga

SEQ ID NO: 1249767 - RNA, 16 nt, Human
acccccagcuuugcua

SEQ ID NO: 1249768 - RNA, 12 nt, Human
acccccagcuca

SEQ ID NO: 1249769 - RNA, 13 nt, Human
acccccagcucaa

SEQ ID NO: 1249770 - RNA, 20 nt, Human
acccccagcucaauggacug

SEQ ID NO: 1249771 - RNA, 21 nt, Human
acccccagcucaauggacugg

SEQ ID NO: 1249772 - RNA, 18 nt, Human
acccccagcuccggccug

SEQ ID NO: 1249773 - RNA, 14 nt, Human
acccccagcuuugc

SEQ ID NO: 1249774 - RNA, 14 nt, Human
accccccaagcugu

SEQ ID NO: 1249775 - RNA, 15 nt, Human
acccccggcagcagc

SEQ ID NO: 1249776 - RNA, 17 nt, Human
acccccucaccccucca

SEQ ID NO: 1249777 - RNA, 19 nt, Human
accacuuguguuuugcaag

SEQ ID NO: 1249778 - RNA, 23 nt, Human
accacuuguguuuugcaagccag

SEQ ID NO: 1249779 - RNA, 18 nt, Human
accagagaaaaagggagg

SEQ ID NO: 1249780 - RNA, 20 nt, Human
accagagaaaaagggagggg

SEQ ID NO: 1249781 - RNA, 15 nt, Human
accacuuucuuauuu

SEQ ID NO: 1249782 - RNA, 15 nt, Human
accagagagaguugu

SEQ ID NO: 1249783 - RNA, 13 nt, Human
accagccuggccc

SEQ ID NO: 1249784 - RNA, 14 nt, Human
accagccuggccca

SEQ ID NO: 1249785 - RNA, 12 nt, Human
ucaccuccucua

SEQ ID NO: 1249786 - RNA, 22 nt, Human
ucaccuccucuaagguugggca

SEQ ID NO: 1249787 - RNA, 13 nt, Human
ucaccucccccau

SEQ ID NO: 1249788 - RNA, 15 nt, Human
ucaccucccccaucu

SEQ ID NO: 1249789 - RNA, 14 nt, Human
accaggccaccucc

SEQ ID NO: 1249790 - RNA, 17 nt, Human
accaggccaccucccca

SEQ ID NO: 1249791 - RNA, 19 nt, Human
accaggcaacuugggaacu

SEQ ID NO: 1249792 - RNA, 17 nt, Human
accaggauagagacugg

SEQ ID NO: 1249793 - RNA, 17 nt, Human
accaggcaccaaaagaa

SEQ ID NO: 1249794 - RNA, 19 nt, Human
accaggcaccaaaagaagu

SEQ ID NO: 1249795 - RNA, 20 nt, Human
accaggcaccaaaagaagua

SEQ ID NO: 1249796 - RNA, 16 nt, Human
accaggaguggguggg

SEQ ID NO: 1249797 - RNA, 20 nt, Human
accaggaguggguggggagu

SEQ ID NO: 1249798 - RNA, 14 nt, Human
accaggauagagac

SEQ ID NO: 1249799 - RNA, 16 nt, Human
accaggauagagacug

SEQ ID NO: 1249800 - RNA, 19 nt, Human
accaggauagagacuggaa

SEQ ID NO: 1249801 - RNA, 15 nt, Human
accaggcaccaggca

SEQ ID NO: 1249802 - RNA, 21 nt, Human
accaggcaccaaaagaaguaa

SEQ ID NO: 1249803 - RNA, 17 nt, Human
accaggcagccucuggg

SEQ ID NO: 1249804 - RNA, 20 nt, Human
accaggcagccucugggggg

SEQ ID NO: 1249805 - RNA, 21 nt, Human
accaggcagccucuggggggu

SEQ ID NO: 1249806 - RNA, 12 nt, Human
accaggccaccu

SEQ ID NO: 1249807 - RNA, 23 nt, Human
accagcgaggaggcuccagaggg

SEQ ID NO: 1249808 - RNA, 21 nt, Human
accacugcccccugcugccau

SEQ ID NO: 1249809 - RNA, 14 nt, Human
accacucuguaauu

SEQ ID NO: 1249810 - RNA, 14 nt, Human
accacugaaaaaau

SEQ ID NO: 1249811 - RNA, 15 nt, Human
accacugaaaaaaua

SEQ ID NO: 1249812 - RNA, 16 nt, Human
accacugaaaaaauau

SEQ ID NO: 1249813 - RNA, 17 nt, Human
accacugaaaaaauaua

SEQ ID NO: 1249814 - RNA, 19 nt, Human
accacugaaaaaauauaug

SEQ ID NO: 1249815 - RNA, 19 nt, Human
accacugcagaagacagua

SEQ ID NO: 1249816 - RNA, 14 nt, Human
accacugcagaaga

SEQ ID NO: 1249817 - RNA, 12 nt, Human
accacucagaga

SEQ ID NO: 1249818 - RNA, 20 nt, Human
accacucagagacaugcaga

SEQ ID NO: 1249819 - RNA, 13 nt, Human
accacucagagac

SEQ ID NO: 1249820 - RNA, 14 nt, Human
accacucagagaca

SEQ ID NO: 1249821 - RNA, 12 nt, Human
accacucuggca

SEQ ID NO: 1249822 - RNA, 13 nt, Human
accacucuggcag

SEQ ID NO: 1249823 - RNA, 14 nt, Human
accacucuggcagc

SEQ ID NO: 1249824 - RNA, 15 nt, Human
accacucuggcagcc

SEQ ID NO: 1249825 - RNA, 16 nt, Human
accacucuggcagcca

SEQ ID NO: 1249826 - RNA, 17 nt, Human
accacucuggcagccac

SEQ ID NO: 1249827 - RNA, 18 nt, Human
accacucuggcagccaca

SEQ ID NO: 1249828 - RNA, 20 nt, Human
accacucuggcagccacacu

SEQ ID NO: 1249829 - RNA, 12 nt, Human
accacucuguaa

SEQ ID NO: 1249830 - RNA, 15 nt, Human
accacagcacagcca

SEQ ID NO: 1249831 - RNA, 16 nt, Human
accacagcacagccaa

SEQ ID NO: 1249832 - RNA, 16 nt, Human
accacagccagcaccu

SEQ ID NO: 1249833 - RNA, 17 nt, Human
accacagccagcaccug

SEQ ID NO: 1249834 - RNA, 19 nt, Human
uauuucaucauucacuuca

SEQ ID NO: 1249835 - RNA, 17 nt, Human
uauuucaugaaaauugu

SEQ ID NO: 1249836 - RNA, 21 nt, Human
uauuucaggcauuggauauuu

SEQ ID NO: 1249837 - RNA, 13 nt, Human
uauuucauguuuu

SEQ ID NO: 1249838 - RNA, 21 nt, Human
uauuucauguuuuugaucaaa

SEQ ID NO: 1249839 - RNA, 23 nt, Human
uauuucaucaugauaauucagca

SEQ ID NO: 1249840 - RNA, 19 nt, Human
acccagaaugagacaucca

SEQ ID NO: 1249841 - RNA, 20 nt, Human
acccagaaugagacauccag

SEQ ID NO: 1249842 - RNA, 18 nt, Human
acccagaaugagacaucc

SEQ ID NO: 1249843 - RNA, 22 nt, Human
acccacuuuaaaauaucuacau

SEQ ID NO: 1249844 - RNA, 17 nt, Human
acccagacauaaaggaa

SEQ ID NO: 1249845 - RNA, 15 nt, Human
acccagacauaaagg

SEQ ID NO: 1249846 - RNA, 14 nt, Human
ucagaacagcagac

SEQ ID NO: 1249847 - RNA, 23 nt, Human
ucagaacagcagacucagcucug

SEQ ID NO: 1249848 - RNA, 19 nt, Human
acccacuugcuuuuaaaau

SEQ ID NO: 1249849 - RNA, 13 nt, Human
acccaacgcucca

SEQ ID NO: 1249850 - RNA, 16 nt, Human
acccaacgcuccaaag

SEQ ID NO: 1249851 - RNA, 22 nt, Human
acccaagaugggcaucuuuugu

SEQ ID NO: 1249852 - RNA, 17 nt, Human
acccacuucugcacuug

SEQ ID NO: 1249853 - RNA, 21 nt, Human
acccaaauguucaucaaugaa

SEQ ID NO: 1249854 - RNA, 23 nt, Human
acccaaccacaucccacucacaa

SEQ ID NO: 1249855 - RNA, 18 nt, Human
acccaaaaggcagaagca

SEQ ID NO: 1249856 - RNA, 15 nt, Human
accauuccccauggg

SEQ ID NO: 1249857 - RNA, 14 nt, Human
accaugauuccuuu

SEQ ID NO: 1249858 - RNA, 16 nt, Human
accaguugccuuuuau

SEQ ID NO: 1249859 - RNA, 17 nt, Human
accaugacgcaaagaga

SEQ ID NO: 1249860 - RNA, 13 nt, Human
accauugugcauu

SEQ ID NO: 1249861 - RNA, 23 nt, Human
accauuuuguuauugacuaacag

SEQ ID NO: 1249862 - RNA, 13 nt, Human
accauuuccucag

SEQ ID NO: 1249863 - RNA, 15 nt, Human
accauuuccucagac

SEQ ID NO: 1249864 - RNA, 15 nt, Human
acccaaaaggcagaa

SEQ ID NO: 1249865 - RNA, 13 nt, Human
acccaaaaggcag

SEQ ID NO: 1249866 - RNA, 11 nt, Human
accauuucaga

SEQ ID NO: 1249867 - RNA, 14 nt, Human
accauuucagagag

SEQ ID NO: 1249868 - RNA, 20 nt, Human
accauuucagagaggccuuu

SEQ ID NO: 1249869 - RNA, 19 nt, Human
accauuuccucagacucua

SEQ ID NO: 1249870 - RNA, 21 nt, Human
ucacuguagaaugauuucaug

SEQ ID NO: 1249871 - RNA, 20 nt, Human
ucacugcacagugcaucuca

SEQ ID NO: 1249872 - RNA, 22 nt, Human
ucacugcacagugcaucucagc

SEQ ID NO: 1249873 - RNA, 24 nt, Human
ucacugcacagugcaucucagccc

SEQ ID NO: 1249874 - RNA, 20 nt, Human
ucacugucuuuaauucugua

SEQ ID NO: 1249875 - RNA, 16 nt, Human
ucaccuggcccugcuu

SEQ ID NO: 1249876 - RNA, 19 nt, Human
ucaccuggcccugcuuccu

SEQ ID NO: 1249877 - RNA, 23 nt, Human
ucaccuggcccugcuuccugcuu

SEQ ID NO: 1249878 - RNA, 13 nt, Human
ucaccuggaagca

SEQ ID NO: 1249879 - RNA, 22 nt, Human
ucaccuggacuuaagcaucugg

SEQ ID NO: 1249880 - RNA, 19 nt, Human
ucaccuggaagcauuuguu

SEQ ID NO: 1249881 - RNA, 12 nt, Human
ucaccuggcccu

SEQ ID NO: 1249882 - RNA, 13 nt, Human
ucaccuggcccug

SEQ ID NO: 1249883 - RNA, 14 nt, Human
ucaccuggcccugc

SEQ ID NO: 1249884 - RNA, 12 nt, Human
accagugccuua

SEQ ID NO: 1249885 - RNA, 14 nt, Human
accaguugcugcuu

SEQ ID NO: 1249886 - RNA, 24 nt, Human
accaugaagagauuuuucaugauu

SEQ ID NO: 1249887 - RNA, 12 nt, Human
accaguugccuu

SEQ ID NO: 1249888 - RNA, 13 nt, Human
accaguugccuuu

SEQ ID NO: 1249889 - RNA, 14 nt, Human
accaguugccuuuu

SEQ ID NO: 1249890 - RNA, 15 nt, Human
accaguugccuuuua

SEQ ID NO: 1249891 - RNA, 21 nt, Human
accaguucucauggguggcac

SEQ ID NO: 1249892 - RNA, 15 nt, Human
accaguugcagucac

SEQ ID NO: 1249893 - RNA, 20 nt, Human
accaguugcagucacucuag

SEQ ID NO: 1249894 - RNA, 21 nt, Human
accaguugcagucacucuagu

SEQ ID NO: 1249895 - RNA, 12 nt, Human
accaguuaauuu

SEQ ID NO: 1249896 - RNA, 13 nt, Human
accaguuaauuuu

SEQ ID NO: 1249897 - RNA, 14 nt, Human
accaguuaauuuuu

SEQ ID NO: 1249898 - RNA, 16 nt, Human
accaguuaauuuuucc

SEQ ID NO: 1249899 - RNA, 16 nt, Human
accaguucucaugggu

SEQ ID NO: 1249900 - RNA, 19 nt, Human
ucacugucuuuaauucugu

SEQ ID NO: 1249901 - RNA, 21 nt, Human
accagggaugaugcaacaucc

SEQ ID NO: 1249902 - RNA, 17 nt, Human
accagggcaucucuggg

SEQ ID NO: 1249903 - RNA, 18 nt, Human
accagggcaucucugggc

SEQ ID NO: 1249904 - RNA, 19 nt, Human
accagggcaucucugggcu

SEQ ID NO: 1249905 - RNA, 20 nt, Human
accagggcaucucugggcug

SEQ ID NO: 1249906 - RNA, 21 nt, Human
accagggcaucucugggcugg

SEQ ID NO: 1249907 - RNA, 22 nt, Human
accagggcaucucugggcugga

SEQ ID NO: 1249908 - RNA, 16 nt, Human
accagggccagccucu

SEQ ID NO: 1249909 - RNA, 17 nt, Human
accagggccagccucua

SEQ ID NO: 1249910 - RNA, 15 nt, Human
accagggcuccagcc

SEQ ID NO: 1249911 - RNA, 16 nt, Human
accagggcuccagccc

SEQ ID NO: 1249912 - RNA, 12 nt, Human
acagcuccuccc

SEQ ID NO: 1249913 - RNA, 14 nt, Human
acagcuccucccac

SEQ ID NO: 1249914 - RNA, 14 nt, Human
acagcuggacccug

SEQ ID NO: 1249915 - RNA, 17 nt, Human
acagcuggacccugacc

SEQ ID NO: 1249916 - RNA, 13 nt, Human
acagcuggcucua

SEQ ID NO: 1249917 - RNA, 16 nt, Human
acagcuggcucuacuu

SEQ ID NO: 1249918 - RNA, 20 nt, Human
acagcuggcucuacuucccc

SEQ ID NO: 1249919 - RNA, 16 nt, Human
acagcuggggugcagg

SEQ ID NO: 1249920 - RNA, 21 nt, Human
acagcuggggugcagggaugu

SEQ ID NO: 1249921 - RNA, 23 nt, Human
acagcuggggugcagggaugugg

SEQ ID NO: 1249922 - RNA, 21 nt, Human
uauguuuucaggcuagaugua

SEQ ID NO: 1249923 - RNA, 21 nt, Human
uauuaaagaaaaaaauguauu

SEQ ID NO: 1249924 - RNA, 14 nt, Human
uauuaaagugcuaa

SEQ ID NO: 1249925 - RNA, 18 nt, Human
uauuaaagugcuaagguu

SEQ ID NO: 1249926 - RNA, 24 nt, Human
uauuaaagugcuaagguucuaagg

SEQ ID NO: 1249927 - RNA, 22 nt, Human
uauuaaagugcuaagguucuaa

SEQ ID NO: 1249928 - RNA, 23 nt, Human
uauuacaguggggaaugaagaua

SEQ ID NO: 1249929 - RNA, 15 nt, Human
uauuacaguguuuau

SEQ ID NO: 1249930 - RNA, 16 nt, Human
uauuacaguguuuauc

SEQ ID NO: 1249931 - RNA, 19 nt, Human
uauuacaguguuuauccuu

SEQ ID NO: 1249932 - RNA, 22 nt, Human
uauuaaagaaaaaaauguauuu

SEQ ID NO: 1249933 - RNA, 13 nt, Human
uauuaaagaaaaa

SEQ ID NO: 1249934 - RNA, 18 nt, Human
uauuaaagaaaaaaaugu

SEQ ID NO: 1249935 - RNA, 20 nt, Human
uauuaaagaaaaaaauguau

SEQ ID NO: 1249936 - RNA, 22 nt, Human
uauuagcccuucuccauggccc

SEQ ID NO: 1249937 - RNA, 16 nt, Human
uauuagugcuuugcca

SEQ ID NO: 1249938 - RNA, 14 nt, Human
uauuaguuuugauu

SEQ ID NO: 1249939 - RNA, 15 nt, Human
uauuacauuuucagu

SEQ ID NO: 1249940 - RNA, 17 nt, Human
uauuaccaaaagucaac

SEQ ID NO: 1249941 - RNA, 15 nt, Human
uauuaccccuuuucg

SEQ ID NO: 1249942 - RNA, 17 nt, Human
uauuagaaucaaacauu

SEQ ID NO: 1249943 - RNA, 21 nt, Human
uauuagaaucaaacauuuuga

SEQ ID NO: 1249944 - RNA, 23 nt, Human
uauuagaaucaaacauuuugaaa

SEQ ID NO: 1249945 - RNA, 22 nt, Human
uauuagaaucaaacauuuugaa

SEQ ID NO: 1249946 - RNA, 15 nt, Human
uauuagagugucuuu

SEQ ID NO: 1249947 - RNA, 18 nt, Human
uauuagagugucuuucca

SEQ ID NO: 1249948 - RNA, 15 nt, Human
uauucagcucaugga

SEQ ID NO: 1249949 - RNA, 11 nt, Human
uauucaauaaa

SEQ ID NO: 1249950 - RNA, 13 nt, Human
uauucagacagau

SEQ ID NO: 1249951 - RNA, 19 nt, Human
uauucagcaccaagcaugu

SEQ ID NO: 1249952 - RNA, 23 nt, Human
uauucagcaccaagcauguccca

SEQ ID NO: 1249953 - RNA, 20 nt, Human
uauucaggacuugaaagaaa

SEQ ID NO: 1249954 - RNA, 20 nt, Human
uauucagggaaggaggagcc

SEQ ID NO: 1249955 - RNA, 23 nt, Human
uauucagggaaggaggagccugu

SEQ ID NO: 1249956 - RNA, 23 nt, Human
uauucauagcagcuuauucacaa

SEQ ID NO: 1249957 - RNA, 16 nt, Human
uauucauaguuuaauu

SEQ ID NO: 1249958 - RNA, 17 nt, Human
uauucauaugcauauuu

SEQ ID NO: 1249959 - RNA, 16 nt, Human
uauucauaugcauauu

SEQ ID NO: 1249960 - RNA, 15 nt, Human
uauucauaugcauau

SEQ ID NO: 1249961 - RNA, 14 nt, Human
uauucauaugcaua

SEQ ID NO: 1249962 - RNA, 13 nt, Human
uauucauaugcau

SEQ ID NO: 1249963 - RNA, 21 nt, Human
uauucauauuuucuuucaaaa

SEQ ID NO: 1249964 - RNA, 17 nt, Human
uauucauccaaguuaaa

SEQ ID NO: 1249965 - RNA, 21 nt, Human
uauucauccaaguuaaaugua

SEQ ID NO: 1249966 - RNA, 21 nt, Human
acaguuaccucugccucagaa

SEQ ID NO: 1249967 - RNA, 13 nt, Human
acaguuacauaau

SEQ ID NO: 1249968 - RNA, 19 nt, Human
acaguuacauaauucacuc

SEQ ID NO: 1249969 - RNA, 19 nt, Human
acaguguugaaaauguuca

SEQ ID NO: 1249970 - RNA, 21 nt, Human
acaguguugaaaauguucaga

SEQ ID NO: 1249971 - RNA, 14 nt, Human
acaguguuuauccu

SEQ ID NO: 1249972 - RNA, 18 nt, Human
acaguguuuauccuuuca

SEQ ID NO: 1249973 - RNA, 21 nt, Human
acaguguuuauccuuucauau

SEQ ID NO: 1249974 - RNA, 20 nt, Human
acaguguuuauccuuucaua

SEQ ID NO: 1249975 - RNA, 18 nt, Human
acagugagacucugucuc

SEQ ID NO: 1249976 - RNA, 14 nt, Human
acagugagacucug

SEQ ID NO: 1249977 - RNA, 13 nt, Human
acagugaagacag

SEQ ID NO: 1249978 - RNA, 14 nt, Human
acagugaagacaga

SEQ ID NO: 1249979 - RNA, 18 nt, Human
acagugaagacagaaguu

SEQ ID NO: 1249980 - RNA, 21 nt, Human
acagugaagacagaaguuugc

SEQ ID NO: 1249981 - RNA, 19 nt, Human
acagugaagacagaaguuu

SEQ ID NO: 1249982 - RNA, 14 nt, Human
acagugacuucuga

SEQ ID NO: 1249983 - RNA, 15 nt, Human
acagugacuucugag

SEQ ID NO: 1249984 - RNA, 17 nt, Human
acagugacuucugagau

SEQ ID NO: 1249985 - RNA, 12 nt, Human
acagugagccug

SEQ ID NO: 1249986 - RNA, 14 nt, Human
acagugagccugaa

SEQ ID NO: 1249987 - RNA, 17 nt, Human
acagugagccugaauuu

SEQ ID NO: 1249988 - RNA, 11 nt, Human
acagugucuuu

SEQ ID NO: 1249989 - RNA, 12 nt, Human
acagugucuuuu

SEQ ID NO: 1249990 - RNA, 14 nt, Human
acagugucuuuuuu

SEQ ID NO: 1249991 - RNA, 21 nt, Human
acagugucuuuuuuuguauag

SEQ ID NO: 1249992 - RNA, 19 nt, Human
acagugucuuuuuuuguau

SEQ ID NO: 1249993 - RNA, 13 nt, Human
acagugugcaagg

SEQ ID NO: 1249994 - RNA, 22 nt, Human
acagugugcaaggcagccgugg

SEQ ID NO: 1249995 - RNA, 20 nt, Human
acagugaaagaaaauaacaa

SEQ ID NO: 1249996 - RNA, 14 nt, Human
acagucuuccauuu

SEQ ID NO: 1249997 - RNA, 19 nt, Human
acagucuuccauuugcaag

SEQ ID NO: 1249998 - RNA, 12 nt, Human
acagucuaaagc

SEQ ID NO: 1249999 - RNA, 15 nt, Human
acagucuaaagcugg

SEQ ID NO: 1250000 - RNA, 14 nt, Human
acagucuaaagcug

SEQ ID NO: 1250001 - RNA, 21 nt, Human
acaguaaaccacugaaaaaau

SEQ ID NO: 1250002 - RNA, 15 nt, Human
acagggccacauaga

SEQ ID NO: 1250003 - RNA, 15 nt, Human
acaguaaaccacuga

SEQ ID NO: 1250004 - RNA, 16 nt, Human
acaguaaaccacugaa

SEQ ID NO: 1250005 - RNA, 17 nt, Human
acaguaaaccacugaaa

SEQ ID NO: 1250006 - RNA, 18 nt, Human
acaguaaaccacugaaaa

SEQ ID NO: 1250007 - RNA, 19 nt, Human
acaguaaaccacugaaaaa

SEQ ID NO: 1250008 - RNA, 20 nt, Human
acaguaaaccacugaaaaaa

SEQ ID NO: 1250009 - RNA, 22 nt, Human
acaguaaaccacugaaaaaaua

SEQ ID NO: 1250010 - RNA, 20 nt, Human
acaguaucucaaacaauuga

SEQ ID NO: 1250011 - RNA, 21 nt, Human
acaguauggcagcuuuccuca

SEQ ID NO: 1250012 - RNA, 19 nt, Human
acaguauggggguuguaaa

SEQ ID NO: 1250013 - RNA, 20 nt, Human
acaguauggggguuguaaau

SEQ ID NO: 1250014 - RNA, 21 nt, Human
acaguauggggguuguaaauu

SEQ ID NO: 1250015 - RNA, 22 nt, Human
acaguauggggguuguaaauug

SEQ ID NO: 1250016 - RNA, 23 nt, Human
acaguauggggguuguaaauugg

SEQ ID NO: 1250017 - RNA, 22 nt, Human
uauucauccaaguuaaauguag

SEQ ID NO: 1250018 - RNA, 20 nt, Human
acagggcaguaccugagggu

SEQ ID NO: 1250019 - RNA, 20 nt, Human
acaguauuauacgcuggcaa

SEQ ID NO: 1250020 - RNA, 12 nt, Human
acaguauugcuc

SEQ ID NO: 1250021 - RNA, 15 nt, Human
acaguauugcucacc

SEQ ID NO: 1250022 - RNA, 16 nt, Human
acaguauugcucaccc

SEQ ID NO: 1250023 - RNA, 22 nt, Human
acaguauugcucacccagugcc

SEQ ID NO: 1250024 - RNA, 14 nt, Human
acaguauuuguaau

SEQ ID NO: 1250025 - RNA, 17 nt, Human
acaguauuuguaauuaa

SEQ ID NO: 1250026 - RNA, 18 nt, Human
acaguauuuguaauuaaa

SEQ ID NO: 1250027 - RNA, 18 nt, Human
acagucaaaaccaaguca

SEQ ID NO: 1250028 - RNA, 17 nt, Human
acaguccgucaaaacag

SEQ ID NO: 1250029 - RNA, 21 nt, Human
acaguccgucaaaacagauug

SEQ ID NO: 1250030 - RNA, 19 nt, Human
uauuguauauuacaaugau

SEQ ID NO: 1250031 - RNA, 17 nt, Human
uauuguauauuacaaug

SEQ ID NO: 1250032 - RNA, 16 nt, Human
uauuguauauuacaau

SEQ ID NO: 1250033 - RNA, 17 nt, Human
uauuguagcauccugga

SEQ ID NO: 1250034 - RNA, 18 nt, Human
uauuguagcauccuggaa

SEQ ID NO: 1250035 - RNA, 20 nt, Human
uauuguagcauccuggaaua

SEQ ID NO: 1250036 - RNA, 21 nt, Human
uauuguagcauccuggaauau

SEQ ID NO: 1250037 - RNA, 13 nt, Human
uauuguauucugg

SEQ ID NO: 1250038 - RNA, 17 nt, Human
uauugucuagugaaacu

SEQ ID NO: 1250039 - RNA, 15 nt, Human
uauuguccauugucc

SEQ ID NO: 1250040 - RNA, 17 nt, Human
uauuguccauuguccaa

SEQ ID NO: 1250041 - RNA, 23 nt, Human
uauugucugaacuugcauuguga

SEQ ID NO: 1250042 - RNA, 17 nt, Human
uauuuaaccucuaaauu

SEQ ID NO: 1250043 - RNA, 18 nt, Human
uauuuaaccucuaaauuc

SEQ ID NO: 1250044 - RNA, 17 nt, Human
uauugugcaauguaaau

SEQ ID NO: 1250045 - RNA, 19 nt, Human
uauuuaacagaaauuguau

SEQ ID NO: 1250046 - RNA, 13 nt, Human
uauuuaacuaauu

SEQ ID NO: 1250047 - RNA, 16 nt, Human
uauuuaacucucuuua

SEQ ID NO: 1250048 - RNA, 23 nt, Human
uauuuaacucucuuuaugucugu

SEQ ID NO: 1250049 - RNA, 11 nt, Human
uauuuaacuga

SEQ ID NO: 1250050 - RNA, 13 nt, Human
uauuuaacugacu

SEQ ID NO: 1250051 - RNA, 13 nt, Human
uauuuaacuucug

SEQ ID NO: 1250052 - RNA, 14 nt, Human
uauuuaacuucuga

SEQ ID NO: 1250053 - RNA, 14 nt, Human
uauuuaauagguuu

SEQ ID NO: 1250054 - RNA, 18 nt, Human
uauuuaauagcaaagaau

SEQ ID NO: 1250055 - RNA, 19 nt, Human
uauuuaauagcaaagaauu

SEQ ID NO: 1250056 - RNA, 20 nt, Human
uauuuaauagcaaagaauug

SEQ ID NO: 1250057 - RNA, 22 nt, Human
uauuuaauagcaaagaauugac

SEQ ID NO: 1250058 - RNA, 17 nt, Human
uauuuaagauaauuaua

SEQ ID NO: 1250059 - RNA, 20 nt, Human
uauuuaagauaauuauaaua

SEQ ID NO: 1250060 - RNA, 13 nt, Human
uauuuaauagcaa

SEQ ID NO: 1250061 - RNA, 14 nt, Human
uauuuauuuuaaua

SEQ ID NO: 1250062 - RNA, 16 nt, Human
uauuuauuuuaauaau

SEQ ID NO: 1250063 - RNA, 18 nt, Human
uauuuauuuuaauaaugu

SEQ ID NO: 1250064 - RNA, 20 nt, Human
uauuuauuuuuuuuaaguau

SEQ ID NO: 1250065 - RNA, 14 nt, Human
uauuucaaauugga

SEQ ID NO: 1250066 - RNA, 18 nt, Human
uauuucaaauuggagcuu

SEQ ID NO: 1250067 - RNA, 16 nt, Human
uauuucaauguuagcc

SEQ ID NO: 1250068 - RNA, 15 nt, Human
uauuucaauguuagc

SEQ ID NO: 1250069 - RNA, 15 nt, Human
uauuucacaacagcc

SEQ ID NO: 1250070 - RNA, 15 nt, Human
uauuucacuggagca

SEQ ID NO: 1250071 - RNA, 14 nt, Human
uauuucacuggagc

SEQ ID NO: 1250072 - RNA, 19 nt, Human
uauuuaguguucauaaaua

SEQ ID NO: 1250073 - RNA, 21 nt, Human
uauuuagaugauaaagagaca

SEQ ID NO: 1250074 - RNA, 19 nt, Human
uauuuagcuugggaaaggu

SEQ ID NO: 1250075 - RNA, 14 nt, Human
uauuuauuuaguau

SEQ ID NO: 1250076 - RNA, 14 nt, Human
uauuuaauucaugu

SEQ ID NO: 1250077 - RNA, 21 nt, Human
uauuuaaugccgauauacucu

SEQ ID NO: 1250078 - RNA, 14 nt, Human
uauuuaaugcugug

SEQ ID NO: 1250079 - RNA, 15 nt, Human
uauuuacgcuuugau

SEQ ID NO: 1250080 - RNA, 19 nt, Human
uauuuacgcuuugauucau

SEQ ID NO: 1250081 - RNA, 22 nt, Human
uauuuacgcuuugauucauagu

SEQ ID NO: 1250082 - RNA, 14 nt, Human
uauuuacauuuaau

SEQ ID NO: 1250083 - RNA, 17 nt, Human
uauuuaccccuccccua

SEQ ID NO: 1250084 - RNA, 13 nt, Human
uauuuaccucagc

SEQ ID NO: 1250085 - RNA, 14 nt, Human
uauuuaccucagcc

SEQ ID NO: 1250086 - RNA, 15 nt, Human
uauuuaccucagccu

SEQ ID NO: 1250087 - RNA, 16 nt, Human
uauuuaccucagccug

SEQ ID NO: 1250088 - RNA, 14 nt, Human
uauuuacgcuuuga

SEQ ID NO: 1250089 - RNA, 17 nt, Human
uauuuaccucagccugg

SEQ ID NO: 1250090 - RNA, 20 nt, Human
uauuuagcaccagggaaggg

SEQ ID NO: 1250091 - RNA, 14 nt, Human
uauuuagauucacu

SEQ ID NO: 1250092 - RNA, 20 nt, Human
uauuuagauucacuuaacaa

SEQ ID NO: 1250093 - RNA, 23 nt, Human
uauuuagaugauaaagagacagu

SEQ ID NO: 1250094 - RNA, 16 nt, Human
uauuggggucugaccc

SEQ ID NO: 1250095 - RNA, 17 nt, Human
uauuggggucugacccc

SEQ ID NO: 1250096 - RNA, 17 nt, Human
uauugguguaagguacu

SEQ ID NO: 1250097 - RNA, 20 nt, Human
uauugguuuaaagaaagugu

SEQ ID NO: 1250098 - RNA, 15 nt, Human
uauuguaaaacaggu

SEQ ID NO: 1250099 - RNA, 15 nt, Human
uauuguaaauauugu

SEQ ID NO: 1250100 - RNA, 20 nt, Human
uauuguaacccugucuggau

SEQ ID NO: 1250101 - RNA, 14 nt, Human
uauugagucaaaug

SEQ ID NO: 1250102 - RNA, 22 nt, Human
uauugacuaacaggccaaagag

SEQ ID NO: 1250103 - RNA, 14 nt, Human
uauugacuuguaua

SEQ ID NO: 1250104 - RNA, 15 nt, Human
uauugacuuguauau

SEQ ID NO: 1250105 - RNA, 17 nt, Human
uauugacuuguauauuu

SEQ ID NO: 1250106 - RNA, 21 nt, Human
uauugacaaaauguuauuucc

SEQ ID NO: 1250107 - RNA, 23 nt, Human
uauugacacagaaaauguugaga

SEQ ID NO: 1250108 - RNA, 13 nt, Human
uauugacacagaa

SEQ ID NO: 1250109 - RNA, 16 nt, Human
uauugacacagaaaau

SEQ ID NO: 1250110 - RNA, 18 nt, Human
uauugacacagaaaaugu

SEQ ID NO: 1250111 - RNA, 20 nt, Human
uauugacacagaaaauguug

SEQ ID NO: 1250112 - RNA, 22 nt, Human
uauugacaaaauguuauuuccc

SEQ ID NO: 1250113 - RNA, 16 nt, Human
uauugacaaaauguua

SEQ ID NO: 1250114 - RNA, 13 nt, Human
uauugacaaaaug

SEQ ID NO: 1250115 - RNA, 12 nt, Human
uauugacaaaau

SEQ ID NO: 1250116 - RNA, 18 nt, Human
uauugaauucauuucacu

SEQ ID NO: 1250117 - RNA, 19 nt, Human
uauugaauucauuucacug

SEQ ID NO: 1250118 - RNA, 18 nt, Human
uauugaauauuuuauauu

SEQ ID NO: 1250119 - RNA, 22 nt, Human
uauucuucucuuccuuuuauca

SEQ ID NO: 1250120 - RNA, 16 nt, Human
uauucuugauguaaaa

SEQ ID NO: 1250121 - RNA, 14 nt, Human
uauucuugguuuuc

SEQ ID NO: 1250122 - RNA, 14 nt, Human
uauucuugauguaa

SEQ ID NO: 1250123 - RNA, 13 nt, Human
uauucuugguuuu

SEQ ID NO: 1250124 - RNA, 22 nt, Human
acaguucggugagcuacaaaug

SEQ ID NO: 1250125 - RNA, 19 nt, Human
acaguucggugagcuacaa

SEQ ID NO: 1250126 - RNA, 23 nt, Human
acaguucggugagcuacaaaugc

SEQ ID NO: 1250127 - RNA, 18 nt, Human
acaguuccccuaugugga

SEQ ID NO: 1250128 - RNA, 20 nt, Human
acaguuccccuauguggaag

SEQ ID NO: 1250129 - RNA, 19 nt, Human
acaguuccccuauguggaa

SEQ ID NO: 1250130 - RNA, 15 nt, Human
acaguuaucuaaguu

SEQ ID NO: 1250131 - RNA, 16 nt, Human
acaguuaucuaaguua

SEQ ID NO: 1250132 - RNA, 17 nt, Human
acaguuaucuaaguuaa

SEQ ID NO: 1250133 - RNA, 23 nt, Human
acaguuaucuaaguuaauuuaaa

SEQ ID NO: 1250134 - RNA, 12 nt, Human
acaguucaagaa

SEQ ID NO: 1250135 - RNA, 20 nt, Human
acaguucaagaaagcuucaa

SEQ ID NO: 1250136 - RNA, 16 nt, Human
acaguucaagaaagcu

SEQ ID NO: 1250137 - RNA, 15 nt, Human
acaguucauauguac

SEQ ID NO: 1250138 - RNA, 21 nt, Human
acaguuccugggaacaucaca

SEQ ID NO: 1250139 - RNA, 13 nt, Human
acaguuccuggga

SEQ ID NO: 1250140 - RNA, 16 nt, Human
acaguucugcucuggu

SEQ ID NO: 1250141 - RNA, 12 nt, Human
acaguucugugg

SEQ ID NO: 1250142 - RNA, 22 nt, Human
acaguucugugguuucauguua

SEQ ID NO: 1250143 - RNA, 21 nt, Human
acaguucugcucugguuguuu

SEQ ID NO: 1250144 - RNA, 17 nt, Human
acaguucuuugggccag

SEQ ID NO: 1250145 - RNA, 18 nt, Human
acaguucuuugggccaga

SEQ ID NO: 1250146 - RNA, 20 nt, Human
acaguucuuugggccagaca

SEQ ID NO: 1250147 - RNA, 19 nt, Human
acaguucuuugggccagac

SEQ ID NO: 1250148 - RNA, 12 nt, Human
uauucucugagc

SEQ ID NO: 1250149 - RNA, 18 nt, Human
uauucucugagcugugca

SEQ ID NO: 1250150 - RNA, 19 nt, Human
uauucucugagcugugcag

SEQ ID NO: 1250151 - RNA, 14 nt, Human
uauucuucauaaca

SEQ ID NO: 1250152 - RNA, 13 nt, Human
uauucuucuagag

SEQ ID NO: 1250153 - RNA, 14 nt, Human
uauucuucuagagu

SEQ ID NO: 1250154 - RNA, 17 nt, Human
uauucuucuagaguuca

SEQ ID NO: 1250155 - RNA, 18 nt, Human
uauucuucuagaguucag

SEQ ID NO: 1250156 - RNA, 13 nt, Human
uauucuucucuuc

SEQ ID NO: 1250157 - RNA, 19 nt, Human
uauucugggggcugcaguu

SEQ ID NO: 1250158 - RNA, 18 nt, Human
uauucugggguauggcgu

SEQ ID NO: 1250159 - RNA, 11 nt, Human
uauucuguccc

SEQ ID NO: 1250160 - RNA, 12 nt, Human
uauucugucccu

SEQ ID NO: 1250161 - RNA, 13 nt, Human
uauucugucccua

SEQ ID NO: 1250162 - RNA, 15 nt, Human
uauucugucccuagg

SEQ ID NO: 1250163 - RNA, 16 nt, Human
uauauugauccagaaa

SEQ ID NO: 1250164 - RNA, 23 nt, Human
acagacugcgauuugucccaggu

SEQ ID NO: 1250165 - RNA, 14 nt, Human
acagacuauuuuua

SEQ ID NO: 1250166 - RNA, 17 nt, Human
acagacuauuuuuagau

SEQ ID NO: 1250167 - RNA, 23 nt, Human
acagacuauuuuuagauuuucuu

SEQ ID NO: 1250168 - RNA, 15 nt, Human
acacuccccgaaguc

SEQ ID NO: 1250169 - RNA, 14 nt, Human
acacucccuugggc

SEQ ID NO: 1250170 - RNA, 14 nt, Human
acagacacuggcau

SEQ ID NO: 1250171 - RNA, 13 nt, Human
acagacagcccuc

SEQ ID NO: 1250172 - RNA, 15 nt, Human
acagacagcccucca

SEQ ID NO: 1250173 - RNA, 16 nt, Human
uaucacccaacgcucc

SEQ ID NO: 1250174 - RNA, 21 nt, Human
uaucacccaacgcuccaaagu

SEQ ID NO: 1250175 - RNA, 18 nt, Human
uaucacugaagcuuuuua

SEQ ID NO: 1250176 - RNA, 22 nt, Human
uaucacuuaaacuugcaucacu

SEQ ID NO: 1250177 - RNA, 18 nt, Human
uaucacauguuuucucug

SEQ ID NO: 1250178 - RNA, 23 nt, Human
uaucaccaaaaaccuauuccacu

SEQ ID NO: 1250179 - RNA, 19 nt, Human
uaucaauaaauagaccauu

SEQ ID NO: 1250180 - RNA, 13 nt, Human
uaucacacacauu

SEQ ID NO: 1250181 - RNA, 19 nt, Human
uaucacacacauugcugug

SEQ ID NO: 1250182 - RNA, 20 nt, Human
uaucacacacauugcuguga

SEQ ID NO: 1250183 - RNA, 12 nt, Human
uaucacauguuu

SEQ ID NO: 1250184 - RNA, 14 nt, Human
uauauuuacaaaug

SEQ ID NO: 1250185 - RNA, 16 nt, Human
uauauugauaagaucu

SEQ ID NO: 1250186 - RNA, 15 nt, Human
uauauuuacaaaugg

SEQ ID NO: 1250187 - RNA, 17 nt, Human
uaucuagguuuaugaca

SEQ ID NO: 1250188 - RNA, 17 nt, Human
uaucuaguuuaauuaau

SEQ ID NO: 1250189 - RNA, 22 nt, Human
uaucucccugccuccugccggc

SEQ ID NO: 1250190 - RNA, 16 nt, Human
uaucucccugccuccu

SEQ ID NO: 1250191 - RNA, 17 nt, Human
uaucuacuuccaaacua

SEQ ID NO: 1250192 - RNA, 22 nt, Human
uaucuacuuuuacucauaagua

SEQ ID NO: 1250193 - RNA, 21 nt, Human
uaucuagguuuaugacaguaa

SEQ ID NO: 1250194 - RNA, 15 nt, Human
uaucuagguuuauga

SEQ ID NO: 1250195 - RNA, 17 nt, Human
uaucuaggcaacauagu

SEQ ID NO: 1250196 - RNA, 22 nt, Human
uauccauauugagucaaauggu

SEQ ID NO: 1250197 - RNA, 16 nt, Human
uaucacuuaaacuugc

SEQ ID NO: 1250198 - RNA, 22 nt, Human
uaucccaaaguuguuguaaccu

SEQ ID NO: 1250199 - RNA, 22 nt, Human
uaucuacuuccaaacuaauuuu

SEQ ID NO: 1250200 - RNA, 22 nt, Human
acagagcgugagcugagcaggc

SEQ ID NO: 1250201 - RNA, 23 nt, Human
acagagcgugagcugagcaggcc

SEQ ID NO: 1250202 - RNA, 14 nt, Human
acagaguggccguc

SEQ ID NO: 1250203 - RNA, 13 nt, Human
acagacuucugaa

SEQ ID NO: 1250204 - RNA, 14 nt, Human
acagacuucugaaa

SEQ ID NO: 1250205 - RNA, 20 nt, Human
acagacuggauguaccacca

SEQ ID NO: 1250206 - RNA, 13 nt, Human
acagagaaaccag

SEQ ID NO: 1250207 - RNA, 15 nt, Human
acagagaaaccagcu

SEQ ID NO: 1250208 - RNA, 14 nt, Human
acagagaaaccagc

SEQ ID NO: 1250209 - RNA, 12 nt, Human
acagagaccaag

SEQ ID NO: 1250210 - RNA, 13 nt, Human
acagagaccaaga

SEQ ID NO: 1250211 - RNA, 14 nt, Human
acagagaccaagau

SEQ ID NO: 1250212 - RNA, 20 nt, Human
acagagacugaauagauaug

SEQ ID NO: 1250213 - RNA, 16 nt, Human
acagagaggacuguag

SEQ ID NO: 1250214 - RNA, 15 nt, Human
acagcuccaagaauu

SEQ ID NO: 1250215 - RNA, 17 nt, Human
acagcuccacccuggcc

SEQ ID NO: 1250216 - RNA, 20 nt, Human
acagcuaaucagcauucuca

SEQ ID NO: 1250217 - RNA, 22 nt, Human
acagcuaaucagcauucucacu

SEQ ID NO: 1250218 - RNA, 23 nt, Human
uauggggaagguuaucagugcuu

SEQ ID NO: 1250219 - RNA, 23 nt, Human
uauggcguaaguacagagaagcc

SEQ ID NO: 1250220 - RNA, 22 nt, Human
uauggcguaaguacagagaagc

SEQ ID NO: 1250221 - RNA, 21 nt, Human
uauggggaagguuaucagugc

SEQ ID NO: 1250222 - RNA, 14 nt, Human
acagccuggcacag

SEQ ID NO: 1250223 - RNA, 12 nt, Human
acagccuggcug

SEQ ID NO: 1250224 - RNA, 15 nt, Human
acagccuggcacagg

SEQ ID NO: 1250225 - RNA, 14 nt, Human
uauggccuguggau

SEQ ID NO: 1250226 - RNA, 22 nt, Human
uauggccugugagcuaggaauu

SEQ ID NO: 1250227 - RNA, 13 nt, Human
uauggccuguguc

SEQ ID NO: 1250228 - RNA, 14 nt, Human
uauggccuguguca

SEQ ID NO: 1250229 - RNA, 17 nt, Human
uauggcguaaguacaga

SEQ ID NO: 1250230 - RNA, 18 nt, Human
uauggcguaaguacagag

SEQ ID NO: 1250231 - RNA, 19 nt, Human
uauggcguaaguacagaga

SEQ ID NO: 1250232 - RNA, 20 nt, Human
uauggcguaaguacagagaa

SEQ ID NO: 1250233 - RNA, 21 nt, Human
uauggcguaaguacagagaag

SEQ ID NO: 1250234 - RNA, 16 nt, Human
uaugcucuuaauugcc

SEQ ID NO: 1250235 - RNA, 18 nt, Human
uaugcucuuaauugccac

SEQ ID NO: 1250236 - RNA, 17 nt, Human
uaugcucuuaauugcca

SEQ ID NO: 1250237 - RNA, 16 nt, Human
uaugaucugucugugg

SEQ ID NO: 1250238 - RNA, 14 nt, Human
uaugaucugucugu

SEQ ID NO: 1250239 - RNA, 21 nt, Human
uaugauggguguuuuuagcag

SEQ ID NO: 1250240 - RNA, 14 nt, Human
uaugauguuaaaaa

SEQ ID NO: 1250241 - RNA, 21 nt, Human
uaugaugugcuuaacagggaa

SEQ ID NO: 1250242 - RNA, 18 nt, Human
uaugauguuaaaaaaaua

SEQ ID NO: 1250243 - RNA, 17 nt, Human
uaugaugugcuuaacag

SEQ ID NO: 1250244 - RNA, 14 nt, Human
uaugaugugcuuaa

SEQ ID NO: 1250245 - RNA, 21 nt, Human
uaugauguauacugccacuaa

SEQ ID NO: 1250246 - RNA, 19 nt, Human
uaugauguauacugccacu

SEQ ID NO: 1250247 - RNA, 15 nt, Human
uaugauaauagauuc

SEQ ID NO: 1250248 - RNA, 14 nt, Human
uaugagucuagaug

SEQ ID NO: 1250249 - RNA, 16 nt, Human
uaugagucuagauguu

SEQ ID NO: 1250250 - RNA, 16 nt, Human
uaugauaauagauucu

SEQ ID NO: 1250251 - RNA, 15 nt, Human
uaucuugaauaaugu

SEQ ID NO: 1250252 - RNA, 22 nt, Human
uaucuugcaguaucggcacugu

SEQ ID NO: 1250253 - RNA, 23 nt, Human
uaucuugcaguaucggcacugua

SEQ ID NO: 1250254 - RNA, 19 nt, Human
uaucuuggacaaaucacau

SEQ ID NO: 1250255 - RNA, 17 nt, Human
uaucuuggacaaaucac

SEQ ID NO: 1250256 - RNA, 17 nt, Human
uaugaggacuugugucu

SEQ ID NO: 1250257 - RNA, 23 nt, Human
uaugaggacuugugucucugugc

SEQ ID NO: 1250258 - RNA, 18 nt, Human
acagaguguggacucugg

SEQ ID NO: 1250259 - RNA, 13 nt, Human
acagaguugauuu

SEQ ID NO: 1250260 - RNA, 16 nt, Human
acagaguugauuuuuu

SEQ ID NO: 1250261 - RNA, 13 nt, Human
acagauaaaaugu

SEQ ID NO: 1250262 - RNA, 16 nt, Human
acagauaaaauguaaa

SEQ ID NO: 1250263 - RNA, 18 nt, Human
acagauaacugaaaauua

SEQ ID NO: 1250264 - RNA, 18 nt, Human
acagcagccccugcacaa

SEQ ID NO: 1250265 - RNA, 14 nt, Human
acagauaacugaaa

SEQ ID NO: 1250266 - RNA, 22 nt, Human
acagcagccuggggcuggccuc

SEQ ID NO: 1250267 - RNA, 15 nt, Human
acagcccaggauacu

SEQ ID NO: 1250268 - RNA, 21 nt, Human
acagcccaggauacuggcaca

SEQ ID NO: 1250269 - RNA, 12 nt, Human
acagccccaccc

SEQ ID NO: 1250270 - RNA, 13 nt, Human
acagccccacccu

SEQ ID NO: 1250271 - RNA, 14 nt, Human
acagccccacccug

SEQ ID NO: 1250272 - RNA, 15 nt, Human
acagccccacccugg

SEQ ID NO: 1250273 - RNA, 20 nt, Human
acagcccaggauacuggcac

SEQ ID NO: 1250274 - RNA, 12 nt, Human
acagccucagaa

SEQ ID NO: 1250275 - RNA, 15 nt, Human
acagccuccccugcc

SEQ ID NO: 1250276 - RNA, 17 nt, Human
acagccuccccugccag

SEQ ID NO: 1250277 - RNA, 18 nt, Human
acagccuccccugccagg

SEQ ID NO: 1250278 - RNA, 19 nt, Human
acagccuccccugccaggg

SEQ ID NO: 1250279 - RNA, 21 nt, Human
acagccuccccugccagggca

SEQ ID NO: 1250280 - RNA, 22 nt, Human
acagccuccccugccagggcag

SEQ ID NO: 1250281 - RNA, 14 nt, Human
uauaauuuugugaa

SEQ ID NO: 1250282 - RNA, 21 nt, Human
uauaagcaucauuauuuaugu

SEQ ID NO: 1250283 - RNA, 17 nt, Human
uauaagcaucauuauuu

SEQ ID NO: 1250284 - RNA, 16 nt, Human
uauaaccagacacaua

SEQ ID NO: 1250285 - RNA, 13 nt, Human
uauaagaaagccu

SEQ ID NO: 1250286 - RNA, 14 nt, Human
uauaagaaagccug

SEQ ID NO: 1250287 - RNA, 15 nt, Human
uauaagaaagccuga

SEQ ID NO: 1250288 - RNA, 12 nt, Human
uauaagacucuc

SEQ ID NO: 1250289 - RNA, 14 nt, Human
uauaagauccuaga

SEQ ID NO: 1250290 - RNA, 18 nt, Human
uauaagauccuagauccu

SEQ ID NO: 1250291 - RNA, 19 nt, Human
uauaagauccuagauccua

SEQ ID NO: 1250292 - RNA, 21 nt, Human
uauaagauccuagauccuaag

SEQ ID NO: 1250293 - RNA, 22 nt, Human
uauaagcaagaaggcaaaaaua

SEQ ID NO: 1250294 - RNA, 15 nt, Human
uauaagcaucauuau

SEQ ID NO: 1250295 - RNA, 16 nt, Human
uauaagcaucauuauu

SEQ ID NO: 1250296 - RNA, 20 nt, Human
acaccuaggcuagggugggg

SEQ ID NO: 1250297 - RNA, 17 nt, Human
acaccuacccuccuuuu

SEQ ID NO: 1250298 - RNA, 23 nt, Human
acaccuaggcuaggguggggaga

SEQ ID NO: 1250299 - RNA, 17 nt, Human
acaccuaugucauuuca

SEQ ID NO: 1250300 - RNA, 20 nt, Human
acaccuaugucauuucauuu

SEQ ID NO: 1250301 - RNA, 18 nt, Human
acaccuauuaucccagcu

SEQ ID NO: 1250302 - RNA, 19 nt, Human
acaccuauuaucccagcug

SEQ ID NO: 1250303 - RNA, 20 nt, Human
acaccuauuaucccagcugc

SEQ ID NO: 1250304 - RNA, 22 nt, Human
acaccuauuaucccagcugccu

SEQ ID NO: 1250305 - RNA, 12 nt, Human
acaccucccagg

SEQ ID NO: 1250306 - RNA, 16 nt, Human
uauaacaguguuuaaa

SEQ ID NO: 1250307 - RNA, 19 nt, Human
uauaaccaacuuuucuauu

SEQ ID NO: 1250308 - RNA, 12 nt, Human
uauagauucuaa

SEQ ID NO: 1250309 - RNA, 13 nt, Human
uauagauucuaaa

SEQ ID NO: 1250310 - RNA, 14 nt, Human
uauagauucuaaag

SEQ ID NO: 1250311 - RNA, 15 nt, Human
uauagauucuaaaga

SEQ ID NO: 1250312 - RNA, 17 nt, Human
uauagauucuaaagauu

SEQ ID NO: 1250313 - RNA, 14 nt, Human
uauacccacccaga

SEQ ID NO: 1250314 - RNA, 14 nt, Human
uauaccaauaaagu

SEQ ID NO: 1250315 - RNA, 19 nt, Human
uauaccaguauaauugagu

SEQ ID NO: 1250316 - RNA, 17 nt, Human
uauaccaaagcacauuu

SEQ ID NO: 1250317 - RNA, 15 nt, Human
uauaccaauaaagug

SEQ ID NO: 1250318 - RNA, 13 nt, Human
uauaccaauaaag

SEQ ID NO: 1250319 - RNA, 12 nt, Human
uauaccaauaaa

SEQ ID NO: 1250320 - RNA, 15 nt, Human
uauaccaaaauguug

SEQ ID NO: 1250321 - RNA, 22 nt, Human
uauaccaaagcacauuuuaaaa

SEQ ID NO: 1250322 - RNA, 19 nt, Human
uauaauuuugugaagcaaa

SEQ ID NO: 1250323 - RNA, 20 nt, Human
uauacaauuaugaagauuua

SEQ ID NO: 1250324 - RNA, 12 nt, Human
uauacacugugu

SEQ ID NO: 1250325 - RNA, 13 nt, Human
uauauaucaaaua

SEQ ID NO: 1250326 - RNA, 14 nt, Human
uauauauauauaug

SEQ ID NO: 1250327 - RNA, 15 nt, Human
uauauauauauguac

SEQ ID NO: 1250328 - RNA, 16 nt, Human
uauauauagcagcuuu

SEQ ID NO: 1250329 - RNA, 15 nt, Human
uauauauauauaaag

SEQ ID NO: 1250330 - RNA, 13 nt, Human
uauauauauauau

SEQ ID NO: 1250331 - RNA, 16 nt, Human
uauauauauauaugua

SEQ ID NO: 1250332 - RNA, 21 nt, Human
uauauauuuuuuucugaaauu

SEQ ID NO: 1250333 - RNA, 22 nt, Human
uauauauuuuuuucugaaauuu

SEQ ID NO: 1250334 - RNA, 23 nt, Human
uauauauuuuuuucugaaauuuc

SEQ ID NO: 1250335 - RNA, 19 nt, Human
uauaucacauguuuucucu

SEQ ID NO: 1250336 - RNA, 13 nt, Human
uauaucacccaga

SEQ ID NO: 1250337 - RNA, 22 nt, Human
uauaucacccagacauaaagga

SEQ ID NO: 1250338 - RNA, 20 nt, Human
uauauccaaaagcuuuuuau

SEQ ID NO: 1250339 - RNA, 14 nt, Human
uauagcuaaguaca

SEQ ID NO: 1250340 - RNA, 17 nt, Human
uauagauuguccuuuug

SEQ ID NO: 1250341 - RNA, 19 nt, Human
uauaggaauugacccacaa

SEQ ID NO: 1250342 - RNA, 14 nt, Human
uauaggaauugacc

SEQ ID NO: 1250343 - RNA, 13 nt, Human
uauaggaauugac

SEQ ID NO: 1250344 - RNA, 20 nt, Human
uauagcucuaauguuugcau

SEQ ID NO: 1250345 - RNA, 16 nt, Human
uauagcucuaauguuu

SEQ ID NO: 1250346 - RNA, 14 nt, Human
uauagcucuaaugu

SEQ ID NO: 1250347 - RNA, 18 nt, Human
uauagcucuaauguuugc

SEQ ID NO: 1250348 - RNA, 11 nt, Human
uauauauaaau

SEQ ID NO: 1250349 - RNA, 12 nt, Human
uauauauaaaua

SEQ ID NO: 1250350 - RNA, 20 nt, Human
uauauauaaucaucaaguaa

SEQ ID NO: 1250351 - RNA, 16 nt, Human
uaguuuuauaugcuuc

SEQ ID NO: 1250352 - RNA, 19 nt, Human
uaguucugcuccagacagg

SEQ ID NO: 1250353 - RNA, 18 nt, Human
uaguucugcuccagacag

SEQ ID NO: 1250354 - RNA, 13 nt, Human
uaguucugccagg

SEQ ID NO: 1250355 - RNA, 16 nt, Human
uaguucuaggcacugu

SEQ ID NO: 1250356 - RNA, 14 nt, Human
uaguucugccagga

SEQ ID NO: 1250357 - RNA, 15 nt, Human
uaguucugcuccaga

SEQ ID NO: 1250358 - RNA, 17 nt, Human
uaguuccugugcacagc

SEQ ID NO: 1250359 - RNA, 21 nt, Human
uaguuccugcuaaaacaauga

SEQ ID NO: 1250360 - RNA, 13 nt, Human
uaguucuaagacu

SEQ ID NO: 1250361 - RNA, 14 nt, Human
uaguucuaagacuc

SEQ ID NO: 1250362 - RNA, 15 nt, Human
uaguucuaagacuca

SEQ ID NO: 1250363 - RNA, 13 nt, Human
uaguucuagaaaa

SEQ ID NO: 1250364 - RNA, 14 nt, Human
uaguucuagaaaaa

SEQ ID NO: 1250365 - RNA, 15 nt, Human
uaguucuagaaaaac

SEQ ID NO: 1250366 - RNA, 16 nt, Human
uaguucuagaaaaaca

SEQ ID NO: 1250367 - RNA, 22 nt, Human
uaguucuagaaaaacaggcacu

SEQ ID NO: 1250368 - RNA, 11 nt, Human
uaguucuagac

SEQ ID NO: 1250369 - RNA, 12 nt, Human
uaguucuagaca

SEQ ID NO: 1250370 - RNA, 23 nt, Human
uaguucuagacauggagguucua

SEQ ID NO: 1250371 - RNA, 15 nt, Human
uaguucuaggcacug

SEQ ID NO: 1250372 - RNA, 19 nt, Human
uaguuccccuguuuauuca

SEQ ID NO: 1250373 - RNA, 23 nt, Human
uaguuccccuguuuauucauaug

SEQ ID NO: 1250374 - RNA, 19 nt, Human
uaguuauacuuauuuguau

SEQ ID NO: 1250375 - RNA, 22 nt, Human
uaguuagcuaauaaaaagcuuu

SEQ ID NO: 1250376 - RNA, 13 nt, Human
uagugaugguucc

SEQ ID NO: 1250377 - RNA, 17 nt, Human
uaguuacuguguaauua

SEQ ID NO: 1250378 - RNA, 18 nt, Human
uaguuacuguguaauuag

SEQ ID NO: 1250379 - RNA, 19 nt, Human
uaguuacuguguaauuagu

SEQ ID NO: 1250380 - RNA, 22 nt, Human
uaguuagccaauauuuuucuua

SEQ ID NO: 1250381 - RNA, 16 nt, Human
uagugacuuguguccc

SEQ ID NO: 1250382 - RNA, 19 nt, Human
uagugaucaaauugugcag

SEQ ID NO: 1250383 - RNA, 16 nt, Human
uagucucuuuaaaagg

SEQ ID NO: 1250384 - RNA, 18 nt, Human
uagucucuuuaaaaggaa

SEQ ID NO: 1250385 - RNA, 22 nt, Human
uagugagcagucaggaaagaga

SEQ ID NO: 1250386 - RNA, 23 nt, Human
uagugacuaaaccauugugcauu

SEQ ID NO: 1250387 - RNA, 22 nt, Human
uagugacuaaaccauugugcau

SEQ ID NO: 1250388 - RNA, 13 nt, Human
uagucaugugacc

SEQ ID NO: 1250389 - RNA, 15 nt, Human
uagucauguuuaucu

SEQ ID NO: 1250390 - RNA, 11 nt, Human
uagucucaguu

SEQ ID NO: 1250391 - RNA, 19 nt, Human
uagucucaguuuguguguc

SEQ ID NO: 1250392 - RNA, 22 nt, Human
uagucucaguuugugugucuua

SEQ ID NO: 1250393 - RNA, 22 nt, Human
acaagcucacagaccuuugaac

SEQ ID NO: 1250394 - RNA, 13 nt, Human
acaagcuucugag

SEQ ID NO: 1250395 - RNA, 15 nt, Human
acaagcuucugagac

SEQ ID NO: 1250396 - RNA, 16 nt, Human
acaagcuucugagacg

SEQ ID NO: 1250397 - RNA, 21 nt, Human
acaaggaagucaaagcaagga

SEQ ID NO: 1250398 - RNA, 21 nt, Human
acaccuacuagucaccagaga

SEQ ID NO: 1250399 - RNA, 18 nt, Human
acaccguucauucaggca

SEQ ID NO: 1250400 - RNA, 13 nt, Human
acacccuguacug

SEQ ID NO: 1250401 - RNA, 22 nt, Human
acacccuguacuguucuguguc

SEQ ID NO: 1250402 - RNA, 14 nt, Human
acaccagggccagc

SEQ ID NO: 1250403 - RNA, 18 nt, Human
acaccagggccagccucu

SEQ ID NO: 1250404 - RNA, 17 nt, Human
acaccagggccagccuc

SEQ ID NO: 1250405 - RNA, 19 nt, Human
acacaugaagguaaauaaa

SEQ ID NO: 1250406 - RNA, 22 nt, Human
acaccaggauagagacuggaac

SEQ ID NO: 1250407 - RNA, 21 nt, Human
acaccaggcuugccugcaggc

SEQ ID NO: 1250408 - RNA, 12 nt, Human
uauaaaagccug

SEQ ID NO: 1250409 - RNA, 13 nt, Human
uaguuuuauucuu

SEQ ID NO: 1250410 - RNA, 22 nt, Human
uaguuuucauccauaacugaac

SEQ ID NO: 1250411 - RNA, 17 nt, Human
uauaaaagccuguuuaa

SEQ ID NO: 1250412 - RNA, 14 nt, Human
uauaaaagccuguu

SEQ ID NO: 1250413 - RNA, 21 nt, Human
uauaaaauaauuuuuauauuu

SEQ ID NO: 1250414 - RNA, 22 nt, Human
uauaaaauaauuuuuauauuug

SEQ ID NO: 1250415 - RNA, 19 nt, Human
uauaaaagccuguuuaaga

SEQ ID NO: 1250416 - RNA, 23 nt, Human
uauaaaauaauuuuuauauuuga

SEQ ID NO: 1250417 - RNA, 22 nt, Human
aauucuuuaaaauuacaacuaa

SEQ ID NO: 1250418 - RNA, 17 nt, Human
aauucuuuaaaauuaca

SEQ ID NO: 1250419 - RNA, 13 nt, Human
aauucuuucaagu

SEQ ID NO: 1250420 - RNA, 17 nt, Human
aauucuuucaauacaga

SEQ ID NO: 1250421 - RNA, 23 nt, Human
aauucuucugaacucaaacugag

SEQ ID NO: 1250422 - RNA, 13 nt, Human
aauucuuccuuug

SEQ ID NO: 1250423 - RNA, 15 nt, Human
aauucuuccuuugua

SEQ ID NO: 1250424 - RNA, 18 nt, Human
aauucuugguugaggaaa

SEQ ID NO: 1250425 - RNA, 19 nt, Human
aauucuugguugaggaaac

SEQ ID NO: 1250426 - RNA, 20 nt, Human
aauucuugguugaggaaaca

SEQ ID NO: 1250427 - RNA, 14 nt, Human
aauucuuucauuuu

SEQ ID NO: 1250428 - RNA, 18 nt, Human
aauucuuucaauacagau

SEQ ID NO: 1250429 - RNA, 19 nt, Human
aauucuuucaauacagaua

SEQ ID NO: 1250430 - RNA, 20 nt, Human
aauucuuucaauacagauau

SEQ ID NO: 1250431 - RNA, 21 nt, Human
aauucuuucaauacagauaua

SEQ ID NO: 1250432 - RNA, 22 nt, Human
aauucuuucaauacagauauau

SEQ ID NO: 1250433 - RNA, 21 nt, Human
aauugacccacaagaaaugaa

SEQ ID NO: 1250434 - RNA, 17 nt, Human
aauugaaguaaacuuuu

SEQ ID NO: 1250435 - RNA, 18 nt, Human
aauugaaguaaacuuuuu

SEQ ID NO: 1250436 - RNA, 19 nt, Human
aauugacccacaagaaaug

SEQ ID NO: 1250437 - RNA, 16 nt, Human
aauugacccacaagaa

SEQ ID NO: 1250438 - RNA, 22 nt, Human
aauugaaagugggcaaaagcuu

SEQ ID NO: 1250439 - RNA, 12 nt, Human
aauugaaaugua

SEQ ID NO: 1250440 - RNA, 13 nt, Human
aauugaaauguaa

SEQ ID NO: 1250441 - RNA, 15 nt, Human
aauugaaauguaagg

SEQ ID NO: 1250442 - RNA, 16 nt, Human
aauugaaauguaaggc

SEQ ID NO: 1250443 - RNA, 24 nt, Human
aauugaaauguaaggcuguguaag

SEQ ID NO: 1250444 - RNA, 12 nt, Human
aauugaaccuuu

SEQ ID NO: 1250445 - RNA, 13 nt, Human
aauugaaccuuug

SEQ ID NO: 1250446 - RNA, 23 nt, Human
aauugaaccuuugugcccuauca

SEQ ID NO: 1250447 - RNA, 21 nt, Human
aauugaaccuuugugcccuau

SEQ ID NO: 1250448 - RNA, 19 nt, Human
aauucuuaugccauauaau

SEQ ID NO: 1250449 - RNA, 12 nt, Human
uacccuggcccc

SEQ ID NO: 1250450 - RNA, 13 nt, Human
uacccuggccccu

SEQ ID NO: 1250451 - RNA, 14 nt, Human
uacccuggccccuc

SEQ ID NO: 1250452 - RNA, 16 nt, Human
uacccuggccccucuc

SEQ ID NO: 1250453 - RNA, 19 nt, Human
uacccuggccccucucccu

SEQ ID NO: 1250454 - RNA, 21 nt, Human
uacccuggccccucucccuug

SEQ ID NO: 1250455 - RNA, 18 nt, Human
uacccuggccgcccccug

SEQ ID NO: 1250456 - RNA, 13 nt, Human
uacccuuggaaau

SEQ ID NO: 1250457 - RNA, 22 nt, Human
uacccuuuucugaccaaagaga

SEQ ID NO: 1250458 - RNA, 17 nt, Human
uacccuuuuucuccagc

SEQ ID NO: 1250459 - RNA, 18 nt, Human
uacccuuuuucuccagcu

SEQ ID NO: 1250460 - RNA, 19 nt, Human
uacccuuuuucuccagcug

SEQ ID NO: 1250461 - RNA, 21 nt, Human
aauucuucccuaucuuugcca

SEQ ID NO: 1250462 - RNA, 13 nt, Human
aauucuucugaac

SEQ ID NO: 1250463 - RNA, 11 nt, Human
aauucuucccu

SEQ ID NO: 1250464 - RNA, 15 nt, Human
aauucuucugaacuc

SEQ ID NO: 1250465 - RNA, 18 nt, Human
aauucuucugaacucaaa

SEQ ID NO: 1250466 - RNA, 21 nt, Human
aauucuugccaaauauaaaua

SEQ ID NO: 1250467 - RNA, 13 nt, Human
uacucacacaggc

SEQ ID NO: 1250468 - RNA, 14 nt, Human
uacucacacaggca

SEQ ID NO: 1250469 - RNA, 21 nt, Human
uacucacacaggcauuuccug

SEQ ID NO: 1250470 - RNA, 20 nt, Human
uacucuuauaucuauauuuu

SEQ ID NO: 1250471 - RNA, 18 nt, Human
uacucuuauagacaacau

SEQ ID NO: 1250472 - RNA, 22 nt, Human
uacucuuauaucuauauuuuac

SEQ ID NO: 1250473 - RNA, 22 nt, Human
uacucuucaguuaagccuuugg

SEQ ID NO: 1250474 - RNA, 17 nt, Human
uacugaaguaaaacaaa

SEQ ID NO: 1250475 - RNA, 16 nt, Human
uacugaaguaaaacaa

SEQ ID NO: 1250476 - RNA, 13 nt, Human
uacugaaucugcu

SEQ ID NO: 1250477 - RNA, 19 nt, Human
uacugaaugucauugaaaa

SEQ ID NO: 1250478 - RNA, 13 nt, Human
uacugacaugugg

SEQ ID NO: 1250479 - RNA, 20 nt, Human
uacugacauguggggccagg

SEQ ID NO: 1250480 - RNA, 14 nt, Human
uacucuucuugaaa

SEQ ID NO: 1250481 - RNA, 17 nt, Human
uacucuucuugaaauuu

SEQ ID NO: 1250482 - RNA, 18 nt, Human
uacucuucuugaaauuuu

SEQ ID NO: 1250483 - RNA, 13 nt, Human
uacucuuucugua

SEQ ID NO: 1250484 - RNA, 18 nt, Human
uacugaacaucugagucc

SEQ ID NO: 1250485 - RNA, 19 nt, Human
uacugaacaucugaguccu

SEQ ID NO: 1250486 - RNA, 21 nt, Human
uacugaacaucugaguccugg

SEQ ID NO: 1250487 - RNA, 20 nt, Human
uacugaacaucugaguccug

SEQ ID NO: 1250488 - RNA, 22 nt, Human
uacuagucaccagagacuuuag

SEQ ID NO: 1250489 - RNA, 12 nt, Human
uacuauuaaaaa

SEQ ID NO: 1250490 - RNA, 22 nt, Human
uacucaagagugguaucuugca

SEQ ID NO: 1250491 - RNA, 23 nt, Human
uacucaagagugguaucuugcag

SEQ ID NO: 1250492 - RNA, 11 nt, Human
uacuauuuaaa

SEQ ID NO: 1250493 - RNA, 12 nt, Human
uacuauuuaaag

SEQ ID NO: 1250494 - RNA, 18 nt, Human
uacucaaaugaguaacau

SEQ ID NO: 1250495 - RNA, 23 nt, Human
uacucaaaugaguaacauuugcu

SEQ ID NO: 1250496 - RNA, 17 nt, Human
uacuauaagaacuuuga

SEQ ID NO: 1250497 - RNA, 19 nt, Human
uacuauguggaugugacag

SEQ ID NO: 1250498 - RNA, 15 nt, Human
uacuauuguuacauu

SEQ ID NO: 1250499 - RNA, 21 nt, Human
uacuagucaccagagacuuua

SEQ ID NO: 1250500 - RNA, 20 nt, Human
uacuagucaccagagacuuu

SEQ ID NO: 1250501 - RNA, 18 nt, Human
uacgugcucugugggucu

SEQ ID NO: 1250502 - RNA, 22 nt, Human
uacguaugucugguucucaauu

SEQ ID NO: 1250503 - RNA, 14 nt, Human
uacguuaccaggca

SEQ ID NO: 1250504 - RNA, 18 nt, Human
uacguaugucugguucuc

SEQ ID NO: 1250505 - RNA, 21 nt, Human
uacguaugucugguucucaau

SEQ ID NO: 1250506 - RNA, 16 nt, Human
uacguauuuaauagca

SEQ ID NO: 1250507 - RNA, 19 nt, Human
uacgugggcauugucuuuu

SEQ ID NO: 1250508 - RNA, 21 nt, Human
uacguagccuaaggcuccugu

SEQ ID NO: 1250509 - RNA, 12 nt, Human
uacguaugucug

SEQ ID NO: 1250510 - RNA, 14 nt, Human
uacguaugucuggu

SEQ ID NO: 1250511 - RNA, 16 nt, Human
aauuugacuuuucugu

SEQ ID NO: 1250512 - RNA, 17 nt, Human
aauuugacuuuucugua

SEQ ID NO: 1250513 - RNA, 18 nt, Human
aauuugacuuuucuguaa

SEQ ID NO: 1250514 - RNA, 18 nt, Human
aauuugagagaaauauga

SEQ ID NO: 1250515 - RNA, 20 nt, Human
aauuugagagaaauaugaag

SEQ ID NO: 1250516 - RNA, 13 nt, Human
aauuugaggacaa

SEQ ID NO: 1250517 - RNA, 20 nt, Human
aauuugaaacacuuugcaua

SEQ ID NO: 1250518 - RNA, 21 nt, Human
aauuucuguguugccaagcuc

SEQ ID NO: 1250519 - RNA, 12 nt, Human
aauuucuuaacu

SEQ ID NO: 1250520 - RNA, 14 nt, Human
uacuucaaauccuu

SEQ ID NO: 1250521 - RNA, 19 nt, Human
uacuucaaauccuugaaga

SEQ ID NO: 1250522 - RNA, 19 nt, Human
aauuugauaugugaacagu

SEQ ID NO: 1250523 - RNA, 12 nt, Human
aauuugaugugg

SEQ ID NO: 1250524 - RNA, 22 nt, Human
aauuugauguggugaaaagcag

SEQ ID NO: 1250525 - RNA, 15 nt, Human
aauuugauaugugaa

SEQ ID NO: 1250526 - RNA, 16 nt, Human
aauuugauaugugaac

SEQ ID NO: 1250527 - RNA, 18 nt, Human
aauuugauaugugaacag

SEQ ID NO: 1250528 - RNA, 14 nt, Human
aauuugaggacaac

SEQ ID NO: 1250529 - RNA, 19 nt, Human
aauuugacuuuucuguaau

SEQ ID NO: 1250530 - RNA, 13 nt, Human
aauuugagugcuc

SEQ ID NO: 1250531 - RNA, 18 nt, Human
aauuuaccuaagauuaca

SEQ ID NO: 1250532 - RNA, 21 nt, Human
aauuuaccuaagauuacaaau

SEQ ID NO: 1250533 - RNA, 13 nt, Human
aauuuaccuaaga

SEQ ID NO: 1250534 - RNA, 14 nt, Human
aauuuaccuaagau

SEQ ID NO: 1250535 - RNA, 16 nt, Human
aauuuaccuaagauua

SEQ ID NO: 1250536 - RNA, 17 nt, Human
aauuuaccuaagauuac

SEQ ID NO: 1250537 - RNA, 16 nt, Human
aauuuagaaaacuuua

SEQ ID NO: 1250538 - RNA, 15 nt, Human
aauuuagaaaacuuu

SEQ ID NO: 1250539 - RNA, 14 nt, Human
aauuuagaaaucau

SEQ ID NO: 1250540 - RNA, 15 nt, Human
aauuuagaaaucauu

SEQ ID NO: 1250541 - RNA, 17 nt, Human
aauuuagaaaucauuuu

SEQ ID NO: 1250542 - RNA, 20 nt, Human
aauuuagaaaucauuuugca

SEQ ID NO: 1250543 - RNA, 21 nt, Human
aauuuagaaaucauuuugcaa

SEQ ID NO: 1250544 - RNA, 17 nt, Human
aauuuagacuucaagca

SEQ ID NO: 1250545 - RNA, 16 nt, Human
aauuuagacuuggauu

SEQ ID NO: 1250546 - RNA, 20 nt, Human
aauuuagacuuggauucuuu

SEQ ID NO: 1250547 - RNA, 13 nt, Human
aauuuagcauugu

SEQ ID NO: 1250548 - RNA, 14 nt, Human
aauuuagcauugua

SEQ ID NO: 1250549 - RNA, 16 nt, Human
aauuuagcauuguagu

SEQ ID NO: 1250550 - RNA, 20 nt, Human
aauuuaguaaaccaauccua

SEQ ID NO: 1250551 - RNA, 18 nt, Human
aauuuauccugaaauuuc

SEQ ID NO: 1250552 - RNA, 19 nt, Human
aauuuauccugaaauuuca

SEQ ID NO: 1250553 - RNA, 23 nt, Human
aauuuauccugaaauuucagauu

SEQ ID NO: 1250554 - RNA, 15 nt, Human
aauuuaguaaaccaa

SEQ ID NO: 1250555 - RNA, 21 nt, Human
aauuuaugaauugaauuaucu

SEQ ID NO: 1250556 - RNA, 23 nt, Human
aauuuaugaauugaauuaucuug

SEQ ID NO: 1250557 - RNA, 16 nt, Human
aauuucuaccauuuca

SEQ ID NO: 1250558 - RNA, 18 nt, Human
aauuucuaccauuucaga

SEQ ID NO: 1250559 - RNA, 15 nt, Human
aauuucuacuuugaa

SEQ ID NO: 1250560 - RNA, 16 nt, Human
aauuucuacuuugaag

SEQ ID NO: 1250561 - RNA, 17 nt, Human
aauuucuacuuugaagu

SEQ ID NO: 1250562 - RNA, 15 nt, Human
aauuuaaauagcuuu

SEQ ID NO: 1250563 - RNA, 22 nt, Human
aauuuaaaguuguuugugccuu

SEQ ID NO: 1250564 - RNA, 16 nt, Human
aauuuaaauagcuuuu

SEQ ID NO: 1250565 - RNA, 15 nt, Human
aauuuaauauuuacu

SEQ ID NO: 1250566 - RNA, 16 nt, Human
aauuuacaucauuucu

SEQ ID NO: 1250567 - RNA, 16 nt, Human
aauuuacaaaaauaua

SEQ ID NO: 1250568 - RNA, 18 nt, Human
aauuuacaaaaauauaaa

SEQ ID NO: 1250569 - RNA, 21 nt, Human
aauuuacaaaaauauaaaaua

SEQ ID NO: 1250570 - RNA, 19 nt, Human
aauuguuuuaucugaauuu

SEQ ID NO: 1250571 - RNA, 22 nt, Human
aauuguuuuaucugaauuuuua

SEQ ID NO: 1250572 - RNA, 19 nt, Human
aauuuaaaauaauuauaua

SEQ ID NO: 1250573 - RNA, 9 nt, Human
aauuuaaac

SEQ ID NO: 1250574 - RNA, 10 nt, Human
aauuuaaaca

SEQ ID NO: 1250575 - RNA, 15 nt, Human
aauuuaaacaccucc

SEQ ID NO: 1250576 - RNA, 19 nt, Human
aauuuaaacaccuccucau

SEQ ID NO: 1250577 - RNA, 22 nt, Human
aauuuaaacuauaagcaagaag

SEQ ID NO: 1250578 - RNA, 11 nt, Human
aauuuaaagca

SEQ ID NO: 1250579 - RNA, 12 nt, Human
aauuuaaagcag

SEQ ID NO: 1250580 - RNA, 19 nt, Human
aauuuaaagcagguucuug

SEQ ID NO: 1250581 - RNA, 22 nt, Human
aauuuaaagcagguucuuguug

SEQ ID NO: 1250582 - RNA, 20 nt, Human
aauuuaaagcagguucuugu

SEQ ID NO: 1250583 - RNA, 23 nt, Human
aauugugugaaagguacuucaaa

SEQ ID NO: 1250584 - RNA, 17 nt, Human
aauugcugacuguagcu

SEQ ID NO: 1250585 - RNA, 18 nt, Human
aauugcugacuguagcuu

SEQ ID NO: 1250586 - RNA, 19 nt, Human
aauugcugacuguagcuuu

SEQ ID NO: 1250587 - RNA, 13 nt, Human
aauugcugcuacu

SEQ ID NO: 1250588 - RNA, 13 nt, Human
uacuguaagaaaa

SEQ ID NO: 1250589 - RNA, 12 nt, Human
aauugcuccuug

SEQ ID NO: 1250590 - RNA, 16 nt, Human
uacuguaacauucagg

SEQ ID NO: 1250591 - RNA, 23 nt, Human
aauugcuauguuuugacauuuuu

SEQ ID NO: 1250592 - RNA, 20 nt, Human
aauuguguuuauaauuuuaa

SEQ ID NO: 1250593 - RNA, 22 nt, Human
aauuguguuuacauuuuauggu

SEQ ID NO: 1250594 - RNA, 21 nt, Human
aauuguguuuacauuuuaugg

SEQ ID NO: 1250595 - RNA, 20 nt, Human
aauuguguuuacauuuuaug

SEQ ID NO: 1250596 - RNA, 19 nt, Human
aauuguguuuacauuuuau

SEQ ID NO: 1250597 - RNA, 14 nt, Human
aauuguguuuacau

SEQ ID NO: 1250598 - RNA, 15 nt, Human
aauuguguggauucu

SEQ ID NO: 1250599 - RNA, 19 nt, Human
aauuguguggauucuuuaa

SEQ ID NO: 1250600 - RNA, 23 nt, Human
aauugugugugaugugaagccaa

SEQ ID NO: 1250601 - RNA, 12 nt, Human
aauuguuguucu

SEQ ID NO: 1250602 - RNA, 13 nt, Human
aauuguuguucug

SEQ ID NO: 1250603 - RNA, 14 nt, Human
aauuguuguucugu

SEQ ID NO: 1250604 - RNA, 15 nt, Human
aauuguuguucuguu

SEQ ID NO: 1250605 - RNA, 16 nt, Human
aauuguuguucuguua

SEQ ID NO: 1250606 - RNA, 17 nt, Human
aauuguuguucuguuaa

SEQ ID NO: 1250607 - RNA, 23 nt, Human
aauuguuguucuguuaacugaau

SEQ ID NO: 1250608 - RNA, 22 nt, Human
aauuguuguucuguuaacugaa

SEQ ID NO: 1250609 - RNA, 22 nt, Human
uagaagagagagguugaaaaac

SEQ ID NO: 1250610 - RNA, 14 nt, Human
uagaagagagaggu

SEQ ID NO: 1250611 - RNA, 19 nt, Human
uagaacucugaaaugaaga

SEQ ID NO: 1250612 - RNA, 21 nt, Human
uagaacucaaccucuacaggg

SEQ ID NO: 1250613 - RNA, 22 nt, Human
uagaacuuggauguaccugccc

SEQ ID NO: 1250614 - RNA, 21 nt, Human
uacuucaaauccuugaagauu

SEQ ID NO: 1250615 - RNA, 17 nt, Human
uacuucaaaaguuuguu

SEQ ID NO: 1250616 - RNA, 22 nt, Human
uacuucaaaaguuuguuugcuu

SEQ ID NO: 1250617 - RNA, 16 nt, Human
uacuucaugcugucua

SEQ ID NO: 1250618 - RNA, 14 nt, Human
uagaacuagccaaa

SEQ ID NO: 1250619 - RNA, 15 nt, Human
uagaacucccuuuca

SEQ ID NO: 1250620 - RNA, 23 nt, Human
uagaacucaaccucuacaggguu

SEQ ID NO: 1250621 - RNA, 23 nt, Human
uagaagucacauuccugaacagg

SEQ ID NO: 1250622 - RNA, 22 nt, Human
uagaagccccguuauaacuccu

SEQ ID NO: 1250623 - RNA, 12 nt, Human
uagaagccugca

SEQ ID NO: 1250624 - RNA, 17 nt, Human
uagaauugaguguuuaa

SEQ ID NO: 1250625 - RNA, 20 nt, Human
uagaauugaguguuuaaagu

SEQ ID NO: 1250626 - RNA, 19 nt, Human
uagaauuugauaugugaac

SEQ ID NO: 1250627 - RNA, 17 nt, Human
uagacaaauagaaaaug

SEQ ID NO: 1250628 - RNA, 20 nt, Human
uagacaaauagaaaaugguc

SEQ ID NO: 1250629 - RNA, 19 nt, Human
uagacaaauagaaaauggu

SEQ ID NO: 1250630 - RNA, 13 nt, Human
uagacaagccaga

SEQ ID NO: 1250631 - RNA, 19 nt, Human
uagaauugaguguuuaaag

SEQ ID NO: 1250632 - RNA, 13 nt, Human
uagaauugcauug

SEQ ID NO: 1250633 - RNA, 14 nt, Human
uagaauugcauuga

SEQ ID NO: 1250634 - RNA, 15 nt, Human
uagaauugcauugac

SEQ ID NO: 1250635 - RNA, 18 nt, Human
uagacaauugagguaagu

SEQ ID NO: 1250636 - RNA, 14 nt, Human
uagacagcaugaga

SEQ ID NO: 1250637 - RNA, 15 nt, Human
uagacaauugaggua

SEQ ID NO: 1250638 - RNA, 22 nt, Human
uagacaaguccagccuggcaag

SEQ ID NO: 1250639 - RNA, 14 nt, Human
uagacaagccagaa

SEQ ID NO: 1250640 - RNA, 15 nt, Human
uagacaagccagaac

SEQ ID NO: 1250641 - RNA, 19 nt, Human
uagacaagccagaacuuga

SEQ ID NO: 1250642 - RNA, 19 nt, Human
aauuuuuauauuugaaaua

SEQ ID NO: 1250643 - RNA, 17 nt, Human
aauuuuaaacaaagguu

SEQ ID NO: 1250644 - RNA, 14 nt, Human
aauuuuaaacaaag

SEQ ID NO: 1250645 - RNA, 19 nt, Human
aauuuuaaccuaugauauu

SEQ ID NO: 1250646 - RNA, 15 nt, Human
aauuuuuauuucuuc

SEQ ID NO: 1250647 - RNA, 22 nt, Human
aauuuuuauuuuugcugagacu

SEQ ID NO: 1250648 - RNA, 17 nt, Human
aauuuguaaugucuuga

SEQ ID NO: 1250649 - RNA, 18 nt, Human
aauuuguaaugucuugag

SEQ ID NO: 1250650 - RNA, 20 nt, Human
aauuuguaaugucuugagcu

SEQ ID NO: 1250651 - RNA, 17 nt, Human
aauuuguaggguuucua

SEQ ID NO: 1250652 - RNA, 19 nt, Human
aauuuguacuauuuaacug

SEQ ID NO: 1250653 - RNA, 17 nt, Human
aauuuguuuuggauaua

SEQ ID NO: 1250654 - RNA, 19 nt, Human
aauuuuuucucuaggaaau

SEQ ID NO: 1250655 - RNA, 21 nt, Human
aauuuuuuaagugaaaauaua

SEQ ID NO: 1250656 - RNA, 18 nt, Human
aauuuuuuaucaugcaug

SEQ ID NO: 1250657 - RNA, 20 nt, Human
aauuuuuuaucaugcauguc

SEQ ID NO: 1250658 - RNA, 13 nt, Human
aauuuuuuucacc

SEQ ID NO: 1250659 - RNA, 22 nt, Human
aauuuuuucucuaggaaauauu

SEQ ID NO: 1250660 - RNA, 17 nt, Human
aauuuuuuauaaaagug

SEQ ID NO: 1250661 - RNA, 14 nt, Human
aauuuuuguauuuu

SEQ ID NO: 1250662 - RNA, 15 nt, Human
aauuuuuuaaaaagc

SEQ ID NO: 1250663 - RNA, 14 nt, Human
aauuuuuccaacua

SEQ ID NO: 1250664 - RNA, 20 nt, Human
aauuuuuccaacuacuaaua

SEQ ID NO: 1250665 - RNA, 19 nt, Human
acaaaaaaaaaauuugcca

SEQ ID NO: 1250666 - RNA, 20 nt, Human
aauuuuuuucaccuagauuu

SEQ ID NO: 1250667 - RNA, 20 nt, Human
aauuuuuuuccuuaccuuuu

SEQ ID NO: 1250668 - RNA, 14 nt, Human
acaaaaaaaucuuc

SEQ ID NO: 1250669 - RNA, 13 nt, Human
acaaaaacaggua

SEQ ID NO: 1250670 - RNA, 20 nt, Human
acaaaaacagguauauacuu

SEQ ID NO: 1250671 - RNA, 19 nt, Human
acaaaaaaaucuuccaauu

SEQ ID NO: 1250672 - RNA, 14 nt, Human
acaaaaaaaaauuu

SEQ ID NO: 1250673 - RNA, 19 nt, Human
uagcauuuguguugaagag

SEQ ID NO: 1250674 - RNA, 21 nt, Human
uagcauuguagugcuuugaga

SEQ ID NO: 1250675 - RNA, 18 nt, Human
uagcauuguaaaagcauu

SEQ ID NO: 1250676 - RNA, 19 nt, Human
uagcauuguaaaagcauuu

SEQ ID NO: 1250677 - RNA, 24 nt, Human
uagcauuguaaaauuauuucauga

SEQ ID NO: 1250678 - RNA, 18 nt, Human
acaaauguuaaaaugugu

SEQ ID NO: 1250679 - RNA, 20 nt, Human
acaaauguuaaaauguguug

SEQ ID NO: 1250680 - RNA, 19 nt, Human
acaaauguuaaaauguguu

SEQ ID NO: 1250681 - RNA, 15 nt, Human
acaaauuaguuauau

SEQ ID NO: 1250682 - RNA, 15 nt, Human
acaaauuaucuuaaa

SEQ ID NO: 1250683 - RNA, 17 nt, Human
acaaauuauuaaugaaa

SEQ ID NO: 1250684 - RNA, 18 nt, Human
acaaauucugucucugga

SEQ ID NO: 1250685 - RNA, 15 nt, Human
acaacaaccugguca

SEQ ID NO: 1250686 - RNA, 14 nt, Human
acaacaauccuucu

SEQ ID NO: 1250687 - RNA, 13 nt, Human
acaacacccauuu

SEQ ID NO: 1250688 - RNA, 14 nt, Human
acaagaagaagggc

SEQ ID NO: 1250689 - RNA, 15 nt, Human
acaagaagcauuuug

SEQ ID NO: 1250690 - RNA, 17 nt, Human
acaagaagcauuuugua

SEQ ID NO: 1250691 - RNA, 18 nt, Human
acaagaagcauuuuguaa

SEQ ID NO: 1250692 - RNA, 20 nt, Human
acaagaagccacagaccuag

SEQ ID NO: 1250693 - RNA, 22 nt, Human
acaagaauacuacuuaugaaau

SEQ ID NO: 1250694 - RNA, 13 nt, Human
acaagaauggauc

SEQ ID NO: 1250695 - RNA, 14 nt, Human
acaagaauggauca

SEQ ID NO: 1250696 - RNA, 18 nt, Human
acaagcacuaaacaaaga

SEQ ID NO: 1250697 - RNA, 21 nt, Human
acaagcauucugucuugaagg

SEQ ID NO: 1250698 - RNA, 19 nt, Human
acaagagaagcauucucau

SEQ ID NO: 1250699 - RNA, 23 nt, Human
acaagaauggaucacaagaugga

SEQ ID NO: 1250700 - RNA, 15 nt, Human
acaagagcacuacau

SEQ ID NO: 1250701 - RNA, 21 nt, Human
acaagagcacuacauucauuu

SEQ ID NO: 1250702 - RNA, 23 nt, Human
acaagcauggucccacaucccug

SEQ ID NO: 1250703 - RNA, 22 nt, Human
acaagccagaacuugacccuga

SEQ ID NO: 1250704 - RNA, 14 nt, Human
acaagccagaacuu

SEQ ID NO: 1250705 - RNA, 14 nt, Human
acaagcuaaaauua

SEQ ID NO: 1250706 - RNA, 21 nt, Human
uagcaugucgucaaagcugaa

SEQ ID NO: 1250707 - RNA, 16 nt, Human
uagcaccagggaaggg

SEQ ID NO: 1250708 - RNA, 13 nt, Human
uagcaccagggaa

SEQ ID NO: 1250709 - RNA, 14 nt, Human
uagcaccagggaag

SEQ ID NO: 1250710 - RNA, 17 nt, Human
uagcacagauggccagc

SEQ ID NO: 1250711 - RNA, 20 nt, Human
uagaugcaguucugaagaag

SEQ ID NO: 1250712 - RNA, 21 nt, Human
uagauuuuacaugaaguauuu

SEQ ID NO: 1250713 - RNA, 22 nt, Human
uagauuuuacaugaaguauuuu

SEQ ID NO: 1250714 - RNA, 12 nt, Human
uagauuuuccaa

SEQ ID NO: 1250715 - RNA, 13 nt, Human
uagauuuuccaaa

SEQ ID NO: 1250716 - RNA, 13 nt, Human
uagauuuucugcu

SEQ ID NO: 1250717 - RNA, 14 nt, Human
uagauuuucugguu

SEQ ID NO: 1250718 - RNA, 17 nt, Human
uagauuuucugguucua

SEQ ID NO: 1250719 - RNA, 19 nt, Human
uagauuuucugguucuaac

SEQ ID NO: 1250720 - RNA, 21 nt, Human
uagauuuucugguucuaacau

SEQ ID NO: 1250721 - RNA, 22 nt, Human
uagauuuucugguucuaacauu

SEQ ID NO: 1250722 - RNA, 15 nt, Human
uagaggaagcagcca

SEQ ID NO: 1250723 - RNA, 19 nt, Human
uagaggagaaacuggaacu

SEQ ID NO: 1250724 - RNA, 14 nt, Human
uagaucagaugcuc

SEQ ID NO: 1250725 - RNA, 17 nt, Human
uagaugcaguucugaag

SEQ ID NO: 1250726 - RNA, 19 nt, Human
uagaugcaguucugaagaa

SEQ ID NO: 1250727 - RNA, 18 nt, Human
uagaucagaugcuccaag

SEQ ID NO: 1250728 - RNA, 19 nt, Human
uagaucagaugcuccaaga

SEQ ID NO: 1250729 - RNA, 20 nt, Human
uagaucagaugcuccaagau

SEQ ID NO: 1250730 - RNA, 23 nt, Human
uagaucagaugcuccaagauucu

SEQ ID NO: 1250731 - RNA, 14 nt, Human
uagaucauaaggcu

SEQ ID NO: 1250732 - RNA, 15 nt, Human
uagaucauaaggcuu

SEQ ID NO: 1250733 - RNA, 21 nt, Human
uagaucauaaggcuucaaaau

SEQ ID NO: 1250734 - RNA, 18 nt, Human
acaaaaagaaaagaaaau

SEQ ID NO: 1250735 - RNA, 14 nt, Human
acaaaaagaaaaga

SEQ ID NO: 1250736 - RNA, 22 nt, Human
acaaaaacagguauauacuuug

SEQ ID NO: 1250737 - RNA, 14 nt, Human
uagagcacugccac

SEQ ID NO: 1250738 - RNA, 17 nt, Human
uagagcacugccaccag

SEQ ID NO: 1250739 - RNA, 16 nt, Human
uagagcacugccacca

SEQ ID NO: 1250740 - RNA, 17 nt, Human
uagagcagacuacagcu

SEQ ID NO: 1250741 - RNA, 16 nt, Human
uagagcagacuacagc

SEQ ID NO: 1250742 - RNA, 16 nt, Human
uagagcaggacugaug

SEQ ID NO: 1250743 - RNA, 17 nt, Human
uagagcaggacugaugu

SEQ ID NO: 1250744 - RNA, 23 nt, Human
uagagcaggacugaugucuccua

SEQ ID NO: 1250745 - RNA, 15 nt, Human
uagagcuucuggcac

SEQ ID NO: 1250746 - RNA, 20 nt, Human
uagagcuguauuaagccacu

SEQ ID NO: 1250747 - RNA, 23 nt, Human
uagagcagggauuaaccucugca

SEQ ID NO: 1250748 - RNA, 14 nt, Human
uagagcuccucccu

SEQ ID NO: 1250749 - RNA, 23 nt, Human
uaccccaccucccucaaccucau

SEQ ID NO: 1250750 - RNA, 21 nt, Human
uaccccagacuagauguagua

SEQ ID NO: 1250751 - RNA, 22 nt, Human
uaccccagacuagauguaguau

SEQ ID NO: 1250752 - RNA, 18 nt, Human
uaccccaauuucggauuu

SEQ ID NO: 1250753 - RNA, 20 nt, Human
uaccccauggagcugggcua

SEQ ID NO: 1250754 - RNA, 16 nt, Human
uacccccagcugugcu

SEQ ID NO: 1250755 - RNA, 15 nt, Human
uaccccccucugucu

SEQ ID NO: 1250756 - RNA, 14 nt, Human
uaccaguugccuuu

SEQ ID NO: 1250757 - RNA, 16 nt, Human
uaccaguugccuuuua

SEQ ID NO: 1250758 - RNA, 16 nt, Human
uaccauauacagcuca

SEQ ID NO: 1250759 - RNA, 19 nt, Human
uaccaguugccuuuuaucc

SEQ ID NO: 1250760 - RNA, 20 nt, Human
uaccaucacugaguuuucca

SEQ ID NO: 1250761 - RNA, 17 nt, Human
uaccaucacugaguuuu

SEQ ID NO: 1250762 - RNA, 17 nt, Human
uaccacugcugauauuu

SEQ ID NO: 1250763 - RNA, 20 nt, Human
uaccacugcugauauuuucu

SEQ ID NO: 1250764 - RNA, 19 nt, Human
uaccagagaaaaagggagg

SEQ ID NO: 1250765 - RNA, 22 nt, Human
uaccacugcugauauuuucucu

SEQ ID NO: 1250766 - RNA, 21 nt, Human
uaccacugcugauauuuucuc

SEQ ID NO: 1250767 - RNA, 13 nt, Human
uaccagaaagcag

SEQ ID NO: 1250768 - RNA, 15 nt, Human
uacauuuaaaacauu

SEQ ID NO: 1250769 - RNA, 16 nt, Human
uacauuuaaaacauua

SEQ ID NO: 1250770 - RNA, 19 nt, Human
uacauuuaaaacauuaaaa

SEQ ID NO: 1250771 - RNA, 20 nt, Human
uacauuuaaaacauuaaaau

SEQ ID NO: 1250772 - RNA, 11 nt, Human
uacauuuaaua

SEQ ID NO: 1250773 - RNA, 15 nt, Human
uacauuuacaaacug

SEQ ID NO: 1250774 - RNA, 16 nt, Human
uacauuuacaaacuga

SEQ ID NO: 1250775 - RNA, 17 nt, Human
uacauuuacaaacugaa

SEQ ID NO: 1250776 - RNA, 18 nt, Human
uacauuuacaaacugaag

SEQ ID NO: 1250777 - RNA, 20 nt, Human
uacauuuauaguuguaacua

SEQ ID NO: 1250778 - RNA, 19 nt, Human
uaccccuuacaaaugaaaa

SEQ ID NO: 1250779 - RNA, 17 nt, Human
uaccccgcagacaccuu

SEQ ID NO: 1250780 - RNA, 12 nt, Human
uacccuccuggc

SEQ ID NO: 1250781 - RNA, 15 nt, Human
uacccuccuggcucu

SEQ ID NO: 1250782 - RNA, 22 nt, Human
uacccucuucauggauggggga

SEQ ID NO: 1250783 - RNA, 17 nt, Human
uacccucugaaauacau

SEQ ID NO: 1250784 - RNA, 13 nt, Human
uacccugaccugg

SEQ ID NO: 1250785 - RNA, 14 nt, Human
uacccugaccuggc

SEQ ID NO: 1250786 - RNA, 20 nt, Human
uacccugaccuggcccccuc

SEQ ID NO: 1250787 - RNA, 22 nt, Human
uacccugaccuggcccccucag

SEQ ID NO: 1250788 - RNA, 16 nt, Human
uacccugagcugaggc

SEQ ID NO: 1250789 - RNA, 17 nt, Human
uacccugagcugaggca

SEQ ID NO: 1250790 - RNA, 18 nt, Human
uacccugagcugaggcag

SEQ ID NO: 1250791 - RNA, 18 nt, Human
uacccuccuuuuuuuccc

SEQ ID NO: 1250792 - RNA, 13 nt, Human
uacccucucagcu

SEQ ID NO: 1250793 - RNA, 15 nt, Human
uacccucucagcucc

SEQ ID NO: 1250794 - RNA, 16 nt, Human
uacccucucagcucca

SEQ ID NO: 1250795 - RNA, 17 nt, Human
uacccucucagcuccag

SEQ ID NO: 1250796 - RNA, 20 nt, Human
uacccucucagcuccaggug

SEQ ID NO: 1250797 - RNA, 21 nt, Human
uacccucucagcuccaggugg

SEQ ID NO: 1250798 - RNA, 13 nt, Human
uacccucugaaau

SEQ ID NO: 1250799 - RNA, 14 nt, Human
uacccucugaaaua

SEQ ID NO: 1250800 - RNA, 15 nt, Human
uacccucugaaauac

SEQ ID NO: 1250801 - RNA, 16 nt, Human
uacccucugaaauaca

SEQ ID NO: 1250802 - RNA, 12 nt, Human
uacccucuggag

SEQ ID NO: 1250803 - RNA, 14 nt, Human
uacccucuggaggg

SEQ ID NO: 1250804 - RNA, 22 nt, Human
uacccucuggagggguguggcu

SEQ ID NO: 1250805 - RNA, 18 nt, Human
aauguugacaugggacau

SEQ ID NO: 1250806 - RNA, 14 nt, Human
aauguugaauuuug

SEQ ID NO: 1250807 - RNA, 18 nt, Human
aauguugagaaucccaaa

SEQ ID NO: 1250808 - RNA, 19 nt, Human
aauguugauuacagugcag

SEQ ID NO: 1250809 - RNA, 13 nt, Human
aauguugcugaaa

SEQ ID NO: 1250810 - RNA, 14 nt, Human
aauguugcugaaaa

SEQ ID NO: 1250811 - RNA, 13 nt, Human
aaugugaagccuu

SEQ ID NO: 1250812 - RNA, 14 nt, Human
aaugugaagccuuc

SEQ ID NO: 1250813 - RNA, 15 nt, Human
aaugugaagccuucc

SEQ ID NO: 1250814 - RNA, 19 nt, Human
aauuaacaugaauauuuag

SEQ ID NO: 1250815 - RNA, 17 nt, Human
aauguugcugaaaaaug

SEQ ID NO: 1250816 - RNA, 20 nt, Human
aauuaagaaaggauaaaguu

SEQ ID NO: 1250817 - RNA, 15 nt, Human
uacauuguauauaug

SEQ ID NO: 1250818 - RNA, 23 nt, Human
uacauugugggauguucagcacu

SEQ ID NO: 1250819 - RNA, 21 nt, Human
uacauuguuaccucuauauac

SEQ ID NO: 1250820 - RNA, 17 nt, Human
uacauuguuaccucuau

SEQ ID NO: 1250821 - RNA, 13 nt, Human
uacauuguugagc

SEQ ID NO: 1250822 - RNA, 23 nt, Human
uacauuguugagcuauugcuguu

SEQ ID NO: 1250823 - RNA, 19 nt, Human
uacauuagcaguuugcuuu

SEQ ID NO: 1250824 - RNA, 20 nt, Human
uacauuagcaguuugcuuug

SEQ ID NO: 1250825 - RNA, 14 nt, Human
uacauuaaacauga

SEQ ID NO: 1250826 - RNA, 15 nt, Human
uacauuaauuaucua

SEQ ID NO: 1250827 - RNA, 20 nt, Human
uacauuaaacaugacuccau

SEQ ID NO: 1250828 - RNA, 12 nt, Human
uacauuaaacau

SEQ ID NO: 1250829 - RNA, 22 nt, Human
uacauguuugcaccuuucuagu

SEQ ID NO: 1250830 - RNA, 12 nt, Human
uacauguuugca

SEQ ID NO: 1250831 - RNA, 13 nt, Human
uacauguuugcac

SEQ ID NO: 1250832 - RNA, 15 nt, Human
uacauguauugcaca

SEQ ID NO: 1250833 - RNA, 19 nt, Human
uacauguauugcacauugu

SEQ ID NO: 1250834 - RNA, 17 nt, Human
uacauguacugauuacu

SEQ ID NO: 1250835 - RNA, 23 nt, Human
uacauggcuggagcuagaauuug

SEQ ID NO: 1250836 - RNA, 14 nt, Human
uacauggugcuggg

SEQ ID NO: 1250837 - RNA, 17 nt, Human
uacauggugcugggaga

SEQ ID NO: 1250838 - RNA, 23 nt, Human
uacauggugcugggagaggcagc

SEQ ID NO: 1250839 - RNA, 15 nt, Human
uacaugguguuugug

SEQ ID NO: 1250840 - RNA, 16 nt, Human
aauuaaggcauaagaa

SEQ ID NO: 1250841 - RNA, 18 nt, Human
aauuaagggccgauuuaa

SEQ ID NO: 1250842 - RNA, 20 nt, Human
uacaguggggaaugaagaua

SEQ ID NO: 1250843 - RNA, 15 nt, Human
uacauaaguuuagga

SEQ ID NO: 1250844 - RNA, 15 nt, Human
uacagucucgucucu

SEQ ID NO: 1250845 - RNA, 18 nt, Human
uacagucuuccauuugca

SEQ ID NO: 1250846 - RNA, 19 nt, Human
uacagucuuccauuugcaa

SEQ ID NO: 1250847 - RNA, 20 nt, Human
uacagucuuccauuugcaag

SEQ ID NO: 1250848 - RNA, 22 nt, Human
uacagucuuccauuugcaaggg

SEQ ID NO: 1250849 - RNA, 19 nt, Human
uacagucuucuuacuugga

SEQ ID NO: 1250850 - RNA, 14 nt, Human
uacagcaaauccuu

SEQ ID NO: 1250851 - RNA, 20 nt, Human
uacaguauggggguuguaaa

SEQ ID NO: 1250852 - RNA, 21 nt, Human
uacaguauggggguuguaaau

SEQ ID NO: 1250853 - RNA, 22 nt, Human
uacaguauggggguuguaaauu

SEQ ID NO: 1250854 - RNA, 14 nt, Human
uacagucuaaagcu

SEQ ID NO: 1250855 - RNA, 15 nt, Human
uacagucuaaagcug

SEQ ID NO: 1250856 - RNA, 17 nt, Human
uacagucucgucucuuu

SEQ ID NO: 1250857 - RNA, 22 nt, Human
uacagcaacaauuuaugaauug

SEQ ID NO: 1250858 - RNA, 19 nt, Human
uacagcaacaauuuaugaa

SEQ ID NO: 1250859 - RNA, 20 nt, Human
uacagcaacaauuuaugaau

SEQ ID NO: 1250860 - RNA, 19 nt, Human
aauguaugcauguugucua

SEQ ID NO: 1250861 - RNA, 13 nt, Human
aauguaugcaugu

SEQ ID NO: 1250862 - RNA, 16 nt, Human
aauguaucauagaaau

SEQ ID NO: 1250863 - RNA, 18 nt, Human
aauguaucauagaaaugu

SEQ ID NO: 1250864 - RNA, 19 nt, Human
aauguaucauagaaaugua

SEQ ID NO: 1250865 - RNA, 22 nt, Human
aauguaucauagaaauguaacu

SEQ ID NO: 1250866 - RNA, 21 nt, Human
aauguagaguuuuuaaacauc

SEQ ID NO: 1250867 - RNA, 14 nt, Human
aauguagauaagug

SEQ ID NO: 1250868 - RNA, 15 nt, Human
aauguagauaagugu

SEQ ID NO: 1250869 - RNA, 16 nt, Human
aauguagauaaguguu

SEQ ID NO: 1250870 - RNA, 18 nt, Human
aauguagauaaguguucu

SEQ ID NO: 1250871 - RNA, 22 nt, Human
aauguaggagacuguuuggaaa

SEQ ID NO: 1250872 - RNA, 16 nt, Human
aauguaggcuuaguuu

SEQ ID NO: 1250873 - RNA, 19 nt, Human
aauguaggcuuaguuugug

SEQ ID NO: 1250874 - RNA, 22 nt, Human
aauguaggcuuaguuugugugu

SEQ ID NO: 1250875 - RNA, 23 nt, Human
aauguaguucugcuccagacagg

SEQ ID NO: 1250876 - RNA, 12 nt, Human
uacauacagaau

SEQ ID NO: 1250877 - RNA, 20 nt, Human
uacauacagaauuacuguaa

SEQ ID NO: 1250878 - RNA, 20 nt, Human
uacauaccacgcuagggcug

SEQ ID NO: 1250879 - RNA, 23 nt, Human
uacauaccacgcuagggcuggcu

SEQ ID NO: 1250880 - RNA, 22 nt, Human
uacauacccuggccgcccccug

SEQ ID NO: 1250881 - RNA, 17 nt, Human
uacauacuaugaaauau

SEQ ID NO: 1250882 - RNA, 19 nt, Human
uacauacuaugaaauaugu

SEQ ID NO: 1250883 - RNA, 20 nt, Human
uacauacuaugaaauaugua

SEQ ID NO: 1250884 - RNA, 14 nt, Human
uacauagaugcuua

SEQ ID NO: 1250885 - RNA, 13 nt, Human
aauguaagacaaa

SEQ ID NO: 1250886 - RNA, 16 nt, Human
aauguaagauuauaga

SEQ ID NO: 1250887 - RNA, 19 nt, Human
aauguaagauuauagauuc

SEQ ID NO: 1250888 - RNA, 20 nt, Human
aauguaagauuauagauucu

SEQ ID NO: 1250889 - RNA, 21 nt, Human
aauguaagauuauagauucua

SEQ ID NO: 1250890 - RNA, 22 nt, Human
aauguaagauuauagauucuaa

SEQ ID NO: 1250891 - RNA, 23 nt, Human
aauguaagauuauagauucuaaa

SEQ ID NO: 1250892 - RNA, 16 nt, Human
aaugguuuaaaugguc

SEQ ID NO: 1250893 - RNA, 23 nt, Human
uacaaugaaaaggacuuuauaga

SEQ ID NO: 1250894 - RNA, 15 nt, Human
uacaaguuucaucca

SEQ ID NO: 1250895 - RNA, 16 nt, Human
uacaauaauucuauga

SEQ ID NO: 1250896 - RNA, 20 nt, Human
uacagcaaauccuuugugaa

SEQ ID NO: 1250897 - RNA, 16 nt, Human
uacagagaagccauca

SEQ ID NO: 1250898 - RNA, 18 nt, Human
uacagagaagccaucacc

SEQ ID NO: 1250899 - RNA, 22 nt, Human
uacagagaagccaucaccucag

SEQ ID NO: 1250900 - RNA, 23 nt, Human
uacagagaagccaucaccucaga

SEQ ID NO: 1250901 - RNA, 13 nt, Human
uacagagaagccu

SEQ ID NO: 1250902 - RNA, 14 nt, Human
uacagagaagccuu

SEQ ID NO: 1250903 - RNA, 15 nt, Human
uacagagaagccuuc

SEQ ID NO: 1250904 - RNA, 16 nt, Human
uacagagaagccuuca

SEQ ID NO: 1250905 - RNA, 20 nt, Human
uacagauuuauuccuuuguu

SEQ ID NO: 1250906 - RNA, 21 nt, Human
uacacguauuugaauggccuu

SEQ ID NO: 1250907 - RNA, 19 nt, Human
uacagacuggauguaccac

SEQ ID NO: 1250908 - RNA, 15 nt, Human
uacagagaaaccagc

SEQ ID NO: 1250909 - RNA, 17 nt, Human
uacagagaaaccagcuu

SEQ ID NO: 1250910 - RNA, 18 nt, Human
uacagagaaaccagcuuc

SEQ ID NO: 1250911 - RNA, 20 nt, Human
uacagagaaaccagcuuccu

SEQ ID NO: 1250912 - RNA, 19 nt, Human
uacagagaaaccagcuucc

SEQ ID NO: 1250913 - RNA, 10 nt, Human
uacagagaag

SEQ ID NO: 1250914 - RNA, 11 nt, Human
uacagagaagc

SEQ ID NO: 1250915 - RNA, 12 nt, Human
uacagagaagcc

SEQ ID NO: 1250916 - RNA, 13 nt, Human
uacagagaagcca

SEQ ID NO: 1250917 - RNA, 14 nt, Human
uacagagaagccag

SEQ ID NO: 1250918 - RNA, 15 nt, Human
uacagagaagccagc

SEQ ID NO: 1250919 - RNA, 17 nt, Human
uacagagaagccagcuu

SEQ ID NO: 1250920 - RNA, 18 nt, Human
uacagagaagccagcuug

SEQ ID NO: 1250921 - RNA, 19 nt, Human
uacagagaagccagcuugu

SEQ ID NO: 1250922 - RNA, 20 nt, Human
uacagagaagccagcuuguu

SEQ ID NO: 1250923 - RNA, 21 nt, Human
uacagagaagccagcuuguuu

SEQ ID NO: 1250924 - RNA, 14 nt, Human
uacagagaagccau

SEQ ID NO: 1250925 - RNA, 15 nt, Human
uacagagaagccauc

SEQ ID NO: 1250926 - RNA, 21 nt, Human
aauguacauagugcuaacaug

SEQ ID NO: 1250927 - RNA, 15 nt, Human
aauguacauuaauua

SEQ ID NO: 1250928 - RNA, 22 nt, Human
aauguacccaccgggccacucc

SEQ ID NO: 1250929 - RNA, 14 nt, Human
uacaccuaugucau

SEQ ID NO: 1250930 - RNA, 17 nt, Human
uacaccuaugucauuuc

SEQ ID NO: 1250931 - RNA, 21 nt, Human
uacaccuaugucauuucauuu

SEQ ID NO: 1250932 - RNA, 18 nt, Human
aauguacccaccgggcca

SEQ ID NO: 1250933 - RNA, 16 nt, Human
uacaccuauuauccca

SEQ ID NO: 1250934 - RNA, 18 nt, Human
uacaccuauuaucccagc

SEQ ID NO: 1250935 - RNA, 17 nt, Human
uacacgcuuuugugaug

SEQ ID NO: 1250936 - RNA, 13 nt, Human
uaauucauguugc

SEQ ID NO: 1250937 - RNA, 16 nt, Human
uaauuauaucuaaaau

SEQ ID NO: 1250938 - RNA, 14 nt, Human
uaauucagguuuuu

SEQ ID NO: 1250939 - RNA, 16 nt, Human
uaauucagguuuuucc

SEQ ID NO: 1250940 - RNA, 17 nt, Human
uaauucagguuuuuccu

SEQ ID NO: 1250941 - RNA, 21 nt, Human
uaauucagguuuuuccuuuuu

SEQ ID NO: 1250942 - RNA, 19 nt, Human
uaauucagguuuuuccuuu

SEQ ID NO: 1250943 - RNA, 19 nt, Human
uaauuuacaaaaauauaaa

SEQ ID NO: 1250944 - RNA, 21 nt, Human
uaauuuacaaaaauauaaaau

SEQ ID NO: 1250945 - RNA, 22 nt, Human
uaauuuacaaaaauauaaaaua

SEQ ID NO: 1250946 - RNA, 21 nt, Human
uaauuuaccuaagauuacaaa

SEQ ID NO: 1250947 - RNA, 22 nt, Human
uaauuuaccuaagauuacaaau

SEQ ID NO: 1250948 - RNA, 13 nt, Human
uaauuucuaaugu

SEQ ID NO: 1250949 - RNA, 15 nt, Human
uaauuugacuagaaa

SEQ ID NO: 1250950 - RNA, 16 nt, Human
uaauuugacuagaaaa

SEQ ID NO: 1250951 - RNA, 15 nt, Human
uaauuugagagaaau

SEQ ID NO: 1250952 - RNA, 18 nt, Human
uaauuugaggacaaccau

SEQ ID NO: 1250953 - RNA, 22 nt, Human
uaauuugaggacaaccauucca

SEQ ID NO: 1250954 - RNA, 12 nt, Human
uaauuugcauua

SEQ ID NO: 1250955 - RNA, 16 nt, Human
uaauuugcauuaaauu

SEQ ID NO: 1250956 - RNA, 17 nt, Human
uaauuugcauuaaauuc

SEQ ID NO: 1250957 - RNA, 21 nt, Human
uaauuuuuguauuuuuaguag

SEQ ID NO: 1250958 - RNA, 20 nt, Human
uaauuugcauuaaauucaca

SEQ ID NO: 1250959 - RNA, 16 nt, Human
uacaagccugcacaau

SEQ ID NO: 1250960 - RNA, 20 nt, Human
uacaauaaaaucuugaaaau

SEQ ID NO: 1250961 - RNA, 18 nt, Human
uacaaguuucauccagaa

SEQ ID NO: 1250962 - RNA, 14 nt, Human
uacaaguuucaucc

SEQ ID NO: 1250963 - RNA, 13 nt, Human
uacaaguuagaaa

SEQ ID NO: 1250964 - RNA, 15 nt, Human
uacaaguuagaaaac

SEQ ID NO: 1250965 - RNA, 15 nt, Human
uacaaguuggaguca

SEQ ID NO: 1250966 - RNA, 21 nt, Human
uacaagcauucugucuugaag

SEQ ID NO: 1250967 - RNA, 14 nt, Human
uaauuuuuuuaauu

SEQ ID NO: 1250968 - RNA, 15 nt, Human
uaauuauauguugua

SEQ ID NO: 1250969 - RNA, 16 nt, Human
uaauuauauguuguaa

SEQ ID NO: 1250970 - RNA, 14 nt, Human
uaauuauccaggaa

SEQ ID NO: 1250971 - RNA, 23 nt, Human
uaauuauaccgcuaucauuccaa

SEQ ID NO: 1250972 - RNA, 14 nt, Human
uaauuauauaacug

SEQ ID NO: 1250973 - RNA, 16 nt, Human
uaauuauauaacugua

SEQ ID NO: 1250974 - RNA, 17 nt, Human
uaauuauauaacuguau

SEQ ID NO: 1250975 - RNA, 20 nt, Human
uaauuauauaacuguauuug

SEQ ID NO: 1250976 - RNA, 21 nt, Human
uaauuaugccuuuuuugauca

SEQ ID NO: 1250977 - RNA, 22 nt, Human
uaauuauggagucauuuuuaca

SEQ ID NO: 1250978 - RNA, 17 nt, Human
uaauuauggagucauuu

SEQ ID NO: 1250979 - RNA, 20 nt, Human
uaauuauggagucauuuuua

SEQ ID NO: 1250980 - RNA, 14 nt, Human
uaauucacagugcu

SEQ ID NO: 1250981 - RNA, 21 nt, Human
uaauucacagugcucuuuucu

SEQ ID NO: 1250982 - RNA, 22 nt, Human
uaauucacagugcucuuuucuc

SEQ ID NO: 1250983 - RNA, 20 nt, Human
uaauucacuguacuaucagg

SEQ ID NO: 1250984 - RNA, 20 nt, Human
uaauuauacccccugcaaag

SEQ ID NO: 1250985 - RNA, 13 nt, Human
aaugaaugaaacu

SEQ ID NO: 1250986 - RNA, 13 nt, Human
aaugcaaauaaca

SEQ ID NO: 1250987 - RNA, 14 nt, Human
aaugcaaauaacaa

SEQ ID NO: 1250988 - RNA, 16 nt, Human
aaugcaaauaacaaau

SEQ ID NO: 1250989 - RNA, 17 nt, Human
aaugcaaauaacaaaug

SEQ ID NO: 1250990 - RNA, 13 nt, Human
aaugcaaccauuu

SEQ ID NO: 1250991 - RNA, 17 nt, Human
aaugcaaccauuugaaa

SEQ ID NO: 1250992 - RNA, 18 nt, Human
aaugcaaccauuugaaac

SEQ ID NO: 1250993 - RNA, 15 nt, Human
uaauguaagacaaau

SEQ ID NO: 1250994 - RNA, 13 nt, Human
uaaugaacaaaug

SEQ ID NO: 1250995 - RNA, 14 nt, Human
uaaugaacaaaugg

SEQ ID NO: 1250996 - RNA, 16 nt, Human
uaaugaagaaagugga

SEQ ID NO: 1250997 - RNA, 17 nt, Human
uaaugaagaaaguggaa

SEQ ID NO: 1250998 - RNA, 22 nt, Human
uaaugaagaaaguggaaaacaa

SEQ ID NO: 1250999 - RNA, 23 nt, Human
uaaugaagaaaguggaaaacaag

SEQ ID NO: 1251000 - RNA, 13 nt, Human
uaaugaagaucua

SEQ ID NO: 1251001 - RNA, 14 nt, Human
uaaugaagaucuaa

SEQ ID NO: 1251002 - RNA, 15 nt, Human
uaaugaagaucuaaa

SEQ ID NO: 1251003 - RNA, 17 nt, Human
uaaugaagaucuaaaua

SEQ ID NO: 1251004 - RNA, 16 nt, Human
uaaugaagaucuaaau

SEQ ID NO: 1251005 - RNA, 15 nt, Human
aaugaaugaaugaau

SEQ ID NO: 1251006 - RNA, 16 nt, Human
aaucuugucaugugua

SEQ ID NO: 1251007 - RNA, 14 nt, Human
aaugaaaaaaugua

SEQ ID NO: 1251008 - RNA, 14 nt, Human
aaugaaaaauucca

SEQ ID NO: 1251009 - RNA, 19 nt, Human
aaugaaaaauuccacucaa

SEQ ID NO: 1251010 - RNA, 13 nt, Human
aaucuugaaaaug

SEQ ID NO: 1251011 - RNA, 14 nt, Human
aaucuugaaauuaa

SEQ ID NO: 1251012 - RNA, 17 nt, Human
aaucuugaaauuaagaa

SEQ ID NO: 1251013 - RNA, 22 nt, Human
aaucuugacuacagucaggaaa

SEQ ID NO: 1251014 - RNA, 13 nt, Human
aaucuugcaugua

SEQ ID NO: 1251015 - RNA, 23 nt, Human
aaucuugaucaguuaagaaauuu

SEQ ID NO: 1251016 - RNA, 15 nt, Human
aaucuugcuuucuuu

SEQ ID NO: 1251017 - RNA, 18 nt, Human
aaucuugcuuucuuuguu

SEQ ID NO: 1251018 - RNA, 19 nt, Human
aaucuugguugaugccaaa

SEQ ID NO: 1251019 - RNA, 13 nt, Human
aaucuugguuugc

SEQ ID NO: 1251020 - RNA, 15 nt, Human
aaucuugucaugugu

SEQ ID NO: 1251021 - RNA, 17 nt, Human
aaucuugucauguguau

SEQ ID NO: 1251022 - RNA, 16 nt, Human
aaucuuuuauaggauu

SEQ ID NO: 1251023 - RNA, 13 nt, Human
uaaugugauauua

SEQ ID NO: 1251024 - RNA, 22 nt, Human
uaauccaagcaaaugugaauca

SEQ ID NO: 1251025 - RNA, 19 nt, Human
uaauccaauggguuuuucc

SEQ ID NO: 1251026 - RNA, 20 nt, Human
uaaucauucuuauuucauga

SEQ ID NO: 1251027 - RNA, 22 nt, Human
uaaucauucuuauuucaugaaa

SEQ ID NO: 1251028 - RNA, 17 nt, Human
uaaucuuuaauuuuaca

SEQ ID NO: 1251029 - RNA, 13 nt, Human
uaaucuuucacag

SEQ ID NO: 1251030 - RNA, 15 nt, Human
uaaucuucugccuuc

SEQ ID NO: 1251031 - RNA, 16 nt, Human
uaaucuugaauuguaa

SEQ ID NO: 1251032 - RNA, 22 nt, Human
uaaucuugaauuguaacuguuc

SEQ ID NO: 1251033 - RNA, 14 nt, Human
uaaucuugcuuucu

SEQ ID NO: 1251034 - RNA, 15 nt, Human
uaaucuugcuuucuu

SEQ ID NO: 1251035 - RNA, 20 nt, Human
uaauagaauaaaggcaguuu

SEQ ID NO: 1251036 - RNA, 22 nt, Human
uaauagaauaaaggcaguuuuc

SEQ ID NO: 1251037 - RNA, 16 nt, Human
uaauauuccucaguuc

SEQ ID NO: 1251038 - RNA, 16 nt, Human
uaauauugacuuguau

SEQ ID NO: 1251039 - RNA, 18 nt, Human
uaauauugacuuguauau

SEQ ID NO: 1251040 - RNA, 16 nt, Human
uaauauugauuuauua

SEQ ID NO: 1251041 - RNA, 19 nt, Human
uaaucagggaggucauuuu

SEQ ID NO: 1251042 - RNA, 19 nt, Human
uaaucagguccucagagaa

SEQ ID NO: 1251043 - RNA, 22 nt, Human
uaaucagguccucagagaauuu

SEQ ID NO: 1251044 - RNA, 18 nt, Human
uaauacuugcuuuggaaa

SEQ ID NO: 1251045 - RNA, 17 nt, Human
uaauacuucuugugugu

SEQ ID NO: 1251046 - RNA, 17 nt, Human
uaauagaaaaguauguu

SEQ ID NO: 1251047 - RNA, 14 nt, Human
uaauagaauaaagg

SEQ ID NO: 1251048 - RNA, 16 nt, Human
uaauagaauaaaggca

SEQ ID NO: 1251049 - RNA, 13 nt, Human
uaauaccucccuu

SEQ ID NO: 1251050 - RNA, 21 nt, Human
uaauaccucuaauaguauaaa

SEQ ID NO: 1251051 - RNA, 20 nt, Human
uaauacauuccaacucguau

SEQ ID NO: 1251052 - RNA, 23 nt, Human
uaauaccucuaauaguauaaacc

SEQ ID NO: 1251053 - RNA, 15 nt, Human
uaauacagcugagcu

SEQ ID NO: 1251054 - RNA, 16 nt, Human
uaauacauuauauuuc

SEQ ID NO: 1251055 - RNA, 17 nt, Human
uaauacauuauauuucu

SEQ ID NO: 1251056 - RNA, 16 nt, Human
uaauaccacagcuuuu

SEQ ID NO: 1251057 - RNA, 21 nt, Human
uaauacagcaacaauuuauga

SEQ ID NO: 1251058 - RNA, 22 nt, Human
uaauacagcaacaauuuaugaa

SEQ ID NO: 1251059 - RNA, 23 nt, Human
aauacaucccuuaccugggaaag

SEQ ID NO: 1251060 - RNA, 19 nt, Human
aauacauagggauaugcgu

SEQ ID NO: 1251061 - RNA, 18 nt, Human
uaauacagcaacaauuua

SEQ ID NO: 1251062 - RNA, 19 nt, Human
uaacaaugcuguauuuuaa

SEQ ID NO: 1251063 - RNA, 21 nt, Human
aauacagucuuccauuugcaa

SEQ ID NO: 1251064 - RNA, 16 nt, Human
aauacaguucugcucu

SEQ ID NO: 1251065 - RNA, 17 nt, Human
aauacaguucugcucug

SEQ ID NO: 1251066 - RNA, 22 nt, Human
aauacauaccacgcuagggcug

SEQ ID NO: 1251067 - RNA, 16 nt, Human
aagcuuuuaugugaaa

SEQ ID NO: 1251068 - RNA, 15 nt, Human
guuccccuguucacu

SEQ ID NO: 1251069 - RNA, 17 nt, Human
guuccccuguucacucu

SEQ ID NO: 1251070 - RNA, 19 nt, Human
aaggaaaaaauaacaauga

SEQ ID NO: 1251071 - RNA, 16 nt, Human
aaggaaaaaauaacaa

SEQ ID NO: 1251072 - RNA, 13 nt, Human
aagcucugaggga

SEQ ID NO: 1251073 - RNA, 14 nt, Human
aagcucugcuauua

SEQ ID NO: 1251074 - RNA, 18 nt, Human
aagcuuuccugccccagg

SEQ ID NO: 1251075 - RNA, 21 nt, Human
aagcuuuccugccccaggccu

SEQ ID NO: 1251076 - RNA, 22 nt, Human
aagcuuuccugccccaggccug

SEQ ID NO: 1251077 - RNA, 22 nt, Human
aagcuuuggugagaaccugggu

SEQ ID NO: 1251078 - RNA, 19 nt, Human
aagcuuuggugagaaccug

SEQ ID NO: 1251079 - RNA, 15 nt, Human
aagcucccagggccu

SEQ ID NO: 1251080 - RNA, 23 nt, Human
aagcucccccagcaaagccccca

SEQ ID NO: 1251081 - RNA, 15 nt, Human
aagcucccccagcaa

SEQ ID NO: 1251082 - RNA, 16 nt, Human
aagcuccucuccccag

SEQ ID NO: 1251083 - RNA, 15 nt, Human
aagcucuagaaucug

SEQ ID NO: 1251084 - RNA, 15 nt, Human
aagcucugaagaacu

SEQ ID NO: 1251085 - RNA, 9 nt, Human
aagcucuga

SEQ ID NO: 1251086 - RNA, 12 nt, Human
aagcucugacau

SEQ ID NO: 1251087 - RNA, 11 nt, Human
aagcucugagc

SEQ ID NO: 1251088 - RNA, 12 nt, Human
aagcucugagcu

SEQ ID NO: 1251089 - RNA, 15 nt, Human
aagcucugagcuguc

SEQ ID NO: 1251090 - RNA, 16 nt, Human
aagcucugagcuguca

SEQ ID NO: 1251091 - RNA, 17 nt, Human
guguuuauccuuucaua

SEQ ID NO: 1251092 - RNA, 15 nt, Human
guguuuauccuuuca

SEQ ID NO: 1251093 - RNA, 22 nt, Human
guguuuauccuaucucuccaac

SEQ ID NO: 1251094 - RNA, 22 nt, Human
guguuuaagacauuuuuggaag

SEQ ID NO: 1251095 - RNA, 14 nt, Human
guguuuacauuuua

SEQ ID NO: 1251096 - RNA, 13 nt, Human
guugaauuuuaca

SEQ ID NO: 1251097 - RNA, 16 nt, Human
guucuguuuuguuucg

SEQ ID NO: 1251098 - RNA, 20 nt, Human
guugaauuuuuuuuaacauu

SEQ ID NO: 1251099 - RNA, 21 nt, Human
guugaauuuuuuuuaacauuc

SEQ ID NO: 1251100 - RNA, 23 nt, Human
guugaauuuuuuuuaacauuccu

SEQ ID NO: 1251101 - RNA, 13 nt, Human
guucuguuucaag

SEQ ID NO: 1251102 - RNA, 14 nt, Human
guucuguuucaagg

SEQ ID NO: 1251103 - RNA, 13 nt, Human
guucuguuugcug

SEQ ID NO: 1251104 - RNA, 18 nt, Human
guucuguuucaaggcacu

SEQ ID NO: 1251105 - RNA, 12 nt, Human
guucuguuuugu

SEQ ID NO: 1251106 - RNA, 16 nt, Human
guucugugguuucaug

SEQ ID NO: 1251107 - RNA, 19 nt, Human
guucugugguuucauguua

SEQ ID NO: 1251108 - RNA, 21 nt, Human
guucugugguuucauguuagu

SEQ ID NO: 1251109 - RNA, 13 nt, Human
guucugugucuuu

SEQ ID NO: 1251110 - RNA, 22 nt, Human
guucugugucuuucacagcucc

SEQ ID NO: 1251111 - RNA, 23 nt, Human
guucugugucuuucacagcuccu

SEQ ID NO: 1251112 - RNA, 13 nt, Human
guucuguuaacug

SEQ ID NO: 1251113 - RNA, 14 nt, Human
guucuguuaacuga

SEQ ID NO: 1251114 - RNA, 16 nt, Human
guucuguuaacugaau

SEQ ID NO: 1251115 - RNA, 17 nt, Human
guucuguuaacugaaua

SEQ ID NO: 1251116 - RNA, 18 nt, Human
guucuguuaacugaauac

SEQ ID NO: 1251117 - RNA, 19 nt, Human
guucuguuaacugaauacc

SEQ ID NO: 1251118 - RNA, 21 nt, Human
guucuguuaacugaauaccac

SEQ ID NO: 1251119 - RNA, 13 nt, Human
guugacaugggac

SEQ ID NO: 1251120 - RNA, 12 nt, Human
guugagacagag

SEQ ID NO: 1251121 - RNA, 18 nt, Human
guugacaguucauaugua

SEQ ID NO: 1251122 - RNA, 15 nt, Human
guugagagugugacc

SEQ ID NO: 1251123 - RNA, 17 nt, Human
guugagagugugaccaa

SEQ ID NO: 1251124 - RNA, 18 nt, Human
guugagauaguuuucauc

SEQ ID NO: 1251125 - RNA, 17 nt, Human
guugagauaguuuucau

SEQ ID NO: 1251126 - RNA, 16 nt, Human
guugagcaucuguccc

SEQ ID NO: 1251127 - RNA, 15 nt, Human
guugagccccuggag

SEQ ID NO: 1251128 - RNA, 14 nt, Human
guugagccuuuucc

SEQ ID NO: 1251129 - RNA, 23 nt, Human
guucuccaacaucacagcccagc

SEQ ID NO: 1251130 - RNA, 20 nt, Human
guucucccuguacaguguua

SEQ ID NO: 1251131 - RNA, 18 nt, Human
guucuccguuagcuccug

SEQ ID NO: 1251132 - RNA, 19 nt, Human
guucuccguuagcuccugu

SEQ ID NO: 1251133 - RNA, 21 nt, Human
guucuccguuagcuccugugg

SEQ ID NO: 1251134 - RNA, 12 nt, Human
guucugucacca

SEQ ID NO: 1251135 - RNA, 11 nt, Human
guucugucccu

SEQ ID NO: 1251136 - RNA, 16 nt, Human
guucugucccuugccc

SEQ ID NO: 1251137 - RNA, 18 nt, Human
guucugucccuugccccc

SEQ ID NO: 1251138 - RNA, 11 nt, Human
guucugugcac

SEQ ID NO: 1251139 - RNA, 18 nt, Human
guuccccuguucacucua

SEQ ID NO: 1251140 - RNA, 19 nt, Human
guuccccuguuuauucaua

SEQ ID NO: 1251141 - RNA, 18 nt, Human
guuccccuguuuauucau

SEQ ID NO: 1251142 - RNA, 17 nt, Human
guuccccuguuuauuca

SEQ ID NO: 1251143 - RNA, 13 nt, Human
guuccccuuccac

SEQ ID NO: 1251144 - RNA, 14 nt, Human
guucuaguuuuuua

SEQ ID NO: 1251145 - RNA, 14 nt, Human
guucucaauuccaa

SEQ ID NO: 1251146 - RNA, 17 nt, Human
guucucaauuccaacag

SEQ ID NO: 1251147 - RNA, 21 nt, Human
guucucaauuccaacaguuua

SEQ ID NO: 1251148 - RNA, 21 nt, Human
guucucacacuggucugcugu

SEQ ID NO: 1251149 - RNA, 23 nt, Human
guucucagaaucccuuaacaguu

SEQ ID NO: 1251150 - RNA, 17 nt, Human
guucucagguguugcca

SEQ ID NO: 1251151 - RNA, 19 nt, Human
guucucauggguggcacuc

SEQ ID NO: 1251152 - RNA, 21 nt, Human
guucuccaacaucacagccca

SEQ ID NO: 1251153 - RNA, 22 nt, Human
guucuccaacaucacagcccag

SEQ ID NO: 1251154 - RNA, 20 nt, Human
aaggccugguguuucuugau

SEQ ID NO: 1251155 - RNA, 11 nt, Human
aaggccugggg

SEQ ID NO: 1251156 - RNA, 15 nt, Human
aaggccuggggugac

SEQ ID NO: 1251157 - RNA, 17 nt, Human
aaggccuggggugaccc

SEQ ID NO: 1251158 - RNA, 21 nt, Human
aaggccuggggugacccggca

SEQ ID NO: 1251159 - RNA, 16 nt, Human
aaggcccgagcagcug

SEQ ID NO: 1251160 - RNA, 22 nt, Human
aaggccuggggugacccggcac

SEQ ID NO: 1251161 - RNA, 18 nt, Human
aaggccuucaacccgaga

SEQ ID NO: 1251162 - RNA, 14 nt, Human
aaggcccgagcagc

SEQ ID NO: 1251163 - RNA, 15 nt, Human
aaggccuccuggcug

SEQ ID NO: 1251164 - RNA, 12 nt, Human
guugcugccuca

SEQ ID NO: 1251165 - RNA, 23 nt, Human
guugcugaugaacucuuaaucaa

SEQ ID NO: 1251166 - RNA, 19 nt, Human
guugcuccgccuggccugg

SEQ ID NO: 1251167 - RNA, 22 nt, Human
guugcuccgccuggccuggcca

SEQ ID NO: 1251168 - RNA, 14 nt, Human
guugguugguuuuc

SEQ ID NO: 1251169 - RNA, 12 nt, Human
guugguuuucuu

SEQ ID NO: 1251170 - RNA, 15 nt, Human
guugguuuucuucuu

SEQ ID NO: 1251171 - RNA, 20 nt, Human
guugggagagggcgcaggcc

SEQ ID NO: 1251172 - RNA, 23 nt, Human
guuggggaaacagcaucuccaag

SEQ ID NO: 1251173 - RNA, 18 nt, Human
guuggggaagggccugcc

SEQ ID NO: 1251174 - RNA, 21 nt, Human
guuggggacacauguauuugg

SEQ ID NO: 1251175 - RNA, 16 nt, Human
guuggggucuggcagc

SEQ ID NO: 1251176 - RNA, 17 nt, Human
guuggcuuaccuggccc

SEQ ID NO: 1251177 - RNA, 14 nt, Human
guuggcuuaccugg

SEQ ID NO: 1251178 - RNA, 16 nt, Human
guuggcuuaccuggcc

SEQ ID NO: 1251179 - RNA, 18 nt, Human
guugggacuacaggcgug

SEQ ID NO: 1251180 - RNA, 22 nt, Human
aaggagcaagucagaauagaaa

SEQ ID NO: 1251181 - RNA, 18 nt, Human
aaggaagguggauggccc

SEQ ID NO: 1251182 - RNA, 21 nt, Human
aaggaagucaaagcaaggaaa

SEQ ID NO: 1251183 - RNA, 14 nt, Human
aaggagaaugaauc

SEQ ID NO: 1251184 - RNA, 17 nt, Human
aaggaaggcuccaucuc

SEQ ID NO: 1251185 - RNA, 17 nt, Human
aaggaaggcagggagga

SEQ ID NO: 1251186 - RNA, 12 nt, Human
aaggaaggugga

SEQ ID NO: 1251187 - RNA, 17 nt, Human
aaggaagguggauggcc

SEQ ID NO: 1251188 - RNA, 15 nt, Human
aaggaagcugugcgu

SEQ ID NO: 1251189 - RNA, 19 nt, Human
guugaucuggaacccagac

SEQ ID NO: 1251190 - RNA, 20 nt, Human
aaggaaacaaccaugucauu

SEQ ID NO: 1251191 - RNA, 15 nt, Human
guugaucuggaaccc

SEQ ID NO: 1251192 - RNA, 16 nt, Human
guugaucuggaaccca

SEQ ID NO: 1251193 - RNA, 17 nt, Human
guugaucuggaacccag

SEQ ID NO: 1251194 - RNA, 22 nt, Human
guugaucuggaacccagacuca

SEQ ID NO: 1251195 - RNA, 21 nt, Human
aaggauaaaguugguaaaccu

SEQ ID NO: 1251196 - RNA, 15 nt, Human
aaggaggagccuguc

SEQ ID NO: 1251197 - RNA, 16 nt, Human
aaggaggagccugucc

SEQ ID NO: 1251198 - RNA, 17 nt, Human
aaggaggagccuguccu

SEQ ID NO: 1251199 - RNA, 22 nt, Human
aaggaggagccuguccugccug

SEQ ID NO: 1251200 - RNA, 23 nt, Human
aaggaggauggcauauaauacaa

SEQ ID NO: 1251201 - RNA, 23 nt, Human
aaggauaaaguugguaaaccuuu

SEQ ID NO: 1251202 - RNA, 13 nt, Human
aaggauaaugaau

SEQ ID NO: 1251203 - RNA, 22 nt, Human
aaggaggacccaggacaggauc

SEQ ID NO: 1251204 - RNA, 21 nt, Human
aaggaggacccaggacaggau

SEQ ID NO: 1251205 - RNA, 18 nt, Human
aaggaggacccaggacag

SEQ ID NO: 1251206 - RNA, 17 nt, Human
aaggaggacccaggaca

SEQ ID NO: 1251207 - RNA, 15 nt, Human
aaggaggacccagga

SEQ ID NO: 1251208 - RNA, 14 nt, Human
aaggaggacccagg

SEQ ID NO: 1251209 - RNA, 13 nt, Human
aaggaggacccag

SEQ ID NO: 1251210 - RNA, 23 nt, Human
aaggagcagagcugauggagaag

SEQ ID NO: 1251211 - RNA, 17 nt, Human
aaggagccccauuccug

SEQ ID NO: 1251212 - RNA, 19 nt, Human
aaggagccccauuccuggg

SEQ ID NO: 1251213 - RNA, 20 nt, Human
aaggauagaugcuggcccag

SEQ ID NO: 1251214 - RNA, 22 nt, Human
aaggauaggccuucauuaacaa

SEQ ID NO: 1251215 - RNA, 16 nt, Human
aaggauccggaaagaa

SEQ ID NO: 1251216 - RNA, 17 nt, Human
aaggauccggaaagaag

SEQ ID NO: 1251217 - RNA, 20 nt, Human
aagucacauuccugaacagg

SEQ ID NO: 1251218 - RNA, 19 nt, Human
aagucacagggcaguaccu

SEQ ID NO: 1251219 - RNA, 18 nt, Human
aagucaauguuuucaguu

SEQ ID NO: 1251220 - RNA, 14 nt, Human
aagucacagggcag

SEQ ID NO: 1251221 - RNA, 15 nt, Human
aagucacagggcagu

SEQ ID NO: 1251222 - RNA, 23 nt, Human
aagucacagggcaguaccugagg

SEQ ID NO: 1251223 - RNA, 12 nt, Human
aagucacugcac

SEQ ID NO: 1251224 - RNA, 21 nt, Human
aagucacggcugcgcacugug

SEQ ID NO: 1251225 - RNA, 14 nt, Human
aagucacugcacag

SEQ ID NO: 1251226 - RNA, 14 nt, Human
aagucauaauugca

SEQ ID NO: 1251227 - RNA, 15 nt, Human
aagucauaauugcau

SEQ ID NO: 1251228 - RNA, 19 nt, Human
aagucaaggguaggguggg

SEQ ID NO: 1251229 - RNA, 17 nt, Human
aagucaauguuuucagu

SEQ ID NO: 1251230 - RNA, 13 nt, Human
aagucaaggagaa

SEQ ID NO: 1251231 - RNA, 15 nt, Human
aagucaacuuagcau

SEQ ID NO: 1251232 - RNA, 16 nt, Human
aagucaaccugccuga

SEQ ID NO: 1251233 - RNA, 17 nt, Human
aagucaacaguaaacca

SEQ ID NO: 1251234 - RNA, 19 nt, Human
aagucaacaguaaaccacu

SEQ ID NO: 1251235 - RNA, 21 nt, Human
aagucaacaguaaaccacuga

SEQ ID NO: 1251236 - RNA, 14 nt, Human
aagucaacaguaaa

SEQ ID NO: 1251237 - RNA, 15 nt, Human
aagucaacaguaaac

SEQ ID NO: 1251238 - RNA, 16 nt, Human
aagucaacaguaaacc

SEQ ID NO: 1251239 - RNA, 13 nt, Human
aaguauguucuaa

SEQ ID NO: 1251240 - RNA, 23 nt, Human
aaguauguuagugcaaauuguca

SEQ ID NO: 1251241 - RNA, 20 nt, Human
guuuuauauauuauauggaa

SEQ ID NO: 1251242 - RNA, 17 nt, Human
guuuuuuuguuauuaaa

SEQ ID NO: 1251243 - RNA, 14 nt, Human
guuuuuuucuaaua

SEQ ID NO: 1251244 - RNA, 15 nt, Human
guuuuuuuucaguug

SEQ ID NO: 1251245 - RNA, 12 nt, Human
guuuuuuucuau

SEQ ID NO: 1251246 - RNA, 15 nt, Human
guuuuuuuuuaaaga

SEQ ID NO: 1251247 - RNA, 23 nt, Human
guuuuuuuuuaaaaaagaaacau

SEQ ID NO: 1251248 - RNA, 12 nt, Human
guuuuuuaaguc

SEQ ID NO: 1251249 - RNA, 15 nt, Human
guuuuuuaugcuaau

SEQ ID NO: 1251250 - RNA, 16 nt, Human
guuuuuuaguugaauu

SEQ ID NO: 1251251 - RNA, 11 nt, Human
guuuuuucauc

SEQ ID NO: 1251252 - RNA, 22 nt, Human
guuuuuucaucuucaguugucu

SEQ ID NO: 1251253 - RNA, 21 nt, Human
guuuuuucuuccuuuucacug

SEQ ID NO: 1251254 - RNA, 14 nt, Human
guuuuuugccacag

SEQ ID NO: 1251255 - RNA, 23 nt, Human
guuuuuugccacagcuuuugcaa

SEQ ID NO: 1251256 - RNA, 14 nt, Human
guuuuuuguaccaa

SEQ ID NO: 1251257 - RNA, 20 nt, Human
guuuuuggucuuuuauaauu

SEQ ID NO: 1251258 - RNA, 15 nt, Human
guuuuuguucaaagc

SEQ ID NO: 1251259 - RNA, 13 nt, Human
guuuuucuauuaa

SEQ ID NO: 1251260 - RNA, 15 nt, Human
guuuuucuauuaaaa

SEQ ID NO: 1251261 - RNA, 16 nt, Human
guuuuucuauuaaaag

SEQ ID NO: 1251262 - RNA, 17 nt, Human
guuuuucuauuaaaaga

SEQ ID NO: 1251263 - RNA, 18 nt, Human
guuuuucuauuaaaagac

SEQ ID NO: 1251264 - RNA, 19 nt, Human
guuuuucuauuaaaagacu

SEQ ID NO: 1251265 - RNA, 20 nt, Human
guuuuucuauuaaaagacuc

SEQ ID NO: 1251266 - RNA, 21 nt, Human
guuuuucuauuaaaagacuca

SEQ ID NO: 1251267 - RNA, 22 nt, Human
guuuuucuauuaaaagacucau

SEQ ID NO: 1251268 - RNA, 23 nt, Human
guuuuugaucaaaaacuauuugg

SEQ ID NO: 1251269 - RNA, 15 nt, Human
guuuuugcacauguu

SEQ ID NO: 1251270 - RNA, 18 nt, Human
guuuuugguuuuuaaaac

SEQ ID NO: 1251271 - RNA, 19 nt, Human
aagugacuuuggcugcaug

SEQ ID NO: 1251272 - RNA, 20 nt, Human
aagugaccuauaccuguguu

SEQ ID NO: 1251273 - RNA, 19 nt, Human
aagugacuaauggcaugag

SEQ ID NO: 1251274 - RNA, 20 nt, Human
guuuuucuaaaggaguuuau

SEQ ID NO: 1251275 - RNA, 11 nt, Human
guuuuucuauu

SEQ ID NO: 1251276 - RNA, 12 nt, Human
guuuuucuauua

SEQ ID NO: 1251277 - RNA, 15 nt, Human
aagugaauuugccug

SEQ ID NO: 1251278 - RNA, 16 nt, Human
aagugaauuugccugu

SEQ ID NO: 1251279 - RNA, 20 nt, Human
aagugaauuugccuguaaca

SEQ ID NO: 1251280 - RNA, 17 nt, Human
aagugaauuugccugua

SEQ ID NO: 1251281 - RNA, 22 nt, Human
aagugacauugcaucaaagcau

SEQ ID NO: 1251282 - RNA, 22 nt, Human
aagucuuauauauuguagauaa

SEQ ID NO: 1251283 - RNA, 15 nt, Human
aagugaaugcuggga

SEQ ID NO: 1251284 - RNA, 13 nt, Human
aagucaucuugcu

SEQ ID NO: 1251285 - RNA, 14 nt, Human
aagucaucuugcua

SEQ ID NO: 1251286 - RNA, 20 nt, Human
aagucaucuugcuaccagua

SEQ ID NO: 1251287 - RNA, 23 nt, Human
aagucaucuugcuaccaguauuu

SEQ ID NO: 1251288 - RNA, 15 nt, Human
guuuuauaauuuugu

SEQ ID NO: 1251289 - RNA, 22 nt, Human
guuuuauaauuuugugaagcaa

SEQ ID NO: 1251290 - RNA, 11 nt, Human
guuuuauauau

SEQ ID NO: 1251291 - RNA, 12 nt, Human
guuuuauauauu

SEQ ID NO: 1251292 - RNA, 19 nt, Human
guuuuauauauuauaugga

SEQ ID NO: 1251293 - RNA, 13 nt, Human
guuuuacuuuuaa

SEQ ID NO: 1251294 - RNA, 18 nt, Human
guuuuacuuuuaaacugu

SEQ ID NO: 1251295 - RNA, 21 nt, Human
guuuuacuuuuaaacugugua

SEQ ID NO: 1251296 - RNA, 22 nt, Human
guuuuaacuguggauauuguua

SEQ ID NO: 1251297 - RNA, 14 nt, Human
guuuuaacuuuguu

SEQ ID NO: 1251298 - RNA, 13 nt, Human
guuuuaacuuugu

SEQ ID NO: 1251299 - RNA, 17 nt, Human
guuugcacuaucuuuca

SEQ ID NO: 1251300 - RNA, 23 nt, Human
guuugcauauaagggaaguaguu

SEQ ID NO: 1251301 - RNA, 16 nt, Human
guuugcagucccaagc

SEQ ID NO: 1251302 - RNA, 22 nt, Human
guuugcagguggccaaguuccu

SEQ ID NO: 1251303 - RNA, 15 nt, Human
guuugcacuuccucu

SEQ ID NO: 1251304 - RNA, 14 nt, Human
guuugcacuuccuc

SEQ ID NO: 1251305 - RNA, 21 nt, Human
guuugcagaagggggucucuu

SEQ ID NO: 1251306 - RNA, 19 nt, Human
guuugcaucugaaaauuga

SEQ ID NO: 1251307 - RNA, 15 nt, Human
guuugccuuccagaa

SEQ ID NO: 1251308 - RNA, 18 nt, Human
guuugccuucuacuuuua

SEQ ID NO: 1251309 - RNA, 18 nt, Human
guuucugguggucuguug

SEQ ID NO: 1251310 - RNA, 21 nt, Human
guuucugguggucuguuggca

SEQ ID NO: 1251311 - RNA, 14 nt, Human
guuucuggauuuca

SEQ ID NO: 1251312 - RNA, 14 nt, Human
guuucucagcuccc

SEQ ID NO: 1251313 - RNA, 23 nt, Human
guuucuagguaauuuuuacagaa

SEQ ID NO: 1251314 - RNA, 18 nt, Human
guuucuccaaacugaagc

SEQ ID NO: 1251315 - RNA, 11 nt, Human
guuucuccccc

SEQ ID NO: 1251316 - RNA, 17 nt, Human
guuucucccccauguuc

SEQ ID NO: 1251317 - RNA, 22 nt, Human
guuucucccccauguucugucc

SEQ ID NO: 1251318 - RNA, 16 nt, Human
guuguaaaccaaguga

SEQ ID NO: 1251319 - RNA, 21 nt, Human
guuguaaaguauguauuauuu

SEQ ID NO: 1251320 - RNA, 19 nt, Human
aaggcugagaggagagaga

SEQ ID NO: 1251321 - RNA, 14 nt, Human
guuguaaauuggca

SEQ ID NO: 1251322 - RNA, 16 nt, Human
guuguaaauuggcaug

SEQ ID NO: 1251323 - RNA, 22 nt, Human
guuguaaauuggcauggaaauu

SEQ ID NO: 1251324 - RNA, 14 nt, Human
guuguaaccugcug

SEQ ID NO: 1251325 - RNA, 17 nt, Human
guuguaaccugcuguga

SEQ ID NO: 1251326 - RNA, 16 nt, Human
aaggcugcuguacuga

SEQ ID NO: 1251327 - RNA, 16 nt, Human
aaggcugaugucaauu

SEQ ID NO: 1251328 - RNA, 16 nt, Human
aagggcccuccuuccu

SEQ ID NO: 1251329 - RNA, 12 nt, Human
aagggcccuggg

SEQ ID NO: 1251330 - RNA, 23 nt, Human
aagggccugcccaguugcacuca

SEQ ID NO: 1251331 - RNA, 16 nt, Human
aaggggagcccacugu

SEQ ID NO: 1251332 - RNA, 14 nt, Human
aaggggauuuuuau

SEQ ID NO: 1251333 - RNA, 20 nt, Human
aaggggauuuuuaugucugg

SEQ ID NO: 1251334 - RNA, 20 nt, Human
aaguaaaacaaacaauaccu

SEQ ID NO: 1251335 - RNA, 13 nt, Human
aaguaaaagcaaa

SEQ ID NO: 1251336 - RNA, 21 nt, Human
aaguaaaagcaaaaaagaaaa

SEQ ID NO: 1251337 - RNA, 18 nt, Human
aaguaaaagcaaaaaaga

SEQ ID NO: 1251338 - RNA, 20 nt, Human
aaguaaacuuuuuguucugg

SEQ ID NO: 1251339 - RNA, 17 nt, Human
aaguaaaacaaacaaua

SEQ ID NO: 1251340 - RNA, 12 nt, Human
aaguaaacuuuu

SEQ ID NO: 1251341 - RNA, 12 nt, Human
aaguaaauacaa

SEQ ID NO: 1251342 - RNA, 13 nt, Human
aaguaaauacaau

SEQ ID NO: 1251343 - RNA, 15 nt, Human
aaguaaauacaauuu

SEQ ID NO: 1251344 - RNA, 17 nt, Human
aaguaaauacaauuuuu

SEQ ID NO: 1251345 - RNA, 17 nt, Human
guuucuaagauucuaaa

SEQ ID NO: 1251346 - RNA, 18 nt, Human
guuucuaagauucuaaag

SEQ ID NO: 1251347 - RNA, 19 nt, Human
guuucuaagauucuaaagg

SEQ ID NO: 1251348 - RNA, 20 nt, Human
guuucuaagauucuaaaggu

SEQ ID NO: 1251349 - RNA, 21 nt, Human
guuucuaagauucuaaagguc

SEQ ID NO: 1251350 - RNA, 11 nt, Human
guuucuaaggu

SEQ ID NO: 1251351 - RNA, 22 nt, Human
guuucuaagguccgguguucua

SEQ ID NO: 1251352 - RNA, 11 nt, Human
aagggucaggc

SEQ ID NO: 1251353 - RNA, 12 nt, Human
aagggucaggcc

SEQ ID NO: 1251354 - RNA, 13 nt, Human
aagggucaggccu

SEQ ID NO: 1251355 - RNA, 14 nt, Human
aagggucaggccuu

SEQ ID NO: 1251356 - RNA, 20 nt, Human
aagggucaggccuuugagcu

SEQ ID NO: 1251357 - RNA, 16 nt, Human
aagggucaggccuuug

SEQ ID NO: 1251358 - RNA, 21 nt, Human
aaggguguugggagggugguu

SEQ ID NO: 1251359 - RNA, 14 nt, Human
aaggguugagcugg

SEQ ID NO: 1251360 - RNA, 20 nt, Human
aauaagcuauuugauguaau

SEQ ID NO: 1251361 - RNA, 14 nt, Human
aauaaggaaaagcu

SEQ ID NO: 1251362 - RNA, 15 nt, Human
aauaaggaaaagcuu

SEQ ID NO: 1251363 - RNA, 16 nt, Human
aauaaggcacccaucu

SEQ ID NO: 1251364 - RNA, 12 nt, Human
aauaaggcaggg

SEQ ID NO: 1251365 - RNA, 18 nt, Human
aauaaggcacccaucugu

SEQ ID NO: 1251366 - RNA, 19 nt, Human
aauaagguacaagaagcau

SEQ ID NO: 1251367 - RNA, 14 nt, Human
aauaagguugaaca

SEQ ID NO: 1251368 - RNA, 13 nt, Human
aauaagguuuuaa

SEQ ID NO: 1251369 - RNA, 15 nt, Human
aauaagguacaagaa

SEQ ID NO: 1251370 - RNA, 14 nt, Human
aauaagucaacagu

SEQ ID NO: 1251371 - RNA, 15 nt, Human
aauaagucaacagua

SEQ ID NO: 1251372 - RNA, 16 nt, Human
aauaagucaacaguaa

SEQ ID NO: 1251373 - RNA, 22 nt, Human
aauaagucaacaguaaaccacu

SEQ ID NO: 1251374 - RNA, 14 nt, Human
aauaagcuauuuga

SEQ ID NO: 1251375 - RNA, 16 nt, Human
aauaagcuauuugaug

SEQ ID NO: 1251376 - RNA, 18 nt, Human
aauaagcuauuugaugua

SEQ ID NO: 1251377 - RNA, 21 nt, Human
aauaagcuauuugauguaaua

SEQ ID NO: 1251378 - RNA, 12 nt, Human
aauaagauucua

SEQ ID NO: 1251379 - RNA, 13 nt, Human
aauaagauucuaa

SEQ ID NO: 1251380 - RNA, 14 nt, Human
aauaagauucuaac

SEQ ID NO: 1251381 - RNA, 14 nt, Human
aauaagcaggugga

SEQ ID NO: 1251382 - RNA, 18 nt, Human
aauaagcagguggaucua

SEQ ID NO: 1251383 - RNA, 23 nt, Human
aauaagcagguggaucuauuuca

SEQ ID NO: 1251384 - RNA, 22 nt, Human
aauaacguuuaagccaaaacaa

SEQ ID NO: 1251385 - RNA, 19 nt, Human
aauaacuccucauuguaaa

SEQ ID NO: 1251386 - RNA, 14 nt, Human
aauaacuccuccca

SEQ ID NO: 1251387 - RNA, 16 nt, Human
aauaacuccucccagg

SEQ ID NO: 1251388 - RNA, 17 nt, Human
aauaacuccucccaggg

SEQ ID NO: 1251389 - RNA, 22 nt, Human
aauaacuccucccaggguuuua

SEQ ID NO: 1251390 - RNA, 14 nt, Human
aauaagaucuuuuu

SEQ ID NO: 1251391 - RNA, 19 nt, Human
aauaaauaaggaaaagcuu

SEQ ID NO: 1251392 - RNA, 15 nt, Human
aauaaauauaucuac

SEQ ID NO: 1251393 - RNA, 23 nt, Human
aauaaauauaucuaccccagacu

SEQ ID NO: 1251394 - RNA, 20 nt, Human
aauaaauauccuuuaauuga

SEQ ID NO: 1251395 - RNA, 15 nt, Human
aauaacaauaaaaga

SEQ ID NO: 1251396 - RNA, 22 nt, Human
aauaaauuuuuuauaaaagugu

SEQ ID NO: 1251397 - RNA, 22 nt, Human
aauaacaaaugccaaauuaaaa

SEQ ID NO: 1251398 - RNA, 18 nt, Human
aauaacaaaugccaaauu

SEQ ID NO: 1251399 - RNA, 14 nt, Human
aauaacagauuucu

SEQ ID NO: 1251400 - RNA, 15 nt, Human
aauaacagauuucuc

SEQ ID NO: 1251401 - RNA, 15 nt, Human
aauaaaaaagauccc

SEQ ID NO: 1251402 - RNA, 19 nt, Human
uaaaguguaacaauugugu

SEQ ID NO: 1251403 - RNA, 20 nt, Human
uaaagugcuaagguucuaag

SEQ ID NO: 1251404 - RNA, 21 nt, Human
uaaagugcuaagguucuaagg

SEQ ID NO: 1251405 - RNA, 22 nt, Human
uaaagugcuaagguucuaaggc

SEQ ID NO: 1251406 - RNA, 20 nt, Human
uaaagugacccugcucucac

SEQ ID NO: 1251407 - RNA, 17 nt, Human
uaaagugacccugcucu

SEQ ID NO: 1251408 - RNA, 22 nt, Human
uaaagucuguugauuaaagaug

SEQ ID NO: 1251409 - RNA, 19 nt, Human
uaaagugacuaauggcaug

SEQ ID NO: 1251410 - RNA, 15 nt, Human
uaaagugauauuucc

SEQ ID NO: 1251411 - RNA, 16 nt, Human
uaaagugauauuuccc

SEQ ID NO: 1251412 - RNA, 15 nt, Human
uaaagugccaguauu

SEQ ID NO: 1251413 - RNA, 18 nt, Human
uaaagugccaguauuuua

SEQ ID NO: 1251414 - RNA, 22 nt, Human
uaaagugccaguauuuuaaaau

SEQ ID NO: 1251415 - RNA, 23 nt, Human
uaaagugccaguauuuuaaaaua

SEQ ID NO: 1251416 - RNA, 15 nt, Human
uaaagugcuaagguu

SEQ ID NO: 1251417 - RNA, 16 nt, Human
uaaagugcuaagguuc

SEQ ID NO: 1251418 - RNA, 17 nt, Human
uaaagugcuaagguucu

SEQ ID NO: 1251419 - RNA, 18 nt, Human
uaaagugcuaagguucua

SEQ ID NO: 1251420 - RNA, 19 nt, Human
uaaagugcuaagguucuaa

SEQ ID NO: 1251421 - RNA, 15 nt, Human
uaaagucagauggaa

SEQ ID NO: 1251422 - RNA, 17 nt, Human
uaaagucagauggaaaa

SEQ ID NO: 1251423 - RNA, 21 nt, Human
uaaagucuguugauuaaagau

SEQ ID NO: 1251424 - RNA, 12 nt, Human
aauaaaaauaau

SEQ ID NO: 1251425 - RNA, 15 nt, Human
aauaaaaagaaaggc

SEQ ID NO: 1251426 - RNA, 14 nt, Human
aauaaaaauguuua

SEQ ID NO: 1251427 - RNA, 15 nt, Human
aauaaaaauguuuaa

SEQ ID NO: 1251428 - RNA, 20 nt, Human
aauaaaaggaagccaaagag

SEQ ID NO: 1251429 - RNA, 21 nt, Human
aauaaaaggaagccaaagagu

SEQ ID NO: 1251430 - RNA, 16 nt, Human
aauaaaagugaccuuu

SEQ ID NO: 1251431 - RNA, 22 nt, Human
aauaaaauccauacauuugugu

SEQ ID NO: 1251432 - RNA, 16 nt, Human
aauaaaaucuugaaaa

SEQ ID NO: 1251433 - RNA, 16 nt, Human
aauaaaguacaagagc

SEQ ID NO: 1251434 - RNA, 15 nt, Human
aauaaaggcaguuuu

SEQ ID NO: 1251435 - RNA, 16 nt, Human
aauaaaggcaguuuuc

SEQ ID NO: 1251436 - RNA, 18 nt, Human
aauaaaggcaguuuucua

SEQ ID NO: 1251437 - RNA, 19 nt, Human
aauaaaggcaguuuucuaa

SEQ ID NO: 1251438 - RNA, 19 nt, Human
uaaauacaauuuuuuuuau

SEQ ID NO: 1251439 - RNA, 12 nt, Human
uaaauagcuuuu

SEQ ID NO: 1251440 - RNA, 19 nt, Human
uaaauaguaaaaauaaaau

SEQ ID NO: 1251441 - RNA, 20 nt, Human
uaaauaguaaaaauaaaauu

SEQ ID NO: 1251442 - RNA, 12 nt, Human
uaaauauaaaga

SEQ ID NO: 1251443 - RNA, 13 nt, Human
uaaauauaaagac

SEQ ID NO: 1251444 - RNA, 14 nt, Human
uaaauauaaagacg

SEQ ID NO: 1251445 - RNA, 17 nt, Human
uaaauauaaagacguuu

SEQ ID NO: 1251446 - RNA, 23 nt, Human
uaaauauaaagacguuuuauaag

SEQ ID NO: 1251447 - RNA, 13 nt, Human
uaaauaguauuuc

SEQ ID NO: 1251448 - RNA, 21 nt, Human
uaaauaggcggggcuugccuu

SEQ ID NO: 1251449 - RNA, 22 nt, Human
uaaauaggcggggcuugccuuc

SEQ ID NO: 1251450 - RNA, 12 nt, Human
uaaauaguauuu

SEQ ID NO: 1251451 - RNA, 15 nt, Human
uaaaucuacacacgg

SEQ ID NO: 1251452 - RNA, 13 nt, Human
uaaaucuacacac

SEQ ID NO: 1251453 - RNA, 17 nt, Human
uaaauccuuuacuguua

SEQ ID NO: 1251454 - RNA, 17 nt, Human
aauacaaguuucaucca

SEQ ID NO: 1251455 - RNA, 20 nt, Human
aauacaauuuuuuuuauuag

SEQ ID NO: 1251456 - RNA, 13 nt, Human
uaaauaaauuuga

SEQ ID NO: 1251457 - RNA, 14 nt, Human
uaaauaaauuugac

SEQ ID NO: 1251458 - RNA, 16 nt, Human
uaaauaaauuugacuu

SEQ ID NO: 1251459 - RNA, 14 nt, Human
uaaauaacuggaaa

SEQ ID NO: 1251460 - RNA, 15 nt, Human
uaaauaacuggaaaa

SEQ ID NO: 1251461 - RNA, 23 nt, Human
uaaauguuuuuuuuuaaagacuu

SEQ ID NO: 1251462 - RNA, 20 nt, Human
uaaauguuuuuuuuuaaaga

SEQ ID NO: 1251463 - RNA, 16 nt, Human
uaaauuacagaaauuu

SEQ ID NO: 1251464 - RNA, 13 nt, Human
uaaauuuguacua

SEQ ID NO: 1251465 - RNA, 14 nt, Human
uaaauuuguacuau

SEQ ID NO: 1251466 - RNA, 19 nt, Human
uaaauuuguacuauuuaac

SEQ ID NO: 1251467 - RNA, 20 nt, Human
uaaauuuguacuauuuaacu

SEQ ID NO: 1251468 - RNA, 22 nt, Human
uaaauuuguacuauuuaacuga

SEQ ID NO: 1251469 - RNA, 13 nt, Human
uaaaugaauguuu

SEQ ID NO: 1251470 - RNA, 13 nt, Human
uaaaugacacuca

SEQ ID NO: 1251471 - RNA, 17 nt, Human
uaaaugauuucauucaa

SEQ ID NO: 1251472 - RNA, 17 nt, Human
uaaaugauucuuaguga

SEQ ID NO: 1251473 - RNA, 19 nt, Human
uaaaugcaaccauuugaaa

SEQ ID NO: 1251474 - RNA, 15 nt, Human
uaaaugcaaauaaca

SEQ ID NO: 1251475 - RNA, 16 nt, Human
uaaaugcaaauaacaa

SEQ ID NO: 1251476 - RNA, 17 nt, Human
uaaaugcaaauaacaaa

SEQ ID NO: 1251477 - RNA, 14 nt, Human
uaacaacauguuuc

SEQ ID NO: 1251478 - RNA, 19 nt, Human
uaacaacauguuuccagca

SEQ ID NO: 1251479 - RNA, 20 nt, Human
uaacaacauguuuccagcau

SEQ ID NO: 1251480 - RNA, 21 nt, Human
uaacaacauguuuccagcauu

SEQ ID NO: 1251481 - RNA, 13 nt, Human
uaacaaaaauaaa

SEQ ID NO: 1251482 - RNA, 20 nt, Human
uaacaaaugccaaauuaaaa

SEQ ID NO: 1251483 - RNA, 20 nt, Human
uaacaaaaauaaaaacucuu

SEQ ID NO: 1251484 - RNA, 21 nt, Human
uaaauuuguacuauuuaacug

SEQ ID NO: 1251485 - RNA, 16 nt, Human
uaaauuuuccuguccu

SEQ ID NO: 1251486 - RNA, 18 nt, Human
uaaauuuuccuguccucu

SEQ ID NO: 1251487 - RNA, 23 nt, Human
uaaauuuuccuguccucuuucag

SEQ ID NO: 1251488 - RNA, 24 nt, Human
uaaauuuuccuguccucuuucagc

SEQ ID NO: 1251489 - RNA, 15 nt, Human
uaacaaugcuguauu

SEQ ID NO: 1251490 - RNA, 17 nt, Human
uaacaaugcuguauuuu

SEQ ID NO: 1251491 - RNA, 15 nt, Human
uaacaagccagauuu

SEQ ID NO: 1251492 - RNA, 16 nt, Human
uaacaacuaugauuug

SEQ ID NO: 1251493 - RNA, 21 nt, Human
uaacaacuaugauuuggaaaa

SEQ ID NO: 1251494 - RNA, 22 nt, Human
uaacaacuaugauuuggaaaau

SEQ ID NO: 1251495 - RNA, 15 nt, Human
uaacaaccaaagacu

SEQ ID NO: 1251496 - RNA, 19 nt, Human
uaacaagaacuuuaaauug

SEQ ID NO: 1251497 - RNA, 13 nt, Human
uaaacgucuuaaa

SEQ ID NO: 1251498 - RNA, 17 nt, Human
uaaacgucuuaaauauu

SEQ ID NO: 1251499 - RNA, 14 nt, Human
uaaacguggauguu

SEQ ID NO: 1251500 - RNA, 18 nt, Human
uaaacguggauguuacuc

SEQ ID NO: 1251501 - RNA, 13 nt, Human
uaaacuaaacacg

SEQ ID NO: 1251502 - RNA, 13 nt, Human
uaaacuaaaugug

SEQ ID NO: 1251503 - RNA, 14 nt, Human
uaaacuaaaugugc

SEQ ID NO: 1251504 - RNA, 16 nt, Human
uaaacuaauaauugca

SEQ ID NO: 1251505 - RNA, 17 nt, Human
uaaacuaauaauugcag

SEQ ID NO: 1251506 - RNA, 13 nt, Human
uaaaccuuuuuug

SEQ ID NO: 1251507 - RNA, 15 nt, Human
uaaacgaaacaaaga

SEQ ID NO: 1251508 - RNA, 22 nt, Human
uaaacgaaacaaagacaauuua

SEQ ID NO: 1251509 - RNA, 16 nt, Human
uaaacgauuuuuaaaa

SEQ ID NO: 1251510 - RNA, 17 nt, Human
uaaacgauuuuuaaaau

SEQ ID NO: 1251511 - RNA, 18 nt, Human
uaaacgauuuuuaaaaug

SEQ ID NO: 1251512 - RNA, 19 nt, Human
uaaacgauuuuuaaaaugu

SEQ ID NO: 1251513 - RNA, 20 nt, Human
uaaacgauuuuuaaaaugua

SEQ ID NO: 1251514 - RNA, 21 nt, Human
uaaacgauuuuuaaaauguac

SEQ ID NO: 1251515 - RNA, 15 nt, Human
uaaacggauuccaaa

SEQ ID NO: 1251516 - RNA, 22 nt, Human
uaaaccccaccccaaaauuagc

SEQ ID NO: 1251517 - RNA, 20 nt, Human
uaaaccccaccuuuauuccu

SEQ ID NO: 1251518 - RNA, 23 nt, Human
uaaacccauauuguaaaacaggu

SEQ ID NO: 1251519 - RNA, 22 nt, Human
uaaaccaucucccuggugcuua

SEQ ID NO: 1251520 - RNA, 14 nt, Human
uaaaccauugugca

SEQ ID NO: 1251521 - RNA, 16 nt, Human
uaaaccaucucccugg

SEQ ID NO: 1251522 - RNA, 19 nt, Human
uaaaccaucucccuggugc

SEQ ID NO: 1251523 - RNA, 16 nt, Human
uaaaccggaccaucuc

SEQ ID NO: 1251524 - RNA, 17 nt, Human
uaaaccgcuaaaagaaa

SEQ ID NO: 1251525 - RNA, 11 nt, Human
uaaagaaagug

SEQ ID NO: 1251526 - RNA, 13 nt, Human
uaaagaaagugua

SEQ ID NO: 1251527 - RNA, 14 nt, Human
uaaagaaaguguau

SEQ ID NO: 1251528 - RNA, 15 nt, Human
uaaagaaaguguauu

SEQ ID NO: 1251529 - RNA, 16 nt, Human
uaaagaaaguguauuu

SEQ ID NO: 1251530 - RNA, 17 nt, Human
uaaagaaaguguauuug

SEQ ID NO: 1251531 - RNA, 12 nt, Human
uaaacugccccc

SEQ ID NO: 1251532 - RNA, 15 nt, Human
uaaacucuguugcaa

SEQ ID NO: 1251533 - RNA, 17 nt, Human
uaaacuauaagcaagaa

SEQ ID NO: 1251534 - RNA, 15 nt, Human
uaaacuauaagcaag

SEQ ID NO: 1251535 - RNA, 20 nt, Human
uaaacuaucuuggugaauuu

SEQ ID NO: 1251536 - RNA, 21 nt, Human
uaaacuaucuuggugaauuuu

SEQ ID NO: 1251537 - RNA, 22 nt, Human
uaaacuaucuuggugaauuuuu

SEQ ID NO: 1251538 - RNA, 14 nt, Human
uaaacucaaaauau

SEQ ID NO: 1251539 - RNA, 16 nt, Human
uaaacucaaaauauuu

SEQ ID NO: 1251540 - RNA, 19 nt, Human
uaaacucaaaauauuugua

SEQ ID NO: 1251541 - RNA, 21 nt, Human
uaaacucaaaauauuuguaca

SEQ ID NO: 1251542 - RNA, 22 nt, Human
uaaacucaaaauauuuguacau

SEQ ID NO: 1251543 - RNA, 23 nt, Human
uaaacucaaaauauuuguacaua

SEQ ID NO: 1251544 - RNA, 16 nt, Human
uaaagacuuuuaugau

SEQ ID NO: 1251545 - RNA, 16 nt, Human
uaaagacguuuuauaa

SEQ ID NO: 1251546 - RNA, 21 nt, Human
uaaagacguuuuauaagcauc

SEQ ID NO: 1251547 - RNA, 23 nt, Human
uaaagacguuuuauaagcaucau

SEQ ID NO: 1251548 - RNA, 14 nt, Human
uaaagacuggcuuu

SEQ ID NO: 1251549 - RNA, 20 nt, Human
uaaagacuggcuuuuauuaa

SEQ ID NO: 1251550 - RNA, 15 nt, Human
uaaagacuggcuuuu

SEQ ID NO: 1251551 - RNA, 22 nt, Human
uaaagagacagugauauuggaa

SEQ ID NO: 1251552 - RNA, 15 nt, Human
uaaagacaccuacug

SEQ ID NO: 1251553 - RNA, 13 nt, Human
uaaagacaugaag

SEQ ID NO: 1251554 - RNA, 16 nt, Human
uaaagacaugaagcca

SEQ ID NO: 1251555 - RNA, 11 nt, Human
uaaagacauuc

SEQ ID NO: 1251556 - RNA, 14 nt, Human
uaaagaagguuuca

SEQ ID NO: 1251557 - RNA, 15 nt, Human
uaaagaauucaaauu

SEQ ID NO: 1251558 - RNA, 14 nt, Human
uaaagaauucaaau

SEQ ID NO: 1251559 - RNA, 15 nt, Human
uaaagaauuauuuug

SEQ ID NO: 1251560 - RNA, 16 nt, Human
uaaagaauuauuuugu

SEQ ID NO: 1251561 - RNA, 17 nt, Human
uaaagaauaugaaacau

SEQ ID NO: 1251562 - RNA, 13 nt, Human
uaaagaauuauuu

SEQ ID NO: 1251563 - RNA, 20 nt, Human
uaaagaauugugguuuauau

SEQ ID NO: 1251564 - RNA, 18 nt, Human
uaaagaauugugguuuau

SEQ ID NO: 1251565 - RNA, 14 nt, Human
uaaagacaaaaaac

SEQ ID NO: 1251566 - RNA, 20 nt, Human
uaaagaaaguguauuuggaa

SEQ ID NO: 1251567 - RNA, 23 nt, Human
uaaagaaaguguauuuggaaaua

SEQ ID NO: 1251568 - RNA, 24 nt, Human
uaaagaaaguguauuuggaaauaa

SEQ ID NO: 1251569 - RNA, 17 nt, Human
uaaagaaauagaacaag

SEQ ID NO: 1251570 - RNA, 16 nt, Human
uaaagaaauagaacaa

SEQ ID NO: 1251571 - RNA, 15 nt, Human
uaaagaacauaaaua

SEQ ID NO: 1251572 - RNA, 13 nt, Human
uaaagaacaaagu

SEQ ID NO: 1251573 - RNA, 19 nt, Human
uaaagaacacccuauauuu

SEQ ID NO: 1251574 - RNA, 13 nt, Human
uaaagaagaaaaa

SEQ ID NO: 1251575 - RNA, 23 nt, Human
uaaagaagaaaaaaaaaaauuca

SEQ ID NO: 1251576 - RNA, 11 nt, Human
uaaagaagacc

SEQ ID NO: 1251577 - RNA, 12 nt, Human
uaaagaagaccu

SEQ ID NO: 1251578 - RNA, 16 nt, Human
uaaagaagaccugaga

SEQ ID NO: 1251579 - RNA, 20 nt, Human
uaaagaagaccugagaaugu

SEQ ID NO: 1251580 - RNA, 21 nt, Human
uaaagaagaccugagaaugua

SEQ ID NO: 1251581 - RNA, 10 nt, Human
uaaagcaaaa

SEQ ID NO: 1251582 - RNA, 10 nt, Human
uaaagcaaau

SEQ ID NO: 1251583 - RNA, 22 nt, Human
uaaagauuuuuuaauaauuuag

SEQ ID NO: 1251584 - RNA, 19 nt, Human
uaaagauggaguuucuaag

SEQ ID NO: 1251585 - RNA, 21 nt, Human
uaaagauggaguuucuaaggu

SEQ ID NO: 1251586 - RNA, 22 nt, Human
uaaagauggaguuucuaagguc

SEQ ID NO: 1251587 - RNA, 19 nt, Human
uaaagauucuauaguucua

SEQ ID NO: 1251588 - RNA, 20 nt, Human
uaaagauucuauaguucuag

SEQ ID NO: 1251589 - RNA, 21 nt, Human
uaaagauucuauaguucuaga

SEQ ID NO: 1251590 - RNA, 24 nt, Human
uaaagauucuauaguucuagacau

SEQ ID NO: 1251591 - RNA, 13 nt, Human
uaaagauuugggu

SEQ ID NO: 1251592 - RNA, 15 nt, Human
uaaagauuuuuguuu

SEQ ID NO: 1251593 - RNA, 12 nt, Human
uaaagauuuuuu

SEQ ID NO: 1251594 - RNA, 16 nt, Human
uaaagauuuuuuaaua

SEQ ID NO: 1251595 - RNA, 17 nt, Human
uaaagauuuuuuaauaa

SEQ ID NO: 1251596 - RNA, 20 nt, Human
uaaagauuuuuuaauaauuu

SEQ ID NO: 1251597 - RNA, 21 nt, Human
uaaagauuuuuuaauaauuua

SEQ ID NO: 1251598 - RNA, 19 nt, Human
uaaagagucuagauucaaa

SEQ ID NO: 1251599 - RNA, 21 nt, Human
uaaagagucuagauucaaagg

SEQ ID NO: 1251600 - RNA, 13 nt, Human
uaaagagucuaga

SEQ ID NO: 1251601 - RNA, 15 nt, Human
uaaagagucuagauu

SEQ ID NO: 1251602 - RNA, 18 nt, Human
uaaagagucuagauucaa

SEQ ID NO: 1251603 - RNA, 18 nt, Human
uaaagaguuaguuugagu

SEQ ID NO: 1251604 - RNA, 13 nt, Human
uaaagagacgaau

SEQ ID NO: 1251605 - RNA, 23 nt, Human
uaaagauacagaacucuuucaaa

SEQ ID NO: 1251606 - RNA, 23 nt, Human
uaaagagucuagauucaaagguu

SEQ ID NO: 1251607 - RNA, 18 nt, Human
uaaagauauuuuuaucuu

SEQ ID NO: 1251608 - RNA, 21 nt, Human
uaaagauauuuuuaucuuuau

SEQ ID NO: 1251609 - RNA, 22 nt, Human
uaaagauauuuuuaucuuuaua

SEQ ID NO: 1251610 - RNA, 19 nt, Human
uaaagaugagcuuugucua

SEQ ID NO: 1251611 - RNA, 17 nt, Human
uaaagauggaguuucua

SEQ ID NO: 1251612 - RNA, 18 nt, Human
uaaagauggaguuucuaa

SEQ ID NO: 1251613 - RNA, 22 nt, Human
aaguuuaguuugaggaauucuu

SEQ ID NO: 1251614 - RNA, 23 nt, Human
aaguuuagccccugaaagccaug

SEQ ID NO: 1251615 - RNA, 13 nt, Human
aaguuuagcucug

SEQ ID NO: 1251616 - RNA, 14 nt, Human
aaguuuagcucuga

SEQ ID NO: 1251617 - RNA, 15 nt, Human
aaguuuagcucugag

SEQ ID NO: 1251618 - RNA, 16 nt, Human
aaguuuagcucugaga

SEQ ID NO: 1251619 - RNA, 18 nt, Human
aaguuuaucaguaaauaa

SEQ ID NO: 1251620 - RNA, 20 nt, Human
aaguuuaucaguaaauaacu

SEQ ID NO: 1251621 - RNA, 15 nt, Human
aaguuucaucauuuu

SEQ ID NO: 1251622 - RNA, 23 nt, Human
aaguuucauucucccuuucacua

SEQ ID NO: 1251623 - RNA, 19 nt, Human
aaguuugcacuaucuuuca

SEQ ID NO: 1251624 - RNA, 21 nt, Human
aaguuugcacuaucuuucagc

SEQ ID NO: 1251625 - RNA, 20 nt, Human
aaguuugcacuaucuuucag

SEQ ID NO: 1251626 - RNA, 16 nt, Human
aaguuuguuuuugcgu

SEQ ID NO: 1251627 - RNA, 17 nt, Human
aaguuuuaaaaagccag

SEQ ID NO: 1251628 - RNA, 19 nt, Human
aaguuuuaaaaagccaguu

SEQ ID NO: 1251629 - RNA, 13 nt, Human
aaguuuuauauau

SEQ ID NO: 1251630 - RNA, 14 nt, Human
aaguuuuauauauu

SEQ ID NO: 1251631 - RNA, 15 nt, Human
aaguuuuauauauua

SEQ ID NO: 1251632 - RNA, 16 nt, Human
aaguuuuauauauuau

SEQ ID NO: 1251633 - RNA, 17 nt, Human
aaguuuuauauauuaua

SEQ ID NO: 1251634 - RNA, 21 nt, Human
aaguuuuauauauuauaugga

SEQ ID NO: 1251635 - RNA, 23 nt, Human
aaguuuuauauauuauauggaaa

SEQ ID NO: 1251636 - RNA, 17 nt, Human
uaaaauguucacuuuug

SEQ ID NO: 1251637 - RNA, 22 nt, Human
uaaaauguucacuuuugacaaa

SEQ ID NO: 1251638 - RNA, 19 nt, Human
uaaaauuuuuaaucuuuaa

SEQ ID NO: 1251639 - RNA, 13 nt, Human
uaaaccacugaaa

SEQ ID NO: 1251640 - RNA, 20 nt, Human
uaaaccacugaaaaaauaua

SEQ ID NO: 1251641 - RNA, 13 nt, Human
uaaaccaucuccc

SEQ ID NO: 1251642 - RNA, 18 nt, Human
uaaacaaacuguguaacu

SEQ ID NO: 1251643 - RNA, 19 nt, Human
uaaacaaacuguguaacug

SEQ ID NO: 1251644 - RNA, 22 nt, Human
uaaacaaacuguguaacugccc

SEQ ID NO: 1251645 - RNA, 13 nt, Human
uaaacaaagguug

SEQ ID NO: 1251646 - RNA, 17 nt, Human
uaaaauuuuuaaucuuu

SEQ ID NO: 1251647 - RNA, 20 nt, Human
uaaaauuauagcucuaaugu

SEQ ID NO: 1251648 - RNA, 21 nt, Human
uaaaauuauagcucuaauguu

SEQ ID NO: 1251649 - RNA, 13 nt, Human
uaaaauuauuuca

SEQ ID NO: 1251650 - RNA, 14 nt, Human
uaaaauuuguugca

SEQ ID NO: 1251651 - RNA, 15 nt, Human
uaaaauuuguugcau

SEQ ID NO: 1251652 - RNA, 15 nt, Human
uaaaauuauuucaug

SEQ ID NO: 1251653 - RNA, 20 nt, Human
uaaaauuuguucuuguauuu

SEQ ID NO: 1251654 - RNA, 19 nt, Human
uaaaauuacaacuaaguga

SEQ ID NO: 1251655 - RNA, 17 nt, Human
uaaaauuacaacuaagu

SEQ ID NO: 1251656 - RNA, 15 nt, Human
uaaaauuacaacuaa

SEQ ID NO: 1251657 - RNA, 13 nt, Human
uaaaauuacaacu

SEQ ID NO: 1251658 - RNA, 18 nt, Human
uaaaauuauagcucuaau

SEQ ID NO: 1251659 - RNA, 16 nt, Human
uaaaauuauagcucua

SEQ ID NO: 1251660 - RNA, 15 nt, Human
uaaaauuauagcucu

SEQ ID NO: 1251661 - RNA, 16 nt, Human
uaaaauuaaagcugaa

SEQ ID NO: 1251662 - RNA, 18 nt, Human
uaaaauuaaagcugaaaa

SEQ ID NO: 1251663 - RNA, 19 nt, Human
uaaaauuaaagcugaaaac

SEQ ID NO: 1251664 - RNA, 17 nt, Human
aaguucugcagauaaac

SEQ ID NO: 1251665 - RNA, 20 nt, Human
aaguuuaauggugccuucau

SEQ ID NO: 1251666 - RNA, 16 nt, Human
aaguuuaccagaaagc

SEQ ID NO: 1251667 - RNA, 17 nt, Human
aaguuuagauuuuaauc

SEQ ID NO: 1251668 - RNA, 21 nt, Human
aaguuuagccccugaaagcca

SEQ ID NO: 1251669 - RNA, 15 nt, Human
aaguuccaagagucu

SEQ ID NO: 1251670 - RNA, 16 nt, Human
aaguuccaagagucua

SEQ ID NO: 1251671 - RNA, 17 nt, Human
aaguuccaagagucuaa

SEQ ID NO: 1251672 - RNA, 20 nt, Human
aaguuccaagagucuaaaga

SEQ ID NO: 1251673 - RNA, 21 nt, Human
aaguuccaagagucuaaagau

SEQ ID NO: 1251674 - RNA, 19 nt, Human
aaguuccaaguugcuaaua

SEQ ID NO: 1251675 - RNA, 12 nt, Human
aaguucuaagau

SEQ ID NO: 1251676 - RNA, 14 nt, Human
aaguucuaagauuc

SEQ ID NO: 1251677 - RNA, 15 nt, Human
aaguucuaagauucu

SEQ ID NO: 1251678 - RNA, 16 nt, Human
aaguucuaagauucua

SEQ ID NO: 1251679 - RNA, 18 nt, Human
aaguucuaagauucuaau

SEQ ID NO: 1251680 - RNA, 19 nt, Human
aaguucuaagauucuaaug

SEQ ID NO: 1251681 - RNA, 20 nt, Human
aaguucuaagauucuaauga

SEQ ID NO: 1251682 - RNA, 21 nt, Human
aaguucuaagauucuaaugau

SEQ ID NO: 1251683 - RNA, 16 nt, Human
aaguucuaagauucug

SEQ ID NO: 1251684 - RNA, 17 nt, Human
aaguucuaagauucuga

SEQ ID NO: 1251685 - RNA, 17 nt, Human
aaguucuaauaauuucu

SEQ ID NO: 1251686 - RNA, 18 nt, Human
aaguucuaauaauuucua

SEQ ID NO: 1251687 - RNA, 19 nt, Human
aaguucuaauaauuucuaa

SEQ ID NO: 1251688 - RNA, 21 nt, Human
aaguucuaauaauuucuaaug

SEQ ID NO: 1251689 - RNA, 14 nt, Human
aaguuauugcaguu

SEQ ID NO: 1251690 - RNA, 15 nt, Human
aaguuauugcaguuu

SEQ ID NO: 1251691 - RNA, 17 nt, Human
aaguuauugcaguuuau

SEQ ID NO: 1251692 - RNA, 23 nt, Human
aaguuauugcaguuuaucauuca

SEQ ID NO: 1251693 - RNA, 17 nt, Human
guuuuuuuuuaaagacu

SEQ ID NO: 1251694 - RNA, 17 nt, Human
guuuuuuuuuucuuguc

SEQ ID NO: 1251695 - RNA, 17 nt, Human
guuuuuuuuuuguuugu

SEQ ID NO: 1251696 - RNA, 18 nt, Human
guuuuuuuuuucuugucu

SEQ ID NO: 1251697 - RNA, 21 nt, Human
guuuuuuuuuucuugucuaua

SEQ ID NO: 1251698 - RNA, 16 nt, Human
guuuuuuuuuuguuug

SEQ ID NO: 1251699 - RNA, 23 nt, Human
aaguguuagccuuuuuuccccag

SEQ ID NO: 1251700 - RNA, 22 nt, Human
aaguguuagccuuuuuucccca

SEQ ID NO: 1251701 - RNA, 14 nt, Human
aaguguucauuguu

SEQ ID NO: 1251702 - RNA, 23 nt, Human
aaguguuucauaaauuugagagu

SEQ ID NO: 1251703 - RNA, 13 nt, Human
aaguguuuucucu

SEQ ID NO: 1251704 - RNA, 22 nt, Human
aaguguuuucucugaacacauu

SEQ ID NO: 1251705 - RNA, 14 nt, Human
aaguguuuucucug

SEQ ID NO: 1251706 - RNA, 13 nt, Human
aaguuaaauguag

SEQ ID NO: 1251707 - RNA, 17 nt, Human
aaguuaaauguagaguu

SEQ ID NO: 1251708 - RNA, 16 nt, Human
aaguuacauguuugca

SEQ ID NO: 1251709 - RNA, 19 nt, Human
aaguuacauguuugcaccu

SEQ ID NO: 1251710 - RNA, 20 nt, Human
aaguuacauguuugcaccuu

SEQ ID NO: 1251711 - RNA, 22 nt, Human
aaguuagaacuagccaaaccag

SEQ ID NO: 1251712 - RNA, 17 nt, Human
aaguuauuaauuucuuc

SEQ ID NO: 1251713 - RNA, 18 nt, Human
aaguuauuaauuucuuca

SEQ ID NO: 1251714 - RNA, 17 nt, Human
guguugaaaauguucag

SEQ ID NO: 1251715 - RNA, 19 nt, Human
guguugagccuuuucccuc

SEQ ID NO: 1251716 - RNA, 22 nt, Human
guguugagcaucugucccccuu

SEQ ID NO: 1251717 - RNA, 13 nt, Human
guguugauacugu

SEQ ID NO: 1251718 - RNA, 13 nt, Human
guguuuaagacau

SEQ ID NO: 1251719 - RNA, 14 nt, Human
guguuuaagacauu

SEQ ID NO: 1251720 - RNA, 14 nt, Human
guguugauacuguu

SEQ ID NO: 1251721 - RNA, 12 nt, Human
guguuuaaaacu

SEQ ID NO: 1251722 - RNA, 21 nt, Human
guguuuaaaguucaacauguu

SEQ ID NO: 1251723 - RNA, 16 nt, Human
guguguuaagcucugc

SEQ ID NO: 1251724 - RNA, 17 nt, Human
guguguuaagcucugcu

SEQ ID NO: 1251725 - RNA, 16 nt, Human
guguguugauacuguu

SEQ ID NO: 1251726 - RNA, 14 nt, Human
guguguugauacug

SEQ ID NO: 1251727 - RNA, 15 nt, Human
guguucuguuuuguu

SEQ ID NO: 1251728 - RNA, 13 nt, Human
guguucuguuuug

SEQ ID NO: 1251729 - RNA, 16 nt, Human
guguugaaaauguuca

SEQ ID NO: 1251730 - RNA, 15 nt, Human
guguguguguguaug

SEQ ID NO: 1251731 - RNA, 19 nt, Human
guguguguaugcgugugug

SEQ ID NO: 1251732 - RNA, 15 nt, Human
guguguguauauaua

SEQ ID NO: 1251733 - RNA, 13 nt, Human
gugugugugaaug

SEQ ID NO: 1251734 - RNA, 19 nt, Human
aagcaaguaaaaaggcuaa

SEQ ID NO: 1251735 - RNA, 21 nt, Human
aagcaagcauucagaagaaaa

SEQ ID NO: 1251736 - RNA, 13 nt, Human
aagcaagcuuaau

SEQ ID NO: 1251737 - RNA, 20 nt, Human
aagcaaaugucaugcugccu

SEQ ID NO: 1251738 - RNA, 21 nt, Human
aagcaaaugucaugcugccuu

SEQ ID NO: 1251739 - RNA, 22 nt, Human
aagcaaaugucaugcugccuua

SEQ ID NO: 1251740 - RNA, 14 nt, Human
aagcaagcaagagg

SEQ ID NO: 1251741 - RNA, 15 nt, Human
aagcaagcaagaggc

SEQ ID NO: 1251742 - RNA, 15 nt, Human
aagcaagcauucaga

SEQ ID NO: 1251743 - RNA, 19 nt, Human
aagcaagcauucagaagaa

SEQ ID NO: 1251744 - RNA, 20 nt, Human
aagcaaguaaaaaggcuaaa

SEQ ID NO: 1251745 - RNA, 18 nt, Human
guguccacgacugucucc

SEQ ID NO: 1251746 - RNA, 19 nt, Human
aagcaagcugauuaaauga

SEQ ID NO: 1251747 - RNA, 16 nt, Human
aagcaaguauuagaau

SEQ ID NO: 1251748 - RNA, 18 nt, Human
guguccaugcgcucaggg

SEQ ID NO: 1251749 - RNA, 19 nt, Human
guguccaugcgcucagggc

SEQ ID NO: 1251750 - RNA, 20 nt, Human
guguccaugcgcucagggcc

SEQ ID NO: 1251751 - RNA, 21 nt, Human
guguccaugcgcucagggcca

SEQ ID NO: 1251752 - RNA, 16 nt, Human
gugucuugggcagagc

SEQ ID NO: 1251753 - RNA, 17 nt, Human
gugucuugggcagagcu

SEQ ID NO: 1251754 - RNA, 20 nt, Human
gugucuugggcagagcuggc

SEQ ID NO: 1251755 - RNA, 23 nt, Human
gugucuugggcagagcuggcucu

SEQ ID NO: 1251756 - RNA, 14 nt, Human
gugugaggccaggg

SEQ ID NO: 1251757 - RNA, 15 nt, Human
gugugaggccagggc

SEQ ID NO: 1251758 - RNA, 17 nt, Human
gugugaggccagggcag

SEQ ID NO: 1251759 - RNA, 20 nt, Human
aagcaaaugugaaucauuuu

SEQ ID NO: 1251760 - RNA, 14 nt, Human
aagcaaaugugaau

SEQ ID NO: 1251761 - RNA, 13 nt, Human
aagcaaaugugaa

SEQ ID NO: 1251762 - RNA, 12 nt, Human
aagcaaaugucu

SEQ ID NO: 1251763 - RNA, 17 nt, Human
aagcaaaucgaaugaaa

SEQ ID NO: 1251764 - RNA, 18 nt, Human
aagcaaaucgaaugaaau

SEQ ID NO: 1251765 - RNA, 16 nt, Human
aagcaaaugucaugcu

SEQ ID NO: 1251766 - RNA, 19 nt, Human
aagcaaaugucaugcugcc

SEQ ID NO: 1251767 - RNA, 19 nt, Human
aagcaaaauuuuuucucua

SEQ ID NO: 1251768 - RNA, 22 nt, Human
aagcaaaauuauagaaguuuag

SEQ ID NO: 1251769 - RNA, 21 nt, Human
aagcaaacucuaaaauuauaa

SEQ ID NO: 1251770 - RNA, 14 nt, Human
aagcaaaucauuug

SEQ ID NO: 1251771 - RNA, 16 nt, Human
aagcaaaucauuuguu

SEQ ID NO: 1251772 - RNA, 19 nt, Human
aagcaaaucauuuguuuaa

SEQ ID NO: 1251773 - RNA, 13 nt, Human
aagaugaucauuu

SEQ ID NO: 1251774 - RNA, 13 nt, Human
aagaugacugagg

SEQ ID NO: 1251775 - RNA, 14 nt, Human
aagaugacugaggg

SEQ ID NO: 1251776 - RNA, 15 nt, Human
aagaugacugagggu

SEQ ID NO: 1251777 - RNA, 18 nt, Human
aagaugcacuuugcuuua

SEQ ID NO: 1251778 - RNA, 16 nt, Human
aagaugcacuuugcuu

SEQ ID NO: 1251779 - RNA, 22 nt, Human
aagauguagaggagaaacugga

SEQ ID NO: 1251780 - RNA, 14 nt, Human
aagaucccauuuga

SEQ ID NO: 1251781 - RNA, 22 nt, Human
aagauccuagauccuaaggguc

SEQ ID NO: 1251782 - RNA, 12 nt, Human
aagaucaauaaa

SEQ ID NO: 1251783 - RNA, 15 nt, Human
aagaucacuuucuca

SEQ ID NO: 1251784 - RNA, 17 nt, Human
aagaucacuuucucagu

SEQ ID NO: 1251785 - RNA, 23 nt, Human
aagaucacuuucucaguuuucau

SEQ ID NO: 1251786 - RNA, 18 nt, Human
guggggggggugcugggc

SEQ ID NO: 1251787 - RNA, 24 nt, Human
gugggauguucagcacugucccuu

SEQ ID NO: 1251788 - RNA, 22 nt, Human
gugggauuaugggucacaggaa

SEQ ID NO: 1251789 - RNA, 19 nt, Human
guggggggucccaaagagu

SEQ ID NO: 1251790 - RNA, 19 nt, Human
guggggguagggggcugga

SEQ ID NO: 1251791 - RNA, 22 nt, Human
guggggguagggggcuggagga

SEQ ID NO: 1251792 - RNA, 18 nt, Human
guggguccaugggcagag

SEQ ID NO: 1251793 - RNA, 20 nt, Human
guggguccaugggcagagcc

SEQ ID NO: 1251794 - RNA, 22 nt, Human
guggguccaugggcagagccca

SEQ ID NO: 1251795 - RNA, 15 nt, Human
guggugucagacccu

SEQ ID NO: 1251796 - RNA, 23 nt, Human
guggugugucccccucuguccag

SEQ ID NO: 1251797 - RNA, 22 nt, Human
gugguggaaacuuuucuuaaaa

SEQ ID NO: 1251798 - RNA, 16 nt, Human
gugguggcacaggccc

SEQ ID NO: 1251799 - RNA, 18 nt, Human
gugguggccuggucccug

SEQ ID NO: 1251800 - RNA, 13 nt, Human
gugguggccuggu

SEQ ID NO: 1251801 - RNA, 17 nt, Human
guggcccgacagccugg

SEQ ID NO: 1251802 - RNA, 23 nt, Human
guggccccguuucugguggucug

SEQ ID NO: 1251803 - RNA, 23 nt, Human
guggccucagcucccacaagccu

SEQ ID NO: 1251804 - RNA, 21 nt, Human
guggcuucccgcucagcccuc

SEQ ID NO: 1251805 - RNA, 22 nt, Human
guggcuugagaaauauggacac

SEQ ID NO: 1251806 - RNA, 17 nt, Human
guggcuuucagagccuc

SEQ ID NO: 1251807 - RNA, 19 nt, Human
guggcuuuaggagcagugg

SEQ ID NO: 1251808 - RNA, 16 nt, Human
gugggaaaugguacug

SEQ ID NO: 1251809 - RNA, 23 nt, Human
gugggagcaaacugcaugcccag

SEQ ID NO: 1251810 - RNA, 20 nt, Human
gugggagcaaacugcaugcc

SEQ ID NO: 1251811 - RNA, 22 nt, Human
gugggagaccggccugccagga

SEQ ID NO: 1251812 - RNA, 23 nt, Human
gugggagaccggccugccaggag

SEQ ID NO: 1251813 - RNA, 19 nt, Human
gugggagcaaacugcaugc

SEQ ID NO: 1251814 - RNA, 13 nt, Human
gugggagccucgc

SEQ ID NO: 1251815 - RNA, 11 nt, Human
gugggagccuc

SEQ ID NO: 1251816 - RNA, 12 nt, Human
gugggagccucg

SEQ ID NO: 1251817 - RNA, 14 nt, Human
gugggagccucgca

SEQ ID NO: 1251818 - RNA, 23 nt, Human
gugggauguucagcacugucccu

SEQ ID NO: 1251819 - RNA, 12 nt, Human
aagaccagucca

SEQ ID NO: 1251820 - RNA, 13 nt, Human
aagaccauuuuuc

SEQ ID NO: 1251821 - RNA, 23 nt, Human
aagaccccuuaccacugcucuga

SEQ ID NO: 1251822 - RNA, 13 nt, Human
aagacccccagca

SEQ ID NO: 1251823 - RNA, 15 nt, Human
aagacccccagcacu

SEQ ID NO: 1251824 - RNA, 15 nt, Human
aagaccccuaacccu

SEQ ID NO: 1251825 - RNA, 14 nt, Human
aagacucaaauguu

SEQ ID NO: 1251826 - RNA, 16 nt, Human
aagacucaaauguucu

SEQ ID NO: 1251827 - RNA, 17 nt, Human
aagacucaaauguucua

SEQ ID NO: 1251828 - RNA, 18 nt, Human
aagacucaaauguucuaa

SEQ ID NO: 1251829 - RNA, 19 nt, Human
aagacucaaauguucuaag

SEQ ID NO: 1251830 - RNA, 10 nt, Human
aagacucauc

SEQ ID NO: 1251831 - RNA, 11 nt, Human
aagacucaucc

SEQ ID NO: 1251832 - RNA, 12 nt, Human
aagacucauccg

SEQ ID NO: 1251833 - RNA, 14 nt, Human
aagacuccuagcug

SEQ ID NO: 1251834 - RNA, 18 nt, Human
aagacugcuguggccagg

SEQ ID NO: 1251835 - RNA, 19 nt, Human
aagacugcuguggccagga

SEQ ID NO: 1251836 - RNA, 20 nt, Human
aagacugcuguggccaggag

SEQ ID NO: 1251837 - RNA, 21 nt, Human
aagacugcuguggccaggagg

SEQ ID NO: 1251838 - RNA, 20 nt, Human
aagacuggaagcuaauuugc

SEQ ID NO: 1251839 - RNA, 22 nt, Human
aagacuggaagcuaauuugcau

SEQ ID NO: 1251840 - RNA, 23 nt, Human
aagacuggaagcuaauuugcauu

SEQ ID NO: 1251841 - RNA, 22 nt, Human
aagacugcuguggccaggaggu

SEQ ID NO: 1251842 - RNA, 11 nt, Human
aagacuggcuu

SEQ ID NO: 1251843 - RNA, 23 nt, Human
aagacuggcuuuuauuaaugcac

SEQ ID NO: 1251844 - RNA, 15 nt, Human
aagagauuccugagc

SEQ ID NO: 1251845 - RNA, 22 nt, Human
aagacuggcuuuuauuaaugca

SEQ ID NO: 1251846 - RNA, 16 nt, Human
guggcccgacagccug

SEQ ID NO: 1251847 - RNA, 16 nt, Human
guggccccguuucugg

SEQ ID NO: 1251848 - RNA, 17 nt, Human
guggccccguuucuggu

SEQ ID NO: 1251849 - RNA, 21 nt, Human
guggccccacccugggcccug

SEQ ID NO: 1251850 - RNA, 23 nt, Human
guggccccacccugggcccuggg

SEQ ID NO: 1251851 - RNA, 20 nt, Human
aagagcuacguauuuaauag

SEQ ID NO: 1251852 - RNA, 12 nt, Human
aagagcucagga

SEQ ID NO: 1251853 - RNA, 13 nt, Human
aagagcucaggau

SEQ ID NO: 1251854 - RNA, 24 nt, Human
aagaauuucuaggacugaauuaug

SEQ ID NO: 1251855 - RNA, 21 nt, Human
aagaauucaaauuuuaucugc

SEQ ID NO: 1251856 - RNA, 18 nt, Human
aagaauucaaauuuuauc

SEQ ID NO: 1251857 - RNA, 17 nt, Human
aagaauucaaauuuuau

SEQ ID NO: 1251858 - RNA, 13 nt, Human
aagaauucaaauu

SEQ ID NO: 1251859 - RNA, 12 nt, Human
aagaauucaaau

SEQ ID NO: 1251860 - RNA, 18 nt, Human
aagaauguuaagacuuga

SEQ ID NO: 1251861 - RNA, 11 nt, Human
aagaauuauuu

SEQ ID NO: 1251862 - RNA, 16 nt, Human
aagaauuauuuugaug

SEQ ID NO: 1251863 - RNA, 14 nt, Human
aagaauuauuuugu

SEQ ID NO: 1251864 - RNA, 16 nt, Human
aagacaaaaagcuacu

SEQ ID NO: 1251865 - RNA, 13 nt, Human
aagacccaaaagg

SEQ ID NO: 1251866 - RNA, 13 nt, Human
guggcagcaacaa

SEQ ID NO: 1251867 - RNA, 14 nt, Human
guggcagcccagcc

SEQ ID NO: 1251868 - RNA, 19 nt, Human
guggcagcaacggcacagc

SEQ ID NO: 1251869 - RNA, 16 nt, Human
aagaauaucuggcaaa

SEQ ID NO: 1251870 - RNA, 20 nt, Human
aagaauaucuguaaugguac

SEQ ID NO: 1251871 - RNA, 17 nt, Human
aagaauaucuguaaugg

SEQ ID NO: 1251872 - RNA, 19 nt, Human
aagaauaucuguaauggua

SEQ ID NO: 1251873 - RNA, 21 nt, Human
aagaaucacaauaauuuucua

SEQ ID NO: 1251874 - RNA, 23 nt, Human
aagaaucagagaaggaacauacc

SEQ ID NO: 1251875 - RNA, 19 nt, Human
aagaauguuaagacuugac

SEQ ID NO: 1251876 - RNA, 12 nt, Human
aagaaucagaga

SEQ ID NO: 1251877 - RNA, 12 nt, Human
aagaauguuaag

SEQ ID NO: 1251878 - RNA, 17 nt, Human
guggacugagugggaag

SEQ ID NO: 1251879 - RNA, 18 nt, Human
guggacugagugggaagc

SEQ ID NO: 1251880 - RNA, 20 nt, Human
guggacugagugggaagccc

SEQ ID NO: 1251881 - RNA, 14 nt, Human
guggacucagggca

SEQ ID NO: 1251882 - RNA, 15 nt, Human
guggacucagggcag

SEQ ID NO: 1251883 - RNA, 16 nt, Human
guggacucagggcagc

SEQ ID NO: 1251884 - RNA, 21 nt, Human
guggacucagggcagcgccag

SEQ ID NO: 1251885 - RNA, 21 nt, Human
guggacuagaccuccagcugu

SEQ ID NO: 1251886 - RNA, 12 nt, Human
guggacucuggu

SEQ ID NO: 1251887 - RNA, 21 nt, Human
guggcaaagcagcaacuauuc

SEQ ID NO: 1251888 - RNA, 19 nt, Human
guggcaagugaauuugccu

SEQ ID NO: 1251889 - RNA, 12 nt, Human
guggcacaggcc

SEQ ID NO: 1251890 - RNA, 15 nt, Human
guggcagaguuacag

SEQ ID NO: 1251891 - RNA, 17 nt, Human
guggcacuggggcaggg

SEQ ID NO: 1251892 - RNA, 18 nt, Human
guggcacuggggcagggg

SEQ ID NO: 1251893 - RNA, 16 nt, Human
guggcacaggcccccu

SEQ ID NO: 1251894 - RNA, 19 nt, Human
guggacaccugcccugccc

SEQ ID NO: 1251895 - RNA, 18 nt, Human
guggacaccugcccugcc

SEQ ID NO: 1251896 - RNA, 17 nt, Human
guggacaccugcccugc

SEQ ID NO: 1251897 - RNA, 16 nt, Human
guggacaccugcccug

SEQ ID NO: 1251898 - RNA, 14 nt, Human
guggacaccugccc

SEQ ID NO: 1251899 - RNA, 13 nt, Human
guggacaccugcc

SEQ ID NO: 1251900 - RNA, 12 nt, Human
guggacaccugc

SEQ ID NO: 1251901 - RNA, 11 nt, Human
guggacaccug

SEQ ID NO: 1251902 - RNA, 16 nt, Human
guggaagcuuggggaa

SEQ ID NO: 1251903 - RNA, 16 nt, Human
guggacacacacagac

SEQ ID NO: 1251904 - RNA, 19 nt, Human
guggaagcuuggggaagac

SEQ ID NO: 1251905 - RNA, 14 nt, Human
guggaagcuugggg

SEQ ID NO: 1251906 - RNA, 16 nt, Human
guggaacugcugccac

SEQ ID NO: 1251907 - RNA, 15 nt, Human
gugcuggggccuggu

SEQ ID NO: 1251908 - RNA, 20 nt, Human
gugcuggucccggggccagc

SEQ ID NO: 1251909 - RNA, 19 nt, Human
gugcuggggccugguuccc

SEQ ID NO: 1251910 - RNA, 19 nt, Human
gugcugggccccugccucu

SEQ ID NO: 1251911 - RNA, 16 nt, Human
gugcugggccccugcc

SEQ ID NO: 1251912 - RNA, 18 nt, Human
gugcuggagguuggaucu

SEQ ID NO: 1251913 - RNA, 15 nt, Human
gugcugcugugugcu

SEQ ID NO: 1251914 - RNA, 16 nt, Human
gugcugcugugugcuu

SEQ ID NO: 1251915 - RNA, 18 nt, Human
gugcuggaauucuaacaa

SEQ ID NO: 1251916 - RNA, 23 nt, Human
aagaagguuucagaaagaagugg

SEQ ID NO: 1251917 - RNA, 16 nt, Human
aagaagggcugguauu

SEQ ID NO: 1251918 - RNA, 17 nt, Human
aagaagggacugagaga

SEQ ID NO: 1251919 - RNA, 14 nt, Human
aagaaggugaauag

SEQ ID NO: 1251920 - RNA, 22 nt, Human
aagaaguaaaagcaaaaaagaa

SEQ ID NO: 1251921 - RNA, 14 nt, Human
aagaaguaaaagca

SEQ ID NO: 1251922 - RNA, 20 nt, Human
gugcacuaauguguaagaca

SEQ ID NO: 1251923 - RNA, 22 nt, Human
gugcacuaauguguaagacaaa

SEQ ID NO: 1251924 - RNA, 19 nt, Human
gugcauuuggagggaguga

SEQ ID NO: 1251925 - RNA, 18 nt, Human
gugccaaguccagguccu

SEQ ID NO: 1251926 - RNA, 19 nt, Human
gugccaaguccagguccug

SEQ ID NO: 1251927 - RNA, 20 nt, Human
gugccaaguccagguccugg

SEQ ID NO: 1251928 - RNA, 21 nt, Human
gugccaaguccagguccuggu

SEQ ID NO: 1251929 - RNA, 23 nt, Human
aacugcaggcccuggccuccccu

SEQ ID NO: 1251930 - RNA, 14 nt, Human
aacugcagggaaaa

SEQ ID NO: 1251931 - RNA, 23 nt, Human
aacugcagggaaaauuauuugca

SEQ ID NO: 1251932 - RNA, 16 nt, Human
aacugcauacacuuuu

SEQ ID NO: 1251933 - RNA, 17 nt, Human
aacugcaugcccagaga

SEQ ID NO: 1251934 - RNA, 18 nt, Human
aacugcaugcccagagac

SEQ ID NO: 1251935 - RNA, 22 nt, Human
aacugcaugcccagagacccag

SEQ ID NO: 1251936 - RNA, 23 nt, Human
gugcacguaaaguacuuguaguu

SEQ ID NO: 1251937 - RNA, 15 nt, Human
aacuuguauuaugug

SEQ ID NO: 1251938 - RNA, 20 nt, Human
aacuuguaauuuuuuuaauu

SEQ ID NO: 1251939 - RNA, 15 nt, Human
aacuuguaaaugugg

SEQ ID NO: 1251940 - RNA, 21 nt, Human
aacuugguuuugcuacauaau

SEQ ID NO: 1251941 - RNA, 16 nt, Human
aacuugguuuugcuac

SEQ ID NO: 1251942 - RNA, 22 nt, Human
aacuugguuuugcuacauaauu

SEQ ID NO: 1251943 - RNA, 17 nt, Human
aacuuggauacuuggau

SEQ ID NO: 1251944 - RNA, 18 nt, Human
aacuugcuuaucaacuuc

SEQ ID NO: 1251945 - RNA, 22 nt, Human
gugccaaguccagguccuggug

SEQ ID NO: 1251946 - RNA, 14 nt, Human
gugccaauuucaag

SEQ ID NO: 1251947 - RNA, 21 nt, Human
gugccugacacacuaaccaag

SEQ ID NO: 1251948 - RNA, 16 nt, Human
gugccuggccacgccc

SEQ ID NO: 1251949 - RNA, 22 nt, Human
aagaaaauuuuuguaguagcgu

SEQ ID NO: 1251950 - RNA, 19 nt, Human
aagaaaauuuuuguaguag

SEQ ID NO: 1251951 - RNA, 15 nt, Human
aagaaaggcugcugu

SEQ ID NO: 1251952 - RNA, 23 nt, Human
aagaaaggaagcauuguaaaaua

SEQ ID NO: 1251953 - RNA, 20 nt, Human
aagaaaggcuguuaaauaca

SEQ ID NO: 1251954 - RNA, 16 nt, Human
aagaaagucagccaua

SEQ ID NO: 1251955 - RNA, 13 nt, Human
aagaaaguccacc

SEQ ID NO: 1251956 - RNA, 20 nt, Human
aagaaaggcugcuguacuga

SEQ ID NO: 1251957 - RNA, 22 nt, Human
aagaaagugagcaguguuagcu

SEQ ID NO: 1251958 - RNA, 12 nt, Human
aagaaaguguau

SEQ ID NO: 1251959 - RNA, 15 nt, Human
aagaaaguguauuug

SEQ ID NO: 1251960 - RNA, 18 nt, Human
aagaaaguguauuuggaa

SEQ ID NO: 1251961 - RNA, 21 nt, Human
aagaaauaaaaggaagccaaa

SEQ ID NO: 1251962 - RNA, 23 nt, Human
aagaaauaaaaggaagccaaaga

SEQ ID NO: 1251963 - RNA, 15 nt, Human
aagaaauaaguuuuu

SEQ ID NO: 1251964 - RNA, 13 nt, Human
aagaaaauaucac

SEQ ID NO: 1251965 - RNA, 13 nt, Human
aagaaaaucacuu

SEQ ID NO: 1251966 - RNA, 22 nt, Human
aagaaaaucuauuuuguaacuu

SEQ ID NO: 1251967 - RNA, 15 nt, Human
aagaaaaucuuuaua

SEQ ID NO: 1251968 - RNA, 16 nt, Human
aagaaaauuacaaaaa

SEQ ID NO: 1251969 - RNA, 22 nt, Human
aagaagcaguggccuuauugca

SEQ ID NO: 1251970 - RNA, 22 nt, Human
aagaagcauuuuguaaguugaa

SEQ ID NO: 1251971 - RNA, 19 nt, Human
aagaagccacagaccuagg

SEQ ID NO: 1251972 - RNA, 15 nt, Human
aagaagcccccagcu

SEQ ID NO: 1251973 - RNA, 16 nt, Human
aagaagcccccagcua

SEQ ID NO: 1251974 - RNA, 19 nt, Human
aagaagcccccagcuaaga

SEQ ID NO: 1251975 - RNA, 17 nt, Human
aagaagcccggcuccug

SEQ ID NO: 1251976 - RNA, 19 nt, Human
aagaagcccggcuccuggu

SEQ ID NO: 1251977 - RNA, 24 nt, Human
aagaagcccggcuccuggucaccu

SEQ ID NO: 1251978 - RNA, 23 nt, Human
aagaaggcaucgucaugcacagu

SEQ ID NO: 1251979 - RNA, 16 nt, Human
aagaagggacugagag

SEQ ID NO: 1251980 - RNA, 17 nt, Human
aagaaaacaucuuuaag

SEQ ID NO: 1251981 - RNA, 13 nt, Human
aagaaaacaucuu

SEQ ID NO: 1251982 - RNA, 11 nt, Human
aagaaaagaug

SEQ ID NO: 1251983 - RNA, 23 nt, Human
aagaaaagaugcacuuugcuuua

SEQ ID NO: 1251984 - RNA, 22 nt, Human
aagaaaagguucuuacugcuug

SEQ ID NO: 1251985 - RNA, 20 nt, Human
aagaaaauaagagcucagga

SEQ ID NO: 1251986 - RNA, 13 nt, Human
aacuuguuuucug

SEQ ID NO: 1251987 - RNA, 16 nt, Human
aacuugugcccucccu

SEQ ID NO: 1251988 - RNA, 19 nt, Human
aacuugugucccuaaugug

SEQ ID NO: 1251989 - RNA, 14 nt, Human
aagaaaaauaaaga

SEQ ID NO: 1251990 - RNA, 15 nt, Human
aagaaaaauaaagaa

SEQ ID NO: 1251991 - RNA, 16 nt, Human
aagaaaaauaaagaaa

SEQ ID NO: 1251992 - RNA, 18 nt, Human
gucgcccuggacugugug

SEQ ID NO: 1251993 - RNA, 20 nt, Human
gucgcccaugcuggagugca

SEQ ID NO: 1251994 - RNA, 14 nt, Human
gucgcccuggacug

SEQ ID NO: 1251995 - RNA, 15 nt, Human
gucuacuugcucagg

SEQ ID NO: 1251996 - RNA, 15 nt, Human
gucuauaaagcauuu

SEQ ID NO: 1251997 - RNA, 20 nt, Human
gucuauaaagcauuuaaccc

SEQ ID NO: 1251998 - RNA, 21 nt, Human
gucuaucaaccccagacacug

SEQ ID NO: 1251999 - RNA, 23 nt, Human
gucuaucaaccccagacacuggu

SEQ ID NO: 1252000 - RNA, 22 nt, Human
gucuaucaaccccagacacugg

SEQ ID NO: 1252001 - RNA, 14 nt, Human
gucgcccaggcugg

SEQ ID NO: 1252002 - RNA, 15 nt, Human
gucgcccaggcugga

SEQ ID NO: 1252003 - RNA, 20 nt, Human
gucgcccaggcuggagugca

SEQ ID NO: 1252004 - RNA, 22 nt, Human
gucgagaaagaggcaccaggaa

SEQ ID NO: 1252005 - RNA, 16 nt, Human
guccuuuuuccucucc

SEQ ID NO: 1252006 - RNA, 16 nt, Human
guccuuuuuuuccauc

SEQ ID NO: 1252007 - RNA, 19 nt, Human
guccuuuuuuuccaucuuu

SEQ ID NO: 1252008 - RNA, 20 nt, Human
guccuuuuuccucuccacac

SEQ ID NO: 1252009 - RNA, 16 nt, Human
gucgaaagcucuagaa

SEQ ID NO: 1252010 - RNA, 22 nt, Human
guccugccuguggcgccgucuc

SEQ ID NO: 1252011 - RNA, 20 nt, Human
guccuuggcaggcugauuuc

SEQ ID NO: 1252012 - RNA, 14 nt, Human
guccuuggccugcu

SEQ ID NO: 1252013 - RNA, 21 nt, Human
guccuugugaugugcacguaa

SEQ ID NO: 1252014 - RNA, 15 nt, Human
guccugcaccggggc

SEQ ID NO: 1252015 - RNA, 19 nt, Human
guccugcaccggggccugg

SEQ ID NO: 1252016 - RNA, 20 nt, Human
guccugcaccggggccuggg

SEQ ID NO: 1252017 - RNA, 21 nt, Human
aacauuacucugaaauuguaa

SEQ ID NO: 1252018 - RNA, 17 nt, Human
guccugaucagagccgu

SEQ ID NO: 1252019 - RNA, 18 nt, Human
aacauguuuccagcauuc

SEQ ID NO: 1252020 - RNA, 19 nt, Human
aacauguuuccagcauucc

SEQ ID NO: 1252021 - RNA, 21 nt, Human
aacauguuuccagcauuccca

SEQ ID NO: 1252022 - RNA, 22 nt, Human
aacauguuuccagcauucccag

SEQ ID NO: 1252023 - RNA, 13 nt, Human
aacauuaaaauau

SEQ ID NO: 1252024 - RNA, 20 nt, Human
aacauuaauagcagccuuuc

SEQ ID NO: 1252025 - RNA, 19 nt, Human
aacauuaauagcagccuuu

SEQ ID NO: 1252026 - RNA, 22 nt, Human
aaccaaaucacugaacuuugcu

SEQ ID NO: 1252027 - RNA, 15 nt, Human
aaccaaaucuggaag

SEQ ID NO: 1252028 - RNA, 23 nt, Human
aacauuuugaaagucuguccuug

SEQ ID NO: 1252029 - RNA, 16 nt, Human
aaccaagccguggcuu

SEQ ID NO: 1252030 - RNA, 16 nt, Human
aaccaacuuuucuauu

SEQ ID NO: 1252031 - RNA, 22 nt, Human
gucuccaggggcugcuuccucc

SEQ ID NO: 1252032 - RNA, 23 nt, Human
gucuccaggggcugcuuccuccu

SEQ ID NO: 1252033 - RNA, 21 nt, Human
gucuccaguauccacuuugca

SEQ ID NO: 1252034 - RNA, 20 nt, Human
gucuccagaaagccccaccc

SEQ ID NO: 1252035 - RNA, 15 nt, Human
gucuccaggggcugc

SEQ ID NO: 1252036 - RNA, 16 nt, Human
gucuccaggggcugcu

SEQ ID NO: 1252037 - RNA, 19 nt, Human
gucuccaggggcugcuucc

SEQ ID NO: 1252038 - RNA, 20 nt, Human
gucuccaggggcugcuuccu

SEQ ID NO: 1252039 - RNA, 21 nt, Human
gucuccaggggcugcuuccuc

SEQ ID NO: 1252040 - RNA, 12 nt, Human
aacauuuucugg

SEQ ID NO: 1252041 - RNA, 16 nt, Human
aacauuuucuggccag

SEQ ID NO: 1252042 - RNA, 14 nt, Human
gucuccauggcccu

SEQ ID NO: 1252043 - RNA, 15 nt, Human
gucucaaacuccuga

SEQ ID NO: 1252044 - RNA, 15 nt, Human
gucucaagagggcac

SEQ ID NO: 1252045 - RNA, 17 nt, Human
gucucaagagggcacug

SEQ ID NO: 1252046 - RNA, 22 nt, Human
gucucaaacuccugaccucagg

SEQ ID NO: 1252047 - RNA, 20 nt, Human
gucucaagagggcacuggug

SEQ ID NO: 1252048 - RNA, 22 nt, Human
gucucaagagggcacugguggc

SEQ ID NO: 1252049 - RNA, 23 nt, Human
gucucaguccaugaagauguaga

SEQ ID NO: 1252050 - RNA, 16 nt, Human
gucucaggucccugca

SEQ ID NO: 1252051 - RNA, 15 nt, Human
gucucaggucccugc

SEQ ID NO: 1252052 - RNA, 18 nt, Human
gucucaggcugccugagu

SEQ ID NO: 1252053 - RNA, 23 nt, Human
gucucacaugauuccagccauca

SEQ ID NO: 1252054 - RNA, 16 nt, Human
gucucaggcugccuga

SEQ ID NO: 1252055 - RNA, 13 nt, Human
gucuccagaaagc

SEQ ID NO: 1252056 - RNA, 15 nt, Human
gucuccagaaagccc

SEQ ID NO: 1252057 - RNA, 23 nt, Human
gucuccagaaagccccacccagg

SEQ ID NO: 1252058 - RNA, 22 nt, Human
guagcguuuuuuaaauguauac

SEQ ID NO: 1252059 - RNA, 18 nt, Human
guagcgucuuucuuuuuu

SEQ ID NO: 1252060 - RNA, 13 nt, Human
guagcuacagaga

SEQ ID NO: 1252061 - RNA, 14 nt, Human
guagcuacagagaa

SEQ ID NO: 1252062 - RNA, 15 nt, Human
guagcuacagagaaa

SEQ ID NO: 1252063 - RNA, 16 nt, Human
guagcuacagagaaac

SEQ ID NO: 1252064 - RNA, 18 nt, Human
guagcguuuuuuaaaugu

SEQ ID NO: 1252065 - RNA, 17 nt, Human
guagcguuuuuuaaaug

SEQ ID NO: 1252066 - RNA, 13 nt, Human
guagcguuuuuua

SEQ ID NO: 1252067 - RNA, 23 nt, Human
guagcgggggaggguaggcagga

SEQ ID NO: 1252068 - RNA, 17 nt, Human
guagcgucuuucuuuuu

SEQ ID NO: 1252069 - RNA, 22 nt, Human
guagccucaaucgagugagaca

SEQ ID NO: 1252070 - RNA, 11 nt, Human
guagccuuuuu

SEQ ID NO: 1252071 - RNA, 18 nt, Human
guagccuuuuuguauaaa

SEQ ID NO: 1252072 - RNA, 23 nt, Human
guagcuacagagaaaccagcuuc

SEQ ID NO: 1252073 - RNA, 18 nt, Human
guagcuacagagaaacca

SEQ ID NO: 1252074 - RNA, 10 nt, Human
guagcuccuc

SEQ ID NO: 1252075 - RNA, 12 nt, Human
guagcuccuccc

SEQ ID NO: 1252076 - RNA, 13 nt, Human
guagcuccucccc

SEQ ID NO: 1252077 - RNA, 19 nt, Human
guagcuccuccccuggagg

SEQ ID NO: 1252078 - RNA, 12 nt, Human
gucccccucugg

SEQ ID NO: 1252079 - RNA, 14 nt, Human
gucccccucuggcu

SEQ ID NO: 1252080 - RNA, 12 nt, Human
guccccccacuc

SEQ ID NO: 1252081 - RNA, 14 nt, Human
guccccccacuccc

SEQ ID NO: 1252082 - RNA, 13 nt, Human
guccaugggcaga

SEQ ID NO: 1252083 - RNA, 14 nt, Human
guccaugggcagag

SEQ ID NO: 1252084 - RNA, 16 nt, Human
guccaugggcagagcc

SEQ ID NO: 1252085 - RNA, 18 nt, Human
guccaugggcagagccca

SEQ ID NO: 1252086 - RNA, 23 nt, Human
guccaugggcagagcccaaggga

SEQ ID NO: 1252087 - RNA, 13 nt, Human
gucccccucuguc

SEQ ID NO: 1252088 - RNA, 19 nt, Human
gucccccucuguccaggca

SEQ ID NO: 1252089 - RNA, 21 nt, Human
gucccccucuguccaggcacu

SEQ ID NO: 1252090 - RNA, 17 nt, Human
guccccuagagucccag

SEQ ID NO: 1252091 - RNA, 12 nt, Human
guccccucaccu

SEQ ID NO: 1252092 - RNA, 16 nt, Human
gucccgauuguaacuc

SEQ ID NO: 1252093 - RNA, 18 nt, Human
gucccggaggcggugggc

SEQ ID NO: 1252094 - RNA, 19 nt, Human
guccguucacauguguggu

SEQ ID NO: 1252095 - RNA, 22 nt, Human
guccuaaccucgggccugcugc

SEQ ID NO: 1252096 - RNA, 20 nt, Human
guccuaauaauaucccacug

SEQ ID NO: 1252097 - RNA, 14 nt, Human
aacauauuguugaa

SEQ ID NO: 1252098 - RNA, 20 nt, Human
aacauguuauuuguaauaga

SEQ ID NO: 1252099 - RNA, 11 nt, Human
aacauguuucc

SEQ ID NO: 1252100 - RNA, 15 nt, Human
aacauguuuccagca

SEQ ID NO: 1252101 - RNA, 16 nt, Human
aacauguuuccagcau

SEQ ID NO: 1252102 - RNA, 17 nt, Human
aacauguuuccagcauu

SEQ ID NO: 1252103 - RNA, 19 nt, Human
aacauagacagaagaaaca

SEQ ID NO: 1252104 - RNA, 16 nt, Human
aacauauauaacaaug

SEQ ID NO: 1252105 - RNA, 22 nt, Human
aacauagaaauugccugacgaa

SEQ ID NO: 1252106 - RNA, 15 nt, Human
aacauagacagaaga

SEQ ID NO: 1252107 - RNA, 16 nt, Human
aacauagacagaagaa

SEQ ID NO: 1252108 - RNA, 15 nt, Human
aacauauauauacua

SEQ ID NO: 1252109 - RNA, 13 nt, Human
aacauaagcuauu

SEQ ID NO: 1252110 - RNA, 15 nt, Human
aacauaagcuauuuu

SEQ ID NO: 1252111 - RNA, 18 nt, Human
aacauaagcuauuuuucu

SEQ ID NO: 1252112 - RNA, 20 nt, Human
aacauaagcuauuuuucuaa

SEQ ID NO: 1252113 - RNA, 22 nt, Human
aacauaagcuauuuuucuaacu

SEQ ID NO: 1252114 - RNA, 20 nt, Human
aacauaaucuucugccuucu

SEQ ID NO: 1252115 - RNA, 15 nt, Human
aacagugauuaccag

SEQ ID NO: 1252116 - RNA, 21 nt, Human
aacagugagccugaauuuugu

SEQ ID NO: 1252117 - RNA, 17 nt, Human
aacagugaagacagaag

SEQ ID NO: 1252118 - RNA, 13 nt, Human
aacagugagccug

SEQ ID NO: 1252119 - RNA, 22 nt, Human
aacauaaucuucugccuucuca

SEQ ID NO: 1252120 - RNA, 19 nt, Human
aacagguuauaacaguguu

SEQ ID NO: 1252121 - RNA, 16 nt, Human
aacagugaagacagaa

SEQ ID NO: 1252122 - RNA, 19 nt, Human
aacagauguccaucagaug

SEQ ID NO: 1252123 - RNA, 20 nt, Human
aacagauguccaucagauga

SEQ ID NO: 1252124 - RNA, 18 nt, Human
aacagguauauacuuuga

SEQ ID NO: 1252125 - RNA, 14 nt, Human
guccuacagaaaaa

SEQ ID NO: 1252126 - RNA, 15 nt, Human
guccuacagaaaaac

SEQ ID NO: 1252127 - RNA, 16 nt, Human
guccuacagaaaaacc

SEQ ID NO: 1252128 - RNA, 19 nt, Human
aacagagacugaauagaua

SEQ ID NO: 1252129 - RNA, 16 nt, Human
aacagauaaauaguuu

SEQ ID NO: 1252130 - RNA, 12 nt, Human
aacagaggauau

SEQ ID NO: 1252131 - RNA, 20 nt, Human
aacugaaaucauacuucuua

SEQ ID NO: 1252132 - RNA, 18 nt, Human
aacucugguggcacagga

SEQ ID NO: 1252133 - RNA, 12 nt, Human
aacucugguggc

SEQ ID NO: 1252134 - RNA, 13 nt, Human
aacucugguggca

SEQ ID NO: 1252135 - RNA, 14 nt, Human
aacugaacucugac

SEQ ID NO: 1252136 - RNA, 16 nt, Human
aacucuguuacacuuu

SEQ ID NO: 1252137 - RNA, 21 nt, Human
aacugaacaccauugaaggcu

SEQ ID NO: 1252138 - RNA, 22 nt, Human
aacugaacaccauugaaggcuu

SEQ ID NO: 1252139 - RNA, 23 nt, Human
aacugaacaccauugaaggcuua

SEQ ID NO: 1252140 - RNA, 14 nt, Human
aacugcaggcccug

SEQ ID NO: 1252141 - RNA, 16 nt, Human
aacugcaggcccuggc

SEQ ID NO: 1252142 - RNA, 17 nt, Human
aacugcaggcccuggcc

SEQ ID NO: 1252143 - RNA, 18 nt, Human
aacugcaggcccuggccu

SEQ ID NO: 1252144 - RNA, 19 nt, Human
aacugcaggcccuggccuc

SEQ ID NO: 1252145 - RNA, 20 nt, Human
aacugcaggcccuggccucc

SEQ ID NO: 1252146 - RNA, 21 nt, Human
aacugcaggcccuggccuccc

SEQ ID NO: 1252147 - RNA, 14 nt, Human
gugagucaccacuu

SEQ ID NO: 1252148 - RNA, 18 nt, Human
gugaguaauuuuggauuu

SEQ ID NO: 1252149 - RNA, 16 nt, Human
aacucugcauucuagu

SEQ ID NO: 1252150 - RNA, 16 nt, Human
aacucugcuugauuuu

SEQ ID NO: 1252151 - RNA, 15 nt, Human
gugagcaggcuguga

SEQ ID NO: 1252152 - RNA, 12 nt, Human
gugagacagacu

SEQ ID NO: 1252153 - RNA, 14 nt, Human
gugagcacagccua

SEQ ID NO: 1252154 - RNA, 14 nt, Human
gugacccacaugcc

SEQ ID NO: 1252155 - RNA, 13 nt, Human
gugaccccagggc

SEQ ID NO: 1252156 - RNA, 14 nt, Human
gugaccccagggca

SEQ ID NO: 1252157 - RNA, 15 nt, Human
gugaccccagggcac

SEQ ID NO: 1252158 - RNA, 19 nt, Human
gugaccccagggcacagga

SEQ ID NO: 1252159 - RNA, 21 nt, Human
gugaccccagggcacaggagc

SEQ ID NO: 1252160 - RNA, 22 nt, Human
gugaccccagggcacaggagcu

SEQ ID NO: 1252161 - RNA, 23 nt, Human
gugaccccagggcacaggagcua

SEQ ID NO: 1252162 - RNA, 15 nt, Human
gugacccccagcucc

SEQ ID NO: 1252163 - RNA, 17 nt, Human
gugacccccagcuccgg

SEQ ID NO: 1252164 - RNA, 16 nt, Human
gugacccccagcuccg

SEQ ID NO: 1252165 - RNA, 21 nt, Human
gugagaagugaaugcugggac

SEQ ID NO: 1252166 - RNA, 22 nt, Human
gugagaagugaaugcugggacu

SEQ ID NO: 1252167 - RNA, 20 nt, Human
gugagaaccuggguugcaga

SEQ ID NO: 1252168 - RNA, 15 nt, Human
gugagaaauuuaaac

SEQ ID NO: 1252169 - RNA, 22 nt, Human
gugagaaccuggguugcagaca

SEQ ID NO: 1252170 - RNA, 20 nt, Human
gugagaagugaaugcuggga

SEQ ID NO: 1252171 - RNA, 21 nt, Human
gugacauuuuacauuaaauuu

SEQ ID NO: 1252172 - RNA, 20 nt, Human
gugacauuuuacauuaaauu

SEQ ID NO: 1252173 - RNA, 17 nt, Human
gugaccaaaaguuacau

SEQ ID NO: 1252174 - RNA, 19 nt, Human
gugacauuuuacauuaaau

SEQ ID NO: 1252175 - RNA, 17 nt, Human
gugacauuuuacauuaa

SEQ ID NO: 1252176 - RNA, 15 nt, Human
gugaccaaugucuug

SEQ ID NO: 1252177 - RNA, 16 nt, Human
gugaccaaugucuuga

SEQ ID NO: 1252178 - RNA, 17 nt, Human
gugaccacucugucuug

SEQ ID NO: 1252179 - RNA, 17 nt, Human
gugaccaggcauccucc

SEQ ID NO: 1252180 - RNA, 16 nt, Human
gugacccacaugccau

SEQ ID NO: 1252181 - RNA, 14 nt, Human
gugacauccaggag

SEQ ID NO: 1252182 - RNA, 16 nt, Human
gugacaucggaaaaau

SEQ ID NO: 1252183 - RNA, 18 nt, Human
gugacaucggaaaaauaa

SEQ ID NO: 1252184 - RNA, 19 nt, Human
gugacaucggaaaaauaau

SEQ ID NO: 1252185 - RNA, 13 nt, Human
aacuauauuguuu

SEQ ID NO: 1252186 - RNA, 15 nt, Human
aacuagaauuugauu

SEQ ID NO: 1252187 - RNA, 16 nt, Human
aacuagaauuugauua

SEQ ID NO: 1252188 - RNA, 17 nt, Human
aacuagacaccaaaguu

SEQ ID NO: 1252189 - RNA, 20 nt, Human
aacuagacaccaaaguucua

SEQ ID NO: 1252190 - RNA, 20 nt, Human
aacuaucucauuuccaagca

SEQ ID NO: 1252191 - RNA, 23 nt, Human
aacuaucucauuuccaagcaagu

SEQ ID NO: 1252192 - RNA, 14 nt, Human
gugaagaauacuuc

SEQ ID NO: 1252193 - RNA, 21 nt, Human
gugaagaaugcacaagaaugg

SEQ ID NO: 1252194 - RNA, 14 nt, Human
gugaagacagaagu

SEQ ID NO: 1252195 - RNA, 23 nt, Human
gugaagaaugcacaagaauggau

SEQ ID NO: 1252196 - RNA, 14 nt, Human
gugaaggcuucucu

SEQ ID NO: 1252197 - RNA, 17 nt, Human
gugaaggcuucucucug

SEQ ID NO: 1252198 - RNA, 22 nt, Human
gugaaggcuucucucuguggga

SEQ ID NO: 1252199 - RNA, 18 nt, Human
gugaagggaagagacagc

SEQ ID NO: 1252200 - RNA, 10 nt, Human
gugaagccaa

SEQ ID NO: 1252201 - RNA, 20 nt, Human
gugaagccaauucagacagg

SEQ ID NO: 1252202 - RNA, 22 nt, Human
gugaagccaauucagacaggca

SEQ ID NO: 1252203 - RNA, 10 nt, Human
gugaagccuu

SEQ ID NO: 1252204 - RNA, 11 nt, Human
gugaagccuuc

SEQ ID NO: 1252205 - RNA, 12 nt, Human
gugaagccuucc

SEQ ID NO: 1252206 - RNA, 12 nt, Human
gugaaggacccu

SEQ ID NO: 1252207 - RNA, 13 nt, Human
gugaaggacccuu

SEQ ID NO: 1252208 - RNA, 22 nt, Human
aacuacuucucuuguuagguaa

SEQ ID NO: 1252209 - RNA, 13 nt, Human
aacuacuuuauaa

SEQ ID NO: 1252210 - RNA, 15 nt, Human
aacuacuuuauaacu

SEQ ID NO: 1252211 - RNA, 17 nt, Human
aacuacuuuauaacuaa

SEQ ID NO: 1252212 - RNA, 19 nt, Human
aacuacuuugcugcuaaua

SEQ ID NO: 1252213 - RNA, 16 nt, Human
aacuacuuugcugcua

SEQ ID NO: 1252214 - RNA, 19 nt, Human
aacuaagaaacuuaaauuu

SEQ ID NO: 1252215 - RNA, 23 nt, Human
aacuaagaaauaugcacaauagc

SEQ ID NO: 1252216 - RNA, 15 nt, Human
aacuaagaaacuuaa

SEQ ID NO: 1252217 - RNA, 13 nt, Human
aacuaacuaaaac

SEQ ID NO: 1252218 - RNA, 14 nt, Human
aacuaacauguccu

SEQ ID NO: 1252219 - RNA, 15 nt, Human
aacuaacauguccug

SEQ ID NO: 1252220 - RNA, 18 nt, Human
aacguuuagcugacaaaa

SEQ ID NO: 1252221 - RNA, 20 nt, Human
aacguuuaagccaaaacaau

SEQ ID NO: 1252222 - RNA, 16 nt, Human
aacguguucaauauuu

SEQ ID NO: 1252223 - RNA, 11 nt, Human
aacuaacaugu

SEQ ID NO: 1252224 - RNA, 16 nt, Human
aaccuuucuucaccaa

SEQ ID NO: 1252225 - RNA, 18 nt, Human
aaccuuucuucaccaaau

SEQ ID NO: 1252226 - RNA, 17 nt, Human
aacguguucaauauuuu

SEQ ID NO: 1252227 - RNA, 18 nt, Human
aacguuaagaauuguuaa

SEQ ID NO: 1252228 - RNA, 23 nt, Human
aaccuuagauguucuaagucuuu

SEQ ID NO: 1252229 - RNA, 17 nt, Human
aaccuuaauuuauuauu

SEQ ID NO: 1252230 - RNA, 13 nt, Human
aaccuuguuuugg

SEQ ID NO: 1252231 - RNA, 23 nt, Human
aaccuuguuuuggacaguuuacc

SEQ ID NO: 1252232 - RNA, 19 nt, Human
aaccuuuacaugaggacuc

SEQ ID NO: 1252233 - RNA, 15 nt, Human
aaccuuguuuuggac

SEQ ID NO: 1252234 - RNA, 13 nt, Human
aaccuguucugcu

SEQ ID NO: 1252235 - RNA, 21 nt, Human
aaccuguuaccuacuuugacu

SEQ ID NO: 1252236 - RNA, 17 nt, Human
aaccuguucugcuuucc

SEQ ID NO: 1252237 - RNA, 24 nt, Human
aaccuguuaccuacuuugacuuuu

SEQ ID NO: 1252238 - RNA, 13 nt, Human
aaccuuaagaccu

SEQ ID NO: 1252239 - RNA, 13 nt, Human
aaccuuaagauac

SEQ ID NO: 1252240 - RNA, 18 nt, Human
aaccuuaauuuauuauua

SEQ ID NO: 1252241 - RNA, 15 nt, Human
gucuuccauuugcaa

SEQ ID NO: 1252242 - RNA, 19 nt, Human
gucuuuguuaagacugcug

SEQ ID NO: 1252243 - RNA, 22 nt, Human
gucucuuuaaaaggaaagaaaa

SEQ ID NO: 1252244 - RNA, 16 nt, Human
gucugaagucacugca

SEQ ID NO: 1252245 - RNA, 24 nt, Human
aaccaugaagagauuuuucaugau

SEQ ID NO: 1252246 - RNA, 15 nt, Human
aaccaugacgcaaag

SEQ ID NO: 1252247 - RNA, 22 nt, Human
aaccaugagaccacuguuauca

SEQ ID NO: 1252248 - RNA, 19 nt, Human
aaccaugcaaaugcuauga

SEQ ID NO: 1252249 - RNA, 12 nt, Human
aaccaucucccu

SEQ ID NO: 1252250 - RNA, 13 nt, Human
aaccaucucccug

SEQ ID NO: 1252251 - RNA, 14 nt, Human
aaccaucucccugg

SEQ ID NO: 1252252 - RNA, 18 nt, Human
aaccaucucccuggugcu

SEQ ID NO: 1252253 - RNA, 19 nt, Human
aaccaucucccuggugcuu

SEQ ID NO: 1252254 - RNA, 21 nt, Human
aaccaugaagagauuuuucau

SEQ ID NO: 1252255 - RNA, 23 nt, Human
aaccaugaagagauuuuucauga

SEQ ID NO: 1252256 - RNA, 13 nt, Human
gucucuuguaauc

SEQ ID NO: 1252257 - RNA, 17 nt, Human
gucugaagucacugcac

SEQ ID NO: 1252258 - RNA, 19 nt, Human
gucugaagucacugcacag

SEQ ID NO: 1252259 - RNA, 10 nt, Human
gucuggagac

SEQ ID NO: 1252260 - RNA, 21 nt, Human
gucuggagaccaccagggcau

SEQ ID NO: 1252261 - RNA, 17 nt, Human
gucuggagaccaccagg

SEQ ID NO: 1252262 - RNA, 21 nt, Human
gucuggaguugaucuggaacc

SEQ ID NO: 1252263 - RNA, 16 nt, Human
gucuggauaacuucca

SEQ ID NO: 1252264 - RNA, 18 nt, Human
gucuggauaacuuccaca

SEQ ID NO: 1252265 - RNA, 20 nt, Human
gucuggauaacuuccacagg

SEQ ID NO: 1252266 - RNA, 21 nt, Human
gucuggauaacuuccacaggg

SEQ ID NO: 1252267 - RNA, 15 nt, Human
gucuggcaaugccac

SEQ ID NO: 1252268 - RNA, 16 nt, Human
gucuggcaaugccaca

SEQ ID NO: 1252269 - RNA, 18 nt, Human
gucuggcaaugccacagc

SEQ ID NO: 1252270 - RNA, 22 nt, Human
gucuggggagcgggucugcucc

SEQ ID NO: 1252271 - RNA, 23 nt, Human
gucuggggagcgggucugcuccc

SEQ ID NO: 1252272 - RNA, 14 nt, Human
gucugggggcacaa

SEQ ID NO: 1252273 - RNA, 19 nt, Human
gucugggggcacaagacug

SEQ ID NO: 1252274 - RNA, 20 nt, Human
gucugggggcacaagacuga

SEQ ID NO: 1252275 - RNA, 14 nt, Human
gucugggugcuacu

SEQ ID NO: 1252276 - RNA, 15 nt, Human
gucugggugcuacug

SEQ ID NO: 1252277 - RNA, 20 nt, Human
gucugggugcuacuggggaa

SEQ ID NO: 1252278 - RNA, 14 nt, Human
gucuggguggcuca

SEQ ID NO: 1252279 - RNA, 17 nt, Human
gucuggguggcucacuc

SEQ ID NO: 1252280 - RNA, 15 nt, Human
gucuggguggcucac

SEQ ID NO: 1252281 - RNA, 15 nt, Human
gucuggugaagcuca

SEQ ID NO: 1252282 - RNA, 13 nt, Human
gucugguggcccc

SEQ ID NO: 1252283 - RNA, 20 nt, Human
gucugguggccccguuucug

SEQ ID NO: 1252284 - RNA, 14 nt, Human
gucugguucucaau

SEQ ID NO: 1252285 - RNA, 18 nt, Human
gucugguugggcagccag

SEQ ID NO: 1252286 - RNA, 18 nt, Human
gucugguucucaauucca

SEQ ID NO: 1252287 - RNA, 23 nt, Human
caccccuaaaagaaacccugcac

SEQ ID NO: 1252288 - RNA, 14 nt, Human
caccccuaaagaga

SEQ ID NO: 1252289 - RNA, 19 nt, Human
caccccauucccgcagugg

SEQ ID NO: 1252290 - RNA, 12 nt, Human
cacccccaaggu

SEQ ID NO: 1252291 - RNA, 11 nt, Human
cacccccaccc

SEQ ID NO: 1252292 - RNA, 14 nt, Human
cacccccaccccca

SEQ ID NO: 1252293 - RNA, 17 nt, Human
cacccccacccccagcu

SEQ ID NO: 1252294 - RNA, 12 nt, Human
cacccccagccu

SEQ ID NO: 1252295 - RNA, 13 nt, Human
cacccccagccug

SEQ ID NO: 1252296 - RNA, 14 nt, Human
cacccccagccugg

SEQ ID NO: 1252297 - RNA, 15 nt, Human
cacccccagccuggg

SEQ ID NO: 1252298 - RNA, 16 nt, Human
cacccccagccugggc

SEQ ID NO: 1252299 - RNA, 17 nt, Human
cacccccagccugggcc

SEQ ID NO: 1252300 - RNA, 18 nt, Human
cacccccagccugggccu

SEQ ID NO: 1252301 - RNA, 19 nt, Human
cacccccagccugggccua

SEQ ID NO: 1252302 - RNA, 12 nt, Human
cacccccagcuc

SEQ ID NO: 1252303 - RNA, 13 nt, Human
cacccccagcuca

SEQ ID NO: 1252304 - RNA, 14 nt, Human
cacccccagcucaa

SEQ ID NO: 1252305 - RNA, 12 nt, Human
cacccccagcuu

SEQ ID NO: 1252306 - RNA, 14 nt, Human
caccccccaagcug

SEQ ID NO: 1252307 - RNA, 15 nt, Human
caccccccaagcugu

SEQ ID NO: 1252308 - RNA, 16 nt, Human
caccccgacuuuuguu

SEQ ID NO: 1252309 - RNA, 12 nt, Human
cacccccuuucc

SEQ ID NO: 1252310 - RNA, 14 nt, Human
cacccccuuuccug

SEQ ID NO: 1252311 - RNA, 16 nt, Human
caccccgccugcccuc

SEQ ID NO: 1252312 - RNA, 18 nt, Human
cacccccuucuccaucca

SEQ ID NO: 1252313 - RNA, 18 nt, Human
cacccccggcagcagccc

SEQ ID NO: 1252314 - RNA, 21 nt, Human
cacccccggcagcagccccca

SEQ ID NO: 1252315 - RNA, 11 nt, Human
cacccccguca

SEQ ID NO: 1252316 - RNA, 18 nt, Human
cacccccucaccccucca

SEQ ID NO: 1252317 - RNA, 12 nt, Human
cacccccugcag

SEQ ID NO: 1252318 - RNA, 13 nt, Human
cacccccugcagc

SEQ ID NO: 1252319 - RNA, 14 nt, Human
cacccccugcagcu

SEQ ID NO: 1252320 - RNA, 17 nt, Human
cacccccugcagcuugu

SEQ ID NO: 1252321 - RNA, 22 nt, Human
cacccaccaguugaauuucauc

SEQ ID NO: 1252322 - RNA, 14 nt, Human
cacccaccccugca

SEQ ID NO: 1252323 - RNA, 16 nt, Human
cacccaccccugcaca

SEQ ID NO: 1252324 - RNA, 13 nt, Human
caccccagggcag

SEQ ID NO: 1252325 - RNA, 16 nt, Human
caccccagggcagcca

SEQ ID NO: 1252326 - RNA, 18 nt, Human
caccccagggcagccagg

SEQ ID NO: 1252327 - RNA, 22 nt, Human
caccccagggcagccagggaga

SEQ ID NO: 1252328 - RNA, 19 nt, Human
caccccagggcagccaggg

SEQ ID NO: 1252329 - RNA, 13 nt, Human
caccccauucccg

SEQ ID NO: 1252330 - RNA, 15 nt, Human
caccccauucccgca

SEQ ID NO: 1252331 - RNA, 17 nt, Human
caccccauucccgcagu

SEQ ID NO: 1252332 - RNA, 14 nt, Human
caccagacacccag

SEQ ID NO: 1252333 - RNA, 16 nt, Human
cacccaauucaaaaca

SEQ ID NO: 1252334 - RNA, 17 nt, Human
cacccaauucaaaacau

SEQ ID NO: 1252335 - RNA, 16 nt, Human
cacccaccaacccuca

SEQ ID NO: 1252336 - RNA, 17 nt, Human
cacccaccaacccucag

SEQ ID NO: 1252337 - RNA, 18 nt, Human
cacccaccaacccucagg

SEQ ID NO: 1252338 - RNA, 20 nt, Human
cacccaccaacccucagggc

SEQ ID NO: 1252339 - RNA, 12 nt, Human
caccacucuggc

SEQ ID NO: 1252340 - RNA, 13 nt, Human
caccacucuggca

SEQ ID NO: 1252341 - RNA, 14 nt, Human
caccacucuggcag

SEQ ID NO: 1252342 - RNA, 15 nt, Human
caccacucuggcagc

SEQ ID NO: 1252343 - RNA, 17 nt, Human
caccacucuggcagcca

SEQ ID NO: 1252344 - RNA, 18 nt, Human
caccacucuggcagccac

SEQ ID NO: 1252345 - RNA, 19 nt, Human
caccacucuggcagccaca

SEQ ID NO: 1252346 - RNA, 21 nt, Human
caccacucuggcagccacacu

SEQ ID NO: 1252347 - RNA, 23 nt, Human
caccacugcccccugcugccaug

SEQ ID NO: 1252348 - RNA, 15 nt, Human
caccccuaaagagau

SEQ ID NO: 1252349 - RNA, 15 nt, Human
caaaaaacuacuucu

SEQ ID NO: 1252350 - RNA, 11 nt, Human
caaaaaacuac

SEQ ID NO: 1252351 - RNA, 18 nt, Human
caaaaaaaucuuccaauu

SEQ ID NO: 1252352 - RNA, 12 nt, Human
caaaaaagaaaa

SEQ ID NO: 1252353 - RNA, 14 nt, Human
caaaaaagaaaacc

SEQ ID NO: 1252354 - RNA, 18 nt, Human
auuuuuuuaauuuacaaa

SEQ ID NO: 1252355 - RNA, 18 nt, Human
caaacuuggauacuugga

SEQ ID NO: 1252356 - RNA, 18 nt, Human
caaacuuuuauacucuuu

SEQ ID NO: 1252357 - RNA, 12 nt, Human
caaacuuugcau

SEQ ID NO: 1252358 - RNA, 13 nt, Human
caaacuuugcauc

SEQ ID NO: 1252359 - RNA, 20 nt, Human
caaacuuugcaucucaguau

SEQ ID NO: 1252360 - RNA, 16 nt, Human
caaagaaacaaagaug

SEQ ID NO: 1252361 - RNA, 17 nt, Human
caaagaaacaaagaugu

SEQ ID NO: 1252362 - RNA, 13 nt, Human
caaagaaagugua

SEQ ID NO: 1252363 - RNA, 14 nt, Human
caaagaaaguguau

SEQ ID NO: 1252364 - RNA, 20 nt, Human
caaagaggcugaggcuggca

SEQ ID NO: 1252365 - RNA, 22 nt, Human
caaagaggcugaggcuggcaca

SEQ ID NO: 1252366 - RNA, 12 nt, Human
caaagaggcugc

SEQ ID NO: 1252367 - RNA, 13 nt, Human
caaagaggcugcc

SEQ ID NO: 1252368 - RNA, 15 nt, Human
caaagaggcugcccc

SEQ ID NO: 1252369 - RNA, 16 nt, Human
caaagaggcugccccu

SEQ ID NO: 1252370 - RNA, 21 nt, Human
caaagaggcugccccucucac

SEQ ID NO: 1252371 - RNA, 22 nt, Human
caaagaggcugccccucucacc

SEQ ID NO: 1252372 - RNA, 23 nt, Human
caaagaggcugccccucucacca

SEQ ID NO: 1252373 - RNA, 13 nt, Human
caaagagguauuu

SEQ ID NO: 1252374 - RNA, 16 nt, Human
caaagagguauuuauc

SEQ ID NO: 1252375 - RNA, 19 nt, Human
caaagcaugggauuauuag

SEQ ID NO: 1252376 - RNA, 13 nt, Human
caaagcuuuccug

SEQ ID NO: 1252377 - RNA, 14 nt, Human
caaagcuuuccugc

SEQ ID NO: 1252378 - RNA, 16 nt, Human
caaagcuuuccugccc

SEQ ID NO: 1252379 - RNA, 18 nt, Human
caaagcuuuccugcccca

SEQ ID NO: 1252380 - RNA, 22 nt, Human
caaagcuuuccugccccaggcc

SEQ ID NO: 1252381 - RNA, 23 nt, Human
caaagcuuuccugccccaggccu

SEQ ID NO: 1252382 - RNA, 16 nt, Human
caaagcuuuuuccaga

SEQ ID NO: 1252383 - RNA, 12 nt, Human
caaauauauuca

SEQ ID NO: 1252384 - RNA, 16 nt, Human
caaauagaaaaugguc

SEQ ID NO: 1252385 - RNA, 15 nt, Human
caaauagcauaaguu

SEQ ID NO: 1252386 - RNA, 18 nt, Human
caaauaggaugcuuggga

SEQ ID NO: 1252387 - RNA, 20 nt, Human
caaauaauuuuucacuucaa

SEQ ID NO: 1252388 - RNA, 19 nt, Human
caaauacauuuaaaacauu

SEQ ID NO: 1252389 - RNA, 15 nt, Human
caaaguuguuguaac

SEQ ID NO: 1252390 - RNA, 22 nt, Human
caaaguuguuguaaccugcugu

SEQ ID NO: 1252391 - RNA, 13 nt, Human
caaaguuuaauaa

SEQ ID NO: 1252392 - RNA, 14 nt, Human
caaaggaugugaua

SEQ ID NO: 1252393 - RNA, 17 nt, Human
caaaggaugugauauau

SEQ ID NO: 1252394 - RNA, 21 nt, Human
caaaggaugugauauauaagu

SEQ ID NO: 1252395 - RNA, 15 nt, Human
caaaggcaagcacuu

SEQ ID NO: 1252396 - RNA, 13 nt, Human
caaaggaugugau

SEQ ID NO: 1252397 - RNA, 20 nt, Human
caaaguuuaauaaauuuauu

SEQ ID NO: 1252398 - RNA, 19 nt, Human
caaaguuuaccagaaagca

SEQ ID NO: 1252399 - RNA, 12 nt, Human
caaaguuucaau

SEQ ID NO: 1252400 - RNA, 16 nt, Human
caaaguuucaauuugu

SEQ ID NO: 1252401 - RNA, 17 nt, Human
caaauaaaaagugcuuu

SEQ ID NO: 1252402 - RNA, 18 nt, Human
caaauaaaaagugcuuuu

SEQ ID NO: 1252403 - RNA, 14 nt, Human
caaaucacugaacu

SEQ ID NO: 1252404 - RNA, 19 nt, Human
caaaucaccacaaacugua

SEQ ID NO: 1252405 - RNA, 20 nt, Human
caaaucaccacaaacuguaa

SEQ ID NO: 1252406 - RNA, 15 nt, Human
caaaucaccacaaac

SEQ ID NO: 1252407 - RNA, 15 nt, Human
caaaucacugaacuu

SEQ ID NO: 1252408 - RNA, 14 nt, Human
caaaucagaaguca

SEQ ID NO: 1252409 - RNA, 15 nt, Human
caaaucagaagucau

SEQ ID NO: 1252410 - RNA, 22 nt, Human
caaaucagaagucaucuugcua

SEQ ID NO: 1252411 - RNA, 15 nt, Human
caaaugucuuccugg

SEQ ID NO: 1252412 - RNA, 18 nt, Human
caaaugucuuccuggauu

SEQ ID NO: 1252413 - RNA, 17 nt, Human
caaauucaguuucauaa

SEQ ID NO: 1252414 - RNA, 15 nt, Human
caaauguuuaaucau

SEQ ID NO: 1252415 - RNA, 20 nt, Human
caaauucaguuucauaaaag

SEQ ID NO: 1252416 - RNA, 18 nt, Human
caaauucaguuucauaaa

SEQ ID NO: 1252417 - RNA, 13 nt, Human
caaauguuuaauc

SEQ ID NO: 1252418 - RNA, 22 nt, Human
caaauguucuaaguuucuaaga

SEQ ID NO: 1252419 - RNA, 23 nt, Human
caaauguucuaaguuucuaagau

SEQ ID NO: 1252420 - RNA, 14 nt, Human
caaauguucuaagu

SEQ ID NO: 1252421 - RNA, 15 nt, Human
caaauguucuaaguu

SEQ ID NO: 1252422 - RNA, 19 nt, Human
caaauguucuaaguuucua

SEQ ID NO: 1252423 - RNA, 21 nt, Human
caaauguucuaaguuucuaag

SEQ ID NO: 1252424 - RNA, 15 nt, Human
caaauguuaaaaugu

SEQ ID NO: 1252425 - RNA, 16 nt, Human
caaauguuaaaaugug

SEQ ID NO: 1252426 - RNA, 12 nt, Human
caaauguucuaa

SEQ ID NO: 1252427 - RNA, 21 nt, Human
caaauguucaucaaugaauga

SEQ ID NO: 1252428 - RNA, 18 nt, Human
caaauguuaaaauguguu

SEQ ID NO: 1252429 - RNA, 14 nt, Human
caaauguggcuccu

SEQ ID NO: 1252430 - RNA, 14 nt, Human
caaaugugcuuuga

SEQ ID NO: 1252431 - RNA, 18 nt, Human
caaaugugcuuugagaag

SEQ ID NO: 1252432 - RNA, 17 nt, Human
caacagguaaaacaggg

SEQ ID NO: 1252433 - RNA, 16 nt, Human
caacuucuaauugcca

SEQ ID NO: 1252434 - RNA, 12 nt, Human
caacuuuguaua

SEQ ID NO: 1252435 - RNA, 15 nt, Human
caagaaaacaggcac

SEQ ID NO: 1252436 - RNA, 16 nt, Human
caagaaaacaggcacu

SEQ ID NO: 1252437 - RNA, 17 nt, Human
caagaaaacaggcacug

SEQ ID NO: 1252438 - RNA, 11 nt, Human
caacuuuguau

SEQ ID NO: 1252439 - RNA, 14 nt, Human
caacuucaguccaa

SEQ ID NO: 1252440 - RNA, 14 nt, Human
caacuuacuacuga

SEQ ID NO: 1252441 - RNA, 11 nt, Human
caacuuauuaa

SEQ ID NO: 1252442 - RNA, 14 nt, Human
caacuucguuuccu

SEQ ID NO: 1252443 - RNA, 14 nt, Human
caacuucuaauugc

SEQ ID NO: 1252444 - RNA, 15 nt, Human
caacugcuaaucuac

SEQ ID NO: 1252445 - RNA, 11 nt, Human
caacugcuccc

SEQ ID NO: 1252446 - RNA, 14 nt, Human
caacugcucccacc

SEQ ID NO: 1252447 - RNA, 15 nt, Human
caacugcucccaccu

SEQ ID NO: 1252448 - RNA, 17 nt, Human
caacugcucccaccucc

SEQ ID NO: 1252449 - RNA, 18 nt, Human
caacugcucccaccuccu

SEQ ID NO: 1252450 - RNA, 18 nt, Human
caacugccuacuccaaaa

SEQ ID NO: 1252451 - RNA, 22 nt, Human
caacugccuacuccaaaauguu

SEQ ID NO: 1252452 - RNA, 21 nt, Human
caacugccucgaaacacagaa

SEQ ID NO: 1252453 - RNA, 23 nt, Human
caacugccucgaaacacagaaac

SEQ ID NO: 1252454 - RNA, 19 nt, Human
caacugcucccaccuccug

SEQ ID NO: 1252455 - RNA, 22 nt, Human
caacugcucccaccuccugaca

SEQ ID NO: 1252456 - RNA, 22 nt, Human
caacuuaauacucaaaugagua

SEQ ID NO: 1252457 - RNA, 21 nt, Human
caacucugaaggguaauuaua

SEQ ID NO: 1252458 - RNA, 13 nt, Human
caacucucuuauu

SEQ ID NO: 1252459 - RNA, 16 nt, Human
caacucucuuauugcc

SEQ ID NO: 1252460 - RNA, 21 nt, Human
caacucucuuauugccucacu

SEQ ID NO: 1252461 - RNA, 22 nt, Human
caacucucuuauugccucacuu

SEQ ID NO: 1252462 - RNA, 21 nt, Human
caacucuucccccucucccag

SEQ ID NO: 1252463 - RNA, 14 nt, Human
caacugccuacucc

SEQ ID NO: 1252464 - RNA, 15 nt, Human
caacugccuacucca

SEQ ID NO: 1252465 - RNA, 18 nt, Human
caacgcagcccugcuuug

SEQ ID NO: 1252466 - RNA, 14 nt, Human
caacgcuauuccag

SEQ ID NO: 1252467 - RNA, 12 nt, Human
caacgcagcccu

SEQ ID NO: 1252468 - RNA, 13 nt, Human
caacgcagcccug

SEQ ID NO: 1252469 - RNA, 15 nt, Human
caacgcagcccugcu

SEQ ID NO: 1252470 - RNA, 21 nt, Human
caaccugaauacccuuuucug

SEQ ID NO: 1252471 - RNA, 13 nt, Human
caaccucuuggcc

SEQ ID NO: 1252472 - RNA, 15 nt, Human
caaccucuuggccug

SEQ ID NO: 1252473 - RNA, 24 nt, Human
caaccugaauacccuuuucugacc

SEQ ID NO: 1252474 - RNA, 11 nt, Human
caacccucagg

SEQ ID NO: 1252475 - RNA, 12 nt, Human
caacccucaggg

SEQ ID NO: 1252476 - RNA, 13 nt, Human
caacccucagggc

SEQ ID NO: 1252477 - RNA, 21 nt, Human
caacccucagggcaaagccag

SEQ ID NO: 1252478 - RNA, 22 nt, Human
caacccucagggcaaagccagg

SEQ ID NO: 1252479 - RNA, 17 nt, Human
caacccuucccucaccu

SEQ ID NO: 1252480 - RNA, 18 nt, Human
caacccuucccucaccuu

SEQ ID NO: 1252481 - RNA, 19 nt, Human
caacccuuccugaaacuuc

SEQ ID NO: 1252482 - RNA, 18 nt, Human
caaauucugucucuggau

SEQ ID NO: 1252483 - RNA, 15 nt, Human
caaauucugucucug

SEQ ID NO: 1252484 - RNA, 14 nt, Human
caaauuuacagaga

SEQ ID NO: 1252485 - RNA, 15 nt, Human
caaauuuacagagac

SEQ ID NO: 1252486 - RNA, 16 nt, Human
caaauuuacagagaca

SEQ ID NO: 1252487 - RNA, 19 nt, Human
caaauuuaaaacuguugga

SEQ ID NO: 1252488 - RNA, 23 nt, Human
caacagguaaaacagggccacau

SEQ ID NO: 1252489 - RNA, 15 nt, Human
caacaguaaaccacu

SEQ ID NO: 1252490 - RNA, 20 nt, Human
caacaucacagcccagcccg

SEQ ID NO: 1252491 - RNA, 17 nt, Human
caacaucacagcccagc

SEQ ID NO: 1252492 - RNA, 22 nt, Human
caacaguaaaccacugaaaaaa

SEQ ID NO: 1252493 - RNA, 17 nt, Human
caacaguaaaccacuga

SEQ ID NO: 1252494 - RNA, 16 nt, Human
caacagugaagacaga

SEQ ID NO: 1252495 - RNA, 14 nt, Human
caacaucacagccc

SEQ ID NO: 1252496 - RNA, 16 nt, Human
caacaucacagcccag

SEQ ID NO: 1252497 - RNA, 21 nt, Human
caacccucagagccaccccua

SEQ ID NO: 1252498 - RNA, 16 nt, Human
caacauuguagccuca

SEQ ID NO: 1252499 - RNA, 16 nt, Human
caacauuucaaaauga

SEQ ID NO: 1252500 - RNA, 22 nt, Human
caacauuucuauagccaaaaau

SEQ ID NO: 1252501 - RNA, 14 nt, Human
caacauuucucaau

SEQ ID NO: 1252502 - RNA, 16 nt, Human
caacauuucucaauaa

SEQ ID NO: 1252503 - RNA, 17 nt, Human
caacauuucucaauaau

SEQ ID NO: 1252504 - RNA, 22 nt, Human
caaccaagaauguuaugugcaa

SEQ ID NO: 1252505 - RNA, 14 nt, Human
caaccaauggaaug

SEQ ID NO: 1252506 - RNA, 14 nt, Human
caaccacacccaca

SEQ ID NO: 1252507 - RNA, 19 nt, Human
caacaugaggccacuggag

SEQ ID NO: 1252508 - RNA, 15 nt, Human
caacaugaugaggua

SEQ ID NO: 1252509 - RNA, 15 nt, Human
caacaugcacugaug

SEQ ID NO: 1252510 - RNA, 22 nt, Human
caacaugaugagguaguaccuu

SEQ ID NO: 1252511 - RNA, 12 nt, Human
caacauggcuuu

SEQ ID NO: 1252512 - RNA, 13 nt, Human
caacauggcuuug

SEQ ID NO: 1252513 - RNA, 15 nt, Human
caacauguuauuugu

SEQ ID NO: 1252514 - RNA, 22 nt, Human
caacauguuauuuguaauagau

SEQ ID NO: 1252515 - RNA, 19 nt, Human
caacauguugggaaacuug

SEQ ID NO: 1252516 - RNA, 22 nt, Human
caacauguugggaaacuuggcu

SEQ ID NO: 1252517 - RNA, 23 nt, Human
caacauguugggaaacuuggcuc

SEQ ID NO: 1252518 - RNA, 20 nt, Human
caacauguuuccagcauucc

SEQ ID NO: 1252519 - RNA, 23 nt, Human
caacauguuauuuguaauagaug

SEQ ID NO: 1252520 - RNA, 22 nt, Human
caagugcagggccuguaauccc

SEQ ID NO: 1252521 - RNA, 23 nt, Human
caagucuuucucuuucccugguc

SEQ ID NO: 1252522 - RNA, 19 nt, Human
caaguggguacccccagga

SEQ ID NO: 1252523 - RNA, 17 nt, Human
caaguggguacccccag

SEQ ID NO: 1252524 - RNA, 22 nt, Human
caagugauucucaugccucagc

SEQ ID NO: 1252525 - RNA, 17 nt, Human
caagucuuucucuuucc

SEQ ID NO: 1252526 - RNA, 19 nt, Human
caagucuuucucuuucccu

SEQ ID NO: 1252527 - RNA, 20 nt, Human
caagucuuucucuuucccug

SEQ ID NO: 1252528 - RNA, 21 nt, Human
caagucuuucucuuucccugg

SEQ ID NO: 1252529 - RNA, 14 nt, Human
caagucuaccaauu

SEQ ID NO: 1252530 - RNA, 14 nt, Human
caagucuguuuacu

SEQ ID NO: 1252531 - RNA, 20 nt, Human
caagucuguuuacugcaagg

SEQ ID NO: 1252532 - RNA, 20 nt, Human
caagggcuuuguuuugcaca

SEQ ID NO: 1252533 - RNA, 14 nt, Human
caaggucugcuuuu

SEQ ID NO: 1252534 - RNA, 14 nt, Human
caaggucuuugguu

SEQ ID NO: 1252535 - RNA, 13 nt, Human
caaggucuuuaaa

SEQ ID NO: 1252536 - RNA, 13 nt, Human
caagguguccuac

SEQ ID NO: 1252537 - RNA, 18 nt, Human
caaguccugccucuuaaa

SEQ ID NO: 1252538 - RNA, 17 nt, Human
caagcacuaaacaaaga

SEQ ID NO: 1252539 - RNA, 14 nt, Human
caagcacuucuuuu

SEQ ID NO: 1252540 - RNA, 18 nt, Human
caagccaagggaaccugu

SEQ ID NO: 1252541 - RNA, 19 nt, Human
caagaaacugaggaauuuu

SEQ ID NO: 1252542 - RNA, 19 nt, Human
caagaaaacaggcacugcc

SEQ ID NO: 1252543 - RNA, 20 nt, Human
caagaaaacaggcacugccc

SEQ ID NO: 1252544 - RNA, 21 nt, Human
caagaaaacaggcacugcccu

SEQ ID NO: 1252545 - RNA, 22 nt, Human
caagaaaacaggcacugcccug

SEQ ID NO: 1252546 - RNA, 23 nt, Human
caagaaaacaggcacugcccugg

SEQ ID NO: 1252547 - RNA, 20 nt, Human
caagaaaauaagagcucagg

SEQ ID NO: 1252548 - RNA, 18 nt, Human
caagaaaauaagagcuca

SEQ ID NO: 1252549 - RNA, 18 nt, Human
caagaaacugaggaauuu

SEQ ID NO: 1252550 - RNA, 17 nt, Human
caagccguggcuucccg

SEQ ID NO: 1252551 - RNA, 14 nt, Human
caagccguggcuuc

SEQ ID NO: 1252552 - RNA, 15 nt, Human
caagccguggcuucc

SEQ ID NO: 1252553 - RNA, 16 nt, Human
caagccguggcuuccc

SEQ ID NO: 1252554 - RNA, 21 nt, Human
caagccaagggaaccuguguc

SEQ ID NO: 1252555 - RNA, 22 nt, Human
caagccaagggaaccugugucc

SEQ ID NO: 1252556 - RNA, 23 nt, Human
caagccaagggaaccuguguccg

SEQ ID NO: 1252557 - RNA, 19 nt, Human
caaggaugccccguccccc

SEQ ID NO: 1252558 - RNA, 20 nt, Human
caaggauagaugcuggccca

SEQ ID NO: 1252559 - RNA, 21 nt, Human
caaggauagaugcuggcccag

SEQ ID NO: 1252560 - RNA, 22 nt, Human
caaggauagaugcuggcccagg

SEQ ID NO: 1252561 - RNA, 23 nt, Human
caaggauagaugcuggcccaggg

SEQ ID NO: 1252562 - RNA, 14 nt, Human
caaggacuaggguc

SEQ ID NO: 1252563 - RNA, 17 nt, Human
caaggagucacugagac

SEQ ID NO: 1252564 - RNA, 18 nt, Human
caaggagucacugagacc

SEQ ID NO: 1252565 - RNA, 16 nt, Human
caaggagucagacauu

SEQ ID NO: 1252566 - RNA, 17 nt, Human
caaggauagaaguauac

SEQ ID NO: 1252567 - RNA, 15 nt, Human
caaggauagaugcug

SEQ ID NO: 1252568 - RNA, 16 nt, Human
caaggauagaugcugg

SEQ ID NO: 1252569 - RNA, 17 nt, Human
caaggauagaugcuggc

SEQ ID NO: 1252570 - RNA, 15 nt, Human
caaggaaaaacaggu

SEQ ID NO: 1252571 - RNA, 13 nt, Human
caagcggugucuc

SEQ ID NO: 1252572 - RNA, 15 nt, Human
caagcggugucucuc

SEQ ID NO: 1252573 - RNA, 16 nt, Human
caagcggugucucucc

SEQ ID NO: 1252574 - RNA, 13 nt, Human
caaggaaaggcac

SEQ ID NO: 1252575 - RNA, 16 nt, Human
cacauuccugaacagg

SEQ ID NO: 1252576 - RNA, 22 nt, Human
cacauucaaaauaggguauauu

SEQ ID NO: 1252577 - RNA, 23 nt, Human
cacauucagggcuauuuuuuccc

SEQ ID NO: 1252578 - RNA, 15 nt, Human
cacauguuuucucug

SEQ ID NO: 1252579 - RNA, 12 nt, Human
cacauuaaagaa

SEQ ID NO: 1252580 - RNA, 16 nt, Human
cacauuaaagaagacc

SEQ ID NO: 1252581 - RNA, 20 nt, Human
cacauuaaagaagaccugag

SEQ ID NO: 1252582 - RNA, 21 nt, Human
cacauuagaagacaauugaca

SEQ ID NO: 1252583 - RNA, 21 nt, Human
cacauuaggaaaaguugcuau

SEQ ID NO: 1252584 - RNA, 13 nt, Human
cacauguggacuu

SEQ ID NO: 1252585 - RNA, 22 nt, Human
cacaugugagcaugucacuucc

SEQ ID NO: 1252586 - RNA, 14 nt, Human
cacaugugcugccc

SEQ ID NO: 1252587 - RNA, 12 nt, Human
cacauguguggu

SEQ ID NO: 1252588 - RNA, 12 nt, Human
cacauguuuccu

SEQ ID NO: 1252589 - RNA, 14 nt, Human
cacauguuuccucu

SEQ ID NO: 1252590 - RNA, 15 nt, Human
cacauguuuccucua

SEQ ID NO: 1252591 - RNA, 12 nt, Human
cacauguccagu

SEQ ID NO: 1252592 - RNA, 18 nt, Human
cacaugggugaacacuca

SEQ ID NO: 1252593 - RNA, 17 nt, Human
cacauguaucuaugcau

SEQ ID NO: 1252594 - RNA, 17 nt, Human
cacauauuuuaaaauuu

SEQ ID NO: 1252595 - RNA, 13 nt, Human
cacaucaaagagg

SEQ ID NO: 1252596 - RNA, 20 nt, Human
cacaucacaagacuaugcca

SEQ ID NO: 1252597 - RNA, 14 nt, Human
cacaucacagauga

SEQ ID NO: 1252598 - RNA, 23 nt, Human
cacauggccccucccccugccag

SEQ ID NO: 1252599 - RNA, 17 nt, Human
cacauauuucagugagg

SEQ ID NO: 1252600 - RNA, 18 nt, Human
cacauauccaggcaccag

SEQ ID NO: 1252601 - RNA, 12 nt, Human
cacauauuuuaa

SEQ ID NO: 1252602 - RNA, 14 nt, Human
cacauauuuuaaaa

SEQ ID NO: 1252603 - RNA, 15 nt, Human
cacauauuuuaaaau

SEQ ID NO: 1252604 - RNA, 18 nt, Human
cacauuggagauguuuag

SEQ ID NO: 1252605 - RNA, 17 nt, Human
cacauuggaaacaaguc

SEQ ID NO: 1252606 - RNA, 20 nt, Human
cacauugcugugaacaggaa

SEQ ID NO: 1252607 - RNA, 21 nt, Human
cacauuggaagagcagcaccu

SEQ ID NO: 1252608 - RNA, 13 nt, Human
caccacagccagc

SEQ ID NO: 1252609 - RNA, 17 nt, Human
caccacagccagcaccu

SEQ ID NO: 1252610 - RNA, 19 nt, Human
caccacagccagcaccugg

SEQ ID NO: 1252611 - RNA, 13 nt, Human
caccaagccuuga

SEQ ID NO: 1252612 - RNA, 16 nt, Human
caccaagcuaggugcu

SEQ ID NO: 1252613 - RNA, 13 nt, Human
caccaagcugcug

SEQ ID NO: 1252614 - RNA, 13 nt, Human
caccaccaagcca

SEQ ID NO: 1252615 - RNA, 20 nt, Human
caccacccugcucauccacu

SEQ ID NO: 1252616 - RNA, 15 nt, Human
caccacuagccucag

SEQ ID NO: 1252617 - RNA, 18 nt, Human
caccacuagccucagggg

SEQ ID NO: 1252618 - RNA, 20 nt, Human
cacaggaaccacaagacugc

SEQ ID NO: 1252619 - RNA, 15 nt, Human
cacaggaaguagagg

SEQ ID NO: 1252620 - RNA, 20 nt, Human
cacagccuccccugccaggg

SEQ ID NO: 1252621 - RNA, 21 nt, Human
cacagccuccccugccagggc

SEQ ID NO: 1252622 - RNA, 23 nt, Human
cacagccuccccugccagggcag

SEQ ID NO: 1252623 - RNA, 22 nt, Human
cacaggaagccugcaguccugg

SEQ ID NO: 1252624 - RNA, 20 nt, Human
cacaggaguguccucuuccc

SEQ ID NO: 1252625 - RNA, 10 nt, Human
cacaggcagc

SEQ ID NO: 1252626 - RNA, 22 nt, Human
cacaggaguguccucuucccuc

SEQ ID NO: 1252627 - RNA, 11 nt, Human
cacaggcagcc

SEQ ID NO: 1252628 - RNA, 15 nt, Human
cacaggcagccagug

SEQ ID NO: 1252629 - RNA, 16 nt, Human
cacaggcagccagugc

SEQ ID NO: 1252630 - RNA, 17 nt, Human
cacaggcagccagugcc

SEQ ID NO: 1252631 - RNA, 19 nt, Human
cacaggcagccagugcccu

SEQ ID NO: 1252632 - RNA, 20 nt, Human
cacaggcagccagugcccug

SEQ ID NO: 1252633 - RNA, 23 nt, Human
cacaggcagccagugcccugagc

SEQ ID NO: 1252634 - RNA, 15 nt, Human
cacaggcccuuccuc

SEQ ID NO: 1252635 - RNA, 13 nt, Human
cacaggcccuccc

SEQ ID NO: 1252636 - RNA, 23 nt, Human
cacaguugaagggaggggcugug

SEQ ID NO: 1252637 - RNA, 23 nt, Human
cacaguucuuugggccagacaug

SEQ ID NO: 1252638 - RNA, 18 nt, Human
cacaguugaagggagggg

SEQ ID NO: 1252639 - RNA, 15 nt, Human
cacauauccaggcac

SEQ ID NO: 1252640 - RNA, 19 nt, Human
cacauauccaggcaccagg

SEQ ID NO: 1252641 - RNA, 22 nt, Human
cacauaauucaggaagcagcuu

SEQ ID NO: 1252642 - RNA, 15 nt, Human
cacaguuugaaauaa

SEQ ID NO: 1252643 - RNA, 12 nt, Human
cacauaaaacuu

SEQ ID NO: 1252644 - RNA, 13 nt, Human
cacaguuugaaau

SEQ ID NO: 1252645 - RNA, 13 nt, Human
cacagauggccag

SEQ ID NO: 1252646 - RNA, 14 nt, Human
cacagauggccagc

SEQ ID NO: 1252647 - RNA, 20 nt, Human
cacagcacgggggccaagga

SEQ ID NO: 1252648 - RNA, 19 nt, Human
cacagcaccagaauguaua

SEQ ID NO: 1252649 - RNA, 16 nt, Human
cacagcaccagaaugu

SEQ ID NO: 1252650 - RNA, 16 nt, Human
cacagcagccccugca

SEQ ID NO: 1252651 - RNA, 12 nt, Human
cacagcagccug

SEQ ID NO: 1252652 - RNA, 22 nt, Human
cacagccaacacgcaccugccu

SEQ ID NO: 1252653 - RNA, 14 nt, Human
cacagccuccccug

SEQ ID NO: 1252654 - RNA, 17 nt, Human
cacagccuccccugcca

SEQ ID NO: 1252655 - RNA, 19 nt, Human
cacagccuccccugccagg

SEQ ID NO: 1252656 - RNA, 19 nt, Human
cacagcaucucagcucauc

SEQ ID NO: 1252657 - RNA, 16 nt, Human
cacagcaucucagcuc

SEQ ID NO: 1252658 - RNA, 15 nt, Human
cacagcaucucagcu

SEQ ID NO: 1252659 - RNA, 16 nt, Human
cacagcauuguauaug

SEQ ID NO: 1252660 - RNA, 16 nt, Human
cacagccaaauuuaaa

SEQ ID NO: 1252661 - RNA, 14 nt, Human
cacagcaucucagc

SEQ ID NO: 1252662 - RNA, 13 nt, Human
cacagcaucucag

SEQ ID NO: 1252663 - RNA, 12 nt, Human
cacagcaucuca

SEQ ID NO: 1252664 - RNA, 14 nt, Human
cacagcagccuggg

SEQ ID NO: 1252665 - RNA, 19 nt, Human
cacacugggacuugcaaaa

SEQ ID NO: 1252666 - RNA, 22 nt, Human
cacacugggugguggccugguc

SEQ ID NO: 1252667 - RNA, 14 nt, Human
cacacuucaggcuc

SEQ ID NO: 1252668 - RNA, 17 nt, Human
cacacuucaggcucuuc

SEQ ID NO: 1252669 - RNA, 16 nt, Human
cacacuuacuuuuucu

SEQ ID NO: 1252670 - RNA, 14 nt, Human
cacacuuacuuuuu

SEQ ID NO: 1252671 - RNA, 18 nt, Human
cacacuucaggcucuucu

SEQ ID NO: 1252672 - RNA, 20 nt, Human
cacacuucaggcucuucucc

SEQ ID NO: 1252673 - RNA, 21 nt, Human
cacacuucaggcucuucuccu

SEQ ID NO: 1252674 - RNA, 22 nt, Human
cacacuucaggcucuucuccuu

SEQ ID NO: 1252675 - RNA, 16 nt, Human
cacacuaccgaaugug

SEQ ID NO: 1252676 - RNA, 18 nt, Human
cacacuaccgaauguguc

SEQ ID NO: 1252677 - RNA, 22 nt, Human
cacacuaccgaaugugucuuua

SEQ ID NO: 1252678 - RNA, 21 nt, Human
cacacuaccgaaugugucuuu

SEQ ID NO: 1252679 - RNA, 19 nt, Human
cacacucaugcauuguccu

SEQ ID NO: 1252680 - RNA, 19 nt, Human
cacacucagauccuccuca

SEQ ID NO: 1252681 - RNA, 20 nt, Human
cacacucagauccuccucau

SEQ ID NO: 1252682 - RNA, 14 nt, Human
cacacugaugcuua

SEQ ID NO: 1252683 - RNA, 18 nt, Human
cacacugaugcuuagaug

SEQ ID NO: 1252684 - RNA, 12 nt, Human
cacacugcacaa

SEQ ID NO: 1252685 - RNA, 23 nt, Human
cacacuucucaggacacaggccu

SEQ ID NO: 1252686 - RNA, 17 nt, Human
cacacuucucaggacac

SEQ ID NO: 1252687 - RNA, 13 nt, Human
cacacuucaaacu

SEQ ID NO: 1252688 - RNA, 18 nt, Human
cacacuucaaacuacuuu

SEQ ID NO: 1252689 - RNA, 14 nt, Human
cacacuucucagga

SEQ ID NO: 1252690 - RNA, 10 nt, Human
cacacuuguc

SEQ ID NO: 1252691 - RNA, 23 nt, Human
cacagacggaaggguaaacaaua

SEQ ID NO: 1252692 - RNA, 13 nt, Human
cacagacuauuuu

SEQ ID NO: 1252693 - RNA, 14 nt, Human
cacagacuauuuuu

SEQ ID NO: 1252694 - RNA, 10 nt, Human
cacagagagu

SEQ ID NO: 1252695 - RNA, 17 nt, Human
cacagagauucugaacu

SEQ ID NO: 1252696 - RNA, 13 nt, Human
cacaacuauauug

SEQ ID NO: 1252697 - RNA, 11 nt, Human
cacaacuagga

SEQ ID NO: 1252698 - RNA, 19 nt, Human
cacaacucacuccuuuuaa

SEQ ID NO: 1252699 - RNA, 22 nt, Human
cacaacucacuccuuuuaaaga

SEQ ID NO: 1252700 - RNA, 18 nt, Human
cacacacaugcuucccuu

SEQ ID NO: 1252701 - RNA, 22 nt, Human
cacacacauugcugugaacagg

SEQ ID NO: 1252702 - RNA, 15 nt, Human
cacacagacuauuuu

SEQ ID NO: 1252703 - RNA, 14 nt, Human
cacacccuguuuua

SEQ ID NO: 1252704 - RNA, 21 nt, Human
cacacccuguacuguucugug

SEQ ID NO: 1252705 - RNA, 12 nt, Human
cacaccccacuc

SEQ ID NO: 1252706 - RNA, 17 nt, Human
cacaccccacucccaca

SEQ ID NO: 1252707 - RNA, 17 nt, Human
cacacgagaaccugaag

SEQ ID NO: 1252708 - RNA, 23 nt, Human
cacaccuuuuauugacacagaaa

SEQ ID NO: 1252709 - RNA, 16 nt, Human
cacaccuguagcacuu

SEQ ID NO: 1252710 - RNA, 22 nt, Human
cacaccuuuuauugacacagaa

SEQ ID NO: 1252711 - RNA, 19 nt, Human
cacaccuccuucccucucu

SEQ ID NO: 1252712 - RNA, 22 nt, Human
cacaccuccuucccucucugga

SEQ ID NO: 1252713 - RNA, 18 nt, Human
cacacagcuacucucccc

SEQ ID NO: 1252714 - RNA, 14 nt, Human
cacaccacuagccu

SEQ ID NO: 1252715 - RNA, 19 nt, Human
cacaccacuagccucaggg

SEQ ID NO: 1252716 - RNA, 13 nt, Human
cacaccagagaac

SEQ ID NO: 1252717 - RNA, 21 nt, Human
cacaccaggcuugccugcagg

SEQ ID NO: 1252718 - RNA, 22 nt, Human
cacaccaggcuugccugcaggc

SEQ ID NO: 1252719 - RNA, 15 nt, Human
cacaccagggccagc

SEQ ID NO: 1252720 - RNA, 18 nt, Human
cacaccagggccagccuc

SEQ ID NO: 1252721 - RNA, 19 nt, Human
cacaccagggccagccucu

SEQ ID NO: 1252722 - RNA, 20 nt, Human
cacaccagggccagccucua

SEQ ID NO: 1252723 - RNA, 23 nt, Human
cacaacucacuccuuuuaaagaa

SEQ ID NO: 1252724 - RNA, 20 nt, Human
caaugaucaccgacugaaaa

SEQ ID NO: 1252725 - RNA, 20 nt, Human
caaugacaugaauuuuagcu

SEQ ID NO: 1252726 - RNA, 19 nt, Human
caaugauccuguauucaga

SEQ ID NO: 1252727 - RNA, 14 nt, Human
caaugaugaaugag

SEQ ID NO: 1252728 - RNA, 14 nt, Human
caaugacaugaauu

SEQ ID NO: 1252729 - RNA, 15 nt, Human
caaugacaugaauuu

SEQ ID NO: 1252730 - RNA, 20 nt, Human
caaugagguguccaacuggc

SEQ ID NO: 1252731 - RNA, 12 nt, Human
caaugacaugaa

SEQ ID NO: 1252732 - RNA, 13 nt, Human
caaugacaugaau

SEQ ID NO: 1252733 - RNA, 22 nt, Human
caaugaaugaaugaauggcuaa

SEQ ID NO: 1252734 - RNA, 20 nt, Human
caaugaauaaaaacucaagg

SEQ ID NO: 1252735 - RNA, 21 nt, Human
caaugaauaaaaacucaagga

SEQ ID NO: 1252736 - RNA, 22 nt, Human
caaugaauaaaaacucaaggag

SEQ ID NO: 1252737 - RNA, 23 nt, Human
caaugaauuuuauaaucugcagc

SEQ ID NO: 1252738 - RNA, 14 nt, Human
caaugacaaagcag

SEQ ID NO: 1252739 - RNA, 15 nt, Human
caaugacaaagcaga

SEQ ID NO: 1252740 - RNA, 16 nt, Human
caaugacaaagcagau

SEQ ID NO: 1252741 - RNA, 21 nt, Human
caaugaugaaugagaaucuac

SEQ ID NO: 1252742 - RNA, 13 nt, Human
caaugauggcaau

SEQ ID NO: 1252743 - RNA, 16 nt, Human
caaugauggcaauuuu

SEQ ID NO: 1252744 - RNA, 21 nt, Human
caaugauggcaauuuuguaac

SEQ ID NO: 1252745 - RNA, 16 nt, Human
caaugcagugccuuuc

SEQ ID NO: 1252746 - RNA, 16 nt, Human
caaugcaguugucucu

SEQ ID NO: 1252747 - RNA, 22 nt, Human
caauccucccacuucagccucc

SEQ ID NO: 1252748 - RNA, 18 nt, Human
caauccucccacuucagc

SEQ ID NO: 1252749 - RNA, 23 nt, Human
caauccuaugcaugguuucagca

SEQ ID NO: 1252750 - RNA, 15 nt, Human
caauccucccagaaa

SEQ ID NO: 1252751 - RNA, 11 nt, Human
caauccuggac

SEQ ID NO: 1252752 - RNA, 21 nt, Human
caaugaaaugaauuaaagugg

SEQ ID NO: 1252753 - RNA, 23 nt, Human
caaugaaaugaauuaaaguggac

SEQ ID NO: 1252754 - RNA, 17 nt, Human
caaugaacaucccuuuu

SEQ ID NO: 1252755 - RNA, 12 nt, Human
caauccuaugca

SEQ ID NO: 1252756 - RNA, 14 nt, Human
caauccuaugcaug

SEQ ID NO: 1252757 - RNA, 16 nt, Human
caauccuaugcauggu

SEQ ID NO: 1252758 - RNA, 18 nt, Human
caauccuaugcaugguuu

SEQ ID NO: 1252759 - RNA, 20 nt, Human
caauccuaugcaugguuuca

SEQ ID NO: 1252760 - RNA, 22 nt, Human
caauccuaugcaugguuucagc

SEQ ID NO: 1252761 - RNA, 14 nt, Human
caauccuauguuuu

SEQ ID NO: 1252762 - RNA, 20 nt, Human
caauccuauguuuuuguuca

SEQ ID NO: 1252763 - RNA, 17 nt, Human
caauagucaaauugugu

SEQ ID NO: 1252764 - RNA, 18 nt, Human
caauaugggggccuuuug

SEQ ID NO: 1252765 - RNA, 15 nt, Human
caaguguaaaauauu

SEQ ID NO: 1252766 - RNA, 16 nt, Human
caaguguaaaauauuu

SEQ ID NO: 1252767 - RNA, 21 nt, Human
caaguguaaaauauuuugaau

SEQ ID NO: 1252768 - RNA, 21 nt, Human
cacaaauucugucucuggauu

SEQ ID NO: 1252769 - RNA, 15 nt, Human
cacaaauuaucuuaa

SEQ ID NO: 1252770 - RNA, 17 nt, Human
cacaaauuauuaaugaa

SEQ ID NO: 1252771 - RNA, 20 nt, Human
cacaaauuauuaaugaaaau

SEQ ID NO: 1252772 - RNA, 22 nt, Human
cacaacacacagauuugagcuc

SEQ ID NO: 1252773 - RNA, 23 nt, Human
cacaacagccugacaacauuucu

SEQ ID NO: 1252774 - RNA, 17 nt, Human
cacaaccuucuguggcu

SEQ ID NO: 1252775 - RNA, 18 nt, Human
cacaaccuucuguggcuc

SEQ ID NO: 1252776 - RNA, 19 nt, Human
cacaaccuucuguggcuca

SEQ ID NO: 1252777 - RNA, 23 nt, Human
cacaaccuucuguggcucacaga

SEQ ID NO: 1252778 - RNA, 19 nt, Human
caauuuucuggaauacaug

SEQ ID NO: 1252779 - RNA, 20 nt, Human
caauuuucuggaauacauga

SEQ ID NO: 1252780 - RNA, 13 nt, Human
cacaaaacaaagc

SEQ ID NO: 1252781 - RNA, 16 nt, Human
cacaaaacccagaccu

SEQ ID NO: 1252782 - RNA, 15 nt, Human
cacaaacuguaaaua

SEQ ID NO: 1252783 - RNA, 23 nt, Human
cacaaacuguaaauaaaaagaaa

SEQ ID NO: 1252784 - RNA, 19 nt, Human
cacaaacuuuuauacucuu

SEQ ID NO: 1252785 - RNA, 17 nt, Human
cacaaacuguaauacaa

SEQ ID NO: 1252786 - RNA, 15 nt, Human
cacaaagacccuggc

SEQ ID NO: 1252787 - RNA, 16 nt, Human
cacaaagacccuggcu

SEQ ID NO: 1252788 - RNA, 17 nt, Human
cacaaagacccuggcuu

SEQ ID NO: 1252789 - RNA, 20 nt, Human
cacaaagacccuggcuuuca

SEQ ID NO: 1252790 - RNA, 15 nt, Human
caauuuucacugugu

SEQ ID NO: 1252791 - RNA, 20 nt, Human
caauuuucacuguguccagg

SEQ ID NO: 1252792 - RNA, 14 nt, Human
caauuuucacugug

SEQ ID NO: 1252793 - RNA, 15 nt, Human
caauuccaacaguuu

SEQ ID NO: 1252794 - RNA, 18 nt, Human
caauuccaacaguuuaau

SEQ ID NO: 1252795 - RNA, 19 nt, Human
caauuccaacaguuuaaug

SEQ ID NO: 1252796 - RNA, 21 nt, Human
caauuccaacaguuuaaugaa

SEQ ID NO: 1252797 - RNA, 22 nt, Human
caauuccaacaguuuaaugaag

SEQ ID NO: 1252798 - RNA, 13 nt, Human
caauuccaccugc

SEQ ID NO: 1252799 - RNA, 13 nt, Human
caauuuuaaagac

SEQ ID NO: 1252800 - RNA, 15 nt, Human
caauuuuaaagacau

SEQ ID NO: 1252801 - RNA, 21 nt, Human
caauuuuaucccucaccugua

SEQ ID NO: 1252802 - RNA, 17 nt, Human
caauucaaaaguuccaa

SEQ ID NO: 1252803 - RNA, 13 nt, Human
caauucaaagcug

SEQ ID NO: 1252804 - RNA, 20 nt, Human
caauucacaucuaaccucau

SEQ ID NO: 1252805 - RNA, 13 nt, Human
caauucagacagg

SEQ ID NO: 1252806 - RNA, 14 nt, Human
caauucagacaggc

SEQ ID NO: 1252807 - RNA, 15 nt, Human
caauucagacaggca

SEQ ID NO: 1252808 - RNA, 23 nt, Human
caauucagacaggcaaauaaaag

SEQ ID NO: 1252809 - RNA, 18 nt, Human
caauucauccucacucag

SEQ ID NO: 1252810 - RNA, 17 nt, Human
caaugcaguugucucug

SEQ ID NO: 1252811 - RNA, 18 nt, Human
caaugcaguugucucugu

SEQ ID NO: 1252812 - RNA, 20 nt, Human
caaugcaguugucucuguuu

SEQ ID NO: 1252813 - RNA, 19 nt, Human
caaugcaguugucucuguu

SEQ ID NO: 1252814 - RNA, 15 nt, Human
caaugccacagcccu

SEQ ID NO: 1252815 - RNA, 16 nt, Human
caaugccacagcccug

SEQ ID NO: 1252816 - RNA, 17 nt, Human
caaugccacagcccugu

SEQ ID NO: 1252817 - RNA, 19 nt, Human
caaugccacagcccuguca

SEQ ID NO: 1252818 - RNA, 22 nt, Human
caaugccacagcccugucagca

SEQ ID NO: 1252819 - RNA, 13 nt, Human
caaugucuggaga

SEQ ID NO: 1252820 - RNA, 14 nt, Human
caaugucuggagac

SEQ ID NO: 1252821 - RNA, 15 nt, Human
caaugucuggagacc

SEQ ID NO: 1252822 - RNA, 16 nt, Human
caaugucuggagacca

SEQ ID NO: 1252823 - RNA, 21 nt, Human
caaugucuggagaccaccagg

SEQ ID NO: 1252824 - RNA, 20 nt, Human
caaugucuggagaccaccag

SEQ ID NO: 1252825 - RNA, 11 nt, Human
caaugucuuga

SEQ ID NO: 1252826 - RNA, 21 nt, Human
caaugucuugaugcaugcacu

SEQ ID NO: 1252827 - RNA, 23 nt, Human
caaugucuugaugcaugcacugu

SEQ ID NO: 1252828 - RNA, 14 nt, Human
caauuaaaggcaaa

SEQ ID NO: 1252829 - RNA, 18 nt, Human
uuggacaaaauggaauac

SEQ ID NO: 1252830 - RNA, 17 nt, Human
uuggaauucgcuuucua

SEQ ID NO: 1252831 - RNA, 13 nt, Human
uuggaauacuuuu

SEQ ID NO: 1252832 - RNA, 15 nt, Human
uuggaauauaauugu

SEQ ID NO: 1252833 - RNA, 23 nt, Human
uuggaauauuguccauuguccaa

SEQ ID NO: 1252834 - RNA, 17 nt, Human
uuggaauguucucagau

SEQ ID NO: 1252835 - RNA, 15 nt, Human
uuggacaguuuacca

SEQ ID NO: 1252836 - RNA, 14 nt, Human
uuggacauccuccu

SEQ ID NO: 1252837 - RNA, 13 nt, Human
uuggacaaaauga

SEQ ID NO: 1252838 - RNA, 14 nt, Human
uuggacaaaucaca

SEQ ID NO: 1252839 - RNA, 20 nt, Human
uuggacaaaucacauauuuu

SEQ ID NO: 1252840 - RNA, 19 nt, Human
uuggacaaaucacauauuu

SEQ ID NO: 1252841 - RNA, 15 nt, Human
uuggacaagcuucug

SEQ ID NO: 1252842 - RNA, 17 nt, Human
uuggacaagcuucugag

SEQ ID NO: 1252843 - RNA, 19 nt, Human
uuggacaagcuucugagac

SEQ ID NO: 1252844 - RNA, 19 nt, Human
uuggacaccuuuagguucu

SEQ ID NO: 1252845 - RNA, 14 nt, Human
uuggacacgcucag

SEQ ID NO: 1252846 - RNA, 24 nt, Human
uuggaagacuaucuuacuauuuca

SEQ ID NO: 1252847 - RNA, 15 nt, Human
uuggaagagcagcac

SEQ ID NO: 1252848 - RNA, 16 nt, Human
uuggaagagcagcacc

SEQ ID NO: 1252849 - RNA, 17 nt, Human
uuggaagagcagcaccu

SEQ ID NO: 1252850 - RNA, 20 nt, Human
uuggaagagcagcaccuccu

SEQ ID NO: 1252851 - RNA, 22 nt, Human
uuggaagagcagcaccuccuca

SEQ ID NO: 1252852 - RNA, 22 nt, Human
uuggaagauggcauaaccuguc

SEQ ID NO: 1252853 - RNA, 21 nt, Human
uuggaagagcagcaccuccuc

SEQ ID NO: 1252854 - RNA, 20 nt, Human
uugcugugaggcuguccugu

SEQ ID NO: 1252855 - RNA, 18 nt, Human
uugcuguuuuaaacauua

SEQ ID NO: 1252856 - RNA, 19 nt, Human
uuggauuuaaaagccugcu

SEQ ID NO: 1252857 - RNA, 21 nt, Human
uuggauuuaaaagccugcuca

SEQ ID NO: 1252858 - RNA, 16 nt, Human
uuggauuuaguuucag

SEQ ID NO: 1252859 - RNA, 12 nt, Human
uuggauuuccua

SEQ ID NO: 1252860 - RNA, 14 nt, Human
uuggauuuccuaau

SEQ ID NO: 1252861 - RNA, 21 nt, Human
uuggauuuccuaauacuguca

SEQ ID NO: 1252862 - RNA, 14 nt, Human
uuggauuugacauu

SEQ ID NO: 1252863 - RNA, 22 nt, Human
uuggauuugacauugcguuuga

SEQ ID NO: 1252864 - RNA, 14 nt, Human
uuggcagccuugug

SEQ ID NO: 1252865 - RNA, 16 nt, Human
uuggcagccuugugau

SEQ ID NO: 1252866 - RNA, 12 nt, Human
uuggcaggcugg

SEQ ID NO: 1252867 - RNA, 12 nt, Human
uuggcagccuug

SEQ ID NO: 1252868 - RNA, 13 nt, Human
uuggcagccuugu

SEQ ID NO: 1252869 - RNA, 21 nt, Human
uuggcaccuaauccaggcaga

SEQ ID NO: 1252870 - RNA, 20 nt, Human
uuggauuuugcaaggugcau

SEQ ID NO: 1252871 - RNA, 17 nt, Human
uuggcaaugccaucauc

SEQ ID NO: 1252872 - RNA, 12 nt, Human
uuggcaauuuug

SEQ ID NO: 1252873 - RNA, 14 nt, Human
uuggcaauuuugug

SEQ ID NO: 1252874 - RNA, 13 nt, Human
uuggcaauuuugu

SEQ ID NO: 1252875 - RNA, 13 nt, Human
uuggcaccagaca

SEQ ID NO: 1252876 - RNA, 17 nt, Human
uuggcaccagacaccca

SEQ ID NO: 1252877 - RNA, 20 nt, Human
uuggcaccagacacccagga

SEQ ID NO: 1252878 - RNA, 21 nt, Human
uuggcaccagacacccaggac

SEQ ID NO: 1252879 - RNA, 23 nt, Human
uuggcaccagacacccaggacuu

SEQ ID NO: 1252880 - RNA, 17 nt, Human
uuggcaccgaagcccag

SEQ ID NO: 1252881 - RNA, 18 nt, Human
uuggcaccgaagcccaga

SEQ ID NO: 1252882 - RNA, 19 nt, Human
uuggcaccuaauccaggca

SEQ ID NO: 1252883 - RNA, 16 nt, Human
uugcuaagcauuccaa

SEQ ID NO: 1252884 - RNA, 19 nt, Human
uugcgcuccuggcccagcc

SEQ ID NO: 1252885 - RNA, 20 nt, Human
uugcgcuccuggcccagccu

SEQ ID NO: 1252886 - RNA, 21 nt, Human
uugcgcuccuggcccagccuu

SEQ ID NO: 1252887 - RNA, 18 nt, Human
uugcuaagcauuccaacu

SEQ ID NO: 1252888 - RNA, 16 nt, Human
uugcugcuaauauuuu

SEQ ID NO: 1252889 - RNA, 20 nt, Human
uugcugcuaauauuuuccuc

SEQ ID NO: 1252890 - RNA, 13 nt, Human
uugcugcuucucc

SEQ ID NO: 1252891 - RNA, 15 nt, Human
uugcuggaguacuua

SEQ ID NO: 1252892 - RNA, 15 nt, Human
uugcugcuucuccca

SEQ ID NO: 1252893 - RNA, 16 nt, Human
uugcugcuucucccag

SEQ ID NO: 1252894 - RNA, 17 nt, Human
uugcugcuucucccagg

SEQ ID NO: 1252895 - RNA, 21 nt, Human
uugcugcuucucccaggcaag

SEQ ID NO: 1252896 - RNA, 21 nt, Human
uugcuggaagacgcaagggcc

SEQ ID NO: 1252897 - RNA, 21 nt, Human
uugcuggaauaaguucaaauu

SEQ ID NO: 1252898 - RNA, 23 nt, Human
uugcuggacugucauagaaauua

SEQ ID NO: 1252899 - RNA, 17 nt, Human
uugcugucaagccauuu

SEQ ID NO: 1252900 - RNA, 14 nt, Human
uugcugugaggcug

SEQ ID NO: 1252901 - RNA, 15 nt, Human
uugcugugaggcugu

SEQ ID NO: 1252902 - RNA, 17 nt, Human
uugcugugaggcugucc

SEQ ID NO: 1252903 - RNA, 18 nt, Human
uugcugugaggcuguccu

SEQ ID NO: 1252904 - RNA, 19 nt, Human
uugcugugaggcuguccug

SEQ ID NO: 1252905 - RNA, 12 nt, Human
uugcgagagaug

SEQ ID NO: 1252906 - RNA, 14 nt, Human
uugcgagagaugug

SEQ ID NO: 1252907 - RNA, 15 nt, Human
uugcgagagaugugu

SEQ ID NO: 1252908 - RNA, 16 nt, Human
uugcgagagaugugug

SEQ ID NO: 1252909 - RNA, 17 nt, Human
uugcgagagaugugugu

SEQ ID NO: 1252910 - RNA, 19 nt, Human
uugcgagagauguguguug

SEQ ID NO: 1252911 - RNA, 19 nt, Human
uugcgauagagucucacug

SEQ ID NO: 1252912 - RNA, 15 nt, Human
uugcgcuccuggccc

SEQ ID NO: 1252913 - RNA, 19 nt, Human
uugccuuuugcaaccagga

SEQ ID NO: 1252914 - RNA, 13 nt, Human
uugccuuaaaaua

SEQ ID NO: 1252915 - RNA, 14 nt, Human
uugccuguaacaag

SEQ ID NO: 1252916 - RNA, 19 nt, Human
uugccuguaacaagccaga

SEQ ID NO: 1252917 - RNA, 22 nt, Human
uugccuuccagaaaacaaaacu

SEQ ID NO: 1252918 - RNA, 17 nt, Human
uugccuucuacuuuuaa

SEQ ID NO: 1252919 - RNA, 20 nt, Human
uugccaugacaacuucuaau

SEQ ID NO: 1252920 - RNA, 18 nt, Human
uuguacuuuagggaagua

SEQ ID NO: 1252921 - RNA, 17 nt, Human
uuguagaagucacauuc

SEQ ID NO: 1252922 - RNA, 22 nt, Human
uuguagaagucacauuccugaa

SEQ ID NO: 1252923 - RNA, 15 nt, Human
uuguagcauccugga

SEQ ID NO: 1252924 - RNA, 16 nt, Human
uuguaccgcaauguga

SEQ ID NO: 1252925 - RNA, 20 nt, Human
uuguacauuugggaguuuuu

SEQ ID NO: 1252926 - RNA, 15 nt, Human
uuguaccaacuuuua

SEQ ID NO: 1252927 - RNA, 20 nt, Human
uuguaaaauggugugaccac

SEQ ID NO: 1252928 - RNA, 19 nt, Human
uuguaaaaugacaaucaug

SEQ ID NO: 1252929 - RNA, 20 nt, Human
uuguaaaaugacaaucaugu

SEQ ID NO: 1252930 - RNA, 22 nt, Human
uuguaaaaugacaaucaugugu

SEQ ID NO: 1252931 - RNA, 17 nt, Human
uuguaaaauuauuucau

SEQ ID NO: 1252932 - RNA, 22 nt, Human
uuguaaacaaacuguguaacug

SEQ ID NO: 1252933 - RNA, 23 nt, Human
uuguaaacaaacuguguaacugc

SEQ ID NO: 1252934 - RNA, 16 nt, Human
uuguaaacucaaaaua

SEQ ID NO: 1252935 - RNA, 22 nt, Human
uuguaaacucaaaauauuugua

SEQ ID NO: 1252936 - RNA, 22 nt, Human
uuguaugaaagauggcugugcc

SEQ ID NO: 1252937 - RNA, 20 nt, Human
uuguaugauccuaaugaaug

SEQ ID NO: 1252938 - RNA, 16 nt, Human
uuguaugaaacuaaag

SEQ ID NO: 1252939 - RNA, 22 nt, Human
uugucaagaauagcauuguaaa

SEQ ID NO: 1252940 - RNA, 15 nt, Human
uugucuauaaagcau

SEQ ID NO: 1252941 - RNA, 16 nt, Human
uugucuauaaagcauu

SEQ ID NO: 1252942 - RNA, 18 nt, Human
uugucuauuaccuguuag

SEQ ID NO: 1252943 - RNA, 18 nt, Human
uugucuauaaagcauuua

SEQ ID NO: 1252944 - RNA, 13 nt, Human
uugucucugaugc

SEQ ID NO: 1252945 - RNA, 14 nt, Human
uugucucugaugca

SEQ ID NO: 1252946 - RNA, 17 nt, Human
uugucugaagucacugc

SEQ ID NO: 1252947 - RNA, 22 nt, Human
uugucugaaaagugaagacaga

SEQ ID NO: 1252948 - RNA, 12 nt, Human
uugucucuguuu

SEQ ID NO: 1252949 - RNA, 15 nt, Human
uugucugaacuugca

SEQ ID NO: 1252950 - RNA, 15 nt, Human
uugucucugaugcag

SEQ ID NO: 1252951 - RNA, 17 nt, Human
uugucucugaugcagcu

SEQ ID NO: 1252952 - RNA, 21 nt, Human
uugucucugaugcagcuuaua

SEQ ID NO: 1252953 - RNA, 20 nt, Human
uugucucugcaaacugccuu

SEQ ID NO: 1252954 - RNA, 22 nt, Human
uugucucugcaaacugccuucu

SEQ ID NO: 1252955 - RNA, 23 nt, Human
uugucucuguuuuacaaguugga

SEQ ID NO: 1252956 - RNA, 20 nt, Human
uugucugaagucacugcaca

SEQ ID NO: 1252957 - RNA, 18 nt, Human
uugucugaagucacugca

SEQ ID NO: 1252958 - RNA, 12 nt, Human
uugucuuaauau

SEQ ID NO: 1252959 - RNA, 17 nt, Human
uugucuuaauauugugg

SEQ ID NO: 1252960 - RNA, 13 nt, Human
uuggcaggcuggc

SEQ ID NO: 1252961 - RNA, 14 nt, Human
uuggcaggcuggcc

SEQ ID NO: 1252962 - RNA, 14 nt, Human
uuggcagucugaau

SEQ ID NO: 1252963 - RNA, 16 nt, Human
uuggcauagcucuggg

SEQ ID NO: 1252964 - RNA, 14 nt, Human
uuggcuuauaauuc

SEQ ID NO: 1252965 - RNA, 17 nt, Human
uuggcuuauaauucuuu

SEQ ID NO: 1252966 - RNA, 18 nt, Human
uuggcuuauaauucuuuc

SEQ ID NO: 1252967 - RNA, 19 nt, Human
uuggcuuauaauucuuuca

SEQ ID NO: 1252968 - RNA, 22 nt, Human
uugggacugcuaaauaaaauuu

SEQ ID NO: 1252969 - RNA, 14 nt, Human
uugggagacaugug

SEQ ID NO: 1252970 - RNA, 17 nt, Human
uugggagacaugugaca

SEQ ID NO: 1252971 - RNA, 13 nt, Human
uugggagagacuu

SEQ ID NO: 1252972 - RNA, 23 nt, Human
uugggagagacuuguuuuggaug

SEQ ID NO: 1252973 - RNA, 16 nt, Human
uugggagagggcgcag

SEQ ID NO: 1252974 - RNA, 18 nt, Human
uugggaauggauccugga

SEQ ID NO: 1252975 - RNA, 14 nt, Human
uugggaauuuuauu

SEQ ID NO: 1252976 - RNA, 20 nt, Human
uugguaaggggaauugagga

SEQ ID NO: 1252977 - RNA, 12 nt, Human
uugguaacuuuu

SEQ ID NO: 1252978 - RNA, 14 nt, Human
uugguaacuuuugu

SEQ ID NO: 1252979 - RNA, 15 nt, Human
uugguaacuuuugug

SEQ ID NO: 1252980 - RNA, 13 nt, Human
uugggauuugcug

SEQ ID NO: 1252981 - RNA, 14 nt, Human
uugggauuugcugu

SEQ ID NO: 1252982 - RNA, 17 nt, Human
uugggcacccccagccu

SEQ ID NO: 1252983 - RNA, 15 nt, Human
uugggagagggcgca

SEQ ID NO: 1252984 - RNA, 17 nt, Human
uugggagcuugggaaug

SEQ ID NO: 1252985 - RNA, 19 nt, Human
uugggagcuugggaaugga

SEQ ID NO: 1252986 - RNA, 13 nt, Human
uugggaguuuuua

SEQ ID NO: 1252987 - RNA, 15 nt, Human
uugggauaucuccug

SEQ ID NO: 1252988 - RNA, 16 nt, Human
uuggucuguacugauu

SEQ ID NO: 1252989 - RNA, 14 nt, Human
uuggucuguacuga

SEQ ID NO: 1252990 - RNA, 13 nt, Human
uuggucguuuuuu

SEQ ID NO: 1252991 - RNA, 22 nt, Human
uuggucucccuucucuacacuc

SEQ ID NO: 1252992 - RNA, 12 nt, Human
uugguaccagau

SEQ ID NO: 1252993 - RNA, 14 nt, Human
uugguaccagauaa

SEQ ID NO: 1252994 - RNA, 19 nt, Human
uugguaccagauaacuuuu

SEQ ID NO: 1252995 - RNA, 13 nt, Human
uuguaaaauggug

SEQ ID NO: 1252996 - RNA, 12 nt, Human
uuguaaaauggu

SEQ ID NO: 1252997 - RNA, 15 nt, Human
uuggucugugagaug

SEQ ID NO: 1252998 - RNA, 20 nt, Human
uuggucuguacugauucaau

SEQ ID NO: 1252999 - RNA, 13 nt, Human
uuguaaaaugaca

SEQ ID NO: 1253000 - RNA, 15 nt, Human
uuguaaaaugacaau

SEQ ID NO: 1253001 - RNA, 17 nt, Human
uuguaaaaugacaauca

SEQ ID NO: 1253002 - RNA, 21 nt, Human
uugaagagguuuuaaagcuuc

SEQ ID NO: 1253003 - RNA, 20 nt, Human
uugaagcacagugaucaagu

SEQ ID NO: 1253004 - RNA, 20 nt, Human
uugaagcaaaucgaaugaaa

SEQ ID NO: 1253005 - RNA, 14 nt, Human
uugaagcacguaca

SEQ ID NO: 1253006 - RNA, 18 nt, Human
uugaagcacguacauuuu

SEQ ID NO: 1253007 - RNA, 16 nt, Human
uugaagagguuuuaaa

SEQ ID NO: 1253008 - RNA, 20 nt, Human
uugaaugauuuuucuuuaca

SEQ ID NO: 1253009 - RNA, 21 nt, Human
uugaaugauuuuucuuuacaa

SEQ ID NO: 1253010 - RNA, 19 nt, Human
uugaauguggcuugagaaa

SEQ ID NO: 1253011 - RNA, 21 nt, Human
uugaauguggcuugagaaaua

SEQ ID NO: 1253012 - RNA, 22 nt, Human
uugaauguggcuugagaaauau

SEQ ID NO: 1253013 - RNA, 15 nt, Human
uugaaugcaaaccau

SEQ ID NO: 1253014 - RNA, 20 nt, Human
uugaauguguuucacaguuu

SEQ ID NO: 1253015 - RNA, 18 nt, Human
uugaaaauuaacaugaau

SEQ ID NO: 1253016 - RNA, 12 nt, Human
uucuuucuagaa

SEQ ID NO: 1253017 - RNA, 13 nt, Human
uucuuucuagaaa

SEQ ID NO: 1253018 - RNA, 16 nt, Human
uugaaaauguccagga

SEQ ID NO: 1253019 - RNA, 15 nt, Human
uugaaacagaaaaau

SEQ ID NO: 1253020 - RNA, 19 nt, Human
uucuuuaacugccguaauu

SEQ ID NO: 1253021 - RNA, 20 nt, Human
uucuuuacaaaacaaacuca

SEQ ID NO: 1253022 - RNA, 22 nt, Human
uucuuuacaaaacaaacucauu

SEQ ID NO: 1253023 - RNA, 11 nt, Human
uucuuuagaac

SEQ ID NO: 1253024 - RNA, 21 nt, Human
uugaaaaucuuauaauuuaaa

SEQ ID NO: 1253025 - RNA, 15 nt, Human
uucuuuccauuugca

SEQ ID NO: 1253026 - RNA, 16 nt, Human
uucuuucccagucugu

SEQ ID NO: 1253027 - RNA, 15 nt, Human
uucuguauauacuuu

SEQ ID NO: 1253028 - RNA, 16 nt, Human
uucuguauauacuuuu

SEQ ID NO: 1253029 - RNA, 17 nt, Human
uucuguauauacuuuuu

SEQ ID NO: 1253030 - RNA, 17 nt, Human
uucuggccuuguaagac

SEQ ID NO: 1253031 - RNA, 13 nt, Human
uucugugccugaa

SEQ ID NO: 1253032 - RNA, 15 nt, Human
uucugugccugaaua

SEQ ID NO: 1253033 - RNA, 16 nt, Human
uucugugccugaauau

SEQ ID NO: 1253034 - RNA, 17 nt, Human
uucugugccugaauauu

SEQ ID NO: 1253035 - RNA, 15 nt, Human
uucuuagcucaauga

SEQ ID NO: 1253036 - RNA, 20 nt, Human
uucuaaguuucuaagauucu

SEQ ID NO: 1253037 - RNA, 17 nt, Human
uucuaaguuucuaagau

SEQ ID NO: 1253038 - RNA, 18 nt, Human
uucuaaguuucuaagauu

SEQ ID NO: 1253039 - RNA, 14 nt, Human
uucuggccaggaag

SEQ ID NO: 1253040 - RNA, 21 nt, Human
uucuggccaguguuuaaaacu

SEQ ID NO: 1253041 - RNA, 15 nt, Human
uucuggccaggaagc

SEQ ID NO: 1253042 - RNA, 16 nt, Human
uucuggccaguguuua

SEQ ID NO: 1253043 - RNA, 17 nt, Human
uucuggccaguguuuaa

SEQ ID NO: 1253044 - RNA, 18 nt, Human
uucuggccaguguuuaaa

SEQ ID NO: 1253045 - RNA, 22 nt, Human
uucuggccaguguuuaaaacuu

SEQ ID NO: 1253046 - RNA, 15 nt, Human
uucuaaagcucugac

SEQ ID NO: 1253047 - RNA, 16 nt, Human
uucuaaagcucugaca

SEQ ID NO: 1253048 - RNA, 17 nt, Human
uucuaaagcucugacau

SEQ ID NO: 1253049 - RNA, 15 nt, Human
uucuaaguaaauaca

SEQ ID NO: 1253050 - RNA, 16 nt, Human
uucuaaguaaauacaa

SEQ ID NO: 1253051 - RNA, 17 nt, Human
uucuaaguaaauacaau

SEQ ID NO: 1253052 - RNA, 18 nt, Human
uucuaaguaaauacaauu

SEQ ID NO: 1253053 - RNA, 21 nt, Human
uucuaaguaaauacaauuuuu

SEQ ID NO: 1253054 - RNA, 12 nt, Human
uucuaagucuuu

SEQ ID NO: 1253055 - RNA, 15 nt, Human
uucuaagucuuucca

SEQ ID NO: 1253056 - RNA, 17 nt, Human
uucuaagucuuuccauu

SEQ ID NO: 1253057 - RNA, 20 nt, Human
uucuaaguaaauacaauuuu

SEQ ID NO: 1253058 - RNA, 12 nt, Human
uucuaaguuucu

SEQ ID NO: 1253059 - RNA, 13 nt, Human
uucuaaguuucua

SEQ ID NO: 1253060 - RNA, 14 nt, Human
uucuaaguuucuaa

SEQ ID NO: 1253061 - RNA, 16 nt, Human
uucuaaguuucuaaga

SEQ ID NO: 1253062 - RNA, 19 nt, Human
uucuuaggguuaugauuaa

SEQ ID NO: 1253063 - RNA, 23 nt, Human
uucuuagcucaaugagcauguuu

SEQ ID NO: 1253064 - RNA, 16 nt, Human
uucuuagcucaaugag

SEQ ID NO: 1253065 - RNA, 13 nt, Human
uucuuagugacuu

SEQ ID NO: 1253066 - RNA, 18 nt, Human
uucuuaugccauauaauu

SEQ ID NO: 1253067 - RNA, 15 nt, Human
uucuuauggaauuga

SEQ ID NO: 1253068 - RNA, 17 nt, Human
uucuuauggaauugauu

SEQ ID NO: 1253069 - RNA, 18 nt, Human
uucuuauggaauugauuu

SEQ ID NO: 1253070 - RNA, 22 nt, Human
uucuuauggaauugauuugcau

SEQ ID NO: 1253071 - RNA, 17 nt, Human
uucuuauguugcccagu

SEQ ID NO: 1253072 - RNA, 18 nt, Human
uucuuguguguaugcaca

SEQ ID NO: 1253073 - RNA, 22 nt, Human
uucuuguguguaugcacaugaa

SEQ ID NO: 1253074 - RNA, 20 nt, Human
uucuuuaaaguucuucuaag

SEQ ID NO: 1253075 - RNA, 12 nt, Human
uucuuuaacugc

SEQ ID NO: 1253076 - RNA, 14 nt, Human
uucuuuaacuuaau

SEQ ID NO: 1253077 - RNA, 11 nt, Human
uucuugucuau

SEQ ID NO: 1253078 - RNA, 13 nt, Human
uucuugucuauaa

SEQ ID NO: 1253079 - RNA, 14 nt, Human
uucuugucuauaaa

SEQ ID NO: 1253080 - RNA, 16 nt, Human
uucuugucuauaaagc

SEQ ID NO: 1253081 - RNA, 17 nt, Human
uucuugucuauaaagca

SEQ ID NO: 1253082 - RNA, 18 nt, Human
uucuugucuauaaagcau

SEQ ID NO: 1253083 - RNA, 22 nt, Human
uucuugucuauaaagcauuuaa

SEQ ID NO: 1253084 - RNA, 21 nt, Human
uucuugucuauaaagcauuua

SEQ ID NO: 1253085 - RNA, 14 nt, Human
uucuugucuuuauu

SEQ ID NO: 1253086 - RNA, 18 nt, Human
uucuucauaacaauuuua

SEQ ID NO: 1253087 - RNA, 21 nt, Human
uucuucauaacaauuuuagga

SEQ ID NO: 1253088 - RNA, 12 nt, Human
uucuuguauuua

SEQ ID NO: 1253089 - RNA, 20 nt, Human
uugauaugccuuuucccaac

SEQ ID NO: 1253090 - RNA, 22 nt, Human
uugaggcuugguuccuucccaa

SEQ ID NO: 1253091 - RNA, 16 nt, Human
uugauaugugaacagu

SEQ ID NO: 1253092 - RNA, 15 nt, Human
uugauaugacuguuu

SEQ ID NO: 1253093 - RNA, 22 nt, Human
uugauauuuucaacgcagcccu

SEQ ID NO: 1253094 - RNA, 15 nt, Human
uugauauuucuagcu

SEQ ID NO: 1253095 - RNA, 20 nt, Human
uugaucagccccacccuggc

SEQ ID NO: 1253096 - RNA, 21 nt, Human
uugaucagccccacccuggcc

SEQ ID NO: 1253097 - RNA, 12 nt, Human
uugaucaguuaa

SEQ ID NO: 1253098 - RNA, 18 nt, Human
uugaucaguuaagaaauu

SEQ ID NO: 1253099 - RNA, 17 nt, Human
uugauccagaaagaaaa

SEQ ID NO: 1253100 - RNA, 15 nt, Human
uugauccauuucuaa

SEQ ID NO: 1253101 - RNA, 16 nt, Human
uugauccauuucuaau

SEQ ID NO: 1253102 - RNA, 17 nt, Human
uugauccauuucuaauu

SEQ ID NO: 1253103 - RNA, 18 nt, Human
uugauccauuucuaauua

SEQ ID NO: 1253104 - RNA, 19 nt, Human
uugaucgccuuucccaggu

SEQ ID NO: 1253105 - RNA, 16 nt, Human
uugaucuccguggcuu

SEQ ID NO: 1253106 - RNA, 18 nt, Human
uugaauuguaacuguucu

SEQ ID NO: 1253107 - RNA, 13 nt, Human
uugagcucagccc

SEQ ID NO: 1253108 - RNA, 15 nt, Human
uugagcuauugcugu

SEQ ID NO: 1253109 - RNA, 18 nt, Human
uugagcucucucauuguc

SEQ ID NO: 1253110 - RNA, 15 nt, Human
uugagcucucugccc

SEQ ID NO: 1253111 - RNA, 15 nt, Human
uugaggacuucuugc

SEQ ID NO: 1253112 - RNA, 12 nt, Human
uugaggagcccc

SEQ ID NO: 1253113 - RNA, 16 nt, Human
uugaggagccccagcu

SEQ ID NO: 1253114 - RNA, 13 nt, Human
uugaggacuucuu

SEQ ID NO: 1253115 - RNA, 16 nt, Human
uugaggcaaaagaagg

SEQ ID NO: 1253116 - RNA, 23 nt, Human
uugaauuaauaucccuacaugua

SEQ ID NO: 1253117 - RNA, 13 nt, Human
uugaauuaucuug

SEQ ID NO: 1253118 - RNA, 18 nt, Human
uugaauuaucuugguuga

SEQ ID NO: 1253119 - RNA, 20 nt, Human
uugaauuaucuugguugaaa

SEQ ID NO: 1253120 - RNA, 22 nt, Human
uugaauuaucuugguugaaaau

SEQ ID NO: 1253121 - RNA, 12 nt, Human
uugaauucauuu

SEQ ID NO: 1253122 - RNA, 16 nt, Human
uugaauucauuucacu

SEQ ID NO: 1253123 - RNA, 19 nt, Human
uugaauucauuucacugua

SEQ ID NO: 1253124 - RNA, 21 nt, Human
uugaauucuugguugaggaaa

SEQ ID NO: 1253125 - RNA, 15 nt, Human
uugaauuguaacugu

SEQ ID NO: 1253126 - RNA, 16 nt, Human
uugcauaacguauaaa

SEQ ID NO: 1253127 - RNA, 19 nt, Human
uugcaguuuaucauucaag

SEQ ID NO: 1253128 - RNA, 20 nt, Human
uugcaguuuaucauucaagu

SEQ ID NO: 1253129 - RNA, 23 nt, Human
uugcaguuuaucauucaagugua

SEQ ID NO: 1253130 - RNA, 19 nt, Human
uugcauaacaauuccucua

SEQ ID NO: 1253131 - RNA, 13 nt, Human
uugcauaagagcu

SEQ ID NO: 1253132 - RNA, 19 nt, Human
uugccagagauccaaaaga

SEQ ID NO: 1253133 - RNA, 23 nt, Human
uugccaggcuggagugcaguggc

SEQ ID NO: 1253134 - RNA, 19 nt, Human
uugccaggcuggagugcag

SEQ ID NO: 1253135 - RNA, 20 nt, Human
uugccaggugacugucuggg

SEQ ID NO: 1253136 - RNA, 19 nt, Human
uugccauauuuucaccauu

SEQ ID NO: 1253137 - RNA, 23 nt, Human
uugccaucugcgugacaauaaaa

SEQ ID NO: 1253138 - RNA, 23 nt, Human
uugccaugacaacuucuaauugc

SEQ ID NO: 1253139 - RNA, 22 nt, Human
uugcagcccugcugcugccugc

SEQ ID NO: 1253140 - RNA, 17 nt, Human
uugcagcacagcugaga

SEQ ID NO: 1253141 - RNA, 16 nt, Human
uugcagaaaauucugu

SEQ ID NO: 1253142 - RNA, 17 nt, Human
uugcagaaaauucugug

SEQ ID NO: 1253143 - RNA, 18 nt, Human
uugcagccggcacagggu

SEQ ID NO: 1253144 - RNA, 20 nt, Human
uugcagccggcacagggucu

SEQ ID NO: 1253145 - RNA, 15 nt, Human
uugcagcgacuggca

SEQ ID NO: 1253146 - RNA, 9 nt, Human
uugcagcug

SEQ ID NO: 1253147 - RNA, 12 nt, Human
uugcagcuguuu

SEQ ID NO: 1253148 - RNA, 13 nt, Human
uugcagcuguuuu

SEQ ID NO: 1253149 - RNA, 17 nt, Human
uugcagcuguuuuguug

SEQ ID NO: 1253150 - RNA, 21 nt, Human
uugcaguucccacauuaaaga

SEQ ID NO: 1253151 - RNA, 13 nt, Human
uugcaguuuauca

SEQ ID NO: 1253152 - RNA, 18 nt, Human
uugcaguuuaucauucaa

SEQ ID NO: 1253153 - RNA, 14 nt, Human
uugaucuggaaccc

SEQ ID NO: 1253154 - RNA, 19 nt, Human
uugauucauaguaacuucu

SEQ ID NO: 1253155 - RNA, 23 nt, Human
uugauucgguauccccccaucuu

SEQ ID NO: 1253156 - RNA, 22 nt, Human
uugcacuucuaagacuuuacuu

SEQ ID NO: 1253157 - RNA, 19 nt, Human
uugcagaaaauucugugcc

SEQ ID NO: 1253158 - RNA, 15 nt, Human
uuguuauuaaacaaa

SEQ ID NO: 1253159 - RNA, 20 nt, Human
uugucuuuguucuucuacca

SEQ ID NO: 1253160 - RNA, 12 nt, Human
uugucuuuauuu

SEQ ID NO: 1253161 - RNA, 14 nt, Human
uugucuuauucccu

SEQ ID NO: 1253162 - RNA, 15 nt, Human
uuguuuacaugcuua

SEQ ID NO: 1253163 - RNA, 16 nt, Human
uuguuuacaugcuuau

SEQ ID NO: 1253164 - RNA, 17 nt, Human
uuguuuacaugcuuauu

SEQ ID NO: 1253165 - RNA, 23 nt, Human
uuguuuacaugcuuauuccauga

SEQ ID NO: 1253166 - RNA, 22 nt, Human
uuguuuacaugcuuauuccaug

SEQ ID NO: 1253167 - RNA, 22 nt, Human
uuguuuaauuuuuauuucuucc

SEQ ID NO: 1253168 - RNA, 23 nt, Human
uuguuauuugaaaacauguuuau

SEQ ID NO: 1253169 - RNA, 15 nt, Human
uuguuauuuugcaac

SEQ ID NO: 1253170 - RNA, 22 nt, Human
uuguuauuuugcaaccucgcug

SEQ ID NO: 1253171 - RNA, 13 nt, Human
uuguuuuacaaua

SEQ ID NO: 1253172 - RNA, 12 nt, Human
uuguuuuacaau

SEQ ID NO: 1253173 - RNA, 15 nt, Human
uuuaaaacagacacu

SEQ ID NO: 1253174 - RNA, 14 nt, Human
uuguuucugaucua

SEQ ID NO: 1253175 - RNA, 15 nt, Human
uuguuucuguuccaa

SEQ ID NO: 1253176 - RNA, 16 nt, Human
uuguuucuguuccaaa

SEQ ID NO: 1253177 - RNA, 23 nt, Human
uuguuuauugaauucauuucacu

SEQ ID NO: 1253178 - RNA, 21 nt, Human
uuguuuagaaagaauauucau

SEQ ID NO: 1253179 - RNA, 15 nt, Human
uuguuuauguaauuu

SEQ ID NO: 1253180 - RNA, 20 nt, Human
uuguuucuuucucugaggac

SEQ ID NO: 1253181 - RNA, 17 nt, Human
uuguuuggggcaggagu

SEQ ID NO: 1253182 - RNA, 17 nt, Human
uuguuucuguuccaaau

SEQ ID NO: 1253183 - RNA, 12 nt, Human
uuguuucuuaaa

SEQ ID NO: 1253184 - RNA, 14 nt, Human
uuguuucuuaaaua

SEQ ID NO: 1253185 - RNA, 23 nt, Human
uuguuucuuaaauaagaaacuuu

SEQ ID NO: 1253186 - RNA, 15 nt, Human
uuguuucuuaaauaa

SEQ ID NO: 1253187 - RNA, 16 nt, Human
uuguuucuuucucuga

SEQ ID NO: 1253188 - RNA, 19 nt, Human
uuguuucuuucucugagga

SEQ ID NO: 1253189 - RNA, 16 nt, Human
uuuaaaaugagaaauc

SEQ ID NO: 1253190 - RNA, 11 nt, Human
uuuaaaaugua

SEQ ID NO: 1253191 - RNA, 17 nt, Human
uuuaaaauguaaagcca

SEQ ID NO: 1253192 - RNA, 18 nt, Human
uuuaaaauguaaagccau

SEQ ID NO: 1253193 - RNA, 20 nt, Human
uuuaaaauguaaagccaugc

SEQ ID NO: 1253194 - RNA, 12 nt, Human
uuuaaaaugucu

SEQ ID NO: 1253195 - RNA, 16 nt, Human
uuuaaaauuacaacua

SEQ ID NO: 1253196 - RNA, 12 nt, Human
uuuaaaauguac

SEQ ID NO: 1253197 - RNA, 17 nt, Human
uuuaaaauuuauauugu

SEQ ID NO: 1253198 - RNA, 20 nt, Human
uuuaaaauuuauauuguaaa

SEQ ID NO: 1253199 - RNA, 12 nt, Human
uuuaaaauuugu

SEQ ID NO: 1253200 - RNA, 16 nt, Human
uuuaaaauuuguucuu

SEQ ID NO: 1253201 - RNA, 14 nt, Human
uuuaaacuguguac

SEQ ID NO: 1253202 - RNA, 15 nt, Human
uuuaaacuguguaca

SEQ ID NO: 1253203 - RNA, 16 nt, Human
uuuaaacuguacagug

SEQ ID NO: 1253204 - RNA, 18 nt, Human
uuuaaaccuauacucacu

SEQ ID NO: 1253205 - RNA, 11 nt, Human
uuuaaaccuuu

SEQ ID NO: 1253206 - RNA, 15 nt, Human
uuuaaacuauaagca

SEQ ID NO: 1253207 - RNA, 13 nt, Human
uuuaaacuguaca

SEQ ID NO: 1253208 - RNA, 15 nt, Human
uuuaaacuguacagu

SEQ ID NO: 1253209 - RNA, 18 nt, Human
uuuaaacuguacaguguc

SEQ ID NO: 1253210 - RNA, 14 nt, Human
uuuaaacagauguc

SEQ ID NO: 1253211 - RNA, 23 nt, Human
uuuaaacagauguccaucagaug

SEQ ID NO: 1253212 - RNA, 14 nt, Human
uuuaaacaccuccu

SEQ ID NO: 1253213 - RNA, 15 nt, Human
uuuaaacaaguauuu

SEQ ID NO: 1253214 - RNA, 15 nt, Human
uuuaaacauuaauag

SEQ ID NO: 1253215 - RNA, 19 nt, Human
uuuaaaccaauugcugcua

SEQ ID NO: 1253216 - RNA, 19 nt, Human
uuuaaacauuaauagcagc

SEQ ID NO: 1253217 - RNA, 17 nt, Human
uuuaaaccgcuaaaaga

SEQ ID NO: 1253218 - RNA, 20 nt, Human
uuuaaaccgcuaaaagaaac

SEQ ID NO: 1253219 - RNA, 21 nt, Human
uuuaaaccgcuaaaagaaacu

SEQ ID NO: 1253220 - RNA, 22 nt, Human
uuuaaaccgcuaaaagaaacuu

SEQ ID NO: 1253221 - RNA, 23 nt, Human
uuuaaaccgcuaaaagaaacuuu

SEQ ID NO: 1253222 - RNA, 17 nt, Human
uuuaaaaggaaagaaaa

SEQ ID NO: 1253223 - RNA, 13 nt, Human
uuuaaaagccugc

SEQ ID NO: 1253224 - RNA, 14 nt, Human
uuuaaaagccugcu

SEQ ID NO: 1253225 - RNA, 18 nt, Human
uuuaaaagugucaagcug

SEQ ID NO: 1253226 - RNA, 23 nt, Human
uuuaaaagugccauuaacaaaug

SEQ ID NO: 1253227 - RNA, 12 nt, Human
uuuaaaauagca

SEQ ID NO: 1253228 - RNA, 17 nt, Human
uuuaaaauagcguucuu

SEQ ID NO: 1253229 - RNA, 20 nt, Human
uuuaaaauagcguucuugua

SEQ ID NO: 1253230 - RNA, 23 nt, Human
uuuaaaauagcguucuuguaauu

SEQ ID NO: 1253231 - RNA, 11 nt, Human
uuuaaaauaua

SEQ ID NO: 1253232 - RNA, 21 nt, Human
uuuaaaauauauugaauauuu

SEQ ID NO: 1253233 - RNA, 16 nt, Human
uuuaaaauaucuacau

SEQ ID NO: 1253234 - RNA, 18 nt, Human
uuuaaaaucagcuauuuu

SEQ ID NO: 1253235 - RNA, 22 nt, Human
uuuaaaaucagcuauuuuguga

SEQ ID NO: 1253236 - RNA, 19 nt, Human
uuuaaaaucaucagaaagg

SEQ ID NO: 1253237 - RNA, 15 nt, Human
uuuaaaaucugucac

SEQ ID NO: 1253238 - RNA, 14 nt, Human
uuuaaaagaaugau

SEQ ID NO: 1253239 - RNA, 14 nt, Human
uuuaaaacccauuu

SEQ ID NO: 1253240 - RNA, 21 nt, Human
uuuaaaacccauuuaaauuuu

SEQ ID NO: 1253241 - RNA, 15 nt, Human
uuuaaaacuguugga

SEQ ID NO: 1253242 - RNA, 22 nt, Human
uuuaaaacuguuggaauggauu

SEQ ID NO: 1253243 - RNA, 17 nt, Human
uuuaaaagaaugauuau

SEQ ID NO: 1253244 - RNA, 11 nt, Human
uuuaaaacuug

SEQ ID NO: 1253245 - RNA, 19 nt, Human
uuuaaaagacacacuuguc

SEQ ID NO: 1253246 - RNA, 12 nt, Human
uuuaaaagacac

SEQ ID NO: 1253247 - RNA, 17 nt, Human
uuuaaaagaugcuuuua

SEQ ID NO: 1253248 - RNA, 13 nt, Human
uuuaaaagaugcu

SEQ ID NO: 1253249 - RNA, 12 nt, Human
uuuaaaagauuu

SEQ ID NO: 1253250 - RNA, 13 nt, Human
uuuaaaagcacga

SEQ ID NO: 1253251 - RNA, 19 nt, Human
uuuaaaagcacgacagugg

SEQ ID NO: 1253252 - RNA, 16 nt, Human
uuuacauggcuggagc

SEQ ID NO: 1253253 - RNA, 23 nt, Human
uuuaccagcauacccacacaaau

SEQ ID NO: 1253254 - RNA, 16 nt, Human
uuuacaugaggacucu

SEQ ID NO: 1253255 - RNA, 16 nt, Human
uuuacaugaaguauuu

SEQ ID NO: 1253256 - RNA, 12 nt, Human
uuuacaugcuua

SEQ ID NO: 1253257 - RNA, 13 nt, Human
uuuacaugcuuau

SEQ ID NO: 1253258 - RNA, 14 nt, Human
uuuacaugcuuauu

SEQ ID NO: 1253259 - RNA, 16 nt, Human
uuuacaugcuuauucc

SEQ ID NO: 1253260 - RNA, 17 nt, Human
uuuacaugcuuauucca

SEQ ID NO: 1253261 - RNA, 18 nt, Human
uuuacaugcuuauuccau

SEQ ID NO: 1253262 - RNA, 20 nt, Human
uuuacaugcuuauuccauga

SEQ ID NO: 1253263 - RNA, 17 nt, Human
uuuaccaguugccuuuu

SEQ ID NO: 1253264 - RNA, 13 nt, Human
uuuacagcugccu

SEQ ID NO: 1253265 - RNA, 23 nt, Human
uuuacagauuuauuccuuuguua

SEQ ID NO: 1253266 - RNA, 19 nt, Human
uuuacauccuucacugcuc

SEQ ID NO: 1253267 - RNA, 13 nt, Human
uuuacaugaagua

SEQ ID NO: 1253268 - RNA, 14 nt, Human
uuuacaugaaguau

SEQ ID NO: 1253269 - RNA, 15 nt, Human
uuuacaugaaguauu

SEQ ID NO: 1253270 - RNA, 21 nt, Human
uuuacaugaaguauuuuuuca

SEQ ID NO: 1253271 - RNA, 15 nt, Human
uuuaauauaaaugca

SEQ ID NO: 1253272 - RNA, 18 nt, Human
uuuaauauaaaugcaaau

SEQ ID NO: 1253273 - RNA, 20 nt, Human
uuuaauauaaaugcaaauaa

SEQ ID NO: 1253274 - RNA, 13 nt, Human
uuuaaucauauaa

SEQ ID NO: 1253275 - RNA, 12 nt, Human
uuuaaucauaua

SEQ ID NO: 1253276 - RNA, 13 nt, Human
uuuacagagacag

SEQ ID NO: 1253277 - RNA, 16 nt, Human
uuuaauauuacagaua

SEQ ID NO: 1253278 - RNA, 16 nt, Human
uuuaauauuuacucua

SEQ ID NO: 1253279 - RNA, 13 nt, Human
uuuaaucaaauuu

SEQ ID NO: 1253280 - RNA, 17 nt, Human
uuuaaucaaauuuguag

SEQ ID NO: 1253281 - RNA, 22 nt, Human
uuuaauaaacacucuugaaaaa

SEQ ID NO: 1253282 - RNA, 13 nt, Human
uuuaauaaaccau

SEQ ID NO: 1253283 - RNA, 15 nt, Human
uuuaauaauguuuca

SEQ ID NO: 1253284 - RNA, 16 nt, Human
uuuaaccuaugauauu

SEQ ID NO: 1253285 - RNA, 19 nt, Human
uuuaauaauguuucaaaca

SEQ ID NO: 1253286 - RNA, 23 nt, Human
uuuaauauaaaguaguccuguga

SEQ ID NO: 1253287 - RNA, 13 nt, Human
uuuaauauaaagu

SEQ ID NO: 1253288 - RNA, 16 nt, Human
uuuaauauaaaguuuu

SEQ ID NO: 1253289 - RNA, 18 nt, Human
uuuaauauaaaguuuuau

SEQ ID NO: 1253290 - RNA, 22 nt, Human
uuuaauauaaaguuuuauauau

SEQ ID NO: 1253291 - RNA, 23 nt, Human
uuuaauauaaaguuuuauauauu

SEQ ID NO: 1253292 - RNA, 13 nt, Human
uuuaauauaaaug

SEQ ID NO: 1253293 - RNA, 15 nt, Human
uuuaauaaacacucu

SEQ ID NO: 1253294 - RNA, 14 nt, Human
uuuaauaaacacuc

SEQ ID NO: 1253295 - RNA, 14 nt, Human
uuuaaccucuaaau

SEQ ID NO: 1253296 - RNA, 19 nt, Human
uuuaaccccccuguacaca

SEQ ID NO: 1253297 - RNA, 17 nt, Human
uuuaaccccccuguaca

SEQ ID NO: 1253298 - RNA, 18 nt, Human
uuuaaccccccuguacac

SEQ ID NO: 1253299 - RNA, 13 nt, Human
uuuaacauuccuc

SEQ ID NO: 1253300 - RNA, 12 nt, Human
uuuaacagaaau

SEQ ID NO: 1253301 - RNA, 23 nt, Human
uuuaacauuccucaugaauguaa

SEQ ID NO: 1253302 - RNA, 22 nt, Human
uuuaacauuccucaugaaugua

SEQ ID NO: 1253303 - RNA, 18 nt, Human
uuuaguugcaacuuugua

SEQ ID NO: 1253304 - RNA, 17 nt, Human
uuuaguugcaacuuugu

SEQ ID NO: 1253305 - RNA, 12 nt, Human
uuuaguuccugu

SEQ ID NO: 1253306 - RNA, 16 nt, Human
uuuagacagucucacu

SEQ ID NO: 1253307 - RNA, 20 nt, Human
uuuagacagucucacuuugu

SEQ ID NO: 1253308 - RNA, 14 nt, Human
uuuacccuggcccc

SEQ ID NO: 1253309 - RNA, 17 nt, Human
uuuacccuggccccucu

SEQ ID NO: 1253310 - RNA, 19 nt, Human
uuuacccuggccccucucc

SEQ ID NO: 1253311 - RNA, 20 nt, Human
uuuacccuggccccucuccc

SEQ ID NO: 1253312 - RNA, 13 nt, Human
uuuaguuccugug

SEQ ID NO: 1253313 - RNA, 19 nt, Human
uuuaguuccugugcacagc

SEQ ID NO: 1253314 - RNA, 11 nt, Human
uuuaguugaau

SEQ ID NO: 1253315 - RNA, 14 nt, Human
uuuaguugaauuuu

SEQ ID NO: 1253316 - RNA, 23 nt, Human
uuuaguugaauuuuuuuuaacau

SEQ ID NO: 1253317 - RNA, 17 nt, Human
uuuauaaauacugcaaa

SEQ ID NO: 1253318 - RNA, 20 nt, Human
uuuauaaauacugcaaauca

SEQ ID NO: 1253319 - RNA, 13 nt, Human
uuuauaaauccaa

SEQ ID NO: 1253320 - RNA, 14 nt, Human
uuuauaacuaacau

SEQ ID NO: 1253321 - RNA, 12 nt, Human
uuuauacagcug

SEQ ID NO: 1253322 - RNA, 13 nt, Human
uuuauacagcugu

SEQ ID NO: 1253323 - RNA, 14 nt, Human
uuuauacagcugua

SEQ ID NO: 1253324 - RNA, 18 nt, Human
uuuauacagcuguauugu

SEQ ID NO: 1253325 - RNA, 21 nt, Human
uuuauacagcuguauugucug

SEQ ID NO: 1253326 - RNA, 22 nt, Human
uuuauacagcuguauugucuga

SEQ ID NO: 1253327 - RNA, 19 nt, Human
uuuauccugaaauuucaga

SEQ ID NO: 1253328 - RNA, 16 nt, Human
uuuaucgcagaccuuu

SEQ ID NO: 1253329 - RNA, 16 nt, Human
uuuauccuaucucucc

SEQ ID NO: 1253330 - RNA, 18 nt, Human
uuuauccugaaauuucag

SEQ ID NO: 1253331 - RNA, 21 nt, Human
uuuaucugccucucuuguaau

SEQ ID NO: 1253332 - RNA, 19 nt, Human
uuuaucugccucucuugua

SEQ ID NO: 1253333 - RNA, 14 nt, Human
uuuaucugccucuc

SEQ ID NO: 1253334 - RNA, 15 nt, Human
uuuaucgcugggaaa

SEQ ID NO: 1253335 - RNA, 19 nt, Human
uuuaucgcugggaaaugag

SEQ ID NO: 1253336 - RNA, 20 nt, Human
uuuaucgcugggaaaugaga

SEQ ID NO: 1253337 - RNA, 16 nt, Human
uuuaucugaauuuuua

SEQ ID NO: 1253338 - RNA, 19 nt, Human
uuuaugacaguaauugugu

SEQ ID NO: 1253339 - RNA, 14 nt, Human
uuuaugagaaacuu

SEQ ID NO: 1253340 - RNA, 16 nt, Human
uuuaugacaguaauug

SEQ ID NO: 1253341 - RNA, 15 nt, Human
uuuaugacaguaauu

SEQ ID NO: 1253342 - RNA, 14 nt, Human
uuuaugacaguaau

SEQ ID NO: 1253343 - RNA, 14 nt, Human
uuuaugaaugggug

SEQ ID NO: 1253344 - RNA, 12 nt, Human
uuuaucuuuaua

SEQ ID NO: 1253345 - RNA, 20 nt, Human
uuuaucugccucucuuguaa

SEQ ID NO: 1253346 - RNA, 22 nt, Human
uuuauaccucaauuuucacugu

SEQ ID NO: 1253347 - RNA, 16 nt, Human
uuuauacucuuucugu

SEQ ID NO: 1253348 - RNA, 18 nt, Human
uuuauacucuuucuguau

SEQ ID NO: 1253349 - RNA, 20 nt, Human
uuuauacucuuucuguauau

SEQ ID NO: 1253350 - RNA, 20 nt, Human
uuuauacuuucccuacccuc

SEQ ID NO: 1253351 - RNA, 16 nt, Human
uuuaucccaaaguugu

SEQ ID NO: 1253352 - RNA, 18 nt, Human
uuuaucccaaaguuguug

SEQ ID NO: 1253353 - RNA, 16 nt, Human
uuuaucccucaccugu

SEQ ID NO: 1253354 - RNA, 21 nt, Human
uuuaucccaaaguuguuguaa

SEQ ID NO: 1253355 - RNA, 17 nt, Human
uuuauggcacuaguauu

SEQ ID NO: 1253356 - RNA, 23 nt, Human
uuucaauguguugauacauuccc

SEQ ID NO: 1253357 - RNA, 22 nt, Human
uuuaugauacuugaaaauuaac

SEQ ID NO: 1253358 - RNA, 17 nt, Human
uuuaugauaauagauuc

SEQ ID NO: 1253359 - RNA, 18 nt, Human
uuuaugauaauagauucu

SEQ ID NO: 1253360 - RNA, 19 nt, Human
uuuaugauaauagauucuc

SEQ ID NO: 1253361 - RNA, 17 nt, Human
uuuaugagaaagccuuc

SEQ ID NO: 1253362 - RNA, 14 nt, Human
uuuaugccaccuga

SEQ ID NO: 1253363 - RNA, 13 nt, Human
uuuaugcuugcaa

SEQ ID NO: 1253364 - RNA, 18 nt, Human
uuucagcgacuccguugg

SEQ ID NO: 1253365 - RNA, 23 nt, Human
uuucagcgacuccguuggccacu

SEQ ID NO: 1253366 - RNA, 22 nt, Human
uuucacauagcccacuuacauu

SEQ ID NO: 1253367 - RNA, 21 nt, Human
uuucacauagcccacuuacau

SEQ ID NO: 1253368 - RNA, 22 nt, Human
uuucaauuccaccugcaaucaa

SEQ ID NO: 1253369 - RNA, 18 nt, Human
uuucaauugcaucuccca

SEQ ID NO: 1253370 - RNA, 20 nt, Human
uuucaauugcaucucccaga

SEQ ID NO: 1253371 - RNA, 14 nt, Human
uuucacagaaaaua

SEQ ID NO: 1253372 - RNA, 13 nt, Human
uuucacagcuccu

SEQ ID NO: 1253373 - RNA, 17 nt, Human
uuucacagaaaauaagg

SEQ ID NO: 1253374 - RNA, 16 nt, Human
uuucacaguuugaaau

SEQ ID NO: 1253375 - RNA, 18 nt, Human
uuucacaguuugaaauaa

SEQ ID NO: 1253376 - RNA, 17 nt, Human
uuucacaguuugaaaua

SEQ ID NO: 1253377 - RNA, 15 nt, Human
uuuccacuucuucau

SEQ ID NO: 1253378 - RNA, 16 nt, Human
uuuccacuucuucauu

SEQ ID NO: 1253379 - RNA, 18 nt, Human
uuucauuuucucucaggu

SEQ ID NO: 1253380 - RNA, 17 nt, Human
uuucauuuucucucagg

SEQ ID NO: 1253381 - RNA, 23 nt, Human
uuuccaccacagccagcaccugg

SEQ ID NO: 1253382 - RNA, 23 nt, Human
uuuccacggagccacuccucuga

SEQ ID NO: 1253383 - RNA, 12 nt, Human
uuucagcuccug

SEQ ID NO: 1253384 - RNA, 16 nt, Human
uuucagcuccugacca

SEQ ID NO: 1253385 - RNA, 21 nt, Human
uuucagcuccugaccaguugc

SEQ ID NO: 1253386 - RNA, 20 nt, Human
uuucagcuccugaccaguug

SEQ ID NO: 1253387 - RNA, 15 nt, Human
uuucagcugucuuuu

SEQ ID NO: 1253388 - RNA, 16 nt, Human
uuucagcugucuuuug

SEQ ID NO: 1253389 - RNA, 16 nt, Human
uuucaguauuauaugu

SEQ ID NO: 1253390 - RNA, 14 nt, Human
uuucaguauuauau

SEQ ID NO: 1253391 - RNA, 18 nt, Human
uuucaguccccacagaua

SEQ ID NO: 1253392 - RNA, 20 nt, Human
uuucauuuaucuauaauuua

SEQ ID NO: 1253393 - RNA, 14 nt, Human
uuucauuucaacug

SEQ ID NO: 1253394 - RNA, 16 nt, Human
uuucauuucuucuaca

SEQ ID NO: 1253395 - RNA, 23 nt, Human
uuucauuucuucuacaacucaua

SEQ ID NO: 1253396 - RNA, 19 nt, Human
uuucauuugguucauuaau

SEQ ID NO: 1253397 - RNA, 16 nt, Human
uuucauuuucucucag

SEQ ID NO: 1253398 - RNA, 17 nt, Human
uuucugaguuuuaccaa

SEQ ID NO: 1253399 - RNA, 18 nt, Human
uuucugaguuuuaccaaa

SEQ ID NO: 1253400 - RNA, 12 nt, Human
uuucugaaauuu

SEQ ID NO: 1253401 - RNA, 19 nt, Human
uuucugaaauuuccuggga

SEQ ID NO: 1253402 - RNA, 16 nt, Human
uuucugaaaauauaac

SEQ ID NO: 1253403 - RNA, 20 nt, Human
uuucucucuuuauacagcug

SEQ ID NO: 1253404 - RNA, 21 nt, Human
uuucucucuuuauacagcugu

SEQ ID NO: 1253405 - RNA, 15 nt, Human
uuucucugaacacau

SEQ ID NO: 1253406 - RNA, 12 nt, Human
uuucucuaggaa

SEQ ID NO: 1253407 - RNA, 14 nt, Human
uuucucucaacacc

SEQ ID NO: 1253408 - RNA, 16 nt, Human
uuucucucaacaccau

SEQ ID NO: 1253409 - RNA, 22 nt, Human
uuucucgcuguccuuucuagag

SEQ ID NO: 1253410 - RNA, 16 nt, Human
uuucuaccauuucaga

SEQ ID NO: 1253411 - RNA, 17 nt, Human
uuucuaaaguaaaaaca

SEQ ID NO: 1253412 - RNA, 14 nt, Human
uuuccuggugccaa

SEQ ID NO: 1253413 - RNA, 16 nt, Human
uuuccuggugccaauu

SEQ ID NO: 1253414 - RNA, 19 nt, Human
uuuccuggugccaauuuca

SEQ ID NO: 1253415 - RNA, 22 nt, Human
uuuccuggugccaauuucaagu

SEQ ID NO: 1253416 - RNA, 22 nt, Human
uuucuaaaguaaaaacaaagaa

SEQ ID NO: 1253417 - RNA, 22 nt, Human
uuuccuggguggcuacucugug

SEQ ID NO: 1253418 - RNA, 23 nt, Human
uuuccuguauuuguucccaagag

SEQ ID NO: 1253419 - RNA, 12 nt, Human
uuuccuguccuc

SEQ ID NO: 1253420 - RNA, 14 nt, Human
uuucuaauuaugua

SEQ ID NO: 1253421 - RNA, 17 nt, Human
uuucuaauuauguagcu

SEQ ID NO: 1253422 - RNA, 18 nt, Human
uuucuaauuauguagcuc

SEQ ID NO: 1253423 - RNA, 19 nt, Human
uuucuaauuauguagcucu

SEQ ID NO: 1253424 - RNA, 13 nt, Human
uuucuaauugcuu

SEQ ID NO: 1253425 - RNA, 14 nt, Human
uuucuaauugcuua

SEQ ID NO: 1253426 - RNA, 23 nt, Human
uuucuaauugcuuauuuauugua

SEQ ID NO: 1253427 - RNA, 16 nt, Human
uuucuaauugcuuauu

SEQ ID NO: 1253428 - RNA, 22 nt, Human
uuuccucuuagucgagccaagu

SEQ ID NO: 1253429 - RNA, 23 nt, Human
uuuccucuguucaaagcugccug

SEQ ID NO: 1253430 - RNA, 14 nt, Human
uuuccucuccacac

SEQ ID NO: 1253431 - RNA, 12 nt, Human
uuuccucuccac

SEQ ID NO: 1253432 - RNA, 19 nt, Human
uuuccuaagugauuguaug

SEQ ID NO: 1253433 - RNA, 21 nt, Human
uuuccuaauaaaguucuguac

SEQ ID NO: 1253434 - RNA, 23 nt, Human
uuuccuaauaaaguucuguacuc

SEQ ID NO: 1253435 - RNA, 24 nt, Human
uuuccuaauaaaguucuguacuca

SEQ ID NO: 1253436 - RNA, 12 nt, Human
uuuccuaauacu

SEQ ID NO: 1253437 - RNA, 22 nt, Human
uuuccuccgucaccucagagac

SEQ ID NO: 1253438 - RNA, 18 nt, Human
uuuccuccucaggcacac

SEQ ID NO: 1253439 - RNA, 21 nt, Human
uuuccuccugaggcuuuggau

SEQ ID NO: 1253440 - RNA, 22 nt, Human
uuuccuccugaggcuuuggauu

SEQ ID NO: 1253441 - RNA, 18 nt, Human
uuugccacccucaugcug

SEQ ID NO: 1253442 - RNA, 19 nt, Human
uuugccacccucaugcugu

SEQ ID NO: 1253443 - RNA, 13 nt, Human
uuugccacagcuu

SEQ ID NO: 1253444 - RNA, 15 nt, Human
uuugccacagcuuuu

SEQ ID NO: 1253445 - RNA, 16 nt, Human
uuugccacagcuuuug

SEQ ID NO: 1253446 - RNA, 18 nt, Human
uuugccacagcuuuugca

SEQ ID NO: 1253447 - RNA, 12 nt, Human
uuugcauuuguu

SEQ ID NO: 1253448 - RNA, 20 nt, Human
uuugcauuuguuuauguaau

SEQ ID NO: 1253449 - RNA, 23 nt, Human
uuugcauuuguuuauguaauuuc

SEQ ID NO: 1253450 - RNA, 21 nt, Human
uuugcauuuguuuauguaauu

SEQ ID NO: 1253451 - RNA, 23 nt, Human
uuugccaagggcauaaauuauug

SEQ ID NO: 1253452 - RNA, 22 nt, Human
uuugccaagggcauaaauuauu

SEQ ID NO: 1253453 - RNA, 14 nt, Human
uuugauaugugaac

SEQ ID NO: 1253454 - RNA, 20 nt, Human
uuugauaugcauauuuguuu

SEQ ID NO: 1253455 - RNA, 15 nt, Human
uuugauaugugaaca

SEQ ID NO: 1253456 - RNA, 17 nt, Human
uuugauaugugaacagu

SEQ ID NO: 1253457 - RNA, 19 nt, Human
uuugcuucaugugucccag

SEQ ID NO: 1253458 - RNA, 20 nt, Human
uuugcuucaugugucccaga

SEQ ID NO: 1253459 - RNA, 23 nt, Human
uuugcuugcuuugaaguagcucu

SEQ ID NO: 1253460 - RNA, 18 nt, Human
uuugcuuuaauauaaaug

SEQ ID NO: 1253461 - RNA, 23 nt, Human
uuugcuuuaauauaaaugcaaau

SEQ ID NO: 1253462 - RNA, 19 nt, Human
uuugcuuucgguuccaguu

SEQ ID NO: 1253463 - RNA, 19 nt, Human
uuuggaccuaaauggccuc

SEQ ID NO: 1253464 - RNA, 16 nt, Human
uuuggaccuaauccaa

SEQ ID NO: 1253465 - RNA, 16 nt, Human
uuuggacuucuggggu

SEQ ID NO: 1253466 - RNA, 18 nt, Human
uuugguaaggggaauuga

SEQ ID NO: 1253467 - RNA, 20 nt, Human
uuugguaaaauacuucuuga

SEQ ID NO: 1253468 - RNA, 18 nt, Human
uuuggguuuuuuuccuuu

SEQ ID NO: 1253469 - RNA, 14 nt, Human
uuuggguucugccu

SEQ ID NO: 1253470 - RNA, 15 nt, Human
uuuggguucugccug

SEQ ID NO: 1253471 - RNA, 16 nt, Human
uuuggguucugccugc

SEQ ID NO: 1253472 - RNA, 11 nt, Human
uuuggguuucu

SEQ ID NO: 1253473 - RNA, 16 nt, Human
uuuggguuucugcccu

SEQ ID NO: 1253474 - RNA, 16 nt, Human
uuuggguuuuuuuccu

SEQ ID NO: 1253475 - RNA, 20 nt, Human
uuugguucauuaauucuaua

SEQ ID NO: 1253476 - RNA, 16 nt, Human
uuugguaccagauaac

SEQ ID NO: 1253477 - RNA, 11 nt, Human
uuugguucuaa

SEQ ID NO: 1253478 - RNA, 13 nt, Human
uuugguucuaagg

SEQ ID NO: 1253479 - RNA, 19 nt, Human
uuugguuucccaagagcua

SEQ ID NO: 1253480 - RNA, 23 nt, Human
uuuguaaaaugacaaucaugugu

SEQ ID NO: 1253481 - RNA, 13 nt, Human
uuuguauucaaaa

SEQ ID NO: 1253482 - RNA, 16 nt, Human
uuuguauuaagaaagg

SEQ ID NO: 1253483 - RNA, 16 nt, Human
uuuguaugcacuuugu

SEQ ID NO: 1253484 - RNA, 14 nt, Human
uuuguaaaaugaca

SEQ ID NO: 1253485 - RNA, 16 nt, Human
uuuguaaacucaaaau

SEQ ID NO: 1253486 - RNA, 17 nt, Human
uuuguaaacucaaaaua

SEQ ID NO: 1253487 - RNA, 22 nt, Human
uuuguaaacucaaaauauuugu

SEQ ID NO: 1253488 - RNA, 15 nt, Human
uuuguaaaucugcca

SEQ ID NO: 1253489 - RNA, 17 nt, Human
uuuguaaaucugccaca

SEQ ID NO: 1253490 - RNA, 13 nt, Human
uuugaaccaauaa

SEQ ID NO: 1253491 - RNA, 18 nt, Human
uuugaaccugaugaaaau

SEQ ID NO: 1253492 - RNA, 20 nt, Human
uuugaaccugaugaaaauaa

SEQ ID NO: 1253493 - RNA, 16 nt, Human
uuugaagcuacugugu

SEQ ID NO: 1253494 - RNA, 18 nt, Human
uuugaagcuacugugugu

SEQ ID NO: 1253495 - RNA, 12 nt, Human
uuugaaggcaaa

SEQ ID NO: 1253496 - RNA, 13 nt, Human
uuugaaggcaaaa

SEQ ID NO: 1253497 - RNA, 21 nt, Human
uuugaaauuguauuacaaauc

SEQ ID NO: 1253498 - RNA, 13 nt, Human
uuucuugucuaua

SEQ ID NO: 1253499 - RNA, 18 nt, Human
uuucuugucuauaaagca

SEQ ID NO: 1253500 - RNA, 20 nt, Human
uuucuugucuauaaagcauu

SEQ ID NO: 1253501 - RNA, 19 nt, Human
uuucuugugcacuggcacc

SEQ ID NO: 1253502 - RNA, 20 nt, Human
uuucuugugcacuggcacca

SEQ ID NO: 1253503 - RNA, 21 nt, Human
uuugaaauugaaccuuugugc

SEQ ID NO: 1253504 - RNA, 18 nt, Human
uuucuuaaccagaucauu

SEQ ID NO: 1253505 - RNA, 21 nt, Human
uuucuuaaauaagaaacuuuu

SEQ ID NO: 1253506 - RNA, 18 nt, Human
uuucuuaaauaagaaacu

SEQ ID NO: 1253507 - RNA, 19 nt, Human
uuucuuaaauaagaaacuu

SEQ ID NO: 1253508 - RNA, 23 nt, Human
uuucugaucugaugcaagcaaga

SEQ ID NO: 1253509 - RNA, 15 nt, Human
uuucugaucaaggcc

SEQ ID NO: 1253510 - RNA, 17 nt, Human
uuucugaucaaggccuu

SEQ ID NO: 1253511 - RNA, 12 nt, Human
uuucuuaaauaa

SEQ ID NO: 1253512 - RNA, 13 nt, Human
uuucuuaaagugc

SEQ ID NO: 1253513 - RNA, 17 nt, Human
uuucuuaaagugccagu

SEQ ID NO: 1253514 - RNA, 21 nt, Human
uuucuuaaagugccaguauuu

SEQ ID NO: 1253515 - RNA, 13 nt, Human
uuucuuaaauaag

SEQ ID NO: 1253516 - RNA, 20 nt, Human
uuucuuaaauaagaaacuuu

SEQ ID NO: 1253517 - RNA, 13 nt, Human
uuucuuaacuucu

SEQ ID NO: 1253518 - RNA, 14 nt, Human
uuucuuaacuucuu

SEQ ID NO: 1253519 - RNA, 17 nt, Human
uuugaaguuagcuuuaa

SEQ ID NO: 1253520 - RNA, 15 nt, Human
uuugaauaaauguca

SEQ ID NO: 1253521 - RNA, 20 nt, Human
uuugaauaaaugucacuuuu

SEQ ID NO: 1253522 - RNA, 13 nt, Human
uuugaaguauuua

SEQ ID NO: 1253523 - RNA, 22 nt, Human
uuugaagucauaccaaugaaaa

SEQ ID NO: 1253524 - RNA, 15 nt, Human
uuugaagugcuguuu

SEQ ID NO: 1253525 - RNA, 16 nt, Human
uuugaagugcuguuua

SEQ ID NO: 1253526 - RNA, 20 nt, Human
uuugaagugcuguuuauuaa

SEQ ID NO: 1253527 - RNA, 13 nt, Human
uuugaaguguaau

SEQ ID NO: 1253528 - RNA, 23 nt, Human
uuugaaguuagcuuuaacuuaaa

SEQ ID NO: 1253529 - RNA, 16 nt, Human
uuugaaguuagcuuua

SEQ ID NO: 1253530 - RNA, 22 nt, Human
uuugagauauuaaugcccagac

SEQ ID NO: 1253531 - RNA, 14 nt, Human
uuugaggcaaaaga

SEQ ID NO: 1253532 - RNA, 15 nt, Human
uuugaggcaaaagaa

SEQ ID NO: 1253533 - RNA, 20 nt, Human
uggugccccaggaccagcuc

SEQ ID NO: 1253534 - RNA, 21 nt, Human
uggugccccaggaccagcuca

SEQ ID NO: 1253535 - RNA, 16 nt, Human
uggugccccaggacca

SEQ ID NO: 1253536 - RNA, 17 nt, Human
uggugccccaggaccag

SEQ ID NO: 1253537 - RNA, 18 nt, Human
uggugccccaggaccagc

SEQ ID NO: 1253538 - RNA, 19 nt, Human
uggugccccaggaccagcu

SEQ ID NO: 1253539 - RNA, 10 nt, Human
uggugccacc

SEQ ID NO: 1253540 - RNA, 13 nt, Human
uggugccccagga

SEQ ID NO: 1253541 - RNA, 14 nt, Human
uggugccccaggac

SEQ ID NO: 1253542 - RNA, 23 nt, Human
uggugccccaggaccagcucagg

SEQ ID NO: 1253543 - RNA, 13 nt, Human
uguuuagacuuua

SEQ ID NO: 1253544 - RNA, 18 nt, Human
uguuuagacuuuaacaua

SEQ ID NO: 1253545 - RNA, 23 nt, Human
uguuuagacuuuaacauaagcua

SEQ ID NO: 1253546 - RNA, 21 nt, Human
uguuucaaacauauauaacaa

SEQ ID NO: 1253547 - RNA, 22 nt, Human
uguuucaaacauauauaacaau

SEQ ID NO: 1253548 - RNA, 19 nt, Human
uguuuagacuuuaacauaa

SEQ ID NO: 1253549 - RNA, 13 nt, Human
uguuucaaaguuc

SEQ ID NO: 1253550 - RNA, 14 nt, Human
uguuucaaacaugc

SEQ ID NO: 1253551 - RNA, 17 nt, Human
uguuucaaacaugccca

SEQ ID NO: 1253552 - RNA, 12 nt, Human
uguuucaagagg

SEQ ID NO: 1253553 - RNA, 17 nt, Human
uguuucacuacucagca

SEQ ID NO: 1253554 - RNA, 17 nt, Human
uguuucacaguuugaaa

SEQ ID NO: 1253555 - RNA, 19 nt, Human
uguuucacaguuugaaaua

SEQ ID NO: 1253556 - RNA, 20 nt, Human
uguuucacaguuugaaauaa

SEQ ID NO: 1253557 - RNA, 21 nt, Human
uguuucagaggcucagauugu

SEQ ID NO: 1253558 - RNA, 19 nt, Human
uguuucaagaggagccccc

SEQ ID NO: 1253559 - RNA, 22 nt, Human
uguuucaagaggagcccccacc

SEQ ID NO: 1253560 - RNA, 15 nt, Human
uguuucaaggcacuc

SEQ ID NO: 1253561 - RNA, 19 nt, Human
uguuucaaggcacucuaga

SEQ ID NO: 1253562 - RNA, 20 nt, Human
uguuucaaggcacucuagau

SEQ ID NO: 1253563 - RNA, 21 nt, Human
uguuucaaggcacucuagauu

SEQ ID NO: 1253564 - RNA, 16 nt, Human
uguuucaauugcaucu

SEQ ID NO: 1253565 - RNA, 16 nt, Human
uguuucacaaggucuu

SEQ ID NO: 1253566 - RNA, 13 nt, Human
uguuucacaaggu

SEQ ID NO: 1253567 - RNA, 12 nt, Human
uguuucacaguu

SEQ ID NO: 1253568 - RNA, 13 nt, Human
uguuugugcugug

SEQ ID NO: 1253569 - RNA, 14 nt, Human
uguuugugcugugg

SEQ ID NO: 1253570 - RNA, 20 nt, Human
uguuuguacacaacaauccu

SEQ ID NO: 1253571 - RNA, 13 nt, Human
uguuuccagcauu

SEQ ID NO: 1253572 - RNA, 15 nt, Human
uguuuccagcauucc

SEQ ID NO: 1253573 - RNA, 14 nt, Human
uguuuccagcauuc

SEQ ID NO: 1253574 - RNA, 18 nt, Human
uguuuccuuuuucagaua

SEQ ID NO: 1253575 - RNA, 14 nt, Human
uguuucgcucuuug

SEQ ID NO: 1253576 - RNA, 16 nt, Human
uguuuccuuuuucaga

SEQ ID NO: 1253577 - RNA, 15 nt, Human
uguuucguggggagg

SEQ ID NO: 1253578 - RNA, 17 nt, Human
uguuucuacuuugauau

SEQ ID NO: 1253579 - RNA, 15 nt, Human
uguuuggggcaggag

SEQ ID NO: 1253580 - RNA, 23 nt, Human
uguuuggggcaggaguagcugag

SEQ ID NO: 1253581 - RNA, 18 nt, Human
uguuuggguuuuuuuccu

SEQ ID NO: 1253582 - RNA, 13 nt, Human
uuaaaagaaugau

SEQ ID NO: 1253583 - RNA, 12 nt, Human
uuaaaagaauau

SEQ ID NO: 1253584 - RNA, 20 nt, Human
uuaaaagaugcuuuuaacag

SEQ ID NO: 1253585 - RNA, 22 nt, Human
uuaaaagaugcuuuuaacagag

SEQ ID NO: 1253586 - RNA, 13 nt, Human
uuaaaagauuuuu

SEQ ID NO: 1253587 - RNA, 14 nt, Human
uuaaaagcaaauca

SEQ ID NO: 1253588 - RNA, 21 nt, Human
uuaaaagcaaaucauuuguuu

SEQ ID NO: 1253589 - RNA, 18 nt, Human
uuaaaagcaaaucauuug

SEQ ID NO: 1253590 - RNA, 13 nt, Human
uuaaaagccugcu

SEQ ID NO: 1253591 - RNA, 18 nt, Human
uuaaaaguguauuuguua

SEQ ID NO: 1253592 - RNA, 16 nt, Human
uuaaaagugucaagcu

SEQ ID NO: 1253593 - RNA, 19 nt, Human
uuaaaauagcaaaagaaga

SEQ ID NO: 1253594 - RNA, 21 nt, Human
uuaaaauagcaaaagaagaag

SEQ ID NO: 1253595 - RNA, 23 nt, Human
uuaaaauagcaaaagaagaaguu

SEQ ID NO: 1253596 - RNA, 22 nt, Human
uuaaaauagcaaaagaagaagu

SEQ ID NO: 1253597 - RNA, 20 nt, Human
uuaaaauagcguucuuguaa

SEQ ID NO: 1253598 - RNA, 22 nt, Human
uuaaaauagcguucuuguaauu

SEQ ID NO: 1253599 - RNA, 21 nt, Human
uuaaaauagcguucuuguaau

SEQ ID NO: 1253600 - RNA, 22 nt, Human
uuaaacucuguugcaagugcaa

SEQ ID NO: 1253601 - RNA, 12 nt, Human
uuaaacuguaca

SEQ ID NO: 1253602 - RNA, 13 nt, Human
uuaaacuguacag

SEQ ID NO: 1253603 - RNA, 14 nt, Human
uuaaacuguacagu

SEQ ID NO: 1253604 - RNA, 15 nt, Human
uuaaacuguacagug

SEQ ID NO: 1253605 - RNA, 16 nt, Human
uuaaacuguacagugu

SEQ ID NO: 1253606 - RNA, 17 nt, Human
uuaaacuguacaguguc

SEQ ID NO: 1253607 - RNA, 18 nt, Human
uuaaacuguacagugucu

SEQ ID NO: 1253608 - RNA, 20 nt, Human
uuaaacuguacagugucuuu

SEQ ID NO: 1253609 - RNA, 21 nt, Human
uuaaacuguacagugucuuuu

SEQ ID NO: 1253610 - RNA, 12 nt, Human
uuaaacugugua

SEQ ID NO: 1253611 - RNA, 19 nt, Human
uuaaacuguguacauaacu

SEQ ID NO: 1253612 - RNA, 12 nt, Human
uuaaagaaagug

SEQ ID NO: 1253613 - RNA, 17 nt, Human
uuaaagaaaguguauuu

SEQ ID NO: 1253614 - RNA, 12 nt, Human
uuaaagaagacc

SEQ ID NO: 1253615 - RNA, 18 nt, Human
uguuuuuuuuuaaagacu

SEQ ID NO: 1253616 - RNA, 18 nt, Human
uguuuuuuuguuauuaaa

SEQ ID NO: 1253617 - RNA, 15 nt, Human
uguuuuuuuguuugu

SEQ ID NO: 1253618 - RNA, 16 nt, Human
uguuuuuuuguuauua

SEQ ID NO: 1253619 - RNA, 15 nt, Human
uguuuuuuucuaaua

SEQ ID NO: 1253620 - RNA, 18 nt, Human
uguuuuuuuuuuccacuu

SEQ ID NO: 1253621 - RNA, 19 nt, Human
uguuuuuuuuuuccacuua

SEQ ID NO: 1253622 - RNA, 23 nt, Human
uuaaaagaauaucuggcaaauua

SEQ ID NO: 1253623 - RNA, 22 nt, Human
uguuuuguucaccauuauaaug

SEQ ID NO: 1253624 - RNA, 17 nt, Human
uguuuuguuuggagaca

SEQ ID NO: 1253625 - RNA, 21 nt, Human
uguuuuguugacauucugaau

SEQ ID NO: 1253626 - RNA, 12 nt, Human
uguuuuguugac

SEQ ID NO: 1253627 - RNA, 13 nt, Human
uguuuuguugaca

SEQ ID NO: 1253628 - RNA, 14 nt, Human
uguuuuguugacau

SEQ ID NO: 1253629 - RNA, 15 nt, Human
uguuuuguugacauu

SEQ ID NO: 1253630 - RNA, 19 nt, Human
uguuuuguugacauucuga

SEQ ID NO: 1253631 - RNA, 20 nt, Human
uguuuuguugacauucugaa

SEQ ID NO: 1253632 - RNA, 20 nt, Human
uguuuuguugguuuuuaaag

SEQ ID NO: 1253633 - RNA, 15 nt, Human
uguuuuguuuuuaca

SEQ ID NO: 1253634 - RNA, 16 nt, Human
uguuuuguuuuuacaa

SEQ ID NO: 1253635 - RNA, 15 nt, Human
uguuuuuugccacag

SEQ ID NO: 1253636 - RNA, 18 nt, Human
uguuuuuugccacagcuu

SEQ ID NO: 1253637 - RNA, 19 nt, Human
uguuuuuugccacagcuuu

SEQ ID NO: 1253638 - RNA, 23 nt, Human
uguuuuuugccacagcuuuugca

SEQ ID NO: 1253639 - RNA, 22 nt, Human
uuaacuauugcauuuauaugua

SEQ ID NO: 1253640 - RNA, 21 nt, Human
uuaacuauugcauuuauaugu

SEQ ID NO: 1253641 - RNA, 14 nt, Human
uuaacuauugcauu

SEQ ID NO: 1253642 - RNA, 15 nt, Human
uuaacucauuagacu

SEQ ID NO: 1253643 - RNA, 16 nt, Human
uuaacucauuagacug

SEQ ID NO: 1253644 - RNA, 17 nt, Human
uuaacucauuagacugg

SEQ ID NO: 1253645 - RNA, 20 nt, Human
uuaacugacaagcuccauuu

SEQ ID NO: 1253646 - RNA, 21 nt, Human
uuaacugacaagccaucuuga

SEQ ID NO: 1253647 - RNA, 21 nt, Human
uuaacugaauaccacucugua

SEQ ID NO: 1253648 - RNA, 22 nt, Human
uuaacugaauaccacucuguaa

SEQ ID NO: 1253649 - RNA, 16 nt, Human
uuaacugaauaccacu

SEQ ID NO: 1253650 - RNA, 20 nt, Human
uuaacugaauaccacucugu

SEQ ID NO: 1253651 - RNA, 23 nt, Human
uuaacucccauuaccauguaaug

SEQ ID NO: 1253652 - RNA, 22 nt, Human
uuaacucccauuaccauguaau

SEQ ID NO: 1253653 - RNA, 15 nt, Human
uuaacucucuuuaug

SEQ ID NO: 1253654 - RNA, 19 nt, Human
uuaacucucuuuaugucug

SEQ ID NO: 1253655 - RNA, 17 nt, Human
uuaacucucuuuauguc

SEQ ID NO: 1253656 - RNA, 19 nt, Human
uuaacugccguaauuuaac

SEQ ID NO: 1253657 - RNA, 21 nt, Human
uuaacuggguaaugaaacaaa

SEQ ID NO: 1253658 - RNA, 17 nt, Human
uuaacuggguaaugaaa

SEQ ID NO: 1253659 - RNA, 12 nt, Human
uuaacuguggau

SEQ ID NO: 1253660 - RNA, 13 nt, Human
uuaacuguggaua

SEQ ID NO: 1253661 - RNA, 15 nt, Human
uuaacuguggauauu

SEQ ID NO: 1253662 - RNA, 15 nt, Human
uuaacuuaaauagua

SEQ ID NO: 1253663 - RNA, 13 nt, Human
uuaacuuaaauag

SEQ ID NO: 1253664 - RNA, 15 nt, Human
uuaacuucuguuuua

SEQ ID NO: 1253665 - RNA, 17 nt, Human
uuaacuucuguuuuacc

SEQ ID NO: 1253666 - RNA, 14 nt, Human
uuaacuucuugcuu

SEQ ID NO: 1253667 - RNA, 17 nt, Human
uuaacuucuugcuucuu

SEQ ID NO: 1253668 - RNA, 21 nt, Human
uuaacuucuugcuucuuucua

SEQ ID NO: 1253669 - RNA, 23 nt, Human
uuaaauguuuuuuuuuaaagacu

SEQ ID NO: 1253670 - RNA, 21 nt, Human
uuaaauguuuuuuuuuaaaga

SEQ ID NO: 1253671 - RNA, 13 nt, Human
uuaaauuacagaa

SEQ ID NO: 1253672 - RNA, 14 nt, Human
uuaaagacuuuuau

SEQ ID NO: 1253673 - RNA, 19 nt, Human
uuaaagaauucaaauuuua

SEQ ID NO: 1253674 - RNA, 17 nt, Human
uuaaagaauucaaauuu

SEQ ID NO: 1253675 - RNA, 15 nt, Human
uuaaagaauucaaau

SEQ ID NO: 1253676 - RNA, 20 nt, Human
uuaaagaauucaaauuuuau

SEQ ID NO: 1253677 - RNA, 14 nt, Human
uuaaagaauucaaa

SEQ ID NO: 1253678 - RNA, 16 nt, Human
uuaaagaauaugaaac

SEQ ID NO: 1253679 - RNA, 18 nt, Human
uuaaagaauaugaaacau

SEQ ID NO: 1253680 - RNA, 13 nt, Human
uuaaccagaucua

SEQ ID NO: 1253681 - RNA, 22 nt, Human
uuaaccagaucuagucaaucaa

SEQ ID NO: 1253682 - RNA, 14 nt, Human
uuaaccccccugua

SEQ ID NO: 1253683 - RNA, 17 nt, Human
uuaaccccccuguacac

SEQ ID NO: 1253684 - RNA, 20 nt, Human
uuaaccccccuguacacaac

SEQ ID NO: 1253685 - RNA, 18 nt, Human
uuaaccccccuguacaca

SEQ ID NO: 1253686 - RNA, 20 nt, Human
uuaaccuaugauauuuucug

SEQ ID NO: 1253687 - RNA, 21 nt, Human
uuaaccuaugauauuuucugu

SEQ ID NO: 1253688 - RNA, 12 nt, Human
uuaaccucugca

SEQ ID NO: 1253689 - RNA, 15 nt, Human
uuaaccucugcacua

SEQ ID NO: 1253690 - RNA, 14 nt, Human
uuaacgauguccaa

SEQ ID NO: 1253691 - RNA, 12 nt, Human
uuaaccuuugau

SEQ ID NO: 1253692 - RNA, 22 nt, Human
uuaaugucaauucuugccaaau

SEQ ID NO: 1253693 - RNA, 18 nt, Human
uuaauguacauagugcua

SEQ ID NO: 1253694 - RNA, 19 nt, Human
uuaauguauaguaaaucac

SEQ ID NO: 1253695 - RNA, 17 nt, Human
uuaauguaucaaacugu

SEQ ID NO: 1253696 - RNA, 13 nt, Human
uuaauguauguua

SEQ ID NO: 1253697 - RNA, 15 nt, Human
uuaauguauguuacc

SEQ ID NO: 1253698 - RNA, 17 nt, Human
uuaauguauguuaccaa

SEQ ID NO: 1253699 - RNA, 18 nt, Human
uuaauguauguuaccaaa

SEQ ID NO: 1253700 - RNA, 13 nt, Human
uuaauguguauua

SEQ ID NO: 1253701 - RNA, 17 nt, Human
uuaauguacauagugcu

SEQ ID NO: 1253702 - RNA, 20 nt, Human
uuaauggugccuucauuugg

SEQ ID NO: 1253703 - RNA, 17 nt, Human
uuaauggugccuucauu

SEQ ID NO: 1253704 - RNA, 19 nt, Human
uuaauggugccuucauuug

SEQ ID NO: 1253705 - RNA, 23 nt, Human
uuaaugccgauauacucuagaug

SEQ ID NO: 1253706 - RNA, 13 nt, Human
uuaaugcccagac

SEQ ID NO: 1253707 - RNA, 11 nt, Human
uuaaugcacuu

SEQ ID NO: 1253708 - RNA, 12 nt, Human
uuaaugcacuuu

SEQ ID NO: 1253709 - RNA, 13 nt, Human
uuaaugcacuuuc

SEQ ID NO: 1253710 - RNA, 14 nt, Human
uuaaugcacuuucu

SEQ ID NO: 1253711 - RNA, 15 nt, Human
uuaaugcacuuucua

SEQ ID NO: 1253712 - RNA, 18 nt, Human
uuaauguuuuuugccaca

SEQ ID NO: 1253713 - RNA, 15 nt, Human
uuaauguuuaaaaca

SEQ ID NO: 1253714 - RNA, 17 nt, Human
uuacaaguaacaaaaau

SEQ ID NO: 1253715 - RNA, 20 nt, Human
uuacaaguaacaaaaauaaa

SEQ ID NO: 1253716 - RNA, 19 nt, Human
uuacaaguaacaaaaauaa

SEQ ID NO: 1253717 - RNA, 15 nt, Human
uuaauauaaaugcaa

SEQ ID NO: 1253718 - RNA, 20 nt, Human
uuaauauauauuaucuuuuc

SEQ ID NO: 1253719 - RNA, 14 nt, Human
uuaauauuacagau

SEQ ID NO: 1253720 - RNA, 21 nt, Human
uuaaugauaugcuuguaacua

SEQ ID NO: 1253721 - RNA, 16 nt, Human
uuaaugcaauauacug

SEQ ID NO: 1253722 - RNA, 15 nt, Human
uuaagccuuuggaaa

SEQ ID NO: 1253723 - RNA, 16 nt, Human
uuaagccuuuggaaac

SEQ ID NO: 1253724 - RNA, 14 nt, Human
uuaagcucugagcu

SEQ ID NO: 1253725 - RNA, 15 nt, Human
uuaagcucugagcug

SEQ ID NO: 1253726 - RNA, 16 nt, Human
uuaagcucugagcugu

SEQ ID NO: 1253727 - RNA, 17 nt, Human
uuaagcucugagcuguc

SEQ ID NO: 1253728 - RNA, 18 nt, Human
uuaagcucugagcuguca

SEQ ID NO: 1253729 - RNA, 21 nt, Human
uuaauauaaaguuuuauauau

SEQ ID NO: 1253730 - RNA, 22 nt, Human
uuaauauaaaguuuuauauauu

SEQ ID NO: 1253731 - RNA, 23 nt, Human
uuaauauaaaguuuuauauauua

SEQ ID NO: 1253732 - RNA, 14 nt, Human
uuaauauaaaugca

SEQ ID NO: 1253733 - RNA, 17 nt, Human
uuaauauaaaugcaaau

SEQ ID NO: 1253734 - RNA, 19 nt, Human
uuacugucuuuuuucuaaa

SEQ ID NO: 1253735 - RNA, 13 nt, Human
uuacuguguaauu

SEQ ID NO: 1253736 - RNA, 16 nt, Human
uuacuguguaauuagu

SEQ ID NO: 1253737 - RNA, 20 nt, Human
uuacuguguaauuagugcca

SEQ ID NO: 1253738 - RNA, 18 nt, Human
uuacuguuagucauuugc

SEQ ID NO: 1253739 - RNA, 19 nt, Human
uuacuuaguauugcaaagu

SEQ ID NO: 1253740 - RNA, 15 nt, Human
uuacuuaguauugca

SEQ ID NO: 1253741 - RNA, 13 nt, Human
uuacuuaguauug

SEQ ID NO: 1253742 - RNA, 18 nt, Human
uuacuuauuaucuucagg

SEQ ID NO: 1253743 - RNA, 16 nt, Human
uuacuuaaucaaaacu

SEQ ID NO: 1253744 - RNA, 11 nt, Human
uuacuucauau

SEQ ID NO: 1253745 - RNA, 22 nt, Human
uuacuucguguccgacucuucu

SEQ ID NO: 1253746 - RNA, 15 nt, Human
uuacaauuuuuuauc

SEQ ID NO: 1253747 - RNA, 17 nt, Human
uuacaauuuuuuaucau

SEQ ID NO: 1253748 - RNA, 18 nt, Human
uuacaauuuuuuaucaug

SEQ ID NO: 1253749 - RNA, 20 nt, Human
uuacaauuuuuuaucaugca

SEQ ID NO: 1253750 - RNA, 17 nt, Human
uuacuaguuucccuugc

SEQ ID NO: 1253751 - RNA, 19 nt, Human
uuacuaucaugucaaacgu

SEQ ID NO: 1253752 - RNA, 15 nt, Human
uuacuauaagaacuu

SEQ ID NO: 1253753 - RNA, 20 nt, Human
uuacuauaagaacuuugagc

SEQ ID NO: 1253754 - RNA, 23 nt, Human
uuacuauaagaacuuugagcuac

SEQ ID NO: 1253755 - RNA, 21 nt, Human
uuacuaucaugucaaacguga

SEQ ID NO: 1253756 - RNA, 20 nt, Human
uuacuaaggaagauuacuca

SEQ ID NO: 1253757 - RNA, 13 nt, Human
uuacuacaugcac

SEQ ID NO: 1253758 - RNA, 14 nt, Human
uuacuacaugcacu

SEQ ID NO: 1253759 - RNA, 16 nt, Human
uuacuagggaucccuc

SEQ ID NO: 1253760 - RNA, 20 nt, Human
uuacuagggaucccucaucu

SEQ ID NO: 1253761 - RNA, 23 nt, Human
uuacuagggaucccucaucuguc

SEQ ID NO: 1253762 - RNA, 15 nt, Human
uuagacuuuaacaua

SEQ ID NO: 1253763 - RNA, 16 nt, Human
uuagacuuuaacauaa

SEQ ID NO: 1253764 - RNA, 21 nt, Human
uuagacuuuaacauaagcuau

SEQ ID NO: 1253765 - RNA, 22 nt, Human
uuagacuuuaacauaagcuauu

SEQ ID NO: 1253766 - RNA, 13 nt, Human
uuagagaaaacua

SEQ ID NO: 1253767 - RNA, 21 nt, Human
uuagagaaguauacauaaguu

SEQ ID NO: 1253768 - RNA, 12 nt, Human
uuagagaauaaa

SEQ ID NO: 1253769 - RNA, 16 nt, Human
uuagaccuguguuacu

SEQ ID NO: 1253770 - RNA, 17 nt, Human
uuagacucuuuuccuuc

SEQ ID NO: 1253771 - RNA, 15 nt, Human
uuagacuggaacuug

SEQ ID NO: 1253772 - RNA, 16 nt, Human
uuagacuggaacuuga

SEQ ID NO: 1253773 - RNA, 17 nt, Human
uuagacuggaacuugaa

SEQ ID NO: 1253774 - RNA, 21 nt, Human
uuagacuggaacuugaacuga

SEQ ID NO: 1253775 - RNA, 22 nt, Human
uuagacuggaacuugaacugau

SEQ ID NO: 1253776 - RNA, 15 nt, Human
uuagacuggacagcu

SEQ ID NO: 1253777 - RNA, 16 nt, Human
uuagacuggacagcuu

SEQ ID NO: 1253778 - RNA, 17 nt, Human
uuagacuggacagcuug

SEQ ID NO: 1253779 - RNA, 19 nt, Human
uuagacuggacagcuugug

SEQ ID NO: 1253780 - RNA, 18 nt, Human
uuagacugugauucagaa

SEQ ID NO: 1253781 - RNA, 16 nt, Human
uuagaccaccaagccu

SEQ ID NO: 1253782 - RNA, 17 nt, Human
uuagaccaccaagccuu

SEQ ID NO: 1253783 - RNA, 19 nt, Human
uuagaccaccaagccuuga

SEQ ID NO: 1253784 - RNA, 13 nt, Human
uuagaccuacagg

SEQ ID NO: 1253785 - RNA, 23 nt, Human
uuagaccuacagggggucuggcu

SEQ ID NO: 1253786 - RNA, 18 nt, Human
uuagacuaaggccauuau

SEQ ID NO: 1253787 - RNA, 19 nt, Human
uuagaaacacaacuauauu

SEQ ID NO: 1253788 - RNA, 21 nt, Human
uuagaaaacauaaucuucugc

SEQ ID NO: 1253789 - RNA, 23 nt, Human
uuagaaaaccagcucagcacugc

SEQ ID NO: 1253790 - RNA, 16 nt, Human
uuagaaaacuuuaaag

SEQ ID NO: 1253791 - RNA, 14 nt, Human
uuagaaaacuuuaa

SEQ ID NO: 1253792 - RNA, 13 nt, Human
uuacuuugugaau

SEQ ID NO: 1253793 - RNA, 17 nt, Human
uuacuuuuaaacaguga

SEQ ID NO: 1253794 - RNA, 14 nt, Human
uuacuuuuaaacug

SEQ ID NO: 1253795 - RNA, 15 nt, Human
uuacuuuuaaacugu

SEQ ID NO: 1253796 - RNA, 16 nt, Human
uuacuuuuaaacugug

SEQ ID NO: 1253797 - RNA, 19 nt, Human
uuacuuuuaaacuguguac

SEQ ID NO: 1253798 - RNA, 14 nt, Human
uuacuuuugcugua

SEQ ID NO: 1253799 - RNA, 13 nt, Human
uuacuuguaaaua

SEQ ID NO: 1253800 - RNA, 16 nt, Human
uuacuuguaaauauaa

SEQ ID NO: 1253801 - RNA, 17 nt, Human
uuacuuguaaauauaaa

SEQ ID NO: 1253802 - RNA, 19 nt, Human
uuacuuguaaauauaaaga

SEQ ID NO: 1253803 - RNA, 21 nt, Human
uuacuuguaaauauaaagacg

SEQ ID NO: 1253804 - RNA, 22 nt, Human
uuacuuguaaauauaaagacgu

SEQ ID NO: 1253805 - RNA, 23 nt, Human
uuacuuguaaauauaaagacguu

SEQ ID NO: 1253806 - RNA, 18 nt, Human
uuacuuuagaagccugca

SEQ ID NO: 1253807 - RNA, 16 nt, Human
uuacuuuauguuacua

SEQ ID NO: 1253808 - RNA, 21 nt, Human
uuacuuuggggcuaauuuaac

SEQ ID NO: 1253809 - RNA, 14 nt, Human
uuagggaaaacauu

SEQ ID NO: 1253810 - RNA, 17 nt, Human
uuaggcuguaacuacuu

SEQ ID NO: 1253811 - RNA, 20 nt, Human
uuaggcuguaacuacuuuau

SEQ ID NO: 1253812 - RNA, 23 nt, Human
uuaggcuauuuguaaaucugcca

SEQ ID NO: 1253813 - RNA, 14 nt, Human
uuaggcuguaacua

SEQ ID NO: 1253814 - RNA, 19 nt, Human
uuaggcccccaucauccuc

SEQ ID NO: 1253815 - RNA, 14 nt, Human
uuaggccucugaga

SEQ ID NO: 1253816 - RNA, 16 nt, Human
uuaggcuauuuguaaa

SEQ ID NO: 1253817 - RNA, 19 nt, Human
uuaggcuauuuguaaaucu

SEQ ID NO: 1253818 - RNA, 20 nt, Human
uuaggcuauuuguaaaucug

SEQ ID NO: 1253819 - RNA, 22 nt, Human
uuaggcuauuuguaaaucugcc

SEQ ID NO: 1253820 - RNA, 23 nt, Human
uuaggaaguugacuuauaguaca

SEQ ID NO: 1253821 - RNA, 22 nt, Human
uuaggaaguugacuuauaguac

SEQ ID NO: 1253822 - RNA, 11 nt, Human
uuaggaagagc

SEQ ID NO: 1253823 - RNA, 22 nt, Human
uuaggaagagccuuccacccag

SEQ ID NO: 1253824 - RNA, 18 nt, Human
uuaggaagcaagcuuaau

SEQ ID NO: 1253825 - RNA, 12 nt, Human
uuaggagaagcc

SEQ ID NO: 1253826 - RNA, 13 nt, Human
uuaggagaagcca

SEQ ID NO: 1253827 - RNA, 16 nt, Human
uuaggagaagccagga

SEQ ID NO: 1253828 - RNA, 17 nt, Human
uuaggagaagccaggaa

SEQ ID NO: 1253829 - RNA, 21 nt, Human
uuaggagagaagguagggguu

SEQ ID NO: 1253830 - RNA, 18 nt, Human
uuaggauguugaaaaagu

SEQ ID NO: 1253831 - RNA, 15 nt, Human
uuaggacuugcccuc

SEQ ID NO: 1253832 - RNA, 15 nt, Human
uuaggagcuaaggcu

SEQ ID NO: 1253833 - RNA, 17 nt, Human
uuaggagcuaaggcucu

SEQ ID NO: 1253834 - RNA, 16 nt, Human
uuaggagcuaaggcuc

SEQ ID NO: 1253835 - RNA, 16 nt, Human
uuaggcagacucuuua

SEQ ID NO: 1253836 - RNA, 15 nt, Human
uuaggcagacucuuu

SEQ ID NO: 1253837 - RNA, 14 nt, Human
uuaguguucauaaa

SEQ ID NO: 1253838 - RNA, 12 nt, Human
uuagucucaguu

SEQ ID NO: 1253839 - RNA, 21 nt, Human
uuagucucaguuugugugucu

SEQ ID NO: 1253840 - RNA, 22 nt, Human
uuagucucaguuugugugucuu

SEQ ID NO: 1253841 - RNA, 23 nt, Human
uuagucucaguuugugugucuua

SEQ ID NO: 1253842 - RNA, 13 nt, Human
uuaguuaccuuau

SEQ ID NO: 1253843 - RNA, 16 nt, Human
uuaguuaccuuauagu

SEQ ID NO: 1253844 - RNA, 18 nt, Human
uuaguuaccuuauaguua

SEQ ID NO: 1253845 - RNA, 19 nt, Human
uuaguuaccuuauaguuac

SEQ ID NO: 1253846 - RNA, 20 nt, Human
uuaguuaccuuauaguuacu

SEQ ID NO: 1253847 - RNA, 21 nt, Human
uuaguuaccuuauaguuacug

SEQ ID NO: 1253848 - RNA, 22 nt, Human
uuaguuaccuuauaguuacugu

SEQ ID NO: 1253849 - RNA, 15 nt, Human
uuaguuccacugaga

SEQ ID NO: 1253850 - RNA, 16 nt, Human
uuaguuccacugagac

SEQ ID NO: 1253851 - RNA, 17 nt, Human
uuaguauugcaaaguca

SEQ ID NO: 1253852 - RNA, 12 nt, Human
uuaguauuguug

SEQ ID NO: 1253853 - RNA, 16 nt, Human
uuaguauuguuguccu

SEQ ID NO: 1253854 - RNA, 17 nt, Human
uuaguauuguuguccuu

SEQ ID NO: 1253855 - RNA, 13 nt, Human
uuaguauugcaaa

SEQ ID NO: 1253856 - RNA, 11 nt, Human
uuaguauugca

SEQ ID NO: 1253857 - RNA, 13 nt, Human
uuaguaucuuuug

SEQ ID NO: 1253858 - RNA, 18 nt, Human
uuaguauuguuguccuuu

SEQ ID NO: 1253859 - RNA, 20 nt, Human
uuaguauuguuguccuuuuc

SEQ ID NO: 1253860 - RNA, 23 nt, Human
uuaguauuguuguccuuuucaua

SEQ ID NO: 1253861 - RNA, 22 nt, Human
uuaguauuguuguccuuuucau

SEQ ID NO: 1253862 - RNA, 13 nt, Human
uuagucaugugac

SEQ ID NO: 1253863 - RNA, 14 nt, Human
uuagucaugugacc

SEQ ID NO: 1253864 - RNA, 19 nt, Human
uuagucauguuuaucugcu

SEQ ID NO: 1253865 - RNA, 17 nt, Human
uuagucccucaugcaaa

SEQ ID NO: 1253866 - RNA, 22 nt, Human
uuaguccuguuauagacgagaa

SEQ ID NO: 1253867 - RNA, 12 nt, Human
uuagcuggaaaa

SEQ ID NO: 1253868 - RNA, 13 nt, Human
uuagcuggaaaag

SEQ ID NO: 1253869 - RNA, 12 nt, Human
uuagcugggaga

SEQ ID NO: 1253870 - RNA, 16 nt, Human
uuagcuggcauuacag

SEQ ID NO: 1253871 - RNA, 15 nt, Human
uuagcugucugcuca

SEQ ID NO: 1253872 - RNA, 17 nt, Human
uuagcugucugcucaga

SEQ ID NO: 1253873 - RNA, 15 nt, Human
uuagcugacaaaaua

SEQ ID NO: 1253874 - RNA, 18 nt, Human
uuagcugacaaaauacuu

SEQ ID NO: 1253875 - RNA, 12 nt, Human
uuagcugacaaa

SEQ ID NO: 1253876 - RNA, 14 nt, Human
uuagcuccuguggc

SEQ ID NO: 1253877 - RNA, 11 nt, Human
uuagcucugag

SEQ ID NO: 1253878 - RNA, 12 nt, Human
uuagcucugaga

SEQ ID NO: 1253879 - RNA, 13 nt, Human
uuagcucugagaa

SEQ ID NO: 1253880 - RNA, 23 nt, Human
uuagcuaauaaaaagcuuuuguc

SEQ ID NO: 1253881 - RNA, 13 nt, Human
uuagcucaaugag

SEQ ID NO: 1253882 - RNA, 14 nt, Human
uuagcucaaugagc

SEQ ID NO: 1253883 - RNA, 18 nt, Human
uuagcucaaugagcaugu

SEQ ID NO: 1253884 - RNA, 17 nt, Human
uuagcucaaugagcaug

SEQ ID NO: 1253885 - RNA, 13 nt, Human
uuagcuccugugg

SEQ ID NO: 1253886 - RNA, 12 nt, Human
uuagcuuuguca

SEQ ID NO: 1253887 - RNA, 16 nt, Human
uuagcuuugucacugu

SEQ ID NO: 1253888 - RNA, 23 nt, Human
uuaggaaauguuuuuaauaaaag

SEQ ID NO: 1253889 - RNA, 17 nt, Human
uuagcuuauguuaacug

SEQ ID NO: 1253890 - RNA, 13 nt, Human
uuagcuuuaacuu

SEQ ID NO: 1253891 - RNA, 20 nt, Human
uuagaugcaguucugaagaa

SEQ ID NO: 1253892 - RNA, 21 nt, Human
uuagaugcaguucugaagaag

SEQ ID NO: 1253893 - RNA, 22 nt, Human
uuagaugcaguucugaagaaga

SEQ ID NO: 1253894 - RNA, 15 nt, Human
uuagaucuggcaugu

SEQ ID NO: 1253895 - RNA, 21 nt, Human
uuagcuaaacggauuccaaag

SEQ ID NO: 1253896 - RNA, 15 nt, Human
uuagcuaauaaaaag

SEQ ID NO: 1253897 - RNA, 22 nt, Human
uuagcuaauaaaaagcuuuugu

SEQ ID NO: 1253898 - RNA, 15 nt, Human
uuagauaaauauuga

SEQ ID NO: 1253899 - RNA, 16 nt, Human
uuagauagcccugucc

SEQ ID NO: 1253900 - RNA, 17 nt, Human
uuagauagcccuguccu

SEQ ID NO: 1253901 - RNA, 18 nt, Human
uuagauagcccuguccug

SEQ ID NO: 1253902 - RNA, 20 nt, Human
uuagauagcccuguccuggu

SEQ ID NO: 1253903 - RNA, 15 nt, Human
uuagagauaagaguu

SEQ ID NO: 1253904 - RNA, 18 nt, Human
uuagagggaggagaauga

SEQ ID NO: 1253905 - RNA, 16 nt, Human
uuagagugucuuucca

SEQ ID NO: 1253906 - RNA, 17 nt, Human
uuagagugucuuuccac

SEQ ID NO: 1253907 - RNA, 16 nt, Human
uuaugcuuaaauucaa

SEQ ID NO: 1253908 - RNA, 17 nt, Human
uuaugcugugacacaug

SEQ ID NO: 1253909 - RNA, 15 nt, Human
uuaugcugauuuauu

SEQ ID NO: 1253910 - RNA, 21 nt, Human
uuauggcacuaguauuucuau

SEQ ID NO: 1253911 - RNA, 16 nt, Human
uuaugccaccugaaua

SEQ ID NO: 1253912 - RNA, 17 nt, Human
uuaugccuuuuuugauc

SEQ ID NO: 1253913 - RNA, 16 nt, Human
uuaugcgguuaauuuu

SEQ ID NO: 1253914 - RNA, 19 nt, Human
uuaugcgguuaauuuugaa

SEQ ID NO: 1253915 - RNA, 17 nt, Human
uuaugcucuuaauugcc

SEQ ID NO: 1253916 - RNA, 21 nt, Human
uuaugcucuuaauugccaccu

SEQ ID NO: 1253917 - RNA, 18 nt, Human
uuaugcucuuaauugcca

SEQ ID NO: 1253918 - RNA, 14 nt, Human
uuaugaaaaagaag

SEQ ID NO: 1253919 - RNA, 13 nt, Human
uuaugccaccuga

SEQ ID NO: 1253920 - RNA, 17 nt, Human
uuaucuugguugaaaau

SEQ ID NO: 1253921 - RNA, 16 nt, Human
uuaucuuuacuuuuaa

SEQ ID NO: 1253922 - RNA, 12 nt, Human
uuaucuuuauau

SEQ ID NO: 1253923 - RNA, 15 nt, Human
uuaucuuuuuaccuu

SEQ ID NO: 1253924 - RNA, 17 nt, Human
uuaugaaaaagaagaau

SEQ ID NO: 1253925 - RNA, 20 nt, Human
uuaguugcaacuuuguauaa

SEQ ID NO: 1253926 - RNA, 13 nt, Human
uuaguugcaacuu

SEQ ID NO: 1253927 - RNA, 18 nt, Human
uuaguuccugugcacagc

SEQ ID NO: 1253928 - RNA, 15 nt, Human
uuaguuccugugcac

SEQ ID NO: 1253929 - RNA, 12 nt, Human
uuaguuccugug

SEQ ID NO: 1253930 - RNA, 12 nt, Human
uuaucucugugu

SEQ ID NO: 1253931 - RNA, 15 nt, Human
uuaucuauaauuuac

SEQ ID NO: 1253932 - RNA, 17 nt, Human
uuaucuauaauuuaccu

SEQ ID NO: 1253933 - RNA, 22 nt, Human
uuaucuauaauuuaccuaagau

SEQ ID NO: 1253934 - RNA, 14 nt, Human
uuaucuauaauuua

SEQ ID NO: 1253935 - RNA, 18 nt, Human
uuaucugccucucuugua

SEQ ID NO: 1253936 - RNA, 18 nt, Human
uuaucugcaagugaggug

SEQ ID NO: 1253937 - RNA, 12 nt, Human
uuaucugggcuu

SEQ ID NO: 1253938 - RNA, 21 nt, Human
uuaucugccucucuuguaauu

SEQ ID NO: 1253939 - RNA, 17 nt, Human
uuaucugaauuuuuaaa

SEQ ID NO: 1253940 - RNA, 18 nt, Human
uuaucugaauuuuuaaac

SEQ ID NO: 1253941 - RNA, 21 nt, Human
uuaucugaauuuuuaaacaag

SEQ ID NO: 1253942 - RNA, 18 nt, Human
uuaucugagucaacuccu

SEQ ID NO: 1253943 - RNA, 20 nt, Human
uuaucugaauuuuuaaacaa

SEQ ID NO: 1253944 - RNA, 14 nt, Human
uuaucugaucagaa

SEQ ID NO: 1253945 - RNA, 16 nt, Human
uuaucugucagcugca

SEQ ID NO: 1253946 - RNA, 20 nt, Human
uuaucuugaauaauguaaga

SEQ ID NO: 1253947 - RNA, 16 nt, Human
uuauuaaacaaauaau

SEQ ID NO: 1253948 - RNA, 14 nt, Human
uuauuaaaccccuu

SEQ ID NO: 1253949 - RNA, 12 nt, Human
uuauuaaagaaa

SEQ ID NO: 1253950 - RNA, 13 nt, Human
uuauuaaagaaaa

SEQ ID NO: 1253951 - RNA, 14 nt, Human
uuauuaaagaaaaa

SEQ ID NO: 1253952 - RNA, 20 nt, Human
uuauuaaagaaaaaaaugua

SEQ ID NO: 1253953 - RNA, 21 nt, Human
uuauuaaagaaaaaaauguau

SEQ ID NO: 1253954 - RNA, 22 nt, Human
uuauuaaagaaaaaaauguauu

SEQ ID NO: 1253955 - RNA, 23 nt, Human
uuauuaaagaaaaaaauguauuu

SEQ ID NO: 1253956 - RNA, 17 nt, Human
uuauuaaucuuagugua

SEQ ID NO: 1253957 - RNA, 11 nt, Human
uuauuaaugca

SEQ ID NO: 1253958 - RNA, 12 nt, Human
uuauuaauuuga

SEQ ID NO: 1253959 - RNA, 20 nt, Human
uuauuaauuuuaguuuuuca

SEQ ID NO: 1253960 - RNA, 13 nt, Human
uuauuaaugcacu

SEQ ID NO: 1253961 - RNA, 17 nt, Human
uuauuaaugcacuuucu

SEQ ID NO: 1253962 - RNA, 18 nt, Human
uuauuaaugcacuuucua

SEQ ID NO: 1253963 - RNA, 17 nt, Human
uuauuacuguaagaaaa

SEQ ID NO: 1253964 - RNA, 18 nt, Human
uuauuacuguaagaaaau

SEQ ID NO: 1253965 - RNA, 19 nt, Human
uuauucguagauauuggac

SEQ ID NO: 1253966 - RNA, 13 nt, Human
uuauucuucuaga

SEQ ID NO: 1253967 - RNA, 14 nt, Human
uuauucuucuagag

SEQ ID NO: 1253968 - RNA, 12 nt, Human
uuauucuugguu

SEQ ID NO: 1253969 - RNA, 14 nt, Human
uuauugacacagaa

SEQ ID NO: 1253970 - RNA, 19 nt, Human
uuauugacacagaaaaugu

SEQ ID NO: 1253971 - RNA, 23 nt, Human
uuauugacacagaaaauguugag

SEQ ID NO: 1253972 - RNA, 18 nt, Human
uuauugcaguuuaucauu

SEQ ID NO: 1253973 - RNA, 21 nt, Human
uuauugcaguuuaucauucaa

SEQ ID NO: 1253974 - RNA, 22 nt, Human
uuauugcaguuuaucauucaag

SEQ ID NO: 1253975 - RNA, 14 nt, Human
uuauugcaguuuau

SEQ ID NO: 1253976 - RNA, 16 nt, Human
uuauugcaguuuauca

SEQ ID NO: 1253977 - RNA, 20 nt, Human
uucagacaucugagguuuua

SEQ ID NO: 1253978 - RNA, 13 nt, Human
uucagagagcagu

SEQ ID NO: 1253979 - RNA, 18 nt, Human
uucagagagcagugcuuu

SEQ ID NO: 1253980 - RNA, 19 nt, Human
uucagagagcagugcuuuu

SEQ ID NO: 1253981 - RNA, 22 nt, Human
uucagagagcagugcuuuuggc

SEQ ID NO: 1253982 - RNA, 21 nt, Human
uucagagagcagugcuuuugg

SEQ ID NO: 1253983 - RNA, 15 nt, Human
uucagagaggccuuu

SEQ ID NO: 1253984 - RNA, 22 nt, Human
uucagagccuccuuucuggcuu

SEQ ID NO: 1253985 - RNA, 22 nt, Human
uucagaguucuuuuugaaguau

SEQ ID NO: 1253986 - RNA, 23 nt, Human
uucagaguucuuuuugaaguauu

SEQ ID NO: 1253987 - RNA, 22 nt, Human
uucagaguugaugguuguacau

SEQ ID NO: 1253988 - RNA, 21 nt, Human
uucagaguugaugguuguaca

SEQ ID NO: 1253989 - RNA, 20 nt, Human
uucagauaaucacaauacau

SEQ ID NO: 1253990 - RNA, 15 nt, Human
uucacuacucagcau

SEQ ID NO: 1253991 - RNA, 20 nt, Human
uucagacauagaauuaacac

SEQ ID NO: 1253992 - RNA, 16 nt, Human
uucagacauagaauua

SEQ ID NO: 1253993 - RNA, 14 nt, Human
uucacuacucagca

SEQ ID NO: 1253994 - RNA, 15 nt, Human
uucacaaacuuuuau

SEQ ID NO: 1253995 - RNA, 18 nt, Human
uucaccugccccaacucu

SEQ ID NO: 1253996 - RNA, 21 nt, Human
uucaccuggaagcauuuguuu

SEQ ID NO: 1253997 - RNA, 13 nt, Human
uucaccuguaaac

SEQ ID NO: 1253998 - RNA, 16 nt, Human
uucaccuguaaaccug

SEQ ID NO: 1253999 - RNA, 17 nt, Human
uucaccuguaaaccuga

SEQ ID NO: 1254000 - RNA, 18 nt, Human
uucaccuguaaaccugag

SEQ ID NO: 1254001 - RNA, 16 nt, Human
uucaauuugauguggu

SEQ ID NO: 1254002 - RNA, 22 nt, Human
uucaauuugauguggugaaaag

SEQ ID NO: 1254003 - RNA, 15 nt, Human
uucaauuugaugugg

SEQ ID NO: 1254004 - RNA, 15 nt, Human
uucaauuuauaccuc

SEQ ID NO: 1254005 - RNA, 16 nt, Human
uucaauuuauaccuca

SEQ ID NO: 1254006 - RNA, 19 nt, Human
uucaauugcaucucccaga

SEQ ID NO: 1254007 - RNA, 15 nt, Human
uucaauugcaucucc

SEQ ID NO: 1254008 - RNA, 17 nt, Human
uucaauugcaucuccca

SEQ ID NO: 1254009 - RNA, 23 nt, Human
uucaaaucaaucuguaaaacuaa

SEQ ID NO: 1254010 - RNA, 22 nt, Human
uucaaaucaaucuguaaaacua

SEQ ID NO: 1254011 - RNA, 18 nt, Human
uucaaauagggucuaacu

SEQ ID NO: 1254012 - RNA, 19 nt, Human
uucaaauagggucuaacuc

SEQ ID NO: 1254013 - RNA, 13 nt, Human
uucaaaguguuau

SEQ ID NO: 1254014 - RNA, 14 nt, Human
uucaaaguuuaaua

SEQ ID NO: 1254015 - RNA, 19 nt, Human
uucaaaguuuaauaaauuu

SEQ ID NO: 1254016 - RNA, 17 nt, Human
uucaaauccuugaagau

SEQ ID NO: 1254017 - RNA, 16 nt, Human
uucaacgcagcccugc

SEQ ID NO: 1254018 - RNA, 19 nt, Human
uucaacgcagcccugcuuu

SEQ ID NO: 1254019 - RNA, 20 nt, Human
uucaacgcagcccugcuuug

SEQ ID NO: 1254020 - RNA, 16 nt, Human
uucaacggaaagugcu

SEQ ID NO: 1254021 - RNA, 17 nt, Human
uucaacugaccagccuc

SEQ ID NO: 1254022 - RNA, 23 nt, Human
uucaaagccagcguccuccucug

SEQ ID NO: 1254023 - RNA, 20 nt, Human
uucaaagcuguguguuugga

SEQ ID NO: 1254024 - RNA, 23 nt, Human
uucaaagcuguguguuuggaaga

SEQ ID NO: 1254025 - RNA, 22 nt, Human
uucaaagcuuuuuccagaggcu

SEQ ID NO: 1254026 - RNA, 12 nt, Human
uucaaagguucu

SEQ ID NO: 1254027 - RNA, 16 nt, Human
uucaaagguucuaggu

SEQ ID NO: 1254028 - RNA, 21 nt, Human
uucaaagguucuagguuucaa

SEQ ID NO: 1254029 - RNA, 20 nt, Human
uuauuuuauguugcauagaa

SEQ ID NO: 1254030 - RNA, 17 nt, Human
uuauuuuaauaauguuu

SEQ ID NO: 1254031 - RNA, 22 nt, Human
uuauuggcugagauaugaacau

SEQ ID NO: 1254032 - RNA, 15 nt, Human
uuauugguuuugcag

SEQ ID NO: 1254033 - RNA, 18 nt, Human
uuauugguuuugcagaag

SEQ ID NO: 1254034 - RNA, 15 nt, Human
uuauuggcugagaua

SEQ ID NO: 1254035 - RNA, 16 nt, Human
uuauuggcugagauau

SEQ ID NO: 1254036 - RNA, 14 nt, Human
uuauuggcugagau

SEQ ID NO: 1254037 - RNA, 15 nt, Human
uuauuuuaauaaugu

SEQ ID NO: 1254038 - RNA, 16 nt, Human
uuauuuuaauaauguu

SEQ ID NO: 1254039 - RNA, 13 nt, Human
uuauuguauucug

SEQ ID NO: 1254040 - RNA, 14 nt, Human
uuauuguauucugg

SEQ ID NO: 1254041 - RNA, 12 nt, Human
uuauugucccaa

SEQ ID NO: 1254042 - RNA, 15 nt, Human
uuauugucuagugaa

SEQ ID NO: 1254043 - RNA, 12 nt, Human
uuauuguacuug

SEQ ID NO: 1254044 - RNA, 18 nt, Human
uuccagagcacugcucca

SEQ ID NO: 1254045 - RNA, 21 nt, Human
uuccagagaguggcuccuccc

SEQ ID NO: 1254046 - RNA, 17 nt, Human
uuccagagaguggcucc

SEQ ID NO: 1254047 - RNA, 18 nt, Human
uuccagagaguggcuccu

SEQ ID NO: 1254048 - RNA, 19 nt, Human
uuccagagaguggcuccuc

SEQ ID NO: 1254049 - RNA, 20 nt, Human
uuccagagaguggcuccucc

SEQ ID NO: 1254050 - RNA, 19 nt, Human
uuccacucguguguuucua

SEQ ID NO: 1254051 - RNA, 13 nt, Human
uuccacugagacc

SEQ ID NO: 1254052 - RNA, 21 nt, Human
uuccaaauguaauaaacuuua

SEQ ID NO: 1254053 - RNA, 14 nt, Human
uuccaaauucaguu

SEQ ID NO: 1254054 - RNA, 15 nt, Human
uuccaaauucaguuu

SEQ ID NO: 1254055 - RNA, 18 nt, Human
uuccaaauucaguuucau

SEQ ID NO: 1254056 - RNA, 19 nt, Human
uuccaaauucaguuucaua

SEQ ID NO: 1254057 - RNA, 20 nt, Human
uuccaaauucaguuucauaa

SEQ ID NO: 1254058 - RNA, 16 nt, Human
uucauuugcuuuggaa

SEQ ID NO: 1254059 - RNA, 16 nt, Human
uuccaaaaucucccau

SEQ ID NO: 1254060 - RNA, 19 nt, Human
uuccaaaaucucccauuuu

SEQ ID NO: 1254061 - RNA, 18 nt, Human
uuccaaaaucucccauuu

SEQ ID NO: 1254062 - RNA, 20 nt, Human
uuccaaacucuucccucucu

SEQ ID NO: 1254063 - RNA, 21 nt, Human
uuccaaagaguagaauugcau

SEQ ID NO: 1254064 - RNA, 14 nt, Human
uuccaaacuaauuu

SEQ ID NO: 1254065 - RNA, 15 nt, Human
uuccaaauacuaaug

SEQ ID NO: 1254066 - RNA, 15 nt, Human
uucaugaaagauuca

SEQ ID NO: 1254067 - RNA, 17 nt, Human
uucaugaaagauucaau

SEQ ID NO: 1254068 - RNA, 18 nt, Human
uucaugaaagauucaaug

SEQ ID NO: 1254069 - RNA, 15 nt, Human
uucaugauuuugaaa

SEQ ID NO: 1254070 - RNA, 13 nt, Human
uucaggaaaauug

SEQ ID NO: 1254071 - RNA, 16 nt, Human
uucaggaaaaggccug

SEQ ID NO: 1254072 - RNA, 17 nt, Human
uucaggaaaaggccugg

SEQ ID NO: 1254073 - RNA, 18 nt, Human
uucaggaaaaggccuggg

SEQ ID NO: 1254074 - RNA, 19 nt, Human
uucaggaaaaggccugggg

SEQ ID NO: 1254075 - RNA, 18 nt, Human
uucaggaaaauugaaugc

SEQ ID NO: 1254076 - RNA, 13 nt, Human
uucaugcauggaa

SEQ ID NO: 1254077 - RNA, 13 nt, Human
uucaugcagcugu

SEQ ID NO: 1254078 - RNA, 14 nt, Human
uucaugcagcugug

SEQ ID NO: 1254079 - RNA, 15 nt, Human
uucaugcagcugugg

SEQ ID NO: 1254080 - RNA, 17 nt, Human
uucaugcaaacuuuauu

SEQ ID NO: 1254081 - RNA, 17 nt, Human
uucaugauuuugaaauc

SEQ ID NO: 1254082 - RNA, 15 nt, Human
uucaugcaaacucuu

SEQ ID NO: 1254083 - RNA, 16 nt, Human
uucaugcaaacucuuu

SEQ ID NO: 1254084 - RNA, 20 nt, Human
uucaugcaaacucuuugguc

SEQ ID NO: 1254085 - RNA, 18 nt, Human
uucauuugagaaguaaac

SEQ ID NO: 1254086 - RNA, 12 nt, Human
uucauuugcuuu

SEQ ID NO: 1254087 - RNA, 15 nt, Human
uuccauucuggaagu

SEQ ID NO: 1254088 - RNA, 13 nt, Human
uuccauucuggaa

SEQ ID NO: 1254089 - RNA, 16 nt, Human
uuccauuggaucucau

SEQ ID NO: 1254090 - RNA, 17 nt, Human
uuccauuggaucucauu

SEQ ID NO: 1254091 - RNA, 16 nt, Human
uuccauugguccaaga

SEQ ID NO: 1254092 - RNA, 17 nt, Human
uuccauugguccaagau

SEQ ID NO: 1254093 - RNA, 19 nt, Human
uuccauugguccaagauuc

SEQ ID NO: 1254094 - RNA, 13 nt, Human
uucccauccccag

SEQ ID NO: 1254095 - RNA, 14 nt, Human
uucccauccccagc

SEQ ID NO: 1254096 - RNA, 17 nt, Human
uucccauccccagcgau

SEQ ID NO: 1254097 - RNA, 15 nt, Human
uucccauccccagcg

SEQ ID NO: 1254098 - RNA, 14 nt, Human
uucccaucgcuguc

SEQ ID NO: 1254099 - RNA, 20 nt, Human
uuccagcaauucuccugccu

SEQ ID NO: 1254100 - RNA, 21 nt, Human
uuccagcaauucuccugccuc

SEQ ID NO: 1254101 - RNA, 22 nt, Human
uuccagcaauucuccugccuca

SEQ ID NO: 1254102 - RNA, 23 nt, Human
uuccagcaauucuccugccucag

SEQ ID NO: 1254103 - RNA, 15 nt, Human
uuccaugugcccagu

SEQ ID NO: 1254104 - RNA, 17 nt, Human
uuccaugugcccaguua

SEQ ID NO: 1254105 - RNA, 16 nt, Human
uuccaugugcccaguu

SEQ ID NO: 1254106 - RNA, 13 nt, Human
uuccauuaaacga

SEQ ID NO: 1254107 - RNA, 23 nt, Human
uuccauuaaacgauuuuuaaaau

SEQ ID NO: 1254108 - RNA, 23 nt, Human
uuccauuacaaguauuuuuaauu

SEQ ID NO: 1254109 - RNA, 13 nt, Human
uuccauuacaagu

SEQ ID NO: 1254110 - RNA, 14 nt, Human
uucccauuucagcu

SEQ ID NO: 1254111 - RNA, 15 nt, Human
uucccauuucagcug

SEQ ID NO: 1254112 - RNA, 14 nt, Human
uucccauucuugca

SEQ ID NO: 1254113 - RNA, 14 nt, Human
uucccauggggagg

SEQ ID NO: 1254114 - RNA, 15 nt, Human
uucccauggggaggg

SEQ ID NO: 1254115 - RNA, 23 nt, Human
uucccauggggagggauucuggu

SEQ ID NO: 1254116 - RNA, 22 nt, Human
uucccaugauuucauguacugc

SEQ ID NO: 1254117 - RNA, 21 nt, Human
uucccaugauuucauguacug

SEQ ID NO: 1254118 - RNA, 20 nt, Human
uucccaugauuucauguacu

SEQ ID NO: 1254119 - RNA, 18 nt, Human
uucccaugauuucaugua

SEQ ID NO: 1254120 - RNA, 13 nt, Human
uucccaugauuuc

SEQ ID NO: 1254121 - RNA, 15 nt, Human
uucccaucgcuguca

SEQ ID NO: 1254122 - RNA, 15 nt, Human
uucccauuuaucuaa

SEQ ID NO: 1254123 - RNA, 20 nt, Human
uuccccaucguugcccccau

SEQ ID NO: 1254124 - RNA, 19 nt, Human
uuccccaucucaggccaga

SEQ ID NO: 1254125 - RNA, 11 nt, Human
uuccccauggg

SEQ ID NO: 1254126 - RNA, 17 nt, Human
uuccccaucuucuaaac

SEQ ID NO: 1254127 - RNA, 18 nt, Human
uuccccaucuucuaaacc

SEQ ID NO: 1254128 - RNA, 19 nt, Human
uuccccaugucucgacuca

SEQ ID NO: 1254129 - RNA, 19 nt, Human
uuccccauggcccugagcg

SEQ ID NO: 1254130 - RNA, 23 nt, Human
uuccccaugguuuuaaucuguau

SEQ ID NO: 1254131 - RNA, 23 nt, Human
uucccccaccaccaaaacugcuc

SEQ ID NO: 1254132 - RNA, 12 nt, Human
uucccccaccac

SEQ ID NO: 1254133 - RNA, 15 nt, Human
uucccccacugauca

SEQ ID NO: 1254134 - RNA, 13 nt, Human
uuccccccaaggg

SEQ ID NO: 1254135 - RNA, 22 nt, Human
uucccuggaaaccuuccaccca

SEQ ID NO: 1254136 - RNA, 23 nt, Human
uucccuggaaaccuuccacccag

SEQ ID NO: 1254137 - RNA, 20 nt, Human
uucccuggaaaccuuccacc

SEQ ID NO: 1254138 - RNA, 22 nt, Human
uucccugcugugaaagaaguaa

SEQ ID NO: 1254139 - RNA, 14 nt, Human
uucccugccucuca

SEQ ID NO: 1254140 - RNA, 23 nt, Human
uucccugccucucaucaacugaa

SEQ ID NO: 1254141 - RNA, 17 nt, Human
uucccuugaugaagaag

SEQ ID NO: 1254142 - RNA, 15 nt, Human
uucccuuccugccag

SEQ ID NO: 1254143 - RNA, 14 nt, Human
uucccuuccugcca

SEQ ID NO: 1254144 - RNA, 21 nt, Human
uucccucucucauacccuccc

SEQ ID NO: 1254145 - RNA, 13 nt, Human
uucccucucugga

SEQ ID NO: 1254146 - RNA, 17 nt, Human
uucccucucccaggccc

SEQ ID NO: 1254147 - RNA, 16 nt, Human
uucccucucccaggcc

SEQ ID NO: 1254148 - RNA, 14 nt, Human
uucccucucucacu

SEQ ID NO: 1254149 - RNA, 15 nt, Human
uucccucucuggaga

SEQ ID NO: 1254150 - RNA, 19 nt, Human
uucccccuccaaucccacc

SEQ ID NO: 1254151 - RNA, 13 nt, Human
uucccuccuuggu

SEQ ID NO: 1254152 - RNA, 12 nt, Human
uucccuccuugg

SEQ ID NO: 1254153 - RNA, 14 nt, Human
uucccucucccagg

SEQ ID NO: 1254154 - RNA, 15 nt, Human
uucccucucccaggc

SEQ ID NO: 1254155 - RNA, 13 nt, Human
uucccugacucau

SEQ ID NO: 1254156 - RNA, 16 nt, Human
uucccugacucauucu

SEQ ID NO: 1254157 - RNA, 13 nt, Human
uucccugaagcuc

SEQ ID NO: 1254158 - RNA, 14 nt, Human
uucccucuuuggcu

SEQ ID NO: 1254159 - RNA, 16 nt, Human
uucccucuuuggcucc

SEQ ID NO: 1254160 - RNA, 20 nt, Human
uucccucuuuggcuccccug

SEQ ID NO: 1254161 - RNA, 18 nt, Human
uucccuugaugaagaagu

SEQ ID NO: 1254162 - RNA, 18 nt, Human
uuccuaugauguauacug

SEQ ID NO: 1254163 - RNA, 14 nt, Human
uuccuaugcuuuga

SEQ ID NO: 1254164 - RNA, 21 nt, Human
uuccuaugauguauacugcca

SEQ ID NO: 1254165 - RNA, 14 nt, Human
uuccuaugauguau

SEQ ID NO: 1254166 - RNA, 22 nt, Human
uucccuuugugagucaauacau

SEQ ID NO: 1254167 - RNA, 12 nt, Human
uucccuuuguga

SEQ ID NO: 1254168 - RNA, 13 nt, Human
uuccuauacgcag

SEQ ID NO: 1254169 - RNA, 19 nt, Human
uuccuauacgcagcgugcu

SEQ ID NO: 1254170 - RNA, 21 nt, Human
uuccucacaccaggcuugccu

SEQ ID NO: 1254171 - RNA, 14 nt, Human
uuccucagacucua

SEQ ID NO: 1254172 - RNA, 18 nt, Human
uuccucagacucuaagaa

SEQ ID NO: 1254173 - RNA, 14 nt, Human
uuccucagccagcc

SEQ ID NO: 1254174 - RNA, 11 nt, Human
uuccucagcca

SEQ ID NO: 1254175 - RNA, 16 nt, Human
uuccuaugcuuugaaa

SEQ ID NO: 1254176 - RNA, 16 nt, Human
uuccugcauuugugaa

SEQ ID NO: 1254177 - RNA, 18 nt, Human
uuccugcauuugugaaau

SEQ ID NO: 1254178 - RNA, 15 nt, Human
uuccugccagccccu

SEQ ID NO: 1254179 - RNA, 18 nt, Human
uuccucccauucaagauu

SEQ ID NO: 1254180 - RNA, 22 nt, Human
uuccuggagcagaagcagcaac

SEQ ID NO: 1254181 - RNA, 20 nt, Human
uuccugccagccccugccau

SEQ ID NO: 1254182 - RNA, 23 nt, Human
uuccugccccaacuccuuccagc

SEQ ID NO: 1254183 - RNA, 13 nt, Human
uuccugccccagg

SEQ ID NO: 1254184 - RNA, 16 nt, Human
uuccugccccaggccu

SEQ ID NO: 1254185 - RNA, 15 nt, Human
uuccuggacagcugu

SEQ ID NO: 1254186 - RNA, 17 nt, Human
uuccuggacagcugugc

SEQ ID NO: 1254187 - RNA, 19 nt, Human
uuccuggacagcugugccu

SEQ ID NO: 1254188 - RNA, 20 nt, Human
uuccuggacagcugugccuc

SEQ ID NO: 1254189 - RNA, 21 nt, Human
uuccuggacagcugugccucg

SEQ ID NO: 1254190 - RNA, 24 nt, Human
uuccuggacagcugugccucgcuc

SEQ ID NO: 1254191 - RNA, 12 nt, Human
uucuaaagauuc

SEQ ID NO: 1254192 - RNA, 13 nt, Human
uucuaaagauucu

SEQ ID NO: 1254193 - RNA, 14 nt, Human
uucuaaagauucua

SEQ ID NO: 1254194 - RNA, 16 nt, Human
uucuaaagauucuaua

SEQ ID NO: 1254195 - RNA, 22 nt, Human
uucuaaagauucuauaguucua

SEQ ID NO: 1254196 - RNA, 23 nt, Human
uucuaaagauucuauaguucuag

SEQ ID NO: 1254197 - RNA, 16 nt, Human
uucguuuaaugaaugc

SEQ ID NO: 1254198 - RNA, 15 nt, Human
uucguuuauuuucaa

SEQ ID NO: 1254199 - RNA, 14 nt, Human
uucgggcugugccc

SEQ ID NO: 1254200 - RNA, 12 nt, Human
uucguucugugg

SEQ ID NO: 1254201 - RNA, 18 nt, Human
uucuaaaaauugugauca

SEQ ID NO: 1254202 - RNA, 18 nt, Human
uucgggccaaggaccuga

SEQ ID NO: 1254203 - RNA, 20 nt, Human
uucgggccaaggaccugaga

SEQ ID NO: 1254204 - RNA, 12 nt, Human
uucgggcugugc

SEQ ID NO: 1254205 - RNA, 13 nt, Human
uucgggcugugcc

SEQ ID NO: 1254206 - RNA, 17 nt, Human
uuugugggggacuguaa

SEQ ID NO: 1254207 - RNA, 18 nt, Human
uuugugggggacuguaag

SEQ ID NO: 1254208 - RNA, 20 nt, Human
uuuguggguuuuuauuuccu

SEQ ID NO: 1254209 - RNA, 20 nt, Human
uuugugggggacuguaaguu

SEQ ID NO: 1254210 - RNA, 22 nt, Human
uggggccaggcugggucgcccu

SEQ ID NO: 1254211 - RNA, 21 nt, Human
uggggccaggcugggucgccc

SEQ ID NO: 1254212 - RNA, 22 nt, Human
uggggaugguaguuuuuucauc

SEQ ID NO: 1254213 - RNA, 15 nt, Human
uggggccaggucacc

SEQ ID NO: 1254214 - RNA, 18 nt, Human
uggggauaggccagccgc

SEQ ID NO: 1254215 - RNA, 17 nt, Human
uggggauaggccagccg

SEQ ID NO: 1254216 - RNA, 20 nt, Human
uggggaucccucccccccau

SEQ ID NO: 1254217 - RNA, 20 nt, Human
uggggaguuuaggguggggg

SEQ ID NO: 1254218 - RNA, 21 nt, Human
ugggcuugcuauucugucccu

SEQ ID NO: 1254219 - RNA, 13 nt, Human
ugggcuugauucu

SEQ ID NO: 1254220 - RNA, 14 nt, Human
ugggcuugauucug

SEQ ID NO: 1254221 - RNA, 14 nt, Human
ugggcuugcuauuc

SEQ ID NO: 1254222 - RNA, 17 nt, Human
ugggcuugcuauucugu

SEQ ID NO: 1254223 - RNA, 15 nt, Human
ugggccuucagggag

SEQ ID NO: 1254224 - RNA, 12 nt, Human
ugggccuucagg

SEQ ID NO: 1254225 - RNA, 15 nt, Human
ugggccuuaggaaga

SEQ ID NO: 1254226 - RNA, 13 nt, Human
ugggcuucaucug

SEQ ID NO: 1254227 - RNA, 14 nt, Human
ugggcuucccaagg

SEQ ID NO: 1254228 - RNA, 13 nt, Human
ugggcuucccaag

SEQ ID NO: 1254229 - RNA, 13 nt, Human
ugggcuuccugga

SEQ ID NO: 1254230 - RNA, 14 nt, Human
ugggcuuccuggag

SEQ ID NO: 1254231 - RNA, 15 nt, Human
ugggcuuccuggagc

SEQ ID NO: 1254232 - RNA, 16 nt, Human
ugggcuuccuggagca

SEQ ID NO: 1254233 - RNA, 17 nt, Human
ugggcuuccuggagcag

SEQ ID NO: 1254234 - RNA, 20 nt, Human
ugggcuuccuggagcagaag

SEQ ID NO: 1254235 - RNA, 16 nt, Human
uggguacuucuugaag

SEQ ID NO: 1254236 - RNA, 19 nt, Human
uggguacuucuugaaggug

SEQ ID NO: 1254237 - RNA, 20 nt, Human
uggguauaguucaugucugc

SEQ ID NO: 1254238 - RNA, 15 nt, Human
uggggguucuuucuu

SEQ ID NO: 1254239 - RNA, 19 nt, Human
uggggguucuuucuuccuc

SEQ ID NO: 1254240 - RNA, 10 nt, Human
uggggguggg

SEQ ID NO: 1254241 - RNA, 16 nt, Human
uggggguggggguagg

SEQ ID NO: 1254242 - RNA, 20 nt, Human
uggggguucuuucuuccucu

SEQ ID NO: 1254243 - RNA, 22 nt, Human
uggggguucuuucuuccucugc

SEQ ID NO: 1254244 - RNA, 16 nt, Human
uggggguucaggcccg

SEQ ID NO: 1254245 - RNA, 18 nt, Human
uggguaaugaaacaaaga

SEQ ID NO: 1254246 - RNA, 15 nt, Human
uggguacccccagga

SEQ ID NO: 1254247 - RNA, 21 nt, Human
ugggggaguagaucuuucuag

SEQ ID NO: 1254248 - RNA, 16 nt, Human
ugggggacuguaaguu

SEQ ID NO: 1254249 - RNA, 14 nt, Human
ugggggacuuacau

SEQ ID NO: 1254250 - RNA, 21 nt, Human
ugggggacuuacaugauucau

SEQ ID NO: 1254251 - RNA, 19 nt, Human
uggggguagggggcuggag

SEQ ID NO: 1254252 - RNA, 21 nt, Human
uggggguccuccuccagggac

SEQ ID NO: 1254253 - RNA, 21 nt, Human
uggggguagggggcuggagga

SEQ ID NO: 1254254 - RNA, 13 nt, Human
uggggggguggcc

SEQ ID NO: 1254255 - RNA, 14 nt, Human
uggggggguggccg

SEQ ID NO: 1254256 - RNA, 23 nt, Human
uggggggguggccgcugaguggc

SEQ ID NO: 1254257 - RNA, 18 nt, Human
uggggggugaugagggca

SEQ ID NO: 1254258 - RNA, 19 nt, Human
uggggggugaugagggcag

SEQ ID NO: 1254259 - RNA, 20 nt, Human
uggggggugaugagggcagc

SEQ ID NO: 1254260 - RNA, 16 nt, Human
ugggggguggccaggc

SEQ ID NO: 1254261 - RNA, 24 nt, Human
uggggggugaugagggcagcagcc

SEQ ID NO: 1254262 - RNA, 23 nt, Human
ugggccccugccucucugcaggu

SEQ ID NO: 1254263 - RNA, 21 nt, Human
ugggccccugccucucugcag

SEQ ID NO: 1254264 - RNA, 13 nt, Human
ugggcccucucug

SEQ ID NO: 1254265 - RNA, 16 nt, Human
ugggcccucucugcuc

SEQ ID NO: 1254266 - RNA, 18 nt, Human
ugggcccucucugcucug

SEQ ID NO: 1254267 - RNA, 11 nt, Human
ugggccuucag

SEQ ID NO: 1254268 - RNA, 20 nt, Human
ugggccugggcuccuggacc

SEQ ID NO: 1254269 - RNA, 21 nt, Human
ugggccuggucucacccugga

SEQ ID NO: 1254270 - RNA, 22 nt, Human
ugggccuggucucacccuggag

SEQ ID NO: 1254271 - RNA, 23 nt, Human
ugggccugguuaaauaaggcagg

SEQ ID NO: 1254272 - RNA, 13 nt, Human
ugggccugggcuc

SEQ ID NO: 1254273 - RNA, 15 nt, Human
ugggccugggcuccu

SEQ ID NO: 1254274 - RNA, 16 nt, Human
ugggccugggcuccug

SEQ ID NO: 1254275 - RNA, 17 nt, Human
ugggccugggcuccugg

SEQ ID NO: 1254276 - RNA, 18 nt, Human
ugggccugggcuccugga

SEQ ID NO: 1254277 - RNA, 19 nt, Human
ugggccugggcuccuggac

SEQ ID NO: 1254278 - RNA, 13 nt, Human
ugggcagagccca

SEQ ID NO: 1254279 - RNA, 14 nt, Human
ugggcagagcccaa

SEQ ID NO: 1254280 - RNA, 12 nt, Human
ugggcagagcug

SEQ ID NO: 1254281 - RNA, 16 nt, Human
ugggcagagcuggcuc

SEQ ID NO: 1254282 - RNA, 13 nt, Human
ugggcaggaggga

SEQ ID NO: 1254283 - RNA, 14 nt, Human
ugggcagagcuggc

SEQ ID NO: 1254284 - RNA, 15 nt, Human
ugggcaggagggagg

SEQ ID NO: 1254285 - RNA, 16 nt, Human
ugggcaggagggaggu

SEQ ID NO: 1254286 - RNA, 18 nt, Human
ugggcaggagggaggugc

SEQ ID NO: 1254287 - RNA, 13 nt, Human
ugggcagggagcg

SEQ ID NO: 1254288 - RNA, 17 nt, Human
ugggauuacaggcguga

SEQ ID NO: 1254289 - RNA, 18 nt, Human
ugggauuacaggcuccug

SEQ ID NO: 1254290 - RNA, 16 nt, Human
ugggauguucagcacu

SEQ ID NO: 1254291 - RNA, 20 nt, Human
ugggauguucagcacugucc

SEQ ID NO: 1254292 - RNA, 21 nt, Human
ugggauguucagcacuguccc

SEQ ID NO: 1254293 - RNA, 22 nt, Human
ugggauguucagcacugucccu

SEQ ID NO: 1254294 - RNA, 20 nt, Human
ugggaucagggguaggaaug

SEQ ID NO: 1254295 - RNA, 14 nt, Human
uggcugcuguggga

SEQ ID NO: 1254296 - RNA, 16 nt, Human
uggcugcugugggaaa

SEQ ID NO: 1254297 - RNA, 19 nt, Human
ugggaucagggguaggaau

SEQ ID NO: 1254298 - RNA, 18 nt, Human
ugguccccuccuucccaa

SEQ ID NO: 1254299 - RNA, 22 nt, Human
ugguccccuccuucccaaguga

SEQ ID NO: 1254300 - RNA, 12 nt, Human
uggucccugggu

SEQ ID NO: 1254301 - RNA, 22 nt, Human
uggucccuguuuucccacgagg

SEQ ID NO: 1254302 - RNA, 23 nt, Human
uggucccuuguauccccugcagg

SEQ ID NO: 1254303 - RNA, 22 nt, Human
uggucccuuguauccccugcag

SEQ ID NO: 1254304 - RNA, 16 nt, Human
ugguccuauggccuca

SEQ ID NO: 1254305 - RNA, 19 nt, Human
ugguccuauggccucaugu

SEQ ID NO: 1254306 - RNA, 20 nt, Human
ugguccgugggacggugccc

SEQ ID NO: 1254307 - RNA, 13 nt, Human
ugguauguuuuca

SEQ ID NO: 1254308 - RNA, 21 nt, Human
ugguauguuuucaggcuagau

SEQ ID NO: 1254309 - RNA, 13 nt, Human
ugguauuuucaau

SEQ ID NO: 1254310 - RNA, 17 nt, Human
ugguauuuucaauagcc

SEQ ID NO: 1254311 - RNA, 20 nt, Human
ugguauuuucaauagccacu

SEQ ID NO: 1254312 - RNA, 22 nt, Human
ugguauuuucaauagccacuaa

SEQ ID NO: 1254313 - RNA, 22 nt, Human
uggguaucaccacuggagauca

SEQ ID NO: 1254314 - RNA, 13 nt, Human
ugggucacaggaa

SEQ ID NO: 1254315 - RNA, 21 nt, Human
uggguaucaccacuggagauc

SEQ ID NO: 1254316 - RNA, 12 nt, Human
ugggucacagga

SEQ ID NO: 1254317 - RNA, 18 nt, Human
uggucaacuugagcaugu

SEQ ID NO: 1254318 - RNA, 20 nt, Human
uggucacaggacucugccuc

SEQ ID NO: 1254319 - RNA, 19 nt, Human
uggucacaggacucugccu

SEQ ID NO: 1254320 - RNA, 22 nt, Human
uggucacaggaaguagaggagg

SEQ ID NO: 1254321 - RNA, 18 nt, Human
uggucacaggacucugcc

SEQ ID NO: 1254322 - RNA, 22 nt, Human
uggugacaucagguuuuucccg

SEQ ID NO: 1254323 - RNA, 17 nt, Human
uggugagggaagacgcc

SEQ ID NO: 1254324 - RNA, 22 nt, Human
uggugcaauguguguauaugga

SEQ ID NO: 1254325 - RNA, 23 nt, Human
uggugcacagcacaaauuaguua

SEQ ID NO: 1254326 - RNA, 15 nt, Human
uggugccaauuucaa

SEQ ID NO: 1254327 - RNA, 17 nt, Human
uggucgaggaguaacaa

SEQ ID NO: 1254328 - RNA, 13 nt, Human
uggucgcuccugc

SEQ ID NO: 1254329 - RNA, 15 nt, Human
uggucgcuccugccc

SEQ ID NO: 1254330 - RNA, 13 nt, Human
uggucguuuuuuu

SEQ ID NO: 1254331 - RNA, 12 nt, Human
uggucuaaaacu

SEQ ID NO: 1254332 - RNA, 22 nt, Human
uggucguuuuuuuuuuguuugu

SEQ ID NO: 1254333 - RNA, 18 nt, Human
uggucuaagguucagccu

SEQ ID NO: 1254334 - RNA, 18 nt, Human
uggucuaaguccagucca

SEQ ID NO: 1254335 - RNA, 12 nt, Human
ugguccuuuggg

SEQ ID NO: 1254336 - RNA, 15 nt, Human
ugguccuuucuuccg

SEQ ID NO: 1254337 - RNA, 23 nt, Human
uggucgagaaagaggcaccagga

SEQ ID NO: 1254338 - RNA, 16 nt, Human
uggucgaggaguaaca

SEQ ID NO: 1254339 - RNA, 20 nt, Human
uggucgaggaguaacaauac

SEQ ID NO: 1254340 - RNA, 18 nt, Human
uggugacaucagguuuuu

SEQ ID NO: 1254341 - RNA, 18 nt, Human
uggacauccuccucccac

SEQ ID NO: 1254342 - RNA, 20 nt, Human
uggaccaauagggcugagcu

SEQ ID NO: 1254343 - RNA, 21 nt, Human
uggaccaauagggcugagcuc

SEQ ID NO: 1254344 - RNA, 23 nt, Human
uggacaguuuaccaguugccuuu

SEQ ID NO: 1254345 - RNA, 14 nt, Human
uggacauccuccuc

SEQ ID NO: 1254346 - RNA, 16 nt, Human
uggacacucagaccug

SEQ ID NO: 1254347 - RNA, 23 nt, Human
uggacacuuaauacuaccuugaa

SEQ ID NO: 1254348 - RNA, 14 nt, Human
uggacaggcuggcu

SEQ ID NO: 1254349 - RNA, 20 nt, Human
uggacacuacacccagcaau

SEQ ID NO: 1254350 - RNA, 15 nt, Human
uggacacucagaccu

SEQ ID NO: 1254351 - RNA, 19 nt, Human
uggacacuacacccagcaa

SEQ ID NO: 1254352 - RNA, 18 nt, Human
uggacacuacacccagca

SEQ ID NO: 1254353 - RNA, 17 nt, Human
uggacacuacacccagc

SEQ ID NO: 1254354 - RNA, 16 nt, Human
uggacacuacacccag

SEQ ID NO: 1254355 - RNA, 18 nt, Human
uggacaccuuuagguucu

SEQ ID NO: 1254356 - RNA, 15 nt, Human
uggacacgcucagug

SEQ ID NO: 1254357 - RNA, 22 nt, Human
uggacacgcucaguggggcaga

SEQ ID NO: 1254358 - RNA, 14 nt, Human
ugcuguuuauuaau

SEQ ID NO: 1254359 - RNA, 17 nt, Human
ugcuguuuauuaaucuu

SEQ ID NO: 1254360 - RNA, 23 nt, Human
ugcuguuuauuaaucuuagugua

SEQ ID NO: 1254361 - RNA, 16 nt, Human
ugcuguuucaaaguuc

SEQ ID NO: 1254362 - RNA, 17 nt, Human
ugcuguuugacaccucu

SEQ ID NO: 1254363 - RNA, 23 nt, Human
ugcuguuguuaugaugugcuuaa

SEQ ID NO: 1254364 - RNA, 22 nt, Human
ugcuguuguuaugaugugcuua

SEQ ID NO: 1254365 - RNA, 20 nt, Human
ugcuguuguuaugaugugcu

SEQ ID NO: 1254366 - RNA, 19 nt, Human
ugcuguuguuaugaugugc

SEQ ID NO: 1254367 - RNA, 18 nt, Human
ugcuguuguuaugaugug

SEQ ID NO: 1254368 - RNA, 17 nt, Human
ugcuguuguuaugaugu

SEQ ID NO: 1254369 - RNA, 16 nt, Human
ugcuguuguuaugaug

SEQ ID NO: 1254370 - RNA, 15 nt, Human
ugcuguuguuaugau

SEQ ID NO: 1254371 - RNA, 14 nt, Human
ugcuguuccagugg

SEQ ID NO: 1254372 - RNA, 14 nt, Human
uggagaaggaaggc

SEQ ID NO: 1254373 - RNA, 15 nt, Human
uggagaagucucagc

SEQ ID NO: 1254374 - RNA, 16 nt, Human
uggagaagucucagcu

SEQ ID NO: 1254375 - RNA, 17 nt, Human
uggagaagucucagcua

SEQ ID NO: 1254376 - RNA, 23 nt, Human
uggagaagucucagcuaagcuca

SEQ ID NO: 1254377 - RNA, 13 nt, Human
uggagaaggaagg

SEQ ID NO: 1254378 - RNA, 12 nt, Human
uggagaaggaag

SEQ ID NO: 1254379 - RNA, 11 nt, Human
uggagaaggaa

SEQ ID NO: 1254380 - RNA, 21 nt, Human
uggagaagcucccugaaguaa

SEQ ID NO: 1254381 - RNA, 14 nt, Human
uggacuggaagggg

SEQ ID NO: 1254382 - RNA, 17 nt, Human
uggacugagugggaagc

SEQ ID NO: 1254383 - RNA, 19 nt, Human
uggacugagugggaagccc

SEQ ID NO: 1254384 - RNA, 15 nt, Human
uggaccagccucucc

SEQ ID NO: 1254385 - RNA, 15 nt, Human
uggaccacugggcaa

SEQ ID NO: 1254386 - RNA, 19 nt, Human
uggaccacugggcaaugau

SEQ ID NO: 1254387 - RNA, 14 nt, Human
uggacucagggcag

SEQ ID NO: 1254388 - RNA, 15 nt, Human
uggacucagggcagc

SEQ ID NO: 1254389 - RNA, 18 nt, Human
uggacucagggcagcgcc

SEQ ID NO: 1254390 - RNA, 20 nt, Human
uggacucagggcagcgccag

SEQ ID NO: 1254391 - RNA, 13 nt, Human
uggacuccucugu

SEQ ID NO: 1254392 - RNA, 14 nt, Human
uggacuccucuguc

SEQ ID NO: 1254393 - RNA, 15 nt, Human
uggauaacuuccaca

SEQ ID NO: 1254394 - RNA, 16 nt, Human
uggauaacuuccacag

SEQ ID NO: 1254395 - RNA, 21 nt, Human
uggaucucuucuuaauguaca

SEQ ID NO: 1254396 - RNA, 20 nt, Human
uggaucucuucuuaauguac

SEQ ID NO: 1254397 - RNA, 19 nt, Human
uggaucucuucuuaaugua

SEQ ID NO: 1254398 - RNA, 22 nt, Human
uggaucucccugagaugggcuu

SEQ ID NO: 1254399 - RNA, 21 nt, Human
uggauaacuuccacagggucc

SEQ ID NO: 1254400 - RNA, 22 nt, Human
uggaucucuucuuaauguacau

SEQ ID NO: 1254401 - RNA, 23 nt, Human
uggaucucuucuuaauguacaua

SEQ ID NO: 1254402 - RNA, 16 nt, Human
uggaguugguggugcu

SEQ ID NO: 1254403 - RNA, 17 nt, Human
uggaguugguggugcug

SEQ ID NO: 1254404 - RNA, 21 nt, Human
uggaguuucauguacaagaug

SEQ ID NO: 1254405 - RNA, 13 nt, Human
uggaguuucuaag

SEQ ID NO: 1254406 - RNA, 14 nt, Human
uggaguuucuaagg

SEQ ID NO: 1254407 - RNA, 16 nt, Human
uggaguuucuaagguc

SEQ ID NO: 1254408 - RNA, 17 nt, Human
uggaguuucuaaggucc

SEQ ID NO: 1254409 - RNA, 20 nt, Human
uggaguuuuguuuccucugu

SEQ ID NO: 1254410 - RNA, 16 nt, Human
uggaguuuuguuuccu

SEQ ID NO: 1254411 - RNA, 17 nt, Human
uggaguuuuuuguacca

SEQ ID NO: 1254412 - RNA, 18 nt, Human
uggaguuuuuuguaccaa

SEQ ID NO: 1254413 - RNA, 14 nt, Human
uggagacugucuca

SEQ ID NO: 1254414 - RNA, 17 nt, Human
uggagacugucucaaga

SEQ ID NO: 1254415 - RNA, 13 nt, Human
uggaggaccugag

SEQ ID NO: 1254416 - RNA, 15 nt, Human
uggaggaccugagcc

SEQ ID NO: 1254417 - RNA, 14 nt, Human
uggaggaccugagc

SEQ ID NO: 1254418 - RNA, 20 nt, Human
uggcaauagucaaauugugu

SEQ ID NO: 1254419 - RNA, 17 nt, Human
uggcaaggguucaccug

SEQ ID NO: 1254420 - RNA, 14 nt, Human
uggcaagugaauuu

SEQ ID NO: 1254421 - RNA, 15 nt, Human
uggcacuaguauuuc

SEQ ID NO: 1254422 - RNA, 22 nt, Human
uggcacuaacguugagccccug

SEQ ID NO: 1254423 - RNA, 23 nt, Human
uggauuuuuuccuucaaaguuua

SEQ ID NO: 1254424 - RNA, 20 nt, Human
uggcaaaacucuacuuaauc

SEQ ID NO: 1254425 - RNA, 23 nt, Human
uggcaaagcagcaacuauucaca

SEQ ID NO: 1254426 - RNA, 17 nt, Human
uggcaaaggaaggugga

SEQ ID NO: 1254427 - RNA, 15 nt, Human
uggcgggguggggug

SEQ ID NO: 1254428 - RNA, 17 nt, Human
uggcggggaggaggaaa

SEQ ID NO: 1254429 - RNA, 19 nt, Human
uggcggggaggaggaaauc

SEQ ID NO: 1254430 - RNA, 18 nt, Human
uggcggggggcccauugg

SEQ ID NO: 1254431 - RNA, 15 nt, Human
uggcguaaguacaga

SEQ ID NO: 1254432 - RNA, 16 nt, Human
uggcguaaguacagag

SEQ ID NO: 1254433 - RNA, 21 nt, Human
uggcggcuggggucccagcag

SEQ ID NO: 1254434 - RNA, 20 nt, Human
uggcggcuggggucccagca

SEQ ID NO: 1254435 - RNA, 14 nt, Human
uggcucccacaggc

SEQ ID NO: 1254436 - RNA, 17 nt, Human
uggcucccacaggcccu

SEQ ID NO: 1254437 - RNA, 20 nt, Human
uggcucccacaggcccuucc

SEQ ID NO: 1254438 - RNA, 17 nt, Human
uggcguaaguacagaga

SEQ ID NO: 1254439 - RNA, 18 nt, Human
uggcguaaguacagagaa

SEQ ID NO: 1254440 - RNA, 19 nt, Human
uggcguaaguacagagaag

SEQ ID NO: 1254441 - RNA, 20 nt, Human
uggcguaaguacagagaagc

SEQ ID NO: 1254442 - RNA, 21 nt, Human
uggcguaaguacagagaagcc

SEQ ID NO: 1254443 - RNA, 22 nt, Human
uggcguaaguacagagaagcca

SEQ ID NO: 1254444 - RNA, 23 nt, Human
uggcguaaguacagagaagccau

SEQ ID NO: 1254445 - RNA, 16 nt, Human
uggcguaggcuacaga

SEQ ID NO: 1254446 - RNA, 17 nt, Human
uggcguaggcuacagag

SEQ ID NO: 1254447 - RNA, 18 nt, Human
uggcguaggcuacagaga

SEQ ID NO: 1254448 - RNA, 20 nt, Human
uggcugcugaucgccuuccc

SEQ ID NO: 1254449 - RNA, 14 nt, Human
uggcuccucccggu

SEQ ID NO: 1254450 - RNA, 16 nt, Human
uggcuccucccggugc

SEQ ID NO: 1254451 - RNA, 14 nt, Human
uggcucccaggggc

SEQ ID NO: 1254452 - RNA, 19 nt, Human
uggcucccaggggcucccu

SEQ ID NO: 1254453 - RNA, 21 nt, Human
uggcucccaggggcucccucc

SEQ ID NO: 1254454 - RNA, 18 nt, Human
uggcuccucccggugccc

SEQ ID NO: 1254455 - RNA, 19 nt, Human
uggcuccucccggugccca

SEQ ID NO: 1254456 - RNA, 19 nt, Human
uggccuccccugccaccag

SEQ ID NO: 1254457 - RNA, 20 nt, Human
uggccuccccugccaccagg

SEQ ID NO: 1254458 - RNA, 21 nt, Human
uggccuccccugccaccaggc

SEQ ID NO: 1254459 - RNA, 23 nt, Human
uggccuccccugccaccaggcca

SEQ ID NO: 1254460 - RNA, 13 nt, Human
uggcgaugccagc

SEQ ID NO: 1254461 - RNA, 14 nt, Human
uggcgaugccagcc

SEQ ID NO: 1254462 - RNA, 19 nt, Human
uggcgaugccagccaagcu

SEQ ID NO: 1254463 - RNA, 16 nt, Human
uggcgaugccagccaa

SEQ ID NO: 1254464 - RNA, 19 nt, Human
uggccucagcucccacaag

SEQ ID NO: 1254465 - RNA, 13 nt, Human
uggccucaugugg

SEQ ID NO: 1254466 - RNA, 15 nt, Human
uggccucauguggcu

SEQ ID NO: 1254467 - RNA, 17 nt, Human
uggccucauguggcugg

SEQ ID NO: 1254468 - RNA, 18 nt, Human
uggccucauguggcugga

SEQ ID NO: 1254469 - RNA, 19 nt, Human
uggccucauguggcuggaa

SEQ ID NO: 1254470 - RNA, 20 nt, Human
uggccucauguggcuggaag

SEQ ID NO: 1254471 - RNA, 21 nt, Human
uggccucauguggcuggaaga

SEQ ID NO: 1254472 - RNA, 15 nt, Human
uggccucccccacuu

SEQ ID NO: 1254473 - RNA, 14 nt, Human
uggccuccccugcc

SEQ ID NO: 1254474 - RNA, 15 nt, Human
uggccuccccugcca

SEQ ID NO: 1254475 - RNA, 17 nt, Human
uggccuccccugccacc

SEQ ID NO: 1254476 - RNA, 12 nt, Human
uggcagaggagg

SEQ ID NO: 1254477 - RNA, 12 nt, Human
uggcagaguuac

SEQ ID NO: 1254478 - RNA, 17 nt, Human
uggcagaguuacaguuc

SEQ ID NO: 1254479 - RNA, 13 nt, Human
uggcagagaugcc

SEQ ID NO: 1254480 - RNA, 17 nt, Human
uggcagagaugccuccc

SEQ ID NO: 1254481 - RNA, 19 nt, Human
uggcagagaugccucccug

SEQ ID NO: 1254482 - RNA, 18 nt, Human
uggcagagaugccucccu

SEQ ID NO: 1254483 - RNA, 19 nt, Human
uggcagaguuacaguucug

SEQ ID NO: 1254484 - RNA, 20 nt, Human
uggcagaguuacaguucugu

SEQ ID NO: 1254485 - RNA, 12 nt, Human
uggccagccccu

SEQ ID NO: 1254486 - RNA, 16 nt, Human
uggccagccccuuaga

SEQ ID NO: 1254487 - RNA, 20 nt, Human
uggccagccccuuagacaga

SEQ ID NO: 1254488 - RNA, 21 nt, Human
uggccagccccuuagacagag

SEQ ID NO: 1254489 - RNA, 22 nt, Human
uggccagccccuuagacagagg

SEQ ID NO: 1254490 - RNA, 16 nt, Human
uggccaggcugcucuu

SEQ ID NO: 1254491 - RNA, 17 nt, Human
uggccaggcugcucuug

SEQ ID NO: 1254492 - RNA, 23 nt, Human
uggccagcgagcgcccagcuccu

SEQ ID NO: 1254493 - RNA, 21 nt, Human
uggccagcuggaggcaggggc

SEQ ID NO: 1254494 - RNA, 21 nt, Human
uggccaggaagcuuuggugag

SEQ ID NO: 1254495 - RNA, 13 nt, Human
uggccaggaagcu

SEQ ID NO: 1254496 - RNA, 17 nt, Human
uggcccagggcccagag

SEQ ID NO: 1254497 - RNA, 20 nt, Human
uggccaggcugcucuugaac

SEQ ID NO: 1254498 - RNA, 18 nt, Human
uggcccagggcccagagc

SEQ ID NO: 1254499 - RNA, 20 nt, Human
uggcccagggcccagagccc

SEQ ID NO: 1254500 - RNA, 21 nt, Human
uggcccagggcccagagccca

SEQ ID NO: 1254501 - RNA, 22 nt, Human
uggcccagggcccagagcccag

SEQ ID NO: 1254502 - RNA, 23 nt, Human
uggcccagggcccagagcccagc

SEQ ID NO: 1254503 - RNA, 12 nt, Human
uggcccaucagg

SEQ ID NO: 1254504 - RNA, 22 nt, Human
uggcccaucaggguaggcugga

SEQ ID NO: 1254505 - RNA, 21 nt, Human
uggccccccugguccccuccu

SEQ ID NO: 1254506 - RNA, 15 nt, Human
uggccccccuggucc

SEQ ID NO: 1254507 - RNA, 11 nt, Human
uggcccccucc

SEQ ID NO: 1254508 - RNA, 15 nt, Human
uggccccguuucugg

SEQ ID NO: 1254509 - RNA, 16 nt, Human
uggccccguuucuggu

SEQ ID NO: 1254510 - RNA, 21 nt, Human
uggccccucaaaucguccagc

SEQ ID NO: 1254511 - RNA, 19 nt, Human
uggccuauguggucuaagg

SEQ ID NO: 1254512 - RNA, 16 nt, Human
uggccuauguggucua

SEQ ID NO: 1254513 - RNA, 15 nt, Human
uggccucaaagcaag

SEQ ID NO: 1254514 - RNA, 13 nt, Human
ugcgcucagggcc

SEQ ID NO: 1254515 - RNA, 14 nt, Human
ugcgcucagggcca

SEQ ID NO: 1254516 - RNA, 15 nt, Human
ugcgcucagggccau

SEQ ID NO: 1254517 - RNA, 19 nt, Human
ugcgcucagggccaugcug

SEQ ID NO: 1254518 - RNA, 21 nt, Human
ugcgcucagggccaugcugag

SEQ ID NO: 1254519 - RNA, 22 nt, Human
ugcgcucagggccaugcugagg

SEQ ID NO: 1254520 - RNA, 23 nt, Human
ugcgcucagggccaugcugaggc

SEQ ID NO: 1254521 - RNA, 13 nt, Human
ugcgcuccuggcc

SEQ ID NO: 1254522 - RNA, 14 nt, Human
ugcgcuccuggccc

SEQ ID NO: 1254523 - RNA, 17 nt, Human
ugcgcuccuggcccagc

SEQ ID NO: 1254524 - RNA, 20 nt, Human
ugcgcuccuggcccagccuu

SEQ ID NO: 1254525 - RNA, 18 nt, Human
ugcgcuccuggcccagcc

SEQ ID NO: 1254526 - RNA, 17 nt, Human
ugcgccaccgcccagag

SEQ ID NO: 1254527 - RNA, 20 nt, Human
ugccuugcauaauggucaga

SEQ ID NO: 1254528 - RNA, 23 nt, Human
ugccucuaccugacacucccuug

SEQ ID NO: 1254529 - RNA, 16 nt, Human
ugccucuacugggaag

SEQ ID NO: 1254530 - RNA, 23 nt, Human
ugccucuacugggaaggcuacuu

SEQ ID NO: 1254531 - RNA, 19 nt, Human
ugccucuacugggaaggcu

SEQ ID NO: 1254532 - RNA, 15 nt, Human
ugccucuaccugaca

SEQ ID NO: 1254533 - RNA, 17 nt, Human
ugccucuaccugacacu

SEQ ID NO: 1254534 - RNA, 21 nt, Human
ugcgcaggcuggcccugcccu

SEQ ID NO: 1254535 - RNA, 22 nt, Human
ugcgcaggcuggcccugcccug

SEQ ID NO: 1254536 - RNA, 23 nt, Human
ugcgcaggcuggcccugcccugg

SEQ ID NO: 1254537 - RNA, 17 nt, Human
ugccuuggccucccaag

SEQ ID NO: 1254538 - RNA, 22 nt, Human
ugcguguuuggguuuuuuuccu

SEQ ID NO: 1254539 - RNA, 19 nt, Human
ugcuaacaugaagaccuuu

SEQ ID NO: 1254540 - RNA, 17 nt, Human
ugcuaacaugaagaccu

SEQ ID NO: 1254541 - RNA, 18 nt, Human
ugcuaacggugcucaggg

SEQ ID NO: 1254542 - RNA, 19 nt, Human
ugcuaacggugcucagggg

SEQ ID NO: 1254543 - RNA, 13 nt, Human
ugcuaaaaccuga

SEQ ID NO: 1254544 - RNA, 17 nt, Human
ugcuaaaaccugaaauu

SEQ ID NO: 1254545 - RNA, 14 nt, Human
ugcuaaaauaacag

SEQ ID NO: 1254546 - RNA, 22 nt, Human
ugcuacuggggaaacuggccau

SEQ ID NO: 1254547 - RNA, 19 nt, Human
ugcuacuggggaaacuggc

SEQ ID NO: 1254548 - RNA, 16 nt, Human
ugcuacuuauauaauu

SEQ ID NO: 1254549 - RNA, 15 nt, Human
ugcuagaacaugguu

SEQ ID NO: 1254550 - RNA, 22 nt, Human
ugcuaagacucaguggggaggg

SEQ ID NO: 1254551 - RNA, 13 nt, Human
ugcuacuggggaa

SEQ ID NO: 1254552 - RNA, 18 nt, Human
ugcuacuggggaaacugg

SEQ ID NO: 1254553 - RNA, 20 nt, Human
ugcucaggagcccugggagg

SEQ ID NO: 1254554 - RNA, 19 nt, Human
ugcucaggagcccugggag

SEQ ID NO: 1254555 - RNA, 18 nt, Human
ugcucaggagcccuggga

SEQ ID NO: 1254556 - RNA, 14 nt, Human
ugcucacccagugc

SEQ ID NO: 1254557 - RNA, 19 nt, Human
ugcucacccagugcccucu

SEQ ID NO: 1254558 - RNA, 17 nt, Human
ugcucacgucaaaugca

SEQ ID NO: 1254559 - RNA, 13 nt, Human
ugcucagacagaa

SEQ ID NO: 1254560 - RNA, 18 nt, Human
ugcuagaacucccuuuca

SEQ ID NO: 1254561 - RNA, 12 nt, Human
ugcuaggaagag

SEQ ID NO: 1254562 - RNA, 18 nt, Human
ugcuaggaagaggagugg

SEQ ID NO: 1254563 - RNA, 14 nt, Human
ugcuaggccagagc

SEQ ID NO: 1254564 - RNA, 17 nt, Human
ugcuaggccagagccca

SEQ ID NO: 1254565 - RNA, 19 nt, Human
ugcuaggccagagcccacu

SEQ ID NO: 1254566 - RNA, 18 nt, Human
ugcuaggccagagcccac

SEQ ID NO: 1254567 - RNA, 17 nt, Human
ugcuagaacucccuuuc

SEQ ID NO: 1254568 - RNA, 15 nt, Human
ugcuagaacucccuu

SEQ ID NO: 1254569 - RNA, 14 nt, Human
ugcuagaacucccu

SEQ ID NO: 1254570 - RNA, 13 nt, Human
ugcuagaacuccc

SEQ ID NO: 1254571 - RNA, 13 nt, Human
ugcucuccuccac

SEQ ID NO: 1254572 - RNA, 10 nt, Human
ugcucuccuc

SEQ ID NO: 1254573 - RNA, 12 nt, Human
ugcucuccucuu

SEQ ID NO: 1254574 - RNA, 11 nt, Human
ugcucuccucu

SEQ ID NO: 1254575 - RNA, 13 nt, Human
ugcucuccucuuc

SEQ ID NO: 1254576 - RNA, 14 nt, Human
ugcucuccucuucu

SEQ ID NO: 1254577 - RNA, 15 nt, Human
ugcucuccucuucua

SEQ ID NO: 1254578 - RNA, 14 nt, Human
ugcucuccucuugc

SEQ ID NO: 1254579 - RNA, 14 nt, Human
ugcucuuggcugga

SEQ ID NO: 1254580 - RNA, 15 nt, Human
ugcucuuggcuggac

SEQ ID NO: 1254581 - RNA, 19 nt, Human
ugcucuuggcuggacccag

SEQ ID NO: 1254582 - RNA, 20 nt, Human
ugcucuuggcuggacccagc

SEQ ID NO: 1254583 - RNA, 21 nt, Human
ugcucuuggcuggacccagcc

SEQ ID NO: 1254584 - RNA, 24 nt, Human
ugcucauauuucccaugauuucau

SEQ ID NO: 1254585 - RNA, 15 nt, Human
ugcucggggugcaca

SEQ ID NO: 1254586 - RNA, 16 nt, Human
ugcucggggugcacag

SEQ ID NO: 1254587 - RNA, 17 nt, Human
ugcucggggugcacagg

SEQ ID NO: 1254588 - RNA, 18 nt, Human
ugcucggggugcacagga

SEQ ID NO: 1254589 - RNA, 19 nt, Human
ugcucggggugcacaggag

SEQ ID NO: 1254590 - RNA, 20 nt, Human
ugcucggggugcacaggagg

SEQ ID NO: 1254591 - RNA, 22 nt, Human
ugcucggggugcacaggagggg

SEQ ID NO: 1254592 - RNA, 21 nt, Human
ugcucggggugcacaggaggg

SEQ ID NO: 1254593 - RNA, 15 nt, Human
ugcucuaacagcccu

SEQ ID NO: 1254594 - RNA, 16 nt, Human
ugcucuaacagcccuc

SEQ ID NO: 1254595 - RNA, 22 nt, Human
ugcucauauuucccaugauuuc

SEQ ID NO: 1254596 - RNA, 15 nt, Human
ugcucauauuuccca

SEQ ID NO: 1254597 - RNA, 14 nt, Human
ugcucauauuuccc

SEQ ID NO: 1254598 - RNA, 22 nt, Human
ugcucauauugugauucugccu

SEQ ID NO: 1254599 - RNA, 23 nt, Human
ugcucauauugugauucugccuu

SEQ ID NO: 1254600 - RNA, 21 nt, Human
ugcucauauugugauucugcc

SEQ ID NO: 1254601 - RNA, 16 nt, Human
ugcuguucaugaaaga

SEQ ID NO: 1254602 - RNA, 17 nt, Human
ugcuguucaugaaagau

SEQ ID NO: 1254603 - RNA, 22 nt, Human
ugcuguucucuugggaacugaa

SEQ ID NO: 1254604 - RNA, 15 nt, Human
ugcuguuauauuuca

SEQ ID NO: 1254605 - RNA, 18 nt, Human
ugcuguuauauuucauca

SEQ ID NO: 1254606 - RNA, 15 nt, Human
ugcugugugcuuuuu

SEQ ID NO: 1254607 - RNA, 17 nt, Human
ugcuguggugugucccc

SEQ ID NO: 1254608 - RNA, 23 nt, Human
ugcuguggugugucccccucugu

SEQ ID NO: 1254609 - RNA, 12 nt, Human
ugcuguguaaaa

SEQ ID NO: 1254610 - RNA, 21 nt, Human
ugcugugugcuuuuuuugugu

SEQ ID NO: 1254611 - RNA, 13 nt, Human
ugcugguuuuagu

SEQ ID NO: 1254612 - RNA, 13 nt, Human
ugcugguuuguag

SEQ ID NO: 1254613 - RNA, 22 nt, Human
ugcugguuuguaguugaauauu

SEQ ID NO: 1254614 - RNA, 15 nt, Human
ugcuguggugugucc

SEQ ID NO: 1254615 - RNA, 16 nt, Human
ugcugugguguguccc

SEQ ID NO: 1254616 - RNA, 20 nt, Human
ugcuguaaagaguugcuuuu

SEQ ID NO: 1254617 - RNA, 18 nt, Human
ugcuggugagccaagcag

SEQ ID NO: 1254618 - RNA, 19 nt, Human
ugcuggucccggggccagc

SEQ ID NO: 1254619 - RNA, 13 nt, Human
ugcugguccgugg

SEQ ID NO: 1254620 - RNA, 16 nt, Human
ugcugguccgugggac

SEQ ID NO: 1254621 - RNA, 22 nt, Human
ugcuggguccauaucacacaca

SEQ ID NO: 1254622 - RNA, 16 nt, Human
ugcugggauuuccaac

SEQ ID NO: 1254623 - RNA, 12 nt, Human
ugcugggcucag

SEQ ID NO: 1254624 - RNA, 13 nt, Human
ugcugggcucagu

SEQ ID NO: 1254625 - RNA, 14 nt, Human
ugcugggcucagug

SEQ ID NO: 1254626 - RNA, 15 nt, Human
ugcugggcucaguga

SEQ ID NO: 1254627 - RNA, 17 nt, Human
ugcugggcucagugaag

SEQ ID NO: 1254628 - RNA, 20 nt, Human
ugcugggggggauuguaaaa

SEQ ID NO: 1254629 - RNA, 18 nt, Human
ugcuggggccugguuccc

SEQ ID NO: 1254630 - RNA, 23 nt, Human
ugcuggggccugggacaacugcu

SEQ ID NO: 1254631 - RNA, 16 nt, Human
ugcuggggaagacagu

SEQ ID NO: 1254632 - RNA, 17 nt, Human
ugcuggggaagacagug

SEQ ID NO: 1254633 - RNA, 22 nt, Human
ugcuggggaagacaguggcccc

SEQ ID NO: 1254634 - RNA, 14 nt, Human
ugcuggggccuggg

SEQ ID NO: 1254635 - RNA, 17 nt, Human
ugcuggggccugggaca

SEQ ID NO: 1254636 - RNA, 17 nt, Human
ugcugccugcuuuuuau

SEQ ID NO: 1254637 - RNA, 15 nt, Human
ugcugccugcuuuuu

SEQ ID NO: 1254638 - RNA, 15 nt, Human
ugcucuuucucugcc

SEQ ID NO: 1254639 - RNA, 16 nt, Human
ugcugccucccucugc

SEQ ID NO: 1254640 - RNA, 18 nt, Human
ugcugccuuauucaggga

SEQ ID NO: 1254641 - RNA, 19 nt, Human
ugcugccuuauucagggaa

SEQ ID NO: 1254642 - RNA, 20 nt, Human
ugcugccuuauucagggaag

SEQ ID NO: 1254643 - RNA, 13 nt, Human
ugcugcucccuca

SEQ ID NO: 1254644 - RNA, 14 nt, Human
ugcugcucccucag

SEQ ID NO: 1254645 - RNA, 15 nt, Human
ugcugcucccucaga

SEQ ID NO: 1254646 - RNA, 17 nt, Human
ugcugcucccucagacu

SEQ ID NO: 1254647 - RNA, 16 nt, Human
ugcugcucccucagac

SEQ ID NO: 1254648 - RNA, 17 nt, Human
ugcugcucuuggcugga

SEQ ID NO: 1254649 - RNA, 18 nt, Human
ugcugcucuuggcuggac

SEQ ID NO: 1254650 - RNA, 19 nt, Human
ugcugcucuuggcuggacc

SEQ ID NO: 1254651 - RNA, 21 nt, Human
ugcugcucuuggcuggaccca

SEQ ID NO: 1254652 - RNA, 23 nt, Human
ugcugcucuuggcuggacccagc

SEQ ID NO: 1254653 - RNA, 11 nt, Human
ugcugcugaga

SEQ ID NO: 1254654 - RNA, 13 nt, Human
ugcugcugagaac

SEQ ID NO: 1254655 - RNA, 15 nt, Human
ugcugcugagaaccu

SEQ ID NO: 1254656 - RNA, 16 nt, Human
ugcugcugagaaccug

SEQ ID NO: 1254657 - RNA, 17 nt, Human
ugcugcugagaaccugg

SEQ ID NO: 1254658 - RNA, 18 nt, Human
ugcugcugagaaccuggc

SEQ ID NO: 1254659 - RNA, 12 nt, Human
ugcucuuucucu

SEQ ID NO: 1254660 - RNA, 13 nt, Human
ugcucuuucucug

SEQ ID NO: 1254661 - RNA, 14 nt, Human
ugcucuuucucugc

SEQ ID NO: 1254662 - RNA, 24 nt, Human
ugcugggccccugccucucugcag

SEQ ID NO: 1254663 - RNA, 23 nt, Human
ugcugggccccugccucucugca

SEQ ID NO: 1254664 - RNA, 22 nt, Human
ugcugggccccugccucucugc

SEQ ID NO: 1254665 - RNA, 21 nt, Human
ugcugggccccugccucucug

SEQ ID NO: 1254666 - RNA, 19 nt, Human
ugcugggccccugccucuc

SEQ ID NO: 1254667 - RNA, 18 nt, Human
ugcugggccccugccucu

SEQ ID NO: 1254668 - RNA, 17 nt, Human
ugcugggccccugccuc

SEQ ID NO: 1254669 - RNA, 16 nt, Human
ugcugggccccugccu

SEQ ID NO: 1254670 - RNA, 14 nt, Human
ugcugggccccugc

SEQ ID NO: 1254671 - RNA, 15 nt, Human
ugcugcuucucccag

SEQ ID NO: 1254672 - RNA, 18 nt, Human
ugcugcuucucccaggca

SEQ ID NO: 1254673 - RNA, 19 nt, Human
ugcugcuucucccaggcaa

SEQ ID NO: 1254674 - RNA, 20 nt, Human
ugcugcuucucccaggcaag

SEQ ID NO: 1254675 - RNA, 23 nt, Human
ugcugcuucucccaggcaaggcu

SEQ ID NO: 1254676 - RNA, 14 nt, Human
ugcugggauuucca

SEQ ID NO: 1254677 - RNA, 20 nt, Human
ugcugggauuacagguguga

SEQ ID NO: 1254678 - RNA, 14 nt, Human
ugcugcugccugcc

SEQ ID NO: 1254679 - RNA, 13 nt, Human
ugcugcugccugc

SEQ ID NO: 1254680 - RNA, 21 nt, Human
ugcugcugagaaccuggccuu

SEQ ID NO: 1254681 - RNA, 19 nt, Human
ugcugcugagaaccuggcc

SEQ ID NO: 1254682 - RNA, 20 nt, Human
ugcugcugagaaccuggccu

SEQ ID NO: 1254683 - RNA, 22 nt, Human
ugcugcugagaaccuggccuuc

SEQ ID NO: 1254684 - RNA, 14 nt, Human
ugcugcuucaauuu

SEQ ID NO: 1254685 - RNA, 13 nt, Human
ugcugcuucaauu

SEQ ID NO: 1254686 - RNA, 23 nt, Human
ugcccugguuuccugcccuggga

SEQ ID NO: 1254687 - RNA, 19 nt, Human
ugcccugguuuccugcccu

SEQ ID NO: 1254688 - RNA, 20 nt, Human
ugcccugguuuccugcccug

SEQ ID NO: 1254689 - RNA, 12 nt, Human
ugcccuggugcu

SEQ ID NO: 1254690 - RNA, 14 nt, Human
ugcccuggugcugc

SEQ ID NO: 1254691 - RNA, 16 nt, Human
ugcccuggugcugcca

SEQ ID NO: 1254692 - RNA, 17 nt, Human
ugcccuggugcugccac

SEQ ID NO: 1254693 - RNA, 17 nt, Human
ugcccugguuuccugcc

SEQ ID NO: 1254694 - RNA, 18 nt, Human
ugcccugguuuccugccc

SEQ ID NO: 1254695 - RNA, 13 nt, Human
ugcccugggaggc

SEQ ID NO: 1254696 - RNA, 15 nt, Human
ugcccugggaggcag

SEQ ID NO: 1254697 - RNA, 17 nt, Human
ugcccugggaggcagug

SEQ ID NO: 1254698 - RNA, 18 nt, Human
ugcccugggaggcaguga

SEQ ID NO: 1254699 - RNA, 20 nt, Human
ugcccggcuaauuuuuguaa

SEQ ID NO: 1254700 - RNA, 11 nt, Human
ugccuccuccc

SEQ ID NO: 1254701 - RNA, 12 nt, Human
ugccuccucccu

SEQ ID NO: 1254702 - RNA, 13 nt, Human
ugccuccucccuc

SEQ ID NO: 1254703 - RNA, 19 nt, Human
ugccuccucccucccucuc

SEQ ID NO: 1254704 - RNA, 13 nt, Human
ugccucaaugcca

SEQ ID NO: 1254705 - RNA, 15 nt, Human
ugccucaaugccagu

SEQ ID NO: 1254706 - RNA, 16 nt, Human
ugccucaaugccagua

SEQ ID NO: 1254707 - RNA, 14 nt, Human
ugccuccucuucaa

SEQ ID NO: 1254708 - RNA, 16 nt, Human
ugccuccucuucaacu

SEQ ID NO: 1254709 - RNA, 15 nt, Human
ugccuccucccuccc

SEQ ID NO: 1254710 - RNA, 14 nt, Human
ugccuccugccggc

SEQ ID NO: 1254711 - RNA, 21 nt, Human
ugccuccugccggcuccuugg

SEQ ID NO: 1254712 - RNA, 20 nt, Human
ugccuccugccggcuccuug

SEQ ID NO: 1254713 - RNA, 21 nt, Human
ugccucgcuccccacucugcu

SEQ ID NO: 1254714 - RNA, 20 nt, Human
ugccucggccucccaaagug

SEQ ID NO: 1254715 - RNA, 21 nt, Human
ugccuaguauugacaaaaugu

SEQ ID NO: 1254716 - RNA, 22 nt, Human
ugccuaguauugacaaaauguu

SEQ ID NO: 1254717 - RNA, 18 nt, Human
ugccuaguauugacaaaa

SEQ ID NO: 1254718 - RNA, 17 nt, Human
ugccuaguauugacaaa

SEQ ID NO: 1254719 - RNA, 16 nt, Human
ugccuaguauugacaa

SEQ ID NO: 1254720 - RNA, 21 nt, Human
ugccuauuaucugucagcugc

SEQ ID NO: 1254721 - RNA, 17 nt, Human
ugccuauugcuagagcu

SEQ ID NO: 1254722 - RNA, 18 nt, Human
ugccuauugcuagagcuc

SEQ ID NO: 1254723 - RNA, 20 nt, Human
ugccuauugcuagagcuccu

SEQ ID NO: 1254724 - RNA, 12 nt, Human
ugccucaaauaa

SEQ ID NO: 1254725 - RNA, 21 nt, Human
ugccucaaauaaaaagugcuu

SEQ ID NO: 1254726 - RNA, 22 nt, Human
ugccucaaauaaaaagugcuuu

SEQ ID NO: 1254727 - RNA, 14 nt, Human
ugccucaaccuccc

SEQ ID NO: 1254728 - RNA, 19 nt, Human
ugccaggcuggagugcagu

SEQ ID NO: 1254729 - RNA, 10 nt, Human
ugcccagaca

SEQ ID NO: 1254730 - RNA, 14 nt, Human
ugccaggcucucuu

SEQ ID NO: 1254731 - RNA, 15 nt, Human
ugcccagagacccag

SEQ ID NO: 1254732 - RNA, 16 nt, Human
ugcccagagacccagc

SEQ ID NO: 1254733 - RNA, 17 nt, Human
ugcccagagacccagcg

SEQ ID NO: 1254734 - RNA, 18 nt, Human
ugcccagagacccagcgg

SEQ ID NO: 1254735 - RNA, 17 nt, Human
ugccaggcuggagugca

SEQ ID NO: 1254736 - RNA, 16 nt, Human
ugccaggcuaauuuuu

SEQ ID NO: 1254737 - RNA, 12 nt, Human
ugccaggcucuc

SEQ ID NO: 1254738 - RNA, 17 nt, Human
ugccaggcuaauuuuuu

SEQ ID NO: 1254739 - RNA, 23 nt, Human
ugcccagagacccagcggacaca

SEQ ID NO: 1254740 - RNA, 20 nt, Human
ugcccagagacccagcggac

SEQ ID NO: 1254741 - RNA, 13 nt, Human
ugcccauguuuca

SEQ ID NO: 1254742 - RNA, 15 nt, Human
ugcccauguuucaaa

SEQ ID NO: 1254743 - RNA, 14 nt, Human
ugcccauuuugaau

SEQ ID NO: 1254744 - RNA, 16 nt, Human
ugccccaacuccuucc

SEQ ID NO: 1254745 - RNA, 18 nt, Human
ugccccaacuccuuccag

SEQ ID NO: 1254746 - RNA, 19 nt, Human
ugccccaacuccuuccagc

SEQ ID NO: 1254747 - RNA, 22 nt, Human
ugccccaacuccuuccagcuag

SEQ ID NO: 1254748 - RNA, 20 nt, Human
ugccccaacuccuuccagcu

SEQ ID NO: 1254749 - RNA, 14 nt, Human
ugccccacuugucc

SEQ ID NO: 1254750 - RNA, 18 nt, Human
ugccccacuuguccuuag

SEQ ID NO: 1254751 - RNA, 19 nt, Human
ugccccacuuguccuuagc

SEQ ID NO: 1254752 - RNA, 15 nt, Human
ugccccucuccuucu

SEQ ID NO: 1254753 - RNA, 20 nt, Human
ugccccucuccuucuuagcu

SEQ ID NO: 1254754 - RNA, 19 nt, Human
ugccccuccucucugcccu

SEQ ID NO: 1254755 - RNA, 20 nt, Human
ugccccuccucucugcccua

SEQ ID NO: 1254756 - RNA, 12 nt, Human
ugccccucucac

SEQ ID NO: 1254757 - RNA, 14 nt, Human
ugccccucucacca

SEQ ID NO: 1254758 - RNA, 15 nt, Human
ugccccucucaccaa

SEQ ID NO: 1254759 - RNA, 15 nt, Human
ugccccucccuucaa

SEQ ID NO: 1254760 - RNA, 16 nt, Human
ugccccucccuucaac

SEQ ID NO: 1254761 - RNA, 17 nt, Human
ugccccuccucucugcc

SEQ ID NO: 1254762 - RNA, 18 nt, Human
ugccccuccucucugccc

SEQ ID NO: 1254763 - RNA, 21 nt, Human
ugccccuugacaacuggcagg

SEQ ID NO: 1254764 - RNA, 20 nt, Human
ugccccuuggacacgcucag

SEQ ID NO: 1254765 - RNA, 19 nt, Human
ugccccuuuauaaauccaa

SEQ ID NO: 1254766 - RNA, 14 nt, Human
ugccccuuucugga

SEQ ID NO: 1254767 - RNA, 11 nt, Human
ugccccuuucu

SEQ ID NO: 1254768 - RNA, 20 nt, Human
ugcccgccugggucuccuaa

SEQ ID NO: 1254769 - RNA, 13 nt, Human
ugccaccugucug

SEQ ID NO: 1254770 - RNA, 12 nt, Human
ugccaccugucu

SEQ ID NO: 1254771 - RNA, 11 nt, Human
ugccaccuguc

SEQ ID NO: 1254772 - RNA, 10 nt, Human
ugccaccugu

SEQ ID NO: 1254773 - RNA, 14 nt, Human
ugccaccuggaccc

SEQ ID NO: 1254774 - RNA, 15 nt, Human
ugccaccuggacccc

SEQ ID NO: 1254775 - RNA, 18 nt, Human
ugccaccuggaccccugc

SEQ ID NO: 1254776 - RNA, 19 nt, Human
ugccaccuggaccccugca

SEQ ID NO: 1254777 - RNA, 20 nt, Human
ugccaccuggaccccugcau

SEQ ID NO: 1254778 - RNA, 14 nt, Human
ugccaccuccugcc

SEQ ID NO: 1254779 - RNA, 18 nt, Human
ugccaccucuaacagcac

SEQ ID NO: 1254780 - RNA, 20 nt, Human
ugccaccucuaacagcacca

SEQ ID NO: 1254781 - RNA, 19 nt, Human
ugccaccucuaacagcacc

SEQ ID NO: 1254782 - RNA, 13 nt, Human
ugccaccuggacc

SEQ ID NO: 1254783 - RNA, 22 nt, Human
ugccaaauuauucuccuauguu

SEQ ID NO: 1254784 - RNA, 22 nt, Human
ugccaaauuaaaaaagauaaac

SEQ ID NO: 1254785 - RNA, 12 nt, Human
ugccaaccuaaa

SEQ ID NO: 1254786 - RNA, 16 nt, Human
ugccaaccuaaaacuc

SEQ ID NO: 1254787 - RNA, 18 nt, Human
ugccaaccuaaaacucuu

SEQ ID NO: 1254788 - RNA, 15 nt, Human
ugccaccucccccca

SEQ ID NO: 1254789 - RNA, 17 nt, Human
ugccaccuccccccaca

SEQ ID NO: 1254790 - RNA, 16 nt, Human
ugccaccugucugucu

SEQ ID NO: 1254791 - RNA, 15 nt, Human
ugccaccugucuguc

SEQ ID NO: 1254792 - RNA, 14 nt, Human
ugccaccugucugu

SEQ ID NO: 1254793 - RNA, 16 nt, Human
ugccacuaaauugaca

SEQ ID NO: 1254794 - RNA, 19 nt, Human
ugccaggagcacggcucug

SEQ ID NO: 1254795 - RNA, 20 nt, Human
ugccaggagcacggcucugu

SEQ ID NO: 1254796 - RNA, 13 nt, Human
ugccaggaggacc

SEQ ID NO: 1254797 - RNA, 17 nt, Human
ugccaggaggacccagg

SEQ ID NO: 1254798 - RNA, 20 nt, Human
ugccaggaggacccagggcu

SEQ ID NO: 1254799 - RNA, 20 nt, Human
ugccacuaaauugacacuua

SEQ ID NO: 1254800 - RNA, 22 nt, Human
ugccacguuggagaagcccgug

SEQ ID NO: 1254801 - RNA, 20 nt, Human
ugccaggaccagucaaccug

SEQ ID NO: 1254802 - RNA, 15 nt, Human
ugccaggagcacggc

SEQ ID NO: 1254803 - RNA, 16 nt, Human
ugcauuugauacauuu

SEQ ID NO: 1254804 - RNA, 20 nt, Human
ugcauuuggagggagugagu

SEQ ID NO: 1254805 - RNA, 17 nt, Human
ugcaugguuuagaaagc

SEQ ID NO: 1254806 - RNA, 21 nt, Human
ugcauggugccccaggaccag

SEQ ID NO: 1254807 - RNA, 22 nt, Human
ugcauggugccccaggaccagc

SEQ ID NO: 1254808 - RNA, 17 nt, Human
ugcauggugccccagga

SEQ ID NO: 1254809 - RNA, 18 nt, Human
ugcauggugccccaggac

SEQ ID NO: 1254810 - RNA, 19 nt, Human
ugcauggugccccaggacc

SEQ ID NO: 1254811 - RNA, 20 nt, Human
ugcauggugccccaggacca

SEQ ID NO: 1254812 - RNA, 17 nt, Human
ugcaucagaaagggagg

SEQ ID NO: 1254813 - RNA, 18 nt, Human
ugcaucagaaagggaggg

SEQ ID NO: 1254814 - RNA, 20 nt, Human
ugcaucagaaagggagggcu

SEQ ID NO: 1254815 - RNA, 21 nt, Human
ugcaucagaaagggagggcuc

SEQ ID NO: 1254816 - RNA, 22 nt, Human
ugcaucagaaagggagggcucu

SEQ ID NO: 1254817 - RNA, 23 nt, Human
ugcaucagaaagggagggcucug

SEQ ID NO: 1254818 - RNA, 14 nt, Human
ugcauuugggucca

SEQ ID NO: 1254819 - RNA, 16 nt, Human
ugcauuuggguccagg

SEQ ID NO: 1254820 - RNA, 17 nt, Human
ugcauuuggguccagga

SEQ ID NO: 1254821 - RNA, 18 nt, Human
ugcauuuggguccaggag

SEQ ID NO: 1254822 - RNA, 20 nt, Human
ugcauuuggguccaggagga

SEQ ID NO: 1254823 - RNA, 19 nt, Human
ugcauuuggguccaggagg

SEQ ID NO: 1254824 - RNA, 17 nt, Human
ugccaaacaaaaagguu

SEQ ID NO: 1254825 - RNA, 23 nt, Human
ugccaaacaaaaagguucucagg

SEQ ID NO: 1254826 - RNA, 15 nt, Human
ugccaaaggauguga

SEQ ID NO: 1254827 - RNA, 16 nt, Human
ugccaaaggaugugau

SEQ ID NO: 1254828 - RNA, 17 nt, Human
ugccaaaggaugugaua

SEQ ID NO: 1254829 - RNA, 19 nt, Human
ugccaaaggaugugauaua

SEQ ID NO: 1254830 - RNA, 17 nt, Human
ugccaaauauguccugg

SEQ ID NO: 1254831 - RNA, 18 nt, Human
ugccaaauauguccuggg

SEQ ID NO: 1254832 - RNA, 13 nt, Human
ugccaaauuaaaa

SEQ ID NO: 1254833 - RNA, 17 nt, Human
ugccaaauuaaaaaaga

SEQ ID NO: 1254834 - RNA, 18 nt, Human
ugccaaauuaaaaaagau

SEQ ID NO: 1254835 - RNA, 19 nt, Human
ugccaaauuaaaaaagaua

SEQ ID NO: 1254836 - RNA, 18 nt, Human
ugcauauuauuuuauguu

SEQ ID NO: 1254837 - RNA, 19 nt, Human
ugcauauguugaauacuuu

SEQ ID NO: 1254838 - RNA, 22 nt, Human
ugcauaguaccaaucauuuuaa

SEQ ID NO: 1254839 - RNA, 12 nt, Human
ugcaguucugaa

SEQ ID NO: 1254840 - RNA, 14 nt, Human
ugcaguucugaaga

SEQ ID NO: 1254841 - RNA, 13 nt, Human
ugcaguugucucu

SEQ ID NO: 1254842 - RNA, 14 nt, Human
ugcaguugucucug

SEQ ID NO: 1254843 - RNA, 15 nt, Human
ugcaguugucucugu

SEQ ID NO: 1254844 - RNA, 17 nt, Human
ugcaguugucucuguuu

SEQ ID NO: 1254845 - RNA, 10 nt, Human
ugcaguuuau

SEQ ID NO: 1254846 - RNA, 12 nt, Human
ugcaguuuauca

SEQ ID NO: 1254847 - RNA, 16 nt, Human
ugcaguuuaucauuca

SEQ ID NO: 1254848 - RNA, 17 nt, Human
ugcaguuuaucauucaa

SEQ ID NO: 1254849 - RNA, 20 nt, Human
ugcauaggaguuuggaggaa

SEQ ID NO: 1254850 - RNA, 19 nt, Human
ugcaguuuaucauucaagu

SEQ ID NO: 1254851 - RNA, 20 nt, Human
ugcauaguaccaaucauuuu

SEQ ID NO: 1254852 - RNA, 21 nt, Human
ugcauaguaccaaucauuuua

SEQ ID NO: 1254853 - RNA, 14 nt, Human
ugcaguuauuugcu

SEQ ID NO: 1254854 - RNA, 21 nt, Human
ugcaguucccacauuaaagaa

SEQ ID NO: 1254855 - RNA, 21 nt, Human
ugcagggcagucauuggcugu

SEQ ID NO: 1254856 - RNA, 23 nt, Human
ugcagggagcugggcuuccagaa

SEQ ID NO: 1254857 - RNA, 14 nt, Human
ugcagggauguggg

SEQ ID NO: 1254858 - RNA, 15 nt, Human
ugcagggaugugggu

SEQ ID NO: 1254859 - RNA, 16 nt, Human
ugcagggauguggguu

SEQ ID NO: 1254860 - RNA, 18 nt, Human
ugcagggauguggguucc

SEQ ID NO: 1254861 - RNA, 22 nt, Human
ugcagggauguggguuccacag

SEQ ID NO: 1254862 - RNA, 23 nt, Human
ugcagggauguggguuccacaga

SEQ ID NO: 1254863 - RNA, 13 nt, Human
ugcagggcaguca

SEQ ID NO: 1254864 - RNA, 14 nt, Human
ugcagggcagucau

SEQ ID NO: 1254865 - RNA, 15 nt, Human
ugcagggaaaauuau

SEQ ID NO: 1254866 - RNA, 20 nt, Human
ugcagggaaaauuauuugca

SEQ ID NO: 1254867 - RNA, 21 nt, Human
ugcagggaaaauuauuugcau

SEQ ID NO: 1254868 - RNA, 22 nt, Human
ugcagggaaaauuauuugcaua

SEQ ID NO: 1254869 - RNA, 13 nt, Human
ugauuuaauguuu

SEQ ID NO: 1254870 - RNA, 16 nt, Human
ugauuuaauguuuuca

SEQ ID NO: 1254871 - RNA, 15 nt, Human
ugauuuaauuugaaa

SEQ ID NO: 1254872 - RNA, 23 nt, Human
ugacauaaguauuuaauucaugu

SEQ ID NO: 1254873 - RNA, 19 nt, Human
ugacagacaggcucuuagc

SEQ ID NO: 1254874 - RNA, 16 nt, Human
ugacagacagcccucc

SEQ ID NO: 1254875 - RNA, 14 nt, Human
ugacagacaggcuc

SEQ ID NO: 1254876 - RNA, 15 nt, Human
ugacagacaggcucu

SEQ ID NO: 1254877 - RNA, 12 nt, Human
ugacaagcucac

SEQ ID NO: 1254878 - RNA, 23 nt, Human
ugacaagaaaggcugcuguacug

SEQ ID NO: 1254879 - RNA, 22 nt, Human
ugacaagauuauaauauuuuaa

SEQ ID NO: 1254880 - RNA, 22 nt, Human
ugacaagaaaggcugcuguacu

SEQ ID NO: 1254881 - RNA, 19 nt, Human
ugacaacuucuaauugcca

SEQ ID NO: 1254882 - RNA, 22 nt, Human
ugacaacuucuaauugccaugu

SEQ ID NO: 1254883 - RNA, 18 nt, Human
ugaauuguaacuguucuu

SEQ ID NO: 1254884 - RNA, 14 nt, Human
ugacaacuucuaau

SEQ ID NO: 1254885 - RNA, 15 nt, Human
ugacaacuucuaauu

SEQ ID NO: 1254886 - RNA, 15 nt, Human
ugacaagcucacaga

SEQ ID NO: 1254887 - RNA, 20 nt, Human
ugacaagcucacagaccuuu

SEQ ID NO: 1254888 - RNA, 18 nt, Human
ugacaagcuccauuuaaa

SEQ ID NO: 1254889 - RNA, 21 nt, Human
ugacaagcuccauuuaaacag

SEQ ID NO: 1254890 - RNA, 17 nt, Human
ugacaauaaaacauuaa

SEQ ID NO: 1254891 - RNA, 13 nt, Human
ugacaaucaugug

SEQ ID NO: 1254892 - RNA, 15 nt, Human
ugacaaucaugugug

SEQ ID NO: 1254893 - RNA, 16 nt, Human
ugacaaucaugugugu

SEQ ID NO: 1254894 - RNA, 18 nt, Human
ugacaaucauguguguua

SEQ ID NO: 1254895 - RNA, 17 nt, Human
ugacaaucauguguguu

SEQ ID NO: 1254896 - RNA, 14 nt, Human
ugacaauugggagc

SEQ ID NO: 1254897 - RNA, 12 nt, Human
ugacacaaacac

SEQ ID NO: 1254898 - RNA, 17 nt, Human
ugacacaaacacacaca

SEQ ID NO: 1254899 - RNA, 13 nt, Human
ugacacaaacaca

SEQ ID NO: 1254900 - RNA, 22 nt, Human
ugacacuuuaauuaccaaccug

SEQ ID NO: 1254901 - RNA, 15 nt, Human
ugacauacccccucc

SEQ ID NO: 1254902 - RNA, 16 nt, Human
ugacauacccccuccc

SEQ ID NO: 1254903 - RNA, 20 nt, Human
ugacauacccccucccccac

SEQ ID NO: 1254904 - RNA, 17 nt, Human
ugacaugggacauuugc

SEQ ID NO: 1254905 - RNA, 18 nt, Human
ugacaugggacauuugcu

SEQ ID NO: 1254906 - RNA, 14 nt, Human
ugacauguccuucu

SEQ ID NO: 1254907 - RNA, 17 nt, Human
ugacauguccuucugag

SEQ ID NO: 1254908 - RNA, 15 nt, Human
ugaccacagcacagc

SEQ ID NO: 1254909 - RNA, 16 nt, Human
ugaccacagcacagcc

SEQ ID NO: 1254910 - RNA, 17 nt, Human
ugaccacagcacagcca

SEQ ID NO: 1254911 - RNA, 19 nt, Human
ugaccacagcacagccaac

SEQ ID NO: 1254912 - RNA, 20 nt, Human
ugaccacugcagaagacagu

SEQ ID NO: 1254913 - RNA, 14 nt, Human
ugaccacucagaga

SEQ ID NO: 1254914 - RNA, 16 nt, Human
ugaccacucagagaca

SEQ ID NO: 1254915 - RNA, 18 nt, Human
ugaccacucagagacaug

SEQ ID NO: 1254916 - RNA, 20 nt, Human
ugaccacucagagacaugca

SEQ ID NO: 1254917 - RNA, 15 nt, Human
ugaccacucugucuu

SEQ ID NO: 1254918 - RNA, 16 nt, Human
ugaccacucugucuug

SEQ ID NO: 1254919 - RNA, 23 nt, Human
ugaccacuuuuuagaaagauaau

SEQ ID NO: 1254920 - RNA, 12 nt, Human
ugaccagcuccc

SEQ ID NO: 1254921 - RNA, 13 nt, Human
ugaccagcucccc

SEQ ID NO: 1254922 - RNA, 16 nt, Human
ugaccagcucccccuc

SEQ ID NO: 1254923 - RNA, 17 nt, Human
ugaccagcucccccucc

SEQ ID NO: 1254924 - RNA, 18 nt, Human
ugaccagcucccccuccc

SEQ ID NO: 1254925 - RNA, 19 nt, Human
ugaccagcucccccucccu

SEQ ID NO: 1254926 - RNA, 20 nt, Human
ugaccagcucccccucccuc

SEQ ID NO: 1254927 - RNA, 22 nt, Human
ugaccagcucccccucccuccc

SEQ ID NO: 1254928 - RNA, 16 nt, Human
ugaccaggcauccucc

SEQ ID NO: 1254929 - RNA, 16 nt, Human
ugaccaggcugccucc

SEQ ID NO: 1254930 - RNA, 17 nt, Human
ugaccaguugcagucac

SEQ ID NO: 1254931 - RNA, 18 nt, Human
ugaccaguugcagucacu

SEQ ID NO: 1254932 - RNA, 13 nt, Human
ugacccuggcucc

SEQ ID NO: 1254933 - RNA, 13 nt, Human
ugacccuuuucau

SEQ ID NO: 1254934 - RNA, 15 nt, Human
ugacccuugcuguga

SEQ ID NO: 1254935 - RNA, 15 nt, Human
ugaagauacugaaau

SEQ ID NO: 1254936 - RNA, 16 nt, Human
ugaagauacugaaaua

SEQ ID NO: 1254937 - RNA, 18 nt, Human
ugaagauacugaaauaaa

SEQ ID NO: 1254938 - RNA, 20 nt, Human
ugaaggaauaaauugcuccu

SEQ ID NO: 1254939 - RNA, 14 nt, Human
ugaagauacugaaa

SEQ ID NO: 1254940 - RNA, 15 nt, Human
ugaacucuuaaucaa

SEQ ID NO: 1254941 - RNA, 21 nt, Human
ugaacucuuaaucaaauagca

SEQ ID NO: 1254942 - RNA, 14 nt, Human
ugaacucuuaauca

SEQ ID NO: 1254943 - RNA, 16 nt, Human
ugaacucugacaacag

SEQ ID NO: 1254944 - RNA, 16 nt, Human
ugaaggagagcccuuc

SEQ ID NO: 1254945 - RNA, 22 nt, Human
ugaaggacuaauagaaaaguau

SEQ ID NO: 1254946 - RNA, 20 nt, Human
ugaaggagagcccuucauuu

SEQ ID NO: 1254947 - RNA, 12 nt, Human
ugaaggacccuu

SEQ ID NO: 1254948 - RNA, 17 nt, Human
ugaaggacuaauagaaa

SEQ ID NO: 1254949 - RNA, 20 nt, Human
ugaaggacuaauagaaaagu

SEQ ID NO: 1254950 - RNA, 13 nt, Human
ugaaguccaagca

SEQ ID NO: 1254951 - RNA, 17 nt, Human
ugaagugagcacagccu

SEQ ID NO: 1254952 - RNA, 18 nt, Human
ugaagugagcacagccua

SEQ ID NO: 1254953 - RNA, 23 nt, Human
ugaagugagcugagauugcacca

SEQ ID NO: 1254954 - RNA, 18 nt, Human
ugaagugcuguuuauuaa

SEQ ID NO: 1254955 - RNA, 22 nt, Human
ugaagugcuguuuauuaaucuu

SEQ ID NO: 1254956 - RNA, 11 nt, Human
ugaaguccaag

SEQ ID NO: 1254957 - RNA, 23 nt, Human
ugaaguuagcuuuaacuuaaaua

SEQ ID NO: 1254958 - RNA, 18 nt, Human
ugaaguuagcuuuaacuu

SEQ ID NO: 1254959 - RNA, 13 nt, Human
ugaaguugcugcu

SEQ ID NO: 1254960 - RNA, 14 nt, Human
ugaaguugcugcuu

SEQ ID NO: 1254961 - RNA, 22 nt, Human
ugaaguugcugcuucucccagg

SEQ ID NO: 1254962 - RNA, 15 nt, Human
ugaaguugcugcuuc

SEQ ID NO: 1254963 - RNA, 18 nt, Human
ugaauaaaaacucaagga

SEQ ID NO: 1254964 - RNA, 16 nt, Human
ugaauaaaaacucaag

SEQ ID NO: 1254965 - RNA, 15 nt, Human
ugaauuauauguuca

SEQ ID NO: 1254966 - RNA, 17 nt, Human
ugaauuaggcuguaacu

SEQ ID NO: 1254967 - RNA, 20 nt, Human
ugaauuaggcuguaacuacu

SEQ ID NO: 1254968 - RNA, 21 nt, Human
ugaauuaggcuguaacuacuu

SEQ ID NO: 1254969 - RNA, 22 nt, Human
ugaauuaggcuguaacuacuuu

SEQ ID NO: 1254970 - RNA, 15 nt, Human
ugaauuacauuugua

SEQ ID NO: 1254971 - RNA, 16 nt, Human
ugaauuacauuuguau

SEQ ID NO: 1254972 - RNA, 18 nt, Human
ugaauuacauuuguauaa

SEQ ID NO: 1254973 - RNA, 16 nt, Human
ugaauuauuuucucuc

SEQ ID NO: 1254974 - RNA, 14 nt, Human
ugaauuauuacagu

SEQ ID NO: 1254975 - RNA, 16 nt, Human
ugaauuauuacagugu

SEQ ID NO: 1254976 - RNA, 17 nt, Human
ugaauuauuacaguguu

SEQ ID NO: 1254977 - RNA, 18 nt, Human
ugaauuauuacaguguuu

SEQ ID NO: 1254978 - RNA, 15 nt, Human
ugaauuauucaauuu

SEQ ID NO: 1254979 - RNA, 13 nt, Human
ugaauuaugaaac

SEQ ID NO: 1254980 - RNA, 15 nt, Human
ugaauuaguuuuaaa

SEQ ID NO: 1254981 - RNA, 21 nt, Human
ugaauuaucuugguugaaaau

SEQ ID NO: 1254982 - RNA, 15 nt, Human
ugaauuaugaaacuu

SEQ ID NO: 1254983 - RNA, 17 nt, Human
ugaauuaugaaacuuuu

SEQ ID NO: 1254984 - RNA, 13 nt, Human
ugaauuauucaau

SEQ ID NO: 1254985 - RNA, 15 nt, Human
ugaauucauuucacu

SEQ ID NO: 1254986 - RNA, 16 nt, Human
ugaauucauuucacug

SEQ ID NO: 1254987 - RNA, 12 nt, Human
ugaauucccuca

SEQ ID NO: 1254988 - RNA, 13 nt, Human
ugaauucccucac

SEQ ID NO: 1254989 - RNA, 14 nt, Human
ugaauucccucacu

SEQ ID NO: 1254990 - RNA, 22 nt, Human
ugaauucccucacucgucuccc

SEQ ID NO: 1254991 - RNA, 20 nt, Human
ugaauucuugguugaggaaa

SEQ ID NO: 1254992 - RNA, 22 nt, Human
ugaauucuugguugaggaaaca

SEQ ID NO: 1254993 - RNA, 21 nt, Human
ugaauucuugguugaggaaac

SEQ ID NO: 1254994 - RNA, 23 nt, Human
ugaaucauuuuaccuuugacaaa

SEQ ID NO: 1254995 - RNA, 22 nt, Human
ugaaucauuuuaccuuugacaa

SEQ ID NO: 1254996 - RNA, 14 nt, Human
ugaauaaagacacc

SEQ ID NO: 1254997 - RNA, 15 nt, Human
ugaauaaagacaccu

SEQ ID NO: 1254998 - RNA, 18 nt, Human
ugaaucauuguauguggu

SEQ ID NO: 1254999 - RNA, 21 nt, Human
ugaaucauuguauguggucau

SEQ ID NO: 1255000 - RNA, 15 nt, Human
ugaauccaaacuaau

SEQ ID NO: 1255001 - RNA, 16 nt, Human
ugaauccaaacuaauc

SEQ ID NO: 1255002 - RNA, 21 nt, Human
ugaauguguuucacaguuuga

SEQ ID NO: 1255003 - RNA, 22 nt, Human
ugaauguguuucacaguuugaa

SEQ ID NO: 1255004 - RNA, 23 nt, Human
ugaauguguuucacaguuugaaa

SEQ ID NO: 1255005 - RNA, 17 nt, Human
ugaaugaaaauguccau

SEQ ID NO: 1255006 - RNA, 11 nt, Human
ugaaugaacac

SEQ ID NO: 1255007 - RNA, 14 nt, Human
ugaaugagaaucua

SEQ ID NO: 1255008 - RNA, 22 nt, Human
ugaaugaggucagcaugucuau

SEQ ID NO: 1255009 - RNA, 16 nt, Human
ucuuucuuucaauaaa

SEQ ID NO: 1255010 - RNA, 13 nt, Human
ucuuucuuuauuu

SEQ ID NO: 1255011 - RNA, 16 nt, Human
ucuuucauuucuucua

SEQ ID NO: 1255012 - RNA, 20 nt, Human
ucuuuccauuggaucucauu

SEQ ID NO: 1255013 - RNA, 21 nt, Human
ucuuucauuugcuuuggaagu

SEQ ID NO: 1255014 - RNA, 19 nt, Human
ucuuuccacggagccacuc

SEQ ID NO: 1255015 - RNA, 22 nt, Human
ucuuuccacggagccacuccuc

SEQ ID NO: 1255016 - RNA, 23 nt, Human
ucuuuccacggagccacuccucu

SEQ ID NO: 1255017 - RNA, 15 nt, Human
ucuuucagcaagaua

SEQ ID NO: 1255018 - RNA, 21 nt, Human
ucuuucagcaagauaaacauu

SEQ ID NO: 1255019 - RNA, 11 nt, Human
ucuuucagcuc

SEQ ID NO: 1255020 - RNA, 13 nt, Human
ucuuucagcuccu

SEQ ID NO: 1255021 - RNA, 14 nt, Human
ucuuucagcuccug

SEQ ID NO: 1255022 - RNA, 15 nt, Human
ucuuucagcuccuga

SEQ ID NO: 1255023 - RNA, 12 nt, Human
ucuuugccaagu

SEQ ID NO: 1255024 - RNA, 12 nt, Human
ucuuugaaauua

SEQ ID NO: 1255025 - RNA, 15 nt, Human
ucuuugaaauuaugu

SEQ ID NO: 1255026 - RNA, 16 nt, Human
ucuuugaaauuaugua

SEQ ID NO: 1255027 - RNA, 12 nt, Human
ucuuugaauaaa

SEQ ID NO: 1255028 - RNA, 13 nt, Human
ucuuugaauaaau

SEQ ID NO: 1255029 - RNA, 20 nt, Human
ucuuugccacccucaugcug

SEQ ID NO: 1255030 - RNA, 18 nt, Human
ucuuugccacccucaugc

SEQ ID NO: 1255031 - RNA, 17 nt, Human
ucuuugccacccucaug

SEQ ID NO: 1255032 - RNA, 16 nt, Human
ucuuugccacccucau

SEQ ID NO: 1255033 - RNA, 14 nt, Human
ucuuugccacccuc

SEQ ID NO: 1255034 - RNA, 19 nt, Human
ucuuuggaaaguacacucu

SEQ ID NO: 1255035 - RNA, 16 nt, Human
ucuuuggaaaguacac

SEQ ID NO: 1255036 - RNA, 13 nt, Human
ucuuuuauaauuc

SEQ ID NO: 1255037 - RNA, 14 nt, Human
ucuuuuauaggauu

SEQ ID NO: 1255038 - RNA, 13 nt, Human
ucuugcuaccagu

SEQ ID NO: 1255039 - RNA, 21 nt, Human
ucuugcaguaucggcacugua

SEQ ID NO: 1255040 - RNA, 14 nt, Human
ucuugcuaccagua

SEQ ID NO: 1255041 - RNA, 20 nt, Human
ucuugcuaccaguauuuaga

SEQ ID NO: 1255042 - RNA, 22 nt, Human
ucuugcuggucuagucacgcau

SEQ ID NO: 1255043 - RNA, 18 nt, Human
ucuugcuucccuaaucua

SEQ ID NO: 1255044 - RNA, 22 nt, Human
ucuugcuucccuaaucuauggu

SEQ ID NO: 1255045 - RNA, 23 nt, Human
ucuugcuucccuaaucuaugguc

SEQ ID NO: 1255046 - RNA, 11 nt, Human
ucuugcuucuu

SEQ ID NO: 1255047 - RNA, 13 nt, Human
ucuccucuugcca

SEQ ID NO: 1255048 - RNA, 16 nt, Human
ucuccucuugccacug

SEQ ID NO: 1255049 - RNA, 13 nt, Human
ucucccuggugcu

SEQ ID NO: 1255050 - RNA, 16 nt, Human
ucucccuggugcuuau

SEQ ID NO: 1255051 - RNA, 14 nt, Human
ucucccuguacagu

SEQ ID NO: 1255052 - RNA, 18 nt, Human
ucucccuguacaguguua

SEQ ID NO: 1255053 - RNA, 22 nt, Human
ucuccucuugccacugccucuu

SEQ ID NO: 1255054 - RNA, 17 nt, Human
ucuccucuugccacugc

SEQ ID NO: 1255055 - RNA, 20 nt, Human
ucuugcacagucacugcucu

SEQ ID NO: 1255056 - RNA, 20 nt, Human
ucuugcaguaucggcacugu

SEQ ID NO: 1255057 - RNA, 23 nt, Human
ucuugcaggaaggacuaugaaaa

SEQ ID NO: 1255058 - RNA, 22 nt, Human
ucuugcaccccaaagcuuuccu

SEQ ID NO: 1255059 - RNA, 23 nt, Human
ucuugcaccccaaagcuuuccug

SEQ ID NO: 1255060 - RNA, 19 nt, Human
ucuugcacagucacugcuc

SEQ ID NO: 1255061 - RNA, 16 nt, Human
ucuugcuucuuucuag

SEQ ID NO: 1255062 - RNA, 17 nt, Human
ucuugcuucuuucuaga

SEQ ID NO: 1255063 - RNA, 18 nt, Human
ucuugcuucuuucuagaa

SEQ ID NO: 1255064 - RNA, 20 nt, Human
ucuugcuuggggaacuugug

SEQ ID NO: 1255065 - RNA, 13 nt, Human
ucuuguguuggcu

SEQ ID NO: 1255066 - RNA, 22 nt, Human
ucuuguguuuccacagccugca

SEQ ID NO: 1255067 - RNA, 13 nt, Human
ucuuguugagccg

SEQ ID NO: 1255068 - RNA, 17 nt, Human
ucuuguuggugcacagc

SEQ ID NO: 1255069 - RNA, 14 nt, Human
ucuuguuucaauuc

SEQ ID NO: 1255070 - RNA, 16 nt, Human
ucuuguuggugcacag

SEQ ID NO: 1255071 - RNA, 20 nt, Human
ucuuucaagcagucgugccu

SEQ ID NO: 1255072 - RNA, 21 nt, Human
ucuuucaagcagucgugccug

SEQ ID NO: 1255073 - RNA, 11 nt, Human
ucuuucaaaac

SEQ ID NO: 1255074 - RNA, 20 nt, Human
ucuuucaaaaccuuuugaaa

SEQ ID NO: 1255075 - RNA, 21 nt, Human
ucuuucaaaaccuuuugaaau

SEQ ID NO: 1255076 - RNA, 23 nt, Human
ucuuucaaaaccuuuugaaauua

SEQ ID NO: 1255077 - RNA, 22 nt, Human
ugaaauuaugugacauuuuaca

SEQ ID NO: 1255078 - RNA, 20 nt, Human
ugaaauuaugugacauuuua

SEQ ID NO: 1255079 - RNA, 12 nt, Human
ugaaauuauuca

SEQ ID NO: 1255080 - RNA, 16 nt, Human
ugaaauuccauuugua

SEQ ID NO: 1255081 - RNA, 14 nt, Human
ugaaauucuccugg

SEQ ID NO: 1255082 - RNA, 15 nt, Human
ugaaauucuccugga

SEQ ID NO: 1255083 - RNA, 16 nt, Human
ugaaauucuccuggag

SEQ ID NO: 1255084 - RNA, 15 nt, Human
ugaaauuccauuugu

SEQ ID NO: 1255085 - RNA, 19 nt, Human
ugaaauuccaaagucucua

SEQ ID NO: 1255086 - RNA, 16 nt, Human
ugaaauuccaaagucu

SEQ ID NO: 1255087 - RNA, 17 nt, Human
ugaaauuccaaagucuc

SEQ ID NO: 1255088 - RNA, 12 nt, Human
ugaaauuccaaa

SEQ ID NO: 1255089 - RNA, 14 nt, Human
ugaaauuccaaagu

SEQ ID NO: 1255090 - RNA, 15 nt, Human
ugaaauuccaaaguc

SEQ ID NO: 1255091 - RNA, 14 nt, Human
ugaaauuaaccucu

SEQ ID NO: 1255092 - RNA, 17 nt, Human
ugaaauuaaccucucac

SEQ ID NO: 1255093 - RNA, 22 nt, Human
ugaaauuaacuggguaaugaaa

SEQ ID NO: 1255094 - RNA, 19 nt, Human
ugaaauuaagaaggcaaaa

SEQ ID NO: 1255095 - RNA, 21 nt, Human
ugaaauuaagaaggcaaaaau

SEQ ID NO: 1255096 - RNA, 23 nt, Human
ugaaauuaagaaggcaaaaaugu

SEQ ID NO: 1255097 - RNA, 15 nt, Human
ugaaauuauguaaau

SEQ ID NO: 1255098 - RNA, 13 nt, Human
ugaaauuauguaa

SEQ ID NO: 1255099 - RNA, 15 nt, Human
ugaaaucauucauuu

SEQ ID NO: 1255100 - RNA, 16 nt, Human
ugaaaucaguuacucu

SEQ ID NO: 1255101 - RNA, 17 nt, Human
ugaaaucaguuacucuu

SEQ ID NO: 1255102 - RNA, 16 nt, Human
ugaaauauugacuuuu

SEQ ID NO: 1255103 - RNA, 19 nt, Human
ugaaagguuagagaauaaa

SEQ ID NO: 1255104 - RNA, 17 nt, Human
ugaaauggauacuuaua

SEQ ID NO: 1255105 - RNA, 12 nt, Human
ugaaauguaagg

SEQ ID NO: 1255106 - RNA, 20 nt, Human
ugaaauguaaggcuguguaa

SEQ ID NO: 1255107 - RNA, 15 nt, Human
ugaaauguaaggcug

SEQ ID NO: 1255108 - RNA, 19 nt, Human
ugaaauguaaggcugugua

SEQ ID NO: 1255109 - RNA, 19 nt, Human
ugaacaguuguguuugaag

SEQ ID NO: 1255110 - RNA, 17 nt, Human
ugaacaggaaacuccug

SEQ ID NO: 1255111 - RNA, 13 nt, Human
ugaacagcuggug

SEQ ID NO: 1255112 - RNA, 14 nt, Human
ugaacagcuggugu

SEQ ID NO: 1255113 - RNA, 15 nt, Human
ugaacagcuggugua

SEQ ID NO: 1255114 - RNA, 18 nt, Human
ugaacagcugguguagcu

SEQ ID NO: 1255115 - RNA, 19 nt, Human
ugaacagcugguguagcua

SEQ ID NO: 1255116 - RNA, 23 nt, Human
ugaacagcugguguagcuacaga

SEQ ID NO: 1255117 - RNA, 22 nt, Human
ugaacaggaaacuccugugacc

SEQ ID NO: 1255118 - RNA, 11 nt, Human
ugaacaagaau

SEQ ID NO: 1255119 - RNA, 12 nt, Human
ugaacaagaauu

SEQ ID NO: 1255120 - RNA, 14 nt, Human
ugaacaagaauugg

SEQ ID NO: 1255121 - RNA, 18 nt, Human
ugaacaagaauuggaagc

SEQ ID NO: 1255122 - RNA, 14 nt, Human
ugaacaagagaagc

SEQ ID NO: 1255123 - RNA, 16 nt, Human
ugaacaagagaagcau

SEQ ID NO: 1255124 - RNA, 17 nt, Human
ugaacaagagaagcauu

SEQ ID NO: 1255125 - RNA, 18 nt, Human
ugaacaagagaagcauuc

SEQ ID NO: 1255126 - RNA, 23 nt, Human
ugaacaagagaagcauucucauu

SEQ ID NO: 1255127 - RNA, 18 nt, Human
ugaacacaaacuguaaau

SEQ ID NO: 1255128 - RNA, 12 nt, Human
ugaacaguggag

SEQ ID NO: 1255129 - RNA, 20 nt, Human
ugaacauugguucuuucauu

SEQ ID NO: 1255130 - RNA, 16 nt, Human
ugaaaagcagacauuu

SEQ ID NO: 1255131 - RNA, 22 nt, Human
ugaaaagcagguugauaaauca

SEQ ID NO: 1255132 - RNA, 19 nt, Human
ugaaaagcagguugauaaa

SEQ ID NO: 1255133 - RNA, 18 nt, Human
ugaaaagcagguugauaa

SEQ ID NO: 1255134 - RNA, 17 nt, Human
ugaaaagcuagaauuga

SEQ ID NO: 1255135 - RNA, 22 nt, Human
ucuuuuauaauucucauuaaaa

SEQ ID NO: 1255136 - RNA, 18 nt, Human
ucuuuuauacucagcuuu

SEQ ID NO: 1255137 - RNA, 20 nt, Human
ugaaaagcuccauuuuuagu

SEQ ID NO: 1255138 - RNA, 16 nt, Human
ugaaacauuuucuccc

SEQ ID NO: 1255139 - RNA, 18 nt, Human
ugaaacauuuucucccug

SEQ ID NO: 1255140 - RNA, 19 nt, Human
ugaaacauuuucucccugg

SEQ ID NO: 1255141 - RNA, 20 nt, Human
ugaaaccaguguuagggaag

SEQ ID NO: 1255142 - RNA, 23 nt, Human
ugaaacaaagaguucaagaaaua

SEQ ID NO: 1255143 - RNA, 14 nt, Human
ugaaacaaagaguu

SEQ ID NO: 1255144 - RNA, 15 nt, Human
ugaaacaacuuggaa

SEQ ID NO: 1255145 - RNA, 16 nt, Human
ugaaacaacuuggaaa

SEQ ID NO: 1255146 - RNA, 17 nt, Human
ugaaacaagaagccaca

SEQ ID NO: 1255147 - RNA, 16 nt, Human
ugaaagguacuucaaa

SEQ ID NO: 1255148 - RNA, 16 nt, Human
ugaaagguaauuugag

SEQ ID NO: 1255149 - RNA, 15 nt, Human
ugaaagguacuucaa

SEQ ID NO: 1255150 - RNA, 15 nt, Human
ugaaagcuacucaua

SEQ ID NO: 1255151 - RNA, 16 nt, Human
ugaaagcugauuuuuu

SEQ ID NO: 1255152 - RNA, 16 nt, Human
ugaaagaugaucauuu

SEQ ID NO: 1255153 - RNA, 19 nt, Human
ugaaagaggcugaggccug

SEQ ID NO: 1255154 - RNA, 21 nt, Human
ugaaagaggcugaggccugga

SEQ ID NO: 1255155 - RNA, 18 nt, Human
ugaaacccugucucuacu

SEQ ID NO: 1255156 - RNA, 20 nt, Human
ugaaaccccuguaggccuca

SEQ ID NO: 1255157 - RNA, 16 nt, Human
ugaaagccauggagau

SEQ ID NO: 1255158 - RNA, 13 nt, Human
ugaaagccaugga

SEQ ID NO: 1255159 - RNA, 19 nt, Human
ugaaagauggcugugccuc

SEQ ID NO: 1255160 - RNA, 18 nt, Human
ugaaagauggcugugccu

SEQ ID NO: 1255161 - RNA, 23 nt, Human
ugaaagccaaggagucacugaga

SEQ ID NO: 1255162 - RNA, 16 nt, Human
ugaggagcuugaaacc

SEQ ID NO: 1255163 - RNA, 22 nt, Human
ugagcuggggaccugguacccu

SEQ ID NO: 1255164 - RNA, 16 nt, Human
ugagcugucaacgaga

SEQ ID NO: 1255165 - RNA, 12 nt, Human
ugaggagcuggg

SEQ ID NO: 1255166 - RNA, 13 nt, Human
ugaggagcugggg

SEQ ID NO: 1255167 - RNA, 20 nt, Human
ugaggagcuggggaucccuc

SEQ ID NO: 1255168 - RNA, 23 nt, Human
ugaggcaucgcaauguaagacuc

SEQ ID NO: 1255169 - RNA, 17 nt, Human
ugagggagaacaagacc

SEQ ID NO: 1255170 - RNA, 14 nt, Human
ugagggagccuggc

SEQ ID NO: 1255171 - RNA, 20 nt, Human
ugaggcuccacuuggucugu

SEQ ID NO: 1255172 - RNA, 18 nt, Human
ugaggcuccacuuggucu

SEQ ID NO: 1255173 - RNA, 16 nt, Human
ugaggucucagccccu

SEQ ID NO: 1255174 - RNA, 13 nt, Human
ugagguccugagc

SEQ ID NO: 1255175 - RNA, 14 nt, Human
ugagguccugagca

SEQ ID NO: 1255176 - RNA, 15 nt, Human
ugagguccugagcac

SEQ ID NO: 1255177 - RNA, 16 nt, Human
ugagguccugagcacu

SEQ ID NO: 1255178 - RNA, 17 nt, Human
ugagguccugagcacug

SEQ ID NO: 1255179 - RNA, 18 nt, Human
ugagguccugagcacugc

SEQ ID NO: 1255180 - RNA, 19 nt, Human
ugagguccugagcacugcc

SEQ ID NO: 1255181 - RNA, 23 nt, Human
ugagguccugagcacugccagga

SEQ ID NO: 1255182 - RNA, 20 nt, Human
ugagguccugagcacugcca

SEQ ID NO: 1255183 - RNA, 21 nt, Human
ugagguccugagcacugccag

SEQ ID NO: 1255184 - RNA, 22 nt, Human
ugagguccugagcacugccagg

SEQ ID NO: 1255185 - RNA, 13 nt, Human
ugaggucucagcc

SEQ ID NO: 1255186 - RNA, 14 nt, Human
ugaggucucagccc

SEQ ID NO: 1255187 - RNA, 15 nt, Human
ugaggucucagcccc

SEQ ID NO: 1255188 - RNA, 17 nt, Human
ugaggucucagccccuu

SEQ ID NO: 1255189 - RNA, 16 nt, Human
ugauaacuggaaacuu

SEQ ID NO: 1255190 - RNA, 19 nt, Human
ugaguuugucgcucaugug

SEQ ID NO: 1255191 - RNA, 20 nt, Human
ugaguuugucgcucaugugu

SEQ ID NO: 1255192 - RNA, 13 nt, Human
ugaguuuuaccaa

SEQ ID NO: 1255193 - RNA, 12 nt, Human
ugaguuuuacca

SEQ ID NO: 1255194 - RNA, 19 nt, Human
ugaguuuuccauggcagga

SEQ ID NO: 1255195 - RNA, 13 nt, Human
ugaguuuuccaug

SEQ ID NO: 1255196 - RNA, 17 nt, Human
ugaguuuuguguuuguu

SEQ ID NO: 1255197 - RNA, 21 nt, Human
ugaguuuuguguuuguuguag

SEQ ID NO: 1255198 - RNA, 18 nt, Human
ugaguuuuguguuuguug

SEQ ID NO: 1255199 - RNA, 15 nt, Human
ugaguucucccugua

SEQ ID NO: 1255200 - RNA, 22 nt, Human
ugaguuugggccccagaggcug

SEQ ID NO: 1255201 - RNA, 23 nt, Human
ugaguuugggccccagaggcugg

SEQ ID NO: 1255202 - RNA, 15 nt, Human
ugagucccaggcuga

SEQ ID NO: 1255203 - RNA, 19 nt, Human
ugagucccaggcugagccu

SEQ ID NO: 1255204 - RNA, 17 nt, Human
ugagucguacagaaagc

SEQ ID NO: 1255205 - RNA, 19 nt, Human
ugagucguacagaaagcug

SEQ ID NO: 1255206 - RNA, 17 nt, Human
ugagucgugaccugcua

SEQ ID NO: 1255207 - RNA, 15 nt, Human
ugagucuagauguuu

SEQ ID NO: 1255208 - RNA, 15 nt, Human
ugagucucucugggc

SEQ ID NO: 1255209 - RNA, 16 nt, Human
ugagucuuugguucua

SEQ ID NO: 1255210 - RNA, 17 nt, Human
ugagucuuugguucuaa

SEQ ID NO: 1255211 - RNA, 18 nt, Human
ugagucuuugguucuaag

SEQ ID NO: 1255212 - RNA, 20 nt, Human
ugagucuuugguucuaagga

SEQ ID NO: 1255213 - RNA, 21 nt, Human
ugagucuuugguucuaaggac

SEQ ID NO: 1255214 - RNA, 15 nt, Human
ugagugaauaaaugu

SEQ ID NO: 1255215 - RNA, 19 nt, Human
ugagaccaccucucaauau

SEQ ID NO: 1255216 - RNA, 18 nt, Human
ugagacccagcccucauc

SEQ ID NO: 1255217 - RNA, 20 nt, Human
ugagacccagcccucauccc

SEQ ID NO: 1255218 - RNA, 15 nt, Human
ugagaccaccucuca

SEQ ID NO: 1255219 - RNA, 12 nt, Human
ugagaccaccuc

SEQ ID NO: 1255220 - RNA, 14 nt, Human
ugagaccacuguua

SEQ ID NO: 1255221 - RNA, 12 nt, Human
ugagaaccuggg

SEQ ID NO: 1255222 - RNA, 21 nt, Human
ugagaaccuggguugcagaca

SEQ ID NO: 1255223 - RNA, 23 nt, Human
ugagaaccuggguugcagacagg

SEQ ID NO: 1255224 - RNA, 22 nt, Human
ugagaaccuggguugcagacag

SEQ ID NO: 1255225 - RNA, 17 nt, Human
ugagacuccagaccuga

SEQ ID NO: 1255226 - RNA, 22 nt, Human
ugagacuaaucuuauucauuuu

SEQ ID NO: 1255227 - RNA, 17 nt, Human
ugagaaauuuauaaacu

SEQ ID NO: 1255228 - RNA, 20 nt, Human
ugaccucaggcaaucugccc

SEQ ID NO: 1255229 - RNA, 20 nt, Human
ugagaaccguagaugauuuc

SEQ ID NO: 1255230 - RNA, 12 nt, Human
ugagaaccuggc

SEQ ID NO: 1255231 - RNA, 14 nt, Human
ugagaaccuggccu

SEQ ID NO: 1255232 - RNA, 15 nt, Human
ugagaaccuggccuu

SEQ ID NO: 1255233 - RNA, 16 nt, Human
ugagaaccuggccuuc

SEQ ID NO: 1255234 - RNA, 22 nt, Human
ugaccucagcuuugauauuuca

SEQ ID NO: 1255235 - RNA, 21 nt, Human
ugaccucaggcaaucugcccg

SEQ ID NO: 1255236 - RNA, 19 nt, Human
ugaccgcgacuaauuucaa

SEQ ID NO: 1255237 - RNA, 16 nt, Human
ugaccggacuuuucug

SEQ ID NO: 1255238 - RNA, 19 nt, Human
ugaccggacuuuucugcaa

SEQ ID NO: 1255239 - RNA, 16 nt, Human
ugagagugaacaaauu

SEQ ID NO: 1255240 - RNA, 21 nt, Human
ugagacuaaucuuauucauuu

SEQ ID NO: 1255241 - RNA, 13 nt, Human
ugagagucuagau

SEQ ID NO: 1255242 - RNA, 14 nt, Human
ugagagucuagauu

SEQ ID NO: 1255243 - RNA, 15 nt, Human
ugagagucuagauuc

SEQ ID NO: 1255244 - RNA, 17 nt, Human
ugagagucuagauucuc

SEQ ID NO: 1255245 - RNA, 16 nt, Human
ugagagucuagauucu

SEQ ID NO: 1255246 - RNA, 12 nt, Human
ugagagugugac

SEQ ID NO: 1255247 - RNA, 14 nt, Human
ugagagugugacca

SEQ ID NO: 1255248 - RNA, 13 nt, Human
ugagagugugacc

SEQ ID NO: 1255249 - RNA, 17 nt, Human
ugagauaguuuucaucc

SEQ ID NO: 1255250 - RNA, 18 nt, Human
ugagauaguuuucaucca

SEQ ID NO: 1255251 - RNA, 21 nt, Human
ugagauaguuuucauccauaa

SEQ ID NO: 1255252 - RNA, 12 nt, Human
ugagauauuaau

SEQ ID NO: 1255253 - RNA, 13 nt, Human
ugagauauuaaug

SEQ ID NO: 1255254 - RNA, 20 nt, Human
ugagauauuaaugcccagac

SEQ ID NO: 1255255 - RNA, 19 nt, Human
ugagauauuaaugcccaga

SEQ ID NO: 1255256 - RNA, 20 nt, Human
ugagcaguccuuggccugcu

SEQ ID NO: 1255257 - RNA, 16 nt, Human
ugagcaguguuagcuu

SEQ ID NO: 1255258 - RNA, 18 nt, Human
ugagcaguggcuggucca

SEQ ID NO: 1255259 - RNA, 22 nt, Human
ugagcaguggcugguccagggc

SEQ ID NO: 1255260 - RNA, 12 nt, Human
ugagcaguggcu

SEQ ID NO: 1255261 - RNA, 13 nt, Human
ugagcaguggcug

SEQ ID NO: 1255262 - RNA, 14 nt, Human
ugagcaguggcugg

SEQ ID NO: 1255263 - RNA, 15 nt, Human
ugagcaguggcuggu

SEQ ID NO: 1255264 - RNA, 13 nt, Human
ugagcauagguga

SEQ ID NO: 1255265 - RNA, 21 nt, Human
ugagcauaggugauccaugua

SEQ ID NO: 1255266 - RNA, 23 nt, Human
ugagcauaggugauccauguaac

SEQ ID NO: 1255267 - RNA, 12 nt, Human
ugagcaucacag

SEQ ID NO: 1255268 - RNA, 18 nt, Human
ugagcaucacagaaugug

SEQ ID NO: 1255269 - RNA, 13 nt, Human
ugagcaucacaga

SEQ ID NO: 1255270 - RNA, 14 nt, Human
ugagcaucacagaa

SEQ ID NO: 1255271 - RNA, 15 nt, Human
ugagcaucacagaau

SEQ ID NO: 1255272 - RNA, 14 nt, Human
ugagccccagggag

SEQ ID NO: 1255273 - RNA, 18 nt, Human
ugagcccuguccugccua

SEQ ID NO: 1255274 - RNA, 15 nt, Human
ugagccccuggaggc

SEQ ID NO: 1255275 - RNA, 14 nt, Human
ugagccucagucuc

SEQ ID NO: 1255276 - RNA, 13 nt, Human
ugagccugccgag

SEQ ID NO: 1255277 - RNA, 18 nt, Human
ugagcuccuguccccugc

SEQ ID NO: 1255278 - RNA, 20 nt, Human
ugagcuccuguccccugcua

SEQ ID NO: 1255279 - RNA, 19 nt, Human
ugagcuccuuaaggcucuu

SEQ ID NO: 1255280 - RNA, 21 nt, Human
ugagcuccuuaaggcucuuuu

SEQ ID NO: 1255281 - RNA, 21 nt, Human
ugagcuccuguccccugcuac

SEQ ID NO: 1255282 - RNA, 22 nt, Human
ugagcuccuguccccugcuaca

SEQ ID NO: 1255283 - RNA, 20 nt, Human
ugagcucuauuaugaaugug

SEQ ID NO: 1255284 - RNA, 18 nt, Human
ugagcuggaccucaccaa

SEQ ID NO: 1255285 - RNA, 19 nt, Human
ugauucugauguacucuaa

SEQ ID NO: 1255286 - RNA, 16 nt, Human
ugauucugcaguaaau

SEQ ID NO: 1255287 - RNA, 22 nt, Human
ugauucugcaguaaaucuuuua

SEQ ID NO: 1255288 - RNA, 12 nt, Human
ugauucugccuu

SEQ ID NO: 1255289 - RNA, 13 nt, Human
ugauucugccuuu

SEQ ID NO: 1255290 - RNA, 21 nt, Human
ugauugaccguguuggucugu

SEQ ID NO: 1255291 - RNA, 12 nt, Human
ugauugauuuga

SEQ ID NO: 1255292 - RNA, 14 nt, Human
ugauugauuugaag

SEQ ID NO: 1255293 - RNA, 15 nt, Human
ugauugaugacccuu

SEQ ID NO: 1255294 - RNA, 20 nt, Human
ugauuggcaggaguuggaag

SEQ ID NO: 1255295 - RNA, 21 nt, Human
ugauuggccuguagaguugcu

SEQ ID NO: 1255296 - RNA, 21 nt, Human
ugauuguggaauggagauuca

SEQ ID NO: 1255297 - RNA, 18 nt, Human
ugauugucuuaauauugu

SEQ ID NO: 1255298 - RNA, 20 nt, Human
ugauuguaguaaucugcauu

SEQ ID NO: 1255299 - RNA, 16 nt, Human
ugauuguauuguugaa

SEQ ID NO: 1255300 - RNA, 13 nt, Human
ugauugucuuaau

SEQ ID NO: 1255301 - RNA, 14 nt, Human
ugauugucuuaaua

SEQ ID NO: 1255302 - RNA, 14 nt, Human
ugauuguggaaugg

SEQ ID NO: 1255303 - RNA, 18 nt, Human
ugauuguggaauggagau

SEQ ID NO: 1255304 - RNA, 13 nt, Human
ugauuauauguca

SEQ ID NO: 1255305 - RNA, 17 nt, Human
ugauuaugaauuacauu

SEQ ID NO: 1255306 - RNA, 19 nt, Human
ugauuaugaauuacauuug

SEQ ID NO: 1255307 - RNA, 22 nt, Human
ugauuagugaaaggaagauaaa

SEQ ID NO: 1255308 - RNA, 19 nt, Human
ugauuagcuuugucacugu

SEQ ID NO: 1255309 - RNA, 17 nt, Human
ugauuagacagaacacc

SEQ ID NO: 1255310 - RNA, 20 nt, Human
ugauuacuggccuuuuucau

SEQ ID NO: 1255311 - RNA, 21 nt, Human
ugauuacuggccuuuuucauu

SEQ ID NO: 1255312 - RNA, 23 nt, Human
ugauuacuggccuuuuucauuua

SEQ ID NO: 1255313 - RNA, 23 nt, Human
ugauuagaaauuaccuguggaua

SEQ ID NO: 1255314 - RNA, 13 nt, Human
ugauuagacagaa

SEQ ID NO: 1255315 - RNA, 15 nt, Human
ugauuagacagaaca

SEQ ID NO: 1255316 - RNA, 16 nt, Human
ugauuagacagaacac

SEQ ID NO: 1255317 - RNA, 22 nt, Human
ugauguuuagaaacacaacuau

SEQ ID NO: 1255318 - RNA, 18 nt, Human
ugauguucuaaggcucug

SEQ ID NO: 1255319 - RNA, 19 nt, Human
ugauguucuaaggcucuga

SEQ ID NO: 1255320 - RNA, 20 nt, Human
ugauguucuaaggcucugag

SEQ ID NO: 1255321 - RNA, 21 nt, Human
ugauguucuaaggcucugaga

SEQ ID NO: 1255322 - RNA, 22 nt, Human
ugauguucuaaggcucugagag

SEQ ID NO: 1255323 - RNA, 13 nt, Human
ugauguuccuucc

SEQ ID NO: 1255324 - RNA, 12 nt, Human
ugauguucuaag

SEQ ID NO: 1255325 - RNA, 14 nt, Human
ugauguucuaaggc

SEQ ID NO: 1255326 - RNA, 15 nt, Human
ugauguucuaaggcu

SEQ ID NO: 1255327 - RNA, 17 nt, Human
ugauguucuaaggcucu

SEQ ID NO: 1255328 - RNA, 21 nt, Human
ugauuaugaauuacauuugua

SEQ ID NO: 1255329 - RNA, 22 nt, Human
ugauuaugaauuacauuuguau

SEQ ID NO: 1255330 - RNA, 20 nt, Human
ugauuauuaacgauguccaa

SEQ ID NO: 1255331 - RNA, 14 nt, Human
ugauuauucagugu

SEQ ID NO: 1255332 - RNA, 16 nt, Human
ugauuauucaguguca

SEQ ID NO: 1255333 - RNA, 20 nt, Human
ugauuauuuuuuucuguaaa

SEQ ID NO: 1255334 - RNA, 16 nt, Human
ugauucaaucuguaaa

SEQ ID NO: 1255335 - RNA, 17 nt, Human
ugauucaaucuguaaac

SEQ ID NO: 1255336 - RNA, 21 nt, Human
ugauucaaucuguaaacugug

SEQ ID NO: 1255337 - RNA, 22 nt, Human
ugauucaaucuguaaacugugu

SEQ ID NO: 1255338 - RNA, 23 nt, Human
ugauucaaucuguaaacugugua

SEQ ID NO: 1255339 - RNA, 12 nt, Human
ugauucacagug

SEQ ID NO: 1255340 - RNA, 19 nt, Human
ugauucaauuugauguggu

SEQ ID NO: 1255341 - RNA, 16 nt, Human
ugauucaauuugaugu

SEQ ID NO: 1255342 - RNA, 14 nt, Human
ugauucaauuugau

SEQ ID NO: 1255343 - RNA, 16 nt, Human
ugauucacaucucauu

SEQ ID NO: 1255344 - RNA, 16 nt, Human
ugauucaccucuucuu

SEQ ID NO: 1255345 - RNA, 18 nt, Human
ugauucagaaaauguucu

SEQ ID NO: 1255346 - RNA, 19 nt, Human
ugauucagaaaauguucug

SEQ ID NO: 1255347 - RNA, 20 nt, Human
ugauucagaaaauguucugu

SEQ ID NO: 1255348 - RNA, 21 nt, Human
ugauucagaaaauguucuguu

SEQ ID NO: 1255349 - RNA, 22 nt, Human
ugauucagaaaauguucuguuu

SEQ ID NO: 1255350 - RNA, 21 nt, Human
ugaugguuguacauauaagug

SEQ ID NO: 1255351 - RNA, 17 nt, Human
ugaugucaauuucugug

SEQ ID NO: 1255352 - RNA, 14 nt, Human
ugaugguuguacau

SEQ ID NO: 1255353 - RNA, 13 nt, Human
ugaugguuguaca

SEQ ID NO: 1255354 - RNA, 14 nt, Human
ugaugguuccccug

SEQ ID NO: 1255355 - RNA, 16 nt, Human
ugauguggugaaaagc

SEQ ID NO: 1255356 - RNA, 12 nt, Human
ugauguuaaaaa

SEQ ID NO: 1255357 - RNA, 13 nt, Human
ugauguuaaaaaa

SEQ ID NO: 1255358 - RNA, 14 nt, Human
ugauguuaaaaaaa

SEQ ID NO: 1255359 - RNA, 23 nt, Human
ugauguuaaaaaaauaagaagaa

SEQ ID NO: 1255360 - RNA, 19 nt, Human
ugaugucccaacuuguaaa

SEQ ID NO: 1255361 - RNA, 22 nt, Human
ugaugucauacagagaagucac

SEQ ID NO: 1255362 - RNA, 20 nt, Human
ugaugucauacagagaaguc

SEQ ID NO: 1255363 - RNA, 21 nt, Human
ugaugucauacagagaaguca

SEQ ID NO: 1255364 - RNA, 18 nt, Human
ugaugucaauuucugugu

SEQ ID NO: 1255365 - RNA, 19 nt, Human
ugaugucaauuucuguguu

SEQ ID NO: 1255366 - RNA, 23 nt, Human
ugaugucaauuucuguguugcca

SEQ ID NO: 1255367 - RNA, 14 nt, Human
ugaugucauacaga

SEQ ID NO: 1255368 - RNA, 15 nt, Human
ugaugucauacagag

SEQ ID NO: 1255369 - RNA, 16 nt, Human
ugaugucauacagaga

SEQ ID NO: 1255370 - RNA, 17 nt, Human
ugaugucauacagagaa

SEQ ID NO: 1255371 - RNA, 18 nt, Human
ugaugucauacagagaag

SEQ ID NO: 1255372 - RNA, 19 nt, Human
ugaugucauacagagaagu

SEQ ID NO: 1255373 - RNA, 11 nt, Human
ugaugccuggc

SEQ ID NO: 1255374 - RNA, 15 nt, Human
ugaugccugugaacu

SEQ ID NO: 1255375 - RNA, 20 nt, Human
ugaugccugugaacugaacu

SEQ ID NO: 1255376 - RNA, 20 nt, Human
ugaugcuacaggauuugaaa

SEQ ID NO: 1255377 - RNA, 23 nt, Human
ugaugcuacaggauuugaaauug

SEQ ID NO: 1255378 - RNA, 21 nt, Human
ugaugccucugucuucuggac

SEQ ID NO: 1255379 - RNA, 21 nt, Human
ugaugccugugaacugaacuc

SEQ ID NO: 1255380 - RNA, 20 nt, Human
ugaugcuaaaaccugaaauu

SEQ ID NO: 1255381 - RNA, 20 nt, Human
ugaugauuuagagugcuguc

SEQ ID NO: 1255382 - RNA, 21 nt, Human
ugaugcagcuuauacgaaaua

SEQ ID NO: 1255383 - RNA, 21 nt, Human
ugaugcaucagaaagggaggg

SEQ ID NO: 1255384 - RNA, 22 nt, Human
ugaugcaucagaaagggagggc

SEQ ID NO: 1255385 - RNA, 17 nt, Human
ugaugcaugcacuguuc

SEQ ID NO: 1255386 - RNA, 18 nt, Human
ugaugcaugcacuguucc

SEQ ID NO: 1255387 - RNA, 23 nt, Human
ugaugcaugcacuguucccccug

SEQ ID NO: 1255388 - RNA, 14 nt, Human
ugaugccucugucu

SEQ ID NO: 1255389 - RNA, 17 nt, Human
ugaucagcuuauugucu

SEQ ID NO: 1255390 - RNA, 18 nt, Human
ugauagcaaauggccuca

SEQ ID NO: 1255391 - RNA, 24 nt, Human
ugaucagcuuauugucuagugaaa

SEQ ID NO: 1255392 - RNA, 14 nt, Human
ugauagauuuucug

SEQ ID NO: 1255393 - RNA, 22 nt, Human
ugaucauguguggaaguuauua

SEQ ID NO: 1255394 - RNA, 13 nt, Human
ugauccaacuaau

SEQ ID NO: 1255395 - RNA, 14 nt, Human
ugauccaacuaaug

SEQ ID NO: 1255396 - RNA, 15 nt, Human
ugaucugugggcaca

SEQ ID NO: 1255397 - RNA, 19 nt, Human
ugaucugucuguggcaaaa

SEQ ID NO: 1255398 - RNA, 14 nt, Human
ugaucugucugugg

SEQ ID NO: 1255399 - RNA, 17 nt, Human
ugaucugucuguggcaa

SEQ ID NO: 1255400 - RNA, 15 nt, Human
ugaucuggaacccag

SEQ ID NO: 1255401 - RNA, 17 nt, Human
ugaucuggaacccagac

SEQ ID NO: 1255402 - RNA, 18 nt, Human
ugaucuggaacccagacu

SEQ ID NO: 1255403 - RNA, 19 nt, Human
ugaucuggaacccagacuc

SEQ ID NO: 1255404 - RNA, 17 nt, Human
ugaucugggucucuaau

SEQ ID NO: 1255405 - RNA, 18 nt, Human
ugaucuccguggcuuugg

SEQ ID NO: 1255406 - RNA, 15 nt, Human
ugaucuccguggcuu

SEQ ID NO: 1255407 - RNA, 18 nt, Human
ucuccagccucagcucuc

SEQ ID NO: 1255408 - RNA, 19 nt, Human
ucuccagccucagccuccc

SEQ ID NO: 1255409 - RNA, 16 nt, Human
ucuccagcggcccugu

SEQ ID NO: 1255410 - RNA, 18 nt, Human
ucuccagcggcccuguca

SEQ ID NO: 1255411 - RNA, 20 nt, Human
ucuccagcggcccugucauc

SEQ ID NO: 1255412 - RNA, 12 nt, Human
ucuccagcugac

SEQ ID NO: 1255413 - RNA, 14 nt, Human
ucuccagcugacua

SEQ ID NO: 1255414 - RNA, 15 nt, Human
ucuccagcugacuaa

SEQ ID NO: 1255415 - RNA, 11 nt, Human
ucuccagcugg

SEQ ID NO: 1255416 - RNA, 17 nt, Human
ucuccagcugggcucug

SEQ ID NO: 1255417 - RNA, 19 nt, Human
ucuccagcugggcucugca

SEQ ID NO: 1255418 - RNA, 16 nt, Human
ucuccagccucagccu

SEQ ID NO: 1255419 - RNA, 14 nt, Human
ucuccacugccuuc

SEQ ID NO: 1255420 - RNA, 14 nt, Human
ucuccacuuucagc

SEQ ID NO: 1255421 - RNA, 15 nt, Human
ucuccacuuucagcu

SEQ ID NO: 1255422 - RNA, 16 nt, Human
ucuccacuuucagcug

SEQ ID NO: 1255423 - RNA, 17 nt, Human
ucuccacuuucagcugu

SEQ ID NO: 1255424 - RNA, 18 nt, Human
ucuccacuuucagcuguc

SEQ ID NO: 1255425 - RNA, 19 nt, Human
ucuccacuuucagcugucu

SEQ ID NO: 1255426 - RNA, 18 nt, Human
ucuccagaaagccccacc

SEQ ID NO: 1255427 - RNA, 17 nt, Human
ucuccagaggccaagga

SEQ ID NO: 1255428 - RNA, 21 nt, Human
ucuccagcugggcucugcaau

SEQ ID NO: 1255429 - RNA, 15 nt, Human
ucuccaggcaggucu

SEQ ID NO: 1255430 - RNA, 19 nt, Human
ucuccccagguccagcucu

SEQ ID NO: 1255431 - RNA, 20 nt, Human
ucuccccagguccagcucug

SEQ ID NO: 1255432 - RNA, 22 nt, Human
ucuccccagguccagcucugga

SEQ ID NO: 1255433 - RNA, 12 nt, Human
ucucccccaaca

SEQ ID NO: 1255434 - RNA, 17 nt, Human
ucucccccaacagcugg

SEQ ID NO: 1255435 - RNA, 21 nt, Human
ucucccccaacagcuggaccc

SEQ ID NO: 1255436 - RNA, 12 nt, Human
ucuccccugcac

SEQ ID NO: 1255437 - RNA, 13 nt, Human
ucuccccugcacu

SEQ ID NO: 1255438 - RNA, 14 nt, Human
ucuccccugcacug

SEQ ID NO: 1255439 - RNA, 15 nt, Human
ucuccccugcacugu

SEQ ID NO: 1255440 - RNA, 16 nt, Human
ucuccccugcacugua

SEQ ID NO: 1255441 - RNA, 17 nt, Human
ucuccccugcacuguaa

SEQ ID NO: 1255442 - RNA, 21 nt, Human
ucuccccugcacuguaaaaug

SEQ ID NO: 1255443 - RNA, 12 nt, Human
ucuccccugccc

SEQ ID NO: 1255444 - RNA, 14 nt, Human
ucuccccugccccc

SEQ ID NO: 1255445 - RNA, 18 nt, Human
ucucccuccucugcccgg

SEQ ID NO: 1255446 - RNA, 21 nt, Human
ucucccuccuccaggaagccu

SEQ ID NO: 1255447 - RNA, 15 nt, Human
ucucccugcauggca

SEQ ID NO: 1255448 - RNA, 14 nt, Human
ucucccucccuugg

SEQ ID NO: 1255449 - RNA, 19 nt, Human
ucucccugcauggcauccu

SEQ ID NO: 1255450 - RNA, 15 nt, Human
ucucccugccuccug

SEQ ID NO: 1255451 - RNA, 20 nt, Human
ucucccuggaaugaguugag

SEQ ID NO: 1255452 - RNA, 16 nt, Human
ucucauacccucccuc

SEQ ID NO: 1255453 - RNA, 16 nt, Human
ucucagugaagaauac

SEQ ID NO: 1255454 - RNA, 15 nt, Human
ucucagucugucacc

SEQ ID NO: 1255455 - RNA, 18 nt, Human
ucucagucucugagcagu

SEQ ID NO: 1255456 - RNA, 15 nt, Human
ucucagucucugagc

SEQ ID NO: 1255457 - RNA, 17 nt, Human
ucucagucucugagcag

SEQ ID NO: 1255458 - RNA, 23 nt, Human
ucucaguccaugaagauguagag

SEQ ID NO: 1255459 - RNA, 11 nt, Human
ucucagucucu

SEQ ID NO: 1255460 - RNA, 13 nt, Human
ucucagucucuga

SEQ ID NO: 1255461 - RNA, 14 nt, Human
ucuaugagucuaga

SEQ ID NO: 1255462 - RNA, 15 nt, Human
ucuaugagucuagau

SEQ ID NO: 1255463 - RNA, 16 nt, Human
ucuaugagucuagaug

SEQ ID NO: 1255464 - RNA, 15 nt, Human
ucucauccugcaggc

SEQ ID NO: 1255465 - RNA, 19 nt, Human
ucucaucucagugaagaau

SEQ ID NO: 1255466 - RNA, 20 nt, Human
ucucaucucagugaagaaua

SEQ ID NO: 1255467 - RNA, 18 nt, Human
ucucaucucuucuuuuaa

SEQ ID NO: 1255468 - RNA, 22 nt, Human
ucucaucuggggagcaggcagc

SEQ ID NO: 1255469 - RNA, 11 nt, Human
ucucaucuggg

SEQ ID NO: 1255470 - RNA, 13 nt, Human
ucucaugaaccuc

SEQ ID NO: 1255471 - RNA, 14 nt, Human
ucucaugaaccuca

SEQ ID NO: 1255472 - RNA, 16 nt, Human
ucucaugccucagccu

SEQ ID NO: 1255473 - RNA, 19 nt, Human
ucucaugccucagccuccu

SEQ ID NO: 1255474 - RNA, 13 nt, Human
ucucaugccucag

SEQ ID NO: 1255475 - RNA, 18 nt, Human
ucucaugccccuggcugg

SEQ ID NO: 1255476 - RNA, 21 nt, Human
ucucaugccccuggcugggac

SEQ ID NO: 1255477 - RNA, 22 nt, Human
ucucaugaaccucaagcugcau

SEQ ID NO: 1255478 - RNA, 12 nt, Human
ucucaugccagu

SEQ ID NO: 1255479 - RNA, 20 nt, Human
ucucaugccaguaacaggcu

SEQ ID NO: 1255480 - RNA, 20 nt, Human
ucucaugccucagccuccug

SEQ ID NO: 1255481 - RNA, 13 nt, Human
ucuccacuccaga

SEQ ID NO: 1255482 - RNA, 17 nt, Human
ucuacacuaagagagaa

SEQ ID NO: 1255483 - RNA, 13 nt, Human
ucuacaaaacauu

SEQ ID NO: 1255484 - RNA, 18 nt, Human
ucuacaaaacauuaaacu

SEQ ID NO: 1255485 - RNA, 18 nt, Human
ucuacaaaauccugauga

SEQ ID NO: 1255486 - RNA, 17 nt, Human
ucuacaacucauacacu

SEQ ID NO: 1255487 - RNA, 21 nt, Human
ucuacaacucauacacucgua

SEQ ID NO: 1255488 - RNA, 16 nt, Human
ucuacagagcuucccu

SEQ ID NO: 1255489 - RNA, 17 nt, Human
ucuacagagcuucccug

SEQ ID NO: 1255490 - RNA, 18 nt, Human
ucuacagagcuucccuga

SEQ ID NO: 1255491 - RNA, 19 nt, Human
ucuacagagcuucccugac

SEQ ID NO: 1255492 - RNA, 15 nt, Human
ucuaccuggucuggu

SEQ ID NO: 1255493 - RNA, 15 nt, Human
ucuaccuucucccca

SEQ ID NO: 1255494 - RNA, 16 nt, Human
ucuaccuucuccccag

SEQ ID NO: 1255495 - RNA, 18 nt, Human
ucuaccuucuccccagcu

SEQ ID NO: 1255496 - RNA, 23 nt, Human
ucuaccuucuccccagcucccag

SEQ ID NO: 1255497 - RNA, 20 nt, Human
ucuaccuucuccccagcucc

SEQ ID NO: 1255498 - RNA, 12 nt, Human
ucuacuaaaaau

SEQ ID NO: 1255499 - RNA, 20 nt, Human
ucuacugggaaggcuacuuc

SEQ ID NO: 1255500 - RNA, 16 nt, Human
ucuacuggucuugugg

SEQ ID NO: 1255501 - RNA, 20 nt, Human
ucuacuggucuuguggaauu

SEQ ID NO: 1255502 - RNA, 23 nt, Human
ucuacuggucuuguggaauuggg

SEQ ID NO: 1255503 - RNA, 21 nt, Human
ucuacuuaauccaauggguuu

SEQ ID NO: 1255504 - RNA, 22 nt, Human
ucuacuuccaaacuaauuuuua

SEQ ID NO: 1255505 - RNA, 14 nt, Human
ucuacuuccccaug

SEQ ID NO: 1255506 - RNA, 19 nt, Human
ucuacuuccaaacuaauuu

SEQ ID NO: 1255507 - RNA, 23 nt, Human
ucuaugaacucuguuuucuuucu

SEQ ID NO: 1255508 - RNA, 14 nt, Human
ucuaucaccaagga

SEQ ID NO: 1255509 - RNA, 20 nt, Human
ucguggacaccugcccugcc

SEQ ID NO: 1255510 - RNA, 19 nt, Human
ucguggacaccugcccugc

SEQ ID NO: 1255511 - RNA, 18 nt, Human
ucguggacaccugcccug

SEQ ID NO: 1255512 - RNA, 17 nt, Human
ucguggacaccugcccu

SEQ ID NO: 1255513 - RNA, 22 nt, Human
ucguggacacacacagacuauu

SEQ ID NO: 1255514 - RNA, 20 nt, Human
ucguggacugagugggaagc

SEQ ID NO: 1255515 - RNA, 22 nt, Human
ucguggacugagugggaagccc

SEQ ID NO: 1255516 - RNA, 10 nt, Human
ucguggagag

SEQ ID NO: 1255517 - RNA, 12 nt, Human
ucguggagagcu

SEQ ID NO: 1255518 - RNA, 16 nt, Human
ucguggagagcuagga

SEQ ID NO: 1255519 - RNA, 18 nt, Human
ucguggagagcuaggagc

SEQ ID NO: 1255520 - RNA, 16 nt, Human
ucguggacaccugccc

SEQ ID NO: 1255521 - RNA, 15 nt, Human
ucguggacaccugcc

SEQ ID NO: 1255522 - RNA, 14 nt, Human
ucguggacaccugc

SEQ ID NO: 1255523 - RNA, 13 nt, Human
ucguggacaccug

SEQ ID NO: 1255524 - RNA, 12 nt, Human
ucguggacaccu

SEQ ID NO: 1255525 - RNA, 18 nt, Human
ucguggacacacacagac

SEQ ID NO: 1255526 - RNA, 21 nt, Human
ucgugaccugcuaggccagag

SEQ ID NO: 1255527 - RNA, 17 nt, Human
ucgugaccugcuaggcc

SEQ ID NO: 1255528 - RNA, 24 nt, Human
ucguggagagcuaggagcaaagcc

SEQ ID NO: 1255529 - RNA, 16 nt, Human
ucguguccccuauccu

SEQ ID NO: 1255530 - RNA, 14 nt, Human
ucuaaagguccaca

SEQ ID NO: 1255531 - RNA, 15 nt, Human
ucuaaagguccacag

SEQ ID NO: 1255532 - RNA, 17 nt, Human
ucuaaagguccacaggu

SEQ ID NO: 1255533 - RNA, 22 nt, Human
ucuaaagguccacaggucuaga

SEQ ID NO: 1255534 - RNA, 23 nt, Human
ucuaaagguccacaggucuagac

SEQ ID NO: 1255535 - RNA, 11 nt, Human
ucuaaaguucu

SEQ ID NO: 1255536 - RNA, 12 nt, Human
ucuaaaguucua

SEQ ID NO: 1255537 - RNA, 13 nt, Human
ucuaaaguucuaa

SEQ ID NO: 1255538 - RNA, 14 nt, Human
ucuaaaguucuaag

SEQ ID NO: 1255539 - RNA, 15 nt, Human
ucuaaaguucuaaga

SEQ ID NO: 1255540 - RNA, 16 nt, Human
ucuaaaguucuaagau

SEQ ID NO: 1255541 - RNA, 17 nt, Human
ucuaaaguucuaagauu

SEQ ID NO: 1255542 - RNA, 18 nt, Human
ucuaaaguucuaagauuc

SEQ ID NO: 1255543 - RNA, 19 nt, Human
ucuaaaguucuaagauucu

SEQ ID NO: 1255544 - RNA, 20 nt, Human
ucuaaaguucuaagauucug

SEQ ID NO: 1255545 - RNA, 21 nt, Human
ucuaaaguucuaagauucuga

SEQ ID NO: 1255546 - RNA, 15 nt, Human
ucgucuuucccaugg

SEQ ID NO: 1255547 - RNA, 18 nt, Human
ucgucuuucccaugggga

SEQ ID NO: 1255548 - RNA, 20 nt, Human
ucgucuuucccauggggagg

SEQ ID NO: 1255549 - RNA, 16 nt, Human
ucgugaaaacacauuu

SEQ ID NO: 1255550 - RNA, 15 nt, Human
ucggcacuguacaaa

SEQ ID NO: 1255551 - RNA, 16 nt, Human
ucggauuuuuuccaaa

SEQ ID NO: 1255552 - RNA, 17 nt, Human
ucggauuuuuuccaaaa

SEQ ID NO: 1255553 - RNA, 10 nt, Human
ucggauuaga

SEQ ID NO: 1255554 - RNA, 13 nt, Human
ucggauuuuuucc

SEQ ID NO: 1255555 - RNA, 14 nt, Human
ucggauuuuuucca

SEQ ID NO: 1255556 - RNA, 18 nt, Human
ucggauccagggaggcug

SEQ ID NO: 1255557 - RNA, 19 nt, Human
uccuuagaaaaaaaauuau

SEQ ID NO: 1255558 - RNA, 18 nt, Human
uccuuagacucuuuuccu

SEQ ID NO: 1255559 - RNA, 18 nt, Human
uccuuagaucuggcaugu

SEQ ID NO: 1255560 - RNA, 17 nt, Human
uccuuagaucuggcaug

SEQ ID NO: 1255561 - RNA, 13 nt, Human
uccuuagccugga

SEQ ID NO: 1255562 - RNA, 14 nt, Human
uccuuagccuggac

SEQ ID NO: 1255563 - RNA, 15 nt, Human
uccuuagccuggacc

SEQ ID NO: 1255564 - RNA, 21 nt, Human
uccuuagccuggaccucugac

SEQ ID NO: 1255565 - RNA, 22 nt, Human
uccuuagccuggaccucugaca

SEQ ID NO: 1255566 - RNA, 23 nt, Human
uccuuagccuggaccucugacag

SEQ ID NO: 1255567 - RNA, 17 nt, Human
uccuggcaauagucaaa

SEQ ID NO: 1255568 - RNA, 17 nt, Human
uccuggcccagccuuug

SEQ ID NO: 1255569 - RNA, 19 nt, Human
uccuggaggggcuggggac

SEQ ID NO: 1255570 - RNA, 22 nt, Human
uccuggaugauacuaauaaacu

SEQ ID NO: 1255571 - RNA, 14 nt, Human
uccuggccgccugg

SEQ ID NO: 1255572 - RNA, 12 nt, Human
uccuggcgccug

SEQ ID NO: 1255573 - RNA, 15 nt, Human
uccugucucccuccu

SEQ ID NO: 1255574 - RNA, 23 nt, Human
uccugucucccuccucugcccgg

SEQ ID NO: 1255575 - RNA, 21 nt, Human
uccugcccugggaggcaguga

SEQ ID NO: 1255576 - RNA, 11 nt, Human
uccugcccugg

SEQ ID NO: 1255577 - RNA, 12 nt, Human
uccugcccuggg

SEQ ID NO: 1255578 - RNA, 14 nt, Human
uccugcccugggag

SEQ ID NO: 1255579 - RNA, 15 nt, Human
uccugcccugggagg

SEQ ID NO: 1255580 - RNA, 14 nt, Human
uccugccggcuccu

SEQ ID NO: 1255581 - RNA, 17 nt, Human
uccugccggcuccuugg

SEQ ID NO: 1255582 - RNA, 15 nt, Human
uccuggaggcccagu

SEQ ID NO: 1255583 - RNA, 18 nt, Human
uccuggaggcccaguuca

SEQ ID NO: 1255584 - RNA, 20 nt, Human
uccuggagcagaagcagcaa

SEQ ID NO: 1255585 - RNA, 11 nt, Human
uccuggagggg

SEQ ID NO: 1255586 - RNA, 18 nt, Human
uccuggagcagaccaccc

SEQ ID NO: 1255587 - RNA, 19 nt, Human
uccuggagcagaccacccc

SEQ ID NO: 1255588 - RNA, 13 nt, Human
uccuggaggccca

SEQ ID NO: 1255589 - RNA, 14 nt, Human
uccuggaggcccag

SEQ ID NO: 1255590 - RNA, 18 nt, Human
uccuggacagcugugccu

SEQ ID NO: 1255591 - RNA, 19 nt, Human
uccuggacagcugugccuc

SEQ ID NO: 1255592 - RNA, 22 nt, Human
uccuggacagcugugccucgcu

SEQ ID NO: 1255593 - RNA, 21 nt, Human
uccuggacaugaagauucuuu

SEQ ID NO: 1255594 - RNA, 16 nt, Human
uccugccuaaggcuga

SEQ ID NO: 1255595 - RNA, 19 nt, Human
uccugccuaaggcugaacu

SEQ ID NO: 1255596 - RNA, 22 nt, Human
uccuggacaugaagauucuuuc

SEQ ID NO: 1255597 - RNA, 13 nt, Human
uccuggagcagaa

SEQ ID NO: 1255598 - RNA, 14 nt, Human
uccuggagcagaag

SEQ ID NO: 1255599 - RNA, 16 nt, Human
uccuggagcagaagca

SEQ ID NO: 1255600 - RNA, 18 nt, Human
uccuggagcagaagcagc

SEQ ID NO: 1255601 - RNA, 19 nt, Human
uccuggagcagaagcagca

SEQ ID NO: 1255602 - RNA, 11 nt, Human
uccugccacca

SEQ ID NO: 1255603 - RNA, 16 nt, Human
uccugccaccacgccc

SEQ ID NO: 1255604 - RNA, 16 nt, Human
uccugccacccagccc

SEQ ID NO: 1255605 - RNA, 20 nt, Human
uccugccacccagccccagc

SEQ ID NO: 1255606 - RNA, 22 nt, Human
uccugccacccagccccagcca

SEQ ID NO: 1255607 - RNA, 20 nt, Human
uccugaggcuccacuugguc

SEQ ID NO: 1255608 - RNA, 19 nt, Human
uccugaggcuccacuuggu

SEQ ID NO: 1255609 - RNA, 21 nt, Human
uccugaggcuccacuuggucu

SEQ ID NO: 1255610 - RNA, 16 nt, Human
uccugcauuugugaaa

SEQ ID NO: 1255611 - RNA, 17 nt, Human
uccugccccugagccca

SEQ ID NO: 1255612 - RNA, 21 nt, Human
uccugccccaacuccuuccag

SEQ ID NO: 1255613 - RNA, 18 nt, Human
uccugccccugagcccau

SEQ ID NO: 1255614 - RNA, 10 nt, Human
uccugcccug

SEQ ID NO: 1255615 - RNA, 13 nt, Human
uccugccagcccc

SEQ ID NO: 1255616 - RNA, 14 nt, Human
uccugccagccccu

SEQ ID NO: 1255617 - RNA, 14 nt, Human
uccugccccaggcc

SEQ ID NO: 1255618 - RNA, 15 nt, Human
uccugccccaggccu

SEQ ID NO: 1255619 - RNA, 20 nt, Human
uccucccacccggcugcaga

SEQ ID NO: 1255620 - RNA, 21 nt, Human
uccucccacccggcugcagag

SEQ ID NO: 1255621 - RNA, 12 nt, Human
uccuccuccagg

SEQ ID NO: 1255622 - RNA, 13 nt, Human
uccuccuccaggg

SEQ ID NO: 1255623 - RNA, 14 nt, Human
uccuccuccaggga

SEQ ID NO: 1255624 - RNA, 15 nt, Human
uccuccuccagggac

SEQ ID NO: 1255625 - RNA, 16 nt, Human
uccuccuccagggaca

SEQ ID NO: 1255626 - RNA, 17 nt, Human
uccuccuccagggacag

SEQ ID NO: 1255627 - RNA, 14 nt, Human
uccuccucccaccc

SEQ ID NO: 1255628 - RNA, 20 nt, Human
uccuccucccacccggcugc

SEQ ID NO: 1255629 - RNA, 11 nt, Human
uccuccucugu

SEQ ID NO: 1255630 - RNA, 13 nt, Human
uccuccucuguga

SEQ ID NO: 1255631 - RNA, 12 nt, Human
uccuccucugug

SEQ ID NO: 1255632 - RNA, 23 nt, Human
uccucugucucgagcgcccugca

SEQ ID NO: 1255633 - RNA, 15 nt, Human
uccucugucucgagc

SEQ ID NO: 1255634 - RNA, 19 nt, Human
uccucugugaccaaugucu

SEQ ID NO: 1255635 - RNA, 21 nt, Human
uccucugugaccaaugucuug

SEQ ID NO: 1255636 - RNA, 20 nt, Human
uccucugugaccaaugucuu

SEQ ID NO: 1255637 - RNA, 19 nt, Human
uccucuguucaaagcugcc

SEQ ID NO: 1255638 - RNA, 23 nt, Human
uccucuguucaaagcugccuguc

SEQ ID NO: 1255639 - RNA, 15 nt, Human
uccucuuccaugcug

SEQ ID NO: 1255640 - RNA, 19 nt, Human
uccugagaaaaaagguucc

SEQ ID NO: 1255641 - RNA, 24 nt, Human
uccugagaaaaaagguuccgcuug

SEQ ID NO: 1255642 - RNA, 15 nt, Human
uccugagaaagcuca

SEQ ID NO: 1255643 - RNA, 16 nt, Human
uccugagaaagcucaa

SEQ ID NO: 1255644 - RNA, 18 nt, Human
uccugagaaagcucaaag

SEQ ID NO: 1255645 - RNA, 23 nt, Human
uccugagccagugucaggaggaa

SEQ ID NO: 1255646 - RNA, 14 nt, Human
uccugagccccagg

SEQ ID NO: 1255647 - RNA, 16 nt, Human
uccugagccccaggga

SEQ ID NO: 1255648 - RNA, 17 nt, Human
uccugagccccagggag

SEQ ID NO: 1255649 - RNA, 12 nt, Human
uccugagcucag

SEQ ID NO: 1255650 - RNA, 13 nt, Human
uccugagcucagc

SEQ ID NO: 1255651 - RNA, 14 nt, Human
uccugagcucagcg

SEQ ID NO: 1255652 - RNA, 18 nt, Human
uccugagcucagcgugga

SEQ ID NO: 1255653 - RNA, 19 nt, Human
uccugagcucagcguggag

SEQ ID NO: 1255654 - RNA, 22 nt, Human
uccuaagcuggagugcaguggc

SEQ ID NO: 1255655 - RNA, 22 nt, Human
uccgcuuggagcuauuuuccag

SEQ ID NO: 1255656 - RNA, 16 nt, Human
uccuaagggucgaaag

SEQ ID NO: 1255657 - RNA, 18 nt, Human
uccuaagggucgaaagcu

SEQ ID NO: 1255658 - RNA, 20 nt, Human
uccuaagggucgaaagcucu

SEQ ID NO: 1255659 - RNA, 21 nt, Human
uccuaagggucgaaagcucua

SEQ ID NO: 1255660 - RNA, 23 nt, Human
uccuaagggucgaaagcucuaga

SEQ ID NO: 1255661 - RNA, 13 nt, Human
uccuacccccugu

SEQ ID NO: 1255662 - RNA, 15 nt, Human
uccuacccccugugc

SEQ ID NO: 1255663 - RNA, 16 nt, Human
uccuacccccugugcc

SEQ ID NO: 1255664 - RNA, 17 nt, Human
uccuacccccugugccu

SEQ ID NO: 1255665 - RNA, 13 nt, Human
uccuacagaaaaa

SEQ ID NO: 1255666 - RNA, 14 nt, Human
uccuacagaaaaac

SEQ ID NO: 1255667 - RNA, 15 nt, Human
uccuacagaaaaacc

SEQ ID NO: 1255668 - RNA, 20 nt, Human
uccuacagaaaaaccuuggg

SEQ ID NO: 1255669 - RNA, 17 nt, Human
uccuacagaaaaaccuu

SEQ ID NO: 1255670 - RNA, 19 nt, Human
uccuacagaaaaaccuugg

SEQ ID NO: 1255671 - RNA, 19 nt, Human
uccuaucaccuauuuccau

SEQ ID NO: 1255672 - RNA, 20 nt, Human
uccuacauuaauuaucuagu

SEQ ID NO: 1255673 - RNA, 21 nt, Human
uccuccaggguggcagcaaca

SEQ ID NO: 1255674 - RNA, 12 nt, Human
uccuccauggga

SEQ ID NO: 1255675 - RNA, 20 nt, Human
uccucccaauuucagacucc

SEQ ID NO: 1255676 - RNA, 21 nt, Human
uccucccaauuucagacuccc

SEQ ID NO: 1255677 - RNA, 20 nt, Human
uccuccaggguggcagcaac

SEQ ID NO: 1255678 - RNA, 12 nt, Human
uccuccacgccu

SEQ ID NO: 1255679 - RNA, 12 nt, Human
uccuccagcccc

SEQ ID NO: 1255680 - RNA, 13 nt, Human
uccuccagccccu

SEQ ID NO: 1255681 - RNA, 17 nt, Human
uccuccagccccuguag

SEQ ID NO: 1255682 - RNA, 15 nt, Human
uccuccaggaagccu

SEQ ID NO: 1255683 - RNA, 14 nt, Human
uccuccagggacag

SEQ ID NO: 1255684 - RNA, 16 nt, Human
uccuccagggacagca

SEQ ID NO: 1255685 - RNA, 17 nt, Human
uccuccaccucaacucc

SEQ ID NO: 1255686 - RNA, 19 nt, Human
uccuccacguucugcucau

SEQ ID NO: 1255687 - RNA, 17 nt, Human
uccuccaacaccaagca

SEQ ID NO: 1255688 - RNA, 22 nt, Human
uccuccaacaccaagcacagca

SEQ ID NO: 1255689 - RNA, 17 nt, Human
uccuaucagaaguuucu

SEQ ID NO: 1255690 - RNA, 19 nt, Human
uccucauuguaaacaaacu

SEQ ID NO: 1255691 - RNA, 15 nt, Human
uccgcuauccaccaa

SEQ ID NO: 1255692 - RNA, 16 nt, Human
uccgccuggccuggcc

SEQ ID NO: 1255693 - RNA, 20 nt, Human
uccgcuuggagcuauuuucc

SEQ ID NO: 1255694 - RNA, 16 nt, Human
uccgcaggugcugguc

SEQ ID NO: 1255695 - RNA, 18 nt, Human
uccgcaggugcugguccc

SEQ ID NO: 1255696 - RNA, 14 nt, Human
uccgcagugagaga

SEQ ID NO: 1255697 - RNA, 14 nt, Human
uccgccacuggggc

SEQ ID NO: 1255698 - RNA, 15 nt, Human
uccgccacuggggcu

SEQ ID NO: 1255699 - RNA, 21 nt, Human
uccgccacuggggcucagagc

SEQ ID NO: 1255700 - RNA, 19 nt, Human
uccgccacuggggcucaga

SEQ ID NO: 1255701 - RNA, 20 nt, Human
ucccuugccucaaugccagu

SEQ ID NO: 1255702 - RNA, 23 nt, Human
uccgcagcccccacccccaaggu

SEQ ID NO: 1255703 - RNA, 15 nt, Human
uccgcaggugcuggu

SEQ ID NO: 1255704 - RNA, 16 nt, Human
ucccuucauacuugaa

SEQ ID NO: 1255705 - RNA, 14 nt, Human
ucccuucauacuug

SEQ ID NO: 1255706 - RNA, 16 nt, Human
ucccuucaguacccuc

SEQ ID NO: 1255707 - RNA, 18 nt, Human
ucccuucaguacccucuc

SEQ ID NO: 1255708 - RNA, 19 nt, Human
ucccuucaguacccucuca

SEQ ID NO: 1255709 - RNA, 20 nt, Human
ucccuucaguacccucucag

SEQ ID NO: 1255710 - RNA, 21 nt, Human
ucccuucaguacccucucagc

SEQ ID NO: 1255711 - RNA, 23 nt, Human
ucccuucaguacccucucagcuc

SEQ ID NO: 1255712 - RNA, 10 nt, Human
ucccuucaua

SEQ ID NO: 1255713 - RNA, 15 nt, Human
ucccuuccugccagc

SEQ ID NO: 1255714 - RNA, 14 nt, Human
ucccuugccccccu

SEQ ID NO: 1255715 - RNA, 18 nt, Human
ucccuugccccccuggcc

SEQ ID NO: 1255716 - RNA, 12 nt, Human
ucccuugccuca

SEQ ID NO: 1255717 - RNA, 21 nt, Human
ucccccuguuucagaggcuca

SEQ ID NO: 1255718 - RNA, 12 nt, Human
uccccccaucuu

SEQ ID NO: 1255719 - RNA, 15 nt, Human
uccccccaucuugcu

SEQ ID NO: 1255720 - RNA, 22 nt, Human
uccccccaucuugcuucccuaa

SEQ ID NO: 1255721 - RNA, 13 nt, Human
ucccccccaugca

SEQ ID NO: 1255722 - RNA, 17 nt, Human
ucccccccaugcacugu

SEQ ID NO: 1255723 - RNA, 18 nt, Human
ucccccccaugcacugug

SEQ ID NO: 1255724 - RNA, 23 nt, Human
uccagaaagaaaacuuguauuau

SEQ ID NO: 1255725 - RNA, 13 nt, Human
uccagaaaacaaa

SEQ ID NO: 1255726 - RNA, 14 nt, Human
uccagaaaacaaaa

SEQ ID NO: 1255727 - RNA, 15 nt, Human
uccacuuuguuucgu

SEQ ID NO: 1255728 - RNA, 18 nt, Human
uccacuuuguuucguggg

SEQ ID NO: 1255729 - RNA, 19 nt, Human
uccacuuuguuucgugggg

SEQ ID NO: 1255730 - RNA, 22 nt, Human
uccacuuuguuucguggggagg

SEQ ID NO: 1255731 - RNA, 23 nt, Human
uccacuuuguuucguggggaggu

SEQ ID NO: 1255732 - RNA, 14 nt, Human
uccagaaagcccca

SEQ ID NO: 1255733 - RNA, 16 nt, Human
uccagaaagccccacc

SEQ ID NO: 1255734 - RNA, 18 nt, Human
uccagagucccugccugg

SEQ ID NO: 1255735 - RNA, 23 nt, Human
uccagaaagccccacccaggcca

SEQ ID NO: 1255736 - RNA, 19 nt, Human
uccagagucccugccugga

SEQ ID NO: 1255737 - RNA, 20 nt, Human
uccagagucccugccuggac

SEQ ID NO: 1255738 - RNA, 21 nt, Human
uccagagucccugccuggacc

SEQ ID NO: 1255739 - RNA, 20 nt, Human
uccagaaagccccacccagg

SEQ ID NO: 1255740 - RNA, 15 nt, Human
uccagauaguguagc

SEQ ID NO: 1255741 - RNA, 22 nt, Human
uccagauaguguagcugaggag

SEQ ID NO: 1255742 - RNA, 21 nt, Human
uccacuuggucugugagaugc

SEQ ID NO: 1255743 - RNA, 18 nt, Human
uccaaagucauaauugca

SEQ ID NO: 1255744 - RNA, 23 nt, Human
uccacuuggucugugagaugcua

SEQ ID NO: 1255745 - RNA, 15 nt, Human
uccaaagucauaauu

SEQ ID NO: 1255746 - RNA, 17 nt, Human
uccaaagucauaauugc

SEQ ID NO: 1255747 - RNA, 13 nt, Human
uccagcuccugua

SEQ ID NO: 1255748 - RNA, 14 nt, Human
uccagcuccuuugg

SEQ ID NO: 1255749 - RNA, 15 nt, Human
uccagcuccuuuggg

SEQ ID NO: 1255750 - RNA, 19 nt, Human
uccagcuccuuugggcuuc

SEQ ID NO: 1255751 - RNA, 12 nt, Human
uccagcucugga

SEQ ID NO: 1255752 - RNA, 13 nt, Human
uccagcucuggag

SEQ ID NO: 1255753 - RNA, 15 nt, Human
uccagcucuggaggg

SEQ ID NO: 1255754 - RNA, 20 nt, Human
uccagcucuggaggggaggg

SEQ ID NO: 1255755 - RNA, 16 nt, Human
uccagcuccuuugggc

SEQ ID NO: 1255756 - RNA, 14 nt, Human
uccagcugacuaaa

SEQ ID NO: 1255757 - RNA, 21 nt, Human
uccagcugacuaaacuuuuuu

SEQ ID NO: 1255758 - RNA, 16 nt, Human
uccagcugagcgccag

SEQ ID NO: 1255759 - RNA, 22 nt, Human
uccagcaauucuccugccucag

SEQ ID NO: 1255760 - RNA, 22 nt, Human
uccagcugccccggccccuccc

SEQ ID NO: 1255761 - RNA, 12 nt, Human
uccagcugcccc

SEQ ID NO: 1255762 - RNA, 13 nt, Human
uccagcugccccg

SEQ ID NO: 1255763 - RNA, 21 nt, Human
uccaggggcugcuuccuccug

SEQ ID NO: 1255764 - RNA, 22 nt, Human
uccaggggcugcuuccuccugg

SEQ ID NO: 1255765 - RNA, 23 nt, Human
uccaggggcugcuuccuccugga

SEQ ID NO: 1255766 - RNA, 20 nt, Human
uccaugggccauaugaaaag

SEQ ID NO: 1255767 - RNA, 18 nt, Human
uccaugggagaaaauaga

SEQ ID NO: 1255768 - RNA, 15 nt, Human
uccaugggcagagcc

SEQ ID NO: 1255769 - RNA, 16 nt, Human
uccaugggcagagccc

SEQ ID NO: 1255770 - RNA, 17 nt, Human
uccaugggcagagccca

SEQ ID NO: 1255771 - RNA, 18 nt, Human
uccaugggcagagcccaa

SEQ ID NO: 1255772 - RNA, 22 nt, Human
uccaugggcagagcccaaggga

SEQ ID NO: 1255773 - RNA, 20 nt, Human
uccaugcugugcgcccaggg

SEQ ID NO: 1255774 - RNA, 21 nt, Human
uccaugcugugcgcccagggc

SEQ ID NO: 1255775 - RNA, 22 nt, Human
uccaugcugugcgcccagggcu

SEQ ID NO: 1255776 - RNA, 14 nt, Human
uccaugcugccucc

SEQ ID NO: 1255777 - RNA, 15 nt, Human
uccaugcugccucca

SEQ ID NO: 1255778 - RNA, 22 nt, Human
uccaugcguguuucugacucug

SEQ ID NO: 1255779 - RNA, 15 nt, Human
uccauacauuugugu

SEQ ID NO: 1255780 - RNA, 21 nt, Human
uccauaaucuggacuccucug

SEQ ID NO: 1255781 - RNA, 17 nt, Human
uccauagaccuuuucau

SEQ ID NO: 1255782 - RNA, 14 nt, Human
uccaucaggccacu

SEQ ID NO: 1255783 - RNA, 16 nt, Human
uccaucagaugacaag

SEQ ID NO: 1255784 - RNA, 13 nt, Human
uccaucaucaugu

SEQ ID NO: 1255785 - RNA, 19 nt, Human
uccaucacguuagcugucc

SEQ ID NO: 1255786 - RNA, 21 nt, Human
uccaguucuucgacuguuguu

SEQ ID NO: 1255787 - RNA, 23 nt, Human
uccaguuggaguuuuuuguacca

SEQ ID NO: 1255788 - RNA, 23 nt, Human
uccaguucuucgacuguuguuau

SEQ ID NO: 1255789 - RNA, 19 nt, Human
uccaguucuucgacuguug

SEQ ID NO: 1255790 - RNA, 22 nt, Human
uccaguuaaaaaaaauuuuaau

SEQ ID NO: 1255791 - RNA, 16 nt, Human
uccaguucaugagaau

SEQ ID NO: 1255792 - RNA, 19 nt, Human
uccaguucaugagaaucua

SEQ ID NO: 1255793 - RNA, 22 nt, Human
uccauaaucuggacuccucugu

SEQ ID NO: 1255794 - RNA, 17 nt, Human
uccauaaauccuugaug

SEQ ID NO: 1255795 - RNA, 13 nt, Human
uccauaaagaccc

SEQ ID NO: 1255796 - RNA, 14 nt, Human
uccauaacugaaca

SEQ ID NO: 1255797 - RNA, 14 nt, Human
uccaguaaaauaau

SEQ ID NO: 1255798 - RNA, 15 nt, Human
uccagguccuggugg

SEQ ID NO: 1255799 - RNA, 21 nt, Human
uccagguccugguggggcagc

SEQ ID NO: 1255800 - RNA, 21 nt, Human
uccagguauucguuaucuaau

SEQ ID NO: 1255801 - RNA, 22 nt, Human
uccagguccugguggggcagcu

SEQ ID NO: 1255802 - RNA, 19 nt, Human
uccagguagagggugugua

SEQ ID NO: 1255803 - RNA, 23 nt, Human
uccccagagaaaggggagcccac

SEQ ID NO: 1255804 - RNA, 14 nt, Human
ucccauguucaagc

SEQ ID NO: 1255805 - RNA, 10 nt, Human
ucccaugugg

SEQ ID NO: 1255806 - RNA, 20 nt, Human
uccccagcauuccagccccu

SEQ ID NO: 1255807 - RNA, 12 nt, Human
uccccagcccag

SEQ ID NO: 1255808 - RNA, 13 nt, Human
uccccagcccaga

SEQ ID NO: 1255809 - RNA, 14 nt, Human
uccccagcccagag

SEQ ID NO: 1255810 - RNA, 15 nt, Human
uccccagcccagaga

SEQ ID NO: 1255811 - RNA, 16 nt, Human
uccccagcccagagac

SEQ ID NO: 1255812 - RNA, 17 nt, Human
uccccagcccagagaca

SEQ ID NO: 1255813 - RNA, 22 nt, Human
uccccccaagggaggcugcugc

SEQ ID NO: 1255814 - RNA, 17 nt, Human
uccccccacaagugccc

SEQ ID NO: 1255815 - RNA, 22 nt, Human
uccccccacaagugcccuccag

SEQ ID NO: 1255816 - RNA, 18 nt, Human
uccccccacucccucaca

SEQ ID NO: 1255817 - RNA, 16 nt, Human
ucccaggcgccccuuc

SEQ ID NO: 1255818 - RNA, 23 nt, Human
ucccaggccccaugaccuccagc

SEQ ID NO: 1255819 - RNA, 12 nt, Human
ucccaggcccac

SEQ ID NO: 1255820 - RNA, 19 nt, Human
ucccaggcccacugugccu

SEQ ID NO: 1255821 - RNA, 20 nt, Human
ucccaggcccacugugccuc

SEQ ID NO: 1255822 - RNA, 11 nt, Human
ucccaggcccc

SEQ ID NO: 1255823 - RNA, 18 nt, Human
ucccaggccccaugaccu

SEQ ID NO: 1255824 - RNA, 21 nt, Human
ucccaggccccaugaccucca

SEQ ID NO: 1255825 - RNA, 22 nt, Human
ucccaggccccaugaccuccag

SEQ ID NO: 1255826 - RNA, 11 nt, Human
ucccaggaacu

SEQ ID NO: 1255827 - RNA, 16 nt, Human
ucccaggaacugggcc

SEQ ID NO: 1255828 - RNA, 12 nt, Human
ucccaggacccu

SEQ ID NO: 1255829 - RNA, 17 nt, Human
ucccaggaccacaggcu

SEQ ID NO: 1255830 - RNA, 18 nt, Human
ucccaggaccacaggcuc

SEQ ID NO: 1255831 - RNA, 19 nt, Human
ucccaggaccacaggcuca

SEQ ID NO: 1255832 - RNA, 23 nt, Human
ucccaggaccacaggcucaggca

SEQ ID NO: 1255833 - RNA, 24 nt, Human
ucccaggaccacaggcucaggcag

SEQ ID NO: 1255834 - RNA, 11 nt, Human
ucccaggaccc

SEQ ID NO: 1255835 - RNA, 23 nt, Human
uccaugggcagagcccaagggaa

SEQ ID NO: 1255836 - RNA, 19 nt, Human
uccauuaaacgauuuuuaa

SEQ ID NO: 1255837 - RNA, 23 nt, Human
ucccaccugacacaccaggcgcu

SEQ ID NO: 1255838 - RNA, 22 nt, Human
uccauucacaguucuuugggcc

SEQ ID NO: 1255839 - RNA, 13 nt, Human
ucccaccugacac

SEQ ID NO: 1255840 - RNA, 19 nt, Human
ucccaccugacacaccagg

SEQ ID NO: 1255841 - RNA, 19 nt, Human
ucaugggccacugcuuuuc

SEQ ID NO: 1255842 - RNA, 17 nt, Human
ucaugcuguucaugaaa

SEQ ID NO: 1255843 - RNA, 17 nt, Human
ucaucuuucccuccuug

SEQ ID NO: 1255844 - RNA, 18 nt, Human
ucaucuuucccuccuugg

SEQ ID NO: 1255845 - RNA, 19 nt, Human
ucaucuuucccuccuuggu

SEQ ID NO: 1255846 - RNA, 12 nt, Human
ucaucuuucuuc

SEQ ID NO: 1255847 - RNA, 14 nt, Human
ucaucuuucccucc

SEQ ID NO: 1255848 - RNA, 15 nt, Human
ucaucuuucccuccu

SEQ ID NO: 1255849 - RNA, 16 nt, Human
ucaucuuucccuccuu

SEQ ID NO: 1255850 - RNA, 11 nt, Human
ucaucuugcua

SEQ ID NO: 1255851 - RNA, 17 nt, Human
ucaucuugcuaccagua

SEQ ID NO: 1255852 - RNA, 18 nt, Human
ucaucuugcuaccaguau

SEQ ID NO: 1255853 - RNA, 21 nt, Human
ucaucuugcuaccaguauuua

SEQ ID NO: 1255854 - RNA, 22 nt, Human
ucaucuugcuaccaguauuuag

SEQ ID NO: 1255855 - RNA, 16 nt, Human
ucaucuccccaucauu

SEQ ID NO: 1255856 - RNA, 20 nt, Human
ucaucucauuuaauccuccc

SEQ ID NO: 1255857 - RNA, 21 nt, Human
ucaucucauuuaauccucccu

SEQ ID NO: 1255858 - RNA, 12 nt, Human
ucaucucccacc

SEQ ID NO: 1255859 - RNA, 22 nt, Human
ucaucucccaccuagcagcacc

SEQ ID NO: 1255860 - RNA, 15 nt, Human
ucaucuccugccuuc

SEQ ID NO: 1255861 - RNA, 18 nt, Human
ucaucuccugccuuccuc

SEQ ID NO: 1255862 - RNA, 19 nt, Human
ucaucucagcucacugcaa

SEQ ID NO: 1255863 - RNA, 22 nt, Human
ucaucucagugaagaauacuuc

SEQ ID NO: 1255864 - RNA, 18 nt, Human
ucaguguaccauuugccu

SEQ ID NO: 1255865 - RNA, 19 nt, Human
ucaguguaccauuugccuc

SEQ ID NO: 1255866 - RNA, 22 nt, Human
ucaguguagaaccuaauucaau

SEQ ID NO: 1255867 - RNA, 21 nt, Human
ucaguguauggaaauaaaugu

SEQ ID NO: 1255868 - RNA, 22 nt, Human
ucaguguauggaaauaaaugua

SEQ ID NO: 1255869 - RNA, 12 nt, Human
ucauagcagcuu

SEQ ID NO: 1255870 - RNA, 13 nt, Human
ucauagagacuug

SEQ ID NO: 1255871 - RNA, 11 nt, Human
ucauagcagcu

SEQ ID NO: 1255872 - RNA, 22 nt, Human
ucaguguaccgcgucuacccug

SEQ ID NO: 1255873 - RNA, 17 nt, Human
ucaucaaugaaugaaug

SEQ ID NO: 1255874 - RNA, 13 nt, Human
ucaucaauuaaag

SEQ ID NO: 1255875 - RNA, 19 nt, Human
ucaucaauggggccaguca

SEQ ID NO: 1255876 - RNA, 23 nt, Human
ucaucauucacuucacugugcug

SEQ ID NO: 1255877 - RNA, 22 nt, Human
ucaucauucacuucacugugcu

SEQ ID NO: 1255878 - RNA, 21 nt, Human
ucaucauucacuucacugugc

SEQ ID NO: 1255879 - RNA, 19 nt, Human
ucaucauucacuucacugu

SEQ ID NO: 1255880 - RNA, 17 nt, Human
ucaucauucacuucacu

SEQ ID NO: 1255881 - RNA, 16 nt, Human
ucaucaugauaauuca

SEQ ID NO: 1255882 - RNA, 14 nt, Human
ucaucauggccagc

SEQ ID NO: 1255883 - RNA, 17 nt, Human
ucaucauggccagcugg

SEQ ID NO: 1255884 - RNA, 18 nt, Human
ucaucauggccagcugga

SEQ ID NO: 1255885 - RNA, 22 nt, Human
ucaucauggccagcuggaggca

SEQ ID NO: 1255886 - RNA, 22 nt, Human
ucaucauguaucgcuucaugua

SEQ ID NO: 1255887 - RNA, 13 nt, Human
ucaucauucucug

SEQ ID NO: 1255888 - RNA, 14 nt, Human
ucaucauucucugu

SEQ ID NO: 1255889 - RNA, 18 nt, Human
ucaucauucucugucuca

SEQ ID NO: 1255890 - RNA, 19 nt, Human
ucaucauucucugucucau

SEQ ID NO: 1255891 - RNA, 20 nt, Human
ucauccaccccaucccuccc

SEQ ID NO: 1255892 - RNA, 14 nt, Human
ucauggugcucaga

SEQ ID NO: 1255893 - RNA, 15 nt, Human
ucauuagaaauauuu

SEQ ID NO: 1255894 - RNA, 20 nt, Human
ucauuagacuggaacuugaa

SEQ ID NO: 1255895 - RNA, 16 nt, Human
ucauuaggauggcuag

SEQ ID NO: 1255896 - RNA, 14 nt, Human
ucauuguagaaaag

SEQ ID NO: 1255897 - RNA, 14 nt, Human
ucauuguauguggu

SEQ ID NO: 1255898 - RNA, 23 nt, Human
ucauugucugugaagugagaccu

SEQ ID NO: 1255899 - RNA, 18 nt, Human
ucauugucuguguagagu

SEQ ID NO: 1255900 - RNA, 22 nt, Human
ucauuuaauccucccuuccucc

SEQ ID NO: 1255901 - RNA, 17 nt, Human
ucauuuagcauguuguu

SEQ ID NO: 1255902 - RNA, 23 nt, Human
ucauuuagcauguuguugaaagg

SEQ ID NO: 1255903 - RNA, 15 nt, Human
ucauuuagccugucc

SEQ ID NO: 1255904 - RNA, 16 nt, Human
ucauuuagccuguccu

SEQ ID NO: 1255905 - RNA, 17 nt, Human
ucauuuagccuguccug

SEQ ID NO: 1255906 - RNA, 18 nt, Human
ucauuuagucaugugacc

SEQ ID NO: 1255907 - RNA, 19 nt, Human
ucauuuaguuugauuauuc

SEQ ID NO: 1255908 - RNA, 12 nt, Human
uccaaaccacuu

SEQ ID NO: 1255909 - RNA, 22 nt, Human
uccaaaccacuuuuugcagcuu

SEQ ID NO: 1255910 - RNA, 19 nt, Human
uccaaagaggcugccccuc

SEQ ID NO: 1255911 - RNA, 20 nt, Human
uccaaagaguagaauugcau

SEQ ID NO: 1255912 - RNA, 19 nt, Human
uccaaacuaccuuccaguu

SEQ ID NO: 1255913 - RNA, 12 nt, Human
uccaaacuaauu

SEQ ID NO: 1255914 - RNA, 16 nt, Human
uccaaacuaauuuuua

SEQ ID NO: 1255915 - RNA, 13 nt, Human
uccaaagaggcug

SEQ ID NO: 1255916 - RNA, 14 nt, Human
uccaaagaggcugc

SEQ ID NO: 1255917 - RNA, 15 nt, Human
uccaaagaggcugcc

SEQ ID NO: 1255918 - RNA, 16 nt, Human
uccaaagaggcugccc

SEQ ID NO: 1255919 - RNA, 18 nt, Human
uccaaagaggcugccccu

SEQ ID NO: 1255920 - RNA, 14 nt, Human
uccaaacaggcuca

SEQ ID NO: 1255921 - RNA, 21 nt, Human
uccaaaagaagcccccagcua

SEQ ID NO: 1255922 - RNA, 16 nt, Human
uccaaaagauugcuga

SEQ ID NO: 1255923 - RNA, 14 nt, Human
uccaaacauccucu

SEQ ID NO: 1255924 - RNA, 12 nt, Human
uccaaaacugcc

SEQ ID NO: 1255925 - RNA, 13 nt, Human
uccaaaacugccu

SEQ ID NO: 1255926 - RNA, 21 nt, Human
uccaaaaccgccagcucuguu

SEQ ID NO: 1255927 - RNA, 14 nt, Human
uccaaaagaagccc

SEQ ID NO: 1255928 - RNA, 15 nt, Human
uccaaaagaagcccc

SEQ ID NO: 1255929 - RNA, 18 nt, Human
uccaaaagaagcccccag

SEQ ID NO: 1255930 - RNA, 12 nt, Human
ucauuuaucuau

SEQ ID NO: 1255931 - RNA, 16 nt, Human
ucauuuaucuauaauu

SEQ ID NO: 1255932 - RNA, 18 nt, Human
ucauuuaucuauaauuua

SEQ ID NO: 1255933 - RNA, 21 nt, Human
ucauuuaucuauaauuuaccu

SEQ ID NO: 1255934 - RNA, 21 nt, Human
uccaaaaauguguaagaacaa

SEQ ID NO: 1255935 - RNA, 17 nt, Human
uccaaaaauguguaaga

SEQ ID NO: 1255936 - RNA, 18 nt, Human
uccaaaaccgccagcucu

SEQ ID NO: 1255937 - RNA, 19 nt, Human
uccaaaaccgccagcucug

SEQ ID NO: 1255938 - RNA, 20 nt, Human
uccaaaaccgccagcucugu

SEQ ID NO: 1255939 - RNA, 22 nt, Human
uccaaaaccgccagcucuguuc

SEQ ID NO: 1255940 - RNA, 20 nt, Human
ucagucucuauaccaauaaa

SEQ ID NO: 1255941 - RNA, 13 nt, Human
ucagugaagacua

SEQ ID NO: 1255942 - RNA, 14 nt, Human
ucagugaaguugcu

SEQ ID NO: 1255943 - RNA, 16 nt, Human
ucagugaaguugcugc

SEQ ID NO: 1255944 - RNA, 17 nt, Human
ucagugaaguugcugcu

SEQ ID NO: 1255945 - RNA, 18 nt, Human
ucagugaaguugcugcuu

SEQ ID NO: 1255946 - RNA, 20 nt, Human
ucagugaaguugcugcuucu

SEQ ID NO: 1255947 - RNA, 18 nt, Human
ucagugacccuggcuccu

SEQ ID NO: 1255948 - RNA, 21 nt, Human
ucagucucuauaccaauaaag

SEQ ID NO: 1255949 - RNA, 18 nt, Human
ucagucucuauaccaaua

SEQ ID NO: 1255950 - RNA, 15 nt, Human
ucagucucuauacca

SEQ ID NO: 1255951 - RNA, 13 nt, Human
ucaguauuuaacu

SEQ ID NO: 1255952 - RNA, 14 nt, Human
ucaguauuuaacua

SEQ ID NO: 1255953 - RNA, 20 nt, Human
ucaguauuuaacuaauuaua

SEQ ID NO: 1255954 - RNA, 15 nt, Human
ucaguauuuaacuaa

SEQ ID NO: 1255955 - RNA, 16 nt, Human
ucagucucccucccuu

SEQ ID NO: 1255956 - RNA, 18 nt, Human
ucagucucagaaugucau

SEQ ID NO: 1255957 - RNA, 19 nt, Human
ucagucucagaaugucauu

SEQ ID NO: 1255958 - RNA, 16 nt, Human
ucagucaauauuuuua

SEQ ID NO: 1255959 - RNA, 13 nt, Human
ucagucacagcca

SEQ ID NO: 1255960 - RNA, 14 nt, Human
ucagucacagccac

SEQ ID NO: 1255961 - RNA, 15 nt, Human
ucagucacagccacc

SEQ ID NO: 1255962 - RNA, 13 nt, Human
ucaggcuagaugu

SEQ ID NO: 1255963 - RNA, 12 nt, Human
ucaggcugccug

SEQ ID NO: 1255964 - RNA, 13 nt, Human
ucaggcugccuga

SEQ ID NO: 1255965 - RNA, 16 nt, Human
ucaggcucuucuccuu

SEQ ID NO: 1255966 - RNA, 21 nt, Human
ucaggcucuucuccuuucaca

SEQ ID NO: 1255967 - RNA, 15 nt, Human
ucaggcugccugagu

SEQ ID NO: 1255968 - RNA, 17 nt, Human
ucagggaaggaggagcc

SEQ ID NO: 1255969 - RNA, 19 nt, Human
ucagggaaggaggagccug

SEQ ID NO: 1255970 - RNA, 20 nt, Human
ucagggaaggaggagccugu

SEQ ID NO: 1255971 - RNA, 21 nt, Human
ucagggaaggaggagccuguc

SEQ ID NO: 1255972 - RNA, 23 nt, Human
ucagggaaggaggagccuguccu

SEQ ID NO: 1255973 - RNA, 22 nt, Human
ucagggaaggaggagccugucc

SEQ ID NO: 1255974 - RNA, 15 nt, Human
ucagguauuaagaaa

SEQ ID NO: 1255975 - RNA, 17 nt, Human
ucagguauuaagaaaau

SEQ ID NO: 1255976 - RNA, 18 nt, Human
ucaggucacauaaaacuu

SEQ ID NO: 1255977 - RNA, 12 nt, Human
ucaggucccugc

SEQ ID NO: 1255978 - RNA, 23 nt, Human
ucaggucacauaaaacuuuguau

SEQ ID NO: 1255979 - RNA, 16 nt, Human
ucagguccucagagaa

SEQ ID NO: 1255980 - RNA, 21 nt, Human
ucaggugaaacuccagaugcc

SEQ ID NO: 1255981 - RNA, 16 nt, Human
ucaggugaaaggaaau

SEQ ID NO: 1255982 - RNA, 15 nt, Human
ucaggagcccuggga

SEQ ID NO: 1255983 - RNA, 14 nt, Human
ucaggagcccuggg

SEQ ID NO: 1255984 - RNA, 12 nt, Human
ucaggagcccug

SEQ ID NO: 1255985 - RNA, 11 nt, Human
ucaggagcccu

SEQ ID NO: 1255986 - RNA, 22 nt, Human
ucaggaaucaucaggaacguuu

SEQ ID NO: 1255987 - RNA, 16 nt, Human
ucaggaauucuuggag

SEQ ID NO: 1255988 - RNA, 19 nt, Human
ucaggaaucggaauccugu

SEQ ID NO: 1255989 - RNA, 17 nt, Human
ucaggaauauuuuccaa

SEQ ID NO: 1255990 - RNA, 18 nt, Human
ucaggaauauuuuccaaa

SEQ ID NO: 1255991 - RNA, 18 nt, Human
ucaggaauucuuggagaa

SEQ ID NO: 1255992 - RNA, 15 nt, Human
ucaggacacaggccu

SEQ ID NO: 1255993 - RNA, 16 nt, Human
ucaggacacaggccug

SEQ ID NO: 1255994 - RNA, 23 nt, Human
ucaggacacaggccuguguagcu

SEQ ID NO: 1255995 - RNA, 17 nt, Human
ucaggacacaggccugu

SEQ ID NO: 1255996 - RNA, 18 nt, Human
ucaggacacaggccugug

SEQ ID NO: 1255997 - RNA, 19 nt, Human
ucaggacacaggccugugu

SEQ ID NO: 1255998 - RNA, 18 nt, Human
ucaggagcccugggaggc

SEQ ID NO: 1255999 - RNA, 16 nt, Human
ucaggaguguguguga

SEQ ID NO: 1256000 - RNA, 20 nt, Human
ucaggaucaaaccccgacca

SEQ ID NO: 1256001 - RNA, 20 nt, Human
ucaggauccaagcuaagcac

SEQ ID NO: 1256002 - RNA, 22 nt, Human
ucaggauccaagcuaagcacug

SEQ ID NO: 1256003 - RNA, 14 nt, Human
ucaggaucuauuuu

SEQ ID NO: 1256004 - RNA, 18 nt, Human
ucaggaugagggaaaaga

SEQ ID NO: 1256005 - RNA, 19 nt, Human
ucaggaugagggaaaagaa

SEQ ID NO: 1256006 - RNA, 17 nt, Human
ucaggccuagaggccug

SEQ ID NO: 1256007 - RNA, 18 nt, Human
ucaggccuuugagcucag

SEQ ID NO: 1256008 - RNA, 20 nt, Human
ucaggcuacugcuucaaucu

SEQ ID NO: 1256009 - RNA, 15 nt, Human
ucaggcucuucuccu

SEQ ID NO: 1256010 - RNA, 14 nt, Human
ucagcuccaggugg

SEQ ID NO: 1256011 - RNA, 19 nt, Human
ucagcuccagguggcucug

SEQ ID NO: 1256012 - RNA, 13 nt, Human
ucagcucccacaa

SEQ ID NO: 1256013 - RNA, 16 nt, Human
ucagcucccacaagcc

SEQ ID NO: 1256014 - RNA, 15 nt, Human
ucaccggcucucacc

SEQ ID NO: 1256015 - RNA, 18 nt, Human
ucaccggggugguuuagu

SEQ ID NO: 1256016 - RNA, 22 nt, Human
ucaccggcucucaccuggcccu

SEQ ID NO: 1256017 - RNA, 13 nt, Human
ucaccgugggcuc

SEQ ID NO: 1256018 - RNA, 15 nt, Human
ucaccgugggcuccc

SEQ ID NO: 1256019 - RNA, 16 nt, Human
ucaccgugggcucccu

SEQ ID NO: 1256020 - RNA, 17 nt, Human
ucaccgugggcucccug

SEQ ID NO: 1256021 - RNA, 18 nt, Human
ucaccgugggcucccuga

SEQ ID NO: 1256022 - RNA, 19 nt, Human
ucaccgugggcucccugac

SEQ ID NO: 1256023 - RNA, 13 nt, Human
ucagcugucuuuu

SEQ ID NO: 1256024 - RNA, 14 nt, Human
ucagcugucuuuug

SEQ ID NO: 1256025 - RNA, 15 nt, Human
ucagcugucuuuugg

SEQ ID NO: 1256026 - RNA, 19 nt, Human
ucagcugucuuuuggagga

SEQ ID NO: 1256027 - RNA, 20 nt, Human
ucagcucccacaagccucug

SEQ ID NO: 1256028 - RNA, 18 nt, Human
ucagcucccacaagccuc

SEQ ID NO: 1256029 - RNA, 14 nt, Human
ucagcucugaaaga

SEQ ID NO: 1256030 - RNA, 16 nt, Human
ucagcucugaaagaga

SEQ ID NO: 1256031 - RNA, 18 nt, Human
ucagcucugaaagagaaa

SEQ ID NO: 1256032 - RNA, 21 nt, Human
ucagcucugaaagagaaacac

SEQ ID NO: 1256033 - RNA, 16 nt, Human
ucagcucugacauucu

SEQ ID NO: 1256034 - RNA, 22 nt, Human
ucagcucugacauucugauucg

SEQ ID NO: 1256035 - RNA, 19 nt, Human
ucagcucugggccauucuc

SEQ ID NO: 1256036 - RNA, 22 nt, Human
ucagcucuucuccauccuacca

SEQ ID NO: 1256037 - RNA, 16 nt, Human
uaugauucccagccag

SEQ ID NO: 1256038 - RNA, 16 nt, Human
uaugauucaaaugucu

SEQ ID NO: 1256039 - RNA, 21 nt, Human
uaugauucaaaugucuauaaa

SEQ ID NO: 1256040 - RNA, 21 nt, Human
uaugauuagcuuugucacugu

SEQ ID NO: 1256041 - RNA, 22 nt, Human
uaugauuacuggccuuuuucau

SEQ ID NO: 1256042 - RNA, 12 nt, Human
uaugauuauuaa

SEQ ID NO: 1256043 - RNA, 21 nt, Human
uaugauuauuaacgaugucca

SEQ ID NO: 1256044 - RNA, 15 nt, Human
uaugauuacuggccu

SEQ ID NO: 1256045 - RNA, 14 nt, Human
uaugagcucuucau

SEQ ID NO: 1256046 - RNA, 15 nt, Human
uaugagcucuucaug

SEQ ID NO: 1256047 - RNA, 16 nt, Human
uaugagcucuucaugu

SEQ ID NO: 1256048 - RNA, 18 nt, Human
uaugacuauguaaacuac

SEQ ID NO: 1256049 - RNA, 21 nt, Human
uaugacuugggcacccccagc

SEQ ID NO: 1256050 - RNA, 22 nt, Human
uaugacuugggcacccccagcc

SEQ ID NO: 1256051 - RNA, 23 nt, Human
uaugacuugggcacccccagccu

SEQ ID NO: 1256052 - RNA, 17 nt, Human
uaugacuauguaaacua

SEQ ID NO: 1256053 - RNA, 16 nt, Human
uaugacuauguaaacu

SEQ ID NO: 1256054 - RNA, 14 nt, Human
uaugcacaguaaaa

SEQ ID NO: 1256055 - RNA, 16 nt, Human
uaugcaauuuccuuuu

SEQ ID NO: 1256056 - RNA, 16 nt, Human
uaugcaaacaggguaa

SEQ ID NO: 1256057 - RNA, 14 nt, Human
uaugcaaaagcaag

SEQ ID NO: 1256058 - RNA, 19 nt, Human
uaugauuuuuuuuucauac

SEQ ID NO: 1256059 - RNA, 15 nt, Human
uaugauuuggaaaau

SEQ ID NO: 1256060 - RNA, 17 nt, Human
uaugauuuggaaaauaa

SEQ ID NO: 1256061 - RNA, 18 nt, Human
uaugauuuggaaaauaaa

SEQ ID NO: 1256062 - RNA, 17 nt, Human
uaugauuuaauuugaaa

SEQ ID NO: 1256063 - RNA, 18 nt, Human
uaugauuuaauuugaaau

SEQ ID NO: 1256064 - RNA, 13 nt, Human
uaugauuuacauu

SEQ ID NO: 1256065 - RNA, 17 nt, Human
uaugauuuuuuuuucau

SEQ ID NO: 1256066 - RNA, 20 nt, Human
uaugcauauuauuuuauguu

SEQ ID NO: 1256067 - RNA, 15 nt, Human
uaugcauauuuguuu

SEQ ID NO: 1256068 - RNA, 18 nt, Human
uaugcagagguccacaac

SEQ ID NO: 1256069 - RNA, 15 nt, Human
uaugcacaugaacuu

SEQ ID NO: 1256070 - RNA, 19 nt, Human
uaugcacaugaacuuagau

SEQ ID NO: 1256071 - RNA, 16 nt, Human
uaugcacaugaacuua

SEQ ID NO: 1256072 - RNA, 19 nt, Human
uaugcacuuauaauuuucc

SEQ ID NO: 1256073 - RNA, 22 nt, Human
uaugcacuuauaauuuuccuaa

SEQ ID NO: 1256074 - RNA, 20 nt, Human
uaugcacuuauaauuuuccu

SEQ ID NO: 1256075 - RNA, 18 nt, Human
uaugcagaacacauuuca

SEQ ID NO: 1256076 - RNA, 20 nt, Human
uaugcagaacacauuucaaa

SEQ ID NO: 1256077 - RNA, 15 nt, Human
uaugcuucuguuuua

SEQ ID NO: 1256078 - RNA, 16 nt, Human
uaugcuucuguuuuau

SEQ ID NO: 1256079 - RNA, 20 nt, Human
uaugcuuauauuguucacuu

SEQ ID NO: 1256080 - RNA, 14 nt, Human
uaugcauauuuguu

SEQ ID NO: 1256081 - RNA, 17 nt, Human
uauggaaauaaauguau

SEQ ID NO: 1256082 - RNA, 13 nt, Human
uauggaaauauau

SEQ ID NO: 1256083 - RNA, 15 nt, Human
uauggaaauauauau

SEQ ID NO: 1256084 - RNA, 14 nt, Human
uauggaaauauaua

SEQ ID NO: 1256085 - RNA, 18 nt, Human
uauggaauugauuugcau

SEQ ID NO: 1256086 - RNA, 15 nt, Human
uauggaauuuugcaa

SEQ ID NO: 1256087 - RNA, 16 nt, Human
uauggacaaaacaaga

SEQ ID NO: 1256088 - RNA, 11 nt, Human
uauggaauuga

SEQ ID NO: 1256089 - RNA, 19 nt, Human
uauggaauugauuugcauu

SEQ ID NO: 1256090 - RNA, 16 nt, Human
uaugcuugcaaaaacu

SEQ ID NO: 1256091 - RNA, 18 nt, Human
uaugcuuguaacuaaaau

SEQ ID NO: 1256092 - RNA, 20 nt, Human
uaugcuuguaacuaaaauaa

SEQ ID NO: 1256093 - RNA, 15 nt, Human
uaugcuuugaaacag

SEQ ID NO: 1256094 - RNA, 16 nt, Human
uauggaaauaaaugua

SEQ ID NO: 1256095 - RNA, 20 nt, Human
uaugaaguuuuuuuuauaca

SEQ ID NO: 1256096 - RNA, 18 nt, Human
uaugaauaaagacaccua

SEQ ID NO: 1256097 - RNA, 14 nt, Human
uaucuucacuuguc

SEQ ID NO: 1256098 - RNA, 15 nt, Human
uaucuucucaaguuc

SEQ ID NO: 1256099 - RNA, 17 nt, Human
uaucuucucaaguucua

SEQ ID NO: 1256100 - RNA, 18 nt, Human
uaucuucucaaguucuaa

SEQ ID NO: 1256101 - RNA, 20 nt, Human
uaucuucucaaguucuaaga

SEQ ID NO: 1256102 - RNA, 21 nt, Human
uaucuucucaaguucuaagau

SEQ ID NO: 1256103 - RNA, 16 nt, Human
uaucuguuugagaaag

SEQ ID NO: 1256104 - RNA, 15 nt, Human
uaucuguuugagaaa

SEQ ID NO: 1256105 - RNA, 19 nt, Human
uaucuguuugagaaaguca

SEQ ID NO: 1256106 - RNA, 18 nt, Human
uaucuuacuauuucacaa

SEQ ID NO: 1256107 - RNA, 17 nt, Human
uaucuuacuauuucaca

SEQ ID NO: 1256108 - RNA, 21 nt, Human
uaucuguagacggcucaguau

SEQ ID NO: 1256109 - RNA, 22 nt, Human
uaucuguaaugguacugacuuu

SEQ ID NO: 1256110 - RNA, 18 nt, Human
uaucugggcugugggcaa

SEQ ID NO: 1256111 - RNA, 11 nt, Human
uaucugggcuu

SEQ ID NO: 1256112 - RNA, 14 nt, Human
uaucugggcuuccu

SEQ ID NO: 1256113 - RNA, 15 nt, Human
uaucugggcuuccug

SEQ ID NO: 1256114 - RNA, 16 nt, Human
uaucugggcuuccugg

SEQ ID NO: 1256115 - RNA, 18 nt, Human
uaucugggcuuccuggag

SEQ ID NO: 1256116 - RNA, 20 nt, Human
uaucugggcuuccuggagca

SEQ ID NO: 1256117 - RNA, 13 nt, Human
uaucuguaauggu

SEQ ID NO: 1256118 - RNA, 15 nt, Human
uaucugucagcugca

SEQ ID NO: 1256119 - RNA, 17 nt, Human
uaugaauuacauuugua

SEQ ID NO: 1256120 - RNA, 15 nt, Human
uaugaaugugaagcc

SEQ ID NO: 1256121 - RNA, 16 nt, Human
uaugaaugugaagccu

SEQ ID NO: 1256122 - RNA, 17 nt, Human
uaugaaugugaagccuu

SEQ ID NO: 1256123 - RNA, 18 nt, Human
uaugaaugugaagccuuc

SEQ ID NO: 1256124 - RNA, 23 nt, Human
uaugaauuacauuuguauaaaau

SEQ ID NO: 1256125 - RNA, 19 nt, Human
uaugaaugugaagccuucc

SEQ ID NO: 1256126 - RNA, 14 nt, Human
uaugaauuauucaa

SEQ ID NO: 1256127 - RNA, 18 nt, Human
uaugaauuauucaauuua

SEQ ID NO: 1256128 - RNA, 19 nt, Human
uaugaauuauucaauuuau

SEQ ID NO: 1256129 - RNA, 18 nt, Human
uaugaauugaauuaucuu

SEQ ID NO: 1256130 - RNA, 22 nt, Human
uaucuucucaaguucuaagauu

SEQ ID NO: 1256131 - RNA, 13 nt, Human
uaugaauacuuug

SEQ ID NO: 1256132 - RNA, 15 nt, Human
uaugaauacuuugca

SEQ ID NO: 1256133 - RNA, 22 nt, Human
uaugacaguaauuguguuuaca

SEQ ID NO: 1256134 - RNA, 18 nt, Human
uaugacaguaauuguguu

SEQ ID NO: 1256135 - RNA, 17 nt, Human
uaugacaguaauugugu

SEQ ID NO: 1256136 - RNA, 15 nt, Human
uaugacaguaauugu

SEQ ID NO: 1256137 - RNA, 14 nt, Human
uaugaccacacucc

SEQ ID NO: 1256138 - RNA, 19 nt, Human
uaugaccacacuccagcug

SEQ ID NO: 1256139 - RNA, 20 nt, Human
uaugacaucacuuguacaaa

SEQ ID NO: 1256140 - RNA, 23 nt, Human
uaugacaucacuuguacaaaaua

SEQ ID NO: 1256141 - RNA, 24 nt, Human
uaugacaucacuuguacaaaauaa

SEQ ID NO: 1256142 - RNA, 23 nt, Human
uaugacaguaauuguguuuacau

SEQ ID NO: 1256143 - RNA, 19 nt, Human
uaugacaucacuuguacaa

SEQ ID NO: 1256144 - RNA, 18 nt, Human
uaucguaaaauuaagaaa

SEQ ID NO: 1256145 - RNA, 15 nt, Human
uaucguaaaauuaag

SEQ ID NO: 1256146 - RNA, 15 nt, Human
uauccuucagccuga

SEQ ID NO: 1256147 - RNA, 18 nt, Human
uauccuuucauauaguua

SEQ ID NO: 1256148 - RNA, 11 nt, Human
uauccucccug

SEQ ID NO: 1256149 - RNA, 12 nt, Human
uauccucccugu

SEQ ID NO: 1256150 - RNA, 14 nt, Human
uauccucccuguaa

SEQ ID NO: 1256151 - RNA, 15 nt, Human
uauccucccuguaac

SEQ ID NO: 1256152 - RNA, 16 nt, Human
uauccucccuguaacu

SEQ ID NO: 1256153 - RNA, 17 nt, Human
uauccucccuguaacuu

SEQ ID NO: 1256154 - RNA, 14 nt, Human
uauccucucuuccu

SEQ ID NO: 1256155 - RNA, 15 nt, Human
uauccucucuuccuc

SEQ ID NO: 1256156 - RNA, 18 nt, Human
uauccucucuuccucuuc

SEQ ID NO: 1256157 - RNA, 12 nt, Human
uauccucuguaa

SEQ ID NO: 1256158 - RNA, 14 nt, Human
uauccugaaauuuc

SEQ ID NO: 1256159 - RNA, 16 nt, Human
uauccugaaauuucag

SEQ ID NO: 1256160 - RNA, 17 nt, Human
uauccugaaauuucaga

SEQ ID NO: 1256161 - RNA, 21 nt, Human
uaucugaggcacaugucagca

SEQ ID NO: 1256162 - RNA, 23 nt, Human
uaucugaguuacagaaaugauua

SEQ ID NO: 1256163 - RNA, 13 nt, Human
uaucugaucagaa

SEQ ID NO: 1256164 - RNA, 22 nt, Human
uaucugcaagugagguguguca

SEQ ID NO: 1256165 - RNA, 21 nt, Human
uaucugccucucuuguaauuu

SEQ ID NO: 1256166 - RNA, 20 nt, Human
uaucugccucucuuguaauu

SEQ ID NO: 1256167 - RNA, 16 nt, Human
uaucugccucucuugu

SEQ ID NO: 1256168 - RNA, 15 nt, Human
uaucuggccucugcu

SEQ ID NO: 1256169 - RNA, 23 nt, Human
uaucugggaagcuauuuuuuuca

SEQ ID NO: 1256170 - RNA, 22 nt, Human
uaucuaccccagacuagaugua

SEQ ID NO: 1256171 - RNA, 22 nt, Human
uaucuaaguuaauuuaaaguug

SEQ ID NO: 1256172 - RNA, 13 nt, Human
uaucuaaucauga

SEQ ID NO: 1256173 - RNA, 13 nt, Human
uaucuaauuuaua

SEQ ID NO: 1256174 - RNA, 23 nt, Human
uaucuaaguuaauuuaaaguugu

SEQ ID NO: 1256175 - RNA, 19 nt, Human
uaucuaaguuaauuuaaag

SEQ ID NO: 1256176 - RNA, 20 nt, Human
uaucuaaguuaauuuaaagu

SEQ ID NO: 1256177 - RNA, 15 nt, Human
uaggucucaauaccu

SEQ ID NO: 1256178 - RNA, 16 nt, Human
uaggucagugcaaaua

SEQ ID NO: 1256179 - RNA, 20 nt, Human
uagguauaaguggugugugu

SEQ ID NO: 1256180 - RNA, 14 nt, Human
uagguaggaaaugu

SEQ ID NO: 1256181 - RNA, 16 nt, Human
uagguaguaccaaaau

SEQ ID NO: 1256182 - RNA, 14 nt, Human
uagguacacagcuc

SEQ ID NO: 1256183 - RNA, 16 nt, Human
uaggcuagggugggga

SEQ ID NO: 1256184 - RNA, 20 nt, Human
uaggccuugcggcuccucag

SEQ ID NO: 1256185 - RNA, 21 nt, Human
uaggccuugcggcuccucagg

SEQ ID NO: 1256186 - RNA, 16 nt, Human
uaggcuauuuguaaau

SEQ ID NO: 1256187 - RNA, 18 nt, Human
uaggcuauuuguaaaucu

SEQ ID NO: 1256188 - RNA, 20 nt, Human
uaggcuauuuguaaaucugc

SEQ ID NO: 1256189 - RNA, 17 nt, Human
uaggccguuccuucaaa

SEQ ID NO: 1256190 - RNA, 14 nt, Human
uaggcccccacuug

SEQ ID NO: 1256191 - RNA, 19 nt, Human
uaggcccccacuugccucu

SEQ ID NO: 1256192 - RNA, 21 nt, Human
uaggcccccacuugccucuuc

SEQ ID NO: 1256193 - RNA, 18 nt, Human
uaggccaugggacaggga

SEQ ID NO: 1256194 - RNA, 22 nt, Human
uaggaccaagcaucuugggggg

SEQ ID NO: 1256195 - RNA, 18 nt, Human
uaggaccaagcaucuugg

SEQ ID NO: 1256196 - RNA, 19 nt, Human
uaggaccaugguuaagagu

SEQ ID NO: 1256197 - RNA, 23 nt, Human
uaggaccaugguuaagaguccaa

SEQ ID NO: 1256198 - RNA, 19 nt, Human
uaggaccuuuccaccacag

SEQ ID NO: 1256199 - RNA, 20 nt, Human
uaggaauugacccacaagaa

SEQ ID NO: 1256200 - RNA, 19 nt, Human
uaggacacaguuccuggga

SEQ ID NO: 1256201 - RNA, 17 nt, Human
uaggaccaagcaucuug

SEQ ID NO: 1256202 - RNA, 12 nt, Human
uaggaauugacc

SEQ ID NO: 1256203 - RNA, 16 nt, Human
uaggaauggaaaggau

SEQ ID NO: 1256204 - RNA, 21 nt, Human
guggcucugaggugccugucc

SEQ ID NO: 1256205 - RNA, 17 nt, Human
guggcugaggccaccca

SEQ ID NO: 1256206 - RNA, 13 nt, Human
guggcugcagccu

SEQ ID NO: 1256207 - RNA, 14 nt, Human
guggcugcagccuc

SEQ ID NO: 1256208 - RNA, 17 nt, Human
guggcugcagccucagg

SEQ ID NO: 1256209 - RNA, 15 nt, Human
guggcugcagccuca

SEQ ID NO: 1256210 - RNA, 23 nt, Human
uaggaauagcaugucacuaaagc

SEQ ID NO: 1256211 - RNA, 20 nt, Human
uaguugcaacuuuguauaaa

SEQ ID NO: 1256212 - RNA, 13 nt, Human
uaguguucauaaa

SEQ ID NO: 1256213 - RNA, 15 nt, Human
uagugcuaacaugaa

SEQ ID NO: 1256214 - RNA, 16 nt, Human
uagugcaguuauuugc

SEQ ID NO: 1256215 - RNA, 22 nt, Human
uagugccacuuaauguauguua

SEQ ID NO: 1256216 - RNA, 13 nt, Human
uagucaaauugug

SEQ ID NO: 1256217 - RNA, 14 nt, Human
uagucaaauugugu

SEQ ID NO: 1256218 - RNA, 14 nt, Human
uagugcaaauuguc

SEQ ID NO: 1256219 - RNA, 15 nt, Human
uagugcaaauuguca

SEQ ID NO: 1256220 - RNA, 19 nt, Human
uaguauuuuuuguauaauu

SEQ ID NO: 1256221 - RNA, 18 nt, Human
uaguauuucuaugaaaua

SEQ ID NO: 1256222 - RNA, 19 nt, Human
uaguauuucuaugaaauau

SEQ ID NO: 1256223 - RNA, 13 nt, Human
uaguauuuucuaa

SEQ ID NO: 1256224 - RNA, 14 nt, Human
uaguauuuucuaaa

SEQ ID NO: 1256225 - RNA, 18 nt, Human
uaguauuuuuuguauaau

SEQ ID NO: 1256226 - RNA, 21 nt, Human
uaggugauccacucgccuuca

SEQ ID NO: 1256227 - RNA, 15 nt, Human
uaggugauccaugua

SEQ ID NO: 1256228 - RNA, 16 nt, Human
uaggugauccauguaa

SEQ ID NO: 1256229 - RNA, 19 nt, Human
uaggugauccauguaacug

SEQ ID NO: 1256230 - RNA, 22 nt, Human
uaggugauccauguaacugccu

SEQ ID NO: 1256231 - RNA, 21 nt, Human
uaggugauccauguaacugcc

SEQ ID NO: 1256232 - RNA, 22 nt, Human
uaggugcaauuucaagguucua

SEQ ID NO: 1256233 - RNA, 13 nt, Human
uaguaucaaaaga

SEQ ID NO: 1256234 - RNA, 18 nt, Human
uaguaucaucagauagca

SEQ ID NO: 1256235 - RNA, 20 nt, Human
uauaauucacauuguauuca

SEQ ID NO: 1256236 - RNA, 17 nt, Human
uauaauuauauguugua

SEQ ID NO: 1256237 - RNA, 15 nt, Human
uauaauucacauugu

SEQ ID NO: 1256238 - RNA, 13 nt, Human
uauaauuauaugu

SEQ ID NO: 1256239 - RNA, 19 nt, Human
uauaauuauauguuguaag

SEQ ID NO: 1256240 - RNA, 13 nt, Human
uauaauucuuuca

SEQ ID NO: 1256241 - RNA, 16 nt, Human
uauaauucuuucaaua

SEQ ID NO: 1256242 - RNA, 17 nt, Human
uauaauugccaaaaagu

SEQ ID NO: 1256243 - RNA, 17 nt, Human
uauaauuggauuuccua

SEQ ID NO: 1256244 - RNA, 18 nt, Human
uauaauuggauuuccuaa

SEQ ID NO: 1256245 - RNA, 19 nt, Human
uauaauuggauuuccuaau

SEQ ID NO: 1256246 - RNA, 20 nt, Human
uauaauuggauuuccuaaua

SEQ ID NO: 1256247 - RNA, 22 nt, Human
uauaauuggauuuccuaauacu

SEQ ID NO: 1256248 - RNA, 21 nt, Human
uauaauuguucucagaauccc

SEQ ID NO: 1256249 - RNA, 12 nt, Human
uauaccuguguu

SEQ ID NO: 1256250 - RNA, 23 nt, Human
uauaccuguguuucuugccucau

SEQ ID NO: 1256251 - RNA, 18 nt, Human
uauaauguuguuauuuaa

SEQ ID NO: 1256252 - RNA, 16 nt, Human
uauaaucaucaaguaa

SEQ ID NO: 1256253 - RNA, 17 nt, Human
uauaaucaucaaguaau

SEQ ID NO: 1256254 - RNA, 22 nt, Human
uauaaucaucaaguaauacaaa

SEQ ID NO: 1256255 - RNA, 23 nt, Human
uauaaucauuauuacuuuugcug

SEQ ID NO: 1256256 - RNA, 17 nt, Human
uauaaucauuauuacuu

SEQ ID NO: 1256257 - RNA, 16 nt, Human
uauaaucuuauaauug

SEQ ID NO: 1256258 - RNA, 17 nt, Human
uauaaucuuauaauugu

SEQ ID NO: 1256259 - RNA, 17 nt, Human
uauaauguuguuauuua

SEQ ID NO: 1256260 - RNA, 19 nt, Human
uauaauguuguuauuuaaa

SEQ ID NO: 1256261 - RNA, 22 nt, Human
uauaauaaaggacuguaaucuu

SEQ ID NO: 1256262 - RNA, 19 nt, Human
uauaauaaaggacuguaau

SEQ ID NO: 1256263 - RNA, 14 nt, Human
uauaauaaaggacu

SEQ ID NO: 1256264 - RNA, 11 nt, Human
uauaaaugucu

SEQ ID NO: 1256265 - RNA, 17 nt, Human
uauaaaugucuuuaaug

SEQ ID NO: 1256266 - RNA, 23 nt, Human
uauaaaugucuuuaaugcaauau

SEQ ID NO: 1256267 - RNA, 19 nt, Human
uauaaaugucuuuaaugca

SEQ ID NO: 1256268 - RNA, 16 nt, Human
uauaauaaauguacau

SEQ ID NO: 1256269 - RNA, 17 nt, Human
uauaauauacuauauuu

SEQ ID NO: 1256270 - RNA, 20 nt, Human
uauaauauacuauauuuaug

SEQ ID NO: 1256271 - RNA, 13 nt, Human
uauaauauuuuaa

SEQ ID NO: 1256272 - RNA, 17 nt, Human
uaguugccuuaaaauaa

SEQ ID NO: 1256273 - RNA, 21 nt, Human
uauaaagacguuuuauaagca

SEQ ID NO: 1256274 - RNA, 14 nt, Human
uauaaagaauugug

SEQ ID NO: 1256275 - RNA, 17 nt, Human
uauaaagacguuuuaua

SEQ ID NO: 1256276 - RNA, 12 nt, Human
uauaaagcauuu

SEQ ID NO: 1256277 - RNA, 12 nt, Human
uauaaagcagua

SEQ ID NO: 1256278 - RNA, 15 nt, Human
uauaaaugcaaauaa

SEQ ID NO: 1256279 - RNA, 16 nt, Human
uauaaaugcaaauaac

SEQ ID NO: 1256280 - RNA, 17 nt, Human
uauaaaugcaaauaaca

SEQ ID NO: 1256281 - RNA, 18 nt, Human
uauaaaugcaaauaacaa

SEQ ID NO: 1256282 - RNA, 17 nt, Human
uauacuauaguaccagu

SEQ ID NO: 1256283 - RNA, 22 nt, Human
uauacuagggagccauuugaga

SEQ ID NO: 1256284 - RNA, 20 nt, Human
uauacuagggagccauuuga

SEQ ID NO: 1256285 - RNA, 20 nt, Human
uauacgcagcgugcuuuaaa

SEQ ID NO: 1256286 - RNA, 22 nt, Human
uauaccuguguuucuugccuca

SEQ ID NO: 1256287 - RNA, 16 nt, Human
uauacgaaauaauugu

SEQ ID NO: 1256288 - RNA, 17 nt, Human
uauacgaaauaauuguu

SEQ ID NO: 1256289 - RNA, 17 nt, Human
uauacugcauacuuuuu

SEQ ID NO: 1256290 - RNA, 23 nt, Human
uauacugcuuggagcugagcaaa

SEQ ID NO: 1256291 - RNA, 12 nt, Human
uauacugcauac

SEQ ID NO: 1256292 - RNA, 16 nt, Human
uauacugcauacuuuu

SEQ ID NO: 1256293 - RNA, 13 nt, Human
uauaguuaacaca

SEQ ID NO: 1256294 - RNA, 15 nt, Human
uauaguuaacacacu

SEQ ID NO: 1256295 - RNA, 16 nt, Human
uauaguuaacacacua

SEQ ID NO: 1256296 - RNA, 18 nt, Human
uauaguuaacacacuacc

SEQ ID NO: 1256297 - RNA, 13 nt, Human
uauaguuacugug

SEQ ID NO: 1256298 - RNA, 15 nt, Human
uauaguuacugugua

SEQ ID NO: 1256299 - RNA, 16 nt, Human
uauaguuacuguguaa

SEQ ID NO: 1256300 - RNA, 18 nt, Human
uauaguuacuguguaauu

SEQ ID NO: 1256301 - RNA, 20 nt, Human
uauaguuacuguguaauuag

SEQ ID NO: 1256302 - RNA, 22 nt, Human
uauaguuacuguguaauuagug

SEQ ID NO: 1256303 - RNA, 17 nt, Human
uauaguuaacacacuac

SEQ ID NO: 1256304 - RNA, 22 nt, Human
uauaguuauuaaguucuuuaaa

SEQ ID NO: 1256305 - RNA, 21 nt, Human
uauaguucaugucugcuauca

SEQ ID NO: 1256306 - RNA, 12 nt, Human
uauaguucuaga

SEQ ID NO: 1256307 - RNA, 13 nt, Human
uauaguucuagac

SEQ ID NO: 1256308 - RNA, 15 nt, Human
uauaguucuagacau

SEQ ID NO: 1256309 - RNA, 12 nt, Human
uauaguucuagg

SEQ ID NO: 1256310 - RNA, 13 nt, Human
uauaguucuaggc

SEQ ID NO: 1256311 - RNA, 14 nt, Human
uauaguuucugagg

SEQ ID NO: 1256312 - RNA, 22 nt, Human
uauaguuucugaggcuuuauga

SEQ ID NO: 1256313 - RNA, 15 nt, Human
uauaguuuuacuuuu

SEQ ID NO: 1256314 - RNA, 13 nt, Human
uauauaacaaugc

SEQ ID NO: 1256315 - RNA, 22 nt, Human
uauauaaauauauuauuacuug

SEQ ID NO: 1256316 - RNA, 16 nt, Human
uauaguuuuacuuuua

SEQ ID NO: 1256317 - RNA, 17 nt, Human
uauaguuuuacuuuuaa

SEQ ID NO: 1256318 - RNA, 19 nt, Human
uauauaaauauauuauuac

SEQ ID NO: 1256319 - RNA, 14 nt, Human
uauauguguaugca

SEQ ID NO: 1256320 - RNA, 13 nt, Human
uauaugcuucugu

SEQ ID NO: 1256321 - RNA, 21 nt, Human
uauaugcuuacugauauauuu

SEQ ID NO: 1256322 - RNA, 16 nt, Human
uauaugcuuacugaua

SEQ ID NO: 1256323 - RNA, 17 nt, Human
uauaugcuuacugauau

SEQ ID NO: 1256324 - RNA, 14 nt, Human
uauaugcuuacuga

SEQ ID NO: 1256325 - RNA, 14 nt, Human
uauuucuaugaaau

SEQ ID NO: 1256326 - RNA, 15 nt, Human
uauuucuaugaaaua

SEQ ID NO: 1256327 - RNA, 22 nt, Human
uauuucuuccuaccaagucaaa

SEQ ID NO: 1256328 - RNA, 16 nt, Human
uauuugaaccaauaaa

SEQ ID NO: 1256329 - RNA, 14 nt, Human
uauuugaacuuuuu

SEQ ID NO: 1256330 - RNA, 20 nt, Human
uauuugaaaacauguuuauu

SEQ ID NO: 1256331 - RNA, 13 nt, Human
uauuucuaugaaa

SEQ ID NO: 1256332 - RNA, 14 nt, Human
uauuuauuacugua

SEQ ID NO: 1256333 - RNA, 13 nt, Human
uauuuauguaugg

SEQ ID NO: 1256334 - RNA, 12 nt, Human
uauuuauguauu

SEQ ID NO: 1256335 - RNA, 13 nt, Human
uauuuauguauug

SEQ ID NO: 1256336 - RNA, 20 nt, Human
uauuuauguauugugcaaug

SEQ ID NO: 1256337 - RNA, 13 nt, Human
uauuuaugaaagu

SEQ ID NO: 1256338 - RNA, 12 nt, Human
uauuuaucuuua

SEQ ID NO: 1256339 - RNA, 16 nt, Human
uauuuaacagaaauug

SEQ ID NO: 1256340 - RNA, 15 nt, Human
uauuuauauguacau

SEQ ID NO: 1256341 - RNA, 17 nt, Human
uauuuauauguacauga

SEQ ID NO: 1256342 - RNA, 13 nt, Human
uauuguuguccuu

SEQ ID NO: 1256343 - RNA, 14 nt, Human
uauuguuguccuuu

SEQ ID NO: 1256344 - RNA, 16 nt, Human
uauuguuguccuuuuc

SEQ ID NO: 1256345 - RNA, 18 nt, Human
uauuguuguccuuuucau

SEQ ID NO: 1256346 - RNA, 22 nt, Human
uauuguuguccuuuucauaggu

SEQ ID NO: 1256347 - RNA, 12 nt, Human
uauuguuucaau

SEQ ID NO: 1256348 - RNA, 18 nt, Human
uauuguuucaauugcauc

SEQ ID NO: 1256349 - RNA, 18 nt, Human
uauuuaaauguaaagaca

SEQ ID NO: 1256350 - RNA, 15 nt, Human
uauuuaacaagaucu

SEQ ID NO: 1256351 - RNA, 12 nt, Human
uauuuaacagaa

SEQ ID NO: 1256352 - RNA, 13 nt, Human
uauuuaacagaaa

SEQ ID NO: 1256353 - RNA, 14 nt, Human
uauuuaacagaaau

SEQ ID NO: 1256354 - RNA, 23 nt, Human
uauugugcaauguguauaaacaa

SEQ ID NO: 1256355 - RNA, 15 nt, Human
uauuguucucacacu

SEQ ID NO: 1256356 - RNA, 14 nt, Human
uauuguugaaaaag

SEQ ID NO: 1256357 - RNA, 17 nt, Human
uauuguugaaaaaguuu

SEQ ID NO: 1256358 - RNA, 17 nt, Human
uauuguugcauugcuuu

SEQ ID NO: 1256359 - RNA, 19 nt, Human
uauugugcaauguaaauau

SEQ ID NO: 1256360 - RNA, 14 nt, Human
uauugugcaaugug

SEQ ID NO: 1256361 - RNA, 16 nt, Human
uauugugcaaugugua

SEQ ID NO: 1256362 - RNA, 18 nt, Human
uauugugcaauguguaua

SEQ ID NO: 1256363 - RNA, 17 nt, Human
uauugcauuuauaugua

SEQ ID NO: 1256364 - RNA, 13 nt, Human
uauugcauuuaua

SEQ ID NO: 1256365 - RNA, 15 nt, Human
uauugcauuaauuuu

SEQ ID NO: 1256366 - RNA, 20 nt, Human
uauugcaguuuaucauucaa

SEQ ID NO: 1256367 - RNA, 19 nt, Human
uauugcaguuuaucauuca

SEQ ID NO: 1256368 - RNA, 14 nt, Human
uauugcaaagucag

SEQ ID NO: 1256369 - RNA, 20 nt, Human
uauugcaaagucaggaauca

SEQ ID NO: 1256370 - RNA, 13 nt, Human
uauugcacauugu

SEQ ID NO: 1256371 - RNA, 17 nt, Human
uauugcacauuguaaaa

SEQ ID NO: 1256372 - RNA, 11 nt, Human
uauugcaguuu

SEQ ID NO: 1256373 - RNA, 13 nt, Human
uauugcaguuuau

SEQ ID NO: 1256374 - RNA, 15 nt, Human
uauugcaguuuauca

SEQ ID NO: 1256375 - RNA, 17 nt, Human
uauuccaagacaugucu

SEQ ID NO: 1256376 - RNA, 15 nt, Human
uauucauuuucucua

SEQ ID NO: 1256377 - RNA, 17 nt, Human
uauugauaagaucuuuu

SEQ ID NO: 1256378 - RNA, 18 nt, Human
uauugauaagaucuuuua

SEQ ID NO: 1256379 - RNA, 19 nt, Human
uauugauaagaucuuuuau

SEQ ID NO: 1256380 - RNA, 23 nt, Human
uauugauaagaucuuuuauuuug

SEQ ID NO: 1256381 - RNA, 23 nt, Human
uauucauccaaguuaaauguaga

SEQ ID NO: 1256382 - RNA, 18 nt, Human
uauucauuguggucauag

SEQ ID NO: 1256383 - RNA, 14 nt, Human
uauucauuuucucu

SEQ ID NO: 1256384 - RNA, 16 nt, Human
uauucauuuucucuaa

SEQ ID NO: 1256385 - RNA, 14 nt, Human
uauuaucugucagc

SEQ ID NO: 1256386 - RNA, 12 nt, Human
uauuaucuuuuc

SEQ ID NO: 1256387 - RNA, 16 nt, Human
uauuauccccauuucu

SEQ ID NO: 1256388 - RNA, 15 nt, Human
uauuaucccagcugc

SEQ ID NO: 1256389 - RNA, 14 nt, Human
uauuaucugggcuu

SEQ ID NO: 1256390 - RNA, 13 nt, Human
uauuaucugucag

SEQ ID NO: 1256391 - RNA, 15 nt, Human
uauuaucaacaauag

SEQ ID NO: 1256392 - RNA, 14 nt, Human
uauuaucuuuucau

SEQ ID NO: 1256393 - RNA, 19 nt, Human
uauuaucuuuucauacauu

SEQ ID NO: 1256394 - RNA, 13 nt, Human
uauuaugaaugug

SEQ ID NO: 1256395 - RNA, 14 nt, Human
uauuaugaauguga

SEQ ID NO: 1256396 - RNA, 14 nt, Human
uauuaugauuagcu

SEQ ID NO: 1256397 - RNA, 20 nt, Human
uauuaugaaugugaagccuu

SEQ ID NO: 1256398 - RNA, 21 nt, Human
uauuaugaaugugaagccuuc

SEQ ID NO: 1256399 - RNA, 22 nt, Human
uauuaugaaugugaagccuucc

SEQ ID NO: 1256400 - RNA, 14 nt, Human
uauuaugagaugcu

SEQ ID NO: 1256401 - RNA, 15 nt, Human
uauuaugagaugcug

SEQ ID NO: 1256402 - RNA, 17 nt, Human
uauuaugagaugcuggc

SEQ ID NO: 1256403 - RNA, 19 nt, Human
uauuaugcauuauaucaaa

SEQ ID NO: 1256404 - RNA, 20 nt, Human
uauuauggaggcaggaguuu

SEQ ID NO: 1256405 - RNA, 17 nt, Human
uauuaugucucuucuga

SEQ ID NO: 1256406 - RNA, 16 nt, Human
uauuauguuaaaacug

SEQ ID NO: 1256407 - RNA, 21 nt, Human
uauuaugucucuucugagcua

SEQ ID NO: 1256408 - RNA, 13 nt, Human
uauuauuuauaua

SEQ ID NO: 1256409 - RNA, 14 nt, Human
uauuauuuguguuu

SEQ ID NO: 1256410 - RNA, 15 nt, Human
uauuaagcaucagaa

SEQ ID NO: 1256411 - RNA, 18 nt, Human
uauuaacuuuaauguuuu

SEQ ID NO: 1256412 - RNA, 16 nt, Human
uauuaagguguggcuu

SEQ ID NO: 1256413 - RNA, 19 nt, Human
uauuaauaaacauucuauc

SEQ ID NO: 1256414 - RNA, 16 nt, Human
uauuaaguaacuuauu

SEQ ID NO: 1256415 - RNA, 14 nt, Human
uauuauaaucuuau

SEQ ID NO: 1256416 - RNA, 19 nt, Human
uauuauaaucuuauaauug

SEQ ID NO: 1256417 - RNA, 17 nt, Human
uauuauauuuacaaaug

SEQ ID NO: 1256418 - RNA, 21 nt, Human
uauuauauguacccucugaaa

SEQ ID NO: 1256419 - RNA, 17 nt, Human
uauuauauguacccucu

SEQ ID NO: 1256420 - RNA, 18 nt, Human
uauuauacuuguaauuau

SEQ ID NO: 1256421 - RNA, 17 nt, Human
uauuauacuuguaauua

SEQ ID NO: 1256422 - RNA, 12 nt, Human
uauuauauggaa

SEQ ID NO: 1256423 - RNA, 13 nt, Human
uauuauauggaaa

SEQ ID NO: 1256424 - RNA, 13 nt, Human
uauguguguuuua

SEQ ID NO: 1256425 - RNA, 16 nt, Human
uauggagucauuuuua

SEQ ID NO: 1256426 - RNA, 22 nt, Human
uauggagucauuuuuacaaugu

SEQ ID NO: 1256427 - RNA, 14 nt, Human
uauggaggcaggag

SEQ ID NO: 1256428 - RNA, 14 nt, Human
uauggagagcccug

SEQ ID NO: 1256429 - RNA, 15 nt, Human
uauggagagcccugg

SEQ ID NO: 1256430 - RNA, 16 nt, Human
uauggagagcccuggg

SEQ ID NO: 1256431 - RNA, 13 nt, Human
uauggacuaucug

SEQ ID NO: 1256432 - RNA, 17 nt, Human
uauggacuaucugucug

SEQ ID NO: 1256433 - RNA, 18 nt, Human
uauggacuaucugucugg

SEQ ID NO: 1256434 - RNA, 21 nt, Human
uauggacuaucugucuggugg

SEQ ID NO: 1256435 - RNA, 12 nt, Human
uauguuaaaacu

SEQ ID NO: 1256436 - RNA, 19 nt, Human
uauguuagugcaaauuguc

SEQ ID NO: 1256437 - RNA, 15 nt, Human
uauguuauauauaaa

SEQ ID NO: 1256438 - RNA, 19 nt, Human
uauguuauauauaaauaua

SEQ ID NO: 1256439 - RNA, 21 nt, Human
uauguuauauauaaauauauu

SEQ ID NO: 1256440 - RNA, 19 nt, Human
uauguuaagggaagaauuc

SEQ ID NO: 1256441 - RNA, 18 nt, Human
uauguuacuacaugcacu

SEQ ID NO: 1256442 - RNA, 16 nt, Human
uauguucagauuauug

SEQ ID NO: 1256443 - RNA, 20 nt, Human
uauguuauauauaaauauau

SEQ ID NO: 1256444 - RNA, 16 nt, Human
uauguucaaagucaaa

SEQ ID NO: 1256445 - RNA, 21 nt, Human
uauguucaacuaggaucagaa

SEQ ID NO: 1256446 - RNA, 17 nt, Human
uauguucuaagaaguga

SEQ ID NO: 1256447 - RNA, 14 nt, Human
uauguuccauuaaa

SEQ ID NO: 1256448 - RNA, 15 nt, Human
uauguuccauuaaac

SEQ ID NO: 1256449 - RNA, 16 nt, Human
uauguuccauuaaacg

SEQ ID NO: 1256450 - RNA, 20 nt, Human
uauguuccauuaaacgauuu

SEQ ID NO: 1256451 - RNA, 18 nt, Human
uauguucuaaccuuuaca

SEQ ID NO: 1256452 - RNA, 17 nt, Human
uauguugaagccuuugu

SEQ ID NO: 1256453 - RNA, 12 nt, Human
uauguugaauac

SEQ ID NO: 1256454 - RNA, 15 nt, Human
uauguugaauacuuu

SEQ ID NO: 1256455 - RNA, 18 nt, Human
uauguugaauacuuuuua

SEQ ID NO: 1256456 - RNA, 22 nt, Human
uauguuguaauauuucuucaaa

SEQ ID NO: 1256457 - RNA, 13 nt, Human
uauuaacauaccu

SEQ ID NO: 1256458 - RNA, 17 nt, Human
uauuaacuuuaauguuu

SEQ ID NO: 1256459 - RNA, 15 nt, Human
uauuaacgaugucca

SEQ ID NO: 1256460 - RNA, 20 nt, Human
ucaaaccaaaucacugaacu

SEQ ID NO: 1256461 - RNA, 15 nt, Human
ucaaacauuuugaaa

SEQ ID NO: 1256462 - RNA, 17 nt, Human
ucaaacauuuugaaagu

SEQ ID NO: 1256463 - RNA, 18 nt, Human
ucaaacauuuugaaaguc

SEQ ID NO: 1256464 - RNA, 19 nt, Human
ucaaaccccgaccaccugc

SEQ ID NO: 1256465 - RNA, 20 nt, Human
ucaaaccccgaccaccugcc

SEQ ID NO: 1256466 - RNA, 13 nt, Human
ucaaacauuuucu

SEQ ID NO: 1256467 - RNA, 15 nt, Human
ucaaacauuuucugg

SEQ ID NO: 1256468 - RNA, 12 nt, Human
ucaaacauuuug

SEQ ID NO: 1256469 - RNA, 23 nt, Human
ucaaaccccgaccaccugcccaa

SEQ ID NO: 1256470 - RNA, 15 nt, Human
ucaaacccuagccuu

SEQ ID NO: 1256471 - RNA, 16 nt, Human
ucaaacccuagccuug

SEQ ID NO: 1256472 - RNA, 17 nt, Human
ucaaacccuagccuugc

SEQ ID NO: 1256473 - RNA, 18 nt, Human
ucaaacccuagccuugcu

SEQ ID NO: 1256474 - RNA, 19 nt, Human
ucaaacccuagccuugcuu

SEQ ID NO: 1256475 - RNA, 20 nt, Human
ucaaacccuagccuugcuug

SEQ ID NO: 1256476 - RNA, 21 nt, Human
ucaaacccuagccuugcuugu

SEQ ID NO: 1256477 - RNA, 19 nt, Human
ucaaacugaggaauuucac

SEQ ID NO: 1256478 - RNA, 17 nt, Human
ucaaacauauauaacaa

SEQ ID NO: 1256479 - RNA, 21 nt, Human
uauuugcauaacaauuccucu

SEQ ID NO: 1256480 - RNA, 22 nt, Human
uauuugcauaacaauuccucua

SEQ ID NO: 1256481 - RNA, 21 nt, Human
uauuugaaugauuuuucuuua

SEQ ID NO: 1256482 - RNA, 19 nt, Human
uauuugagaagcugcucaa

SEQ ID NO: 1256483 - RNA, 21 nt, Human
uauuugacaacguuucagcga

SEQ ID NO: 1256484 - RNA, 16 nt, Human
ucaaauccuugaagau

SEQ ID NO: 1256485 - RNA, 20 nt, Human
ucaaaucuaccacuguauga

SEQ ID NO: 1256486 - RNA, 15 nt, Human
ucaaaucuaccacug

SEQ ID NO: 1256487 - RNA, 23 nt, Human
ucaaaugaauggaggaacuuucc

SEQ ID NO: 1256488 - RNA, 20 nt, Human
ucaaauggggccagauccag

SEQ ID NO: 1256489 - RNA, 20 nt, Human
ucaaaugguaggcauuuccu

SEQ ID NO: 1256490 - RNA, 21 nt, Human
ucaaaugguaggcauuuccua

SEQ ID NO: 1256491 - RNA, 16 nt, Human
ucaaaugguaucuuuu

SEQ ID NO: 1256492 - RNA, 22 nt, Human
ucaaacuuggauacuuggauuu

SEQ ID NO: 1256493 - RNA, 21 nt, Human
ucaaagaggcugaggcuggca

SEQ ID NO: 1256494 - RNA, 12 nt, Human
ucaaacuuggau

SEQ ID NO: 1256495 - RNA, 16 nt, Human
ucaaggaauuucuuaa

SEQ ID NO: 1256496 - RNA, 19 nt, Human
ucaaggaauuucuuaacuu

SEQ ID NO: 1256497 - RNA, 21 nt, Human
ucaaggaauuucuuaacuucu

SEQ ID NO: 1256498 - RNA, 23 nt, Human
ucaaggaauuucuuaacuucuug

SEQ ID NO: 1256499 - RNA, 21 nt, Human
ucaaggacacgggccugucca

SEQ ID NO: 1256500 - RNA, 20 nt, Human
ucaaggaaguagaaacaaaa

SEQ ID NO: 1256501 - RNA, 22 nt, Human
ucaacuccaaacugacucuuaa

SEQ ID NO: 1256502 - RNA, 13 nt, Human
ucaaccugccuga

SEQ ID NO: 1256503 - RNA, 17 nt, Human
ucaaccugggcaaagcc

SEQ ID NO: 1256504 - RNA, 14 nt, Human
ucaacucccugccc

SEQ ID NO: 1256505 - RNA, 15 nt, Human
ucaacucccugcccc

SEQ ID NO: 1256506 - RNA, 21 nt, Human
ucaacucccugccccccagcc

SEQ ID NO: 1256507 - RNA, 22 nt, Human
ucaacucccugccccccagccc

SEQ ID NO: 1256508 - RNA, 20 nt, Human
ucaacucucuuauugccuca

SEQ ID NO: 1256509 - RNA, 21 nt, Human
ucaacucucuuauugccucac

SEQ ID NO: 1256510 - RNA, 23 nt, Human
ucaacucucuuauugccucacuu

SEQ ID NO: 1256511 - RNA, 24 nt, Human
ucaacucucuuauugccucacuuc

SEQ ID NO: 1256512 - RNA, 18 nt, Human
ucaacugaccagccucca

SEQ ID NO: 1256513 - RNA, 19 nt, Human
ucaacucuugaguuuuuca

SEQ ID NO: 1256514 - RNA, 14 nt, Human
ucaacucuuuguua

SEQ ID NO: 1256515 - RNA, 22 nt, Human
ucaacucuuuguuauuugaaaa

SEQ ID NO: 1256516 - RNA, 24 nt, Human
ucaacugaccagccuccaugcugc

SEQ ID NO: 1256517 - RNA, 16 nt, Human
ucaacucuuuguuauu

SEQ ID NO: 1256518 - RNA, 20 nt, Human
ucaaauguuuaaucauauaa

SEQ ID NO: 1256519 - RNA, 18 nt, Human
ucaaauguuuaaucauau

SEQ ID NO: 1256520 - RNA, 17 nt, Human
ucaaauguuuaaucaua

SEQ ID NO: 1256521 - RNA, 15 nt, Human
ucaaauguuuaauca

SEQ ID NO: 1256522 - RNA, 14 nt, Human
ucaaauguuuaauc

SEQ ID NO: 1256523 - RNA, 12 nt, Human
ucaaauguuuaa

SEQ ID NO: 1256524 - RNA, 23 nt, Human
ucaaauguucuaaguuucuaaga

SEQ ID NO: 1256525 - RNA, 13 nt, Human
ucaaauguucuaa

SEQ ID NO: 1256526 - RNA, 14 nt, Human
ucaaauguucuaag

SEQ ID NO: 1256527 - RNA, 15 nt, Human
ucaaauguucuaagu

SEQ ID NO: 1256528 - RNA, 19 nt, Human
ucaaauguucuaaguuucu

SEQ ID NO: 1256529 - RNA, 20 nt, Human
ucaaauguucuaaguuucua

SEQ ID NO: 1256530 - RNA, 21 nt, Human
ucaaauguucuaaguuucuaa

SEQ ID NO: 1256531 - RNA, 22 nt, Human
ucaaauguucuaaguuucuaag

SEQ ID NO: 1256532 - RNA, 19 nt, Human
ucaaccccuccccuccauc

SEQ ID NO: 1256533 - RNA, 21 nt, Human
ucaaccccuccccuccauccc

SEQ ID NO: 1256534 - RNA, 23 nt, Human
ucaaccccuccccuccaucccug

SEQ ID NO: 1256535 - RNA, 23 nt, Human
ucaauuaaaauagucucuuuaaa

SEQ ID NO: 1256536 - RNA, 15 nt, Human
ucaauguuuucaguu

SEQ ID NO: 1256537 - RNA, 14 nt, Human
ucaauuauaguuuc

SEQ ID NO: 1256538 - RNA, 15 nt, Human
ucaauuauaguuucu

SEQ ID NO: 1256539 - RNA, 16 nt, Human
ucaauuauaguuucug

SEQ ID NO: 1256540 - RNA, 17 nt, Human
ucaauuauaguuucuga

SEQ ID NO: 1256541 - RNA, 19 nt, Human
ucaauuauaguuucugagg

SEQ ID NO: 1256542 - RNA, 14 nt, Human
ucaauaaaauccau

SEQ ID NO: 1256543 - RNA, 18 nt, Human
ucaauguuucuucuaggu

SEQ ID NO: 1256544 - RNA, 22 nt, Human
ucacaagacccaaaaggcagaa

SEQ ID NO: 1256545 - RNA, 21 nt, Human
ucaauuccaacaguuuaauga

SEQ ID NO: 1256546 - RNA, 18 nt, Human
ucaauuauaguuucugag

SEQ ID NO: 1256547 - RNA, 15 nt, Human
ucaauucaaagcugu

SEQ ID NO: 1256548 - RNA, 17 nt, Human
ucaauucaaagcugugu

SEQ ID NO: 1256549 - RNA, 22 nt, Human
ucaauucaaagcuguguguuug

SEQ ID NO: 1256550 - RNA, 15 nt, Human
ucaauuccaacaguu

SEQ ID NO: 1256551 - RNA, 18 nt, Human
ucaauuccaacaguuuaa

SEQ ID NO: 1256552 - RNA, 19 nt, Human
ucaauuccaacaguuuaau

SEQ ID NO: 1256553 - RNA, 20 nt, Human
ucaauuccaacaguuuaaug

SEQ ID NO: 1256554 - RNA, 14 nt, Human
ucaauuccaccugc

SEQ ID NO: 1256555 - RNA, 23 nt, Human
ucacaagauggaauuuaucaaac

SEQ ID NO: 1256556 - RNA, 12 nt, Human
ucacaaggcagc

SEQ ID NO: 1256557 - RNA, 16 nt, Human
ucacaaggcagcaagg

SEQ ID NO: 1256558 - RNA, 18 nt, Human
ucacaaggcagcaaggcc

SEQ ID NO: 1256559 - RNA, 23 nt, Human
ucacaaggcagcaaggcccgagc

SEQ ID NO: 1256560 - RNA, 22 nt, Human
ucacaaggcagcaaggcccgag

SEQ ID NO: 1256561 - RNA, 22 nt, Human
ucacaaguggguacccccagga

SEQ ID NO: 1256562 - RNA, 20 nt, Human
ucacaaguggguacccccag

SEQ ID NO: 1256563 - RNA, 12 nt, Human
ucacacaccugu

SEQ ID NO: 1256564 - RNA, 14 nt, Human
ucacauuggaaaca

SEQ ID NO: 1256565 - RNA, 15 nt, Human
ucacaguauugcuca

SEQ ID NO: 1256566 - RNA, 16 nt, Human
ucacaggugacucuaa

SEQ ID NO: 1256567 - RNA, 15 nt, Human
ucacaggucccaaau

SEQ ID NO: 1256568 - RNA, 14 nt, Human
ucacaguauugcuc

SEQ ID NO: 1256569 - RNA, 19 nt, Human
ucacaggacucugccuccu

SEQ ID NO: 1256570 - RNA, 23 nt, Human
ucacaggacucugccuccucuuc

SEQ ID NO: 1256571 - RNA, 19 nt, Human
ucacaggagggagggggaa

SEQ ID NO: 1256572 - RNA, 12 nt, Human
ucacaggcagcc

SEQ ID NO: 1256573 - RNA, 23 nt, Human
ucacagguagacaguauauaacu

SEQ ID NO: 1256574 - RNA, 12 nt, Human
ucacacacugau

SEQ ID NO: 1256575 - RNA, 19 nt, Human
ucacacaggcauuuccugg

SEQ ID NO: 1256576 - RNA, 17 nt, Human
ucacaggacucugccuc

SEQ ID NO: 1256577 - RNA, 18 nt, Human
ucacaggacucugccucc

SEQ ID NO: 1256578 - RNA, 15 nt, Human
ucacaccacuagccu

SEQ ID NO: 1256579 - RNA, 23 nt, Human
ucacaccaggcuugccugcaggc

SEQ ID NO: 1256580 - RNA, 12 nt, Human
ucacacaggcau

SEQ ID NO: 1256581 - RNA, 20 nt, Human
ucacaccacuagccucaggg

SEQ ID NO: 1256582 - RNA, 21 nt, Human
ucacaccaggcuugccugcag

SEQ ID NO: 1256583 - RNA, 22 nt, Human
ucacaccaggcuugccugcagg

SEQ ID NO: 1256584 - RNA, 12 nt, Human
ucacauuuaaau

SEQ ID NO: 1256585 - RNA, 22 nt, Human
ucacauuguauucagaguugau

SEQ ID NO: 1256586 - RNA, 17 nt, Human
ucacauuggaaacaagu

SEQ ID NO: 1256587 - RNA, 19 nt, Human
ucaccagagacuuuagggg

SEQ ID NO: 1256588 - RNA, 15 nt, Human
ucaccagagacuuua

SEQ ID NO: 1256589 - RNA, 14 nt, Human
ucaccagagacuuu

SEQ ID NO: 1256590 - RNA, 15 nt, Human
ucaccccuguuucug

SEQ ID NO: 1256591 - RNA, 20 nt, Human
ucaccacgacuggccagggc

SEQ ID NO: 1256592 - RNA, 18 nt, Human
ucaccacgacuggccagg

SEQ ID NO: 1256593 - RNA, 16 nt, Human
ucaccacugcccccug

SEQ ID NO: 1256594 - RNA, 22 nt, Human
ucaccgacugaaaauauuguuu

SEQ ID NO: 1256595 - RNA, 16 nt, Human
ucaccgagugggggca

SEQ ID NO: 1256596 - RNA, 13 nt, Human
ucacccuuugcug

SEQ ID NO: 1256597 - RNA, 15 nt, Human
ucacccuuugcugug

SEQ ID NO: 1256598 - RNA, 22 nt, Human
ucacccuuugcugugaggcugu

SEQ ID NO: 1256599 - RNA, 20 nt, Human
ucacccuggggcuaggaaau

SEQ ID NO: 1256600 - RNA, 17 nt, Human
ucacccuggaggcaccu

SEQ ID NO: 1256601 - RNA, 18 nt, Human
ucacccuggaggcaccug

SEQ ID NO: 1256602 - RNA, 15 nt, Human
ucacccuaccugugc

SEQ ID NO: 1256603 - RNA, 17 nt, Human
ucacccuaccugugccu

SEQ ID NO: 1256604 - RNA, 23 nt, Human
ucacccugauuuaggagaagcca

SEQ ID NO: 1256605 - RNA, 13 nt, Human
ucacccugccuua

SEQ ID NO: 1256606 - RNA, 15 nt, Human
ucacccugccuuauc

SEQ ID NO: 1256607 - RNA, 19 nt, Human
guggcaucaucucagcuca

SEQ ID NO: 1256608 - RNA, 15 nt, Human
guggccaagaagcag

SEQ ID NO: 1256609 - RNA, 17 nt, Human
guggccaagaagcagug

SEQ ID NO: 1256610 - RNA, 22 nt, Human
guggccaagaagcaguggccuu

SEQ ID NO: 1256611 - RNA, 18 nt, Human
guggccaagagaaacuuc

SEQ ID NO: 1256612 - RNA, 23 nt, Human
guggccaagaagcaguggccuua

SEQ ID NO: 1256613 - RNA, 14 nt, Human
guggcauccagagu

SEQ ID NO: 1256614 - RNA, 18 nt, Human
guggcucgggaggcgaag

SEQ ID NO: 1256615 - RNA, 20 nt, Human
guggccccacccugggcccu

SEQ ID NO: 1256616 - RNA, 18 nt, Human
guggccccacccugggcc

SEQ ID NO: 1256617 - RNA, 19 nt, Human
guggccccacccugggccc

SEQ ID NO: 1256618 - RNA, 18 nt, Human
guggccaugacccugccu

SEQ ID NO: 1256619 - RNA, 20 nt, Human
guggccaugacccugccucu

SEQ ID NO: 1256620 - RNA, 21 nt, Human
guggccaugacccugccucuc

SEQ ID NO: 1256621 - RNA, 13 nt, Human
guggccaugcucc

SEQ ID NO: 1256622 - RNA, 18 nt, Human
guggccaugcuccucuuc

SEQ ID NO: 1256623 - RNA, 19 nt, Human
guggccaugcuccucuucc

SEQ ID NO: 1256624 - RNA, 15 nt, Human
guggccccacccugg

SEQ ID NO: 1256625 - RNA, 21 nt, Human
guggccacuccagaccccugg

SEQ ID NO: 1256626 - RNA, 13 nt, Human
guggccaccagua

SEQ ID NO: 1256627 - RNA, 21 nt, Human
guggccagcgagggcgugucu

SEQ ID NO: 1256628 - RNA, 12 nt, Human
guggccaggagg

SEQ ID NO: 1256629 - RNA, 13 nt, Human
guggccaggaggu

SEQ ID NO: 1256630 - RNA, 10 nt, Human
guggccaggc

SEQ ID NO: 1256631 - RNA, 23 nt, Human
guggccaggccgggaaaaagccc

SEQ ID NO: 1256632 - RNA, 11 nt, Human
guggcagucug

SEQ ID NO: 1256633 - RNA, 12 nt, Human
guggcaggcaga

SEQ ID NO: 1256634 - RNA, 13 nt, Human
guggcaggcagag

SEQ ID NO: 1256635 - RNA, 15 nt, Human
guggcaggcagaggc

SEQ ID NO: 1256636 - RNA, 22 nt, Human
guggcaggcagaggcccaggcu

SEQ ID NO: 1256637 - RNA, 24 nt, Human
guggcaggcagaggcccaggcugc

SEQ ID NO: 1256638 - RNA, 23 nt, Human
guggcaggcagaggcccaggcug

SEQ ID NO: 1256639 - RNA, 16 nt, Human
guggcaggggacagga

SEQ ID NO: 1256640 - RNA, 18 nt, Human
guggcaggggacaggagu

SEQ ID NO: 1256641 - RNA, 20 nt, Human
guggcaggggacaggagucc

SEQ ID NO: 1256642 - RNA, 21 nt, Human
guggaacauaaaaaggacauc

SEQ ID NO: 1256643 - RNA, 20 nt, Human
guggaacauaaaaaggacau

SEQ ID NO: 1256644 - RNA, 19 nt, Human
guggaacauaaaaaggaca

SEQ ID NO: 1256645 - RNA, 20 nt, Human
guggaaauuaagacuuuaug

SEQ ID NO: 1256646 - RNA, 23 nt, Human
guggaacuacauuaguacacagc

SEQ ID NO: 1256647 - RNA, 16 nt, Human
guggaacgaaaaugaa

SEQ ID NO: 1256648 - RNA, 14 nt, Human
guggaacugcugcc

SEQ ID NO: 1256649 - RNA, 15 nt, Human
guggaacugcugcca

SEQ ID NO: 1256650 - RNA, 13 nt, Human
guggacuuuuauu

SEQ ID NO: 1256651 - RNA, 18 nt, Human
guggagaggcccggccuc

SEQ ID NO: 1256652 - RNA, 12 nt, Human
guggagagggaa

SEQ ID NO: 1256653 - RNA, 14 nt, Human
guggagagggaaug

SEQ ID NO: 1256654 - RNA, 15 nt, Human
guggagagggaaugu

SEQ ID NO: 1256655 - RNA, 18 nt, Human
guggagagggaaugugaa

SEQ ID NO: 1256656 - RNA, 16 nt, Human
guggagucugccaccc

SEQ ID NO: 1256657 - RNA, 17 nt, Human
guggagucugccaccca

SEQ ID NO: 1256658 - RNA, 14 nt, Human
guggauauuguuac

SEQ ID NO: 1256659 - RNA, 16 nt, Human
guggauauuuguauaa

SEQ ID NO: 1256660 - RNA, 23 nt, Human
guggaucacaaaguggaacgaaa

SEQ ID NO: 1256661 - RNA, 21 nt, Human
guggaucagagaugcaccacc

SEQ ID NO: 1256662 - RNA, 19 nt, Human
guggauccaaacugaucca

SEQ ID NO: 1256663 - RNA, 19 nt, Human
guggaucuauuucauguuu

SEQ ID NO: 1256664 - RNA, 23 nt, Human
guggaugauccccacgccacagc

SEQ ID NO: 1256665 - RNA, 12 nt, Human
guggaggcugcu

SEQ ID NO: 1256666 - RNA, 13 nt, Human
guggaggcugcuc

SEQ ID NO: 1256667 - RNA, 14 nt, Human
guggaggcugcucg

SEQ ID NO: 1256668 - RNA, 23 nt, Human
guggagggacaaguggacucagg

SEQ ID NO: 1256669 - RNA, 12 nt, Human
guggagggccac

SEQ ID NO: 1256670 - RNA, 22 nt, Human
guggagggguaggggcugggaa

SEQ ID NO: 1256671 - RNA, 19 nt, Human
guggagggguaggggcugg

SEQ ID NO: 1256672 - RNA, 12 nt, Human
gugcugccacac

SEQ ID NO: 1256673 - RNA, 14 nt, Human
gugcugagauuaca

SEQ ID NO: 1256674 - RNA, 21 nt, Human
gugcugacggccagggagaag

SEQ ID NO: 1256675 - RNA, 23 nt, Human
gugcugacggccagggagaagcu

SEQ ID NO: 1256676 - RNA, 22 nt, Human
gugcugacgggacccacaugcu

SEQ ID NO: 1256677 - RNA, 15 nt, Human
gugcugacggccagg

SEQ ID NO: 1256678 - RNA, 16 nt, Human
gugcugacggccaggg

SEQ ID NO: 1256679 - RNA, 18 nt, Human
gugcugacggccagggag

SEQ ID NO: 1256680 - RNA, 15 nt, Human
gugcucuuuguuuug

SEQ ID NO: 1256681 - RNA, 16 nt, Human
gugcucuuuguuuugu

SEQ ID NO: 1256682 - RNA, 22 nt, Human
gugcucuuuguuuugugucucu

SEQ ID NO: 1256683 - RNA, 14 nt, Human
gugcucuuuucucc

SEQ ID NO: 1256684 - RNA, 16 nt, Human
gugcucuuuucuccuc

SEQ ID NO: 1256685 - RNA, 20 nt, Human
gugcucuuuucuccucacug

SEQ ID NO: 1256686 - RNA, 21 nt, Human
gugcugaacaguggaggaaga

SEQ ID NO: 1256687 - RNA, 23 nt, Human
gugcucuuuguuuugugucucuu

SEQ ID NO: 1256688 - RNA, 19 nt, Human
gugcugaauguugggacug

SEQ ID NO: 1256689 - RNA, 16 nt, Human
gugcccucugggcucu

SEQ ID NO: 1256690 - RNA, 17 nt, Human
gugcccucugggcucug

SEQ ID NO: 1256691 - RNA, 19 nt, Human
gugcccucugggcucugag

SEQ ID NO: 1256692 - RNA, 12 nt, Human
gugcccugagcc

SEQ ID NO: 1256693 - RNA, 15 nt, Human
gugcccugagccagg

SEQ ID NO: 1256694 - RNA, 17 nt, Human
gugcccugagccagggu

SEQ ID NO: 1256695 - RNA, 13 nt, Human
gugcccugauccc

SEQ ID NO: 1256696 - RNA, 19 nt, Human
gugccuugucacgccagac

SEQ ID NO: 1256697 - RNA, 13 nt, Human
gugccuuguuuuu

SEQ ID NO: 1256698 - RNA, 16 nt, Human
gugccuuuauuuccac

SEQ ID NO: 1256699 - RNA, 20 nt, Human
gugccuuuauuuccacugug

SEQ ID NO: 1256700 - RNA, 16 nt, Human
gugccuuucaggaucu

SEQ ID NO: 1256701 - RNA, 18 nt, Human
gugccuuuauuuccacug

SEQ ID NO: 1256702 - RNA, 23 nt, Human
gugcuuucuucucccaauucauc

SEQ ID NO: 1256703 - RNA, 15 nt, Human
gugcuuugagagaga

SEQ ID NO: 1256704 - RNA, 17 nt, Human
gugcuuugagagagaaa

SEQ ID NO: 1256705 - RNA, 15 nt, Human
gugcuuuuaaaugca

SEQ ID NO: 1256706 - RNA, 23 nt, Human
gugcuuuuggcggggaggaggaa

SEQ ID NO: 1256707 - RNA, 16 nt, Human
gugcuuuuuuugugug

SEQ ID NO: 1256708 - RNA, 16 nt, Human
guggaaaacuuaugcu

SEQ ID NO: 1256709 - RNA, 21 nt, Human
guggaaaacuuaugcugauuu

SEQ ID NO: 1256710 - RNA, 18 nt, Human
gugcuugauagaaaugcc

SEQ ID NO: 1256711 - RNA, 14 nt, Human
gugcuugagccagg

SEQ ID NO: 1256712 - RNA, 20 nt, Human
gugcuuuccauucgugaaaa

SEQ ID NO: 1256713 - RNA, 21 nt, Human
gugcugccacacuucaggcuc

SEQ ID NO: 1256714 - RNA, 22 nt, Human
gugcuguuguuaugaugugcuu

SEQ ID NO: 1256715 - RNA, 19 nt, Human
gugcuguuuuguuauauaa

SEQ ID NO: 1256716 - RNA, 21 nt, Human
gugcuguuuuguuauauaauu

SEQ ID NO: 1256717 - RNA, 21 nt, Human
gugcuuaucccauagccagga

SEQ ID NO: 1256718 - RNA, 20 nt, Human
gugcuguuguuaugaugugc

SEQ ID NO: 1256719 - RNA, 19 nt, Human
gugcuguuguuaugaugug

SEQ ID NO: 1256720 - RNA, 15 nt, Human
gugcuguuuauuaau

SEQ ID NO: 1256721 - RNA, 19 nt, Human
gugcuguuuauuaaucuua

SEQ ID NO: 1256722 - RNA, 14 nt, Human
gugcuguuucaaag

SEQ ID NO: 1256723 - RNA, 15 nt, Human
gugcuguuucaaagu

SEQ ID NO: 1256724 - RNA, 16 nt, Human
gugcuguuucaaaguu

SEQ ID NO: 1256725 - RNA, 16 nt, Human
gugcuguuuuguuaua

SEQ ID NO: 1256726 - RNA, 17 nt, Human
gugcuguuguuaugaug

SEQ ID NO: 1256727 - RNA, 15 nt, Human
gugcuguuguuauga

SEQ ID NO: 1256728 - RNA, 14 nt, Human
gugcuguuguuaug

SEQ ID NO: 1256729 - RNA, 11 nt, Human
gugcugugugu

SEQ ID NO: 1256730 - RNA, 17 nt, Human
gugcuucgggcccuucc

SEQ ID NO: 1256731 - RNA, 20 nt, Human
gugcuucuaguucugccagg

SEQ ID NO: 1256732 - RNA, 14 nt, Human
gugcuucgggcccu

SEQ ID NO: 1256733 - RNA, 21 nt, Human
gugcuucuaguucugccagga

SEQ ID NO: 1256734 - RNA, 22 nt, Human
gugcuucuaguucugccaggag

SEQ ID NO: 1256735 - RNA, 18 nt, Human
gugcuuauguaugaggua

SEQ ID NO: 1256736 - RNA, 21 nt, Human
gugcuuaugcucuuaauugcc

SEQ ID NO: 1256737 - RNA, 16 nt, Human
gugcuuaugguaccag

SEQ ID NO: 1256738 - RNA, 24 nt, Human
gugcaguggcgugaucucagcuca

SEQ ID NO: 1256739 - RNA, 18 nt, Human
gugcaugcagcaucuaag

SEQ ID NO: 1256740 - RNA, 18 nt, Human
gugcaucucagcccacau

SEQ ID NO: 1256741 - RNA, 24 nt, Human
gugcaguggcgcgaucucagcuca

SEQ ID NO: 1256742 - RNA, 15 nt, Human
gugcaucucagccca

SEQ ID NO: 1256743 - RNA, 18 nt, Human
gugcaaauugucacagga

SEQ ID NO: 1256744 - RNA, 22 nt, Human
gugcaaaguucccuacuuccug

SEQ ID NO: 1256745 - RNA, 22 nt, Human
gugcaacaagguccucugucag

SEQ ID NO: 1256746 - RNA, 13 nt, Human
gugcaacacuggu

SEQ ID NO: 1256747 - RNA, 14 nt, Human
gugcaacaggguau

SEQ ID NO: 1256748 - RNA, 24 nt, Human
gugcaacaggguauggacuaucug

SEQ ID NO: 1256749 - RNA, 23 nt, Human
gugcagggccuguaaucccagca

SEQ ID NO: 1256750 - RNA, 14 nt, Human
gugcagggaugugg

SEQ ID NO: 1256751 - RNA, 15 nt, Human
gugcagggauguggg

SEQ ID NO: 1256752 - RNA, 15 nt, Human
gugcagguggggaga

SEQ ID NO: 1256753 - RNA, 15 nt, Human
gugcaguacuuugug

SEQ ID NO: 1256754 - RNA, 22 nt, Human
gugcaguaucaugcccugugca

SEQ ID NO: 1256755 - RNA, 24 nt, Human
gugcaguggcaucaucucagcuca

SEQ ID NO: 1256756 - RNA, 16 nt, Human
gugcaguccugaucag

SEQ ID NO: 1256757 - RNA, 13 nt, Human
gugcccacaggcc

SEQ ID NO: 1256758 - RNA, 21 nt, Human
gugcccacaggccgcccugcg

SEQ ID NO: 1256759 - RNA, 22 nt, Human
gugcccacagugucaggcacug

SEQ ID NO: 1256760 - RNA, 16 nt, Human
gugcccagaauaaguu

SEQ ID NO: 1256761 - RNA, 16 nt, Human
gugccaguauuuuaaa

SEQ ID NO: 1256762 - RNA, 18 nt, Human
gugccaguauuuuaaaau

SEQ ID NO: 1256763 - RNA, 12 nt, Human
gugcccaagcca

SEQ ID NO: 1256764 - RNA, 19 nt, Human
gugcccaagccagaggcug

SEQ ID NO: 1256765 - RNA, 20 nt, Human
gugcccaagccagaggcugg

SEQ ID NO: 1256766 - RNA, 13 nt, Human
gugcccaggagaa

SEQ ID NO: 1256767 - RNA, 12 nt, Human
gugcccaggaga

SEQ ID NO: 1256768 - RNA, 16 nt, Human
gugcccaguuaaucuu

SEQ ID NO: 1256769 - RNA, 17 nt, Human
gugcccaguuaaucuug

SEQ ID NO: 1256770 - RNA, 12 nt, Human
gugccccaggac

SEQ ID NO: 1256771 - RNA, 14 nt, Human
gugccccaggacca

SEQ ID NO: 1256772 - RNA, 15 nt, Human
gugccccaggaccag

SEQ ID NO: 1256773 - RNA, 19 nt, Human
gugccccaggaccagcuca

SEQ ID NO: 1256774 - RNA, 21 nt, Human
gugccccaggaccagcucagg

SEQ ID NO: 1256775 - RNA, 13 nt, Human
gugcccccacuga

SEQ ID NO: 1256776 - RNA, 15 nt, Human
gugcccccacugacc

SEQ ID NO: 1256777 - RNA, 18 nt, Human
gugcccccacugaccaga

SEQ ID NO: 1256778 - RNA, 19 nt, Human
gugcccccacugaccagaa

SEQ ID NO: 1256779 - RNA, 22 nt, Human
gugcccccaaccauuuccucag

SEQ ID NO: 1256780 - RNA, 14 nt, Human
gugcccccaggguc

SEQ ID NO: 1256781 - RNA, 22 nt, Human
gugcccccaggguccugggagg

SEQ ID NO: 1256782 - RNA, 16 nt, Human
gugcccccaggguccu

SEQ ID NO: 1256783 - RNA, 13 nt, Human
gugcccucuccca

SEQ ID NO: 1256784 - RNA, 15 nt, Human
gugcccucucccacc

SEQ ID NO: 1256785 - RNA, 17 nt, Human
gugcccucucccacccu

SEQ ID NO: 1256786 - RNA, 18 nt, Human
gugcccucucccacccuc

SEQ ID NO: 1256787 - RNA, 19 nt, Human
gugcccucucccacccucu

SEQ ID NO: 1256788 - RNA, 20 nt, Human
gugcccucucccacccucuu

SEQ ID NO: 1256789 - RNA, 21 nt, Human
gugcccucucccacccucuuc

SEQ ID NO: 1256790 - RNA, 22 nt, Human
gugcccucucccacccucuucc

SEQ ID NO: 1256791 - RNA, 13 nt, Human
gugcccucugggc

SEQ ID NO: 1256792 - RNA, 14 nt, Human
gugcccucugggcu

SEQ ID NO: 1256793 - RNA, 15 nt, Human
gugcccucugggcuc

SEQ ID NO: 1256794 - RNA, 23 nt, Human
gugaggauuaaauaauguaaaua

SEQ ID NO: 1256795 - RNA, 23 nt, Human
gugaggcaaugggagcugaggcc

SEQ ID NO: 1256796 - RNA, 16 nt, Human
gugauccauguaacug

SEQ ID NO: 1256797 - RNA, 14 nt, Human
gugauccacucgcc

SEQ ID NO: 1256798 - RNA, 21 nt, Human
gugaucccuagcugugaccuc

SEQ ID NO: 1256799 - RNA, 22 nt, Human
gugaucccuagcugugaccucu

SEQ ID NO: 1256800 - RNA, 20 nt, Human
gugauucacagugugaaucu

SEQ ID NO: 1256801 - RNA, 21 nt, Human
gugauucagaaaauguucugu

SEQ ID NO: 1256802 - RNA, 20 nt, Human
gugauucucaugccucagcc

SEQ ID NO: 1256803 - RNA, 15 nt, Human
gugauuccgcaguga

SEQ ID NO: 1256804 - RNA, 13 nt, Human
gugauucugccuu

SEQ ID NO: 1256805 - RNA, 24 nt, Human
gugauuggccuguagaguugcuga

SEQ ID NO: 1256806 - RNA, 14 nt, Human
gugauuguggaaug

SEQ ID NO: 1256807 - RNA, 19 nt, Human
gugauuguggaauggagau

SEQ ID NO: 1256808 - RNA, 23 nt, Human
gugauuguggaauggagauucag

SEQ ID NO: 1256809 - RNA, 16 nt, Human
gugauuuuuaugccac

SEQ ID NO: 1256810 - RNA, 17 nt, Human
gugauuuaagggcccag

SEQ ID NO: 1256811 - RNA, 22 nt, Human
gugauuuaagggcccaggucag

SEQ ID NO: 1256812 - RNA, 17 nt, Human
gugauuuuuaugccacc

SEQ ID NO: 1256813 - RNA, 19 nt, Human
gugauuuuuaugccaccug

SEQ ID NO: 1256814 - RNA, 20 nt, Human
gugauuuuuaugccaccuga

SEQ ID NO: 1256815 - RNA, 16 nt, Human
gugacaagcucacaga

SEQ ID NO: 1256816 - RNA, 17 nt, Human
gugaauuuuuuuuuccu

SEQ ID NO: 1256817 - RNA, 13 nt, Human
gugacaaaaaauu

SEQ ID NO: 1256818 - RNA, 17 nt, Human
gugacccggcacccccu

SEQ ID NO: 1256819 - RNA, 18 nt, Human
gugacccggcacccccug

SEQ ID NO: 1256820 - RNA, 21 nt, Human
gugacccggcacccccugcag

SEQ ID NO: 1256821 - RNA, 22 nt, Human
gugacccggcacccccugcagc

SEQ ID NO: 1256822 - RNA, 23 nt, Human
gugacccggcacccccugcagcu

SEQ ID NO: 1256823 - RNA, 20 nt, Human
gugacaaaaaauuaaagcau

SEQ ID NO: 1256824 - RNA, 16 nt, Human
gugaccucagcuuuga

SEQ ID NO: 1256825 - RNA, 21 nt, Human
gugaccggacuuuucugcaaa

SEQ ID NO: 1256826 - RNA, 18 nt, Human
gugaccuauaccuguguu

SEQ ID NO: 1256827 - RNA, 16 nt, Human
gugacccuggcuccuu

SEQ ID NO: 1256828 - RNA, 15 nt, Human
gugaccggacuuuuc

SEQ ID NO: 1256829 - RNA, 19 nt, Human
gugaccggacuuuucugca

SEQ ID NO: 1256830 - RNA, 12 nt, Human
gugacucuuucc

SEQ ID NO: 1256831 - RNA, 13 nt, Human
gugaccugcuagg

SEQ ID NO: 1256832 - RNA, 18 nt, Human
gugaccugcuaggccaga

SEQ ID NO: 1256833 - RNA, 12 nt, Human
gugaccugcuga

SEQ ID NO: 1256834 - RNA, 13 nt, Human
gugaccugcugag

SEQ ID NO: 1256835 - RNA, 14 nt, Human
gugaccugcugagc

SEQ ID NO: 1256836 - RNA, 15 nt, Human
gugaccugcugagcu

SEQ ID NO: 1256837 - RNA, 16 nt, Human
gugaccugcugagcuc

SEQ ID NO: 1256838 - RNA, 18 nt, Human
gugaccugcugagcucug

SEQ ID NO: 1256839 - RNA, 19 nt, Human
gugaccugcugagcucuga

SEQ ID NO: 1256840 - RNA, 20 nt, Human
gugaccugcugagcucugag

SEQ ID NO: 1256841 - RNA, 21 nt, Human
gugaccugcugagcucugaga

SEQ ID NO: 1256842 - RNA, 16 nt, Human
gugagcagucaggaaa

SEQ ID NO: 1256843 - RNA, 17 nt, Human
gugagcaggcugugagu

SEQ ID NO: 1256844 - RNA, 17 nt, Human
gugagccaccgugccug

SEQ ID NO: 1256845 - RNA, 21 nt, Human
gugagccaccgugccuggcca

SEQ ID NO: 1256846 - RNA, 15 nt, Human
gugagccaccacgcc

SEQ ID NO: 1256847 - RNA, 20 nt, Human
gugagcauggaacacuucga

SEQ ID NO: 1256848 - RNA, 13 nt, Human
gugagcauguuug

SEQ ID NO: 1256849 - RNA, 16 nt, Human
gugagccaccacgccc

SEQ ID NO: 1256850 - RNA, 15 nt, Human
gugagccaccgugcc

SEQ ID NO: 1256851 - RNA, 22 nt, Human
gugagccaccgugccuggccac

SEQ ID NO: 1256852 - RNA, 19 nt, Human
gugagcauguuuggaaggg

SEQ ID NO: 1256853 - RNA, 13 nt, Human
gugagcugagcag

SEQ ID NO: 1256854 - RNA, 14 nt, Human
gugagcugagcagg

SEQ ID NO: 1256855 - RNA, 16 nt, Human
gugagcugagcaggcc

SEQ ID NO: 1256856 - RNA, 17 nt, Human
gugagcugagcaggcca

SEQ ID NO: 1256857 - RNA, 12 nt, Human
gugaaugggugc

SEQ ID NO: 1256858 - RNA, 18 nt, Human
gugaauuaggcuguaacu

SEQ ID NO: 1256859 - RNA, 21 nt, Human
gugaauuaggcuguaacuacu

SEQ ID NO: 1256860 - RNA, 22 nt, Human
gugaauuaggcuguaacuacuu

SEQ ID NO: 1256861 - RNA, 16 nt, Human
gugaauuaguuuuaaa

SEQ ID NO: 1256862 - RNA, 14 nt, Human
gugaaucagagcac

SEQ ID NO: 1256863 - RNA, 21 nt, Human
gugaauacugcuacagcaauu

SEQ ID NO: 1256864 - RNA, 18 nt, Human
gugaauagccauauuugu

SEQ ID NO: 1256865 - RNA, 19 nt, Human
gugaauagccauauuugua

SEQ ID NO: 1256866 - RNA, 23 nt, Human
gugaauagccauauuuguaaaau

SEQ ID NO: 1256867 - RNA, 13 nt, Human
gugaaucaagggu

SEQ ID NO: 1256868 - RNA, 15 nt, Human
gugaaucaaggguca

SEQ ID NO: 1256869 - RNA, 17 nt, Human
gugaaucaagggucagg

SEQ ID NO: 1256870 - RNA, 21 nt, Human
gugaaucaagggucaggccuu

SEQ ID NO: 1256871 - RNA, 20 nt, Human
gugaaauuauucauaauuau

SEQ ID NO: 1256872 - RNA, 18 nt, Human
gugaaauuauucauaauu

SEQ ID NO: 1256873 - RNA, 22 nt, Human
gugaaauuuacaucauuucuuu

SEQ ID NO: 1256874 - RNA, 20 nt, Human
gugaaauuuacaucauuucu

SEQ ID NO: 1256875 - RNA, 15 nt, Human
gugaauaccugcuca

SEQ ID NO: 1256876 - RNA, 19 nt, Human
gugaauacugcuacagcaa

SEQ ID NO: 1256877 - RNA, 13 nt, Human
gugaaaucauuca

SEQ ID NO: 1256878 - RNA, 22 nt, Human
gugaaauaccaaccugaagaca

SEQ ID NO: 1256879 - RNA, 13 nt, Human
gugaaagaaguaa

SEQ ID NO: 1256880 - RNA, 14 nt, Human
gugaaacuuucauu

SEQ ID NO: 1256881 - RNA, 19 nt, Human
gugaaagaaaauaacaaua

SEQ ID NO: 1256882 - RNA, 20 nt, Human
gugaaacucguuaauuugua

SEQ ID NO: 1256883 - RNA, 17 nt, Human
gucugccacccaggauc

SEQ ID NO: 1256884 - RNA, 12 nt, Human
gugaaaagaaua

SEQ ID NO: 1256885 - RNA, 16 nt, Human
gugaaaaugugugugu

SEQ ID NO: 1256886 - RNA, 15 nt, Human
gugaaaaugguccag

SEQ ID NO: 1256887 - RNA, 17 nt, Human
gugaaaaugguccagga

SEQ ID NO: 1256888 - RNA, 19 nt, Human
gugaaacauuuucucccug

SEQ ID NO: 1256889 - RNA, 15 nt, Human
gugaaacauuuucuc

SEQ ID NO: 1256890 - RNA, 18 nt, Human
gugaaacauuuucucccu

SEQ ID NO: 1256891 - RNA, 22 nt, Human
gucuacccugggauucaggaaa

SEQ ID NO: 1256892 - RNA, 22 nt, Human
gucucacuugugcaguguugac

SEQ ID NO: 1256893 - RNA, 14 nt, Human
gucucgagcgcccu

SEQ ID NO: 1256894 - RNA, 15 nt, Human
gucucgagcgcccug

SEQ ID NO: 1256895 - RNA, 17 nt, Human
gucucgagcgcccugca

SEQ ID NO: 1256896 - RNA, 18 nt, Human
gucucgagcgcccugcag

SEQ ID NO: 1256897 - RNA, 19 nt, Human
gucucgagcgcccugcaga

SEQ ID NO: 1256898 - RNA, 20 nt, Human
gucucgagcgcccugcagac

SEQ ID NO: 1256899 - RNA, 23 nt, Human
gucucgagcgcccugcagacccu

SEQ ID NO: 1256900 - RNA, 21 nt, Human
gucucgagcgcccugcagacc

SEQ ID NO: 1256901 - RNA, 17 nt, Human
gucuacacuaagagaga

SEQ ID NO: 1256902 - RNA, 21 nt, Human
gucuaaucuagauaucgacuu

SEQ ID NO: 1256903 - RNA, 17 nt, Human
gucuacacacccugcau

SEQ ID NO: 1256904 - RNA, 22 nt, Human
gucuaaagauggaguuucuaag

SEQ ID NO: 1256905 - RNA, 20 nt, Human
gucuaaagauggaguuucua

SEQ ID NO: 1256906 - RNA, 21 nt, Human
gucuaaagauggaguuucuaa

SEQ ID NO: 1256907 - RNA, 12 nt, Human
gucuaagauucu

SEQ ID NO: 1256908 - RNA, 13 nt, Human
gucuaagauucua

SEQ ID NO: 1256909 - RNA, 14 nt, Human
gucuaagauucuag

SEQ ID NO: 1256910 - RNA, 15 nt, Human
gucuaagauucuaga

SEQ ID NO: 1256911 - RNA, 16 nt, Human
gucuaagauucuagau

SEQ ID NO: 1256912 - RNA, 18 nt, Human
gucuaagauucuagauca

SEQ ID NO: 1256913 - RNA, 23 nt, Human
gucuacacuaagagagaaugaga

SEQ ID NO: 1256914 - RNA, 15 nt, Human
gucuaccaauuauaa

SEQ ID NO: 1256915 - RNA, 13 nt, Human
gucuacccuggga

SEQ ID NO: 1256916 - RNA, 14 nt, Human
gucuacccugggau

SEQ ID NO: 1256917 - RNA, 22 nt, Human
gucuacauaacuaauacagcug

SEQ ID NO: 1256918 - RNA, 19 nt, Human
gucguggggugugcuggga

SEQ ID NO: 1256919 - RNA, 21 nt, Human
gucguggggugugcugggagc

SEQ ID NO: 1256920 - RNA, 23 nt, Human
gucguuaaaaacagauuuggaaa

SEQ ID NO: 1256921 - RNA, 15 nt, Human
gucguucccagugug

SEQ ID NO: 1256922 - RNA, 21 nt, Human
gucguuuuuuuuuuguuuguu

SEQ ID NO: 1256923 - RNA, 16 nt, Human
gucguuuuuuuuuugu

SEQ ID NO: 1256924 - RNA, 11 nt, Human
gucuaaaacuc

SEQ ID NO: 1256925 - RNA, 13 nt, Human
gucugacuguuuc

SEQ ID NO: 1256926 - RNA, 14 nt, Human
gucugagguccuga

SEQ ID NO: 1256927 - RNA, 15 nt, Human
gucugagguccugag

SEQ ID NO: 1256928 - RNA, 16 nt, Human
gucugagguccugagc

SEQ ID NO: 1256929 - RNA, 17 nt, Human
gucugagguccugagca

SEQ ID NO: 1256930 - RNA, 18 nt, Human
gucugagguccugagcac

SEQ ID NO: 1256931 - RNA, 19 nt, Human
gucugagguccugagcacu

SEQ ID NO: 1256932 - RNA, 21 nt, Human
gucugagguccugagcacugc

SEQ ID NO: 1256933 - RNA, 19 nt, Human
gucugccaaccuaaaacuc

SEQ ID NO: 1256934 - RNA, 21 nt, Human
gucugccaaccuaaaacucuu

SEQ ID NO: 1256935 - RNA, 14 nt, Human
gucugccacccagg

SEQ ID NO: 1256936 - RNA, 21 nt, Human
gucucuauaccaauaaaguga

SEQ ID NO: 1256937 - RNA, 14 nt, Human
gucucgucucuuuu

SEQ ID NO: 1256938 - RNA, 15 nt, Human
gucucggccuucaca

SEQ ID NO: 1256939 - RNA, 16 nt, Human
gucucucaugaaccuc

SEQ ID NO: 1256940 - RNA, 17 nt, Human
gucucucagggccaggc

SEQ ID NO: 1256941 - RNA, 18 nt, Human
gucucucagggccaggcc

SEQ ID NO: 1256942 - RNA, 15 nt, Human
gucucucaugaaccu

SEQ ID NO: 1256943 - RNA, 22 nt, Human
gucucucguaguguuaaguuau

SEQ ID NO: 1256944 - RNA, 17 nt, Human
gucucucuaugccucuc

SEQ ID NO: 1256945 - RNA, 22 nt, Human
gucucucuaugccucucuacag

SEQ ID NO: 1256946 - RNA, 18 nt, Human
gucucucuaugccucucu

SEQ ID NO: 1256947 - RNA, 22 nt, Human
gucucuguuuuacaaguuggag

SEQ ID NO: 1256948 - RNA, 14 nt, Human
gucucuucuccacu

SEQ ID NO: 1256949 - RNA, 15 nt, Human
gucucuuauggaugu

SEQ ID NO: 1256950 - RNA, 22 nt, Human
gucucuuauggauguccccagc

SEQ ID NO: 1256951 - RNA, 23 nt, Human
gucucuuauggauguccccagca

SEQ ID NO: 1256952 - RNA, 15 nt, Human
gucucuucuccacug

SEQ ID NO: 1256953 - RNA, 16 nt, Human
gucucuucuccacugg

SEQ ID NO: 1256954 - RNA, 17 nt, Human
gucucuucuccacugga

SEQ ID NO: 1256955 - RNA, 21 nt, Human
gucucuuccaguuugcuuugc

SEQ ID NO: 1256956 - RNA, 15 nt, Human
guccugggaggagag

SEQ ID NO: 1256957 - RNA, 16 nt, Human
guccugggaggagaga

SEQ ID NO: 1256958 - RNA, 13 nt, Human
guccugggccugc

SEQ ID NO: 1256959 - RNA, 14 nt, Human
guccugggccugca

SEQ ID NO: 1256960 - RNA, 17 nt, Human
guccugggccugcagaa

SEQ ID NO: 1256961 - RNA, 19 nt, Human
guccuggggaaccugaccc

SEQ ID NO: 1256962 - RNA, 20 nt, Human
guccuggggaaccugacccc

SEQ ID NO: 1256963 - RNA, 16 nt, Human
guccugguggggcagc

SEQ ID NO: 1256964 - RNA, 17 nt, Human
guccugguggggcagcu

SEQ ID NO: 1256965 - RNA, 18 nt, Human
guccugguggggcagcuc

SEQ ID NO: 1256966 - RNA, 20 nt, Human
guccugguggggcagcuccu

SEQ ID NO: 1256967 - RNA, 22 nt, Human
guccugguggggcagcuccucu

SEQ ID NO: 1256968 - RNA, 23 nt, Human
guccuggugguauuuucaauagc

SEQ ID NO: 1256969 - RNA, 20 nt, Human
guccuggugguauuuucaau

SEQ ID NO: 1256970 - RNA, 15 nt, Human
guccuguacauugug

SEQ ID NO: 1256971 - RNA, 16 nt, Human
guccugucaucaucau

SEQ ID NO: 1256972 - RNA, 19 nt, Human
guccugucaucaucauggc

SEQ ID NO: 1256973 - RNA, 20 nt, Human
guccugucaucaucauggcc

SEQ ID NO: 1256974 - RNA, 21 nt, Human
guccugucaucaucauggcca

SEQ ID NO: 1256975 - RNA, 23 nt, Human
guccugucaucaucauggccagc

SEQ ID NO: 1256976 - RNA, 18 nt, Human
guccugugaaugccacug

SEQ ID NO: 1256977 - RNA, 19 nt, Human
guccugugaaugccacugc

SEQ ID NO: 1256978 - RNA, 21 nt, Human
guccucccaauuucagacucc

SEQ ID NO: 1256979 - RNA, 22 nt, Human
guccuggcgccuggcaguccgu

SEQ ID NO: 1256980 - RNA, 16 nt, Human
guccucccgagcuccu

SEQ ID NO: 1256981 - RNA, 21 nt, Human
guccucccgagcuccucuucc

SEQ ID NO: 1256982 - RNA, 22 nt, Human
guccucccgagcuccucuucca

SEQ ID NO: 1256983 - RNA, 22 nt, Human
gucccuggggcuagggggagcc

SEQ ID NO: 1256984 - RNA, 20 nt, Human
gucccuggguagcgggggag

SEQ ID NO: 1256985 - RNA, 19 nt, Human
gucccaggaaucaguuuaa

SEQ ID NO: 1256986 - RNA, 17 nt, Human
gucccagcagcugccag

SEQ ID NO: 1256987 - RNA, 16 nt, Human
gucccagguuggcucu

SEQ ID NO: 1256988 - RNA, 17 nt, Human
gucccagguuggcucug

SEQ ID NO: 1256989 - RNA, 18 nt, Human
gucccagguuggcucugc

SEQ ID NO: 1256990 - RNA, 19 nt, Human
gucccagguuggcucugcc

SEQ ID NO: 1256991 - RNA, 22 nt, Human
gucccagguuggcucugccagu

SEQ ID NO: 1256992 - RNA, 21 nt, Human
gucccagguuggcucugccag

SEQ ID NO: 1256993 - RNA, 20 nt, Human
gucccugccuggaccagccu

SEQ ID NO: 1256994 - RNA, 21 nt, Human
gucccugccuggaccagccuc

SEQ ID NO: 1256995 - RNA, 14 nt, Human
gucccugccuggac

SEQ ID NO: 1256996 - RNA, 22 nt, Human
gucccugccuggaccagccucu

SEQ ID NO: 1256997 - RNA, 23 nt, Human
gucccugccuggaccagccucuc

SEQ ID NO: 1256998 - RNA, 19 nt, Human
gucccugggagggacaugc

SEQ ID NO: 1256999 - RNA, 15 nt, Human
gucccuggggcuagg

SEQ ID NO: 1257000 - RNA, 12 nt, Human
guccucagcccc

SEQ ID NO: 1257001 - RNA, 12 nt, Human
guccucagccuu

SEQ ID NO: 1257002 - RNA, 14 nt, Human
guccucagccuugc

SEQ ID NO: 1257003 - RNA, 20 nt, Human
guccucagagaauuucuacc

SEQ ID NO: 1257004 - RNA, 16 nt, Human
guccucagccuugcca

SEQ ID NO: 1257005 - RNA, 20 nt, Human
guccucagccuugccagaga

SEQ ID NO: 1257006 - RNA, 21 nt, Human
guccucagccuugccagagau

SEQ ID NO: 1257007 - RNA, 21 nt, Human
guccuccaacaccaagcacag

SEQ ID NO: 1257008 - RNA, 22 nt, Human
guccuccaacaccaagcacagc

SEQ ID NO: 1257009 - RNA, 15 nt, Human
guccuauggccucau

SEQ ID NO: 1257010 - RNA, 16 nt, Human
guccuauggccucaug

SEQ ID NO: 1257011 - RNA, 15 nt, Human
guccuagcacagaug

SEQ ID NO: 1257012 - RNA, 21 nt, Human
guccuagcacagauggccagc

SEQ ID NO: 1257013 - RNA, 17 nt, Human
guccuagcacagauggc

SEQ ID NO: 1257014 - RNA, 16 nt, Human
guccuaguuguucagc

SEQ ID NO: 1257015 - RNA, 20 nt, Human
guccuaucuccagcggcccu

SEQ ID NO: 1257016 - RNA, 14 nt, Human
guccuaucugggcu

SEQ ID NO: 1257017 - RNA, 15 nt, Human
guccuaucugggcuu

SEQ ID NO: 1257018 - RNA, 17 nt, Human
guccuaucugggcuucc

SEQ ID NO: 1257019 - RNA, 18 nt, Human
guccuaucugggcuuccu

SEQ ID NO: 1257020 - RNA, 19 nt, Human
guccuaucugggcuuccug

SEQ ID NO: 1257021 - RNA, 24 nt, Human
guccuaucugggcuuccuggagca

SEQ ID NO: 1257022 - RNA, 20 nt, Human
guccuaucugggcuuccugg

SEQ ID NO: 1257023 - RNA, 21 nt, Human
guccuaucugggcuuccugga

SEQ ID NO: 1257024 - RNA, 22 nt, Human
guccuaucugggcuuccuggag

SEQ ID NO: 1257025 - RNA, 14 nt, Human
guccuauggccuca

SEQ ID NO: 1257026 - RNA, 19 nt, Human
gucacguuuggugcuucuc

SEQ ID NO: 1257027 - RNA, 21 nt, Human
gucagcaaguccuaagccugu

SEQ ID NO: 1257028 - RNA, 20 nt, Human
gucagcagccucccugaaga

SEQ ID NO: 1257029 - RNA, 14 nt, Human
gucacgccagacuu

SEQ ID NO: 1257030 - RNA, 20 nt, Human
gucacggcugcgcacugugu

SEQ ID NO: 1257031 - RNA, 18 nt, Human
gucacggauuugugucug

SEQ ID NO: 1257032 - RNA, 21 nt, Human
gucaccucagagacauacacc

SEQ ID NO: 1257033 - RNA, 13 nt, Human
gucaccugugcuu

SEQ ID NO: 1257034 - RNA, 13 nt, Human
gucagcccuaggg

SEQ ID NO: 1257035 - RNA, 22 nt, Human
gucagcccuaggguggagagcc

SEQ ID NO: 1257036 - RNA, 23 nt, Human
gucagcagccucccugaagacca

SEQ ID NO: 1257037 - RNA, 14 nt, Human
gucagcaugaauuu

SEQ ID NO: 1257038 - RNA, 20 nt, Human
gucagcaugaauuuguaaug

SEQ ID NO: 1257039 - RNA, 13 nt, Human
gucagccacuguu

SEQ ID NO: 1257040 - RNA, 15 nt, Human
gucagcaugaauuug

SEQ ID NO: 1257041 - RNA, 12 nt, Human
gucauaauugca

SEQ ID NO: 1257042 - RNA, 14 nt, Human
gucauaauugcauu

SEQ ID NO: 1257043 - RNA, 16 nt, Human
gucauaauugcauuga

SEQ ID NO: 1257044 - RNA, 18 nt, Human
gucauaauugcauugacu

SEQ ID NO: 1257045 - RNA, 12 nt, Human
gucauacagaga

SEQ ID NO: 1257046 - RNA, 13 nt, Human
gucauacagagaa

SEQ ID NO: 1257047 - RNA, 14 nt, Human
gucauacagagaag

SEQ ID NO: 1257048 - RNA, 15 nt, Human
gucauacagagaagu

SEQ ID NO: 1257049 - RNA, 16 nt, Human
gucauacagagaaguc

SEQ ID NO: 1257050 - RNA, 15 nt, Human
gucauaccaaugaaa

SEQ ID NO: 1257051 - RNA, 16 nt, Human
gucauaccaaugaaaa

SEQ ID NO: 1257052 - RNA, 13 nt, Human
gucauagaaauua

SEQ ID NO: 1257053 - RNA, 22 nt, Human
gucauagaaauuacacccaaag

SEQ ID NO: 1257054 - RNA, 15 nt, Human
gucauagguuaauau

SEQ ID NO: 1257055 - RNA, 23 nt, Human
gucaucaauuaaaggcaaaggca

SEQ ID NO: 1257056 - RNA, 23 nt, Human
gucaucacucuagguuuuacaga

SEQ ID NO: 1257057 - RNA, 16 nt, Human
gucaucucagcuggau

SEQ ID NO: 1257058 - RNA, 18 nt, Human
gucauccucacagugaac

SEQ ID NO: 1257059 - RNA, 17 nt, Human
gucaucaucauggccag

SEQ ID NO: 1257060 - RNA, 18 nt, Human
gucaucaucauggccagc

SEQ ID NO: 1257061 - RNA, 20 nt, Human
gucaucaucauggccagcug

SEQ ID NO: 1257062 - RNA, 21 nt, Human
gucaucaucauggccagcugg

SEQ ID NO: 1257063 - RNA, 19 nt, Human
gucauccucaaagaaagug

SEQ ID NO: 1257064 - RNA, 22 nt, Human
gucauccucaaagaaaguguau

SEQ ID NO: 1257065 - RNA, 12 nt, Human
gucaucuugcua

SEQ ID NO: 1257066 - RNA, 14 nt, Human
gucaucuugcuacc

SEQ ID NO: 1257067 - RNA, 15 nt, Human
gucaucuugcuacca

SEQ ID NO: 1257068 - RNA, 18 nt, Human
gucaucuugcuaccagua

SEQ ID NO: 1257069 - RNA, 22 nt, Human
gucaucuugcuaccaguauuua

SEQ ID NO: 1257070 - RNA, 20 nt, Human
gucaugaggagauucugccu

SEQ ID NO: 1257071 - RNA, 22 nt, Human
gucaugaggagauucugccuuu

SEQ ID NO: 1257072 - RNA, 21 nt, Human
gucaugaggagauucugccuu

SEQ ID NO: 1257073 - RNA, 19 nt, Human
gucaugcacaguauuugua

SEQ ID NO: 1257074 - RNA, 24 nt, Human
gucaugcacaguauuuguaauuaa

SEQ ID NO: 1257075 - RNA, 14 nt, Human
gucauguguauaaa

SEQ ID NO: 1257076 - RNA, 15 nt, Human
gucauguuuaagaaa

SEQ ID NO: 1257077 - RNA, 13 nt, Human
gucaugcugccuu

SEQ ID NO: 1257078 - RNA, 14 nt, Human
gucaugcugccuua

SEQ ID NO: 1257079 - RNA, 23 nt, Human
gucaugggccacugcuuuucccu

SEQ ID NO: 1257080 - RNA, 20 nt, Human
gucauguaagcugaaaauau

SEQ ID NO: 1257081 - RNA, 11 nt, Human
gucaugugacc

SEQ ID NO: 1257082 - RNA, 15 nt, Human
gucaugugacaggua

SEQ ID NO: 1257083 - RNA, 12 nt, Human
gucauguguaua

SEQ ID NO: 1257084 - RNA, 13 nt, Human
gucauguguauaa

SEQ ID NO: 1257085 - RNA, 16 nt, Human
guccacuucugacagc

SEQ ID NO: 1257086 - RNA, 17 nt, Human
guccacuucugacagcc

SEQ ID NO: 1257087 - RNA, 18 nt, Human
guccacuucugacagccu

SEQ ID NO: 1257088 - RNA, 19 nt, Human
guccacuucugacagccuc

SEQ ID NO: 1257089 - RNA, 21 nt, Human
guccagacacaaagagacaaa

SEQ ID NO: 1257090 - RNA, 12 nt, Human
guccagcucugg

SEQ ID NO: 1257091 - RNA, 13 nt, Human
guccagcucugga

SEQ ID NO: 1257092 - RNA, 14 nt, Human
guccagcucuggag

SEQ ID NO: 1257093 - RNA, 16 nt, Human
guccagcucuggaggg

SEQ ID NO: 1257094 - RNA, 21 nt, Human
guccagcucuggaggggaggg

SEQ ID NO: 1257095 - RNA, 17 nt, Human
guccagcugagcgccag

SEQ ID NO: 1257096 - RNA, 13 nt, Human
guccaggagccug

SEQ ID NO: 1257097 - RNA, 21 nt, Human
guccaggaugcuaacaucuaa

SEQ ID NO: 1257098 - RNA, 15 nt, Human
guccaggcacugaga

SEQ ID NO: 1257099 - RNA, 13 nt, Human
guccaggcugccg

SEQ ID NO: 1257100 - RNA, 14 nt, Human
guccaggcugccgu

SEQ ID NO: 1257101 - RNA, 16 nt, Human
guccaggcugccgugg

SEQ ID NO: 1257102 - RNA, 20 nt, Human
guccaggcugccguggggcc

SEQ ID NO: 1257103 - RNA, 21 nt, Human
gucccagaagaugacugaggg

SEQ ID NO: 1257104 - RNA, 12 nt, Human
gucccagagcag

SEQ ID NO: 1257105 - RNA, 22 nt, Human
gucccagaaaaagcaucauggc

SEQ ID NO: 1257106 - RNA, 11 nt, Human
gucccagcagc

SEQ ID NO: 1257107 - RNA, 12 nt, Human
gucccagcagcu

SEQ ID NO: 1257108 - RNA, 14 nt, Human
gucccagcagcugc

SEQ ID NO: 1257109 - RNA, 15 nt, Human
gucccagcagcugcc

SEQ ID NO: 1257110 - RNA, 22 nt, Human
gucccagcagcugccaggagca

SEQ ID NO: 1257111 - RNA, 16 nt, Human
guauucguuaucuaau

SEQ ID NO: 1257112 - RNA, 21 nt, Human
guauucauccaaguuaaaugu

SEQ ID NO: 1257113 - RNA, 22 nt, Human
guauucauccaaguuaaaugua

SEQ ID NO: 1257114 - RNA, 19 nt, Human
guauuccagaccugaagaa

SEQ ID NO: 1257115 - RNA, 21 nt, Human
guauucccaaaaauuacuuug

SEQ ID NO: 1257116 - RNA, 19 nt, Human
guauuuauuuaguauuuau

SEQ ID NO: 1257117 - RNA, 17 nt, Human
guauuucuaugaaauau

SEQ ID NO: 1257118 - RNA, 13 nt, Human
guauuucaaauug

SEQ ID NO: 1257119 - RNA, 19 nt, Human
guauuuauuuuuucuuuuc

SEQ ID NO: 1257120 - RNA, 22 nt, Human
guauuucuaugaaauauuaugu

SEQ ID NO: 1257121 - RNA, 15 nt, Human
guauuugaaucagcc

SEQ ID NO: 1257122 - RNA, 11 nt, Human
guauuugcuaa

SEQ ID NO: 1257123 - RNA, 12 nt, Human
guauuugcuaau

SEQ ID NO: 1257124 - RNA, 12 nt, Human
guauuugcuuuu

SEQ ID NO: 1257125 - RNA, 22 nt, Human
guauuugcuuuuuuguuuuggc

SEQ ID NO: 1257126 - RNA, 19 nt, Human
guauuuggaaauaaaguca

SEQ ID NO: 1257127 - RNA, 20 nt, Human
guauuuggaaauaaagucag

SEQ ID NO: 1257128 - RNA, 21 nt, Human
guauuuggaaauaaagucaga

SEQ ID NO: 1257129 - RNA, 20 nt, Human
guauuacaguggggaaugaa

SEQ ID NO: 1257130 - RNA, 22 nt, Human
guauuacaguggggaaugaaga

SEQ ID NO: 1257131 - RNA, 19 nt, Human
guauucaaaaauuaucuau

SEQ ID NO: 1257132 - RNA, 16 nt, Human
guauuauuuacauuua

SEQ ID NO: 1257133 - RNA, 16 nt, Human
guauuaugucucuucu

SEQ ID NO: 1257134 - RNA, 15 nt, Human
guauuauguguguuu

SEQ ID NO: 1257135 - RNA, 18 nt, Human
guauuauaccaaaauguu

SEQ ID NO: 1257136 - RNA, 13 nt, Human
guauuauauguac

SEQ ID NO: 1257137 - RNA, 14 nt, Human
gucaccucauggaa

SEQ ID NO: 1257138 - RNA, 19 nt, Human
gucaccuaggaagccucag

SEQ ID NO: 1257139 - RNA, 20 nt, Human
gucaccuaggaagccucaga

SEQ ID NO: 1257140 - RNA, 21 nt, Human
gucaccuaggaagccucagau

SEQ ID NO: 1257141 - RNA, 16 nt, Human
gucaccucagagacau

SEQ ID NO: 1257142 - RNA, 20 nt, Human
gucacccagguuggagugca

SEQ ID NO: 1257143 - RNA, 20 nt, Human
gucacccaggcuggagugca

SEQ ID NO: 1257144 - RNA, 20 nt, Human
gucacccaggcuggacugca

SEQ ID NO: 1257145 - RNA, 15 nt, Human
gucaauaaaauccau

SEQ ID NO: 1257146 - RNA, 11 nt, Human
gucaaguuauu

SEQ ID NO: 1257147 - RNA, 20 nt, Human
gucaaguuauuaauuucuuc

SEQ ID NO: 1257148 - RNA, 21 nt, Human
gucaauaaaauccauacauuu

SEQ ID NO: 1257149 - RNA, 14 nt, Human
gucaaugcaguugu

SEQ ID NO: 1257150 - RNA, 16 nt, Human
gucaaugcaguugucu

SEQ ID NO: 1257151 - RNA, 22 nt, Human
gucaaugcaguugucucuguuu

SEQ ID NO: 1257152 - RNA, 18 nt, Human
gucaaguuauuaauuucu

SEQ ID NO: 1257153 - RNA, 15 nt, Human
gucaauguuuucagu

SEQ ID NO: 1257154 - RNA, 16 nt, Human
guauuuuaaaagaaug

SEQ ID NO: 1257155 - RNA, 17 nt, Human
guauuuuaaaagaauga

SEQ ID NO: 1257156 - RNA, 20 nt, Human
guauuugggaagugaagacu

SEQ ID NO: 1257157 - RNA, 13 nt, Human
guauuuguaauua

SEQ ID NO: 1257158 - RNA, 17 nt, Human
guauuuguuaauuuaga

SEQ ID NO: 1257159 - RNA, 18 nt, Human
guauuuguuaauuuagaa

SEQ ID NO: 1257160 - RNA, 23 nt, Human
guauuuguuaauuuagaaaacuu

SEQ ID NO: 1257161 - RNA, 18 nt, Human
guauuuuaaaagaaugau

SEQ ID NO: 1257162 - RNA, 16 nt, Human
guauuuguucccaaga

SEQ ID NO: 1257163 - RNA, 22 nt, Human
guauuuguuaauuuagaaaacu

SEQ ID NO: 1257164 - RNA, 20 nt, Human
gucaacuugagcauguuacu

SEQ ID NO: 1257165 - RNA, 17 nt, Human
gucaagugcguccacga

SEQ ID NO: 1257166 - RNA, 19 nt, Human
gucaagauucagcuagugg

SEQ ID NO: 1257167 - RNA, 18 nt, Human
gucaagccauuuuuacau

SEQ ID NO: 1257168 - RNA, 16 nt, Human
gucaagauucagcuag

SEQ ID NO: 1257169 - RNA, 15 nt, Human
gucaagauucagcua

SEQ ID NO: 1257170 - RNA, 19 nt, Human
gucaagagugaauucccuc

SEQ ID NO: 1257171 - RNA, 20 nt, Human
gucaagagugaauucccuca

SEQ ID NO: 1257172 - RNA, 17 nt, Human
gucaacuugagcauguu

SEQ ID NO: 1257173 - RNA, 21 nt, Human
gucaagaauagcauuguaaaa

SEQ ID NO: 1257174 - RNA, 22 nt, Human
gucaagcugaguauuaaaaugu

SEQ ID NO: 1257175 - RNA, 16 nt, Human
ggggcagagccaggaa

SEQ ID NO: 1257176 - RNA, 15 nt, Human
ggggcagagccagga

SEQ ID NO: 1257177 - RNA, 17 nt, Human
ggggcagaggcaguacc

SEQ ID NO: 1257178 - RNA, 23 nt, Human
ggggcagaggcaguaccugggca

SEQ ID NO: 1257179 - RNA, 14 nt, Human
ggggcagagccagg

SEQ ID NO: 1257180 - RNA, 13 nt, Human
ggggcagagccag

SEQ ID NO: 1257181 - RNA, 13 nt, Human
ggggauguguccu

SEQ ID NO: 1257182 - RNA, 16 nt, Human
ggggcagcagcagugg

SEQ ID NO: 1257183 - RNA, 12 nt, Human
ggggcagccccc

SEQ ID NO: 1257184 - RNA, 18 nt, Human
ggggaguuuagggugggg

SEQ ID NO: 1257185 - RNA, 21 nt, Human
ggggaucccucccccccaugc

SEQ ID NO: 1257186 - RNA, 23 nt, Human
ggggaucccucccccccaugcac

SEQ ID NO: 1257187 - RNA, 20 nt, Human
gggcuugggccuaggcugca

SEQ ID NO: 1257188 - RNA, 17 nt, Human
ggggagacugggcugag

SEQ ID NO: 1257189 - RNA, 18 nt, Human
ggggagacugggcugagg

SEQ ID NO: 1257190 - RNA, 14 nt, Human
ggggagcaggcagc

SEQ ID NO: 1257191 - RNA, 11 nt, Human
ggggagcccac

SEQ ID NO: 1257192 - RNA, 19 nt, Human
ggggagcccacuguccugg

SEQ ID NO: 1257193 - RNA, 17 nt, Human
ggggaguuaagaccugg

SEQ ID NO: 1257194 - RNA, 21 nt, Human
ggggaguuaagaccuggcagc

SEQ ID NO: 1257195 - RNA, 22 nt, Human
ggggagccccuucugcucagcu

SEQ ID NO: 1257196 - RNA, 19 nt, Human
ggggagcgggucugcuccc

SEQ ID NO: 1257197 - RNA, 15 nt, Human
ggggagcugggccug

SEQ ID NO: 1257198 - RNA, 13 nt, Human
ggggaggaggagg

SEQ ID NO: 1257199 - RNA, 22 nt, Human
ggggaguaaagaauuauuuugu

SEQ ID NO: 1257200 - RNA, 21 nt, Human
gggcuugcuauucugucccua

SEQ ID NO: 1257201 - RNA, 14 nt, Human
gggcuugccuucug

SEQ ID NO: 1257202 - RNA, 11 nt, Human
gggcuugggcc

SEQ ID NO: 1257203 - RNA, 15 nt, Human
gggcuugggccuagg

SEQ ID NO: 1257204 - RNA, 13 nt, Human
gggcuugccuucu

SEQ ID NO: 1257205 - RNA, 17 nt, Human
gggcuucagguccaggc

SEQ ID NO: 1257206 - RNA, 16 nt, Human
gggcuucccaagggcu

SEQ ID NO: 1257207 - RNA, 13 nt, Human
gggcuucccaagg

SEQ ID NO: 1257208 - RNA, 12 nt, Human
gggcuuccugga

SEQ ID NO: 1257209 - RNA, 13 nt, Human
gggcuuccuggag

SEQ ID NO: 1257210 - RNA, 14 nt, Human
gggcuuccuggagc

SEQ ID NO: 1257211 - RNA, 15 nt, Human
gggcuuccuggagca

SEQ ID NO: 1257212 - RNA, 16 nt, Human
gggcuuccuggagcag

SEQ ID NO: 1257213 - RNA, 21 nt, Human
gggcuuccuggagcagaagca

SEQ ID NO: 1257214 - RNA, 15 nt, Human
gggcuuccuggugcu

SEQ ID NO: 1257215 - RNA, 17 nt, Human
gggcuucagcugccagu

SEQ ID NO: 1257216 - RNA, 20 nt, Human
ggggcuuauaauaaaggacu

SEQ ID NO: 1257217 - RNA, 23 nt, Human
ggggcuguccugccacccagccc

SEQ ID NO: 1257218 - RNA, 11 nt, Human
ggggcuuccug

SEQ ID NO: 1257219 - RNA, 13 nt, Human
ggggcuuccuggu

SEQ ID NO: 1257220 - RNA, 21 nt, Human
ggggcuuccuggugcuggagg

SEQ ID NO: 1257221 - RNA, 14 nt, Human
ggggcuugccuucu

SEQ ID NO: 1257222 - RNA, 17 nt, Human
gggggaacucagaucca

SEQ ID NO: 1257223 - RNA, 23 nt, Human
ggggcuggaggagcccaggccag

SEQ ID NO: 1257224 - RNA, 16 nt, Human
ggggcuggaggagccc

SEQ ID NO: 1257225 - RNA, 17 nt, Human
ggggcuggaggagccca

SEQ ID NO: 1257226 - RNA, 21 nt, Human
ggggcuggaggagcccaggcc

SEQ ID NO: 1257227 - RNA, 22 nt, Human
ggggcugcugcugggcucagug

SEQ ID NO: 1257228 - RNA, 16 nt, Human
ggggcugcuuccuccu

SEQ ID NO: 1257229 - RNA, 18 nt, Human
ggggcugcuuccuccugg

SEQ ID NO: 1257230 - RNA, 19 nt, Human
ggggcugcuuccuccugga

SEQ ID NO: 1257231 - RNA, 12 nt, Human
ggggcugcugcu

SEQ ID NO: 1257232 - RNA, 13 nt, Human
ggggcuggaggag

SEQ ID NO: 1257233 - RNA, 11 nt, Human
ggggcaggagu

SEQ ID NO: 1257234 - RNA, 17 nt, Human
ggggcaggaguagcuga

SEQ ID NO: 1257235 - RNA, 19 nt, Human
ggggcaggaguagcugagc

SEQ ID NO: 1257236 - RNA, 20 nt, Human
ggggcaggaguagcugagcu

SEQ ID NO: 1257237 - RNA, 21 nt, Human
ggggcaggaguagcugagcuc

SEQ ID NO: 1257238 - RNA, 13 nt, Human
ggggcaggcuggg

SEQ ID NO: 1257239 - RNA, 14 nt, Human
ggggcaggcugggc

SEQ ID NO: 1257240 - RNA, 15 nt, Human
ggggcaggcugggcc

SEQ ID NO: 1257241 - RNA, 16 nt, Human
ggggcaggcugggcca

SEQ ID NO: 1257242 - RNA, 20 nt, Human
gggguucuuucuuccucugc

SEQ ID NO: 1257243 - RNA, 22 nt, Human
gggguucuuucuuccucugcug

SEQ ID NO: 1257244 - RNA, 14 nt, Human
gggguucaggcccg

SEQ ID NO: 1257245 - RNA, 21 nt, Human
gggguuccguguccaccccca

SEQ ID NO: 1257246 - RNA, 23 nt, Human
ggggugacccggcacccccugca

SEQ ID NO: 1257247 - RNA, 14 nt, Human
ggggugaggagcug

SEQ ID NO: 1257248 - RNA, 15 nt, Human
ggggugaggagcugg

SEQ ID NO: 1257249 - RNA, 23 nt, Human
ggggugaugagggcagcagccag

SEQ ID NO: 1257250 - RNA, 17 nt, Human
ggggugaugagggcagc

SEQ ID NO: 1257251 - RNA, 13 nt, Human
ggggugcacagga

SEQ ID NO: 1257252 - RNA, 14 nt, Human
ggggugcacaggag

SEQ ID NO: 1257253 - RNA, 15 nt, Human
ggggugcacaggagg

SEQ ID NO: 1257254 - RNA, 16 nt, Human
ggggugcacaggaggg

SEQ ID NO: 1257255 - RNA, 13 nt, Human
ggggugcagggau

SEQ ID NO: 1257256 - RNA, 16 nt, Human
ggggugcccacaggcc

SEQ ID NO: 1257257 - RNA, 18 nt, Human
ggggugcagggauguggg

SEQ ID NO: 1257258 - RNA, 17 nt, Human
ggguacauggugcuggg

SEQ ID NO: 1257259 - RNA, 16 nt, Human
gggccuuuggcaggug

SEQ ID NO: 1257260 - RNA, 18 nt, Human
gggccuuggccuggagca

SEQ ID NO: 1257261 - RNA, 13 nt, Human
gggccuugggcuc

SEQ ID NO: 1257262 - RNA, 14 nt, Human
gggccuugggcucc

SEQ ID NO: 1257263 - RNA, 24 nt, Human
gggccuugggcuccgugugggaga

SEQ ID NO: 1257264 - RNA, 12 nt, Human
gggcgcaggccg

SEQ ID NO: 1257265 - RNA, 13 nt, Human
gggcgccuguggu

SEQ ID NO: 1257266 - RNA, 22 nt, Human
gggccugguuaaauaaggcagg

SEQ ID NO: 1257267 - RNA, 23 nt, Human
gggccugguuaaauaaggcaggg

SEQ ID NO: 1257268 - RNA, 15 nt, Human
gggccuguacugccu

SEQ ID NO: 1257269 - RNA, 16 nt, Human
gggccuguacugccug

SEQ ID NO: 1257270 - RNA, 17 nt, Human
gggccuguacugccugc

SEQ ID NO: 1257271 - RNA, 18 nt, Human
gggccuguacugccugcu

SEQ ID NO: 1257272 - RNA, 20 nt, Human
gggccuguacugccugcuug

SEQ ID NO: 1257273 - RNA, 16 nt, Human
gggccuguccacaggc

SEQ ID NO: 1257274 - RNA, 23 nt, Human
gggccuguccacaggcuucugag

SEQ ID NO: 1257275 - RNA, 20 nt, Human
gggccuuaggaagagccuuc

SEQ ID NO: 1257276 - RNA, 18 nt, Human
gggccuuaggaagagccu

SEQ ID NO: 1257277 - RNA, 14 nt, Human
gggccuuggccugg

SEQ ID NO: 1257278 - RNA, 15 nt, Human
gggccuuggccugga

SEQ ID NO: 1257279 - RNA, 16 nt, Human
gggccuuggccuggag

SEQ ID NO: 1257280 - RNA, 17 nt, Human
gggccuuggccuggagc

SEQ ID NO: 1257281 - RNA, 14 nt, Human
gggcucccugacug

SEQ ID NO: 1257282 - RNA, 18 nt, Human
gggcucccugacugggag

SEQ ID NO: 1257283 - RNA, 21 nt, Human
gggcucccuguaaccucuuca

SEQ ID NO: 1257284 - RNA, 14 nt, Human
gggcgcggcuggga

SEQ ID NO: 1257285 - RNA, 22 nt, Human
gggccuggcagccgugccuuca

SEQ ID NO: 1257286 - RNA, 10 nt, Human
gggccuggca

SEQ ID NO: 1257287 - RNA, 19 nt, Human
gggccuggucucacccugg

SEQ ID NO: 1257288 - RNA, 20 nt, Human
gggccuggucucacccugga

SEQ ID NO: 1257289 - RNA, 21 nt, Human
gggccuggucucacccuggag

SEQ ID NO: 1257290 - RNA, 23 nt, Human
gggccuggucucacccuggaggc

SEQ ID NO: 1257291 - RNA, 20 nt, Human
ggcucccacaggcccuuccu

SEQ ID NO: 1257292 - RNA, 21 nt, Human
ggcucccacaggcccuuccuc

SEQ ID NO: 1257293 - RNA, 11 nt, Human
gggcccggacg

SEQ ID NO: 1257294 - RNA, 12 nt, Human
gggcccggacgc

SEQ ID NO: 1257295 - RNA, 16 nt, Human
gggcccucucugcucu

SEQ ID NO: 1257296 - RNA, 23 nt, Human
gggccugcugcugagaaccuggc

SEQ ID NO: 1257297 - RNA, 13 nt, Human
gggcccuccuucc

SEQ ID NO: 1257298 - RNA, 12 nt, Human
gggccuggagau

SEQ ID NO: 1257299 - RNA, 21 nt, Human
gggccuggagauccuccugca

SEQ ID NO: 1257300 - RNA, 20 nt, Human
gggcuuauaauaaaggacug

SEQ ID NO: 1257301 - RNA, 14 nt, Human
gggcuuauaucugg

SEQ ID NO: 1257302 - RNA, 19 nt, Human
gggcuuauaucuggccucu

SEQ ID NO: 1257303 - RNA, 17 nt, Human
gggcugucaucugugca

SEQ ID NO: 1257304 - RNA, 22 nt, Human
gggcuguaacugccaggcucuc

SEQ ID NO: 1257305 - RNA, 22 nt, Human
gggcuguccugccacccagccc

SEQ ID NO: 1257306 - RNA, 23 nt, Human
gggcugguucuguaauugugugu

SEQ ID NO: 1257307 - RNA, 14 nt, Human
gggcugagggagcc

SEQ ID NO: 1257308 - RNA, 18 nt, Human
gggcugaggagcagcagg

SEQ ID NO: 1257309 - RNA, 16 nt, Human
gggcuguaacugccag

SEQ ID NO: 1257310 - RNA, 17 nt, Human
gggcuguaacugccagg

SEQ ID NO: 1257311 - RNA, 18 nt, Human
gggcuguaacugccaggc

SEQ ID NO: 1257312 - RNA, 19 nt, Human
gggcuguaacugccaggcu

SEQ ID NO: 1257313 - RNA, 16 nt, Human
gggcugucaucugugc

SEQ ID NO: 1257314 - RNA, 23 nt, Human
gggcugagcuggggaccugguac

SEQ ID NO: 1257315 - RNA, 12 nt, Human
gggcugagggag

SEQ ID NO: 1257316 - RNA, 13 nt, Human
gggcugagggagc

SEQ ID NO: 1257317 - RNA, 23 nt, Human
gggcuccuccaggguggcagcaa

SEQ ID NO: 1257318 - RNA, 22 nt, Human
gggcuccuccaggguggcagca

SEQ ID NO: 1257319 - RNA, 17 nt, Human
gggcuccgugugggaga

SEQ ID NO: 1257320 - RNA, 18 nt, Human
gggcuccgugugggagac

SEQ ID NO: 1257321 - RNA, 11 nt, Human
gggcuccugca

SEQ ID NO: 1257322 - RNA, 18 nt, Human
gggcuccugcacuuacuu

SEQ ID NO: 1257323 - RNA, 22 nt, Human
gggcuccugcacuuacuugcuu

SEQ ID NO: 1257324 - RNA, 13 nt, Human
gggcuccuggacc

SEQ ID NO: 1257325 - RNA, 18 nt, Human
gggcuccuugugggccug

SEQ ID NO: 1257326 - RNA, 19 nt, Human
gggcuccuugugggccugg

SEQ ID NO: 1257327 - RNA, 20 nt, Human
gggcuccuugugggccuggg

SEQ ID NO: 1257328 - RNA, 22 nt, Human
gggcuccuugugggccugggcu

SEQ ID NO: 1257329 - RNA, 23 nt, Human
gggcuccuugugggccugggcuc

SEQ ID NO: 1257330 - RNA, 12 nt, Human
gggcuccuuucc

SEQ ID NO: 1257331 - RNA, 18 nt, Human
gggcucgaggggugggcu

SEQ ID NO: 1257332 - RNA, 20 nt, Human
gggcucgaggggugggcugg

SEQ ID NO: 1257333 - RNA, 15 nt, Human
gggcucuaacgccug

SEQ ID NO: 1257334 - RNA, 16 nt, Human
gggcucuaacgccuga

SEQ ID NO: 1257335 - RNA, 17 nt, Human
gggcucuaacgccugag

SEQ ID NO: 1257336 - RNA, 18 nt, Human
gggcucuaacgccugagc

SEQ ID NO: 1257337 - RNA, 19 nt, Human
gggcucuaacgccugagcc

SEQ ID NO: 1257338 - RNA, 20 nt, Human
gggcucuaacgccugagccc

SEQ ID NO: 1257339 - RNA, 21 nt, Human
gggcucuaacgccugagccca

SEQ ID NO: 1257340 - RNA, 23 nt, Human
gggcucuaacgccugagcccagg

SEQ ID NO: 1257341 - RNA, 22 nt, Human
gggcucuaacgccugagcccag

SEQ ID NO: 1257342 - RNA, 12 nt, Human
gggcucuccugg

SEQ ID NO: 1257343 - RNA, 13 nt, Human
gggcucuccuggc

SEQ ID NO: 1257344 - RNA, 22 nt, Human
gggcucuccuggcuucccaucc

SEQ ID NO: 1257345 - RNA, 11 nt, Human
gggcucugagg

SEQ ID NO: 1257346 - RNA, 12 nt, Human
gggcucugaggc

SEQ ID NO: 1257347 - RNA, 15 nt, Human
gggcucugaggcgcc

SEQ ID NO: 1257348 - RNA, 11 nt, Human
gggcucugagu

SEQ ID NO: 1257349 - RNA, 16 nt, Human
gggcucugaguacccc

SEQ ID NO: 1257350 - RNA, 10 nt, Human
gggcucugau

SEQ ID NO: 1257351 - RNA, 20 nt, Human
gggcucugcaauuccccucu

SEQ ID NO: 1257352 - RNA, 21 nt, Human
gggcucugcaauuccccucug

SEQ ID NO: 1257353 - RNA, 23 nt, Human
gggcucugcaauuccccucugcu

SEQ ID NO: 1257354 - RNA, 19 nt, Human
gggugcugggccccugccu

SEQ ID NO: 1257355 - RNA, 16 nt, Human
ggguagcgggggaggg

SEQ ID NO: 1257356 - RNA, 14 nt, Human
ggguucauuugugu

SEQ ID NO: 1257357 - RNA, 22 nt, Human
ggguuccagcaauucuccugcc

SEQ ID NO: 1257358 - RNA, 12 nt, Human
ggguggaagcuu

SEQ ID NO: 1257359 - RNA, 14 nt, Human
ggguucuuucuucc

SEQ ID NO: 1257360 - RNA, 16 nt, Human
ggguucuuucuuccuc

SEQ ID NO: 1257361 - RNA, 20 nt, Human
ggguucugccugccagcugc

SEQ ID NO: 1257362 - RNA, 21 nt, Human
ggguucugccugccagcugca

SEQ ID NO: 1257363 - RNA, 21 nt, Human
ggguuccguguccacccccau

SEQ ID NO: 1257364 - RNA, 17 nt, Human
ggguuccuccccuccag

SEQ ID NO: 1257365 - RNA, 18 nt, Human
ggguuccuccccuccagc

SEQ ID NO: 1257366 - RNA, 19 nt, Human
ggguuccuccccuccagcu

SEQ ID NO: 1257367 - RNA, 22 nt, Human
gguacuucaaauccuugaagau

SEQ ID NO: 1257368 - RNA, 21 nt, Human
gguacuguaugaucaaauguu

SEQ ID NO: 1257369 - RNA, 20 nt, Human
gguacuguaugaucaaaugu

SEQ ID NO: 1257370 - RNA, 18 nt, Human
gguacuguaugaucaaau

SEQ ID NO: 1257371 - RNA, 17 nt, Human
gguacuguaugaucaaa

SEQ ID NO: 1257372 - RNA, 21 nt, Human
gguacuguacagcuggcucua

SEQ ID NO: 1257373 - RNA, 18 nt, Human
gguacuguacagcuggcu

SEQ ID NO: 1257374 - RNA, 20 nt, Human
gguacuguacagcuggcucu

SEQ ID NO: 1257375 - RNA, 18 nt, Human
gguacugacuuugcuugc

SEQ ID NO: 1257376 - RNA, 15 nt, Human
gguacuguacagcug

SEQ ID NO: 1257377 - RNA, 14 nt, Human
gguacccuccuggc

SEQ ID NO: 1257378 - RNA, 13 nt, Human
gguacccucugga

SEQ ID NO: 1257379 - RNA, 20 nt, Human
ggguuucaccauguuggcca

SEQ ID NO: 1257380 - RNA, 15 nt, Human
ggguuuauucacuga

SEQ ID NO: 1257381 - RNA, 20 nt, Human
ggguuucaccauguuagcca

SEQ ID NO: 1257382 - RNA, 23 nt, Human
ggguuguaaauuggcauggaaau

SEQ ID NO: 1257383 - RNA, 15 nt, Human
ggguugugugucugu

SEQ ID NO: 1257384 - RNA, 15 nt, Human
gguagacacacauga

SEQ ID NO: 1257385 - RNA, 20 nt, Human
gguagaaagagauacagagg

SEQ ID NO: 1257386 - RNA, 19 nt, Human
gguagaauguaaagcuugu

SEQ ID NO: 1257387 - RNA, 22 nt, Human
gguagacacacaugaaguccaa

SEQ ID NO: 1257388 - RNA, 15 nt, Human
gguagaauguaaagc

SEQ ID NO: 1257389 - RNA, 18 nt, Human
ggucaaguuauuaauuuc

SEQ ID NO: 1257390 - RNA, 14 nt, Human
ggucacacacugau

SEQ ID NO: 1257391 - RNA, 15 nt, Human
ggucacagcggaggu

SEQ ID NO: 1257392 - RNA, 22 nt, Human
ggucccccacucuaaagcaaau

SEQ ID NO: 1257393 - RNA, 14 nt, Human
ggucccagcagcug

SEQ ID NO: 1257394 - RNA, 12 nt, Human
ggucccagcagc

SEQ ID NO: 1257395 - RNA, 15 nt, Human
ggucccagcagcugc

SEQ ID NO: 1257396 - RNA, 18 nt, Human
ggucagcacaucucaaca

SEQ ID NO: 1257397 - RNA, 21 nt, Human
ggucagcaugucuauucagcu

SEQ ID NO: 1257398 - RNA, 23 nt, Human
ggugccccaggaccagcucagga

SEQ ID NO: 1257399 - RNA, 17 nt, Human
ggugccuaguauugaca

SEQ ID NO: 1257400 - RNA, 16 nt, Human
ggugccuaggccuggg

SEQ ID NO: 1257401 - RNA, 22 nt, Human
ggugauagguauaaguggugug

SEQ ID NO: 1257402 - RNA, 12 nt, Human
ggugcccaggag

SEQ ID NO: 1257403 - RNA, 13 nt, Human
ggugcccaggaga

SEQ ID NO: 1257404 - RNA, 14 nt, Human
ggugcccaggagaa

SEQ ID NO: 1257405 - RNA, 13 nt, Human
ggugccccaggac

SEQ ID NO: 1257406 - RNA, 14 nt, Human
ggugccccaggacc

SEQ ID NO: 1257407 - RNA, 15 nt, Human
ggugccccaggacca

SEQ ID NO: 1257408 - RNA, 16 nt, Human
ggugccccaggaccag

SEQ ID NO: 1257409 - RNA, 17 nt, Human
ggugccccaggaccagc

SEQ ID NO: 1257410 - RNA, 20 nt, Human
ggugccccaggaccagcuca

SEQ ID NO: 1257411 - RNA, 21 nt, Human
ggugccccaggaccagcucag

SEQ ID NO: 1257412 - RNA, 22 nt, Human
ggugccccaggaccagcucagg

SEQ ID NO: 1257413 - RNA, 20 nt, Human
ggugaccccagggcacagga

SEQ ID NO: 1257414 - RNA, 21 nt, Human
ggugaccccagggcacaggag

SEQ ID NO: 1257415 - RNA, 23 nt, Human
ggugaccccagggcacaggagcu

SEQ ID NO: 1257416 - RNA, 22 nt, Human
ggugaccccagggcacaggagc

SEQ ID NO: 1257417 - RNA, 20 nt, Human
ggugacccggcacccccugc

SEQ ID NO: 1257418 - RNA, 21 nt, Human
ggugacccggcacccccugca

SEQ ID NO: 1257419 - RNA, 22 nt, Human
ggugacccggcacccccugcag

SEQ ID NO: 1257420 - RNA, 23 nt, Human
ggugacccggcacccccugcagc

SEQ ID NO: 1257421 - RNA, 16 nt, Human
ggugaggucagcacau

SEQ ID NO: 1257422 - RNA, 23 nt, Human
ggugaggucuguuccuuuuauau

SEQ ID NO: 1257423 - RNA, 23 nt, Human
ggugaguuggcuuaccuggccca

SEQ ID NO: 1257424 - RNA, 20 nt, Human
ggugcuaaugucaaaccacu

SEQ ID NO: 1257425 - RNA, 19 nt, Human
ggugccuaguauugacaaa

SEQ ID NO: 1257426 - RNA, 17 nt, Human
ggugcggcuggccaugg

SEQ ID NO: 1257427 - RNA, 14 nt, Human
ggugcucagggggc

SEQ ID NO: 1257428 - RNA, 16 nt, Human
ggugcucucuuucugu

SEQ ID NO: 1257429 - RNA, 13 nt, Human
gguccgugggacg

SEQ ID NO: 1257430 - RNA, 21 nt, Human
gguccgguguucuaagaugug

SEQ ID NO: 1257431 - RNA, 18 nt, Human
gguccggcagcuucugcc

SEQ ID NO: 1257432 - RNA, 16 nt, Human
gguccgguguucuaag

SEQ ID NO: 1257433 - RNA, 17 nt, Human
gguccgguguucuaaga

SEQ ID NO: 1257434 - RNA, 19 nt, Human
ggucccuuguauccccugc

SEQ ID NO: 1257435 - RNA, 11 nt, Human
ggucccugggu

SEQ ID NO: 1257436 - RNA, 20 nt, Human
ggucccuggguagcggggga

SEQ ID NO: 1257437 - RNA, 17 nt, Human
ggucccuaauaaagcug

SEQ ID NO: 1257438 - RNA, 16 nt, Human
ggucccuaauaaagcu

SEQ ID NO: 1257439 - RNA, 13 nt, Human
ggucccuaauaaa

SEQ ID NO: 1257440 - RNA, 12 nt, Human
ggucccuaauaa

SEQ ID NO: 1257441 - RNA, 18 nt, Human
ggucccuaauaaagcugu

SEQ ID NO: 1257442 - RNA, 13 nt, Human
gguccccuccuuc

SEQ ID NO: 1257443 - RNA, 21 nt, Human
ggucccccacucuaaagcaaa

SEQ ID NO: 1257444 - RNA, 12 nt, Human
gguccccuccuu

SEQ ID NO: 1257445 - RNA, 14 nt, Human
ggucccucugugua

SEQ ID NO: 1257446 - RNA, 17 nt, Human
ggucccuccccuucucu

SEQ ID NO: 1257447 - RNA, 21 nt, Human
ggugaagcucacuucugggcu

SEQ ID NO: 1257448 - RNA, 15 nt, Human
ggucugagcuccagc

SEQ ID NO: 1257449 - RNA, 16 nt, Human
ggucugagcuccagcu

SEQ ID NO: 1257450 - RNA, 22 nt, Human
ggugaagaggaggggaagaggc

SEQ ID NO: 1257451 - RNA, 19 nt, Human
ggucucgaacuccugaccu

SEQ ID NO: 1257452 - RNA, 20 nt, Human
ggucucgaacuccugaccuu

SEQ ID NO: 1257453 - RNA, 20 nt, Human
ggucucccuucucuacacuc

SEQ ID NO: 1257454 - RNA, 21 nt, Human
ggucucccuucucuacacucu

SEQ ID NO: 1257455 - RNA, 21 nt, Human
guaaaucacgcuuuuugaaaa

SEQ ID NO: 1257456 - RNA, 14 nt, Human
guaaauauuuuaaa

SEQ ID NO: 1257457 - RNA, 14 nt, Human
guaaaucaguaaga

SEQ ID NO: 1257458 - RNA, 13 nt, Human
guaaauauuuuaa

SEQ ID NO: 1257459 - RNA, 23 nt, Human
guaaauauuuuaaagaauugugu

SEQ ID NO: 1257460 - RNA, 11 nt, Human
guaaauauaaa

SEQ ID NO: 1257461 - RNA, 12 nt, Human
guaaauauaaag

SEQ ID NO: 1257462 - RNA, 13 nt, Human
guaaauauaaaga

SEQ ID NO: 1257463 - RNA, 14 nt, Human
guaaauauaaagac

SEQ ID NO: 1257464 - RNA, 15 nt, Human
guaaauauaaagacg

SEQ ID NO: 1257465 - RNA, 19 nt, Human
guaaauauaaagacguuuu

SEQ ID NO: 1257466 - RNA, 23 nt, Human
guaaauauaaagacguuuuauaa

SEQ ID NO: 1257467 - RNA, 21 nt, Human
guaaauacaauuuuuuuuauu

SEQ ID NO: 1257468 - RNA, 19 nt, Human
guaaauacaauuuuuuuua

SEQ ID NO: 1257469 - RNA, 16 nt, Human
guaaauacccauaugu

SEQ ID NO: 1257470 - RNA, 14 nt, Human
guaaauaggaauug

SEQ ID NO: 1257471 - RNA, 16 nt, Human
guaaaauaaaaggucg

SEQ ID NO: 1257472 - RNA, 19 nt, Human
guaaaagcaaaaaagaaaa

SEQ ID NO: 1257473 - RNA, 16 nt, Human
guaaaagcauuuugua

SEQ ID NO: 1257474 - RNA, 17 nt, Human
guaaaagguauuaaauu

SEQ ID NO: 1257475 - RNA, 13 nt, Human
guaaauaaaaaga

SEQ ID NO: 1257476 - RNA, 13 nt, Human
guaaauacaauuu

SEQ ID NO: 1257477 - RNA, 21 nt, Human
guaaauaacuggaaaacagaa

SEQ ID NO: 1257478 - RNA, 20 nt, Human
guaaauaacuggaaaacaga

SEQ ID NO: 1257479 - RNA, 14 nt, Human
guaaauaauacauu

SEQ ID NO: 1257480 - RNA, 16 nt, Human
guaaauaauacauuau

SEQ ID NO: 1257481 - RNA, 12 nt, Human
guaaauaaugcu

SEQ ID NO: 1257482 - RNA, 16 nt, Human
guaaauaaugcuuuga

SEQ ID NO: 1257483 - RNA, 15 nt, Human
guaaauaaaaagaaa

SEQ ID NO: 1257484 - RNA, 14 nt, Human
guaaauaaaaagaa

SEQ ID NO: 1257485 - RNA, 17 nt, Human
guaaaucaguaagaggu

SEQ ID NO: 1257486 - RNA, 21 nt, Human
guaaaucaguaagagguguua

SEQ ID NO: 1257487 - RNA, 13 nt, Human
guaaaucuacaca

SEQ ID NO: 1257488 - RNA, 12 nt, Human
guaaaucugcca

SEQ ID NO: 1257489 - RNA, 13 nt, Human
guaaaucugccac

SEQ ID NO: 1257490 - RNA, 14 nt, Human
guaaaucugccaca

SEQ ID NO: 1257491 - RNA, 14 nt, Human
guaaaucuuuuaca

SEQ ID NO: 1257492 - RNA, 17 nt, Human
guaaaugucucacugag

SEQ ID NO: 1257493 - RNA, 19 nt, Human
guaaaugucucacugagca

SEQ ID NO: 1257494 - RNA, 15 nt, Human
guaaaucugccacaa

SEQ ID NO: 1257495 - RNA, 16 nt, Human
guaaaugguaugucau

SEQ ID NO: 1257496 - RNA, 23 nt, Human
guaagcauaagcuuaugcuuaaa

SEQ ID NO: 1257497 - RNA, 20 nt, Human
guaagcacugacugggacca

SEQ ID NO: 1257498 - RNA, 21 nt, Human
guaagauuuguuuuuaaacug

SEQ ID NO: 1257499 - RNA, 17 nt, Human
guaagauuuguuuuuaa

SEQ ID NO: 1257500 - RNA, 16 nt, Human
guaagcacugacuggg

SEQ ID NO: 1257501 - RNA, 19 nt, Human
guaaguacagagaagccau

SEQ ID NO: 1257502 - RNA, 17 nt, Human
guaagggugacaaaugg

SEQ ID NO: 1257503 - RNA, 13 nt, Human
guaaguacagaga

SEQ ID NO: 1257504 - RNA, 14 nt, Human
guaaguacagagaa

SEQ ID NO: 1257505 - RNA, 15 nt, Human
guaaguacagagaag

SEQ ID NO: 1257506 - RNA, 16 nt, Human
guaaguacagagaagc

SEQ ID NO: 1257507 - RNA, 17 nt, Human
guaaguacagagaagcc

SEQ ID NO: 1257508 - RNA, 18 nt, Human
guaaguacagagaagcca

SEQ ID NO: 1257509 - RNA, 18 nt, Human
guaaggauccggaaagaa

SEQ ID NO: 1257510 - RNA, 19 nt, Human
guaaggauccggaaagaag

SEQ ID NO: 1257511 - RNA, 13 nt, Human
guaaggcucuaga

SEQ ID NO: 1257512 - RNA, 14 nt, Human
guaaggcucuagau

SEQ ID NO: 1257513 - RNA, 16 nt, Human
guaaggcucuagauca

SEQ ID NO: 1257514 - RNA, 13 nt, Human
guaaggcugugua

SEQ ID NO: 1257515 - RNA, 14 nt, Human
guaaggcuguguaa

SEQ ID NO: 1257516 - RNA, 19 nt, Human
guaaggcuguguaagauuu

SEQ ID NO: 1257517 - RNA, 13 nt, Human
guaacuguucuug

SEQ ID NO: 1257518 - RNA, 16 nt, Human
guaacuguuuuuuaag

SEQ ID NO: 1257519 - RNA, 18 nt, Human
guaacuucuuauggaauu

SEQ ID NO: 1257520 - RNA, 20 nt, Human
guaacuucuuauggaauuga

SEQ ID NO: 1257521 - RNA, 21 nt, Human
guaacuucuuauggaauugau

SEQ ID NO: 1257522 - RNA, 21 nt, Human
guaacuugauccauuucuaau

SEQ ID NO: 1257523 - RNA, 23 nt, Human
guaacuugauccauuucuaauua

SEQ ID NO: 1257524 - RNA, 22 nt, Human
guaacuugauccauuucuaauu

SEQ ID NO: 1257525 - RNA, 14 nt, Human
guaacuuuuguaag

SEQ ID NO: 1257526 - RNA, 15 nt, Human
guaacuuuuguaaga

SEQ ID NO: 1257527 - RNA, 17 nt, Human
guaacuuuuguaagaca

SEQ ID NO: 1257528 - RNA, 14 nt, Human
guaacuuuugugaa

SEQ ID NO: 1257529 - RNA, 20 nt, Human
guaagaaaccuacugcccag

SEQ ID NO: 1257530 - RNA, 13 nt, Human
guaagaaauacag

SEQ ID NO: 1257531 - RNA, 16 nt, Human
guaagaaauacagacu

SEQ ID NO: 1257532 - RNA, 18 nt, Human
guaagaacaacuaccuga

SEQ ID NO: 1257533 - RNA, 23 nt, Human
guaagaacaacuaccugagcuaa

SEQ ID NO: 1257534 - RNA, 15 nt, Human
guaagacaaagguuu

SEQ ID NO: 1257535 - RNA, 15 nt, Human
guaagagcaaaagaa

SEQ ID NO: 1257536 - RNA, 18 nt, Human
guaagauuauagauucua

SEQ ID NO: 1257537 - RNA, 20 nt, Human
guaagauuauagauucuaaa

SEQ ID NO: 1257538 - RNA, 21 nt, Human
guaagauuauagauucuaaag

SEQ ID NO: 1257539 - RNA, 22 nt, Human
guaagauuauagauucuaaaga

SEQ ID NO: 1257540 - RNA, 23 nt, Human
guaagauuauagauucuaaagau

SEQ ID NO: 1257541 - RNA, 13 nt, Human
guaagauuuccuu

SEQ ID NO: 1257542 - RNA, 18 nt, Human
guaagauuuccuucuuuu

SEQ ID NO: 1257543 - RNA, 16 nt, Human
guaagauuuguuuuua

SEQ ID NO: 1257544 - RNA, 20 nt, Human
guaaaaacaaagaaauuaug

SEQ ID NO: 1257545 - RNA, 13 nt, Human
guaaaaaauuuau

SEQ ID NO: 1257546 - RNA, 18 nt, Human
guaaaaacaaagaaauua

SEQ ID NO: 1257547 - RNA, 22 nt, Human
gguuuuuuuucaguuguucuuu

SEQ ID NO: 1257548 - RNA, 17 nt, Human
guaaaaauggaaacuau

SEQ ID NO: 1257549 - RNA, 15 nt, Human
guaaaaaugauuuca

SEQ ID NO: 1257550 - RNA, 14 nt, Human
guaaaaauaaaauu

SEQ ID NO: 1257551 - RNA, 13 nt, Human
guaaaaauaaaau

SEQ ID NO: 1257552 - RNA, 19 nt, Human
guaaaacaaacaauaccug

SEQ ID NO: 1257553 - RNA, 17 nt, Human
guaaaacagggccacau

SEQ ID NO: 1257554 - RNA, 20 nt, Human
guaaaacagggccacauaga

SEQ ID NO: 1257555 - RNA, 11 nt, Human
guaaaacauuu

SEQ ID NO: 1257556 - RNA, 18 nt, Human
guaaaacauuuauuuuga

SEQ ID NO: 1257557 - RNA, 20 nt, Human
guaaaaccuggagauggugg

SEQ ID NO: 1257558 - RNA, 12 nt, Human
guaaaagcaaaa

SEQ ID NO: 1257559 - RNA, 18 nt, Human
guaaaagcaaaaaagaaa

SEQ ID NO: 1257560 - RNA, 20 nt, Human
guaaaacauuuauuuugaca

SEQ ID NO: 1257561 - RNA, 20 nt, Human
gguuuucacauuggaaacaa

SEQ ID NO: 1257562 - RNA, 13 nt, Human
gguuuucgagauu

SEQ ID NO: 1257563 - RNA, 19 nt, Human
gguuuaauguuuuggccaa

SEQ ID NO: 1257564 - RNA, 13 nt, Human
gguuuaauguuuu

SEQ ID NO: 1257565 - RNA, 18 nt, Human
gguuuacucacugcugca

SEQ ID NO: 1257566 - RNA, 17 nt, Human
gguuuuguauucucuga

SEQ ID NO: 1257567 - RNA, 18 nt, Human
gguuuuguauucucugag

SEQ ID NO: 1257568 - RNA, 19 nt, Human
gguuuuguauucucugagc

SEQ ID NO: 1257569 - RNA, 16 nt, Human
gguuuuuaaaacccag

SEQ ID NO: 1257570 - RNA, 14 nt, Human
gguuuuuauuuccu

SEQ ID NO: 1257571 - RNA, 20 nt, Human
gguuuuuacugcucugagaa

SEQ ID NO: 1257572 - RNA, 19 nt, Human
gguuuuuacugcucugaga

SEQ ID NO: 1257573 - RNA, 12 nt, Human
gguuuuucccug

SEQ ID NO: 1257574 - RNA, 23 nt, Human
gguuuuuguuuguuuccuuuguu

SEQ ID NO: 1257575 - RNA, 20 nt, Human
gguuuuuggacuucuggggu

SEQ ID NO: 1257576 - RNA, 14 nt, Human
gguuuuuuaguuga

SEQ ID NO: 1257577 - RNA, 13 nt, Human
gguuuuuuuccuu

SEQ ID NO: 1257578 - RNA, 22 nt, Human
guaaaaaaaaaaaaaagcaaca

SEQ ID NO: 1257579 - RNA, 23 nt, Human
guaaaaaaaaaaaaaauguucuu

SEQ ID NO: 1257580 - RNA, 20 nt, Human
gguggcccuuaugacugcca

SEQ ID NO: 1257581 - RNA, 23 nt, Human
gguggcccuuaugacugccaaga

SEQ ID NO: 1257582 - RNA, 20 nt, Human
gguggccgcugaguggcagg

SEQ ID NO: 1257583 - RNA, 21 nt, Human
gguggccgcugaguggcaggg

SEQ ID NO: 1257584 - RNA, 16 nt, Human
gguggcccgacagccu

SEQ ID NO: 1257585 - RNA, 17 nt, Human
gguggcccgacagccug

SEQ ID NO: 1257586 - RNA, 18 nt, Human
gguggcccgacagccugg

SEQ ID NO: 1257587 - RNA, 19 nt, Human
gguggcccgacagccuggc

SEQ ID NO: 1257588 - RNA, 20 nt, Human
gguggcccgacagccuggca

SEQ ID NO: 1257589 - RNA, 15 nt, Human
gguggcccucucccc

SEQ ID NO: 1257590 - RNA, 18 nt, Human
gguggcccucuccccugc

SEQ ID NO: 1257591 - RNA, 19 nt, Human
gguggcccucuccccugcc

SEQ ID NO: 1257592 - RNA, 20 nt, Human
gguggcccucuccccugccc

SEQ ID NO: 1257593 - RNA, 22 nt, Human
gguggcccucuccccugccccc

SEQ ID NO: 1257594 - RNA, 21 nt, Human
gguggcccucuccccugcccc

SEQ ID NO: 1257595 - RNA, 18 nt, Human
gguucuuucuuccucugc

SEQ ID NO: 1257596 - RNA, 19 nt, Human
gguucagaauuaaacuuuu

SEQ ID NO: 1257597 - RNA, 23 nt, Human
gguucaacaaagaaacaaagaug

SEQ ID NO: 1257598 - RNA, 14 nt, Human
gguucaacuuauua

SEQ ID NO: 1257599 - RNA, 18 nt, Human
gguucagaauuaaacuuu

SEQ ID NO: 1257600 - RNA, 21 nt, Human
gguugggcagccagaccagca

SEQ ID NO: 1257601 - RNA, 13 nt, Human
gguugguagggug

SEQ ID NO: 1257602 - RNA, 16 nt, Human
gguugguaggguggga

SEQ ID NO: 1257603 - RNA, 22 nt, Human
gguugaacucugguggcacagg

SEQ ID NO: 1257604 - RNA, 16 nt, Human
gguugaacucuggugg

SEQ ID NO: 1257605 - RNA, 15 nt, Human
gguugaccccagagg

SEQ ID NO: 1257606 - RNA, 16 nt, Human
gguugaccccagagga

SEQ ID NO: 1257607 - RNA, 15 nt, Human
gguugacuuuaccca

SEQ ID NO: 1257608 - RNA, 18 nt, Human
gguugcuccgccuggccu

SEQ ID NO: 1257609 - RNA, 16 nt, Human
gguugcuccgccuggc

SEQ ID NO: 1257610 - RNA, 17 nt, Human
gguuuaaaugaacaaga

SEQ ID NO: 1257611 - RNA, 17 nt, Human
gguuuaagaaauagaau

SEQ ID NO: 1257612 - RNA, 13 nt, Human
gguuguuauguga

SEQ ID NO: 1257613 - RNA, 12 nt, Human
gguuguuucugu

SEQ ID NO: 1257614 - RNA, 19 nt, Human
gguuguuucuguuccaaau

SEQ ID NO: 1257615 - RNA, 14 nt, Human
gguuguuucuguuc

SEQ ID NO: 1257616 - RNA, 18 nt, Human
gguuuaaagaaaguguau

SEQ ID NO: 1257617 - RNA, 15 nt, Human
gguuuaaagagucua

SEQ ID NO: 1257618 - RNA, 20 nt, Human
gguuuaaagagucuagauuc

SEQ ID NO: 1257619 - RNA, 22 nt, Human
gguuuaaagagucuagauucaa

SEQ ID NO: 1257620 - RNA, 12 nt, Human
gguuuaaaugaa

SEQ ID NO: 1257621 - RNA, 22 nt, Human
gguuuaaaugaacaagagaagc

SEQ ID NO: 1257622 - RNA, 19 nt, Human
guaaugauaacuggaaacu

SEQ ID NO: 1257623 - RNA, 18 nt, Human
guaaugaugucguuugaa

SEQ ID NO: 1257624 - RNA, 14 nt, Human
guaaugaauaccuu

SEQ ID NO: 1257625 - RNA, 22 nt, Human
guaaugacagaacaugcuguua

SEQ ID NO: 1257626 - RNA, 16 nt, Human
guaauggcaguuauau

SEQ ID NO: 1257627 - RNA, 23 nt, Human
guaauggcaguuauauuuugcag

SEQ ID NO: 1257628 - RNA, 19 nt, Human
guaaugguacugacuuugc

SEQ ID NO: 1257629 - RNA, 23 nt, Human
guaaugguacugacuuugcuugc

SEQ ID NO: 1257630 - RNA, 14 nt, Human
guaaugguguagaa

SEQ ID NO: 1257631 - RNA, 15 nt, Human
guaaugguguagaac

SEQ ID NO: 1257632 - RNA, 16 nt, Human
guaaugguguagaaca

SEQ ID NO: 1257633 - RNA, 17 nt, Human
guaaugguguagaacac

SEQ ID NO: 1257634 - RNA, 19 nt, Human
guaauguaucaaauacauu

SEQ ID NO: 1257635 - RNA, 19 nt, Human
guaaugucuugagcucuau

SEQ ID NO: 1257636 - RNA, 17 nt, Human
guaaugucuugagcucu

SEQ ID NO: 1257637 - RNA, 17 nt, Human
guaauguuaauauugau

SEQ ID NO: 1257638 - RNA, 22 nt, Human
guaauguuaauauugauuuauu

SEQ ID NO: 1257639 - RNA, 18 nt, Human
guaauguuaauauugauu

SEQ ID NO: 1257640 - RNA, 13 nt, Human
guaaugaaaacca

SEQ ID NO: 1257641 - RNA, 11 nt, Human
guaaugaaaac

SEQ ID NO: 1257642 - RNA, 15 nt, Human
guaaucguguccccu

SEQ ID NO: 1257643 - RNA, 22 nt, Human
guaaucuaugaauucuaaguga

SEQ ID NO: 1257644 - RNA, 22 nt, Human
guaaucugaauaaaguguaaca

SEQ ID NO: 1257645 - RNA, 23 nt, Human
guaauucuaccaaggucuucuua

SEQ ID NO: 1257646 - RNA, 18 nt, Human
guaauucuaaaugaaugu

SEQ ID NO: 1257647 - RNA, 22 nt, Human
guaauucuaaaugaauguuuac

SEQ ID NO: 1257648 - RNA, 17 nt, Human
guaauucagguuuuucc

SEQ ID NO: 1257649 - RNA, 12 nt, Human
guaauucuaaau

SEQ ID NO: 1257650 - RNA, 14 nt, Human
guaauucuaaauga

SEQ ID NO: 1257651 - RNA, 15 nt, Human
guaauucuaaaugaa

SEQ ID NO: 1257652 - RNA, 23 nt, Human
guaauuauuuauguauggugcaa

SEQ ID NO: 1257653 - RNA, 19 nt, Human
guaauuauuuauguauggu

SEQ ID NO: 1257654 - RNA, 15 nt, Human
guaauuggaaaggca

SEQ ID NO: 1257655 - RNA, 15 nt, Human
guaauugacaugugc

SEQ ID NO: 1257656 - RNA, 23 nt, Human
guaauuguacuaaagccaaacau

SEQ ID NO: 1257657 - RNA, 23 nt, Human
guaauuaguaacauguguuaagu

SEQ ID NO: 1257658 - RNA, 20 nt, Human
guaauuagugccacuuaaug

SEQ ID NO: 1257659 - RNA, 21 nt, Human
guaauuagugccacuuaaugu

SEQ ID NO: 1257660 - RNA, 13 nt, Human
guaauuauggagu

SEQ ID NO: 1257661 - RNA, 18 nt, Human
guaauuaaaagcaaauca

SEQ ID NO: 1257662 - RNA, 19 nt, Human
guaauuaaaagcaaaucau

SEQ ID NO: 1257663 - RNA, 20 nt, Human
guaauuaaaagcaaaucauu

SEQ ID NO: 1257664 - RNA, 21 nt, Human
guaauuaaaagcaaaucauuu

SEQ ID NO: 1257665 - RNA, 15 nt, Human
guaauuaguaacaug

SEQ ID NO: 1257666 - RNA, 15 nt, Human
guacagacagaaaaa

SEQ ID NO: 1257667 - RNA, 14 nt, Human
guacagaaagcugc

SEQ ID NO: 1257668 - RNA, 13 nt, Human
guacagaaagcug

SEQ ID NO: 1257669 - RNA, 18 nt, Human
guaauuguacuaaagcca

SEQ ID NO: 1257670 - RNA, 11 nt, Human
guacagagaag

SEQ ID NO: 1257671 - RNA, 12 nt, Human
guacagagaagc

SEQ ID NO: 1257672 - RNA, 13 nt, Human
guacagagaagcc

SEQ ID NO: 1257673 - RNA, 14 nt, Human
guacagagaagcca

SEQ ID NO: 1257674 - RNA, 15 nt, Human
guacagagaagccag

SEQ ID NO: 1257675 - RNA, 16 nt, Human
guacagagaagccagc

SEQ ID NO: 1257676 - RNA, 18 nt, Human
guacagagaagccagcuu

SEQ ID NO: 1257677 - RNA, 19 nt, Human
guacagagaagccagcuug

SEQ ID NO: 1257678 - RNA, 21 nt, Human
guacagagaagccagcuuguu

SEQ ID NO: 1257679 - RNA, 23 nt, Human
guacagagaagccagcuuguuua

SEQ ID NO: 1257680 - RNA, 15 nt, Human
guacagagaagccau

SEQ ID NO: 1257681 - RNA, 16 nt, Human
guacagagaagccauc

SEQ ID NO: 1257682 - RNA, 18 nt, Human
guacagagaagccaucac

SEQ ID NO: 1257683 - RNA, 17 nt, Human
guacagagaagccauca

SEQ ID NO: 1257684 - RNA, 21 nt, Human
guacagaguguggacucuggu

SEQ ID NO: 1257685 - RNA, 12 nt, Human
guacagcuggcu

SEQ ID NO: 1257686 - RNA, 14 nt, Human
guacagcuggcucu

SEQ ID NO: 1257687 - RNA, 15 nt, Human
guacagcuggcucua

SEQ ID NO: 1257688 - RNA, 22 nt, Human
guacauagugcuaacaugaaga

SEQ ID NO: 1257689 - RNA, 16 nt, Human
guacauaugugcugga

SEQ ID NO: 1257690 - RNA, 14 nt, Human
guacauaugugcug

SEQ ID NO: 1257691 - RNA, 17 nt, Human
guacauaguuauuuauu

SEQ ID NO: 1257692 - RNA, 18 nt, Human
guacauaguuauuuauuu

SEQ ID NO: 1257693 - RNA, 19 nt, Human
guacauacccuggccgccc

SEQ ID NO: 1257694 - RNA, 22 nt, Human
guacauacccuggccgcccccu

SEQ ID NO: 1257695 - RNA, 14 nt, Human
guacauaacugaaa

SEQ ID NO: 1257696 - RNA, 16 nt, Human
guacaggguuaucugc

SEQ ID NO: 1257697 - RNA, 21 nt, Human
guacaguauggggguuguaaa

SEQ ID NO: 1257698 - RNA, 22 nt, Human
guacaguauggggguuguaaau

SEQ ID NO: 1257699 - RNA, 23 nt, Human
guacaguauggggguuguaaauu

SEQ ID NO: 1257700 - RNA, 24 nt, Human
guacaguauggggguuguaaauug

SEQ ID NO: 1257701 - RNA, 13 nt, Human
guacagugucuuu

SEQ ID NO: 1257702 - RNA, 14 nt, Human
guacagugucuuuu

SEQ ID NO: 1257703 - RNA, 15 nt, Human
guacagugucuuuuu

SEQ ID NO: 1257704 - RNA, 20 nt, Human
guacagugucuuuuuuugua

SEQ ID NO: 1257705 - RNA, 21 nt, Human
guacagugucuuuuuuuguau

SEQ ID NO: 1257706 - RNA, 22 nt, Human
guacagugucuuuuuuuguaua

SEQ ID NO: 1257707 - RNA, 12 nt, Human
guacaguguuac

SEQ ID NO: 1257708 - RNA, 14 nt, Human
guacaguuaucuaa

SEQ ID NO: 1257709 - RNA, 20 nt, Human
guacaguuaucuaaguuaau

SEQ ID NO: 1257710 - RNA, 19 nt, Human
guacuugcucuugaugccu

SEQ ID NO: 1257711 - RNA, 18 nt, Human
guacuugcucuugaugcc

SEQ ID NO: 1257712 - RNA, 16 nt, Human
guacuugcucuugaug

SEQ ID NO: 1257713 - RNA, 15 nt, Human
guacuugcucuugau

SEQ ID NO: 1257714 - RNA, 22 nt, Human
guacuugcucuugaugccuggc

SEQ ID NO: 1257715 - RNA, 21 nt, Human
guacuuggaguauuggggucu

SEQ ID NO: 1257716 - RNA, 12 nt, Human
guacuuguaguu

SEQ ID NO: 1257717 - RNA, 14 nt, Human
guacuugcucuuga

SEQ ID NO: 1257718 - RNA, 22 nt, Human
guacuugccuuauuagaguguc

SEQ ID NO: 1257719 - RNA, 20 nt, Human
guagaaaaaaaaauucacau

SEQ ID NO: 1257720 - RNA, 13 nt, Human
guagaaaagcuau

SEQ ID NO: 1257721 - RNA, 15 nt, Human
guagaaacugcaggg

SEQ ID NO: 1257722 - RNA, 19 nt, Human
guagaaacugcagggaaaa

SEQ ID NO: 1257723 - RNA, 15 nt, Human
guagaggagaaacug

SEQ ID NO: 1257724 - RNA, 23 nt, Human
guacuuuauuuucuauaauuuaa

SEQ ID NO: 1257725 - RNA, 22 nt, Human
guacuuucauauuuuaaacaga

SEQ ID NO: 1257726 - RNA, 13 nt, Human
guacccccaggac

SEQ ID NO: 1257727 - RNA, 14 nt, Human
guacccccaggacc

SEQ ID NO: 1257728 - RNA, 16 nt, Human
guacccccaggaccag

SEQ ID NO: 1257729 - RNA, 15 nt, Human
guacccccaggacca

SEQ ID NO: 1257730 - RNA, 15 nt, Human
guaccgcaaugugac

SEQ ID NO: 1257731 - RNA, 16 nt, Human
guacccucugaaauac

SEQ ID NO: 1257732 - RNA, 15 nt, Human
guacccucuggaggg

SEQ ID NO: 1257733 - RNA, 18 nt, Human
guaccgcgucuacccugg

SEQ ID NO: 1257734 - RNA, 17 nt, Human
guaccuagcuggcucug

SEQ ID NO: 1257735 - RNA, 17 nt, Human
guacccuccuggcucuu

SEQ ID NO: 1257736 - RNA, 17 nt, Human
guacccucucagcucca

SEQ ID NO: 1257737 - RNA, 18 nt, Human
guacccucucagcuccag

SEQ ID NO: 1257738 - RNA, 19 nt, Human
guacccucucagcuccagg

SEQ ID NO: 1257739 - RNA, 20 nt, Human
guaccgcgucuacccuggga

SEQ ID NO: 1257740 - RNA, 12 nt, Human
guaccugagggu

SEQ ID NO: 1257741 - RNA, 14 nt, Human
guaccugagggucu

SEQ ID NO: 1257742 - RNA, 17 nt, Human
guaccugcccccaaucc

SEQ ID NO: 1257743 - RNA, 15 nt, Human
guaccugagggucug

SEQ ID NO: 1257744 - RNA, 15 nt, Human
guaccugggcaagcu

SEQ ID NO: 1257745 - RNA, 16 nt, Human
guaccugggcaagcug

SEQ ID NO: 1257746 - RNA, 15 nt, Human
guaccuggggccaaa

SEQ ID NO: 1257747 - RNA, 21 nt, Human
guaccuuuugaggagccccag

SEQ ID NO: 1257748 - RNA, 23 nt, Human
guaccuuuugaggagccccagcu

SEQ ID NO: 1257749 - RNA, 23 nt, Human
guacgaaccuacaguuuuaacug

SEQ ID NO: 1257750 - RNA, 15 nt, Human
guacgaugacagugu

SEQ ID NO: 1257751 - RNA, 17 nt, Human
guacggauuuucaguua

SEQ ID NO: 1257752 - RNA, 13 nt, Human
guacuaaagccaa

SEQ ID NO: 1257753 - RNA, 22 nt, Human
guacuaacuccuaggaaaauac

SEQ ID NO: 1257754 - RNA, 17 nt, Human
guacuaauauuucugua

SEQ ID NO: 1257755 - RNA, 20 nt, Human
ggccuguggaucaaauccag

SEQ ID NO: 1257756 - RNA, 20 nt, Human
ggcgccgucuccaggggcug

SEQ ID NO: 1257757 - RNA, 21 nt, Human
ggcgccgucuccaggggcugc

SEQ ID NO: 1257758 - RNA, 22 nt, Human
ggcgcgaucucggcucacugca

SEQ ID NO: 1257759 - RNA, 15 nt, Human
ggcgccugugguucu

SEQ ID NO: 1257760 - RNA, 16 nt, Human
ggcgccugugguucug

SEQ ID NO: 1257761 - RNA, 16 nt, Human
ggcgcggcugggagga

SEQ ID NO: 1257762 - RNA, 20 nt, Human
ggcggauguugaagugagcu

SEQ ID NO: 1257763 - RNA, 17 nt, Human
ggcggcaggggccugga

SEQ ID NO: 1257764 - RNA, 18 nt, Human
ggcggcaggggccuggag

SEQ ID NO: 1257765 - RNA, 22 nt, Human
ggcggccuaugacuugggcacc

SEQ ID NO: 1257766 - RNA, 11 nt, Human
ggccugugagc

SEQ ID NO: 1257767 - RNA, 22 nt, Human
ggccugucucaagcucuuccuu

SEQ ID NO: 1257768 - RNA, 17 nt, Human
ggccuguacugccugcu

SEQ ID NO: 1257769 - RNA, 17 nt, Human
ggccuguagaguugcug

SEQ ID NO: 1257770 - RNA, 18 nt, Human
ggccuguccaacacaucu

SEQ ID NO: 1257771 - RNA, 18 nt, Human
ggccuguacugccugcuu

SEQ ID NO: 1257772 - RNA, 15 nt, Human
ggccuguccacaggc

SEQ ID NO: 1257773 - RNA, 22 nt, Human
ggccuguccacaggcuucugag

SEQ ID NO: 1257774 - RNA, 14 nt, Human
ggccuguccuccaa

SEQ ID NO: 1257775 - RNA, 14 nt, Human
ggccugggcaggag

SEQ ID NO: 1257776 - RNA, 11 nt, Human
ggccugggagg

SEQ ID NO: 1257777 - RNA, 17 nt, Human
ggccugggcuccuggac

SEQ ID NO: 1257778 - RNA, 18 nt, Human
ggccugggcuccuggacc

SEQ ID NO: 1257779 - RNA, 13 nt, Human
ggccugggcagga

SEQ ID NO: 1257780 - RNA, 19 nt, Human
ggccuggcuggcugagggc

SEQ ID NO: 1257781 - RNA, 21 nt, Human
ggccugggacaacugcuccca

SEQ ID NO: 1257782 - RNA, 11 nt, Human
ggccuggcugg

SEQ ID NO: 1257783 - RNA, 12 nt, Human
ggccuggcuggc

SEQ ID NO: 1257784 - RNA, 14 nt, Human
ggccuggcuggcug

SEQ ID NO: 1257785 - RNA, 15 nt, Human
ggccuggcuggcuga

SEQ ID NO: 1257786 - RNA, 17 nt, Human
ggccuggcuggcugagg

SEQ ID NO: 1257787 - RNA, 13 nt, Human
ggccucuugagca

SEQ ID NO: 1257788 - RNA, 16 nt, Human
ggccucuugagcagug

SEQ ID NO: 1257789 - RNA, 18 nt, Human
ggccucuugagcaguggc

SEQ ID NO: 1257790 - RNA, 22 nt, Human
ggccucuugagcaguggcuggu

SEQ ID NO: 1257791 - RNA, 17 nt, Human
ggccugaaagaggcuga

SEQ ID NO: 1257792 - RNA, 23 nt, Human
ggccugaaagaggcugaggccug

SEQ ID NO: 1257793 - RNA, 12 nt, Human
ggcuccagcugg

SEQ ID NO: 1257794 - RNA, 15 nt, Human
ggcuccagccccucu

SEQ ID NO: 1257795 - RNA, 21 nt, Human
ggcuccagccccucuuggaga

SEQ ID NO: 1257796 - RNA, 18 nt, Human
ggcucacacaccuguagc

SEQ ID NO: 1257797 - RNA, 16 nt, Human
ggcuccagaugcaggg

SEQ ID NO: 1257798 - RNA, 17 nt, Human
ggcuccagaugcagggc

SEQ ID NO: 1257799 - RNA, 18 nt, Human
ggcuccagaugcagggca

SEQ ID NO: 1257800 - RNA, 19 nt, Human
ggcuccagaugcagggcag

SEQ ID NO: 1257801 - RNA, 17 nt, Human
ggcucccacaggcccuu

SEQ ID NO: 1257802 - RNA, 18 nt, Human
ggcucccacaggcccuuc

SEQ ID NO: 1257803 - RNA, 19 nt, Human
ggcucccacaggcccuucc

SEQ ID NO: 1257804 - RNA, 22 nt, Human
ggcuccagccccucuuggagaa

SEQ ID NO: 1257805 - RNA, 23 nt, Human
ggcuccagccccucuuggagaag

SEQ ID NO: 1257806 - RNA, 18 nt, Human
ggcggcucggaggaagcc

SEQ ID NO: 1257807 - RNA, 18 nt, Human
ggcggcuggggucccagc

SEQ ID NO: 1257808 - RNA, 20 nt, Human
ggcuagagugcgguggcgcg

SEQ ID NO: 1257809 - RNA, 16 nt, Human
ggcuaggguggggaga

SEQ ID NO: 1257810 - RNA, 14 nt, Human
ggcuagggggagcc

SEQ ID NO: 1257811 - RNA, 17 nt, Human
ggcuauagaugucuuuu

SEQ ID NO: 1257812 - RNA, 19 nt, Human
ggcuauagaugucuuuucc

SEQ ID NO: 1257813 - RNA, 19 nt, Human
ggcuaugggggcacugagg

SEQ ID NO: 1257814 - RNA, 18 nt, Human
ggcuauagaugucuuuuc

SEQ ID NO: 1257815 - RNA, 16 nt, Human
ggcuauuuguaaaucu

SEQ ID NO: 1257816 - RNA, 21 nt, Human
ggcuauuuuguuugcuucaug

SEQ ID NO: 1257817 - RNA, 19 nt, Human
ggcucaagcgauucuccug

SEQ ID NO: 1257818 - RNA, 13 nt, Human
ggcccugcccugg

SEQ ID NO: 1257819 - RNA, 20 nt, Human
ggcccugcccugguuuccug

SEQ ID NO: 1257820 - RNA, 11 nt, Human
ggcccugcccu

SEQ ID NO: 1257821 - RNA, 12 nt, Human
ggcccugcccug

SEQ ID NO: 1257822 - RNA, 23 nt, Human
ggcccugagcgaguggagucugc

SEQ ID NO: 1257823 - RNA, 11 nt, Human
ggcccugagcg

SEQ ID NO: 1257824 - RNA, 19 nt, Human
ggcccugcaaaaggacucu

SEQ ID NO: 1257825 - RNA, 22 nt, Human
ggcccugcaaaaggacucucag

SEQ ID NO: 1257826 - RNA, 22 nt, Human
ggcccugcccugguuuccugcc

SEQ ID NO: 1257827 - RNA, 14 nt, Human
ggcccugcuuccug

SEQ ID NO: 1257828 - RNA, 15 nt, Human
ggcccugcuuccugc

SEQ ID NO: 1257829 - RNA, 16 nt, Human
ggcccugcuuccugcu

SEQ ID NO: 1257830 - RNA, 13 nt, Human
ggcccuggcuccc

SEQ ID NO: 1257831 - RNA, 22 nt, Human
ggcccuggcucccacaggcccu

SEQ ID NO: 1257832 - RNA, 18 nt, Human
ggcccugcuuccugcuug

SEQ ID NO: 1257833 - RNA, 17 nt, Human
ggcccuggaucagcgug

SEQ ID NO: 1257834 - RNA, 18 nt, Human
ggcccuggaucagcgugg

SEQ ID NO: 1257835 - RNA, 20 nt, Human
ggcccuggaucagcguggcc

SEQ ID NO: 1257836 - RNA, 22 nt, Human
ggcccuggaucagcguggccuu

SEQ ID NO: 1257837 - RNA, 23 nt, Human
ggcccuggaucagcguggccuug

SEQ ID NO: 1257838 - RNA, 13 nt, Human
ggcccuggccucc

SEQ ID NO: 1257839 - RNA, 14 nt, Human
ggcccuggccuccc

SEQ ID NO: 1257840 - RNA, 17 nt, Human
ggcccuggccuccccug

SEQ ID NO: 1257841 - RNA, 13 nt, Human
ggcccacugugcc

SEQ ID NO: 1257842 - RNA, 17 nt, Human
ggcccacugugccucag

SEQ ID NO: 1257843 - RNA, 18 nt, Human
ggcccacugugccucaga

SEQ ID NO: 1257844 - RNA, 21 nt, Human
ggcccacugugccucagagac

SEQ ID NO: 1257845 - RNA, 23 nt, Human
ggcccacugugccucagagacca

SEQ ID NO: 1257846 - RNA, 12 nt, Human
ggcccucucccc

SEQ ID NO: 1257847 - RNA, 15 nt, Human
ggcccucuccccugc

SEQ ID NO: 1257848 - RNA, 16 nt, Human
ggcccucuccccugcc

SEQ ID NO: 1257849 - RNA, 23 nt, Human
ggcccucuccccugcccccugca

SEQ ID NO: 1257850 - RNA, 14 nt, Human
ggcccucucugcuc

SEQ ID NO: 1257851 - RNA, 15 nt, Human
ggcccucucugcucu

SEQ ID NO: 1257852 - RNA, 21 nt, Human
ggcccaauccaagguggggug

SEQ ID NO: 1257853 - RNA, 21 nt, Human
ggcccucucugcucugcgugu

SEQ ID NO: 1257854 - RNA, 19 nt, Human
ggccucuuccgugacguca

SEQ ID NO: 1257855 - RNA, 20 nt, Human
ggccucggacuuagcuggga

SEQ ID NO: 1257856 - RNA, 20 nt, Human
ggccucaaaggcccgcucua

SEQ ID NO: 1257857 - RNA, 19 nt, Human
ggccucaaaugcaccaugu

SEQ ID NO: 1257858 - RNA, 22 nt, Human
ggccucggacuuagcugggaga

SEQ ID NO: 1257859 - RNA, 12 nt, Human
ggccuaggcugc

SEQ ID NO: 1257860 - RNA, 14 nt, Human
ggccuaggcugcau

SEQ ID NO: 1257861 - RNA, 13 nt, Human
ggccuaggcugca

SEQ ID NO: 1257862 - RNA, 16 nt, Human
ggccuaucuaaacugg

SEQ ID NO: 1257863 - RNA, 18 nt, Human
ggccuaugacuugggcac

SEQ ID NO: 1257864 - RNA, 15 nt, Human
ggccuauggagagcc

SEQ ID NO: 1257865 - RNA, 16 nt, Human
ggccuauggagagccc

SEQ ID NO: 1257866 - RNA, 17 nt, Human
ggccuauggagagcccu

SEQ ID NO: 1257867 - RNA, 18 nt, Human
ggccuauggagagcccug

SEQ ID NO: 1257868 - RNA, 19 nt, Human
ggccuauggagagcccugg

SEQ ID NO: 1257869 - RNA, 21 nt, Human
ggccuauggagagcccuggga

SEQ ID NO: 1257870 - RNA, 14 nt, Human
ggccuauguggucu

SEQ ID NO: 1257871 - RNA, 22 nt, Human
ggccuauggagagcccugggac

SEQ ID NO: 1257872 - RNA, 23 nt, Human
ggccucaaagcaagcauucagaa

SEQ ID NO: 1257873 - RNA, 18 nt, Human
ggccucaaaggcccgcuc

SEQ ID NO: 1257874 - RNA, 19 nt, Human
ggccucaaaggcccgcucu

SEQ ID NO: 1257875 - RNA, 23 nt, Human
ggcccugggccugccucaccacg

SEQ ID NO: 1257876 - RNA, 18 nt, Human
ggcccugggccugccuca

SEQ ID NO: 1257877 - RNA, 12 nt, Human
ggcccugggcug

SEQ ID NO: 1257878 - RNA, 13 nt, Human
ggcccugggcugg

SEQ ID NO: 1257879 - RNA, 14 nt, Human
ggcccugggcugga

SEQ ID NO: 1257880 - RNA, 15 nt, Human
ggcccugggcuggaa

SEQ ID NO: 1257881 - RNA, 13 nt, Human
ggcccuggggccu

SEQ ID NO: 1257882 - RNA, 14 nt, Human
ggcccuggggccug

SEQ ID NO: 1257883 - RNA, 15 nt, Human
ggcccuggggccugu

SEQ ID NO: 1257884 - RNA, 16 nt, Human
ggcccuggggccugua

SEQ ID NO: 1257885 - RNA, 17 nt, Human
ggcccuggggccuguac

SEQ ID NO: 1257886 - RNA, 18 nt, Human
ggcccuggggccuguacu

SEQ ID NO: 1257887 - RNA, 23 nt, Human
ggcccuggggccuguacugccug

SEQ ID NO: 1257888 - RNA, 19 nt, Human
ggcccugucauccagcuca

SEQ ID NO: 1257889 - RNA, 22 nt, Human
ggccuaaccugccgagagucca

SEQ ID NO: 1257890 - RNA, 21 nt, Human
ggccgugacgucuggguggcc

SEQ ID NO: 1257891 - RNA, 21 nt, Human
ggccgugaaugggugcccaca

SEQ ID NO: 1257892 - RNA, 16 nt, Human
ggccgugacgucuggg

SEQ ID NO: 1257893 - RNA, 20 nt, Human
ggccgugacgucuggguggc

SEQ ID NO: 1257894 - RNA, 15 nt, Human
ggccuaagaggcugc

SEQ ID NO: 1257895 - RNA, 22 nt, Human
ggccuaagaggcugcccuccug

SEQ ID NO: 1257896 - RNA, 18 nt, Human
ggccuaagaggcugcccu

SEQ ID NO: 1257897 - RNA, 20 nt, Human
ggccuaagaggcugcccucc

SEQ ID NO: 1257898 - RNA, 16 nt, Human
ggccuaccccgcagac

SEQ ID NO: 1257899 - RNA, 20 nt, Human
ggccuaccccgcagacaccu

SEQ ID NO: 1257900 - RNA, 23 nt, Human
ggccuaccccgcagacaccuugg

SEQ ID NO: 1257901 - RNA, 24 nt, Human
ggccuacuagagucugaacagcug

SEQ ID NO: 1257902 - RNA, 17 nt, Human
ggccuaggaggguccuc

SEQ ID NO: 1257903 - RNA, 19 nt, Human
ggccuaggaggguccucug

SEQ ID NO: 1257904 - RNA, 21 nt, Human
ggccuaggaggguccucugag

SEQ ID NO: 1257905 - RNA, 23 nt, Human
ggccuaggaggguccucugagac

SEQ ID NO: 1257906 - RNA, 13 nt, Human
ggccuaggauucu

SEQ ID NO: 1257907 - RNA, 15 nt, Human
ggccuaggauucuaa

SEQ ID NO: 1257908 - RNA, 18 nt, Human
ggagaugaggccagacca

SEQ ID NO: 1257909 - RNA, 15 nt, Human
ggagaugcuccuugg

SEQ ID NO: 1257910 - RNA, 15 nt, Human
ggauacuggcacaga

SEQ ID NO: 1257911 - RNA, 17 nt, Human
ggauacuggcacagagg

SEQ ID NO: 1257912 - RNA, 18 nt, Human
ggauacuggcacagaggu

SEQ ID NO: 1257913 - RNA, 18 nt, Human
ggauacuuauauggaaau

SEQ ID NO: 1257914 - RNA, 12 nt, Human
ggauagaggggu

SEQ ID NO: 1257915 - RNA, 13 nt, Human
ggauagaugcugg

SEQ ID NO: 1257916 - RNA, 14 nt, Human
ggauagaugcuggc

SEQ ID NO: 1257917 - RNA, 18 nt, Human
ggauagaugcuggcccag

SEQ ID NO: 1257918 - RNA, 13 nt, Human
ggaucccucaucu

SEQ ID NO: 1257919 - RNA, 18 nt, Human
ggaucccucaucuguccc

SEQ ID NO: 1257920 - RNA, 22 nt, Human
ggaucccucaucugucccuccg

SEQ ID NO: 1257921 - RNA, 17 nt, Human
ggaucccucccccccau

SEQ ID NO: 1257922 - RNA, 22 nt, Human
ggaucaaaccccgaccaccugc

SEQ ID NO: 1257923 - RNA, 14 nt, Human
ggaucacaagaugg

SEQ ID NO: 1257924 - RNA, 18 nt, Human
ggaucacaagauggaauu

SEQ ID NO: 1257925 - RNA, 16 nt, Human
ggauauguaaaacauu

SEQ ID NO: 1257926 - RNA, 14 nt, Human
ggauaggccagccg

SEQ ID NO: 1257927 - RNA, 15 nt, Human
ggauaggccagccgc

SEQ ID NO: 1257928 - RNA, 21 nt, Human
ggauaggccuucauuaacaaa

SEQ ID NO: 1257929 - RNA, 16 nt, Human
ggauauaguuuuacuu

SEQ ID NO: 1257930 - RNA, 20 nt, Human
ggauauaguuuuacuuuuaa

SEQ ID NO: 1257931 - RNA, 17 nt, Human
ggauccgacugcuuugg

SEQ ID NO: 1257932 - RNA, 19 nt, Human
ggauccgacugcuuuggac

SEQ ID NO: 1257933 - RNA, 21 nt, Human
ggauccgacugcuuuggaccu

SEQ ID NO: 1257934 - RNA, 22 nt, Human
ggaugccaauauuaaaucugcu

SEQ ID NO: 1257935 - RNA, 16 nt, Human
ggaugcggauggccgg

SEQ ID NO: 1257936 - RNA, 16 nt, Human
ggaugcuaacaucuaa

SEQ ID NO: 1257937 - RNA, 14 nt, Human
ggauggacaucuug

SEQ ID NO: 1257938 - RNA, 16 nt, Human
ggauucuuccaucuga

SEQ ID NO: 1257939 - RNA, 15 nt, Human
ggauugcacguggcc

SEQ ID NO: 1257940 - RNA, 17 nt, Human
ggauugcacguggccuc

SEQ ID NO: 1257941 - RNA, 18 nt, Human
ggauugcacguggccucu

SEQ ID NO: 1257942 - RNA, 19 nt, Human
ggauugcaauaucugaagc

SEQ ID NO: 1257943 - RNA, 16 nt, Human
ggauugcgagagaugu

SEQ ID NO: 1257944 - RNA, 19 nt, Human
ggauuacaggcuccugcca

SEQ ID NO: 1257945 - RNA, 13 nt, Human
ggauggacaucuu

SEQ ID NO: 1257946 - RNA, 15 nt, Human
ggauuguaaaauggu

SEQ ID NO: 1257947 - RNA, 17 nt, Human
ggauugcgagagaugug

SEQ ID NO: 1257948 - RNA, 18 nt, Human
ggauugcgagagaugugu

SEQ ID NO: 1257949 - RNA, 19 nt, Human
ggauugcgagagaugugug

SEQ ID NO: 1257950 - RNA, 19 nt, Human
ggcaaucauggugcucaga

SEQ ID NO: 1257951 - RNA, 15 nt, Human
ggcaaugauggcaau

SEQ ID NO: 1257952 - RNA, 17 nt, Human
ggcaaugccacagcccu

SEQ ID NO: 1257953 - RNA, 17 nt, Human
ggcacccccagccuggg

SEQ ID NO: 1257954 - RNA, 18 nt, Human
ggcacccccagccugggc

SEQ ID NO: 1257955 - RNA, 19 nt, Human
ggcacccccagccugggcc

SEQ ID NO: 1257956 - RNA, 20 nt, Human
ggcacccccagccugggccu

SEQ ID NO: 1257957 - RNA, 21 nt, Human
ggcacccccagccugggccua

SEQ ID NO: 1257958 - RNA, 17 nt, Human
ggcacccccgucaagag

SEQ ID NO: 1257959 - RNA, 13 nt, Human
ggcacccccugca

SEQ ID NO: 1257960 - RNA, 14 nt, Human
ggcacccccugcag

SEQ ID NO: 1257961 - RNA, 18 nt, Human
ggcaccggggccucggac

SEQ ID NO: 1257962 - RNA, 15 nt, Human
ggcaccgaagcccag

SEQ ID NO: 1257963 - RNA, 16 nt, Human
ggcaccgaagcccaga

SEQ ID NO: 1257964 - RNA, 23 nt, Human
ggcaccgaagcccagagggucug

SEQ ID NO: 1257965 - RNA, 15 nt, Human
ggcacccccugcagc

SEQ ID NO: 1257966 - RNA, 20 nt, Human
ggcaaugggagcugaggcca

SEQ ID NO: 1257967 - RNA, 21 nt, Human
ggcaaugggagcugaggccac

SEQ ID NO: 1257968 - RNA, 18 nt, Human
ggcaaugccacagcccug

SEQ ID NO: 1257969 - RNA, 13 nt, Human
ggcacccccagcc

SEQ ID NO: 1257970 - RNA, 14 nt, Human
ggcacccccagccu

SEQ ID NO: 1257971 - RNA, 15 nt, Human
ggcacccccagccug

SEQ ID NO: 1257972 - RNA, 16 nt, Human
ggcacccccagccugg

SEQ ID NO: 1257973 - RNA, 11 nt, Human
ggcaucuuuug

SEQ ID NO: 1257974 - RNA, 14 nt, Human
ggcaucuuuuguau

SEQ ID NO: 1257975 - RNA, 16 nt, Human
ggcaucuuuuguauua

SEQ ID NO: 1257976 - RNA, 21 nt, Human
ggcaucuuuuguauuaagaaa

SEQ ID NO: 1257977 - RNA, 17 nt, Human
ggcaucuuuuguauuaa

SEQ ID NO: 1257978 - RNA, 17 nt, Human
ggcauggccagguggcc

SEQ ID NO: 1257979 - RNA, 18 nt, Human
ggcauggccagguggcca

SEQ ID NO: 1257980 - RNA, 12 nt, Human
ggcauggaaauu

SEQ ID NO: 1257981 - RNA, 17 nt, Human
ggcagcuucugcccccu

SEQ ID NO: 1257982 - RNA, 20 nt, Human
ggcagcuucugcccccugca

SEQ ID NO: 1257983 - RNA, 21 nt, Human
ggcagcuucugcccccugcag

SEQ ID NO: 1257984 - RNA, 22 nt, Human
ggcagcuucugcccccugcaga

SEQ ID NO: 1257985 - RNA, 23 nt, Human
ggcagcuucugcccccugcagaa

SEQ ID NO: 1257986 - RNA, 14 nt, Human
ggcagggugacccu

SEQ ID NO: 1257987 - RNA, 22 nt, Human
ggcagcgccaggcugaccacag

SEQ ID NO: 1257988 - RNA, 22 nt, Human
ggcaccgaagcccagagggucu

SEQ ID NO: 1257989 - RNA, 15 nt, Human
ggcaccuaauccagg

SEQ ID NO: 1257990 - RNA, 16 nt, Human
ggcaccuaauccaggc

SEQ ID NO: 1257991 - RNA, 17 nt, Human
ggcaccuaauccaggca

SEQ ID NO: 1257992 - RNA, 23 nt, Human
ggcaccugggcccuggggccugu

SEQ ID NO: 1257993 - RNA, 22 nt, Human
ggcaccugguggccaugcuccu

SEQ ID NO: 1257994 - RNA, 23 nt, Human
ggcacuaacguugagccccugga

SEQ ID NO: 1257995 - RNA, 16 nt, Human
ggcagcuucugccccc

SEQ ID NO: 1257996 - RNA, 20 nt, Human
ggcagcucuggacagcccca

SEQ ID NO: 1257997 - RNA, 13 nt, Human
ggcagcuccucug

SEQ ID NO: 1257998 - RNA, 16 nt, Human
ggcagcuccucugucu

SEQ ID NO: 1257999 - RNA, 21 nt, Human
ggcagcuccucugucucgagc

SEQ ID NO: 1258000 - RNA, 18 nt, Human
ggcagcuccucugucucg

SEQ ID NO: 1258001 - RNA, 15 nt, Human
ggcagcucuggacag

SEQ ID NO: 1258002 - RNA, 18 nt, Human
ggccacaugggaggcuca

SEQ ID NO: 1258003 - RNA, 19 nt, Human
ggccacaugggaggcucac

SEQ ID NO: 1258004 - RNA, 17 nt, Human
ggccacuccagaccccu

SEQ ID NO: 1258005 - RNA, 13 nt, Human
ggccacuccgaga

SEQ ID NO: 1258006 - RNA, 14 nt, Human
ggccacuccuuccu

SEQ ID NO: 1258007 - RNA, 15 nt, Human
ggccacuccuuccug

SEQ ID NO: 1258008 - RNA, 16 nt, Human
ggccacuccuuccugc

SEQ ID NO: 1258009 - RNA, 17 nt, Human
ggccacuccuuccugcc

SEQ ID NO: 1258010 - RNA, 19 nt, Human
ggccacuccuuccugcccc

SEQ ID NO: 1258011 - RNA, 20 nt, Human
ggccacuccuuccugcccca

SEQ ID NO: 1258012 - RNA, 11 nt, Human
ggccagccugg

SEQ ID NO: 1258013 - RNA, 11 nt, Human
ggccagccucu

SEQ ID NO: 1258014 - RNA, 12 nt, Human
ggccagccuggc

SEQ ID NO: 1258015 - RNA, 13 nt, Human
ggccagccuggcc

SEQ ID NO: 1258016 - RNA, 14 nt, Human
ggccagccuggccu

SEQ ID NO: 1258017 - RNA, 15 nt, Human
ggccagccuggccuc

SEQ ID NO: 1258018 - RNA, 16 nt, Human
ggccagccuggccucc

SEQ ID NO: 1258019 - RNA, 18 nt, Human
ggccacgcuccagcugcc

SEQ ID NO: 1258020 - RNA, 17 nt, Human
ggccagccuggccuccu

SEQ ID NO: 1258021 - RNA, 18 nt, Human
ggccagccuggccuccug

SEQ ID NO: 1258022 - RNA, 19 nt, Human
ggccagccuggccuccugc

SEQ ID NO: 1258023 - RNA, 20 nt, Human
ggccagccuggccuccugcc

SEQ ID NO: 1258024 - RNA, 22 nt, Human
ggccagccuggccuccugccuc

SEQ ID NO: 1258025 - RNA, 21 nt, Human
ggccagccuggccuccugccu

SEQ ID NO: 1258026 - RNA, 22 nt, Human
ggccagcgagcgcccagcuccu

SEQ ID NO: 1258027 - RNA, 12 nt, Human
ggccagcuccgc

SEQ ID NO: 1258028 - RNA, 13 nt, Human
ggccagcuggagg

SEQ ID NO: 1258029 - RNA, 15 nt, Human
ggccagcuggaggca

SEQ ID NO: 1258030 - RNA, 18 nt, Human
ggccagcuggaggcaggg

SEQ ID NO: 1258031 - RNA, 15 nt, Human
ggccagcuuuucaaa

SEQ ID NO: 1258032 - RNA, 20 nt, Human
ggccauucuuucccaacacc

SEQ ID NO: 1258033 - RNA, 20 nt, Human
ggccauucuccacagcaacc

SEQ ID NO: 1258034 - RNA, 13 nt, Human
ggccauguccaaa

SEQ ID NO: 1258035 - RNA, 15 nt, Human
ggccauguccaaaga

SEQ ID NO: 1258036 - RNA, 16 nt, Human
ggccauguccaaagag

SEQ ID NO: 1258037 - RNA, 22 nt, Human
ggccauguccaaagaggcugcc

SEQ ID NO: 1258038 - RNA, 23 nt, Human
ggccauguccaaagaggcugccc

SEQ ID NO: 1258039 - RNA, 11 nt, Human
ggccaggcugc

SEQ ID NO: 1258040 - RNA, 18 nt, Human
ggccagcugugguuuucu

SEQ ID NO: 1258041 - RNA, 14 nt, Human
ggccaggccucucc

SEQ ID NO: 1258042 - RNA, 14 nt, Human
ggccaggcugcucu

SEQ ID NO: 1258043 - RNA, 15 nt, Human
ggccaggcugcucuu

SEQ ID NO: 1258044 - RNA, 16 nt, Human
ggccaggcugcucuug

SEQ ID NO: 1258045 - RNA, 16 nt, Human
ggagaugaggccagac

SEQ ID NO: 1258046 - RNA, 15 nt, Human
ggagaugaggccaga

SEQ ID NO: 1258047 - RNA, 14 nt, Human
ggagaugaggccag

SEQ ID NO: 1258048 - RNA, 13 nt, Human
ggagauccuccug

SEQ ID NO: 1258049 - RNA, 15 nt, Human
ggagauccuccugca

SEQ ID NO: 1258050 - RNA, 17 nt, Human
ggagaggccccagccgc

SEQ ID NO: 1258051 - RNA, 16 nt, Human
ggagagguugucugug

SEQ ID NO: 1258052 - RNA, 13 nt, Human
ggagagugggggu

SEQ ID NO: 1258053 - RNA, 18 nt, Human
ggagaguuuccugaaaca

SEQ ID NO: 1258054 - RNA, 19 nt, Human
ggagaaucgcuccugcagc

SEQ ID NO: 1258055 - RNA, 18 nt, Human
ggagaagcccgugugaga

SEQ ID NO: 1258056 - RNA, 17 nt, Human
ggagacacuggccccuc

SEQ ID NO: 1258057 - RNA, 20 nt, Human
ggagacacuggccccucaaa

SEQ ID NO: 1258058 - RNA, 14 nt, Human
ggagacagcaucag

SEQ ID NO: 1258059 - RNA, 17 nt, Human
ggagacagcaucagggu

SEQ ID NO: 1258060 - RNA, 18 nt, Human
ggagacagcaucaggguu

SEQ ID NO: 1258061 - RNA, 21 nt, Human
ggacugggagcccccagccug

SEQ ID NO: 1258062 - RNA, 18 nt, Human
ggacugggagcccccagc

SEQ ID NO: 1258063 - RNA, 19 nt, Human
ggacugggagcccccagcc

SEQ ID NO: 1258064 - RNA, 20 nt, Human
ggacugggagcccccagccu

SEQ ID NO: 1258065 - RNA, 18 nt, Human
ggacuggccucugcugau

SEQ ID NO: 1258066 - RNA, 15 nt, Human
ggacgcucucuggcc

SEQ ID NO: 1258067 - RNA, 20 nt, Human
ggacgccugggggugccagg

SEQ ID NO: 1258068 - RNA, 16 nt, Human
ggacugcucaggaaac

SEQ ID NO: 1258069 - RNA, 14 nt, Human
ggacgcucucuggc

SEQ ID NO: 1258070 - RNA, 13 nt, Human
ggacgcucucugg

SEQ ID NO: 1258071 - RNA, 17 nt, Human
ggacugugugcucagga

SEQ ID NO: 1258072 - RNA, 12 nt, Human
ggagaagccagg

SEQ ID NO: 1258073 - RNA, 13 nt, Human
ggagaagccagga

SEQ ID NO: 1258074 - RNA, 15 nt, Human
ggagaagccaggaau

SEQ ID NO: 1258075 - RNA, 19 nt, Human
ggagaaucacuugaacccg

SEQ ID NO: 1258076 - RNA, 15 nt, Human
ggagaaucacuugaa

SEQ ID NO: 1258077 - RNA, 16 nt, Human
ggacauuugcucaugg

SEQ ID NO: 1258078 - RNA, 14 nt, Human
ggacauuucucuaa

SEQ ID NO: 1258079 - RNA, 12 nt, Human
ggaccaaagcaa

SEQ ID NO: 1258080 - RNA, 22 nt, Human
ggaccaaagggagucugccagg

SEQ ID NO: 1258081 - RNA, 16 nt, Human
ggaccaagcaucuugg

SEQ ID NO: 1258082 - RNA, 19 nt, Human
ggacagcaacuaucagacu

SEQ ID NO: 1258083 - RNA, 20 nt, Human
ggacagaugccuccuuccuc

SEQ ID NO: 1258084 - RNA, 22 nt, Human
ggacacuacacccagcaauaga

SEQ ID NO: 1258085 - RNA, 15 nt, Human
ggacagaugccuccu

SEQ ID NO: 1258086 - RNA, 21 nt, Human
ggacagaugccuccuuccucu

SEQ ID NO: 1258087 - RNA, 22 nt, Human
ggaccacccucacuggcucucc

SEQ ID NO: 1258088 - RNA, 15 nt, Human
ggaccacccugagcc

SEQ ID NO: 1258089 - RNA, 16 nt, Human
ggaccacccugagccg

SEQ ID NO: 1258090 - RNA, 18 nt, Human
ggaccacccugagccggc

SEQ ID NO: 1258091 - RNA, 20 nt, Human
ggaccacaacuauuuucaga

SEQ ID NO: 1258092 - RNA, 15 nt, Human
ggaccacaggcucag

SEQ ID NO: 1258093 - RNA, 14 nt, Human
ggaccacaggcuca

SEQ ID NO: 1258094 - RNA, 15 nt, Human
ggaccagaagcuccc

SEQ ID NO: 1258095 - RNA, 18 nt, Human
ggaccagaagcuccccca

SEQ ID NO: 1258096 - RNA, 21 nt, Human
ggaccagaagcucccccagca

SEQ ID NO: 1258097 - RNA, 18 nt, Human
ggaccuucgggcugugcc

SEQ ID NO: 1258098 - RNA, 19 nt, Human
ggaccuucgggcugugccc

SEQ ID NO: 1258099 - RNA, 20 nt, Human
ggaccuucgggcugugcccg

SEQ ID NO: 1258100 - RNA, 17 nt, Human
ggacgcccaggacccca

SEQ ID NO: 1258101 - RNA, 14 nt, Human
ggacgccugggggu

SEQ ID NO: 1258102 - RNA, 19 nt, Human
ggacgccugggggugccag

SEQ ID NO: 1258103 - RNA, 16 nt, Human
ggaaggauucugcugg

SEQ ID NO: 1258104 - RNA, 22 nt, Human
ggaaggaucccaugagcuccuu

SEQ ID NO: 1258105 - RNA, 19 nt, Human
ggaaggauucugcuggccu

SEQ ID NO: 1258106 - RNA, 20 nt, Human
ggaaggauucugcuggccuc

SEQ ID NO: 1258107 - RNA, 22 nt, Human
ggaaggauucugcuggccucug

SEQ ID NO: 1258108 - RNA, 14 nt, Human
ggaaggcagggagg

SEQ ID NO: 1258109 - RNA, 18 nt, Human
ggaaggcaggcagggcuc

SEQ ID NO: 1258110 - RNA, 19 nt, Human
ggaaggcaggcagggcucu

SEQ ID NO: 1258111 - RNA, 21 nt, Human
ggaaggcaggcagggcucucc

SEQ ID NO: 1258112 - RNA, 22 nt, Human
ggaaggcaggcagggcucuccu

SEQ ID NO: 1258113 - RNA, 11 nt, Human
ggaaggcaggc

SEQ ID NO: 1258114 - RNA, 12 nt, Human
ggaaggcaggca

SEQ ID NO: 1258115 - RNA, 14 nt, Human
ggaaggcaggcagg

SEQ ID NO: 1258116 - RNA, 15 nt, Human
ggaaggcaggcaggg

SEQ ID NO: 1258117 - RNA, 16 nt, Human
ggaaggcaggcagggc

SEQ ID NO: 1258118 - RNA, 17 nt, Human
ggaaggcaggcagggcu

SEQ ID NO: 1258119 - RNA, 13 nt, Human
ggaaccugacccc

SEQ ID NO: 1258120 - RNA, 21 nt, Human
ggaaggcagggaggaggcaga

SEQ ID NO: 1258121 - RNA, 17 nt, Human
ggaaggcagggaggagg

SEQ ID NO: 1258122 - RNA, 19 nt, Human
ggaaggcuacuucggggcu

SEQ ID NO: 1258123 - RNA, 20 nt, Human
ggaaggcuacuucggggcug

SEQ ID NO: 1258124 - RNA, 23 nt, Human
ggaaggcuacuucggggcuggga

SEQ ID NO: 1258125 - RNA, 22 nt, Human
ggaaggcuacuucggggcuggg

SEQ ID NO: 1258126 - RNA, 19 nt, Human
ggaaggcuuguugugcuuu

SEQ ID NO: 1258127 - RNA, 21 nt, Human
ggaaggcuuguugugcuuuua

SEQ ID NO: 1258128 - RNA, 17 nt, Human
ggaaggcugagaggaga

SEQ ID NO: 1258129 - RNA, 11 nt, Human
ggaagggagcc

SEQ ID NO: 1258130 - RNA, 13 nt, Human
ggaagggagccaa

SEQ ID NO: 1258131 - RNA, 15 nt, Human
ggaagggagccaagg

SEQ ID NO: 1258132 - RNA, 17 nt, Human
ggaagggagccaaggga

SEQ ID NO: 1258133 - RNA, 21 nt, Human
ggaagggagccaagggaugga

SEQ ID NO: 1258134 - RNA, 18 nt, Human
ggaagugcuaauuuugaa

SEQ ID NO: 1258135 - RNA, 22 nt, Human
ggaaguggcugagucaggacuu

SEQ ID NO: 1258136 - RNA, 18 nt, Human
ggaaguggggcgggcuuc

SEQ ID NO: 1258137 - RNA, 20 nt, Human
ggaagugacgguuuaauggg

SEQ ID NO: 1258138 - RNA, 19 nt, Human
ggaaguaguuaucauguua

SEQ ID NO: 1258139 - RNA, 13 nt, Human
ggaagucaaagca

SEQ ID NO: 1258140 - RNA, 16 nt, Human
ggaaguaguuaucaug

SEQ ID NO: 1258141 - RNA, 13 nt, Human
ggaaguaguuauc

SEQ ID NO: 1258142 - RNA, 15 nt, Human
ggaaguccaaugugg

SEQ ID NO: 1258143 - RNA, 16 nt, Human
ggaaguccaauguggc

SEQ ID NO: 1258144 - RNA, 17 nt, Human
ggaaguccaauguggca

SEQ ID NO: 1258145 - RNA, 16 nt, Human
ggaaguccggccccag

SEQ ID NO: 1258146 - RNA, 21 nt, Human
ggaagucguccuuacuccugu

SEQ ID NO: 1258147 - RNA, 22 nt, Human
ggaagucguccuuacuccugug

SEQ ID NO: 1258148 - RNA, 23 nt, Human
ggaagucguccuuacuccugugg

SEQ ID NO: 1258149 - RNA, 20 nt, Human
ggaagugaagacuggaagcu

SEQ ID NO: 1258150 - RNA, 14 nt, Human
ggaaguagaaacaa

SEQ ID NO: 1258151 - RNA, 16 nt, Human
ggaaguaggaaguaaa

SEQ ID NO: 1258152 - RNA, 19 nt, Human
ggaagguacuguaugauca

SEQ ID NO: 1258153 - RNA, 15 nt, Human
ggaaggguaaacaau

SEQ ID NO: 1258154 - RNA, 14 nt, Human
ggaaggguaaacaa

SEQ ID NO: 1258155 - RNA, 15 nt, Human
ggaaggggccagagg

SEQ ID NO: 1258156 - RNA, 17 nt, Human
ggaaggggccagaggcu

SEQ ID NO: 1258157 - RNA, 14 nt, Human
ggaaggggacccuc

SEQ ID NO: 1258158 - RNA, 16 nt, Human
ggaauuggagcucgug

SEQ ID NO: 1258159 - RNA, 22 nt, Human
ggaauuggagcucgugggacag

SEQ ID NO: 1258160 - RNA, 12 nt, Human
ggaauuguguuu

SEQ ID NO: 1258161 - RNA, 14 nt, Human
ggaauuucccagga

SEQ ID NO: 1258162 - RNA, 15 nt, Human
ggaauuucccaggac

SEQ ID NO: 1258163 - RNA, 16 nt, Human
ggaauuucccaggacc

SEQ ID NO: 1258164 - RNA, 17 nt, Human
ggaauuucccaggaccc

SEQ ID NO: 1258165 - RNA, 18 nt, Human
ggaauuucccaggacccu

SEQ ID NO: 1258166 - RNA, 19 nt, Human
ggaauuucccaggacccug

SEQ ID NO: 1258167 - RNA, 18 nt, Human
ggaauuucuuaacuucuu

SEQ ID NO: 1258168 - RNA, 22 nt, Human
ggaauuucuuaacuucuugcuu

SEQ ID NO: 1258169 - RNA, 16 nt, Human
ggaauuugccugcugg

SEQ ID NO: 1258170 - RNA, 21 nt, Human
ggacacuacacccagcaauag

SEQ ID NO: 1258171 - RNA, 20 nt, Human
ggacacuacacccagcaaua

SEQ ID NO: 1258172 - RNA, 19 nt, Human
ggacacuacacccagcaau

SEQ ID NO: 1258173 - RNA, 18 nt, Human
ggacacuacacccagcaa

SEQ ID NO: 1258174 - RNA, 17 nt, Human
ggacacuacacccagca

SEQ ID NO: 1258175 - RNA, 16 nt, Human
ggacacuacacccagc

SEQ ID NO: 1258176 - RNA, 15 nt, Human
ggacacuacacccag

SEQ ID NO: 1258177 - RNA, 14 nt, Human
ggacaaaggagccu

SEQ ID NO: 1258178 - RNA, 15 nt, Human
ggacaaaggagccug

SEQ ID NO: 1258179 - RNA, 16 nt, Human
ggacaaaggagccugu

SEQ ID NO: 1258180 - RNA, 17 nt, Human
ggacaaaggagccugug

SEQ ID NO: 1258181 - RNA, 18 nt, Human
ggacaaaggagccuguga

SEQ ID NO: 1258182 - RNA, 21 nt, Human
ggacaaaucacauauuuuaaa

SEQ ID NO: 1258183 - RNA, 18 nt, Human
ggacaaaucacauauuuu

SEQ ID NO: 1258184 - RNA, 19 nt, Human
ggaauuuucaucuaggauu

SEQ ID NO: 1258185 - RNA, 20 nt, Human
ggacaaaaccccccagauau

SEQ ID NO: 1258186 - RNA, 16 nt, Human
ggacaaaauggaauac

SEQ ID NO: 1258187 - RNA, 17 nt, Human
ggacaaaauggaauacu

SEQ ID NO: 1258188 - RNA, 11 nt, Human
ggacaaacugc

SEQ ID NO: 1258189 - RNA, 11 nt, Human
ggacaaaauga

SEQ ID NO: 1258190 - RNA, 14 nt, Human
ggacaaagaaccuu

SEQ ID NO: 1258191 - RNA, 13 nt, Human
ggacaaagaaccu

SEQ ID NO: 1258192 - RNA, 13 nt, Human
ggacaaaggagcc

SEQ ID NO: 1258193 - RNA, 15 nt, Human
ggaauugauuugcau

SEQ ID NO: 1258194 - RNA, 17 nt, Human
ggaauugauuugcauug

SEQ ID NO: 1258195 - RNA, 18 nt, Human
ggaauugauuugcauuga

SEQ ID NO: 1258196 - RNA, 19 nt, Human
ggaauugauuugcauugaa

SEQ ID NO: 1258197 - RNA, 19 nt, Human
ggaauuacgugcucugugg

SEQ ID NO: 1258198 - RNA, 21 nt, Human
ggaauggaggggcagagccag

SEQ ID NO: 1258199 - RNA, 19 nt, Human
ggaauggauuuuucuuuaa

SEQ ID NO: 1258200 - RNA, 17 nt, Human
ggaauggaggggcagag

SEQ ID NO: 1258201 - RNA, 16 nt, Human
ggaauggaggggcaga

SEQ ID NO: 1258202 - RNA, 14 nt, Human
ggaauggaggggca

SEQ ID NO: 1258203 - RNA, 20 nt, Human
ggaauggauuuuucuuuaac

SEQ ID NO: 1258204 - RNA, 22 nt, Human
ggaauggauuuuucuuuaacug

SEQ ID NO: 1258205 - RNA, 12 nt, Human
ggaauggcagca

SEQ ID NO: 1258206 - RNA, 14 nt, Human
ggaauggcagcagg

SEQ ID NO: 1258207 - RNA, 16 nt, Human
ggaauggcagcagggg

SEQ ID NO: 1258208 - RNA, 19 nt, Human
ggaaugcccuucacuguca

SEQ ID NO: 1258209 - RNA, 15 nt, Human
gcuuucagaauaugu

SEQ ID NO: 1258210 - RNA, 13 nt, Human
gcuuucagagccu

SEQ ID NO: 1258211 - RNA, 13 nt, Human
gcuuucagggagg

SEQ ID NO: 1258212 - RNA, 15 nt, Human
gcuuuguaugcacuu

SEQ ID NO: 1258213 - RNA, 14 nt, Human
gcuuuguggcacug

SEQ ID NO: 1258214 - RNA, 18 nt, Human
gcuuugucuacuucaaaa

SEQ ID NO: 1258215 - RNA, 22 nt, Human
gcuuuguggcacuggggcaggg

SEQ ID NO: 1258216 - RNA, 18 nt, Human
gcuucugcccccugcaga

SEQ ID NO: 1258217 - RNA, 12 nt, Human
gcuuuagaaaca

SEQ ID NO: 1258218 - RNA, 20 nt, Human
gcuuuagaaacagugcaaca

SEQ ID NO: 1258219 - RNA, 21 nt, Human
gcuuuagaaucccagcccccu

SEQ ID NO: 1258220 - RNA, 16 nt, Human
gcuuuagaaucccagc

SEQ ID NO: 1258221 - RNA, 15 nt, Human
ggaaaacauuccauc

SEQ ID NO: 1258222 - RNA, 15 nt, Human
ggaaaacagaacacu

SEQ ID NO: 1258223 - RNA, 21 nt, Human
ggaaaaccaagccguggcuuc

SEQ ID NO: 1258224 - RNA, 10 nt, Human
ggaaaagcuu

SEQ ID NO: 1258225 - RNA, 12 nt, Human
ggaaaaggccug

SEQ ID NO: 1258226 - RNA, 13 nt, Human
ggaaaaggccugg

SEQ ID NO: 1258227 - RNA, 14 nt, Human
ggaaaaggccuggg

SEQ ID NO: 1258228 - RNA, 16 nt, Human
ggaaaaggccuggggu

SEQ ID NO: 1258229 - RNA, 22 nt, Human
ggaaaaggccuggggugacccg

SEQ ID NO: 1258230 - RNA, 17 nt, Human
ggaaaaggccuggggug

SEQ ID NO: 1258231 - RNA, 16 nt, Human
gcuuuucccaaaagcc

SEQ ID NO: 1258232 - RNA, 18 nt, Human
gcuuuucaugcaaacucu

SEQ ID NO: 1258233 - RNA, 22 nt, Human
gcuuuucacugcuggcugccuu

SEQ ID NO: 1258234 - RNA, 23 nt, Human
gcuuuucacugcuggcugccuua

SEQ ID NO: 1258235 - RNA, 15 nt, Human
ggaaaaauguaggag

SEQ ID NO: 1258236 - RNA, 14 nt, Human
gcuuuguuuugcac

SEQ ID NO: 1258237 - RNA, 13 nt, Human
gcuuuucacugcu

SEQ ID NO: 1258238 - RNA, 23 nt, Human
gcuuuguuuugcacacuuugcca

SEQ ID NO: 1258239 - RNA, 14 nt, Human
gcuuuucacugcug

SEQ ID NO: 1258240 - RNA, 18 nt, Human
gcuuuucacugcuggcug

SEQ ID NO: 1258241 - RNA, 18 nt, Human
ggaacauaaaaaggacau

SEQ ID NO: 1258242 - RNA, 17 nt, Human
ggaacauggggaggagg

SEQ ID NO: 1258243 - RNA, 13 nt, Human
ggaacauaaaaag

SEQ ID NO: 1258244 - RNA, 18 nt, Human
ggaacagugugcaaggca

SEQ ID NO: 1258245 - RNA, 19 nt, Human
ggaacagugugcaaggcag

SEQ ID NO: 1258246 - RNA, 13 nt, Human
ggaacauggggag

SEQ ID NO: 1258247 - RNA, 14 nt, Human
ggaacauggggagg

SEQ ID NO: 1258248 - RNA, 11 nt, Human
ggaaccagacu

SEQ ID NO: 1258249 - RNA, 12 nt, Human
ggaaccagacuc

SEQ ID NO: 1258250 - RNA, 19 nt, Human
ggaaccagacucuugccug

SEQ ID NO: 1258251 - RNA, 13 nt, Human
ggaaccagacucu

SEQ ID NO: 1258252 - RNA, 11 nt, Human
ggaacccagac

SEQ ID NO: 1258253 - RNA, 13 nt, Human
ggaacccagacuc

SEQ ID NO: 1258254 - RNA, 14 nt, Human
ggaacccagacuca

SEQ ID NO: 1258255 - RNA, 15 nt, Human
ggaacccagacucag

SEQ ID NO: 1258256 - RNA, 21 nt, Human
ggaaccccggggugcccacag

SEQ ID NO: 1258257 - RNA, 16 nt, Human
ggaaaucaacuugcuu

SEQ ID NO: 1258258 - RNA, 19 nt, Human
ggaaauacaguucugcucu

SEQ ID NO: 1258259 - RNA, 18 nt, Human
ggaaauacaguucugcuc

SEQ ID NO: 1258260 - RNA, 18 nt, Human
ggaaauacuguaugguuu

SEQ ID NO: 1258261 - RNA, 16 nt, Human
ggaaauauauauuaua

SEQ ID NO: 1258262 - RNA, 23 nt, Human
ggaaauauauauuauacuuguaa

SEQ ID NO: 1258263 - RNA, 12 nt, Human
ggaaaauuauuu

SEQ ID NO: 1258264 - RNA, 14 nt, Human
ggaaaauucauuuu

SEQ ID NO: 1258265 - RNA, 15 nt, Human
ggaaaauucauuuuu

SEQ ID NO: 1258266 - RNA, 20 nt, Human
ggaaagggcccuccuuccua

SEQ ID NO: 1258267 - RNA, 21 nt, Human
ggaaagggcccuccuuccuaa

SEQ ID NO: 1258268 - RNA, 22 nt, Human
ggaaagggcccuccuuccuaaa

SEQ ID NO: 1258269 - RNA, 21 nt, Human
gcuguucaugaaagauucaau

SEQ ID NO: 1258270 - RNA, 12 nt, Human
gcuguucaugaa

SEQ ID NO: 1258271 - RNA, 20 nt, Human
gcugugggcgugagaccugc

SEQ ID NO: 1258272 - RNA, 21 nt, Human
gcugugggcgugagaccugcc

SEQ ID NO: 1258273 - RNA, 22 nt, Human
gcugugggcgugagaccugccc

SEQ ID NO: 1258274 - RNA, 23 nt, Human
gcuguggugugucccccucuguc

SEQ ID NO: 1258275 - RNA, 19 nt, Human
gcuguggugagggaagacg

SEQ ID NO: 1258276 - RNA, 20 nt, Human
gcugucuacacuaagagaga

SEQ ID NO: 1258277 - RNA, 14 nt, Human
gcuguccuuucuag

SEQ ID NO: 1258278 - RNA, 14 nt, Human
gcuguccuuuuucc

SEQ ID NO: 1258279 - RNA, 19 nt, Human
gcuguccuuuuuccucucc

SEQ ID NO: 1258280 - RNA, 15 nt, Human
gcuguccuggagggg

SEQ ID NO: 1258281 - RNA, 16 nt, Human
gcuguccuggaggggc

SEQ ID NO: 1258282 - RNA, 23 nt, Human
gcuguccuggaggggcuggggac

SEQ ID NO: 1258283 - RNA, 12 nt, Human
gcuuaguuugug

SEQ ID NO: 1258284 - RNA, 14 nt, Human
gcuuaguuugugug

SEQ ID NO: 1258285 - RNA, 16 nt, Human
gcuuaguuuguguguu

SEQ ID NO: 1258286 - RNA, 16 nt, Human
gcuuagaguuggccau

SEQ ID NO: 1258287 - RNA, 15 nt, Human
gcuuagauuucauag

SEQ ID NO: 1258288 - RNA, 13 nt, Human
gcuuagauuucau

SEQ ID NO: 1258289 - RNA, 19 nt, Human
gcuuagcaguccccuuccc

SEQ ID NO: 1258290 - RNA, 23 nt, Human
gcuuagcuuuagaaacagugcaa

SEQ ID NO: 1258291 - RNA, 20 nt, Human
gcuuagcucaauuagugugg

SEQ ID NO: 1258292 - RNA, 17 nt, Human
gcuuauaauaaaggacu

SEQ ID NO: 1258293 - RNA, 16 nt, Human
gcuuauaauucuuuca

SEQ ID NO: 1258294 - RNA, 15 nt, Human
gcuuaugaaaagaau

SEQ ID NO: 1258295 - RNA, 18 nt, Human
gcuuaugacaucacuugu

SEQ ID NO: 1258296 - RNA, 22 nt, Human
gcuuaugacaucacuuguacaa

SEQ ID NO: 1258297 - RNA, 23 nt, Human
gcuuaugacaucacuuguacaaa

SEQ ID NO: 1258298 - RNA, 18 nt, Human
gcuuaugcuuaaauucaa

SEQ ID NO: 1258299 - RNA, 23 nt, Human
gcuuaugauagcaaauggccuca

SEQ ID NO: 1258300 - RNA, 16 nt, Human
gcuuaugguaccagau

SEQ ID NO: 1258301 - RNA, 20 nt, Human
gcuuaguuuguguguugucu

SEQ ID NO: 1258302 - RNA, 21 nt, Human
gcuuaguuuguguguugucuc

SEQ ID NO: 1258303 - RNA, 14 nt, Human
gcuucauagagacu

SEQ ID NO: 1258304 - RNA, 17 nt, Human
gcuucauagagacuugg

SEQ ID NO: 1258305 - RNA, 15 nt, Human
gcuuaugcucuuaau

SEQ ID NO: 1258306 - RNA, 15 nt, Human
gcuuaugguaccaga

SEQ ID NO: 1258307 - RNA, 19 nt, Human
gcuucugcccccugcagaa

SEQ ID NO: 1258308 - RNA, 16 nt, Human
gcuucugcccccugca

SEQ ID NO: 1258309 - RNA, 17 nt, Human
gcuucugcccccugcag

SEQ ID NO: 1258310 - RNA, 22 nt, Human
gcuucugagcagcgagccugcu

SEQ ID NO: 1258311 - RNA, 15 nt, Human
gcuucucccaggcaa

SEQ ID NO: 1258312 - RNA, 16 nt, Human
gcuucucccaggcaag

SEQ ID NO: 1258313 - RNA, 17 nt, Human
gcuucucccaggcaagg

SEQ ID NO: 1258314 - RNA, 18 nt, Human
gcuucucccaggcaaggc

SEQ ID NO: 1258315 - RNA, 23 nt, Human
gcuucucccaggcaaggcugugg

SEQ ID NO: 1258316 - RNA, 20 nt, Human
gcuucucccaggcaaggcug

SEQ ID NO: 1258317 - RNA, 22 nt, Human
gcuucucccaggcaaggcugug

SEQ ID NO: 1258318 - RNA, 18 nt, Human
gcuucugagcagcgagcc

SEQ ID NO: 1258319 - RNA, 21 nt, Human
gcuucugagcagcgagccugc

SEQ ID NO: 1258320 - RNA, 23 nt, Human
gcuucugagcagcgagccugcua

SEQ ID NO: 1258321 - RNA, 22 nt, Human
gcuucucauccugcaggcagcu

SEQ ID NO: 1258322 - RNA, 11 nt, Human
gcuucucccag

SEQ ID NO: 1258323 - RNA, 13 nt, Human
gcuucucccaggc

SEQ ID NO: 1258324 - RNA, 14 nt, Human
gcuucucccaggca

SEQ ID NO: 1258325 - RNA, 14 nt, Human
gcuccaagaauuuc

SEQ ID NO: 1258326 - RNA, 15 nt, Human
gcuccaaccugcaaa

SEQ ID NO: 1258327 - RNA, 18 nt, Human
gcuccaaccugcaaagau

SEQ ID NO: 1258328 - RNA, 21 nt, Human
gcuccaaccugcaaagaucug

SEQ ID NO: 1258329 - RNA, 16 nt, Human
gcuccaaaugcagcuu

SEQ ID NO: 1258330 - RNA, 17 nt, Human
gcuccaaagucauaauu

SEQ ID NO: 1258331 - RNA, 19 nt, Human
gcuccaaagucauaauugc

SEQ ID NO: 1258332 - RNA, 20 nt, Human
gcuccaaagucauaauugca

SEQ ID NO: 1258333 - RNA, 14 nt, Human
gcuccaagauucua

SEQ ID NO: 1258334 - RNA, 15 nt, Human
gcuccaagauucuag

SEQ ID NO: 1258335 - RNA, 16 nt, Human
gcuccaagauucuaga

SEQ ID NO: 1258336 - RNA, 17 nt, Human
gcuccaagauucuagau

SEQ ID NO: 1258337 - RNA, 16 nt, Human
gcuccaagccccaucu

SEQ ID NO: 1258338 - RNA, 19 nt, Human
gcuccaagccccaucuucu

SEQ ID NO: 1258339 - RNA, 20 nt, Human
gcuccaaggggaaucagaac

SEQ ID NO: 1258340 - RNA, 21 nt, Human
gcuccaaggggaaucagaacu

SEQ ID NO: 1258341 - RNA, 23 nt, Human
gcuccaaggggaaucagaacuca

SEQ ID NO: 1258342 - RNA, 18 nt, Human
gcuccaagauucuagaug

SEQ ID NO: 1258343 - RNA, 17 nt, Human
gcuccagcuggccggga

SEQ ID NO: 1258344 - RNA, 23 nt, Human
gcuccagcuggccgggagccuga

SEQ ID NO: 1258345 - RNA, 12 nt, Human
gcuccagcugcc

SEQ ID NO: 1258346 - RNA, 13 nt, Human
gcuccagcugccc

SEQ ID NO: 1258347 - RNA, 21 nt, Human
gcuccagcugccccggccccu

SEQ ID NO: 1258348 - RNA, 20 nt, Human
gcuccauuuuuagugaaaua

SEQ ID NO: 1258349 - RNA, 19 nt, Human
gcuccauuuaaacagaugu

SEQ ID NO: 1258350 - RNA, 10 nt, Human
gcucccucag

SEQ ID NO: 1258351 - RNA, 11 nt, Human
gcucccucaga

SEQ ID NO: 1258352 - RNA, 22 nt, Human
gcucccucagacuggggcaaug

SEQ ID NO: 1258353 - RNA, 12 nt, Human
gcucccucagac

SEQ ID NO: 1258354 - RNA, 16 nt, Human
gcucccuccgccccca

SEQ ID NO: 1258355 - RNA, 18 nt, Human
gcucccuccgcccccagg

SEQ ID NO: 1258356 - RNA, 19 nt, Human
gcucccuccgcccccaggu

SEQ ID NO: 1258357 - RNA, 16 nt, Human
gcucccugacugggag

SEQ ID NO: 1258358 - RNA, 18 nt, Human
gcucccugacugggaguu

SEQ ID NO: 1258359 - RNA, 16 nt, Human
gcuccagcugccccgg

SEQ ID NO: 1258360 - RNA, 22 nt, Human
gcuccaguguccugagcucagc

SEQ ID NO: 1258361 - RNA, 23 nt, Human
gcuccaguguccugagcucagcg

SEQ ID NO: 1258362 - RNA, 23 nt, Human
gcuccauuuaaacagauguccau

SEQ ID NO: 1258363 - RNA, 16 nt, Human
gcuccauuuaaacaga

SEQ ID NO: 1258364 - RNA, 14 nt, Human
gcuccaucuccacu

SEQ ID NO: 1258365 - RNA, 21 nt, Human
gcuccauccgugccucuuuuu

SEQ ID NO: 1258366 - RNA, 16 nt, Human
gcucaguaauuugagg

SEQ ID NO: 1258367 - RNA, 21 nt, Human
gcucaguaauuugaggacaac

SEQ ID NO: 1258368 - RNA, 17 nt, Human
gcucagugaaguugcug

SEQ ID NO: 1258369 - RNA, 20 nt, Human
gcucagugaaguugcugcuu

SEQ ID NO: 1258370 - RNA, 19 nt, Human
gcucagugaaguugcugcu

SEQ ID NO: 1258371 - RNA, 17 nt, Human
gcucaguggggcagagg

SEQ ID NO: 1258372 - RNA, 19 nt, Human
gcucauauggggcugggag

SEQ ID NO: 1258373 - RNA, 19 nt, Human
gcucagauagaaugacagu

SEQ ID NO: 1258374 - RNA, 15 nt, Human
gcucagauagaauga

SEQ ID NO: 1258375 - RNA, 17 nt, Human
gcucagcacugccugcu

SEQ ID NO: 1258376 - RNA, 18 nt, Human
gcucagcacugccugcuc

SEQ ID NO: 1258377 - RNA, 19 nt, Human
gcucagcacugccugcucc

SEQ ID NO: 1258378 - RNA, 20 nt, Human
gcucagcacugccugcuccc

SEQ ID NO: 1258379 - RNA, 22 nt, Human
gcucagcacugccugcucccau

SEQ ID NO: 1258380 - RNA, 12 nt, Human
gcucagccagca

SEQ ID NO: 1258381 - RNA, 13 nt, Human
gcucagccagcac

SEQ ID NO: 1258382 - RNA, 14 nt, Human
gcucagccagcacu

SEQ ID NO: 1258383 - RNA, 15 nt, Human
gcucagccagcacuu

SEQ ID NO: 1258384 - RNA, 22 nt, Human
gcucacccccuucuccauccac

SEQ ID NO: 1258385 - RNA, 21 nt, Human
gcucagaggguguccugcacc

SEQ ID NO: 1258386 - RNA, 18 nt, Human
gcucacccccuucuccau

SEQ ID NO: 1258387 - RNA, 20 nt, Human
gcucacccccuucuccaucc

SEQ ID NO: 1258388 - RNA, 19 nt, Human
gcucacccagugcccucuc

SEQ ID NO: 1258389 - RNA, 13 nt, Human
gcucacccagugc

SEQ ID NO: 1258390 - RNA, 16 nt, Human
gcucacccccuucucc

SEQ ID NO: 1258391 - RNA, 20 nt, Human
gcuaagcucacguccugaga

SEQ ID NO: 1258392 - RNA, 22 nt, Human
gcuaagcucacguccugagaaa

SEQ ID NO: 1258393 - RNA, 15 nt, Human
gcuaagcuaggaaug

SEQ ID NO: 1258394 - RNA, 19 nt, Human
gcuaagcuaggaaugaaau

SEQ ID NO: 1258395 - RNA, 14 nt, Human
gcuaagcauuccaa

SEQ ID NO: 1258396 - RNA, 22 nt, Human
gcuaacaugaagaccuuuuucu

SEQ ID NO: 1258397 - RNA, 13 nt, Human
gcuaacaugaaga

SEQ ID NO: 1258398 - RNA, 22 nt, Human
gcuaacagggaaggcaggcagg

SEQ ID NO: 1258399 - RNA, 17 nt, Human
gcuaagcaaaaugugau

SEQ ID NO: 1258400 - RNA, 14 nt, Human
gcuacguauuuaau

SEQ ID NO: 1258401 - RNA, 20 nt, Human
gcuacuaugauuuaauuuga

SEQ ID NO: 1258402 - RNA, 22 nt, Human
gcuacuaugauuuaauuugaaa

SEQ ID NO: 1258403 - RNA, 14 nt, Human
gcuagcaguggcag

SEQ ID NO: 1258404 - RNA, 16 nt, Human
gcuagcaguggcaggc

SEQ ID NO: 1258405 - RNA, 18 nt, Human
gcuagcaguggcaggcag

SEQ ID NO: 1258406 - RNA, 20 nt, Human
gcuagcaguggcaggcagag

SEQ ID NO: 1258407 - RNA, 12 nt, Human
gcuaucucccug

SEQ ID NO: 1258408 - RNA, 13 nt, Human
gcuaucucugugu

SEQ ID NO: 1258409 - RNA, 16 nt, Human
gcuaucucugugugca

SEQ ID NO: 1258410 - RNA, 20 nt, Human
gcuaucucugugugcacaaa

SEQ ID NO: 1258411 - RNA, 23 nt, Human
gccugugagcuaggaauuguguu

SEQ ID NO: 1258412 - RNA, 17 nt, Human
gccugugaacugaacuc

SEQ ID NO: 1258413 - RNA, 15 nt, Human
gccugucagauccag

SEQ ID NO: 1258414 - RNA, 19 nt, Human
gccugugaacccaggacaa

SEQ ID NO: 1258415 - RNA, 21 nt, Human
gccugugaacccaggacaagc

SEQ ID NO: 1258416 - RNA, 23 nt, Human
gccugugacauacccccuccccc

SEQ ID NO: 1258417 - RNA, 21 nt, Human
gccugugacauacccccuccc

SEQ ID NO: 1258418 - RNA, 15 nt, Human
gccugugcaaugcau

SEQ ID NO: 1258419 - RNA, 10 nt, Human
gccugugcca

SEQ ID NO: 1258420 - RNA, 13 nt, Human
gccugugccaggu

SEQ ID NO: 1258421 - RNA, 14 nt, Human
gccugugccaggug

SEQ ID NO: 1258422 - RNA, 14 nt, Human
gcguaggcuacaga

SEQ ID NO: 1258423 - RNA, 16 nt, Human
gcguaggcuacagaga

SEQ ID NO: 1258424 - RNA, 17 nt, Human
gcguaggcuacagagaa

SEQ ID NO: 1258425 - RNA, 18 nt, Human
gcguaggcuacagagaag

SEQ ID NO: 1258426 - RNA, 19 nt, Human
gcguaggcuacagagaagc

SEQ ID NO: 1258427 - RNA, 20 nt, Human
gcguaggcuacagagaagcc

SEQ ID NO: 1258428 - RNA, 19 nt, Human
gcguauuauaccaaaaugu

SEQ ID NO: 1258429 - RNA, 12 nt, Human
gcgucuuccuga

SEQ ID NO: 1258430 - RNA, 15 nt, Human
gcgugagaccugccc

SEQ ID NO: 1258431 - RNA, 13 nt, Human
gcgucuuccugag

SEQ ID NO: 1258432 - RNA, 14 nt, Human
gcgucuuccugagu

SEQ ID NO: 1258433 - RNA, 21 nt, Human
gcgucuuccugaguggugcca

SEQ ID NO: 1258434 - RNA, 13 nt, Human
gcgugacaauaaa

SEQ ID NO: 1258435 - RNA, 14 nt, Human
gcgugagcugagca

SEQ ID NO: 1258436 - RNA, 23 nt, Human
gcgugagcuuaaaauacaagacu

SEQ ID NO: 1258437 - RNA, 12 nt, Human
gcgugagcuuaa

SEQ ID NO: 1258438 - RNA, 19 nt, Human
gcuaaauaaaauuuguugc

SEQ ID NO: 1258439 - RNA, 20 nt, Human
gcuaaauaaaauuuguugca

SEQ ID NO: 1258440 - RNA, 21 nt, Human
gcuaaauaaaauuuguugcau

SEQ ID NO: 1258441 - RNA, 19 nt, Human
gcuaaauccuuuacuguua

SEQ ID NO: 1258442 - RNA, 15 nt, Human
gcuaacagggaaggc

SEQ ID NO: 1258443 - RNA, 16 nt, Human
gcuaacagggaaggca

SEQ ID NO: 1258444 - RNA, 18 nt, Human
gcuaacagggaaggcagg

SEQ ID NO: 1258445 - RNA, 20 nt, Human
gcuaacagggaaggcaggca

SEQ ID NO: 1258446 - RNA, 17 nt, Human
gcugauggagaaggaag

SEQ ID NO: 1258447 - RNA, 16 nt, Human
gcugauggagaaggaa

SEQ ID NO: 1258448 - RNA, 13 nt, Human
gcugaguuuccua

SEQ ID NO: 1258449 - RNA, 15 nt, Human
gcugaguuuccuaug

SEQ ID NO: 1258450 - RNA, 17 nt, Human
gcugaguggcaggggac

SEQ ID NO: 1258451 - RNA, 19 nt, Human
gcugaguggcaggggacag

SEQ ID NO: 1258452 - RNA, 21 nt, Human
gcugaguggcaggggacagga

SEQ ID NO: 1258453 - RNA, 11 nt, Human
gcugaguuucc

SEQ ID NO: 1258454 - RNA, 12 nt, Human
gcugaguuuccu

SEQ ID NO: 1258455 - RNA, 14 nt, Human
gcugacuguagcuu

SEQ ID NO: 1258456 - RNA, 21 nt, Human
gcugacuguacuccucccagg

SEQ ID NO: 1258457 - RNA, 17 nt, Human
gcugagucccaggcuga

SEQ ID NO: 1258458 - RNA, 21 nt, Human
gcugagucccaggcugagccu

SEQ ID NO: 1258459 - RNA, 22 nt, Human
gcugagucccaggcugagccuc

SEQ ID NO: 1258460 - RNA, 17 nt, Human
gcugauggagccuuccc

SEQ ID NO: 1258461 - RNA, 20 nt, Human
gcugauguagcaugcuuguu

SEQ ID NO: 1258462 - RNA, 17 nt, Human
gcugaugucaauuucug

SEQ ID NO: 1258463 - RNA, 20 nt, Human
gcugaugucaauuucugugu

SEQ ID NO: 1258464 - RNA, 23 nt, Human
gcugaugucaauuucuguguugc

SEQ ID NO: 1258465 - RNA, 21 nt, Human
gcugcaguuuugcuaucuggg

SEQ ID NO: 1258466 - RNA, 17 nt, Human
gcugcaguuuugcuauc

SEQ ID NO: 1258467 - RNA, 17 nt, Human
gcugcauggcagggggc

SEQ ID NO: 1258468 - RNA, 22 nt, Human
gcugcauggcagggggcugcug

SEQ ID NO: 1258469 - RNA, 19 nt, Human
gcugcauugaaaagagcug

SEQ ID NO: 1258470 - RNA, 20 nt, Human
gcugcauugaaaagagcuga

SEQ ID NO: 1258471 - RNA, 17 nt, Human
gcucuugaugccuggcg

SEQ ID NO: 1258472 - RNA, 22 nt, Human
gcucuugauaccccccucuguc

SEQ ID NO: 1258473 - RNA, 23 nt, Human
gcucuugauaccccccucugucu

SEQ ID NO: 1258474 - RNA, 21 nt, Human
gcucuuguugagccgugggca

SEQ ID NO: 1258475 - RNA, 17 nt, Human
gcugacagacagcccuc

SEQ ID NO: 1258476 - RNA, 16 nt, Human
gcucuuucucugccag

SEQ ID NO: 1258477 - RNA, 14 nt, Human
gcucuuucucugcc

SEQ ID NO: 1258478 - RNA, 15 nt, Human
gcucuuucucugcca

SEQ ID NO: 1258479 - RNA, 17 nt, Human
gcucuuucucugccagu

SEQ ID NO: 1258480 - RNA, 18 nt, Human
gcugacuguacuccuccc

SEQ ID NO: 1258481 - RNA, 19 nt, Human
gcugacuguacuccuccca

SEQ ID NO: 1258482 - RNA, 17 nt, Human
gcugacucacaccugaa

SEQ ID NO: 1258483 - RNA, 21 nt, Human
gcugaccaugcucaucugcug

SEQ ID NO: 1258484 - RNA, 22 nt, Human
gcugaccaugcucaucugcugg

SEQ ID NO: 1258485 - RNA, 16 nt, Human
gcucuugaugccuggc

SEQ ID NO: 1258486 - RNA, 15 nt, Human
gcucuugaugccugg

SEQ ID NO: 1258487 - RNA, 14 nt, Human
gcucuugaugccug

SEQ ID NO: 1258488 - RNA, 23 nt, Human
gcucuucuccuuucacaaccuuc

SEQ ID NO: 1258489 - RNA, 13 nt, Human
gcucuucuccuuu

SEQ ID NO: 1258490 - RNA, 17 nt, Human
gcucuucuccuuucaca

SEQ ID NO: 1258491 - RNA, 21 nt, Human
gcucuucuccuuucacaaccu

SEQ ID NO: 1258492 - RNA, 20 nt, Human
gcucuggacagccccacccu

SEQ ID NO: 1258493 - RNA, 22 nt, Human
gcucuggacagccccacccugg

SEQ ID NO: 1258494 - RNA, 15 nt, Human
gcucuuccuuacucc

SEQ ID NO: 1258495 - RNA, 17 nt, Human
gcucuccuccaccucaa

SEQ ID NO: 1258496 - RNA, 13 nt, Human
gcucuccucuucu

SEQ ID NO: 1258497 - RNA, 15 nt, Human
gcucuccucuucuac

SEQ ID NO: 1258498 - RNA, 15 nt, Human
gcucuccucuugcca

SEQ ID NO: 1258499 - RNA, 19 nt, Human
gcucuccucuugccacugc

SEQ ID NO: 1258500 - RNA, 22 nt, Human
gcucuccucuugccacugccuc

SEQ ID NO: 1258501 - RNA, 20 nt, Human
gcucuccauucugcuccuuc

SEQ ID NO: 1258502 - RNA, 13 nt, Human
gcucucuggccuu

SEQ ID NO: 1258503 - RNA, 12 nt, Human
gcucucuggccu

SEQ ID NO: 1258504 - RNA, 11 nt, Human
gcucucuggcc

SEQ ID NO: 1258505 - RNA, 23 nt, Human
gcucuccucuucuacucacuuuu

SEQ ID NO: 1258506 - RNA, 14 nt, Human
gcucuccuggcccu

SEQ ID NO: 1258507 - RNA, 12 nt, Human
gcucuccuggcu

SEQ ID NO: 1258508 - RNA, 13 nt, Human
gcucuccuggcuu

SEQ ID NO: 1258509 - RNA, 14 nt, Human
gcucuccuggcuuc

SEQ ID NO: 1258510 - RNA, 15 nt, Human
gcucuccuggcuucc

SEQ ID NO: 1258511 - RNA, 17 nt, Human
gcucuccuggcuuccca

SEQ ID NO: 1258512 - RNA, 23 nt, Human
gcucuccuggcuucccaucccca

SEQ ID NO: 1258513 - RNA, 19 nt, Human
gcucucgcacaccucugca

SEQ ID NO: 1258514 - RNA, 19 nt, Human
gcucucggguugugugucu

SEQ ID NO: 1258515 - RNA, 19 nt, Human
gcucucucauugucugugu

SEQ ID NO: 1258516 - RNA, 20 nt, Human
gcucucuccaggcaggucug

SEQ ID NO: 1258517 - RNA, 21 nt, Human
gcucccuguaaccucuucaga

SEQ ID NO: 1258518 - RNA, 16 nt, Human
gcucccugugccccca

SEQ ID NO: 1258519 - RNA, 12 nt, Human
gcucccuggggg

SEQ ID NO: 1258520 - RNA, 15 nt, Human
gcucgaaucucugug

SEQ ID NO: 1258521 - RNA, 16 nt, Human
gcucgaaucucugugc

SEQ ID NO: 1258522 - RNA, 19 nt, Human
gcucgaaucucugugccuu

SEQ ID NO: 1258523 - RNA, 11 nt, Human
gcuccuugggc

SEQ ID NO: 1258524 - RNA, 12 nt, Human
gcucuccauucu

SEQ ID NO: 1258525 - RNA, 14 nt, Human
gcucuccauucugc

SEQ ID NO: 1258526 - RNA, 17 nt, Human
gcucuccauucugcucc

SEQ ID NO: 1258527 - RNA, 18 nt, Human
gcucuccauucugcuccu

SEQ ID NO: 1258528 - RNA, 19 nt, Human
gcucuccauucugcuccuu

SEQ ID NO: 1258529 - RNA, 21 nt, Human
gcucuccauucugcuccuucc

SEQ ID NO: 1258530 - RNA, 20 nt, Human
gcucucuggccuucggccuc

SEQ ID NO: 1258531 - RNA, 19 nt, Human
gcucucuggccuucggccu

SEQ ID NO: 1258532 - RNA, 15 nt, Human
gcucucuggccuucg

SEQ ID NO: 1258533 - RNA, 14 nt, Human
gcucucuggccuuc

SEQ ID NO: 1258534 - RNA, 17 nt, Human
gcucugcgugucaccug

SEQ ID NO: 1258535 - RNA, 16 nt, Human
gcucuggacagcccca

SEQ ID NO: 1258536 - RNA, 19 nt, Human
gcucuggacagccccaccc

SEQ ID NO: 1258537 - RNA, 22 nt, Human
gcucugcgugucaccugugcuu

SEQ ID NO: 1258538 - RNA, 22 nt, Human
gcucugcuccccuaaagccuca

SEQ ID NO: 1258539 - RNA, 22 nt, Human
gcucugcuauuaggccagcaag

SEQ ID NO: 1258540 - RNA, 20 nt, Human
gccugagugacagagcaaga

SEQ ID NO: 1258541 - RNA, 16 nt, Human
gccugaucagaccacg

SEQ ID NO: 1258542 - RNA, 20 nt, Human
gccugaucagaccacggcuc

SEQ ID NO: 1258543 - RNA, 17 nt, Human
gccugacccucaucuuu

SEQ ID NO: 1258544 - RNA, 23 nt, Human
gccugacccuacuucuuuugcuc

SEQ ID NO: 1258545 - RNA, 18 nt, Human
gccugagucgugaccugc

SEQ ID NO: 1258546 - RNA, 20 nt, Human
gccugagucgugaccugcua

SEQ ID NO: 1258547 - RNA, 23 nt, Human
gccugagucgugaccugcuaggc

SEQ ID NO: 1258548 - RNA, 22 nt, Human
gccugagucgugaccugcuagg

SEQ ID NO: 1258549 - RNA, 20 nt, Human
gccugacaaccacuggucug

SEQ ID NO: 1258550 - RNA, 21 nt, Human
gccugacaaccacuggucugu

SEQ ID NO: 1258551 - RNA, 22 nt, Human
gccugacacacuaaccaagcug

SEQ ID NO: 1258552 - RNA, 15 nt, Human
gccugacacacuaac

SEQ ID NO: 1258553 - RNA, 22 nt, Human
gccugacauuuggaguguuccc

SEQ ID NO: 1258554 - RNA, 15 nt, Human
gccugaccaaacagc

SEQ ID NO: 1258555 - RNA, 21 nt, Human
gccucucugcaggucccuaau

SEQ ID NO: 1258556 - RNA, 20 nt, Human
gccucucugcaggucccuaa

SEQ ID NO: 1258557 - RNA, 23 nt, Human
gccucucugcaggucccuaauaa

SEQ ID NO: 1258558 - RNA, 12 nt, Human
gccucugccugu

SEQ ID NO: 1258559 - RNA, 19 nt, Human
gccucugcugauccuccca

SEQ ID NO: 1258560 - RNA, 13 nt, Human
gccucugccuguc

SEQ ID NO: 1258561 - RNA, 22 nt, Human
gccucucgcuccucaaccccuc

SEQ ID NO: 1258562 - RNA, 18 nt, Human
gccucugcugauccuccc

SEQ ID NO: 1258563 - RNA, 19 nt, Human
gccucugcgagugguuucu

SEQ ID NO: 1258564 - RNA, 16 nt, Human
gccugcacaauaaaaa

SEQ ID NO: 1258565 - RNA, 16 nt, Human
gccugcagaauuuggg

SEQ ID NO: 1258566 - RNA, 16 nt, Human
gccugcagacucacug

SEQ ID NO: 1258567 - RNA, 22 nt, Human
gccugcuuuuuauggccuguga

SEQ ID NO: 1258568 - RNA, 14 nt, Human
gccuggaggaccug

SEQ ID NO: 1258569 - RNA, 15 nt, Human
gccuggaggaccuga

SEQ ID NO: 1258570 - RNA, 16 nt, Human
gccuggaggaccugag

SEQ ID NO: 1258571 - RNA, 17 nt, Human
gccuggaggaccugagc

SEQ ID NO: 1258572 - RNA, 19 nt, Human
gccugcuuuuuauggccug

SEQ ID NO: 1258573 - RNA, 18 nt, Human
gccugcuuuuuauggccu

SEQ ID NO: 1258574 - RNA, 22 nt, Human
gccuggggcugaggcugaggca

SEQ ID NO: 1258575 - RNA, 21 nt, Human
gccuggggcucuaacgccuga

SEQ ID NO: 1258576 - RNA, 22 nt, Human
gccuggggcucuaacgccugag

SEQ ID NO: 1258577 - RNA, 17 nt, Human
gccuggggcuggccucc

SEQ ID NO: 1258578 - RNA, 14 nt, Human
gccuggggcuggcc

SEQ ID NO: 1258579 - RNA, 23 nt, Human
gccuggggcucuaacgccugagc

SEQ ID NO: 1258580 - RNA, 13 nt, Human
gccugggggccug

SEQ ID NO: 1258581 - RNA, 14 nt, Human
gccugggggccugg

SEQ ID NO: 1258582 - RNA, 15 nt, Human
gccugggggccuggc

SEQ ID NO: 1258583 - RNA, 16 nt, Human
gccugggggccuggcu

SEQ ID NO: 1258584 - RNA, 17 nt, Human
gccugggggccuggcug

SEQ ID NO: 1258585 - RNA, 18 nt, Human
gccugggggccuggcugg

SEQ ID NO: 1258586 - RNA, 19 nt, Human
gccugggggccuggcuggc

SEQ ID NO: 1258587 - RNA, 20 nt, Human
gccugggggccuggcuggcu

SEQ ID NO: 1258588 - RNA, 18 nt, Human
gccuggccauacuguguc

SEQ ID NO: 1258589 - RNA, 17 nt, Human
gccuggccagugcccug

SEQ ID NO: 1258590 - RNA, 14 nt, Human
gccuggcccacccc

SEQ ID NO: 1258591 - RNA, 20 nt, Human
gccuggggcucuaacgccug

SEQ ID NO: 1258592 - RNA, 15 nt, Human
gccugggucuccuaa

SEQ ID NO: 1258593 - RNA, 17 nt, Human
gccuguacugccugcuu

SEQ ID NO: 1258594 - RNA, 18 nt, Human
gccuguacugccugcuug

SEQ ID NO: 1258595 - RNA, 20 nt, Human
gccuguacugccugcuuggg

SEQ ID NO: 1258596 - RNA, 19 nt, Human
gccuguacugccugcuugg

SEQ ID NO: 1258597 - RNA, 13 nt, Human
gccuguagaguug

SEQ ID NO: 1258598 - RNA, 15 nt, Human
gccuguagaguugcu

SEQ ID NO: 1258599 - RNA, 16 nt, Human
gccuguagaguugcug

SEQ ID NO: 1258600 - RNA, 19 nt, Human
gccuguagaguugcugaga

SEQ ID NO: 1258601 - RNA, 17 nt, Human
gccuguagaguugcuga

SEQ ID NO: 1258602 - RNA, 20 nt, Human
gccuguagccccagugacag

SEQ ID NO: 1258603 - RNA, 21 nt, Human
gccuguagccccagugacagc

SEQ ID NO: 1258604 - RNA, 18 nt, Human
gccuggaggaccugagcc

SEQ ID NO: 1258605 - RNA, 19 nt, Human
gccuggaggaccugagccu

SEQ ID NO: 1258606 - RNA, 20 nt, Human
gccuggaggaccugagccug

SEQ ID NO: 1258607 - RNA, 21 nt, Human
gccuggaggaccugagccugc

SEQ ID NO: 1258608 - RNA, 22 nt, Human
gccuggaggaccugagccugcc

SEQ ID NO: 1258609 - RNA, 24 nt, Human
gccuggaguguaugacugcacaug

SEQ ID NO: 1258610 - RNA, 20 nt, Human
gccuggaugcggauggccgg

SEQ ID NO: 1258611 - RNA, 20 nt, Human
gccuggcaguccgugggacg

SEQ ID NO: 1258612 - RNA, 13 nt, Human
gccuggccacgcc

SEQ ID NO: 1258613 - RNA, 13 nt, Human
gccuggccagaca

SEQ ID NO: 1258614 - RNA, 14 nt, Human
gccuggccagacac

SEQ ID NO: 1258615 - RNA, 16 nt, Human
gccuggccagacacag

SEQ ID NO: 1258616 - RNA, 17 nt, Human
gccuggccagacacagg

SEQ ID NO: 1258617 - RNA, 15 nt, Human
gccuggccagugccc

SEQ ID NO: 1258618 - RNA, 20 nt, Human
gccuggccagacacaggccc

SEQ ID NO: 1258619 - RNA, 21 nt, Human
gccuggccagacacaggcccu

SEQ ID NO: 1258620 - RNA, 19 nt, Human
gccucucugcaggucccua

SEQ ID NO: 1258621 - RNA, 19 nt, Human
gccucucgcuccucaaccc

SEQ ID NO: 1258622 - RNA, 23 nt, Human
gccucuaccugacacucccuugg

SEQ ID NO: 1258623 - RNA, 15 nt, Human
gccucuacugggaag

SEQ ID NO: 1258624 - RNA, 16 nt, Human
gccucuacugggaagg

SEQ ID NO: 1258625 - RNA, 17 nt, Human
gccucuacugggaaggc

SEQ ID NO: 1258626 - RNA, 18 nt, Human
gccucuacugggaaggcu

SEQ ID NO: 1258627 - RNA, 22 nt, Human
gccucuagagcagacuacagcu

SEQ ID NO: 1258628 - RNA, 14 nt, Human
gccucucccuccuc

SEQ ID NO: 1258629 - RNA, 23 nt, Human
gccucucccuccuccaggaagcc

SEQ ID NO: 1258630 - RNA, 22 nt, Human
gccucucccuccuccaggaagc

SEQ ID NO: 1258631 - RNA, 20 nt, Human
gccucggacuuagcugggag

SEQ ID NO: 1258632 - RNA, 21 nt, Human
gccucggacuuagcugggaga

SEQ ID NO: 1258633 - RNA, 19 nt, Human
gccuccccuuaaaggggag

SEQ ID NO: 1258634 - RNA, 17 nt, Human
gccucggccucccaaag

SEQ ID NO: 1258635 - RNA, 17 nt, Human
gccucagugacccuggc

SEQ ID NO: 1258636 - RNA, 20 nt, Human
gccucagugacccuggcucc

SEQ ID NO: 1258637 - RNA, 18 nt, Human
gccuccccucuccuuccu

SEQ ID NO: 1258638 - RNA, 19 nt, Human
gccuccccucuccuuccug

SEQ ID NO: 1258639 - RNA, 21 nt, Human
gccuccccucuccuuccugug

SEQ ID NO: 1258640 - RNA, 14 nt, Human
gccuccccugccac

SEQ ID NO: 1258641 - RNA, 15 nt, Human
gccuccccugccacc

SEQ ID NO: 1258642 - RNA, 16 nt, Human
gccuccccugccacca

SEQ ID NO: 1258643 - RNA, 19 nt, Human
gccuccccugccaccaggc

SEQ ID NO: 1258644 - RNA, 14 nt, Human
gccuccccugccag

SEQ ID NO: 1258645 - RNA, 15 nt, Human
gccuccccugccagg

SEQ ID NO: 1258646 - RNA, 17 nt, Human
gccuccccugccagggc

SEQ ID NO: 1258647 - RNA, 18 nt, Human
gccuccccugccagggca

SEQ ID NO: 1258648 - RNA, 20 nt, Human
gccuccccuuaaaggggaga

SEQ ID NO: 1258649 - RNA, 19 nt, Human
gccucaccagcccuggcaa

SEQ ID NO: 1258650 - RNA, 15 nt, Human
gccucacccaccccu

SEQ ID NO: 1258651 - RNA, 17 nt, Human
gccucacccaccccugc

SEQ ID NO: 1258652 - RNA, 18 nt, Human
gccucacccaccccugca

SEQ ID NO: 1258653 - RNA, 19 nt, Human
gccucacccaccccugcac

SEQ ID NO: 1258654 - RNA, 20 nt, Human
gccucacccaccccugcaca

SEQ ID NO: 1258655 - RNA, 15 nt, Human
gccucaaccucccaa

SEQ ID NO: 1258656 - RNA, 22 nt, Human
gccucacuuuuaaugaacaaau

SEQ ID NO: 1258657 - RNA, 19 nt, Human
gccucagaagugcaucugg

SEQ ID NO: 1258658 - RNA, 23 nt, Human
gccucacuuuuaaugaacaaaug

SEQ ID NO: 1258659 - RNA, 17 nt, Human
gccucagaaaccagacu

SEQ ID NO: 1258660 - RNA, 16 nt, Human
gccucagccucccaag

SEQ ID NO: 1258661 - RNA, 14 nt, Human
gccucagccucccg

SEQ ID NO: 1258662 - RNA, 13 nt, Human
gccucagaagugc

SEQ ID NO: 1258663 - RNA, 15 nt, Human
gccucagucucccuc

SEQ ID NO: 1258664 - RNA, 18 nt, Human
gccucagucucccucccu

SEQ ID NO: 1258665 - RNA, 15 nt, Human
gccucagcucccaca

SEQ ID NO: 1258666 - RNA, 16 nt, Human
gccucagcucccacaa

SEQ ID NO: 1258667 - RNA, 17 nt, Human
gccucagcucccacaag

SEQ ID NO: 1258668 - RNA, 21 nt, Human
gccucagcucccacaagccuc

SEQ ID NO: 1258669 - RNA, 15 nt, Human
gccucaggacuggga

SEQ ID NO: 1258670 - RNA, 16 nt, Human
gccucaggacugggag

SEQ ID NO: 1258671 - RNA, 17 nt, Human
gccucaggacugggagc

SEQ ID NO: 1258672 - RNA, 23 nt, Human
gccucaggacugggagcccccag

SEQ ID NO: 1258673 - RNA, 16 nt, Human
gccucaggggucugag

SEQ ID NO: 1258674 - RNA, 18 nt, Human
gccucaggacugggagcc

SEQ ID NO: 1258675 - RNA, 14 nt, Human
gccucagggcuccu

SEQ ID NO: 1258676 - RNA, 20 nt, Human
gccuaucagaguugcugcaa

SEQ ID NO: 1258677 - RNA, 16 nt, Human
gccuaugacuugggca

SEQ ID NO: 1258678 - RNA, 17 nt, Human
gccuaugacuugggcac

SEQ ID NO: 1258679 - RNA, 18 nt, Human
gccuaugacuugggcacc

SEQ ID NO: 1258680 - RNA, 22 nt, Human
gccuauauuuuuuguuaaauga

SEQ ID NO: 1258681 - RNA, 23 nt, Human
gccuaagggauccugccugcccc

SEQ ID NO: 1258682 - RNA, 17 nt, Human
gccuaagugcagccccg

SEQ ID NO: 1258683 - RNA, 16 nt, Human
gccuaaggcugaacuu

SEQ ID NO: 1258684 - RNA, 14 nt, Human
gccgagcaaccgug

SEQ ID NO: 1258685 - RNA, 19 nt, Human
gccgagcaaccguggcccu

SEQ ID NO: 1258686 - RNA, 20 nt, Human
gccgagcaaccguggcccuu

SEQ ID NO: 1258687 - RNA, 14 nt, Human
gccgagcaggaggc

SEQ ID NO: 1258688 - RNA, 15 nt, Human
gccgagcaggaggcc

SEQ ID NO: 1258689 - RNA, 21 nt, Human
gcccugggaggcucuggagcc

SEQ ID NO: 1258690 - RNA, 19 nt, Human
gcccugggaggcucuggag

SEQ ID NO: 1258691 - RNA, 18 nt, Human
gcccugggaggcucugga

SEQ ID NO: 1258692 - RNA, 17 nt, Human
gcccugggaggcucugg

SEQ ID NO: 1258693 - RNA, 23 nt, Human
gcccugggaggcucuggagccca

SEQ ID NO: 1258694 - RNA, 16 nt, Human
gcccugggaggcagug

SEQ ID NO: 1258695 - RNA, 22 nt, Human
gcccugggaccgcuacaccacu

SEQ ID NO: 1258696 - RNA, 23 nt, Human
gcccugggagaaucgcuccugca

SEQ ID NO: 1258697 - RNA, 13 nt, Human
gcccugggccugc

SEQ ID NO: 1258698 - RNA, 15 nt, Human
gcccugggccugccu

SEQ ID NO: 1258699 - RNA, 16 nt, Human
gcccugggccugccuc

SEQ ID NO: 1258700 - RNA, 20 nt, Human
gcccugggccugccucacca

SEQ ID NO: 1258701 - RNA, 22 nt, Human
gcccugggccugccucaccacg

SEQ ID NO: 1258702 - RNA, 15 nt, Human
gcccuggugcugcca

SEQ ID NO: 1258703 - RNA, 16 nt, Human
gcccuggugcugccac

SEQ ID NO: 1258704 - RNA, 17 nt, Human
gcccuggugcugccaca

SEQ ID NO: 1258705 - RNA, 21 nt, Human
gcccuggugcugccacacuuc

SEQ ID NO: 1258706 - RNA, 11 nt, Human
gcccugggcug

SEQ ID NO: 1258707 - RNA, 12 nt, Human
gcccugggcugg

SEQ ID NO: 1258708 - RNA, 13 nt, Human
gcccugggcugga

SEQ ID NO: 1258709 - RNA, 14 nt, Human
gcccugggcuggaa

SEQ ID NO: 1258710 - RNA, 16 nt, Human
gcccugggcuggaauc

SEQ ID NO: 1258711 - RNA, 18 nt, Human
gcccugggcuggaaucag

SEQ ID NO: 1258712 - RNA, 12 nt, Human
gcccuggggccu

SEQ ID NO: 1258713 - RNA, 13 nt, Human
gcccuggggccug

SEQ ID NO: 1258714 - RNA, 14 nt, Human
gcccuggggccugu

SEQ ID NO: 1258715 - RNA, 15 nt, Human
gcccuggggccugua

SEQ ID NO: 1258716 - RNA, 18 nt, Human
gcccuggggccuguacug

SEQ ID NO: 1258717 - RNA, 19 nt, Human
gcccuggggccuguacugc

SEQ ID NO: 1258718 - RNA, 23 nt, Human
gcccuggggccuguacugccugc

SEQ ID NO: 1258719 - RNA, 21 nt, Human
gcccuggggccuguacugccu

SEQ ID NO: 1258720 - RNA, 22 nt, Human
gcccuggggccuguacugccug

SEQ ID NO: 1258721 - RNA, 16 nt, Human
gcccugggaggcucug

SEQ ID NO: 1258722 - RNA, 15 nt, Human
gcccugggaggcucu

SEQ ID NO: 1258723 - RNA, 14 nt, Human
gcccugggaggcuc

SEQ ID NO: 1258724 - RNA, 13 nt, Human
gcccugggaggcu

SEQ ID NO: 1258725 - RNA, 11 nt, Human
gcccugggagg

SEQ ID NO: 1258726 - RNA, 14 nt, Human
gcccugggaggcag

SEQ ID NO: 1258727 - RNA, 14 nt, Human
gcccugggaccgcu

SEQ ID NO: 1258728 - RNA, 20 nt, Human
gcccugggaccgcuacacca

SEQ ID NO: 1258729 - RNA, 15 nt, Human
gcccuggcucccaca

SEQ ID NO: 1258730 - RNA, 19 nt, Human
gcccuggcucccacaggcc

SEQ ID NO: 1258731 - RNA, 20 nt, Human
gcccuggcucccacaggccc

SEQ ID NO: 1258732 - RNA, 19 nt, Human
gcccuggccuccccugcca

SEQ ID NO: 1258733 - RNA, 20 nt, Human
gcccuggccuccccugccac

SEQ ID NO: 1258734 - RNA, 21 nt, Human
gcccuggccuccccugccacc

SEQ ID NO: 1258735 - RNA, 24 nt, Human
gcccuggccuccccugccaccagg

SEQ ID NO: 1258736 - RNA, 22 nt, Human
gcccuggaucagcguggccuug

SEQ ID NO: 1258737 - RNA, 15 nt, Human
gcccuggcaugucaa

SEQ ID NO: 1258738 - RNA, 12 nt, Human
gcccuggccucc

SEQ ID NO: 1258739 - RNA, 14 nt, Human
gcccuggccucccc

SEQ ID NO: 1258740 - RNA, 16 nt, Human
gcccuggccuccccug

SEQ ID NO: 1258741 - RNA, 17 nt, Human
gcccuggccuccccugc

SEQ ID NO: 1258742 - RNA, 21 nt, Human
gcccuuccucuccacugccuu

SEQ ID NO: 1258743 - RNA, 17 nt, Human
gcccuuccucuccacug

SEQ ID NO: 1258744 - RNA, 16 nt, Human
gcccuuccucuccacu

SEQ ID NO: 1258745 - RNA, 18 nt, Human
gcccuuccucuccacugc

SEQ ID NO: 1258746 - RNA, 19 nt, Human
gcccuuccucuccacugcc

SEQ ID NO: 1258747 - RNA, 20 nt, Human
gcccuuccucuccacugccu

SEQ ID NO: 1258748 - RNA, 23 nt, Human
gcccuuguuuggggcaggaguag

SEQ ID NO: 1258749 - RNA, 14 nt, Human
gcccuuuugucucu

SEQ ID NO: 1258750 - RNA, 15 nt, Human
gcccuuuccuccuca

SEQ ID NO: 1258751 - RNA, 16 nt, Human
gcccuuuccuccucag

SEQ ID NO: 1258752 - RNA, 22 nt, Human
gcccuuucggauccagggaggc

SEQ ID NO: 1258753 - RNA, 19 nt, Human
gcccuuucggauccaggga

SEQ ID NO: 1258754 - RNA, 18 nt, Human
gcccuuugagugcagucc

SEQ ID NO: 1258755 - RNA, 23 nt, Human
gcccuggugguggcucgggaggc

SEQ ID NO: 1258756 - RNA, 18 nt, Human
gcccugguggcccucucc

SEQ ID NO: 1258757 - RNA, 19 nt, Human
gcccugguggcccucuccc

SEQ ID NO: 1258758 - RNA, 20 nt, Human
gcccugguggcccucucccc

SEQ ID NO: 1258759 - RNA, 13 nt, Human
gcccugguggccc

SEQ ID NO: 1258760 - RNA, 14 nt, Human
gcccugguggcccu

SEQ ID NO: 1258761 - RNA, 15 nt, Human
gcccugguggcccuc

SEQ ID NO: 1258762 - RNA, 14 nt, Human
gcccugguuuccug

SEQ ID NO: 1258763 - RNA, 15 nt, Human
gcccugguuuccugc

SEQ ID NO: 1258764 - RNA, 17 nt, Human
gcccugguuuccugccc

SEQ ID NO: 1258765 - RNA, 18 nt, Human
gcccugguuuccugcccu

SEQ ID NO: 1258766 - RNA, 19 nt, Human
gcccugguuuccugcccug

SEQ ID NO: 1258767 - RNA, 20 nt, Human
gcccugguuuccugcccugg

SEQ ID NO: 1258768 - RNA, 21 nt, Human
gcccugguuuccugcccuggg

SEQ ID NO: 1258769 - RNA, 23 nt, Human
gcccugguuuccugcccugggag

SEQ ID NO: 1258770 - RNA, 20 nt, Human
gcccugucagcaugaauuug

SEQ ID NO: 1258771 - RNA, 22 nt, Human
gcccugucagcaugaauuugua

SEQ ID NO: 1258772 - RNA, 22 nt, Human
gcccuggacugugugcucagga

SEQ ID NO: 1258773 - RNA, 16 nt, Human
gcccuggacugugugc

SEQ ID NO: 1258774 - RNA, 12 nt, Human
gcccuggacugu

SEQ ID NO: 1258775 - RNA, 22 nt, Human
gcccugcuuugggcugcccugg

SEQ ID NO: 1258776 - RNA, 23 nt, Human
gcccugcuuugggcugcccuggu

SEQ ID NO: 1258777 - RNA, 17 nt, Human
gcccuggaucagcgugg

SEQ ID NO: 1258778 - RNA, 18 nt, Human
gcccuggaucagcguggc

SEQ ID NO: 1258779 - RNA, 19 nt, Human
gcccuggaucagcguggcc

SEQ ID NO: 1258780 - RNA, 20 nt, Human
gcccuggaucagcguggccu

SEQ ID NO: 1258781 - RNA, 21 nt, Human
gcccuggaucagcguggccuu

SEQ ID NO: 1258782 - RNA, 23 nt, Human
gcccuggaucagcguggccuugu

SEQ ID NO: 1258783 - RNA, 15 nt, Human
gcccugaucccagag

SEQ ID NO: 1258784 - RNA, 13 nt, Human
gcccugaucccag

SEQ ID NO: 1258785 - RNA, 14 nt, Human
gcccugcaaaagga

SEQ ID NO: 1258786 - RNA, 18 nt, Human
gcccugcaaaaggacucu

SEQ ID NO: 1258787 - RNA, 20 nt, Human
gcccugaggccuagacucug

SEQ ID NO: 1258788 - RNA, 17 nt, Human
gcccugaggacagaugc

SEQ ID NO: 1258789 - RNA, 20 nt, Human
gcccugcuuugggcugcccu

SEQ ID NO: 1258790 - RNA, 21 nt, Human
gcccugcuuugggcugcccug

SEQ ID NO: 1258791 - RNA, 13 nt, Human
gcccugcagaccc

SEQ ID NO: 1258792 - RNA, 14 nt, Human
gcccugcagacccu

SEQ ID NO: 1258793 - RNA, 15 nt, Human
gcccugcagacccug

SEQ ID NO: 1258794 - RNA, 16 nt, Human
gcccugcagacccugc

SEQ ID NO: 1258795 - RNA, 21 nt, Human
gcccugcaaaaggacucucag

SEQ ID NO: 1258796 - RNA, 17 nt, Human
gcccugcaccaugcugc

SEQ ID NO: 1258797 - RNA, 21 nt, Human
gcccugcaccaugcugcuggg

SEQ ID NO: 1258798 - RNA, 22 nt, Human
gcccugcaccaugcugcugggg

SEQ ID NO: 1258799 - RNA, 14 nt, Human
gcccggcuccuggu

SEQ ID NO: 1258800 - RNA, 13 nt, Human
gcccggcuccugg

SEQ ID NO: 1258801 - RNA, 14 nt, Human
gcccucgcugccag

SEQ ID NO: 1258802 - RNA, 15 nt, Human
gcccucgcugccagc

SEQ ID NO: 1258803 - RNA, 17 nt, Human
gcccucgcugccagcuc

SEQ ID NO: 1258804 - RNA, 23 nt, Human
gcccucgugguggaaacuuuucu

SEQ ID NO: 1258805 - RNA, 17 nt, Human
gcccucgugguggaaac

SEQ ID NO: 1258806 - RNA, 13 nt, Human
gcccucucccacc

SEQ ID NO: 1258807 - RNA, 16 nt, Human
gcccucucccacccuc

SEQ ID NO: 1258808 - RNA, 19 nt, Human
gcccucucccacccucuuc

SEQ ID NO: 1258809 - RNA, 20 nt, Human
gcccucucccacccucuucc

SEQ ID NO: 1258810 - RNA, 17 nt, Human
gcccucuccccucagcc

SEQ ID NO: 1258811 - RNA, 20 nt, Human
gcccucuccccucagccucu

SEQ ID NO: 1258812 - RNA, 14 nt, Human
gcccucuccccugc

SEQ ID NO: 1258813 - RNA, 15 nt, Human
gcccucuccccugcc

SEQ ID NO: 1258814 - RNA, 16 nt, Human
gcccucuccccugccc

SEQ ID NO: 1258815 - RNA, 17 nt, Human
gcccucuccccugcccc

SEQ ID NO: 1258816 - RNA, 18 nt, Human
gcccucuccccugccccc

SEQ ID NO: 1258817 - RNA, 20 nt, Human
gcccucuccccugcccccug

SEQ ID NO: 1258818 - RNA, 16 nt, Human
gcccucucugcucugc

SEQ ID NO: 1258819 - RNA, 17 nt, Human
gcccucugcauccucug

SEQ ID NO: 1258820 - RNA, 18 nt, Human
gcccucugcauccucugg

SEQ ID NO: 1258821 - RNA, 19 nt, Human
gcccucugcauccucugga

SEQ ID NO: 1258822 - RNA, 20 nt, Human
gcccucugcauccucuggag

SEQ ID NO: 1258823 - RNA, 21 nt, Human
gcccucugcauccucuggagc

SEQ ID NO: 1258824 - RNA, 22 nt, Human
gcccucugcauccucuggagcc

SEQ ID NO: 1258825 - RNA, 21 nt, Human
gcccugaggacagaugccucc

SEQ ID NO: 1258826 - RNA, 23 nt, Human
gcccucuccccugcccccugcag

SEQ ID NO: 1258827 - RNA, 22 nt, Human
gcccucuccccugcccccugca

SEQ ID NO: 1258828 - RNA, 16 nt, Human
gcagacucagcucuga

SEQ ID NO: 1258829 - RNA, 13 nt, Human
gcagacucacugu

SEQ ID NO: 1258830 - RNA, 15 nt, Human
gcagacucagcucug

SEQ ID NO: 1258831 - RNA, 17 nt, Human
gcagaccuuuuuuagga

SEQ ID NO: 1258832 - RNA, 14 nt, Human
gcagacguccauca

SEQ ID NO: 1258833 - RNA, 12 nt, Human
gccccucccuuc

SEQ ID NO: 1258834 - RNA, 14 nt, Human
gccccucccuucaa

SEQ ID NO: 1258835 - RNA, 15 nt, Human
gccccucccuucaac

SEQ ID NO: 1258836 - RNA, 18 nt, Human
gccccuccucucugcccu

SEQ ID NO: 1258837 - RNA, 19 nt, Human
gccccuccucucugcccua

SEQ ID NO: 1258838 - RNA, 20 nt, Human
gccccucucccuugggcucu

SEQ ID NO: 1258839 - RNA, 21 nt, Human
gccccucucccuugggcucug

SEQ ID NO: 1258840 - RNA, 23 nt, Human
gccccucucccuugggcucugau

SEQ ID NO: 1258841 - RNA, 17 nt, Human
gccccucuccuucuuag

SEQ ID NO: 1258842 - RNA, 14 nt, Human
gccccucucaccaa

SEQ ID NO: 1258843 - RNA, 15 nt, Human
gccccucucaccaaa

SEQ ID NO: 1258844 - RNA, 13 nt, Human
gccccucucagcc

SEQ ID NO: 1258845 - RNA, 14 nt, Human
gccccucucagccc

SEQ ID NO: 1258846 - RNA, 15 nt, Human
gccccucucagcccu

SEQ ID NO: 1258847 - RNA, 16 nt, Human
gccccucucagcccuc

SEQ ID NO: 1258848 - RNA, 20 nt, Human
gccccucucagcccucacac

SEQ ID NO: 1258849 - RNA, 18 nt, Human
gccccucuccccagggaa

SEQ ID NO: 1258850 - RNA, 12 nt, Human
gccccucucccu

SEQ ID NO: 1258851 - RNA, 18 nt, Human
gcccggcuaauuuuugua

SEQ ID NO: 1258852 - RNA, 17 nt, Human
gcccggcagggcgggca

SEQ ID NO: 1258853 - RNA, 24 nt, Human
gcccgcgauguggaacugcugcca

SEQ ID NO: 1258854 - RNA, 21 nt, Human
gcccgcgauguggaacugcug

SEQ ID NO: 1258855 - RNA, 15 nt, Human
gcccggcagggcggg

SEQ ID NO: 1258856 - RNA, 12 nt, Human
gccccuuccccc

SEQ ID NO: 1258857 - RNA, 17 nt, Human
gccccuucccccuccaa

SEQ ID NO: 1258858 - RNA, 16 nt, Human
gcccgacagccuggca

SEQ ID NO: 1258859 - RNA, 17 nt, Human
gcccgacagccuggcac

SEQ ID NO: 1258860 - RNA, 19 nt, Human
gcccgacagccuggcacag

SEQ ID NO: 1258861 - RNA, 16 nt, Human
gccccuuagacagagg

SEQ ID NO: 1258862 - RNA, 22 nt, Human
gccccuuagacagaggcccuca

SEQ ID NO: 1258863 - RNA, 17 nt, Human
gccccuuagacagaggc

SEQ ID NO: 1258864 - RNA, 12 nt, Human
gcccgagcagcu

SEQ ID NO: 1258865 - RNA, 13 nt, Human
gcccgagcagcug

SEQ ID NO: 1258866 - RNA, 14 nt, Human
gcccgagcagcuga

SEQ ID NO: 1258867 - RNA, 16 nt, Human
gcccgagcagcugagc

SEQ ID NO: 1258868 - RNA, 17 nt, Human
gcccgagcagcugagca

SEQ ID NO: 1258869 - RNA, 18 nt, Human
gcccgagcagcugagcag

SEQ ID NO: 1258870 - RNA, 19 nt, Human
gcccgagcagcugagcagg

SEQ ID NO: 1258871 - RNA, 20 nt, Human
gcccgagcagcugagcaggg

SEQ ID NO: 1258872 - RNA, 22 nt, Human
gcccgagcagcugagcagggcc

SEQ ID NO: 1258873 - RNA, 23 nt, Human
gcccgagcagcugagcagggccg

SEQ ID NO: 1258874 - RNA, 17 nt, Human
gaugggguuucaccaug

SEQ ID NO: 1258875 - RNA, 19 nt, Human
gaugggaugguggagggcc

SEQ ID NO: 1258876 - RNA, 20 nt, Human
gaugggaugguggagggcca

SEQ ID NO: 1258877 - RNA, 13 nt, Human
gaugggauucugg

SEQ ID NO: 1258878 - RNA, 17 nt, Human
gaugggauucuggacag

SEQ ID NO: 1258879 - RNA, 12 nt, Human
gauggggcuccc

SEQ ID NO: 1258880 - RNA, 14 nt, Human
gauggccccagcac

SEQ ID NO: 1258881 - RNA, 15 nt, Human
gauggccccagcaca

SEQ ID NO: 1258882 - RNA, 13 nt, Human
gauggccagcccc

SEQ ID NO: 1258883 - RNA, 14 nt, Human
gauggccagccccu

SEQ ID NO: 1258884 - RNA, 19 nt, Human
gauggccagccccuuagac

SEQ ID NO: 1258885 - RNA, 14 nt, Human
gauggcccauccug

SEQ ID NO: 1258886 - RNA, 12 nt, Human
gauggccccagc

SEQ ID NO: 1258887 - RNA, 18 nt, Human
gauggccggagaggaccg

SEQ ID NO: 1258888 - RNA, 20 nt, Human
gaugggagggaggcucaggu

SEQ ID NO: 1258889 - RNA, 22 nt, Human
gaugccagccaagcucugcagu

SEQ ID NO: 1258890 - RNA, 13 nt, Human
gaucagaacaaau

SEQ ID NO: 1258891 - RNA, 16 nt, Human
gaucagaccauaaugu

SEQ ID NO: 1258892 - RNA, 16 nt, Human
gaucagagccgugguc

SEQ ID NO: 1258893 - RNA, 23 nt, Human
gaucagagccgugguccuuuggg

SEQ ID NO: 1258894 - RNA, 18 nt, Human
gaugccagccaagcucug

SEQ ID NO: 1258895 - RNA, 17 nt, Human
gaugcccaaauccuuag

SEQ ID NO: 1258896 - RNA, 11 nt, Human
gaugcccagag

SEQ ID NO: 1258897 - RNA, 22 nt, Human
gaugcuagaacucccuuucaac

SEQ ID NO: 1258898 - RNA, 20 nt, Human
gaugcuagaacucccuuuca

SEQ ID NO: 1258899 - RNA, 16 nt, Human
gaugccccgucccccu

SEQ ID NO: 1258900 - RNA, 18 nt, Human
gaugcuagaacucccuuu

SEQ ID NO: 1258901 - RNA, 21 nt, Human
gaugccccgucccccucuggc

SEQ ID NO: 1258902 - RNA, 23 nt, Human
gaugcccccuaauccccuucucc

SEQ ID NO: 1258903 - RNA, 13 nt, Human
gaugcuccuuggg

SEQ ID NO: 1258904 - RNA, 14 nt, Human
gaugcuccuugggc

SEQ ID NO: 1258905 - RNA, 16 nt, Human
gaugcuccuugggccc

SEQ ID NO: 1258906 - RNA, 21 nt, Human
gaugcuccuugggcccuuuga

SEQ ID NO: 1258907 - RNA, 17 nt, Human
gaugcugacuguacucc

SEQ ID NO: 1258908 - RNA, 20 nt, Human
gaugcugacuguacuccucc

SEQ ID NO: 1258909 - RNA, 17 nt, Human
gaugcugaaaauguccu

SEQ ID NO: 1258910 - RNA, 20 nt, Human
gaugcugacauucaccugcc

SEQ ID NO: 1258911 - RNA, 21 nt, Human
gaugcugacauucaccugccc

SEQ ID NO: 1258912 - RNA, 22 nt, Human
gaugguucccuugaugaagaag

SEQ ID NO: 1258913 - RNA, 13 nt, Human
gaugguuccccug

SEQ ID NO: 1258914 - RNA, 18 nt, Human
gaugguuccccuguucac

SEQ ID NO: 1258915 - RNA, 21 nt, Human
gaugguuccccuguucacucu

SEQ ID NO: 1258916 - RNA, 17 nt, Human
gauguuacuccaaaacu

SEQ ID NO: 1258917 - RNA, 14 nt, Human
gauguggugaaaag

SEQ ID NO: 1258918 - RNA, 16 nt, Human
gauguggguuccacag

SEQ ID NO: 1258919 - RNA, 18 nt, Human
gauguggguuccacagac

SEQ ID NO: 1258920 - RNA, 16 nt, Human
gauguggucacagcug

SEQ ID NO: 1258921 - RNA, 17 nt, Human
gauguggucacagcugu

SEQ ID NO: 1258922 - RNA, 18 nt, Human
gauguggucacagcugua

SEQ ID NO: 1258923 - RNA, 17 nt, Human
gaugguaguuuuuucau

SEQ ID NO: 1258924 - RNA, 16 nt, Human
gauggucuuacagcag

SEQ ID NO: 1258925 - RNA, 17 nt, Human
gauggucuuacagcagg

SEQ ID NO: 1258926 - RNA, 21 nt, Human
gauggucuuacagcaggcagu

SEQ ID NO: 1258927 - RNA, 16 nt, Human
gauguuuaguaaucau

SEQ ID NO: 1258928 - RNA, 14 nt, Human
gauguuuauucuuc

SEQ ID NO: 1258929 - RNA, 18 nt, Human
gauguuuauucuucuaga

SEQ ID NO: 1258930 - RNA, 17 nt, Human
gauguucagcacugucc

SEQ ID NO: 1258931 - RNA, 19 nt, Human
gauguucagcacugucccu

SEQ ID NO: 1258932 - RNA, 20 nt, Human
gauguucagcacugucccuu

SEQ ID NO: 1258933 - RNA, 22 nt, Human
gauguucagcacugucccuugc

SEQ ID NO: 1258934 - RNA, 12 nt, Human
gauguucuaagg

SEQ ID NO: 1258935 - RNA, 14 nt, Human
gauuacacacguga

SEQ ID NO: 1258936 - RNA, 16 nt, Human
gauuaaauaagauucu

SEQ ID NO: 1258937 - RNA, 17 nt, Human
gauuaaauaagauucua

SEQ ID NO: 1258938 - RNA, 20 nt, Human
gauuacaggcgugagccacc

SEQ ID NO: 1258939 - RNA, 17 nt, Human
gauuacaggcuccugcc

SEQ ID NO: 1258940 - RNA, 18 nt, Human
gauuaaauaagauucuaa

SEQ ID NO: 1258941 - RNA, 20 nt, Human
gauuacaggcaugagccacu

SEQ ID NO: 1258942 - RNA, 14 nt, Human
gauuacaggcguga

SEQ ID NO: 1258943 - RNA, 20 nt, Human
gauuaaagaugagcuuuguc

SEQ ID NO: 1258944 - RNA, 21 nt, Human
gauucaaugccccugaauuua

SEQ ID NO: 1258945 - RNA, 16 nt, Human
gauucaauuugaugug

SEQ ID NO: 1258946 - RNA, 15 nt, Human
gauucuauuuauaug

SEQ ID NO: 1258947 - RNA, 20 nt, Human
gauucuauuuauauguacau

SEQ ID NO: 1258948 - RNA, 21 nt, Human
gauucuauuuauauguacaug

SEQ ID NO: 1258949 - RNA, 18 nt, Human
gauucucaaaggagcgag

SEQ ID NO: 1258950 - RNA, 13 nt, Human
gauucucauaacu

SEQ ID NO: 1258951 - RNA, 19 nt, Human
gauucaaugccccugaauu

SEQ ID NO: 1258952 - RNA, 20 nt, Human
gauucaaugccccugaauuu

SEQ ID NO: 1258953 - RNA, 20 nt, Human
gauucaaucuguaaacugug

SEQ ID NO: 1258954 - RNA, 21 nt, Human
gauucaaucuguaaacugugu

SEQ ID NO: 1258955 - RNA, 22 nt, Human
gauucaaucuguaaacugugua

SEQ ID NO: 1258956 - RNA, 18 nt, Human
gauuacaggcuccugcca

SEQ ID NO: 1258957 - RNA, 21 nt, Human
gauuacaggcuccugccacca

SEQ ID NO: 1258958 - RNA, 16 nt, Human
gauucucaugccucag

SEQ ID NO: 1258959 - RNA, 17 nt, Human
gauugagcucucugccc

SEQ ID NO: 1258960 - RNA, 16 nt, Human
gauugagucugugcca

SEQ ID NO: 1258961 - RNA, 19 nt, Human
gauugauagaguguuauca

SEQ ID NO: 1258962 - RNA, 15 nt, Human
gauugauuugaagaa

SEQ ID NO: 1258963 - RNA, 17 nt, Human
gauugauuugaagaaca

SEQ ID NO: 1258964 - RNA, 13 nt, Human
gauugcgagagau

SEQ ID NO: 1258965 - RNA, 14 nt, Human
gauugcgagagaug

SEQ ID NO: 1258966 - RNA, 15 nt, Human
gauugcgagagaugu

SEQ ID NO: 1258967 - RNA, 16 nt, Human
gauugcgagagaugug

SEQ ID NO: 1258968 - RNA, 17 nt, Human
gauugcgagagaugugu

SEQ ID NO: 1258969 - RNA, 18 nt, Human
gauugcgagagaugugug

SEQ ID NO: 1258970 - RNA, 19 nt, Human
gauugcgagagaugugugu

SEQ ID NO: 1258971 - RNA, 20 nt, Human
gauugcgagagauguguguu

SEQ ID NO: 1258972 - RNA, 13 nt, Human
gauuuccuaauac

SEQ ID NO: 1258973 - RNA, 22 nt, Human
gauuuccugcuuugggaagccg

SEQ ID NO: 1258974 - RNA, 12 nt, Human
gauuuccuucuu

SEQ ID NO: 1258975 - RNA, 13 nt, Human
gauuuccuugaau

SEQ ID NO: 1258976 - RNA, 17 nt, Human
gauuuccuugaaugugg

SEQ ID NO: 1258977 - RNA, 22 nt, Human
gauuuccuugaauguggcuuga

SEQ ID NO: 1258978 - RNA, 16 nt, Human
gauuugagcucagccc

SEQ ID NO: 1258979 - RNA, 18 nt, Human
gauuucuagguaggaaau

SEQ ID NO: 1258980 - RNA, 19 nt, Human
gauuugaagaacaugugag

SEQ ID NO: 1258981 - RNA, 20 nt, Human
gauuugaagaacaugugaga

SEQ ID NO: 1258982 - RNA, 13 nt, Human
gauuugacauugc

SEQ ID NO: 1258983 - RNA, 22 nt, Human
gauuggggaagagagccugcag

SEQ ID NO: 1258984 - RNA, 22 nt, Human
gauugcgagagauguguguuga

SEQ ID NO: 1258985 - RNA, 21 nt, Human
gauugcgagagauguguguug

SEQ ID NO: 1258986 - RNA, 21 nt, Human
gauuggguuuuuggacuucug

SEQ ID NO: 1258987 - RNA, 20 nt, Human
gauugguguuuuuuucuaug

SEQ ID NO: 1258988 - RNA, 17 nt, Human
gauugguguuuuuuucu

SEQ ID NO: 1258989 - RNA, 13 nt, Human
gcaacaauaaaua

SEQ ID NO: 1258990 - RNA, 20 nt, Human
gcaacaagguccucugucag

SEQ ID NO: 1258991 - RNA, 14 nt, Human
gcaacaauuuauga

SEQ ID NO: 1258992 - RNA, 15 nt, Human
gcaaauuggagaaaa

SEQ ID NO: 1258993 - RNA, 19 nt, Human
gcaaauuugcauuaaauua

SEQ ID NO: 1258994 - RNA, 14 nt, Human
gcaaauuggagaaa

SEQ ID NO: 1258995 - RNA, 16 nt, Human
gcaaauugucacagga

SEQ ID NO: 1258996 - RNA, 15 nt, Human
gcaaauguggcuccu

SEQ ID NO: 1258997 - RNA, 16 nt, Human
gcaaagauaucucauc

SEQ ID NO: 1258998 - RNA, 19 nt, Human
gcaaagaucuguccucagc

SEQ ID NO: 1258999 - RNA, 20 nt, Human
gcaaagaucuguccucagcc

SEQ ID NO: 1259000 - RNA, 21 nt, Human
gcaaagaucuguccucagccu

SEQ ID NO: 1259001 - RNA, 22 nt, Human
gcaaagaucuguccucagccuu

SEQ ID NO: 1259002 - RNA, 16 nt, Human
gcaaagauuuaaucug

SEQ ID NO: 1259003 - RNA, 12 nt, Human
gcaaagcacaga

SEQ ID NO: 1259004 - RNA, 14 nt, Human
gcaaagcacagaga

SEQ ID NO: 1259005 - RNA, 13 nt, Human
gcaaagcacagag

SEQ ID NO: 1259006 - RNA, 21 nt, Human
gcaaagccuguucauggcaga

SEQ ID NO: 1259007 - RNA, 15 nt, Human
gcaaaggaaggugga

SEQ ID NO: 1259008 - RNA, 20 nt, Human
gcaaaggaagguggauggcc

SEQ ID NO: 1259009 - RNA, 21 nt, Human
gauuuuaggagcuaaggcucu

SEQ ID NO: 1259010 - RNA, 15 nt, Human
gauuuucuuuugccu

SEQ ID NO: 1259011 - RNA, 21 nt, Human
gauuuugaaaccaugaagaga

SEQ ID NO: 1259012 - RNA, 21 nt, Human
gauuuugaaaucaugaagaua

SEQ ID NO: 1259013 - RNA, 15 nt, Human
gauuugcauugaaca

SEQ ID NO: 1259014 - RNA, 17 nt, Human
gauuugcauugaacaca

SEQ ID NO: 1259015 - RNA, 21 nt, Human
gauuuuaaguuucucugcaga

SEQ ID NO: 1259016 - RNA, 20 nt, Human
gauuuuacaugaaguauuuu

SEQ ID NO: 1259017 - RNA, 12 nt, Human
gauuuuacauga

SEQ ID NO: 1259018 - RNA, 13 nt, Human
gauuuuacaugaa

SEQ ID NO: 1259019 - RNA, 16 nt, Human
gauuuuacaugaagua

SEQ ID NO: 1259020 - RNA, 19 nt, Human
gauuuuaggagcuaaggcu

SEQ ID NO: 1259021 - RNA, 13 nt, Human
gauuuuuaaaaug

SEQ ID NO: 1259022 - RNA, 16 nt, Human
gauuuuuaaaauguac

SEQ ID NO: 1259023 - RNA, 14 nt, Human
gauuuuuacacaug

SEQ ID NO: 1259024 - RNA, 23 nt, Human
gauuuugaaccugaugaaaauaa

SEQ ID NO: 1259025 - RNA, 17 nt, Human
gauuuucuuuugccuuu

SEQ ID NO: 1259026 - RNA, 20 nt, Human
gauuuugcaguucuuuggcu

SEQ ID NO: 1259027 - RNA, 22 nt, Human
gauuuugggagugacucaagaa

SEQ ID NO: 1259028 - RNA, 14 nt, Human
gcacuggccccacc

SEQ ID NO: 1259029 - RNA, 15 nt, Human
gcacuggggcagggg

SEQ ID NO: 1259030 - RNA, 18 nt, Human
gcacuggggcaggggccg

SEQ ID NO: 1259031 - RNA, 23 nt, Human
gcacuggggcaggggccgggggc

SEQ ID NO: 1259032 - RNA, 14 nt, Human
gcacugguggcccg

SEQ ID NO: 1259033 - RNA, 19 nt, Human
gcacugguggcccgacagc

SEQ ID NO: 1259034 - RNA, 16 nt, Human
gcacugcuugaggaaa

SEQ ID NO: 1259035 - RNA, 17 nt, Human
gcacugcuugaggaaaa

SEQ ID NO: 1259036 - RNA, 14 nt, Human
gcacugcugcccag

SEQ ID NO: 1259037 - RNA, 15 nt, Human
gcacugcugcccagc

SEQ ID NO: 1259038 - RNA, 18 nt, Human
gcacugcugcccagccuc

SEQ ID NO: 1259039 - RNA, 20 nt, Human
gcacugcugcccagccucca

SEQ ID NO: 1259040 - RNA, 21 nt, Human
gcacugagauaccagcgagga

SEQ ID NO: 1259041 - RNA, 16 nt, Human
gcagaaggaaggcagg

SEQ ID NO: 1259042 - RNA, 22 nt, Human
gcagaaggaaggcagggaggag

SEQ ID NO: 1259043 - RNA, 15 nt, Human
gcagaaggaaggcag

SEQ ID NO: 1259044 - RNA, 13 nt, Human
gcagaaggaaggc

SEQ ID NO: 1259045 - RNA, 12 nt, Human
gcagaaggaagg

SEQ ID NO: 1259046 - RNA, 23 nt, Human
gcagaagggggucucuucuucca

SEQ ID NO: 1259047 - RNA, 16 nt, Human
gcagaaguguuuuuua

SEQ ID NO: 1259048 - RNA, 19 nt, Human
gcacuguggguagacacac

SEQ ID NO: 1259049 - RNA, 19 nt, Human
gcacugugacccccagcuc

SEQ ID NO: 1259050 - RNA, 16 nt, Human
gcacugucuuaaggca

SEQ ID NO: 1259051 - RNA, 11 nt, Human
gcacugugaag

SEQ ID NO: 1259052 - RNA, 14 nt, Human
gcacugugaaggac

SEQ ID NO: 1259053 - RNA, 16 nt, Human
gcacugugaaggaccc

SEQ ID NO: 1259054 - RNA, 17 nt, Human
gcacugugaaggacccu

SEQ ID NO: 1259055 - RNA, 18 nt, Human
gcacugugaaggacccuu

SEQ ID NO: 1259056 - RNA, 15 nt, Human
gcagacaccuuggac

SEQ ID NO: 1259057 - RNA, 12 nt, Human
gcagacagagcc

SEQ ID NO: 1259058 - RNA, 13 nt, Human
gcagacagagcca

SEQ ID NO: 1259059 - RNA, 14 nt, Human
gcagacagagccag

SEQ ID NO: 1259060 - RNA, 15 nt, Human
gcagacagagccagg

SEQ ID NO: 1259061 - RNA, 16 nt, Human
gcagacagagccagga

SEQ ID NO: 1259062 - RNA, 17 nt, Human
gcagacagagccaggag

SEQ ID NO: 1259063 - RNA, 18 nt, Human
gcagacagagccaggaga

SEQ ID NO: 1259064 - RNA, 21 nt, Human
gcagacagagccaggagaagc

SEQ ID NO: 1259065 - RNA, 22 nt, Human
gcagacagagccaggagaagcu

SEQ ID NO: 1259066 - RNA, 23 nt, Human
gcagacagagccaggagaagcuc

SEQ ID NO: 1259067 - RNA, 22 nt, Human
gcaccccagcuggggccaggcu

SEQ ID NO: 1259068 - RNA, 12 nt, Human
gcacccccagcc

SEQ ID NO: 1259069 - RNA, 13 nt, Human
gcacccccagccu

SEQ ID NO: 1259070 - RNA, 14 nt, Human
gcacccccagccug

SEQ ID NO: 1259071 - RNA, 15 nt, Human
gcacccccagccugg

SEQ ID NO: 1259072 - RNA, 16 nt, Human
gcacccccagccuggg

SEQ ID NO: 1259073 - RNA, 17 nt, Human
gcacccccagccugggc

SEQ ID NO: 1259074 - RNA, 18 nt, Human
gcacccccagccugggcc

SEQ ID NO: 1259075 - RNA, 19 nt, Human
gcacccccagccugggccu

SEQ ID NO: 1259076 - RNA, 20 nt, Human
gcacccccagccugggccua

SEQ ID NO: 1259077 - RNA, 21 nt, Human
gcacccccagccugggccuau

SEQ ID NO: 1259078 - RNA, 14 nt, Human
gcaccccccaagcu

SEQ ID NO: 1259079 - RNA, 23 nt, Human
gcacccccagccugggccuaugg

SEQ ID NO: 1259080 - RNA, 16 nt, Human
gcacccccgucaagag

SEQ ID NO: 1259081 - RNA, 19 nt, Human
gcaccugggcccuggggcc

SEQ ID NO: 1259082 - RNA, 20 nt, Human
gcaccugggcccuggggccu

SEQ ID NO: 1259083 - RNA, 23 nt, Human
gcaccugggcccuggggccugua

SEQ ID NO: 1259084 - RNA, 22 nt, Human
gcaccugggcccuggggccugu

SEQ ID NO: 1259085 - RNA, 22 nt, Human
gcaccugguggccaugcuccuc

SEQ ID NO: 1259086 - RNA, 18 nt, Human
gcaccuguaaugugcgag

SEQ ID NO: 1259087 - RNA, 15 nt, Human
gcaccugucccagaa

SEQ ID NO: 1259088 - RNA, 19 nt, Human
gcaccugucccagaaaaag

SEQ ID NO: 1259089 - RNA, 22 nt, Human
gcaccugucccagaaaaagcau

SEQ ID NO: 1259090 - RNA, 15 nt, Human
gcacagauggauuug

SEQ ID NO: 1259091 - RNA, 15 nt, Human
gcacaguauuuguaa

SEQ ID NO: 1259092 - RNA, 16 nt, Human
gcacagucacugcucu

SEQ ID NO: 1259093 - RNA, 16 nt, Human
gcacagugacuucuga

SEQ ID NO: 1259094 - RNA, 13 nt, Human
gcacagugcaucu

SEQ ID NO: 1259095 - RNA, 17 nt, Human
gcacagugacuucugag

SEQ ID NO: 1259096 - RNA, 18 nt, Human
gcacagugacuucugaga

SEQ ID NO: 1259097 - RNA, 19 nt, Human
gcacagugacuucugagau

SEQ ID NO: 1259098 - RNA, 15 nt, Human
gcacagugcaucuca

SEQ ID NO: 1259099 - RNA, 18 nt, Human
gcacagugcaucucagcc

SEQ ID NO: 1259100 - RNA, 19 nt, Human
gcacagugcaucucagccc

SEQ ID NO: 1259101 - RNA, 12 nt, Human
gcacauguuucc

SEQ ID NO: 1259102 - RNA, 22 nt, Human
gcaccaguugcugcuucaauuu

SEQ ID NO: 1259103 - RNA, 19 nt, Human
gcaccagggguuucucgca

SEQ ID NO: 1259104 - RNA, 23 nt, Human
gcaccaggguugaccccagagga

SEQ ID NO: 1259105 - RNA, 18 nt, Human
gcaccaggaagccguccu

SEQ ID NO: 1259106 - RNA, 16 nt, Human
gcaccagggguuucuc

SEQ ID NO: 1259107 - RNA, 18 nt, Human
gcaccagggguuucucgc

SEQ ID NO: 1259108 - RNA, 14 nt, Human
gcaccaaaagaagu

SEQ ID NO: 1259109 - RNA, 15 nt, Human
gcaccaaaagaagua

SEQ ID NO: 1259110 - RNA, 16 nt, Human
gcaccaaaagaaguaa

SEQ ID NO: 1259111 - RNA, 18 nt, Human
gcaccaaaagaaguaaaa

SEQ ID NO: 1259112 - RNA, 13 nt, Human
gcaacucugaagg

SEQ ID NO: 1259113 - RNA, 19 nt, Human
gcaaugggagcugaggcca

SEQ ID NO: 1259114 - RNA, 20 nt, Human
gcaaugggagcugaggccac

SEQ ID NO: 1259115 - RNA, 13 nt, Human
gcaauguaaauau

SEQ ID NO: 1259116 - RNA, 15 nt, Human
gcaauguaaauauuu

SEQ ID NO: 1259117 - RNA, 18 nt, Human
gcaauguaaauauuuuaa

SEQ ID NO: 1259118 - RNA, 19 nt, Human
gcaauguaaauauuuuaaa

SEQ ID NO: 1259119 - RNA, 17 nt, Human
gcaacgcuauuccagcu

SEQ ID NO: 1259120 - RNA, 19 nt, Human
gcaacuaucagacuaagcc

SEQ ID NO: 1259121 - RNA, 22 nt, Human
gcaacuaucagacuaagccagc

SEQ ID NO: 1259122 - RNA, 23 nt, Human
gcaacuaucagacuaagccagca

SEQ ID NO: 1259123 - RNA, 13 nt, Human
gcaacuauucaca

SEQ ID NO: 1259124 - RNA, 22 nt, Human
gcaacucaaggacuuugcagcc

SEQ ID NO: 1259125 - RNA, 18 nt, Human
gcaacgcuauuccagcug

SEQ ID NO: 1259126 - RNA, 19 nt, Human
gcaauuaauuccuucagca

SEQ ID NO: 1259127 - RNA, 16 nt, Human
gcaauucaaaaguucc

SEQ ID NO: 1259128 - RNA, 22 nt, Human
gcaauucaaaaguuccaagagu

SEQ ID NO: 1259129 - RNA, 14 nt, Human
gcaauuccccucug

SEQ ID NO: 1259130 - RNA, 18 nt, Human
gcaauuccccucugcugc

SEQ ID NO: 1259131 - RNA, 21 nt, Human
gcaauuccccucugcugcugu

SEQ ID NO: 1259132 - RNA, 20 nt, Human
gcaauuacaacggagucaaa

SEQ ID NO: 1259133 - RNA, 16 nt, Human
gcaauuaauuccuuca

SEQ ID NO: 1259134 - RNA, 19 nt, Human
gcaauguguguauauggac

SEQ ID NO: 1259135 - RNA, 20 nt, Human
gcaauguguguauauggaca

SEQ ID NO: 1259136 - RNA, 20 nt, Human
gcaauguuaauuuaguggaa

SEQ ID NO: 1259137 - RNA, 23 nt, Human
gcaauguaaauauuuuaaagaau

SEQ ID NO: 1259138 - RNA, 16 nt, Human
gcaauguguauaaaca

SEQ ID NO: 1259139 - RNA, 17 nt, Human
gcaauguguauaaacaa

SEQ ID NO: 1259140 - RNA, 20 nt, Human
gcaauguguauaaacaagaa

SEQ ID NO: 1259141 - RNA, 23 nt, Human
gcaauguguauaaacaagaaaaa

SEQ ID NO: 1259142 - RNA, 14 nt, Human
gcaauguguguaua

SEQ ID NO: 1259143 - RNA, 16 nt, Human
gcaauguguguauaug

SEQ ID NO: 1259144 - RNA, 18 nt, Human
gcaauguguguauaugga

SEQ ID NO: 1259145 - RNA, 18 nt, Human
gcaauuuaaauguuauga

SEQ ID NO: 1259146 - RNA, 12 nt, Human
gcaauugucuga

SEQ ID NO: 1259147 - RNA, 13 nt, Human
gcaauuuaaaugu

SEQ ID NO: 1259148 - RNA, 23 nt, Human
gcaauuggcaccgaagcccagag

SEQ ID NO: 1259149 - RNA, 12 nt, Human
gcaauugccuuu

SEQ ID NO: 1259150 - RNA, 13 nt, Human
gcaauugccuuuu

SEQ ID NO: 1259151 - RNA, 13 nt, Human
gcaauuucaaggu

SEQ ID NO: 1259152 - RNA, 18 nt, Human
gcaauuucaagguucuaa

SEQ ID NO: 1259153 - RNA, 18 nt, Human
gcaauuuccuuuuuuguu

SEQ ID NO: 1259154 - RNA, 17 nt, Human
gcaauuucuaauuuuua

SEQ ID NO: 1259155 - RNA, 22 nt, Human
gcaauuucuaauuuuuaagaau

SEQ ID NO: 1259156 - RNA, 19 nt, Human
gcaauuucuaauuuuuaag

SEQ ID NO: 1259157 - RNA, 14 nt, Human
gcaauucuccugcc

SEQ ID NO: 1259158 - RNA, 15 nt, Human
gcaauucuccugccu

SEQ ID NO: 1259159 - RNA, 16 nt, Human
gcaauucuccugccuc

SEQ ID NO: 1259160 - RNA, 17 nt, Human
gcaauucuccugccuca

SEQ ID NO: 1259161 - RNA, 18 nt, Human
gcaauucuccugccucag

SEQ ID NO: 1259162 - RNA, 19 nt, Human
gcaauucuccugccucagc

SEQ ID NO: 1259163 - RNA, 20 nt, Human
gcaauucuccugccucagcc

SEQ ID NO: 1259164 - RNA, 16 nt, Human
gcaauuuuuauauuaa

SEQ ID NO: 1259165 - RNA, 14 nt, Human
gcaauuuugugguu

SEQ ID NO: 1259166 - RNA, 13 nt, Human
gcacaaaacccag

SEQ ID NO: 1259167 - RNA, 23 nt, Human
gcacaaaacccagaccuguuagc

SEQ ID NO: 1259168 - RNA, 14 nt, Human
gcaauuuuguaacg

SEQ ID NO: 1259169 - RNA, 12 nt, Human
gcaauuuugugg

SEQ ID NO: 1259170 - RNA, 17 nt, Human
gcacaaagacccuggcu

SEQ ID NO: 1259171 - RNA, 18 nt, Human
gcacaaagacccuggcuu

SEQ ID NO: 1259172 - RNA, 13 nt, Human
gcacaaauauuua

SEQ ID NO: 1259173 - RNA, 23 nt, Human
gcacaaauucugucucuggauua

SEQ ID NO: 1259174 - RNA, 14 nt, Human
gcacaaauauuuau

SEQ ID NO: 1259175 - RNA, 15 nt, Human
gcacaaauauuuauu

SEQ ID NO: 1259176 - RNA, 16 nt, Human
gcacaaauauuuauuu

SEQ ID NO: 1259177 - RNA, 19 nt, Human
gcacaaauuaguuauauau

SEQ ID NO: 1259178 - RNA, 14 nt, Human
gcacaagaauggau

SEQ ID NO: 1259179 - RNA, 15 nt, Human
gcacaagaauggauc

SEQ ID NO: 1259180 - RNA, 16 nt, Human
gcacaagaauggauca

SEQ ID NO: 1259181 - RNA, 20 nt, Human
gcacaagacugacgccaggg

SEQ ID NO: 1259182 - RNA, 12 nt, Human
gcacaagacuga

SEQ ID NO: 1259183 - RNA, 19 nt, Human
gcacaagacugacgccagg

SEQ ID NO: 1259184 - RNA, 22 nt, Human
gcacacuuugccauauuuucac

SEQ ID NO: 1259185 - RNA, 21 nt, Human
gcacacuuugguaccagauaa

SEQ ID NO: 1259186 - RNA, 20 nt, Human
gcacacuuugcacugauaua

SEQ ID NO: 1259187 - RNA, 13 nt, Human
gcacacuuugcca

SEQ ID NO: 1259188 - RNA, 14 nt, Human
gcacacuuugccau

SEQ ID NO: 1259189 - RNA, 16 nt, Human
gcacagagagucugga

SEQ ID NO: 1259190 - RNA, 12 nt, Human
gaguuaagaccu

SEQ ID NO: 1259191 - RNA, 13 nt, Human
gaguuaagaccug

SEQ ID NO: 1259192 - RNA, 14 nt, Human
gaguuaagaccugg

SEQ ID NO: 1259193 - RNA, 18 nt, Human
gagugugcggcugugugu

SEQ ID NO: 1259194 - RNA, 23 nt, Human
gagugugcgugguggucccuggg

SEQ ID NO: 1259195 - RNA, 15 nt, Human
gaguguggacucugg

SEQ ID NO: 1259196 - RNA, 15 nt, Human
gagugaauucccuca

SEQ ID NO: 1259197 - RNA, 16 nt, Human
gagugaauucccucac

SEQ ID NO: 1259198 - RNA, 18 nt, Human
gagugaauucccucacuc

SEQ ID NO: 1259199 - RNA, 21 nt, Human
gagugggguuaucucuguguu

SEQ ID NO: 1259200 - RNA, 13 nt, Human
gaguggggguggg

SEQ ID NO: 1259201 - RNA, 14 nt, Human
gaguggguggggag

SEQ ID NO: 1259202 - RNA, 15 nt, Human
gaguggguggggagu

SEQ ID NO: 1259203 - RNA, 21 nt, Human
gagugguuuaggcuauuugua

SEQ ID NO: 1259204 - RNA, 13 nt, Human
gaguguacaagua

SEQ ID NO: 1259205 - RNA, 18 nt, Human
gaguguagcaacuacagu

SEQ ID NO: 1259206 - RNA, 19 nt, Human
gaguguccucuucccucuc

SEQ ID NO: 1259207 - RNA, 15 nt, Human
gauaaaugauagaca

SEQ ID NO: 1259208 - RNA, 14 nt, Human
gauaaaucauuuua

SEQ ID NO: 1259209 - RNA, 13 nt, Human
gauaaaucauuuu

SEQ ID NO: 1259210 - RNA, 12 nt, Human
gaguugaggcca

SEQ ID NO: 1259211 - RNA, 20 nt, Human
gauaaaucauuuuaugucaa

SEQ ID NO: 1259212 - RNA, 22 nt, Human
gauaaauggcuuccuggcaaua

SEQ ID NO: 1259213 - RNA, 17 nt, Human
gaguuaagaccuggcag

SEQ ID NO: 1259214 - RNA, 21 nt, Human
gaguuaagaccuggcagcucu

SEQ ID NO: 1259215 - RNA, 13 nt, Human
gaguuacaguucu

SEQ ID NO: 1259216 - RNA, 14 nt, Human
gaguuacaguucug

SEQ ID NO: 1259217 - RNA, 15 nt, Human
gaguuacaguucugu

SEQ ID NO: 1259218 - RNA, 16 nt, Human
gaguuacaguucugug

SEQ ID NO: 1259219 - RNA, 17 nt, Human
gaguuacaguucugugg

SEQ ID NO: 1259220 - RNA, 17 nt, Human
gauauaaguguguguuu

SEQ ID NO: 1259221 - RNA, 20 nt, Human
gauaucuuggacaaaucaca

SEQ ID NO: 1259222 - RNA, 15 nt, Human
gauaugaaagcugau

SEQ ID NO: 1259223 - RNA, 15 nt, Human
gauauaagugugugu

SEQ ID NO: 1259224 - RNA, 14 nt, Human
gauaugauucaaau

SEQ ID NO: 1259225 - RNA, 22 nt, Human
gauaugauucaaaugucuauaa

SEQ ID NO: 1259226 - RNA, 24 nt, Human
gauaugauucaaaugucuauaaac

SEQ ID NO: 1259227 - RNA, 21 nt, Human
gaucaauuauaguuucugagg

SEQ ID NO: 1259228 - RNA, 13 nt, Human
gaucacaaaaaca

SEQ ID NO: 1259229 - RNA, 12 nt, Human
gaucacaagaug

SEQ ID NO: 1259230 - RNA, 13 nt, Human
gaucacaagaugg

SEQ ID NO: 1259231 - RNA, 14 nt, Human
gaucacaagaugga

SEQ ID NO: 1259232 - RNA, 17 nt, Human
gaucacaagauggaauu

SEQ ID NO: 1259233 - RNA, 22 nt, Human
gaucacuuucucaguuuucaua

SEQ ID NO: 1259234 - RNA, 15 nt, Human
gauagcccuguccug

SEQ ID NO: 1259235 - RNA, 16 nt, Human
gauagcccuguccugg

SEQ ID NO: 1259236 - RNA, 21 nt, Human
gauagcccuguccugguggua

SEQ ID NO: 1259237 - RNA, 17 nt, Human
gauagcccuguccuggu

SEQ ID NO: 1259238 - RNA, 13 nt, Human
gauagcugugacu

SEQ ID NO: 1259239 - RNA, 20 nt, Human
gauaacugaaaauuauuuaa

SEQ ID NO: 1259240 - RNA, 21 nt, Human
gauaacugaaaauuauuuaaa

SEQ ID NO: 1259241 - RNA, 22 nt, Human
gauagauuuucugcuacuuugc

SEQ ID NO: 1259242 - RNA, 21 nt, Human
gagucuauuuacggaacucaa

SEQ ID NO: 1259243 - RNA, 15 nt, Human
gagucuaucaaucaa

SEQ ID NO: 1259244 - RNA, 13 nt, Human
gagucuagauuca

SEQ ID NO: 1259245 - RNA, 17 nt, Human
gagucuagauucaaagg

SEQ ID NO: 1259246 - RNA, 21 nt, Human
gagucuagauucaaagguucu

SEQ ID NO: 1259247 - RNA, 22 nt, Human
gagucuagauucaaagguucua

SEQ ID NO: 1259248 - RNA, 23 nt, Human
gagucuagauucaaagguucuag

SEQ ID NO: 1259249 - RNA, 13 nt, Human
gagucuagauucu

SEQ ID NO: 1259250 - RNA, 14 nt, Human
gagucuagauucuc

SEQ ID NO: 1259251 - RNA, 23 nt, Human
gagucuggugaagcucacuucug

SEQ ID NO: 1259252 - RNA, 20 nt, Human
gagucuugcucugucgccca

SEQ ID NO: 1259253 - RNA, 14 nt, Human
gagucuuugguucu

SEQ ID NO: 1259254 - RNA, 15 nt, Human
gagucuuugguucua

SEQ ID NO: 1259255 - RNA, 16 nt, Human
gagucuuugguucuaa

SEQ ID NO: 1259256 - RNA, 17 nt, Human
gagucuuugguucuaag

SEQ ID NO: 1259257 - RNA, 18 nt, Human
gagucuuugguucuaagg

SEQ ID NO: 1259258 - RNA, 22 nt, Human
gagucuuugguucuaaggaccu

SEQ ID NO: 1259259 - RNA, 14 nt, Human
gagugaauaaaugu

SEQ ID NO: 1259260 - RNA, 15 nt, Human
gagugaauaaauguc

SEQ ID NO: 1259261 - RNA, 19 nt, Human
gaguccuggaugauacuaa

SEQ ID NO: 1259262 - RNA, 14 nt, Human
gaguccuuaaaaug

SEQ ID NO: 1259263 - RNA, 22 nt, Human
gagucguggggugugcugggag

SEQ ID NO: 1259264 - RNA, 11 nt, Human
gagucuaaaga

SEQ ID NO: 1259265 - RNA, 12 nt, Human
gagucuaaagau

SEQ ID NO: 1259266 - RNA, 13 nt, Human
gagucuaaagaug

SEQ ID NO: 1259267 - RNA, 21 nt, Human
gagucuaaagauggaguuucu

SEQ ID NO: 1259268 - RNA, 22 nt, Human
gagucuaaagauggaguuucua

SEQ ID NO: 1259269 - RNA, 11 nt, Human
gagucuagaug

SEQ ID NO: 1259270 - RNA, 16 nt, Human
gagucuagauguuuau

SEQ ID NO: 1259271 - RNA, 11 nt, Human
gagucuagauu

SEQ ID NO: 1259272 - RNA, 21 nt, Human
gagucccugccuggaccagcc

SEQ ID NO: 1259273 - RNA, 23 nt, Human
gagucccugccuggaccagccuc

SEQ ID NO: 1259274 - RNA, 14 nt, Human
gaguauuaaaaugu

SEQ ID NO: 1259275 - RNA, 22 nt, Human
gaguauuaaaauguaugcaugu

SEQ ID NO: 1259276 - RNA, 23 nt, Human
gaguauuaaaauguaugcauguu

SEQ ID NO: 1259277 - RNA, 22 nt, Human
gaguaauccaagcaaaugugaa

SEQ ID NO: 1259278 - RNA, 17 nt, Human
gaguaacauuugcuguu

SEQ ID NO: 1259279 - RNA, 16 nt, Human
gaguaauaugccugcu

SEQ ID NO: 1259280 - RNA, 13 nt, Human
gaguaaucaaucu

SEQ ID NO: 1259281 - RNA, 14 nt, Human
gaguaaugguguag

SEQ ID NO: 1259282 - RNA, 17 nt, Human
gaguaaugguguagaac

SEQ ID NO: 1259283 - RNA, 19 nt, Human
gaguaaugguguagaacac

SEQ ID NO: 1259284 - RNA, 22 nt, Human
gaguaaugguguagaacacuaa

SEQ ID NO: 1259285 - RNA, 21 nt, Human
gaguacuccacacugcacaau

SEQ ID NO: 1259286 - RNA, 16 nt, Human
gaguacuccacacugc

SEQ ID NO: 1259287 - RNA, 17 nt, Human
gaguacuccacacugca

SEQ ID NO: 1259288 - RNA, 19 nt, Human
gaguagaaacugcagggaa

SEQ ID NO: 1259289 - RNA, 20 nt, Human
gaguacuccacacugcacaa

SEQ ID NO: 1259290 - RNA, 14 nt, Human
gaguagaauugcau

SEQ ID NO: 1259291 - RNA, 17 nt, Human
gaguagaauugcauuga

SEQ ID NO: 1259292 - RNA, 18 nt, Human
gagguugaaaaacaaaau

SEQ ID NO: 1259293 - RNA, 20 nt, Human
gaggugucucaggcugccug

SEQ ID NO: 1259294 - RNA, 13 nt, Human
gaggugucucagg

SEQ ID NO: 1259295 - RNA, 14 nt, Human
gaggugucucaggc

SEQ ID NO: 1259296 - RNA, 15 nt, Human
gaggugucucaggcu

SEQ ID NO: 1259297 - RNA, 16 nt, Human
gaggugucucaggcug

SEQ ID NO: 1259298 - RNA, 17 nt, Human
gaggugucucaggcugc

SEQ ID NO: 1259299 - RNA, 19 nt, Human
gaggugucucaggcugccu

SEQ ID NO: 1259300 - RNA, 16 nt, Human
gagguguggagccgag

SEQ ID NO: 1259301 - RNA, 14 nt, Human
gaggugggccgugg

SEQ ID NO: 1259302 - RNA, 15 nt, Human
gagguguccaacugg

SEQ ID NO: 1259303 - RNA, 16 nt, Human
gagguguccaacuggc

SEQ ID NO: 1259304 - RNA, 21 nt, Human
gaggucagcacaucucaacag

SEQ ID NO: 1259305 - RNA, 23 nt, Human
gaggucagcaugucuauucagcu

SEQ ID NO: 1259306 - RNA, 19 nt, Human
gaggugggccguggcccuu

SEQ ID NO: 1259307 - RNA, 14 nt, Human
gagguucuaaggcc

SEQ ID NO: 1259308 - RNA, 14 nt, Human
gagguugggugggc

SEQ ID NO: 1259309 - RNA, 15 nt, Human
gaguaacaauacaaa

SEQ ID NO: 1259310 - RNA, 19 nt, Human
gaguaacaauacaaaugga

SEQ ID NO: 1259311 - RNA, 20 nt, Human
gaguaacaauacaaauggau

SEQ ID NO: 1259312 - RNA, 21 nt, Human
gaguaacaauacaaauggauu

SEQ ID NO: 1259313 - RNA, 13 nt, Human
gaguaacauuugc

SEQ ID NO: 1259314 - RNA, 15 nt, Human
gaguaacauuugcug

SEQ ID NO: 1259315 - RNA, 16 nt, Human
gaguaacauuugcugu

SEQ ID NO: 1259316 - RNA, 12 nt, Human
gagguaaguuuu

SEQ ID NO: 1259317 - RNA, 22 nt, Human
gaggguuucauugucugugaag

SEQ ID NO: 1259318 - RNA, 20 nt, Human
gagggugguucaacaaagaa

SEQ ID NO: 1259319 - RNA, 13 nt, Human
gaggguguccugc

SEQ ID NO: 1259320 - RNA, 19 nt, Human
gagguauuuaucuuuacuu

SEQ ID NO: 1259321 - RNA, 16 nt, Human
gagggugaguuggcuu

SEQ ID NO: 1259322 - RNA, 13 nt, Human
gagggugggaagg

SEQ ID NO: 1259323 - RNA, 17 nt, Human
gagggucugggggcaca

SEQ ID NO: 1259324 - RNA, 15 nt, Human
gagggucggugccuu

SEQ ID NO: 1259325 - RNA, 21 nt, Human
gaggguaggagggugggaagg

SEQ ID NO: 1259326 - RNA, 13 nt, Human
gaggguaggcagg

SEQ ID NO: 1259327 - RNA, 14 nt, Human
gaggguaggcagga

SEQ ID NO: 1259328 - RNA, 15 nt, Human
gaggguaggcaggau

SEQ ID NO: 1259329 - RNA, 22 nt, Human
gaggguaggcaggauuggggaa

SEQ ID NO: 1259330 - RNA, 18 nt, Human
gaggguaggcaggauugg

SEQ ID NO: 1259331 - RNA, 22 nt, Human
gaggcugggaauggaggggcag

SEQ ID NO: 1259332 - RNA, 15 nt, Human
gaggcugguccuaug

SEQ ID NO: 1259333 - RNA, 18 nt, Human
gaggcugguccuauggcc

SEQ ID NO: 1259334 - RNA, 16 nt, Human
gaggcugguccuaugg

SEQ ID NO: 1259335 - RNA, 12 nt, Human
gaggcuguccug

SEQ ID NO: 1259336 - RNA, 14 nt, Human
gaggcuguccugua

SEQ ID NO: 1259337 - RNA, 23 nt, Human
gaggcuguggucacagcggaggu

SEQ ID NO: 1259338 - RNA, 21 nt, Human
gagggagacacuggccccuca

SEQ ID NO: 1259339 - RNA, 20 nt, Human
gagggagggggaaggcaggg

SEQ ID NO: 1259340 - RNA, 18 nt, Human
gagggagugaguggcccu

SEQ ID NO: 1259341 - RNA, 16 nt, Human
gagggaugaugaagag

SEQ ID NO: 1259342 - RNA, 15 nt, Human
gagggguaggggcug

SEQ ID NO: 1259343 - RNA, 17 nt, Human
gagggggaauggcagca

SEQ ID NO: 1259344 - RNA, 23 nt, Human
gaggggcuggggacuugugucug

SEQ ID NO: 1259345 - RNA, 15 nt, Human
gagggguuccucccc

SEQ ID NO: 1259346 - RNA, 22 nt, Human
gagggguuccuccccuccagcu

SEQ ID NO: 1259347 - RNA, 23 nt, Human
gagggguuccuccccuccagcuc

SEQ ID NO: 1259348 - RNA, 17 nt, Human
gagggguaggggcuggg

SEQ ID NO: 1259349 - RNA, 19 nt, Human
gagggguaggggcugggaa

SEQ ID NO: 1259350 - RNA, 15 nt, Human
gaggggugggcuggu

SEQ ID NO: 1259351 - RNA, 21 nt, Human
gagggguguggcuccuuccca

SEQ ID NO: 1259352 - RNA, 14 nt, Human
gagggcagcagcca

SEQ ID NO: 1259353 - RNA, 15 nt, Human
gagggcagcagccag

SEQ ID NO: 1259354 - RNA, 16 nt, Human
gagggcagcagccagc

SEQ ID NO: 1259355 - RNA, 17 nt, Human
gagggcagcagccagcc

SEQ ID NO: 1259356 - RNA, 20 nt, Human
gagggcagcagccagcccug

SEQ ID NO: 1259357 - RNA, 21 nt, Human
gagggcagcagccagcccugc

SEQ ID NO: 1259358 - RNA, 22 nt, Human
gagggcagcagccagcccugcc

SEQ ID NO: 1259359 - RNA, 23 nt, Human
gagggcagcagccagcccugccu

SEQ ID NO: 1259360 - RNA, 12 nt, Human
gagggcagcagg

SEQ ID NO: 1259361 - RNA, 14 nt, Human
gagggcagcagggc

SEQ ID NO: 1259362 - RNA, 15 nt, Human
gagggcagcagggcu

SEQ ID NO: 1259363 - RNA, 18 nt, Human
gagggauucugguuccag

SEQ ID NO: 1259364 - RNA, 21 nt, Human
gagggauucugguuccagggu

SEQ ID NO: 1259365 - RNA, 14 nt, Human
gagggggagagggc

SEQ ID NO: 1259366 - RNA, 17 nt, Human
gaggggcugugggcgug

SEQ ID NO: 1259367 - RNA, 16 nt, Human
gagggccacaugggag

SEQ ID NO: 1259368 - RNA, 16 nt, Human
gagggcagcagggcua

SEQ ID NO: 1259369 - RNA, 19 nt, Human
gagggcagcagggcuaccc

SEQ ID NO: 1259370 - RNA, 18 nt, Human
gagggcaguucgcagcca

SEQ ID NO: 1259371 - RNA, 19 nt, Human
gagggcaguucgcagccac

SEQ ID NO: 1259372 - RNA, 20 nt, Human
gagggcaguucgcagccacc

SEQ ID NO: 1259373 - RNA, 23 nt, Human
gagggcaguucgcagccacccug

SEQ ID NO: 1259374 - RNA, 23 nt, Human
gaggcugggaauggaggggcaga

SEQ ID NO: 1259375 - RNA, 24 nt, Human
gaggcugcucggggugcacaggag

SEQ ID NO: 1259376 - RNA, 23 nt, Human
gaggcugcucggggugcacagga

SEQ ID NO: 1259377 - RNA, 13 nt, Human
gaggcuggcacag

SEQ ID NO: 1259378 - RNA, 21 nt, Human
gaggcgcaugaauuugugaag

SEQ ID NO: 1259379 - RNA, 21 nt, Human
gaggcgaagcguuguccucag

SEQ ID NO: 1259380 - RNA, 19 nt, Human
gaggccuuucccuaagcca

SEQ ID NO: 1259381 - RNA, 22 nt, Human
gaggccuuucccuaagccagcu

SEQ ID NO: 1259382 - RNA, 17 nt, Human
gaggcgccccaacccgu

SEQ ID NO: 1259383 - RNA, 20 nt, Human
gaggcgccccaacccgugga

SEQ ID NO: 1259384 - RNA, 22 nt, Human
gaggcgccccaacccguggagg

SEQ ID NO: 1259385 - RNA, 21 nt, Human
gaggcgccccaacccguggag

SEQ ID NO: 1259386 - RNA, 13 nt, Human
gaggcugcucggg

SEQ ID NO: 1259387 - RNA, 18 nt, Human
gaggcugcucggggugca

SEQ ID NO: 1259388 - RNA, 21 nt, Human
gaggcugcucggggugcacag

SEQ ID NO: 1259389 - RNA, 22 nt, Human
gaggcugcucggggugcacagg

SEQ ID NO: 1259390 - RNA, 20 nt, Human
gaggcgaagcguuguccuca

SEQ ID NO: 1259391 - RNA, 18 nt, Human
gaggccugacugccaagc

SEQ ID NO: 1259392 - RNA, 19 nt, Human
gaggccugacugccaagcc

SEQ ID NO: 1259393 - RNA, 15 nt, Human
gaggccuaggagggu

SEQ ID NO: 1259394 - RNA, 18 nt, Human
gaggccuaccccgcagac

SEQ ID NO: 1259395 - RNA, 15 nt, Human
gaggccuagacucug

SEQ ID NO: 1259396 - RNA, 18 nt, Human
gaggccuaggaggguccu

SEQ ID NO: 1259397 - RNA, 19 nt, Human
gaggccauggacucugucc

SEQ ID NO: 1259398 - RNA, 20 nt, Human
gaggccauggacucuguccu

SEQ ID NO: 1259399 - RNA, 22 nt, Human
gaggccauggacucuguccuga

SEQ ID NO: 1259400 - RNA, 19 nt, Human
gaggccauugugugagccu

SEQ ID NO: 1259401 - RNA, 18 nt, Human
gaggcccacauuggaaga

SEQ ID NO: 1259402 - RNA, 20 nt, Human
gaggcccacauuggaagagc

SEQ ID NO: 1259403 - RNA, 13 nt, Human
gaggcccaggcug

SEQ ID NO: 1259404 - RNA, 14 nt, Human
gaggcccaggcugc

SEQ ID NO: 1259405 - RNA, 15 nt, Human
gaggcccaggcugcc

SEQ ID NO: 1259406 - RNA, 16 nt, Human
gaggcccaggcugccg

SEQ ID NO: 1259407 - RNA, 17 nt, Human
gaggcccaggcugccgu

SEQ ID NO: 1259408 - RNA, 23 nt, Human
gaggccccagccucccugaagcc

SEQ ID NO: 1259409 - RNA, 13 nt, Human
gaggccccagccg

SEQ ID NO: 1259410 - RNA, 18 nt, Human
gaggcccaggcugccguc

SEQ ID NO: 1259411 - RNA, 15 nt, Human
gaggcccaggcuggg

SEQ ID NO: 1259412 - RNA, 16 nt, Human
gaggcccaggcuggga

SEQ ID NO: 1259413 - RNA, 17 nt, Human
gaggcccaggcugggaa

SEQ ID NO: 1259414 - RNA, 23 nt, Human
gaggcccaggcugggaacucauc

SEQ ID NO: 1259415 - RNA, 13 nt, Human
gaggcccaguuca

SEQ ID NO: 1259416 - RNA, 18 nt, Human
gaggcccaguucacccug

SEQ ID NO: 1259417 - RNA, 20 nt, Human
gaggcccaguucacccugau

SEQ ID NO: 1259418 - RNA, 15 nt, Human
gaggccccaacccug

SEQ ID NO: 1259419 - RNA, 12 nt, Human
gaggccccagcc

SEQ ID NO: 1259420 - RNA, 13 nt, Human
gaggccccagccu

SEQ ID NO: 1259421 - RNA, 19 nt, Human
gaggccccagccucccuga

SEQ ID NO: 1259422 - RNA, 22 nt, Human
gaggccccagccucccugaagc

SEQ ID NO: 1259423 - RNA, 14 nt, Human
gaggcccccagccc

SEQ ID NO: 1259424 - RNA, 18 nt, Human
gaggcagagaagaaagaa

SEQ ID NO: 1259425 - RNA, 19 nt, Human
gaggcagagguugcaguga

SEQ ID NO: 1259426 - RNA, 14 nt, Human
gaggcagggaagga

SEQ ID NO: 1259427 - RNA, 23 nt, Human
gaggcagggaacauggggaggag

SEQ ID NO: 1259428 - RNA, 16 nt, Human
gaggcagagaagaaag

SEQ ID NO: 1259429 - RNA, 13 nt, Human
gaggcaaaagaag

SEQ ID NO: 1259430 - RNA, 22 nt, Human
gaggcaaugggagcugaggcca

SEQ ID NO: 1259431 - RNA, 23 nt, Human
gagcccuucuauacccacccaga

SEQ ID NO: 1259432 - RNA, 22 nt, Human
gagcccuucuauacccacccag

SEQ ID NO: 1259433 - RNA, 21 nt, Human
gagcccuucuauacccaccca

SEQ ID NO: 1259434 - RNA, 22 nt, Human
gagcccaggccaggacucugca

SEQ ID NO: 1259435 - RNA, 22 nt, Human
gagcccuguccugccuaaggcu

SEQ ID NO: 1259436 - RNA, 14 nt, Human
gagaugaggccaga

SEQ ID NO: 1259437 - RNA, 13 nt, Human
gagaugaggccag

SEQ ID NO: 1259438 - RNA, 15 nt, Human
gagaugaggccagac

SEQ ID NO: 1259439 - RNA, 22 nt, Human
gagaugauacauccaaagcaga

SEQ ID NO: 1259440 - RNA, 17 nt, Human
gagaugaggccgccaug

SEQ ID NO: 1259441 - RNA, 18 nt, Human
gagaucccaacacugcca

SEQ ID NO: 1259442 - RNA, 19 nt, Human
gagaucccaacacugccag

SEQ ID NO: 1259443 - RNA, 20 nt, Human
gagaucccaacacugccagc

SEQ ID NO: 1259444 - RNA, 18 nt, Human
gagauccagggcaaggcc

SEQ ID NO: 1259445 - RNA, 12 nt, Human
gagauccuccug

SEQ ID NO: 1259446 - RNA, 21 nt, Human
gagaucaccaguguguggcuu

SEQ ID NO: 1259447 - RNA, 21 nt, Human
gagauccaaaagaagccccca

SEQ ID NO: 1259448 - RNA, 22 nt, Human
gagauccaaaagaagcccccag

SEQ ID NO: 1259449 - RNA, 14 nt, Human
gagcagacuacagc

SEQ ID NO: 1259450 - RNA, 20 nt, Human
gagcacugccaggagggaca

SEQ ID NO: 1259451 - RNA, 18 nt, Human
gagcacugccaggaggga

SEQ ID NO: 1259452 - RNA, 19 nt, Human
gagcacugccaggagggac

SEQ ID NO: 1259453 - RNA, 23 nt, Human
gagcagacuggcggggggcccau

SEQ ID NO: 1259454 - RNA, 12 nt, Human
gagcacugccag

SEQ ID NO: 1259455 - RNA, 13 nt, Human
gagcacugccagg

SEQ ID NO: 1259456 - RNA, 14 nt, Human
gagcacugccagga

SEQ ID NO: 1259457 - RNA, 15 nt, Human
gagcacugccaggag

SEQ ID NO: 1259458 - RNA, 16 nt, Human
gagcacugccaggagg

SEQ ID NO: 1259459 - RNA, 17 nt, Human
gagcacugccaggaggg

SEQ ID NO: 1259460 - RNA, 13 nt, Human
gagcacggcucug

SEQ ID NO: 1259461 - RNA, 22 nt, Human
gagcacggcucuguccccagcc

SEQ ID NO: 1259462 - RNA, 23 nt, Human
gagcacggcucuguccccagccu

SEQ ID NO: 1259463 - RNA, 22 nt, Human
gagcacaagaggagauccaggg

SEQ ID NO: 1259464 - RNA, 20 nt, Human
gagcacaaagacccuggcuu

SEQ ID NO: 1259465 - RNA, 20 nt, Human
gagcaagaccccaucucaaa

SEQ ID NO: 1259466 - RNA, 23 nt, Human
gagcaaccguggcccuuccugga

SEQ ID NO: 1259467 - RNA, 15 nt, Human
gagcaaccguggccc

SEQ ID NO: 1259468 - RNA, 16 nt, Human
gagcaaccguggcccu

SEQ ID NO: 1259469 - RNA, 20 nt, Human
gagcaaccguggcccuuccu

SEQ ID NO: 1259470 - RNA, 21 nt, Human
gagcaaccguggcccuuccug

SEQ ID NO: 1259471 - RNA, 22 nt, Human
gagcaaccguggcccuuccugg

SEQ ID NO: 1259472 - RNA, 16 nt, Human
gagcacaaagacccug

SEQ ID NO: 1259473 - RNA, 18 nt, Human
gagcaagcaggaaucaga

SEQ ID NO: 1259474 - RNA, 17 nt, Human
gagccaagggauggaca

SEQ ID NO: 1259475 - RNA, 18 nt, Human
gagccaagggauggacau

SEQ ID NO: 1259476 - RNA, 19 nt, Human
gagccaagggauggacauc

SEQ ID NO: 1259477 - RNA, 22 nt, Human
gagccaagggauggacaucuug

SEQ ID NO: 1259478 - RNA, 18 nt, Human
gagccaaggggcuucagg

SEQ ID NO: 1259479 - RNA, 12 nt, Human
gagccaccaguu

SEQ ID NO: 1259480 - RNA, 15 nt, Human
gagcauuagauuucu

SEQ ID NO: 1259481 - RNA, 21 nt, Human
gagcauuagauuucucauuug

SEQ ID NO: 1259482 - RNA, 15 nt, Human
gagcauuucucauca

SEQ ID NO: 1259483 - RNA, 19 nt, Human
gagcauuucucaucaguag

SEQ ID NO: 1259484 - RNA, 20 nt, Human
gagcauuucucaucaguagu

SEQ ID NO: 1259485 - RNA, 14 nt, Human
gagccaagggaugg

SEQ ID NO: 1259486 - RNA, 15 nt, Human
gagccaagggaugga

SEQ ID NO: 1259487 - RNA, 16 nt, Human
gagccaagggauggac

SEQ ID NO: 1259488 - RNA, 13 nt, Human
gagcagcugagca

SEQ ID NO: 1259489 - RNA, 17 nt, Human
gagcagcgagccugcua

SEQ ID NO: 1259490 - RNA, 14 nt, Human
gagcagcugagcag

SEQ ID NO: 1259491 - RNA, 15 nt, Human
gagcagcugagcagg

SEQ ID NO: 1259492 - RNA, 16 nt, Human
gagcagcugagcaggg

SEQ ID NO: 1259493 - RNA, 17 nt, Human
gagcagcugagcagggc

SEQ ID NO: 1259494 - RNA, 18 nt, Human
gagcagcugagcagggcc

SEQ ID NO: 1259495 - RNA, 19 nt, Human
gagcagcugagcagggccg

SEQ ID NO: 1259496 - RNA, 20 nt, Human
gagcagcugagcagggccgg

SEQ ID NO: 1259497 - RNA, 14 nt, Human
gagcaggaauggga

SEQ ID NO: 1259498 - RNA, 15 nt, Human
gagcaggacuccagg

SEQ ID NO: 1259499 - RNA, 16 nt, Human
gagcaggacuccaggc

SEQ ID NO: 1259500 - RNA, 19 nt, Human
gagcaggacuccaggccca

SEQ ID NO: 1259501 - RNA, 20 nt, Human
gagcaggacuccaggcccaa

SEQ ID NO: 1259502 - RNA, 22 nt, Human
gagcauguuuagacuuuaacau

SEQ ID NO: 1259503 - RNA, 13 nt, Human
gagccaccaguuc

SEQ ID NO: 1259504 - RNA, 22 nt, Human
gagccagggucuccagaaagcc

SEQ ID NO: 1259505 - RNA, 17 nt, Human
gagccagggucuccaga

SEQ ID NO: 1259506 - RNA, 19 nt, Human
gagcccacuguccugggcc

SEQ ID NO: 1259507 - RNA, 24 nt, Human
gagcccacuguccugggccugcag

SEQ ID NO: 1259508 - RNA, 12 nt, Human
gagcccagcucc

SEQ ID NO: 1259509 - RNA, 13 nt, Human
gagcccagcucca

SEQ ID NO: 1259510 - RNA, 14 nt, Human
gagcccagcuccaa

SEQ ID NO: 1259511 - RNA, 12 nt, Human
gagcccagcucu

SEQ ID NO: 1259512 - RNA, 14 nt, Human
gagcccagcucuga

SEQ ID NO: 1259513 - RNA, 21 nt, Human
gagcccagcucugaaaccagu

SEQ ID NO: 1259514 - RNA, 13 nt, Human
gagcccagcuggg

SEQ ID NO: 1259515 - RNA, 19 nt, Human
gagcccagcugggucaggc

SEQ ID NO: 1259516 - RNA, 21 nt, Human
gagcccagcugggucaggcag

SEQ ID NO: 1259517 - RNA, 22 nt, Human
gagcccagcugggucaggcagg

SEQ ID NO: 1259518 - RNA, 12 nt, Human
gagcccaggagc

SEQ ID NO: 1259519 - RNA, 13 nt, Human
gagcccaggagcu

SEQ ID NO: 1259520 - RNA, 17 nt, Human
gagcccaggagcucccc

SEQ ID NO: 1259521 - RNA, 21 nt, Human
gagcccaggagcuccccuccc

SEQ ID NO: 1259522 - RNA, 13 nt, Human
gagcccaggccag

SEQ ID NO: 1259523 - RNA, 16 nt, Human
gagcccaggccaggac

SEQ ID NO: 1259524 - RNA, 17 nt, Human
gagcccaggccaggacu

SEQ ID NO: 1259525 - RNA, 18 nt, Human
gagcccaggccaggacuc

SEQ ID NO: 1259526 - RNA, 21 nt, Human
gagcccaggccaggacucugc

SEQ ID NO: 1259527 - RNA, 23 nt, Human
gagcccaggccaggacucugcag

SEQ ID NO: 1259528 - RNA, 20 nt, Human
gagaaugagagacacacuga

SEQ ID NO: 1259529 - RNA, 21 nt, Human
gagaaugagagacacacugaa

SEQ ID NO: 1259530 - RNA, 15 nt, Human
gagaagccagcuugu

SEQ ID NO: 1259531 - RNA, 20 nt, Human
gagaaugcccuucuccuuau

SEQ ID NO: 1259532 - RNA, 20 nt, Human
gagacagcucugcauacuca

SEQ ID NO: 1259533 - RNA, 19 nt, Human
gagaauggcuuuggucucu

SEQ ID NO: 1259534 - RNA, 19 nt, Human
gagacaggguuucaccaug

SEQ ID NO: 1259535 - RNA, 16 nt, Human
gagacaguucaagaaa

SEQ ID NO: 1259536 - RNA, 18 nt, Human
gagacaguucaagaaagc

SEQ ID NO: 1259537 - RNA, 15 nt, Human
gagacuggguaggaa

SEQ ID NO: 1259538 - RNA, 15 nt, Human
gagacugggcugagg

SEQ ID NO: 1259539 - RNA, 17 nt, Human
gagacugggcugaggga

SEQ ID NO: 1259540 - RNA, 20 nt, Human
gagacugggcugagggagcc

SEQ ID NO: 1259541 - RNA, 21 nt, Human
gagacugggcugagggagccu

SEQ ID NO: 1259542 - RNA, 14 nt, Human
gagacugggaaggc

SEQ ID NO: 1259543 - RNA, 17 nt, Human
gagacugggaaggcuug

SEQ ID NO: 1259544 - RNA, 22 nt, Human
gagacugggaaggcuugggauu

SEQ ID NO: 1259545 - RNA, 13 nt, Human
gagacugggcuga

SEQ ID NO: 1259546 - RNA, 14 nt, Human
gagacugggcugag

SEQ ID NO: 1259547 - RNA, 14 nt, Human
gagagaaaggacuc

SEQ ID NO: 1259548 - RNA, 16 nt, Human
gagagaaaggacuccu

SEQ ID NO: 1259549 - RNA, 11 nt, Human
gagagugugac

SEQ ID NO: 1259550 - RNA, 15 nt, Human
gagauaccagcgagg

SEQ ID NO: 1259551 - RNA, 16 nt, Human
gagaguggcuccuccc

SEQ ID NO: 1259552 - RNA, 21 nt, Human
gagaguggcuccucccggugc

SEQ ID NO: 1259553 - RNA, 14 nt, Human
gagaguggcugggg

SEQ ID NO: 1259554 - RNA, 17 nt, Human
gagaguggcuggggcau

SEQ ID NO: 1259555 - RNA, 20 nt, Human
gagaguggcuggggcaugga

SEQ ID NO: 1259556 - RNA, 12 nt, Human
gagagugggggu

SEQ ID NO: 1259557 - RNA, 15 nt, Human
gagaguggggguggg

SEQ ID NO: 1259558 - RNA, 16 nt, Human
gagagucuagauucuc

SEQ ID NO: 1259559 - RNA, 13 nt, Human
gagagucuagauu

SEQ ID NO: 1259560 - RNA, 20 nt, Human
gagaggggccgaugcccaga

SEQ ID NO: 1259561 - RNA, 21 nt, Human
gagaggggccgaugcccagag

SEQ ID NO: 1259562 - RNA, 13 nt, Human
gagagggggcugg

SEQ ID NO: 1259563 - RNA, 19 nt, Human
gagagggggcuggugggug

SEQ ID NO: 1259564 - RNA, 17 nt, Human
gagaguaaugaggcuug

SEQ ID NO: 1259565 - RNA, 13 nt, Human
gagagacgggccc

SEQ ID NO: 1259566 - RNA, 12 nt, Human
gagagacuuguu

SEQ ID NO: 1259567 - RNA, 20 nt, Human
gagagacuuguuuuggaugc

SEQ ID NO: 1259568 - RNA, 21 nt, Human
gagagaaauaagugcccucuc

SEQ ID NO: 1259569 - RNA, 18 nt, Human
gagagacacuggugggga

SEQ ID NO: 1259570 - RNA, 16 nt, Human
gagagacacugguggg

SEQ ID NO: 1259571 - RNA, 19 nt, Human
gagagagcuucuguugcug

SEQ ID NO: 1259572 - RNA, 22 nt, Human
gagagagcuucuguugcugccu

SEQ ID NO: 1259573 - RNA, 16 nt, Human
gagagcccuucauuug

SEQ ID NO: 1259574 - RNA, 14 nt, Human
gagagcccugaggc

SEQ ID NO: 1259575 - RNA, 19 nt, Human
gagagcccugaggccuaga

SEQ ID NO: 1259576 - RNA, 13 nt, Human
gagagcccuggga

SEQ ID NO: 1259577 - RNA, 14 nt, Human
gagagcccugggac

SEQ ID NO: 1259578 - RNA, 15 nt, Human
gagagcccugggacc

SEQ ID NO: 1259579 - RNA, 14 nt, Human
gagagccugcagga

SEQ ID NO: 1259580 - RNA, 17 nt, Human
gagagccugcaggaucu

SEQ ID NO: 1259581 - RNA, 14 nt, Human
gagagcccaggagc

SEQ ID NO: 1259582 - RNA, 15 nt, Human
gagagcccaggagcu

SEQ ID NO: 1259583 - RNA, 16 nt, Human
gagagcccaggagcuc

SEQ ID NO: 1259584 - RNA, 20 nt, Human
gagagcccaggagcuccccu

SEQ ID NO: 1259585 - RNA, 23 nt, Human
gagagcccgaggaggugucucag

SEQ ID NO: 1259586 - RNA, 14 nt, Human
gagagaucaaagau

SEQ ID NO: 1259587 - RNA, 15 nt, Human
gagagaucaaagaug

SEQ ID NO: 1259588 - RNA, 12 nt, Human
gagagaugugug

SEQ ID NO: 1259589 - RNA, 13 nt, Human
gagagaugugugu

SEQ ID NO: 1259590 - RNA, 14 nt, Human
gagagauguguguu

SEQ ID NO: 1259591 - RNA, 22 nt, Human
gagagauguguguugauacugu

SEQ ID NO: 1259592 - RNA, 22 nt, Human
gagagcaagggaagugguucuu

SEQ ID NO: 1259593 - RNA, 16 nt, Human
gagagcagaggucucc

SEQ ID NO: 1259594 - RNA, 17 nt, Human
gagaaugagagacacac

SEQ ID NO: 1259595 - RNA, 11 nt, Human
gagaagccagc

SEQ ID NO: 1259596 - RNA, 13 nt, Human
gagaagccagcuu

SEQ ID NO: 1259597 - RNA, 14 nt, Human
gagaagccagcuug

SEQ ID NO: 1259598 - RNA, 18 nt, Human
gagaagcauucucauugg

SEQ ID NO: 1259599 - RNA, 22 nt, Human
gagaagaaagaggugaccccag

SEQ ID NO: 1259600 - RNA, 22 nt, Human
gagaacuuccagauccuggaaa

SEQ ID NO: 1259601 - RNA, 23 nt, Human
gagaacuuccagauccuggaaau

SEQ ID NO: 1259602 - RNA, 21 nt, Human
gagaaccuggguugcagacag

SEQ ID NO: 1259603 - RNA, 21 nt, Human
gagaagaaagaacggaagaag

SEQ ID NO: 1259604 - RNA, 16 nt, Human
gagaagaaagaacgga

SEQ ID NO: 1259605 - RNA, 13 nt, Human
gagaagaacugaa

SEQ ID NO: 1259606 - RNA, 14 nt, Human
gagaaauuuauaaa

SEQ ID NO: 1259607 - RNA, 12 nt, Human
gagaaccuggcc

SEQ ID NO: 1259608 - RNA, 13 nt, Human
gagaaccuggccu

SEQ ID NO: 1259609 - RNA, 14 nt, Human
gagaaccuggccuu

SEQ ID NO: 1259610 - RNA, 15 nt, Human
gagaaccuggccuuc

SEQ ID NO: 1259611 - RNA, 16 nt, Human
gagaaccuggccuuca

SEQ ID NO: 1259612 - RNA, 23 nt, Human
gagaaccuggguugcagacagga

SEQ ID NO: 1259613 - RNA, 21 nt, Human
gagaaccuagggugauauuaa

SEQ ID NO: 1259614 - RNA, 22 nt, Human
gagaaccuagggugauauuaac

SEQ ID NO: 1259615 - RNA, 21 nt, Human
gagaaaugaaaaaauauauau

SEQ ID NO: 1259616 - RNA, 17 nt, Human
gagaaauucguguguuu

SEQ ID NO: 1259617 - RNA, 19 nt, Human
gagaaauucguguguuuuu

SEQ ID NO: 1259618 - RNA, 17 nt, Human
gagaaaggggagcccac

SEQ ID NO: 1259619 - RNA, 18 nt, Human
gagaaaggggagcccacu

SEQ ID NO: 1259620 - RNA, 14 nt, Human
gagaaagcucaaag

SEQ ID NO: 1259621 - RNA, 13 nt, Human
gagaaagcugacu

SEQ ID NO: 1259622 - RNA, 15 nt, Human
gagaaagcugacuug

SEQ ID NO: 1259623 - RNA, 20 nt, Human
gagaaagcugacuuggcugg

SEQ ID NO: 1259624 - RNA, 22 nt, Human
gagaaagcugacuuggcuggug

SEQ ID NO: 1259625 - RNA, 21 nt, Human
gagaaagcugacuuggcuggu

SEQ ID NO: 1259626 - RNA, 21 nt, Human
gagaaagggcccugggccugc

SEQ ID NO: 1259627 - RNA, 16 nt, Human
gacuugaagacuuaca

SEQ ID NO: 1259628 - RNA, 13 nt, Human
gacuugaaagaaa

SEQ ID NO: 1259629 - RNA, 15 nt, Human
gacuuggccccugcc

SEQ ID NO: 1259630 - RNA, 12 nt, Human
gacuuggccucu

SEQ ID NO: 1259631 - RNA, 13 nt, Human
gacuuggccucuc

SEQ ID NO: 1259632 - RNA, 14 nt, Human
gacuuggccucucu

SEQ ID NO: 1259633 - RNA, 15 nt, Human
gacuuggccucucuc

SEQ ID NO: 1259634 - RNA, 16 nt, Human
gacuugacaguggaac

SEQ ID NO: 1259635 - RNA, 14 nt, Human
gacuuggcuggugu

SEQ ID NO: 1259636 - RNA, 22 nt, Human
gacuuggcuggugugguacaga

SEQ ID NO: 1259637 - RNA, 23 nt, Human
gacuuggcuggugugguacagag

SEQ ID NO: 1259638 - RNA, 14 nt, Human
gacuugggcacccc

SEQ ID NO: 1259639 - RNA, 18 nt, Human
gacuugggcacccccagc

SEQ ID NO: 1259640 - RNA, 19 nt, Human
gacuugggcacccccagcc

SEQ ID NO: 1259641 - RNA, 20 nt, Human
gacuugggcacccccagccu

SEQ ID NO: 1259642 - RNA, 21 nt, Human
gacuugggcacccccagccug

SEQ ID NO: 1259643 - RNA, 23 nt, Human
gacuugggcacccccagccuggg

SEQ ID NO: 1259644 - RNA, 22 nt, Human
gacuugggcacccccagccugg

SEQ ID NO: 1259645 - RNA, 15 nt, Human
gacuugguugguagg

SEQ ID NO: 1259646 - RNA, 17 nt, Human
gacuugguugguagggu

SEQ ID NO: 1259647 - RNA, 20 nt, Human
gacuugguugguaggguggg

SEQ ID NO: 1259648 - RNA, 15 nt, Human
gagaaaaccuguucu

SEQ ID NO: 1259649 - RNA, 16 nt, Human
gagaaaacuaaagaaa

SEQ ID NO: 1259650 - RNA, 20 nt, Human
gacuuaagcaucuggcucua

SEQ ID NO: 1259651 - RNA, 22 nt, Human
gacuuaagcaucuggcucuaau

SEQ ID NO: 1259652 - RNA, 21 nt, Human
gacuuaagcccagugcacuga

SEQ ID NO: 1259653 - RNA, 19 nt, Human
gacuuaaaauauuccugca

SEQ ID NO: 1259654 - RNA, 17 nt, Human
gacuucuauuuuaaaga

SEQ ID NO: 1259655 - RNA, 14 nt, Human
gacuucucuuugcc

SEQ ID NO: 1259656 - RNA, 18 nt, Human
gacuucucuuugccucaa

SEQ ID NO: 1259657 - RNA, 12 nt, Human
gacuucugagau

SEQ ID NO: 1259658 - RNA, 13 nt, Human
gacuucugccugg

SEQ ID NO: 1259659 - RNA, 14 nt, Human
gacuucugccugga

SEQ ID NO: 1259660 - RNA, 15 nt, Human
gacuucugccuggag

SEQ ID NO: 1259661 - RNA, 16 nt, Human
gacuucugccuggaga

SEQ ID NO: 1259662 - RNA, 17 nt, Human
gacuucugccuggagac

SEQ ID NO: 1259663 - RNA, 13 nt, Human
gacuucugagauc

SEQ ID NO: 1259664 - RNA, 13 nt, Human
gacuucuggggua

SEQ ID NO: 1259665 - RNA, 17 nt, Human
gacuggguaggaaagag

SEQ ID NO: 1259666 - RNA, 14 nt, Human
gacuggggcagggu

SEQ ID NO: 1259667 - RNA, 11 nt, Human
gacuggggcag

SEQ ID NO: 1259668 - RNA, 13 nt, Human
gacuggggcaggg

SEQ ID NO: 1259669 - RNA, 23 nt, Human
gacugggagcccccagccuguca

SEQ ID NO: 1259670 - RNA, 22 nt, Human
gacugggagcccccagccuguc

SEQ ID NO: 1259671 - RNA, 14 nt, Human
gacugggcugaggg

SEQ ID NO: 1259672 - RNA, 15 nt, Human
gacugggcugaggga

SEQ ID NO: 1259673 - RNA, 16 nt, Human
gacugggcugagggag

SEQ ID NO: 1259674 - RNA, 21 nt, Human
gacugggcugagggagccugg

SEQ ID NO: 1259675 - RNA, 21 nt, Human
gacuggaagcuaauuugcauu

SEQ ID NO: 1259676 - RNA, 20 nt, Human
gacuggaagcuaauuugcau

SEQ ID NO: 1259677 - RNA, 13 nt, Human
gacuggacagcuu

SEQ ID NO: 1259678 - RNA, 14 nt, Human
gacuggacagcuug

SEQ ID NO: 1259679 - RNA, 21 nt, Human
gacuggacagcuuguggcaag

SEQ ID NO: 1259680 - RNA, 15 nt, Human
gacuggacagcuugu

SEQ ID NO: 1259681 - RNA, 20 nt, Human
gacugcuugcccuaagcaga

SEQ ID NO: 1259682 - RNA, 21 nt, Human
gacugcuugcccuaagcagaa

SEQ ID NO: 1259683 - RNA, 22 nt, Human
gacugcuugcccuaagcagaaa

SEQ ID NO: 1259684 - RNA, 23 nt, Human
gacugcuugcccuaagcagaaag

SEQ ID NO: 1259685 - RNA, 21 nt, Human
gacugcuuuggaccuaaaugg

SEQ ID NO: 1259686 - RNA, 15 nt, Human
gacuggaacacuaga

SEQ ID NO: 1259687 - RNA, 15 nt, Human
gacugcugguuugua

SEQ ID NO: 1259688 - RNA, 16 nt, Human
gacugcugguuuguag

SEQ ID NO: 1259689 - RNA, 12 nt, Human
gacugcuguggc

SEQ ID NO: 1259690 - RNA, 15 nt, Human
gacugcuguggccag

SEQ ID NO: 1259691 - RNA, 16 nt, Human
gacugcuguggccagg

SEQ ID NO: 1259692 - RNA, 17 nt, Human
gacugcuguggccagga

SEQ ID NO: 1259693 - RNA, 18 nt, Human
gacugcuguggccaggag

SEQ ID NO: 1259694 - RNA, 20 nt, Human
gacugcuguggccaggaggu

SEQ ID NO: 1259695 - RNA, 19 nt, Human
gacugcuguggccaggagg

SEQ ID NO: 1259696 - RNA, 12 nt, Human
gacugcuugccc

SEQ ID NO: 1259697 - RNA, 13 nt, Human
gacugcuugcccu

SEQ ID NO: 1259698 - RNA, 15 nt, Human
gacugcuugcccuaa

SEQ ID NO: 1259699 - RNA, 17 nt, Human
gacugcuugcccuaagc

SEQ ID NO: 1259700 - RNA, 18 nt, Human
gacugcuugcccuaagca

SEQ ID NO: 1259701 - RNA, 24 nt, Human
gacugcauuauauuuauuacugua

SEQ ID NO: 1259702 - RNA, 14 nt, Human
gacugcauuauauu

SEQ ID NO: 1259703 - RNA, 16 nt, Human
gacugcauuauauuua

SEQ ID NO: 1259704 - RNA, 15 nt, Human
gacucuauucuuuaa

SEQ ID NO: 1259705 - RNA, 14 nt, Human
gacugagugggaag

SEQ ID NO: 1259706 - RNA, 15 nt, Human
gacugagugggaagc

SEQ ID NO: 1259707 - RNA, 16 nt, Human
gacucuagaguccaag

SEQ ID NO: 1259708 - RNA, 18 nt, Human
gacucuagaguccaaggu

SEQ ID NO: 1259709 - RNA, 19 nt, Human
gacucuagaguccaagguu

SEQ ID NO: 1259710 - RNA, 18 nt, Human
gacucuauucuuuaacuc

SEQ ID NO: 1259711 - RNA, 14 nt, Human
gacucuauucuuua

SEQ ID NO: 1259712 - RNA, 14 nt, Human
gacucucagucucu

SEQ ID NO: 1259713 - RNA, 16 nt, Human
gacucucagucucuga

SEQ ID NO: 1259714 - RNA, 18 nt, Human
gacucucagucucugagc

SEQ ID NO: 1259715 - RNA, 20 nt, Human
gacucucagucucugagcag

SEQ ID NO: 1259716 - RNA, 14 nt, Human
gacuccucugucca

SEQ ID NO: 1259717 - RNA, 11 nt, Human
gacuccucugu

SEQ ID NO: 1259718 - RNA, 16 nt, Human
gacuccuccuuuuucc

SEQ ID NO: 1259719 - RNA, 13 nt, Human
gacuccuccuuuu

SEQ ID NO: 1259720 - RNA, 17 nt, Human
gacuccuccuuuuucca

SEQ ID NO: 1259721 - RNA, 23 nt, Human
gacuccugcacacgcuccuuccu

SEQ ID NO: 1259722 - RNA, 17 nt, Human
gacuccguuggccacuc

SEQ ID NO: 1259723 - RNA, 16 nt, Human
gacuccguuggccacu

SEQ ID NO: 1259724 - RNA, 14 nt, Human
gacuccuagcuguc

SEQ ID NO: 1259725 - RNA, 19 nt, Human
gacuccuagcuguccuuuu

SEQ ID NO: 1259726 - RNA, 15 nt, Human
gacuccuagcugucc

SEQ ID NO: 1259727 - RNA, 17 nt, Human
gaccucaagugaucugc

SEQ ID NO: 1259728 - RNA, 18 nt, Human
gacuacagucaggaaagg

SEQ ID NO: 1259729 - RNA, 15 nt, Human
gaccuacuguucuaa

SEQ ID NO: 1259730 - RNA, 17 nt, Human
gaccuacuguucuaaag

SEQ ID NO: 1259731 - RNA, 18 nt, Human
gaccuacuguucuaaagc

SEQ ID NO: 1259732 - RNA, 20 nt, Human
gaccuauaccuguguuucuu

SEQ ID NO: 1259733 - RNA, 16 nt, Human
gaccuauaccuguguu

SEQ ID NO: 1259734 - RNA, 12 nt, Human
gacucagcucug

SEQ ID NO: 1259735 - RNA, 12 nt, Human
gacucagccuuc

SEQ ID NO: 1259736 - RNA, 14 nt, Human
gacucagccuucag

SEQ ID NO: 1259737 - RNA, 15 nt, Human
gacucagccuucaga

SEQ ID NO: 1259738 - RNA, 19 nt, Human
gacucagccuucagacaga

SEQ ID NO: 1259739 - RNA, 20 nt, Human
gacucagccuucagacagag

SEQ ID NO: 1259740 - RNA, 14 nt, Human
gacuagaugaugga

SEQ ID NO: 1259741 - RNA, 16 nt, Human
gacuagaugauggaug

SEQ ID NO: 1259742 - RNA, 21 nt, Human
gacuagaugauggaugccaau

SEQ ID NO: 1259743 - RNA, 17 nt, Human
gacuagauggaccugcc

SEQ ID NO: 1259744 - RNA, 17 nt, Human
gacuagauguaguauuu

SEQ ID NO: 1259745 - RNA, 18 nt, Human
gacuagauguaguauuuu

SEQ ID NO: 1259746 - RNA, 18 nt, Human
gacucagacauuggcacc

SEQ ID NO: 1259747 - RNA, 11 nt, Human
gaauguaauca

SEQ ID NO: 1259748 - RNA, 13 nt, Human
gaauguaaucaau

SEQ ID NO: 1259749 - RNA, 16 nt, Human
gaauguaaucaauguu

SEQ ID NO: 1259750 - RNA, 18 nt, Human
gaauguaaucaauguuuc

SEQ ID NO: 1259751 - RNA, 19 nt, Human
gaauguaaucaauguuucu

SEQ ID NO: 1259752 - RNA, 17 nt, Human
gaauggcuauguuuuua

SEQ ID NO: 1259753 - RNA, 19 nt, Human
gaauggcuauguuuuuaau

SEQ ID NO: 1259754 - RNA, 13 nt, Human
gaaugugaagccu

SEQ ID NO: 1259755 - RNA, 14 nt, Human
gaaugugaagccuu

SEQ ID NO: 1259756 - RNA, 15 nt, Human
gaaugugaagccuuc

SEQ ID NO: 1259757 - RNA, 16 nt, Human
gaaugugaagccuucc

SEQ ID NO: 1259758 - RNA, 20 nt, Human
gaaugugaagccuuccccuu

SEQ ID NO: 1259759 - RNA, 19 nt, Human
gaaugugauaaggaaauca

SEQ ID NO: 1259760 - RNA, 18 nt, Human
gaaugugauaaggaaauc

SEQ ID NO: 1259761 - RNA, 18 nt, Human
gaauguggcuugagaaau

SEQ ID NO: 1259762 - RNA, 22 nt, Human
gaauguggccccugaacaagaa

SEQ ID NO: 1259763 - RNA, 12 nt, Human
gaaugugucuuu

SEQ ID NO: 1259764 - RNA, 13 nt, Human
gaaugugucuuua

SEQ ID NO: 1259765 - RNA, 14 nt, Human
gaaugugucuuuag

SEQ ID NO: 1259766 - RNA, 15 nt, Human
gaaugugucuuuaga

SEQ ID NO: 1259767 - RNA, 13 nt, Human
gaauguguuucac

SEQ ID NO: 1259768 - RNA, 14 nt, Human
gaauguguuucaca

SEQ ID NO: 1259769 - RNA, 20 nt, Human
gaauguguuucacaguuuga

SEQ ID NO: 1259770 - RNA, 21 nt, Human
gaauguguuucacaguuugaa

SEQ ID NO: 1259771 - RNA, 22 nt, Human
gaauguguuucacaguuugaaa

SEQ ID NO: 1259772 - RNA, 20 nt, Human
gaauguuaagacuugacagu

SEQ ID NO: 1259773 - RNA, 16 nt, Human
gaauuggagcucgugg

SEQ ID NO: 1259774 - RNA, 22 nt, Human
gaauugauuugcauugaacaca

SEQ ID NO: 1259775 - RNA, 14 nt, Human
gaauugcagaguac

SEQ ID NO: 1259776 - RNA, 12 nt, Human
gaauugcauuga

SEQ ID NO: 1259777 - RNA, 13 nt, Human
gaauugcauugac

SEQ ID NO: 1259778 - RNA, 21 nt, Human
gaauugacccacaagaaauga

SEQ ID NO: 1259779 - RNA, 16 nt, Human
gaauugacccacaaga

SEQ ID NO: 1259780 - RNA, 14 nt, Human
gaauguugggacug

SEQ ID NO: 1259781 - RNA, 20 nt, Human
gaauguuuacacucuuugua

SEQ ID NO: 1259782 - RNA, 21 nt, Human
gaauguuuacacucuuuguaa

SEQ ID NO: 1259783 - RNA, 14 nt, Human
gaauguucucagau

SEQ ID NO: 1259784 - RNA, 20 nt, Human
gaauguugauuacagugcag

SEQ ID NO: 1259785 - RNA, 23 nt, Human
gaauguugggacugcuaaauaaa

SEQ ID NO: 1259786 - RNA, 18 nt, Human
gaaugcacaagaauggau

SEQ ID NO: 1259787 - RNA, 19 nt, Human
gaaugcacaagaauggauc

SEQ ID NO: 1259788 - RNA, 21 nt, Human
gaaugcacaagaauggaucac

SEQ ID NO: 1259789 - RNA, 15 nt, Human
gaaugcuguauaugu

SEQ ID NO: 1259790 - RNA, 20 nt, Human
gaaugcacaagaauggauca

SEQ ID NO: 1259791 - RNA, 23 nt, Human
gaaugcuuaaagaauucaaauuu

SEQ ID NO: 1259792 - RNA, 21 nt, Human
gaaugcuuaaagaauucaaau

SEQ ID NO: 1259793 - RNA, 14 nt, Human
gaaugcuucuaagu

SEQ ID NO: 1259794 - RNA, 22 nt, Human
gaaugcuucuaaguaaauacaa

SEQ ID NO: 1259795 - RNA, 23 nt, Human
gaaugcuucuaaguaaauacaau

SEQ ID NO: 1259796 - RNA, 11 nt, Human
gaauggcagca

SEQ ID NO: 1259797 - RNA, 20 nt, Human
gaaugaacacucuuuugcuu

SEQ ID NO: 1259798 - RNA, 23 nt, Human
gaaugaaauccugcuucagugua

SEQ ID NO: 1259799 - RNA, 17 nt, Human
gaaucuauauuuaacaa

SEQ ID NO: 1259800 - RNA, 13 nt, Human
gaaucucugugcc

SEQ ID NO: 1259801 - RNA, 14 nt, Human
gaaucucugugccu

SEQ ID NO: 1259802 - RNA, 15 nt, Human
gaaucucugugccuu

SEQ ID NO: 1259803 - RNA, 18 nt, Human
gaaucucuuuuugcuuuc

SEQ ID NO: 1259804 - RNA, 15 nt, Human
gaaucugcaauucaa

SEQ ID NO: 1259805 - RNA, 21 nt, Human
gaaucugcaauucaaaaguuc

SEQ ID NO: 1259806 - RNA, 22 nt, Human
gaaucugcaauucaaaaguucc

SEQ ID NO: 1259807 - RNA, 14 nt, Human
gaaaggccagcacu

SEQ ID NO: 1259808 - RNA, 15 nt, Human
gaaaggccagcacuc

SEQ ID NO: 1259809 - RNA, 16 nt, Human
gaaaggccagcacucg

SEQ ID NO: 1259810 - RNA, 21 nt, Human
gaaucaggaauauuuuccaaa

SEQ ID NO: 1259811 - RNA, 23 nt, Human
gaaucaggaauauuuuccaaaga

SEQ ID NO: 1259812 - RNA, 17 nt, Human
gaaucaguuuaaaagca

SEQ ID NO: 1259813 - RNA, 16 nt, Human
gaaucccaaauuugau

SEQ ID NO: 1259814 - RNA, 17 nt, Human
gaaucccaaauuugauu

SEQ ID NO: 1259815 - RNA, 19 nt, Human
gaaucccaaauuugauuga

SEQ ID NO: 1259816 - RNA, 22 nt, Human
gaauccugucgauuagacugga

SEQ ID NO: 1259817 - RNA, 12 nt, Human
gaauccuuucag

SEQ ID NO: 1259818 - RNA, 16 nt, Human
gaaucgcuccugcagc

SEQ ID NO: 1259819 - RNA, 20 nt, Human
gaaucgcuccugcagcccca

SEQ ID NO: 1259820 - RNA, 18 nt, Human
gaaucuacccccagaucc

SEQ ID NO: 1259821 - RNA, 22 nt, Human
gaaucuacccccagauccaagc

SEQ ID NO: 1259822 - RNA, 15 nt, Human
gaaucuacuaauucc

SEQ ID NO: 1259823 - RNA, 13 nt, Human
gaaucuauauuua

SEQ ID NO: 1259824 - RNA, 20 nt, Human
gaauuugugaagguggaaau

SEQ ID NO: 1259825 - RNA, 20 nt, Human
gaauuuguaaugucuugagc

SEQ ID NO: 1259826 - RNA, 14 nt, Human
gaauuugccugcug

SEQ ID NO: 1259827 - RNA, 18 nt, Human
gaauuuggggcuuccaag

SEQ ID NO: 1259828 - RNA, 19 nt, Human
gaauuuggggcuuccaagu

SEQ ID NO: 1259829 - RNA, 17 nt, Human
gaauuugagugcucuga

SEQ ID NO: 1259830 - RNA, 20 nt, Human
gaauuugccugcugggauuc

SEQ ID NO: 1259831 - RNA, 20 nt, Human
gaauuugauaugugaacagu

SEQ ID NO: 1259832 - RNA, 21 nt, Human
gaauuucuucaacucccugcc

SEQ ID NO: 1259833 - RNA, 19 nt, Human
gaauuucuuaacuucuugc

SEQ ID NO: 1259834 - RNA, 21 nt, Human
gaauuucuuaacuucuugcuu

SEQ ID NO: 1259835 - RNA, 19 nt, Human
gaauuucuaggacugaauu

SEQ ID NO: 1259836 - RNA, 20 nt, Human
gaauuucuaggacugaauua

SEQ ID NO: 1259837 - RNA, 16 nt, Human
gaauuguaacuguucu

SEQ ID NO: 1259838 - RNA, 14 nt, Human
gaauuucccucucu

SEQ ID NO: 1259839 - RNA, 13 nt, Human
gaauuucuuaacu

SEQ ID NO: 1259840 - RNA, 14 nt, Human
gaauuucuuaacuu

SEQ ID NO: 1259841 - RNA, 15 nt, Human
gaauuucuuaacuuc

SEQ ID NO: 1259842 - RNA, 16 nt, Human
gaauuucuuaacuucu

SEQ ID NO: 1259843 - RNA, 17 nt, Human
gaauuucuuaacuucuu

SEQ ID NO: 1259844 - RNA, 18 nt, Human
gaauuucuuaacuucuug

SEQ ID NO: 1259845 - RNA, 17 nt, Human
gaauugggagcuuggga

SEQ ID NO: 1259846 - RNA, 24 nt, Human
gaauugcuuguuugcuucaacugu

SEQ ID NO: 1259847 - RNA, 16 nt, Human
gaauugggagcuuggg

SEQ ID NO: 1259848 - RNA, 16 nt, Human
gacaacacccauuuuu

SEQ ID NO: 1259849 - RNA, 16 nt, Human
gacaaaucacauauuu

SEQ ID NO: 1259850 - RNA, 18 nt, Human
gacaaaucacauauuuua

SEQ ID NO: 1259851 - RNA, 20 nt, Human
gacaaaucacauauuuuaaa

SEQ ID NO: 1259852 - RNA, 16 nt, Human
gacaacagacuucuga

SEQ ID NO: 1259853 - RNA, 20 nt, Human
gacaacagguaaaacagggc

SEQ ID NO: 1259854 - RNA, 22 nt, Human
gacaacauuucuauagccaaaa

SEQ ID NO: 1259855 - RNA, 15 nt, Human
gacaaccacuggucu

SEQ ID NO: 1259856 - RNA, 17 nt, Human
gacaaccacuggucugu

SEQ ID NO: 1259857 - RNA, 19 nt, Human
gacaaccacuggucuguag

SEQ ID NO: 1259858 - RNA, 17 nt, Human
gacaacguuucagcgac

SEQ ID NO: 1259859 - RNA, 15 nt, Human
gacaacgugcucuuu

SEQ ID NO: 1259860 - RNA, 17 nt, Human
gacaacugcucccaccu

SEQ ID NO: 1259861 - RNA, 19 nt, Human
gacaacugcucccaccucc

SEQ ID NO: 1259862 - RNA, 21 nt, Human
gacaacugcucccaccuccug

SEQ ID NO: 1259863 - RNA, 22 nt, Human
gacaacugcucccaccuccuga

SEQ ID NO: 1259864 - RNA, 12 nt, Human
gacaacuggcag

SEQ ID NO: 1259865 - RNA, 13 nt, Human
gacaacuggcagg

SEQ ID NO: 1259866 - RNA, 15 nt, Human
gacaacuggcaggca

SEQ ID NO: 1259867 - RNA, 16 nt, Human
gacaacuggcaggcag

SEQ ID NO: 1259868 - RNA, 18 nt, Human
gacaacuggcaggcaggc

SEQ ID NO: 1259869 - RNA, 17 nt, Human
gacaacuggcaggcagg

SEQ ID NO: 1259870 - RNA, 21 nt, Human
gacaacuucuaauugccaugu

SEQ ID NO: 1259871 - RNA, 16 nt, Human
gacaagacccccagca

SEQ ID NO: 1259872 - RNA, 16 nt, Human
gacaaggaaaaaauaa

SEQ ID NO: 1259873 - RNA, 22 nt, Human
gacaagaaaggcugcuguacug

SEQ ID NO: 1259874 - RNA, 15 nt, Human
gacaagacccccagc

SEQ ID NO: 1259875 - RNA, 12 nt, Human
gacaagcuucug

SEQ ID NO: 1259876 - RNA, 13 nt, Human
gacaagcuucuga

SEQ ID NO: 1259877 - RNA, 22 nt, Human
gacaauugagguaaguuuuuug

SEQ ID NO: 1259878 - RNA, 22 nt, Human
gacaauuagauaaauguccauu

SEQ ID NO: 1259879 - RNA, 14 nt, Human
gacaauggaccgga

SEQ ID NO: 1259880 - RNA, 16 nt, Human
gacaauggaccggaga

SEQ ID NO: 1259881 - RNA, 19 nt, Human
gacacaaacacacacaaaa

SEQ ID NO: 1259882 - RNA, 15 nt, Human
gacacaaacacacac

SEQ ID NO: 1259883 - RNA, 13 nt, Human
gacacaggcccuc

SEQ ID NO: 1259884 - RNA, 17 nt, Human
gacacaggcccucccug

SEQ ID NO: 1259885 - RNA, 19 nt, Human
gacacaugaagguaaauaa

SEQ ID NO: 1259886 - RNA, 20 nt, Human
gacacaugaagguaaauaaa

SEQ ID NO: 1259887 - RNA, 21 nt, Human
gacacaugaagguaaauaaaa

SEQ ID NO: 1259888 - RNA, 19 nt, Human
gacacauuuuuuaggaaau

SEQ ID NO: 1259889 - RNA, 20 nt, Human
gacacauuuuuuaggaaaug

SEQ ID NO: 1259890 - RNA, 23 nt, Human
gacacauuuuuuaggaaauguuu

SEQ ID NO: 1259891 - RNA, 15 nt, Human
gacaccaaaguucua

SEQ ID NO: 1259892 - RNA, 14 nt, Human
gacaccaaaguucu

SEQ ID NO: 1259893 - RNA, 16 nt, Human
gaccaccucucaauau

SEQ ID NO: 1259894 - RNA, 17 nt, Human
gaccacgcccguccugc

SEQ ID NO: 1259895 - RNA, 19 nt, Human
gaccacgcccguccugccu

SEQ ID NO: 1259896 - RNA, 21 nt, Human
gaccacgcccguccugccugu

SEQ ID NO: 1259897 - RNA, 13 nt, Human
gaccaccugccca

SEQ ID NO: 1259898 - RNA, 14 nt, Human
gaccaccugcccaa

SEQ ID NO: 1259899 - RNA, 14 nt, Human
gaccacccucacug

SEQ ID NO: 1259900 - RNA, 19 nt, Human
gaccacccucacuggcucu

SEQ ID NO: 1259901 - RNA, 14 nt, Human
gaccacccugagcc

SEQ ID NO: 1259902 - RNA, 15 nt, Human
gaccacccugagccg

SEQ ID NO: 1259903 - RNA, 17 nt, Human
gacaugggacauuugcu

SEQ ID NO: 1259904 - RNA, 16 nt, Human
gacaugcgguagccag

SEQ ID NO: 1259905 - RNA, 17 nt, Human
gacaugcgguagccagc

SEQ ID NO: 1259906 - RNA, 18 nt, Human
gacaugcgguagccagca

SEQ ID NO: 1259907 - RNA, 18 nt, Human
gaccaccccgccugcccu

SEQ ID NO: 1259908 - RNA, 19 nt, Human
gaccaccccgccugcccuc

SEQ ID NO: 1259909 - RNA, 20 nt, Human
gaccaccccgccugcccuca

SEQ ID NO: 1259910 - RNA, 16 nt, Human
gacaugggacauuugc

SEQ ID NO: 1259911 - RNA, 22 nt, Human
gaccacgcccguccugccugug

SEQ ID NO: 1259912 - RNA, 22 nt, Human
gaccaccuuuguuucuccccca

SEQ ID NO: 1259913 - RNA, 13 nt, Human
gaccacggcucga

SEQ ID NO: 1259914 - RNA, 21 nt, Human
gaccacugcagaagacaguau

SEQ ID NO: 1259915 - RNA, 14 nt, Human
gaccacuguuauca

SEQ ID NO: 1259916 - RNA, 17 nt, Human
gaccagaagcuccccca

SEQ ID NO: 1259917 - RNA, 20 nt, Human
gaccagccuccaugcugccu

SEQ ID NO: 1259918 - RNA, 20 nt, Human
gaccagaagcucccccagca

SEQ ID NO: 1259919 - RNA, 21 nt, Human
gaccagccuccaugcugccuc

SEQ ID NO: 1259920 - RNA, 22 nt, Human
gaccagccuccaugcugccucc

SEQ ID NO: 1259921 - RNA, 16 nt, Human
gaccauugucucagag

SEQ ID NO: 1259922 - RNA, 14 nt, Human
gaccagccucucca

SEQ ID NO: 1259923 - RNA, 22 nt, Human
gacccacaagaaaugaaagcag

SEQ ID NO: 1259924 - RNA, 15 nt, Human
gacccacaagaaaug

SEQ ID NO: 1259925 - RNA, 16 nt, Human
gacccaaaaggcagaa

SEQ ID NO: 1259926 - RNA, 12 nt, Human
gacccccaacca

SEQ ID NO: 1259927 - RNA, 21 nt, Human
gacccccaaccaaguggcucc

SEQ ID NO: 1259928 - RNA, 11 nt, Human
gacccugcccu

SEQ ID NO: 1259929 - RNA, 16 nt, Human
gacccuggaggcccca

SEQ ID NO: 1259930 - RNA, 13 nt, Human
gacccuggcuccu

SEQ ID NO: 1259931 - RNA, 23 nt, Human
gacccuggcuccuugugccagag

SEQ ID NO: 1259932 - RNA, 15 nt, Human
gacccuggcuuucau

SEQ ID NO: 1259933 - RNA, 23 nt, Human
gacccuggguaggggaagagaag

SEQ ID NO: 1259934 - RNA, 22 nt, Human
gaccgcuacaccacucuggcag

SEQ ID NO: 1259935 - RNA, 12 nt, Human
gacccuuuucau

SEQ ID NO: 1259936 - RNA, 18 nt, Human
gacccuuuuggguuucug

SEQ ID NO: 1259937 - RNA, 12 nt, Human
gaccgcccccuc

SEQ ID NO: 1259938 - RNA, 14 nt, Human
gaccgcccccuccu

SEQ ID NO: 1259939 - RNA, 15 nt, Human
gaccgcccccuccuc

SEQ ID NO: 1259940 - RNA, 16 nt, Human
gaccgcccccuccucu

SEQ ID NO: 1259941 - RNA, 15 nt, Human
gaccgcccccugucu

SEQ ID NO: 1259942 - RNA, 19 nt, Human
gaccgcuacaccacucugg

SEQ ID NO: 1259943 - RNA, 20 nt, Human
gaccgcuacaccacucuggc

SEQ ID NO: 1259944 - RNA, 21 nt, Human
gaccgcuacaccacucuggca

SEQ ID NO: 1259945 - RNA, 23 nt, Human
gaccgcuacaccacucuggcagc

SEQ ID NO: 1259946 - RNA, 17 nt, Human
gaccggacuuuucugca

SEQ ID NO: 1259947 - RNA, 15 nt, Human
gacagagaggacugu

SEQ ID NO: 1259948 - RNA, 16 nt, Human
gacagagaggacugua

SEQ ID NO: 1259949 - RNA, 13 nt, Human
gacacccaggacu

SEQ ID NO: 1259950 - RNA, 14 nt, Human
gacacccaggacuu

SEQ ID NO: 1259951 - RNA, 19 nt, Human
gacagagaggacuguaggg

SEQ ID NO: 1259952 - RNA, 13 nt, Human
gacagagccagga

SEQ ID NO: 1259953 - RNA, 16 nt, Human
gacagagccaggagaa

SEQ ID NO: 1259954 - RNA, 15 nt, Human
gacagagccaggaga

SEQ ID NO: 1259955 - RNA, 16 nt, Human
gacagaguugauuuuu

SEQ ID NO: 1259956 - RNA, 21 nt, Human
gacagcccaggauacuggcac

SEQ ID NO: 1259957 - RNA, 21 nt, Human
gacagcuuguggcaagugaau

SEQ ID NO: 1259958 - RNA, 20 nt, Human
gacagcuuguaggggagggg

SEQ ID NO: 1259959 - RNA, 17 nt, Human
gacagggaggacgcucu

SEQ ID NO: 1259960 - RNA, 18 nt, Human
gacagggaggacgcucuc

SEQ ID NO: 1259961 - RNA, 20 nt, Human
gacagggaauuaggccccca

SEQ ID NO: 1259962 - RNA, 20 nt, Human
gacaguguuccccgauacca

SEQ ID NO: 1259963 - RNA, 21 nt, Human
gacaguguuccccgauaccau

SEQ ID NO: 1259964 - RNA, 23 nt, Human
gacaguguugaaaauguucagaa

SEQ ID NO: 1259965 - RNA, 14 nt, Human
gacauacuugaagg

SEQ ID NO: 1259966 - RNA, 15 nt, Human
gacauacuugaaggg

SEQ ID NO: 1259967 - RNA, 20 nt, Human
gacauagaauuaacacauga

SEQ ID NO: 1259968 - RNA, 17 nt, Human
gacauacuugaagggcc

SEQ ID NO: 1259969 - RNA, 18 nt, Human
gacauacuugaagggcca

SEQ ID NO: 1259970 - RNA, 19 nt, Human
gacauacuugaagggccag

SEQ ID NO: 1259971 - RNA, 20 nt, Human
gacauacuugaagggccaga

SEQ ID NO: 1259972 - RNA, 22 nt, Human
gacauacuugaagggccagagc

SEQ ID NO: 1259973 - RNA, 23 nt, Human
gacauacuugaagggccagagcc

SEQ ID NO: 1259974 - RNA, 22 nt, Human
gacagcccaggauacuggcaca

SEQ ID NO: 1259975 - RNA, 15 nt, Human
gacauccuccuccca

SEQ ID NO: 1259976 - RNA, 18 nt, Human
gacauccuccucccaccc

SEQ ID NO: 1259977 - RNA, 15 nt, Human
gacaucggaaaaaua

SEQ ID NO: 1259978 - RNA, 11 nt, Human
gacaugaauuu

SEQ ID NO: 1259979 - RNA, 21 nt, Human
gacaugaauuuuagcuuuugu

SEQ ID NO: 1259980 - RNA, 17 nt, Human
gacaugaauuuuagcuu

SEQ ID NO: 1259981 - RNA, 14 nt, Human
gacaugauuuccuu

SEQ ID NO: 1259982 - RNA, 16 nt, Human
gacaugauuuccuuga

SEQ ID NO: 1259983 - RNA, 17 nt, Human
gacaugauuuccuugaa

SEQ ID NO: 1259984 - RNA, 19 nt, Human
gacaugauuuccuugaaug

SEQ ID NO: 1259985 - RNA, 20 nt, Human
gacaugauuuccuugaaugu

SEQ ID NO: 1259986 - RNA, 22 nt, Human
gacaugauuuccuugaaugugg

SEQ ID NO: 1259987 - RNA, 24 nt, Human
gacaugauuuccuugaauguggcu

SEQ ID NO: 1259988 - RNA, 17 nt, Human
cuuuuuauggccuguga

SEQ ID NO: 1259989 - RNA, 13 nt, Human
cuuuuguucgcau

SEQ ID NO: 1259990 - RNA, 22 nt, Human
cuuuuucugcacuauaugcaaa

SEQ ID NO: 1259991 - RNA, 20 nt, Human
cuuuuucugcacuauaugca

SEQ ID NO: 1259992 - RNA, 16 nt, Human
cuuuuucugcacuaua

SEQ ID NO: 1259993 - RNA, 14 nt, Human
cuuuuucugcacua

SEQ ID NO: 1259994 - RNA, 13 nt, Human
cuuuuucugcacu

SEQ ID NO: 1259995 - RNA, 20 nt, Human
cuuuuucucuuuccaugaca

SEQ ID NO: 1259996 - RNA, 19 nt, Human
cuuuguuacuucucuaauu

SEQ ID NO: 1259997 - RNA, 18 nt, Human
cuuuguuaagacugcuga

SEQ ID NO: 1259998 - RNA, 14 nt, Human
cuuuguggcacugg

SEQ ID NO: 1259999 - RNA, 17 nt, Human
cuuugugugcucuccau

SEQ ID NO: 1260000 - RNA, 17 nt, Human
cuuuuugggagagacuu

SEQ ID NO: 1260001 - RNA, 20 nt, Human
cuuuuugggagagacuuguu

SEQ ID NO: 1260002 - RNA, 23 nt, Human
cuuuuuggucgaggaguaacaau

SEQ ID NO: 1260003 - RNA, 19 nt, Human
cuuuuugggagagacuugu

SEQ ID NO: 1260004 - RNA, 18 nt, Human
cuuuuuguauaaaauaga

SEQ ID NO: 1260005 - RNA, 13 nt, Human
cuuuuuguauaaa

SEQ ID NO: 1260006 - RNA, 22 nt, Human
cuuuuugugauaugcacaaugu

SEQ ID NO: 1260007 - RNA, 15 nt, Human
cuuuuuguguuuuuu

SEQ ID NO: 1260008 - RNA, 21 nt, Human
cuuuuuguucugguccuuuuu

SEQ ID NO: 1260009 - RNA, 13 nt, Human
gaaaaagcgaaaa

SEQ ID NO: 1260010 - RNA, 14 nt, Human
gaaaacacugugca

SEQ ID NO: 1260011 - RNA, 21 nt, Human
gaaaacacugugcacaucugu

SEQ ID NO: 1260012 - RNA, 23 nt, Human
gaaaaguuuagccccugaaagcc

SEQ ID NO: 1260013 - RNA, 15 nt, Human
gaaaauauuguuuua

SEQ ID NO: 1260014 - RNA, 22 nt, Human
gaaaauauuguuuuacaauagu

SEQ ID NO: 1260015 - RNA, 18 nt, Human
gaaaaucuuauaauuuaa

SEQ ID NO: 1260016 - RNA, 19 nt, Human
gaaaaucuuuauaaaugua

SEQ ID NO: 1260017 - RNA, 13 nt, Human
gaaaaugaaagcu

SEQ ID NO: 1260018 - RNA, 22 nt, Human
gaaaaucuacacuccagugaga

SEQ ID NO: 1260019 - RNA, 11 nt, Human
gaaaaucauau

SEQ ID NO: 1260020 - RNA, 14 nt, Human
gaaaaguugaauuu

SEQ ID NO: 1260021 - RNA, 15 nt, Human
gaaaaguugaauuuu

SEQ ID NO: 1260022 - RNA, 23 nt, Human
gaaaagcuuagcuuuagaaacag

SEQ ID NO: 1260023 - RNA, 22 nt, Human
gaaaaggcacccccgucaagag

SEQ ID NO: 1260024 - RNA, 12 nt, Human
gaaaaggccugg

SEQ ID NO: 1260025 - RNA, 16 nt, Human
gaaaaggccuggggug

SEQ ID NO: 1260026 - RNA, 13 nt, Human
gaaaaggccuggg

SEQ ID NO: 1260027 - RNA, 14 nt, Human
gaaaaggccugggg

SEQ ID NO: 1260028 - RNA, 16 nt, Human
gaaaacagaacacuua

SEQ ID NO: 1260029 - RNA, 15 nt, Human
gaaaacagaacacuu

SEQ ID NO: 1260030 - RNA, 12 nt, Human
gaaaacaggcac

SEQ ID NO: 1260031 - RNA, 18 nt, Human
gaaaacaggcacugcccu

SEQ ID NO: 1260032 - RNA, 22 nt, Human
gaaagcgccuccaacccuagca

SEQ ID NO: 1260033 - RNA, 17 nt, Human
gaaagcgccuccaaccc

SEQ ID NO: 1260034 - RNA, 14 nt, Human
gaaagccuucuuuu

SEQ ID NO: 1260035 - RNA, 18 nt, Human
gaaagccccacccaggcc

SEQ ID NO: 1260036 - RNA, 14 nt, Human
gaaagccccugccc

SEQ ID NO: 1260037 - RNA, 23 nt, Human
gaaagccccugccccuccucucc

SEQ ID NO: 1260038 - RNA, 10 nt, Human
gaaagccuga

SEQ ID NO: 1260039 - RNA, 12 nt, Human
gaaagccugagu

SEQ ID NO: 1260040 - RNA, 19 nt, Human
gaaagcuauauaagacaag

SEQ ID NO: 1260041 - RNA, 13 nt, Human
gaaagcucuagaa

SEQ ID NO: 1260042 - RNA, 12 nt, Human
gaaagcucuaga

SEQ ID NO: 1260043 - RNA, 15 nt, Human
gaaagcugacuuggc

SEQ ID NO: 1260044 - RNA, 16 nt, Human
gaaagcugacuuggcu

SEQ ID NO: 1260045 - RNA, 18 nt, Human
gaaagcugacuuggcugg

SEQ ID NO: 1260046 - RNA, 19 nt, Human
gaaagcugacuuggcuggu

SEQ ID NO: 1260047 - RNA, 20 nt, Human
gaaagcugacuuggcuggug

SEQ ID NO: 1260048 - RNA, 22 nt, Human
gaaagcugacuuggcuggugug

SEQ ID NO: 1260049 - RNA, 21 nt, Human
gaaagcuugcccuggugccuc

SEQ ID NO: 1260050 - RNA, 17 nt, Human
gaaagcuucaaacugca

SEQ ID NO: 1260051 - RNA, 16 nt, Human
gaaagcuucagugcug

SEQ ID NO: 1260052 - RNA, 18 nt, Human
gaaagcuucagugcugcc

SEQ ID NO: 1260053 - RNA, 21 nt, Human
gaaagcugacuuggcuggugu

SEQ ID NO: 1260054 - RNA, 17 nt, Human
gaaagcugccugguaua

SEQ ID NO: 1260055 - RNA, 13 nt, Human
gaaagccccaccc

SEQ ID NO: 1260056 - RNA, 16 nt, Human
gaaagccccacccagg

SEQ ID NO: 1260057 - RNA, 21 nt, Human
gaaagccccacccaggccagg

SEQ ID NO: 1260058 - RNA, 14 nt, Human
gaaagcagggacuu

SEQ ID NO: 1260059 - RNA, 18 nt, Human
gaaagcaguugagacaag

SEQ ID NO: 1260060 - RNA, 21 nt, Human
gaaagaguacucuuguuuccu

SEQ ID NO: 1260061 - RNA, 20 nt, Human
gaaagaggcugaggccugga

SEQ ID NO: 1260062 - RNA, 21 nt, Human
gaaagaggcugaggccuggac

SEQ ID NO: 1260063 - RNA, 22 nt, Human
gaaagaggcugaggccuggacu

SEQ ID NO: 1260064 - RNA, 22 nt, Human
gaaagcagaacagugauuacca

SEQ ID NO: 1260065 - RNA, 23 nt, Human
gaaagaggugaccccagggcaca

SEQ ID NO: 1260066 - RNA, 21 nt, Human
gaaagaggugaccccagggca

SEQ ID NO: 1260067 - RNA, 17 nt, Human
gaaagcagaacagugau

SEQ ID NO: 1260068 - RNA, 14 nt, Human
gaaagaggugaccc

SEQ ID NO: 1260069 - RNA, 19 nt, Human
gaaagaggugaccccaggg

SEQ ID NO: 1260070 - RNA, 20 nt, Human
gaaagaggugaccccagggc

SEQ ID NO: 1260071 - RNA, 13 nt, Human
gaaagaggaagca

SEQ ID NO: 1260072 - RNA, 16 nt, Human
gaaagaggcaccagga

SEQ ID NO: 1260073 - RNA, 17 nt, Human
gaaagaggcaccaggaa

SEQ ID NO: 1260074 - RNA, 20 nt, Human
gaaagaggcaccaggaagcc

SEQ ID NO: 1260075 - RNA, 21 nt, Human
gaaagaggcaccaggaagccg

SEQ ID NO: 1260076 - RNA, 21 nt, Human
gaaagaggaaugaaguacuca

SEQ ID NO: 1260077 - RNA, 13 nt, Human
gaaagagaaacac

SEQ ID NO: 1260078 - RNA, 18 nt, Human
gaaagagaaacaguuggu

SEQ ID NO: 1260079 - RNA, 17 nt, Human
gaaagagaacuuccaga

SEQ ID NO: 1260080 - RNA, 14 nt, Human
gaaaccuuccaccc

SEQ ID NO: 1260081 - RNA, 16 nt, Human
gaaacgucuucuaaac

SEQ ID NO: 1260082 - RNA, 19 nt, Human
gaaacuaggugcauauuua

SEQ ID NO: 1260083 - RNA, 21 nt, Human
gaaacuagaaagcagagauuu

SEQ ID NO: 1260084 - RNA, 23 nt, Human
gaaacucguuaauuuguaguguu

SEQ ID NO: 1260085 - RNA, 15 nt, Human
gaaacuccagaugcc

SEQ ID NO: 1260086 - RNA, 21 nt, Human
gaaacccugcacccauuagca

SEQ ID NO: 1260087 - RNA, 14 nt, Human
gaaacccugucucu

SEQ ID NO: 1260088 - RNA, 13 nt, Human
gaaaccuacugcc

SEQ ID NO: 1260089 - RNA, 19 nt, Human
gaaaccuacugcccaggca

SEQ ID NO: 1260090 - RNA, 19 nt, Human
gaaaccccuguaggccuca

SEQ ID NO: 1260091 - RNA, 16 nt, Human
gaaacacaacuauauu

SEQ ID NO: 1260092 - RNA, 13 nt, Human
gaaacacagaaac

SEQ ID NO: 1260093 - RNA, 15 nt, Human
gaaaaugauacagca

SEQ ID NO: 1260094 - RNA, 17 nt, Human
gaaaaugauacagcaga

SEQ ID NO: 1260095 - RNA, 13 nt, Human
gaaaccagcuucc

SEQ ID NO: 1260096 - RNA, 17 nt, Human
gaaaccagcuuccuuca

SEQ ID NO: 1260097 - RNA, 19 nt, Human
gaaaccagcuuccuucaga

SEQ ID NO: 1260098 - RNA, 21 nt, Human
gaaaccagcuuccuucagaga

SEQ ID NO: 1260099 - RNA, 22 nt, Human
gaaaccagcuuccuucagagag

SEQ ID NO: 1260100 - RNA, 23 nt, Human
gaaaccagcuuccuucagagagc

SEQ ID NO: 1260101 - RNA, 17 nt, Human
cuuguacuuuauuuucu

SEQ ID NO: 1260102 - RNA, 22 nt, Human
cuuguaggggaggggcuccuuu

SEQ ID NO: 1260103 - RNA, 23 nt, Human
cuuguaggggaggggcuccuuuc

SEQ ID NO: 1260104 - RNA, 23 nt, Human
cuugucaauaaaauccauacauu

SEQ ID NO: 1260105 - RNA, 17 nt, Human
cuuguauauuuuaagaa

SEQ ID NO: 1260106 - RNA, 23 nt, Human
cuuguauauuuuaagaaauaaca

SEQ ID NO: 1260107 - RNA, 19 nt, Human
cuuguauaagauccuagau

SEQ ID NO: 1260108 - RNA, 17 nt, Human
cuuguauaucuuguuuu

SEQ ID NO: 1260109 - RNA, 12 nt, Human
cuuguccagcug

SEQ ID NO: 1260110 - RNA, 13 nt, Human
cuuguccagcuga

SEQ ID NO: 1260111 - RNA, 13 nt, Human
cuugucacgccag

SEQ ID NO: 1260112 - RNA, 16 nt, Human
cuugucacgccagacu

SEQ ID NO: 1260113 - RNA, 18 nt, Human
cuugucacgccagacuuc

SEQ ID NO: 1260114 - RNA, 12 nt, Human
cuugucaugugu

SEQ ID NO: 1260115 - RNA, 13 nt, Human
cuugucaugugua

SEQ ID NO: 1260116 - RNA, 14 nt, Human
cuugucauguguau

SEQ ID NO: 1260117 - RNA, 15 nt, Human
cuugucauguguaua

SEQ ID NO: 1260118 - RNA, 16 nt, Human
cuugucauguguauaa

SEQ ID NO: 1260119 - RNA, 17 nt, Human
cuugucauguguauaaa

SEQ ID NO: 1260120 - RNA, 18 nt, Human
cuugucauguguauaaaa

SEQ ID NO: 1260121 - RNA, 22 nt, Human
cuugucauuguuauauaaucau

SEQ ID NO: 1260122 - RNA, 18 nt, Human
cuugucauuuuuuuucuu

SEQ ID NO: 1260123 - RNA, 19 nt, Human
cuugucauguguauaaaaa

SEQ ID NO: 1260124 - RNA, 19 nt, Human
cuugaguuuaaauuguaau

SEQ ID NO: 1260125 - RNA, 12 nt, Human
cuugaguuuguc

SEQ ID NO: 1260126 - RNA, 16 nt, Human
cuugaguuugucgcuc

SEQ ID NO: 1260127 - RNA, 13 nt, Human
cuugaguuugucg

SEQ ID NO: 1260128 - RNA, 14 nt, Human
cuuggggggguggc

SEQ ID NO: 1260129 - RNA, 16 nt, Human
cuuggggggguggccg

SEQ ID NO: 1260130 - RNA, 18 nt, Human
cuuggggggguggccgcu

SEQ ID NO: 1260131 - RNA, 19 nt, Human
cuuggggggguggccgcug

SEQ ID NO: 1260132 - RNA, 22 nt, Human
cuuggggggguggccgcugagu

SEQ ID NO: 1260133 - RNA, 13 nt, Human
cuuggggggugau

SEQ ID NO: 1260134 - RNA, 20 nt, Human
cuuggggggugaugagggca

SEQ ID NO: 1260135 - RNA, 22 nt, Human
cuuggggggugaugagggcagc

SEQ ID NO: 1260136 - RNA, 24 nt, Human
cuuggggggugaugagggcagcag

SEQ ID NO: 1260137 - RNA, 20 nt, Human
cuuggggguccuccuccagg

SEQ ID NO: 1260138 - RNA, 23 nt, Human
cuuggggguccuccuccagggac

SEQ ID NO: 1260139 - RNA, 21 nt, Human
cuuggggguccuccuccaggg

SEQ ID NO: 1260140 - RNA, 22 nt, Human
cuuggggguccuccuccaggga

SEQ ID NO: 1260141 - RNA, 21 nt, Human
cuuuaucuugaauaauguaag

SEQ ID NO: 1260142 - RNA, 18 nt, Human
cuuuaucuugaauaaugu

SEQ ID NO: 1260143 - RNA, 23 nt, Human
cuuuaucuugaauaauguaagac

SEQ ID NO: 1260144 - RNA, 20 nt, Human
cuuuaugauaauagauucuc

SEQ ID NO: 1260145 - RNA, 19 nt, Human
cuuuaugauaauagauucu

SEQ ID NO: 1260146 - RNA, 23 nt, Human
cuuuauacagcuguauugucuga

SEQ ID NO: 1260147 - RNA, 14 nt, Human
cuuuauacagcugu

SEQ ID NO: 1260148 - RNA, 15 nt, Human
cuuuauagaucagcc

SEQ ID NO: 1260149 - RNA, 13 nt, Human
cuuuauaugaaga

SEQ ID NO: 1260150 - RNA, 22 nt, Human
cuuuauaugaagaaaaucacuu

SEQ ID NO: 1260151 - RNA, 20 nt, Human
cuuuaaaauuacaacuaagu

SEQ ID NO: 1260152 - RNA, 19 nt, Human
cuuuaaaauuacaacuaag

SEQ ID NO: 1260153 - RNA, 17 nt, Human
cuuuaaaauuacaacua

SEQ ID NO: 1260154 - RNA, 16 nt, Human
cuuuaaaauguaaagc

SEQ ID NO: 1260155 - RNA, 19 nt, Human
cuuuaaaauguaaagccau

SEQ ID NO: 1260156 - RNA, 17 nt, Human
cuuuaaaaggaaagaaa

SEQ ID NO: 1260157 - RNA, 17 nt, Human
cuuuaaaauaucuacau

SEQ ID NO: 1260158 - RNA, 18 nt, Human
cuuuaaaaggaaagaaaa

SEQ ID NO: 1260159 - RNA, 16 nt, Human
cuuuaaaaggaaagaa

SEQ ID NO: 1260160 - RNA, 18 nt, Human
cuuuaaaagaugcuuuua

SEQ ID NO: 1260161 - RNA, 15 nt, Human
cuugugucucugugc

SEQ ID NO: 1260162 - RNA, 16 nt, Human
cuugugucaaacagua

SEQ ID NO: 1260163 - RNA, 14 nt, Human
cuugugucccauga

SEQ ID NO: 1260164 - RNA, 21 nt, Human
cuuuaaaauguaaagccaugc

SEQ ID NO: 1260165 - RNA, 21 nt, Human
cuuuaaaauuggguucacagc

SEQ ID NO: 1260166 - RNA, 16 nt, Human
cuuuaccuuuuuucuu

SEQ ID NO: 1260167 - RNA, 15 nt, Human
cuuuagauagcccug

SEQ ID NO: 1260168 - RNA, 19 nt, Human
cuuuagauagcccuguccu

SEQ ID NO: 1260169 - RNA, 20 nt, Human
cuuuagauagcccuguccug

SEQ ID NO: 1260170 - RNA, 21 nt, Human
cuuuagauagcccuguccugg

SEQ ID NO: 1260171 - RNA, 15 nt, Human
cuuuagaucucugaa

SEQ ID NO: 1260172 - RNA, 16 nt, Human
cuuuagaucucugaag

SEQ ID NO: 1260173 - RNA, 16 nt, Human
cuuucucuuucccugg

SEQ ID NO: 1260174 - RNA, 18 nt, Human
cuuucucuuucccugguc

SEQ ID NO: 1260175 - RNA, 21 nt, Human
cuuucucuuucccuggucccu

SEQ ID NO: 1260176 - RNA, 23 nt, Human
cuuucuggauuauucugggggcu

SEQ ID NO: 1260177 - RNA, 14 nt, Human
cuuucucugaggac

SEQ ID NO: 1260178 - RNA, 15 nt, Human
cuuucucugaggaca

SEQ ID NO: 1260179 - RNA, 13 nt, Human
cuuucucugccag

SEQ ID NO: 1260180 - RNA, 14 nt, Human
cuuucucugccagu

SEQ ID NO: 1260181 - RNA, 16 nt, Human
cuuucucugccaguga

SEQ ID NO: 1260182 - RNA, 18 nt, Human
cuuucucugccagugaca

SEQ ID NO: 1260183 - RNA, 15 nt, Human
cuuuccugaauccaa

SEQ ID NO: 1260184 - RNA, 22 nt, Human
cuuuccugaauccaaacuaauc

SEQ ID NO: 1260185 - RNA, 22 nt, Human
cuuucucucuuuauacagcugu

SEQ ID NO: 1260186 - RNA, 12 nt, Human
cuuucucugagg

SEQ ID NO: 1260187 - RNA, 20 nt, Human
cuuucugggcaccggggccu

SEQ ID NO: 1260188 - RNA, 16 nt, Human
cuuucuguaaccauaa

SEQ ID NO: 1260189 - RNA, 11 nt, Human
cuuucuuccuc

SEQ ID NO: 1260190 - RNA, 20 nt, Human
cuuucuuccggccccucccc

SEQ ID NO: 1260191 - RNA, 13 nt, Human
cuuucuguauaua

SEQ ID NO: 1260192 - RNA, 18 nt, Human
cuuucuguauauacuuuu

SEQ ID NO: 1260193 - RNA, 13 nt, Human
cuuucccuccuug

SEQ ID NO: 1260194 - RNA, 14 nt, Human
cuuucccuccuugg

SEQ ID NO: 1260195 - RNA, 15 nt, Human
cuuucccuccuuggu

SEQ ID NO: 1260196 - RNA, 18 nt, Human
cuuucccuccuuggugau

SEQ ID NO: 1260197 - RNA, 13 nt, Human
cuuucccugccuc

SEQ ID NO: 1260198 - RNA, 13 nt, Human
cuuucccuggucc

SEQ ID NO: 1260199 - RNA, 17 nt, Human
cuuucccuucaguaccc

SEQ ID NO: 1260200 - RNA, 20 nt, Human
cuuuauguaguuuuuauaug

SEQ ID NO: 1260201 - RNA, 20 nt, Human
cuuuccauaaauccuugaug

SEQ ID NO: 1260202 - RNA, 23 nt, Human
cuuuauggcagacauugugcuag

SEQ ID NO: 1260203 - RNA, 13 nt, Human
cuuuaugcuugca

SEQ ID NO: 1260204 - RNA, 19 nt, Human
cuuuauguaguuuuuauau

SEQ ID NO: 1260205 - RNA, 21 nt, Human
cuuuaugucuguggauuuuuu

SEQ ID NO: 1260206 - RNA, 13 nt, Human
cuuucccaacacc

SEQ ID NO: 1260207 - RNA, 18 nt, Human
cuuuccauuggaucucau

SEQ ID NO: 1260208 - RNA, 12 nt, Human
cuuuccauuaca

SEQ ID NO: 1260209 - RNA, 15 nt, Human
cuuuccauccauggc

SEQ ID NO: 1260210 - RNA, 18 nt, Human
cuuuccauccauggccag

SEQ ID NO: 1260211 - RNA, 20 nt, Human
cuuuccauccauggccagca

SEQ ID NO: 1260212 - RNA, 21 nt, Human
cuuuccauccauggccagcag

SEQ ID NO: 1260213 - RNA, 22 nt, Human
cuuuccauccauggccagcagc

SEQ ID NO: 1260214 - RNA, 12 nt, Human
cuuucccuaagc

SEQ ID NO: 1260215 - RNA, 17 nt, Human
cuuucccuaagccagcu

SEQ ID NO: 1260216 - RNA, 18 nt, Human
cuuucccuaagccagcug

SEQ ID NO: 1260217 - RNA, 13 nt, Human
cuuucccuacccu

SEQ ID NO: 1260218 - RNA, 15 nt, Human
cuuucccuacccucu

SEQ ID NO: 1260219 - RNA, 16 nt, Human
cuuucccuacccucua

SEQ ID NO: 1260220 - RNA, 18 nt, Human
cuuucccuacccucuaga

SEQ ID NO: 1260221 - RNA, 16 nt, Human
cuuuggcugcaugcga

SEQ ID NO: 1260222 - RNA, 14 nt, Human
cuuuggcugcaugc

SEQ ID NO: 1260223 - RNA, 22 nt, Human
cuuuggcugaaaggaagcugug

SEQ ID NO: 1260224 - RNA, 13 nt, Human
cuuuggcuccccu

SEQ ID NO: 1260225 - RNA, 15 nt, Human
cuuuggcuccccugu

SEQ ID NO: 1260226 - RNA, 14 nt, Human
cuuugucagggagu

SEQ ID NO: 1260227 - RNA, 17 nt, Human
cuuugcucauauuuccc

SEQ ID NO: 1260228 - RNA, 22 nt, Human
cuuugcgcuccuggcccagccu

SEQ ID NO: 1260229 - RNA, 21 nt, Human
cuuugcgcuccuggcccagcc

SEQ ID NO: 1260230 - RNA, 18 nt, Human
cuuugcuaaagacaugaa

SEQ ID NO: 1260231 - RNA, 13 nt, Human
cuuugcgcuccug

SEQ ID NO: 1260232 - RNA, 15 nt, Human
cuuugcgcuccuggc

SEQ ID NO: 1260233 - RNA, 17 nt, Human
cuuugcgcuccuggccc

SEQ ID NO: 1260234 - RNA, 20 nt, Human
cuuugcgcuccuggcccagc

SEQ ID NO: 1260235 - RNA, 14 nt, Human
cuuugugcauucug

SEQ ID NO: 1260236 - RNA, 13 nt, Human
cuuugugcccuau

SEQ ID NO: 1260237 - RNA, 18 nt, Human
cuuugugcccuaucaccc

SEQ ID NO: 1260238 - RNA, 16 nt, Human
cuuugugcacauuuau

SEQ ID NO: 1260239 - RNA, 18 nt, Human
cuuugugcacauuuauuu

SEQ ID NO: 1260240 - RNA, 23 nt, Human
cuuugugcacauuuauuuccucc

SEQ ID NO: 1260241 - RNA, 13 nt, Human
cuuugugcauucu

SEQ ID NO: 1260242 - RNA, 23 nt, Human
cuuugucuacuucaaaaguuugu

SEQ ID NO: 1260243 - RNA, 22 nt, Human
cuuugugaauagaacucugaaa

SEQ ID NO: 1260244 - RNA, 16 nt, Human
cuuugucacuguuuca

SEQ ID NO: 1260245 - RNA, 22 nt, Human
cuuugcauaacguauaaaagcc

SEQ ID NO: 1260246 - RNA, 18 nt, Human
cuuugaccugccucccuu

SEQ ID NO: 1260247 - RNA, 12 nt, Human
cuuugccucaaa

SEQ ID NO: 1260248 - RNA, 15 nt, Human
cuuugaccugccucc

SEQ ID NO: 1260249 - RNA, 14 nt, Human
cuuugaccugccuc

SEQ ID NO: 1260250 - RNA, 22 nt, Human
cuuugcagccggcacagggucu

SEQ ID NO: 1260251 - RNA, 12 nt, Human
cuuucuuccucu

SEQ ID NO: 1260252 - RNA, 13 nt, Human
cuuucuuccucug

SEQ ID NO: 1260253 - RNA, 14 nt, Human
cuuucuuccucugc

SEQ ID NO: 1260254 - RNA, 15 nt, Human
cuuucuuccucugcu

SEQ ID NO: 1260255 - RNA, 13 nt, Human
cuuauauuaugga

SEQ ID NO: 1260256 - RNA, 19 nt, Human
cuuauaucuauauuuuaca

SEQ ID NO: 1260257 - RNA, 16 nt, Human
cuuauaucuggccucu

SEQ ID NO: 1260258 - RNA, 22 nt, Human
cuuauaucuggccucugcuuuc

SEQ ID NO: 1260259 - RNA, 21 nt, Human
cuuauaucuggccucugcuuu

SEQ ID NO: 1260260 - RNA, 21 nt, Human
cuuauauuaauauuccucagu

SEQ ID NO: 1260261 - RNA, 15 nt, Human
cuuauccuccaccgu

SEQ ID NO: 1260262 - RNA, 12 nt, Human
cuuauccucccu

SEQ ID NO: 1260263 - RNA, 14 nt, Human
cuuauccucccugu

SEQ ID NO: 1260264 - RNA, 19 nt, Human
cuuauaggaauugacccac

SEQ ID NO: 1260265 - RNA, 16 nt, Human
cuuauagccucugucu

SEQ ID NO: 1260266 - RNA, 15 nt, Human
cuuauauaauugcca

SEQ ID NO: 1260267 - RNA, 14 nt, Human
cuuauagacaacau

SEQ ID NO: 1260268 - RNA, 16 nt, Human
cuuauacgaguaauau

SEQ ID NO: 1260269 - RNA, 23 nt, Human
cuuaguucaaguccugccucuua

SEQ ID NO: 1260270 - RNA, 17 nt, Human
cuuaguuuguguguugu

SEQ ID NO: 1260271 - RNA, 22 nt, Human
cuuaguuuguguguugucucuu

SEQ ID NO: 1260272 - RNA, 23 nt, Human
cuuaguuuguguguugucucuug

SEQ ID NO: 1260273 - RNA, 16 nt, Human
cuuauacgaaauaauu

SEQ ID NO: 1260274 - RNA, 17 nt, Human
cuuauacgaaauaauug

SEQ ID NO: 1260275 - RNA, 18 nt, Human
cuuauacgaaauaauugu

SEQ ID NO: 1260276 - RNA, 20 nt, Human
cuuauacgaaauaauuguug

SEQ ID NO: 1260277 - RNA, 21 nt, Human
cuuauacgaaauaauuguugu

SEQ ID NO: 1260278 - RNA, 22 nt, Human
cuuauacgaaauaauuguuguu

SEQ ID NO: 1260279 - RNA, 22 nt, Human
cuuagaugcaguucugaagaag

SEQ ID NO: 1260280 - RNA, 16 nt, Human
cuguucugcacacagc

SEQ ID NO: 1260281 - RNA, 21 nt, Human
cuguucucuugggaacugaac

SEQ ID NO: 1260282 - RNA, 12 nt, Human
cuuagucucagu

SEQ ID NO: 1260283 - RNA, 13 nt, Human
cuuagucucaguu

SEQ ID NO: 1260284 - RNA, 18 nt, Human
cuuagucucaguuugugu

SEQ ID NO: 1260285 - RNA, 19 nt, Human
cuuagucucaguuugugug

SEQ ID NO: 1260286 - RNA, 19 nt, Human
cuuagugcaguuauuugcu

SEQ ID NO: 1260287 - RNA, 20 nt, Human
cuuagucucaguuugugugu

SEQ ID NO: 1260288 - RNA, 23 nt, Human
cuuagucucaguuugugugucuu

SEQ ID NO: 1260289 - RNA, 21 nt, Human
cuuagucuagguccuuguugu

SEQ ID NO: 1260290 - RNA, 11 nt, Human
cuuaguguaug

SEQ ID NO: 1260291 - RNA, 15 nt, Human
cuuaguguaugauua

SEQ ID NO: 1260292 - RNA, 15 nt, Human
cuucaaaguuuaaua

SEQ ID NO: 1260293 - RNA, 16 nt, Human
cuucaaaguuuaauaa

SEQ ID NO: 1260294 - RNA, 17 nt, Human
cuucaaagcaaaugucu

SEQ ID NO: 1260295 - RNA, 23 nt, Human
cuucaaacuagggccaagcccag

SEQ ID NO: 1260296 - RNA, 14 nt, Human
cuucaaacuacuuu

SEQ ID NO: 1260297 - RNA, 20 nt, Human
cuucaaaauguuaucuucuc

SEQ ID NO: 1260298 - RNA, 22 nt, Human
cuucaaaauguuaucuucucaa

SEQ ID NO: 1260299 - RNA, 23 nt, Human
cuucaaaauguuaucuucucaag

SEQ ID NO: 1260300 - RNA, 11 nt, Human
cuucaaacuac

SEQ ID NO: 1260301 - RNA, 18 nt, Human
cuuauuucaucauucacu

SEQ ID NO: 1260302 - RNA, 17 nt, Human
cuuauuucaugaaaauu

SEQ ID NO: 1260303 - RNA, 16 nt, Human
cuuauuuguauauggu

SEQ ID NO: 1260304 - RNA, 21 nt, Human
cuucaaaaguuuguuugcuua

SEQ ID NO: 1260305 - RNA, 23 nt, Human
cuuauuuagauucacuuaacaaa

SEQ ID NO: 1260306 - RNA, 22 nt, Human
cuuauuuaugaaaguauuaaaa

SEQ ID NO: 1260307 - RNA, 15 nt, Human
cuuauuucaucauuc

SEQ ID NO: 1260308 - RNA, 17 nt, Human
cuuauuuauuguauucu

SEQ ID NO: 1260309 - RNA, 19 nt, Human
cuuauuuauuguauucugg

SEQ ID NO: 1260310 - RNA, 21 nt, Human
cuuauuuauucauauuuucuu

SEQ ID NO: 1260311 - RNA, 14 nt, Human
cuuauuuauuguau

SEQ ID NO: 1260312 - RNA, 16 nt, Human
cuuauuuauuguauuc

SEQ ID NO: 1260313 - RNA, 23 nt, Human
cuuaucuaaucaugaaacucccu

SEQ ID NO: 1260314 - RNA, 18 nt, Human
cuuaucuacuuccaaacu

SEQ ID NO: 1260315 - RNA, 15 nt, Human
cuuauccucccugua

SEQ ID NO: 1260316 - RNA, 16 nt, Human
cuuauccucccuguaa

SEQ ID NO: 1260317 - RNA, 17 nt, Human
cuuauccucccuguaac

SEQ ID NO: 1260318 - RNA, 18 nt, Human
cuuauccucccuguaacu

SEQ ID NO: 1260319 - RNA, 20 nt, Human
cuuauccucccuguaacuug

SEQ ID NO: 1260320 - RNA, 19 nt, Human
cuuauccucccuguaacuu

SEQ ID NO: 1260321 - RNA, 15 nt, Human
cuuaucgaaacucau

SEQ ID NO: 1260322 - RNA, 16 nt, Human
cuucaacucccugccc

SEQ ID NO: 1260323 - RNA, 20 nt, Human
cuucaagcucugagggaaag

SEQ ID NO: 1260324 - RNA, 16 nt, Human
cuucaaccauucccca

SEQ ID NO: 1260325 - RNA, 20 nt, Human
cuucaaccauuccccauggg

SEQ ID NO: 1260326 - RNA, 19 nt, Human
cuucacaccuacccuccuu

SEQ ID NO: 1260327 - RNA, 17 nt, Human
cuucaccauuuggcaau

SEQ ID NO: 1260328 - RNA, 15 nt, Human
cuucaauuuauaccu

SEQ ID NO: 1260329 - RNA, 17 nt, Human
cuucaauccuugaaggu

SEQ ID NO: 1260330 - RNA, 14 nt, Human
cuucccuuuccuga

SEQ ID NO: 1260331 - RNA, 19 nt, Human
cuuccuaaauauuaugaga

SEQ ID NO: 1260332 - RNA, 22 nt, Human
cuuccuaaauauuaugagaugc

SEQ ID NO: 1260333 - RNA, 16 nt, Human
cuuccuaaauuuuccu

SEQ ID NO: 1260334 - RNA, 19 nt, Human
cuuccuaaauuuuccuguc

SEQ ID NO: 1260335 - RNA, 20 nt, Human
cuuccuaaauuuuccugucc

SEQ ID NO: 1260336 - RNA, 13 nt, Human
cuuccuaauucca

SEQ ID NO: 1260337 - RNA, 17 nt, Human
cuuccuaauuccacagc

SEQ ID NO: 1260338 - RNA, 18 nt, Human
cuuccuaauuccacagcu

SEQ ID NO: 1260339 - RNA, 19 nt, Human
cuuccuaauuccacagcug

SEQ ID NO: 1260340 - RNA, 13 nt, Human
cuuccucccucau

SEQ ID NO: 1260341 - RNA, 21 nt, Human
cuuccuaaauuuuccuguccu

SEQ ID NO: 1260342 - RNA, 15 nt, Human
cuuccucagccagcc

SEQ ID NO: 1260343 - RNA, 16 nt, Human
cuuccucagccagccu

SEQ ID NO: 1260344 - RNA, 17 nt, Human
cuuccucagccagccuc

SEQ ID NO: 1260345 - RNA, 18 nt, Human
cuuccucauccaccccau

SEQ ID NO: 1260346 - RNA, 22 nt, Human
cuuccucauccaccccaucccu

SEQ ID NO: 1260347 - RNA, 23 nt, Human
cuuccucauccaccccaucccuc

SEQ ID NO: 1260348 - RNA, 20 nt, Human
cuucccuuuccugaguccca

SEQ ID NO: 1260349 - RNA, 16 nt, Human
cuucccugugccuccu

SEQ ID NO: 1260350 - RNA, 21 nt, Human
cuucccugugccuccucccuc

SEQ ID NO: 1260351 - RNA, 22 nt, Human
cuucccuguguaguuugugcug

SEQ ID NO: 1260352 - RNA, 12 nt, Human
cuucccuaaucu

SEQ ID NO: 1260353 - RNA, 14 nt, Human
cuucccugugccuc

SEQ ID NO: 1260354 - RNA, 15 nt, Human
cuucccugugccucc

SEQ ID NO: 1260355 - RNA, 23 nt, Human
cuucccuguuuuccccccaaggg

SEQ ID NO: 1260356 - RNA, 19 nt, Human
cuucccgcucagcccuccc

SEQ ID NO: 1260357 - RNA, 23 nt, Human
cuucccgcucagcccucccugcc

SEQ ID NO: 1260358 - RNA, 21 nt, Human
cuuccaggggagguucaguga

SEQ ID NO: 1260359 - RNA, 14 nt, Human
cuucccauccccag

SEQ ID NO: 1260360 - RNA, 15 nt, Human
cuucccauccccagc

SEQ ID NO: 1260361 - RNA, 17 nt, Human
cuucccauccccagcga

SEQ ID NO: 1260362 - RNA, 15 nt, Human
cuucccaucgcuguc

SEQ ID NO: 1260363 - RNA, 18 nt, Human
cuucccccucucccaguu

SEQ ID NO: 1260364 - RNA, 16 nt, Human
cuucccccucucccag

SEQ ID NO: 1260365 - RNA, 17 nt, Human
cuucccccucucccagu

SEQ ID NO: 1260366 - RNA, 18 nt, Human
cuuccccuuauccucccu

SEQ ID NO: 1260367 - RNA, 20 nt, Human
cuuccccuuauccucccugu

SEQ ID NO: 1260368 - RNA, 21 nt, Human
cuuccccuuauccucccugua

SEQ ID NO: 1260369 - RNA, 14 nt, Human
cuuccacccagugc

SEQ ID NO: 1260370 - RNA, 12 nt, Human
cuuccacccagu

SEQ ID NO: 1260371 - RNA, 13 nt, Human
cuuccacccaggg

SEQ ID NO: 1260372 - RNA, 19 nt, Human
cuuccacguacugcagccu

SEQ ID NO: 1260373 - RNA, 20 nt, Human
cuuccacguacugcagccuc

SEQ ID NO: 1260374 - RNA, 14 nt, Human
cuuccacugagggc

SEQ ID NO: 1260375 - RNA, 15 nt, Human
cuuccacugagggca

SEQ ID NO: 1260376 - RNA, 21 nt, Human
cuucauucaagucagcucuuc

SEQ ID NO: 1260377 - RNA, 12 nt, Human
cuucauuucaga

SEQ ID NO: 1260378 - RNA, 15 nt, Human
cuucagggagugagg

SEQ ID NO: 1260379 - RNA, 19 nt, Human
cuucaggcucuucuccuuu

SEQ ID NO: 1260380 - RNA, 22 nt, Human
cuucaggcucuucuccuuucac

SEQ ID NO: 1260381 - RNA, 21 nt, Human
cuucaccauuuggcaaugcca

SEQ ID NO: 1260382 - RNA, 19 nt, Human
cuucaguacccucucagcu

SEQ ID NO: 1260383 - RNA, 22 nt, Human
cuucaguacccucucagcucca

SEQ ID NO: 1260384 - RNA, 23 nt, Human
cuucaguacccucucagcuccag

SEQ ID NO: 1260385 - RNA, 18 nt, Human
cuugaaaauuaacaugaa

SEQ ID NO: 1260386 - RNA, 22 nt, Human
cuugaaaauaagaauagaaaua

SEQ ID NO: 1260387 - RNA, 13 nt, Human
cuugaaagaaaug

SEQ ID NO: 1260388 - RNA, 13 nt, Human
cuugaaaauuaac

SEQ ID NO: 1260389 - RNA, 12 nt, Human
cuugaaaauuaa

SEQ ID NO: 1260390 - RNA, 21 nt, Human
cuugaaagaagaaaagguucu

SEQ ID NO: 1260391 - RNA, 19 nt, Human
cuugaaagaagaaaagguu

SEQ ID NO: 1260392 - RNA, 15 nt, Human
cuugaaauuuuaacc

SEQ ID NO: 1260393 - RNA, 16 nt, Human
cuugaaauuuuaaccu

SEQ ID NO: 1260394 - RNA, 17 nt, Human
cuugaaauuuuaaccua

SEQ ID NO: 1260395 - RNA, 18 nt, Human
cuugaaaaaugcauguug

SEQ ID NO: 1260396 - RNA, 12 nt, Human
cuugaaaaaugc

SEQ ID NO: 1260397 - RNA, 14 nt, Human
cuucuuuagaacag

SEQ ID NO: 1260398 - RNA, 14 nt, Human
cuugaaaaaaaaca

SEQ ID NO: 1260399 - RNA, 16 nt, Human
cuugaaaaaaaacagu

SEQ ID NO: 1260400 - RNA, 18 nt, Human
cuugaaaaaaaacagugg

SEQ ID NO: 1260401 - RNA, 15 nt, Human
cuugaaaaagacauu

SEQ ID NO: 1260402 - RNA, 20 nt, Human
cuugaaaaaaaacaguggau

SEQ ID NO: 1260403 - RNA, 16 nt, Human
cuugaaaauaagaaua

SEQ ID NO: 1260404 - RNA, 16 nt, Human
cuucuuggccauggga

SEQ ID NO: 1260405 - RNA, 16 nt, Human
cuucuuguguguaugc

SEQ ID NO: 1260406 - RNA, 15 nt, Human
cuucuguugcugccu

SEQ ID NO: 1260407 - RNA, 13 nt, Human
cuucuugccucug

SEQ ID NO: 1260408 - RNA, 15 nt, Human
cuucuugccucugug

SEQ ID NO: 1260409 - RNA, 16 nt, Human
cuucuugccucugugc

SEQ ID NO: 1260410 - RNA, 17 nt, Human
cuucuugccucugugcu

SEQ ID NO: 1260411 - RNA, 18 nt, Human
cuucuugccucugugcug

SEQ ID NO: 1260412 - RNA, 20 nt, Human
cuucuugcuucuuucuagaa

SEQ ID NO: 1260413 - RNA, 21 nt, Human
cuucuugcuucuuucuagaaa

SEQ ID NO: 1260414 - RNA, 18 nt, Human
cuucuuggccaugggagg

SEQ ID NO: 1260415 - RNA, 15 nt, Human
cuucuguggcucaca

SEQ ID NO: 1260416 - RNA, 22 nt, Human
cuucuguggcucacagaacccu

SEQ ID NO: 1260417 - RNA, 13 nt, Human
cuucuguggcuca

SEQ ID NO: 1260418 - RNA, 13 nt, Human
cuugaacuccuga

SEQ ID NO: 1260419 - RNA, 16 nt, Human
cuugaacuccugaccu

SEQ ID NO: 1260420 - RNA, 14 nt, Human
cuugaacccgggag

SEQ ID NO: 1260421 - RNA, 23 nt, Human
cuugaacccaggucucccuggau

SEQ ID NO: 1260422 - RNA, 16 nt, Human
cuugaacguuuucuaa

SEQ ID NO: 1260423 - RNA, 17 nt, Human
cuugaacguuuucuaau

SEQ ID NO: 1260424 - RNA, 18 nt, Human
cuugaacguuuucuaauu

SEQ ID NO: 1260425 - RNA, 18 nt, Human
cuugaacuccugaccuca

SEQ ID NO: 1260426 - RNA, 19 nt, Human
cuugaacguuuucuaauug

SEQ ID NO: 1260427 - RNA, 21 nt, Human
cuugaacguuuucuaauugcu

SEQ ID NO: 1260428 - RNA, 12 nt, Human
cuugaagaacug

SEQ ID NO: 1260429 - RNA, 17 nt, Human
cuugaagaacugcaggc

SEQ ID NO: 1260430 - RNA, 18 nt, Human
cuugaagaacugcaggcc

SEQ ID NO: 1260431 - RNA, 20 nt, Human
cuugaagaacugcaggcccu

SEQ ID NO: 1260432 - RNA, 22 nt, Human
cuugaagaacugcaggcccugg

SEQ ID NO: 1260433 - RNA, 22 nt, Human
cuugaacguuuucuaauugcuu

SEQ ID NO: 1260434 - RNA, 13 nt, Human
cuugacccugagc

SEQ ID NO: 1260435 - RNA, 15 nt, Human
cuugacccugagcug

SEQ ID NO: 1260436 - RNA, 14 nt, Human
cuugacccugagcu

SEQ ID NO: 1260437 - RNA, 14 nt, Human
cuugaccugaggcu

SEQ ID NO: 1260438 - RNA, 17 nt, Human
cuugaccugaggcugug

SEQ ID NO: 1260439 - RNA, 20 nt, Human
cuugaccugaggcugugguc

SEQ ID NO: 1260440 - RNA, 23 nt, Human
cuugaccugaggcuguggucaca

SEQ ID NO: 1260441 - RNA, 14 nt, Human
cuugaggucucagc

SEQ ID NO: 1260442 - RNA, 15 nt, Human
cuugaggucucagcc

SEQ ID NO: 1260443 - RNA, 16 nt, Human
cuugaggucucagccc

SEQ ID NO: 1260444 - RNA, 11 nt, Human
cuugagcucua

SEQ ID NO: 1260445 - RNA, 12 nt, Human
cuugagcucuau

SEQ ID NO: 1260446 - RNA, 14 nt, Human
cuugagcucuauua

SEQ ID NO: 1260447 - RNA, 15 nt, Human
cuugagcucuauuau

SEQ ID NO: 1260448 - RNA, 16 nt, Human
cuugagcucuauuaug

SEQ ID NO: 1260449 - RNA, 18 nt, Human
cuugagcucuauuaugaa

SEQ ID NO: 1260450 - RNA, 13 nt, Human
cuucuccacugga

SEQ ID NO: 1260451 - RNA, 16 nt, Human
cuuccuguccagcucc

SEQ ID NO: 1260452 - RNA, 14 nt, Human
cuucuccacuggau

SEQ ID NO: 1260453 - RNA, 15 nt, Human
cuucuccacuggaug

SEQ ID NO: 1260454 - RNA, 15 nt, Human
cuuccucccucauuc

SEQ ID NO: 1260455 - RNA, 22 nt, Human
cuuccuggagcagaagcagcaa

SEQ ID NO: 1260456 - RNA, 19 nt, Human
cuuccuggccgccuggguc

SEQ ID NO: 1260457 - RNA, 11 nt, Human
cuuccuggccg

SEQ ID NO: 1260458 - RNA, 20 nt, Human
cuuccuggggcaucuggcga

SEQ ID NO: 1260459 - RNA, 23 nt, Human
cuuccuggggcaucuggcgaauc

SEQ ID NO: 1260460 - RNA, 23 nt, Human
cuuccugguagaccacugccaua

SEQ ID NO: 1260461 - RNA, 15 nt, Human
cuuccuggugcugga

SEQ ID NO: 1260462 - RNA, 17 nt, Human
cuucuccacuggaugga

SEQ ID NO: 1260463 - RNA, 13 nt, Human
cuucuccccugca

SEQ ID NO: 1260464 - RNA, 14 nt, Human
cuucuccccugcac

SEQ ID NO: 1260465 - RNA, 16 nt, Human
cuucuccccugcacug

SEQ ID NO: 1260466 - RNA, 17 nt, Human
cuucuccccugcacugu

SEQ ID NO: 1260467 - RNA, 18 nt, Human
cuucuccccugcacugua

SEQ ID NO: 1260468 - RNA, 19 nt, Human
cuucuccccugcacuguaa

SEQ ID NO: 1260469 - RNA, 20 nt, Human
cuucuccccugcacuguaaa

SEQ ID NO: 1260470 - RNA, 21 nt, Human
cuucuccccugcacuguaaaa

SEQ ID NO: 1260471 - RNA, 23 nt, Human
cuucuccccugcacuguaaaaug

SEQ ID NO: 1260472 - RNA, 22 nt, Human
cuucuccccugcacuguaaaau

SEQ ID NO: 1260473 - RNA, 13 nt, Human
cuucucccuggaa

SEQ ID NO: 1260474 - RNA, 16 nt, Human
cuucucccuggaauga

SEQ ID NO: 1260475 - RNA, 16 nt, Human
cuucuccucuccuagc

SEQ ID NO: 1260476 - RNA, 13 nt, Human
cuucucucugugg

SEQ ID NO: 1260477 - RNA, 12 nt, Human
cuucucugacuu

SEQ ID NO: 1260478 - RNA, 14 nt, Human
cuucucugacuucu

SEQ ID NO: 1260479 - RNA, 15 nt, Human
cuucucugacuucug

SEQ ID NO: 1260480 - RNA, 16 nt, Human
cuucucugacuucugc

SEQ ID NO: 1260481 - RNA, 17 nt, Human
cuucucugacuucugcc

SEQ ID NO: 1260482 - RNA, 20 nt, Human
cuucucugacuucugccugg

SEQ ID NO: 1260483 - RNA, 14 nt, Human
cuucucuccagcug

SEQ ID NO: 1260484 - RNA, 15 nt, Human
cuucucuccagcuga

SEQ ID NO: 1260485 - RNA, 16 nt, Human
cuucucuccagcugac

SEQ ID NO: 1260486 - RNA, 17 nt, Human
cuucucuccagcugacu

SEQ ID NO: 1260487 - RNA, 18 nt, Human
cuucucuccagcugacua

SEQ ID NO: 1260488 - RNA, 19 nt, Human
cuucucuccagcugacuaa

SEQ ID NO: 1260489 - RNA, 14 nt, Human
cuucucuccagugc

SEQ ID NO: 1260490 - RNA, 13 nt, Human
cuucucucucccu

SEQ ID NO: 1260491 - RNA, 16 nt, Human
cuucucucugugggau

SEQ ID NO: 1260492 - RNA, 15 nt, Human
cuucuguaauugugu

SEQ ID NO: 1260493 - RNA, 20 nt, Human
cuucuguaauuguguggauu

SEQ ID NO: 1260494 - RNA, 13 nt, Human
cuucugcuggggc

SEQ ID NO: 1260495 - RNA, 15 nt, Human
cuucugcuggggccu

SEQ ID NO: 1260496 - RNA, 18 nt, Human
cuucugcuggggccuggg

SEQ ID NO: 1260497 - RNA, 21 nt, Human
cuucugcuggggccugggaca

SEQ ID NO: 1260498 - RNA, 19 nt, Human
cuucugcuggggccuggga

SEQ ID NO: 1260499 - RNA, 21 nt, Human
cuucucugacuucugccugga

SEQ ID NO: 1260500 - RNA, 15 nt, Human
cuucugcccccugca

SEQ ID NO: 1260501 - RNA, 16 nt, Human
cuucugcccccugcag

SEQ ID NO: 1260502 - RNA, 17 nt, Human
cuucugcccccugcaga

SEQ ID NO: 1260503 - RNA, 13 nt, Human
cuucugccuggag

SEQ ID NO: 1260504 - RNA, 14 nt, Human
cuucugccuggaga

SEQ ID NO: 1260505 - RNA, 15 nt, Human
cuucugccuggagac

SEQ ID NO: 1260506 - RNA, 16 nt, Human
cuucugccuggagacu

SEQ ID NO: 1260507 - RNA, 18 nt, Human
cuucugccuuagucucag

SEQ ID NO: 1260508 - RNA, 19 nt, Human
cuucugccuuagucucagu

SEQ ID NO: 1260509 - RNA, 14 nt, Human
cuucugguugaugc

SEQ ID NO: 1260510 - RNA, 16 nt, Human
cuucuggguuccuucc

SEQ ID NO: 1260511 - RNA, 17 nt, Human
cuucuggguuccuuccu

SEQ ID NO: 1260512 - RNA, 23 nt, Human
cuucuggguuccuuccucugagc

SEQ ID NO: 1260513 - RNA, 22 nt, Human
cuucugggagggcagcagggcu

SEQ ID NO: 1260514 - RNA, 23 nt, Human
cuucugggagggcagcagggcua

SEQ ID NO: 1260515 - RNA, 16 nt, Human
cuucugggccugacca

SEQ ID NO: 1260516 - RNA, 21 nt, Human
cuucugggcuucaucuggcaa

SEQ ID NO: 1260517 - RNA, 22 nt, Human
cuucugggcuucaucuggcaac

SEQ ID NO: 1260518 - RNA, 14 nt, Human
cuucuggggcaggc

SEQ ID NO: 1260519 - RNA, 15 nt, Human
cuucuggggcaggcu

SEQ ID NO: 1260520 - RNA, 16 nt, Human
cuucuggggcaggcug

SEQ ID NO: 1260521 - RNA, 19 nt, Human
cuucuggggcaggcugggc

SEQ ID NO: 1260522 - RNA, 20 nt, Human
cuucuggggcaggcugggcc

SEQ ID NO: 1260523 - RNA, 22 nt, Human
cuucuggggcaggcugggccau

SEQ ID NO: 1260524 - RNA, 21 nt, Human
cuucuggggcaggcugggcca

SEQ ID NO: 1260525 - RNA, 15 nt, Human
cuguguggcagucug

SEQ ID NO: 1260526 - RNA, 20 nt, Human
cugugugcuuuuuuugugug

SEQ ID NO: 1260527 - RNA, 12 nt, Human
cuguguggagag

SEQ ID NO: 1260528 - RNA, 15 nt, Human
cuguguggagaggga

SEQ ID NO: 1260529 - RNA, 16 nt, Human
cuguguggagagggaa

SEQ ID NO: 1260530 - RNA, 22 nt, Human
cuguguggagagggaaugugaa

SEQ ID NO: 1260531 - RNA, 23 nt, Human
cuguguggagagggaaugugaaa

SEQ ID NO: 1260532 - RNA, 23 nt, Human
cugugugcucaggagcccuggga

SEQ ID NO: 1260533 - RNA, 13 nt, Human
cugugugcuuuuu

SEQ ID NO: 1260534 - RNA, 21 nt, Human
cugugugcucaggagcccugg

SEQ ID NO: 1260535 - RNA, 20 nt, Human
cugugugcucaggagcccug

SEQ ID NO: 1260536 - RNA, 19 nt, Human
cugugugcucaggagcccu

SEQ ID NO: 1260537 - RNA, 21 nt, Human
cugugggggguaaucccugcu

SEQ ID NO: 1260538 - RNA, 23 nt, Human
cugugggcgugagaccugccccu

SEQ ID NO: 1260539 - RNA, 15 nt, Human
cugugggcuggcagu

SEQ ID NO: 1260540 - RNA, 12 nt, Human
cuguguguguga

SEQ ID NO: 1260541 - RNA, 14 nt, Human
cugugugugugaau

SEQ ID NO: 1260542 - RNA, 16 nt, Human
cugugugugugaauga

SEQ ID NO: 1260543 - RNA, 17 nt, Human
cugugugugugaaugaa

SEQ ID NO: 1260544 - RNA, 18 nt, Human
cugugugugugaaugaac

SEQ ID NO: 1260545 - RNA, 23 nt, Human
cugugugugugaaugaacacucu

SEQ ID NO: 1260546 - RNA, 21 nt, Human
cugugugugugaaugaacacu

SEQ ID NO: 1260547 - RNA, 17 nt, Human
cuguguguuaagcucug

SEQ ID NO: 1260548 - RNA, 18 nt, Human
cuguguguuaagcucugc

SEQ ID NO: 1260549 - RNA, 19 nt, Human
cuguguguuaagcucugcu

SEQ ID NO: 1260550 - RNA, 20 nt, Human
cuguguguuaagcucugcua

SEQ ID NO: 1260551 - RNA, 15 nt, Human
cuguguuuccaucuc

SEQ ID NO: 1260552 - RNA, 23 nt, Human
cuguguuuccaucucaaagaagg

SEQ ID NO: 1260553 - RNA, 13 nt, Human
cuguguuucuugc

SEQ ID NO: 1260554 - RNA, 15 nt, Human
cuguguuucuugccu

SEQ ID NO: 1260555 - RNA, 17 nt, Human
cuguguuucuugccuca

SEQ ID NO: 1260556 - RNA, 18 nt, Human
cuguguuucuugccucau

SEQ ID NO: 1260557 - RNA, 16 nt, Human
cuguguuuggcuuuca

SEQ ID NO: 1260558 - RNA, 17 nt, Human
cuguguuuggcuuucag

SEQ ID NO: 1260559 - RNA, 18 nt, Human
cuguguuuggcuuucagg

SEQ ID NO: 1260560 - RNA, 17 nt, Human
cuguguuuugaaagaau

SEQ ID NO: 1260561 - RNA, 23 nt, Human
cuguguuuggcuuucagggaggc

SEQ ID NO: 1260562 - RNA, 22 nt, Human
cuguguuuggcuuucagggagg

SEQ ID NO: 1260563 - RNA, 16 nt, Human
cuguguuuugaaagaa

SEQ ID NO: 1260564 - RNA, 22 nt, Human
cuguucauuccuccagguauuc

SEQ ID NO: 1260565 - RNA, 14 nt, Human
cuguucauuuccuc

SEQ ID NO: 1260566 - RNA, 17 nt, Human
cuguucauuuccucaaa

SEQ ID NO: 1260567 - RNA, 17 nt, Human
cuguucauuccuccagg

SEQ ID NO: 1260568 - RNA, 16 nt, Human
cuguucauuccuccag

SEQ ID NO: 1260569 - RNA, 15 nt, Human
cuguucauuccucca

SEQ ID NO: 1260570 - RNA, 15 nt, Human
cuguucaguugcacu

SEQ ID NO: 1260571 - RNA, 14 nt, Human
cuguucauggcaga

SEQ ID NO: 1260572 - RNA, 17 nt, Human
cuguucaugaaagauuc

SEQ ID NO: 1260573 - RNA, 18 nt, Human
cuguucaugaaagauuca

SEQ ID NO: 1260574 - RNA, 23 nt, Human
cuguucaugaaagauucaaugcc

SEQ ID NO: 1260575 - RNA, 18 nt, Human
cuguucccauucuugcau

SEQ ID NO: 1260576 - RNA, 13 nt, Human
cuguuccccagag

SEQ ID NO: 1260577 - RNA, 14 nt, Human
cuguuccccagaga

SEQ ID NO: 1260578 - RNA, 15 nt, Human
cuguuccccagagaa

SEQ ID NO: 1260579 - RNA, 16 nt, Human
cuguuccccagagaaa

SEQ ID NO: 1260580 - RNA, 23 nt, Human
cuguucauggcagauguaggagg

SEQ ID NO: 1260581 - RNA, 11 nt, Human
cuguuccaaau

SEQ ID NO: 1260582 - RNA, 14 nt, Human
cuguuccaaauuca

SEQ ID NO: 1260583 - RNA, 17 nt, Human
cuguuccaaauucaguu

SEQ ID NO: 1260584 - RNA, 18 nt, Human
cuguuccaaauucaguuu

SEQ ID NO: 1260585 - RNA, 20 nt, Human
cuguuccaaauucaguuuca

SEQ ID NO: 1260586 - RNA, 21 nt, Human
cuguuccaaauucaguuucau

SEQ ID NO: 1260587 - RNA, 22 nt, Human
cuguuccaaauucaguuucaua

SEQ ID NO: 1260588 - RNA, 20 nt, Human
cuguuccagugguaagcuau

SEQ ID NO: 1260589 - RNA, 19 nt, Human
cuguuacacuuuuuggaag

SEQ ID NO: 1260590 - RNA, 18 nt, Human
cuguuacacuuuuuggaa

SEQ ID NO: 1260591 - RNA, 12 nt, Human
cuguuccuuuua

SEQ ID NO: 1260592 - RNA, 12 nt, Human
cuguucuaaagc

SEQ ID NO: 1260593 - RNA, 17 nt, Human
cuguucuaaagcucuga

SEQ ID NO: 1260594 - RNA, 20 nt, Human
cuguucuacauagaugcuua

SEQ ID NO: 1260595 - RNA, 17 nt, Human
cuguuccugcugcuguc

SEQ ID NO: 1260596 - RNA, 18 nt, Human
cuguuccugcugcugucu

SEQ ID NO: 1260597 - RNA, 21 nt, Human
cuguuccugcugcugucuggg

SEQ ID NO: 1260598 - RNA, 13 nt, Human
cuguuccuucccu

SEQ ID NO: 1260599 - RNA, 22 nt, Human
cuguuccuucccugugccuccu

SEQ ID NO: 1260600 - RNA, 14 nt, Human
cuguuccuuuuaua

SEQ ID NO: 1260601 - RNA, 12 nt, Human
cuguucccccug

SEQ ID NO: 1260602 - RNA, 15 nt, Human
cuguucccccugugc

SEQ ID NO: 1260603 - RNA, 16 nt, Human
cuguucccccugugca

SEQ ID NO: 1260604 - RNA, 17 nt, Human
cuguucccccugugcag

SEQ ID NO: 1260605 - RNA, 12 nt, Human
cuguuccugcug

SEQ ID NO: 1260606 - RNA, 13 nt, Human
cuguuccugcugc

SEQ ID NO: 1260607 - RNA, 14 nt, Human
cuguuccugcugcu

SEQ ID NO: 1260608 - RNA, 15 nt, Human
cuguuccugcugcug

SEQ ID NO: 1260609 - RNA, 16 nt, Human
cuguuccugcugcugu

SEQ ID NO: 1260610 - RNA, 19 nt, Human
cuguucuacauagaugcuu

SEQ ID NO: 1260611 - RNA, 16 nt, Human
cuguucuaaagcucug

SEQ ID NO: 1260612 - RNA, 12 nt, Human
cuguucuaguuu

SEQ ID NO: 1260613 - RNA, 14 nt, Human
cuguucuaguuuuu

SEQ ID NO: 1260614 - RNA, 19 nt, Human
cuguucuaguuuuuuacuu

SEQ ID NO: 1260615 - RNA, 15 nt, Human
cuguucucuugggaa

SEQ ID NO: 1260616 - RNA, 22 nt, Human
cugucuccuaagcuggagugca

SEQ ID NO: 1260617 - RNA, 19 nt, Human
cugucuccuaccucugcuc

SEQ ID NO: 1260618 - RNA, 13 nt, Human
cugucuccuagga

SEQ ID NO: 1260619 - RNA, 21 nt, Human
cugucucccuccucugcccgg

SEQ ID NO: 1260620 - RNA, 20 nt, Human
cugucuccauggcccugcaa

SEQ ID NO: 1260621 - RNA, 23 nt, Human
cugucucaagagggcacuggugg

SEQ ID NO: 1260622 - RNA, 18 nt, Human
cugucucaagcucuuccu

SEQ ID NO: 1260623 - RNA, 20 nt, Human
cugucucaagcucuuccuua

SEQ ID NO: 1260624 - RNA, 12 nt, Human
cugucucaccug

SEQ ID NO: 1260625 - RNA, 14 nt, Human
cugucucaccugga

SEQ ID NO: 1260626 - RNA, 17 nt, Human
cugucucaccuggacuu

SEQ ID NO: 1260627 - RNA, 20 nt, Human
cugugagucuuugguucuaa

SEQ ID NO: 1260628 - RNA, 21 nt, Human
cugugagucuuugguucuaag

SEQ ID NO: 1260629 - RNA, 22 nt, Human
cugugagucuuugguucuaagg

SEQ ID NO: 1260630 - RNA, 23 nt, Human
cugugagucuuugguucuaagga

SEQ ID NO: 1260631 - RNA, 15 nt, Human
cugugaguucucccu

SEQ ID NO: 1260632 - RNA, 22 nt, Human
cugugaguucucccuguacagu

SEQ ID NO: 1260633 - RNA, 16 nt, Human
cugugaguucucccug

SEQ ID NO: 1260634 - RNA, 17 nt, Human
cugugaguucucccugu

SEQ ID NO: 1260635 - RNA, 22 nt, Human
cugugaucugggucucuaaucu

SEQ ID NO: 1260636 - RNA, 16 nt, Human
cugugcaaggccuggu

SEQ ID NO: 1260637 - RNA, 20 nt, Human
cugugcaagguauuacacuc

SEQ ID NO: 1260638 - RNA, 19 nt, Human
cugugcacaaaacccagac

SEQ ID NO: 1260639 - RNA, 20 nt, Human
cugugcacaaaacccagacc

SEQ ID NO: 1260640 - RNA, 18 nt, Human
cugugaguucucccugua

SEQ ID NO: 1260641 - RNA, 13 nt, Human
cugugcacagccc

SEQ ID NO: 1260642 - RNA, 12 nt, Human
cugugcacagcc

SEQ ID NO: 1260643 - RNA, 11 nt, Human
cugugcacagc

SEQ ID NO: 1260644 - RNA, 22 nt, Human
cugugcacaccccacucccaca

SEQ ID NO: 1260645 - RNA, 18 nt, Human
cugugcacaucugugucu

SEQ ID NO: 1260646 - RNA, 19 nt, Human
cugugcacaucugugucuu

SEQ ID NO: 1260647 - RNA, 22 nt, Human
cugugcacaaaacccagaccug

SEQ ID NO: 1260648 - RNA, 17 nt, Human
cugugcacaccccacuc

SEQ ID NO: 1260649 - RNA, 21 nt, Human
cugugcacaccccacucccac

SEQ ID NO: 1260650 - RNA, 20 nt, Human
cugugcacaucugugucuug

SEQ ID NO: 1260651 - RNA, 21 nt, Human
cugugcacaucugugucuugu

SEQ ID NO: 1260652 - RNA, 15 nt, Human
cugugccauguguuu

SEQ ID NO: 1260653 - RNA, 18 nt, Human
cugugccucagagaccag

SEQ ID NO: 1260654 - RNA, 22 nt, Human
cugugccucagagaccagggcu

SEQ ID NO: 1260655 - RNA, 13 nt, Human
cugugccuccuca

SEQ ID NO: 1260656 - RNA, 15 nt, Human
cugugccuccucacc

SEQ ID NO: 1260657 - RNA, 16 nt, Human
cugugccuccucaccc

SEQ ID NO: 1260658 - RNA, 19 nt, Human
cugugccucagagaccagg

SEQ ID NO: 1260659 - RNA, 14 nt, Human
cugugccuccuccc

SEQ ID NO: 1260660 - RNA, 15 nt, Human
cugugccuccucccu

SEQ ID NO: 1260661 - RNA, 16 nt, Human
cugugccuccucccuc

SEQ ID NO: 1260662 - RNA, 11 nt, Human
cugugccucug

SEQ ID NO: 1260663 - RNA, 17 nt, Human
cugugccuccucccucc

SEQ ID NO: 1260664 - RNA, 18 nt, Human
cugugccuccucccuccc

SEQ ID NO: 1260665 - RNA, 21 nt, Human
cugugccuccucccucccucu

SEQ ID NO: 1260666 - RNA, 17 nt, Human
cugugccucgcucccca

SEQ ID NO: 1260667 - RNA, 22 nt, Human
cugugccucgcuccccacucug

SEQ ID NO: 1260668 - RNA, 23 nt, Human
cugugccucgcuccccacucugc

SEQ ID NO: 1260669 - RNA, 24 nt, Human
cugugccucgcuccccacucugcu

SEQ ID NO: 1260670 - RNA, 12 nt, Human
cugugcuggcca

SEQ ID NO: 1260671 - RNA, 13 nt, Human
cugugcuggccag

SEQ ID NO: 1260672 - RNA, 21 nt, Human
cugugcuguuguuaugaugug

SEQ ID NO: 1260673 - RNA, 19 nt, Human
cugugcuguuguuaugaug

SEQ ID NO: 1260674 - RNA, 17 nt, Human
cugugcuguuguuauga

SEQ ID NO: 1260675 - RNA, 17 nt, Human
cugugcuucgggcccuu

SEQ ID NO: 1260676 - RNA, 19 nt, Human
cugugcuucgggcccuucc

SEQ ID NO: 1260677 - RNA, 13 nt, Human
cugugcuguuguu

SEQ ID NO: 1260678 - RNA, 18 nt, Human
cugugcugugugugacgu

SEQ ID NO: 1260679 - RNA, 14 nt, Human
cugugcuguuucaa

SEQ ID NO: 1260680 - RNA, 19 nt, Human
cugugcuguuucaaaguuc

SEQ ID NO: 1260681 - RNA, 16 nt, Human
cugugcuuaugguacc

SEQ ID NO: 1260682 - RNA, 14 nt, Human
cugugcuggccagc

SEQ ID NO: 1260683 - RNA, 11 nt, Human
cugugcugugu

SEQ ID NO: 1260684 - RNA, 13 nt, Human
cugugcugugugu

SEQ ID NO: 1260685 - RNA, 20 nt, Human
cugugcuucgggcccuuccc

SEQ ID NO: 1260686 - RNA, 21 nt, Human
cugugcuucgggcccuuccca

SEQ ID NO: 1260687 - RNA, 17 nt, Human
cugugcuuuuaaaugca

SEQ ID NO: 1260688 - RNA, 21 nt, Human
cuguggcgccgucuccagggg

SEQ ID NO: 1260689 - RNA, 24 nt, Human
cuguggcgccgucuccaggggcug

SEQ ID NO: 1260690 - RNA, 21 nt, Human
cugugggcgugagaccugccc

SEQ ID NO: 1260691 - RNA, 22 nt, Human
cugugggcgugagaccugcccc

SEQ ID NO: 1260692 - RNA, 19 nt, Human
cuguggcaggccagcugug

SEQ ID NO: 1260693 - RNA, 18 nt, Human
cuguggcaugggugaaga

SEQ ID NO: 1260694 - RNA, 12 nt, Human
cuguggccagga

SEQ ID NO: 1260695 - RNA, 17 nt, Human
cuguggcgccgucucca

SEQ ID NO: 1260696 - RNA, 19 nt, Human
cuguggcgccgucuccagg

SEQ ID NO: 1260697 - RNA, 20 nt, Human
cuguggcgccgucuccaggg

SEQ ID NO: 1260698 - RNA, 23 nt, Human
cuguggauuuuuuccuucaaagu

SEQ ID NO: 1260699 - RNA, 17 nt, Human
cuguggcagaguuacag

SEQ ID NO: 1260700 - RNA, 18 nt, Human
cuguggcagaguuacagu

SEQ ID NO: 1260701 - RNA, 19 nt, Human
cuguggcagaguuacaguu

SEQ ID NO: 1260702 - RNA, 22 nt, Human
cuguggcagaguuacaguucug

SEQ ID NO: 1260703 - RNA, 23 nt, Human
cuguggcagaguuacaguucugu

SEQ ID NO: 1260704 - RNA, 23 nt, Human
cuguggcaggccagcugugguuu

SEQ ID NO: 1260705 - RNA, 18 nt, Human
cuguggcaggccagcugu

SEQ ID NO: 1260706 - RNA, 14 nt, Human
cuguauauacuuuu

SEQ ID NO: 1260707 - RNA, 15 nt, Human
cuguauauacuuuuu

SEQ ID NO: 1260708 - RNA, 14 nt, Human
cuguauauucagga

SEQ ID NO: 1260709 - RNA, 22 nt, Human
cuguauauuacagauauuuguc

SEQ ID NO: 1260710 - RNA, 16 nt, Human
cuguaucaggacccag

SEQ ID NO: 1260711 - RNA, 22 nt, Human
cuguaucaggacccagaggaag

SEQ ID NO: 1260712 - RNA, 23 nt, Human
cuguaucaggacccagaggaagg

SEQ ID NO: 1260713 - RNA, 15 nt, Human
cuguauaaaugucuu

SEQ ID NO: 1260714 - RNA, 14 nt, Human
cuguauaaaugucu

SEQ ID NO: 1260715 - RNA, 16 nt, Human
cuguacacaacucacu

SEQ ID NO: 1260716 - RNA, 17 nt, Human
cuguacacaacucacuc

SEQ ID NO: 1260717 - RNA, 20 nt, Human
cuguacacaacucacuccuu

SEQ ID NO: 1260718 - RNA, 22 nt, Human
cuguacacaacucacuccuuuu

SEQ ID NO: 1260719 - RNA, 13 nt, Human
cuguacacugcac

SEQ ID NO: 1260720 - RNA, 15 nt, Human
cuguacacugcacga

SEQ ID NO: 1260721 - RNA, 16 nt, Human
cuguagugcuacaggg

SEQ ID NO: 1260722 - RNA, 20 nt, Human
cuguagugcuacagggucca

SEQ ID NO: 1260723 - RNA, 20 nt, Human
cuguagugucacucaaggcg

SEQ ID NO: 1260724 - RNA, 22 nt, Human
cuguauuuuaaaagaaugauua

SEQ ID NO: 1260725 - RNA, 21 nt, Human
cuguaugaucaaauguuuaau

SEQ ID NO: 1260726 - RNA, 19 nt, Human
cuguaugaucaaauguuua

SEQ ID NO: 1260727 - RNA, 20 nt, Human
cuguauuuuaaaagaaugau

SEQ ID NO: 1260728 - RNA, 23 nt, Human
cuguauccagguucccucccaga

SEQ ID NO: 1260729 - RNA, 18 nt, Human
cuguaugaucaaauguuu

SEQ ID NO: 1260730 - RNA, 17 nt, Human
cuguaugaucaaauguu

SEQ ID NO: 1260731 - RNA, 16 nt, Human
cuguaugaucaaaugu

SEQ ID NO: 1260732 - RNA, 15 nt, Human
cuguaugaucaaaug

SEQ ID NO: 1260733 - RNA, 14 nt, Human
cuguaugaucaaau

SEQ ID NO: 1260734 - RNA, 13 nt, Human
cuguaugaucaaa

SEQ ID NO: 1260735 - RNA, 18 nt, Human
cugucaagccauuuuuac

SEQ ID NO: 1260736 - RNA, 19 nt, Human
cugucaagccauuuuuaca

SEQ ID NO: 1260737 - RNA, 13 nt, Human
cugucaaggcuca

SEQ ID NO: 1260738 - RNA, 14 nt, Human
cugucaaggcucag

SEQ ID NO: 1260739 - RNA, 17 nt, Human
cuguccaggcacugcug

SEQ ID NO: 1260740 - RNA, 17 nt, Human
cuguccagcuccaaccu

SEQ ID NO: 1260741 - RNA, 18 nt, Human
cuguccagcuccaaccug

SEQ ID NO: 1260742 - RNA, 21 nt, Human
cuguccagcuccaaccugcaa

SEQ ID NO: 1260743 - RNA, 16 nt, Human
cuguccaggcacugag

SEQ ID NO: 1260744 - RNA, 12 nt, Human
cuguccagcucc

SEQ ID NO: 1260745 - RNA, 13 nt, Human
cuguccagcucca

SEQ ID NO: 1260746 - RNA, 14 nt, Human
cuguccagcuccaa

SEQ ID NO: 1260747 - RNA, 22 nt, Human
cugucucaagagggcacuggug

SEQ ID NO: 1260748 - RNA, 15 nt, Human
cuguccuccaacacc

SEQ ID NO: 1260749 - RNA, 23 nt, Human
cuguccuccaacaccaagcacag

SEQ ID NO: 1260750 - RNA, 14 nt, Human
cugucuaccugguc

SEQ ID NO: 1260751 - RNA, 20 nt, Human
cugucuacuugcucagguac

SEQ ID NO: 1260752 - RNA, 18 nt, Human
cugucuacuugcucaggu

SEQ ID NO: 1260753 - RNA, 13 nt, Human
cugucuauucuag

SEQ ID NO: 1260754 - RNA, 18 nt, Human
cuguccgagugugccaca

SEQ ID NO: 1260755 - RNA, 21 nt, Human
cuguccguucacauguguggu

SEQ ID NO: 1260756 - RNA, 14 nt, Human
cuguccucagccuu

SEQ ID NO: 1260757 - RNA, 18 nt, Human
cuguccucagccuugcca

SEQ ID NO: 1260758 - RNA, 20 nt, Human
cuguccucagccuugccaga

SEQ ID NO: 1260759 - RNA, 21 nt, Human
cuguccucagccuugccagag

SEQ ID NO: 1260760 - RNA, 22 nt, Human
cuguccucagccuugccagaga

SEQ ID NO: 1260761 - RNA, 19 nt, Human
cuguccaggcacugagaua

SEQ ID NO: 1260762 - RNA, 21 nt, Human
cugucccuccgggaccuggug

SEQ ID NO: 1260763 - RNA, 15 nt, Human
cuguccccugcuaca

SEQ ID NO: 1260764 - RNA, 21 nt, Human
cuguccccugcuacaccuauu

SEQ ID NO: 1260765 - RNA, 14 nt, Human
cuggugcugccucu

SEQ ID NO: 1260766 - RNA, 19 nt, Human
cuggugcugccucuaccug

SEQ ID NO: 1260767 - RNA, 12 nt, Human
cuggugcugcca

SEQ ID NO: 1260768 - RNA, 13 nt, Human
cuggugcugccac

SEQ ID NO: 1260769 - RNA, 20 nt, Human
cuggugcugccacacuucag

SEQ ID NO: 1260770 - RNA, 22 nt, Human
cuggugcugccacacuucaggc

SEQ ID NO: 1260771 - RNA, 21 nt, Human
cugguggcccgacagccuggc

SEQ ID NO: 1260772 - RNA, 22 nt, Human
cugguggcccgacagccuggca

SEQ ID NO: 1260773 - RNA, 23 nt, Human
cugguggcccgacagccuggcac

SEQ ID NO: 1260774 - RNA, 18 nt, Human
cuggucacaggacucugc

SEQ ID NO: 1260775 - RNA, 19 nt, Human
cuggucacaggacucugcc

SEQ ID NO: 1260776 - RNA, 19 nt, Human
cuggucaacuugagcaugu

SEQ ID NO: 1260777 - RNA, 20 nt, Human
cuggucaacuugagcauguu

SEQ ID NO: 1260778 - RNA, 21 nt, Human
cugguacucccucucaggauc

SEQ ID NO: 1260779 - RNA, 17 nt, Human
cugguauuguucucaca

SEQ ID NO: 1260780 - RNA, 23 nt, Human
cuggucccuguuuucccacgagg

SEQ ID NO: 1260781 - RNA, 19 nt, Human
cuggucccuuguauccccu

SEQ ID NO: 1260782 - RNA, 24 nt, Human
cuggucccuuguauccccugcagg

SEQ ID NO: 1260783 - RNA, 22 nt, Human
cuggucccuuguauccccugca

SEQ ID NO: 1260784 - RNA, 15 nt, Human
cugguccgugggacg

SEQ ID NO: 1260785 - RNA, 16 nt, Human
cugguccgugggacgg

SEQ ID NO: 1260786 - RNA, 19 nt, Human
cugguccgugggacggugc

SEQ ID NO: 1260787 - RNA, 21 nt, Human
cugguccgugggacggugccc

SEQ ID NO: 1260788 - RNA, 17 nt, Human
cugguccuauggccuca

SEQ ID NO: 1260789 - RNA, 21 nt, Human
cugguccuauggccucauguu

SEQ ID NO: 1260790 - RNA, 23 nt, Human
cuguacaaaaaaaucuuccaauu

SEQ ID NO: 1260791 - RNA, 22 nt, Human
cuguaaugugcgagggacccag

SEQ ID NO: 1260792 - RNA, 15 nt, Human
cuguaauguuaauau

SEQ ID NO: 1260793 - RNA, 17 nt, Human
cuguaauguuaauauug

SEQ ID NO: 1260794 - RNA, 18 nt, Human
cuguaauguuaauauuga

SEQ ID NO: 1260795 - RNA, 19 nt, Human
cuguaauguuaauauugau

SEQ ID NO: 1260796 - RNA, 18 nt, Human
cuguaauuauaucuaaaa

SEQ ID NO: 1260797 - RNA, 19 nt, Human
cuguaaucauauaauaaau

SEQ ID NO: 1260798 - RNA, 14 nt, Human
cuguaaucuaugaa

SEQ ID NO: 1260799 - RNA, 18 nt, Human
cuguaaugguacugacuu

SEQ ID NO: 1260800 - RNA, 14 nt, Human
cuguaauguuaaua

SEQ ID NO: 1260801 - RNA, 23 nt, Human
cuguaaucacagcuacuugggag

SEQ ID NO: 1260802 - RNA, 13 nt, Human
cugguuccucccc

SEQ ID NO: 1260803 - RNA, 12 nt, Human
cugguuccuccc

SEQ ID NO: 1260804 - RNA, 18 nt, Human
cugguucccguuucucca

SEQ ID NO: 1260805 - RNA, 21 nt, Human
cugguucccguuucuccaccu

SEQ ID NO: 1260806 - RNA, 17 nt, Human
cugguggcccucucccc

SEQ ID NO: 1260807 - RNA, 18 nt, Human
cugguggcccucuccccu

SEQ ID NO: 1260808 - RNA, 20 nt, Human
cugguggcccucuccccugc

SEQ ID NO: 1260809 - RNA, 22 nt, Human
cugguggcccucuccccugccc

SEQ ID NO: 1260810 - RNA, 15 nt, Human
cugggcuucaucugg

SEQ ID NO: 1260811 - RNA, 19 nt, Human
cugggcuucaucuggcaac

SEQ ID NO: 1260812 - RNA, 12 nt, Human
cugggcuuccug

SEQ ID NO: 1260813 - RNA, 13 nt, Human
cugggcuuccugg

SEQ ID NO: 1260814 - RNA, 14 nt, Human
cugggcuuccugga

SEQ ID NO: 1260815 - RNA, 15 nt, Human
cugggcuuccuggag

SEQ ID NO: 1260816 - RNA, 16 nt, Human
cugggcuuccuggagc

SEQ ID NO: 1260817 - RNA, 17 nt, Human
cugggcuuccuggagca

SEQ ID NO: 1260818 - RNA, 22 nt, Human
cugggcuuccuggagcagaagc

SEQ ID NO: 1260819 - RNA, 19 nt, Human
cugggcuuccuggagcaga

SEQ ID NO: 1260820 - RNA, 14 nt, Human
cuggggcuggccuc

SEQ ID NO: 1260821 - RNA, 18 nt, Human
cuggggcuggccucccaa

SEQ ID NO: 1260822 - RNA, 15 nt, Human
cuggggcuggccucc

SEQ ID NO: 1260823 - RNA, 18 nt, Human
cugggggcacaagacuga

SEQ ID NO: 1260824 - RNA, 22 nt, Human
cugggggcacaagacugacgcc

SEQ ID NO: 1260825 - RNA, 20 nt, Human
cugggggcacaagacugacg

SEQ ID NO: 1260826 - RNA, 22 nt, Human
cugggggggauuguaaaauggu

SEQ ID NO: 1260827 - RNA, 12 nt, Human
cugggggguggc

SEQ ID NO: 1260828 - RNA, 13 nt, Human
cugggggguggcc

SEQ ID NO: 1260829 - RNA, 12 nt, Human
cuggggugcagg

SEQ ID NO: 1260830 - RNA, 15 nt, Human
cuggggugcagggau

SEQ ID NO: 1260831 - RNA, 20 nt, Human
cuggggugcagggauguggg

SEQ ID NO: 1260832 - RNA, 18 nt, Human
cuggguaaugaaacaaag

SEQ ID NO: 1260833 - RNA, 16 nt, Human
cuggguaauaaaagug

SEQ ID NO: 1260834 - RNA, 15 nt, Human
cuggguacuucuuga

SEQ ID NO: 1260835 - RNA, 17 nt, Human
cuggguacuucuugaag

SEQ ID NO: 1260836 - RNA, 20 nt, Human
cuggguacuucuugaaggug

SEQ ID NO: 1260837 - RNA, 23 nt, Human
cuggguacuucuugaaggugcug

SEQ ID NO: 1260838 - RNA, 15 nt, Human
cugggggguggccag

SEQ ID NO: 1260839 - RNA, 13 nt, Human
cuggggucccagc

SEQ ID NO: 1260840 - RNA, 14 nt, Human
cuggggucccagca

SEQ ID NO: 1260841 - RNA, 15 nt, Human
cuggggucccagcag

SEQ ID NO: 1260842 - RNA, 16 nt, Human
cuggggucccagcagc

SEQ ID NO: 1260843 - RNA, 18 nt, Human
cuggggucccagcagcug

SEQ ID NO: 1260844 - RNA, 20 nt, Human
cuggggucccagcagcugcc

SEQ ID NO: 1260845 - RNA, 22 nt, Human
cuggggucccagcagcugccag

SEQ ID NO: 1260846 - RNA, 13 nt, Human
cuggggucuggag

SEQ ID NO: 1260847 - RNA, 22 nt, Human
cuggggucuggaguugaucugg

SEQ ID NO: 1260848 - RNA, 21 nt, Human
cuggggugacccggcaccccc

SEQ ID NO: 1260849 - RNA, 21 nt, Human
cuggggugcagggaugugggu

SEQ ID NO: 1260850 - RNA, 23 nt, Human
cugguacaguauggggguuguaa

SEQ ID NO: 1260851 - RNA, 14 nt, Human
cugguacccuccug

SEQ ID NO: 1260852 - RNA, 15 nt, Human
cugguacccuccugg

SEQ ID NO: 1260853 - RNA, 16 nt, Human
cugguacccuccuggc

SEQ ID NO: 1260854 - RNA, 18 nt, Human
cugguacucccucucagg

SEQ ID NO: 1260855 - RNA, 19 nt, Human
cugguacucccucucagga

SEQ ID NO: 1260856 - RNA, 20 nt, Human
cugguacucccucucaggau

SEQ ID NO: 1260857 - RNA, 14 nt, Human
cuggagugcagugg

SEQ ID NO: 1260858 - RNA, 14 nt, Human
cuggcacuuggaga

SEQ ID NO: 1260859 - RNA, 21 nt, Human
cuggcacuuggagacuuguau

SEQ ID NO: 1260860 - RNA, 21 nt, Human
cuggccagacacaggcccucc

SEQ ID NO: 1260861 - RNA, 19 nt, Human
cuggccaguccaggcugcc

SEQ ID NO: 1260862 - RNA, 21 nt, Human
cuggccaguccaggcugccgu

SEQ ID NO: 1260863 - RNA, 13 nt, Human
cuggccagacaca

SEQ ID NO: 1260864 - RNA, 15 nt, Human
cuggccagacacagg

SEQ ID NO: 1260865 - RNA, 17 nt, Human
cuggccagacacaggcc

SEQ ID NO: 1260866 - RNA, 18 nt, Human
cuggccagacacaggccc

SEQ ID NO: 1260867 - RNA, 19 nt, Human
cuggccagacacaggcccu

SEQ ID NO: 1260868 - RNA, 16 nt, Human
cuggcaguccguggga

SEQ ID NO: 1260869 - RNA, 22 nt, Human
cuggcaguccuggaagccagcu

SEQ ID NO: 1260870 - RNA, 19 nt, Human
cuggcaguccgugggacgg

SEQ ID NO: 1260871 - RNA, 20 nt, Human
cuggcaguuuauauuuaacu

SEQ ID NO: 1260872 - RNA, 22 nt, Human
cuggcaguuuauauuuaacucu

SEQ ID NO: 1260873 - RNA, 19 nt, Human
cuggcauacuauguggaug

SEQ ID NO: 1260874 - RNA, 17 nt, Human
cuggcaucgcaccauuc

SEQ ID NO: 1260875 - RNA, 18 nt, Human
cuggcaucgcaccauucu

SEQ ID NO: 1260876 - RNA, 19 nt, Human
cuggcaucgcaccauucug

SEQ ID NO: 1260877 - RNA, 20 nt, Human
cuggcaucgcaccauucuga

SEQ ID NO: 1260878 - RNA, 22 nt, Human
cuggcaucgcaccauucugacu

SEQ ID NO: 1260879 - RNA, 23 nt, Human
cuggcaucgcaccauucugacuc

SEQ ID NO: 1260880 - RNA, 16 nt, Human
cuggccauacuguguc

SEQ ID NO: 1260881 - RNA, 15 nt, Human
cuggccaguguuuaa

SEQ ID NO: 1260882 - RNA, 22 nt, Human
cuggccagugcccugaucccag

SEQ ID NO: 1260883 - RNA, 13 nt, Human
cuggccaguguuu

SEQ ID NO: 1260884 - RNA, 20 nt, Human
cuggccaguguuuaaaacuu

SEQ ID NO: 1260885 - RNA, 22 nt, Human
cuggccaguccaggcugccgug

SEQ ID NO: 1260886 - RNA, 23 nt, Human
cuggccaguccaggcugccgugg

SEQ ID NO: 1260887 - RNA, 17 nt, Human
cuggccagugcccugau

SEQ ID NO: 1260888 - RNA, 20 nt, Human
cuggccagugcccugauccc

SEQ ID NO: 1260889 - RNA, 21 nt, Human
cuggccagugcccugauccca

SEQ ID NO: 1260890 - RNA, 12 nt, Human
cuggccauggag

SEQ ID NO: 1260891 - RNA, 15 nt, Human
cuggccauggagaaa

SEQ ID NO: 1260892 - RNA, 16 nt, Human
cuggccauggagaaag

SEQ ID NO: 1260893 - RNA, 11 nt, Human
cuggcccagcc

SEQ ID NO: 1260894 - RNA, 12 nt, Human
cuggccccaccc

SEQ ID NO: 1260895 - RNA, 13 nt, Human
cuggccccaggac

SEQ ID NO: 1260896 - RNA, 23 nt, Human
cuggccccacccucguggacacc

SEQ ID NO: 1260897 - RNA, 17 nt, Human
cuggccauggagaaagc

SEQ ID NO: 1260898 - RNA, 13 nt, Human
cuggcccaucagg

SEQ ID NO: 1260899 - RNA, 22 nt, Human
cuggcccaucaggguaggcugg

SEQ ID NO: 1260900 - RNA, 17 nt, Human
cuggcccagggcccaga

SEQ ID NO: 1260901 - RNA, 18 nt, Human
cuggcccagggcccagag

SEQ ID NO: 1260902 - RNA, 19 nt, Human
cuggcccagggcccagagc

SEQ ID NO: 1260903 - RNA, 20 nt, Human
cuggcccagggcccagagcc

SEQ ID NO: 1260904 - RNA, 21 nt, Human
cuggcccagggcccagagccc

SEQ ID NO: 1260905 - RNA, 22 nt, Human
cuggcccagggcccagagccca

SEQ ID NO: 1260906 - RNA, 23 nt, Human
cuggcccagggcccagagcccag

SEQ ID NO: 1260907 - RNA, 14 nt, Human
cuggccucugcuuu

SEQ ID NO: 1260908 - RNA, 18 nt, Human
cuggccuggacuguuuuc

SEQ ID NO: 1260909 - RNA, 13 nt, Human
cuggccuggccag

SEQ ID NO: 1260910 - RNA, 14 nt, Human
cuggccuggccagu

SEQ ID NO: 1260911 - RNA, 15 nt, Human
cuggccuggccagug

SEQ ID NO: 1260912 - RNA, 17 nt, Human
cuggccuggccagugcc

SEQ ID NO: 1260913 - RNA, 22 nt, Human
cuggccuggacuguuuucucuc

SEQ ID NO: 1260914 - RNA, 12 nt, Human
cuggccucugcg

SEQ ID NO: 1260915 - RNA, 19 nt, Human
cuggccuggccagugcccu

SEQ ID NO: 1260916 - RNA, 19 nt, Human
cuggccuggccauacugug

SEQ ID NO: 1260917 - RNA, 22 nt, Human
cuggccuucggccuccauccug

SEQ ID NO: 1260918 - RNA, 23 nt, Human
cuggccuucggccuccauccuga

SEQ ID NO: 1260919 - RNA, 18 nt, Human
cuggcggcugggguccca

SEQ ID NO: 1260920 - RNA, 19 nt, Human
cuggcggcuggggucccag

SEQ ID NO: 1260921 - RNA, 22 nt, Human
cuggcggcuggggucccagcag

SEQ ID NO: 1260922 - RNA, 20 nt, Human
cuggcggcuggggucccagc

SEQ ID NO: 1260923 - RNA, 16 nt, Human
cuggcggggggcccau

SEQ ID NO: 1260924 - RNA, 15 nt, Human
cuggcggggggccca

SEQ ID NO: 1260925 - RNA, 13 nt, Human
cuggcuaaagcuc

SEQ ID NO: 1260926 - RNA, 12 nt, Human
cuggcugagggc

SEQ ID NO: 1260927 - RNA, 13 nt, Human
cuggcugagggca

SEQ ID NO: 1260928 - RNA, 23 nt, Human
cuggcugagggcaguucgcagcc

SEQ ID NO: 1260929 - RNA, 15 nt, Human
cuggcugagggcagu

SEQ ID NO: 1260930 - RNA, 19 nt, Human
cuggagaugaggccagacc

SEQ ID NO: 1260931 - RNA, 13 nt, Human
cuggagcacaaag

SEQ ID NO: 1260932 - RNA, 16 nt, Human
cuggagcacaaagacc

SEQ ID NO: 1260933 - RNA, 19 nt, Human
cuggagcacaaagacccug

SEQ ID NO: 1260934 - RNA, 22 nt, Human
cuggagcacaaagacccuggcu

SEQ ID NO: 1260935 - RNA, 23 nt, Human
cuggagcacaaagacccuggcuu

SEQ ID NO: 1260936 - RNA, 20 nt, Human
cuggagaugaggccagacca

SEQ ID NO: 1260937 - RNA, 18 nt, Human
cuggagaugaggccagac

SEQ ID NO: 1260938 - RNA, 17 nt, Human
cuggagaugaggccaga

SEQ ID NO: 1260939 - RNA, 16 nt, Human
cuggagaugaggccag

SEQ ID NO: 1260940 - RNA, 23 nt, Human
cuggagauccuccugcagaccac

SEQ ID NO: 1260941 - RNA, 18 nt, Human
cuggagauccuccugcag

SEQ ID NO: 1260942 - RNA, 20 nt, Human
cuggagauccuccugcagac

SEQ ID NO: 1260943 - RNA, 14 nt, Human
cuggagauccuccu

SEQ ID NO: 1260944 - RNA, 15 nt, Human
cuggagauccuccug

SEQ ID NO: 1260945 - RNA, 16 nt, Human
cuggagauccuccugc

SEQ ID NO: 1260946 - RNA, 17 nt, Human
cuggagauccuccugca

SEQ ID NO: 1260947 - RNA, 22 nt, Human
cuggagcacaauaaauggcugu

SEQ ID NO: 1260948 - RNA, 16 nt, Human
cuggagcucugcccau

SEQ ID NO: 1260949 - RNA, 24 nt, Human
cuggaggcaccugguggccaugcu

SEQ ID NO: 1260950 - RNA, 15 nt, Human
cuggaggcagggaac

SEQ ID NO: 1260951 - RNA, 13 nt, Human
cuggagcucugcc

SEQ ID NO: 1260952 - RNA, 18 nt, Human
cuggaggcaggggcuucc

SEQ ID NO: 1260953 - RNA, 19 nt, Human
cuggaggcaggggcuuccu

SEQ ID NO: 1260954 - RNA, 20 nt, Human
cuggaggcaggggcuuccug

SEQ ID NO: 1260955 - RNA, 21 nt, Human
cuggaggcaggggcuuccugg

SEQ ID NO: 1260956 - RNA, 22 nt, Human
cuggaggcaggggcuuccuggu

SEQ ID NO: 1260957 - RNA, 12 nt, Human
cuggaggcccag

SEQ ID NO: 1260958 - RNA, 13 nt, Human
cuggaggcccagg

SEQ ID NO: 1260959 - RNA, 14 nt, Human
cuggaggcccaggc

SEQ ID NO: 1260960 - RNA, 15 nt, Human
cuggaggcccaggcu

SEQ ID NO: 1260961 - RNA, 17 nt, Human
cuggaggcccaggcugg

SEQ ID NO: 1260962 - RNA, 18 nt, Human
cuggaggcccaggcuggg

SEQ ID NO: 1260963 - RNA, 19 nt, Human
cuggaggcccaggcuggga

SEQ ID NO: 1260964 - RNA, 13 nt, Human
cuggaggcccagu

SEQ ID NO: 1260965 - RNA, 14 nt, Human
cuggaggcccaguu

SEQ ID NO: 1260966 - RNA, 15 nt, Human
cuggaggcccaguuc

SEQ ID NO: 1260967 - RNA, 21 nt, Human
cuggaggcccaguucacccug

SEQ ID NO: 1260968 - RNA, 14 nt, Human
cuggaggccccaac

SEQ ID NO: 1260969 - RNA, 21 nt, Human
cuggagggggaauggcagcag

SEQ ID NO: 1260970 - RNA, 22 nt, Human
cuggagggggaauggcagcagg

SEQ ID NO: 1260971 - RNA, 16 nt, Human
cuggagggguguggcu

SEQ ID NO: 1260972 - RNA, 20 nt, Human
cuggagggguguggcuccuu

SEQ ID NO: 1260973 - RNA, 13 nt, Human
cuggaggggaggg

SEQ ID NO: 1260974 - RNA, 15 nt, Human
cuggagggggaaugg

SEQ ID NO: 1260975 - RNA, 19 nt, Human
cuggagggggaauggcagc

SEQ ID NO: 1260976 - RNA, 20 nt, Human
cuggagggggaauggcagca

SEQ ID NO: 1260977 - RNA, 15 nt, Human
cuggagucaaaacac

SEQ ID NO: 1260978 - RNA, 13 nt, Human
cuggaauuugaaa

SEQ ID NO: 1260979 - RNA, 15 nt, Human
cugcuuccuccugga

SEQ ID NO: 1260980 - RNA, 16 nt, Human
cugcuuccuccuggaa

SEQ ID NO: 1260981 - RNA, 18 nt, Human
cugcuuccuccuggaaau

SEQ ID NO: 1260982 - RNA, 14 nt, Human
cugcuuccagugua

SEQ ID NO: 1260983 - RNA, 16 nt, Human
cugcuucccugaagcu

SEQ ID NO: 1260984 - RNA, 15 nt, Human
cugcuucccugaagc

SEQ ID NO: 1260985 - RNA, 12 nt, Human
cugcuuccuccu

SEQ ID NO: 1260986 - RNA, 13 nt, Human
cugcuuccuccug

SEQ ID NO: 1260987 - RNA, 14 nt, Human
cugcuuccuccugg

SEQ ID NO: 1260988 - RNA, 15 nt, Human
cuggacacucagacc

SEQ ID NO: 1260989 - RNA, 16 nt, Human
cuggacacucagaccu

SEQ ID NO: 1260990 - RNA, 17 nt, Human
cuggacacucagaccug

SEQ ID NO: 1260991 - RNA, 14 nt, Human
cuggaccagccucu

SEQ ID NO: 1260992 - RNA, 18 nt, Human
cuggaccagccucuccac

SEQ ID NO: 1260993 - RNA, 11 nt, Human
cuggacccagc

SEQ ID NO: 1260994 - RNA, 12 nt, Human
cuggacccagcc

SEQ ID NO: 1260995 - RNA, 13 nt, Human
cuggacccagcca

SEQ ID NO: 1260996 - RNA, 14 nt, Human
cuggacccagccag

SEQ ID NO: 1260997 - RNA, 17 nt, Human
cuggacccagccagaac

SEQ ID NO: 1260998 - RNA, 17 nt, Human
cuggacccagccaggcc

SEQ ID NO: 1260999 - RNA, 18 nt, Human
cuggacccagccaggccc

SEQ ID NO: 1261000 - RNA, 19 nt, Human
cuggacccagccaggccca

SEQ ID NO: 1261001 - RNA, 20 nt, Human
cuggacccagccaggcccag

SEQ ID NO: 1261002 - RNA, 21 nt, Human
cuggacccagccaggcccagc

SEQ ID NO: 1261003 - RNA, 22 nt, Human
cuggacccagccaggcccagcc

SEQ ID NO: 1261004 - RNA, 14 nt, Human
cuggacuccucugu

SEQ ID NO: 1261005 - RNA, 17 nt, Human
cuggacuccucugucca

SEQ ID NO: 1261006 - RNA, 18 nt, Human
cuggacuccucuguccag

SEQ ID NO: 1261007 - RNA, 19 nt, Human
cuggacuccucuguccagg

SEQ ID NO: 1261008 - RNA, 20 nt, Human
cuggacuccucuguccaggc

SEQ ID NO: 1261009 - RNA, 15 nt, Human
cuggagaucaccagu

SEQ ID NO: 1261010 - RNA, 20 nt, Human
cuggacccguucauggggga

SEQ ID NO: 1261011 - RNA, 23 nt, Human
cuggacccguucaugggggaggg

SEQ ID NO: 1261012 - RNA, 12 nt, Human
cuggacccugac

SEQ ID NO: 1261013 - RNA, 13 nt, Human
cuggacccugacc

SEQ ID NO: 1261014 - RNA, 20 nt, Human
cuggacccugaccagcuccc

SEQ ID NO: 1261015 - RNA, 21 nt, Human
cuggacccugaccagcucccc

SEQ ID NO: 1261016 - RNA, 19 nt, Human
cuggaccccccuuucacag

SEQ ID NO: 1261017 - RNA, 22 nt, Human
cuggaccccccuuucacaggca

SEQ ID NO: 1261018 - RNA, 23 nt, Human
cuggaccccccuuucacaggcag

SEQ ID NO: 1261019 - RNA, 13 nt, Human
cuggaccccugca

SEQ ID NO: 1261020 - RNA, 14 nt, Human
cuggaccccugcau

SEQ ID NO: 1261021 - RNA, 15 nt, Human
cuggaccccugcauu

SEQ ID NO: 1261022 - RNA, 18 nt, Human
cuggaccccugcauugga

SEQ ID NO: 1261023 - RNA, 23 nt, Human
cuggaccccugcauuggaacugg

SEQ ID NO: 1261024 - RNA, 18 nt, Human
cuggaccucugacagcag

SEQ ID NO: 1261025 - RNA, 19 nt, Human
cuggaccucugacagcagc

SEQ ID NO: 1261026 - RNA, 14 nt, Human
cuggaccucugggu

SEQ ID NO: 1261027 - RNA, 21 nt, Human
cuggaccucugacagcagcau

SEQ ID NO: 1261028 - RNA, 13 nt, Human
cuggaccucacca

SEQ ID NO: 1261029 - RNA, 13 nt, Human
cuggaccucugac

SEQ ID NO: 1261030 - RNA, 15 nt, Human
cuggaccucugacag

SEQ ID NO: 1261031 - RNA, 17 nt, Human
cuggaccucugacagca

SEQ ID NO: 1261032 - RNA, 16 nt, Human
cugcugcuacaauguc

SEQ ID NO: 1261033 - RNA, 12 nt, Human
cugcugcucccu

SEQ ID NO: 1261034 - RNA, 13 nt, Human
cugcugcucccuc

SEQ ID NO: 1261035 - RNA, 14 nt, Human
cugcugcucccuca

SEQ ID NO: 1261036 - RNA, 15 nt, Human
cugcugcucccucag

SEQ ID NO: 1261037 - RNA, 16 nt, Human
cugcugcucccucaga

SEQ ID NO: 1261038 - RNA, 17 nt, Human
cugcugcucccucagac

SEQ ID NO: 1261039 - RNA, 21 nt, Human
cugcugcucccucagacuggg

SEQ ID NO: 1261040 - RNA, 23 nt, Human
cugcugcucccucagacuggggc

SEQ ID NO: 1261041 - RNA, 15 nt, Human
cugcugcucuuggcu

SEQ ID NO: 1261042 - RNA, 21 nt, Human
cugcugcucuuggcuggaccc

SEQ ID NO: 1261043 - RNA, 22 nt, Human
cugcugcucuuggcuggaccca

SEQ ID NO: 1261044 - RNA, 14 nt, Human
cugcugcccucccc

SEQ ID NO: 1261045 - RNA, 15 nt, Human
cugcugcugccugcc

SEQ ID NO: 1261046 - RNA, 14 nt, Human
cugcugcugccugc

SEQ ID NO: 1261047 - RNA, 21 nt, Human
cugcugcugagaaccuggccu

SEQ ID NO: 1261048 - RNA, 22 nt, Human
cugcugcugagaaccuggccuu

SEQ ID NO: 1261049 - RNA, 23 nt, Human
cugcugcucuuggcuggacccag

SEQ ID NO: 1261050 - RNA, 11 nt, Human
cugcugcugag

SEQ ID NO: 1261051 - RNA, 13 nt, Human
cugcugcugagaa

SEQ ID NO: 1261052 - RNA, 14 nt, Human
cugcugcugagaac

SEQ ID NO: 1261053 - RNA, 16 nt, Human
cugcugcugagaaccu

SEQ ID NO: 1261054 - RNA, 17 nt, Human
cugcugcugagaaccug

SEQ ID NO: 1261055 - RNA, 19 nt, Human
cugcugcugagaaccuggc

SEQ ID NO: 1261056 - RNA, 20 nt, Human
cugcugcugagaaccuggcc

SEQ ID NO: 1261057 - RNA, 23 nt, Human
cugcugcugagaaccuggccuuc

SEQ ID NO: 1261058 - RNA, 12 nt, Human
cugcugcugggc

SEQ ID NO: 1261059 - RNA, 13 nt, Human
cugcugcugggcu

SEQ ID NO: 1261060 - RNA, 14 nt, Human
cugcugcugggcuc

SEQ ID NO: 1261061 - RNA, 15 nt, Human
cugcugcugggcuca

SEQ ID NO: 1261062 - RNA, 16 nt, Human
cugcugcugggcucag

SEQ ID NO: 1261063 - RNA, 14 nt, Human
cugcugcugucccu

SEQ ID NO: 1261064 - RNA, 17 nt, Human
cugcugcugggcucagu

SEQ ID NO: 1261065 - RNA, 16 nt, Human
cugcugcugucugggu

SEQ ID NO: 1261066 - RNA, 18 nt, Human
cugcugcugucugggugc

SEQ ID NO: 1261067 - RNA, 17 nt, Human
cugcugcugucugggug

SEQ ID NO: 1261068 - RNA, 15 nt, Human
cugcuggagaggccc

SEQ ID NO: 1261069 - RNA, 18 nt, Human
cugcuggagaggccccag

SEQ ID NO: 1261070 - RNA, 21 nt, Human
cugcuggagaggccccagccg

SEQ ID NO: 1261071 - RNA, 20 nt, Human
cugcuggaguuucauguaca

SEQ ID NO: 1261072 - RNA, 21 nt, Human
cugcuggaguuucauguacaa

SEQ ID NO: 1261073 - RNA, 19 nt, Human
cugcuggagaggccccagc

SEQ ID NO: 1261074 - RNA, 14 nt, Human
cugcuggccucugc

SEQ ID NO: 1261075 - RNA, 15 nt, Human
cugcuggccucugcg

SEQ ID NO: 1261076 - RNA, 21 nt, Human
cugcuggccucugcgaguggu

SEQ ID NO: 1261077 - RNA, 16 nt, Human
cugcuggccucugcga

SEQ ID NO: 1261078 - RNA, 20 nt, Human
cugcuggggaagacaguggc

SEQ ID NO: 1261079 - RNA, 21 nt, Human
cugcuggggaagacaguggcc

SEQ ID NO: 1261080 - RNA, 22 nt, Human
cugcuggggaagacaguggccc

SEQ ID NO: 1261081 - RNA, 14 nt, Human
cugcuggggaagac

SEQ ID NO: 1261082 - RNA, 15 nt, Human
cugcuggggaagaca

SEQ ID NO: 1261083 - RNA, 17 nt, Human
cugcuggggaagacagu

SEQ ID NO: 1261084 - RNA, 18 nt, Human
cugcuggggaagacagug

SEQ ID NO: 1261085 - RNA, 19 nt, Human
cugcuggggaagacagugg

SEQ ID NO: 1261086 - RNA, 12 nt, Human
cugcuggcugcc

SEQ ID NO: 1261087 - RNA, 15 nt, Human
cugcgacuaaacuua

SEQ ID NO: 1261088 - RNA, 14 nt, Human
cugcgacuuucugc

SEQ ID NO: 1261089 - RNA, 16 nt, Human
cugcgacuuucugccu

SEQ ID NO: 1261090 - RNA, 17 nt, Human
cugcgacuuucugccug

SEQ ID NO: 1261091 - RNA, 18 nt, Human
cugcgacuuucugccugg

SEQ ID NO: 1261092 - RNA, 19 nt, Human
cugcgacuuucugccugga

SEQ ID NO: 1261093 - RNA, 20 nt, Human
cugcgacuuucugccuggag

SEQ ID NO: 1261094 - RNA, 15 nt, Human
cugcgagugguuucu

SEQ ID NO: 1261095 - RNA, 14 nt, Human
cugcucuccucuug

SEQ ID NO: 1261096 - RNA, 20 nt, Human
cugcucuccucuugccacug

SEQ ID NO: 1261097 - RNA, 11 nt, Human
cugcucuccuc

SEQ ID NO: 1261098 - RNA, 13 nt, Human
cugcucuccucuu

SEQ ID NO: 1261099 - RNA, 14 nt, Human
cugcucuccucuuc

SEQ ID NO: 1261100 - RNA, 17 nt, Human
cugcucuccucuucuac

SEQ ID NO: 1261101 - RNA, 18 nt, Human
cugcucuccucuucuacu

SEQ ID NO: 1261102 - RNA, 12 nt, Human
cugcucccaagg

SEQ ID NO: 1261103 - RNA, 17 nt, Human
cugcucccaaggggccu

SEQ ID NO: 1261104 - RNA, 18 nt, Human
cugcucccaaggggccug

SEQ ID NO: 1261105 - RNA, 20 nt, Human
cugcucccaaggggccugag

SEQ ID NO: 1261106 - RNA, 21 nt, Human
cugcucccaaggggccugagc

SEQ ID NO: 1261107 - RNA, 23 nt, Human
cugcucccaaggggccugagcag

SEQ ID NO: 1261108 - RNA, 22 nt, Human
cugcucccaaggggccugagca

SEQ ID NO: 1261109 - RNA, 16 nt, Human
cugcucccaccuccug

SEQ ID NO: 1261110 - RNA, 17 nt, Human
cugcucccaccuccuga

SEQ ID NO: 1261111 - RNA, 21 nt, Human
cugcucuccucuugccacugc

SEQ ID NO: 1261112 - RNA, 17 nt, Human
cugcugaaggaauaaau

SEQ ID NO: 1261113 - RNA, 18 nt, Human
cugcugaaggaauaaauu

SEQ ID NO: 1261114 - RNA, 12 nt, Human
cugcugcccagc

SEQ ID NO: 1261115 - RNA, 15 nt, Human
cugcugcccagccuc

SEQ ID NO: 1261116 - RNA, 22 nt, Human
cugcugcccagccuccaagcuc

SEQ ID NO: 1261117 - RNA, 17 nt, Human
cugcugcccauguuuca

SEQ ID NO: 1261118 - RNA, 13 nt, Human
cugcugcccuccc

SEQ ID NO: 1261119 - RNA, 11 nt, Human
cugcugccacu

SEQ ID NO: 1261120 - RNA, 12 nt, Human
cugcugccacug

SEQ ID NO: 1261121 - RNA, 13 nt, Human
cugcugccacuga

SEQ ID NO: 1261122 - RNA, 14 nt, Human
cugcugccacugag

SEQ ID NO: 1261123 - RNA, 15 nt, Human
cugcugccacugagg

SEQ ID NO: 1261124 - RNA, 16 nt, Human
cugcugccacugaggg

SEQ ID NO: 1261125 - RNA, 17 nt, Human
cugcugccacugagggg

SEQ ID NO: 1261126 - RNA, 19 nt, Human
cucccuucaugcauggaaa

SEQ ID NO: 1261127 - RNA, 19 nt, Human
cugcccucauggccccucu

SEQ ID NO: 1261128 - RNA, 12 nt, Human
cugcccucaugg

SEQ ID NO: 1261129 - RNA, 20 nt, Human
cugcccugcgggucacagga

SEQ ID NO: 1261130 - RNA, 22 nt, Human
cugcccugcugagucccaggcu

SEQ ID NO: 1261131 - RNA, 15 nt, Human
cugcccuuccugcag

SEQ ID NO: 1261132 - RNA, 13 nt, Human
cugccggggcagc

SEQ ID NO: 1261133 - RNA, 17 nt, Human
cugccggggcagccccc

SEQ ID NO: 1261134 - RNA, 19 nt, Human
cugccggggcagcccccuc

SEQ ID NO: 1261135 - RNA, 20 nt, Human
cugccggggcagcccccuca

SEQ ID NO: 1261136 - RNA, 23 nt, Human
cugccggggcagcccccucacag

SEQ ID NO: 1261137 - RNA, 15 nt, Human
cugccguaauuuaac

SEQ ID NO: 1261138 - RNA, 23 nt, Human
cugccgguucuuaaauccauccu

SEQ ID NO: 1261139 - RNA, 13 nt, Human
cugccgucagugc

SEQ ID NO: 1261140 - RNA, 19 nt, Human
cugccgucagugcugugcu

SEQ ID NO: 1261141 - RNA, 20 nt, Human
cugccgucagugcugugcug

SEQ ID NO: 1261142 - RNA, 22 nt, Human
cugccguccccuagagucccag

SEQ ID NO: 1261143 - RNA, 21 nt, Human
cugccguccccuagaguccca

SEQ ID NO: 1261144 - RNA, 13 nt, Human
cugccguggggcc

SEQ ID NO: 1261145 - RNA, 20 nt, Human
cugccguggggccgccgccu

SEQ ID NO: 1261146 - RNA, 21 nt, Human
cugccguggggccgccgccuc

SEQ ID NO: 1261147 - RNA, 16 nt, Human
cugccgagcaaccgug

SEQ ID NO: 1261148 - RNA, 21 nt, Human
cugccgagcaaccguggcccu

SEQ ID NO: 1261149 - RNA, 17 nt, Human
cugccgcaacaguuuuu

SEQ ID NO: 1261150 - RNA, 22 nt, Human
cugccgagaguccaucagccuc

SEQ ID NO: 1261151 - RNA, 23 nt, Human
cugccgagaguccaucagccucc

SEQ ID NO: 1261152 - RNA, 14 nt, Human
cugccgagcaaccg

SEQ ID NO: 1261153 - RNA, 21 nt, Human
cugcccuuucugggcaccggg

SEQ ID NO: 1261154 - RNA, 12 nt, Human
cugcccuuguuu

SEQ ID NO: 1261155 - RNA, 20 nt, Human
cugcccuuguuuggggcagg

SEQ ID NO: 1261156 - RNA, 16 nt, Human
cugcccuugaucagcc

SEQ ID NO: 1261157 - RNA, 17 nt, Human
cugcccuugaucagccc

SEQ ID NO: 1261158 - RNA, 21 nt, Human
cugcccuuguuuggggcagga

SEQ ID NO: 1261159 - RNA, 22 nt, Human
cugcccuuguuuggggcaggag

SEQ ID NO: 1261160 - RNA, 23 nt, Human
cugcccuuguuuggggcaggagu

SEQ ID NO: 1261161 - RNA, 21 nt, Human
cugccucucugcaggucccua

SEQ ID NO: 1261162 - RNA, 20 nt, Human
cugccucucugcaggucccu

SEQ ID NO: 1261163 - RNA, 22 nt, Human
cugccucucugcaggucccuaa

SEQ ID NO: 1261164 - RNA, 16 nt, Human
cugccucuucugggag

SEQ ID NO: 1261165 - RNA, 17 nt, Human
cugccucuucugggagg

SEQ ID NO: 1261166 - RNA, 16 nt, Human
cugccucucuuguaau

SEQ ID NO: 1261167 - RNA, 22 nt, Human
cugccucuucugggagggcagc

SEQ ID NO: 1261168 - RNA, 14 nt, Human
cugccuuggccucc

SEQ ID NO: 1261169 - RNA, 17 nt, Human
cugccuuggccucccaa

SEQ ID NO: 1261170 - RNA, 18 nt, Human
cuagaguuuagcuggaaa

SEQ ID NO: 1261171 - RNA, 19 nt, Human
cuagaguuuagcuggaaaa

SEQ ID NO: 1261172 - RNA, 24 nt, Human
cuagagugacucacuaauucauua

SEQ ID NO: 1261173 - RNA, 14 nt, Human
cuagagcacugcca

SEQ ID NO: 1261174 - RNA, 15 nt, Human
cuagagcacugccac

SEQ ID NO: 1261175 - RNA, 20 nt, Human
cuagagcagacuacagcugg

SEQ ID NO: 1261176 - RNA, 18 nt, Human
cuagagcacugccaccag

SEQ ID NO: 1261177 - RNA, 14 nt, Human
cuagagcagggauu

SEQ ID NO: 1261178 - RNA, 15 nt, Human
cuagagcagggauua

SEQ ID NO: 1261179 - RNA, 23 nt, Human
cuagaggccugacugccaagcca

SEQ ID NO: 1261180 - RNA, 21 nt, Human
cuagaggccugacugccaagc

SEQ ID NO: 1261181 - RNA, 18 nt, Human
cuagaggcuuccuucauu

SEQ ID NO: 1261182 - RNA, 19 nt, Human
cuagaggcuuccuucauuu

SEQ ID NO: 1261183 - RNA, 21 nt, Human
cuagaggcuuccuucauuucc

SEQ ID NO: 1261184 - RNA, 23 nt, Human
cuagaggcuuccuucauuuccuc

SEQ ID NO: 1261185 - RNA, 13 nt, Human
cuagacuggugcu

SEQ ID NO: 1261186 - RNA, 17 nt, Human
cuagacuggugcuaaug

SEQ ID NO: 1261187 - RNA, 18 nt, Human
cuagacugugcuaagaga

SEQ ID NO: 1261188 - RNA, 19 nt, Human
cuagagaaauaagaucuuu

SEQ ID NO: 1261189 - RNA, 21 nt, Human
cuagagaaauaagaucuuuuu

SEQ ID NO: 1261190 - RNA, 15 nt, Human
cuagagaagacaggc

SEQ ID NO: 1261191 - RNA, 17 nt, Human
cuagagaagacaggcug

SEQ ID NO: 1261192 - RNA, 22 nt, Human
cuagagaagacaggcuggaaga

SEQ ID NO: 1261193 - RNA, 18 nt, Human
cuagagaagacaggcugg

SEQ ID NO: 1261194 - RNA, 14 nt, Human
cuagaaacuuccaa

SEQ ID NO: 1261195 - RNA, 16 nt, Human
cuagaaacuuccaaau

SEQ ID NO: 1261196 - RNA, 19 nt, Human
cuagaaacaacacuguagu

SEQ ID NO: 1261197 - RNA, 17 nt, Human
cuagaaagcagagauuu

SEQ ID NO: 1261198 - RNA, 18 nt, Human
cuagaaagcagagauuuu

SEQ ID NO: 1261199 - RNA, 21 nt, Human
cuagaaagcagagauuuucaa

SEQ ID NO: 1261200 - RNA, 12 nt, Human
cuacuguucuaa

SEQ ID NO: 1261201 - RNA, 14 nt, Human
cuacuguucuaaag

SEQ ID NO: 1261202 - RNA, 15 nt, Human
cuacuguucuaaagc

SEQ ID NO: 1261203 - RNA, 18 nt, Human
cuacuguucuaaagcucu

SEQ ID NO: 1261204 - RNA, 20 nt, Human
cuacuguucuaaagcucuga

SEQ ID NO: 1261205 - RNA, 22 nt, Human
cuacuguucuaaagcucugaca

SEQ ID NO: 1261206 - RNA, 22 nt, Human
cuacuuacaugcauuacugcau

SEQ ID NO: 1261207 - RNA, 17 nt, Human
cuacuuagcaugucccu

SEQ ID NO: 1261208 - RNA, 22 nt, Human
cuacuuagcaugucccuaccga

SEQ ID NO: 1261209 - RNA, 13 nt, Human
cuacuuuuacuca

SEQ ID NO: 1261210 - RNA, 11 nt, Human
cuagaaaaaca

SEQ ID NO: 1261211 - RNA, 14 nt, Human
cuagaaaaacaggc

SEQ ID NO: 1261212 - RNA, 15 nt, Human
cuagaaaaacaggca

SEQ ID NO: 1261213 - RNA, 17 nt, Human
cuagaaaaacaggcacu

SEQ ID NO: 1261214 - RNA, 16 nt, Human
cuagaaaaacaggcac

SEQ ID NO: 1261215 - RNA, 14 nt, Human
cuagaaacaacacu

SEQ ID NO: 1261216 - RNA, 17 nt, Human
cuagaaacaacacugua

SEQ ID NO: 1261217 - RNA, 18 nt, Human
cuagaaacaacacuguag

SEQ ID NO: 1261218 - RNA, 20 nt, Human
cuagaaacaacacuguagua

SEQ ID NO: 1261219 - RNA, 22 nt, Human
cuaccuccaaagcuucccacgg

SEQ ID NO: 1261220 - RNA, 17 nt, Human
cuaccgagucucuucuc

SEQ ID NO: 1261221 - RNA, 19 nt, Human
cuaccgagucucuucucca

SEQ ID NO: 1261222 - RNA, 18 nt, Human
cuacccuuuuucuccagc

SEQ ID NO: 1261223 - RNA, 19 nt, Human
cuacccuuuuucuccagcu

SEQ ID NO: 1261224 - RNA, 17 nt, Human
cuaccgaaugugucuuu

SEQ ID NO: 1261225 - RNA, 18 nt, Human
cuaccgaaugugucuuua

SEQ ID NO: 1261226 - RNA, 21 nt, Human
cuaccgagucucuucuccacu

SEQ ID NO: 1261227 - RNA, 22 nt, Human
cuaccgagucucuucuccacug

SEQ ID NO: 1261228 - RNA, 23 nt, Human
cuaccgagucucuucuccacugg

SEQ ID NO: 1261229 - RNA, 13 nt, Human
cuaccgaguucaa

SEQ ID NO: 1261230 - RNA, 14 nt, Human
cuaccgaguucaag

SEQ ID NO: 1261231 - RNA, 16 nt, Human
cuaccgucuuuuccug

SEQ ID NO: 1261232 - RNA, 17 nt, Human
cuaccucaggcagcuca

SEQ ID NO: 1261233 - RNA, 18 nt, Human
cuaccucaggcagcucaa

SEQ ID NO: 1261234 - RNA, 13 nt, Human
cuacuggucucuc

SEQ ID NO: 1261235 - RNA, 15 nt, Human
cuacuggucucucua

SEQ ID NO: 1261236 - RNA, 20 nt, Human
cuacuggucucucuaugccu

SEQ ID NO: 1261237 - RNA, 14 nt, Human
cuacugggaaggcu

SEQ ID NO: 1261238 - RNA, 15 nt, Human
cuacuggggaaacug

SEQ ID NO: 1261239 - RNA, 16 nt, Human
cuacuggggaaacugg

SEQ ID NO: 1261240 - RNA, 17 nt, Human
cuacuggggaaacuggc

SEQ ID NO: 1261241 - RNA, 19 nt, Human
cuacuggggaaacuggcca

SEQ ID NO: 1261242 - RNA, 22 nt, Human
cuacuggggaaacuggccaugg

SEQ ID NO: 1261243 - RNA, 20 nt, Human
cuacuggggaaacuggccau

SEQ ID NO: 1261244 - RNA, 21 nt, Human
cuacugccgucagugcugugc

SEQ ID NO: 1261245 - RNA, 15 nt, Human
cuacugcccaggcac

SEQ ID NO: 1261246 - RNA, 21 nt, Human
cuacugcccaggcacugcaaa

SEQ ID NO: 1261247 - RNA, 21 nt, Human
cuacucugugccagagccugg

SEQ ID NO: 1261248 - RNA, 22 nt, Human
cuacucugugccagagccuggg

SEQ ID NO: 1261249 - RNA, 14 nt, Human
cuacugauuccgca

SEQ ID NO: 1261250 - RNA, 23 nt, Human
cuacucuccccacgagggcuggc

SEQ ID NO: 1261251 - RNA, 22 nt, Human
cuacucuccccacgagggcugg

SEQ ID NO: 1261252 - RNA, 13 nt, Human
cuacucugugcca

SEQ ID NO: 1261253 - RNA, 17 nt, Human
cuacucugugccagagc

SEQ ID NO: 1261254 - RNA, 18 nt, Human
cuacucugugccagagcc

SEQ ID NO: 1261255 - RNA, 19 nt, Human
cuacucugugccagagccu

SEQ ID NO: 1261256 - RNA, 20 nt, Human
cuacucugugccagagccug

SEQ ID NO: 1261257 - RNA, 17 nt, Human
cuacucuccccacgagg

SEQ ID NO: 1261258 - RNA, 19 nt, Human
cuacucuccccacgagggc

SEQ ID NO: 1261259 - RNA, 20 nt, Human
cuacucuccccacgagggcu

SEQ ID NO: 1261260 - RNA, 21 nt, Human
cuacucuccccacgagggcug

SEQ ID NO: 1261261 - RNA, 14 nt, Human
cuaggaaauauuua

SEQ ID NO: 1261262 - RNA, 15 nt, Human
cuaggaaauauuuau

SEQ ID NO: 1261263 - RNA, 19 nt, Human
cuaggaaauauuuauuuua

SEQ ID NO: 1261264 - RNA, 20 nt, Human
cuaggaaauauuuauuuuaa

SEQ ID NO: 1261265 - RNA, 23 nt, Human
cuagcuguccuuuuuccucucca

SEQ ID NO: 1261266 - RNA, 23 nt, Human
cuagcugugugaauaccugcuca

SEQ ID NO: 1261267 - RNA, 14 nt, Human
cuaggaaaauaaaa

SEQ ID NO: 1261268 - RNA, 15 nt, Human
cuaggaaaauaaaac

SEQ ID NO: 1261269 - RNA, 12 nt, Human
cuaggaaaauac

SEQ ID NO: 1261270 - RNA, 21 nt, Human
cuagcucuuguugagccgugg

SEQ ID NO: 1261271 - RNA, 17 nt, Human
cuagcugaauguuuuuc

SEQ ID NO: 1261272 - RNA, 18 nt, Human
cuagcugaauguuuuucu

SEQ ID NO: 1261273 - RNA, 19 nt, Human
cuagcugaauguuuuucua

SEQ ID NO: 1261274 - RNA, 20 nt, Human
cuagcugaauguuuuucuaa

SEQ ID NO: 1261275 - RNA, 14 nt, Human
cuagcuggcucugu

SEQ ID NO: 1261276 - RNA, 13 nt, Human
cuagcuggcucug

SEQ ID NO: 1261277 - RNA, 17 nt, Human
cuagcuguccuuuuucc

SEQ ID NO: 1261278 - RNA, 14 nt, Human
cuagcugugggggu

SEQ ID NO: 1261279 - RNA, 14 nt, Human
cuagauaucgacuu

SEQ ID NO: 1261280 - RNA, 21 nt, Human
cuagauaucgacuuguuuuug

SEQ ID NO: 1261281 - RNA, 22 nt, Human
cuagccuuaaucagguccucag

SEQ ID NO: 1261282 - RNA, 15 nt, Human
cuagauacucuuauu

SEQ ID NO: 1261283 - RNA, 11 nt, Human
cuagccuugcu

SEQ ID NO: 1261284 - RNA, 13 nt, Human
cuagccuugcuug

SEQ ID NO: 1261285 - RNA, 14 nt, Human
cuagccuugcuugu

SEQ ID NO: 1261286 - RNA, 22 nt, Human
cuagccuuggccucuuuccuca

SEQ ID NO: 1261287 - RNA, 15 nt, Human
cuagccuugcuuguu

SEQ ID NO: 1261288 - RNA, 14 nt, Human
cuagcgcaguuuuu

SEQ ID NO: 1261289 - RNA, 21 nt, Human
cuagcgcaguuuuuuuuuucu

SEQ ID NO: 1261290 - RNA, 22 nt, Human
cuagcgcaguuuuuuuuuucuu

SEQ ID NO: 1261291 - RNA, 17 nt, Human
cuagcgcuaucucccug

SEQ ID NO: 1261292 - RNA, 20 nt, Human
cuagcgcuaucucccugccu

SEQ ID NO: 1261293 - RNA, 16 nt, Human
cuagcgggauggggcu

SEQ ID NO: 1261294 - RNA, 19 nt, Human
cuagcgggauggggcuccc

SEQ ID NO: 1261295 - RNA, 23 nt, Human
cuauggggaagguuaucagugcu

SEQ ID NO: 1261296 - RNA, 19 nt, Human
cuaugggggcacugaggac

SEQ ID NO: 1261297 - RNA, 22 nt, Human
cuauguaacauguaggaaguag

SEQ ID NO: 1261298 - RNA, 22 nt, Human
cuauguaggaaagaccauuuuu

SEQ ID NO: 1261299 - RNA, 23 nt, Human
cuauguaggaaagaccauuuuuc

SEQ ID NO: 1261300 - RNA, 16 nt, Human
cuauguaucaaaugua

SEQ ID NO: 1261301 - RNA, 18 nt, Human
cuauuaucccagcugccu

SEQ ID NO: 1261302 - RNA, 19 nt, Human
cuauuaucccagcugccua

SEQ ID NO: 1261303 - RNA, 16 nt, Human
cuauuauccccauuuc

SEQ ID NO: 1261304 - RNA, 17 nt, Human
cuauuauccccauuucu

SEQ ID NO: 1261305 - RNA, 19 nt, Human
cuauuaucugucagcugca

SEQ ID NO: 1261306 - RNA, 21 nt, Human
cuauuaugaaugugaagccuu

SEQ ID NO: 1261307 - RNA, 22 nt, Human
cuauuaugaaugugaagccuuc

SEQ ID NO: 1261308 - RNA, 23 nt, Human
cuauuaugaaugugaagccuucc

SEQ ID NO: 1261309 - RNA, 20 nt, Human
cuauuauuuucacuguagaa

SEQ ID NO: 1261310 - RNA, 22 nt, Human
cuauuauuuucacuguagaaug

SEQ ID NO: 1261311 - RNA, 23 nt, Human
cuauucagcuucguuuauuuuca

SEQ ID NO: 1261312 - RNA, 12 nt, Human
cuauucuguccc

SEQ ID NO: 1261313 - RNA, 14 nt, Human
cuauucugucccua

SEQ ID NO: 1261314 - RNA, 15 nt, Human
cuauucugucccuag

SEQ ID NO: 1261315 - RNA, 16 nt, Human
cuauucugucccuagg

SEQ ID NO: 1261316 - RNA, 20 nt, Human
cuauucugucccuagguguu

SEQ ID NO: 1261317 - RNA, 14 nt, Human
cuauucuugaugua

SEQ ID NO: 1261318 - RNA, 16 nt, Human
cuauucuugauguaaa

SEQ ID NO: 1261319 - RNA, 17 nt, Human
cuauucuugauguaaaa

SEQ ID NO: 1261320 - RNA, 18 nt, Human
cuauucuugauguaaaau

SEQ ID NO: 1261321 - RNA, 19 nt, Human
cuauucuugauguaaaauc

SEQ ID NO: 1261322 - RNA, 20 nt, Human
cuauucuugauguaaaaucu

SEQ ID NO: 1261323 - RNA, 22 nt, Human
cuauucuugauguaaaaucuug

SEQ ID NO: 1261324 - RNA, 22 nt, Human
cuauucuuuaacucccauuacc

SEQ ID NO: 1261325 - RNA, 22 nt, Human
cuaugaaguuuuuuuuauacag

SEQ ID NO: 1261326 - RNA, 19 nt, Human
cuaugaacucuguuuucuu

SEQ ID NO: 1261327 - RNA, 13 nt, Human
cuaugaaggcugu

SEQ ID NO: 1261328 - RNA, 16 nt, Human
cuaugauguauacugc

SEQ ID NO: 1261329 - RNA, 14 nt, Human
cuaugauuauuaac

SEQ ID NO: 1261330 - RNA, 20 nt, Human
cuaugauguauacugccacu

SEQ ID NO: 1261331 - RNA, 14 nt, Human
cuaugauguauacu

SEQ ID NO: 1261332 - RNA, 13 nt, Human
cuaugauguauac

SEQ ID NO: 1261333 - RNA, 15 nt, Human
cuaugauuuggaaaa

SEQ ID NO: 1261334 - RNA, 19 nt, Human
cuaugauuuaauuugaaau

SEQ ID NO: 1261335 - RNA, 20 nt, Human
cuaugauuuaauuugaaaua

SEQ ID NO: 1261336 - RNA, 19 nt, Human
cuaugauuuggaaaauaaa

SEQ ID NO: 1261337 - RNA, 15 nt, Human
cuaugccucucuaca

SEQ ID NO: 1261338 - RNA, 16 nt, Human
cuaugccucucuacag

SEQ ID NO: 1261339 - RNA, 17 nt, Human
cuauagcuaaguacaca

SEQ ID NO: 1261340 - RNA, 15 nt, Human
cuauagcuaaguaca

SEQ ID NO: 1261341 - RNA, 23 nt, Human
cuauaccuguguuucuugccuca

SEQ ID NO: 1261342 - RNA, 12 nt, Human
cuauacugcuug

SEQ ID NO: 1261343 - RNA, 21 nt, Human
cuauaguccagcuuuguucuu

SEQ ID NO: 1261344 - RNA, 15 nt, Human
cuauaguucuagaca

SEQ ID NO: 1261345 - RNA, 19 nt, Human
cuauauaagacaagaacuc

SEQ ID NO: 1261346 - RNA, 20 nt, Human
cuauaguuauuaaguucuuu

SEQ ID NO: 1261347 - RNA, 13 nt, Human
cuauaguucuaga

SEQ ID NO: 1261348 - RNA, 14 nt, Human
cuauaguucuagac

SEQ ID NO: 1261349 - RNA, 14 nt, Human
cuauauaccaaagc

SEQ ID NO: 1261350 - RNA, 21 nt, Human
cuauauacucacuuucuagau

SEQ ID NO: 1261351 - RNA, 19 nt, Human
cuaugaaauauuauguuaa

SEQ ID NO: 1261352 - RNA, 19 nt, Human
cuauauaccaaagcacauu

SEQ ID NO: 1261353 - RNA, 19 nt, Human
cuauauagcugaucaguuu

SEQ ID NO: 1261354 - RNA, 16 nt, Human
cuauacccacccagaa

SEQ ID NO: 1261355 - RNA, 15 nt, Human
cuauacccacccaga

SEQ ID NO: 1261356 - RNA, 16 nt, Human
cuauaccaauaaagug

SEQ ID NO: 1261357 - RNA, 15 nt, Human
cuauaccaauaaagu

SEQ ID NO: 1261358 - RNA, 13 nt, Human
cuauaccuguguu

SEQ ID NO: 1261359 - RNA, 19 nt, Human
cuauacgcagcgugcuuua

SEQ ID NO: 1261360 - RNA, 17 nt, Human
cuauacugcauacuuuu

SEQ ID NO: 1261361 - RNA, 19 nt, Human
cuauacugcauacuuuuua

SEQ ID NO: 1261362 - RNA, 21 nt, Human
cuauacugcauacuuuuuaaa

SEQ ID NO: 1261363 - RNA, 23 nt, Human
cuauacugcuuggagcugagcaa

SEQ ID NO: 1261364 - RNA, 13 nt, Human
cuauaauuuaaau

SEQ ID NO: 1261365 - RNA, 12 nt, Human
cuauaauuuaaa

SEQ ID NO: 1261366 - RNA, 23 nt, Human
cucaacuccgugcuuaaccaaag

SEQ ID NO: 1261367 - RNA, 19 nt, Human
cucaaccccuccccuccau

SEQ ID NO: 1261368 - RNA, 21 nt, Human
cucaaccccuccccuccaucc

SEQ ID NO: 1261369 - RNA, 23 nt, Human
cucaaccccuccccuccaucccu

SEQ ID NO: 1261370 - RNA, 22 nt, Human
cucaacaggccucagggcuccu

SEQ ID NO: 1261371 - RNA, 21 nt, Human
cucaacaggccucagggcucc

SEQ ID NO: 1261372 - RNA, 13 nt, Human
cuauuucacugga

SEQ ID NO: 1261373 - RNA, 14 nt, Human
cuauuucacuggag

SEQ ID NO: 1261374 - RNA, 16 nt, Human
cuauuucuuaaacacu

SEQ ID NO: 1261375 - RNA, 19 nt, Human
cuauuugauguaauacuuc

SEQ ID NO: 1261376 - RNA, 16 nt, Human
cuauuugauguaauac

SEQ ID NO: 1261377 - RNA, 15 nt, Human
cuauuucuccuccau

SEQ ID NO: 1261378 - RNA, 16 nt, Human
cuauuucuccuccaug

SEQ ID NO: 1261379 - RNA, 18 nt, Human
cuauuucuuaaacacuug

SEQ ID NO: 1261380 - RNA, 22 nt, Human
cucaagcagcgaccgcccccuc

SEQ ID NO: 1261381 - RNA, 23 nt, Human
cucaagcagcgaccgcccccucc

SEQ ID NO: 1261382 - RNA, 17 nt, Human
cucaaggcggugcuuga

SEQ ID NO: 1261383 - RNA, 23 nt, Human
cucaaggcggugcuugauagaaa

SEQ ID NO: 1261384 - RNA, 14 nt, Human
cucaagguuuuagg

SEQ ID NO: 1261385 - RNA, 19 nt, Human
cucaagguuuuagguucua

SEQ ID NO: 1261386 - RNA, 20 nt, Human
cucaagguuuuagguucuaa

SEQ ID NO: 1261387 - RNA, 22 nt, Human
cucaagguuuuagguucuaaag

SEQ ID NO: 1261388 - RNA, 23 nt, Human
cucaagguuuuagguucuaaagu

SEQ ID NO: 1261389 - RNA, 17 nt, Human
cucacagaacccuugga

SEQ ID NO: 1261390 - RNA, 15 nt, Human
cucacaccugaacug

SEQ ID NO: 1261391 - RNA, 23 nt, Human
cucacacucaugcauuguccucu

SEQ ID NO: 1261392 - RNA, 22 nt, Human
cucacacucaugcauuguccuc

SEQ ID NO: 1261393 - RNA, 18 nt, Human
cucacacuggucugcugu

SEQ ID NO: 1261394 - RNA, 19 nt, Human
cucacacuggucugcuguc

SEQ ID NO: 1261395 - RNA, 19 nt, Human
cuauugcauuuauauguac

SEQ ID NO: 1261396 - RNA, 11 nt, Human
cuauugccucu

SEQ ID NO: 1261397 - RNA, 13 nt, Human
cuauugccucuga

SEQ ID NO: 1261398 - RNA, 17 nt, Human
cuauugccucugagagc

SEQ ID NO: 1261399 - RNA, 17 nt, Human
cuauugcauuuauaugu

SEQ ID NO: 1261400 - RNA, 14 nt, Human
cuauugcauuuaua

SEQ ID NO: 1261401 - RNA, 14 nt, Human
cuauugccucugag

SEQ ID NO: 1261402 - RNA, 17 nt, Human
cuauugcuagagcuccu

SEQ ID NO: 1261403 - RNA, 18 nt, Human
cuauugcuagagcuccuc

SEQ ID NO: 1261404 - RNA, 19 nt, Human
cuauugcuagagcuccucc

SEQ ID NO: 1261405 - RNA, 21 nt, Human
cuauugcuagagcuccucccu

SEQ ID NO: 1261406 - RNA, 11 nt, Human
cuauugguaaa

SEQ ID NO: 1261407 - RNA, 16 nt, Human
cuauuuaaaacuugua

SEQ ID NO: 1261408 - RNA, 17 nt, Human
cuauuuaaaacuuguaa

SEQ ID NO: 1261409 - RNA, 15 nt, Human
cuauuuaaagccucc

SEQ ID NO: 1261410 - RNA, 13 nt, Human
cuauuuaacugac

SEQ ID NO: 1261411 - RNA, 14 nt, Human
cuauuuaacugacu

SEQ ID NO: 1261412 - RNA, 15 nt, Human
cuauuuaacugacua

SEQ ID NO: 1261413 - RNA, 17 nt, Human
cucccucaaccucaucc

SEQ ID NO: 1261414 - RNA, 13 nt, Human
cucccucaaccuc

SEQ ID NO: 1261415 - RNA, 24 nt, Human
cucccgagcuccucuuccaugcug

SEQ ID NO: 1261416 - RNA, 12 nt, Human
cucccgagcucc

SEQ ID NO: 1261417 - RNA, 14 nt, Human
cucccgagcuccuc

SEQ ID NO: 1261418 - RNA, 18 nt, Human
cucccgagcuccucuucc

SEQ ID NO: 1261419 - RNA, 19 nt, Human
cucccgagcuccucuucca

SEQ ID NO: 1261420 - RNA, 21 nt, Human
cuccccugccagggcagggcc

SEQ ID NO: 1261421 - RNA, 22 nt, Human
cuccccuggaacugucucucau

SEQ ID NO: 1261422 - RNA, 19 nt, Human
cuccccugcacuguaaaau

SEQ ID NO: 1261423 - RNA, 21 nt, Human
cuccccuggagggggaauggc

SEQ ID NO: 1261424 - RNA, 14 nt, Human
cuccccuguaccuu

SEQ ID NO: 1261425 - RNA, 22 nt, Human
cucccuucaaccauuccccaug

SEQ ID NO: 1261426 - RNA, 23 nt, Human
cucccuucaaccauuccccaugg

SEQ ID NO: 1261427 - RNA, 21 nt, Human
cucccuucaaccauuccccau

SEQ ID NO: 1261428 - RNA, 18 nt, Human
cucccuggaucagaacag

SEQ ID NO: 1261429 - RNA, 23 nt, Human
cucccuggaucagaacaggagcu

SEQ ID NO: 1261430 - RNA, 12 nt, Human
cucccuggauga

SEQ ID NO: 1261431 - RNA, 13 nt, Human
cucccuggauuuu

SEQ ID NO: 1261432 - RNA, 19 nt, Human
cucccuggauuuuuaccag

SEQ ID NO: 1261433 - RNA, 24 nt, Human
cucccuggauuuuuaccagucuca

SEQ ID NO: 1261434 - RNA, 23 nt, Human
cucccuggaaugaguugaggcca

SEQ ID NO: 1261435 - RNA, 12 nt, Human
cucccuggaaug

SEQ ID NO: 1261436 - RNA, 12 nt, Human
cuccccugccac

SEQ ID NO: 1261437 - RNA, 13 nt, Human
cuccccugccacc

SEQ ID NO: 1261438 - RNA, 18 nt, Human
cuccccugccaccaggcc

SEQ ID NO: 1261439 - RNA, 23 nt, Human
cuccccugccaccaggccaccuc

SEQ ID NO: 1261440 - RNA, 15 nt, Human
cuccccugccagggc

SEQ ID NO: 1261441 - RNA, 16 nt, Human
cuccccugccagggca

SEQ ID NO: 1261442 - RNA, 16 nt, Human
cuccccugaccuguga

SEQ ID NO: 1261443 - RNA, 17 nt, Human
cuccccugaccugugag

SEQ ID NO: 1261444 - RNA, 22 nt, Human
cuccccugaccugugagcccag

SEQ ID NO: 1261445 - RNA, 12 nt, Human
cuccccugcacu

SEQ ID NO: 1261446 - RNA, 13 nt, Human
cuccccugcacug

SEQ ID NO: 1261447 - RNA, 14 nt, Human
cuccccugcacugu

SEQ ID NO: 1261448 - RNA, 15 nt, Human
cuccccugcacugua

SEQ ID NO: 1261449 - RNA, 16 nt, Human
cuccccugcacuguaa

SEQ ID NO: 1261450 - RNA, 17 nt, Human
cuccccugcacuguaaa

SEQ ID NO: 1261451 - RNA, 18 nt, Human
cuccccugcacuguaaaa

SEQ ID NO: 1261452 - RNA, 21 nt, Human
cuccccugcacuguaaaaugu

SEQ ID NO: 1261453 - RNA, 18 nt, Human
cuccccagcccagagaca

SEQ ID NO: 1261454 - RNA, 14 nt, Human
cuccccagcccaga

SEQ ID NO: 1261455 - RNA, 15 nt, Human
cuccccagcccagag

SEQ ID NO: 1261456 - RNA, 16 nt, Human
cuccccagcccagaga

SEQ ID NO: 1261457 - RNA, 17 nt, Human
cuccccagcccagagac

SEQ ID NO: 1261458 - RNA, 16 nt, Human
cuccccucuccuuccu

SEQ ID NO: 1261459 - RNA, 20 nt, Human
cuccccacgucagcugggac

SEQ ID NO: 1261460 - RNA, 16 nt, Human
cuccccacgagggcug

SEQ ID NO: 1261461 - RNA, 12 nt, Human
cuccccacucug

SEQ ID NO: 1261462 - RNA, 13 nt, Human
cuccccacucugc

SEQ ID NO: 1261463 - RNA, 14 nt, Human
cuccccacucugcu

SEQ ID NO: 1261464 - RNA, 16 nt, Human
cuccccacucugcucu

SEQ ID NO: 1261465 - RNA, 17 nt, Human
cuccccacucugcucug

SEQ ID NO: 1261466 - RNA, 20 nt, Human
cuccccacucugcucugaug

SEQ ID NO: 1261467 - RNA, 22 nt, Human
cuccccagcauuccagccccuc

SEQ ID NO: 1261468 - RNA, 23 nt, Human
cuccccagcauuccagccccucu

SEQ ID NO: 1261469 - RNA, 19 nt, Human
cuccccacucugcucugau

SEQ ID NO: 1261470 - RNA, 13 nt, Human
cuccccagcccag

SEQ ID NO: 1261471 - RNA, 19 nt, Human
cuccauggcccugccaugc

SEQ ID NO: 1261472 - RNA, 16 nt, Human
cuccauggcccugcca

SEQ ID NO: 1261473 - RNA, 15 nt, Human
cuccauggcccugcc

SEQ ID NO: 1261474 - RNA, 17 nt, Human
cuccaugcugccuccag

SEQ ID NO: 1261475 - RNA, 19 nt, Human
cuccagcuggguuggaaaa

SEQ ID NO: 1261476 - RNA, 14 nt, Human
cuccaugcugccuc

SEQ ID NO: 1261477 - RNA, 15 nt, Human
cuccaugcugccucc

SEQ ID NO: 1261478 - RNA, 16 nt, Human
cuccaugcugccucca

SEQ ID NO: 1261479 - RNA, 22 nt, Human
cuccagccccucuuggagaagu

SEQ ID NO: 1261480 - RNA, 20 nt, Human
cuccagccccucuuggagaa

SEQ ID NO: 1261481 - RNA, 21 nt, Human
cuccagccccucuuggagaag

SEQ ID NO: 1261482 - RNA, 20 nt, Human
cuccagcugacuaaacuuuu

SEQ ID NO: 1261483 - RNA, 14 nt, Human
cuccagcugccccg

SEQ ID NO: 1261484 - RNA, 11 nt, Human
cuccagcugcc

SEQ ID NO: 1261485 - RNA, 13 nt, Human
cuccagcugcccc

SEQ ID NO: 1261486 - RNA, 22 nt, Human
cuccagcuggccgggagccuga

SEQ ID NO: 1261487 - RNA, 23 nt, Human
cuccagcuggccgggagccugau

SEQ ID NO: 1261488 - RNA, 15 nt, Human
cuccagcugggcucu

SEQ ID NO: 1261489 - RNA, 19 nt, Human
cuccagcugggcucugcaa

SEQ ID NO: 1261490 - RNA, 20 nt, Human
cuccagcugggcucugcaau

SEQ ID NO: 1261491 - RNA, 18 nt, Human
cuccauuuaaacagaugu

SEQ ID NO: 1261492 - RNA, 18 nt, Human
cucccaaacgcccuuucc

SEQ ID NO: 1261493 - RNA, 20 nt, Human
cucccaaacgcccuuuccuc

SEQ ID NO: 1261494 - RNA, 16 nt, Human
cucccaaagugcuggg

SEQ ID NO: 1261495 - RNA, 20 nt, Human
cucccaaagugcugagauua

SEQ ID NO: 1261496 - RNA, 22 nt, Human
cucccaaagugcugagauuaca

SEQ ID NO: 1261497 - RNA, 15 nt, Human
cucccaaaugagcca

SEQ ID NO: 1261498 - RNA, 20 nt, Human
cucccaggcgccccuucccc

SEQ ID NO: 1261499 - RNA, 22 nt, Human
cucccaggcgccccuucccccu

SEQ ID NO: 1261500 - RNA, 17 nt, Human
cucccaggcgccccuuc

SEQ ID NO: 1261501 - RNA, 19 nt, Human
cucccaggcgccccuuccc

SEQ ID NO: 1261502 - RNA, 17 nt, Human
cucccacaagccugagg

SEQ ID NO: 1261503 - RNA, 13 nt, Human
cucccaauucauc

SEQ ID NO: 1261504 - RNA, 19 nt, Human
cucccaauuucagacuccc

SEQ ID NO: 1261505 - RNA, 21 nt, Human
cucccaauuucagacucccau

SEQ ID NO: 1261506 - RNA, 15 nt, Human
cucccacaagccucu

SEQ ID NO: 1261507 - RNA, 21 nt, Human
cucccacaagccucugcccag

SEQ ID NO: 1261508 - RNA, 23 nt, Human
cucccacaagccucugcccaggc

SEQ ID NO: 1261509 - RNA, 15 nt, Human
cucccacaagccuga

SEQ ID NO: 1261510 - RNA, 16 nt, Human
cucccacaagccugag

SEQ ID NO: 1261511 - RNA, 23 nt, Human
cucccacaagccugagggaaagg

SEQ ID NO: 1261512 - RNA, 15 nt, Human
cucccauucaagauu

SEQ ID NO: 1261513 - RNA, 14 nt, Human
cucccauuccugaa

SEQ ID NO: 1261514 - RNA, 15 nt, Human
cucccauuccugaag

SEQ ID NO: 1261515 - RNA, 16 nt, Human
cucccauuccugaaga

SEQ ID NO: 1261516 - RNA, 17 nt, Human
cucccauuccugaagaa

SEQ ID NO: 1261517 - RNA, 19 nt, Human
cucccauuccugaagaacc

SEQ ID NO: 1261518 - RNA, 15 nt, Human
cuccccacgagggcu

SEQ ID NO: 1261519 - RNA, 18 nt, Human
cuccccacgagggcuggc

SEQ ID NO: 1261520 - RNA, 14 nt, Human
cucccauccagggc

SEQ ID NO: 1261521 - RNA, 15 nt, Human
cucccauccagggcc

SEQ ID NO: 1261522 - RNA, 22 nt, Human
cucccauccagggcccccaucu

SEQ ID NO: 1261523 - RNA, 17 nt, Human
cuccaccgcagaaggaa

SEQ ID NO: 1261524 - RNA, 16 nt, Human
cuccaccgcagaagga

SEQ ID NO: 1261525 - RNA, 16 nt, Human
cuccaccaucgucuuc

SEQ ID NO: 1261526 - RNA, 22 nt, Human
cuccaccaucgucuucuuggcc

SEQ ID NO: 1261527 - RNA, 20 nt, Human
cuccaaggggaaucagaacu

SEQ ID NO: 1261528 - RNA, 18 nt, Human
cuccaccgcagaaggaag

SEQ ID NO: 1261529 - RNA, 15 nt, Human
cuccaccuagacugu

SEQ ID NO: 1261530 - RNA, 16 nt, Human
cuccacucaugugacu

SEQ ID NO: 1261531 - RNA, 22 nt, Human
cuccacucaugugacucuuucc

SEQ ID NO: 1261532 - RNA, 13 nt, Human
cuccacugccuuc

SEQ ID NO: 1261533 - RNA, 14 nt, Human
cuccacugccuucg

SEQ ID NO: 1261534 - RNA, 15 nt, Human
cuccacugccuucga

SEQ ID NO: 1261535 - RNA, 16 nt, Human
cuccacugccuucgau

SEQ ID NO: 1261536 - RNA, 13 nt, Human
cuccacuggaugg

SEQ ID NO: 1261537 - RNA, 13 nt, Human
cuccagagggcac

SEQ ID NO: 1261538 - RNA, 20 nt, Human
cuccagagggcacucugcuu

SEQ ID NO: 1261539 - RNA, 21 nt, Human
cuccagagggcacucugcuug

SEQ ID NO: 1261540 - RNA, 20 nt, Human
cuccagaggggcucagguca

SEQ ID NO: 1261541 - RNA, 16 nt, Human
cuccagaugcagggca

SEQ ID NO: 1261542 - RNA, 17 nt, Human
cuccagaugcagggcag

SEQ ID NO: 1261543 - RNA, 18 nt, Human
cuccagaugcagggcagu

SEQ ID NO: 1261544 - RNA, 21 nt, Human
cuccagaugcagggcagucau

SEQ ID NO: 1261545 - RNA, 14 nt, Human
cuccacuggaugga

SEQ ID NO: 1261546 - RNA, 16 nt, Human
cuccacuggauggagg

SEQ ID NO: 1261547 - RNA, 11 nt, Human
cuccagaccug

SEQ ID NO: 1261548 - RNA, 12 nt, Human
cuccagaccuga

SEQ ID NO: 1261549 - RNA, 14 nt, Human
cuccagaccugauc

SEQ ID NO: 1261550 - RNA, 19 nt, Human
cuccagaccugauccugga

SEQ ID NO: 1261551 - RNA, 23 nt, Human
cuccagaccugauccuggaggcc

SEQ ID NO: 1261552 - RNA, 21 nt, Human
cuccagagaguaucugaggca

SEQ ID NO: 1261553 - RNA, 19 nt, Human
cuccagauuagagccugua

SEQ ID NO: 1261554 - RNA, 22 nt, Human
cuccagauuagagccuguaaac

SEQ ID NO: 1261555 - RNA, 16 nt, Human
cuccagccccucuugg

SEQ ID NO: 1261556 - RNA, 18 nt, Human
cuccagccccucuuggag

SEQ ID NO: 1261557 - RNA, 19 nt, Human
cuccagccccucuuggaga

SEQ ID NO: 1261558 - RNA, 13 nt, Human
cucaguugcagcc

SEQ ID NO: 1261559 - RNA, 15 nt, Human
cucaguugauuuucu

SEQ ID NO: 1261560 - RNA, 16 nt, Human
cucaguugauuuucug

SEQ ID NO: 1261561 - RNA, 18 nt, Human
cucaguugauuuucugga

SEQ ID NO: 1261562 - RNA, 20 nt, Human
cucaguugauuuucuggauu

SEQ ID NO: 1261563 - RNA, 20 nt, Human
cucaguugugacuaacuaga

SEQ ID NO: 1261564 - RNA, 15 nt, Human
cucaguuucuugcuu

SEQ ID NO: 1261565 - RNA, 22 nt, Human
cucaguuugugugucuuaauua

SEQ ID NO: 1261566 - RNA, 17 nt, Human
cucaguuuuaucauuuu

SEQ ID NO: 1261567 - RNA, 18 nt, Human
cucaguuuuaucauuuuc

SEQ ID NO: 1261568 - RNA, 13 nt, Human
cucaguuuucaua

SEQ ID NO: 1261569 - RNA, 14 nt, Human
cucaguuuucauaa

SEQ ID NO: 1261570 - RNA, 17 nt, Human
cucauucugaaggagcc

SEQ ID NO: 1261571 - RNA, 19 nt, Human
cucauucugaaggagcccc

SEQ ID NO: 1261572 - RNA, 21 nt, Human
cucauugcucugaauauguca

SEQ ID NO: 1261573 - RNA, 19 nt, Human
cucauuuagccuguccugu

SEQ ID NO: 1261574 - RNA, 22 nt, Human
cuccaaaccacuuuuugcagcu

SEQ ID NO: 1261575 - RNA, 13 nt, Human
cuccaaaccacuu

SEQ ID NO: 1261576 - RNA, 14 nt, Human
cuccaaaaugugcc

SEQ ID NO: 1261577 - RNA, 15 nt, Human
cuccaaaaugugccu

SEQ ID NO: 1261578 - RNA, 22 nt, Human
cuccaaaauguuggucauuuua

SEQ ID NO: 1261579 - RNA, 18 nt, Human
cucauuuuaggcaaauau

SEQ ID NO: 1261580 - RNA, 22 nt, Human
cucauuuuuccguaaaaaugau

SEQ ID NO: 1261581 - RNA, 13 nt, Human
cucauuuuuuaaa

SEQ ID NO: 1261582 - RNA, 16 nt, Human
cuccaaaaugugccua

SEQ ID NO: 1261583 - RNA, 18 nt, Human
cuccaaacugaagcagcc

SEQ ID NO: 1261584 - RNA, 22 nt, Human
cuccaaacugaagcagccucuc

SEQ ID NO: 1261585 - RNA, 23 nt, Human
cuccaaacugaagcagccucucc

SEQ ID NO: 1261586 - RNA, 19 nt, Human
cuccaaggaggggcuguaa

SEQ ID NO: 1261587 - RNA, 20 nt, Human
cuccaaggaggggcuguaaa

SEQ ID NO: 1261588 - RNA, 21 nt, Human
cuccaaggaggggcuguaaaa

SEQ ID NO: 1261589 - RNA, 22 nt, Human
cuccaaggaggggcuguaaaau

SEQ ID NO: 1261590 - RNA, 13 nt, Human
cucauuucaggau

SEQ ID NO: 1261591 - RNA, 12 nt, Human
cucauuucagga

SEQ ID NO: 1261592 - RNA, 12 nt, Human
cucauuuccaag

SEQ ID NO: 1261593 - RNA, 13 nt, Human
cucauuuccaagc

SEQ ID NO: 1261594 - RNA, 14 nt, Human
cucauuuccaagca

SEQ ID NO: 1261595 - RNA, 17 nt, Human
cucauuuccaagcaagu

SEQ ID NO: 1261596 - RNA, 21 nt, Human
cucauuuccaagcaaguauua

SEQ ID NO: 1261597 - RNA, 18 nt, Human
cucauuuagccuguccug

SEQ ID NO: 1261598 - RNA, 23 nt, Human
cucaggagcccugggaggcucug

SEQ ID NO: 1261599 - RNA, 22 nt, Human
cucaggagcccugggaggcucu

SEQ ID NO: 1261600 - RNA, 21 nt, Human
cucaggagcccugggaggcuc

SEQ ID NO: 1261601 - RNA, 20 nt, Human
cucaggagcccugggaggcu

SEQ ID NO: 1261602 - RNA, 17 nt, Human
cucaggagcccugggag

SEQ ID NO: 1261603 - RNA, 16 nt, Human
cucaggagcccuggga

SEQ ID NO: 1261604 - RNA, 15 nt, Human
cucaggagcccuggg

SEQ ID NO: 1261605 - RNA, 14 nt, Human
cucaggagcccugg

SEQ ID NO: 1261606 - RNA, 13 nt, Human
cucaggagcccug

SEQ ID NO: 1261607 - RNA, 12 nt, Human
cucaggagcccu

SEQ ID NO: 1261608 - RNA, 14 nt, Human
cucaggacugcgac

SEQ ID NO: 1261609 - RNA, 14 nt, Human
cucaggacugggag

SEQ ID NO: 1261610 - RNA, 15 nt, Human
cucaggacugggagc

SEQ ID NO: 1261611 - RNA, 23 nt, Human
cucaggacugggagcccccagcc

SEQ ID NO: 1261612 - RNA, 12 nt, Human
cucaggacagau

SEQ ID NO: 1261613 - RNA, 14 nt, Human
cucaggacagaugc

SEQ ID NO: 1261614 - RNA, 16 nt, Human
cucaggacagaugcca

SEQ ID NO: 1261615 - RNA, 18 nt, Human
cucaggacagaugccaca

SEQ ID NO: 1261616 - RNA, 19 nt, Human
cucaggacagaugccacac

SEQ ID NO: 1261617 - RNA, 20 nt, Human
cucaggaccaaagcuuucau

SEQ ID NO: 1261618 - RNA, 21 nt, Human
cucaggaccaaagcuuucaug

SEQ ID NO: 1261619 - RNA, 22 nt, Human
cucaggaccaaagcuuucaugu

SEQ ID NO: 1261620 - RNA, 21 nt, Human
cucaggacacaggccugugua

SEQ ID NO: 1261621 - RNA, 20 nt, Human
cucagcucucaguugcagcc

SEQ ID NO: 1261622 - RNA, 14 nt, Human
cucagcucugggcc

SEQ ID NO: 1261623 - RNA, 23 nt, Human
cucagcucugggccauucuccac

SEQ ID NO: 1261624 - RNA, 23 nt, Human
cucagcucugacauucugauucg

SEQ ID NO: 1261625 - RNA, 11 nt, Human
cucagcugcau

SEQ ID NO: 1261626 - RNA, 18 nt, Human
cucagcugucaaggcuca

SEQ ID NO: 1261627 - RNA, 19 nt, Human
cucagcugucaaggcucag

SEQ ID NO: 1261628 - RNA, 17 nt, Human
cucaggaaccgaggcag

SEQ ID NO: 1261629 - RNA, 18 nt, Human
cucaggaaccgaggcagg

SEQ ID NO: 1261630 - RNA, 19 nt, Human
cucaggaaccgaggcaggg

SEQ ID NO: 1261631 - RNA, 13 nt, Human
cucaggacacagg

SEQ ID NO: 1261632 - RNA, 14 nt, Human
cucaggacacaggc

SEQ ID NO: 1261633 - RNA, 15 nt, Human
cucaggacacaggcc

SEQ ID NO: 1261634 - RNA, 16 nt, Human
cucaggacacaggccu

SEQ ID NO: 1261635 - RNA, 17 nt, Human
cucaggacacaggccug

SEQ ID NO: 1261636 - RNA, 18 nt, Human
cucaggacacaggccugu

SEQ ID NO: 1261637 - RNA, 19 nt, Human
cucaggacacaggccugug

SEQ ID NO: 1261638 - RNA, 20 nt, Human
cucaggacacaggccugugu

SEQ ID NO: 1261639 - RNA, 14 nt, Human
cucagcuuucuaag

SEQ ID NO: 1261640 - RNA, 22 nt, Human
cucaggaaacgagacuuuccau

SEQ ID NO: 1261641 - RNA, 23 nt, Human
cucaggaaacgagacuuuccauu

SEQ ID NO: 1261642 - RNA, 24 nt, Human
cucaggagcccugggaggcucugg

SEQ ID NO: 1261643 - RNA, 14 nt, Human
cucaggagccugug

SEQ ID NO: 1261644 - RNA, 16 nt, Human
cucaggaggcaggacc

SEQ ID NO: 1261645 - RNA, 17 nt, Human
cucaggaggcaggaccu

SEQ ID NO: 1261646 - RNA, 18 nt, Human
cucaggaggcaggaccuu

SEQ ID NO: 1261647 - RNA, 16 nt, Human
cucaggagccugugac

SEQ ID NO: 1261648 - RNA, 20 nt, Human
cucagggcagcgccaggcug

SEQ ID NO: 1261649 - RNA, 14 nt, Human
cucagggccaggcc

SEQ ID NO: 1261650 - RNA, 16 nt, Human
cucagggccaggccuc

SEQ ID NO: 1261651 - RNA, 18 nt, Human
cucagggccaggccucuc

SEQ ID NO: 1261652 - RNA, 13 nt, Human
cucagggccaugc

SEQ ID NO: 1261653 - RNA, 21 nt, Human
cucagggccaggccucucccu

SEQ ID NO: 1261654 - RNA, 15 nt, Human
cucagggccaugcug

SEQ ID NO: 1261655 - RNA, 17 nt, Human
cucagggccaugcugag

SEQ ID NO: 1261656 - RNA, 18 nt, Human
cucagggccaugcugagg

SEQ ID NO: 1261657 - RNA, 19 nt, Human
cucagggccaugcugaggc

SEQ ID NO: 1261658 - RNA, 20 nt, Human
cucagggccaugcugaggcc

SEQ ID NO: 1261659 - RNA, 20 nt, Human
cucagguaaucgaccugccu

SEQ ID NO: 1261660 - RNA, 22 nt, Human
cucagguaaucgaccugccucg

SEQ ID NO: 1261661 - RNA, 24 nt, Human
cucagguaaucgaccugccucggc

SEQ ID NO: 1261662 - RNA, 13 nt, Human
cucaggugcuggg

SEQ ID NO: 1261663 - RNA, 15 nt, Human
cucaggugcuggggc

SEQ ID NO: 1261664 - RNA, 22 nt, Human
cucaggugcuggggccugguuc

SEQ ID NO: 1261665 - RNA, 16 nt, Human
cucaggugcuggggcc

SEQ ID NO: 1261666 - RNA, 17 nt, Human
cucagccccgcguggaa

SEQ ID NO: 1261667 - RNA, 22 nt, Human
cucagccccaccccagggcagc

SEQ ID NO: 1261668 - RNA, 14 nt, Human
cucagcccucccug

SEQ ID NO: 1261669 - RNA, 19 nt, Human
cucagcccucccugccccu

SEQ ID NO: 1261670 - RNA, 20 nt, Human
cucagcccucccugccccuc

SEQ ID NO: 1261671 - RNA, 21 nt, Human
cucagcccucccugccccucc

SEQ ID NO: 1261672 - RNA, 19 nt, Human
cucagccccaccccagggc

SEQ ID NO: 1261673 - RNA, 21 nt, Human
cucagccccaccccagggcag

SEQ ID NO: 1261674 - RNA, 16 nt, Human
cucagccccuuucccu

SEQ ID NO: 1261675 - RNA, 17 nt, Human
cucagcccucacacacc

SEQ ID NO: 1261676 - RNA, 18 nt, Human
cucagcccucacacaccc

SEQ ID NO: 1261677 - RNA, 20 nt, Human
cucagcucacugcaaccucc

SEQ ID NO: 1261678 - RNA, 14 nt, Human
cucagcucacugca

SEQ ID NO: 1261679 - RNA, 20 nt, Human
cucagcucacuacaaccucc

SEQ ID NO: 1261680 - RNA, 15 nt, Human
cucagcucacugcaa

SEQ ID NO: 1261681 - RNA, 21 nt, Human
cucagcucaucuucacugcac

SEQ ID NO: 1261682 - RNA, 15 nt, Human
cucagcuaagcucac

SEQ ID NO: 1261683 - RNA, 15 nt, Human
cucagcucccaaggc

SEQ ID NO: 1261684 - RNA, 19 nt, Human
cucagcuccagguggcucu

SEQ ID NO: 1261685 - RNA, 20 nt, Human
cucagcuccagguggcucug

SEQ ID NO: 1261686 - RNA, 19 nt, Human
cucagcucccaaggcucug

SEQ ID NO: 1261687 - RNA, 14 nt, Human
cucagcucauccau

SEQ ID NO: 1261688 - RNA, 13 nt, Human
cucagcucccaca

SEQ ID NO: 1261689 - RNA, 18 nt, Human
cucagcucccacaagccu

SEQ ID NO: 1261690 - RNA, 22 nt, Human
cucagcucccacaagccucugc

SEQ ID NO: 1261691 - RNA, 20 nt, Human
cucagcucccacaagccucu

SEQ ID NO: 1261692 - RNA, 19 nt, Human
cucacugugucacccaggc

SEQ ID NO: 1261693 - RNA, 16 nt, Human
cucacugcuugaacua

SEQ ID NO: 1261694 - RNA, 18 nt, Human
cucacugcuugaacuagg

SEQ ID NO: 1261695 - RNA, 15 nt, Human
cucacuggcucuccu

SEQ ID NO: 1261696 - RNA, 17 nt, Human
cucacuggcucuccugg

SEQ ID NO: 1261697 - RNA, 18 nt, Human
cucacuggcucuccuggc

SEQ ID NO: 1261698 - RNA, 19 nt, Human
cucacuggcucuccuggcc

SEQ ID NO: 1261699 - RNA, 21 nt, Human
cucacuggcucuccuggcccu

SEQ ID NO: 1261700 - RNA, 20 nt, Human
cucacugcauccuccgccuc

SEQ ID NO: 1261701 - RNA, 15 nt, Human
cucagagccaccccu

SEQ ID NO: 1261702 - RNA, 12 nt, Human
cucagauggcag

SEQ ID NO: 1261703 - RNA, 13 nt, Human
cucagauggcagc

SEQ ID NO: 1261704 - RNA, 14 nt, Human
cucagauggcagcu

SEQ ID NO: 1261705 - RNA, 15 nt, Human
cucagauggcagcuu

SEQ ID NO: 1261706 - RNA, 16 nt, Human
cucagauggcagcuuu

SEQ ID NO: 1261707 - RNA, 21 nt, Human
cucagauggcagcuuuuaaaa

SEQ ID NO: 1261708 - RNA, 17 nt, Human
cucagauggcagcuuuu

SEQ ID NO: 1261709 - RNA, 20 nt, Human
cucagauggcagcuuuuaaa

SEQ ID NO: 1261710 - RNA, 16 nt, Human
cucagaggguguccug

SEQ ID NO: 1261711 - RNA, 19 nt, Human
cucagaggcgcacugugac

SEQ ID NO: 1261712 - RNA, 17 nt, Human
cucagaggcgcacugug

SEQ ID NO: 1261713 - RNA, 18 nt, Human
cucagaggcgcacuguga

SEQ ID NO: 1261714 - RNA, 22 nt, Human
cuaggaaauauuuauuuuaaua

SEQ ID NO: 1261715 - RNA, 20 nt, Human
cuaccaaggucuucuuaaua

SEQ ID NO: 1261716 - RNA, 15 nt, Human
cuaccaaagcaccuu

SEQ ID NO: 1261717 - RNA, 13 nt, Human
cuaccaccagcug

SEQ ID NO: 1261718 - RNA, 14 nt, Human
cuaccaccagcugu

SEQ ID NO: 1261719 - RNA, 15 nt, Human
cuaccaccagcugug

SEQ ID NO: 1261720 - RNA, 16 nt, Human
cuaccaccagcugugu

SEQ ID NO: 1261721 - RNA, 19 nt, Human
cuaccaccagcugugucca

SEQ ID NO: 1261722 - RNA, 18 nt, Human
cuaccaccagcugugucc

SEQ ID NO: 1261723 - RNA, 12 nt, Human
cuaccauuucag

SEQ ID NO: 1261724 - RNA, 13 nt, Human
cuaccauuucaga

SEQ ID NO: 1261725 - RNA, 16 nt, Human
cuaccaaccuguucaa

SEQ ID NO: 1261726 - RNA, 14 nt, Human
cuaccaaagcaccu

SEQ ID NO: 1261727 - RNA, 12 nt, Human
cuacauucauuu

SEQ ID NO: 1261728 - RNA, 18 nt, Human
cuacauuaaacaugacuc

SEQ ID NO: 1261729 - RNA, 23 nt, Human
cuacaugguugaaaccccaucuc

SEQ ID NO: 1261730 - RNA, 13 nt, Human
cuacauguauugc

SEQ ID NO: 1261731 - RNA, 18 nt, Human
cuacauguauugcacauu

SEQ ID NO: 1261732 - RNA, 21 nt, Human
cuacauguauugcacauugua

SEQ ID NO: 1261733 - RNA, 22 nt, Human
cuacauguauugcacauuguaa

SEQ ID NO: 1261734 - RNA, 19 nt, Human
cuaccccauggugcuagga

SEQ ID NO: 1261735 - RNA, 17 nt, Human
cuacccccagcugugcu

SEQ ID NO: 1261736 - RNA, 13 nt, Human
cuacccucuagag

SEQ ID NO: 1261737 - RNA, 14 nt, Human
cuacccucuagaga

SEQ ID NO: 1261738 - RNA, 16 nt, Human
cuacccucuagagaaa

SEQ ID NO: 1261739 - RNA, 12 nt, Human
cuacccugagcu

SEQ ID NO: 1261740 - RNA, 17 nt, Human
cuacccugagcugaggc

SEQ ID NO: 1261741 - RNA, 18 nt, Human
cuacccugagcugaggca

SEQ ID NO: 1261742 - RNA, 13 nt, Human
cuacccuggacuu

SEQ ID NO: 1261743 - RNA, 17 nt, Human
cuacccuggacuugccu

SEQ ID NO: 1261744 - RNA, 16 nt, Human
cuacccuuuuucucca

SEQ ID NO: 1261745 - RNA, 16 nt, Human
cuacccuaaccaaguu

SEQ ID NO: 1261746 - RNA, 19 nt, Human
cuacccccagcugugcuua

SEQ ID NO: 1261747 - RNA, 18 nt, Human
cuacccccagcugugcuu

SEQ ID NO: 1261748 - RNA, 17 nt, Human
cuacagcuggggugcag

SEQ ID NO: 1261749 - RNA, 18 nt, Human
cuacagcuggggugcagg

SEQ ID NO: 1261750 - RNA, 22 nt, Human
cuacagcuggggugcagggaug

SEQ ID NO: 1261751 - RNA, 18 nt, Human
cuacagcuaaucagcauu

SEQ ID NO: 1261752 - RNA, 19 nt, Human
cuacagcuaaucagcauuc

SEQ ID NO: 1261753 - RNA, 14 nt, Human
cuacagaugaguca

SEQ ID NO: 1261754 - RNA, 21 nt, Human
cuacagcuaaucagcauucuc

SEQ ID NO: 1261755 - RNA, 22 nt, Human
cuacagcuaaucagcauucuca

SEQ ID NO: 1261756 - RNA, 18 nt, Human
cuacagccucagaaacca

SEQ ID NO: 1261757 - RNA, 14 nt, Human
cuacagccucagaa

SEQ ID NO: 1261758 - RNA, 15 nt, Human
cuacacucaccugca

SEQ ID NO: 1261759 - RNA, 12 nt, Human
cuacaggccuca

SEQ ID NO: 1261760 - RNA, 16 nt, Human
cuacaggccucacaca

SEQ ID NO: 1261761 - RNA, 20 nt, Human
cuacaggccucacacacaau

SEQ ID NO: 1261762 - RNA, 21 nt, Human
cuacaggcgugagccaccaug

SEQ ID NO: 1261763 - RNA, 15 nt, Human
cuacagggggucugg

SEQ ID NO: 1261764 - RNA, 17 nt, Human
cuacagggggucuggcu

SEQ ID NO: 1261765 - RNA, 19 nt, Human
cuacagggggucuggcugg

SEQ ID NO: 1261766 - RNA, 20 nt, Human
cuacagggggucuggcuggu

SEQ ID NO: 1261767 - RNA, 21 nt, Human
cuacagggggucuggcuggug

SEQ ID NO: 1261768 - RNA, 22 nt, Human
cuacagggggucuggcuggugu

SEQ ID NO: 1261769 - RNA, 23 nt, Human
cuacagggggucuggcugguguu

SEQ ID NO: 1261770 - RNA, 17 nt, Human
cuacaggguccaacaua

SEQ ID NO: 1261771 - RNA, 14 nt, Human
cuacagucaggaaa

SEQ ID NO: 1261772 - RNA, 15 nt, Human
cuacagucaggaaag

SEQ ID NO: 1261773 - RNA, 18 nt, Human
cuacagucaggaaaggaa

SEQ ID NO: 1261774 - RNA, 21 nt, Human
cuacagucaggaaaggaauca

SEQ ID NO: 1261775 - RNA, 17 nt, Human
cuacuggucuuguggaa

SEQ ID NO: 1261776 - RNA, 22 nt, Human
cuaauagggcaauuaauuccuu

SEQ ID NO: 1261777 - RNA, 23 nt, Human
cuaauagaauaaaggcaguuuuc

SEQ ID NO: 1261778 - RNA, 14 nt, Human
cuaauaguauaaac

SEQ ID NO: 1261779 - RNA, 23 nt, Human
cuaauaguuuuauuaauaaacau

SEQ ID NO: 1261780 - RNA, 13 nt, Human
cuaauauauuuaa

SEQ ID NO: 1261781 - RNA, 14 nt, Human
cuaauauauuuaaa

SEQ ID NO: 1261782 - RNA, 15 nt, Human
cuaauauauuuaaaa

SEQ ID NO: 1261783 - RNA, 16 nt, Human
cuaauauauuuaaaaa

SEQ ID NO: 1261784 - RNA, 17 nt, Human
cuaauauauuuaaaaau

SEQ ID NO: 1261785 - RNA, 18 nt, Human
cuaauagaaaaguauguu

SEQ ID NO: 1261786 - RNA, 20 nt, Human
cuaauagaauaaaggcaguu

SEQ ID NO: 1261787 - RNA, 21 nt, Human
cuaauagaauaaaggcaguuu

SEQ ID NO: 1261788 - RNA, 14 nt, Human
cuaauaauuucuaa

SEQ ID NO: 1261789 - RNA, 15 nt, Human
cuaauaauuucuaau

SEQ ID NO: 1261790 - RNA, 16 nt, Human
cuaauaauuucuaaug

SEQ ID NO: 1261791 - RNA, 17 nt, Human
cuaauaauuucuaaugu

SEQ ID NO: 1261792 - RNA, 17 nt, Human
cuaauacagcugagcua

SEQ ID NO: 1261793 - RNA, 18 nt, Human
cuaauaauuucuaauguu

SEQ ID NO: 1261794 - RNA, 19 nt, Human
cuaauacagcaacaauuua

SEQ ID NO: 1261795 - RNA, 23 nt, Human
cuaauacagcaacaauuuaugaa

SEQ ID NO: 1261796 - RNA, 17 nt, Human
cuaauaacaugugaaaa

SEQ ID NO: 1261797 - RNA, 14 nt, Human
cuaaggaaccaaca

SEQ ID NO: 1261798 - RNA, 19 nt, Human
cuaaggaccugaaauucca

SEQ ID NO: 1261799 - RNA, 20 nt, Human
cuaaggaccugaaauuccaa

SEQ ID NO: 1261800 - RNA, 22 nt, Human
cuaaggaccugaaauuccaaag

SEQ ID NO: 1261801 - RNA, 13 nt, Human
cuaaggccuacuu

SEQ ID NO: 1261802 - RNA, 14 nt, Human
cuaaggccuaggau

SEQ ID NO: 1261803 - RNA, 19 nt, Human
cuaaggccuaggauucuaa

SEQ ID NO: 1261804 - RNA, 20 nt, Human
cuaaggccuaggauucuaaa

SEQ ID NO: 1261805 - RNA, 21 nt, Human
cuaaggccuaggauucuaaaa

SEQ ID NO: 1261806 - RNA, 22 nt, Human
cuaaggccuaggauucuaaaau

SEQ ID NO: 1261807 - RNA, 16 nt, Human
cuaaggcuccuguuuu

SEQ ID NO: 1261808 - RNA, 18 nt, Human
cuaaggcucuaugagucu

SEQ ID NO: 1261809 - RNA, 19 nt, Human
cuaaggcucuaugagucua

SEQ ID NO: 1261810 - RNA, 20 nt, Human
cuaaggcucuaugagucuag

SEQ ID NO: 1261811 - RNA, 21 nt, Human
cuaaggcucuaugagucuaga

SEQ ID NO: 1261812 - RNA, 22 nt, Human
cuaaggcucuaugagucuagau

SEQ ID NO: 1261813 - RNA, 23 nt, Human
cuaaggcucuaugagucuagaug

SEQ ID NO: 1261814 - RNA, 11 nt, Human
cuaaggcucug

SEQ ID NO: 1261815 - RNA, 13 nt, Human
cuaaggcucugag

SEQ ID NO: 1261816 - RNA, 14 nt, Human
cuaaggcucugaga

SEQ ID NO: 1261817 - RNA, 15 nt, Human
cuaaggcucugagag

SEQ ID NO: 1261818 - RNA, 19 nt, Human
cuaaggcucugagagucua

SEQ ID NO: 1261819 - RNA, 20 nt, Human
cuaaggcucugagagucuag

SEQ ID NO: 1261820 - RNA, 14 nt, Human
cuaagguucuaagg

SEQ ID NO: 1261821 - RNA, 15 nt, Human
cuaagguucuaaggc

SEQ ID NO: 1261822 - RNA, 16 nt, Human
cuaagguucuaaggcc

SEQ ID NO: 1261823 - RNA, 17 nt, Human
cuaagguucuaaggccu

SEQ ID NO: 1261824 - RNA, 21 nt, Human
cuaagcuucacuguaaaauaa

SEQ ID NO: 1261825 - RNA, 11 nt, Human
cuaagauucua

SEQ ID NO: 1261826 - RNA, 12 nt, Human
cuaagauucuaa

SEQ ID NO: 1261827 - RNA, 13 nt, Human
cuaagauucuaaa

SEQ ID NO: 1261828 - RNA, 16 nt, Human
cuaagcucacguccug

SEQ ID NO: 1261829 - RNA, 14 nt, Human
cuaagauucuaaag

SEQ ID NO: 1261830 - RNA, 15 nt, Human
cuaagauucuaaagg

SEQ ID NO: 1261831 - RNA, 19 nt, Human
cuaagauuacaaaucagaa

SEQ ID NO: 1261832 - RNA, 21 nt, Human
cuaagauuacaaaucagaagu

SEQ ID NO: 1261833 - RNA, 22 nt, Human
cuaagauuacaaaucagaaguc

SEQ ID NO: 1261834 - RNA, 23 nt, Human
cuaagauuacaaaucagaaguca

SEQ ID NO: 1261835 - RNA, 18 nt, Human
cuaagaugugauauucua

SEQ ID NO: 1261836 - RNA, 19 nt, Human
cuaagaugugauauucuaa

SEQ ID NO: 1261837 - RNA, 20 nt, Human
cuaagaugugauauucuaag

SEQ ID NO: 1261838 - RNA, 21 nt, Human
cuaagaugugauauucuaaga

SEQ ID NO: 1261839 - RNA, 22 nt, Human
cuaagaugugauauucuaagac

SEQ ID NO: 1261840 - RNA, 23 nt, Human
cuaagaugugauauucuaagacu

SEQ ID NO: 1261841 - RNA, 22 nt, Human
cuaagaugugcagcauuucacu

SEQ ID NO: 1261842 - RNA, 16 nt, Human
cuacacccagcaauag

SEQ ID NO: 1261843 - RNA, 14 nt, Human
cuacacccagcaau

SEQ ID NO: 1261844 - RNA, 13 nt, Human
cuacacccagcaa

SEQ ID NO: 1261845 - RNA, 12 nt, Human
cuacacccagca

SEQ ID NO: 1261846 - RNA, 11 nt, Human
cuacacccagc

SEQ ID NO: 1261847 - RNA, 19 nt, Human
cuacaccacucuggcagcc

SEQ ID NO: 1261848 - RNA, 20 nt, Human
cuacaccacucuggcagcca

SEQ ID NO: 1261849 - RNA, 21 nt, Human
cuacaccacucuggcagccac

SEQ ID NO: 1261850 - RNA, 22 nt, Human
cuacaccacucuggcagccaca

SEQ ID NO: 1261851 - RNA, 16 nt, Human
cuacacccuuuuccag

SEQ ID NO: 1261852 - RNA, 18 nt, Human
cuacacccuuuuccagcu

SEQ ID NO: 1261853 - RNA, 16 nt, Human
cuacaccuauuauccc

SEQ ID NO: 1261854 - RNA, 17 nt, Human
cuacaccuauuauccca

SEQ ID NO: 1261855 - RNA, 18 nt, Human
cuacaccuauuaucccag

SEQ ID NO: 1261856 - RNA, 23 nt, Human
cuacacgagauacagaauuuuau

SEQ ID NO: 1261857 - RNA, 14 nt, Human
cuacacuaagagag

SEQ ID NO: 1261858 - RNA, 13 nt, Human
cuacaccacucug

SEQ ID NO: 1261859 - RNA, 14 nt, Human
cuacaccacucugg

SEQ ID NO: 1261860 - RNA, 15 nt, Human
cuacaccacucuggc

SEQ ID NO: 1261861 - RNA, 16 nt, Human
cuacaccacucuggca

SEQ ID NO: 1261862 - RNA, 18 nt, Human
cuacaccacucuggcagc

SEQ ID NO: 1261863 - RNA, 14 nt, Human
cuaauuccacagcu

SEQ ID NO: 1261864 - RNA, 15 nt, Human
cuaauuccacaccuu

SEQ ID NO: 1261865 - RNA, 17 nt, Human
cuaauuccacaccuuuu

SEQ ID NO: 1261866 - RNA, 15 nt, Human
cuaauucacagugcu

SEQ ID NO: 1261867 - RNA, 16 nt, Human
cuaauucacagugcuc

SEQ ID NO: 1261868 - RNA, 22 nt, Human
cuaauucacagugcucuuuucu

SEQ ID NO: 1261869 - RNA, 10 nt, Human
cuaauucaua

SEQ ID NO: 1261870 - RNA, 15 nt, Human
cuaauuccacagcug

SEQ ID NO: 1261871 - RNA, 16 nt, Human
cuaauuccacagcugc

SEQ ID NO: 1261872 - RNA, 17 nt, Human
cuaauauggcaaccauu

SEQ ID NO: 1261873 - RNA, 21 nt, Human
cuaaucagcauucucacuccu

SEQ ID NO: 1261874 - RNA, 20 nt, Human
cuaauauggccacaguaguc

SEQ ID NO: 1261875 - RNA, 19 nt, Human
cuaaucagggaggucauuu

SEQ ID NO: 1261876 - RNA, 20 nt, Human
cuaaucagggaggucauuuu

SEQ ID NO: 1261877 - RNA, 21 nt, Human
cuaaucagggaggucauuuug

SEQ ID NO: 1261878 - RNA, 15 nt, Human
cuaaugcgcaggcug

SEQ ID NO: 1261879 - RNA, 16 nt, Human
cuaaugcgcaggcugg

SEQ ID NO: 1261880 - RNA, 19 nt, Human
cuaaugcgcaggcuggccc

SEQ ID NO: 1261881 - RNA, 20 nt, Human
cuaaugcgcaggcuggcccu

SEQ ID NO: 1261882 - RNA, 14 nt, Human
cuaaucaugaaacu

SEQ ID NO: 1261883 - RNA, 22 nt, Human
cuaaugcgcaggcuggcccugc

SEQ ID NO: 1261884 - RNA, 23 nt, Human
cuaaugcgcaggcuggcccugcc

SEQ ID NO: 1261885 - RNA, 18 nt, Human
cuaaugccuuacucuucu

SEQ ID NO: 1261886 - RNA, 14 nt, Human
cuaauggcaugaga

SEQ ID NO: 1261887 - RNA, 22 nt, Human
cuaauuauacccccugcaaagc

SEQ ID NO: 1261888 - RNA, 16 nt, Human
cuaauggcaugagaaa

SEQ ID NO: 1261889 - RNA, 18 nt, Human
cuaauggcaugagaaaua

SEQ ID NO: 1261890 - RNA, 16 nt, Human
cuaauuauauaauauu

SEQ ID NO: 1261891 - RNA, 18 nt, Human
cuaauuauauaauauuuu

SEQ ID NO: 1261892 - RNA, 15 nt, Human
cuaauuauguagcuc

SEQ ID NO: 1261893 - RNA, 17 nt, Human
cuaauuauguagcucuu

SEQ ID NO: 1261894 - RNA, 18 nt, Human
cuaauuauguagcucuuu

SEQ ID NO: 1261895 - RNA, 16 nt, Human
cuaauucaaggaauuu

SEQ ID NO: 1261896 - RNA, 18 nt, Human
cuaauucaaggaauuucu

SEQ ID NO: 1261897 - RNA, 20 nt, Human
cuaauucaaggaauuucuua

SEQ ID NO: 1261898 - RNA, 15 nt, Human
cuaauucaauucaaa

SEQ ID NO: 1261899 - RNA, 16 nt, Human
cuaagauucuaaaggu

SEQ ID NO: 1261900 - RNA, 13 nt, Human
cguuuucaaaauu

SEQ ID NO: 1261901 - RNA, 19 nt, Human
cuaaauucuuucauuuuag

SEQ ID NO: 1261902 - RNA, 20 nt, Human
cuaaaucuuuuauaggauuu

SEQ ID NO: 1261903 - RNA, 19 nt, Human
cuaaauugacacuuaaaaa

SEQ ID NO: 1261904 - RNA, 15 nt, Human
cuaaaugaauguuua

SEQ ID NO: 1261905 - RNA, 12 nt, Human
cuaaaugaaugu

SEQ ID NO: 1261906 - RNA, 14 nt, Human
cuaaaugaauguuu

SEQ ID NO: 1261907 - RNA, 19 nt, Human
cuaaauuuuccuguccucu

SEQ ID NO: 1261908 - RNA, 16 nt, Human
cuaaauuuuccugucc

SEQ ID NO: 1261909 - RNA, 17 nt, Human
cuaaauuuuccuguccu

SEQ ID NO: 1261910 - RNA, 20 nt, Human
cuaacaacauuguagccuca

SEQ ID NO: 1261911 - RNA, 16 nt, Human
cuaacaaccaaagacu

SEQ ID NO: 1261912 - RNA, 12 nt, Human
cuaaccaaguuc

SEQ ID NO: 1261913 - RNA, 21 nt, Human
cuaaccaagcugaguuuccua

SEQ ID NO: 1261914 - RNA, 10 nt, Human
cuaaccaagu

SEQ ID NO: 1261915 - RNA, 15 nt, Human
cuaaccaagcugagu

SEQ ID NO: 1261916 - RNA, 20 nt, Human
cuaaccaagcugaguuuccu

SEQ ID NO: 1261917 - RNA, 21 nt, Human
cuaacauuuuugauaaagccu

SEQ ID NO: 1261918 - RNA, 22 nt, Human
cuaacaagucauagguuaauau

SEQ ID NO: 1261919 - RNA, 22 nt, Human
cuaacaaucagcuccuuccugg

SEQ ID NO: 1261920 - RNA, 12 nt, Human
cuaacagcccuc

SEQ ID NO: 1261921 - RNA, 21 nt, Human
cuaacagcccuccucugcacu

SEQ ID NO: 1261922 - RNA, 22 nt, Human
cuaacagcccuccucugcacuc

SEQ ID NO: 1261923 - RNA, 14 nt, Human
cuaacagggaaggc

SEQ ID NO: 1261924 - RNA, 15 nt, Human
cuaacagggaaggca

SEQ ID NO: 1261925 - RNA, 16 nt, Human
cuaacagggaaggcag

SEQ ID NO: 1261926 - RNA, 17 nt, Human
cuaacagggaaggcagg

SEQ ID NO: 1261927 - RNA, 21 nt, Human
cuaacagggaaggcaggcagg

SEQ ID NO: 1261928 - RNA, 18 nt, Human
cuaacagggaaggcaggc

SEQ ID NO: 1261929 - RNA, 12 nt, Human
cuaacauauaau

SEQ ID NO: 1261930 - RNA, 22 nt, Human
cuaacauauaauguuguuauuu

SEQ ID NO: 1261931 - RNA, 23 nt, Human
cuaacauauaauguuguuauuua

SEQ ID NO: 1261932 - RNA, 14 nt, Human
cuaagagagaauga

SEQ ID NO: 1261933 - RNA, 15 nt, Human
cuaagagagaaugag

SEQ ID NO: 1261934 - RNA, 21 nt, Human
cuaagagaaguuguaaaguau

SEQ ID NO: 1261935 - RNA, 16 nt, Human
cuaagagagcaccugg

SEQ ID NO: 1261936 - RNA, 18 nt, Human
cuaaccauguguuauguu

SEQ ID NO: 1261937 - RNA, 19 nt, Human
cuaacccagguauccaaaa

SEQ ID NO: 1261938 - RNA, 23 nt, Human
cuaacccuauacuguaguauucu

SEQ ID NO: 1261939 - RNA, 23 nt, Human
cuaacccuuugugugcucuccau

SEQ ID NO: 1261940 - RNA, 12 nt, Human
cuaaccucaucu

SEQ ID NO: 1261941 - RNA, 15 nt, Human
cuaaccucaucuucu

SEQ ID NO: 1261942 - RNA, 22 nt, Human
cuaacccuuugugugcucucca

SEQ ID NO: 1261943 - RNA, 17 nt, Human
cuaaccucgggccugcu

SEQ ID NO: 1261944 - RNA, 14 nt, Human
cuaagaggcugccc

SEQ ID NO: 1261945 - RNA, 16 nt, Human
cuaagaggcugcccuc

SEQ ID NO: 1261946 - RNA, 18 nt, Human
cuaagaggcugcccuccu

SEQ ID NO: 1261947 - RNA, 22 nt, Human
cuaagagugcugggcauuuuua

SEQ ID NO: 1261948 - RNA, 23 nt, Human
cuaagaggcugcccuccugugcu

SEQ ID NO: 1261949 - RNA, 12 nt, Human
cuaagaucuuag

SEQ ID NO: 1261950 - RNA, 14 nt, Human
cuaagaucuuagau

SEQ ID NO: 1261951 - RNA, 16 nt, Human
cuaagaucuuagauuc

SEQ ID NO: 1261952 - RNA, 17 nt, Human
cuaagaucuuagauucu

SEQ ID NO: 1261953 - RNA, 20 nt, Human
cuaagaucuuagauucucug

SEQ ID NO: 1261954 - RNA, 15 nt, Human
cuaaaaucugcuugu

SEQ ID NO: 1261955 - RNA, 22 nt, Human
cuaaaaucugcuuguauuccaa

SEQ ID NO: 1261956 - RNA, 17 nt, Human
cuaaaaucuuauaguuc

SEQ ID NO: 1261957 - RNA, 19 nt, Human
cuaaaaucuuauaguucua

SEQ ID NO: 1261958 - RNA, 21 nt, Human
cuaaaaucuuauaguucuagg

SEQ ID NO: 1261959 - RNA, 22 nt, Human
cuaaaaucuuauaguucuaggc

SEQ ID NO: 1261960 - RNA, 14 nt, Human
cuaaaauauuuauu

SEQ ID NO: 1261961 - RNA, 15 nt, Human
cuaaaauauuuauuu

SEQ ID NO: 1261962 - RNA, 23 nt, Human
cuaaaauauuuauuuuuuuuaag

SEQ ID NO: 1261963 - RNA, 18 nt, Human
cuaaaaugugauguucua

SEQ ID NO: 1261964 - RNA, 19 nt, Human
cuaaaaugugauguucuaa

SEQ ID NO: 1261965 - RNA, 20 nt, Human
cuaaaaugugauguucuaag

SEQ ID NO: 1261966 - RNA, 21 nt, Human
cuaaaaugugauguucuaagg

SEQ ID NO: 1261967 - RNA, 22 nt, Human
cuaaaaugugauguucuaaggc

SEQ ID NO: 1261968 - RNA, 23 nt, Human
cuaaaaugugauguucuaaggcu

SEQ ID NO: 1261969 - RNA, 15 nt, Human
cuaaacuaagaugug

SEQ ID NO: 1261970 - RNA, 12 nt, Human
cuaaacugcccc

SEQ ID NO: 1261971 - RNA, 13 nt, Human
cuaaacugccccc

SEQ ID NO: 1261972 - RNA, 19 nt, Human
cuaaacuccaaacauccuc

SEQ ID NO: 1261973 - RNA, 20 nt, Human
cuaaacuccaaacauccucu

SEQ ID NO: 1261974 - RNA, 17 nt, Human
cuaaauauauuuuaaga

SEQ ID NO: 1261975 - RNA, 21 nt, Human
cuaaacugcccccucugcccu

SEQ ID NO: 1261976 - RNA, 20 nt, Human
cuaaacugagacaaugccuu

SEQ ID NO: 1261977 - RNA, 13 nt, Human
cuaaauaaaaugc

SEQ ID NO: 1261978 - RNA, 15 nt, Human
cuaaauaaaaugcua

SEQ ID NO: 1261979 - RNA, 19 nt, Human
cuaaauaaaaugcuagguu

SEQ ID NO: 1261980 - RNA, 21 nt, Human
cuaaauaaaaugcuagguucu

SEQ ID NO: 1261981 - RNA, 22 nt, Human
cuaaauaaaaugcuagguucua

SEQ ID NO: 1261982 - RNA, 15 nt, Human
cuaaauaaaauuugu

SEQ ID NO: 1261983 - RNA, 20 nt, Human
cuaaauaaaauuuguugcau

SEQ ID NO: 1261984 - RNA, 23 nt, Human
cuaaauaaagcuugcaacaaaau

SEQ ID NO: 1261985 - RNA, 16 nt, Human
cuaaauaaagauauug

SEQ ID NO: 1261986 - RNA, 19 nt, Human
cuaaauaccucaaucaguc

SEQ ID NO: 1261987 - RNA, 21 nt, Human
cuaaauacugagaaaaccugu

SEQ ID NO: 1261988 - RNA, 18 nt, Human
cguuuggugcuucucaga

SEQ ID NO: 1261989 - RNA, 20 nt, Human
cguuuguuccccaagacauu

SEQ ID NO: 1261990 - RNA, 11 nt, Human
cguuuguguuc

SEQ ID NO: 1261991 - RNA, 19 nt, Human
cguuuguguucuguuuugu

SEQ ID NO: 1261992 - RNA, 20 nt, Human
cguuuguguucuguuuuguu

SEQ ID NO: 1261993 - RNA, 20 nt, Human
cgggaggcagagguugcagu

SEQ ID NO: 1261994 - RNA, 13 nt, Human
cgggaccuggugc

SEQ ID NO: 1261995 - RNA, 16 nt, Human
cgggaccacccugagc

SEQ ID NO: 1261996 - RNA, 17 nt, Human
cgggaccacccugagcc

SEQ ID NO: 1261997 - RNA, 18 nt, Human
cgggaccacccugagccg

SEQ ID NO: 1261998 - RNA, 19 nt, Human
cguuuguuuguuuguuuaa

SEQ ID NO: 1261999 - RNA, 13 nt, Human
cguuuuaaaaaag

SEQ ID NO: 1262000 - RNA, 16 nt, Human
cguuuuauaagcauca

SEQ ID NO: 1262001 - RNA, 14 nt, Human
cuaaaaaaaagaug

SEQ ID NO: 1262002 - RNA, 15 nt, Human
cuaaaaaaaagauga

SEQ ID NO: 1262003 - RNA, 11 nt, Human
cuaaaaauaaa

SEQ ID NO: 1262004 - RNA, 21 nt, Human
cuaaaaauagacuuaaaucuc

SEQ ID NO: 1262005 - RNA, 23 nt, Human
cuaaaagugggcuugauucugca

SEQ ID NO: 1262006 - RNA, 20 nt, Human
cuaaaagugggcuugauucu

SEQ ID NO: 1262007 - RNA, 14 nt, Human
cuaaaauaaagaaa

SEQ ID NO: 1262008 - RNA, 16 nt, Human
cuaaaauaaagaaaua

SEQ ID NO: 1262009 - RNA, 22 nt, Human
cuaaaauaaagaaauagaacaa

SEQ ID NO: 1262010 - RNA, 15 nt, Human
cuaaaauaauuuugu

SEQ ID NO: 1262011 - RNA, 17 nt, Human
cuaaaauaauuuuguaa

SEQ ID NO: 1262012 - RNA, 18 nt, Human
cuaaaauaauuuuguaau

SEQ ID NO: 1262013 - RNA, 20 nt, Human
cgggaauuuucaucuaggau

SEQ ID NO: 1262014 - RNA, 18 nt, Human
cgggaauuuucaucuagg

SEQ ID NO: 1262015 - RNA, 18 nt, Human
cgggacaccuaggcuagg

SEQ ID NO: 1262016 - RNA, 19 nt, Human
cgggacaccuaggcuaggg

SEQ ID NO: 1262017 - RNA, 16 nt, Human
cggcuugccacacccc

SEQ ID NO: 1262018 - RNA, 19 nt, Human
cggcuucaugccagcuacu

SEQ ID NO: 1262019 - RNA, 15 nt, Human
cgggaaaaagcccac

SEQ ID NO: 1262020 - RNA, 13 nt, Human
cggcuggccaugg

SEQ ID NO: 1262021 - RNA, 20 nt, Human
cggcuggccauggagaaagc

SEQ ID NO: 1262022 - RNA, 21 nt, Human
cggcuggccauggagaaagcu

SEQ ID NO: 1262023 - RNA, 13 nt, Human
cggcugugugugc

SEQ ID NO: 1262024 - RNA, 22 nt, Human
cggcugugugugcacgcgugug

SEQ ID NO: 1262025 - RNA, 15 nt, Human
cggcuucaugccagc

SEQ ID NO: 1262026 - RNA, 16 nt, Human
cggcuucaugccagcu

SEQ ID NO: 1262027 - RNA, 13 nt, Human
cggauccagggag

SEQ ID NO: 1262028 - RNA, 18 nt, Human
cggauccagggaggcugg

SEQ ID NO: 1262029 - RNA, 22 nt, Human
cggauccagggaggcugguccu

SEQ ID NO: 1262030 - RNA, 18 nt, Human
cggagugaguuuuuuagu

SEQ ID NO: 1262031 - RNA, 14 nt, Human
cggagugcggacca

SEQ ID NO: 1262032 - RNA, 23 nt, Human
cggagugcggaccacccucacug

SEQ ID NO: 1262033 - RNA, 22 nt, Human
cggccagccccuggccccagga

SEQ ID NO: 1262034 - RNA, 21 nt, Human
cggauccagggaggcuggucc

SEQ ID NO: 1262035 - RNA, 14 nt, Human
cggauccuaagcau

SEQ ID NO: 1262036 - RNA, 17 nt, Human
cggauccuaagcaucua

SEQ ID NO: 1262037 - RNA, 21 nt, Human
cggcccucaguagucccugca

SEQ ID NO: 1262038 - RNA, 22 nt, Human
cggccuccguccaggagccugg

SEQ ID NO: 1262039 - RNA, 21 nt, Human
cggccuccguccaggagccug

SEQ ID NO: 1262040 - RNA, 12 nt, Human
cggccuccuucu

SEQ ID NO: 1262041 - RNA, 20 nt, Human
cggccuccuucugagcuccu

SEQ ID NO: 1262042 - RNA, 22 nt, Human
cggccuccuucugagcuccugu

SEQ ID NO: 1262043 - RNA, 21 nt, Human
cggccuccuucugagcuccug

SEQ ID NO: 1262044 - RNA, 15 nt, Human
cgcuaaaagaaacuu

SEQ ID NO: 1262045 - RNA, 13 nt, Human
cgcuaaaagaaac

SEQ ID NO: 1262046 - RNA, 16 nt, Human
cgccuuggccuguguu

SEQ ID NO: 1262047 - RNA, 12 nt, Human
cgcccguccugc

SEQ ID NO: 1262048 - RNA, 14 nt, Human
cgcccguccugccu

SEQ ID NO: 1262049 - RNA, 15 nt, Human
cgcccguccugccug

SEQ ID NO: 1262050 - RNA, 17 nt, Human
cgcccguccugccugug

SEQ ID NO: 1262051 - RNA, 13 nt, Human
cgccuuucccagg

SEQ ID NO: 1262052 - RNA, 11 nt, Human
cgcggcuggga

SEQ ID NO: 1262053 - RNA, 12 nt, Human
cgcggcugggag

SEQ ID NO: 1262054 - RNA, 16 nt, Human
cgcggcugggaggagg

SEQ ID NO: 1262055 - RNA, 23 nt, Human
cgcgggagccaugcgcccccucc

SEQ ID NO: 1262056 - RNA, 13 nt, Human
cgcagcccugcuu

SEQ ID NO: 1262057 - RNA, 15 nt, Human
cgcagcccugcuuug

SEQ ID NO: 1262058 - RNA, 24 nt, Human
cgcagcccugcuuugggcugcccu

SEQ ID NO: 1262059 - RNA, 18 nt, Human
cgcccaacuaauuuuugu

SEQ ID NO: 1262060 - RNA, 17 nt, Human
cgcccaaaggacgcacu

SEQ ID NO: 1262061 - RNA, 18 nt, Human
cgcccaaaggacgcacug

SEQ ID NO: 1262062 - RNA, 20 nt, Human
cgcccaaaggacgcacugag

SEQ ID NO: 1262063 - RNA, 22 nt, Human
cgcccaaaggacgcacugagca

SEQ ID NO: 1262064 - RNA, 18 nt, Human
cgcccggcuaauuuuugu

SEQ ID NO: 1262065 - RNA, 16 nt, Human
cggacuuagcugggag

SEQ ID NO: 1262066 - RNA, 21 nt, Human
cggaccaaagggagucugcca

SEQ ID NO: 1262067 - RNA, 23 nt, Human
cggaccaaagggagucugccagg

SEQ ID NO: 1262068 - RNA, 21 nt, Human
cggaccacccucacuggcucu

SEQ ID NO: 1262069 - RNA, 12 nt, Human
cggaccagccug

SEQ ID NO: 1262070 - RNA, 21 nt, Human
cggacaguuccagaaguguga

SEQ ID NO: 1262071 - RNA, 23 nt, Human
cggacaguuccagaagugugacu

SEQ ID NO: 1262072 - RNA, 19 nt, Human
cggaccaaagggagucugc

SEQ ID NO: 1262073 - RNA, 17 nt, Human
cggacuuagcugggaga

SEQ ID NO: 1262074 - RNA, 14 nt, Human
cggacuuuucugca

SEQ ID NO: 1262075 - RNA, 15 nt, Human
cggacuuuucugcaa

SEQ ID NO: 1262076 - RNA, 16 nt, Human
cggacuuuucugcaaa

SEQ ID NO: 1262077 - RNA, 22 nt, Human
cggagucguggggugugcuggg

SEQ ID NO: 1262078 - RNA, 23 nt, Human
cggagucguggggugugcuggga

SEQ ID NO: 1262079 - RNA, 23 nt, Human
cggacuuagaaaaccagcucagc

SEQ ID NO: 1262080 - RNA, 16 nt, Human
cgcuucuugccucugu

SEQ ID NO: 1262081 - RNA, 17 nt, Human
cgcuucuugccucugug

SEQ ID NO: 1262082 - RNA, 18 nt, Human
cgcuucuugccucugugc

SEQ ID NO: 1262083 - RNA, 14 nt, Human
cgcuuuccugaauc

SEQ ID NO: 1262084 - RNA, 22 nt, Human
cgcuccugcuaacggugcucag

SEQ ID NO: 1262085 - RNA, 23 nt, Human
cgcuccugcuaacggugcucagg

SEQ ID NO: 1262086 - RNA, 15 nt, Human
cgcuccuggcccagc

SEQ ID NO: 1262087 - RNA, 16 nt, Human
cgcuccuggcccagcc

SEQ ID NO: 1262088 - RNA, 18 nt, Human
cgcuccuggcccagccuu

SEQ ID NO: 1262089 - RNA, 17 nt, Human
cgcuccuggcccagccu

SEQ ID NO: 1262090 - RNA, 18 nt, Human
cgcuccagcugccccggc

SEQ ID NO: 1262091 - RNA, 16 nt, Human
cgcuccagcugccccg

SEQ ID NO: 1262092 - RNA, 15 nt, Human
cgcuccccacucugc

SEQ ID NO: 1262093 - RNA, 16 nt, Human
cgcuccccacucugcu

SEQ ID NO: 1262094 - RNA, 19 nt, Human
cgcuccccacucugcucug

SEQ ID NO: 1262095 - RNA, 17 nt, Human
cgcuccccacucugcuc

SEQ ID NO: 1262096 - RNA, 14 nt, Human
cgcuccugcagccc

SEQ ID NO: 1262097 - RNA, 18 nt, Human
cgcuccugcagccccagc

SEQ ID NO: 1262098 - RNA, 20 nt, Human
cgcuuaucaacuaaugauuu

SEQ ID NO: 1262099 - RNA, 15 nt, Human
cgcuucuugccucug

SEQ ID NO: 1262100 - RNA, 16 nt, Human
cgcacggcagccacag

SEQ ID NO: 1262101 - RNA, 14 nt, Human
cgcaccugccucag

SEQ ID NO: 1262102 - RNA, 15 nt, Human
cgcaccugccucagg

SEQ ID NO: 1262103 - RNA, 16 nt, Human
cgcaccugccucagga

SEQ ID NO: 1262104 - RNA, 13 nt, Human
cgaugccagccaa

SEQ ID NO: 1262105 - RNA, 12 nt, Human
cgaugcccagag

SEQ ID NO: 1262106 - RNA, 13 nt, Human
cgaugcccagaga

SEQ ID NO: 1262107 - RNA, 14 nt, Human
cgaugcccagagac

SEQ ID NO: 1262108 - RNA, 17 nt, Human
cgcacugugacccccag

SEQ ID NO: 1262109 - RNA, 22 nt, Human
cgcacugugacccccagcuccg

SEQ ID NO: 1262110 - RNA, 14 nt, Human
cgagacuuuccauu

SEQ ID NO: 1262111 - RNA, 16 nt, Human
cgagagaucaaagaug

SEQ ID NO: 1262112 - RNA, 17 nt, Human
cgagagaucaaagauga

SEQ ID NO: 1262113 - RNA, 12 nt, Human
cgagagaugugu

SEQ ID NO: 1262114 - RNA, 13 nt, Human
cgagagaugugug

SEQ ID NO: 1262115 - RNA, 14 nt, Human
cgagagaugugugu

SEQ ID NO: 1262116 - RNA, 17 nt, Human
cgagagauguguguuga

SEQ ID NO: 1262117 - RNA, 15 nt, Human
cgagcgcccagcucc

SEQ ID NO: 1262118 - RNA, 19 nt, Human
cgagcgcccagcuccugac

SEQ ID NO: 1262119 - RNA, 13 nt, Human
cgagcgcccugca

SEQ ID NO: 1262120 - RNA, 14 nt, Human
cgagcgcccugcag

SEQ ID NO: 1262121 - RNA, 15 nt, Human
cgaggacccaggaaa

SEQ ID NO: 1262122 - RNA, 19 nt, Human
cgaggaggcuccagagggc

SEQ ID NO: 1262123 - RNA, 20 nt, Human
cgaggaggcuccagagggca

SEQ ID NO: 1262124 - RNA, 18 nt, Human
cgaggaggugucucaggc

SEQ ID NO: 1262125 - RNA, 20 nt, Human
cgaggaggugucucaggcug

SEQ ID NO: 1262126 - RNA, 21 nt, Human
cgaggaggugucucaggcugc

SEQ ID NO: 1262127 - RNA, 22 nt, Human
cgaggaggugucucaggcugcc

SEQ ID NO: 1262128 - RNA, 12 nt, Human
cgaggaguaaca

SEQ ID NO: 1262129 - RNA, 13 nt, Human
cgaggaguaacaa

SEQ ID NO: 1262130 - RNA, 14 nt, Human
cgaggaguaacaau

SEQ ID NO: 1262131 - RNA, 21 nt, Human
cgaggaguaacaauacaaaug

SEQ ID NO: 1262132 - RNA, 22 nt, Human
cgaggaguaacaauacaaaugg

SEQ ID NO: 1262133 - RNA, 17 nt, Human
cgaggccuaccccgcag

SEQ ID NO: 1262134 - RNA, 23 nt, Human
cgaggccuaccccgcagacaccu

SEQ ID NO: 1262135 - RNA, 15 nt, Human
cgaugcaaugaacac

SEQ ID NO: 1262136 - RNA, 18 nt, Human
cgcccacaggaagccugc

SEQ ID NO: 1262137 - RNA, 16 nt, Human
cgcuuugauucauagu

SEQ ID NO: 1262138 - RNA, 18 nt, Human
ccuguggaucaaauccag

SEQ ID NO: 1262139 - RNA, 12 nt, Human
ccuguggauauu

SEQ ID NO: 1262140 - RNA, 21 nt, Human
ccuguggcgccgucuccaggg

SEQ ID NO: 1262141 - RNA, 15 nt, Human
ccugugggagccucg

SEQ ID NO: 1262142 - RNA, 16 nt, Human
ccugugggagccucgc

SEQ ID NO: 1262143 - RNA, 17 nt, Human
ccugugggagccucgca

SEQ ID NO: 1262144 - RNA, 22 nt, Human
ccuguggcgccgucuccagggg

SEQ ID NO: 1262145 - RNA, 13 nt, Human
ccugugggagccu

SEQ ID NO: 1262146 - RNA, 14 nt, Human
ccugugggagccuc

SEQ ID NO: 1262147 - RNA, 9 nt, Human
ccuguccuc

SEQ ID NO: 1262148 - RNA, 15 nt, Human
ccugugccugacccu

SEQ ID NO: 1262149 - RNA, 14 nt, Human
ccugugcucagccc

SEQ ID NO: 1262150 - RNA, 15 nt, Human
ccugugcucagcccu

SEQ ID NO: 1262151 - RNA, 16 nt, Human
ccugugcucagcccug

SEQ ID NO: 1262152 - RNA, 17 nt, Human
ccugugcucagcccuga

SEQ ID NO: 1262153 - RNA, 21 nt, Human
ccuucaugcauggaaauuccc

SEQ ID NO: 1262154 - RNA, 12 nt, Human
ccuucaugcaug

SEQ ID NO: 1262155 - RNA, 17 nt, Human
ccuucaugacagccucc

SEQ ID NO: 1262156 - RNA, 18 nt, Human
ccuucaugacagccucca

SEQ ID NO: 1262157 - RNA, 22 nt, Human
ccugugggggguaaucccugcu

SEQ ID NO: 1262158 - RNA, 16 nt, Human
ccuguggucacugacu

SEQ ID NO: 1262159 - RNA, 15 nt, Human
ccugugguucugaga

SEQ ID NO: 1262160 - RNA, 19 nt, Human
ccugugguucugagauggc

SEQ ID NO: 1262161 - RNA, 15 nt, Human
ccuucaugcauggaa

SEQ ID NO: 1262162 - RNA, 23 nt, Human
ccuucauucugcaaguauacuag

SEQ ID NO: 1262163 - RNA, 12 nt, Human
ccuucauuuccu

SEQ ID NO: 1262164 - RNA, 13 nt, Human
ccuucauuuccuc

SEQ ID NO: 1262165 - RNA, 14 nt, Human
ccuucauuuccucc

SEQ ID NO: 1262166 - RNA, 15 nt, Human
ccuucauuuccuccg

SEQ ID NO: 1262167 - RNA, 23 nt, Human
ccuuccagcuagugacccacaug

SEQ ID NO: 1262168 - RNA, 19 nt, Human
ccuucuccauggcccugcc

SEQ ID NO: 1262169 - RNA, 13 nt, Human
ccuucucccacuc

SEQ ID NO: 1262170 - RNA, 14 nt, Human
ccuucucccacucu

SEQ ID NO: 1262171 - RNA, 15 nt, Human
ccuucucccacucuc

SEQ ID NO: 1262172 - RNA, 17 nt, Human
ccuucucccacucuccu

SEQ ID NO: 1262173 - RNA, 18 nt, Human
ccuucucccacucuccua

SEQ ID NO: 1262174 - RNA, 20 nt, Human
ccuucucccacucuccuagg

SEQ ID NO: 1262175 - RNA, 12 nt, Human
ccuucuccccag

SEQ ID NO: 1262176 - RNA, 13 nt, Human
ccuucuccccagc

SEQ ID NO: 1262177 - RNA, 14 nt, Human
ccuucuccccagcu

SEQ ID NO: 1262178 - RNA, 17 nt, Human
ccuucuccccagcuccc

SEQ ID NO: 1262179 - RNA, 22 nt, Human
ccuucuccauggcccugccaug

SEQ ID NO: 1262180 - RNA, 11 nt, Human
ccuucuccauc

SEQ ID NO: 1262181 - RNA, 13 nt, Human
ccuucuccaucca

SEQ ID NO: 1262182 - RNA, 16 nt, Human
ccuucuccauccacau

SEQ ID NO: 1262183 - RNA, 22 nt, Human
ccuucuccauccacaugggagc

SEQ ID NO: 1262184 - RNA, 15 nt, Human
ccuucuauuuggggc

SEQ ID NO: 1262185 - RNA, 22 nt, Human
ccuucuauuuggggcuugauga

SEQ ID NO: 1262186 - RNA, 16 nt, Human
ccuucuauuuggggcu

SEQ ID NO: 1262187 - RNA, 18 nt, Human
ccuucuccccagcuccca

SEQ ID NO: 1262188 - RNA, 19 nt, Human
ccuucuccccagcucccag

SEQ ID NO: 1262189 - RNA, 20 nt, Human
ccuucuccccagcucccagg

SEQ ID NO: 1262190 - RNA, 21 nt, Human
ccuucuccccagcucccagga

SEQ ID NO: 1262191 - RNA, 23 nt, Human
ccuucuccccagcucccaggacc

SEQ ID NO: 1262192 - RNA, 13 nt, Human
ccuucuccccugc

SEQ ID NO: 1262193 - RNA, 15 nt, Human
ccuucuccccugcac

SEQ ID NO: 1262194 - RNA, 16 nt, Human
ccuucuccccugcacu

SEQ ID NO: 1262195 - RNA, 17 nt, Human
ccuucuccccugcacug

SEQ ID NO: 1262196 - RNA, 22 nt, Human
ccuucuccccugcacuguaaaa

SEQ ID NO: 1262197 - RNA, 24 nt, Human
ccuucuccccugcacuguaaaaug

SEQ ID NO: 1262198 - RNA, 23 nt, Human
ccuucuccccugcacuguaaaau

SEQ ID NO: 1262199 - RNA, 23 nt, Human
ccuuccauggugugaucgucuga

SEQ ID NO: 1262200 - RNA, 18 nt, Human
ccuuccaugucgccucug

SEQ ID NO: 1262201 - RNA, 18 nt, Human
ccuuccuggacagcugug

SEQ ID NO: 1262202 - RNA, 19 nt, Human
ccuuccuggacagcugugc

SEQ ID NO: 1262203 - RNA, 20 nt, Human
ccuuccuggacagcugugcc

SEQ ID NO: 1262204 - RNA, 21 nt, Human
ccuuccuggacagcugugccu

SEQ ID NO: 1262205 - RNA, 22 nt, Human
ccuuccuggacagcugugccuc

SEQ ID NO: 1262206 - RNA, 20 nt, Human
ccuuccuggagacugcccag

SEQ ID NO: 1262207 - RNA, 12 nt, Human
ccuuccagcucc

SEQ ID NO: 1262208 - RNA, 13 nt, Human
ccuuccagcuccu

SEQ ID NO: 1262209 - RNA, 15 nt, Human
ccuuccagcuccugu

SEQ ID NO: 1262210 - RNA, 16 nt, Human
ccuuccagcuccugua

SEQ ID NO: 1262211 - RNA, 17 nt, Human
ccuuccagcuccuguaa

SEQ ID NO: 1262212 - RNA, 19 nt, Human
ccuucggccuccauccuga

SEQ ID NO: 1262213 - RNA, 22 nt, Human
ccuuccuguuuuucacauuuuc

SEQ ID NO: 1262214 - RNA, 18 nt, Human
ccuucggccuccauccug

SEQ ID NO: 1262215 - RNA, 15 nt, Human
ccuucgggcugugcc

SEQ ID NO: 1262216 - RNA, 16 nt, Human
ccuucgggcugugccc

SEQ ID NO: 1262217 - RNA, 16 nt, Human
ccuucgucuuucccau

SEQ ID NO: 1262218 - RNA, 17 nt, Human
ccuucgucuuucccaug

SEQ ID NO: 1262219 - RNA, 17 nt, Human
ccuucggccuccauccu

SEQ ID NO: 1262220 - RNA, 19 nt, Human
ccuuccuggggcaucuggc

SEQ ID NO: 1262221 - RNA, 17 nt, Human
ccuuccuguuuuucaca

SEQ ID NO: 1262222 - RNA, 19 nt, Human
ccuuccuguuuuucacauu

SEQ ID NO: 1262223 - RNA, 23 nt, Human
ccuugacauuguagagcuucugg

SEQ ID NO: 1262224 - RNA, 16 nt, Human
ccuuggccucuuuccu

SEQ ID NO: 1262225 - RNA, 12 nt, Human
ccuuggccugga

SEQ ID NO: 1262226 - RNA, 13 nt, Human
ccuuggccuggag

SEQ ID NO: 1262227 - RNA, 14 nt, Human
ccuuggccuggagc

SEQ ID NO: 1262228 - RNA, 21 nt, Human
ccuuggccuggagcacaaaga

SEQ ID NO: 1262229 - RNA, 15 nt, Human
ccuuggccuggagca

SEQ ID NO: 1262230 - RNA, 14 nt, Human
ccuuggccuguguu

SEQ ID NO: 1262231 - RNA, 16 nt, Human
ccuugggcucugauga

SEQ ID NO: 1262232 - RNA, 12 nt, Human
ccuugggcuccc

SEQ ID NO: 1262233 - RNA, 13 nt, Human
ccuugggcucccu

SEQ ID NO: 1262234 - RNA, 21 nt, Human
ccuugggcuccgugugggaga

SEQ ID NO: 1262235 - RNA, 14 nt, Human
ccuugggcucugau

SEQ ID NO: 1262236 - RNA, 15 nt, Human
ccuugggcucugaug

SEQ ID NO: 1262237 - RNA, 20 nt, Human
ccuugggcucugaugaaaaa

SEQ ID NO: 1262238 - RNA, 16 nt, Human
ccuugguucccccacu

SEQ ID NO: 1262239 - RNA, 13 nt, Human
ccuugguuccuaa

SEQ ID NO: 1262240 - RNA, 22 nt, Human
ccuugguucuugaggggaccag

SEQ ID NO: 1262241 - RNA, 21 nt, Human
ccuugguugucuggcaaggac

SEQ ID NO: 1262242 - RNA, 22 nt, Human
ccuugguugucuggcaaggacu

SEQ ID NO: 1262243 - RNA, 21 nt, Human
ccuugguuuuuacugcucuga

SEQ ID NO: 1262244 - RNA, 23 nt, Human
ccuugguuuuuacugcucugaga

SEQ ID NO: 1262245 - RNA, 16 nt, Human
ccuuguaauucuaaau

SEQ ID NO: 1262246 - RNA, 19 nt, Human
ccuuguaauucuaaaugaa

SEQ ID NO: 1262247 - RNA, 14 nt, Human
ccuuguagcuccuc

SEQ ID NO: 1262248 - RNA, 15 nt, Human
ccuuguagcuccucc

SEQ ID NO: 1262249 - RNA, 17 nt, Human
ccuuguagcuccucccc

SEQ ID NO: 1262250 - RNA, 20 nt, Human
ccuuguauccccugcaggcu

SEQ ID NO: 1262251 - RNA, 22 nt, Human
cgaagcuaacagggaaggcagg

SEQ ID NO: 1262252 - RNA, 17 nt, Human
cgaagcuaacagggaag

SEQ ID NO: 1262253 - RNA, 23 nt, Human
cgaaggaaaagggcuuucucaau

SEQ ID NO: 1262254 - RNA, 17 nt, Human
cgaaucuacuaauucca

SEQ ID NO: 1262255 - RNA, 12 nt, Human
cgaaucucugug

SEQ ID NO: 1262256 - RNA, 16 nt, Human
cgaaucucugugccuu

SEQ ID NO: 1262257 - RNA, 22 nt, Human
cgaaucucuuuuugcuuucgaa

SEQ ID NO: 1262258 - RNA, 12 nt, Human
cgaaugacacug

SEQ ID NO: 1262259 - RNA, 16 nt, Human
cgaaugacacuguuca

SEQ ID NO: 1262260 - RNA, 13 nt, Human
cgaaugacacugu

SEQ ID NO: 1262261 - RNA, 13 nt, Human
cgaaugugucuuu

SEQ ID NO: 1262262 - RNA, 14 nt, Human
cgaaugugucuuua

SEQ ID NO: 1262263 - RNA, 15 nt, Human
cgaaugugucuuuag

SEQ ID NO: 1262264 - RNA, 16 nt, Human
cgaaugugucuuuaga

SEQ ID NO: 1262265 - RNA, 19 nt, Human
cgaaugugucuuuagauag

SEQ ID NO: 1262266 - RNA, 18 nt, Human
cgaaugugucuuuagaua

SEQ ID NO: 1262267 - RNA, 18 nt, Human
ccuuuuuuuccaucuuua

SEQ ID NO: 1262268 - RNA, 16 nt, Human
cgaaauaauuguuguu

SEQ ID NO: 1262269 - RNA, 19 nt, Human
cgaaauaauuguuguucug

SEQ ID NO: 1262270 - RNA, 20 nt, Human
cgaaauaauuguuguucugu

SEQ ID NO: 1262271 - RNA, 21 nt, Human
cgaaauaauuguuguucuguu

SEQ ID NO: 1262272 - RNA, 22 nt, Human
cgaaauaauuguuguucuguua

SEQ ID NO: 1262273 - RNA, 20 nt, Human
cgaaauaucuauguuuuacc

SEQ ID NO: 1262274 - RNA, 13 nt, Human
cgaaauguuauuu

SEQ ID NO: 1262275 - RNA, 14 nt, Human
cgaaauguuauuuu

SEQ ID NO: 1262276 - RNA, 22 nt, Human
cgaaauguuauuuuuuaauuau

SEQ ID NO: 1262277 - RNA, 15 nt, Human
cgaagcguuguccuc

SEQ ID NO: 1262278 - RNA, 16 nt, Human
cgaagcguuguccuca

SEQ ID NO: 1262279 - RNA, 17 nt, Human
cgaagcguuguccucag

SEQ ID NO: 1262280 - RNA, 21 nt, Human
cgaagcguuguccucagcccc

SEQ ID NO: 1262281 - RNA, 18 nt, Human
cgaagcccagagggucug

SEQ ID NO: 1262282 - RNA, 23 nt, Human
cgaagcccagagggucugggggc

SEQ ID NO: 1262283 - RNA, 13 nt, Human
ccuuugugaaaaa

SEQ ID NO: 1262284 - RNA, 18 nt, Human
ccuuuuuuccccagacuu

SEQ ID NO: 1262285 - RNA, 15 nt, Human
ccuuuuuuccccaga

SEQ ID NO: 1262286 - RNA, 15 nt, Human
ccuuuuuucuguaua

SEQ ID NO: 1262287 - RNA, 12 nt, Human
ccuuuuuugauc

SEQ ID NO: 1262288 - RNA, 13 nt, Human
ccuuuuuugauca

SEQ ID NO: 1262289 - RNA, 14 nt, Human
ccuuuuuuccccag

SEQ ID NO: 1262290 - RNA, 13 nt, Human
ccuuugugaguca

SEQ ID NO: 1262291 - RNA, 16 nt, Human
ccuuugugagucaaua

SEQ ID NO: 1262292 - RNA, 22 nt, Human
ccuuugugcacauuuauuuccu

SEQ ID NO: 1262293 - RNA, 13 nt, Human
ccuuugugcccua

SEQ ID NO: 1262294 - RNA, 14 nt, Human
ccuuugugcccuau

SEQ ID NO: 1262295 - RNA, 14 nt, Human
ccuuugugugcucu

SEQ ID NO: 1262296 - RNA, 17 nt, Human
ccuuugugugcucucca

SEQ ID NO: 1262297 - RNA, 18 nt, Human
ccuuugugugcucuccau

SEQ ID NO: 1262298 - RNA, 20 nt, Human
ccuuugugugcucuccauuc

SEQ ID NO: 1262299 - RNA, 18 nt, Human
ccuuuguuacuucucuaa

SEQ ID NO: 1262300 - RNA, 18 nt, Human
ccuuuguuccccacugga

SEQ ID NO: 1262301 - RNA, 20 nt, Human
ccuuuguuccccacuggagc

SEQ ID NO: 1262302 - RNA, 21 nt, Human
ccuuuguuccccacuggagca

SEQ ID NO: 1262303 - RNA, 23 nt, Human
ccuuuguuggagucaaaaagaac

SEQ ID NO: 1262304 - RNA, 12 nt, Human
ccuuuuaaagaa

SEQ ID NO: 1262305 - RNA, 23 nt, Human
ccuuuguaaauugucagaugcug

SEQ ID NO: 1262306 - RNA, 21 nt, Human
ccuuuguaaauugucagaugc

SEQ ID NO: 1262307 - RNA, 22 nt, Human
ccuuugggcuucagcugccagu

SEQ ID NO: 1262308 - RNA, 19 nt, Human
ccuuugggcuucagcugcc

SEQ ID NO: 1262309 - RNA, 15 nt, Human
ccuugugggccuggg

SEQ ID NO: 1262310 - RNA, 16 nt, Human
ccuugugggccugggc

SEQ ID NO: 1262311 - RNA, 17 nt, Human
ccuugugggccugggcu

SEQ ID NO: 1262312 - RNA, 20 nt, Human
ccuugugggccugggcuccu

SEQ ID NO: 1262313 - RNA, 21 nt, Human
ccuugugggccugggcuccug

SEQ ID NO: 1262314 - RNA, 17 nt, Human
ccuuguauccccugcag

SEQ ID NO: 1262315 - RNA, 19 nt, Human
ccuugucuuauucccuucc

SEQ ID NO: 1262316 - RNA, 21 nt, Human
ccuugucuuauucccuuccug

SEQ ID NO: 1262317 - RNA, 20 nt, Human
ccuugugaaucaagggucag

SEQ ID NO: 1262318 - RNA, 21 nt, Human
ccuugugaugucauacagaga

SEQ ID NO: 1262319 - RNA, 22 nt, Human
ccuugugaugucauacagagaa

SEQ ID NO: 1262320 - RNA, 20 nt, Human
ccuugugaugugcacguaaa

SEQ ID NO: 1262321 - RNA, 12 nt, Human
ccuugugccaga

SEQ ID NO: 1262322 - RNA, 23 nt, Human
ccuugugaugucauacagagaag

SEQ ID NO: 1262323 - RNA, 13 nt, Human
ccuugugcugggg

SEQ ID NO: 1262324 - RNA, 17 nt, Human
ccugcccugccaccugu

SEQ ID NO: 1262325 - RNA, 15 nt, Human
ccugcccugccaccu

SEQ ID NO: 1262326 - RNA, 14 nt, Human
ccugcccugccacc

SEQ ID NO: 1262327 - RNA, 12 nt, Human
ccugcccugcca

SEQ ID NO: 1262328 - RNA, 11 nt, Human
ccugcccugcc

SEQ ID NO: 1262329 - RNA, 17 nt, Human
ccugcccugcccugcca

SEQ ID NO: 1262330 - RNA, 16 nt, Human
ccugcccugcccugcc

SEQ ID NO: 1262331 - RNA, 15 nt, Human
ccugcccugcccugc

SEQ ID NO: 1262332 - RNA, 18 nt, Human
ccugcccugccaccuguc

SEQ ID NO: 1262333 - RNA, 21 nt, Human
ccugcccugccaccugucugu

SEQ ID NO: 1262334 - RNA, 10 nt, Human
ccugcccugg

SEQ ID NO: 1262335 - RNA, 12 nt, Human
ccugcccuggga

SEQ ID NO: 1262336 - RNA, 14 nt, Human
ccugcccugggagg

SEQ ID NO: 1262337 - RNA, 15 nt, Human
ccugcccugggaggc

SEQ ID NO: 1262338 - RNA, 23 nt, Human
ccugcccugguuuccugcccugg

SEQ ID NO: 1262339 - RNA, 20 nt, Human
ccugcccugggaggcaguga

SEQ ID NO: 1262340 - RNA, 22 nt, Human
ccugcccugggaggcagugaug

SEQ ID NO: 1262341 - RNA, 14 nt, Human
ccugcccugguuuc

SEQ ID NO: 1262342 - RNA, 19 nt, Human
ccugcccugguuuccugcc

SEQ ID NO: 1262343 - RNA, 20 nt, Human
ccugcccugguuuccugccc

SEQ ID NO: 1262344 - RNA, 21 nt, Human
ccugcccugguuuccugcccu

SEQ ID NO: 1262345 - RNA, 22 nt, Human
ccugcccugguuuccugcccug

SEQ ID NO: 1262346 - RNA, 12 nt, Human
ccugccucagcc

SEQ ID NO: 1262347 - RNA, 22 nt, Human
ccugccgagcaaccguggcccu

SEQ ID NO: 1262348 - RNA, 22 nt, Human
ccugccuguucccauucuugca

SEQ ID NO: 1262349 - RNA, 12 nt, Human
ccugccuguggc

SEQ ID NO: 1262350 - RNA, 14 nt, Human
ccugccuguggcca

SEQ ID NO: 1262351 - RNA, 14 nt, Human
ccugccgagagucc

SEQ ID NO: 1262352 - RNA, 21 nt, Human
ccugcccuuguuuggggcagg

SEQ ID NO: 1262353 - RNA, 22 nt, Human
ccugccgagaguccaucagccu

SEQ ID NO: 1262354 - RNA, 23 nt, Human
ccugccgagaguccaucagccuc

SEQ ID NO: 1262355 - RNA, 22 nt, Human
ccugcccuuguuuggggcagga

SEQ ID NO: 1262356 - RNA, 17 nt, Human
ccugccaccugucuguc

SEQ ID NO: 1262357 - RNA, 16 nt, Human
ccugccaccugucugu

SEQ ID NO: 1262358 - RNA, 15 nt, Human
ccugccaccugucug

SEQ ID NO: 1262359 - RNA, 14 nt, Human
ccugccaccugucu

SEQ ID NO: 1262360 - RNA, 13 nt, Human
ccugccaccuguc

SEQ ID NO: 1262361 - RNA, 12 nt, Human
ccugccaccugu

SEQ ID NO: 1262362 - RNA, 21 nt, Human
ccugccaccuggaccccugca

SEQ ID NO: 1262363 - RNA, 17 nt, Human
ccugccaccuccugccu

SEQ ID NO: 1262364 - RNA, 13 nt, Human
ccugccaccugga

SEQ ID NO: 1262365 - RNA, 15 nt, Human
ccugccaccuggacc

SEQ ID NO: 1262366 - RNA, 16 nt, Human
ccugccaccuggaccc

SEQ ID NO: 1262367 - RNA, 17 nt, Human
ccugccaccuggacccc

SEQ ID NO: 1262368 - RNA, 22 nt, Human
ccugccaccuggaccccugcau

SEQ ID NO: 1262369 - RNA, 22 nt, Human
ccugccaggaggacccagggcu

SEQ ID NO: 1262370 - RNA, 13 nt, Human
ccugccacucacu

SEQ ID NO: 1262371 - RNA, 15 nt, Human
ccugccacucacuag

SEQ ID NO: 1262372 - RNA, 16 nt, Human
ccugccacucacuagg

SEQ ID NO: 1262373 - RNA, 18 nt, Human
ccugccacucacuaggcc

SEQ ID NO: 1262374 - RNA, 21 nt, Human
ccugccacucacuaggccccc

SEQ ID NO: 1262375 - RNA, 22 nt, Human
ccugccacucacuaggccccca

SEQ ID NO: 1262376 - RNA, 15 nt, Human
ccugccaggaggacc

SEQ ID NO: 1262377 - RNA, 19 nt, Human
ccugccaggaggacccagg

SEQ ID NO: 1262378 - RNA, 23 nt, Human
ccugccaggaggacccagggcuc

SEQ ID NO: 1262379 - RNA, 13 nt, Human
ccugccagggcag

SEQ ID NO: 1262380 - RNA, 17 nt, Human
ccugccagggcagggcc

SEQ ID NO: 1262381 - RNA, 19 nt, Human
ccugccagggcagggcccc

SEQ ID NO: 1262382 - RNA, 15 nt, Human
ccugccccccagccu

SEQ ID NO: 1262383 - RNA, 17 nt, Human
ccugccccccagccucu

SEQ ID NO: 1262384 - RNA, 18 nt, Human
ccugccccccagccucug

SEQ ID NO: 1262385 - RNA, 22 nt, Human
ccugccccccagccucuggcau

SEQ ID NO: 1262386 - RNA, 14 nt, Human
ccugcccccugcag

SEQ ID NO: 1262387 - RNA, 15 nt, Human
ccugcccccugcagg

SEQ ID NO: 1262388 - RNA, 16 nt, Human
ccugcccccugcagga

SEQ ID NO: 1262389 - RNA, 20 nt, Human
ccugcccccugcaggaagga

SEQ ID NO: 1262390 - RNA, 18 nt, Human
ccugcccuaccugcccca

SEQ ID NO: 1262391 - RNA, 21 nt, Human
ccugcccucauggccccucug

SEQ ID NO: 1262392 - RNA, 23 nt, Human
ccugcccucauggccccucugac

SEQ ID NO: 1262393 - RNA, 17 nt, Human
ccugccccugagcccau

SEQ ID NO: 1262394 - RNA, 22 nt, Human
ccugccccuccucucccucauc

SEQ ID NO: 1262395 - RNA, 19 nt, Human
ccugccccuccucucugcc

SEQ ID NO: 1262396 - RNA, 20 nt, Human
ccugccccuccucucugccc

SEQ ID NO: 1262397 - RNA, 21 nt, Human
ccugccccuccucucugcccu

SEQ ID NO: 1262398 - RNA, 22 nt, Human
ccugccccuccucucugcccua

SEQ ID NO: 1262399 - RNA, 14 nt, Human
ccugccccucccuu

SEQ ID NO: 1262400 - RNA, 19 nt, Human
ccugcccccugcaggaagg

SEQ ID NO: 1262401 - RNA, 15 nt, Human
ccugccccucccuuc

SEQ ID NO: 1262402 - RNA, 16 nt, Human
ccugccccucccuuca

SEQ ID NO: 1262403 - RNA, 18 nt, Human
ccugccccucccuucaac

SEQ ID NO: 1262404 - RNA, 18 nt, Human
ccugccccuccucucugc

SEQ ID NO: 1262405 - RNA, 23 nt, Human
ccucuuccuucccugcugugaaa

SEQ ID NO: 1262406 - RNA, 11 nt, Human
ccucuuccuga

SEQ ID NO: 1262407 - RNA, 12 nt, Human
ccucuuccccag

SEQ ID NO: 1262408 - RNA, 13 nt, Human
ccucuuccccaga

SEQ ID NO: 1262409 - RNA, 21 nt, Human
ccucuuccccagacgccuggc

SEQ ID NO: 1262410 - RNA, 22 nt, Human
ccucuuccccagacgccuggcu

SEQ ID NO: 1262411 - RNA, 16 nt, Human
ccucuucccccaagau

SEQ ID NO: 1262412 - RNA, 15 nt, Human
ccucuucccccaaga

SEQ ID NO: 1262413 - RNA, 15 nt, Human
ccucuucuacucacu

SEQ ID NO: 1262414 - RNA, 21 nt, Human
ccucuucuacucacuuuuccc

SEQ ID NO: 1262415 - RNA, 17 nt, Human
ccucuucuauuuuguaa

SEQ ID NO: 1262416 - RNA, 18 nt, Human
ccucuucuauuuuguaaa

SEQ ID NO: 1262417 - RNA, 23 nt, Human
ccucuucuacucacuuuucccac

SEQ ID NO: 1262418 - RNA, 18 nt, Human
ccugaaaacacugugcac

SEQ ID NO: 1262419 - RNA, 22 nt, Human
ccugaaaagguuuaugaaaaag

SEQ ID NO: 1262420 - RNA, 15 nt, Human
ccugaaacaacuugg

SEQ ID NO: 1262421 - RNA, 20 nt, Human
ccuaucuuugccacccucau

SEQ ID NO: 1262422 - RNA, 19 nt, Human
ccuaucuuugccacccuca

SEQ ID NO: 1262423 - RNA, 15 nt, Human
ccuaucuuugccacc

SEQ ID NO: 1262424 - RNA, 13 nt, Human
ccuaucuuugcca

SEQ ID NO: 1262425 - RNA, 16 nt, Human
ccuaugacuugggcac

SEQ ID NO: 1262426 - RNA, 17 nt, Human
ccuaugacuugggcacc

SEQ ID NO: 1262427 - RNA, 22 nt, Human
ccuaugacuugggcacccccag

SEQ ID NO: 1262428 - RNA, 12 nt, Human
ccuaucuuugcc

SEQ ID NO: 1262429 - RNA, 16 nt, Human
ccucuucagaggcccu

SEQ ID NO: 1262430 - RNA, 18 nt, Human
ccucuucauggauggggg

SEQ ID NO: 1262431 - RNA, 12 nt, Human
ccucuuccaguc

SEQ ID NO: 1262432 - RNA, 14 nt, Human
ccucuuccagucuu

SEQ ID NO: 1262433 - RNA, 16 nt, Human
ccucuuccaugcugug

SEQ ID NO: 1262434 - RNA, 18 nt, Human
ccuaugauguauacugcc

SEQ ID NO: 1262435 - RNA, 15 nt, Human
ccuaugauguauacu

SEQ ID NO: 1262436 - RNA, 14 nt, Human
ccuaugauguauac

SEQ ID NO: 1262437 - RNA, 11 nt, Human
ccuaugaugua

SEQ ID NO: 1262438 - RNA, 13 nt, Human
ccucuucagaggc

SEQ ID NO: 1262439 - RNA, 14 nt, Human
ccucuucagaggcc

SEQ ID NO: 1262440 - RNA, 17 nt, Human
ccuaugauauuuucugu

SEQ ID NO: 1262441 - RNA, 20 nt, Human
ccugaagcuaucguaaaauu

SEQ ID NO: 1262442 - RNA, 16 nt, Human
ccugaaggccugaggu

SEQ ID NO: 1262443 - RNA, 23 nt, Human
ccugaaggccugagguuacugga

SEQ ID NO: 1262444 - RNA, 20 nt, Human
ccugaaggggccaugauggc

SEQ ID NO: 1262445 - RNA, 13 nt, Human
ccugaaagaggaa

SEQ ID NO: 1262446 - RNA, 13 nt, Human
ccugaaauuccaa

SEQ ID NO: 1262447 - RNA, 19 nt, Human
ccugccaccuccugccuca

SEQ ID NO: 1262448 - RNA, 16 nt, Human
ccugccaccuccugcc

SEQ ID NO: 1262449 - RNA, 14 nt, Human
ccugccaccuccug

SEQ ID NO: 1262450 - RNA, 13 nt, Human
ccugccaccuccc

SEQ ID NO: 1262451 - RNA, 18 nt, Human
ccugccaccuccccccac

SEQ ID NO: 1262452 - RNA, 14 nt, Human
ccugccacccagcc

SEQ ID NO: 1262453 - RNA, 17 nt, Human
ccugccacccagcccca

SEQ ID NO: 1262454 - RNA, 18 nt, Human
ccugccacccagccccag

SEQ ID NO: 1262455 - RNA, 16 nt, Human
ccugcauuggaacugg

SEQ ID NO: 1262456 - RNA, 18 nt, Human
ccugcauuggaacuggag

SEQ ID NO: 1262457 - RNA, 19 nt, Human
ccugcauuggaacuggagg

SEQ ID NO: 1262458 - RNA, 20 nt, Human
ccugcauuggaacuggaggc

SEQ ID NO: 1262459 - RNA, 21 nt, Human
ccugcauuggaacuggaggca

SEQ ID NO: 1262460 - RNA, 22 nt, Human
ccugcauuggaacuggaggcag

SEQ ID NO: 1262461 - RNA, 23 nt, Human
ccugcauuugugaaaugauggug

SEQ ID NO: 1262462 - RNA, 23 nt, Human
ccugcauuggaacuggaggcagg

SEQ ID NO: 1262463 - RNA, 16 nt, Human
ccugcacuguaaaaug

SEQ ID NO: 1262464 - RNA, 15 nt, Human
ccugcacuguaaaau

SEQ ID NO: 1262465 - RNA, 14 nt, Human
ccugcacuuacuug

SEQ ID NO: 1262466 - RNA, 17 nt, Human
ccugcacuuacuugcuu

SEQ ID NO: 1262467 - RNA, 15 nt, Human
ccugccaccacgccc

SEQ ID NO: 1262468 - RNA, 19 nt, Human
ccugccaccacgcccggcu

SEQ ID NO: 1262469 - RNA, 12 nt, Human
ccugccacagcc

SEQ ID NO: 1262470 - RNA, 12 nt, Human
ccugccaccagg

SEQ ID NO: 1262471 - RNA, 13 nt, Human
ccugccaccaggc

SEQ ID NO: 1262472 - RNA, 14 nt, Human
ccugccaccaggcc

SEQ ID NO: 1262473 - RNA, 15 nt, Human
ccugccaccaggcca

SEQ ID NO: 1262474 - RNA, 18 nt, Human
ccugccaccaggccaccu

SEQ ID NO: 1262475 - RNA, 19 nt, Human
ccugccaccaggccaccuc

SEQ ID NO: 1262476 - RNA, 15 nt, Human
ccugcaccggggccu

SEQ ID NO: 1262477 - RNA, 19 nt, Human
ccugcaccaugcugcuggg

SEQ ID NO: 1262478 - RNA, 17 nt, Human
ccugcaccggggccugg

SEQ ID NO: 1262479 - RNA, 14 nt, Human
ccugcacuggggag

SEQ ID NO: 1262480 - RNA, 21 nt, Human
ccugcacuggggagcccgucu

SEQ ID NO: 1262481 - RNA, 11 nt, Human
ccugcacugua

SEQ ID NO: 1262482 - RNA, 12 nt, Human
ccugcacuguaa

SEQ ID NO: 1262483 - RNA, 13 nt, Human
ccugcacuguaaa

SEQ ID NO: 1262484 - RNA, 14 nt, Human
ccugcacuguaaaa

SEQ ID NO: 1262485 - RNA, 23 nt, Human
ccugcacaaagcccuuccauguc

SEQ ID NO: 1262486 - RNA, 19 nt, Human
ccugcaaagcccagcuuga

SEQ ID NO: 1262487 - RNA, 21 nt, Human
ccugcacacgcuccuuccucu

SEQ ID NO: 1262488 - RNA, 20 nt, Human
ccugcacaauaaaaauguuu

SEQ ID NO: 1262489 - RNA, 19 nt, Human
ccugcacaauaaaaauguu

SEQ ID NO: 1262490 - RNA, 15 nt, Human
ccugcacagugacuu

SEQ ID NO: 1262491 - RNA, 17 nt, Human
ccugcacagugacuucu

SEQ ID NO: 1262492 - RNA, 18 nt, Human
ccugcacagugacuucug

SEQ ID NO: 1262493 - RNA, 20 nt, Human
ccugcacagugacuucugag

SEQ ID NO: 1262494 - RNA, 21 nt, Human
ccugcacagugacuucugaga

SEQ ID NO: 1262495 - RNA, 22 nt, Human
ccugcacagugacuucugagau

SEQ ID NO: 1262496 - RNA, 14 nt, Human
ccugcaaagcccag

SEQ ID NO: 1262497 - RNA, 13 nt, Human
ccugcaaacuggg

SEQ ID NO: 1262498 - RNA, 16 nt, Human
ccugcaaacugggaac

SEQ ID NO: 1262499 - RNA, 20 nt, Human
ccugcaaacugggaaccccu

SEQ ID NO: 1262500 - RNA, 22 nt, Human
ccugcaaacugggaaccccuuu

SEQ ID NO: 1262501 - RNA, 15 nt, Human
ccugcaaagcccagc

SEQ ID NO: 1262502 - RNA, 16 nt, Human
ccugcaaagcccagcu

SEQ ID NO: 1262503 - RNA, 17 nt, Human
ccugcaaagcccagcuu

SEQ ID NO: 1262504 - RNA, 18 nt, Human
ccugcaaagcccagcuug

SEQ ID NO: 1262505 - RNA, 22 nt, Human
ccugcacaaagcccuuccaugu

SEQ ID NO: 1262506 - RNA, 20 nt, Human
ccugcacaaagcccuuccau

SEQ ID NO: 1262507 - RNA, 14 nt, Human
ccugaucagaccac

SEQ ID NO: 1262508 - RNA, 18 nt, Human
ccugaucagaccacggcu

SEQ ID NO: 1262509 - RNA, 19 nt, Human
ccugaucagaccacggcuc

SEQ ID NO: 1262510 - RNA, 13 nt, Human
ccugaucagagcc

SEQ ID NO: 1262511 - RNA, 14 nt, Human
ccugaucccagaga

SEQ ID NO: 1262512 - RNA, 17 nt, Human
ccugaucccagagagcc

SEQ ID NO: 1262513 - RNA, 19 nt, Human
ccugaucccagagagcccg

SEQ ID NO: 1262514 - RNA, 13 nt, Human
ccugauccuggag

SEQ ID NO: 1262515 - RNA, 15 nt, Human
ccugauccuggaggc

SEQ ID NO: 1262516 - RNA, 18 nt, Human
ccugauccuggaggccca

SEQ ID NO: 1262517 - RNA, 19 nt, Human
ccugauccuggaggcccag

SEQ ID NO: 1262518 - RNA, 20 nt, Human
ccugauccuggaggcccagu

SEQ ID NO: 1262519 - RNA, 12 nt, Human
ccugcaaacugg

SEQ ID NO: 1262520 - RNA, 19 nt, Human
ccugaaguaagcaaagacu

SEQ ID NO: 1262521 - RNA, 21 nt, Human
ccugagccccagggagagggg

SEQ ID NO: 1262522 - RNA, 21 nt, Human
ccugaauacccuuuucugacc

SEQ ID NO: 1262523 - RNA, 16 nt, Human
ccugagccggccccag

SEQ ID NO: 1262524 - RNA, 17 nt, Human
ccugagccggccccagg

SEQ ID NO: 1262525 - RNA, 12 nt, Human
ccugagccugcc

SEQ ID NO: 1262526 - RNA, 13 nt, Human
ccugagccugccg

SEQ ID NO: 1262527 - RNA, 14 nt, Human
ccugagccugccga

SEQ ID NO: 1262528 - RNA, 15 nt, Human
ccugagccugccgag

SEQ ID NO: 1262529 - RNA, 16 nt, Human
ccugagccugccgagc

SEQ ID NO: 1262530 - RNA, 17 nt, Human
ccugagccugccgagca

SEQ ID NO: 1262531 - RNA, 20 nt, Human
ccugagccugccgagcaacc

SEQ ID NO: 1262532 - RNA, 21 nt, Human
ccugagccugccgagcaaccg

SEQ ID NO: 1262533 - RNA, 23 nt, Human
ccugagccugccgagcaaccgug

SEQ ID NO: 1262534 - RNA, 19 nt, Human
ccugagcgaguggagucug

SEQ ID NO: 1262535 - RNA, 20 nt, Human
ccugagcgaguggagucugc

SEQ ID NO: 1262536 - RNA, 21 nt, Human
ccugagcgaguggagucugcc

SEQ ID NO: 1262537 - RNA, 22 nt, Human
ccugagcgaguggagucugcca

SEQ ID NO: 1262538 - RNA, 23 nt, Human
ccugagcgaguggagucugccac

SEQ ID NO: 1262539 - RNA, 12 nt, Human
ccugagcucagc

SEQ ID NO: 1262540 - RNA, 13 nt, Human
ccugagcucagcg

SEQ ID NO: 1262541 - RNA, 14 nt, Human
ccugagcucugaua

SEQ ID NO: 1262542 - RNA, 17 nt, Human
ccugagcugaccagccg

SEQ ID NO: 1262543 - RNA, 15 nt, Human
ccugagcugaggcag

SEQ ID NO: 1262544 - RNA, 16 nt, Human
ccugagcugaggcagc

SEQ ID NO: 1262545 - RNA, 14 nt, Human
ccugagcucagcgu

SEQ ID NO: 1262546 - RNA, 17 nt, Human
ccugaggcuccacuugg

SEQ ID NO: 1262547 - RNA, 18 nt, Human
ccugagcugaggcagcag

SEQ ID NO: 1262548 - RNA, 19 nt, Human
ccugaggccuagacucugu

SEQ ID NO: 1262549 - RNA, 14 nt, Human
ccugaggcuccacu

SEQ ID NO: 1262550 - RNA, 13 nt, Human
ccugaggcuccac

SEQ ID NO: 1262551 - RNA, 15 nt, Human
ccugucccaccccca

SEQ ID NO: 1262552 - RNA, 17 nt, Human
ccugucccacccccacc

SEQ ID NO: 1262553 - RNA, 18 nt, Human
ccugucccacccccaccc

SEQ ID NO: 1262554 - RNA, 17 nt, Human
ccugucauacuuuguua

SEQ ID NO: 1262555 - RNA, 19 nt, Human
ccugucaucaucauggcca

SEQ ID NO: 1262556 - RNA, 16 nt, Human
ccugucagcaugaauu

SEQ ID NO: 1262557 - RNA, 17 nt, Human
ccugucagcaugaauuu

SEQ ID NO: 1262558 - RNA, 22 nt, Human
ccugucagcaugaauuuguaau

SEQ ID NO: 1262559 - RNA, 20 nt, Human
ccugucagcaugaauuugua

SEQ ID NO: 1262560 - RNA, 20 nt, Human
ccugucauccagcucacuca

SEQ ID NO: 1262561 - RNA, 20 nt, Human
ccugucaugguguccagaca

SEQ ID NO: 1262562 - RNA, 11 nt, Human
ccugucccacc

SEQ ID NO: 1262563 - RNA, 13 nt, Human
ccugucccacccc

SEQ ID NO: 1262564 - RNA, 14 nt, Human
ccuguauaccuccu

SEQ ID NO: 1262565 - RNA, 19 nt, Human
ccuguauaccuccuccagc

SEQ ID NO: 1262566 - RNA, 16 nt, Human
ccuguaugucuccagu

SEQ ID NO: 1262567 - RNA, 17 nt, Human
ccugucagauccaggag

SEQ ID NO: 1262568 - RNA, 19 nt, Human
ccugucagauccaggagcu

SEQ ID NO: 1262569 - RNA, 20 nt, Human
ccugucagauccaggagcuc

SEQ ID NO: 1262570 - RNA, 22 nt, Human
ccugucagauccaggagcucca

SEQ ID NO: 1262571 - RNA, 23 nt, Human
ccugucagauccaggagcuccag

SEQ ID NO: 1262572 - RNA, 12 nt, Human
ccugucagcaug

SEQ ID NO: 1262573 - RNA, 13 nt, Human
ccugucagcauga

SEQ ID NO: 1262574 - RNA, 19 nt, Human
ccuguaggaagguacugua

SEQ ID NO: 1262575 - RNA, 20 nt, Human
ccuguagccccagugacagc

SEQ ID NO: 1262576 - RNA, 22 nt, Human
ccuguagccccagugacagcua

SEQ ID NO: 1262577 - RNA, 22 nt, Human
ccuggucugguugggcagccag

SEQ ID NO: 1262578 - RNA, 14 nt, Human
ccuguacaguagau

SEQ ID NO: 1262579 - RNA, 20 nt, Human
ccuguacaguagauuuucca

SEQ ID NO: 1262580 - RNA, 21 nt, Human
ccuguacaguagauuuuccaa

SEQ ID NO: 1262581 - RNA, 22 nt, Human
ccuguacaguagauuuuccaaa

SEQ ID NO: 1262582 - RNA, 14 nt, Human
ccuguacaguguua

SEQ ID NO: 1262583 - RNA, 16 nt, Human
ccuguacauuguggga

SEQ ID NO: 1262584 - RNA, 14 nt, Human
ccuguaccccagca

SEQ ID NO: 1262585 - RNA, 17 nt, Human
ccuguaccccagcacuu

SEQ ID NO: 1262586 - RNA, 22 nt, Human
ccuguagaacucaaccucuaca

SEQ ID NO: 1262587 - RNA, 23 nt, Human
ccuguagaacucaaccucuacag

SEQ ID NO: 1262588 - RNA, 13 nt, Human
ccuggucucaccc

SEQ ID NO: 1262589 - RNA, 17 nt, Human
ccuggucucacccugga

SEQ ID NO: 1262590 - RNA, 18 nt, Human
ccuggucucacccuggag

SEQ ID NO: 1262591 - RNA, 21 nt, Human
ccuggucucacccuggaggca

SEQ ID NO: 1262592 - RNA, 19 nt, Human
ccuggucucacccuggagg

SEQ ID NO: 1262593 - RNA, 19 nt, Human
ccuggguccaaugcucagg

SEQ ID NO: 1262594 - RNA, 16 nt, Human
ccuggguuaaguauua

SEQ ID NO: 1262595 - RNA, 18 nt, Human
ccuguggauguaaaguga

SEQ ID NO: 1262596 - RNA, 14 nt, Human
ccuggcccacccca

SEQ ID NO: 1262597 - RNA, 21 nt, Human
ccuggcccaccccacccacuu

SEQ ID NO: 1262598 - RNA, 22 nt, Human
ccuggcccaccccacccacuuc

SEQ ID NO: 1262599 - RNA, 12 nt, Human
ccuggcccagcc

SEQ ID NO: 1262600 - RNA, 13 nt, Human
ccuggcccagccu

SEQ ID NO: 1262601 - RNA, 14 nt, Human
ccuggcccagccuu

SEQ ID NO: 1262602 - RNA, 16 nt, Human
ccuggcccagccuuug

SEQ ID NO: 1262603 - RNA, 15 nt, Human
ccuggcccaucaggg

SEQ ID NO: 1262604 - RNA, 12 nt, Human
ccuggccccagg

SEQ ID NO: 1262605 - RNA, 13 nt, Human
ccuggccccagga

SEQ ID NO: 1262606 - RNA, 18 nt, Human
ccuggccccauggucagc

SEQ ID NO: 1262607 - RNA, 16 nt, Human
ccuggcuuuucacugc

SEQ ID NO: 1262608 - RNA, 23 nt, Human
ccuggcuuucauuuucucucagg

SEQ ID NO: 1262609 - RNA, 17 nt, Human
ccuggcuuuucacugcu

SEQ ID NO: 1262610 - RNA, 18 nt, Human
ccuggcuuuucacugcug

SEQ ID NO: 1262611 - RNA, 22 nt, Human
ccuggcuuucauuuucucucag

SEQ ID NO: 1262612 - RNA, 18 nt, Human
ccugggaaagccccugcc

SEQ ID NO: 1262613 - RNA, 17 nt, Human
ccugggaaauauucccu

SEQ ID NO: 1262614 - RNA, 18 nt, Human
ccugggaaauauucccua

SEQ ID NO: 1262615 - RNA, 15 nt, Human
ccugggacaacugcu

SEQ ID NO: 1262616 - RNA, 18 nt, Human
ccugggacaacugcuccc

SEQ ID NO: 1262617 - RNA, 19 nt, Human
ccugggacaacugcuccca

SEQ ID NO: 1262618 - RNA, 22 nt, Human
ccugggacaacugcucccaccu

SEQ ID NO: 1262619 - RNA, 23 nt, Human
ccugggacaacugcucccaccuc

SEQ ID NO: 1262620 - RNA, 21 nt, Human
ccuggcuccguccaggagccu

SEQ ID NO: 1262621 - RNA, 20 nt, Human
ccuggcuccuugugccagag

SEQ ID NO: 1262622 - RNA, 21 nt, Human
ccuggcuccuugugccagaga

SEQ ID NO: 1262623 - RNA, 22 nt, Human
ccuggcuccuugugccagagaa

SEQ ID NO: 1262624 - RNA, 13 nt, Human
ccuggcucucacc

SEQ ID NO: 1262625 - RNA, 14 nt, Human
ccuggcucucaccu

SEQ ID NO: 1262626 - RNA, 15 nt, Human
ccuggcucucaccuc

SEQ ID NO: 1262627 - RNA, 16 nt, Human
ccuggcucucaccucu

SEQ ID NO: 1262628 - RNA, 21 nt, Human
ccuggcuuucauuuucucuca

SEQ ID NO: 1262629 - RNA, 12 nt, Human
ccugggaggaga

SEQ ID NO: 1262630 - RNA, 17 nt, Human
ccugggaggagagacac

SEQ ID NO: 1262631 - RNA, 23 nt, Human
ccugggaccgcuacaccacucug

SEQ ID NO: 1262632 - RNA, 22 nt, Human
ccugggagaaaucuggcuucug

SEQ ID NO: 1262633 - RNA, 22 nt, Human
ccugggagaaucgcuccugcag

SEQ ID NO: 1262634 - RNA, 22 nt, Human
ccugggguauaaaacuuuccuc

SEQ ID NO: 1262635 - RNA, 14 nt, Human
ccuggggucuggag

SEQ ID NO: 1262636 - RNA, 15 nt, Human
ccuggggugacccgg

SEQ ID NO: 1262637 - RNA, 18 nt, Human
ccuggggugacccggcac

SEQ ID NO: 1262638 - RNA, 18 nt, Human
ccuggguagcgggggagg

SEQ ID NO: 1262639 - RNA, 13 nt, Human
ccuggccacgccc

SEQ ID NO: 1262640 - RNA, 21 nt, Human
ccuggcaguccgugggacggg

SEQ ID NO: 1262641 - RNA, 21 nt, Human
ccuggcaucgcaccauucuga

SEQ ID NO: 1262642 - RNA, 23 nt, Human
ccuggcaucgcaccauucugacu

SEQ ID NO: 1262643 - RNA, 19 nt, Human
ccuggcaugucaacagcgu

SEQ ID NO: 1262644 - RNA, 23 nt, Human
ccugccuguggcgccgucuccag

SEQ ID NO: 1262645 - RNA, 14 nt, Human
ccugcuacaccuau

SEQ ID NO: 1262646 - RNA, 20 nt, Human
ccugcuacaccuauuauccc

SEQ ID NO: 1262647 - RNA, 23 nt, Human
ccugcuacaccuauuaucccagc

SEQ ID NO: 1262648 - RNA, 21 nt, Human
ccugcuacaccuauuauccca

SEQ ID NO: 1262649 - RNA, 13 nt, Human
ccugcuaggccag

SEQ ID NO: 1262650 - RNA, 14 nt, Human
ccugcuaggccaga

SEQ ID NO: 1262651 - RNA, 16 nt, Human
ccugcuaggccagagc

SEQ ID NO: 1262652 - RNA, 13 nt, Human
ccuggacuuuccu

SEQ ID NO: 1262653 - RNA, 14 nt, Human
ccuggacuuuccug

SEQ ID NO: 1262654 - RNA, 16 nt, Human
ccuggagaacuagaga

SEQ ID NO: 1262655 - RNA, 15 nt, Human
ccugcuaggccagag

SEQ ID NO: 1262656 - RNA, 12 nt, Human
ccuggagaacua

SEQ ID NO: 1262657 - RNA, 13 nt, Human
ccuggagaacuag

SEQ ID NO: 1262658 - RNA, 15 nt, Human
ccuggacuuuccugc

SEQ ID NO: 1262659 - RNA, 16 nt, Human
ccuggacuuuccugca

SEQ ID NO: 1262660 - RNA, 17 nt, Human
ccuggacuuuccugcaa

SEQ ID NO: 1262661 - RNA, 19 nt, Human
ccuggacuuuccugcaacu

SEQ ID NO: 1262662 - RNA, 11 nt, Human
ccuaaccaagu

SEQ ID NO: 1262663 - RNA, 13 nt, Human
ccuaacccuuugu

SEQ ID NO: 1262664 - RNA, 18 nt, Human
ccuaaccucgggccugcu

SEQ ID NO: 1262665 - RNA, 12 nt, Human
ccguugcauuug

SEQ ID NO: 1262666 - RNA, 12 nt, Human
ccuaaccugccg

SEQ ID NO: 1262667 - RNA, 13 nt, Human
ccuaaccugccga

SEQ ID NO: 1262668 - RNA, 15 nt, Human
ccuaacgaaguaucc

SEQ ID NO: 1262669 - RNA, 16 nt, Human
ccuacagggggucugg

SEQ ID NO: 1262670 - RNA, 21 nt, Human
ccggggugggguggcugcagc

SEQ ID NO: 1262671 - RNA, 14 nt, Human
ccgugccaagucca

SEQ ID NO: 1262672 - RNA, 21 nt, Human
ccgugccaaguccagguccug

SEQ ID NO: 1262673 - RNA, 20 nt, Human
ccgugccaaguccagguccu

SEQ ID NO: 1262674 - RNA, 23 nt, Human
ccguggcuguggcauccagaguc

SEQ ID NO: 1262675 - RNA, 21 nt, Human
ccguggcccuuccuggacagc

SEQ ID NO: 1262676 - RNA, 16 nt, Human
ccguggcugcuguggg

SEQ ID NO: 1262677 - RNA, 17 nt, Human
ccguggcugcuguggga

SEQ ID NO: 1262678 - RNA, 20 nt, Human
ccguggcugcugugggaaau

SEQ ID NO: 1262679 - RNA, 14 nt, Human
ccguggcccuuccu

SEQ ID NO: 1262680 - RNA, 16 nt, Human
ccguggcccuuccugg

SEQ ID NO: 1262681 - RNA, 17 nt, Human
ccguggcccuuccugga

SEQ ID NO: 1262682 - RNA, 19 nt, Human
ccguggcccuuccuggaca

SEQ ID NO: 1262683 - RNA, 20 nt, Human
ccguggcccuuccuggacag

SEQ ID NO: 1262684 - RNA, 22 nt, Human
ccguggcccuuccuggacagcu

SEQ ID NO: 1262685 - RNA, 11 nt, Human
ccguggcuucc

SEQ ID NO: 1262686 - RNA, 14 nt, Human
ccguucacaugugu

SEQ ID NO: 1262687 - RNA, 14 nt, Human
ccguucacauuuuu

SEQ ID NO: 1262688 - RNA, 15 nt, Human
ccguucaugggggag

SEQ ID NO: 1262689 - RNA, 16 nt, Human
ccguucaugggggagg

SEQ ID NO: 1262690 - RNA, 23 nt, Human
ccguucaugggggagggggcaga

SEQ ID NO: 1262691 - RNA, 16 nt, Human
ccuacuagucaccaga

SEQ ID NO: 1262692 - RNA, 14 nt, Human
ccuacucacacagg

SEQ ID NO: 1262693 - RNA, 15 nt, Human
ccuacucacacaggc

SEQ ID NO: 1262694 - RNA, 16 nt, Human
ccuacucacacaggca

SEQ ID NO: 1262695 - RNA, 22 nt, Human
ccuacucacacaggcauuuccu

SEQ ID NO: 1262696 - RNA, 16 nt, Human
ccuacuccaaaauguu

SEQ ID NO: 1262697 - RNA, 23 nt, Human
ccuacucacacaggcauuuccug

SEQ ID NO: 1262698 - RNA, 19 nt, Human
ccuaccgagucucuucucc

SEQ ID NO: 1262699 - RNA, 20 nt, Human
ccuaccgagucucuucucca

SEQ ID NO: 1262700 - RNA, 21 nt, Human
ccuaccgagucucuucuccac

SEQ ID NO: 1262701 - RNA, 16 nt, Human
ccuaccgagucucuuc

SEQ ID NO: 1262702 - RNA, 17 nt, Human
ccuaccgagucucuucu

SEQ ID NO: 1262703 - RNA, 18 nt, Human
ccuacagggggucuggcu

SEQ ID NO: 1262704 - RNA, 19 nt, Human
ccuacagggggucuggcug

SEQ ID NO: 1262705 - RNA, 21 nt, Human
ccuacagggggucuggcuggu

SEQ ID NO: 1262706 - RNA, 13 nt, Human
ccuacccucuaga

SEQ ID NO: 1262707 - RNA, 14 nt, Human
ccuacccuggacuu

SEQ ID NO: 1262708 - RNA, 16 nt, Human
ccuaggcuaggguggg

SEQ ID NO: 1262709 - RNA, 17 nt, Human
ccuagguguuuuguuca

SEQ ID NO: 1262710 - RNA, 15 nt, Human
ccuaggccugggcag

SEQ ID NO: 1262711 - RNA, 13 nt, Human
ccuaggccugggc

SEQ ID NO: 1262712 - RNA, 23 nt, Human
ccuaggccugggcaguggauggc

SEQ ID NO: 1262713 - RNA, 13 nt, Human
ccuacugcccagg

SEQ ID NO: 1262714 - RNA, 14 nt, Human
ccguggcuucccgc

SEQ ID NO: 1262715 - RNA, 16 nt, Human
ccggggggucucuucu

SEQ ID NO: 1262716 - RNA, 21 nt, Human
ccgggggcagucugagagagg

SEQ ID NO: 1262717 - RNA, 20 nt, Human
ccggggccugggcaggaggg

SEQ ID NO: 1262718 - RNA, 22 nt, Human
ccggggugagggggggcucccu

SEQ ID NO: 1262719 - RNA, 20 nt, Human
ccggggugcccacaggccgc

SEQ ID NO: 1262720 - RNA, 18 nt, Human
ccggggugggguggcugc

SEQ ID NO: 1262721 - RNA, 20 nt, Human
ccggggugggguggcugcag

SEQ ID NO: 1262722 - RNA, 18 nt, Human
ccgggccacuccuuccug

SEQ ID NO: 1262723 - RNA, 17 nt, Human
ccggaggggccuggcag

SEQ ID NO: 1262724 - RNA, 18 nt, Human
ccggcucccuucuacagc

SEQ ID NO: 1262725 - RNA, 14 nt, Human
ccggcuccugguca

SEQ ID NO: 1262726 - RNA, 17 nt, Human
ccggcuccuggucaccu

SEQ ID NO: 1262727 - RNA, 17 nt, Human
ccggcucucaccuggcc

SEQ ID NO: 1262728 - RNA, 15 nt, Human
ccggcuccuggucac

SEQ ID NO: 1262729 - RNA, 13 nt, Human
ccgggccacuccu

SEQ ID NO: 1262730 - RNA, 20 nt, Human
ccgccucgaccucucucaaa

SEQ ID NO: 1262731 - RNA, 14 nt, Human
ccgccugcccucau

SEQ ID NO: 1262732 - RNA, 16 nt, Human
ccgccugcccucaugg

SEQ ID NO: 1262733 - RNA, 22 nt, Human
ccgccuggaugcggauggccgg

SEQ ID NO: 1262734 - RNA, 17 nt, Human
ccgccugggucuccuaa

SEQ ID NO: 1262735 - RNA, 14 nt, Human
ccgccuggccuggc

SEQ ID NO: 1262736 - RNA, 14 nt, Human
ccggaggggccugg

SEQ ID NO: 1262737 - RNA, 20 nt, Human
ccggaggcggugggccuggu

SEQ ID NO: 1262738 - RNA, 15 nt, Human
ccggaggggccuggc

SEQ ID NO: 1262739 - RNA, 16 nt, Human
ccggaggggccuggca

SEQ ID NO: 1262740 - RNA, 18 nt, Human
ccgcucuacaucuucugc

SEQ ID NO: 1262741 - RNA, 19 nt, Human
ccgcucuacaucuucugcc

SEQ ID NO: 1262742 - RNA, 20 nt, Human
ccgacugaaaauauuguuuu

SEQ ID NO: 1262743 - RNA, 14 nt, Human
ccgacugcuuugga

SEQ ID NO: 1262744 - RNA, 20 nt, Human
ccgacucacaccacuagccu

SEQ ID NO: 1262745 - RNA, 14 nt, Human
ccgacucacaccac

SEQ ID NO: 1262746 - RNA, 23 nt, Human
ccgacucacaccacuagccucag

SEQ ID NO: 1262747 - RNA, 19 nt, Human
ccgagaucaguauuuaacu

SEQ ID NO: 1262748 - RNA, 21 nt, Human
ccgagaguccaucagccucca

SEQ ID NO: 1262749 - RNA, 20 nt, Human
ccgagaguccaucagccucc

SEQ ID NO: 1262750 - RNA, 16 nt, Human
ccgacugcuuuggacc

SEQ ID NO: 1262751 - RNA, 17 nt, Human
ccgacugcuuuggaccu

SEQ ID NO: 1262752 - RNA, 15 nt, Human
ccgagaggugggcca

SEQ ID NO: 1262753 - RNA, 19 nt, Human
ccgagaggugggccagucu

SEQ ID NO: 1262754 - RNA, 21 nt, Human
ccgagaggugggccagucugu

SEQ ID NO: 1262755 - RNA, 18 nt, Human
ccgccucagccucccaaa

SEQ ID NO: 1262756 - RNA, 18 nt, Human
ccgcagaaggaaggcagg

SEQ ID NO: 1262757 - RNA, 14 nt, Human
ccgcagacaccuug

SEQ ID NO: 1262758 - RNA, 15 nt, Human
ccgcagaaggaaggc

SEQ ID NO: 1262759 - RNA, 13 nt, Human
ccgcagaaggaag

SEQ ID NO: 1262760 - RNA, 15 nt, Human
ccgcagacaccuugg

SEQ ID NO: 1262761 - RNA, 16 nt, Human
ccgcagacaccuugga

SEQ ID NO: 1262762 - RNA, 19 nt, Human
ccgagucucuucuccacug

SEQ ID NO: 1262763 - RNA, 20 nt, Human
ccgagucucuucuccacugg

SEQ ID NO: 1262764 - RNA, 21 nt, Human
ccgagucucuucuccacugga

SEQ ID NO: 1262765 - RNA, 20 nt, Human
ccgaguagcugagauuauag

SEQ ID NO: 1262766 - RNA, 14 nt, Human
ccgagucucuucuc

SEQ ID NO: 1262767 - RNA, 16 nt, Human
ccgagucucuucucca

SEQ ID NO: 1262768 - RNA, 18 nt, Human
ccgagucucuucuccacu

SEQ ID NO: 1262769 - RNA, 13 nt, Human
ccgaggacccagg

SEQ ID NO: 1262770 - RNA, 17 nt, Human
ccgaggacccaggaaag

SEQ ID NO: 1262771 - RNA, 20 nt, Human
ccgcucuacaucuucugccu

SEQ ID NO: 1262772 - RNA, 14 nt, Human
cccugccucucugc

SEQ ID NO: 1262773 - RNA, 13 nt, Human
cccugccucucug

SEQ ID NO: 1262774 - RNA, 17 nt, Human
cccugccuccugccggc

SEQ ID NO: 1262775 - RNA, 14 nt, Human
cccugccucuccca

SEQ ID NO: 1262776 - RNA, 15 nt, Human
cccugccucucccag

SEQ ID NO: 1262777 - RNA, 19 nt, Human
cccugccucucccaggcag

SEQ ID NO: 1262778 - RNA, 23 nt, Human
cccugcccuuguuuggggcagga

SEQ ID NO: 1262779 - RNA, 18 nt, Human
cccugaggagucugaggu

SEQ ID NO: 1262780 - RNA, 19 nt, Human
cccugaggagucugagguc

SEQ ID NO: 1262781 - RNA, 22 nt, Human
cccugaggagucugagguccug

SEQ ID NO: 1262782 - RNA, 13 nt, Human
cccugaggagucu

SEQ ID NO: 1262783 - RNA, 14 nt, Human
cccugaggagucug

SEQ ID NO: 1262784 - RNA, 15 nt, Human
cccugaggagucuga

SEQ ID NO: 1262785 - RNA, 16 nt, Human
cccugaggagucugag

SEQ ID NO: 1262786 - RNA, 21 nt, Human
cccugaggagucugagguccu

SEQ ID NO: 1262787 - RNA, 19 nt, Human
cccugcagcuuguagccag

SEQ ID NO: 1262788 - RNA, 20 nt, Human
cccugcagcuuguagccagc

SEQ ID NO: 1262789 - RNA, 21 nt, Human
cccugcagcuuguagccagcc

SEQ ID NO: 1262790 - RNA, 22 nt, Human
cccugcagcuuguagccagccg

SEQ ID NO: 1262791 - RNA, 15 nt, Human
cccugcaggaaggag

SEQ ID NO: 1262792 - RNA, 17 nt, Human
cccugcaggaaggagcu

SEQ ID NO: 1262793 - RNA, 18 nt, Human
cccugcaggaaggagcug

SEQ ID NO: 1262794 - RNA, 19 nt, Human
cccugcaggaaggagcugc

SEQ ID NO: 1262795 - RNA, 20 nt, Human
cccugcaggaaggagcugcc

SEQ ID NO: 1262796 - RNA, 21 nt, Human
cccugcaggaaggagcugccu

SEQ ID NO: 1262797 - RNA, 22 nt, Human
cccugcaggaaggagcugccug

SEQ ID NO: 1262798 - RNA, 23 nt, Human
cccugcaggaaggagcugccugg

SEQ ID NO: 1262799 - RNA, 18 nt, Human
cccugcaggcugagugca

SEQ ID NO: 1262800 - RNA, 16 nt, Human
cccugccucucugcag

SEQ ID NO: 1262801 - RNA, 20 nt, Human
cccugccucucccaggcagg

SEQ ID NO: 1262802 - RNA, 15 nt, Human
cccugccucucugca

SEQ ID NO: 1262803 - RNA, 22 nt, Human
cccugccuuaucuugcacccca

SEQ ID NO: 1262804 - RNA, 19 nt, Human
cccugcgggucacaggagg

SEQ ID NO: 1262805 - RNA, 21 nt, Human
cccugcgggucacaggaggga

SEQ ID NO: 1262806 - RNA, 22 nt, Human
cccugcgggugaacaaagcagc

SEQ ID NO: 1262807 - RNA, 17 nt, Human
cccugcgguagauggga

SEQ ID NO: 1262808 - RNA, 13 nt, Human
cccugcuacaccu

SEQ ID NO: 1262809 - RNA, 16 nt, Human
cccugcuacaccuauu

SEQ ID NO: 1262810 - RNA, 16 nt, Human
cccugcucaguaaagc

SEQ ID NO: 1262811 - RNA, 15 nt, Human
cccugcucauccacu

SEQ ID NO: 1262812 - RNA, 17 nt, Human
cccugcucccacagaac

SEQ ID NO: 1262813 - RNA, 13 nt, Human
cccugcugcugcc

SEQ ID NO: 1262814 - RNA, 23 nt, Human
cccugcugagucccaggcugagc

SEQ ID NO: 1262815 - RNA, 13 nt, Human
cccugcugccaug

SEQ ID NO: 1262816 - RNA, 13 nt, Human
cccugcugcccuc

SEQ ID NO: 1262817 - RNA, 21 nt, Human
cccugcugagucccaggcuga

SEQ ID NO: 1262818 - RNA, 16 nt, Human
cccuggugcugccaca

SEQ ID NO: 1262819 - RNA, 15 nt, Human
cccuugaugaagaag

SEQ ID NO: 1262820 - RNA, 13 nt, Human
cccuucccucacc

SEQ ID NO: 1262821 - RNA, 15 nt, Human
cccuugaggucucag

SEQ ID NO: 1262822 - RNA, 18 nt, Human
cccuugaggucucagccc

SEQ ID NO: 1262823 - RNA, 16 nt, Human
cccuugaguccccauu

SEQ ID NO: 1262824 - RNA, 21 nt, Human
cccuugaucagccccacccug

SEQ ID NO: 1262825 - RNA, 15 nt, Human
cccuugccccccugg

SEQ ID NO: 1262826 - RNA, 17 nt, Human
cccuugccccccuggcc

SEQ ID NO: 1262827 - RNA, 18 nt, Human
cccuugccccccuggccu

SEQ ID NO: 1262828 - RNA, 22 nt, Human
cccuugccccccuggccucccc

SEQ ID NO: 1262829 - RNA, 15 nt, Human
cccuugccugugcca

SEQ ID NO: 1262830 - RNA, 19 nt, Human
cccuugccugugccaggug

SEQ ID NO: 1262831 - RNA, 20 nt, Human
cccuugccugugccagguga

SEQ ID NO: 1262832 - RNA, 15 nt, Human
cccuugcugugaauu

SEQ ID NO: 1262833 - RNA, 20 nt, Human
cccuuagaaguuuguuguga

SEQ ID NO: 1262834 - RNA, 12 nt, Human
cccuuagacaga

SEQ ID NO: 1262835 - RNA, 15 nt, Human
cccuuagacagaggc

SEQ ID NO: 1262836 - RNA, 16 nt, Human
cccuuagacagaggcc

SEQ ID NO: 1262837 - RNA, 21 nt, Human
cccuuagacagaggcccucaa

SEQ ID NO: 1262838 - RNA, 22 nt, Human
cccuuagacagaggcccucaag

SEQ ID NO: 1262839 - RNA, 14 nt, Human
cccuuauccucccu

SEQ ID NO: 1262840 - RNA, 20 nt, Human
cccuuccaugucgccucugc

SEQ ID NO: 1262841 - RNA, 16 nt, Human
cccuuccacugagggc

SEQ ID NO: 1262842 - RNA, 13 nt, Human
cccuuccacugag

SEQ ID NO: 1262843 - RNA, 14 nt, Human
cccuucaaccauuc

SEQ ID NO: 1262844 - RNA, 19 nt, Human
cccuuauugcuguccugga

SEQ ID NO: 1262845 - RNA, 21 nt, Human
cccuuauccucccuguaacuu

SEQ ID NO: 1262846 - RNA, 16 nt, Human
cccuuauccucccugu

SEQ ID NO: 1262847 - RNA, 17 nt, Human
cccuuaugacugccaag

SEQ ID NO: 1262848 - RNA, 19 nt, Human
cccuuaugcgguuaauuuu

SEQ ID NO: 1262849 - RNA, 18 nt, Human
cccuucaaccauucccca

SEQ ID NO: 1262850 - RNA, 12 nt, Human
cccuuauuuuca

SEQ ID NO: 1262851 - RNA, 21 nt, Human
cccuggugcacuggccccacc

SEQ ID NO: 1262852 - RNA, 14 nt, Human
cccuguaggccuca

SEQ ID NO: 1262853 - RNA, 15 nt, Human
cccuggugcugccac

SEQ ID NO: 1262854 - RNA, 15 nt, Human
cccuguaggccucag

SEQ ID NO: 1262855 - RNA, 18 nt, Human
cccugucagcaugaauuu

SEQ ID NO: 1262856 - RNA, 15 nt, Human
cccugucagcaugaa

SEQ ID NO: 1262857 - RNA, 20 nt, Human
cccugucauccagcucacuc

SEQ ID NO: 1262858 - RNA, 14 nt, Human
cccuguuccccaga

SEQ ID NO: 1262859 - RNA, 16 nt, Human
cccuguuccccagaga

SEQ ID NO: 1262860 - RNA, 17 nt, Human
cccuguuccccagagaa

SEQ ID NO: 1262861 - RNA, 13 nt, Human
cccuguuccugcu

SEQ ID NO: 1262862 - RNA, 14 nt, Human
cccuguuccugcug

SEQ ID NO: 1262863 - RNA, 15 nt, Human
cccuguuccugcugc

SEQ ID NO: 1262864 - RNA, 16 nt, Human
cccuguuccugcugcu

SEQ ID NO: 1262865 - RNA, 20 nt, Human
cccuguuccugcugcugucu

SEQ ID NO: 1262866 - RNA, 17 nt, Human
cccuguuccugcugcug

SEQ ID NO: 1262867 - RNA, 22 nt, Human
cccuuaaacaguugcacagcau

SEQ ID NO: 1262868 - RNA, 21 nt, Human
cccuuaaacaguugcacagca

SEQ ID NO: 1262869 - RNA, 20 nt, Human
cccuuaaacaguugcacagc

SEQ ID NO: 1262870 - RNA, 22 nt, Human
cccuguuuucccacgaggaauc

SEQ ID NO: 1262871 - RNA, 16 nt, Human
cccuguuuucccccca

SEQ ID NO: 1262872 - RNA, 20 nt, Human
cccuguuuuccccccaaggg

SEQ ID NO: 1262873 - RNA, 14 nt, Human
cccuuaaaggggag

SEQ ID NO: 1262874 - RNA, 15 nt, Human
cccugcuuccugcuu

SEQ ID NO: 1262875 - RNA, 19 nt, Human
cccugcuuccugcuugcca

SEQ ID NO: 1262876 - RNA, 16 nt, Human
cccugcuuccugcuug

SEQ ID NO: 1262877 - RNA, 13 nt, Human
cccugggcuggaa

SEQ ID NO: 1262878 - RNA, 14 nt, Human
cccugggcuggaau

SEQ ID NO: 1262879 - RNA, 18 nt, Human
cccugcugcugccugccu

SEQ ID NO: 1262880 - RNA, 17 nt, Human
cccugcugcugccugcc

SEQ ID NO: 1262881 - RNA, 16 nt, Human
cccugcugcugccugc

SEQ ID NO: 1262882 - RNA, 13 nt, Human
cccuggugcugcc

SEQ ID NO: 1262883 - RNA, 14 nt, Human
cccuggugcugcca

SEQ ID NO: 1262884 - RNA, 13 nt, Human
cccuggggccugu

SEQ ID NO: 1262885 - RNA, 17 nt, Human
cccuggggccuguacug

SEQ ID NO: 1262886 - RNA, 18 nt, Human
cccuggggccuguacugc

SEQ ID NO: 1262887 - RNA, 12 nt, Human
cccuggggccug

SEQ ID NO: 1262888 - RNA, 20 nt, Human
cccuggggccuguacugccu

SEQ ID NO: 1262889 - RNA, 23 nt, Human
cccucguggacaccugcccugcc

SEQ ID NO: 1262890 - RNA, 22 nt, Human
cccucguggacaccugcccugc

SEQ ID NO: 1262891 - RNA, 19 nt, Human
cccucguggacaccugccc

SEQ ID NO: 1262892 - RNA, 18 nt, Human
cccucguggacaccugcc

SEQ ID NO: 1262893 - RNA, 17 nt, Human
cccucguggacaccugc

SEQ ID NO: 1262894 - RNA, 16 nt, Human
cccucguggacaccug

SEQ ID NO: 1262895 - RNA, 16 nt, Human
cccucccuacccuaac

SEQ ID NO: 1262896 - RNA, 15 nt, Human
cccucccuacccuaa

SEQ ID NO: 1262897 - RNA, 14 nt, Human
cccucccugccccu

SEQ ID NO: 1262898 - RNA, 12 nt, Human
cccgcucagccc

SEQ ID NO: 1262899 - RNA, 13 nt, Human
cccgcucagcccu

SEQ ID NO: 1262900 - RNA, 14 nt, Human
cccgcucagcccuc

SEQ ID NO: 1262901 - RNA, 17 nt, Human
cccucccagagcaccug

SEQ ID NO: 1262902 - RNA, 14 nt, Human
cccuccccuucucu

SEQ ID NO: 1262903 - RNA, 14 nt, Human
cccuccccuugccu

SEQ ID NO: 1262904 - RNA, 23 nt, Human
cccuccccuugccugugccaggu

SEQ ID NO: 1262905 - RNA, 21 nt, Human
cccuccccuugccugugccag

SEQ ID NO: 1262906 - RNA, 15 nt, Human
cccgcucagcccucc

SEQ ID NO: 1262907 - RNA, 13 nt, Human
cccucuuccuucc

SEQ ID NO: 1262908 - RNA, 15 nt, Human
cccucuuggagaagu

SEQ ID NO: 1262909 - RNA, 23 nt, Human
cccucuuggagaagucucagcua

SEQ ID NO: 1262910 - RNA, 17 nt, Human
cccucuuuggcuccccu

SEQ ID NO: 1262911 - RNA, 19 nt, Human
cccucuuuggcuccccugu

SEQ ID NO: 1262912 - RNA, 20 nt, Human
cccucuuuggcuccccugua

SEQ ID NO: 1262913 - RNA, 21 nt, Human
cccucuuuggcuccccuguac

SEQ ID NO: 1262914 - RNA, 20 nt, Human
cccucuguguauuugcuuuu

SEQ ID NO: 1262915 - RNA, 17 nt, Human
cccucugggcucugagu

SEQ ID NO: 1262916 - RNA, 20 nt, Human
cccucuguucugcacacagc

SEQ ID NO: 1262917 - RNA, 21 nt, Human
cccucuguucugcacacagca

SEQ ID NO: 1262918 - RNA, 18 nt, Human
cccucuguuccuucccug

SEQ ID NO: 1262919 - RNA, 22 nt, Human
cccucuuccuacuggucucucu

SEQ ID NO: 1262920 - RNA, 14 nt, Human
cccucuuccuacug

SEQ ID NO: 1262921 - RNA, 19 nt, Human
cccucuuccuacuggucuc

SEQ ID NO: 1262922 - RNA, 12 nt, Human
cccucuggcucc

SEQ ID NO: 1262923 - RNA, 16 nt, Human
cccucuggcuccagcu

SEQ ID NO: 1262924 - RNA, 17 nt, Human
cccucuggcuccagcug

SEQ ID NO: 1262925 - RNA, 22 nt, Human
cccucuggcuccagcuggccgg

SEQ ID NO: 1262926 - RNA, 10 nt, Human
cccucugggc

SEQ ID NO: 1262927 - RNA, 11 nt, Human
cccucugggcu

SEQ ID NO: 1262928 - RNA, 12 nt, Human
cccucugggcuc

SEQ ID NO: 1262929 - RNA, 16 nt, Human
cccucugggcucugag

SEQ ID NO: 1262930 - RNA, 20 nt, Human
cccucucccaaaaaacuacu

SEQ ID NO: 1262931 - RNA, 16 nt, Human
cccucucauuuagccu

SEQ ID NO: 1262932 - RNA, 11 nt, Human
cccucucccac

SEQ ID NO: 1262933 - RNA, 12 nt, Human
cccucucccacc

SEQ ID NO: 1262934 - RNA, 13 nt, Human
cccucucccaccc

SEQ ID NO: 1262935 - RNA, 17 nt, Human
cccucucccacccucuu

SEQ ID NO: 1262936 - RNA, 18 nt, Human
cccucucccacccucuuc

SEQ ID NO: 1262937 - RNA, 12 nt, Human
cccucucccagg

SEQ ID NO: 1262938 - RNA, 19 nt, Human
cccucucccacccucuucc

SEQ ID NO: 1262939 - RNA, 13 nt, Human
cccucucccaggc

SEQ ID NO: 1262940 - RNA, 20 nt, Human
cccucucccaggccccauga

SEQ ID NO: 1262941 - RNA, 15 nt, Human
cccucuacagagcuu

SEQ ID NO: 1262942 - RNA, 22 nt, Human
cccucuccccagggaagcagca

SEQ ID NO: 1262943 - RNA, 14 nt, Human
cccucucccaggcc

SEQ ID NO: 1262944 - RNA, 15 nt, Human
cccucuccccugccc

SEQ ID NO: 1262945 - RNA, 18 nt, Human
cccucuccccugcccccu

SEQ ID NO: 1262946 - RNA, 22 nt, Human
cccucuccccugcccccugcag

SEQ ID NO: 1262947 - RNA, 13 nt, Human
cccucucccugca

SEQ ID NO: 1262948 - RNA, 14 nt, Human
cccucucccugcau

SEQ ID NO: 1262949 - RNA, 15 nt, Human
cccucucccugcaug

SEQ ID NO: 1262950 - RNA, 16 nt, Human
cccucucccugcaugg

SEQ ID NO: 1262951 - RNA, 17 nt, Human
cccucucccugcauggc

SEQ ID NO: 1262952 - RNA, 22 nt, Human
cccucucccuugggcucugaug

SEQ ID NO: 1262953 - RNA, 17 nt, Human
cccucuccuuccugugu

SEQ ID NO: 1262954 - RNA, 12 nt, Human
cccucugcccug

SEQ ID NO: 1262955 - RNA, 13 nt, Human
cccucugcccugc

SEQ ID NO: 1262956 - RNA, 14 nt, Human
cccucugcccugcg

SEQ ID NO: 1262957 - RNA, 14 nt, Human
cccucuccuuccug

SEQ ID NO: 1262958 - RNA, 23 nt, Human
ccccuggugcacuggccccaccc

SEQ ID NO: 1262959 - RNA, 18 nt, Human
ccccuggucccucugcag

SEQ ID NO: 1262960 - RNA, 17 nt, Human
ccccuggucccucugca

SEQ ID NO: 1262961 - RNA, 17 nt, Human
ccccugguccccuccuu

SEQ ID NO: 1262962 - RNA, 21 nt, Human
ccccugguccccuccuuccca

SEQ ID NO: 1262963 - RNA, 22 nt, Human
ccccugucucucagggccaggc

SEQ ID NO: 1262964 - RNA, 23 nt, Human
ccccugucucucagggccaggcc

SEQ ID NO: 1262965 - RNA, 11 nt, Human
ccccugugcag

SEQ ID NO: 1262966 - RNA, 18 nt, Human
ccccuggcuuuucacugc

SEQ ID NO: 1262967 - RNA, 22 nt, Human
ccccuggcugggacguggcuca

SEQ ID NO: 1262968 - RNA, 23 nt, Human
ccccuggcugggacguggcucag

SEQ ID NO: 1262969 - RNA, 20 nt, Human
ccccuggcuuuucacugcug

SEQ ID NO: 1262970 - RNA, 22 nt, Human
ccccuggcuuuucacugcuggc

SEQ ID NO: 1262971 - RNA, 13 nt, Human
ccccugggguggc

SEQ ID NO: 1262972 - RNA, 19 nt, Human
ccccugggguggccaccag

SEQ ID NO: 1262973 - RNA, 20 nt, Human
ccccugggguggccaccagu

SEQ ID NO: 1262974 - RNA, 14 nt, Human
cccgacagccuggc

SEQ ID NO: 1262975 - RNA, 16 nt, Human
ccccuucauccucuga

SEQ ID NO: 1262976 - RNA, 14 nt, Human
ccccuuccacugag

SEQ ID NO: 1262977 - RNA, 15 nt, Human
ccccuguucacucua

SEQ ID NO: 1262978 - RNA, 14 nt, Human
ccccuguucaugcc

SEQ ID NO: 1262979 - RNA, 14 nt, Human
ccccugugccuugu

SEQ ID NO: 1262980 - RNA, 19 nt, Human
ccccugugcagccgcugag

SEQ ID NO: 1262981 - RNA, 20 nt, Human
ccccugugcagccgcugagc

SEQ ID NO: 1262982 - RNA, 23 nt, Human
cccgcagugggagcaaacugcau

SEQ ID NO: 1262983 - RNA, 17 nt, Human
cccgagcuccucuucca

SEQ ID NO: 1262984 - RNA, 14 nt, Human
cccgagcuccucuu

SEQ ID NO: 1262985 - RNA, 15 nt, Human
cccgcagacaccuug

SEQ ID NO: 1262986 - RNA, 16 nt, Human
cccgcagacaccuugg

SEQ ID NO: 1262987 - RNA, 15 nt, Human
cccgacagccuggca

SEQ ID NO: 1262988 - RNA, 18 nt, Human
cccgacagccuggcacag

SEQ ID NO: 1262989 - RNA, 17 nt, Human
cccgacuggggcagggu

SEQ ID NO: 1262990 - RNA, 21 nt, Human
cccgagaacauggccuaaggg

SEQ ID NO: 1262991 - RNA, 20 nt, Human
cccgagaaaacaaacccagg

SEQ ID NO: 1262992 - RNA, 12 nt, Human
cccgagcagcug

SEQ ID NO: 1262993 - RNA, 13 nt, Human
cccgagcagcuga

SEQ ID NO: 1262994 - RNA, 15 nt, Human
cccgagcagcugagc

SEQ ID NO: 1262995 - RNA, 16 nt, Human
cccgagcagcugagca

SEQ ID NO: 1262996 - RNA, 19 nt, Human
cccgagcagcugagcaggg

SEQ ID NO: 1262997 - RNA, 21 nt, Human
cccgagcagcugagcagggcc

SEQ ID NO: 1262998 - RNA, 22 nt, Human
cccgagcagcugagcagggccg

SEQ ID NO: 1262999 - RNA, 19 nt, Human
ccccugccucucugcaggu

SEQ ID NO: 1263000 - RNA, 17 nt, Human
ccccugccucucugcag

SEQ ID NO: 1263001 - RNA, 16 nt, Human
ccccugccucucugca

SEQ ID NO: 1263002 - RNA, 15 nt, Human
ccccugccucucugc

SEQ ID NO: 1263003 - RNA, 14 nt, Human
ccccugccucucug

SEQ ID NO: 1263004 - RNA, 13 nt, Human
ccccugccccucc

SEQ ID NO: 1263005 - RNA, 12 nt, Human
ccccucugcccu

SEQ ID NO: 1263006 - RNA, 15 nt, Human
ccccucugaccugca

SEQ ID NO: 1263007 - RNA, 18 nt, Human
ccccucugaccugcacug

SEQ ID NO: 1263008 - RNA, 13 nt, Human
ccccucugcccug

SEQ ID NO: 1263009 - RNA, 14 nt, Human
ccccucugcccugc

SEQ ID NO: 1263010 - RNA, 16 nt, Human
ccccugcccccugcag

SEQ ID NO: 1263011 - RNA, 17 nt, Human
ccccugcccccugcagg

SEQ ID NO: 1263012 - RNA, 18 nt, Human
ccccugcccccugcagga

SEQ ID NO: 1263013 - RNA, 19 nt, Human
ccccugccugcccugguga

SEQ ID NO: 1263014 - RNA, 15 nt, Human
ccccugccugcccug

SEQ ID NO: 1263015 - RNA, 22 nt, Human
ccccugcuuugggcuugggccu

SEQ ID NO: 1263016 - RNA, 14 nt, Human
ccccugcuuugggc

SEQ ID NO: 1263017 - RNA, 20 nt, Human
ccccuggaggcacugaagug

SEQ ID NO: 1263018 - RNA, 15 nt, Human
ccccuggagggggaa

SEQ ID NO: 1263019 - RNA, 12 nt, Human
ccccuggcagag

SEQ ID NO: 1263020 - RNA, 21 nt, Human
ccccuggcagagaugccuccc

SEQ ID NO: 1263021 - RNA, 19 nt, Human
ccccuggccucccccacuu

SEQ ID NO: 1263022 - RNA, 22 nt, Human
ccccuggcagagaugccucccu

SEQ ID NO: 1263023 - RNA, 15 nt, Human
ccccuagccugccuc

SEQ ID NO: 1263024 - RNA, 20 nt, Human
ccccuagcgcuaucucccug

SEQ ID NO: 1263025 - RNA, 18 nt, Human
ccccucaaaucguccagc

SEQ ID NO: 1263026 - RNA, 20 nt, Human
ccccucacaguauugcucac

SEQ ID NO: 1263027 - RNA, 13 nt, Human
ccccucaccccuc

SEQ ID NO: 1263028 - RNA, 22 nt, Human
cccccugugccuugucacgcca

SEQ ID NO: 1263029 - RNA, 21 nt, Human
cccccugugcagccgcugagc

SEQ ID NO: 1263030 - RNA, 23 nt, Human
cccccugucucucagggccaggc

SEQ ID NO: 1263031 - RNA, 21 nt, Human
cccccugccccccagccucug

SEQ ID NO: 1263032 - RNA, 15 nt, Human
cccccugguccccuc

SEQ ID NO: 1263033 - RNA, 17 nt, Human
cccccugguccccuccu

SEQ ID NO: 1263034 - RNA, 12 nt, Human
cccccuguacac

SEQ ID NO: 1263035 - RNA, 20 nt, Human
cccccuguacacaacucacu

SEQ ID NO: 1263036 - RNA, 18 nt, Human
cccccuguacacaacuca

SEQ ID NO: 1263037 - RNA, 12 nt, Human
cccccugugcag

SEQ ID NO: 1263038 - RNA, 21 nt, Human
cccccucuggcuccagcuggc

SEQ ID NO: 1263039 - RNA, 12 nt, Human
cccccucugucc

SEQ ID NO: 1263040 - RNA, 16 nt, Human
cccccucugucuugug

SEQ ID NO: 1263041 - RNA, 12 nt, Human
cccccucuggcu

SEQ ID NO: 1263042 - RNA, 19 nt, Human
cccccucuggcuccagcug

SEQ ID NO: 1263043 - RNA, 12 nt, Human
cccccucccucc

SEQ ID NO: 1263044 - RNA, 13 nt, Human
cccccucccugga

SEQ ID NO: 1263045 - RNA, 16 nt, Human
cccccucccuggauga

SEQ ID NO: 1263046 - RNA, 19 nt, Human
cccccuccgcccugccacu

SEQ ID NO: 1263047 - RNA, 14 nt, Human
cccccucccuggau

SEQ ID NO: 1263048 - RNA, 18 nt, Human
cccccugcaaagcccagc

SEQ ID NO: 1263049 - RNA, 19 nt, Human
cccccugcaaagcccagcu

SEQ ID NO: 1263050 - RNA, 21 nt, Human
cccccugcaaagcccagcuug

SEQ ID NO: 1263051 - RNA, 11 nt, Human
cccccugcagc

SEQ ID NO: 1263052 - RNA, 17 nt, Human
cccccugaccacucaga

SEQ ID NO: 1263053 - RNA, 14 nt, Human
cccccugcagcuug

SEQ ID NO: 1263054 - RNA, 23 nt, Human
cccccugcagcuuguagccagcc

SEQ ID NO: 1263055 - RNA, 12 nt, Human
cccccugcagga

SEQ ID NO: 1263056 - RNA, 14 nt, Human
cccccugcaggaag

SEQ ID NO: 1263057 - RNA, 16 nt, Human
cccccugccccccagc

SEQ ID NO: 1263058 - RNA, 16 nt, Human
cccccagagccacagu

SEQ ID NO: 1263059 - RNA, 16 nt, Human
cccccagagcccaggc

SEQ ID NO: 1263060 - RNA, 23 nt, Human
cccccagagcccaggcucggccu

SEQ ID NO: 1263061 - RNA, 12 nt, Human
cccccagauauc

SEQ ID NO: 1263062 - RNA, 20 nt, Human
cccccagcaaagcccccaga

SEQ ID NO: 1263063 - RNA, 11 nt, Human
cccccagcacu

SEQ ID NO: 1263064 - RNA, 15 nt, Human
cccccagccucuggc

SEQ ID NO: 1263065 - RNA, 11 nt, Human
cccccagccug

SEQ ID NO: 1263066 - RNA, 12 nt, Human
cccccagccugg

SEQ ID NO: 1263067 - RNA, 13 nt, Human
cccccagccuggg

SEQ ID NO: 1263068 - RNA, 14 nt, Human
cccccagccugggc

SEQ ID NO: 1263069 - RNA, 15 nt, Human
cccccagccugggcc

SEQ ID NO: 1263070 - RNA, 16 nt, Human
cccccagccugggccu

SEQ ID NO: 1263071 - RNA, 12 nt, Human
cccccagccugu

SEQ ID NO: 1263072 - RNA, 13 nt, Human
cccccagccuguc

SEQ ID NO: 1263073 - RNA, 13 nt, Human
cccccagcuaaga

SEQ ID NO: 1263074 - RNA, 18 nt, Human
cccccagcuaagaaccug

SEQ ID NO: 1263075 - RNA, 21 nt, Human
cccccagcuaagaaccuggaa

SEQ ID NO: 1263076 - RNA, 15 nt, Human
cccccagcucccacc

SEQ ID NO: 1263077 - RNA, 15 nt, Human
cccccagcuccggcc

SEQ ID NO: 1263078 - RNA, 13 nt, Human
cccccucccccac

SEQ ID NO: 1263079 - RNA, 17 nt, Human
ccccuccacucuuucuu

SEQ ID NO: 1263080 - RNA, 12 nt, Human
ccccuccacucu

SEQ ID NO: 1263081 - RNA, 21 nt, Human
ccccuccaaaaugugccuauu

SEQ ID NO: 1263082 - RNA, 16 nt, Human
ccccuccaaaaugugc

SEQ ID NO: 1263083 - RNA, 20 nt, Human
ccccucauagcccucacccu

SEQ ID NO: 1263084 - RNA, 23 nt, Human
ccccuccaaucccaccaacccuc

SEQ ID NO: 1263085 - RNA, 20 nt, Human
ccccucaucucucugcccaa

SEQ ID NO: 1263086 - RNA, 23 nt, Human
ccccucagccucuccccugccug

SEQ ID NO: 1263087 - RNA, 13 nt, Human
ccccucacccugc

SEQ ID NO: 1263088 - RNA, 16 nt, Human
ccccucacccugccuu

SEQ ID NO: 1263089 - RNA, 12 nt, Human
ccccucaccucc

SEQ ID NO: 1263090 - RNA, 13 nt, Human
ccccucaccuccu

SEQ ID NO: 1263091 - RNA, 14 nt, Human
ccccucaccuccuc

SEQ ID NO: 1263092 - RNA, 15 nt, Human
ccccucccuucaacc

SEQ ID NO: 1263093 - RNA, 16 nt, Human
ccccuccgcccugcca

SEQ ID NO: 1263094 - RNA, 14 nt, Human
ccccucccuggaug

SEQ ID NO: 1263095 - RNA, 18 nt, Human
ccccuccuccuggacucc

SEQ ID NO: 1263096 - RNA, 22 nt, Human
ccccuccuccuggacuccugca

SEQ ID NO: 1263097 - RNA, 17 nt, Human
ccccuccucuagcugug

SEQ ID NO: 1263098 - RNA, 19 nt, Human
ccccuccucuagcuguggg

SEQ ID NO: 1263099 - RNA, 17 nt, Human
ccccuccgcccugccac

SEQ ID NO: 1263100 - RNA, 18 nt, Human
ccccuccgcccugccacu

SEQ ID NO: 1263101 - RNA, 19 nt, Human
ccccuccgcccugccacuc

SEQ ID NO: 1263102 - RNA, 15 nt, Human
ccccuccucucugcc

SEQ ID NO: 1263103 - RNA, 17 nt, Human
ccccuccucucugcccu

SEQ ID NO: 1263104 - RNA, 21 nt, Human
ccccuccucuagcuguggggg

SEQ ID NO: 1263105 - RNA, 14 nt, Human
ccccuccuucccaa

SEQ ID NO: 1263106 - RNA, 12 nt, Human
ccccucucacca

SEQ ID NO: 1263107 - RNA, 13 nt, Human
ccccucucagccc

SEQ ID NO: 1263108 - RNA, 15 nt, Human
ccccucucagcccuc

SEQ ID NO: 1263109 - RNA, 14 nt, Human
ccccucucagcccu

SEQ ID NO: 1263110 - RNA, 17 nt, Human
ccccucucccaguuguc

SEQ ID NO: 1263111 - RNA, 14 nt, Human
ccccucucccugca

SEQ ID NO: 1263112 - RNA, 12 nt, Human
ccccucucccuu

SEQ ID NO: 1263113 - RNA, 18 nt, Human
ccccucucccugcauggc

SEQ ID NO: 1263114 - RNA, 15 nt, Human
ccccucucccuuggg

SEQ ID NO: 1263115 - RNA, 14 nt, Human
ccccucuccuuccu

SEQ ID NO: 1263116 - RNA, 19 nt, Human
ccccucuccuuccugugug

SEQ ID NO: 1263117 - RNA, 22 nt, Human
ccccucucccuugggcucugau

SEQ ID NO: 1263118 - RNA, 15 nt, Human
ccccucuccuucuua

SEQ ID NO: 1263119 - RNA, 17 nt, Human
cccccacugccuuugac

SEQ ID NO: 1263120 - RNA, 14 nt, Human
cccccacucccuca

SEQ ID NO: 1263121 - RNA, 20 nt, Human
cccccaccucugcugccucc

SEQ ID NO: 1263122 - RNA, 15 nt, Human
cccccaccuggcuca

SEQ ID NO: 1263123 - RNA, 20 nt, Human
cccccaccuggcucaccuug

SEQ ID NO: 1263124 - RNA, 15 nt, Human
cccccacccccagcu

SEQ ID NO: 1263125 - RNA, 17 nt, Human
cccccacccccagcuca

SEQ ID NO: 1263126 - RNA, 11 nt, Human
cccccacccug

SEQ ID NO: 1263127 - RNA, 14 nt, Human
cccccacccuguuc

SEQ ID NO: 1263128 - RNA, 18 nt, Human
cccccacccuguuccugc

SEQ ID NO: 1263129 - RNA, 22 nt, Human
cccccagaaaagaaagcuacag

SEQ ID NO: 1263130 - RNA, 22 nt, Human
cccccacuugccucuuccuuga

SEQ ID NO: 1263131 - RNA, 15 nt, Human
cccccagagccacag

SEQ ID NO: 1263132 - RNA, 17 nt, Human
ccccaucauugguaccc

SEQ ID NO: 1263133 - RNA, 16 nt, Human
ccccaucauccucugg

SEQ ID NO: 1263134 - RNA, 17 nt, Human
ccccaucauccucuggc

SEQ ID NO: 1263135 - RNA, 14 nt, Human
ccccaucccaugcu

SEQ ID NO: 1263136 - RNA, 14 nt, Human
cccccacccccagc

SEQ ID NO: 1263137 - RNA, 18 nt, Human
ccccaguaucucuucagu

SEQ ID NO: 1263138 - RNA, 14 nt, Human
ccccaguacacagg

SEQ ID NO: 1263139 - RNA, 12 nt, Human
ccccagggagag

SEQ ID NO: 1263140 - RNA, 12 nt, Human
ccccagggcaca

SEQ ID NO: 1263141 - RNA, 14 nt, Human
ccccagggcacagg

SEQ ID NO: 1263142 - RNA, 15 nt, Human
ccccagggcacagga

SEQ ID NO: 1263143 - RNA, 16 nt, Human
ccccagggcacaggag

SEQ ID NO: 1263144 - RNA, 17 nt, Human
ccccagggcacaggagc

SEQ ID NO: 1263145 - RNA, 18 nt, Human
ccccagggcacaggagcu

SEQ ID NO: 1263146 - RNA, 19 nt, Human
ccccagggcacaggagcua

SEQ ID NO: 1263147 - RNA, 23 nt, Human
ccccagggcacaggagcuaccug

SEQ ID NO: 1263148 - RNA, 22 nt, Human
ccccagggcacaggagcuaccu

SEQ ID NO: 1263149 - RNA, 13 nt, Human
ccccagacacugg

SEQ ID NO: 1263150 - RNA, 15 nt, Human
ccccagacuagaugu

SEQ ID NO: 1263151 - RNA, 18 nt, Human
ccccagacuagauguagu

SEQ ID NO: 1263152 - RNA, 21 nt, Human
ccccaggccugaaagaggcug

SEQ ID NO: 1263153 - RNA, 23 nt, Human
ccccaggccugaaagaggcugag

SEQ ID NO: 1263154 - RNA, 15 nt, Human
ccccaggcucgugga

SEQ ID NO: 1263155 - RNA, 18 nt, Human
ccccaggcucguggacug

SEQ ID NO: 1263156 - RNA, 13 nt, Human
ccccaggcugaag

SEQ ID NO: 1263157 - RNA, 16 nt, Human
ccccagggaagcagca

SEQ ID NO: 1263158 - RNA, 18 nt, Human
ccccagggaagcagcagc

SEQ ID NO: 1263159 - RNA, 20 nt, Human
ccccagggaagcagcagccu

SEQ ID NO: 1263160 - RNA, 22 nt, Human
ccccagggaagcagcagccucg

SEQ ID NO: 1263161 - RNA, 11 nt, Human
ccccagggcac

SEQ ID NO: 1263162 - RNA, 22 nt, Human
ccccauaauuuuuuuuuuccuu

SEQ ID NO: 1263163 - RNA, 15 nt, Human
ccccauacuccuaug

SEQ ID NO: 1263164 - RNA, 13 nt, Human
ccccaucagugcu

SEQ ID NO: 1263165 - RNA, 14 nt, Human
ccccaucagugcuc

SEQ ID NO: 1263166 - RNA, 20 nt, Human
ccccaucagugcucccucac

SEQ ID NO: 1263167 - RNA, 15 nt, Human
ccccagugacagcua

SEQ ID NO: 1263168 - RNA, 22 nt, Human
ccccaguuccuguggcucccuc

SEQ ID NO: 1263169 - RNA, 21 nt, Human
ccccaguuccuguggcucccu

SEQ ID NO: 1263170 - RNA, 20 nt, Human
cccagaaugagacauccagc

SEQ ID NO: 1263171 - RNA, 22 nt, Human
cccagagaaaggggagcccacu

SEQ ID NO: 1263172 - RNA, 18 nt, Human
cccagagacauacuugaa

SEQ ID NO: 1263173 - RNA, 21 nt, Human
cccagagacauacuugaaggg

SEQ ID NO: 1263174 - RNA, 22 nt, Human
cccagagacauacuugaagggc

SEQ ID NO: 1263175 - RNA, 23 nt, Human
cccagagacauacuugaagggcc

SEQ ID NO: 1263176 - RNA, 13 nt, Human
cccagagacccag

SEQ ID NO: 1263177 - RNA, 14 nt, Human
cccagagacccagc

SEQ ID NO: 1263178 - RNA, 15 nt, Human
cccagagacccagcg

SEQ ID NO: 1263179 - RNA, 16 nt, Human
cccaguuccuguggcu

SEQ ID NO: 1263180 - RNA, 18 nt, Human
cccaguuccuguggcucc

SEQ ID NO: 1263181 - RNA, 21 nt, Human
cccaguuccuguggcucccuc

SEQ ID NO: 1263182 - RNA, 19 nt, Human
cccaguugcacucagguga

SEQ ID NO: 1263183 - RNA, 15 nt, Human
cccaguugccaucug

SEQ ID NO: 1263184 - RNA, 17 nt, Human
cccaguugccaucugcg

SEQ ID NO: 1263185 - RNA, 20 nt, Human
cccaguugcacucaggugac

SEQ ID NO: 1263186 - RNA, 15 nt, Human
cccaguuggagcucc

SEQ ID NO: 1263187 - RNA, 16 nt, Human
cccaguuggagcucca

SEQ ID NO: 1263188 - RNA, 17 nt, Human
cccaguuggagcuccag

SEQ ID NO: 1263189 - RNA, 21 nt, Human
cccaguuggagcuccagccug

SEQ ID NO: 1263190 - RNA, 22 nt, Human
cccaguuggagcuccagccuga

SEQ ID NO: 1263191 - RNA, 13 nt, Human
cccaguuguauuu

SEQ ID NO: 1263192 - RNA, 21 nt, Human
cccaucucaugccccuggcug

SEQ ID NO: 1263193 - RNA, 22 nt, Human
cccaucucaugccccuggcugg

SEQ ID NO: 1263194 - RNA, 14 nt, Human
cccaucucuucugg

SEQ ID NO: 1263195 - RNA, 17 nt, Human
cccaucugucugccaac

SEQ ID NO: 1263196 - RNA, 18 nt, Human
cccaugaccccaaagcca

SEQ ID NO: 1263197 - RNA, 13 nt, Human
cccaugagcuccu

SEQ ID NO: 1263198 - RNA, 14 nt, Human
cccaugaccuccag

SEQ ID NO: 1263199 - RNA, 15 nt, Human
cccaugaccuccagc

SEQ ID NO: 1263200 - RNA, 16 nt, Human
cccaugaccuccagcu

SEQ ID NO: 1263201 - RNA, 14 nt, Human
cccaugagcuccuu

SEQ ID NO: 1263202 - RNA, 15 nt, Human
cccaugagcuccuua

SEQ ID NO: 1263203 - RNA, 22 nt, Human
cccaugagcuccuuaaggcucu

SEQ ID NO: 1263204 - RNA, 19 nt, Human
cccaugauuucauguacug

SEQ ID NO: 1263205 - RNA, 17 nt, Human
cccaugauuucauguac

SEQ ID NO: 1263206 - RNA, 16 nt, Human
cccaugauuucaugua

SEQ ID NO: 1263207 - RNA, 23 nt, Human
cccaugaguuggggucuggcagc

SEQ ID NO: 1263208 - RNA, 15 nt, Human
cccaugaucccugug

SEQ ID NO: 1263209 - RNA, 12 nt, Human
cccaugcacugu

SEQ ID NO: 1263210 - RNA, 14 nt, Human
cccaugcacuguga

SEQ ID NO: 1263211 - RNA, 16 nt, Human
cccaugcacugugaag

SEQ ID NO: 1263212 - RNA, 18 nt, Human
cccaugcacugugaagga

SEQ ID NO: 1263213 - RNA, 19 nt, Human
cccaugcacugugaaggac

SEQ ID NO: 1263214 - RNA, 20 nt, Human
cccaugcacugugaaggacc

SEQ ID NO: 1263215 - RNA, 22 nt, Human
cccaugcacugugaaggacccu

SEQ ID NO: 1263216 - RNA, 18 nt, Human
cccaugcuguccauccau

SEQ ID NO: 1263217 - RNA, 15 nt, Human
cccauggacaggcug

SEQ ID NO: 1263218 - RNA, 20 nt, Human
cccauggacaggcuggcucc

SEQ ID NO: 1263219 - RNA, 22 nt, Human
cccauggacaggcuggcuccag

SEQ ID NO: 1263220 - RNA, 12 nt, Human
ccccacccuggg

SEQ ID NO: 1263221 - RNA, 14 nt, Human
ccccacccugggcc

SEQ ID NO: 1263222 - RNA, 15 nt, Human
ccccacccugggccc

SEQ ID NO: 1263223 - RNA, 20 nt, Human
ccccacccugggcccugggc

SEQ ID NO: 1263224 - RNA, 14 nt, Human
ccccacccuggccu

SEQ ID NO: 1263225 - RNA, 23 nt, Human
ccccacccucguggacaccugcc

SEQ ID NO: 1263226 - RNA, 22 nt, Human
ccccacccucguggacaccugc

SEQ ID NO: 1263227 - RNA, 21 nt, Human
ccccacccucguggacaccug

SEQ ID NO: 1263228 - RNA, 21 nt, Human
ccccacccucggggauguguc

SEQ ID NO: 1263229 - RNA, 23 nt, Human
ccccacccucggggauguguccu

SEQ ID NO: 1263230 - RNA, 12 nt, Human
ccccacccucau

SEQ ID NO: 1263231 - RNA, 14 nt, Human
ccccacccccaagg

SEQ ID NO: 1263232 - RNA, 15 nt, Human
ccccacccucgggga

SEQ ID NO: 1263233 - RNA, 17 nt, Human
ccccaccccaaaauuag

SEQ ID NO: 1263234 - RNA, 14 nt, Human
ccccacccacuucu

SEQ ID NO: 1263235 - RNA, 18 nt, Human
ccccacccaggccaggca

SEQ ID NO: 1263236 - RNA, 16 nt, Human
ccccacccacuucugc

SEQ ID NO: 1263237 - RNA, 21 nt, Human
ccccacccaccaacccucagg

SEQ ID NO: 1263238 - RNA, 22 nt, Human
ccccacccaccaacccucaggg

SEQ ID NO: 1263239 - RNA, 13 nt, Human
ccccacccacuuc

SEQ ID NO: 1263240 - RNA, 14 nt, Human
ccccaccccagggc

SEQ ID NO: 1263241 - RNA, 15 nt, Human
ccccaccccagggca

SEQ ID NO: 1263242 - RNA, 16 nt, Human
ccccaccccagggcag

SEQ ID NO: 1263243 - RNA, 20 nt, Human
ccccaccccagggcagccag

SEQ ID NO: 1263244 - RNA, 13 nt, Human
ccccacccccagc

SEQ ID NO: 1263245 - RNA, 16 nt, Human
ccccacccccagcuca

SEQ ID NO: 1263246 - RNA, 17 nt, Human
ccccacccccagcucaa

SEQ ID NO: 1263247 - RNA, 20 nt, Human
ccccacccccagcucaaugg

SEQ ID NO: 1263248 - RNA, 21 nt, Human
cccauucauuccauucuggaa

SEQ ID NO: 1263249 - RNA, 12 nt, Human
cccauucccgca

SEQ ID NO: 1263250 - RNA, 15 nt, Human
cccauucccgcagug

SEQ ID NO: 1263251 - RNA, 16 nt, Human
cccauucccgcagugg

SEQ ID NO: 1263252 - RNA, 18 nt, Human
cccauucccgcaguggga

SEQ ID NO: 1263253 - RNA, 12 nt, Human
cccauuccugaa

SEQ ID NO: 1263254 - RNA, 13 nt, Human
cccauuccugaag

SEQ ID NO: 1263255 - RNA, 18 nt, Human
cccauuccugaagaacca

SEQ ID NO: 1263256 - RNA, 22 nt, Human
cccauucauuccauucuggaag

SEQ ID NO: 1263257 - RNA, 18 nt, Human
cccauucauuccauucug

SEQ ID NO: 1263258 - RNA, 15 nt, Human
cccauucaagauucc

SEQ ID NO: 1263259 - RNA, 18 nt, Human
ccccacaagugcccucca

SEQ ID NO: 1263260 - RNA, 20 nt, Human
ccccacaccagggccagccu

SEQ ID NO: 1263261 - RNA, 13 nt, Human
ccccaagguucuc

SEQ ID NO: 1263262 - RNA, 14 nt, Human
ccccaauccuccca

SEQ ID NO: 1263263 - RNA, 20 nt, Human
ccccacccuggugggccaac

SEQ ID NO: 1263264 - RNA, 14 nt, Human
ccccacccuguucc

SEQ ID NO: 1263265 - RNA, 17 nt, Human
ccccacccuguuccugc

SEQ ID NO: 1263266 - RNA, 18 nt, Human
ccccacccuguuccugcu

SEQ ID NO: 1263267 - RNA, 19 nt, Human
ccccacccuguuccugcug

SEQ ID NO: 1263268 - RNA, 20 nt, Human
ccccacccuguuccugcugc

SEQ ID NO: 1263269 - RNA, 21 nt, Human
ccccacccuguuccugcugcu

SEQ ID NO: 1263270 - RNA, 22 nt, Human
ccccaccguugucucaugccag

SEQ ID NO: 1263271 - RNA, 14 nt, Human
ccccaccuggcuca

SEQ ID NO: 1263272 - RNA, 13 nt, Human
ccccacgagggcu

SEQ ID NO: 1263273 - RNA, 14 nt, Human
ccccacgagggcug

SEQ ID NO: 1263274 - RNA, 15 nt, Human
ccccacgagggcugg

SEQ ID NO: 1263275 - RNA, 16 nt, Human
ccccacgagggcuggc

SEQ ID NO: 1263276 - RNA, 17 nt, Human
ccccacgagggcuggcu

SEQ ID NO: 1263277 - RNA, 18 nt, Human
ccccacgagggcuggcug

SEQ ID NO: 1263278 - RNA, 21 nt, Human
ccccacgagggcuggcuggcc

SEQ ID NO: 1263279 - RNA, 13 nt, Human
ccccacgccacag

SEQ ID NO: 1263280 - RNA, 14 nt, Human
ccccacgccacagc

SEQ ID NO: 1263281 - RNA, 16 nt, Human
ccccacgccacagccc

SEQ ID NO: 1263282 - RNA, 14 nt, Human
ccccacuguaucua

SEQ ID NO: 1263283 - RNA, 13 nt, Human
ccccacuugccuc

SEQ ID NO: 1263284 - RNA, 14 nt, Human
ccccacuugccucu

SEQ ID NO: 1263285 - RNA, 15 nt, Human
ccccacuugccucuu

SEQ ID NO: 1263286 - RNA, 16 nt, Human
ccccacuugccucuuc

SEQ ID NO: 1263287 - RNA, 21 nt, Human
ccccacuugccucuuccuuga

SEQ ID NO: 1263288 - RNA, 15 nt, Human
ccccacuuucuuucu

SEQ ID NO: 1263289 - RNA, 19 nt, Human
ccccacuuguccuuagccu

SEQ ID NO: 1263290 - RNA, 15 nt, Human
ccccacgccacagcc

SEQ ID NO: 1263291 - RNA, 14 nt, Human
ccccacucccacau

SEQ ID NO: 1263292 - RNA, 15 nt, Human
ccccacucccucaca

SEQ ID NO: 1263293 - RNA, 13 nt, Human
ccccacucccuca

SEQ ID NO: 1263294 - RNA, 14 nt, Human
ccccacucccucac

SEQ ID NO: 1263295 - RNA, 12 nt, Human
ccccacuccucu

SEQ ID NO: 1263296 - RNA, 21 nt, Human
ccccacuccucugcugaccug

SEQ ID NO: 1263297 - RNA, 16 nt, Human
ccccacuccucugcug

SEQ ID NO: 1263298 - RNA, 18 nt, Human
cccagaaugagacaucca

SEQ ID NO: 1263299 - RNA, 12 nt, Human
cccagaaugaga

SEQ ID NO: 1263300 - RNA, 22 nt, Human
cccagaauaaguuauugcaguu

SEQ ID NO: 1263301 - RNA, 19 nt, Human
cccagaauaaguuauugca

SEQ ID NO: 1263302 - RNA, 20 nt, Human
cccacggagucguggggugu

SEQ ID NO: 1263303 - RNA, 15 nt, Human
cccacggcuccucga

SEQ ID NO: 1263304 - RNA, 15 nt, Human
cccacggccuuucua

SEQ ID NO: 1263305 - RNA, 15 nt, Human
cccacgucagcuggg

SEQ ID NO: 1263306 - RNA, 14 nt, Human
cccacgccuuaucc

SEQ ID NO: 1263307 - RNA, 16 nt, Human
cccacgcucacccccu

SEQ ID NO: 1263308 - RNA, 15 nt, Human
cccacgcucaccccc

SEQ ID NO: 1263309 - RNA, 19 nt, Human
cccaccgugggcagggagc

SEQ ID NO: 1263310 - RNA, 17 nt, Human
cccaccguugucucaug

SEQ ID NO: 1263311 - RNA, 20 nt, Human
cccaccguugucucaugcca

SEQ ID NO: 1263312 - RNA, 15 nt, Human
cccacaucccugggc

SEQ ID NO: 1263313 - RNA, 16 nt, Human
cccacaucccugggcc

SEQ ID NO: 1263314 - RNA, 17 nt, Human
cccacaucccugggccu

SEQ ID NO: 1263315 - RNA, 18 nt, Human
cccacaucccugggccug

SEQ ID NO: 1263316 - RNA, 19 nt, Human
cccacaucccugggccugc

SEQ ID NO: 1263317 - RNA, 20 nt, Human
cccacaucccugggccugcu

SEQ ID NO: 1263318 - RNA, 21 nt, Human
cccacaucccugggccugcug

SEQ ID NO: 1263319 - RNA, 22 nt, Human
cccacaucccugggccugcugc

SEQ ID NO: 1263320 - RNA, 24 nt, Human
cccacaucccugggccugcugcug

SEQ ID NO: 1263321 - RNA, 23 nt, Human
cccacaucccugggccugcugcu

SEQ ID NO: 1263322 - RNA, 15 nt, Human
cccaccgugggcagg

SEQ ID NO: 1263323 - RNA, 17 nt, Human
cccaccgugggcaggga

SEQ ID NO: 1263324 - RNA, 18 nt, Human
cccaccucagccucccaa

SEQ ID NO: 1263325 - RNA, 16 nt, Human
cccacaggcccuuccu

SEQ ID NO: 1263326 - RNA, 18 nt, Human
cccacaggcccuuccucu

SEQ ID NO: 1263327 - RNA, 19 nt, Human
cccacauagugaugguucc

SEQ ID NO: 1263328 - RNA, 21 nt, Human
cccacagugucaggcacuggg

SEQ ID NO: 1263329 - RNA, 19 nt, Human
cccacagugucaggcacug

SEQ ID NO: 1263330 - RNA, 17 nt, Human
cccacaucccaucgucu

SEQ ID NO: 1263331 - RNA, 13 nt, Human
cccacaucccugg

SEQ ID NO: 1263332 - RNA, 14 nt, Human
cccacaucccuggg

SEQ ID NO: 1263333 - RNA, 13 nt, Human
cccaacccgugga

SEQ ID NO: 1263334 - RNA, 17 nt, Human
cccaacccguggaggcu

SEQ ID NO: 1263335 - RNA, 18 nt, Human
cccaaggggccugagcag

SEQ ID NO: 1263336 - RNA, 17 nt, Human
cccaagguaccauccua

SEQ ID NO: 1263337 - RNA, 22 nt, Human
cccaagguuacuuaauucaacu

SEQ ID NO: 1263338 - RNA, 23 nt, Human
cccaaguagcugggauuacaggu

SEQ ID NO: 1263339 - RNA, 13 nt, Human
cccaagugagucu

SEQ ID NO: 1263340 - RNA, 20 nt, Human
cccaagugagucucucuggg

SEQ ID NO: 1263341 - RNA, 22 nt, Human
cccacacucagauccuccucau

SEQ ID NO: 1263342 - RNA, 23 nt, Human
cccaacagcuggacccugaccag

SEQ ID NO: 1263343 - RNA, 15 nt, Human
cccaacagcuggacc

SEQ ID NO: 1263344 - RNA, 18 nt, Human
cccaaccauuuccucaga

SEQ ID NO: 1263345 - RNA, 17 nt, Human
cccaaccauuuccucag

SEQ ID NO: 1263346 - RNA, 14 nt, Human
ccauuuucugguuc

SEQ ID NO: 1263347 - RNA, 18 nt, Human
ccauuuuguuauugacua

SEQ ID NO: 1263348 - RNA, 14 nt, Human
cccaacacugccag

SEQ ID NO: 1263349 - RNA, 15 nt, Human
cccaacacugccagc

SEQ ID NO: 1263350 - RNA, 16 nt, Human
cccaacacugccagca

SEQ ID NO: 1263351 - RNA, 23 nt, Human
ccauuuuguuauugacuaacagg

SEQ ID NO: 1263352 - RNA, 22 nt, Human
ccauuuuguuauugacuaacag

SEQ ID NO: 1263353 - RNA, 11 nt, Human
ccauuuuuccu

SEQ ID NO: 1263354 - RNA, 12 nt, Human
ccauuuuuccuu

SEQ ID NO: 1263355 - RNA, 20 nt, Human
ccauguuaaccccuccacuc

SEQ ID NO: 1263356 - RNA, 16 nt, Human
ccauguguuauguuuu

SEQ ID NO: 1263357 - RNA, 18 nt, Human
ccauguuagccaggcugg

SEQ ID NO: 1263358 - RNA, 15 nt, Human
ccauguucugucccu

SEQ ID NO: 1263359 - RNA, 22 nt, Human
ccauguucugucccuugccccc

SEQ ID NO: 1263360 - RNA, 20 nt, Human
ccauuaaguaaacaauaaaa

SEQ ID NO: 1263361 - RNA, 18 nt, Human
ccauuaaagaauaugaaa

SEQ ID NO: 1263362 - RNA, 22 nt, Human
ccauuaaccagaucuagucaau

SEQ ID NO: 1263363 - RNA, 17 nt, Human
ccauuaaucaguucauu

SEQ ID NO: 1263364 - RNA, 16 nt, Human
ccauuaccauguaaug

SEQ ID NO: 1263365 - RNA, 12 nt, Human
ccauuaaaccau

SEQ ID NO: 1263366 - RNA, 18 nt, Human
ccauuaaaccaucucccu

SEQ ID NO: 1263367 - RNA, 19 nt, Human
ccauuaaaccaucucccug

SEQ ID NO: 1263368 - RNA, 10 nt, Human
ccauuaaacg

SEQ ID NO: 1263369 - RNA, 23 nt, Human
ccauuaaacgauuuuuaaaaugu

SEQ ID NO: 1263370 - RNA, 12 nt, Human
ccauuaaagaau

SEQ ID NO: 1263371 - RNA, 14 nt, Human
ccauuaaagaauau

SEQ ID NO: 1263372 - RNA, 16 nt, Human
ccauuaaagaauauga

SEQ ID NO: 1263373 - RNA, 20 nt, Human
ccauuaaagaauaugaaaca

SEQ ID NO: 1263374 - RNA, 18 nt, Human
ccaucucugauuuucaaa

SEQ ID NO: 1263375 - RNA, 23 nt, Human
ccaucucugauuuucaaagcuuu

SEQ ID NO: 1263376 - RNA, 15 nt, Human
ccaucugucugccaa

SEQ ID NO: 1263377 - RNA, 19 nt, Human
ccaucuugcccgcucaggc

SEQ ID NO: 1263378 - RNA, 21 nt, Human
ccaucuugcccgcucaggcug

SEQ ID NO: 1263379 - RNA, 20 nt, Human
ccaucuugcuucccuaaucu

SEQ ID NO: 1263380 - RNA, 21 nt, Human
ccaucuugcuucccuaaucua

SEQ ID NO: 1263381 - RNA, 14 nt, Human
ccauguguccuggu

SEQ ID NO: 1263382 - RNA, 17 nt, Human
ccauguguccugguucc

SEQ ID NO: 1263383 - RNA, 15 nt, Human
ccauuugcauuuguu

SEQ ID NO: 1263384 - RNA, 16 nt, Human
ccauuuguucauauua

SEQ ID NO: 1263385 - RNA, 20 nt, Human
ccauuuguucauauuaagaa

SEQ ID NO: 1263386 - RNA, 15 nt, Human
ccauuuguucauauu

SEQ ID NO: 1263387 - RNA, 16 nt, Human
ccauuugcuuuuucac

SEQ ID NO: 1263388 - RNA, 22 nt, Human
ccauuuuaaaguuaguaucuuu

SEQ ID NO: 1263389 - RNA, 20 nt, Human
ccauucugacucgguuucuc

SEQ ID NO: 1263390 - RNA, 22 nt, Human
ccauuugaauuuuuuagugacu

SEQ ID NO: 1263391 - RNA, 19 nt, Human
ccauuucugaggugcacug

SEQ ID NO: 1263392 - RNA, 12 nt, Human
ccauuugcauuu

SEQ ID NO: 1263393 - RNA, 22 nt, Human
ccauuugcauuuguuuauguaa

SEQ ID NO: 1263394 - RNA, 13 nt, Human
ccauucuccugag

SEQ ID NO: 1263395 - RNA, 12 nt, Human
ccauucugacuc

SEQ ID NO: 1263396 - RNA, 13 nt, Human
ccauucugacucg

SEQ ID NO: 1263397 - RNA, 21 nt, Human
ccauucucacaggucccaaau

SEQ ID NO: 1263398 - RNA, 13 nt, Human
ccauucuccacag

SEQ ID NO: 1263399 - RNA, 15 nt, Human
ccauucuccacagca

SEQ ID NO: 1263400 - RNA, 16 nt, Human
ccauucuccacagcaa

SEQ ID NO: 1263401 - RNA, 18 nt, Human
ccauucuccacagcaacc

SEQ ID NO: 1263402 - RNA, 20 nt, Human
ccauuauaaugaauuuagug

SEQ ID NO: 1263403 - RNA, 20 nt, Human
ccauuauaaccuuaauuuau

SEQ ID NO: 1263404 - RNA, 13 nt, Human
ccauuccuuccca

SEQ ID NO: 1263405 - RNA, 16 nt, Human
ccauuccuucccagag

SEQ ID NO: 1263406 - RNA, 15 nt, Human
ccauucgugaaaaca

SEQ ID NO: 1263407 - RNA, 24 nt, Human
ccaggcugggucgcccuggacugu

SEQ ID NO: 1263408 - RNA, 23 nt, Human
ccaggcugggucgcccuggacug

SEQ ID NO: 1263409 - RNA, 22 nt, Human
ccaggcugggucgcccuggacu

SEQ ID NO: 1263410 - RNA, 21 nt, Human
ccaggcugggucgcccuggac

SEQ ID NO: 1263411 - RNA, 16 nt, Human
ccaggcugggucgccc

SEQ ID NO: 1263412 - RNA, 12 nt, Human
ccaggcuggguc

SEQ ID NO: 1263413 - RNA, 23 nt, Human
ccaggcuucugcuggggccuggg

SEQ ID NO: 1263414 - RNA, 21 nt, Human
ccaggccaccuccccagcauu

SEQ ID NO: 1263415 - RNA, 11 nt, Human
ccagcuccuga

SEQ ID NO: 1263416 - RNA, 12 nt, Human
ccagcuccugac

SEQ ID NO: 1263417 - RNA, 20 nt, Human
ccagcuccugacacugcugg

SEQ ID NO: 1263418 - RNA, 23 nt, Human
ccagcuccugacacugcuggaga

SEQ ID NO: 1263419 - RNA, 14 nt, Human
ccagcuccuuuggg

SEQ ID NO: 1263420 - RNA, 13 nt, Human
ccagcuccuuugg

SEQ ID NO: 1263421 - RNA, 21 nt, Human
ccaggagggacaaaggagccu

SEQ ID NO: 1263422 - RNA, 16 nt, Human
ccaggccaccucccca

SEQ ID NO: 1263423 - RNA, 17 nt, Human
ccaggccaccuccccag

SEQ ID NO: 1263424 - RNA, 16 nt, Human
ccaggagggacaaagg

SEQ ID NO: 1263425 - RNA, 17 nt, Human
ccaggagggacaaagga

SEQ ID NO: 1263426 - RNA, 13 nt, Human
ccaggccaccucc

SEQ ID NO: 1263427 - RNA, 17 nt, Human
ccaggguggcagcaaca

SEQ ID NO: 1263428 - RNA, 16 nt, Human
ccaggguggcagcaac

SEQ ID NO: 1263429 - RNA, 14 nt, Human
ccaggguggcagca

SEQ ID NO: 1263430 - RNA, 20 nt, Human
ccagguagaggguguguaag

SEQ ID NO: 1263431 - RNA, 14 nt, Human
ccagggugugugcu

SEQ ID NO: 1263432 - RNA, 16 nt, Human
ccagguacuugagaaa

SEQ ID NO: 1263433 - RNA, 14 nt, Human
ccaggguccuggga

SEQ ID NO: 1263434 - RNA, 16 nt, Human
ccaggguccugggagg

SEQ ID NO: 1263435 - RNA, 23 nt, Human
ccaggguccugggaggagagaca

SEQ ID NO: 1263436 - RNA, 12 nt, Human
ccagggucucca

SEQ ID NO: 1263437 - RNA, 13 nt, Human
ccagggucuccag

SEQ ID NO: 1263438 - RNA, 17 nt, Human
ccagggucuccagaaag

SEQ ID NO: 1263439 - RNA, 15 nt, Human
ccagggucuccagaa

SEQ ID NO: 1263440 - RNA, 16 nt, Human
ccaggcuggucuaaaa

SEQ ID NO: 1263441 - RNA, 17 nt, Human
ccaggcuggucuaaaac

SEQ ID NO: 1263442 - RNA, 20 nt, Human
ccaggcuggucuaaaacucc

SEQ ID NO: 1263443 - RNA, 13 nt, Human
ccaggcuucugcu

SEQ ID NO: 1263444 - RNA, 15 nt, Human
ccaggcuucugcugg

SEQ ID NO: 1263445 - RNA, 16 nt, Human
ccaggcuucugcuggg

SEQ ID NO: 1263446 - RNA, 18 nt, Human
ccaggcuucugcuggggc

SEQ ID NO: 1263447 - RNA, 20 nt, Human
ccaggcuucugcuggggccu

SEQ ID NO: 1263448 - RNA, 17 nt, Human
ccagggaggcugguccu

SEQ ID NO: 1263449 - RNA, 10 nt, Human
ccagggcaca

SEQ ID NO: 1263450 - RNA, 13 nt, Human
ccagggcacagga

SEQ ID NO: 1263451 - RNA, 14 nt, Human
ccagggcacaggag

SEQ ID NO: 1263452 - RNA, 15 nt, Human
ccagggcacaggagc

SEQ ID NO: 1263453 - RNA, 16 nt, Human
ccagggcacaggagcu

SEQ ID NO: 1263454 - RNA, 17 nt, Human
ccagggcacaggagcua

SEQ ID NO: 1263455 - RNA, 22 nt, Human
ccagggcacaggagcuaccugu

SEQ ID NO: 1263456 - RNA, 20 nt, Human
ccagggcacaggagcuaccu

SEQ ID NO: 1263457 - RNA, 17 nt, Human
ccagggcccccaucuca

SEQ ID NO: 1263458 - RNA, 21 nt, Human
ccagggccccucacccugccu

SEQ ID NO: 1263459 - RNA, 22 nt, Human
ccagggccccucacccugccuu

SEQ ID NO: 1263460 - RNA, 11 nt, Human
ccagggccccu

SEQ ID NO: 1263461 - RNA, 15 nt, Human
ccagggccccucucc

SEQ ID NO: 1263462 - RNA, 22 nt, Human
ccagggccccucuccccaggga

SEQ ID NO: 1263463 - RNA, 24 nt, Human
ccagggccccucuccccagggaag

SEQ ID NO: 1263464 - RNA, 20 nt, Human
ccaucaucuauagaaagcua

SEQ ID NO: 1263465 - RNA, 16 nt, Human
ccaucauccucuggcu

SEQ ID NO: 1263466 - RNA, 20 nt, Human
ccauccugaggcuccacuug

SEQ ID NO: 1263467 - RNA, 18 nt, Human
ccauccugaggcuccacu

SEQ ID NO: 1263468 - RNA, 18 nt, Human
ccaucaaggguacacugc

SEQ ID NO: 1263469 - RNA, 13 nt, Human
ccaucauccucug

SEQ ID NO: 1263470 - RNA, 14 nt, Human
ccaucauccucugg

SEQ ID NO: 1263471 - RNA, 15 nt, Human
ccaucauccucuggc

SEQ ID NO: 1263472 - RNA, 13 nt, Human
ccaucaucuccug

SEQ ID NO: 1263473 - RNA, 16 nt, Human
ccauauggauccacug

SEQ ID NO: 1263474 - RNA, 22 nt, Human
ccauaugcuaccaccagcugug

SEQ ID NO: 1263475 - RNA, 17 nt, Human
ccauaugcuaccaccag

SEQ ID NO: 1263476 - RNA, 18 nt, Human
ccauaugcuaccaccagc

SEQ ID NO: 1263477 - RNA, 19 nt, Human
ccauaugcuaccaccagcu

SEQ ID NO: 1263478 - RNA, 21 nt, Human
ccauaugcuaccaccagcugu

SEQ ID NO: 1263479 - RNA, 12 nt, Human
ccauauuaaauu

SEQ ID NO: 1263480 - RNA, 20 nt, Human
ccauauuaaauuuuuuguug

SEQ ID NO: 1263481 - RNA, 22 nt, Human
ccauauuaaauuuuuuguugac

SEQ ID NO: 1263482 - RNA, 23 nt, Human
ccauauuaaauuuuuuguugaca

SEQ ID NO: 1263483 - RNA, 21 nt, Human
ccagguauucguuaucuaaua

SEQ ID NO: 1263484 - RNA, 20 nt, Human
ccagguauucguuaucuaau

SEQ ID NO: 1263485 - RNA, 14 nt, Human
ccagguaggccaag

SEQ ID NO: 1263486 - RNA, 15 nt, Human
ccagguaggccaagg

SEQ ID NO: 1263487 - RNA, 21 nt, Human
ccagguaggccaagguguccu

SEQ ID NO: 1263488 - RNA, 20 nt, Human
ccagguaggggccccucuca

SEQ ID NO: 1263489 - RNA, 22 nt, Human
ccagguauccaaaaauguguaa

SEQ ID NO: 1263490 - RNA, 19 nt, Human
ccagguauccaaaaaugug

SEQ ID NO: 1263491 - RNA, 16 nt, Human
ccagguggccacucca

SEQ ID NO: 1263492 - RNA, 21 nt, Human
ccagguggccacuccagaccc

SEQ ID NO: 1263493 - RNA, 19 nt, Human
ccagguuggcucugccagu

SEQ ID NO: 1263494 - RNA, 20 nt, Human
ccagguuggcucugccaguc

SEQ ID NO: 1263495 - RNA, 24 nt, Human
ccagguuggcucugccaguccugu

SEQ ID NO: 1263496 - RNA, 15 nt, Human
ccagugacagacagg

SEQ ID NO: 1263497 - RNA, 17 nt, Human
ccagugacagacaggcu

SEQ ID NO: 1263498 - RNA, 18 nt, Human
ccagugacagacaggcuc

SEQ ID NO: 1263499 - RNA, 19 nt, Human
ccagugacagacaggcucu

SEQ ID NO: 1263500 - RNA, 21 nt, Human
ccagugacagacaggcucuua

SEQ ID NO: 1263501 - RNA, 12 nt, Human
ccagugacagcu

SEQ ID NO: 1263502 - RNA, 14 nt, Human
ccagugacagcuag

SEQ ID NO: 1263503 - RNA, 16 nt, Human
ccagugaccaaccuuu

SEQ ID NO: 1263504 - RNA, 20 nt, Human
ccagugcacuugcuggaaga

SEQ ID NO: 1263505 - RNA, 14 nt, Human
ccagugcacugaaa

SEQ ID NO: 1263506 - RNA, 16 nt, Human
ccagugcacuugcugg

SEQ ID NO: 1263507 - RNA, 16 nt, Human
ccagaaugagacaucc

SEQ ID NO: 1263508 - RNA, 16 nt, Human
ccagaaugcuguacau

SEQ ID NO: 1263509 - RNA, 17 nt, Human
ccagaaugcuguacauc

SEQ ID NO: 1263510 - RNA, 19 nt, Human
ccagacacaggcccucccu

SEQ ID NO: 1263511 - RNA, 15 nt, Human
ccagaauaaguuauu

SEQ ID NO: 1263512 - RNA, 19 nt, Human
ccagaauaaguuauugcag

SEQ ID NO: 1263513 - RNA, 21 nt, Human
ccagaauaaguuauugcaguu

SEQ ID NO: 1263514 - RNA, 22 nt, Human
ccagaauaaguuauugcaguuu

SEQ ID NO: 1263515 - RNA, 23 nt, Human
ccagaauaaguuauugcaguuua

SEQ ID NO: 1263516 - RNA, 15 nt, Human
ccagaagcuccccca

SEQ ID NO: 1263517 - RNA, 16 nt, Human
ccagaagcucccccag

SEQ ID NO: 1263518 - RNA, 17 nt, Human
ccagaagcucccccagc

SEQ ID NO: 1263519 - RNA, 18 nt, Human
ccagaagcucccccagca

SEQ ID NO: 1263520 - RNA, 20 nt, Human
ccagaagcucccccagcaaa

SEQ ID NO: 1263521 - RNA, 19 nt, Human
ccagaagcucccccagcaa

SEQ ID NO: 1263522 - RNA, 16 nt, Human
ccagaaguaccagacu

SEQ ID NO: 1263523 - RNA, 20 nt, Human
ccagaaguaccagacuagau

SEQ ID NO: 1263524 - RNA, 14 nt, Human
ccagaccauggaca

SEQ ID NO: 1263525 - RNA, 24 nt, Human
ccagaccccuggcuuuucacugcu

SEQ ID NO: 1263526 - RNA, 14 nt, Human
ccagacaucaacag

SEQ ID NO: 1263527 - RNA, 16 nt, Human
ccagacauaaaggaaa

SEQ ID NO: 1263528 - RNA, 17 nt, Human
ccagacauaaaggaaaa

SEQ ID NO: 1263529 - RNA, 18 nt, Human
ccagacauaaaggaaaag

SEQ ID NO: 1263530 - RNA, 14 nt, Human
ccagacaugccaca

SEQ ID NO: 1263531 - RNA, 20 nt, Human
ccagacaugccacaaggacu

SEQ ID NO: 1263532 - RNA, 13 nt, Human
ccagacacccagg

SEQ ID NO: 1263533 - RNA, 14 nt, Human
ccagagaguggcuc

SEQ ID NO: 1263534 - RNA, 15 nt, Human
ccagagaguggcucc

SEQ ID NO: 1263535 - RNA, 16 nt, Human
ccagagaguggcuccu

SEQ ID NO: 1263536 - RNA, 18 nt, Human
ccagagaguggcuccucc

SEQ ID NO: 1263537 - RNA, 22 nt, Human
ccagagaguggcuccucccggu

SEQ ID NO: 1263538 - RNA, 13 nt, Human
ccagagauccaaa

SEQ ID NO: 1263539 - RNA, 13 nt, Human
ccagagccaaggg

SEQ ID NO: 1263540 - RNA, 12 nt, Human
ccagagccacag

SEQ ID NO: 1263541 - RNA, 13 nt, Human
ccagagccacagu

SEQ ID NO: 1263542 - RNA, 14 nt, Human
ccagagccacaguu

SEQ ID NO: 1263543 - RNA, 15 nt, Human
ccagagccacaguuc

SEQ ID NO: 1263544 - RNA, 11 nt, Human
ccagagccagg

SEQ ID NO: 1263545 - RNA, 12 nt, Human
ccagagccaggg

SEQ ID NO: 1263546 - RNA, 22 nt, Human
ccagagccaggggggugaggag

SEQ ID NO: 1263547 - RNA, 23 nt, Human
ccagagccaggggggugaggagc

SEQ ID NO: 1263548 - RNA, 18 nt, Human
ccagaaaccuuuguuugc

SEQ ID NO: 1263549 - RNA, 16 nt, Human
ccagaaccaauuauuu

SEQ ID NO: 1263550 - RNA, 16 nt, Human
ccacuuuuugcagcuu

SEQ ID NO: 1263551 - RNA, 16 nt, Human
ccagaaaacaaaacug

SEQ ID NO: 1263552 - RNA, 13 nt, Human
ccagaaaacaaaa

SEQ ID NO: 1263553 - RNA, 17 nt, Human
ccacuuuuugcagcuuu

SEQ ID NO: 1263554 - RNA, 15 nt, Human
ccacuuuuugcagcu

SEQ ID NO: 1263555 - RNA, 14 nt, Human
ccacuuuuugcagc

SEQ ID NO: 1263556 - RNA, 20 nt, Human
ccagaacuugacccugagcu

SEQ ID NO: 1263557 - RNA, 13 nt, Human
ccacuuuuugcag

SEQ ID NO: 1263558 - RNA, 14 nt, Human
ccacuuuuuagaaa

SEQ ID NO: 1263559 - RNA, 15 nt, Human
ccacuguuuggaaau

SEQ ID NO: 1263560 - RNA, 16 nt, Human
ccacuguguuccuucc

SEQ ID NO: 1263561 - RNA, 15 nt, Human
ccacugugccucaga

SEQ ID NO: 1263562 - RNA, 16 nt, Human
ccacugugccucagag

SEQ ID NO: 1263563 - RNA, 18 nt, Human
ccacugugccucagagac

SEQ ID NO: 1263564 - RNA, 19 nt, Human
ccacugugccucagagacc

SEQ ID NO: 1263565 - RNA, 22 nt, Human
ccacugugccucagagaccagg

SEQ ID NO: 1263566 - RNA, 20 nt, Human
ccacugugccucagagacca

SEQ ID NO: 1263567 - RNA, 13 nt, Human
ccacuguguuccu

SEQ ID NO: 1263568 - RNA, 14 nt, Human
ccacuguuaucaaa

SEQ ID NO: 1263569 - RNA, 18 nt, Human
ccacugugcagguuccca

SEQ ID NO: 1263570 - RNA, 14 nt, Human
ccacugugccucag

SEQ ID NO: 1263571 - RNA, 21 nt, Human
ccagaaugcuguacaucuauu

SEQ ID NO: 1263572 - RNA, 14 nt, Human
ccaccuucccaugc

SEQ ID NO: 1263573 - RNA, 23 nt, Human
ccaccugguacucccucucagga

SEQ ID NO: 1263574 - RNA, 13 nt, Human
ccacugccucuuc

SEQ ID NO: 1263575 - RNA, 16 nt, Human
ccacugccucuuccuc

SEQ ID NO: 1263576 - RNA, 12 nt, Human
ccacugccuucg

SEQ ID NO: 1263577 - RNA, 21 nt, Human
ccacugccuucgauacaccgg

SEQ ID NO: 1263578 - RNA, 18 nt, Human
ccacugcugauauuuucu

SEQ ID NO: 1263579 - RNA, 19 nt, Human
ccacugcugauauuuucuc

SEQ ID NO: 1263580 - RNA, 22 nt, Human
ccacugcugauauuuucucuag

SEQ ID NO: 1263581 - RNA, 20 nt, Human
ccacugcugauauuuucucu

SEQ ID NO: 1263582 - RNA, 14 nt, Human
ccacugcuuuuccc

SEQ ID NO: 1263583 - RNA, 14 nt, Human
ccacugccuucgcu

SEQ ID NO: 1263584 - RNA, 14 nt, Human
ccacuggggcucag

SEQ ID NO: 1263585 - RNA, 15 nt, Human
ccacuggggcucaga

SEQ ID NO: 1263586 - RNA, 18 nt, Human
ccacuggggcucagagcc

SEQ ID NO: 1263587 - RNA, 15 nt, Human
ccacugguucuucuu

SEQ ID NO: 1263588 - RNA, 15 nt, Human
ccacuguccugggcc

SEQ ID NO: 1263589 - RNA, 19 nt, Human
ccacuguccugggccugca

SEQ ID NO: 1263590 - RNA, 20 nt, Human
ccacuguccugggccugcag

SEQ ID NO: 1263591 - RNA, 21 nt, Human
ccacuguccugggccugcaga

SEQ ID NO: 1263592 - RNA, 19 nt, Human
ccacccucguggacaccug

SEQ ID NO: 1263593 - RNA, 13 nt, Human
ccacccugagccg

SEQ ID NO: 1263594 - RNA, 15 nt, Human
ccacccugagccggc

SEQ ID NO: 1263595 - RNA, 20 nt, Human
ccacccucguggacaccugc

SEQ ID NO: 1263596 - RNA, 18 nt, Human
ccacccucguggacaccu

SEQ ID NO: 1263597 - RNA, 17 nt, Human
ccacccucguggacacc

SEQ ID NO: 1263598 - RNA, 19 nt, Human
ccacccucggggauguguc

SEQ ID NO: 1263599 - RNA, 20 nt, Human
ccacccucggggaugugucc

SEQ ID NO: 1263600 - RNA, 22 nt, Human
ccacccucggggauguguccug

SEQ ID NO: 1263601 - RNA, 15 nt, Human
ccacccccaccccca

SEQ ID NO: 1263602 - RNA, 13 nt, Human
ccacccccagcuc

SEQ ID NO: 1263603 - RNA, 16 nt, Human
ccacccccagcucaau

SEQ ID NO: 1263604 - RNA, 14 nt, Human
ccacccccggcagc

SEQ ID NO: 1263605 - RNA, 23 nt, Human
ccaccucucaauauucaauaaag

SEQ ID NO: 1263606 - RNA, 14 nt, Human
ccaccucucaauau

SEQ ID NO: 1263607 - RNA, 13 nt, Human
ccaccucucaaua

SEQ ID NO: 1263608 - RNA, 20 nt, Human
ccaccucuaacagcaccaaa

SEQ ID NO: 1263609 - RNA, 21 nt, Human
ccaccucuaacagcaccaaau

SEQ ID NO: 1263610 - RNA, 21 nt, Human
ccaccucgcagguucaagcaa

SEQ ID NO: 1263611 - RNA, 20 nt, Human
ccaccucgcagguucaagca

SEQ ID NO: 1263612 - RNA, 14 nt, Human
ccaccucuaacagc

SEQ ID NO: 1263613 - RNA, 15 nt, Human
ccaccucuaacagca

SEQ ID NO: 1263614 - RNA, 18 nt, Human
ccaccucuaacagcacca

SEQ ID NO: 1263615 - RNA, 14 nt, Human
ccaccuccugacac

SEQ ID NO: 1263616 - RNA, 19 nt, Human
ccaccuccugacacccuuc

SEQ ID NO: 1263617 - RNA, 21 nt, Human
ccaccuccugacacccuucuc

SEQ ID NO: 1263618 - RNA, 21 nt, Human
ccacccugagccggccccagg

SEQ ID NO: 1263619 - RNA, 22 nt, Human
ccacccugagccggccccaggc

SEQ ID NO: 1263620 - RNA, 15 nt, Human
ccacccugaggaguc

SEQ ID NO: 1263621 - RNA, 21 nt, Human
ccacccugaggagucugaggu

SEQ ID NO: 1263622 - RNA, 23 nt, Human
ccacccugaggagucugaggucc

SEQ ID NO: 1263623 - RNA, 20 nt, Human
ccacccugaguugcuuuuca

SEQ ID NO: 1263624 - RNA, 21 nt, Human
ccacccugaguugcuuuucag

SEQ ID NO: 1263625 - RNA, 13 nt, Human
ccacccugcucau

SEQ ID NO: 1263626 - RNA, 20 nt, Human
ccacccugcucauccacucu

SEQ ID NO: 1263627 - RNA, 13 nt, Human
ccaccucugcugc

SEQ ID NO: 1263628 - RNA, 17 nt, Human
ccaccucugcugccucc

SEQ ID NO: 1263629 - RNA, 11 nt, Human
ccaccuggacc

SEQ ID NO: 1263630 - RNA, 12 nt, Human
ccaccuggaccc

SEQ ID NO: 1263631 - RNA, 17 nt, Human
ccaccuggaccccugca

SEQ ID NO: 1263632 - RNA, 18 nt, Human
ccaccuggaccccugcau

SEQ ID NO: 1263633 - RNA, 19 nt, Human
ccaccuggaccccugcauu

SEQ ID NO: 1263634 - RNA, 21 nt, Human
ccaccuggaccccugcauugg

SEQ ID NO: 1263635 - RNA, 20 nt, Human
ccaccuggaccccugcauug

SEQ ID NO: 1263636 - RNA, 12 nt, Human
ccaccuggcuca

SEQ ID NO: 1263637 - RNA, 15 nt, Human
ccaccuggcucucac

SEQ ID NO: 1263638 - RNA, 18 nt, Human
ccaccuggcucucaccuc

SEQ ID NO: 1263639 - RNA, 19 nt, Human
ccaccuggcucucaccucu

SEQ ID NO: 1263640 - RNA, 22 nt, Human
ccaccuggcucucaccucuagg

SEQ ID NO: 1263641 - RNA, 21 nt, Human
ccaccugguacucccucucag

SEQ ID NO: 1263642 - RNA, 21 nt, Human
ccagccuggggcugaggcuga

SEQ ID NO: 1263643 - RNA, 22 nt, Human
ccagccugggccuauggagagc

SEQ ID NO: 1263644 - RNA, 13 nt, Human
ccagccugggguc

SEQ ID NO: 1263645 - RNA, 18 nt, Human
ccagccugucagauccag

SEQ ID NO: 1263646 - RNA, 10 nt, Human
ccagccuguc

SEQ ID NO: 1263647 - RNA, 15 nt, Human
ccagccuuuguuccc

SEQ ID NO: 1263648 - RNA, 16 nt, Human
ccagccuuuguucccc

SEQ ID NO: 1263649 - RNA, 21 nt, Human
ccagccuuuguuccccacugg

SEQ ID NO: 1263650 - RNA, 23 nt, Human
ccagccuuuguuccccacuggag

SEQ ID NO: 1263651 - RNA, 18 nt, Human
ccagcucccugugccccc

SEQ ID NO: 1263652 - RNA, 19 nt, Human
ccagcucccugugccccca

SEQ ID NO: 1263653 - RNA, 22 nt, Human
ccagcucccugugcccccaggg

SEQ ID NO: 1263654 - RNA, 17 nt, Human
ccagcucccuucuuccc

SEQ ID NO: 1263655 - RNA, 18 nt, Human
ccagcuccggccuguccu

SEQ ID NO: 1263656 - RNA, 19 nt, Human
ccagcuccggccuguccuc

SEQ ID NO: 1263657 - RNA, 20 nt, Human
ccagcuccggccuguccucc

SEQ ID NO: 1263658 - RNA, 19 nt, Human
ccagcuccgcgccaggaug

SEQ ID NO: 1263659 - RNA, 14 nt, Human
ccagccugggccua

SEQ ID NO: 1263660 - RNA, 17 nt, Human
ccagccugggccuaugg

SEQ ID NO: 1263661 - RNA, 19 nt, Human
ccagccugggccuauggag

SEQ ID NO: 1263662 - RNA, 21 nt, Human
ccagccugggccuauggagag

SEQ ID NO: 1263663 - RNA, 12 nt, Human
ccagccugggcc

SEQ ID NO: 1263664 - RNA, 11 nt, Human
ccagccugggc

SEQ ID NO: 1263665 - RNA, 13 nt, Human
ccagccugggccu

SEQ ID NO: 1263666 - RNA, 21 nt, Human
ccagccuggccuccugccucu

SEQ ID NO: 1263667 - RNA, 22 nt, Human
ccagccuggccuccugccucua

SEQ ID NO: 1263668 - RNA, 20 nt, Human
ccagccugggaaagccccug

SEQ ID NO: 1263669 - RNA, 16 nt, Human
ccagccaucaaaaugc

SEQ ID NO: 1263670 - RNA, 18 nt, Human
ccagccaucaaaaugcuu

SEQ ID NO: 1263671 - RNA, 18 nt, Human
ccagccaucaagagacug

SEQ ID NO: 1263672 - RNA, 23 nt, Human
ccagccaucaccuuagaccacca

SEQ ID NO: 1263673 - RNA, 20 nt, Human
ccagccaucaagagacugag

SEQ ID NO: 1263674 - RNA, 13 nt, Human
ccagcccaccccc

SEQ ID NO: 1263675 - RNA, 14 nt, Human
ccagcccacccccg

SEQ ID NO: 1263676 - RNA, 17 nt, Human
ccagcccacccccggca

SEQ ID NO: 1263677 - RNA, 21 nt, Human
ccagcccacccccggcagcag

SEQ ID NO: 1263678 - RNA, 18 nt, Human
ccagcccacccccggcag

SEQ ID NO: 1263679 - RNA, 11 nt, Human
ccagcccagag

SEQ ID NO: 1263680 - RNA, 12 nt, Human
ccagcccagaga

SEQ ID NO: 1263681 - RNA, 13 nt, Human
ccagcccagagac

SEQ ID NO: 1263682 - RNA, 14 nt, Human
ccagcccagagaca

SEQ ID NO: 1263683 - RNA, 22 nt, Human
ccagcccagagacauacuugaa

SEQ ID NO: 1263684 - RNA, 23 nt, Human
ccagcccagagacauacuugaag

SEQ ID NO: 1263685 - RNA, 16 nt, Human
ccagcccagccccacu

SEQ ID NO: 1263686 - RNA, 13 nt, Human
ccagcccagggcu

SEQ ID NO: 1263687 - RNA, 14 nt, Human
ccagcccagggcuc

SEQ ID NO: 1263688 - RNA, 15 nt, Human
ccagcccagggcucc

SEQ ID NO: 1263689 - RNA, 18 nt, Human
ccagccgacccccucucc

SEQ ID NO: 1263690 - RNA, 20 nt, Human
ccagccgacccccucucccu

SEQ ID NO: 1263691 - RNA, 22 nt, Human
ccagccgacccccucucccugc

SEQ ID NO: 1263692 - RNA, 23 nt, Human
ccagccgacccccucucccugca

SEQ ID NO: 1263693 - RNA, 19 nt, Human
ccagccgcgcaucagacug

SEQ ID NO: 1263694 - RNA, 22 nt, Human
ccagccgcuuggcgaugccagc

SEQ ID NO: 1263695 - RNA, 23 nt, Human
ccagccgcuuggcgaugccagcc

SEQ ID NO: 1263696 - RNA, 21 nt, Human
ccagccggggcgaguggcacg

SEQ ID NO: 1263697 - RNA, 20 nt, Human
ccagccggggcgaguggcac

SEQ ID NO: 1263698 - RNA, 23 nt, Human
ccagcccauggagauugaccugg

SEQ ID NO: 1263699 - RNA, 17 nt, Human
ccagcccagggcuccug

SEQ ID NO: 1263700 - RNA, 19 nt, Human
ccagcccagggcuccugca

SEQ ID NO: 1263701 - RNA, 21 nt, Human
ccagcccagggcuccugcacu

SEQ ID NO: 1263702 - RNA, 14 nt, Human
ccagcccauggaga

SEQ ID NO: 1263703 - RNA, 13 nt, Human
ccagcccugccug

SEQ ID NO: 1263704 - RNA, 14 nt, Human
ccagcccugccugg

SEQ ID NO: 1263705 - RNA, 15 nt, Human
ccagcccugccugga

SEQ ID NO: 1263706 - RNA, 16 nt, Human
ccagcccugccuggag

SEQ ID NO: 1263707 - RNA, 17 nt, Human
ccagcccugccuggagg

SEQ ID NO: 1263708 - RNA, 18 nt, Human
ccagcccugccuggagga

SEQ ID NO: 1263709 - RNA, 22 nt, Human
ccagcccugccuggaggaccug

SEQ ID NO: 1263710 - RNA, 21 nt, Human
ccagcccugccuggaggaccu

SEQ ID NO: 1263711 - RNA, 22 nt, Human
ccagcaccggccccauuuaccc

SEQ ID NO: 1263712 - RNA, 19 nt, Human
ccagcaccggaccagccug

SEQ ID NO: 1263713 - RNA, 20 nt, Human
ccagcaccggaccagccugg

SEQ ID NO: 1263714 - RNA, 18 nt, Human
ccagcaccggaccagccu

SEQ ID NO: 1263715 - RNA, 15 nt, Human
ccagcaccuggcauc

SEQ ID NO: 1263716 - RNA, 21 nt, Human
ccagcaccggaccagccuggc

SEQ ID NO: 1263717 - RNA, 23 nt, Human
ccagcaaagcccccagagcccag

SEQ ID NO: 1263718 - RNA, 16 nt, Human
ccagcacacagggcag

SEQ ID NO: 1263719 - RNA, 19 nt, Human
ccagcacagcuuagauuuc

SEQ ID NO: 1263720 - RNA, 20 nt, Human
ccagcacagcuuagauuuca

SEQ ID NO: 1263721 - RNA, 22 nt, Human
ccagcacagcuuagauuucaua

SEQ ID NO: 1263722 - RNA, 13 nt, Human
ccagcacagcuug

SEQ ID NO: 1263723 - RNA, 17 nt, Human
ccagcacagcuugaccu

SEQ ID NO: 1263724 - RNA, 24 nt, Human
ccagauuuuuuacagcugccugca

SEQ ID NO: 1263725 - RNA, 22 nt, Human
ccagauuuuuuaaaauuuauau

SEQ ID NO: 1263726 - RNA, 21 nt, Human
ccagauuugcuaauuuauccu

SEQ ID NO: 1263727 - RNA, 15 nt, Human
ccagcaaagccccca

SEQ ID NO: 1263728 - RNA, 16 nt, Human
ccagcaaagcccccag

SEQ ID NO: 1263729 - RNA, 17 nt, Human
ccagcaaagcccccaga

SEQ ID NO: 1263730 - RNA, 19 nt, Human
ccagcaaagcccccagagc

SEQ ID NO: 1263731 - RNA, 21 nt, Human
ccagcaaagcccccagagccc

SEQ ID NO: 1263732 - RNA, 24 nt, Human
ccagcaaagcccccagagcccagg

SEQ ID NO: 1263733 - RNA, 16 nt, Human
ccagauuuuuacacau

SEQ ID NO: 1263734 - RNA, 11 nt, Human
ccagagcccac

SEQ ID NO: 1263735 - RNA, 17 nt, Human
ccagagcccagcuccaa

SEQ ID NO: 1263736 - RNA, 18 nt, Human
ccagagcccagcuccaag

SEQ ID NO: 1263737 - RNA, 14 nt, Human
ccagagcccaggcu

SEQ ID NO: 1263738 - RNA, 15 nt, Human
ccagagcccaggcuc

SEQ ID NO: 1263739 - RNA, 11 nt, Human
ccagagccugg

SEQ ID NO: 1263740 - RNA, 12 nt, Human
ccagagccuggg

SEQ ID NO: 1263741 - RNA, 13 nt, Human
ccagagccugggg

SEQ ID NO: 1263742 - RNA, 14 nt, Human
ccagagccuggggc

SEQ ID NO: 1263743 - RNA, 15 nt, Human
ccagagccuggggcu

SEQ ID NO: 1263744 - RNA, 16 nt, Human
ccagagccuggggcuc

SEQ ID NO: 1263745 - RNA, 18 nt, Human
ccagagccuggggcucua

SEQ ID NO: 1263746 - RNA, 20 nt, Human
ccagagccuggggcucuaac

SEQ ID NO: 1263747 - RNA, 13 nt, Human
ccagauugacgac

SEQ ID NO: 1263748 - RNA, 18 nt, Human
ccagauugacgacaagug

SEQ ID NO: 1263749 - RNA, 19 nt, Human
ccagauugacgacaagugc

SEQ ID NO: 1263750 - RNA, 21 nt, Human
ccagauugacgacaagugcug

SEQ ID NO: 1263751 - RNA, 21 nt, Human
ggccccugccucucugcaggu

SEQ ID NO: 1263752 - RNA, 19 nt, Human
ggccccugccucucugcag

SEQ ID NO: 1263753 - RNA, 18 nt, Human
ggccccugccucucugca

SEQ ID NO: 1263754 - RNA, 17 nt, Human
ggccccugccucucugc

SEQ ID NO: 1263755 - RNA, 22 nt, Human
ggccagaggcccccagcccagg

SEQ ID NO: 1263756 - RNA, 11 nt, Human
ggccagaggcu

SEQ ID NO: 1263757 - RNA, 17 nt, Human
ggccagauccagccugg

SEQ ID NO: 1263758 - RNA, 18 nt, Human
ggccagauccagccuggg

SEQ ID NO: 1263759 - RNA, 20 nt, Human
ggccagaugcacaucccugg

SEQ ID NO: 1263760 - RNA, 21 nt, Human
ggccagaugcacaucccugga

SEQ ID NO: 1263761 - RNA, 23 nt, Human
ggccagaugcacaucccuggaag

SEQ ID NO: 1263762 - RNA, 18 nt, Human
ggccccagcacagcuuga

SEQ ID NO: 1263763 - RNA, 13 nt, Human
ggccccagccucc

SEQ ID NO: 1263764 - RNA, 14 nt, Human
ggccucauguggcu

SEQ ID NO: 1263765 - RNA, 19 nt, Human
ggcccucaagucuuucucu

SEQ ID NO: 1263766 - RNA, 16 nt, Human
ggccgcccccugcccc

SEQ ID NO: 1263767 - RNA, 18 nt, Human
ggccgcccccugcccccc

SEQ ID NO: 1263768 - RNA, 19 nt, Human
ggccgcccccugcccccca

SEQ ID NO: 1263769 - RNA, 22 nt, Human
ggccgcccccugccccccagcc

SEQ ID NO: 1263770 - RNA, 14 nt, Human
ggccgccgccucuu

SEQ ID NO: 1263771 - RNA, 15 nt, Human
ggccgccugggucca

SEQ ID NO: 1263772 - RNA, 13 nt, Human
ggccgccuggguc

SEQ ID NO: 1263773 - RNA, 11 nt, Human
ggccucagggc

SEQ ID NO: 1263774 - RNA, 13 nt, Human
ggccucagggcuc

SEQ ID NO: 1263775 - RNA, 14 nt, Human
ggccucagggcucc

SEQ ID NO: 1263776 - RNA, 15 nt, Human
ggccucagggcuccu

SEQ ID NO: 1263777 - RNA, 18 nt, Human
ggccucagggcuccuugu

SEQ ID NO: 1263778 - RNA, 16 nt, Human
ggccucagggcuccuu

SEQ ID NO: 1263779 - RNA, 17 nt, Human
ggccucagggcuccuug

SEQ ID NO: 1263780 - RNA, 19 nt, Human
ggccugaugggguggaagg

SEQ ID NO: 1263781 - RNA, 14 nt, Human
ggccugcaaacugg

SEQ ID NO: 1263782 - RNA, 15 nt, Human
ggccugcaaacuggg

SEQ ID NO: 1263783 - RNA, 16 nt, Human
ggccugcaaacuggga

SEQ ID NO: 1263784 - RNA, 18 nt, Human
ggccugcaaacugggaac

SEQ ID NO: 1263785 - RNA, 14 nt, Human
ggccugccaccugg

SEQ ID NO: 1263786 - RNA, 17 nt, Human
ggccugccaccuggacc

SEQ ID NO: 1263787 - RNA, 18 nt, Human
ggccugccaccuggaccc

SEQ ID NO: 1263788 - RNA, 19 nt, Human
ggccugccaccuggacccc

SEQ ID NO: 1263789 - RNA, 23 nt, Human
ggccugccaccuggaccccugca

SEQ ID NO: 1263790 - RNA, 22 nt, Human
ggccugccaccuggaccccugc

SEQ ID NO: 1263791 - RNA, 12 nt, Human
ggccugccagga

SEQ ID NO: 1263792 - RNA, 13 nt, Human
ggccugccaggag

SEQ ID NO: 1263793 - RNA, 14 nt, Human
ggccugccaggagg

SEQ ID NO: 1263794 - RNA, 17 nt, Human
ggccugcccagugcacu

SEQ ID NO: 1263795 - RNA, 15 nt, Human
ggccugcccaguugc

SEQ ID NO: 1263796 - RNA, 13 nt, Human
ggccugcccccac

SEQ ID NO: 1263797 - RNA, 12 nt, Human
ggccugccccca

SEQ ID NO: 1263798 - RNA, 14 nt, Human
ggccuggcagccgu

SEQ ID NO: 1263799 - RNA, 15 nt, Human
ggccuggcagccgug

SEQ ID NO: 1263800 - RNA, 17 nt, Human
ggccuguuuggccucuc

SEQ ID NO: 1263801 - RNA, 18 nt, Human
ggccuguuuggccucucu

SEQ ID NO: 1263802 - RNA, 17 nt, Human
ggccuucagggagugag

SEQ ID NO: 1263803 - RNA, 12 nt, Human
ggccuucacaau

SEQ ID NO: 1263804 - RNA, 20 nt, Human
ggccuucacaaucugucagu

SEQ ID NO: 1263805 - RNA, 19 nt, Human
ggccuuacuuaaacccagc

SEQ ID NO: 1263806 - RNA, 15 nt, Human
ggccuuaggaagagc

SEQ ID NO: 1263807 - RNA, 17 nt, Human
ggccuuauugcauccca

SEQ ID NO: 1263808 - RNA, 11 nt, Human
ggccugccugu

SEQ ID NO: 1263809 - RNA, 15 nt, Human
ggccugcuaaggucu

SEQ ID NO: 1263810 - RNA, 13 nt, Human
ggccugcuccaga

SEQ ID NO: 1263811 - RNA, 14 nt, Human
ggccugcuccagac

SEQ ID NO: 1263812 - RNA, 15 nt, Human
ggccugcuccagacc

SEQ ID NO: 1263813 - RNA, 16 nt, Human
ggccugcuccagaccu

SEQ ID NO: 1263814 - RNA, 17 nt, Human
ggccugcuccagaccug

SEQ ID NO: 1263815 - RNA, 18 nt, Human
ggccugcuccagaccuga

SEQ ID NO: 1263816 - RNA, 10 nt, Human
ggccugcugc

SEQ ID NO: 1263817 - RNA, 11 nt, Human
ggccugcugcu

SEQ ID NO: 1263818 - RNA, 13 nt, Human
ggccugcugcuga

SEQ ID NO: 1263819 - RNA, 14 nt, Human
ggccugcugcugag

SEQ ID NO: 1263820 - RNA, 15 nt, Human
ggccugcugcugaga

SEQ ID NO: 1263821 - RNA, 16 nt, Human
ggccugcugcugagaa

SEQ ID NO: 1263822 - RNA, 18 nt, Human
ggccugcugcugagaacc

SEQ ID NO: 1263823 - RNA, 19 nt, Human
ggccugcugcugagaaccu

SEQ ID NO: 1263824 - RNA, 23 nt, Human
ggccugcugcugagaaccuggcc

SEQ ID NO: 1263825 - RNA, 20 nt, Human
ggccugcugcugagaaccug

SEQ ID NO: 1263826 - RNA, 22 nt, Human
ggccugcugcugagaaccuggc

SEQ ID NO: 1263827 - RNA, 20 nt, Human
ggccuggagauccuccugca

SEQ ID NO: 1263828 - RNA, 22 nt, Human
ggccuggagcacaaagacccug

SEQ ID NO: 1263829 - RNA, 17 nt, Human
ggcuagacuagucucaa

SEQ ID NO: 1263830 - RNA, 23 nt, Human
ggcuacuucggggcugggaaguc

SEQ ID NO: 1263831 - RNA, 18 nt, Human
ggcuacuucggggcuggg

SEQ ID NO: 1263832 - RNA, 19 nt, Human
ggcuacccugagcugaggc

SEQ ID NO: 1263833 - RNA, 13 nt, Human
ggcuacucugugc

SEQ ID NO: 1263834 - RNA, 15 nt, Human
ggcuacucugugcca

SEQ ID NO: 1263835 - RNA, 16 nt, Human
ggcuacucugugccag

SEQ ID NO: 1263836 - RNA, 18 nt, Human
ggcuacucugugccagag

SEQ ID NO: 1263837 - RNA, 19 nt, Human
ggcuacucugugccagagc

SEQ ID NO: 1263838 - RNA, 20 nt, Human
ggcuacucugugccagagcc

SEQ ID NO: 1263839 - RNA, 21 nt, Human
ggcuacucugugccagagccu

SEQ ID NO: 1263840 - RNA, 22 nt, Human
ggcuacucugugccagagccug

SEQ ID NO: 1263841 - RNA, 23 nt, Human
ggcuacucugugccagagccugg

SEQ ID NO: 1263842 - RNA, 24 nt, Human
ggcuacucugugccagagccuggg

SEQ ID NO: 1263843 - RNA, 14 nt, Human
ggcuaccaggaaag

SEQ ID NO: 1263844 - RNA, 18 nt, Human
ggcuacagagaagccuuc

SEQ ID NO: 1263845 - RNA, 19 nt, Human
ggcuacagagaagccuuca

SEQ ID NO: 1263846 - RNA, 14 nt, Human
ggcuacagagaagc

SEQ ID NO: 1263847 - RNA, 15 nt, Human
ggcuacagagaagcc

SEQ ID NO: 1263848 - RNA, 16 nt, Human
ggcuacagagaagccu

SEQ ID NO: 1263849 - RNA, 17 nt, Human
ggcuacagagaagccuu

SEQ ID NO: 1263850 - RNA, 22 nt, Human
ggcuacaccuuagccugcccuc

SEQ ID NO: 1263851 - RNA, 13 nt, Human
ggcuaauuuuugu

SEQ ID NO: 1263852 - RNA, 23 nt, Human
ggcuacaccuuagccugcccucc

SEQ ID NO: 1263853 - RNA, 11 nt, Human
ggcuacagaga

SEQ ID NO: 1263854 - RNA, 12 nt, Human
ggcuacagagaa

SEQ ID NO: 1263855 - RNA, 13 nt, Human
ggcuacagagaag

SEQ ID NO: 1263856 - RNA, 18 nt, Human
ggcuaauuuuuguuuugu

SEQ ID NO: 1263857 - RNA, 12 nt, Human
ggcuaauuuaac

SEQ ID NO: 1263858 - RNA, 13 nt, Human
ggcuaauuuaaca

SEQ ID NO: 1263859 - RNA, 23 nt, Human
ggcgugaucucagcucacugcaa

SEQ ID NO: 1263860 - RNA, 17 nt, Human
ggcgugagccaccucgc

SEQ ID NO: 1263861 - RNA, 17 nt, Human
ggcgugagaccugcccc

SEQ ID NO: 1263862 - RNA, 18 nt, Human
ggcgugagaccugccccu

SEQ ID NO: 1263863 - RNA, 14 nt, Human
ggcgugagaccugc

SEQ ID NO: 1263864 - RNA, 16 nt, Human
ggcgugagaccugccc

SEQ ID NO: 1263865 - RNA, 17 nt, Human
ggcgaugccagccaagc

SEQ ID NO: 1263866 - RNA, 18 nt, Human
ggcgaugccagccaagcu

SEQ ID NO: 1263867 - RNA, 20 nt, Human
ggcuaagcuucacuguaaaa

SEQ ID NO: 1263868 - RNA, 13 nt, Human
ggcguuuguaaug

SEQ ID NO: 1263869 - RNA, 15 nt, Human
ggcuaagacuuccua

SEQ ID NO: 1263870 - RNA, 22 nt, Human
ggccuucggccuccauccugag

SEQ ID NO: 1263871 - RNA, 18 nt, Human
ggccuucggccuccaucc

SEQ ID NO: 1263872 - RNA, 16 nt, Human
ggccuucggccuccau

SEQ ID NO: 1263873 - RNA, 22 nt, Human
ggccuucccuguuuucccccca

SEQ ID NO: 1263874 - RNA, 16 nt, Human
ggcucacucagcacuu

SEQ ID NO: 1263875 - RNA, 22 nt, Human
ggcucacucagcacuuggcccu

SEQ ID NO: 1263876 - RNA, 14 nt, Human
ggcucacucagcca

SEQ ID NO: 1263877 - RNA, 23 nt, Human
ggcucacugcaaccuccaccucc

SEQ ID NO: 1263878 - RNA, 17 nt, Human
ggcucccugacugggag

SEQ ID NO: 1263879 - RNA, 18 nt, Human
ggcucccugacugggagu

SEQ ID NO: 1263880 - RNA, 13 nt, Human
ggcucccuccgcc

SEQ ID NO: 1263881 - RNA, 20 nt, Human
ggcucccuguaaccucuuca

SEQ ID NO: 1263882 - RNA, 15 nt, Human
ggcucccggaauucc

SEQ ID NO: 1263883 - RNA, 17 nt, Human
ggcucccuccgccccca

SEQ ID NO: 1263884 - RNA, 21 nt, Human
ggcucccuguaaccucuucag

SEQ ID NO: 1263885 - RNA, 16 nt, Human
ggcucccuggggggag

SEQ ID NO: 1263886 - RNA, 14 nt, Human
ggcucggccugccc

SEQ ID NO: 1263887 - RNA, 18 nt, Human
ggcucggccugcccccac

SEQ ID NO: 1263888 - RNA, 15 nt, Human
ggcucggccugcccc

SEQ ID NO: 1263889 - RNA, 13 nt, Human
ggcucguggacug

SEQ ID NO: 1263890 - RNA, 19 nt, Human
ggcucguggacugaguggg

SEQ ID NO: 1263891 - RNA, 23 nt, Human
ggcucguggacugagugggaagc

SEQ ID NO: 1263892 - RNA, 18 nt, Human
ggcucguugacuggcugu

SEQ ID NO: 1263893 - RNA, 14 nt, Human
ggcucuaacgccug

SEQ ID NO: 1263894 - RNA, 15 nt, Human
ggcucuaacgccuga

SEQ ID NO: 1263895 - RNA, 16 nt, Human
ggcucuaacgccugag

SEQ ID NO: 1263896 - RNA, 17 nt, Human
ggcucuaacgccugagc

SEQ ID NO: 1263897 - RNA, 18 nt, Human
ggcucuaacgccugagcc

SEQ ID NO: 1263898 - RNA, 19 nt, Human
ggcucuaacgccugagccc

SEQ ID NO: 1263899 - RNA, 22 nt, Human
ggcucuaacgccugagcccagg

SEQ ID NO: 1263900 - RNA, 23 nt, Human
ggcucuaacgccugagcccaggg

SEQ ID NO: 1263901 - RNA, 17 nt, Human
ggcucuaauucacagug

SEQ ID NO: 1263902 - RNA, 19 nt, Human
ggcucuaauucacagugcu

SEQ ID NO: 1263903 - RNA, 19 nt, Human
ggcucuugauaccccccuc

SEQ ID NO: 1263904 - RNA, 20 nt, Human
ggcucuugauaccccccucu

SEQ ID NO: 1263905 - RNA, 21 nt, Human
ggcucuugauaccccccucug

SEQ ID NO: 1263906 - RNA, 12 nt, Human
ggcugcccuggu

SEQ ID NO: 1263907 - RNA, 10 nt, Human
ggcugcccuu

SEQ ID NO: 1263908 - RNA, 11 nt, Human
ggcugcccuuu

SEQ ID NO: 1263909 - RNA, 14 nt, Human
ggcugcccuuucug

SEQ ID NO: 1263910 - RNA, 18 nt, Human
ggcugcccuuucugggca

SEQ ID NO: 1263911 - RNA, 15 nt, Human
ggcugccggggcagc

SEQ ID NO: 1263912 - RNA, 16 nt, Human
ggcugccguggggccg

SEQ ID NO: 1263913 - RNA, 23 nt, Human
ggcugccguggggccgccgccuc

SEQ ID NO: 1263914 - RNA, 15 nt, Human
ggcugccguccccua

SEQ ID NO: 1263915 - RNA, 16 nt, Human
ggcuggccaguccagg

SEQ ID NO: 1263916 - RNA, 20 nt, Human
ggcuggccaguccaggcugc

SEQ ID NO: 1263917 - RNA, 21 nt, Human
ggcuggccaguccaggcugcc

SEQ ID NO: 1263918 - RNA, 13 nt, Human
ggcugaaagacag

SEQ ID NO: 1263919 - RNA, 15 nt, Human
ggcugaccaugcuca

SEQ ID NO: 1263920 - RNA, 15 nt, Human
ggcugccccucucac

SEQ ID NO: 1263921 - RNA, 13 nt, Human
ggcugcccuccug

SEQ ID NO: 1263922 - RNA, 14 nt, Human
ggcugcccuccugu

SEQ ID NO: 1263923 - RNA, 18 nt, Human
ggcugcccuccugugcuc

SEQ ID NO: 1263924 - RNA, 20 nt, Human
ggcugcccuccugugcucag

SEQ ID NO: 1263925 - RNA, 22 nt, Human
ggcugcccuccugugcucagcc

SEQ ID NO: 1263926 - RNA, 23 nt, Human
ggcugcccuccugugcucagccc

SEQ ID NO: 1263927 - RNA, 22 nt, Human
ggcuggccaguccaggcugccg

SEQ ID NO: 1263928 - RNA, 13 nt, Human
ggcuggccaugga

SEQ ID NO: 1263929 - RNA, 18 nt, Human
ggcuggccauggagaaag

SEQ ID NO: 1263930 - RNA, 19 nt, Human
ggcuggccauggagaaagc

SEQ ID NO: 1263931 - RNA, 23 nt, Human
ggcuggccucacccaccccugca

SEQ ID NO: 1263932 - RNA, 20 nt, Human
ggcuggccucccaaaugagc

SEQ ID NO: 1263933 - RNA, 18 nt, Human
aaaaaaacaguggaucac

SEQ ID NO: 1263934 - RNA, 19 nt, Human
aaaaaaaccugagauuuau

SEQ ID NO: 1263935 - RNA, 14 nt, Human
aaaaaaagaucugu

SEQ ID NO: 1263936 - RNA, 10 nt, Human
aaaaaacuac

SEQ ID NO: 1263937 - RNA, 13 nt, Human
aaaaaaauguauu

SEQ ID NO: 1263938 - RNA, 19 nt, Human
aaaaaaauugaaauguaag

SEQ ID NO: 1263939 - RNA, 12 nt, Human
aaaaaaagauga

SEQ ID NO: 1263940 - RNA, 14 nt, Human
aaaaauaaaaaaca

SEQ ID NO: 1263941 - RNA, 13 nt, Human
aaaaaguuuguuu

SEQ ID NO: 1263942 - RNA, 16 nt, Human
aaaaaguuuuaguuuu

SEQ ID NO: 1263943 - RNA, 23 nt, Human
aaaaagccaguuuggguaaaaua

SEQ ID NO: 1263944 - RNA, 13 nt, Human
aaaaaggcaguua

SEQ ID NO: 1263945 - RNA, 17 nt, Human
aaaaagccaguuugggu

SEQ ID NO: 1263946 - RNA, 17 nt, Human
aaaaagcccaccauuug

SEQ ID NO: 1263947 - RNA, 16 nt, Human
ggcugguaucucagaa

SEQ ID NO: 1263948 - RNA, 18 nt, Human
ggcugguaucucagaaag

SEQ ID NO: 1263949 - RNA, 13 nt, Human
aaaaauacaaaaa

SEQ ID NO: 1263950 - RNA, 12 nt, Human
aaaaauaaagaa

SEQ ID NO: 1263951 - RNA, 18 nt, Human
aaaaauaaucaaaagcua

SEQ ID NO: 1263952 - RNA, 17 nt, Human
aaaaauaauuuuuauau

SEQ ID NO: 1263953 - RNA, 14 nt, Human
aaaaauacucagau

SEQ ID NO: 1263954 - RNA, 13 nt, Human
aaaaauacucaga

SEQ ID NO: 1263955 - RNA, 15 nt, Human
ggaggcucuggagcc

SEQ ID NO: 1263956 - RNA, 15 nt, Human
ggaggcucagguccc

SEQ ID NO: 1263957 - RNA, 15 nt, Human
ggaggcuccagaggg

SEQ ID NO: 1263958 - RNA, 16 nt, Human
ggaggcuccagagggc

SEQ ID NO: 1263959 - RNA, 18 nt, Human
ggaggcuccagagggcac

SEQ ID NO: 1263960 - RNA, 20 nt, Human
ggaggcggauguugaaguga

SEQ ID NO: 1263961 - RNA, 16 nt, Human
ggaggcggugggccug

SEQ ID NO: 1263962 - RNA, 21 nt, Human
ggaggcucacccccuucucca

SEQ ID NO: 1263963 - RNA, 15 nt, Human
ggaggggggagggaa

SEQ ID NO: 1263964 - RNA, 16 nt, Human
ggaggggggagggaag

SEQ ID NO: 1263965 - RNA, 14 nt, Human
ggagggggagaggg

SEQ ID NO: 1263966 - RNA, 14 nt, Human
ggagggggauccga

SEQ ID NO: 1263967 - RNA, 11 nt, Human
ggaggcugcuc

SEQ ID NO: 1263968 - RNA, 12 nt, Human
ggaggcugcucg

SEQ ID NO: 1263969 - RNA, 14 nt, Human
ggaggcugcucggg

SEQ ID NO: 1263970 - RNA, 22 nt, Human
ggaggcugcucggggugcacag

SEQ ID NO: 1263971 - RNA, 23 nt, Human
ggaggcugcucggggugcacagg

SEQ ID NO: 1263972 - RNA, 18 nt, Human
ggaggcugcugcugcucu

SEQ ID NO: 1263973 - RNA, 13 nt, Human
ggaggcugguccu

SEQ ID NO: 1263974 - RNA, 16 nt, Human
ggagggaagcucuugg

SEQ ID NO: 1263975 - RNA, 15 nt, Human
ggagggaagggagcc

SEQ ID NO: 1263976 - RNA, 16 nt, Human
ggagggaagggagcca

SEQ ID NO: 1263977 - RNA, 13 nt, Human
ggagggugggaag

SEQ ID NO: 1263978 - RNA, 14 nt, Human
ggagggugggaagg

SEQ ID NO: 1263979 - RNA, 20 nt, Human
ggaggguuucauugucugug

SEQ ID NO: 1263980 - RNA, 21 nt, Human
ggaggguuucauugucuguga

SEQ ID NO: 1263981 - RNA, 19 nt, Human
ggaggugggccguggcccu

SEQ ID NO: 1263982 - RNA, 15 nt, Human
ggaggugggccgugg

SEQ ID NO: 1263983 - RNA, 16 nt, Human
ggagugugcguggugg

SEQ ID NO: 1263984 - RNA, 24 nt, Human
ggaguguccucuucccucucugca

SEQ ID NO: 1263985 - RNA, 23 nt, Human
ggagugggguggugucagacccu

SEQ ID NO: 1263986 - RNA, 14 nt, Human
ggagugggugggga

SEQ ID NO: 1263987 - RNA, 15 nt, Human
ggaguggguggggag

SEQ ID NO: 1263988 - RNA, 20 nt, Human
ggagugguuuaggcuauuug

SEQ ID NO: 1263989 - RNA, 20 nt, Human
ggaguguaugacugcacaug

SEQ ID NO: 1263990 - RNA, 13 nt, Human
ggaguguccucuu

SEQ ID NO: 1263991 - RNA, 20 nt, Human
ggaguguccucuucccucuc

SEQ ID NO: 1263992 - RNA, 17 nt, Human
ggagugugugugagugu

SEQ ID NO: 1263993 - RNA, 12 nt, Human
ggaguguucccc

SEQ ID NO: 1263994 - RNA, 20 nt, Human
ggaguguuccccuuccacug

SEQ ID NO: 1263995 - RNA, 15 nt, Human
ggaguuaagaccugg

SEQ ID NO: 1263996 - RNA, 16 nt, Human
ggaguuaagaccuggc

SEQ ID NO: 1263997 - RNA, 18 nt, Human
ggaguuaagaccuggcag

SEQ ID NO: 1263998 - RNA, 23 nt, Human
ggaguuaagaccuggcagcucug

SEQ ID NO: 1263999 - RNA, 22 nt, Human
ggaguuagggacugaccagcag

SEQ ID NO: 1264000 - RNA, 13 nt, Human
ggaguuagggacu

SEQ ID NO: 1264001 - RNA, 19 nt, Human
ggaguuagggacugaccag

SEQ ID NO: 1264002 - RNA, 14 nt, Human
ggauuguaguccca

SEQ ID NO: 1264003 - RNA, 21 nt, Human
ggaugggguauggauucuaaa

SEQ ID NO: 1264004 - RNA, 16 nt, Human
ggaugguaguuuuuuc

SEQ ID NO: 1264005 - RNA, 20 nt, Human
ggaugguaguuuuuucaucu

SEQ ID NO: 1264006 - RNA, 21 nt, Human
ggauggucuuacagcaggcag

SEQ ID NO: 1264007 - RNA, 12 nt, Human
ggauggugucuc

SEQ ID NO: 1264008 - RNA, 15 nt, Human
ggaugggggaacuca

SEQ ID NO: 1264009 - RNA, 17 nt, Human
ggaugggggaacucaga

SEQ ID NO: 1264010 - RNA, 21 nt, Human
ggaugggggaacucagaucca

SEQ ID NO: 1264011 - RNA, 22 nt, Human
ggaugggggaacucagauccag

SEQ ID NO: 1264012 - RNA, 23 nt, Human
ggaugggggaacucagauccagg

SEQ ID NO: 1264013 - RNA, 16 nt, Human
ggauuuaaaagccugc

SEQ ID NO: 1264014 - RNA, 17 nt, Human
ggauuuaaaagccugcu

SEQ ID NO: 1264015 - RNA, 18 nt, Human
ggauuuaaaagccugcuc

SEQ ID NO: 1264016 - RNA, 19 nt, Human
ggauuuaaaagccugcuca

SEQ ID NO: 1264017 - RNA, 19 nt, Human
ggauggucuuacagcaggc

SEQ ID NO: 1264018 - RNA, 21 nt, Human
ggaucucccugagaugggcuu

SEQ ID NO: 1264019 - RNA, 22 nt, Human
ggaucucuucuuaauguacaua

SEQ ID NO: 1264020 - RNA, 21 nt, Human
ggaucucuucuuaauguacau

SEQ ID NO: 1264021 - RNA, 16 nt, Human
ggauccuguguggaga

SEQ ID NO: 1264022 - RNA, 14 nt, Human
ggaucuauuucaug

SEQ ID NO: 1264023 - RNA, 21 nt, Human
ggaucuauuucauguuuuuga

SEQ ID NO: 1264024 - RNA, 15 nt, Human
ggaucucaccaggca

SEQ ID NO: 1264025 - RNA, 16 nt, Human
ggaucucaccaggcag

SEQ ID NO: 1264026 - RNA, 17 nt, Human
ggaucucaccaggcagc

SEQ ID NO: 1264027 - RNA, 22 nt, Human
ggaucucaccaggcagccucug

SEQ ID NO: 1264028 - RNA, 17 nt, Human
ggaucucauuggacccu

SEQ ID NO: 1264029 - RNA, 24 nt, Human
ggaucucauuggacccuuccaugg

SEQ ID NO: 1264030 - RNA, 23 nt, Human
ggcaucaucucagcucacugcaa

SEQ ID NO: 1264031 - RNA, 17 nt, Human
ggcaucaucucagcuca

SEQ ID NO: 1264032 - RNA, 20 nt, Human
ggcaucaguguccuuggcag

SEQ ID NO: 1264033 - RNA, 16 nt, Human
ggcauccagagucccu

SEQ ID NO: 1264034 - RNA, 18 nt, Human
ggcauccagagucccugc

SEQ ID NO: 1264035 - RNA, 22 nt, Human
ggcaucggggagccgggagccu

SEQ ID NO: 1264036 - RNA, 18 nt, Human
ggcaucgcaccauucuga

SEQ ID NO: 1264037 - RNA, 21 nt, Human
ggcaucgcaccauucugacuc

SEQ ID NO: 1264038 - RNA, 20 nt, Human
ggcaucgcaauguaagacuc

SEQ ID NO: 1264039 - RNA, 12 nt, Human
ggcauuuccugg

SEQ ID NO: 1264040 - RNA, 15 nt, Human
ggcauuuccugggug

SEQ ID NO: 1264041 - RNA, 18 nt, Human
ggcauuuccuggguggcu

SEQ ID NO: 1264042 - RNA, 16 nt, Human
ggcauuuccugggugg

SEQ ID NO: 1264043 - RNA, 20 nt, Human
ggcauuugcaggguccucuu

SEQ ID NO: 1264044 - RNA, 21 nt, Human
ggcauuugcaggguccucuuc

SEQ ID NO: 1264045 - RNA, 23 nt, Human
ggcaucggggagccgggagccug

SEQ ID NO: 1264046 - RNA, 16 nt, Human
ggccagaccauggaca

SEQ ID NO: 1264047 - RNA, 15 nt, Human
ggccaagcugaggug

SEQ ID NO: 1264048 - RNA, 20 nt, Human
ggccaagcugaggugcccag

SEQ ID NO: 1264049 - RNA, 22 nt, Human
ggccaagcugaggugcccagga

SEQ ID NO: 1264050 - RNA, 23 nt, Human
ggccaagcugaggugcccaggag

SEQ ID NO: 1264051 - RNA, 15 nt, Human
ggccaaggaccugag

SEQ ID NO: 1264052 - RNA, 19 nt, Human
ggccaaggaccugagaccu

SEQ ID NO: 1264053 - RNA, 16 nt, Human
ggccaaggaccugaga

SEQ ID NO: 1264054 - RNA, 21 nt, Human
ggccagaggcccccagcccag

SEQ ID NO: 1264055 - RNA, 18 nt, Human
ggcauuuuacuguacaga

SEQ ID NO: 1264056 - RNA, 17 nt, Human
ggcauuuguuucuuucu

SEQ ID NO: 1264057 - RNA, 23 nt, Human
ggcauuuguuucuuucucugagg

SEQ ID NO: 1264058 - RNA, 22 nt, Human
ggccaagagaugcagugccagg

SEQ ID NO: 1264059 - RNA, 19 nt, Human
ggccaagagaaacuuccua

SEQ ID NO: 1264060 - RNA, 15 nt, Human
ggccaagaagcagug

SEQ ID NO: 1264061 - RNA, 13 nt, Human
ggcaggggcuucc

SEQ ID NO: 1264062 - RNA, 14 nt, Human
ggcaggggcuuccu

SEQ ID NO: 1264063 - RNA, 15 nt, Human
ggcaggggcuuccug

SEQ ID NO: 1264064 - RNA, 12 nt, Human
ggcagggggcug

SEQ ID NO: 1264065 - RNA, 13 nt, Human
ggcagggggcugc

SEQ ID NO: 1264066 - RNA, 14 nt, Human
ggcagggggcugcu

SEQ ID NO: 1264067 - RNA, 15 nt, Human
ggcagggggcugcug

SEQ ID NO: 1264068 - RNA, 16 nt, Human
ggcagggggcugcugc

SEQ ID NO: 1264069 - RNA, 17 nt, Human
ggcagggggcugcugcu

SEQ ID NO: 1264070 - RNA, 18 nt, Human
ggcagggggcugcugcug

SEQ ID NO: 1264071 - RNA, 22 nt, Human
ggcagggggcugcugcugggcu

SEQ ID NO: 1264072 - RNA, 14 nt, Human
ggauuuauuuaaaa

SEQ ID NO: 1264073 - RNA, 19 nt, Human
ggauuuauuuaaaauagca

SEQ ID NO: 1264074 - RNA, 14 nt, Human
ggauuuauuuuucc

SEQ ID NO: 1264075 - RNA, 20 nt, Human
ggauuucaugauuucauuuc

SEQ ID NO: 1264076 - RNA, 23 nt, Human
ggauuuccugcuuugggaagccg

SEQ ID NO: 1264077 - RNA, 11 nt, Human
ggcaaaagcuu

SEQ ID NO: 1264078 - RNA, 12 nt, Human
ggauuuuuacca

SEQ ID NO: 1264079 - RNA, 23 nt, Human
ggauuuuuguuuuguuuuuacaa

SEQ ID NO: 1264080 - RNA, 12 nt, Human
ggauuuuuucca

SEQ ID NO: 1264081 - RNA, 12 nt, Human
ggcaaaacucua

SEQ ID NO: 1264082 - RNA, 13 nt, Human
ggcaccagacacc

SEQ ID NO: 1264083 - RNA, 14 nt, Human
ggcacugcuaggcu

SEQ ID NO: 1264084 - RNA, 14 nt, Human
ggcacacagcuacu

SEQ ID NO: 1264085 - RNA, 14 nt, Human
ggcagccccaggcc

SEQ ID NO: 1264086 - RNA, 16 nt, Human
ggcagccucuucaaaa

SEQ ID NO: 1264087 - RNA, 18 nt, Human
ggcagccccaggccaaag

SEQ ID NO: 1264088 - RNA, 16 nt, Human
ggcagccucugggggg

SEQ ID NO: 1264089 - RNA, 19 nt, Human
ggcagccucuggggggugg

SEQ ID NO: 1264090 - RNA, 20 nt, Human
ggcagccucugggggguggc

SEQ ID NO: 1264091 - RNA, 23 nt, Human
ggcagccucugggggguggccag

SEQ ID NO: 1264092 - RNA, 15 nt, Human
ggcagcccagccagc

SEQ ID NO: 1264093 - RNA, 16 nt, Human
ggcagcccagccagcg

SEQ ID NO: 1264094 - RNA, 18 nt, Human
ggcagcccagccagcguc

SEQ ID NO: 1264095 - RNA, 22 nt, Human
ggcagcagugugaggccagggc

SEQ ID NO: 1264096 - RNA, 17 nt, Human
ggcagcauccccuugaa

SEQ ID NO: 1264097 - RNA, 20 nt, Human
ggcagccacacuucucagga

SEQ ID NO: 1264098 - RNA, 21 nt, Human
ggcagccacacuucucaggac

SEQ ID NO: 1264099 - RNA, 11 nt, Human
ggcagccagac

SEQ ID NO: 1264100 - RNA, 13 nt, Human
ggcagccagacca

SEQ ID NO: 1264101 - RNA, 14 nt, Human
ggcagccagaccag

SEQ ID NO: 1264102 - RNA, 15 nt, Human
ggcagccagaccagc

SEQ ID NO: 1264103 - RNA, 16 nt, Human
ggcagccagcaucugg

SEQ ID NO: 1264104 - RNA, 19 nt, Human
ggcagccagcaucugggcc

SEQ ID NO: 1264105 - RNA, 21 nt, Human
ggcagccagggagagcccagg

SEQ ID NO: 1264106 - RNA, 20 nt, Human
ggcagccagcaucugggccu

SEQ ID NO: 1264107 - RNA, 15 nt, Human
ggcagccagugcccu

SEQ ID NO: 1264108 - RNA, 17 nt, Human
ggcagccagugcccuga

SEQ ID NO: 1264109 - RNA, 19 nt, Human
ggcagccagugcccugagc

SEQ ID NO: 1264110 - RNA, 20 nt, Human
ggcagccagugcccugagcc

SEQ ID NO: 1264111 - RNA, 22 nt, Human
ggcagccagugcccugagccag

SEQ ID NO: 1264112 - RNA, 23 nt, Human
ggcagccagugcccugagccagg

SEQ ID NO: 1264113 - RNA, 11 nt, Human
ggcagcccagc

SEQ ID NO: 1264114 - RNA, 12 nt, Human
ggcagcccagcc

SEQ ID NO: 1264115 - RNA, 13 nt, Human
ggcagcccagcca

SEQ ID NO: 1264116 - RNA, 14 nt, Human
ggcagcccagccag

SEQ ID NO: 1264117 - RNA, 14 nt, Human
ggcagccuugugau

SEQ ID NO: 1264118 - RNA, 14 nt, Human
ggcaggagggaggu

SEQ ID NO: 1264119 - RNA, 14 nt, Human
ggcagcgccaggcu

SEQ ID NO: 1264120 - RNA, 21 nt, Human
ggcagcgccaggcugaccaca

SEQ ID NO: 1264121 - RNA, 14 nt, Human
ggcaggaguagcug

SEQ ID NO: 1264122 - RNA, 17 nt, Human
ggcaggaguagcugagc

SEQ ID NO: 1264123 - RNA, 18 nt, Human
ggcaggaguagcugagcu

SEQ ID NO: 1264124 - RNA, 19 nt, Human
ggcaggaguagcugagcuc

SEQ ID NO: 1264125 - RNA, 15 nt, Human
ggcaggauuggggaa

SEQ ID NO: 1264126 - RNA, 22 nt, Human
ggcaggauuggggaagagagcc

SEQ ID NO: 1264127 - RNA, 17 nt, Human
ggcaggauuggggaaga

SEQ ID NO: 1264128 - RNA, 14 nt, Human
ggcaggcugggcca

SEQ ID NO: 1264129 - RNA, 15 nt, Human
ggcaggcugggccau

SEQ ID NO: 1264130 - RNA, 16 nt, Human
ggcaggcugggccaug

SEQ ID NO: 1264131 - RNA, 22 nt, Human
ggcaggcugggccauguccaaa

SEQ ID NO: 1264132 - RNA, 17 nt, Human
ggcagggaacaugggga

SEQ ID NO: 1264133 - RNA, 18 nt, Human
ggcagggaacauggggag

SEQ ID NO: 1264134 - RNA, 20 nt, Human
ggcagggaacauggggagga

SEQ ID NO: 1264135 - RNA, 14 nt, Human
ggcagggaccacac

SEQ ID NO: 1264136 - RNA, 12 nt, Human
ggcaggggccgg

SEQ ID NO: 1264137 - RNA, 21 nt, Human
ggcaggggccuccaugggccc

SEQ ID NO: 1264138 - RNA, 14 nt, Human
ggcaggggccugga

SEQ ID NO: 1264139 - RNA, 16 nt, Human
ggcaggggccuggaga

SEQ ID NO: 1264140 - RNA, 17 nt, Human
ggcaggggccuggagau

SEQ ID NO: 1264141 - RNA, 16 nt, Human
ggcagggccccaggca

SEQ ID NO: 1264142 - RNA, 10 nt, Human
ggcagggagg

SEQ ID NO: 1264143 - RNA, 22 nt, Human
ggcagggagcggccggccagcc

SEQ ID NO: 1264144 - RNA, 17 nt, Human
ggcagggagggccuggg

SEQ ID NO: 1264145 - RNA, 18 nt, Human
ggcagggagggccugggc

SEQ ID NO: 1264146 - RNA, 19 nt, Human
ggcagggagggccugggcc

SEQ ID NO: 1264147 - RNA, 20 nt, Human
ggcagggagggccugggccc

SEQ ID NO: 1264148 - RNA, 17 nt, Human
gguuuucacauuggaaa

SEQ ID NO: 1264149 - RNA, 17 nt, Human
gguuuuaauuuaguaaa

SEQ ID NO: 1264150 - RNA, 15 nt, Human
gguuuuagguucuaa

SEQ ID NO: 1264151 - RNA, 16 nt, Human
gguuuuagguucuaaa

SEQ ID NO: 1264152 - RNA, 17 nt, Human
gguuuuauaaggcugau

SEQ ID NO: 1264153 - RNA, 15 nt, Human
gguuugguguauggu

SEQ ID NO: 1264154 - RNA, 22 nt, Human
gguuugguuugcagcgacuggc

SEQ ID NO: 1264155 - RNA, 14 nt, Human
gguuuuaacuuugu

SEQ ID NO: 1264156 - RNA, 15 nt, Human
gguuuuaacuuuguu

SEQ ID NO: 1264157 - RNA, 21 nt, Human
gguuuuaauuuaguaaaccaa

SEQ ID NO: 1264158 - RNA, 16 nt, Human
gguuuccugcccuggg

SEQ ID NO: 1264159 - RNA, 19 nt, Human
gguuuccugcccugggagg

SEQ ID NO: 1264160 - RNA, 19 nt, Human
gguuucccuacugaagccc

SEQ ID NO: 1264161 - RNA, 21 nt, Human
gguuucuaagcauaaaagaug

SEQ ID NO: 1264162 - RNA, 12 nt, Human
gguuuccugccc

SEQ ID NO: 1264163 - RNA, 13 nt, Human
gguuuccugcccu

SEQ ID NO: 1264164 - RNA, 15 nt, Human
gguuuccugcccugg

SEQ ID NO: 1264165 - RNA, 22 nt, Human
gguucucaauuccaacaguuua

SEQ ID NO: 1264166 - RNA, 21 nt, Human
gguucucaauuccaacaguuu

SEQ ID NO: 1264167 - RNA, 13 nt, Human
gguuucagcacua

SEQ ID NO: 1264168 - RNA, 19 nt, Human
gguuucagcacuagccaaa

SEQ ID NO: 1264169 - RNA, 17 nt, Human
gguuucagcacuagcca

SEQ ID NO: 1264170 - RNA, 16 nt, Human
gguuucauguuaguua

SEQ ID NO: 1264171 - RNA, 17 nt, Human
aaaguauguuagugcaa

SEQ ID NO: 1264172 - RNA, 17 nt, Human
aaagugggcuugauucu

SEQ ID NO: 1264173 - RNA, 22 nt, Human
aaaguggguuuuuuaguugaau

SEQ ID NO: 1264174 - RNA, 16 nt, Human
aaaguauguauuauuu

SEQ ID NO: 1264175 - RNA, 17 nt, Human
aaaguauguauuauuua

SEQ ID NO: 1264176 - RNA, 19 nt, Human
aaaguauguauuauuuaca

SEQ ID NO: 1264177 - RNA, 17 nt, Human
aaaguggguuuuuuagu

SEQ ID NO: 1264178 - RNA, 19 nt, Human
aaaguacaaccauagagga

SEQ ID NO: 1264179 - RNA, 15 nt, Human
aaaguacacucugcu

SEQ ID NO: 1264180 - RNA, 17 nt, Human
aaaguacacucugcugu

SEQ ID NO: 1264181 - RNA, 14 nt, Human
aaaguacuuguagu

SEQ ID NO: 1264182 - RNA, 15 nt, Human
aaaguacuuguaguu

SEQ ID NO: 1264183 - RNA, 16 nt, Human
aaaguacuuguaguuc

SEQ ID NO: 1264184 - RNA, 22 nt, Human
gguggggggggggcgcggcugg

SEQ ID NO: 1264185 - RNA, 21 nt, Human
gguggggagagacgggcccug

SEQ ID NO: 1264186 - RNA, 16 nt, Human
gguguggagccgaggc

SEQ ID NO: 1264187 - RNA, 12 nt, Human
gguguggcuccu

SEQ ID NO: 1264188 - RNA, 14 nt, Human
ggugugguacagag

SEQ ID NO: 1264189 - RNA, 15 nt, Human
ggugugguacagaga

SEQ ID NO: 1264190 - RNA, 16 nt, Human
ggugugguacagagaa

SEQ ID NO: 1264191 - RNA, 17 nt, Human
ggugugguacagagaag

SEQ ID NO: 1264192 - RNA, 19 nt, Human
ggugugguacagagaagcc

SEQ ID NO: 1264193 - RNA, 20 nt, Human
ggugugguacagagaagcca

SEQ ID NO: 1264194 - RNA, 23 nt, Human
ggugugguacagagaagccagcu

SEQ ID NO: 1264195 - RNA, 21 nt, Human
ggugugguacagagaagccag

SEQ ID NO: 1264196 - RNA, 23 nt, Human
ggugugucccccucuguccaggc

SEQ ID NO: 1264197 - RNA, 12 nt, Human
ggugugucugcu

SEQ ID NO: 1264198 - RNA, 13 nt, Human
gguguuaacagaa

SEQ ID NO: 1264199 - RNA, 15 nt, Human
gguguuaacagaagg

SEQ ID NO: 1264200 - RNA, 14 nt, Human
gguguuaauuuuug

SEQ ID NO: 1264201 - RNA, 21 nt, Human
gguguuaucaccgugggcucc

SEQ ID NO: 1264202 - RNA, 22 nt, Human
gguguuauuuggaaccuuguuu

SEQ ID NO: 1264203 - RNA, 12 nt, Human
gguguuauuugg

SEQ ID NO: 1264204 - RNA, 11 nt, Human
gguguucuaag

SEQ ID NO: 1264205 - RNA, 21 nt, Human
gguguugccaaauauguccug

SEQ ID NO: 1264206 - RNA, 22 nt, Human
gguguugccaaauauguccugg

SEQ ID NO: 1264207 - RNA, 13 nt, Human
gguguucuaagau

SEQ ID NO: 1264208 - RNA, 17 nt, Human
gguguugccaguugucc

SEQ ID NO: 1264209 - RNA, 13 nt, Human
gguucccaagcuc

SEQ ID NO: 1264210 - RNA, 16 nt, Human
gguucccaagcucaga

SEQ ID NO: 1264211 - RNA, 15 nt, Human
gguuccgcuuggagc

SEQ ID NO: 1264212 - RNA, 21 nt, Human
gguuccgcuuggagcagaggg

SEQ ID NO: 1264213 - RNA, 22 nt, Human
gguuccgcuuggagcagagggg

SEQ ID NO: 1264214 - RNA, 23 nt, Human
gguuccgcuuggagcagaggggc

SEQ ID NO: 1264215 - RNA, 16 nt, Human
gguuccggcauggaca

SEQ ID NO: 1264216 - RNA, 15 nt, Human
gguuccuuuuauuag

SEQ ID NO: 1264217 - RNA, 14 nt, Human
gguucuaaaaggug

SEQ ID NO: 1264218 - RNA, 11 nt, Human
gguucuaaagu

SEQ ID NO: 1264219 - RNA, 12 nt, Human
gguucuaaaguu

SEQ ID NO: 1264220 - RNA, 13 nt, Human
gguucuaaaguuc

SEQ ID NO: 1264221 - RNA, 14 nt, Human
gguucuaaaguucu

SEQ ID NO: 1264222 - RNA, 15 nt, Human
gguucuaaaguucua

SEQ ID NO: 1264223 - RNA, 17 nt, Human
gguucuaaaguucuaag

SEQ ID NO: 1264224 - RNA, 22 nt, Human
gguucuaaaguucuaagauucu

SEQ ID NO: 1264225 - RNA, 11 nt, Human
gguucuaaggc

SEQ ID NO: 1264226 - RNA, 12 nt, Human
gguucuaaggcc

SEQ ID NO: 1264227 - RNA, 23 nt, Human
gguucuaaggccuaggauucuaa

SEQ ID NO: 1264228 - RNA, 15 nt, Human
gguucuagguuucaa

SEQ ID NO: 1264229 - RNA, 21 nt, Human
aaaguaaaaacaaagaaauua

SEQ ID NO: 1264230 - RNA, 12 nt, Human
aaagguuuuuuu

SEQ ID NO: 1264231 - RNA, 18 nt, Human
aaagguuuuuuuucaguu

SEQ ID NO: 1264232 - RNA, 22 nt, Human
aaagguuuaaaugaacaagaga

SEQ ID NO: 1264233 - RNA, 20 nt, Human
aaagguuuaagaaauagaau

SEQ ID NO: 1264234 - RNA, 15 nt, Human
aaagguuuacagaau

SEQ ID NO: 1264235 - RNA, 16 nt, Human
aaagguuuacagaauu

SEQ ID NO: 1264236 - RNA, 16 nt, Human
aaagguuuaugaaaaa

SEQ ID NO: 1264237 - RNA, 18 nt, Human
aaagguuuaugaaaaaga

SEQ ID NO: 1264238 - RNA, 22 nt, Human
aaagguuuaugaaaaagaagaa

SEQ ID NO: 1264239 - RNA, 21 nt, Human
aaagguuuggaaggagcagaa

SEQ ID NO: 1264240 - RNA, 19 nt, Human
aaagguuuaugaaaaagaa

SEQ ID NO: 1264241 - RNA, 14 nt, Human
aaagguuuuccucu

SEQ ID NO: 1264242 - RNA, 23 nt, Human
gguggcuuuugcgguucaggaaa

SEQ ID NO: 1264243 - RNA, 14 nt, Human
gguggcuuuugcgg

SEQ ID NO: 1264244 - RNA, 16 nt, Human
ggugggcugguaucuc

SEQ ID NO: 1264245 - RNA, 12 nt, Human
ggugggccuggu

SEQ ID NO: 1264246 - RNA, 18 nt, Human
aaagguucaugcaaacuu

SEQ ID NO: 1264247 - RNA, 19 nt, Human
aaaggugugagacugggaa

SEQ ID NO: 1264248 - RNA, 17 nt, Human
aaaggugugagacuggg

SEQ ID NO: 1264249 - RNA, 19 nt, Human
aaagguuagagaauaaauu

SEQ ID NO: 1264250 - RNA, 13 nt, Human
aaagguucuaggu

SEQ ID NO: 1264251 - RNA, 20 nt, Human
aaagguucuagguuucaaag

SEQ ID NO: 1264252 - RNA, 21 nt, Human
aaagguucuagguuucaaaga

SEQ ID NO: 1264253 - RNA, 13 nt, Human
aaagguuuaaaug

SEQ ID NO: 1264254 - RNA, 14 nt, Human
aaagguuuaaauga

SEQ ID NO: 1264255 - RNA, 16 nt, Human
aaagguuuaaaugaac

SEQ ID NO: 1264256 - RNA, 18 nt, Human
aaagguuuaaaugaacaa

SEQ ID NO: 1264257 - RNA, 20 nt, Human
aaagguuuaaaugaacaaga

SEQ ID NO: 1264258 - RNA, 21 nt, Human
aaagguuuaaaugaacaagag

SEQ ID NO: 1264259 - RNA, 23 nt, Human
aaaggggucggcugaccaugcuc

SEQ ID NO: 1264260 - RNA, 24 nt, Human
aaaggggucggcugaccaugcuca

SEQ ID NO: 1264261 - RNA, 23 nt, Human
aaaggugacaucggaaaaauaau

SEQ ID NO: 1264262 - RNA, 20 nt, Human
aaagggcuguuauaaucuuu

SEQ ID NO: 1264263 - RNA, 22 nt, Human
aaagggcuguuauaaucuuuca

SEQ ID NO: 1264264 - RNA, 17 nt, Human
aaagggcccuccuuccu

SEQ ID NO: 1264265 - RNA, 11 nt, Human
aaaggggagac

SEQ ID NO: 1264266 - RNA, 14 nt, Human
aaagggggauuccc

SEQ ID NO: 1264267 - RNA, 16 nt, Human
aaagcuuaaaacuuug

SEQ ID NO: 1264268 - RNA, 19 nt, Human
aaagggcccuccuuccuaa

SEQ ID NO: 1264269 - RNA, 14 nt, Human
aaagcuuaaaacuu

SEQ ID NO: 1264270 - RNA, 15 nt, Human
aaagcuuaaaacuuu

SEQ ID NO: 1264271 - RNA, 19 nt, Human
aaagcuuaaaacuuugaag

SEQ ID NO: 1264272 - RNA, 13 nt, Human
gguggcagcaaca

SEQ ID NO: 1264273 - RNA, 14 nt, Human
gguggcagcaacaa

SEQ ID NO: 1264274 - RNA, 14 nt, Human
aaagcagagauuuu

SEQ ID NO: 1264275 - RNA, 15 nt, Human
aaagcagagauuuuc

SEQ ID NO: 1264276 - RNA, 16 nt, Human
aaagcagagauuuuca

SEQ ID NO: 1264277 - RNA, 14 nt, Human
aaagcagaggccaa

SEQ ID NO: 1264278 - RNA, 16 nt, Human
aaagcagaacagugau

SEQ ID NO: 1264279 - RNA, 15 nt, Human
gguggacucgccugu

SEQ ID NO: 1264280 - RNA, 19 nt, Human
aaacuuuaugcuaagugaa

SEQ ID NO: 1264281 - RNA, 12 nt, Human
aaacuuuaugcu

SEQ ID NO: 1264282 - RNA, 17 nt, Human
ggugcugccucuaccug

SEQ ID NO: 1264283 - RNA, 23 nt, Human
ggugcuggagguuggaucuugau

SEQ ID NO: 1264284 - RNA, 12 nt, Human
ggugcugggaga

SEQ ID NO: 1264285 - RNA, 18 nt, Human
ggugcugggagaggcagc

SEQ ID NO: 1264286 - RNA, 19 nt, Human
ggugcugggagaggcagcc

SEQ ID NO: 1264287 - RNA, 14 nt, Human
aaagcuguguggca

SEQ ID NO: 1264288 - RNA, 18 nt, Human
aaagcuguguguuuggaa

SEQ ID NO: 1264289 - RNA, 14 nt, Human
aaagcugauuuuuu

SEQ ID NO: 1264290 - RNA, 18 nt, Human
aaagcugguuuaauguuu

SEQ ID NO: 1264291 - RNA, 15 nt, Human
aaagcaguauuuuuc

SEQ ID NO: 1264292 - RNA, 16 nt, Human
aaagcaguauuuuucu

SEQ ID NO: 1264293 - RNA, 13 nt, Human
aaagcuagaauug

SEQ ID NO: 1264294 - RNA, 14 nt, Human
aaagcuagaauuga

SEQ ID NO: 1264295 - RNA, 20 nt, Human
aaagcuagaauugaguguuu

SEQ ID NO: 1264296 - RNA, 18 nt, Human
aaagcugacuuggcuggu

SEQ ID NO: 1264297 - RNA, 17 nt, Human
aaagcagccuggccaac

SEQ ID NO: 1264298 - RNA, 19 nt, Human
aaagcagaauaguauuuuu

SEQ ID NO: 1264299 - RNA, 12 nt, Human
aaagcagccacg

SEQ ID NO: 1264300 - RNA, 15 nt, Human
aaagcagccacgagg

SEQ ID NO: 1264301 - RNA, 21 nt, Human
aaagcagguugauaaaucauu

SEQ ID NO: 1264302 - RNA, 22 nt, Human
aaagcagguucuuguuggugca

SEQ ID NO: 1264303 - RNA, 17 nt, Human
aaagcagguucuuguug

SEQ ID NO: 1264304 - RNA, 19 nt, Human
aaagcagguucuuguuggu

SEQ ID NO: 1264305 - RNA, 17 nt, Human
aaagcagguuucaagga

SEQ ID NO: 1264306 - RNA, 14 nt, Human
aaagcagguucuug

SEQ ID NO: 1264307 - RNA, 15 nt, Human
aaagcagguucuugu

SEQ ID NO: 1264308 - RNA, 16 nt, Human
aaagcagguucuuguu

SEQ ID NO: 1264309 - RNA, 14 nt, Human
aaauauauaucaaa

SEQ ID NO: 1264310 - RNA, 18 nt, Human
aaauauaugcuaagucuu

SEQ ID NO: 1264311 - RNA, 12 nt, Human
aaauauauauua

SEQ ID NO: 1264312 - RNA, 13 nt, Human
aaauauauauuau

SEQ ID NO: 1264313 - RNA, 14 nt, Human
aaauauauauuaua

SEQ ID NO: 1264314 - RNA, 17 nt, Human
aaauauauauuauacuu

SEQ ID NO: 1264315 - RNA, 22 nt, Human
aaauauauauuauacuuguaau

SEQ ID NO: 1264316 - RNA, 12 nt, Human
aaauauauuauu

SEQ ID NO: 1264317 - RNA, 13 nt, Human
aaauauauuauua

SEQ ID NO: 1264318 - RNA, 16 nt, Human
aaauauauuauuacuu

SEQ ID NO: 1264319 - RNA, 19 nt, Human
aaauauauuauuacuugua

SEQ ID NO: 1264320 - RNA, 23 nt, Human
aaauauauuauuacuuguaaaua

SEQ ID NO: 1264321 - RNA, 12 nt, Human
aaauauauuuaa

SEQ ID NO: 1264322 - RNA, 20 nt, Human
aaauauauuuaagauaauua

SEQ ID NO: 1264323 - RNA, 21 nt, Human
aaauauauuuaagauaauuau

SEQ ID NO: 1264324 - RNA, 22 nt, Human
aaauauauuuuaagacgaaaca

SEQ ID NO: 1264325 - RNA, 16 nt, Human
aaauauauuuuaagac

SEQ ID NO: 1264326 - RNA, 22 nt, Human
aaauauauuuaagauaauuaua

SEQ ID NO: 1264327 - RNA, 21 nt, Human
aaauauauuauuacuuguaaa

SEQ ID NO: 1264328 - RNA, 22 nt, Human
aaauaucacuugucaauaaaau

SEQ ID NO: 1264329 - RNA, 20 nt, Human
aaauaucccuccuguuggga

SEQ ID NO: 1264330 - RNA, 23 nt, Human
aaauaucccuccuguugggagag

SEQ ID NO: 1264331 - RNA, 17 nt, Human
aaauaucuauguuuuac

SEQ ID NO: 1264332 - RNA, 20 nt, Human
aaauacgugggcauucaaau

SEQ ID NO: 1264333 - RNA, 21 nt, Human
aaauacgugggcauucaaaug

SEQ ID NO: 1264334 - RNA, 22 nt, Human
aaauacgugggcauucaaaugu

SEQ ID NO: 1264335 - RNA, 15 nt, Human
aaauacggugggggu

SEQ ID NO: 1264336 - RNA, 23 nt, Human
aaauauacuuuuacaaguaacaa

SEQ ID NO: 1264337 - RNA, 18 nt, Human
aaauauagaucaguuaua

SEQ ID NO: 1264338 - RNA, 22 nt, Human
aaauauacuuuuacaaguaaca

SEQ ID NO: 1264339 - RNA, 12 nt, Human
aaauauauacua

SEQ ID NO: 1264340 - RNA, 16 nt, Human
aaauauauacuaaaca

SEQ ID NO: 1264341 - RNA, 14 nt, Human
aaauauauacucaa

SEQ ID NO: 1264342 - RNA, 20 nt, Human
guacacaauaagcaaaaaca

SEQ ID NO: 1264343 - RNA, 18 nt, Human
guacacaauaagcaaaaa

SEQ ID NO: 1264344 - RNA, 16 nt, Human
guacacagcaccagaa

SEQ ID NO: 1264345 - RNA, 20 nt, Human
aaauauuccugcauuuguga

SEQ ID NO: 1264346 - RNA, 18 nt, Human
aaaucagcuauuuuguga

SEQ ID NO: 1264347 - RNA, 16 nt, Human
aaauaugccuuuuuga

SEQ ID NO: 1264348 - RNA, 15 nt, Human
aaauauggacacuua

SEQ ID NO: 1264349 - RNA, 16 nt, Human
aaauauggacacuuaa

SEQ ID NO: 1264350 - RNA, 20 nt, Human
aaauauggacacuuaauacu

SEQ ID NO: 1264351 - RNA, 18 nt, Human
aaauauggacugcucagg

SEQ ID NO: 1264352 - RNA, 19 nt, Human
aaauauggucuuuugguua

SEQ ID NO: 1264353 - RNA, 13 nt, Human
aaauauguaccaa

SEQ ID NO: 1264354 - RNA, 17 nt, Human
aaauauguauaacuuua

SEQ ID NO: 1264355 - RNA, 16 nt, Human
aaauauguccuggggu

SEQ ID NO: 1264356 - RNA, 15 nt, Human
aaauaucuugaaagg

SEQ ID NO: 1264357 - RNA, 17 nt, Human
aaauaugaagaacugag

SEQ ID NO: 1264358 - RNA, 20 nt, Human
aaauaugaagacauaaaccc

SEQ ID NO: 1264359 - RNA, 15 nt, Human
aaauaugauguuaaa

SEQ ID NO: 1264360 - RNA, 21 nt, Human
aaauaugauguuaaaaaaaua

SEQ ID NO: 1264361 - RNA, 21 nt, Human
guaaagcccauuuuuaaaaua

SEQ ID NO: 1264362 - RNA, 24 nt, Human
guaaacugugcaccaagcaggaaa

SEQ ID NO: 1264363 - RNA, 20 nt, Human
guaaagcuaaaauaaagaaa

SEQ ID NO: 1264364 - RNA, 16 nt, Human
guaaagcuugucugau

SEQ ID NO: 1264365 - RNA, 22 nt, Human
guaaacuaucuuggugaauuuu

SEQ ID NO: 1264366 - RNA, 16 nt, Human
guaaacucaaaauauu

SEQ ID NO: 1264367 - RNA, 23 nt, Human
guaaacucaaaauauuuguacau

SEQ ID NO: 1264368 - RNA, 15 nt, Human
guaaagcuaaaauaa

SEQ ID NO: 1264369 - RNA, 14 nt, Human
guaaaguacuugua

SEQ ID NO: 1264370 - RNA, 15 nt, Human
guaaaguacuuguag

SEQ ID NO: 1264371 - RNA, 16 nt, Human
guaaaguacuuguagu

SEQ ID NO: 1264372 - RNA, 17 nt, Human
guaaaguacuuguaguu

SEQ ID NO: 1264373 - RNA, 22 nt, Human
guaaaguaucaggauacuauau

SEQ ID NO: 1264374 - RNA, 15 nt, Human
guaaaguauguauua

SEQ ID NO: 1264375 - RNA, 17 nt, Human
guaaaguauguauuauu

SEQ ID NO: 1264376 - RNA, 22 nt, Human
guaaaguauguauuauuuacau

SEQ ID NO: 1264377 - RNA, 23 nt, Human
guaaaguauguauuauuuacauu

SEQ ID NO: 1264378 - RNA, 15 nt, Human
guaaagucaaggaga

SEQ ID NO: 1264379 - RNA, 13 nt, Human
guaaauuuguacu

SEQ ID NO: 1264380 - RNA, 15 nt, Human
guaaauuuguacuau

SEQ ID NO: 1264381 - RNA, 20 nt, Human
guaaauuuguacuauuuaac

SEQ ID NO: 1264382 - RNA, 22 nt, Human
guaaauuuguacuauuuaacug

SEQ ID NO: 1264383 - RNA, 13 nt, Human
guaacaaaaauaa

SEQ ID NO: 1264384 - RNA, 13 nt, Human
guaacaagccaga

SEQ ID NO: 1264385 - RNA, 14 nt, Human
guaacaagccagau

SEQ ID NO: 1264386 - RNA, 15 nt, Human
guaacaagccagauu

SEQ ID NO: 1264387 - RNA, 16 nt, Human
guaacaagccagauuu

SEQ ID NO: 1264388 - RNA, 23 nt, Human
guaacaagccagauuuuuuaaaa

SEQ ID NO: 1264389 - RNA, 23 nt, Human
guaacauguguuaaguauuuuca

SEQ ID NO: 1264390 - RNA, 14 nt, Human
guaacauuugcugu

SEQ ID NO: 1264391 - RNA, 19 nt, Human
guaacauuugcuguuuuaa

SEQ ID NO: 1264392 - RNA, 22 nt, Human
guaacauuugcuguuuuaaaca

SEQ ID NO: 1264393 - RNA, 15 nt, Human
aaaguguauuuguua

SEQ ID NO: 1264394 - RNA, 18 nt, Human
aaagugucaacucuuugu

SEQ ID NO: 1264395 - RNA, 21 nt, Human
aaaguggguuuuuuaguugaa

SEQ ID NO: 1264396 - RNA, 14 nt, Human
aaaguguuuucucu

SEQ ID NO: 1264397 - RNA, 20 nt, Human
aaauaauguguaguucaugu

SEQ ID NO: 1264398 - RNA, 23 nt, Human
aaaguguuuucucugaacacauu

SEQ ID NO: 1264399 - RNA, 17 nt, Human
aaaguguuuucucugaa

SEQ ID NO: 1264400 - RNA, 21 nt, Human
aaaguguuuucucugaacaca

SEQ ID NO: 1264401 - RNA, 13 nt, Human
aaaguuaaguuga

SEQ ID NO: 1264402 - RNA, 21 nt, Human
aaauaauguguaguucaugua

SEQ ID NO: 1264403 - RNA, 21 nt, Human
aaauaauuauauaacuguauu

SEQ ID NO: 1264404 - RNA, 22 nt, Human
aaauaauuauauaacuguauuu

SEQ ID NO: 1264405 - RNA, 23 nt, Human
aaauaauuauauaacuguauuug

SEQ ID NO: 1264406 - RNA, 23 nt, Human
guaaaaugugggauuauggguca

SEQ ID NO: 1264407 - RNA, 20 nt, Human
guaaacaaacuguguaacug

SEQ ID NO: 1264408 - RNA, 11 nt, Human
guaaacaauau

SEQ ID NO: 1264409 - RNA, 19 nt, Human
guaaacagauggcacuuug

SEQ ID NO: 1264410 - RNA, 13 nt, Human
guaaguuuuuuga

SEQ ID NO: 1264411 - RNA, 19 nt, Human
guaaguugggcuugcuauu

SEQ ID NO: 1264412 - RNA, 17 nt, Human
guaaguugggcuugcua

SEQ ID NO: 1264413 - RNA, 18 nt, Human
guaaguugggcuugcuau

SEQ ID NO: 1264414 - RNA, 23 nt, Human
guaaguugggcuugcuauucugu

SEQ ID NO: 1264415 - RNA, 17 nt, Human
guaacuaacuaaaacaa

SEQ ID NO: 1264416 - RNA, 19 nt, Human
guaacuaacugcauacacu

SEQ ID NO: 1264417 - RNA, 16 nt, Human
guaacuaacuaaaaca

SEQ ID NO: 1264418 - RNA, 12 nt, Human
guaacuacuuua

SEQ ID NO: 1264419 - RNA, 14 nt, Human
guaacuacuuuaua

SEQ ID NO: 1264420 - RNA, 13 nt, Human
guaacucaucugu

SEQ ID NO: 1264421 - RNA, 18 nt, Human
guaaccucuucagaggcc

SEQ ID NO: 1264422 - RNA, 20 nt, Human
guaaccucuucagaggcccu

SEQ ID NO: 1264423 - RNA, 16 nt, Human
guaacgcgucuuccug

SEQ ID NO: 1264424 - RNA, 17 nt, Human
guaacgcgucuuccuga

SEQ ID NO: 1264425 - RNA, 13 nt, Human
guaacuaaaauaa

SEQ ID NO: 1264426 - RNA, 15 nt, Human
guaacuaaaauaauu

SEQ ID NO: 1264427 - RNA, 20 nt, Human
guaacuaaaauaauuuugua

SEQ ID NO: 1264428 - RNA, 22 nt, Human
guaacuaaaauaauuuuguaau

SEQ ID NO: 1264429 - RNA, 22 nt, Human
guaauaccucuaauaguauaaa

SEQ ID NO: 1264430 - RNA, 17 nt, Human
guaauacuucuugugug

SEQ ID NO: 1264431 - RNA, 18 nt, Human
guaauacuucuugugugu

SEQ ID NO: 1264432 - RNA, 21 nt, Human
guaauaccucuaauaguauaa

SEQ ID NO: 1264433 - RNA, 22 nt, Human
guaauacaaacuaauuuaguaa

SEQ ID NO: 1264434 - RNA, 12 nt, Human
guaauaauaaag

SEQ ID NO: 1264435 - RNA, 16 nt, Human
guaauaauaaagaaua

SEQ ID NO: 1264436 - RNA, 21 nt, Human
guaauaaaauucaacaaacau

SEQ ID NO: 1264437 - RNA, 20 nt, Human
guaauaaaauucaacaaaca

SEQ ID NO: 1264438 - RNA, 15 nt, Human
guaauaaacuuuaau

SEQ ID NO: 1264439 - RNA, 15 nt, Human
guaauaagguuuuaa

SEQ ID NO: 1264440 - RNA, 21 nt, Human
guaauaagguuuuaauuuagu

SEQ ID NO: 1264441 - RNA, 23 nt, Human
guaauacuucuuguguguaugca

SEQ ID NO: 1264442 - RNA, 19 nt, Human
guaauauugacuuguauau

SEQ ID NO: 1264443 - RNA, 20 nt, Human
guaauauugacuuguauauu

SEQ ID NO: 1264444 - RNA, 22 nt, Human
guaaucaaucuacucaaagcau

SEQ ID NO: 1264445 - RNA, 12 nt, Human
guacaaaauaaa

SEQ ID NO: 1264446 - RNA, 14 nt, Human
guacaaaauaaaca

SEQ ID NO: 1264447 - RNA, 16 nt, Human
guacaaaauaaacaaa

SEQ ID NO: 1264448 - RNA, 15 nt, Human
guaauuuuuuucacc

SEQ ID NO: 1264449 - RNA, 21 nt, Human
guacaaaaaaaucuuccaauu

SEQ ID NO: 1264450 - RNA, 22 nt, Human
guacaaccuguucugcuuuccu

SEQ ID NO: 1264451 - RNA, 23 nt, Human
guacaaccacacccacacucaga

SEQ ID NO: 1264452 - RNA, 15 nt, Human
guacaagaagcauuu

SEQ ID NO: 1264453 - RNA, 21 nt, Human
guacaagaagcauuuuguaag

SEQ ID NO: 1264454 - RNA, 15 nt, Human
guaaucgaccugccu

SEQ ID NO: 1264455 - RNA, 12 nt, Human
guaauccuguag

SEQ ID NO: 1264456 - RNA, 18 nt, Human
guaaucccugcuuuuugu

SEQ ID NO: 1264457 - RNA, 22 nt, Human
guaauccucaagaaauaaaagg

SEQ ID NO: 1264458 - RNA, 14 nt, Human
guaaucaauguuuc

SEQ ID NO: 1264459 - RNA, 13 nt, Human
guaaucccugcuu

SEQ ID NO: 1264460 - RNA, 17 nt, Human
guaaucgaccugccucg

SEQ ID NO: 1264461 - RNA, 18 nt, Human
gguaaguuuuuugaaauu

SEQ ID NO: 1264462 - RNA, 19 nt, Human
gguaagcaacauggcuuug

SEQ ID NO: 1264463 - RNA, 18 nt, Human
gguaacugcuuucuguuc

SEQ ID NO: 1264464 - RNA, 24 nt, Human
gguaacuuuugugaauuaggcugu

SEQ ID NO: 1264465 - RNA, 23 nt, Human
gguaagaaguuuuaaaaagccag

SEQ ID NO: 1264466 - RNA, 16 nt, Human
gguaagcaacauggcu

SEQ ID NO: 1264467 - RNA, 17 nt, Human
gguaagcaacauggcuu

SEQ ID NO: 1264468 - RNA, 21 nt, Human
gguaggaauagcaugucacua

SEQ ID NO: 1264469 - RNA, 17 nt, Human
gguaggagggugggaag

SEQ ID NO: 1264470 - RNA, 18 nt, Human
gguaggccaagguguccu

SEQ ID NO: 1264471 - RNA, 21 nt, Human
gguaggccaagguguccuaca

SEQ ID NO: 1264472 - RNA, 23 nt, Human
gguaggccaagguguccuacaga

SEQ ID NO: 1264473 - RNA, 24 nt, Human
gguaggccaagguguccuacagaa

SEQ ID NO: 1264474 - RNA, 14 nt, Human
gguaggggccccuc

SEQ ID NO: 1264475 - RNA, 18 nt, Human
gguaggggccccucucag

SEQ ID NO: 1264476 - RNA, 19 nt, Human
gguaggggccccucucagc

SEQ ID NO: 1264477 - RNA, 21 nt, Human
gguaggggccccucucagccc

SEQ ID NO: 1264478 - RNA, 11 nt, Human
gguaggggcug

SEQ ID NO: 1264479 - RNA, 13 nt, Human
gguaggggcuggg

SEQ ID NO: 1264480 - RNA, 14 nt, Human
gguaggggcuggga

SEQ ID NO: 1264481 - RNA, 16 nt, Human
gguaggggcugggaac

SEQ ID NO: 1264482 - RNA, 13 nt, Human
gguagggggcugg

SEQ ID NO: 1264483 - RNA, 17 nt, Human
gguagggggcuggagga

SEQ ID NO: 1264484 - RNA, 23 nt, Human
gguagggggcuggaggagcccag

SEQ ID NO: 1264485 - RNA, 13 nt, Human
gguagggguuggg

SEQ ID NO: 1264486 - RNA, 14 nt, Human
gguaggguaaauca

SEQ ID NO: 1264487 - RNA, 15 nt, Human
gguaggguaaaucag

SEQ ID NO: 1264488 - RNA, 16 nt, Human
gguaggguaaaucagu

SEQ ID NO: 1264489 - RNA, 11 nt, Human
gguaggguggg

SEQ ID NO: 1264490 - RNA, 23 nt, Human
gguagggugggccuucagggagu

SEQ ID NO: 1264491 - RNA, 15 nt, Human
gguagguucagccaa

SEQ ID NO: 1264492 - RNA, 16 nt, Human
gguagguucagccaag

SEQ ID NO: 1264493 - RNA, 17 nt, Human
gguagguucagccaagg

SEQ ID NO: 1264494 - RNA, 14 nt, Human
gguauaccucacuu

SEQ ID NO: 1264495 - RNA, 19 nt, Human
gguauaucuagguuuauga

SEQ ID NO: 1264496 - RNA, 21 nt, Human
gguauaucuagguuuaugaca

SEQ ID NO: 1264497 - RNA, 12 nt, Human
gguauauuuucc

SEQ ID NO: 1264498 - RNA, 18 nt, Human
gguagguucagccaaggu

SEQ ID NO: 1264499 - RNA, 19 nt, Human
gguagguucagccaagguu

SEQ ID NO: 1264500 - RNA, 23 nt, Human
gguauaguucaugucugcuauca

SEQ ID NO: 1264501 - RNA, 13 nt, Human
gguauauacuuug

SEQ ID NO: 1264502 - RNA, 16 nt, Human
gguauauccaaaagcu

SEQ ID NO: 1264503 - RNA, 14 nt, Human
ggucagugcaaaua

SEQ ID NO: 1264504 - RNA, 20 nt, Human
gguaugaacuugaggacaca

SEQ ID NO: 1264505 - RNA, 19 nt, Human
gguaugaacuugaggacac

SEQ ID NO: 1264506 - RNA, 16 nt, Human
gguaugaacuugagga

SEQ ID NO: 1264507 - RNA, 20 nt, Human
gguaucucagaaagugccug

SEQ ID NO: 1264508 - RNA, 18 nt, Human
gguauccccccaucuugc

SEQ ID NO: 1264509 - RNA, 15 nt, Human
gguaucucagaaagu

SEQ ID NO: 1264510 - RNA, 19 nt, Human
gguaucucagaaagugccu

SEQ ID NO: 1264511 - RNA, 15 nt, Human
aaacuuuaucacuua

SEQ ID NO: 1264512 - RNA, 14 nt, Human
aaacuucguuuaau

SEQ ID NO: 1264513 - RNA, 17 nt, Human
aaacuucguuuaaugaa

SEQ ID NO: 1264514 - RNA, 17 nt, Human
aaacuuccccaucuucu

SEQ ID NO: 1264515 - RNA, 11 nt, Human
gguccagcucu

SEQ ID NO: 1264516 - RNA, 12 nt, Human
gguccagcucug

SEQ ID NO: 1264517 - RNA, 13 nt, Human
gguccagcucugg

SEQ ID NO: 1264518 - RNA, 14 nt, Human
gguccagcucugga

SEQ ID NO: 1264519 - RNA, 15 nt, Human
gguccagcucuggag

SEQ ID NO: 1264520 - RNA, 16 nt, Human
gguccagcucuggagg

SEQ ID NO: 1264521 - RNA, 22 nt, Human
gguccagcucuggaggggaggg

SEQ ID NO: 1264522 - RNA, 11 nt, Human
gguccaggaga

SEQ ID NO: 1264523 - RNA, 13 nt, Human
gguccaggcugug

SEQ ID NO: 1264524 - RNA, 22 nt, Human
gguaaaucagacuaugaaguuu

SEQ ID NO: 1264525 - RNA, 15 nt, Human
gguaaaucaguaaga

SEQ ID NO: 1264526 - RNA, 22 nt, Human
ggguuuuuuaguugaauuuuuu

SEQ ID NO: 1264527 - RNA, 22 nt, Human
gguaaaaaaaaauuacuguuua

SEQ ID NO: 1264528 - RNA, 16 nt, Human
gguaaaaaauuuauaa

SEQ ID NO: 1264529 - RNA, 13 nt, Human
gguaaaacacuug

SEQ ID NO: 1264530 - RNA, 14 nt, Human
gguaaaaaauuuau

SEQ ID NO: 1264531 - RNA, 18 nt, Human
gguaaaacagggccacau

SEQ ID NO: 1264532 - RNA, 13 nt, Human
gguaaaauacuuc

SEQ ID NO: 1264533 - RNA, 23 nt, Human
gguaaaauacuuuuacucugccu

SEQ ID NO: 1264534 - RNA, 13 nt, Human
gguaaaaugccau

SEQ ID NO: 1264535 - RNA, 15 nt, Human
gguaaagacuggcuu

SEQ ID NO: 1264536 - RNA, 16 nt, Human
gguaaagacuggcuuu

SEQ ID NO: 1264537 - RNA, 20 nt, Human
gguaaaguuaaguugagaua

SEQ ID NO: 1264538 - RNA, 15 nt, Human
gguaaauaaaaagaa

SEQ ID NO: 1264539 - RNA, 19 nt, Human
gguaaauaaaaagaaaggc

SEQ ID NO: 1264540 - RNA, 23 nt, Human
ggguuuuuauuuccuaugaugua

SEQ ID NO: 1264541 - RNA, 18 nt, Human
ggguuuuguauucucuga

SEQ ID NO: 1264542 - RNA, 20 nt, Human
ggguguccccaacagcgccc

SEQ ID NO: 1264543 - RNA, 15 nt, Human
ggguggcugcagccu

SEQ ID NO: 1264544 - RNA, 17 nt, Human
ggguggcugcagccuca

SEQ ID NO: 1264545 - RNA, 15 nt, Human
gggugguggugauag

SEQ ID NO: 1264546 - RNA, 15 nt, Human
gggugguggccuggu

SEQ ID NO: 1264547 - RNA, 17 nt, Human
ggguguccugcaccggg

SEQ ID NO: 1264548 - RNA, 21 nt, Human
ggguguccugcaccggggccu

SEQ ID NO: 1264549 - RNA, 13 nt, Human
ggguggugucaga

SEQ ID NO: 1264550 - RNA, 18 nt, Human
ggguguaaaaccuggaga

SEQ ID NO: 1264551 - RNA, 13 nt, Human
aaacgcaucuagu

SEQ ID NO: 1264552 - RNA, 17 nt, Human
aaacuaaaaaauuaaac

SEQ ID NO: 1264553 - RNA, 14 nt, Human
aaacuaaaaacuag

SEQ ID NO: 1264554 - RNA, 19 nt, Human
aaacuaaagaaauuucuca

SEQ ID NO: 1264555 - RNA, 19 nt, Human
aaacuguuggaauggauuu

SEQ ID NO: 1264556 - RNA, 16 nt, Human
aaacuguuucuuuaaa

SEQ ID NO: 1264557 - RNA, 18 nt, Human
aaacuguuucuuuaaaau

SEQ ID NO: 1264558 - RNA, 16 nt, Human
aaacuuaaauguuauu

SEQ ID NO: 1264559 - RNA, 17 nt, Human
aaacuuaaauguuauua

SEQ ID NO: 1264560 - RNA, 21 nt, Human
aaacuuaaauguuauuaucug

SEQ ID NO: 1264561 - RNA, 15 nt, Human
aaacuuaagccaauu

SEQ ID NO: 1264562 - RNA, 16 nt, Human
aaacuuaauuuaauau

SEQ ID NO: 1264563 - RNA, 17 nt, Human
aaacuuaauuuaauauu

SEQ ID NO: 1264564 - RNA, 20 nt, Human
aaacuuaugcugauuuauuu

SEQ ID NO: 1264565 - RNA, 19 nt, Human
aaacuucagacauagaauu

SEQ ID NO: 1264566 - RNA, 18 nt, Human
ggguggcuacucugugcc

SEQ ID NO: 1264567 - RNA, 19 nt, Human
ggguggcuacucugugcca

SEQ ID NO: 1264568 - RNA, 20 nt, Human
ggguggcuacucugugccag

SEQ ID NO: 1264569 - RNA, 23 nt, Human
ggguggcuacucugugccagagc

SEQ ID NO: 1264570 - RNA, 13 nt, Human
ggguggcugcagc

SEQ ID NO: 1264571 - RNA, 10 nt, Human
aaaccacuuu

SEQ ID NO: 1264572 - RNA, 13 nt, Human
aaaccagcucagc

SEQ ID NO: 1264573 - RNA, 12 nt, Human
aaaccagcuucc

SEQ ID NO: 1264574 - RNA, 13 nt, Human
aaaccagcuuccu

SEQ ID NO: 1264575 - RNA, 16 nt, Human
aaaccagcuuccuuca

SEQ ID NO: 1264576 - RNA, 17 nt, Human
aaaccagcuuccuucag

SEQ ID NO: 1264577 - RNA, 18 nt, Human
aaaccagcuuccuucaga

SEQ ID NO: 1264578 - RNA, 19 nt, Human
aaaccagcuuccuucagag

SEQ ID NO: 1264579 - RNA, 16 nt, Human
aaaccaggacccuguc

SEQ ID NO: 1264580 - RNA, 20 nt, Human
aaaccagcuuccuucagaga

SEQ ID NO: 1264581 - RNA, 14 nt, Human
aaaccugcuuuuca

SEQ ID NO: 1264582 - RNA, 15 nt, Human
aaaccugcuuuucaa

SEQ ID NO: 1264583 - RNA, 20 nt, Human
aaaccugcuuuucaaugugu

SEQ ID NO: 1264584 - RNA, 11 nt, Human
aaaccuggaga

SEQ ID NO: 1264585 - RNA, 19 nt, Human
aaaccuggagaugguggau

SEQ ID NO: 1264586 - RNA, 20 nt, Human
aaaccacuuuuugcagcuuu

SEQ ID NO: 1264587 - RNA, 12 nt, Human
aaaccacugaaa

SEQ ID NO: 1264588 - RNA, 16 nt, Human
aaaccacugaaaaaau

SEQ ID NO: 1264589 - RNA, 17 nt, Human
aaaccacugaaaaaaua

SEQ ID NO: 1264590 - RNA, 18 nt, Human
aaaccacugaaaaaauau

SEQ ID NO: 1264591 - RNA, 13 nt, Human
aaacauuuucucc

SEQ ID NO: 1264592 - RNA, 12 nt, Human
aaacauuuucug

SEQ ID NO: 1264593 - RNA, 16 nt, Human
aaacauuuucuggcca

SEQ ID NO: 1264594 - RNA, 23 nt, Human
aaaccuuccacccagugcugaau

SEQ ID NO: 1264595 - RNA, 16 nt, Human
aaaccuuccacccagu

SEQ ID NO: 1264596 - RNA, 17 nt, Human
aaacgagacuuuccauu

SEQ ID NO: 1264597 - RNA, 20 nt, Human
aaacgauuuuuaaaauguac

SEQ ID NO: 1264598 - RNA, 12 nt, Human
aaaccuguucua

SEQ ID NO: 1264599 - RNA, 17 nt, Human
aaaccuucacuuaggaa

SEQ ID NO: 1264600 - RNA, 14 nt, Human
aaacauuugcugaa

SEQ ID NO: 1264601 - RNA, 15 nt, Human
ggguccggcagcuuc

SEQ ID NO: 1264602 - RNA, 16 nt, Human
ggguccggcagcuucu

SEQ ID NO: 1264603 - RNA, 15 nt, Human
ggguccuccuccagg

SEQ ID NO: 1264604 - RNA, 16 nt, Human
ggguccuccuccaggg

SEQ ID NO: 1264605 - RNA, 18 nt, Human
ggguccuccuccagggac

SEQ ID NO: 1264606 - RNA, 20 nt, Human
ggguccuccuccagggacag

SEQ ID NO: 1264607 - RNA, 15 nt, Human
ggguccucugagacu

SEQ ID NO: 1264608 - RNA, 19 nt, Human
ggguccucugagacuccag

SEQ ID NO: 1264609 - RNA, 13 nt, Human
ggguccucuucug

SEQ ID NO: 1264610 - RNA, 19 nt, Human
ggguccucuucugggccug

SEQ ID NO: 1264611 - RNA, 18 nt, Human
ggggucccagcagcugcc

SEQ ID NO: 1264612 - RNA, 23 nt, Human
gggguccuccuccagggacagca

SEQ ID NO: 1264613 - RNA, 19 nt, Human
gggguccuggagcagacca

SEQ ID NO: 1264614 - RNA, 22 nt, Human
ggguauggcguaaguacagaga

SEQ ID NO: 1264615 - RNA, 13 nt, Human
ggguauggcguaa

SEQ ID NO: 1264616 - RNA, 13 nt, Human
gggucaaguuauu

SEQ ID NO: 1264617 - RNA, 12 nt, Human
gggucacaggaa

SEQ ID NO: 1264618 - RNA, 23 nt, Human
gggucaaguuauuaauuucuuca

SEQ ID NO: 1264619 - RNA, 21 nt, Human
gggucaggccuuugagcucag

SEQ ID NO: 1264620 - RNA, 20 nt, Human
aaaauguaugcauguugucu

SEQ ID NO: 1264621 - RNA, 15 nt, Human
aaaauguaugucugg

SEQ ID NO: 1264622 - RNA, 11 nt, Human
aaaauguauuu

SEQ ID NO: 1264623 - RNA, 13 nt, Human
aaaauguauuuua

SEQ ID NO: 1264624 - RNA, 15 nt, Human
aaaauguauuuuaug

SEQ ID NO: 1264625 - RNA, 16 nt, Human
aaaauguauuuuaugu

SEQ ID NO: 1264626 - RNA, 17 nt, Human
aaaauguauuuuauguu

SEQ ID NO: 1264627 - RNA, 18 nt, Human
aaaauguauuuuauguua

SEQ ID NO: 1264628 - RNA, 22 nt, Human
aaaaugguccaauuaguuuccu

SEQ ID NO: 1264629 - RNA, 14 nt, Human
aaaauguaaagcca

SEQ ID NO: 1264630 - RNA, 19 nt, Human
aaaauguaaaggagucaaa

SEQ ID NO: 1264631 - RNA, 22 nt, Human
aaaauguaagauuauagauucu

SEQ ID NO: 1264632 - RNA, 23 nt, Human
aaaauguaagauuauagauucua

SEQ ID NO: 1264633 - RNA, 16 nt, Human
aaaauguaugcauguu

SEQ ID NO: 1264634 - RNA, 22 nt, Human
aaaauguauuuuauguuauaua

SEQ ID NO: 1264635 - RNA, 14 nt, Human
aaaauguccuugug

SEQ ID NO: 1264636 - RNA, 15 nt, Human
ggggacagguccuca

SEQ ID NO: 1264637 - RNA, 15 nt, Human
ggggccccucucagc

SEQ ID NO: 1264638 - RNA, 17 nt, Human
ggggccccucucagccc

SEQ ID NO: 1264639 - RNA, 19 nt, Human
ggggccccucucagcccuc

SEQ ID NO: 1264640 - RNA, 18 nt, Human
ggggccccucucagcccu

SEQ ID NO: 1264641 - RNA, 21 nt, Human
ggggcccgcgauguggaacug

SEQ ID NO: 1264642 - RNA, 13 nt, Human
gggguagggggcu

SEQ ID NO: 1264643 - RNA, 20 nt, Human
gggguauuucaauuaccuuc

SEQ ID NO: 1264644 - RNA, 12 nt, Human
ggggucccagca

SEQ ID NO: 1264645 - RNA, 14 nt, Human
ggggucccagcagc

SEQ ID NO: 1264646 - RNA, 19 nt, Human
ggggguuccguguccaccc

SEQ ID NO: 1264647 - RNA, 23 nt, Human
ggggguggccgcugaguggcagg

SEQ ID NO: 1264648 - RNA, 15 nt, Human
gggggcacaagacug

SEQ ID NO: 1264649 - RNA, 16 nt, Human
gggggcacaagacuga

SEQ ID NO: 1264650 - RNA, 12 nt, Human
gggggcagaagu

SEQ ID NO: 1264651 - RNA, 23 nt, Human
ggggcccggacgcccaggacccc

SEQ ID NO: 1264652 - RNA, 16 nt, Human
gggggcugaggagcag

SEQ ID NO: 1264653 - RNA, 16 nt, Human
gggggcuggaggagcc

SEQ ID NO: 1264654 - RNA, 22 nt, Human
gggggcagucugagagaggcca

SEQ ID NO: 1264655 - RNA, 21 nt, Human
gggggcagcacaggagggcgg

SEQ ID NO: 1264656 - RNA, 15 nt, Human
aaaauauuuguacau

SEQ ID NO: 1264657 - RNA, 20 nt, Human
aaaauauucaauaagagauu

SEQ ID NO: 1264658 - RNA, 19 nt, Human
aaaauauuguuuuacaaua

SEQ ID NO: 1264659 - RNA, 20 nt, Human
aaaauauuguuuuacaauag

SEQ ID NO: 1264660 - RNA, 12 nt, Human
aaaauauuuuga

SEQ ID NO: 1264661 - RNA, 22 nt, Human
aaaauaugaccacacuccagcu

SEQ ID NO: 1264662 - RNA, 15 nt, Human
aaaauauuccugcau

SEQ ID NO: 1264663 - RNA, 19 nt, Human
aaaauagacaaauagaaaa

SEQ ID NO: 1264664 - RNA, 21 nt, Human
aaaauaucaccaaaaaccuau

SEQ ID NO: 1264665 - RNA, 22 nt, Human
aaaauaucuacauuaauauacu

SEQ ID NO: 1264666 - RNA, 13 nt, Human
aaaauaucuacau

SEQ ID NO: 1264667 - RNA, 20 nt, Human
aaaauacuugucuguuuuaa

SEQ ID NO: 1264668 - RNA, 11 nt, Human
aaaauacuuuu

SEQ ID NO: 1264669 - RNA, 16 nt, Human
aaaauacuuuuacucu

SEQ ID NO: 1264670 - RNA, 22 nt, Human
aaaauacuuuuacucugccuac

SEQ ID NO: 1264671 - RNA, 21 nt, Human
aaaauacuuuuacucugccua

SEQ ID NO: 1264672 - RNA, 15 nt, Human
aaaauagacaaauag

SEQ ID NO: 1264673 - RNA, 13 nt, Human
aaaauagacacuc

SEQ ID NO: 1264674 - RNA, 22 nt, Human
aaaauagauaagaguagaaacu

SEQ ID NO: 1264675 - RNA, 12 nt, Human
aaaaugagaaau

SEQ ID NO: 1264676 - RNA, 11 nt, Human
aaaaugagaaa

SEQ ID NO: 1264677 - RNA, 17 nt, Human
aaaaugacaaucaugug

SEQ ID NO: 1264678 - RNA, 20 nt, Human
aaaaugacaaucaugugugu

SEQ ID NO: 1264679 - RNA, 18 nt, Human
aaaaugacaaucaugugu

SEQ ID NO: 1264680 - RNA, 13 nt, Human
aaaauauuuugaa

SEQ ID NO: 1264681 - RNA, 19 nt, Human
aaaaucucccauuuuggaa

SEQ ID NO: 1264682 - RNA, 21 nt, Human
aaaaucucccauuuuggaauu

SEQ ID NO: 1264683 - RNA, 15 nt, Human
aaaaucucuccacuu

SEQ ID NO: 1264684 - RNA, 16 nt, Human
aaaaucucuccacuuu

SEQ ID NO: 1264685 - RNA, 18 nt, Human
aaaaucucuccacuuuca

SEQ ID NO: 1264686 - RNA, 19 nt, Human
aaaaucucuccacuuucag

SEQ ID NO: 1264687 - RNA, 20 nt, Human
aaaaucucuccacuuucagc

SEQ ID NO: 1264688 - RNA, 22 nt, Human
aaaaucucuccacuuucagcug

SEQ ID NO: 1264689 - RNA, 21 nt, Human
aaaaucucuccacuuucagcu

SEQ ID NO: 1264690 - RNA, 20 nt, Human
aaaaucugucacguagaacu

SEQ ID NO: 1264691 - RNA, 16 nt, Human
gggccagacaugccac

SEQ ID NO: 1264692 - RNA, 22 nt, Human
aaaaugcuuuuuauuucugcau

SEQ ID NO: 1264693 - RNA, 16 nt, Human
aaaaugcuuacauuug

SEQ ID NO: 1264694 - RNA, 23 nt, Human
aaaaugcuguauuagucacagag

SEQ ID NO: 1264695 - RNA, 13 nt, Human
aaaaugcuuuuua

SEQ ID NO: 1264696 - RNA, 18 nt, Human
aaaaugcuuuuuauuucu

SEQ ID NO: 1264697 - RNA, 19 nt, Human
aaaaugcuuuuuauuucug

SEQ ID NO: 1264698 - RNA, 23 nt, Human
aaaaugccaugaugccucugucu

SEQ ID NO: 1264699 - RNA, 11 nt, Human
aaaauaauuuu

SEQ ID NO: 1264700 - RNA, 19 nt, Human
aaaauaauuuuaaacaaag

SEQ ID NO: 1264701 - RNA, 20 nt, Human
aaaauaauuuuaaacaaagg

SEQ ID NO: 1264702 - RNA, 16 nt, Human
aaaauaauacugcuga

SEQ ID NO: 1264703 - RNA, 23 nt, Human
aaaauaaucaaaagcuauuuaaa

SEQ ID NO: 1264704 - RNA, 23 nt, Human
aaaauaauacugcugagauacau

SEQ ID NO: 1264705 - RNA, 20 nt, Human
aaaauaauuauauaacugua

SEQ ID NO: 1264706 - RNA, 16 nt, Human
aaaauaagaauagaaa

SEQ ID NO: 1264707 - RNA, 13 nt, Human
aaaauaagcaggu

SEQ ID NO: 1264708 - RNA, 14 nt, Human
aaaauaagcaggug

SEQ ID NO: 1264709 - RNA, 19 nt, Human
aaaauaagcagguggaucu

SEQ ID NO: 1264710 - RNA, 14 nt, Human
aaaauaagucaaca

SEQ ID NO: 1264711 - RNA, 18 nt, Human
aaaauaagucaacaguaa

SEQ ID NO: 1264712 - RNA, 16 nt, Human
aaaauaagucaacagu

SEQ ID NO: 1264713 - RNA, 16 nt, Human
aaaauaauuuuuauau

SEQ ID NO: 1264714 - RNA, 17 nt, Human
aaaauaauuuuuauauu

SEQ ID NO: 1264715 - RNA, 20 nt, Human
aaaauaauuuuuauauuuga

SEQ ID NO: 1264716 - RNA, 13 nt, Human
aaaauaauuuugu

SEQ ID NO: 1264717 - RNA, 14 nt, Human
aaaauaauuuugua

SEQ ID NO: 1264718 - RNA, 12 nt, Human
aaaauacauugu

SEQ ID NO: 1264719 - RNA, 17 nt, Human
aaaauacaagacugcca

SEQ ID NO: 1264720 - RNA, 10 nt, Human
aaaauacaug

SEQ ID NO: 1264721 - RNA, 19 nt, Human
aaaaggacaucagcaaaca

SEQ ID NO: 1264722 - RNA, 17 nt, Human
aaaaggacaucagcaaa

SEQ ID NO: 1264723 - RNA, 21 nt, Human
ggcugguccuauggccucaug

SEQ ID NO: 1264724 - RNA, 13 nt, Human
ggcugguccaggg

SEQ ID NO: 1264725 - RNA, 23 nt, Human
ggcugguccagggcuagugacuu

SEQ ID NO: 1264726 - RNA, 13 nt, Human
ggcuggucucaaa

SEQ ID NO: 1264727 - RNA, 14 nt, Human
aaaaggauaaguga

SEQ ID NO: 1264728 - RNA, 13 nt, Human
aaaaggcaguuac

SEQ ID NO: 1264729 - RNA, 12 nt, Human
aaaaggccuggg

SEQ ID NO: 1264730 - RNA, 11 nt, Human
aaaaggccugg

SEQ ID NO: 1264731 - RNA, 15 nt, Human
aaaagguauuaaauu

SEQ ID NO: 1264732 - RNA, 19 nt, Human
aaaagguucuuacugcuug

SEQ ID NO: 1264733 - RNA, 15 nt, Human
aaaauggucucuaac

SEQ ID NO: 1264734 - RNA, 18 nt, Human
aaaaugguuuaaaugguc

SEQ ID NO: 1264735 - RNA, 16 nt, Human
aaaaugguuuaaaugg

SEQ ID NO: 1264736 - RNA, 23 nt, Human
aaaauggccauuugcuuuuucac

SEQ ID NO: 1264737 - RNA, 16 nt, Human
aaaaugggcacuuaaa

SEQ ID NO: 1264738 - RNA, 12 nt, Human
gggcucccugac

SEQ ID NO: 1264739 - RNA, 20 nt, Human
gggcugccggggcagccccc

SEQ ID NO: 1264740 - RNA, 23 nt, Human
gggcucccuccgcccccagguag

SEQ ID NO: 1264741 - RNA, 17 nt, Human
gggcugccuucuggccu

SEQ ID NO: 1264742 - RNA, 12 nt, Human
gggcugcuuccu

SEQ ID NO: 1264743 - RNA, 17 nt, Human
gggcugcuuccuccugg

SEQ ID NO: 1264744 - RNA, 17 nt, Human
gggcugcugcugggcuc

SEQ ID NO: 1264745 - RNA, 21 nt, Human
gggcugcugcugggcucagug

SEQ ID NO: 1264746 - RNA, 20 nt, Human
gggcuaggaaauccagggug

SEQ ID NO: 1264747 - RNA, 14 nt, Human
gggcucccuccgcc

SEQ ID NO: 1264748 - RNA, 22 nt, Human
gggcucaggucacauaaaacuu

SEQ ID NO: 1264749 - RNA, 22 nt, Human
gggccugcugcugagaaccugg

SEQ ID NO: 1264750 - RNA, 23 nt, Human
gggcuccagccccucuuggagaa

SEQ ID NO: 1264751 - RNA, 13 nt, Human
gggccaggcuggg

SEQ ID NO: 1264752 - RNA, 10 nt, Human
gggccaggcc

SEQ ID NO: 1264753 - RNA, 19 nt, Human
gggccaugcugaggccugg

SEQ ID NO: 1264754 - RNA, 20 nt, Human
gggccaugcugaggccuggg

SEQ ID NO: 1264755 - RNA, 18 nt, Human
gggccagauccagccugg

SEQ ID NO: 1264756 - RNA, 11 nt, Human
gggccagagcc

SEQ ID NO: 1264757 - RNA, 12 nt, Human
gggccagagcca

SEQ ID NO: 1264758 - RNA, 13 nt, Human
gggccagagccag

SEQ ID NO: 1264759 - RNA, 14 nt, Human
gggccagagccagg

SEQ ID NO: 1264760 - RNA, 15 nt, Human
gggccagagccaggg

SEQ ID NO: 1264761 - RNA, 12 nt, Human
gggccagaggcu

SEQ ID NO: 1264762 - RNA, 13 nt, Human
gggccagauccag

SEQ ID NO: 1264763 - RNA, 14 nt, Human
gggccagauccagc

SEQ ID NO: 1264764 - RNA, 16 nt, Human
gggccagauccagccu

SEQ ID NO: 1264765 - RNA, 17 nt, Human
gggccagauccagccug

SEQ ID NO: 1264766 - RNA, 19 nt, Human
gggccagauccagccuggg

SEQ ID NO: 1264767 - RNA, 23 nt, Human
gggccaugcugaggccugggccg

SEQ ID NO: 1264768 - RNA, 21 nt, Human
gggccaugcugaggccugggc

SEQ ID NO: 1264769 - RNA, 14 nt, Human
gggccauguccaaa

SEQ ID NO: 1264770 - RNA, 15 nt, Human
gggccauguccaaag

SEQ ID NO: 1264771 - RNA, 16 nt, Human
gggccauguccaaaga

SEQ ID NO: 1264772 - RNA, 17 nt, Human
gggccauguccaaagag

SEQ ID NO: 1264773 - RNA, 21 nt, Human
gggccauguccaaagaggcug

SEQ ID NO: 1264774 - RNA, 22 nt, Human
gggccauguccaaagaggcugc

SEQ ID NO: 1264775 - RNA, 23 nt, Human
gggccauguccaaagaggcugcc

SEQ ID NO: 1264776 - RNA, 16 nt, Human
gggccauucuccacag

SEQ ID NO: 1264777 - RNA, 18 nt, Human
gggccauucuccacagca

SEQ ID NO: 1264778 - RNA, 17 nt, Human
gggccgccgccucuuuc

SEQ ID NO: 1264779 - RNA, 12 nt, Human
gggccgcugcca

SEQ ID NO: 1264780 - RNA, 16 nt, Human
gggccggggaacuggc

SEQ ID NO: 1264781 - RNA, 17 nt, Human
gggccggggaacuggcc

SEQ ID NO: 1264782 - RNA, 19 nt, Human
gggccggggaacuggccaa

SEQ ID NO: 1264783 - RNA, 20 nt, Human
gggccggggaacuggccaag

SEQ ID NO: 1264784 - RNA, 23 nt, Human
gggccggggaacuggccaagcug

SEQ ID NO: 1264785 - RNA, 18 nt, Human
gggcgugagaccugcccc

SEQ ID NO: 1264786 - RNA, 19 nt, Human
gggcgugagaccugccccu

SEQ ID NO: 1264787 - RNA, 15 nt, Human
gggcgugguggugag

SEQ ID NO: 1264788 - RNA, 22 nt, Human
gggcuacccugagcugaggcag

SEQ ID NO: 1264789 - RNA, 20 nt, Human
gggccugcugcugagaaccu

SEQ ID NO: 1264790 - RNA, 16 nt, Human
gggccugccaccugga

SEQ ID NO: 1264791 - RNA, 18 nt, Human
gggccugccaccuggacc

SEQ ID NO: 1264792 - RNA, 19 nt, Human
gggccugccaccuggaccc

SEQ ID NO: 1264793 - RNA, 23 nt, Human
gggccugccaccuggaccccugc

SEQ ID NO: 1264794 - RNA, 14 nt, Human
gggccugcccagug

SEQ ID NO: 1264795 - RNA, 12 nt, Human
gggccugccuca

SEQ ID NO: 1264796 - RNA, 14 nt, Human
gggccugccucacc

SEQ ID NO: 1264797 - RNA, 15 nt, Human
gggccugccucacca

SEQ ID NO: 1264798 - RNA, 13 nt, Human
gggccugcuccag

SEQ ID NO: 1264799 - RNA, 14 nt, Human
gggccugcuccaga

SEQ ID NO: 1264800 - RNA, 15 nt, Human
gggccugcuccagac

SEQ ID NO: 1264801 - RNA, 17 nt, Human
gggccugcuccagaccu

SEQ ID NO: 1264802 - RNA, 18 nt, Human
gggccugcuccagaccug

SEQ ID NO: 1264803 - RNA, 11 nt, Human
gggccugcugc

SEQ ID NO: 1264804 - RNA, 12 nt, Human
gggccugcugcu

SEQ ID NO: 1264805 - RNA, 13 nt, Human
gggccugcugcug

SEQ ID NO: 1264806 - RNA, 15 nt, Human
gggccugcugcugag

SEQ ID NO: 1264807 - RNA, 16 nt, Human
gggccugcugcugaga

SEQ ID NO: 1264808 - RNA, 17 nt, Human
gggccugcugcugagaa

SEQ ID NO: 1264809 - RNA, 18 nt, Human
gggccugcugcugagaac

SEQ ID NO: 1264810 - RNA, 19 nt, Human
gggccugcugcugagaacc

SEQ ID NO: 1264811 - RNA, 20 nt, Human
gggccucaccgagugggggc

SEQ ID NO: 1264812 - RNA, 11 nt, Human
gggccugccac

SEQ ID NO: 1264813 - RNA, 13 nt, Human
gggccugccaccu

SEQ ID NO: 1264814 - RNA, 15 nt, Human
gcccccugcaggaag

SEQ ID NO: 1264815 - RNA, 16 nt, Human
gcccccugcaggaagg

SEQ ID NO: 1264816 - RNA, 18 nt, Human
gcccccugcaggaaggag

SEQ ID NO: 1264817 - RNA, 20 nt, Human
gcccccugcaggaaggagcu

SEQ ID NO: 1264818 - RNA, 21 nt, Human
gcccccugcaggaaggagcug

SEQ ID NO: 1264819 - RNA, 22 nt, Human
gcccccugcaggaaggagcugc

SEQ ID NO: 1264820 - RNA, 24 nt, Human
gcccccugcaggaaggagcugccu

SEQ ID NO: 1264821 - RNA, 17 nt, Human
gcccccucugcccugcg

SEQ ID NO: 1264822 - RNA, 17 nt, Human
gcccccugaccacucag

SEQ ID NO: 1264823 - RNA, 18 nt, Human
gcccccugaccacucaga

SEQ ID NO: 1264824 - RNA, 19 nt, Human
gcccccugaccacucagag

SEQ ID NO: 1264825 - RNA, 20 nt, Human
gcccccugaccacucagaga

SEQ ID NO: 1264826 - RNA, 11 nt, Human
gcccccugcag

SEQ ID NO: 1264827 - RNA, 12 nt, Human
gcccccugcaga

SEQ ID NO: 1264828 - RNA, 12 nt, Human
gcccccugcagg

SEQ ID NO: 1264829 - RNA, 13 nt, Human
gcccccugcagga

SEQ ID NO: 1264830 - RNA, 15 nt, Human
gcccccucugcccug

SEQ ID NO: 1264831 - RNA, 16 nt, Human
gcccccucugcccugc

SEQ ID NO: 1264832 - RNA, 21 nt, Human
gcccccagcuaagaaccugga

SEQ ID NO: 1264833 - RNA, 22 nt, Human
gcccccagcuaagaaccuggaa

SEQ ID NO: 1264834 - RNA, 23 nt, Human
gcccccagcuaagaaccuggaac

SEQ ID NO: 1264835 - RNA, 15 nt, Human
gcccccagagccaca

SEQ ID NO: 1264836 - RNA, 16 nt, Human
gcccccagagccacag

SEQ ID NO: 1264837 - RNA, 17 nt, Human
gcccccagagccacagu

SEQ ID NO: 1264838 - RNA, 13 nt, Human
gcccccagagccc

SEQ ID NO: 1264839 - RNA, 16 nt, Human
gcccccagagcccagg

SEQ ID NO: 1264840 - RNA, 17 nt, Human
gcccccagagcccaggc

SEQ ID NO: 1264841 - RNA, 19 nt, Human
gcccccagagcccaggcuc

SEQ ID NO: 1264842 - RNA, 17 nt, Human
gcccccagcccagggcu

SEQ ID NO: 1264843 - RNA, 18 nt, Human
gcccccagcccagggcuc

SEQ ID NO: 1264844 - RNA, 21 nt, Human
gcccccagcccagggcuccug

SEQ ID NO: 1264845 - RNA, 22 nt, Human
gcccccagcccagggcuccugc

SEQ ID NO: 1264846 - RNA, 18 nt, Human
gcccccagagcccaggcu

SEQ ID NO: 1264847 - RNA, 15 nt, Human
gcccccagcccccuc

SEQ ID NO: 1264848 - RNA, 18 nt, Human
gcccccagcccccuccug

SEQ ID NO: 1264849 - RNA, 12 nt, Human
gcccccagccug

SEQ ID NO: 1264850 - RNA, 13 nt, Human
gcccccagccugu

SEQ ID NO: 1264851 - RNA, 14 nt, Human
gcccccagccuguc

SEQ ID NO: 1264852 - RNA, 16 nt, Human
gcccccagccugucag

SEQ ID NO: 1264853 - RNA, 21 nt, Human
gcccccagccugucagaucca

SEQ ID NO: 1264854 - RNA, 22 nt, Human
gcccccagccugucagauccag

SEQ ID NO: 1264855 - RNA, 15 nt, Human
gcccccagcuaagaa

SEQ ID NO: 1264856 - RNA, 11 nt, Human
gccccaaaagg

SEQ ID NO: 1264857 - RNA, 15 nt, Human
gccccaacccgugga

SEQ ID NO: 1264858 - RNA, 17 nt, Human
gccccaacccguggagg

SEQ ID NO: 1264859 - RNA, 19 nt, Human
gccccaacccguggaggcu

SEQ ID NO: 1264860 - RNA, 21 nt, Human
gccccaacccguggaggcugc

SEQ ID NO: 1264861 - RNA, 23 nt, Human
gccccaacccguggaggcugcuc

SEQ ID NO: 1264862 - RNA, 22 nt, Human
gccccaacccguggaggcugcu

SEQ ID NO: 1264863 - RNA, 14 nt, Human
gcccccacuugccu

SEQ ID NO: 1264864 - RNA, 16 nt, Human
gcccccacuugccucu

SEQ ID NO: 1264865 - RNA, 17 nt, Human
gcccccacuugccucuu

SEQ ID NO: 1264866 - RNA, 21 nt, Human
gcccccacuugccucuuccuu

SEQ ID NO: 1264867 - RNA, 11 nt, Human
gcccccagagc

SEQ ID NO: 1264868 - RNA, 14 nt, Human
gccauuaacaaaug

SEQ ID NO: 1264869 - RNA, 13 nt, Human
gcauuuagaugua

SEQ ID NO: 1264870 - RNA, 19 nt, Human
gcauuuaggccaugggaca

SEQ ID NO: 1264871 - RNA, 12 nt, Human
gcauuuagaugu

SEQ ID NO: 1264872 - RNA, 19 nt, Human
gccauucuuucccaacacc

SEQ ID NO: 1264873 - RNA, 12 nt, Human
gccauucuuucc

SEQ ID NO: 1264874 - RNA, 17 nt, Human
gccauugacuucuuccc

SEQ ID NO: 1264875 - RNA, 22 nt, Human
gcccacuguacuugcucuugau

SEQ ID NO: 1264876 - RNA, 17 nt, Human
gcccacgcucacccccu

SEQ ID NO: 1264877 - RNA, 15 nt, Human
gcccacuguccuggg

SEQ ID NO: 1264878 - RNA, 20 nt, Human
gcccacuguacuugcucuug

SEQ ID NO: 1264879 - RNA, 15 nt, Human
gcccacuguacuugc

SEQ ID NO: 1264880 - RNA, 20 nt, Human
gccauuggcuauuuaaaacu

SEQ ID NO: 1264881 - RNA, 20 nt, Human
gcccacugugccucagagac

SEQ ID NO: 1264882 - RNA, 22 nt, Human
gcccacugugccucagagacca

SEQ ID NO: 1264883 - RNA, 23 nt, Human
gcccacugugccucagagaccag

SEQ ID NO: 1264884 - RNA, 19 nt, Human
gcccacuuacauuuacaaa

SEQ ID NO: 1264885 - RNA, 17 nt, Human
gcccacuguccugggcc

SEQ ID NO: 1264886 - RNA, 18 nt, Human
gcccacuguccugggccu

SEQ ID NO: 1264887 - RNA, 21 nt, Human
gcccacuguccugggccugca

SEQ ID NO: 1264888 - RNA, 23 nt, Human
gcccacuguccugggccugcaga

SEQ ID NO: 1264889 - RNA, 24 nt, Human
gcccacuguccugggccugcagaa

SEQ ID NO: 1264890 - RNA, 16 nt, Human
gcccacugugccucag

SEQ ID NO: 1264891 - RNA, 11 nt, Human
gcccaggaagu

SEQ ID NO: 1264892 - RNA, 18 nt, Human
gcccaggaagucucaucu

SEQ ID NO: 1264893 - RNA, 20 nt, Human
gcccaggaagucucaucugg

SEQ ID NO: 1264894 - RNA, 15 nt, Human
gcccaggcacugcaa

SEQ ID NO: 1264895 - RNA, 15 nt, Human
gcccaggauacuggc

SEQ ID NO: 1264896 - RNA, 17 nt, Human
gcccaggauacuggcac

SEQ ID NO: 1264897 - RNA, 20 nt, Human
gcccaggauacuggcacaga

SEQ ID NO: 1264898 - RNA, 23 nt, Human
gcccaggauacuggcacagaggu

SEQ ID NO: 1264899 - RNA, 22 nt, Human
gcccaggauacuggcacagagg

SEQ ID NO: 1264900 - RNA, 21 nt, Human
gcccaggaagucucaucuggg

SEQ ID NO: 1264901 - RNA, 21 nt, Human
gcccaggaccccauggcagug

SEQ ID NO: 1264902 - RNA, 13 nt, Human
gcccaggacccca

SEQ ID NO: 1264903 - RNA, 16 nt, Human
gcccaggcacugcaaa

SEQ ID NO: 1264904 - RNA, 11 nt, Human
gcccaggccag

SEQ ID NO: 1264905 - RNA, 15 nt, Human
gcccaggccaggacu

SEQ ID NO: 1264906 - RNA, 16 nt, Human
gcccaggccaggacuc

SEQ ID NO: 1264907 - RNA, 19 nt, Human
gcccaggccaggacucugc

SEQ ID NO: 1264908 - RNA, 20 nt, Human
gcccaggccaggacucugca

SEQ ID NO: 1264909 - RNA, 21 nt, Human
gcccaggccaggacucugcag

SEQ ID NO: 1264910 - RNA, 22 nt, Human
gcccaggccaggacucugcagc

SEQ ID NO: 1264911 - RNA, 24 nt, Human
gcccaggccaggacucugcagccu

SEQ ID NO: 1264912 - RNA, 23 nt, Human
gcccaggccaggacucugcagcc

SEQ ID NO: 1264913 - RNA, 20 nt, Human
gccuacagaacuucagaaag

SEQ ID NO: 1264914 - RNA, 21 nt, Human
gccuacagaacuucagaaaga

SEQ ID NO: 1264915 - RNA, 12 nt, Human
gccuagaaacaa

SEQ ID NO: 1264916 - RNA, 16 nt, Human
gccuagaaacaacacu

SEQ ID NO: 1264917 - RNA, 18 nt, Human
gccuagaaacaacacugu

SEQ ID NO: 1264918 - RNA, 20 nt, Human
gccuagaaacaacacuguag

SEQ ID NO: 1264919 - RNA, 14 nt, Human
gccuagaccagcag

SEQ ID NO: 1264920 - RNA, 16 nt, Human
gccuagaccagcagac

SEQ ID NO: 1264921 - RNA, 22 nt, Human
gccuagaccagcagacagagcc

SEQ ID NO: 1264922 - RNA, 23 nt, Human
gccuagaccagcagacagagcca

SEQ ID NO: 1264923 - RNA, 13 nt, Human
gccuagaggccug

SEQ ID NO: 1264924 - RNA, 13 nt, Human
gccuagacucugu

SEQ ID NO: 1264925 - RNA, 19 nt, Human
gccuccugaguagcuggga

SEQ ID NO: 1264926 - RNA, 16 nt, Human
gccucgaaacacagaa

SEQ ID NO: 1264927 - RNA, 15 nt, Human
gccuccauccugagg

SEQ ID NO: 1264928 - RNA, 14 nt, Human
gccuccauccugag

SEQ ID NO: 1264929 - RNA, 13 nt, Human
gccuccauccuga

SEQ ID NO: 1264930 - RNA, 15 nt, Human
gccucauguggcugg

SEQ ID NO: 1264931 - RNA, 16 nt, Human
gccucauguggcugga

SEQ ID NO: 1264932 - RNA, 17 nt, Human
gccucauguggcuggaa

SEQ ID NO: 1264933 - RNA, 22 nt, Human
gccucauguccacugguucuuc

SEQ ID NO: 1264934 - RNA, 19 nt, Human
gccucaugucaaauauuua

SEQ ID NO: 1264935 - RNA, 13 nt, Human
gccucauguggcu

SEQ ID NO: 1264936 - RNA, 14 nt, Human
gccucauguggcug

SEQ ID NO: 1264937 - RNA, 19 nt, Human
gccucaugcuaagacucag

SEQ ID NO: 1264938 - RNA, 20 nt, Human
gcccugccaccugucugucu

SEQ ID NO: 1264939 - RNA, 11 nt, Human
gcccugccacu

SEQ ID NO: 1264940 - RNA, 12 nt, Human
gcccugccacuc

SEQ ID NO: 1264941 - RNA, 13 nt, Human
gcccugccacuca

SEQ ID NO: 1264942 - RNA, 19 nt, Human
gcccugccacucacuaggc

SEQ ID NO: 1264943 - RNA, 20 nt, Human
gcccugccacucacuaggcc

SEQ ID NO: 1264944 - RNA, 21 nt, Human
gcccugccacucacuaggccc

SEQ ID NO: 1264945 - RNA, 23 nt, Human
gcccccugcaggaaggagcugcc

SEQ ID NO: 1264946 - RNA, 13 nt, Human
gcccccugccccc

SEQ ID NO: 1264947 - RNA, 15 nt, Human
gcccguccugccugu

SEQ ID NO: 1264948 - RNA, 16 nt, Human
gcccguccugccugug

SEQ ID NO: 1264949 - RNA, 17 nt, Human
gcccguccugccugugg

SEQ ID NO: 1264950 - RNA, 18 nt, Human
gcccguccugccuguggc

SEQ ID NO: 1264951 - RNA, 13 nt, Human
gcccgucucagug

SEQ ID NO: 1264952 - RNA, 14 nt, Human
gcccgucucagugu

SEQ ID NO: 1264953 - RNA, 17 nt, Human
gccggaucugagggaga

SEQ ID NO: 1264954 - RNA, 15 nt, Human
gccggaucugaggga

SEQ ID NO: 1264955 - RNA, 13 nt, Human
gccggcacagggu

SEQ ID NO: 1264956 - RNA, 21 nt, Human
gccggcacagggucugcucuu

SEQ ID NO: 1264957 - RNA, 12 nt, Human
gcccuuccaugu

SEQ ID NO: 1264958 - RNA, 21 nt, Human
gcccuuccaugucgccucugc

SEQ ID NO: 1264959 - RNA, 15 nt, Human
gcccuuccaaacucu

SEQ ID NO: 1264960 - RNA, 22 nt, Human
gcccuuccaugucgccucugca

SEQ ID NO: 1264961 - RNA, 12 nt, Human
gcccuuccucuc

SEQ ID NO: 1264962 - RNA, 14 nt, Human
gcccuuccucucca

SEQ ID NO: 1264963 - RNA, 15 nt, Human
gcccuuccucuccac

SEQ ID NO: 1264964 - RNA, 11 nt, Human
gcccugccugg

SEQ ID NO: 1264965 - RNA, 12 nt, Human
gcccugccugga

SEQ ID NO: 1264966 - RNA, 13 nt, Human
gcccugccuggag

SEQ ID NO: 1264967 - RNA, 14 nt, Human
gcccugccuggagg

SEQ ID NO: 1264968 - RNA, 15 nt, Human
gcccugccuggagga

SEQ ID NO: 1264969 - RNA, 16 nt, Human
gcccugccuggaggac

SEQ ID NO: 1264970 - RNA, 18 nt, Human
gcccugccuggaggaccu

SEQ ID NO: 1264971 - RNA, 19 nt, Human
gcccugccuggaggaccug

SEQ ID NO: 1264972 - RNA, 20 nt, Human
gcccugcgggucacaggagg

SEQ ID NO: 1264973 - RNA, 20 nt, Human
gcccugccuggaggaccuga

SEQ ID NO: 1264974 - RNA, 21 nt, Human
gcccugccuggaggaccugag

SEQ ID NO: 1264975 - RNA, 23 nt, Human
gcccugccuggaggaccugagcc

SEQ ID NO: 1264976 - RNA, 18 nt, Human
gcccugcgguagauggga

SEQ ID NO: 1264977 - RNA, 22 nt, Human
gcccugccuggaggaccugagc

SEQ ID NO: 1264978 - RNA, 19 nt, Human
gcccuuaugacugccaaga

SEQ ID NO: 1264979 - RNA, 17 nt, Human
gcccuuauuuucaagaa

SEQ ID NO: 1264980 - RNA, 18 nt, Human
gcccuuauuuucaagaaa

SEQ ID NO: 1264981 - RNA, 20 nt, Human
gcccuuauuuucaagaaacu

SEQ ID NO: 1264982 - RNA, 16 nt, Human
gcucagagcaguguuu

SEQ ID NO: 1264983 - RNA, 18 nt, Human
gcucagaggcgcacugug

SEQ ID NO: 1264984 - RNA, 19 nt, Human
gcucagaggcgcacuguga

SEQ ID NO: 1264985 - RNA, 20 nt, Human
gcucagaggcgcacugugac

SEQ ID NO: 1264986 - RNA, 21 nt, Human
gcucagaggcgcacugugacc

SEQ ID NO: 1264987 - RNA, 17 nt, Human
gcucagaaaauaucccu

SEQ ID NO: 1264988 - RNA, 18 nt, Human
gcucagaaguuucuucuu

SEQ ID NO: 1264989 - RNA, 15 nt, Human
gcucacuucugggcu

SEQ ID NO: 1264990 - RNA, 23 nt, Human
gcucacuucugggcuucaucugg

SEQ ID NO: 1264991 - RNA, 15 nt, Human
gcucaacuugcaaaa

SEQ ID NO: 1264992 - RNA, 23 nt, Human
gcucaacucucuuauugccucac

SEQ ID NO: 1264993 - RNA, 15 nt, Human
gcucaagcagcgacc

SEQ ID NO: 1264994 - RNA, 21 nt, Human
gcucaagcagcgaccgccccc

SEQ ID NO: 1264995 - RNA, 22 nt, Human
gcucaagcagcgaccgcccccu

SEQ ID NO: 1264996 - RNA, 23 nt, Human
gcucaagcagcgaccgcccccuc

SEQ ID NO: 1264997 - RNA, 23 nt, Human
gcucaggagcccugggaggcucu

SEQ ID NO: 1264998 - RNA, 22 nt, Human
gcucaggagcccugggaggcuc

SEQ ID NO: 1264999 - RNA, 18 nt, Human
gcucagaggguguccugc

SEQ ID NO: 1265000 - RNA, 19 nt, Human
gcucagaggguguccugca

SEQ ID NO: 1265001 - RNA, 22 nt, Human
gcuaaguacacaauaagcaaaa

SEQ ID NO: 1265002 - RNA, 21 nt, Human
gcuaaguacacaauaagcaaa

SEQ ID NO: 1265003 - RNA, 20 nt, Human
gcuaaguacacaauaagcaa

SEQ ID NO: 1265004 - RNA, 16 nt, Human
gcuaagguucuaaggc

SEQ ID NO: 1265005 - RNA, 17 nt, Human
gcuaagguucuaaggcc

SEQ ID NO: 1265006 - RNA, 15 nt, Human
gcuaagggguggggc

SEQ ID NO: 1265007 - RNA, 16 nt, Human
gcuaagggguggggcu

SEQ ID NO: 1265008 - RNA, 14 nt, Human
gcuaagguucuaag

SEQ ID NO: 1265009 - RNA, 15 nt, Human
gcuaagguucuaagg

SEQ ID NO: 1265010 - RNA, 21 nt, Human
gcuaguaauuggaaaggcagc

SEQ ID NO: 1265011 - RNA, 22 nt, Human
gcuaguuauacuuauuuguaua

SEQ ID NO: 1265012 - RNA, 17 nt, Human
gcuaggguggggagaga

SEQ ID NO: 1265013 - RNA, 18 nt, Human
gcuaggguggggagagac

SEQ ID NO: 1265014 - RNA, 19 nt, Human
gcuauguuuugacauuuuu

SEQ ID NO: 1265015 - RNA, 16 nt, Human
gcuauguuuuuaaugu

SEQ ID NO: 1265016 - RNA, 18 nt, Human
gcuauguuuuuaauguau

SEQ ID NO: 1265017 - RNA, 20 nt, Human
gcucaaacaaugacaaagca

SEQ ID NO: 1265018 - RNA, 21 nt, Human
gcucaaacaaugacaaagcag

SEQ ID NO: 1265019 - RNA, 22 nt, Human
gcucaaacaaugacaaagcaga

SEQ ID NO: 1265020 - RNA, 23 nt, Human
gcucaaacaaugacaaagcagau

SEQ ID NO: 1265021 - RNA, 22 nt, Human
gcucaaagguuuggaaggagca

SEQ ID NO: 1265022 - RNA, 23 nt, Human
gcucaaagguuuggaaggagcag

SEQ ID NO: 1265023 - RNA, 18 nt, Human
gcuauuauuuucacugua

SEQ ID NO: 1265024 - RNA, 21 nt, Human
gcuauuauuuucacuguagaa

SEQ ID NO: 1265025 - RNA, 17 nt, Human
gcuauuauuuucacugu

SEQ ID NO: 1265026 - RNA, 21 nt, Human
gcuaggaauuguguuuauaau

SEQ ID NO: 1265027 - RNA, 12 nt, Human
gcuaggaaugaa

SEQ ID NO: 1265028 - RNA, 13 nt, Human
gcuaggaaugaaa

SEQ ID NO: 1265029 - RNA, 18 nt, Human
gcuaggaaugaaauccug

SEQ ID NO: 1265030 - RNA, 23 nt, Human
gcuaggcucugucuggaagaugg

SEQ ID NO: 1265031 - RNA, 19 nt, Human
gccuucucuaaacauuuca

SEQ ID NO: 1265032 - RNA, 14 nt, Human
gccuucucuguuca

SEQ ID NO: 1265033 - RNA, 16 nt, Human
gccuucucuguucauu

SEQ ID NO: 1265034 - RNA, 14 nt, Human
gccuucuggccuug

SEQ ID NO: 1265035 - RNA, 19 nt, Human
gccuucugguguuggacaa

SEQ ID NO: 1265036 - RNA, 23 nt, Human
gccuucuuuugggggucaacagu

SEQ ID NO: 1265037 - RNA, 23 nt, Human
gccuguggccaugacccugccuc

SEQ ID NO: 1265038 - RNA, 19 nt, Human
gccuucgucuuucccaugg

SEQ ID NO: 1265039 - RNA, 17 nt, Human
gccuucucaugauccaa

SEQ ID NO: 1265040 - RNA, 21 nt, Human
gccuggcuggcugagggcagu

SEQ ID NO: 1265041 - RNA, 22 nt, Human
gccuguggccaugacccugccu

SEQ ID NO: 1265042 - RNA, 17 nt, Human
gccucugggggguggcc

SEQ ID NO: 1265043 - RNA, 20 nt, Human
gccucugggggguggccagg

SEQ ID NO: 1265044 - RNA, 23 nt, Human
gccucugggggguggccaggccg

SEQ ID NO: 1265045 - RNA, 21 nt, Human
gccucugggggguggccaggc

SEQ ID NO: 1265046 - RNA, 16 nt, Human
gccuggcuccguccag

SEQ ID NO: 1265047 - RNA, 21 nt, Human
gccuggcugcugaucgccuuc

SEQ ID NO: 1265048 - RNA, 12 nt, Human
gccuggcuggcu

SEQ ID NO: 1265049 - RNA, 14 nt, Human
gccuggcuggcuga

SEQ ID NO: 1265050 - RNA, 15 nt, Human
gccuggcuggcugag

SEQ ID NO: 1265051 - RNA, 16 nt, Human
gccuggcuggcugagg

SEQ ID NO: 1265052 - RNA, 17 nt, Human
gccuggcuggcugaggg

SEQ ID NO: 1265053 - RNA, 18 nt, Human
gccuggcuggcugagggc

SEQ ID NO: 1265054 - RNA, 20 nt, Human
gccuggcuggcugagggcag

SEQ ID NO: 1265055 - RNA, 12 nt, Human
gccuugccagag

SEQ ID NO: 1265056 - RNA, 13 nt, Human
gccuugccagaga

SEQ ID NO: 1265057 - RNA, 14 nt, Human
gcgcaggcuggccc

SEQ ID NO: 1265058 - RNA, 19 nt, Human
gcgcaggccgugacgucug

SEQ ID NO: 1265059 - RNA, 15 nt, Human
gcgcaggcuggcccu

SEQ ID NO: 1265060 - RNA, 16 nt, Human
gcgcaggcuggcccug

SEQ ID NO: 1265061 - RNA, 16 nt, Human
gcguucuuguaauuuu

SEQ ID NO: 1265062 - RNA, 17 nt, Human
gcguucuuguaauuuua

SEQ ID NO: 1265063 - RNA, 22 nt, Human
gcguucuuguaauuuuacacgc

SEQ ID NO: 1265064 - RNA, 11 nt, Human
gcuaaggcucu

SEQ ID NO: 1265065 - RNA, 16 nt, Human
gcguuccuuucuuuuc

SEQ ID NO: 1265066 - RNA, 11 nt, Human
gcguucuugua

SEQ ID NO: 1265067 - RNA, 14 nt, Human
gcguucuuguaauu

SEQ ID NO: 1265068 - RNA, 15 nt, Human
gcguucuuguaauuu

SEQ ID NO: 1265069 - RNA, 13 nt, Human
gcguuccuuucuu

SEQ ID NO: 1265070 - RNA, 15 nt, Human
gcguuccuuucuuuu

SEQ ID NO: 1265071 - RNA, 22 nt, Human
gcguuauuggucggcagccuuc

SEQ ID NO: 1265072 - RNA, 21 nt, Human
gcguuaacaguuccuuucaaa

SEQ ID NO: 1265073 - RNA, 16 nt, Human
gcggcuggccauggag

SEQ ID NO: 1265074 - RNA, 18 nt, Human
gcggcuggccauggagaa

SEQ ID NO: 1265075 - RNA, 19 nt, Human
gcggcuggccauggagaaa

SEQ ID NO: 1265076 - RNA, 20 nt, Human
gcggcuggccauggagaaag

SEQ ID NO: 1265077 - RNA, 13 nt, Human
gcggcugggagga

SEQ ID NO: 1265078 - RNA, 17 nt, Human
gcggcuggggucccagc

SEQ ID NO: 1265079 - RNA, 18 nt, Human
gcggcuggggucccagca

SEQ ID NO: 1265080 - RNA, 19 nt, Human
gcggcuggggucccagcag

SEQ ID NO: 1265081 - RNA, 20 nt, Human
gcggcuggggucccagcagc

SEQ ID NO: 1265082 - RNA, 21 nt, Human
gcggcuggggucccagcagcu

SEQ ID NO: 1265083 - RNA, 22 nt, Human
gcggcuggggucccagcagcug

SEQ ID NO: 1265084 - RNA, 12 nt, Human
gcggcugugugu

SEQ ID NO: 1265085 - RNA, 21 nt, Human
gcgggagccaugcgcccccuc

SEQ ID NO: 1265086 - RNA, 21 nt, Human
gcguggaacucgugucuggca

SEQ ID NO: 1265087 - RNA, 13 nt, Human
gcggauggccgga

SEQ ID NO: 1265088 - RNA, 16 nt, Human
gcggcagauggggaga

SEQ ID NO: 1265089 - RNA, 12 nt, Human
gcggcuccucag

SEQ ID NO: 1265090 - RNA, 14 nt, Human
gcggcuccucaggg

SEQ ID NO: 1265091 - RNA, 15 nt, Human
gcggcaggggccugg

SEQ ID NO: 1265092 - RNA, 16 nt, Human
gcggcaggggccugga

SEQ ID NO: 1265093 - RNA, 19 nt, Human
gcggcaggggccuggagau

SEQ ID NO: 1265094 - RNA, 13 nt, Human
gcggcaucaggcu

SEQ ID NO: 1265095 - RNA, 14 nt, Human
gcuuuggaagccau

SEQ ID NO: 1265096 - RNA, 21 nt, Human
gcuuuggaaguuuagcucuga

SEQ ID NO: 1265097 - RNA, 23 nt, Human
gcuuuggaaguuuagcucugaga

SEQ ID NO: 1265098 - RNA, 14 nt, Human
gcuuuggaaguuuu

SEQ ID NO: 1265099 - RNA, 18 nt, Human
gcuuugcccugcugcccu

SEQ ID NO: 1265100 - RNA, 19 nt, Human
gcuuugcccugcugcccuc

SEQ ID NO: 1265101 - RNA, 23 nt, Human
gcuuugcccugcugcccuccccc

SEQ ID NO: 1265102 - RNA, 17 nt, Human
gcuuugcccuucuuucu

SEQ ID NO: 1265103 - RNA, 16 nt, Human
gcuuugcuaccaaagc

SEQ ID NO: 1265104 - RNA, 13 nt, Human
gcuguuucaaagu

SEQ ID NO: 1265105 - RNA, 15 nt, Human
gcuguuuacuaggga

SEQ ID NO: 1265106 - RNA, 16 nt, Human
gcuguuuauuaaucuu

SEQ ID NO: 1265107 - RNA, 19 nt, Human
gcuguuugagauucucaaa

SEQ ID NO: 1265108 - RNA, 17 nt, Human
gcuuaaucagauagaua

SEQ ID NO: 1265109 - RNA, 15 nt, Human
gcuuaaucuuugaaa

SEQ ID NO: 1265110 - RNA, 11 nt, Human
gcuuuccugaa

SEQ ID NO: 1265111 - RNA, 12 nt, Human
gcuuuccugaau

SEQ ID NO: 1265112 - RNA, 22 nt, Human
gcuuuccugaauccaaacuaau

SEQ ID NO: 1265113 - RNA, 11 nt, Human
gcuuuccugcc

SEQ ID NO: 1265114 - RNA, 12 nt, Human
gcuuuccugccc

SEQ ID NO: 1265115 - RNA, 14 nt, Human
gcuuuccugcccca

SEQ ID NO: 1265116 - RNA, 17 nt, Human
gcuuuccugccccaggc

SEQ ID NO: 1265117 - RNA, 19 nt, Human
gcuuuccugccccaggccu

SEQ ID NO: 1265118 - RNA, 16 nt, Human
gcuuucgaacugcuag

SEQ ID NO: 1265119 - RNA, 21 nt, Human
gcuuugauguuccuuccagug

SEQ ID NO: 1265120 - RNA, 12 nt, Human
gcuuugauucau

SEQ ID NO: 1265121 - RNA, 15 nt, Human
gcuuugauucauagu

SEQ ID NO: 1265122 - RNA, 20 nt, Human
gcuuugauucauaguaacuu

SEQ ID NO: 1265123 - RNA, 20 nt, Human
gcuuuucccuuuuuuuaagu

SEQ ID NO: 1265124 - RNA, 21 nt, Human
gcuuuucccuuuuuuuaagua

SEQ ID NO: 1265125 - RNA, 16 nt, Human
gcuuuucccuuuguga

SEQ ID NO: 1265126 - RNA, 23 nt, Human
gcuuuugcgguucaggaaaauug

SEQ ID NO: 1265127 - RNA, 20 nt, Human
gcuuuugcccauuuugaauc

SEQ ID NO: 1265128 - RNA, 21 nt, Human
gcuuuugcccauuuugaauca

SEQ ID NO: 1265129 - RNA, 19 nt, Human
ggaaagcgccuccaacccu

SEQ ID NO: 1265130 - RNA, 16 nt, Human
ggaaagccccugcccc

SEQ ID NO: 1265131 - RNA, 21 nt, Human
ggaaagcuuuucuauuuuaau

SEQ ID NO: 1265132 - RNA, 23 nt, Human
ggaaagcgccuccaacccuagca

SEQ ID NO: 1265133 - RNA, 16 nt, Human
ggaaaggccagcacuc

SEQ ID NO: 1265134 - RNA, 12 nt, Human
ggaaaggccagc

SEQ ID NO: 1265135 - RNA, 19 nt, Human
ggaaagcagccuggccaac

SEQ ID NO: 1265136 - RNA, 16 nt, Human
ggaaagcaagaaucag

SEQ ID NO: 1265137 - RNA, 11 nt, Human
ggaaagcaggu

SEQ ID NO: 1265138 - RNA, 20 nt, Human
ggaaagcccauaugcuacca

SEQ ID NO: 1265139 - RNA, 21 nt, Human
ggaaagaagaaggugggagga

SEQ ID NO: 1265140 - RNA, 13 nt, Human
ggaaagcaaagca

SEQ ID NO: 1265141 - RNA, 16 nt, Human
ggaaagcaaagcacag

SEQ ID NO: 1265142 - RNA, 17 nt, Human
ggaaagcaaagcacaga

SEQ ID NO: 1265143 - RNA, 20 nt, Human
ggaaagcaaagcacagagag

SEQ ID NO: 1265144 - RNA, 21 nt, Human
ggaaagcaaagcacagagagu

SEQ ID NO: 1265145 - RNA, 21 nt, Human
ggaaagcaagaaucagagaag

SEQ ID NO: 1265146 - RNA, 16 nt, Human
ggaaaaaauaacaaug

SEQ ID NO: 1265147 - RNA, 21 nt, Human
gcuuuuguuuccuuuuucaga

SEQ ID NO: 1265148 - RNA, 17 nt, Human
gcuuuuuuuguguguau

SEQ ID NO: 1265149 - RNA, 21 nt, Human
gcuuuuuuuguguguauuugc

SEQ ID NO: 1265150 - RNA, 22 nt, Human
gcuuuuuuuguguguauuugcu

SEQ ID NO: 1265151 - RNA, 15 nt, Human
gcuuuuuuuuccuuc

SEQ ID NO: 1265152 - RNA, 18 nt, Human
gcuuuuggauuggacaaa

SEQ ID NO: 1265153 - RNA, 21 nt, Human
gcuuuugugggggacuguaag

SEQ ID NO: 1265154 - RNA, 11 nt, Human
gcuuuuggcaa

SEQ ID NO: 1265155 - RNA, 23 nt, Human
gcuuuugugggggacuguaaguu

SEQ ID NO: 1265156 - RNA, 23 nt, Human
gcuuuuguuuccuuuuucagaua

SEQ ID NO: 1265157 - RNA, 21 nt, Human
ggaaacagcaucuccaagcag

SEQ ID NO: 1265158 - RNA, 18 nt, Human
ggaaacaguugcauguag

SEQ ID NO: 1265159 - RNA, 17 nt, Human
ggaaacaguugcaugua

SEQ ID NO: 1265160 - RNA, 14 nt, Human
ggaaacucagggcu

SEQ ID NO: 1265161 - RNA, 16 nt, Human
ggaaacuccugugacc

SEQ ID NO: 1265162 - RNA, 17 nt, Human
ggaaacuccugugacca

SEQ ID NO: 1265163 - RNA, 17 nt, Human
ggaaacuggccauggcc

SEQ ID NO: 1265164 - RNA, 15 nt, Human
ggaaaucccuucaua

SEQ ID NO: 1265165 - RNA, 16 nt, Human
ggaaauccaggguggu

SEQ ID NO: 1265166 - RNA, 19 nt, Human
ggaaaucaggguuaguauu

SEQ ID NO: 1265167 - RNA, 13 nt, Human
ggaaaucuuaaac

SEQ ID NO: 1265168 - RNA, 16 nt, Human
ggaagccagcuuuccc

SEQ ID NO: 1265169 - RNA, 17 nt, Human
ggaagcccauccugacc

SEQ ID NO: 1265170 - RNA, 14 nt, Human
ggaagcccauccug

SEQ ID NO: 1265171 - RNA, 19 nt, Human
ggacacauguccaguggga

SEQ ID NO: 1265172 - RNA, 21 nt, Human
ggacacaguuccugggaacau

SEQ ID NO: 1265173 - RNA, 16 nt, Human
ggacaccccgacuuuu

SEQ ID NO: 1265174 - RNA, 13 nt, Human
ggacacaugucca

SEQ ID NO: 1265175 - RNA, 12 nt, Human
ggacacaugucc

SEQ ID NO: 1265176 - RNA, 16 nt, Human
ggacacaguuccuggg

SEQ ID NO: 1265177 - RNA, 17 nt, Human
ggacacaguuccuggga

SEQ ID NO: 1265178 - RNA, 18 nt, Human
ggacacaguuccugggaa

SEQ ID NO: 1265179 - RNA, 19 nt, Human
ggacacaguuccugggaac

SEQ ID NO: 1265180 - RNA, 13 nt, Human
ggacacaggccug

SEQ ID NO: 1265181 - RNA, 14 nt, Human
ggacacaggccugu

SEQ ID NO: 1265182 - RNA, 16 nt, Human
ggacacaggccugugu

SEQ ID NO: 1265183 - RNA, 23 nt, Human
ggacacaggccuguguagcugug

SEQ ID NO: 1265184 - RNA, 14 nt, Human
ggacacaguuccug

SEQ ID NO: 1265185 - RNA, 11 nt, Human
ggacacaggcc

SEQ ID NO: 1265186 - RNA, 12 nt, Human
ggacacaggccu

SEQ ID NO: 1265187 - RNA, 17 nt, Human
ggaaugagcugaaggug

SEQ ID NO: 1265188 - RNA, 19 nt, Human
ggaauacucuuauaucuau

SEQ ID NO: 1265189 - RNA, 12 nt, Human
ggaauacuuuuu

SEQ ID NO: 1265190 - RNA, 17 nt, Human
ggaauacuuuuuguuau

SEQ ID NO: 1265191 - RNA, 19 nt, Human
ggaauacugaacaucugag

SEQ ID NO: 1265192 - RNA, 14 nt, Human
ggaauagcauguca

SEQ ID NO: 1265193 - RNA, 17 nt, Human
ggaauagcaugucacua

SEQ ID NO: 1265194 - RNA, 15 nt, Human
ggaauauaauuguuu

SEQ ID NO: 1265195 - RNA, 14 nt, Human
ggaagccugcaguc

SEQ ID NO: 1265196 - RNA, 15 nt, Human
ggaagccguccuggc

SEQ ID NO: 1265197 - RNA, 20 nt, Human
ggaagccgugcucgccccag

SEQ ID NO: 1265198 - RNA, 13 nt, Human
ggaagccucagau

SEQ ID NO: 1265199 - RNA, 22 nt, Human
ggaagccucagauuccuuccca

SEQ ID NO: 1265200 - RNA, 20 nt, Human
ggaagcgcgagggccucaaa

SEQ ID NO: 1265201 - RNA, 17 nt, Human
ggacagucaccucaugg

SEQ ID NO: 1265202 - RNA, 18 nt, Human
ggacagucaccucaugga

SEQ ID NO: 1265203 - RNA, 21 nt, Human
ggacagucaccucauggaauu

SEQ ID NO: 1265204 - RNA, 20 nt, Human
ggacagguccucaguguccu

SEQ ID NO: 1265205 - RNA, 15 nt, Human
ggacagggcauggcc

SEQ ID NO: 1265206 - RNA, 15 nt, Human
ggacaggcuggcucc

SEQ ID NO: 1265207 - RNA, 23 nt, Human
ggacaggcuggcuccagaugcag

SEQ ID NO: 1265208 - RNA, 22 nt, Human
ggacagggcauggccagguggc

SEQ ID NO: 1265209 - RNA, 12 nt, Human
ggacaccugccc

SEQ ID NO: 1265210 - RNA, 11 nt, Human
ggacaccugcc

SEQ ID NO: 1265211 - RNA, 10 nt, Human
ggacaccugc

SEQ ID NO: 1265212 - RNA, 16 nt, Human
ggacaccuaggcuagg

SEQ ID NO: 1265213 - RNA, 13 nt, Human
ggacaccugcccu

SEQ ID NO: 1265214 - RNA, 16 nt, Human
ggacaccugcccugcc

SEQ ID NO: 1265215 - RNA, 15 nt, Human
ggacaccugcccugc

SEQ ID NO: 1265216 - RNA, 14 nt, Human
ggacaccugcccug

SEQ ID NO: 1265217 - RNA, 13 nt, Human
ggacaggcuggcu

SEQ ID NO: 1265218 - RNA, 15 nt, Human
ggacaucagcaaaca

SEQ ID NO: 1265219 - RNA, 14 nt, Human
ggacaucagcaaac

SEQ ID NO: 1265220 - RNA, 12 nt, Human
ggacaucagcaa

SEQ ID NO: 1265221 - RNA, 13 nt, Human
ggacauccuccuc

SEQ ID NO: 1265222 - RNA, 22 nt, Human
ggacaguuccagaagugugacu

SEQ ID NO: 1265223 - RNA, 20 nt, Human
ggacaguuuaccaguugccu

SEQ ID NO: 1265224 - RNA, 23 nt, Human
ggacaguuuaccaguugccuuuu

SEQ ID NO: 1265225 - RNA, 14 nt, Human
ggacaugcuuagca

SEQ ID NO: 1265226 - RNA, 16 nt, Human
ggacauccuccuccca

SEQ ID NO: 1265227 - RNA, 16 nt, Human
ggacaugcgguagcca

SEQ ID NO: 1265228 - RNA, 19 nt, Human
ggacaugcgguagccagca

SEQ ID NO: 1265229 - RNA, 21 nt, Human
ggacaugcgguagccagcaca

SEQ ID NO: 1265230 - RNA, 13 nt, Human
ggacaugcuuagc

SEQ ID NO: 1265231 - RNA, 20 nt, Human
gcuguauuuuaaaagaauga

SEQ ID NO: 1265232 - RNA, 21 nt, Human
gcuguauuuuaaaagaaugau

SEQ ID NO: 1265233 - RNA, 15 nt, Human
gcuguauagcugcuu

SEQ ID NO: 1265234 - RNA, 12 nt, Human
gcugugaggcug

SEQ ID NO: 1265235 - RNA, 13 nt, Human
gcugugaggcugu

SEQ ID NO: 1265236 - RNA, 14 nt, Human
gcugugaggcuguc

SEQ ID NO: 1265237 - RNA, 15 nt, Human
gcugugaggcugucc

SEQ ID NO: 1265238 - RNA, 16 nt, Human
gcugugaggcuguccu

SEQ ID NO: 1265239 - RNA, 17 nt, Human
gcugugaggcuguccug

SEQ ID NO: 1265240 - RNA, 18 nt, Human
gcugugaggcuguccugu

SEQ ID NO: 1265241 - RNA, 20 nt, Human
gcugugagucuuugguucua

SEQ ID NO: 1265242 - RNA, 22 nt, Human
gcugugagucuuugguucuaag

SEQ ID NO: 1265243 - RNA, 18 nt, Human
gcugugaguucucccugu

SEQ ID NO: 1265244 - RNA, 19 nt, Human
gcugugaguucucccugua

SEQ ID NO: 1265245 - RNA, 20 nt, Human
gcugugauacgaugcuucaa

SEQ ID NO: 1265246 - RNA, 16 nt, Human
gcuguaguaggcauuu

SEQ ID NO: 1265247 - RNA, 23 nt, Human
gcuguaguaggcauuuuuaccau

SEQ ID NO: 1265248 - RNA, 17 nt, Human
gcugugcgcccagggcu

SEQ ID NO: 1265249 - RNA, 16 nt, Human
gcugugcgugugugug

SEQ ID NO: 1265250 - RNA, 14 nt, Human
gcugugccucugcc

SEQ ID NO: 1265251 - RNA, 15 nt, Human
gcugugccucugccu

SEQ ID NO: 1265252 - RNA, 16 nt, Human
gcugugccucugccug

SEQ ID NO: 1265253 - RNA, 16 nt, Human
gcugugcgcccagggc

SEQ ID NO: 1265254 - RNA, 18 nt, Human
gcugugcgcccagggcug

SEQ ID NO: 1265255 - RNA, 16 nt, Human
gcugugcuauggugcu

SEQ ID NO: 1265256 - RNA, 17 nt, Human
gcugugcuauggugcuc

SEQ ID NO: 1265257 - RNA, 17 nt, Human
gcuguuguuaugaugug

SEQ ID NO: 1265258 - RNA, 19 nt, Human
gcuguuguuaugaugugcu

SEQ ID NO: 1265259 - RNA, 15 nt, Human
gcuguuguuaugaug

SEQ ID NO: 1265260 - RNA, 14 nt, Human
gcuguuguuaugau

SEQ ID NO: 1265261 - RNA, 13 nt, Human
gcuguuguuauga

SEQ ID NO: 1265262 - RNA, 21 nt, Human
gcugggaauggaggggcagag

SEQ ID NO: 1265263 - RNA, 17 nt, Human
gcugggccauguccaaa

SEQ ID NO: 1265264 - RNA, 19 nt, Human
gcugggccauguccaaaga

SEQ ID NO: 1265265 - RNA, 20 nt, Human
gcugggccauguccaaagag

SEQ ID NO: 1265266 - RNA, 12 nt, Human
gcuggcuggccu

SEQ ID NO: 1265267 - RNA, 15 nt, Human
gcuggcuugggcagc

SEQ ID NO: 1265268 - RNA, 15 nt, Human
gcuggcugagggcag

SEQ ID NO: 1265269 - RNA, 22 nt, Human
gcugggaacagugugcaaggca

SEQ ID NO: 1265270 - RNA, 14 nt, Human
gcugggccccugcc

SEQ ID NO: 1265271 - RNA, 13 nt, Human
gcugggccccugc

SEQ ID NO: 1265272 - RNA, 12 nt, Human
gcugggccccug

SEQ ID NO: 1265273 - RNA, 20 nt, Human
gcugggccccugccucucug

SEQ ID NO: 1265274 - RNA, 18 nt, Human
gcugggccccugccucuc

SEQ ID NO: 1265275 - RNA, 14 nt, Human
gcugguagagcagg

SEQ ID NO: 1265276 - RNA, 15 nt, Human
gcugguaucucagaa

SEQ ID NO: 1265277 - RNA, 15 nt, Human
gcugcucuuggcugg

SEQ ID NO: 1265278 - RNA, 18 nt, Human
gcugcucuuggcuggacc

SEQ ID NO: 1265279 - RNA, 21 nt, Human
gcugcucuuggcuggacccag

SEQ ID NO: 1265280 - RNA, 22 nt, Human
gcugcucuuggcuggacccagc

SEQ ID NO: 1265281 - RNA, 23 nt, Human
gcugcucuuggcuggacccagcc

SEQ ID NO: 1265282 - RNA, 11 nt, Human
gcuggcugccu

SEQ ID NO: 1265283 - RNA, 16 nt, Human
gcuggcugagggcagu

SEQ ID NO: 1265284 - RNA, 14 nt, Human
gcuggcugccuuag

SEQ ID NO: 1265285 - RNA, 20 nt, Human
gcuggcugccuuagaaccuu

SEQ ID NO: 1265286 - RNA, 13 nt, Human
gcuggcucugagc

SEQ ID NO: 1265287 - RNA, 16 nt, Human
gcuggcucugagcgcc

SEQ ID NO: 1265288 - RNA, 19 nt, Human
gcuggcucugugagggugc

SEQ ID NO: 1265289 - RNA, 20 nt, Human
gcuggagagcauagggucug

SEQ ID NO: 1265290 - RNA, 19 nt, Human
gcugaggccacacucagca

SEQ ID NO: 1265291 - RNA, 21 nt, Human
gcugaggccacacucagcaca

SEQ ID NO: 1265292 - RNA, 15 nt, Human
gcugaggugcccagg

SEQ ID NO: 1265293 - RNA, 16 nt, Human
gcugaggugcccagga

SEQ ID NO: 1265294 - RNA, 17 nt, Human
gcugaggugcccaggag

SEQ ID NO: 1265295 - RNA, 18 nt, Human
gcugaggugcccaggaga

SEQ ID NO: 1265296 - RNA, 13 nt, Human
gcugaggcagcag

SEQ ID NO: 1265297 - RNA, 23 nt, Human
gcugaggcagcagugugaggcca

SEQ ID NO: 1265298 - RNA, 18 nt, Human
gcugagcaaaucaccaca

SEQ ID NO: 1265299 - RNA, 12 nt, Human
gcugagcaggcc

SEQ ID NO: 1265300 - RNA, 14 nt, Human
gcugagcaggccac

SEQ ID NO: 1265301 - RNA, 13 nt, Human
gcugagcagggcc

SEQ ID NO: 1265302 - RNA, 14 nt, Human
gcugagcagggccg

SEQ ID NO: 1265303 - RNA, 16 nt, Human
gcugagcagggccggg

SEQ ID NO: 1265304 - RNA, 20 nt, Human
gcugaggugcccaggagaag

SEQ ID NO: 1265305 - RNA, 12 nt, Human
gcugcaagguac

SEQ ID NO: 1265306 - RNA, 20 nt, Human
gcugcaagguacucugguga

SEQ ID NO: 1265307 - RNA, 18 nt, Human
gcugcaagcacagcccuu

SEQ ID NO: 1265308 - RNA, 20 nt, Human
gcugccccuggugcacuggc

SEQ ID NO: 1265309 - RNA, 21 nt, Human
gcugcccuacagcacccugug

SEQ ID NO: 1265310 - RNA, 12 nt, Human
gcugcccuccug

SEQ ID NO: 1265311 - RNA, 21 nt, Human
gcugcccuccugugcucagcc

SEQ ID NO: 1265312 - RNA, 14 nt, Human
gcugcagccucagg

SEQ ID NO: 1265313 - RNA, 15 nt, Human
gcugcagccucagga

SEQ ID NO: 1265314 - RNA, 16 nt, Human
gcugcagccucaggac

SEQ ID NO: 1265315 - RNA, 18 nt, Human
gcugcagccucaggacug

SEQ ID NO: 1265316 - RNA, 19 nt, Human
gcugcagccucaggacugg

SEQ ID NO: 1265317 - RNA, 21 nt, Human
gcugcagccucaggacuggga

SEQ ID NO: 1265318 - RNA, 22 nt, Human
gcugcagccucaggacugggag

SEQ ID NO: 1265319 - RNA, 23 nt, Human
gcugcagccucaggacugggagc

SEQ ID NO: 1265320 - RNA, 16 nt, Human
gcugcagccugcgcca

SEQ ID NO: 1265321 - RNA, 15 nt, Human
gcugcccccaccucu

SEQ ID NO: 1265322 - RNA, 15 nt, Human
gcugcccccagagcc

SEQ ID NO: 1265323 - RNA, 20 nt, Human
gcugcccccagagccacagu

SEQ ID NO: 1265324 - RNA, 21 nt, Human
gcugcccccagagccacaguu

SEQ ID NO: 1265325 - RNA, 13 nt, Human
gcugccccggccc

SEQ ID NO: 1265326 - RNA, 15 nt, Human
gcugccccggccccu

SEQ ID NO: 1265327 - RNA, 16 nt, Human
gcugccccggccccuc

SEQ ID NO: 1265328 - RNA, 22 nt, Human
gcugccccggccccucccccug

SEQ ID NO: 1265329 - RNA, 23 nt, Human
gcugccccggccccucccccuga

SEQ ID NO: 1265330 - RNA, 22 nt, Human
gcugccccucaucucucugccc

SEQ ID NO: 1265331 - RNA, 13 nt, Human
gcugccccucuca

SEQ ID NO: 1265332 - RNA, 14 nt, Human
gcugccccucucac

SEQ ID NO: 1265333 - RNA, 15 nt, Human
gcugccccucucacc

SEQ ID NO: 1265334 - RNA, 16 nt, Human
gcugccccucucacca

SEQ ID NO: 1265335 - RNA, 18 nt, Human
gcugccccucucaccaaa

SEQ ID NO: 1265336 - RNA, 14 nt, Human
gcugccucuucccu

SEQ ID NO: 1265337 - RNA, 18 nt, Human
gcugccucuucccucuuc

SEQ ID NO: 1265338 - RNA, 21 nt, Human
gcugccucccuuguggcagca

SEQ ID NO: 1265339 - RNA, 21 nt, Human
gcugccucuaccugacacucc

SEQ ID NO: 1265340 - RNA, 13 nt, Human
gcugccucaugcu

SEQ ID NO: 1265341 - RNA, 21 nt, Human
gcugccuccccucuccuuccu

SEQ ID NO: 1265342 - RNA, 18 nt, Human
gcugccucccucugcugu

SEQ ID NO: 1265343 - RNA, 23 nt, Human
gcugcucuugaacuccugaccuc

SEQ ID NO: 1265344 - RNA, 11 nt, Human
gcugccugagu

SEQ ID NO: 1265345 - RNA, 21 nt, Human
gcugccugagucgugaccugc

SEQ ID NO: 1265346 - RNA, 22 nt, Human
gcugccugagucgugaccugcu

SEQ ID NO: 1265347 - RNA, 18 nt, Human
gcaaaauuauagaaguuu

SEQ ID NO: 1265348 - RNA, 23 nt, Human
gcaaaauuauagaaguuuagauu

SEQ ID NO: 1265349 - RNA, 15 nt, Human
gcaaaaucaguuuuc

SEQ ID NO: 1265350 - RNA, 13 nt, Human
gcaaaaucaguuu

SEQ ID NO: 1265351 - RNA, 20 nt, Human
gcaaaauaauuuuaaacaaa

SEQ ID NO: 1265352 - RNA, 13 nt, Human
gcaaaauaauuuu

SEQ ID NO: 1265353 - RNA, 15 nt, Human
gcaaaauaauuuuaa

SEQ ID NO: 1265354 - RNA, 22 nt, Human
gcaacaggguauggacuaucug

SEQ ID NO: 1265355 - RNA, 17 nt, Human
gcaacaguuugacauuu

SEQ ID NO: 1265356 - RNA, 13 nt, Human
gcaacauccaaaa

SEQ ID NO: 1265357 - RNA, 17 nt, Human
gcaacauccaaaauagu

SEQ ID NO: 1265358 - RNA, 14 nt, Human
gcaacaugaugagg

SEQ ID NO: 1265359 - RNA, 16 nt, Human
gcaacaugaugaggua

SEQ ID NO: 1265360 - RNA, 13 nt, Human
gcaacauggcuuu

SEQ ID NO: 1265361 - RNA, 22 nt, Human
gcaacaugaugagguaguaccu

SEQ ID NO: 1265362 - RNA, 14 nt, Human
gcaaccauuugaaa

SEQ ID NO: 1265363 - RNA, 19 nt, Human
gcaaccccaggcugaagca

SEQ ID NO: 1265364 - RNA, 11 nt, Human
gcaaccaggaa

SEQ ID NO: 1265365 - RNA, 15 nt, Human
gcaaccaggaacagc

SEQ ID NO: 1265366 - RNA, 17 nt, Human
gcaaccaggaacagcaa

SEQ ID NO: 1265367 - RNA, 20 nt, Human
gcaaccaggaacagcaaaug

SEQ ID NO: 1265368 - RNA, 16 nt, Human
gcaaccucuuggccug

SEQ ID NO: 1265369 - RNA, 23 nt, Human
gcaaccucuuggccugaucagac

SEQ ID NO: 1265370 - RNA, 20 nt, Human
gcaaccuucgccaccugggu

SEQ ID NO: 1265371 - RNA, 21 nt, Human
gcaaaaacaaaaagaaaagaa

SEQ ID NO: 1265372 - RNA, 20 nt, Human
gcaaaaacaaaaagaaaaga

SEQ ID NO: 1265373 - RNA, 23 nt, Human
gcaaaaauaguuuggauauguaa

SEQ ID NO: 1265374 - RNA, 19 nt, Human
gcaaaagcuuacaaauacu

SEQ ID NO: 1265375 - RNA, 15 nt, Human
gcaaaaacaaaaaga

SEQ ID NO: 1265376 - RNA, 17 nt, Human
gcaaaaaauguuuuugg

SEQ ID NO: 1265377 - RNA, 17 nt, Human
gcaaaaaagaaaaccuu

SEQ ID NO: 1265378 - RNA, 15 nt, Human
gcaaaaaagaaaacc

SEQ ID NO: 1265379 - RNA, 18 nt, Human
gcaaaaaagaaaaccuuu

SEQ ID NO: 1265380 - RNA, 18 nt, Human
gauuuauuuaaaauagca

SEQ ID NO: 1265381 - RNA, 16 nt, Human
gauuuaauuugaaaua

SEQ ID NO: 1265382 - RNA, 21 nt, Human
gauuuauuaauauauauuauc

SEQ ID NO: 1265383 - RNA, 12 nt, Human
gauuuauuuaaa

SEQ ID NO: 1265384 - RNA, 21 nt, Human
gauuuaauauaaaguuuuaua

SEQ ID NO: 1265385 - RNA, 23 nt, Human
gauuuaauauaaaguuuuauaua

SEQ ID NO: 1265386 - RNA, 19 nt, Human
gauuuaaucugccaagggc

SEQ ID NO: 1265387 - RNA, 16 nt, Human
gaugauuucaguucua

SEQ ID NO: 1265388 - RNA, 19 nt, Human
gaugauuucaguucuagga

SEQ ID NO: 1265389 - RNA, 22 nt, Human
gaugauuucaguucuaggaaaa

SEQ ID NO: 1265390 - RNA, 23 nt, Human
gaugauuucaguucuaggaaaau

SEQ ID NO: 1265391 - RNA, 17 nt, Human
gauggaaaauucauuuu

SEQ ID NO: 1265392 - RNA, 17 nt, Human
gauggaacacggccaca

SEQ ID NO: 1265393 - RNA, 21 nt, Human
gaugauccccacgccacagcc

SEQ ID NO: 1265394 - RNA, 19 nt, Human
gaugauugacaacacccau

SEQ ID NO: 1265395 - RNA, 19 nt, Human
gaugauacuaauaaacuaa

SEQ ID NO: 1265396 - RNA, 13 nt, Human
gaugaucaauuau

SEQ ID NO: 1265397 - RNA, 20 nt, Human
gaugaucaauuauaguuucu

SEQ ID NO: 1265398 - RNA, 22 nt, Human
gaugaucaauuauaguuucuga

SEQ ID NO: 1265399 - RNA, 15 nt, Human
gaugauccccacgcc

SEQ ID NO: 1265400 - RNA, 16 nt, Human
gaugauccccacgcca

SEQ ID NO: 1265401 - RNA, 20 nt, Human
gaugauccccacgccacagc

SEQ ID NO: 1265402 - RNA, 12 nt, Human
gaucuggaaccc

SEQ ID NO: 1265403 - RNA, 14 nt, Human
gaucuggaacccag

SEQ ID NO: 1265404 - RNA, 23 nt, Human
gaucugauugaccguguuggucu

SEQ ID NO: 1265405 - RNA, 16 nt, Human
gaucugauugaccgug

SEQ ID NO: 1265406 - RNA, 23 nt, Human
gaucugauaggguuugugacagg

SEQ ID NO: 1265407 - RNA, 20 nt, Human
gaucugcagggggugugucu

SEQ ID NO: 1265408 - RNA, 18 nt, Human
gaucuggaaccucagccu

SEQ ID NO: 1265409 - RNA, 19 nt, Human
gaucuggaaccucagccug

SEQ ID NO: 1265410 - RNA, 20 nt, Human
gaucuggaaccucagccugg

SEQ ID NO: 1265411 - RNA, 21 nt, Human
gaucuggaaccucagccuggc

SEQ ID NO: 1265412 - RNA, 15 nt, Human
gaucuggaacccaga

SEQ ID NO: 1265413 - RNA, 16 nt, Human
gaucuggaacccagac

SEQ ID NO: 1265414 - RNA, 17 nt, Human
gaucuggaacccagacu

SEQ ID NO: 1265415 - RNA, 18 nt, Human
gaucuggaacccagacuc

SEQ ID NO: 1265416 - RNA, 20 nt, Human
gaucuggaacccagacucag

SEQ ID NO: 1265417 - RNA, 12 nt, Human
gaucuggaaccu

SEQ ID NO: 1265418 - RNA, 16 nt, Human
gaucuggaaccucagc

SEQ ID NO: 1265419 - RNA, 17 nt, Human
gaucuggaaccucagcc

SEQ ID NO: 1265420 - RNA, 21 nt, Human
gauccacccgccucagccucc

SEQ ID NO: 1265421 - RNA, 18 nt, Human
gauccacucgccucagcc

SEQ ID NO: 1265422 - RNA, 19 nt, Human
gauccacuggcuggacaaa

SEQ ID NO: 1265423 - RNA, 17 nt, Human
gaucccaacacugccag

SEQ ID NO: 1265424 - RNA, 13 nt, Human
gauccacuggcug

SEQ ID NO: 1265425 - RNA, 12 nt, Human
gauccagccugg

SEQ ID NO: 1265426 - RNA, 18 nt, Human
gaucccaacacugccagc

SEQ ID NO: 1265427 - RNA, 19 nt, Human
gaucccaacacugccagca

SEQ ID NO: 1265428 - RNA, 21 nt, Human
gaucccaaguagaaucucagu

SEQ ID NO: 1265429 - RNA, 21 nt, Human
gaucccagagagcccgaggag

SEQ ID NO: 1265430 - RNA, 17 nt, Human
gaucccagagagcccga

SEQ ID NO: 1265431 - RNA, 15 nt, Human
gaucccaugagcucc

SEQ ID NO: 1265432 - RNA, 13 nt, Human
gaucugagggaga

SEQ ID NO: 1265433 - RNA, 17 nt, Human
gaucugaugcaagcaag

SEQ ID NO: 1265434 - RNA, 22 nt, Human
gaucugagucagagccaugucu

SEQ ID NO: 1265435 - RNA, 17 nt, Human
gaucugagucagagcca

SEQ ID NO: 1265436 - RNA, 19 nt, Human
gaucugauaggguuuguga

SEQ ID NO: 1265437 - RNA, 11 nt, Human
gaucucugaag

SEQ ID NO: 1265438 - RNA, 14 nt, Human
gaucucugaagcca

SEQ ID NO: 1265439 - RNA, 19 nt, Human
gaucucugaagccacaaau

SEQ ID NO: 1265440 - RNA, 12 nt, Human
gauacugaaaua

SEQ ID NO: 1265441 - RNA, 18 nt, Human
gauaccauauacagcuca

SEQ ID NO: 1265442 - RNA, 17 nt, Human
gauacugcgacuuucug

SEQ ID NO: 1265443 - RNA, 18 nt, Human
gauacugcgacuuucugc

SEQ ID NO: 1265444 - RNA, 19 nt, Human
gauacugcgacuuucugcc

SEQ ID NO: 1265445 - RNA, 20 nt, Human
gauacugcgacuuucugccu

SEQ ID NO: 1265446 - RNA, 21 nt, Human
gauacugcgacuuucugccug

SEQ ID NO: 1265447 - RNA, 23 nt, Human
gauacugcgacuuucugccugga

SEQ ID NO: 1265448 - RNA, 13 nt, Human
gauacuggcacag

SEQ ID NO: 1265449 - RNA, 16 nt, Human
gauacuggcacagagg

SEQ ID NO: 1265450 - RNA, 14 nt, Human
gauacauacagaau

SEQ ID NO: 1265451 - RNA, 17 nt, Human
gauacauccaaagcaga

SEQ ID NO: 1265452 - RNA, 20 nt, Human
gauacauccaaagcagacag

SEQ ID NO: 1265453 - RNA, 21 nt, Human
gauacauccaaagcagacagc

SEQ ID NO: 1265454 - RNA, 23 nt, Human
gauacauccaaagcagacagcuc

SEQ ID NO: 1265455 - RNA, 15 nt, Human
gauaccagcgaggag

SEQ ID NO: 1265456 - RNA, 22 nt, Human
gauaccagcgaggaggcuccag

SEQ ID NO: 1265457 - RNA, 13 nt, Human
gauaccagcugga

SEQ ID NO: 1265458 - RNA, 12 nt, Human
gauccacccgcc

SEQ ID NO: 1265459 - RNA, 15 nt, Human
gauccaagcuaagca

SEQ ID NO: 1265460 - RNA, 17 nt, Human
gauccaagcuaagcacu

SEQ ID NO: 1265461 - RNA, 22 nt, Human
gauccaagcuaagcacugccac

SEQ ID NO: 1265462 - RNA, 13 nt, Human
gauccaaaagaag

SEQ ID NO: 1265463 - RNA, 18 nt, Human
gaucaaauguuuaaucau

SEQ ID NO: 1265464 - RNA, 20 nt, Human
gaucaaauguuuaaucauau

SEQ ID NO: 1265465 - RNA, 16 nt, Human
gauccaaaagaagccc

SEQ ID NO: 1265466 - RNA, 19 nt, Human
gauccaaaagaagccccca

SEQ ID NO: 1265467 - RNA, 20 nt, Human
gauccaaaagaagcccccag

SEQ ID NO: 1265468 - RNA, 22 nt, Human
gauccaaaagaagcccccagcu

SEQ ID NO: 1265469 - RNA, 23 nt, Human
gauccaaaagaagcccccagcua

SEQ ID NO: 1265470 - RNA, 19 nt, Human
gauccaacuaaugccuuac

SEQ ID NO: 1265471 - RNA, 20 nt, Human
gauccaacuaaugccuuacu

SEQ ID NO: 1265472 - RNA, 21 nt, Human
gauauuuucaacgcagcccug

SEQ ID NO: 1265473 - RNA, 22 nt, Human
gauauuuucaacgcagcccugc

SEQ ID NO: 1265474 - RNA, 23 nt, Human
gauauuuucaacgcagcccugcu

SEQ ID NO: 1265475 - RNA, 15 nt, Human
gauauuuucugugcc

SEQ ID NO: 1265476 - RNA, 21 nt, Human
gauauuuucugugccugaaua

SEQ ID NO: 1265477 - RNA, 14 nt, Human
gauauuuucucuag

SEQ ID NO: 1265478 - RNA, 16 nt, Human
gaucaaaaacuauuug

SEQ ID NO: 1265479 - RNA, 22 nt, Human
gaucaaaccccgaccaccugcc

SEQ ID NO: 1265480 - RNA, 12 nt, Human
gaucaaagauga

SEQ ID NO: 1265481 - RNA, 15 nt, Human
gaucaaagaugaaaa

SEQ ID NO: 1265482 - RNA, 18 nt, Human
gaucaaagaugaaaagua

SEQ ID NO: 1265483 - RNA, 16 nt, Human
gaucaaauguuuaauc

SEQ ID NO: 1265484 - RNA, 14 nt, Human
gaucaaauguuuaa

SEQ ID NO: 1265485 - RNA, 18 nt, Human
gauacuuugauauuuuca

SEQ ID NO: 1265486 - RNA, 20 nt, Human
gauacuuggauuuaguuuca

SEQ ID NO: 1265487 - RNA, 12 nt, Human
gauacuguugca

SEQ ID NO: 1265488 - RNA, 13 nt, Human
gauacuuggauuu

SEQ ID NO: 1265489 - RNA, 23 nt, Human
gauacuuggauuuaguuucagua

SEQ ID NO: 1265490 - RNA, 13 nt, Human
gauagaaaugcca

SEQ ID NO: 1265491 - RNA, 14 nt, Human
gauagaaaugccaa

SEQ ID NO: 1265492 - RNA, 19 nt, Human
gauagaaaugccaagcacu

SEQ ID NO: 1265493 - RNA, 12 nt, Human
gauagaaugaca

SEQ ID NO: 1265494 - RNA, 19 nt, Human
gauauuuucaacgcagccc

SEQ ID NO: 1265495 - RNA, 22 nt, Human
gauauuugucaugcugggauuu

SEQ ID NO: 1265496 - RNA, 15 nt, Human
gauauuucuagcuua

SEQ ID NO: 1265497 - RNA, 21 nt, Human
gcaucccucacccauccuaga

SEQ ID NO: 1265498 - RNA, 16 nt, Human
gcauccauucuccuga

SEQ ID NO: 1265499 - RNA, 17 nt, Human
gcauccauucuccugag

SEQ ID NO: 1265500 - RNA, 12 nt, Human
gcaucccugggc

SEQ ID NO: 1265501 - RNA, 15 nt, Human
gcaucccugggccuu

SEQ ID NO: 1265502 - RNA, 17 nt, Human
gcaucccugggccuugg

SEQ ID NO: 1265503 - RNA, 18 nt, Human
gcaucccugggccuuggg

SEQ ID NO: 1265504 - RNA, 20 nt, Human
gcaucccugggccuugggcu

SEQ ID NO: 1265505 - RNA, 19 nt, Human
gcaucccugggccuugggc

SEQ ID NO: 1265506 - RNA, 15 nt, Human
gcauccgcaggugcu

SEQ ID NO: 1265507 - RNA, 16 nt, Human
gcauccgcaggugcug

SEQ ID NO: 1265508 - RNA, 17 nt, Human
gcauccgcaggugcugg

SEQ ID NO: 1265509 - RNA, 20 nt, Human
gcauccgcaggugcuggucc

SEQ ID NO: 1265510 - RNA, 18 nt, Human
gcauccgcaggugcuggu

SEQ ID NO: 1265511 - RNA, 18 nt, Human
gcauccuccacaauagca

SEQ ID NO: 1265512 - RNA, 12 nt, Human
gcauccuccagc

SEQ ID NO: 1265513 - RNA, 13 nt, Human
gcauccuccagcc

SEQ ID NO: 1265514 - RNA, 11 nt, Human
gcauccagccu

SEQ ID NO: 1265515 - RNA, 19 nt, Human
gcauccauucuccugagga

SEQ ID NO: 1265516 - RNA, 22 nt, Human
gcauccagagucccugccugga

SEQ ID NO: 1265517 - RNA, 23 nt, Human
gcauccagagucccugccuggac

SEQ ID NO: 1265518 - RNA, 21 nt, Human
gcauccagagucccugccugg

SEQ ID NO: 1265519 - RNA, 20 nt, Human
gcaucuagcaugucgucaaa

SEQ ID NO: 1265520 - RNA, 23 nt, Human
gcaucgucaugcacaguauuugu

SEQ ID NO: 1265521 - RNA, 19 nt, Human
gcaucuaaguuauaagacu

SEQ ID NO: 1265522 - RNA, 22 nt, Human
gcaucuaaguuauaagacucuc

SEQ ID NO: 1265523 - RNA, 21 nt, Human
gcaucuagaggcuuccuucau

SEQ ID NO: 1265524 - RNA, 22 nt, Human
gcaucuagaggcuuccuucauu

SEQ ID NO: 1265525 - RNA, 23 nt, Human
gcaucuagaggcuuccuucauuu

SEQ ID NO: 1265526 - RNA, 15 nt, Human
gcauggcuauuuuau

SEQ ID NO: 1265527 - RNA, 17 nt, Human
gcauccuccgccucccg

SEQ ID NO: 1265528 - RNA, 14 nt, Human
gcauccuccagccc

SEQ ID NO: 1265529 - RNA, 15 nt, Human
gcauccuccagcccc

SEQ ID NO: 1265530 - RNA, 17 nt, Human
gcauccuccagccccug

SEQ ID NO: 1265531 - RNA, 14 nt, Human
gcauccucuggagc

SEQ ID NO: 1265532 - RNA, 16 nt, Human
gcauccucuggagcca

SEQ ID NO: 1265533 - RNA, 18 nt, Human
gcauccucuggagccagc

SEQ ID NO: 1265534 - RNA, 20 nt, Human
gcauccucuggagccagccg

SEQ ID NO: 1265535 - RNA, 17 nt, Human
gcaucggggagccggga

SEQ ID NO: 1265536 - RNA, 15 nt, Human
gcauggucacacacu

SEQ ID NO: 1265537 - RNA, 18 nt, Human
gcauggucacacacugau

SEQ ID NO: 1265538 - RNA, 19 nt, Human
gcauggucccacaucccug

SEQ ID NO: 1265539 - RNA, 20 nt, Human
gcauggucccacaucccugg

SEQ ID NO: 1265540 - RNA, 21 nt, Human
gcauggucccacaucccuggg

SEQ ID NO: 1265541 - RNA, 23 nt, Human
gcauggucccacaucccugggcc

SEQ ID NO: 1265542 - RNA, 15 nt, Human
gcauggugccccagg

SEQ ID NO: 1265543 - RNA, 16 nt, Human
gcauggugccccagga

SEQ ID NO: 1265544 - RNA, 17 nt, Human
gcauggugccccaggac

SEQ ID NO: 1265545 - RNA, 18 nt, Human
gcauggugccccaggacc

SEQ ID NO: 1265546 - RNA, 19 nt, Human
gcauggugccccaggacca

SEQ ID NO: 1265547 - RNA, 20 nt, Human
gcauggugccccaggaccag

SEQ ID NO: 1265548 - RNA, 21 nt, Human
gcauggugccccaggaccagc

SEQ ID NO: 1265549 - RNA, 23 nt, Human
gcauggugccccaggaccagcuc

SEQ ID NO: 1265550 - RNA, 15 nt, Human
gcaugguguucuccu

SEQ ID NO: 1265551 - RNA, 16 nt, Human
gcaugguguucuccug

SEQ ID NO: 1265552 - RNA, 17 nt, Human
gcauguaacgcaaguuc

SEQ ID NO: 1265553 - RNA, 21 nt, Human
gcauguaacgcaaguucccag

SEQ ID NO: 1265554 - RNA, 17 nt, Human
gcaugguguucuccugc

SEQ ID NO: 1265555 - RNA, 18 nt, Human
gcaugguguucuccugcu

SEQ ID NO: 1265556 - RNA, 20 nt, Human
gcaugguguucuccugcugc

SEQ ID NO: 1265557 - RNA, 13 nt, Human
gcaugguuucagc

SEQ ID NO: 1265558 - RNA, 14 nt, Human
gcaugguuucagca

SEQ ID NO: 1265559 - RNA, 16 nt, Human
gcaugguuucagcacu

SEQ ID NO: 1265560 - RNA, 17 nt, Human
gcaugguuucagcacua

SEQ ID NO: 1265561 - RNA, 20 nt, Human
gcauuuaaccccccuguaca

SEQ ID NO: 1265562 - RNA, 21 nt, Human
gcauuuaaccccccuguacac

SEQ ID NO: 1265563 - RNA, 22 nt, Human
gcauuuaaccccccuguacaca

SEQ ID NO: 1265564 - RNA, 15 nt, Human
gcaguuuauauuuaa

SEQ ID NO: 1265565 - RNA, 18 nt, Human
gcaguuuauauuuaacuc

SEQ ID NO: 1265566 - RNA, 14 nt, Human
gcaguuuaucauuc

SEQ ID NO: 1265567 - RNA, 15 nt, Human
gcaguuuaucauuca

SEQ ID NO: 1265568 - RNA, 22 nt, Human
gcaguuguugcccacagcugua

SEQ ID NO: 1265569 - RNA, 13 nt, Human
gcaguugucucug

SEQ ID NO: 1265570 - RNA, 14 nt, Human
gcaguugucucugu

SEQ ID NO: 1265571 - RNA, 15 nt, Human
gcaguugucucuguu

SEQ ID NO: 1265572 - RNA, 16 nt, Human
gcaguugucucuguuu

SEQ ID NO: 1265573 - RNA, 23 nt, Human
gcagucucuauaccaauaaagug

SEQ ID NO: 1265574 - RNA, 22 nt, Human
gcagucucuauaccaauaaagu

SEQ ID NO: 1265575 - RNA, 21 nt, Human
gcagucucuauaccaauaaag

SEQ ID NO: 1265576 - RNA, 20 nt, Human
gcagucucuauaccaauaaa

SEQ ID NO: 1265577 - RNA, 18 nt, Human
gcagucucuauaccaaua

SEQ ID NO: 1265578 - RNA, 20 nt, Human
gcagugaaugauucaguguu

SEQ ID NO: 1265579 - RNA, 23 nt, Human
gcagugagagaguggcuggggca

SEQ ID NO: 1265580 - RNA, 22 nt, Human
gcagugagagaguggcuggggc

SEQ ID NO: 1265581 - RNA, 17 nt, Human
gcagucucuauaccaau

SEQ ID NO: 1265582 - RNA, 17 nt, Human
gcagcugccaggagcac

SEQ ID NO: 1265583 - RNA, 17 nt, Human
gcagucgugccuguguc

SEQ ID NO: 1265584 - RNA, 18 nt, Human
gcagucgugccugugucc

SEQ ID NO: 1265585 - RNA, 19 nt, Human
gcagucgugccugugucca

SEQ ID NO: 1265586 - RNA, 16 nt, Human
gcagcugagcagggcc

SEQ ID NO: 1265587 - RNA, 17 nt, Human
gcagcugagcagggccg

SEQ ID NO: 1265588 - RNA, 18 nt, Human
gcagcugagcagggccgg

SEQ ID NO: 1265589 - RNA, 19 nt, Human
gcagcugagcagggccggg

SEQ ID NO: 1265590 - RNA, 21 nt, Human
gcagcugagcagggccgggga

SEQ ID NO: 1265591 - RNA, 20 nt, Human
gcagcugagcagggccgggg

SEQ ID NO: 1265592 - RNA, 21 nt, Human
gcagcugccaggagcacggcu

SEQ ID NO: 1265593 - RNA, 20 nt, Human
gcagcucuggacagccccac

SEQ ID NO: 1265594 - RNA, 12 nt, Human
gcagcugagcag

SEQ ID NO: 1265595 - RNA, 14 nt, Human
gcagcugagcaggg

SEQ ID NO: 1265596 - RNA, 15 nt, Human
gcagcugagcagggc

SEQ ID NO: 1265597 - RNA, 13 nt, Human
gcagcuccucugu

SEQ ID NO: 1265598 - RNA, 20 nt, Human
gcagcuccucugucucgagc

SEQ ID NO: 1265599 - RNA, 16 nt, Human
gcagcuccucugucuc

SEQ ID NO: 1265600 - RNA, 21 nt, Human
gcagccagggagagcccagga

SEQ ID NO: 1265601 - RNA, 16 nt, Human
gcagccagugcccuga

SEQ ID NO: 1265602 - RNA, 17 nt, Human
gcagccagugcccugag

SEQ ID NO: 1265603 - RNA, 18 nt, Human
gcagccagugcccugagc

SEQ ID NO: 1265604 - RNA, 19 nt, Human
gcagccagugcccugagcc

SEQ ID NO: 1265605 - RNA, 19 nt, Human
gcagccagcaucugggccu

SEQ ID NO: 1265606 - RNA, 11 nt, Human
gcagccagccc

SEQ ID NO: 1265607 - RNA, 17 nt, Human
gcagccagcaucugggc

SEQ ID NO: 1265608 - RNA, 13 nt, Human
gcagccagcccug

SEQ ID NO: 1265609 - RNA, 14 nt, Human
gcagccagcccugc

SEQ ID NO: 1265610 - RNA, 15 nt, Human
gcagccagcccugcc

SEQ ID NO: 1265611 - RNA, 16 nt, Human
gcagccagcccugccu

SEQ ID NO: 1265612 - RNA, 17 nt, Human
gcagccagcccugccug

SEQ ID NO: 1265613 - RNA, 18 nt, Human
gcagccagcccugccugg

SEQ ID NO: 1265614 - RNA, 19 nt, Human
gcagccagcccugccugga

SEQ ID NO: 1265615 - RNA, 20 nt, Human
gcagccagcccugccuggag

SEQ ID NO: 1265616 - RNA, 22 nt, Human
gcagccagcccugccuggagga

SEQ ID NO: 1265617 - RNA, 21 nt, Human
gcagccagcccugccuggagg

SEQ ID NO: 1265618 - RNA, 12 nt, Human
gcagccagggag

SEQ ID NO: 1265619 - RNA, 14 nt, Human
gcagccagggagag

SEQ ID NO: 1265620 - RNA, 15 nt, Human
gcagccagggagagc

SEQ ID NO: 1265621 - RNA, 16 nt, Human
gcagccagggagagcc

SEQ ID NO: 1265622 - RNA, 17 nt, Human
gcagccagggagagccc

SEQ ID NO: 1265623 - RNA, 18 nt, Human
gcagccagggagagccca

SEQ ID NO: 1265624 - RNA, 19 nt, Human
gcagccagggagagcccag

SEQ ID NO: 1265625 - RNA, 20 nt, Human
gcagccagggagagcccagg

SEQ ID NO: 1265626 - RNA, 22 nt, Human
gcagaaaaaccaacaucuacaa

SEQ ID NO: 1265627 - RNA, 16 nt, Human
gcagaaaacccuuggg

SEQ ID NO: 1265628 - RNA, 17 nt, Human
gcagaaaacccuugggc

SEQ ID NO: 1265629 - RNA, 22 nt, Human
gcagaaaacccuugggccagaa

SEQ ID NO: 1265630 - RNA, 21 nt, Human
gcagaaaacccuugggccaga

SEQ ID NO: 1265631 - RNA, 13 nt, Human
gcagaacagugau

SEQ ID NO: 1265632 - RNA, 12 nt, Human
gcagaacaguga

SEQ ID NO: 1265633 - RNA, 17 nt, Human
gcagaaaauucugugcc

SEQ ID NO: 1265634 - RNA, 19 nt, Human
gcagaaagcaucccucacc

SEQ ID NO: 1265635 - RNA, 19 nt, Human
gcagaaccggagagccagc

SEQ ID NO: 1265636 - RNA, 20 nt, Human
gcagaaccggagagccagcu

SEQ ID NO: 1265637 - RNA, 22 nt, Human
gcagaacagugauuaccaggga

SEQ ID NO: 1265638 - RNA, 18 nt, Human
gcagaacagugauuacca

SEQ ID NO: 1265639 - RNA, 23 nt, Human
gcagagcugauggagaaggaagg

SEQ ID NO: 1265640 - RNA, 12 nt, Human
gcagagcuggcu

SEQ ID NO: 1265641 - RNA, 13 nt, Human
gcagagcuggcuc

SEQ ID NO: 1265642 - RNA, 14 nt, Human
gcagagcuggcucu

SEQ ID NO: 1265643 - RNA, 15 nt, Human
gcagagcuggcucug

SEQ ID NO: 1265644 - RNA, 17 nt, Human
gcagagcuggcucugag

SEQ ID NO: 1265645 - RNA, 23 nt, Human
gcagagcuggcucugagcgccuc

SEQ ID NO: 1265646 - RNA, 12 nt, Human
gcagagcuggug

SEQ ID NO: 1265647 - RNA, 13 nt, Human
gcagagcuggugc

SEQ ID NO: 1265648 - RNA, 22 nt, Human
gcagagcugauggagaaggaag

SEQ ID NO: 1265649 - RNA, 21 nt, Human
gcagagcugauggagaaggaa

SEQ ID NO: 1265650 - RNA, 21 nt, Human
gcagagcuggugcggcuggcc

SEQ ID NO: 1265651 - RNA, 14 nt, Human
gcagagcuggugcg

SEQ ID NO: 1265652 - RNA, 18 nt, Human
gcagaggcaguaccuggg

SEQ ID NO: 1265653 - RNA, 21 nt, Human
gcagaggcaguaccugggcaa

SEQ ID NO: 1265654 - RNA, 12 nt, Human
gcagaggccaga

SEQ ID NO: 1265655 - RNA, 12 nt, Human
gcagagggcugg

SEQ ID NO: 1265656 - RNA, 13 nt, Human
gcagagggcugga

SEQ ID NO: 1265657 - RNA, 14 nt, Human
gcagagggcuggag

SEQ ID NO: 1265658 - RNA, 16 nt, Human
gcagagggcuggaggc

SEQ ID NO: 1265659 - RNA, 15 nt, Human
gcagaggccagaggc

SEQ ID NO: 1265660 - RNA, 14 nt, Human
gcagaggcccacau

SEQ ID NO: 1265661 - RNA, 21 nt, Human
gcagaggcccacauuggaaga

SEQ ID NO: 1265662 - RNA, 20 nt, Human
gcagaggcccaggcugccgu

SEQ ID NO: 1265663 - RNA, 14 nt, Human
gcagaggccugggc

SEQ ID NO: 1265664 - RNA, 17 nt, Human
gcagaggccugggcugg

SEQ ID NO: 1265665 - RNA, 20 nt, Human
gcagaggccugggcugggaa

SEQ ID NO: 1265666 - RNA, 22 nt, Human
gcagaggccugggcugggaaaa

SEQ ID NO: 1265667 - RNA, 17 nt, Human
gcagagggcuggaggcc

SEQ ID NO: 1265668 - RNA, 18 nt, Human
gcagagggcuggaggccc

SEQ ID NO: 1265669 - RNA, 19 nt, Human
gcagagggcuggaggccca

SEQ ID NO: 1265670 - RNA, 20 nt, Human
gcagagggcuggaggcccag

SEQ ID NO: 1265671 - RNA, 21 nt, Human
gcagagggcuggaggcccagg

SEQ ID NO: 1265672 - RNA, 23 nt, Human
gcagagggcuggaggcccaggcu

SEQ ID NO: 1265673 - RNA, 24 nt, Human
gcagagggcuggaggcccaggcug

SEQ ID NO: 1265674 - RNA, 15 nt, Human
gcagcagugugaggc

SEQ ID NO: 1265675 - RNA, 19 nt, Human
gcagcagugugaggccagg

SEQ ID NO: 1265676 - RNA, 20 nt, Human
gcagcagugugaggccaggg

SEQ ID NO: 1265677 - RNA, 21 nt, Human
gcagcagugugaggccagggc

SEQ ID NO: 1265678 - RNA, 22 nt, Human
gcagcagugugaggccagggca

SEQ ID NO: 1265679 - RNA, 23 nt, Human
gcagcagugugaggccagggcag

SEQ ID NO: 1265680 - RNA, 23 nt, Human
gcagcaucggacaagacccccag

SEQ ID NO: 1265681 - RNA, 14 nt, Human
gcagcaucucuacc

SEQ ID NO: 1265682 - RNA, 22 nt, Human
gcagcaucucuaccuucucccc

SEQ ID NO: 1265683 - RNA, 20 nt, Human
gcagcaucucuaccuucucc

SEQ ID NO: 1265684 - RNA, 13 nt, Human
gcagcauuucacu

SEQ ID NO: 1265685 - RNA, 14 nt, Human
gcagcauuucacuu

SEQ ID NO: 1265686 - RNA, 18 nt, Human
gcagccacacuucucagg

SEQ ID NO: 1265687 - RNA, 19 nt, Human
gcagccacacuucucagga

SEQ ID NO: 1265688 - RNA, 20 nt, Human
gcagccacacuucucaggac

SEQ ID NO: 1265689 - RNA, 21 nt, Human
gcagccacacuucucaggaca

SEQ ID NO: 1265690 - RNA, 22 nt, Human
gcagccacacuucucaggacac

SEQ ID NO: 1265691 - RNA, 21 nt, Human
gagauugugccccugcacucc

SEQ ID NO: 1265692 - RNA, 20 nt, Human
gagaugcuagaacucccuuu

SEQ ID NO: 1265693 - RNA, 15 nt, Human
gagaugccucccuga

SEQ ID NO: 1265694 - RNA, 15 nt, Human
gagaugucuuggaac

SEQ ID NO: 1265695 - RNA, 16 nt, Human
gagaugucuuggaaca

SEQ ID NO: 1265696 - RNA, 16 nt, Human
gagaugcuagaacucc

SEQ ID NO: 1265697 - RNA, 14 nt, Human
gagaugccucccug

SEQ ID NO: 1265698 - RNA, 15 nt, Human
gagauuauguucuuu

SEQ ID NO: 1265699 - RNA, 15 nt, Human
gagauuaccuccuga

SEQ ID NO: 1265700 - RNA, 14 nt, Human
gagauuacaggcau

SEQ ID NO: 1265701 - RNA, 17 nt, Human
gagauucaguuuucauu

SEQ ID NO: 1265702 - RNA, 17 nt, Human
gagauguguguugauac

SEQ ID NO: 1265703 - RNA, 18 nt, Human
gagauguguguugauacu

SEQ ID NO: 1265704 - RNA, 21 nt, Human
gagauguguguugauacuguu

SEQ ID NO: 1265705 - RNA, 23 nt, Human
gagauguguguugauacuguugc

SEQ ID NO: 1265706 - RNA, 22 nt, Human
gagauguguguugauacuguug

SEQ ID NO: 1265707 - RNA, 22 nt, Human
gagagcuucuguugcugccuca

SEQ ID NO: 1265708 - RNA, 17 nt, Human
gagaggacaagaugggu

SEQ ID NO: 1265709 - RNA, 20 nt, Human
gagaggacuguagggagggc

SEQ ID NO: 1265710 - RNA, 12 nt, Human
gagaggcccugg

SEQ ID NO: 1265711 - RNA, 13 nt, Human
gagaggcccugga

SEQ ID NO: 1265712 - RNA, 24 nt, Human
gagaggcccuggaucagcguggcc

SEQ ID NO: 1265713 - RNA, 15 nt, Human
gagaggccuuuugga

SEQ ID NO: 1265714 - RNA, 18 nt, Human
gagaggccuuuuggaaug

SEQ ID NO: 1265715 - RNA, 21 nt, Human
gagaggcccuggaucagcgug

SEQ ID NO: 1265716 - RNA, 15 nt, Human
gagagggaaugugaa

SEQ ID NO: 1265717 - RNA, 14 nt, Human
gagagggaauguga

SEQ ID NO: 1265718 - RNA, 13 nt, Human
gagagcuaggagc

SEQ ID NO: 1265719 - RNA, 14 nt, Human
gagagcuaggagca

SEQ ID NO: 1265720 - RNA, 22 nt, Human
gagagcuaggagcaaagccugu

SEQ ID NO: 1265721 - RNA, 19 nt, Human
gagagcuaggagcaaagcc

SEQ ID NO: 1265722 - RNA, 16 nt, Human
gagacgggcccuggug

SEQ ID NO: 1265723 - RNA, 19 nt, Human
gagacuccagaccugaggc

SEQ ID NO: 1265724 - RNA, 22 nt, Human
gacuuuuuauggcacuaguauu

SEQ ID NO: 1265725 - RNA, 18 nt, Human
gacuuuuauuuccaguga

SEQ ID NO: 1265726 - RNA, 16 nt, Human
gacuuuuugcauuuaa

SEQ ID NO: 1265727 - RNA, 20 nt, Human
gagaaaaagaaaaaauauau

SEQ ID NO: 1265728 - RNA, 13 nt, Human
gagaaggagcaga

SEQ ID NO: 1265729 - RNA, 22 nt, Human
gagaaggauaggccuucauuaa

SEQ ID NO: 1265730 - RNA, 16 nt, Human
gagaaguauacauaag

SEQ ID NO: 1265731 - RNA, 15 nt, Human
gagaagucacagggc

SEQ ID NO: 1265732 - RNA, 17 nt, Human
gagaagugugccuucuc

SEQ ID NO: 1265733 - RNA, 23 nt, Human
gagacgggacugcggaggaagga

SEQ ID NO: 1265734 - RNA, 21 nt, Human
gagaccggccugccaggagga

SEQ ID NO: 1265735 - RNA, 20 nt, Human
gagaccggccugccaggagg

SEQ ID NO: 1265736 - RNA, 15 nt, Human
gagaccggccugcca

SEQ ID NO: 1265737 - RNA, 17 nt, Human
gagaccggccugccagg

SEQ ID NO: 1265738 - RNA, 18 nt, Human
gagaccggccugccagga

SEQ ID NO: 1265739 - RNA, 19 nt, Human
gagaccggccugccaggag

SEQ ID NO: 1265740 - RNA, 16 nt, Human
gagaaguuguaaagua

SEQ ID NO: 1265741 - RNA, 20 nt, Human
gagaauaaauugauuuuuau

SEQ ID NO: 1265742 - RNA, 21 nt, Human
gagaaucuacccccagaucca

SEQ ID NO: 1265743 - RNA, 15 nt, Human
gagaaucuauauuua

SEQ ID NO: 1265744 - RNA, 22 nt, Human
gagaaucuauauuuaacaagau

SEQ ID NO: 1265745 - RNA, 17 nt, Human
gagcuguuuacuaggga

SEQ ID NO: 1265746 - RNA, 23 nt, Human
gagcuggagaugaggccagacca

SEQ ID NO: 1265747 - RNA, 22 nt, Human
gagcuggagaugaggccagacc

SEQ ID NO: 1265748 - RNA, 12 nt, Human
gagcccugggac

SEQ ID NO: 1265749 - RNA, 12 nt, Human
gagcuggcucug

SEQ ID NO: 1265750 - RNA, 20 nt, Human
gagcccugggaggcucugga

SEQ ID NO: 1265751 - RNA, 19 nt, Human
gagcccugggaggcucugg

SEQ ID NO: 1265752 - RNA, 18 nt, Human
gagcccugggaggcucug

SEQ ID NO: 1265753 - RNA, 16 nt, Human
gagcccugggaggcuc

SEQ ID NO: 1265754 - RNA, 12 nt, Human
gagcccugggag

SEQ ID NO: 1265755 - RNA, 17 nt, Human
gagcccugaggccuaga

SEQ ID NO: 1265756 - RNA, 22 nt, Human
gagccccuucugcucagcucug

SEQ ID NO: 1265757 - RNA, 17 nt, Human
gagccccuucugcucag

SEQ ID NO: 1265758 - RNA, 20 nt, Human
gagccccuucugcucagcuc

SEQ ID NO: 1265759 - RNA, 21 nt, Human
gagccccuucugcucagcucu

SEQ ID NO: 1265760 - RNA, 12 nt, Human
gagccccuccua

SEQ ID NO: 1265761 - RNA, 14 nt, Human
gagcagucaggaaa

SEQ ID NO: 1265762 - RNA, 13 nt, Human
gagcaguccuugg

SEQ ID NO: 1265763 - RNA, 14 nt, Human
gagcaguccuuggc

SEQ ID NO: 1265764 - RNA, 16 nt, Human
gagcaguccuuggccu

SEQ ID NO: 1265765 - RNA, 17 nt, Human
gagcaguccuuggccug

SEQ ID NO: 1265766 - RNA, 20 nt, Human
gagcccagggaggccgaagc

SEQ ID NO: 1265767 - RNA, 15 nt, Human
gaggacccaggacag

SEQ ID NO: 1265768 - RNA, 14 nt, Human
gaggacccaggaca

SEQ ID NO: 1265769 - RNA, 11 nt, Human
gaggacccagg

SEQ ID NO: 1265770 - RNA, 12 nt, Human
gaggacccagga

SEQ ID NO: 1265771 - RNA, 21 nt, Human
gaggacgcucucuggccuucg

SEQ ID NO: 1265772 - RNA, 16 nt, Human
gaggacccagggcucu

SEQ ID NO: 1265773 - RNA, 14 nt, Human
gaggacuugugucu

SEQ ID NO: 1265774 - RNA, 16 nt, Human
gaggacuugugucucu

SEQ ID NO: 1265775 - RNA, 17 nt, Human
gaggacuugugucucug

SEQ ID NO: 1265776 - RNA, 20 nt, Human
gaggacccaggaaaggcagg

SEQ ID NO: 1265777 - RNA, 14 nt, Human
gaggacccagggcu

SEQ ID NO: 1265778 - RNA, 15 nt, Human
gaggacccagggcuc

SEQ ID NO: 1265779 - RNA, 20 nt, Human
gaggacuguagggagggcgg

SEQ ID NO: 1265780 - RNA, 21 nt, Human
gaggacuguagggagggcggc

SEQ ID NO: 1265781 - RNA, 14 nt, Human
gaggagaaacugga

SEQ ID NO: 1265782 - RNA, 12 nt, Human
gaggagaaacug

SEQ ID NO: 1265783 - RNA, 18 nt, Human
gaggacuugugucucugu

SEQ ID NO: 1265784 - RNA, 22 nt, Human
gaggacuugugucucugugcuu

SEQ ID NO: 1265785 - RNA, 15 nt, Human
gaggagcagcaggag

SEQ ID NO: 1265786 - RNA, 16 nt, Human
gaggagcagcaggagg

SEQ ID NO: 1265787 - RNA, 21 nt, Human
gaggagcagcaggagggggga

SEQ ID NO: 1265788 - RNA, 20 nt, Human
gaggagcagcaggagggggg

SEQ ID NO: 1265789 - RNA, 17 nt, Human
gaggagaugcuccuugg

SEQ ID NO: 1265790 - RNA, 18 nt, Human
gaggagauucugccuuug

SEQ ID NO: 1265791 - RNA, 16 nt, Human
gaggggcagagccagg

SEQ ID NO: 1265792 - RNA, 20 nt, Human
gaggggcagagccaggaaga

SEQ ID NO: 1265793 - RNA, 13 nt, Human
gaggggcagagcc

SEQ ID NO: 1265794 - RNA, 12 nt, Human
gagggccugggc

SEQ ID NO: 1265795 - RNA, 22 nt, Human
gagggccucaaaggcccgcucu

SEQ ID NO: 1265796 - RNA, 21 nt, Human
gaggggaccaggagugggugg

SEQ ID NO: 1265797 - RNA, 17 nt, Human
gaggggaccaggagugg

SEQ ID NO: 1265798 - RNA, 11 nt, Human
gaggggagggg

SEQ ID NO: 1265799 - RNA, 19 nt, Human
gaggcauggucugcccucu

SEQ ID NO: 1265800 - RNA, 15 nt, Human
gaggcuccacuuggu

SEQ ID NO: 1265801 - RNA, 18 nt, Human
gaggcugagaugggagaa

SEQ ID NO: 1265802 - RNA, 18 nt, Human
gaggcuccacuuggucug

SEQ ID NO: 1265803 - RNA, 17 nt, Human
gaggcuccacuuggucu

SEQ ID NO: 1265804 - RNA, 21 nt, Human
gacauuuuacauuaaauuuuu

SEQ ID NO: 1265805 - RNA, 15 nt, Human
gacauuuuacauuaa

SEQ ID NO: 1265806 - RNA, 14 nt, Human
gacauuuuacauua

SEQ ID NO: 1265807 - RNA, 13 nt, Human
gacauuuuacauu

SEQ ID NO: 1265808 - RNA, 20 nt, Human
gacauuuuaaaaaaugguca

SEQ ID NO: 1265809 - RNA, 22 nt, Human
gacauuugggagacaugugaca

SEQ ID NO: 1265810 - RNA, 23 nt, Human
gacauuugggagacaugugacau

SEQ ID NO: 1265811 - RNA, 19 nt, Human
gacauuguagagcuucugg

SEQ ID NO: 1265812 - RNA, 23 nt, Human
gacauuggcaccuaauccaggca

SEQ ID NO: 1265813 - RNA, 14 nt, Human
gacauugcguuuga

SEQ ID NO: 1265814 - RNA, 21 nt, Human
gacauugcguuugaccuuuua

SEQ ID NO: 1265815 - RNA, 18 nt, Human
gacagucaccucauggaa

SEQ ID NO: 1265816 - RNA, 12 nt, Human
gacagcucugca

SEQ ID NO: 1265817 - RNA, 21 nt, Human
gacaguccgucaaaacagauu

SEQ ID NO: 1265818 - RNA, 12 nt, Human
gacaugugacau

SEQ ID NO: 1265819 - RNA, 16 nt, Human
gacaugugacauuuau

SEQ ID NO: 1265820 - RNA, 20 nt, Human
gacaugugacauuuauauau

SEQ ID NO: 1265821 - RNA, 17 nt, Human
gacauguggggccaggu

SEQ ID NO: 1265822 - RNA, 14 nt, Human
gacagccccacccu

SEQ ID NO: 1265823 - RNA, 15 nt, Human
gacagccccacccug

SEQ ID NO: 1265824 - RNA, 23 nt, Human
gacagcccaggauacuggcacag

SEQ ID NO: 1265825 - RNA, 23 nt, Human
gacacuuuaauuaccaaccuguu

SEQ ID NO: 1265826 - RNA, 14 nt, Human
gacacugcucuaac

SEQ ID NO: 1265827 - RNA, 20 nt, Human
gacacugcucuaacagcccu

SEQ ID NO: 1265828 - RNA, 21 nt, Human
gacacugcucuaacagcccuc

SEQ ID NO: 1265829 - RNA, 13 nt, Human
gacacugcuggag

SEQ ID NO: 1265830 - RNA, 12 nt, Human
gacacuggcaug

SEQ ID NO: 1265831 - RNA, 13 nt, Human
gacacuggccccu

SEQ ID NO: 1265832 - RNA, 14 nt, Human
gacacuggccccuc

SEQ ID NO: 1265833 - RNA, 15 nt, Human
gacacuggccccuca

SEQ ID NO: 1265834 - RNA, 14 nt, Human
gacacuggugggga

SEQ ID NO: 1265835 - RNA, 16 nt, Human
gacacugguuugaaga

SEQ ID NO: 1265836 - RNA, 20 nt, Human
gaccucaguuuuaucauuuu

SEQ ID NO: 1265837 - RNA, 21 nt, Human
gaccucaguuuuaucauuuuc

SEQ ID NO: 1265838 - RNA, 14 nt, Human
gaccuccagcuguu

SEQ ID NO: 1265839 - RNA, 16 nt, Human
gaccuccagcuuuccu

SEQ ID NO: 1265840 - RNA, 18 nt, Human
gaccuccagcuuuccugu

SEQ ID NO: 1265841 - RNA, 19 nt, Human
gaccuccagcuuuccugua

SEQ ID NO: 1265842 - RNA, 14 nt, Human
gacgccaggguaug

SEQ ID NO: 1265843 - RNA, 13 nt, Human
gacgccugaggaa

SEQ ID NO: 1265844 - RNA, 14 nt, Human
gacgccugaggaac

SEQ ID NO: 1265845 - RNA, 14 nt, Human
gacgccuggcugcu

SEQ ID NO: 1265846 - RNA, 15 nt, Human
gacgccuggcugcug

SEQ ID NO: 1265847 - RNA, 16 nt, Human
gacgccuggcugcuga

SEQ ID NO: 1265848 - RNA, 12 nt, Human
gacgccuggggg

SEQ ID NO: 1265849 - RNA, 14 nt, Human
gacgcucucuggcc

SEQ ID NO: 1265850 - RNA, 15 nt, Human
gacgcucucuggccu

SEQ ID NO: 1265851 - RNA, 22 nt, Human
gaccucagguaaucgaccugcc

SEQ ID NO: 1265852 - RNA, 23 nt, Human
gaccucagguaaucgaccugccu

SEQ ID NO: 1265853 - RNA, 18 nt, Human
gacccugaccagcucccc

SEQ ID NO: 1265854 - RNA, 23 nt, Human
gacccugaccagcucccccuccc

SEQ ID NO: 1265855 - RNA, 16 nt, Human
gacccugagcugacca

SEQ ID NO: 1265856 - RNA, 20 nt, Human
gacccugagcugaccagccg

SEQ ID NO: 1265857 - RNA, 16 nt, Human
gacccugaaggggcca

SEQ ID NO: 1265858 - RNA, 17 nt, Human
gacccugaccagcuccc

SEQ ID NO: 1265859 - RNA, 20 nt, Human
gacccggcacccccugcagc

SEQ ID NO: 1265860 - RNA, 19 nt, Human
gacccggcacccccugcag

SEQ ID NO: 1265861 - RNA, 16 nt, Human
gaccccugagcuugca

SEQ ID NO: 1265862 - RNA, 17 nt, Human
gacccggaggggccugg

SEQ ID NO: 1265863 - RNA, 11 nt, Human
gaccccugcau

SEQ ID NO: 1265864 - RNA, 18 nt, Human
gacccggaggggccuggc

SEQ ID NO: 1265865 - RNA, 19 nt, Human
gacccggaggggccuggca

SEQ ID NO: 1265866 - RNA, 20 nt, Human
gacccggaggggccuggcag

SEQ ID NO: 1265867 - RNA, 17 nt, Human
gacccggcacccccugc

SEQ ID NO: 1265868 - RNA, 14 nt, Human
gaaugaauggcuaa

SEQ ID NO: 1265869 - RNA, 19 nt, Human
gaauauugccauuaugcuu

SEQ ID NO: 1265870 - RNA, 11 nt, Human
gaauaugccuu

SEQ ID NO: 1265871 - RNA, 22 nt, Human
gaauaucuccgucaacucauau

SEQ ID NO: 1265872 - RNA, 16 nt, Human
gaauauccaugaccua

SEQ ID NO: 1265873 - RNA, 15 nt, Human
gaauaucuguaaugg

SEQ ID NO: 1265874 - RNA, 17 nt, Human
gaauaucuguaauggua

SEQ ID NO: 1265875 - RNA, 14 nt, Human
gaauaugaaacaua

SEQ ID NO: 1265876 - RNA, 17 nt, Human
gaauaugaaacauagau

SEQ ID NO: 1265877 - RNA, 14 nt, Human
gaaugauuaugaau

SEQ ID NO: 1265878 - RNA, 16 nt, Human
gaaugaguugaggcca

SEQ ID NO: 1265879 - RNA, 20 nt, Human
gaaugaauggcuaagcaaaa

SEQ ID NO: 1265880 - RNA, 15 nt, Human
gaaugaauggcuaag

SEQ ID NO: 1265881 - RNA, 22 nt, Human
gaaugauuaugaauuacauuug

SEQ ID NO: 1265882 - RNA, 16 nt, Human
gaaugaucugauugac

SEQ ID NO: 1265883 - RNA, 13 nt, Human
gaaugaucugauu

SEQ ID NO: 1265884 - RNA, 15 nt, Human
gaaugauucaguguu

SEQ ID NO: 1265885 - RNA, 14 nt, Human
gaaugauuucaugc

SEQ ID NO: 1265886 - RNA, 13 nt, Human
gaauuacauuugu

SEQ ID NO: 1265887 - RNA, 22 nt, Human
gaauuaauaucccuacauguau

SEQ ID NO: 1265888 - RNA, 21 nt, Human
gaauuaauaucccuacaugua

SEQ ID NO: 1265889 - RNA, 15 nt, Human
gaauuacauuuguau

SEQ ID NO: 1265890 - RNA, 18 nt, Human
gaauuacauuuguauaaa

SEQ ID NO: 1265891 - RNA, 19 nt, Human
gaauuacgugcucuguggg

SEQ ID NO: 1265892 - RNA, 15 nt, Human
gaauuacgugcucug

SEQ ID NO: 1265893 - RNA, 20 nt, Human
gaauuacauuuguauaaaau

SEQ ID NO: 1265894 - RNA, 14 nt, Human
gaaugauuuuucuu

SEQ ID NO: 1265895 - RNA, 16 nt, Human
gaaugauuuuucuuua

SEQ ID NO: 1265896 - RNA, 18 nt, Human
gaaugauuuuucuuuaca

SEQ ID NO: 1265897 - RNA, 15 nt, Human
gaauuaacacaugau

SEQ ID NO: 1265898 - RNA, 14 nt, Human
gaauuaacacauga

SEQ ID NO: 1265899 - RNA, 14 nt, Human
gaauguuuuucuaa

SEQ ID NO: 1265900 - RNA, 13 nt, Human
gaauuaaacuuuu

SEQ ID NO: 1265901 - RNA, 20 nt, Human
gaauuaaacuuuuaauucau

SEQ ID NO: 1265902 - RNA, 14 nt, Human
gaauuaaaguacuu

SEQ ID NO: 1265903 - RNA, 22 nt, Human
gaauuaaaguggaccaauaggg

SEQ ID NO: 1265904 - RNA, 12 nt, Human
gaauuaaauaaa

SEQ ID NO: 1265905 - RNA, 20 nt, Human
gaauuaaauaaacccuuccu

SEQ ID NO: 1265906 - RNA, 14 nt, Human
gacaaaaagcuacu

SEQ ID NO: 1265907 - RNA, 19 nt, Human
gacaaacaccucccaggag

SEQ ID NO: 1265908 - RNA, 22 nt, Human
gacaaacaccucccaggagaca

SEQ ID NO: 1265909 - RNA, 16 nt, Human
gaauuauuuuuuuucu

SEQ ID NO: 1265910 - RNA, 15 nt, Human
gaauuuuuuuuaaca

SEQ ID NO: 1265911 - RNA, 16 nt, Human
gaauuuuuuuuaacau

SEQ ID NO: 1265912 - RNA, 17 nt, Human
gaauuuuuuuuaacauu

SEQ ID NO: 1265913 - RNA, 19 nt, Human
gaauuuuuuuuaacauucc

SEQ ID NO: 1265914 - RNA, 20 nt, Human
gaauuuuuuuuaacauuccu

SEQ ID NO: 1265915 - RNA, 21 nt, Human
gaauuuuuuuuaacauuccuc

SEQ ID NO: 1265916 - RNA, 22 nt, Human
gaauuuuuuuuuccuagcccuc

SEQ ID NO: 1265917 - RNA, 18 nt, Human
gacaaaaaauuaaagcau

SEQ ID NO: 1265918 - RNA, 13 nt, Human
gacaaagaaccuu

SEQ ID NO: 1265919 - RNA, 15 nt, Human
gacaaacuuugcauc

SEQ ID NO: 1265920 - RNA, 13 nt, Human
gacaaaggagccu

SEQ ID NO: 1265921 - RNA, 14 nt, Human
gacaaaggagccug

SEQ ID NO: 1265922 - RNA, 15 nt, Human
gacaaaggagccugu

SEQ ID NO: 1265923 - RNA, 16 nt, Human
gacaaaggagccugug

SEQ ID NO: 1265924 - RNA, 17 nt, Human
gacaaaggagccuguga

SEQ ID NO: 1265925 - RNA, 18 nt, Human
gacaaaggagccugugaa

SEQ ID NO: 1265926 - RNA, 13 nt, Human
gacaaaggcaagc

SEQ ID NO: 1265927 - RNA, 19 nt, Human
gaauuauuacaguguuuau

SEQ ID NO: 1265928 - RNA, 16 nt, Human
gaauuauucaauuuau

SEQ ID NO: 1265929 - RNA, 12 nt, Human
gaauuauuuugu

SEQ ID NO: 1265930 - RNA, 15 nt, Human
gaauuaggcuguaac

SEQ ID NO: 1265931 - RNA, 16 nt, Human
gaauuaggcuguaacu

SEQ ID NO: 1265932 - RNA, 17 nt, Human
gaauuaggcuguaacua

SEQ ID NO: 1265933 - RNA, 18 nt, Human
gaauuaggcuguaacuac

SEQ ID NO: 1265934 - RNA, 19 nt, Human
gaauuaggcuguaacuacu

SEQ ID NO: 1265935 - RNA, 23 nt, Human
gaauuaggcuguaacuacuuuau

SEQ ID NO: 1265936 - RNA, 20 nt, Human
gaauuauucaauuuauuuga

SEQ ID NO: 1265937 - RNA, 18 nt, Human
gacaaagguuuuccucuu

SEQ ID NO: 1265938 - RNA, 17 nt, Human
gacaaauagaaaauggu

SEQ ID NO: 1265939 - RNA, 18 nt, Human
gacaaauagaaaaugguc

SEQ ID NO: 1265940 - RNA, 19 nt, Human
gacacagaaaauguugaga

SEQ ID NO: 1265941 - RNA, 21 nt, Human
gacacagaaaauguugagaau

SEQ ID NO: 1265942 - RNA, 21 nt, Human
cugcccugguuuccugcccug

SEQ ID NO: 1265943 - RNA, 23 nt, Human
cugcccuggugcugccacacuuc

SEQ ID NO: 1265944 - RNA, 17 nt, Human
cugcccugguuuccugc

SEQ ID NO: 1265945 - RNA, 18 nt, Human
cugcccugguuuccugcc

SEQ ID NO: 1265946 - RNA, 19 nt, Human
cugcccugguuuccugccc

SEQ ID NO: 1265947 - RNA, 12 nt, Human
cugcccuggugc

SEQ ID NO: 1265948 - RNA, 13 nt, Human
cugcccuggugcu

SEQ ID NO: 1265949 - RNA, 14 nt, Human
cugcccuggugcug

SEQ ID NO: 1265950 - RNA, 15 nt, Human
cugcccuggugcugc

SEQ ID NO: 1265951 - RNA, 16 nt, Human
cugcccuggugcugcc

SEQ ID NO: 1265952 - RNA, 12 nt, Human
cugcccccugca

SEQ ID NO: 1265953 - RNA, 13 nt, Human
cugcccccugcag

SEQ ID NO: 1265954 - RNA, 14 nt, Human
cugcccccugcaga

SEQ ID NO: 1265955 - RNA, 15 nt, Human
cugcccccugcagaa

SEQ ID NO: 1265956 - RNA, 14 nt, Human
cugcccccugcagg

SEQ ID NO: 1265957 - RNA, 15 nt, Human
cugcccccugcagga

SEQ ID NO: 1265958 - RNA, 16 nt, Human
cugcccccugcaggaa

SEQ ID NO: 1265959 - RNA, 22 nt, Human
cugcccccugcaggaaggagcu

SEQ ID NO: 1265960 - RNA, 23 nt, Human
cugcccccugcaggaaggagcug

SEQ ID NO: 1265961 - RNA, 18 nt, Human
cugcccccugcugccaug

SEQ ID NO: 1265962 - RNA, 13 nt, Human
cugcccccugcug

SEQ ID NO: 1265963 - RNA, 20 nt, Human
cugcccugguuuccugcccu

SEQ ID NO: 1265964 - RNA, 17 nt, Human
cugcccugguggcccuc

SEQ ID NO: 1265965 - RNA, 18 nt, Human
cugcccugguggcccucu

SEQ ID NO: 1265966 - RNA, 22 nt, Human
cugccuccugccggcuccuugg

SEQ ID NO: 1265967 - RNA, 15 nt, Human
cugccuccugccggc

SEQ ID NO: 1265968 - RNA, 23 nt, Human
cugccuccugccggcuccuuggu

SEQ ID NO: 1265969 - RNA, 15 nt, Human
cugccucgaaacaca

SEQ ID NO: 1265970 - RNA, 18 nt, Human
cugccucgaaacacagaa

SEQ ID NO: 1265971 - RNA, 19 nt, Human
cugccucgaaacacagaaa

SEQ ID NO: 1265972 - RNA, 15 nt, Human
cugccucuacuggga

SEQ ID NO: 1265973 - RNA, 17 nt, Human
cugccucuacugggaag

SEQ ID NO: 1265974 - RNA, 18 nt, Human
cugccucuacugggaagg

SEQ ID NO: 1265975 - RNA, 19 nt, Human
cugccucuacugggaaggc

SEQ ID NO: 1265976 - RNA, 22 nt, Human
cugccucuacugggaaggcuac

SEQ ID NO: 1265977 - RNA, 22 nt, Human
cugccucucaucaacugaauga

SEQ ID NO: 1265978 - RNA, 13 nt, Human
cugccucucccag

SEQ ID NO: 1265979 - RNA, 14 nt, Human
cugccucucccagg

SEQ ID NO: 1265980 - RNA, 15 nt, Human
cugccucucccaggc

SEQ ID NO: 1265981 - RNA, 17 nt, Human
cugccucucccaggcag

SEQ ID NO: 1265982 - RNA, 24 nt, Human
cugccugucccuaccccauggugc

SEQ ID NO: 1265983 - RNA, 21 nt, Human
cugccugucccuaccccaugg

SEQ ID NO: 1265984 - RNA, 19 nt, Human
cugccuguucccauucuug

SEQ ID NO: 1265985 - RNA, 15 nt, Human
cugccuguucccauu

SEQ ID NO: 1265986 - RNA, 15 nt, Human
cugcuagaacauggu

SEQ ID NO: 1265987 - RNA, 13 nt, Human
cugcuacuuauau

SEQ ID NO: 1265988 - RNA, 21 nt, Human
cugcuacuuauauaauugcca

SEQ ID NO: 1265989 - RNA, 16 nt, Human
cugcucaacuugcaaa

SEQ ID NO: 1265990 - RNA, 18 nt, Human
cugcuauuaggccagcaa

SEQ ID NO: 1265991 - RNA, 14 nt, Human
cugcuauuugaagu

SEQ ID NO: 1265992 - RNA, 15 nt, Human
cugcuaucauuauuc

SEQ ID NO: 1265993 - RNA, 21 nt, Human
cugcuaugguuuucuccaaga

SEQ ID NO: 1265994 - RNA, 21 nt, Human
cugcuauuaggccagcaagcg

SEQ ID NO: 1265995 - RNA, 15 nt, Human
cugcugagaaccugg

SEQ ID NO: 1265996 - RNA, 22 nt, Human
cugcugagcucugagaggcccu

SEQ ID NO: 1265997 - RNA, 17 nt, Human
cugcuauuuuucauccu

SEQ ID NO: 1265998 - RNA, 16 nt, Human
cugcugagaaccuggc

SEQ ID NO: 1265999 - RNA, 17 nt, Human
cugcugagaaccuggcc

SEQ ID NO: 1266000 - RNA, 18 nt, Human
cugcugagaaccuggccu

SEQ ID NO: 1266001 - RNA, 19 nt, Human
cugcugagaaccuggccuu

SEQ ID NO: 1266002 - RNA, 20 nt, Human
cugcugagaaccuggccuuc

SEQ ID NO: 1266003 - RNA, 20 nt, Human
cugcugagauacauacagaa

SEQ ID NO: 1266004 - RNA, 19 nt, Human
cugcugagauacauacaga

SEQ ID NO: 1266005 - RNA, 13 nt, Human
cugcugagcucug

SEQ ID NO: 1266006 - RNA, 14 nt, Human
cugcugagcucuga

SEQ ID NO: 1266007 - RNA, 15 nt, Human
cugcugagcucugag

SEQ ID NO: 1266008 - RNA, 16 nt, Human
cugcugagcucugaga

SEQ ID NO: 1266009 - RNA, 17 nt, Human
cugcugagcucugagag

SEQ ID NO: 1266010 - RNA, 18 nt, Human
cugcugagcucugagagg

SEQ ID NO: 1266011 - RNA, 19 nt, Human
cugcugagcucugagaggc

SEQ ID NO: 1266012 - RNA, 21 nt, Human
cugcugagcucugagaggccc

SEQ ID NO: 1266013 - RNA, 23 nt, Human
cugcugagcucugagaggcccug

SEQ ID NO: 1266014 - RNA, 13 nt, Human
cuggcagccgugc

SEQ ID NO: 1266015 - RNA, 12 nt, Human
cuggcucuguga

SEQ ID NO: 1266016 - RNA, 17 nt, Human
cuggcagccgugccuuc

SEQ ID NO: 1266017 - RNA, 18 nt, Human
cuggcagccgugccuuca

SEQ ID NO: 1266018 - RNA, 14 nt, Human
cuggcccuauuuag

SEQ ID NO: 1266019 - RNA, 19 nt, Human
cuggcagccgugccuucag

SEQ ID NO: 1266020 - RNA, 19 nt, Human
cuggcucccacaggcccuu

SEQ ID NO: 1266021 - RNA, 22 nt, Human
cuggcucccacaggcccuuccu

SEQ ID NO: 1266022 - RNA, 17 nt, Human
cuggccgaguccaagcu

SEQ ID NO: 1266023 - RNA, 18 nt, Human
cuggccgaguccaagcug

SEQ ID NO: 1266024 - RNA, 20 nt, Human
cuggccgaguccaagcuggg

SEQ ID NO: 1266025 - RNA, 23 nt, Human
cuggccgaguccaagcugggaga

SEQ ID NO: 1266026 - RNA, 21 nt, Human
cuggccgcccccagcccccuc

SEQ ID NO: 1266027 - RNA, 13 nt, Human
cuggccgcccccu

SEQ ID NO: 1266028 - RNA, 14 nt, Human
cuggccgcccccug

SEQ ID NO: 1266029 - RNA, 22 nt, Human
cuggccgcccccugccccccag

SEQ ID NO: 1266030 - RNA, 17 nt, Human
cuggccgccugggucca

SEQ ID NO: 1266031 - RNA, 19 nt, Human
cuggauccaucaggccacu

SEQ ID NO: 1266032 - RNA, 20 nt, Human
cuggaucuccauucucucag

SEQ ID NO: 1266033 - RNA, 20 nt, Human
cuggaaaccuuccacccagu

SEQ ID NO: 1266034 - RNA, 17 nt, Human
cuggaaaccuuccaccc

SEQ ID NO: 1266035 - RNA, 17 nt, Human
cuggaaaauaauacugc

SEQ ID NO: 1266036 - RNA, 20 nt, Human
cuggaaaauaauacugcuga

SEQ ID NO: 1266037 - RNA, 23 nt, Human
cuggaaaauaauacugcugagau

SEQ ID NO: 1266038 - RNA, 23 nt, Human
cuggaaaaguauguuagugcaaa

SEQ ID NO: 1266039 - RNA, 14 nt, Human
cuggaaaacagaac

SEQ ID NO: 1266040 - RNA, 16 nt, Human
cuggaaaacagaacac

SEQ ID NO: 1266041 - RNA, 17 nt, Human
cuggaaaacagaacacu

SEQ ID NO: 1266042 - RNA, 18 nt, Human
cuggaaaacagaacacuu

SEQ ID NO: 1266043 - RNA, 19 nt, Human
cuggaaaacagaacacuua

SEQ ID NO: 1266044 - RNA, 24 nt, Human
cugcuuccaauuuucuggaauaca

SEQ ID NO: 1266045 - RNA, 19 nt, Human
cugcuucaguguauggaaa

SEQ ID NO: 1266046 - RNA, 21 nt, Human
cugcuucaguguauggaaaua

SEQ ID NO: 1266047 - RNA, 18 nt, Human
cuggacucucagucucug

SEQ ID NO: 1266048 - RNA, 19 nt, Human
cuggacucucagucucuga

SEQ ID NO: 1266049 - RNA, 20 nt, Human
cuggacucucagucucugag

SEQ ID NO: 1266050 - RNA, 21 nt, Human
cuggacucucagucucugagc

SEQ ID NO: 1266051 - RNA, 22 nt, Human
cuggacuccucuguccaggcac

SEQ ID NO: 1266052 - RNA, 23 nt, Human
cuggacuccucuguccaggcacu

SEQ ID NO: 1266053 - RNA, 23 nt, Human
cuggacucuaaagucuguugauu

SEQ ID NO: 1266054 - RNA, 14 nt, Human
cuggacucucaguc

SEQ ID NO: 1266055 - RNA, 17 nt, Human
cuggacucucagucucu

SEQ ID NO: 1266056 - RNA, 11 nt, Human
cuggaaagaag

SEQ ID NO: 1266057 - RNA, 23 nt, Human
cuggaaagcuuuucuauuuuaau

SEQ ID NO: 1266058 - RNA, 14 nt, Human
cuggagaacuagag

SEQ ID NO: 1266059 - RNA, 15 nt, Human
cuggagaacuagaga

SEQ ID NO: 1266060 - RNA, 23 nt, Human
cuggacucucagucucugagcag

SEQ ID NO: 1266061 - RNA, 13 nt, Human
cuggagaaagggc

SEQ ID NO: 1266062 - RNA, 23 nt, Human
cuggagaaagggcccugggccug

SEQ ID NO: 1266063 - RNA, 19 nt, Human
cuggagaagacccuccccg

SEQ ID NO: 1266064 - RNA, 17 nt, Human
cuggauccaucaggcca

SEQ ID NO: 1266065 - RNA, 16 nt, Human
cuggaguuagggacug

SEQ ID NO: 1266066 - RNA, 19 nt, Human
cuggaucagcguggccuug

SEQ ID NO: 1266067 - RNA, 17 nt, Human
cuggaguuagggacuga

SEQ ID NO: 1266068 - RNA, 16 nt, Human
cugugaacugaacucu

SEQ ID NO: 1266069 - RNA, 13 nt, Human
cugugaacugaac

SEQ ID NO: 1266070 - RNA, 15 nt, Human
cugugaacugaacuc

SEQ ID NO: 1266071 - RNA, 15 nt, Human
cugugagcccagcug

SEQ ID NO: 1266072 - RNA, 23 nt, Human
cugugagaugcuagaacucccuu

SEQ ID NO: 1266073 - RNA, 15 nt, Human
cugugaaugccacug

SEQ ID NO: 1266074 - RNA, 16 nt, Human
cugugaaugccacugc

SEQ ID NO: 1266075 - RNA, 20 nt, Human
cugugaaugccacugccuuc

SEQ ID NO: 1266076 - RNA, 21 nt, Human
cugugaaugccacugccuucg

SEQ ID NO: 1266077 - RNA, 13 nt, Human
cugugaauuaagc

SEQ ID NO: 1266078 - RNA, 14 nt, Human
cugugagcccagcu

SEQ ID NO: 1266079 - RNA, 15 nt, Human
cuguguagcugugac

SEQ ID NO: 1266080 - RNA, 16 nt, Human
cuguguagcugugacc

SEQ ID NO: 1266081 - RNA, 17 nt, Human
cuguguagcugugaccu

SEQ ID NO: 1266082 - RNA, 18 nt, Human
cuguguagcugugaccug

SEQ ID NO: 1266083 - RNA, 19 nt, Human
cuguguagcugugaccugc

SEQ ID NO: 1266084 - RNA, 20 nt, Human
cuguguagcugugaccugcu

SEQ ID NO: 1266085 - RNA, 23 nt, Human
cuguguagcugugaccugcugag

SEQ ID NO: 1266086 - RNA, 22 nt, Human
cuguguagcugugaccugcuga

SEQ ID NO: 1266087 - RNA, 15 nt, Human
cuguguauuccaaga

SEQ ID NO: 1266088 - RNA, 19 nt, Human
cuguguauuccaagacaug

SEQ ID NO: 1266089 - RNA, 14 nt, Human
cuguguauuugcuu

SEQ ID NO: 1266090 - RNA, 15 nt, Human
cuguguauuugcuuu

SEQ ID NO: 1266091 - RNA, 16 nt, Human
cuguguauuugcuuuu

SEQ ID NO: 1266092 - RNA, 22 nt, Human
cuguguccaugcgcucagggcc

SEQ ID NO: 1266093 - RNA, 23 nt, Human
cuguguccaugcgcucagggcca

SEQ ID NO: 1266094 - RNA, 21 nt, Human
cuguguccaaaaccgccagcu

SEQ ID NO: 1266095 - RNA, 22 nt, Human
cuguguccaaaaccgccagcuc

SEQ ID NO: 1266096 - RNA, 13 nt, Human
cuguguccaugcg

SEQ ID NO: 1266097 - RNA, 18 nt, Human
cuguguccaugcgcucag

SEQ ID NO: 1266098 - RNA, 19 nt, Human
cuguguccaugcgcucagg

SEQ ID NO: 1266099 - RNA, 21 nt, Human
cuguguccaugcgcucagggc

SEQ ID NO: 1266100 - RNA, 13 nt, Human
cuguuagcagaca

SEQ ID NO: 1266101 - RNA, 15 nt, Human
cuguuagcagacagg

SEQ ID NO: 1266102 - RNA, 13 nt, Human
cuguucacucuac

SEQ ID NO: 1266103 - RNA, 14 nt, Human
cuguuaugcuguga

SEQ ID NO: 1266104 - RNA, 23 nt, Human
cuguuaucaaacaccaacauaaa

SEQ ID NO: 1266105 - RNA, 14 nt, Human
cuguuauauuucau

SEQ ID NO: 1266106 - RNA, 17 nt, Human
cuguuauauuucaucau

SEQ ID NO: 1266107 - RNA, 19 nt, Human
cuguuaucaaaacuuucuu

SEQ ID NO: 1266108 - RNA, 19 nt, Human
cuguuaugcugugacacau

SEQ ID NO: 1266109 - RNA, 22 nt, Human
cuuaaaauaaugaauacauuuc

SEQ ID NO: 1266110 - RNA, 12 nt, Human
cuuaaaauacaa

SEQ ID NO: 1266111 - RNA, 13 nt, Human
cuuaaaauacaag

SEQ ID NO: 1266112 - RNA, 12 nt, Human
cuuaaaauaagc

SEQ ID NO: 1266113 - RNA, 13 nt, Human
cuuaaaauaagca

SEQ ID NO: 1266114 - RNA, 14 nt, Human
cuuaaaauaagcag

SEQ ID NO: 1266115 - RNA, 15 nt, Human
cuuaaaauaagcagg

SEQ ID NO: 1266116 - RNA, 21 nt, Human
cuuaaaaaugguuuaaauggu

SEQ ID NO: 1266117 - RNA, 12 nt, Human
cuuaaaaccugc

SEQ ID NO: 1266118 - RNA, 15 nt, Human
cuuaaaaccugcuuu

SEQ ID NO: 1266119 - RNA, 23 nt, Human
cuuaaaaccugcuuuucaaugug

SEQ ID NO: 1266120 - RNA, 12 nt, Human
cuuaaaacuccu

SEQ ID NO: 1266121 - RNA, 12 nt, Human
cuuaaaacuuug

SEQ ID NO: 1266122 - RNA, 20 nt, Human
cuuaaaaaugguuuaaaugg

SEQ ID NO: 1266123 - RNA, 13 nt, Human
cuuaaaaaugguu

SEQ ID NO: 1266124 - RNA, 21 nt, Human
cuguuguuaugaugugcuuaa

SEQ ID NO: 1266125 - RNA, 23 nt, Human
cuguuguuaugaugugcuuaaca

SEQ ID NO: 1266126 - RNA, 19 nt, Human
cuguuguuaugaugugcuu

SEQ ID NO: 1266127 - RNA, 17 nt, Human
cuguuguuaugaugugc

SEQ ID NO: 1266128 - RNA, 15 nt, Human
cuguuguuaugaugu

SEQ ID NO: 1266129 - RNA, 14 nt, Human
cuguuguuaugaug

SEQ ID NO: 1266130 - RNA, 23 nt, Human
cuuaaagaauucaaauuuuaucu

SEQ ID NO: 1266131 - RNA, 22 nt, Human
cuuaaacaguugcacagcaucu

SEQ ID NO: 1266132 - RNA, 15 nt, Human
cuuaaaccuucaguu

SEQ ID NO: 1266133 - RNA, 23 nt, Human
cuuaaaccuucaguuaugauuuu

SEQ ID NO: 1266134 - RNA, 14 nt, Human
cuuaaacuaaaugu

SEQ ID NO: 1266135 - RNA, 15 nt, Human
cuuaaacuaaaugug

SEQ ID NO: 1266136 - RNA, 20 nt, Human
cuuaaacaguugcacagcau

SEQ ID NO: 1266137 - RNA, 19 nt, Human
cuuaaacaguugcacagca

SEQ ID NO: 1266138 - RNA, 18 nt, Human
cuuaaacaguugcacagc

SEQ ID NO: 1266139 - RNA, 14 nt, Human
cuuaaaauacaaga

SEQ ID NO: 1266140 - RNA, 16 nt, Human
cuuaaaauacaagacu

SEQ ID NO: 1266141 - RNA, 19 nt, Human
cuuaaaauacaagacugcc

SEQ ID NO: 1266142 - RNA, 18 nt, Human
cuuaaaauacaagacugc

SEQ ID NO: 1266143 - RNA, 15 nt, Human
cuguuggcaggcugg

SEQ ID NO: 1266144 - RNA, 16 nt, Human
cuguuggcaggcuggc

SEQ ID NO: 1266145 - RNA, 18 nt, Human
cuguuggcaggcuggcca

SEQ ID NO: 1266146 - RNA, 19 nt, Human
cuguuggcaggcuggccag

SEQ ID NO: 1266147 - RNA, 14 nt, Human
cuguugcugccuca

SEQ ID NO: 1266148 - RNA, 22 nt, Human
cuguuguuaucuguuugagaaa

SEQ ID NO: 1266149 - RNA, 13 nt, Human
cuguuguuaucug

SEQ ID NO: 1266150 - RNA, 14 nt, Human
cuggucuguaggga

SEQ ID NO: 1266151 - RNA, 12 nt, Human
cuggugccucac

SEQ ID NO: 1266152 - RNA, 19 nt, Human
cuggucugcuguuccagug

SEQ ID NO: 1266153 - RNA, 21 nt, Human
cuggucugguugggcagccag

SEQ ID NO: 1266154 - RNA, 17 nt, Human
cuggucucucuaugccu

SEQ ID NO: 1266155 - RNA, 21 nt, Human
cuggucucucuaugccucucu

SEQ ID NO: 1266156 - RNA, 23 nt, Human
cuggucucucuaugccucucuac

SEQ ID NO: 1266157 - RNA, 24 nt, Human
cuggucucucuaugccucucuaca

SEQ ID NO: 1266158 - RNA, 14 nt, Human
cuggucucuccuug

SEQ ID NO: 1266159 - RNA, 20 nt, Human
cugucuacacuaagagagaa

SEQ ID NO: 1266160 - RNA, 17 nt, Human
cuguccuuuuuccucuc

SEQ ID NO: 1266161 - RNA, 15 nt, Human
cugucguuaaaaaca

SEQ ID NO: 1266162 - RNA, 23 nt, Human
cuguccugucaucaucauggcca

SEQ ID NO: 1266163 - RNA, 20 nt, Human
cuguccugucaucaucaugg

SEQ ID NO: 1266164 - RNA, 21 nt, Human
cuguccugucaucaucauggc

SEQ ID NO: 1266165 - RNA, 17 nt, Human
cuguccuugaaggacua

SEQ ID NO: 1266166 - RNA, 20 nt, Human
cuguccuugaaggacuaaua

SEQ ID NO: 1266167 - RNA, 13 nt, Human
cuguccuuucuag

SEQ ID NO: 1266168 - RNA, 20 nt, Human
cuguccuuucuagagcacug

SEQ ID NO: 1266169 - RNA, 21 nt, Human
cuguccuuucuagagcacugc

SEQ ID NO: 1266170 - RNA, 22 nt, Human
cuguccuuucuagagcacugcc

SEQ ID NO: 1266171 - RNA, 23 nt, Human
cuguccuuucuagagcacugcca

SEQ ID NO: 1266172 - RNA, 21 nt, Human
cuguaggaagguacuguauga

SEQ ID NO: 1266173 - RNA, 14 nt, Human
cugucaggauugcg

SEQ ID NO: 1266174 - RNA, 15 nt, Human
cugucaggauugcga

SEQ ID NO: 1266175 - RNA, 17 nt, Human
cugucaggauugcgaga

SEQ ID NO: 1266176 - RNA, 19 nt, Human
cugucaggauugcgagaga

SEQ ID NO: 1266177 - RNA, 21 nt, Human
cugucaggauugcgagagaug

SEQ ID NO: 1266178 - RNA, 22 nt, Human
cugucaggauugcgagagaugu

SEQ ID NO: 1266179 - RNA, 24 nt, Human
cugucaggauugcgagagaugugu

SEQ ID NO: 1266180 - RNA, 23 nt, Human
cugucaggauugcgagagaugug

SEQ ID NO: 1266181 - RNA, 13 nt, Human
cugucagucacag

SEQ ID NO: 1266182 - RNA, 14 nt, Human
cugucagucacagc

SEQ ID NO: 1266183 - RNA, 15 nt, Human
cugucagucacagcc

SEQ ID NO: 1266184 - RNA, 17 nt, Human
cugucagucacagccac

SEQ ID NO: 1266185 - RNA, 20 nt, Human
cuguaggaagguacuguaug

SEQ ID NO: 1266186 - RNA, 19 nt, Human
cuguaggaagguacuguau

SEQ ID NO: 1266187 - RNA, 18 nt, Human
cuguaggaagguacugua

SEQ ID NO: 1266188 - RNA, 17 nt, Human
cuguaggaagguacugu

SEQ ID NO: 1266189 - RNA, 15 nt, Human
cuguagcucuaaaau

SEQ ID NO: 1266190 - RNA, 14 nt, Human
cuguaggaaaccca

SEQ ID NO: 1266191 - RNA, 22 nt, Human
cuguagccuaaacuccaaacau

SEQ ID NO: 1266192 - RNA, 17 nt, Human
cuguagccccagugaca

SEQ ID NO: 1266193 - RNA, 18 nt, Human
cuguagccccagugacag

SEQ ID NO: 1266194 - RNA, 20 nt, Human
cuguagccccagugacagcu

SEQ ID NO: 1266195 - RNA, 21 nt, Human
cuguagccccagugacagcua

SEQ ID NO: 1266196 - RNA, 22 nt, Human
cugucaugguguccagacagag

SEQ ID NO: 1266197 - RNA, 18 nt, Human
cugucagucacagccacc

SEQ ID NO: 1266198 - RNA, 14 nt, Human
cugucaucugugca

SEQ ID NO: 1266199 - RNA, 21 nt, Human
cugucaucugugcacugccca

SEQ ID NO: 1266200 - RNA, 15 nt, Human
cugucaucugugcac

SEQ ID NO: 1266201 - RNA, 20 nt, Human
cuguaagaaaauaucacuug

SEQ ID NO: 1266202 - RNA, 22 nt, Human
cuguaacuugauccauuucuaa

SEQ ID NO: 1266203 - RNA, 23 nt, Human
cuguaacuugauccauuucuaau

SEQ ID NO: 1266204 - RNA, 13 nt, Human
cuguaagaaaccu

SEQ ID NO: 1266205 - RNA, 21 nt, Human
cuguaagaaaccuacugccca

SEQ ID NO: 1266206 - RNA, 22 nt, Human
cuguaagaaaccuacugcccag

SEQ ID NO: 1266207 - RNA, 14 nt, Human
cuguaaagaguugc

SEQ ID NO: 1266208 - RNA, 12 nt, Human
cuguaaagaugu

SEQ ID NO: 1266209 - RNA, 16 nt, Human
cuguaaagauguuuau

SEQ ID NO: 1266210 - RNA, 21 nt, Human
cuguaaagauguuuauuucag

SEQ ID NO: 1266211 - RNA, 22 nt, Human
cuguaaagauguuuauuucagg

SEQ ID NO: 1266212 - RNA, 13 nt, Human
cuguaaagcaaaa

SEQ ID NO: 1266213 - RNA, 16 nt, Human
cuguaaagcaaaagau

SEQ ID NO: 1266214 - RNA, 23 nt, Human
cuguaaagcuaaaauaaagaaau

SEQ ID NO: 1266215 - RNA, 21 nt, Human
cuguaaauaaugugcacugaa

SEQ ID NO: 1266216 - RNA, 18 nt, Human
cuguaaagcuaaaauaaa

SEQ ID NO: 1266217 - RNA, 14 nt, Human
cuguaaaucuacac

SEQ ID NO: 1266218 - RNA, 18 nt, Human
cuguaaaucuacacacgg

SEQ ID NO: 1266219 - RNA, 16 nt, Human
cuguaacaagccagau

SEQ ID NO: 1266220 - RNA, 20 nt, Human
cuguacuugcucuugaugcc

SEQ ID NO: 1266221 - RNA, 19 nt, Human
cuguacuugcucuugaugc

SEQ ID NO: 1266222 - RNA, 16 nt, Human
cuguacuugcucuuga

SEQ ID NO: 1266223 - RNA, 21 nt, Human
cuguacuugcucuugaugccu

SEQ ID NO: 1266224 - RNA, 13 nt, Human
cuguagaguugcu

SEQ ID NO: 1266225 - RNA, 15 nt, Human
cuguagaguugcuga

SEQ ID NO: 1266226 - RNA, 16 nt, Human
cuguagaguugcugag

SEQ ID NO: 1266227 - RNA, 23 nt, Human
cuguagaguugcugagagggcuc

SEQ ID NO: 1266228 - RNA, 17 nt, Human
cuguagaguugcugaga

SEQ ID NO: 1266229 - RNA, 16 nt, Human
cuguagcacuuacugg

SEQ ID NO: 1266230 - RNA, 17 nt, Human
cugguuuucacauuaga

SEQ ID NO: 1266231 - RNA, 19 nt, Human
cuuuuaugugaaacauguu

SEQ ID NO: 1266232 - RNA, 14 nt, Human
cuuuuauuaaugca

SEQ ID NO: 1266233 - RNA, 16 nt, Human
cuuuuauuaaugcacu

SEQ ID NO: 1266234 - RNA, 19 nt, Human
cuuuuauuaaugcacuuuc

SEQ ID NO: 1266235 - RNA, 17 nt, Human
cuuuuauugacacagaa

SEQ ID NO: 1266236 - RNA, 18 nt, Human
cuuuuauugacacagaaa

SEQ ID NO: 1266237 - RNA, 18 nt, Human
cuuuuggaagguauuuaa

SEQ ID NO: 1266238 - RNA, 17 nt, Human
cuuuugcuuuuggcaaa

SEQ ID NO: 1266239 - RNA, 16 nt, Human
cuuuugcuuuugccca

SEQ ID NO: 1266240 - RNA, 18 nt, Human
cuuuugcuuuugcccauu

SEQ ID NO: 1266241 - RNA, 15 nt, Human
cuuuugcuuuuggca

SEQ ID NO: 1266242 - RNA, 18 nt, Human
cuuuugggggucaacagu

SEQ ID NO: 1266243 - RNA, 17 nt, Human
cuuuuggguuucugccc

SEQ ID NO: 1266244 - RNA, 19 nt, Human
cuuuuggguuucugcccug

SEQ ID NO: 1266245 - RNA, 20 nt, Human
cuuuuggguuucugcccugc

SEQ ID NO: 1266246 - RNA, 20 nt, Human
cuuuugguaaagacuggcuu

SEQ ID NO: 1266247 - RNA, 21 nt, Human
cuuuugguaaagacuggcuuu

SEQ ID NO: 1266248 - RNA, 11 nt, Human
cuuuuguauua

SEQ ID NO: 1266249 - RNA, 12 nt, Human
cuuuuguauuaa

SEQ ID NO: 1266250 - RNA, 13 nt, Human
cuuuuguauuaag

SEQ ID NO: 1266251 - RNA, 14 nt, Human
cuuuuguauuaaga

SEQ ID NO: 1266252 - RNA, 23 nt, Human
cuuuugcgguucaggaaaauuga

SEQ ID NO: 1266253 - RNA, 20 nt, Human
cuuuugccuuuugcaaccag

SEQ ID NO: 1266254 - RNA, 22 nt, Human
cuuuugcucuuagcugucugcu

SEQ ID NO: 1266255 - RNA, 14 nt, Human
cuuuugcuuuauuc

SEQ ID NO: 1266256 - RNA, 11 nt, Human
cuuuugcuuuu

SEQ ID NO: 1266257 - RNA, 14 nt, Human
gaaaaaauauauau

SEQ ID NO: 1266258 - RNA, 11 nt, Human
gaaaaaauaua

SEQ ID NO: 1266259 - RNA, 12 nt, Human
gaaaaaauauau

SEQ ID NO: 1266260 - RNA, 21 nt, Human
cuuuuuuuuuuuuuaauaaau

SEQ ID NO: 1266261 - RNA, 17 nt, Human
cuuuuguauuaagaaag

SEQ ID NO: 1266262 - RNA, 11 nt, Human
cuuuugucuac

SEQ ID NO: 1266263 - RNA, 19 nt, Human
cuuuugucuacacacccug

SEQ ID NO: 1266264 - RNA, 19 nt, Human
cuuuugugggggacuguaa

SEQ ID NO: 1266265 - RNA, 21 nt, Human
cuuuugugggggacuguaagu

SEQ ID NO: 1266266 - RNA, 12 nt, Human
cuuuuuuuguau

SEQ ID NO: 1266267 - RNA, 13 nt, Human
cuuuuuuuguaua

SEQ ID NO: 1266268 - RNA, 16 nt, Human
cuuuuuuuguauaguu

SEQ ID NO: 1266269 - RNA, 21 nt, Human
cuuuuuuuguauaguuaacac

SEQ ID NO: 1266270 - RNA, 13 nt, Human
cuuuuuuugugug

SEQ ID NO: 1266271 - RNA, 21 nt, Human
cuuuuuuuguguguauuugcu

SEQ ID NO: 1266272 - RNA, 22 nt, Human
cuuuuuuuguguguauuugcua

SEQ ID NO: 1266273 - RNA, 15 nt, Human
cuuuuuuuuccuucu

SEQ ID NO: 1266274 - RNA, 17 nt, Human
cuuuuuuuucuauuuca

SEQ ID NO: 1266275 - RNA, 18 nt, Human
cuuuuuuuucuauuucac

SEQ ID NO: 1266276 - RNA, 14 nt, Human
cuuuuuuuucuuua

SEQ ID NO: 1266277 - RNA, 15 nt, Human
cuuuuuuuucuuuaa

SEQ ID NO: 1266278 - RNA, 16 nt, Human
gaaaagcagacauuuu

SEQ ID NO: 1266279 - RNA, 15 nt, Human
gaaaagcagacauuu

SEQ ID NO: 1266280 - RNA, 18 nt, Human
gaaaagcaucagaaagag

SEQ ID NO: 1266281 - RNA, 23 nt, Human
gaaaagcauggcuugaauaagga

SEQ ID NO: 1266282 - RNA, 22 nt, Human
gaaaagccuggguuugguguau

SEQ ID NO: 1266283 - RNA, 14 nt, Human
gaaaauuaacauga

SEQ ID NO: 1266284 - RNA, 20 nt, Human
gaaaagccuggguuuggugu

SEQ ID NO: 1266285 - RNA, 13 nt, Human
gaaaagcuaagag

SEQ ID NO: 1266286 - RNA, 21 nt, Human
gaaaauguugagaaucccaaa

SEQ ID NO: 1266287 - RNA, 18 nt, Human
gaaaauuaggauuucaug

SEQ ID NO: 1266288 - RNA, 22 nt, Human
gaaaauuaggauuucaugauuu

SEQ ID NO: 1266289 - RNA, 20 nt, Human
gaaaauuaagggccgauuua

SEQ ID NO: 1266290 - RNA, 23 nt, Human
gaaaauuaagggccgauuuaauu

SEQ ID NO: 1266291 - RNA, 14 nt, Human
gaaaauuacaaaaa

SEQ ID NO: 1266292 - RNA, 18 nt, Human
gaaaacuuguauuaugug

SEQ ID NO: 1266293 - RNA, 10 nt, Human
gaaaacuuca

SEQ ID NO: 1266294 - RNA, 19 nt, Human
gaaaacugcaacuuguaaa

SEQ ID NO: 1266295 - RNA, 21 nt, Human
gaaaaaauauauguauauaca

SEQ ID NO: 1266296 - RNA, 18 nt, Human
gaaaacuccaccuuccca

SEQ ID NO: 1266297 - RNA, 16 nt, Human
gaaaacucuuugcugc

SEQ ID NO: 1266298 - RNA, 16 nt, Human
gaaaauuuuuguagua

SEQ ID NO: 1266299 - RNA, 13 nt, Human
gaaaauuuuugua

SEQ ID NO: 1266300 - RNA, 14 nt, Human
gaaaauuagacugu

SEQ ID NO: 1266301 - RNA, 16 nt, Human
gaaaauuagacuguga

SEQ ID NO: 1266302 - RNA, 14 nt, Human
gaaacaaaaacacu

SEQ ID NO: 1266303 - RNA, 19 nt, Human
gaaacaaaaacacuaaaaa

SEQ ID NO: 1266304 - RNA, 23 nt, Human
gaaacaaaaacacuaaaaauaaa

SEQ ID NO: 1266305 - RNA, 13 nt, Human
gaaacaaaauaca

SEQ ID NO: 1266306 - RNA, 18 nt, Human
gaaaauuagacugugauu

SEQ ID NO: 1266307 - RNA, 12 nt, Human
gaaacuuggcuc

SEQ ID NO: 1266308 - RNA, 18 nt, Human
gaaagaaguggggacaga

SEQ ID NO: 1266309 - RNA, 20 nt, Human
gaaagaaguguggggauuuu

SEQ ID NO: 1266310 - RNA, 13 nt, Human
gaaagaauagaac

SEQ ID NO: 1266311 - RNA, 16 nt, Human
gaaagaagaaaagguu

SEQ ID NO: 1266312 - RNA, 15 nt, Human
gaaagaagaaggugg

SEQ ID NO: 1266313 - RNA, 23 nt, Human
gaaacuucagcgguuuauauaag

SEQ ID NO: 1266314 - RNA, 19 nt, Human
gaaacuuaaauguuauuau

SEQ ID NO: 1266315 - RNA, 21 nt, Human
gaaacuuaaauguuauuaucu

SEQ ID NO: 1266316 - RNA, 15 nt, Human
gaaagacgcacuuug

SEQ ID NO: 1266317 - RNA, 17 nt, Human
gaaagacgcacuuuggc

SEQ ID NO: 1266318 - RNA, 19 nt, Human
gaaagacgcacuuuggcuu

SEQ ID NO: 1266319 - RNA, 16 nt, Human
gaaagacagcuucuca

SEQ ID NO: 1266320 - RNA, 17 nt, Human
gaaagacagcuucucau

SEQ ID NO: 1266321 - RNA, 19 nt, Human
gaaagaccaggccaauguc

SEQ ID NO: 1266322 - RNA, 16 nt, Human
gaaagaccauuuuucc

SEQ ID NO: 1266323 - RNA, 19 nt, Human
gaaauauuugugacaaaaa

SEQ ID NO: 1266324 - RNA, 20 nt, Human
gaaauauuuuaaaaucagcu

SEQ ID NO: 1266325 - RNA, 13 nt, Human
gaaagguuuuuuu

SEQ ID NO: 1266326 - RNA, 17 nt, Human
gaaaguacacucugcug

SEQ ID NO: 1266327 - RNA, 18 nt, Human
gaaaguacacucugcugu

SEQ ID NO: 1266328 - RNA, 19 nt, Human
gaaaguacacucugcuguu

SEQ ID NO: 1266329 - RNA, 22 nt, Human
gaaaguacacucugcuguuuga

SEQ ID NO: 1266330 - RNA, 20 nt, Human
gaaaguacacucugcuguuu

SEQ ID NO: 1266331 - RNA, 13 nt, Human
gaaauauuuuaaa

SEQ ID NO: 1266332 - RNA, 15 nt, Human
gaaaucaacuugcuu

SEQ ID NO: 1266333 - RNA, 18 nt, Human
gaaaugaaagcagggacu

SEQ ID NO: 1266334 - RNA, 18 nt, Human
gaacaaauuuacagagac

SEQ ID NO: 1266335 - RNA, 17 nt, Human
gaaauuuuucuucuuga

SEQ ID NO: 1266336 - RNA, 17 nt, Human
gaacaaauuuacagaga

SEQ ID NO: 1266337 - RNA, 23 nt, Human
gaacaaauuuacagagacagaaa

SEQ ID NO: 1266338 - RNA, 15 nt, Human
gaaauuuuucuucuu

SEQ ID NO: 1266339 - RNA, 17 nt, Human
gaacaagagaagcauuc

SEQ ID NO: 1266340 - RNA, 15 nt, Human
gaacaagagaagcau

SEQ ID NO: 1266341 - RNA, 16 nt, Human
gaacaagagaagcauu

SEQ ID NO: 1266342 - RNA, 23 nt, Human
cuugauguaaaaucuugucaugu

SEQ ID NO: 1266343 - RNA, 19 nt, Human
cuugauguaaggaugggca

SEQ ID NO: 1266344 - RNA, 20 nt, Human
cuugaugucuuuguuaagac

SEQ ID NO: 1266345 - RNA, 21 nt, Human
cuugauguaaggaugggcaug

SEQ ID NO: 1266346 - RNA, 16 nt, Human
cuugauggcuaacuua

SEQ ID NO: 1266347 - RNA, 21 nt, Human
cuugauggcuaacuuacaaag

SEQ ID NO: 1266348 - RNA, 17 nt, Human
cuugaugggauucugga

SEQ ID NO: 1266349 - RNA, 18 nt, Human
cuugaugggauucuggac

SEQ ID NO: 1266350 - RNA, 19 nt, Human
cuugaugggauucuggaca

SEQ ID NO: 1266351 - RNA, 13 nt, Human
cuugauguaaaau

SEQ ID NO: 1266352 - RNA, 14 nt, Human
cuugauguaaaauc

SEQ ID NO: 1266353 - RNA, 15 nt, Human
cuugauguaaaaucu

SEQ ID NO: 1266354 - RNA, 17 nt, Human
cuugauguaaaaucuug

SEQ ID NO: 1266355 - RNA, 18 nt, Human
cuugauguaaaaucuugu

SEQ ID NO: 1266356 - RNA, 20 nt, Human
cuugauguaaaaucuuguca

SEQ ID NO: 1266357 - RNA, 21 nt, Human
cuugauguaaaaucuugucau

SEQ ID NO: 1266358 - RNA, 22 nt, Human
cuugauguaaaaucuugucaug

SEQ ID NO: 1266359 - RNA, 13 nt, Human
cuugauucugcag

SEQ ID NO: 1266360 - RNA, 17 nt, Human
cuugauucugcaguaaa

SEQ ID NO: 1266361 - RNA, 20 nt, Human
cuugauucugcaguaaaucu

SEQ ID NO: 1266362 - RNA, 21 nt, Human
cuugauucugcaguaaaucuu

SEQ ID NO: 1266363 - RNA, 22 nt, Human
cuugauucugcaguaaaucuuu

SEQ ID NO: 1266364 - RNA, 19 nt, Human
cuugauugguguugccagu

SEQ ID NO: 1266365 - RNA, 21 nt, Human
cuugauuuaucacacaaagca

SEQ ID NO: 1266366 - RNA, 22 nt, Human
cuugauuuaucacacaaagcag

SEQ ID NO: 1266367 - RNA, 18 nt, Human
cuugccucaaugccagua

SEQ ID NO: 1266368 - RNA, 23 nt, Human
cuugccucauuuuuuuccuugca

SEQ ID NO: 1266369 - RNA, 13 nt, Human
cuugccucauuuu

SEQ ID NO: 1266370 - RNA, 24 nt, Human
cuugccucugcacacccuccagag

SEQ ID NO: 1266371 - RNA, 14 nt, Human
cuugccucugcaca

SEQ ID NO: 1266372 - RNA, 15 nt, Human
cuugccucugcacac

SEQ ID NO: 1266373 - RNA, 19 nt, Human
cuuucacaggcagccagug

SEQ ID NO: 1266374 - RNA, 13 nt, Human
cuuucacagcucc

SEQ ID NO: 1266375 - RNA, 14 nt, Human
cuuucacagcuccu

SEQ ID NO: 1266376 - RNA, 15 nt, Human
cuuucacagcuccuc

SEQ ID NO: 1266377 - RNA, 18 nt, Human
cuuucacagcuccuccca

SEQ ID NO: 1266378 - RNA, 13 nt, Human
cuuucacaggcag

SEQ ID NO: 1266379 - RNA, 14 nt, Human
cuuucacaggcagc

SEQ ID NO: 1266380 - RNA, 15 nt, Human
cuuucacaggcagcc

SEQ ID NO: 1266381 - RNA, 21 nt, Human
cuuuaacugccguaauuuaac

SEQ ID NO: 1266382 - RNA, 23 nt, Human
cuuuaacugccguaauuuaacuu

SEQ ID NO: 1266383 - RNA, 19 nt, Human
cuuuaacuuaauugcuaug

SEQ ID NO: 1266384 - RNA, 15 nt, Human
cuuuaacuuaaauag

SEQ ID NO: 1266385 - RNA, 18 nt, Human
cuuuaacuucuguuuuac

SEQ ID NO: 1266386 - RNA, 15 nt, Human
cuuuaagaguuuaaa

SEQ ID NO: 1266387 - RNA, 19 nt, Human
cuuuaagaguuuaaaauca

SEQ ID NO: 1266388 - RNA, 22 nt, Human
cuuuaagaguuuaaaaucauca

SEQ ID NO: 1266389 - RNA, 20 nt, Human
cuuuaagaguuuaaaaucau

SEQ ID NO: 1266390 - RNA, 21 nt, Human
cuuuaaugauaugcuuguaac

SEQ ID NO: 1266391 - RNA, 22 nt, Human
cuuuaaugauaugcuuguaacu

SEQ ID NO: 1266392 - RNA, 18 nt, Human
cuuucaauacagauauau

SEQ ID NO: 1266393 - RNA, 19 nt, Human
cuuucaauacagauauauu

SEQ ID NO: 1266394 - RNA, 20 nt, Human
cuuucaauacagauauauuu

SEQ ID NO: 1266395 - RNA, 20 nt, Human
cuugucuuauucccuuccug

SEQ ID NO: 1266396 - RNA, 16 nt, Human
cuugguucccccacug

SEQ ID NO: 1266397 - RNA, 19 nt, Human
cuugguucccccacugauc

SEQ ID NO: 1266398 - RNA, 16 nt, Human
cuugguuccuucccaa

SEQ ID NO: 1266399 - RNA, 19 nt, Human
cuugguucuugaggggacc

SEQ ID NO: 1266400 - RNA, 22 nt, Human
cuugguucuugaggggaccagg

SEQ ID NO: 1266401 - RNA, 14 nt, Human
cuugguugaggaaa

SEQ ID NO: 1266402 - RNA, 15 nt, Human
cuugguugaggaaac

SEQ ID NO: 1266403 - RNA, 16 nt, Human
cuugguugaggaaaca

SEQ ID NO: 1266404 - RNA, 23 nt, Human
cuugguucuugaggggaccagga

SEQ ID NO: 1266405 - RNA, 23 nt, Human
cuuggucucagugucaaugcagc

SEQ ID NO: 1266406 - RNA, 15 nt, Human
cuugguccuugauuu

SEQ ID NO: 1266407 - RNA, 13 nt, Human
cuugguuccccca

SEQ ID NO: 1266408 - RNA, 15 nt, Human
cuucucuuugccuca

SEQ ID NO: 1266409 - RNA, 21 nt, Human
cuucuuacuuggaacugaagg

SEQ ID NO: 1266410 - RNA, 22 nt, Human
cuucuuacuuggaacugaaggg

SEQ ID NO: 1266411 - RNA, 19 nt, Human
cuucuuauggaauugauuu

SEQ ID NO: 1266412 - RNA, 23 nt, Human
cuucuuauggaauugauuugcau

SEQ ID NO: 1266413 - RNA, 22 nt, Human
cuucuuauggaauugauuugca

SEQ ID NO: 1266414 - RNA, 22 nt, Human
cuucuuagcuaucauugcuucc

SEQ ID NO: 1266415 - RNA, 22 nt, Human
cuucuugaaauuuuaaccuaug

SEQ ID NO: 1266416 - RNA, 12 nt, Human
cuucuugaaggu

SEQ ID NO: 1266417 - RNA, 17 nt, Human
cuuccucuucccccaag

SEQ ID NO: 1266418 - RNA, 16 nt, Human
cuucuaauugccaugu

SEQ ID NO: 1266419 - RNA, 12 nt, Human
cuuccucugcug

SEQ ID NO: 1266420 - RNA, 13 nt, Human
cuuccucugcuga

SEQ ID NO: 1266421 - RNA, 15 nt, Human
cuuccucuccugucu

SEQ ID NO: 1266422 - RNA, 19 nt, Human
cuuccucuccugucucccu

SEQ ID NO: 1266423 - RNA, 11 nt, Human
cuuccucugcu

SEQ ID NO: 1266424 - RNA, 16 nt, Human
cuuccucuccacugcc

SEQ ID NO: 1266425 - RNA, 17 nt, Human
cuuccucuccacugccu

SEQ ID NO: 1266426 - RNA, 19 nt, Human
cuuccucuccacugccuuc

SEQ ID NO: 1266427 - RNA, 21 nt, Human
cuuccucuccacugccuucga

SEQ ID NO: 1266428 - RNA, 17 nt, Human
cuucuauacccacccag

SEQ ID NO: 1266429 - RNA, 13 nt, Human
cuucuauucuagc

SEQ ID NO: 1266430 - RNA, 20 nt, Human
cuucuauucuagccugcauu

SEQ ID NO: 1266431 - RNA, 21 nt, Human
cuucuauucuagccugcauug

SEQ ID NO: 1266432 - RNA, 13 nt, Human
cuucuauugccuc

SEQ ID NO: 1266433 - RNA, 14 nt, Human
cuucuauugccucu

SEQ ID NO: 1266434 - RNA, 16 nt, Human
cuucuauugccucuga

SEQ ID NO: 1266435 - RNA, 18 nt, Human
cuucuauugccucugaga

SEQ ID NO: 1266436 - RNA, 14 nt, Human
cuucuauuggucuc

SEQ ID NO: 1266437 - RNA, 19 nt, Human
cuucuauugccucugagag

SEQ ID NO: 1266438 - RNA, 22 nt, Human
cuucuauugccucugagagcau

SEQ ID NO: 1266439 - RNA, 22 nt, Human
cuucucugacuucugccuggag

SEQ ID NO: 1266440 - RNA, 24 nt, Human
cuucuauugccucugagagcauca

SEQ ID NO: 1266441 - RNA, 18 nt, Human
cuucuauacccacccaga

SEQ ID NO: 1266442 - RNA, 15 nt, Human
cuucuauacccaccc

SEQ ID NO: 1266443 - RNA, 20 nt, Human
cuucuacucacuuuucccac

SEQ ID NO: 1266444 - RNA, 18 nt, Human
cuucuacucacuuuuccc

SEQ ID NO: 1266445 - RNA, 19 nt, Human
cuucuacucacuuuuccca

SEQ ID NO: 1266446 - RNA, 23 nt, Human
cuucuacucacuuuucccacucc

SEQ ID NO: 1266447 - RNA, 15 nt, Human
cuucuaauugccaug

SEQ ID NO: 1266448 - RNA, 16 nt, Human
cuucucuuugccucaa

SEQ ID NO: 1266449 - RNA, 17 nt, Human
cuucugaacucaaacug

SEQ ID NO: 1266450 - RNA, 18 nt, Human
cuucugaacucaaacuga

SEQ ID NO: 1266451 - RNA, 22 nt, Human
cuucugaacucaaacugaggaa

SEQ ID NO: 1266452 - RNA, 13 nt, Human
cuucucuuugccu

SEQ ID NO: 1266453 - RNA, 23 nt, Human
cuucccaaaguccugggauuaca

SEQ ID NO: 1266454 - RNA, 14 nt, Human
cuuccauuugcaag

SEQ ID NO: 1266455 - RNA, 16 nt, Human
cuucccaaagcaagca

SEQ ID NO: 1266456 - RNA, 13 nt, Human
cuuccauuugcaa

SEQ ID NO: 1266457 - RNA, 23 nt, Human
cuucccaagugagucucucuggg

SEQ ID NO: 1266458 - RNA, 17 nt, Human
cuucccaagggcugccg

SEQ ID NO: 1266459 - RNA, 20 nt, Human
cuuacauuagcaguuugcuu

SEQ ID NO: 1266460 - RNA, 14 nt, Human
cuuccauauggauc

SEQ ID NO: 1266461 - RNA, 16 nt, Human
cuuaaauacagcuuuu

SEQ ID NO: 1266462 - RNA, 18 nt, Human
cuuaaagaauucaaauuu

SEQ ID NO: 1266463 - RNA, 17 nt, Human
cuuaaagaauucaaauu

SEQ ID NO: 1266464 - RNA, 15 nt, Human
cuuaaagaauucaaa

SEQ ID NO: 1266465 - RNA, 16 nt, Human
cuuacaguaggagccc

SEQ ID NO: 1266466 - RNA, 23 nt, Human
cuuacaguaggagcccagcucug

SEQ ID NO: 1266467 - RNA, 12 nt, Human
cuuacaugauuc

SEQ ID NO: 1266468 - RNA, 18 nt, Human
cuuacaugcauuacugca

SEQ ID NO: 1266469 - RNA, 19 nt, Human
cuuacaugcauuacugcau

SEQ ID NO: 1266470 - RNA, 16 nt, Human
caggcacacaccacca

SEQ ID NO: 1266471 - RNA, 12 nt, Human
caggcacacagc

SEQ ID NO: 1266472 - RNA, 13 nt, Human
caggcacacagcu

SEQ ID NO: 1266473 - RNA, 14 nt, Human
caggcacacagcua

SEQ ID NO: 1266474 - RNA, 23 nt, Human
caggcacacagcuacucucccca

SEQ ID NO: 1266475 - RNA, 20 nt, Human
caggcacacagcuacucucc

SEQ ID NO: 1266476 - RNA, 15 nt, Human
caggccacuugauga

SEQ ID NO: 1266477 - RNA, 22 nt, Human
caggcagaggcccaggcugccg

SEQ ID NO: 1266478 - RNA, 13 nt, Human
caggcagauccag

SEQ ID NO: 1266479 - RNA, 20 nt, Human
caggcaccaggacuagggcu

SEQ ID NO: 1266480 - RNA, 15 nt, Human
caggcaccaaaagaa

SEQ ID NO: 1266481 - RNA, 16 nt, Human
caggcaccaaaagaag

SEQ ID NO: 1266482 - RNA, 19 nt, Human
caggcaccaaaagaaguaa

SEQ ID NO: 1266483 - RNA, 14 nt, Human
caggcaccaggcag

SEQ ID NO: 1266484 - RNA, 14 nt, Human
caggcagaggccca

SEQ ID NO: 1266485 - RNA, 15 nt, Human
caggcagaggcccag

SEQ ID NO: 1266486 - RNA, 17 nt, Human
caggcagaggcccaggc

SEQ ID NO: 1266487 - RNA, 18 nt, Human
caggcagaggcccaggcu

SEQ ID NO: 1266488 - RNA, 19 nt, Human
caggcagaggcccaggcug

SEQ ID NO: 1266489 - RNA, 20 nt, Human
caggcagaggcccaggcugc

SEQ ID NO: 1266490 - RNA, 21 nt, Human
caggcagaggcccaggcugcc

SEQ ID NO: 1266491 - RNA, 13 nt, Human
caggccagagcca

SEQ ID NO: 1266492 - RNA, 14 nt, Human
caggcagauccagg

SEQ ID NO: 1266493 - RNA, 18 nt, Human
caggcugggaacucaucu

SEQ ID NO: 1266494 - RNA, 16 nt, Human
caggcuggcuccagau

SEQ ID NO: 1266495 - RNA, 12 nt, Human
caggcugggaac

SEQ ID NO: 1266496 - RNA, 20 nt, Human
caggcuggcuccagaugcag

SEQ ID NO: 1266497 - RNA, 17 nt, Human
caggcuggcuccagaug

SEQ ID NO: 1266498 - RNA, 18 nt, Human
caggcuggcuccagaugc

SEQ ID NO: 1266499 - RNA, 15 nt, Human
cagggagcggccggc

SEQ ID NO: 1266500 - RNA, 17 nt, Human
cagggagcggccggcca

SEQ ID NO: 1266501 - RNA, 19 nt, Human
cagggagcggccggccagc

SEQ ID NO: 1266502 - RNA, 21 nt, Human
cagggagcggccggccagccc

SEQ ID NO: 1266503 - RNA, 23 nt, Human
cagggagcggccggccagccccu

SEQ ID NO: 1266504 - RNA, 12 nt, Human
cagggaguguuc

SEQ ID NO: 1266505 - RNA, 19 nt, Human
cagggauaaggccuguggg

SEQ ID NO: 1266506 - RNA, 17 nt, Human
caggggaacacugggga

SEQ ID NO: 1266507 - RNA, 15 nt, Human
cagggcucuguaagu

SEQ ID NO: 1266508 - RNA, 22 nt, Human
cagggcuccagccccucuugga

SEQ ID NO: 1266509 - RNA, 13 nt, Human
cagggcuccagcc

SEQ ID NO: 1266510 - RNA, 16 nt, Human
cagggcuccagccccu

SEQ ID NO: 1266511 - RNA, 21 nt, Human
caggggaacacuggggacuug

SEQ ID NO: 1266512 - RNA, 20 nt, Human
cagucugacuguuuccauca

SEQ ID NO: 1266513 - RNA, 17 nt, Human
cagucugagagaggcca

SEQ ID NO: 1266514 - RNA, 14 nt, Human
cagucucugagcag

SEQ ID NO: 1266515 - RNA, 12 nt, Human
cagugcaucuca

SEQ ID NO: 1266516 - RNA, 15 nt, Human
cagugcaucucagcc

SEQ ID NO: 1266517 - RNA, 16 nt, Human
cagugcaucucagccc

SEQ ID NO: 1266518 - RNA, 17 nt, Human
cagugcaucucagccca

SEQ ID NO: 1266519 - RNA, 18 nt, Human
cagugcaucucagcccac

SEQ ID NO: 1266520 - RNA, 22 nt, Human
cagugggaggugagaccaccuc

SEQ ID NO: 1266521 - RNA, 22 nt, Human
cagugggaggguaccagcagaa

SEQ ID NO: 1266522 - RNA, 14 nt, Human
caguggggaaugaa

SEQ ID NO: 1266523 - RNA, 21 nt, Human
cagugggaggugagaccaccu

SEQ ID NO: 1266524 - RNA, 13 nt, Human
caguggggcagag

SEQ ID NO: 1266525 - RNA, 21 nt, Human
caguggggcagaggcaguacc

SEQ ID NO: 1266526 - RNA, 20 nt, Human
caguggggaggggcuguggg

SEQ ID NO: 1266527 - RNA, 15 nt, Human
caguggggcagucau

SEQ ID NO: 1266528 - RNA, 16 nt, Human
cagucaccucauggaa

SEQ ID NO: 1266529 - RNA, 15 nt, Human
cagucacauuccaag

SEQ ID NO: 1266530 - RNA, 19 nt, Human
cagucaccucauggaauug

SEQ ID NO: 1266531 - RNA, 21 nt, Human
caguaaaccacugaaaaaaua

SEQ ID NO: 1266532 - RNA, 18 nt, Human
caguaaaccacugaaaaa

SEQ ID NO: 1266533 - RNA, 15 nt, Human
caguaaagcacuugc

SEQ ID NO: 1266534 - RNA, 15 nt, Human
cagucaauauuuuua

SEQ ID NO: 1266535 - RNA, 12 nt, Human
cagucacagcca

SEQ ID NO: 1266536 - RNA, 13 nt, Human
cagucacagccac

SEQ ID NO: 1266537 - RNA, 14 nt, Human
cagucacagccacc

SEQ ID NO: 1266538 - RNA, 16 nt, Human
cagucacagccacccc

SEQ ID NO: 1266539 - RNA, 21 nt, Human
cagucacucuagucaaugaca

SEQ ID NO: 1266540 - RNA, 24 nt, Human
cagucacucuagucaaugacauga

SEQ ID NO: 1266541 - RNA, 15 nt, Human
cagucacucuaguca

SEQ ID NO: 1266542 - RNA, 20 nt, Human
cagucacucuagucaaugac

SEQ ID NO: 1266543 - RNA, 23 nt, Human
caguaaagaacaucccuccuggg

SEQ ID NO: 1266544 - RNA, 14 nt, Human
caguaaaccacuga

SEQ ID NO: 1266545 - RNA, 16 nt, Human
caguaaaccacugaaa

SEQ ID NO: 1266546 - RNA, 22 nt, Human
cagguugucugaagucacugca

SEQ ID NO: 1266547 - RNA, 23 nt, Human
cagguugucugaagucacugcac

SEQ ID NO: 1266548 - RNA, 13 nt, Human
cagauccuggaaa

SEQ ID NO: 1266549 - RNA, 12 nt, Human
cagauccuggaa

SEQ ID NO: 1266550 - RNA, 18 nt, Human
cagaucaucuuggaacug

SEQ ID NO: 1266551 - RNA, 15 nt, Human
cagaucaucuuggaa

SEQ ID NO: 1266552 - RNA, 16 nt, Human
cagaucaguaaagaac

SEQ ID NO: 1266553 - RNA, 16 nt, Human
cagaucaguguaccau

SEQ ID NO: 1266554 - RNA, 19 nt, Human
cagauccccaagccuggca

SEQ ID NO: 1266555 - RNA, 13 nt, Human
cagauccuccuca

SEQ ID NO: 1266556 - RNA, 14 nt, Human
cagauccuccucau

SEQ ID NO: 1266557 - RNA, 16 nt, Human
cagauccuccucauuc

SEQ ID NO: 1266558 - RNA, 21 nt, Human
cagaguaauccaagcaaaugu

SEQ ID NO: 1266559 - RNA, 17 nt, Human
cagagguugcagugagc

SEQ ID NO: 1266560 - RNA, 15 nt, Human
cagagguccacaaca

SEQ ID NO: 1266561 - RNA, 20 nt, Human
cagagguccacaacacacag

SEQ ID NO: 1266562 - RNA, 22 nt, Human
cagagguagucucacugcuuga

SEQ ID NO: 1266563 - RNA, 15 nt, Human
cagaauaucacagaa

SEQ ID NO: 1266564 - RNA, 17 nt, Human
cagaggguguccugcac

SEQ ID NO: 1266565 - RNA, 17 nt, Human
cagagggucugggggca

SEQ ID NO: 1266566 - RNA, 13 nt, Human
cagaaucccuuaa

SEQ ID NO: 1266567 - RNA, 18 nt, Human
cagaaucccuuaacaguu

SEQ ID NO: 1266568 - RNA, 16 nt, Human
cagagggucugggggc

SEQ ID NO: 1266569 - RNA, 13 nt, Human
cagcauaauacuu

SEQ ID NO: 1266570 - RNA, 17 nt, Human
cagcagugugaggccag

SEQ ID NO: 1266571 - RNA, 19 nt, Human
cagcagugugaggccaggg

SEQ ID NO: 1266572 - RNA, 20 nt, Human
cagcagugugaggccagggc

SEQ ID NO: 1266573 - RNA, 22 nt, Human
cagcagugugaggccagggcag

SEQ ID NO: 1266574 - RNA, 23 nt, Human
cagccaggggagcagaggggcag

SEQ ID NO: 1266575 - RNA, 17 nt, Human
cagccaggggagcagag

SEQ ID NO: 1266576 - RNA, 16 nt, Human
cagccagggcucaauc

SEQ ID NO: 1266577 - RNA, 15 nt, Human
cagccaggggagcag

SEQ ID NO: 1266578 - RNA, 14 nt, Human
cagccagggagagc

SEQ ID NO: 1266579 - RNA, 15 nt, Human
cagccagggagagcc

SEQ ID NO: 1266580 - RNA, 16 nt, Human
cagccagggagagccc

SEQ ID NO: 1266581 - RNA, 17 nt, Human
cagccagggagagccca

SEQ ID NO: 1266582 - RNA, 18 nt, Human
cagccagggagagcccag

SEQ ID NO: 1266583 - RNA, 19 nt, Human
cagccagggagagcccagg

SEQ ID NO: 1266584 - RNA, 20 nt, Human
cagccagggagagcccagga

SEQ ID NO: 1266585 - RNA, 21 nt, Human
cagccagggagagcccaggag

SEQ ID NO: 1266586 - RNA, 22 nt, Human
cagccagggagagcccaggagc

SEQ ID NO: 1266587 - RNA, 24 nt, Human
cagccagggagagcccaggagcuc

SEQ ID NO: 1266588 - RNA, 13 nt, Human
cagcaucaggguu

SEQ ID NO: 1266589 - RNA, 23 nt, Human
cagcaucaggguuaagaagacuu

SEQ ID NO: 1266590 - RNA, 20 nt, Human
cagcauccccuugaacucuu

SEQ ID NO: 1266591 - RNA, 19 nt, Human
cagcauccccuugaacucu

SEQ ID NO: 1266592 - RNA, 12 nt, Human
cagcauccgcag

SEQ ID NO: 1266593 - RNA, 17 nt, Human
cagcauccgcaggugcu

SEQ ID NO: 1266594 - RNA, 20 nt, Human
cagcauccgcaggugcuggu

SEQ ID NO: 1266595 - RNA, 11 nt, Human
cagccagccuc

SEQ ID NO: 1266596 - RNA, 14 nt, Human
cagccagccucgcc

SEQ ID NO: 1266597 - RNA, 23 nt, Human
cagccagccucgcccauccccuu

SEQ ID NO: 1266598 - RNA, 19 nt, Human
cagccagccucgcccaucc

SEQ ID NO: 1266599 - RNA, 19 nt, Human
cagccagcgucggucugug

SEQ ID NO: 1266600 - RNA, 22 nt, Human
cagccagcgucggucugugccc

SEQ ID NO: 1266601 - RNA, 23 nt, Human
cagccagcgucggucugugcccc

SEQ ID NO: 1266602 - RNA, 18 nt, Human
cagcuuagaguuggccau

SEQ ID NO: 1266603 - RNA, 22 nt, Human
cagcugccuggaagagcagccc

SEQ ID NO: 1266604 - RNA, 14 nt, Human
cagcuccucugucu

SEQ ID NO: 1266605 - RNA, 12 nt, Human
cagcuccucugu

SEQ ID NO: 1266606 - RNA, 11 nt, Human
cagcugugcuu

SEQ ID NO: 1266607 - RNA, 12 nt, Human
cagcuguggcag

SEQ ID NO: 1266608 - RNA, 17 nt, Human
cagcuguggcagaguua

SEQ ID NO: 1266609 - RNA, 16 nt, Human
cagcuguggcagaguu

SEQ ID NO: 1266610 - RNA, 14 nt, Human
cagcugugcuuaug

SEQ ID NO: 1266611 - RNA, 23 nt, Human
cagcuguugagccccuccuaguu

SEQ ID NO: 1266612 - RNA, 15 nt, Human
cagcuguuuuguuga

SEQ ID NO: 1266613 - RNA, 16 nt, Human
cagcuguuuuguugac

SEQ ID NO: 1266614 - RNA, 17 nt, Human
cagcuguuuuguugaca

SEQ ID NO: 1266615 - RNA, 19 nt, Human
cagcuguuuuguugacauu

SEQ ID NO: 1266616 - RNA, 22 nt, Human
cagcuguuuuguugacauucug

SEQ ID NO: 1266617 - RNA, 23 nt, Human
cagcuguuuuguugacauucuga

SEQ ID NO: 1266618 - RNA, 15 nt, Human
cagcucccaccuccc

SEQ ID NO: 1266619 - RNA, 21 nt, Human
cagcucccaccuccccuuggg

SEQ ID NO: 1266620 - RNA, 11 nt, Human
cagcucccagg

SEQ ID NO: 1266621 - RNA, 18 nt, Human
cagcucccaggaccacag

SEQ ID NO: 1266622 - RNA, 24 nt, Human
cagcucccaggaccacaggcucag

SEQ ID NO: 1266623 - RNA, 14 nt, Human
cagcucccccuccc

SEQ ID NO: 1266624 - RNA, 15 nt, Human
cagcucccccucccu

SEQ ID NO: 1266625 - RNA, 16 nt, Human
cagcucccccucccuc

SEQ ID NO: 1266626 - RNA, 18 nt, Human
cagcucccccucccuccc

SEQ ID NO: 1266627 - RNA, 20 nt, Human
cagcucccccucccuccccu

SEQ ID NO: 1266628 - RNA, 21 nt, Human
cagcuccggccuguccuccaa

SEQ ID NO: 1266629 - RNA, 16 nt, Human
cagcuccggccugucc

SEQ ID NO: 1266630 - RNA, 14 nt, Human
cagcuccucccaca

SEQ ID NO: 1266631 - RNA, 14 nt, Human
cagcucccugugcc

SEQ ID NO: 1266632 - RNA, 18 nt, Human
cagcucccugugccccca

SEQ ID NO: 1266633 - RNA, 19 nt, Human
cagcucccugugcccccag

SEQ ID NO: 1266634 - RNA, 20 nt, Human
cagcucccugugcccccagg

SEQ ID NO: 1266635 - RNA, 22 nt, Human
cagcucccugugcccccagggu

SEQ ID NO: 1266636 - RNA, 18 nt, Human
cagcgcccaaaggacgca

SEQ ID NO: 1266637 - RNA, 13 nt, Human
cagccucuggggg

SEQ ID NO: 1266638 - RNA, 22 nt, Human
cagccucugggggguggccagg

SEQ ID NO: 1266639 - RNA, 13 nt, Human
cagccucuggcau

SEQ ID NO: 1266640 - RNA, 18 nt, Human
cagcgccaggcugaccac

SEQ ID NO: 1266641 - RNA, 19 nt, Human
cagcgccaggcugaccaca

SEQ ID NO: 1266642 - RNA, 20 nt, Human
cagcgccaggcugaccacag

SEQ ID NO: 1266643 - RNA, 21 nt, Human
cagcgccaggcugaccacagc

SEQ ID NO: 1266644 - RNA, 22 nt, Human
cagcgccaggcugaccacagca

SEQ ID NO: 1266645 - RNA, 21 nt, Human
cagcgcccaaaggacgcacug

SEQ ID NO: 1266646 - RNA, 20 nt, Human
cagcccuuggggguccuccu

SEQ ID NO: 1266647 - RNA, 23 nt, Human
cagcccuuggggguccuccucca

SEQ ID NO: 1266648 - RNA, 14 nt, Human
cagcccuuuugucu

SEQ ID NO: 1266649 - RNA, 16 nt, Human
cagcccuuuugucucu

SEQ ID NO: 1266650 - RNA, 14 nt, Human
cagccgacccccuc

SEQ ID NO: 1266651 - RNA, 15 nt, Human
cagccgacccccucu

SEQ ID NO: 1266652 - RNA, 20 nt, Human
cagccgcugagcgaggagau

SEQ ID NO: 1266653 - RNA, 22 nt, Human
cagccgacccccucucccugca

SEQ ID NO: 1266654 - RNA, 19 nt, Human
cagccgcugagcgaggaga

SEQ ID NO: 1266655 - RNA, 20 nt, Human
caugcucuccaaaccacuuu

SEQ ID NO: 1266656 - RNA, 16 nt, Human
caugcuaucucugugu

SEQ ID NO: 1266657 - RNA, 12 nt, Human
caugcaaacucu

SEQ ID NO: 1266658 - RNA, 14 nt, Human
caugcuaauuauau

SEQ ID NO: 1266659 - RNA, 23 nt, Human
caugcuaucucugugugcacaaa

SEQ ID NO: 1266660 - RNA, 12 nt, Human
caugcuccuuac

SEQ ID NO: 1266661 - RNA, 19 nt, Human
caugcugaaggcugaaaga

SEQ ID NO: 1266662 - RNA, 15 nt, Human
caugcugaggccugg

SEQ ID NO: 1266663 - RNA, 22 nt, Human
caugcugcuggggaagacagug

SEQ ID NO: 1266664 - RNA, 17 nt, Human
caugcugcuggggaaga

SEQ ID NO: 1266665 - RNA, 21 nt, Human
caugcugcuggggaagacagu

SEQ ID NO: 1266666 - RNA, 17 nt, Human
caugcuggaaaauaaua

SEQ ID NO: 1266667 - RNA, 22 nt, Human
caugcuggaaaauaauacugcu

SEQ ID NO: 1266668 - RNA, 23 nt, Human
caugcuggaaaauaauacugcug

SEQ ID NO: 1266669 - RNA, 13 nt, Human
caugcugggauuu

SEQ ID NO: 1266670 - RNA, 14 nt, Human
caugcugggauuuc

SEQ ID NO: 1266671 - RNA, 19 nt, Human
caugcugggauuuccaacu

SEQ ID NO: 1266672 - RNA, 12 nt, Human
cauggcuaucug

SEQ ID NO: 1266673 - RNA, 14 nt, Human
cauggcuauuuuau

SEQ ID NO: 1266674 - RNA, 15 nt, Human
cauggcuauuuuaua

SEQ ID NO: 1266675 - RNA, 17 nt, Human
cauggcuauuuuauauu

SEQ ID NO: 1266676 - RNA, 14 nt, Human
caugauguuuagaa

SEQ ID NO: 1266677 - RNA, 20 nt, Human
caugauuucauguacugcau

SEQ ID NO: 1266678 - RNA, 21 nt, Human
caugauuuuaaguuucucugc

SEQ ID NO: 1266679 - RNA, 18 nt, Human
caugauuuccuugaaugu

SEQ ID NO: 1266680 - RNA, 22 nt, Human
caugauuuuaaguuucucugca

SEQ ID NO: 1266681 - RNA, 24 nt, Human
caugauuuuaaguuucucugcaga

SEQ ID NO: 1266682 - RNA, 24 nt, Human
caugauuuugaaaucaugaagaua

SEQ ID NO: 1266683 - RNA, 19 nt, Human
caugauuucauguacugca

SEQ ID NO: 1266684 - RNA, 17 nt, Human
caugauuucauguacug

SEQ ID NO: 1266685 - RNA, 16 nt, Human
caugauuucauguacu

SEQ ID NO: 1266686 - RNA, 14 nt, Human
caugauuucaugua

SEQ ID NO: 1266687 - RNA, 13 nt, Human
caugauuucaugu

SEQ ID NO: 1266688 - RNA, 12 nt, Human
caugauuuccuu

SEQ ID NO: 1266689 - RNA, 14 nt, Human
caugauuuccuuga

SEQ ID NO: 1266690 - RNA, 16 nt, Human
caugauuuccuugaau

SEQ ID NO: 1266691 - RNA, 17 nt, Human
caugauuuccuugaaug

SEQ ID NO: 1266692 - RNA, 13 nt, Human
cauuauaaaaaga

SEQ ID NO: 1266693 - RNA, 16 nt, Human
cauuauaaccuuaauu

SEQ ID NO: 1266694 - RNA, 18 nt, Human
cauuauaaccuuaauuua

SEQ ID NO: 1266695 - RNA, 13 nt, Human
cauuauaaugaau

SEQ ID NO: 1266696 - RNA, 14 nt, Human
cauuauaaugaauu

SEQ ID NO: 1266697 - RNA, 15 nt, Human
cauuauaaugaauuu

SEQ ID NO: 1266698 - RNA, 19 nt, Human
cauguugucuaagaaauug

SEQ ID NO: 1266699 - RNA, 15 nt, Human
cauguuuagacuuua

SEQ ID NO: 1266700 - RNA, 19 nt, Human
cauuauauuuauuacugua

SEQ ID NO: 1266701 - RNA, 14 nt, Human
cauucguucugugg

SEQ ID NO: 1266702 - RNA, 13 nt, Human
cauucgugaaaac

SEQ ID NO: 1266703 - RNA, 15 nt, Human
cauucuacugaaaag

SEQ ID NO: 1266704 - RNA, 21 nt, Human
cauucuagagugcauauauuu

SEQ ID NO: 1266705 - RNA, 18 nt, Human
cauucuccacagcaaccc

SEQ ID NO: 1266706 - RNA, 15 nt, Human
cauucuccacagcaa

SEQ ID NO: 1266707 - RNA, 17 nt, Human
cauucuccacagcaacc

SEQ ID NO: 1266708 - RNA, 20 nt, Human
cauguuggccaggcugcucu

SEQ ID NO: 1266709 - RNA, 20 nt, Human
cauguuggccaggcuggucu

SEQ ID NO: 1266710 - RNA, 21 nt, Human
cauguuggccaggcuggucua

SEQ ID NO: 1266711 - RNA, 15 nt, Human
cauguugggaaacuu

SEQ ID NO: 1266712 - RNA, 19 nt, Human
cauguugggaaacuuggcu

SEQ ID NO: 1266713 - RNA, 20 nt, Human
cauguugggaaacuuggcuc

SEQ ID NO: 1266714 - RNA, 21 nt, Human
cauguugggaaacuuggcucg

SEQ ID NO: 1266715 - RNA, 14 nt, Human
cauguuaguuaccu

SEQ ID NO: 1266716 - RNA, 21 nt, Human
cauguuaguuaccuuauaguu

SEQ ID NO: 1266717 - RNA, 22 nt, Human
cauguuaguuaccuuauaguua

SEQ ID NO: 1266718 - RNA, 24 nt, Human
cauguuaguuaccuuauaguuacu

SEQ ID NO: 1266719 - RNA, 14 nt, Human
cauguuauuuguaa

SEQ ID NO: 1266720 - RNA, 14 nt, Human
caugucaaacguga

SEQ ID NO: 1266721 - RNA, 19 nt, Human
caugucaaacgugaaaaug

SEQ ID NO: 1266722 - RNA, 20 nt, Human
cauguauuuggugauuacau

SEQ ID NO: 1266723 - RNA, 15 nt, Human
cauguauuuggugau

SEQ ID NO: 1266724 - RNA, 14 nt, Human
caugucaaacaaau

SEQ ID NO: 1266725 - RNA, 15 nt, Human
caugucaaacaaaua

SEQ ID NO: 1266726 - RNA, 16 nt, Human
caugucccuaccgagu

SEQ ID NO: 1266727 - RNA, 22 nt, Human
caugucccuaccgagucucuuc

SEQ ID NO: 1266728 - RNA, 15 nt, Human
caugucaacagcguu

SEQ ID NO: 1266729 - RNA, 14 nt, Human
caugucaacagcgu

SEQ ID NO: 1266730 - RNA, 23 nt, Human
caugucccuaccgagucucuucu

SEQ ID NO: 1266731 - RNA, 13 nt, Human
cauguccugccua

SEQ ID NO: 1266732 - RNA, 22 nt, Human
cauguccugccuauuaucuguc

SEQ ID NO: 1266733 - RNA, 14 nt, Human
cauguccuguaaag

SEQ ID NO: 1266734 - RNA, 15 nt, Human
cauguccuguaaagg

SEQ ID NO: 1266735 - RNA, 24 nt, Human
cauguuaguaauaccucuaauagu

SEQ ID NO: 1266736 - RNA, 20 nt, Human
cauguuaguaauaccucuaa

SEQ ID NO: 1266737 - RNA, 19 nt, Human
cauguuaguaauaccucua

SEQ ID NO: 1266738 - RNA, 18 nt, Human
cauguuaguaauaccucu

SEQ ID NO: 1266739 - RNA, 17 nt, Human
cauguuaguaauaccuc

SEQ ID NO: 1266740 - RNA, 16 nt, Human
cauguuaguaauaccu

SEQ ID NO: 1266741 - RNA, 14 nt, Human
cauguuaguaauac

SEQ ID NO: 1266742 - RNA, 13 nt, Human
cauguuagccagg

SEQ ID NO: 1266743 - RNA, 16 nt, Human
cauguuagcccuuccu

SEQ ID NO: 1266744 - RNA, 20 nt, Human
cauguagaaaauuuguuauu

SEQ ID NO: 1266745 - RNA, 18 nt, Human
cauguaggaaguaggaag

SEQ ID NO: 1266746 - RNA, 16 nt, Human
cauguaguaacacuaa

SEQ ID NO: 1266747 - RNA, 19 nt, Human
caucuggaaccaucagaaa

SEQ ID NO: 1266748 - RNA, 17 nt, Human
caucuggaaccaucaga

SEQ ID NO: 1266749 - RNA, 12 nt, Human
caucuggaacca

SEQ ID NO: 1266750 - RNA, 16 nt, Human
caucugcuucaggccc

SEQ ID NO: 1266751 - RNA, 17 nt, Human
caucuggagagaacagg

SEQ ID NO: 1266752 - RNA, 17 nt, Human
caucugugcacugccca

SEQ ID NO: 1266753 - RNA, 18 nt, Human
caucugugcacugcccau

SEQ ID NO: 1266754 - RNA, 21 nt, Human
caucugugcacugcccaugga

SEQ ID NO: 1266755 - RNA, 11 nt, Human
caucugugucu

SEQ ID NO: 1266756 - RNA, 13 nt, Human
caucugugucuug

SEQ ID NO: 1266757 - RNA, 14 nt, Human
caucugugucuugu

SEQ ID NO: 1266758 - RNA, 12 nt, Human
cauccuggaaua

SEQ ID NO: 1266759 - RNA, 16 nt, Human
caucgcaccauucuga

SEQ ID NO: 1266760 - RNA, 18 nt, Human
caucgcaccauucugacu

SEQ ID NO: 1266761 - RNA, 19 nt, Human
caucgcaccauucugacuc

SEQ ID NO: 1266762 - RNA, 14 nt, Human
caucggaaaaauaa

SEQ ID NO: 1266763 - RNA, 15 nt, Human
caucggaaaaauaau

SEQ ID NO: 1266764 - RNA, 16 nt, Human
caucggaaaaauaauc

SEQ ID NO: 1266765 - RNA, 19 nt, Human
caucggacaagacccccag

SEQ ID NO: 1266766 - RNA, 21 nt, Human
caucggacaagacccccagca

SEQ ID NO: 1266767 - RNA, 20 nt, Human
caucggacaagacccccagc

SEQ ID NO: 1266768 - RNA, 17 nt, Human
caucgucuucuuggcca

SEQ ID NO: 1266769 - RNA, 14 nt, Human
caucugcugguccg

SEQ ID NO: 1266770 - RNA, 19 nt, Human
caucugcugguccguggga

SEQ ID NO: 1266771 - RNA, 22 nt, Human
caucacuuaacggaccaaagca

SEQ ID NO: 1266772 - RNA, 14 nt, Human
caucacuuguacaa

SEQ ID NO: 1266773 - RNA, 15 nt, Human
caucacuuguacaaa

SEQ ID NO: 1266774 - RNA, 22 nt, Human
cauccccuugaggucucagccc

SEQ ID NO: 1266775 - RNA, 17 nt, Human
caucccguguucuccuu

SEQ ID NO: 1266776 - RNA, 21 nt, Human
caucccguguucuccuuuucc

SEQ ID NO: 1266777 - RNA, 17 nt, Human
caucccgagcaccucca

SEQ ID NO: 1266778 - RNA, 19 nt, Human
cauccccuugaacucuuca

SEQ ID NO: 1266779 - RNA, 16 nt, Human
caucccgucuucucca

SEQ ID NO: 1266780 - RNA, 18 nt, Human
caucccgucuucuccaac

SEQ ID NO: 1266781 - RNA, 14 nt, Human
caucccguguucuc

SEQ ID NO: 1266782 - RNA, 16 nt, Human
caucccguguucuccu

SEQ ID NO: 1266783 - RNA, 15 nt, Human
cauauuaagaaugau

SEQ ID NO: 1266784 - RNA, 19 nt, Human
cauauuaagaaugaucuga

SEQ ID NO: 1266785 - RNA, 13 nt, Human
cauauuaagaaug

SEQ ID NO: 1266786 - RNA, 14 nt, Human
cauauguuugguaa

SEQ ID NO: 1266787 - RNA, 17 nt, Human
cauauggauccacuggc

SEQ ID NO: 1266788 - RNA, 18 nt, Human
cauauggauccacuggcu

SEQ ID NO: 1266789 - RNA, 23 nt, Human
cauaugcuaccaccagcuguguc

SEQ ID NO: 1266790 - RNA, 21 nt, Human
cauaugcuaccaccagcugug

SEQ ID NO: 1266791 - RNA, 22 nt, Human
cauaugcuaccaccagcugugu

SEQ ID NO: 1266792 - RNA, 16 nt, Human
ccaccgcagaaggaag

SEQ ID NO: 1266793 - RNA, 15 nt, Human
ccaccgcagaaggaa

SEQ ID NO: 1266794 - RNA, 18 nt, Human
ccaccgaagccgccugug

SEQ ID NO: 1266795 - RNA, 17 nt, Human
ccaccgcccagagaccc

SEQ ID NO: 1266796 - RNA, 13 nt, Human
ccaccgcccagag

SEQ ID NO: 1266797 - RNA, 13 nt, Human
ccacgcccggcua

SEQ ID NO: 1266798 - RNA, 16 nt, Human
ccacgacugucuccau

SEQ ID NO: 1266799 - RNA, 15 nt, Human
ccacgacugucucca

SEQ ID NO: 1266800 - RNA, 15 nt, Human
ccacgcccguccugc

SEQ ID NO: 1266801 - RNA, 17 nt, Human
ccacgcccguccugccu

SEQ ID NO: 1266802 - RNA, 18 nt, Human
ccacgcccguccugccug

SEQ ID NO: 1266803 - RNA, 20 nt, Human
ccaccuuuguuucuccccca

SEQ ID NO: 1266804 - RNA, 16 nt, Human
ccaccuuuguuucucc

SEQ ID NO: 1266805 - RNA, 14 nt, Human
ccacgaaggagccc

SEQ ID NO: 1266806 - RNA, 16 nt, Human
ccacgacacugcagcc

SEQ ID NO: 1266807 - RNA, 17 nt, Human
ccacgacacugcagccc

SEQ ID NO: 1266808 - RNA, 15 nt, Human
ccacgacuggccagg

SEQ ID NO: 1266809 - RNA, 14 nt, Human
ccacgacugucucc

SEQ ID NO: 1266810 - RNA, 18 nt, Human
ccacgacuggccagggcc

SEQ ID NO: 1266811 - RNA, 23 nt, Human
ccacgcccguccugccuguggcg

SEQ ID NO: 1266812 - RNA, 19 nt, Human
ccacgcccguccugccugu

SEQ ID NO: 1266813 - RNA, 20 nt, Human
ccacgcccguccugccugug

SEQ ID NO: 1266814 - RNA, 21 nt, Human
ccacgcccguccugccugugg

SEQ ID NO: 1266815 - RNA, 22 nt, Human
ccacgcccguccugccuguggc

SEQ ID NO: 1266816 - RNA, 14 nt, Human
ccacagcugccucu

SEQ ID NO: 1266817 - RNA, 14 nt, Human
ccaccacagccagc

SEQ ID NO: 1266818 - RNA, 15 nt, Human
ccaccacagccagca

SEQ ID NO: 1266819 - RNA, 18 nt, Human
ccaccacagccagcaccu

SEQ ID NO: 1266820 - RNA, 20 nt, Human
ccaccacagccagcaccugg

SEQ ID NO: 1266821 - RNA, 14 nt, Human
ccacagcugcucaa

SEQ ID NO: 1266822 - RNA, 21 nt, Human
ccaccacagccagcaccuggc

SEQ ID NO: 1266823 - RNA, 12 nt, Human
ccaccaguucuc

SEQ ID NO: 1266824 - RNA, 15 nt, Human
ccacccugggcccug

SEQ ID NO: 1266825 - RNA, 16 nt, Human
ccacccugggcccugg

SEQ ID NO: 1266826 - RNA, 17 nt, Human
ccacccugggcccuggg

SEQ ID NO: 1266827 - RNA, 20 nt, Human
ccacccugggcccugggcug

SEQ ID NO: 1266828 - RNA, 22 nt, Human
ccacccugggcccugggcugga

SEQ ID NO: 1266829 - RNA, 15 nt, Human
ccacccuguuccugc

SEQ ID NO: 1266830 - RNA, 16 nt, Human
ccacccuguuccugcu

SEQ ID NO: 1266831 - RNA, 17 nt, Human
ccacccuguuccugcug

SEQ ID NO: 1266832 - RNA, 18 nt, Human
ccacccuguuccugcugc

SEQ ID NO: 1266833 - RNA, 19 nt, Human
ccacccuguuccugcugcu

SEQ ID NO: 1266834 - RNA, 17 nt, Human
ccacagccagcaccugg

SEQ ID NO: 1266835 - RNA, 18 nt, Human
ccacagccagcaccuggc

SEQ ID NO: 1266836 - RNA, 19 nt, Human
ccacagccagcaccuggca

SEQ ID NO: 1266837 - RNA, 22 nt, Human
ccacagccagcaccuggcaucg

SEQ ID NO: 1266838 - RNA, 11 nt, Human
ccacagccagg

SEQ ID NO: 1266839 - RNA, 16 nt, Human
ccacagccuccccugc

SEQ ID NO: 1266840 - RNA, 19 nt, Human
ccacagccuccccugccag

SEQ ID NO: 1266841 - RNA, 20 nt, Human
ccacagccuccccugccagg

SEQ ID NO: 1266842 - RNA, 15 nt, Human
ccacagccagcaccu

SEQ ID NO: 1266843 - RNA, 19 nt, Human
ccacagcaaccccaggcug

SEQ ID NO: 1266844 - RNA, 20 nt, Human
ccacagcaaccccaggcuga

SEQ ID NO: 1266845 - RNA, 14 nt, Human
ccacagcacagcca

SEQ ID NO: 1266846 - RNA, 12 nt, Human
ccacuccucuga

SEQ ID NO: 1266847 - RNA, 20 nt, Human
ccacuccgagaggugggcca

SEQ ID NO: 1266848 - RNA, 16 nt, Human
ccacuccgagaggugg

SEQ ID NO: 1266849 - RNA, 17 nt, Human
ccacuccgagagguggg

SEQ ID NO: 1266850 - RNA, 19 nt, Human
ccacuccgagaggugggcc

SEQ ID NO: 1266851 - RNA, 23 nt, Human
ccacuccgagaggugggccaguc

SEQ ID NO: 1266852 - RNA, 13 nt, Human
ccacuccucugac

SEQ ID NO: 1266853 - RNA, 19 nt, Human
cauuuguauaaaauaauuu

SEQ ID NO: 1266854 - RNA, 20 nt, Human
cauuuguauaaaauaauuuu

SEQ ID NO: 1266855 - RNA, 16 nt, Human
cauuuguguugaagag

SEQ ID NO: 1266856 - RNA, 22 nt, Human
cauuuguggguuuuuauuuccu

SEQ ID NO: 1266857 - RNA, 23 nt, Human
cauuuguggguuuuuauuuccua

SEQ ID NO: 1266858 - RNA, 19 nt, Human
cauuuguguacacagucag

SEQ ID NO: 1266859 - RNA, 17 nt, Human
cauuuguggguuuuuau

SEQ ID NO: 1266860 - RNA, 22 nt, Human
cauuuuuugggcagcaauuuaa

SEQ ID NO: 1266861 - RNA, 19 nt, Human
cauuuuuugggcagcaauu

SEQ ID NO: 1266862 - RNA, 18 nt, Human
cauuuuuugggcagcaau

SEQ ID NO: 1266863 - RNA, 18 nt, Human
cauuuuuuuccuugcaaa

SEQ ID NO: 1266864 - RNA, 20 nt, Human
cauuuguguugaagagguuu

SEQ ID NO: 1266865 - RNA, 14 nt, Human
cauuuuuuaggaaa

SEQ ID NO: 1266866 - RNA, 15 nt, Human
cauuuuuuaggaaau

SEQ ID NO: 1266867 - RNA, 11 nt, Human
ccaaaacugcu

SEQ ID NO: 1266868 - RNA, 12 nt, Human
ccaaaacugcuc

SEQ ID NO: 1266869 - RNA, 23 nt, Human
ccaaaagauugcugaaauuuuau

SEQ ID NO: 1266870 - RNA, 22 nt, Human
ccaaaagaagcccccagcuaag

SEQ ID NO: 1266871 - RNA, 16 nt, Human
ccaaaagauugcugaa

SEQ ID NO: 1266872 - RNA, 19 nt, Human
ccaaaagauugcugaaauu

SEQ ID NO: 1266873 - RNA, 22 nt, Human
ccaaaagauugcugaaauuuua

SEQ ID NO: 1266874 - RNA, 17 nt, Human
ccaaauguucaucaaug

SEQ ID NO: 1266875 - RNA, 18 nt, Human
ccaaauguucaucaauga

SEQ ID NO: 1266876 - RNA, 15 nt, Human
ccaacuccuaguucu

SEQ ID NO: 1266877 - RNA, 19 nt, Human
ccaacuccuaguucuagaa

SEQ ID NO: 1266878 - RNA, 23 nt, Human
ccaacuccuaguucuagaaaaac

SEQ ID NO: 1266879 - RNA, 12 nt, Human
ccaacuccuucc

SEQ ID NO: 1266880 - RNA, 14 nt, Human
ccaacuccuuccag

SEQ ID NO: 1266881 - RNA, 16 nt, Human
ccaacuccuuccagcu

SEQ ID NO: 1266882 - RNA, 15 nt, Human
ccaacuccuuccagc

SEQ ID NO: 1266883 - RNA, 15 nt, Human
ccaacugaccaccuu

SEQ ID NO: 1266884 - RNA, 14 nt, Human
ccaagcucugcagu

SEQ ID NO: 1266885 - RNA, 15 nt, Human
ccaagcucugcaguc

SEQ ID NO: 1266886 - RNA, 12 nt, Human
ccaagcugaggu

SEQ ID NO: 1266887 - RNA, 13 nt, Human
ccaagcugaggug

SEQ ID NO: 1266888 - RNA, 15 nt, Human
ccaagcugaggugcc

SEQ ID NO: 1266889 - RNA, 17 nt, Human
ccaagcugaggugccca

SEQ ID NO: 1266890 - RNA, 19 nt, Human
ccaagcugaggugcccagg

SEQ ID NO: 1266891 - RNA, 20 nt, Human
ccaagcugaggugcccagga

SEQ ID NO: 1266892 - RNA, 21 nt, Human
ccaagcugaggugcccaggag

SEQ ID NO: 1266893 - RNA, 22 nt, Human
ccaagcugaggugcccaggaga

SEQ ID NO: 1266894 - RNA, 23 nt, Human
ccaagcugaggugcccaggagaa

SEQ ID NO: 1266895 - RNA, 15 nt, Human
ccaagcugaguuucc

SEQ ID NO: 1266896 - RNA, 16 nt, Human
ccaagcugaguuuccu

SEQ ID NO: 1266897 - RNA, 17 nt, Human
ccaagcugaguuuccua

SEQ ID NO: 1266898 - RNA, 18 nt, Human
ccaagcugaguuuccuau

SEQ ID NO: 1266899 - RNA, 19 nt, Human
ccaagcugaguuuccuaug

SEQ ID NO: 1266900 - RNA, 23 nt, Human
ccaagcugccuccccucuccuuc

SEQ ID NO: 1266901 - RNA, 22 nt, Human
ccaaucaaucuugcauguaacg

SEQ ID NO: 1266902 - RNA, 16 nt, Human
ccaaucaaucuugcau

SEQ ID NO: 1266903 - RNA, 12 nt, Human
ccaaucauuuua

SEQ ID NO: 1266904 - RNA, 14 nt, Human
ccaaucauuuuaau

SEQ ID NO: 1266905 - RNA, 12 nt, Human
ccaaugaaauga

SEQ ID NO: 1266906 - RNA, 22 nt, Human
ccaaucauuuuaauuauuauuc

SEQ ID NO: 1266907 - RNA, 14 nt, Human
ccaaugagcuuucu

SEQ ID NO: 1266908 - RNA, 15 nt, Human
ccaaugagcuuucug

SEQ ID NO: 1266909 - RNA, 16 nt, Human
ccaaugagcuuucuga

SEQ ID NO: 1266910 - RNA, 18 nt, Human
ccaaugagcuuucugaac

SEQ ID NO: 1266911 - RNA, 20 nt, Human
ccaaugagcuuucugaacag

SEQ ID NO: 1266912 - RNA, 21 nt, Human
ccaaugagcuuucugaacagc

SEQ ID NO: 1266913 - RNA, 23 nt, Human
ccaaugagcuuucugaacagcug

SEQ ID NO: 1266914 - RNA, 22 nt, Human
ccaaugagcuuucugaacagcu

SEQ ID NO: 1266915 - RNA, 20 nt, Human
ccaauggguuuuucccugua

SEQ ID NO: 1266916 - RNA, 15 nt, Human
ccaauguacccaccg

SEQ ID NO: 1266917 - RNA, 12 nt, Human
ccaaugucuuga

SEQ ID NO: 1266918 - RNA, 14 nt, Human
ccaaugucuggaga

SEQ ID NO: 1266919 - RNA, 15 nt, Human
ccaaugucuggagac

SEQ ID NO: 1266920 - RNA, 16 nt, Human
ccaaugucuggagacc

SEQ ID NO: 1266921 - RNA, 22 nt, Human
ccaaugucuggagaccaccagg

SEQ ID NO: 1266922 - RNA, 18 nt, Human
ccaaugcaccuaaagaaa

SEQ ID NO: 1266923 - RNA, 17 nt, Human
auugauccagaaagaaa

SEQ ID NO: 1266924 - RNA, 16 nt, Human
auugauccagaaagaa

SEQ ID NO: 1266925 - RNA, 20 nt, Human
auugagcucucugcccuuga

SEQ ID NO: 1266926 - RNA, 11 nt, Human
auugagagaau

SEQ ID NO: 1266927 - RNA, 15 nt, Human
auugagcucucucau

SEQ ID NO: 1266928 - RNA, 20 nt, Human
auugagaaaaauauauacua

SEQ ID NO: 1266929 - RNA, 18 nt, Human
auugagaagaaaaacuca

SEQ ID NO: 1266930 - RNA, 21 nt, Human
auugagaagaaaaacucaauu

SEQ ID NO: 1266931 - RNA, 13 nt, Human
auuccugaacagg

SEQ ID NO: 1266932 - RNA, 15 nt, Human
auuccugaagaacca

SEQ ID NO: 1266933 - RNA, 16 nt, Human
auuccugaagaaccag

SEQ ID NO: 1266934 - RNA, 19 nt, Human
auuccugaagaaccagucc

SEQ ID NO: 1266935 - RNA, 22 nt, Human
auuccugaccuccgccauccac

SEQ ID NO: 1266936 - RNA, 18 nt, Human
auuccugaccuccgccau

SEQ ID NO: 1266937 - RNA, 18 nt, Human
auucugaccuuaaaugca

SEQ ID NO: 1266938 - RNA, 18 nt, Human
auucugacucgguuucuc

SEQ ID NO: 1266939 - RNA, 20 nt, Human
auucugacucgguuucucca

SEQ ID NO: 1266940 - RNA, 11 nt, Human
auucucugagc

SEQ ID NO: 1266941 - RNA, 13 nt, Human
auucucugagcug

SEQ ID NO: 1266942 - RNA, 17 nt, Human
auucugaguuuuguguu

SEQ ID NO: 1266943 - RNA, 22 nt, Human
auucugaguuuuguguuuguug

SEQ ID NO: 1266944 - RNA, 23 nt, Human
auucugaguuuuguguuuguugu

SEQ ID NO: 1266945 - RNA, 16 nt, Human
auucugauguacucua

SEQ ID NO: 1266946 - RNA, 18 nt, Human
auucugauguacucuaaa

SEQ ID NO: 1266947 - RNA, 23 nt, Human
auucugauguacucuaaauacug

SEQ ID NO: 1266948 - RNA, 20 nt, Human
auucugauucgaaugacacu

SEQ ID NO: 1266949 - RNA, 21 nt, Human
auucugauucgaaugacacug

SEQ ID NO: 1266950 - RNA, 22 nt, Human
auucugauucgaaugacacugu

SEQ ID NO: 1266951 - RNA, 17 nt, Human
auucuugguugaggaaa

SEQ ID NO: 1266952 - RNA, 18 nt, Human
auucuugguugaggaaac

SEQ ID NO: 1266953 - RNA, 21 nt, Human
auuauguuaaaacugggacag

SEQ ID NO: 1266954 - RNA, 15 nt, Human
auuauguguguuuug

SEQ ID NO: 1266955 - RNA, 17 nt, Human
auuaugugguuuuagau

SEQ ID NO: 1266956 - RNA, 13 nt, Human
auucaagauuccc

SEQ ID NO: 1266957 - RNA, 16 nt, Human
auucaaggaauuucuu

SEQ ID NO: 1266958 - RNA, 18 nt, Human
auucacaagacccaaaag

SEQ ID NO: 1266959 - RNA, 21 nt, Human
auucaauuugauguggugaaa

SEQ ID NO: 1266960 - RNA, 14 nt, Human
auucacaaacuuuu

SEQ ID NO: 1266961 - RNA, 22 nt, Human
auucacaaacuuuuauacucuu

SEQ ID NO: 1266962 - RNA, 16 nt, Human
auucaauuugaugugg

SEQ ID NO: 1266963 - RNA, 12 nt, Human
auucacaaaaau

SEQ ID NO: 1266964 - RNA, 15 nt, Human
auucacaaaaauuga

SEQ ID NO: 1266965 - RNA, 13 nt, Human
auucacaaacuuu

SEQ ID NO: 1266966 - RNA, 12 nt, Human
auucaagauucc

SEQ ID NO: 1266967 - RNA, 20 nt, Human
auucaaggaauuucuuaacu

SEQ ID NO: 1266968 - RNA, 19 nt, Human
auucaaggaauuucuuaac

SEQ ID NO: 1266969 - RNA, 17 nt, Human
auucaaggaauuucuua

SEQ ID NO: 1266970 - RNA, 18 nt, Human
auucaaggaauuucuuaa

SEQ ID NO: 1266971 - RNA, 21 nt, Human
auuauguguguuuuaaaauga

SEQ ID NO: 1266972 - RNA, 20 nt, Human
auuauguguguuuuaaaaug

SEQ ID NO: 1266973 - RNA, 15 nt, Human
auuauguguguuuua

SEQ ID NO: 1266974 - RNA, 14 nt, Human
auuaugugguuuua

SEQ ID NO: 1266975 - RNA, 16 nt, Human
auuaugugguuuuaga

SEQ ID NO: 1266976 - RNA, 17 nt, Human
auuaaauaagauucuaa

SEQ ID NO: 1266977 - RNA, 15 nt, Human
auuaaauuggaaagc

SEQ ID NO: 1266978 - RNA, 17 nt, Human
auuaaauuggaaagcag

SEQ ID NO: 1266979 - RNA, 17 nt, Human
auucacaaacuuuuaua

SEQ ID NO: 1266980 - RNA, 16 nt, Human
auucauauuuucuuuc

SEQ ID NO: 1266981 - RNA, 20 nt, Human
auucauauuuucuuucaaaa

SEQ ID NO: 1266982 - RNA, 17 nt, Human
auucauccaaguuaaau

SEQ ID NO: 1266983 - RNA, 18 nt, Human
auucauccaaguuaaaug

SEQ ID NO: 1266984 - RNA, 20 nt, Human
auucauccaaguuaaaugua

SEQ ID NO: 1266985 - RNA, 13 nt, Human
auucauuucacug

SEQ ID NO: 1266986 - RNA, 15 nt, Human
auucauuucacugua

SEQ ID NO: 1266987 - RNA, 19 nt, Human
auucauuucacuguagcuc

SEQ ID NO: 1266988 - RNA, 18 nt, Human
auucauuuuaacaucuga

SEQ ID NO: 1266989 - RNA, 19 nt, Human
auucauccaaguuaaaugu

SEQ ID NO: 1266990 - RNA, 13 nt, Human
auucaugacuaug

SEQ ID NO: 1266991 - RNA, 21 nt, Human
auucauuuuaacaucugagaa

SEQ ID NO: 1266992 - RNA, 14 nt, Human
auucauuuucucua

SEQ ID NO: 1266993 - RNA, 16 nt, Human
auucauuuucucuaau

SEQ ID NO: 1266994 - RNA, 15 nt, Human
auucauuuucucuaa

SEQ ID NO: 1266995 - RNA, 17 nt, Human
auucauuuuuuaaauuc

SEQ ID NO: 1266996 - RNA, 20 nt, Human
auuccaaagaguagaauugc

SEQ ID NO: 1266997 - RNA, 17 nt, Human
auuccaaagaacagccu

SEQ ID NO: 1266998 - RNA, 20 nt, Human
auuccucuacuaacaaucag

SEQ ID NO: 1266999 - RNA, 14 nt, Human
auuguucucagaau

SEQ ID NO: 1267000 - RNA, 17 nt, Human
auuguucucagaauccc

SEQ ID NO: 1267001 - RNA, 17 nt, Human
auuguugaaaaaguuug

SEQ ID NO: 1267002 - RNA, 18 nt, Human
auuguugaaaaaguuugu

SEQ ID NO: 1267003 - RNA, 20 nt, Human
auuguugaaaaaguuuguuu

SEQ ID NO: 1267004 - RNA, 19 nt, Human
auuguugaaaaaguuuguu

SEQ ID NO: 1267005 - RNA, 13 nt, Human
auuguuucaauug

SEQ ID NO: 1267006 - RNA, 22 nt, Human
auugauccagaaagaaaacuug

SEQ ID NO: 1267007 - RNA, 19 nt, Human
auugauccagaaagaaaac

SEQ ID NO: 1267008 - RNA, 18 nt, Human
auugauccagaaagaaaa

SEQ ID NO: 1267009 - RNA, 18 nt, Human
auugaugggauuugguca

SEQ ID NO: 1267010 - RNA, 14 nt, Human
auugaugauccauu

SEQ ID NO: 1267011 - RNA, 15 nt, Human
auuguaaaaauggca

SEQ ID NO: 1267012 - RNA, 14 nt, Human
auuguaaaacaggu

SEQ ID NO: 1267013 - RNA, 13 nt, Human
auuguaaaagcau

SEQ ID NO: 1267014 - RNA, 13 nt, Human
auuguaaaauggu

SEQ ID NO: 1267015 - RNA, 19 nt, Human
auuguaaaagcauuuugua

SEQ ID NO: 1267016 - RNA, 20 nt, Human
auuguaaaagcauuuuguaa

SEQ ID NO: 1267017 - RNA, 21 nt, Human
auuguaaaagcauuuuguaau

SEQ ID NO: 1267018 - RNA, 23 nt, Human
auuguaaaagcauuuuguaauaa

SEQ ID NO: 1267019 - RNA, 23 nt, Human
auuguaauaggcguaacuaauuu

SEQ ID NO: 1267020 - RNA, 14 nt, Human
auuguaaauauugu

SEQ ID NO: 1267021 - RNA, 17 nt, Human
auuguaaaauaauucug

SEQ ID NO: 1267022 - RNA, 13 nt, Human
auuguaaaauaau

SEQ ID NO: 1267023 - RNA, 15 nt, Human
auuucuaugaaauau

SEQ ID NO: 1267024 - RNA, 18 nt, Human
auuucuaugaaauauuau

SEQ ID NO: 1267025 - RNA, 14 nt, Human
auuucaucuauuuu

SEQ ID NO: 1267026 - RNA, 20 nt, Human
auuucuaugaaauauuaugu

SEQ ID NO: 1267027 - RNA, 24 nt, Human
auuucucagaagucuuucagcaag

SEQ ID NO: 1267028 - RNA, 20 nt, Human
auuucuccuccaugggagaa

SEQ ID NO: 1267029 - RNA, 23 nt, Human
auuucuguguugccaagcuccaa

SEQ ID NO: 1267030 - RNA, 15 nt, Human
auuucuguguugcca

SEQ ID NO: 1267031 - RNA, 16 nt, Human
auuucagcagcugcag

SEQ ID NO: 1267032 - RNA, 18 nt, Human
auuucagauucccagagc

SEQ ID NO: 1267033 - RNA, 13 nt, Human
auuucaucuauuu

SEQ ID NO: 1267034 - RNA, 14 nt, Human
auuucaagguucua

SEQ ID NO: 1267035 - RNA, 15 nt, Human
auuucaagguucuaa

SEQ ID NO: 1267036 - RNA, 17 nt, Human
auuucaagguucuaacc

SEQ ID NO: 1267037 - RNA, 11 nt, Human
auuucaaguuc

SEQ ID NO: 1267038 - RNA, 16 nt, Human
auuucaaguuccaagu

SEQ ID NO: 1267039 - RNA, 22 nt, Human
auuucaaguuccaaguugcuaa

SEQ ID NO: 1267040 - RNA, 23 nt, Human
auuucaaguuccaaguugcuaau

SEQ ID NO: 1267041 - RNA, 18 nt, Human
auuucagacucccauucc

SEQ ID NO: 1267042 - RNA, 23 nt, Human
auuucagacucccauuccugaag

SEQ ID NO: 1267043 - RNA, 16 nt, Human
auuucagagaggccuu

SEQ ID NO: 1267044 - RNA, 22 nt, Human
auuucagagaggccuuuuggaa

SEQ ID NO: 1267045 - RNA, 23 nt, Human
auuucagagugacuacacacagu

SEQ ID NO: 1267046 - RNA, 23 nt, Human
auuuauaccucaauuuucacugu

SEQ ID NO: 1267047 - RNA, 21 nt, Human
auuuauauuguaaauauugug

SEQ ID NO: 1267048 - RNA, 20 nt, Human
auuuauauuguaaauauugu

SEQ ID NO: 1267049 - RNA, 21 nt, Human
auuuaucaaacccuagccuug

SEQ ID NO: 1267050 - RNA, 19 nt, Human
auuuaucacacaaagcaga

SEQ ID NO: 1267051 - RNA, 14 nt, Human
auuuaucacacaaa

SEQ ID NO: 1267052 - RNA, 17 nt, Human
auuuaucacacaaagca

SEQ ID NO: 1267053 - RNA, 12 nt, Human
auuucaagguuc

SEQ ID NO: 1267054 - RNA, 13 nt, Human
auuucaagguucu

SEQ ID NO: 1267055 - RNA, 14 nt, Human
auuuaaugcugugg

SEQ ID NO: 1267056 - RNA, 17 nt, Human
auuuaauggggaggaca

SEQ ID NO: 1267057 - RNA, 14 nt, Human
auuuaauguuuuca

SEQ ID NO: 1267058 - RNA, 13 nt, Human
auuuaauauuaca

SEQ ID NO: 1267059 - RNA, 14 nt, Human
auuuaauauuacag

SEQ ID NO: 1267060 - RNA, 16 nt, Human
auuuaauauuacagau

SEQ ID NO: 1267061 - RNA, 17 nt, Human
auuuaauauuacagaua

SEQ ID NO: 1267062 - RNA, 14 nt, Human
auuuaauauuuacu

SEQ ID NO: 1267063 - RNA, 15 nt, Human
auuuaauauuuacuc

SEQ ID NO: 1267064 - RNA, 16 nt, Human
auuuaauauuuacucu

SEQ ID NO: 1267065 - RNA, 22 nt, Human
caaauccagccugcugccugcu

SEQ ID NO: 1267066 - RNA, 16 nt, Human
caaaucaggcuuuugu

SEQ ID NO: 1267067 - RNA, 13 nt, Human
caaaucaggcuuu

SEQ ID NO: 1267068 - RNA, 13 nt, Human
caaaucauuuguu

SEQ ID NO: 1267069 - RNA, 14 nt, Human
caaaucauuuguuu

SEQ ID NO: 1267070 - RNA, 16 nt, Human
caaaucauuuguuuaa

SEQ ID NO: 1267071 - RNA, 17 nt, Human
caaaucauuuguuuaaa

SEQ ID NO: 1267072 - RNA, 18 nt, Human
caaaucauuuguuuaaaa

SEQ ID NO: 1267073 - RNA, 20 nt, Human
caaagaucuguccucagccu

SEQ ID NO: 1267074 - RNA, 21 nt, Human
caaagaucuguccucagccuu

SEQ ID NO: 1267075 - RNA, 12 nt, Human
caaagaugaaaa

SEQ ID NO: 1267076 - RNA, 18 nt, Human
caaagaugaaugaagcaa

SEQ ID NO: 1267077 - RNA, 20 nt, Human
caaagaugaaugaagcaaau

SEQ ID NO: 1267078 - RNA, 18 nt, Human
caaaguaaugacagaaca

SEQ ID NO: 1267079 - RNA, 15 nt, Human
caacaaagaaacaaa

SEQ ID NO: 1267080 - RNA, 20 nt, Human
caacaaagaaacaaagaugu

SEQ ID NO: 1267081 - RNA, 15 nt, Human
caaauuuuucugcuu

SEQ ID NO: 1267082 - RNA, 20 nt, Human
caaauuuuucugcuuuaaaa

SEQ ID NO: 1267083 - RNA, 14 nt, Human
caacaaaagaagcc

SEQ ID NO: 1267084 - RNA, 22 nt, Human
caacaaaagaagcccggcuccu

SEQ ID NO: 1267085 - RNA, 14 nt, Human
caacaauuuaugaa

SEQ ID NO: 1267086 - RNA, 16 nt, Human
caacaauuuaugaauu

SEQ ID NO: 1267087 - RNA, 17 nt, Human
caacaauuuaugaauug

SEQ ID NO: 1267088 - RNA, 18 nt, Human
caacaauuuaugaauuga

SEQ ID NO: 1267089 - RNA, 13 nt, Human
caacaauuucuac

SEQ ID NO: 1267090 - RNA, 18 nt, Human
caacaauuucuacuuuga

SEQ ID NO: 1267091 - RNA, 19 nt, Human
caacaauuucuacuuugaa

SEQ ID NO: 1267092 - RNA, 20 nt, Human
caacaauuucuacuuugaag

SEQ ID NO: 1267093 - RNA, 14 nt, Human
caaaucgaaugaaa

SEQ ID NO: 1267094 - RNA, 19 nt, Human
caaaucguccagcgaccuu

SEQ ID NO: 1267095 - RNA, 21 nt, Human
caaaucguccagcgaccuucc

SEQ ID NO: 1267096 - RNA, 18 nt, Human
caaaucuaccacuguaug

SEQ ID NO: 1267097 - RNA, 14 nt, Human
caaaucuaccacug

SEQ ID NO: 1267098 - RNA, 13 nt, Human
caaaugcagcuuu

SEQ ID NO: 1267099 - RNA, 21 nt, Human
caaaugcaaaaacucuuugag

SEQ ID NO: 1267100 - RNA, 19 nt, Human
caaaugcaaaaacucuuug

SEQ ID NO: 1267101 - RNA, 19 nt, Human
caaauuuugaguugccaca

SEQ ID NO: 1267102 - RNA, 14 nt, Human
caaaugaguaacau

SEQ ID NO: 1267103 - RNA, 18 nt, Human
caaaugaguaacauuugc

SEQ ID NO: 1267104 - RNA, 19 nt, Human
caaaugaguaacauuugcu

SEQ ID NO: 1267105 - RNA, 21 nt, Human
caaaugaguaacauuugcugu

SEQ ID NO: 1267106 - RNA, 18 nt, Human
caacaccucuuggggagu

SEQ ID NO: 1267107 - RNA, 13 nt, Human
caacacaaagauu

SEQ ID NO: 1267108 - RNA, 23 nt, Human
caagaauuucuaggacugaauua

SEQ ID NO: 1267109 - RNA, 13 nt, Human
caagacacaguga

SEQ ID NO: 1267110 - RNA, 13 nt, Human
caagacccccagc

SEQ ID NO: 1267111 - RNA, 14 nt, Human
caagacccccagca

SEQ ID NO: 1267112 - RNA, 16 nt, Human
caagacccccagcacu

SEQ ID NO: 1267113 - RNA, 13 nt, Human
caagaagggacug

SEQ ID NO: 1267114 - RNA, 18 nt, Human
caagaagggacugagaga

SEQ ID NO: 1267115 - RNA, 14 nt, Human
caagaagugaagaa

SEQ ID NO: 1267116 - RNA, 16 nt, Human
caagaagggacugaga

SEQ ID NO: 1267117 - RNA, 17 nt, Human
caagaauaaucacgcuu

SEQ ID NO: 1267118 - RNA, 18 nt, Human
caagaauaaucacgcuuu

SEQ ID NO: 1267119 - RNA, 20 nt, Human
caagaauaaucacgcuuucc

SEQ ID NO: 1267120 - RNA, 16 nt, Human
caaccccagacacugg

SEQ ID NO: 1267121 - RNA, 17 nt, Human
caacuaugauuuggaaa

SEQ ID NO: 1267122 - RNA, 18 nt, Human
caacuaugauuuggaaaa

SEQ ID NO: 1267123 - RNA, 19 nt, Human
caacuaugauuuggaaaau

SEQ ID NO: 1267124 - RNA, 22 nt, Human
caacuaugauuuggaaaauaaa

SEQ ID NO: 1267125 - RNA, 19 nt, Human
caacccaaauguucaucaa

SEQ ID NO: 1267126 - RNA, 14 nt, Human
caaccauuccccau

SEQ ID NO: 1267127 - RNA, 13 nt, Human
caaccauuuccuc

SEQ ID NO: 1267128 - RNA, 16 nt, Human
caaccauuuccucaga

SEQ ID NO: 1267129 - RNA, 14 nt, Human
caaccauuugaaac

SEQ ID NO: 1267130 - RNA, 17 nt, Human
caaccauuuccucagac

SEQ ID NO: 1267131 - RNA, 18 nt, Human
caacccaaccucauccuc

SEQ ID NO: 1267132 - RNA, 14 nt, Human
caacccaaugggcu

SEQ ID NO: 1267133 - RNA, 14 nt, Human
caaccacuggucug

SEQ ID NO: 1267134 - RNA, 22 nt, Human
caaccacuggucuguagggauu

SEQ ID NO: 1267135 - RNA, 23 nt, Human
caaccacuggucuguagggauuu

SEQ ID NO: 1267136 - RNA, 14 nt, Human
caaccaugucauuu

SEQ ID NO: 1267137 - RNA, 16 nt, Human
caaccaugucauuuca

SEQ ID NO: 1267138 - RNA, 22 nt, Human
caaccaugucauuucagaaguu

SEQ ID NO: 1267139 - RNA, 18 nt, Human
caaccauuauaaccuuaa

SEQ ID NO: 1267140 - RNA, 22 nt, Human
caaccauuauaaccuuaauuua

SEQ ID NO: 1267141 - RNA, 13 nt, Human
caaccauuccaga

SEQ ID NO: 1267142 - RNA, 14 nt, Human
caaccauuccagac

SEQ ID NO: 1267143 - RNA, 16 nt, Human
caaccauuccagacug

SEQ ID NO: 1267144 - RNA, 22 nt, Human
caaccauuccagacugcuucca

SEQ ID NO: 1267145 - RNA, 17 nt, Human
caaaccacuuuuugcag

SEQ ID NO: 1267146 - RNA, 19 nt, Human
caaaccacgccucuugacc

SEQ ID NO: 1267147 - RNA, 22 nt, Human
caaaccacgccucuugaccagg

SEQ ID NO: 1267148 - RNA, 16 nt, Human
caaaaguuacauguuu

SEQ ID NO: 1267149 - RNA, 17 nt, Human
caaaccacgccucuuga

SEQ ID NO: 1267150 - RNA, 19 nt, Human
caaaccacuuuuugcagcu

SEQ ID NO: 1267151 - RNA, 20 nt, Human
caaaccacuuuuugcagcuu

SEQ ID NO: 1267152 - RNA, 18 nt, Human
caaaaguuacauguuugc

SEQ ID NO: 1267153 - RNA, 22 nt, Human
caaaagcccauucauuccauuc

SEQ ID NO: 1267154 - RNA, 20 nt, Human
caaaagcccauucauuccau

SEQ ID NO: 1267155 - RNA, 21 nt, Human
caaaagcuauuuaaagcaucu

SEQ ID NO: 1267156 - RNA, 23 nt, Human
caaaagcgugagcuuaaaauaca

SEQ ID NO: 1267157 - RNA, 17 nt, Human
auuuuuuuuuccuagcc

SEQ ID NO: 1267158 - RNA, 14 nt, Human
caaaaaaaaauaca

SEQ ID NO: 1267159 - RNA, 22 nt, Human
caaaaaaaaauuuuaaagaccc

SEQ ID NO: 1267160 - RNA, 21 nt, Human
caaaaaaaaauuuuaaagacc

SEQ ID NO: 1267161 - RNA, 22 nt, Human
auuuuuaauuaauugggccagc

SEQ ID NO: 1267162 - RNA, 17 nt, Human
auuuuuacaauguaauu

SEQ ID NO: 1267163 - RNA, 18 nt, Human
auuuuuacaauguaauua

SEQ ID NO: 1267164 - RNA, 19 nt, Human
auuuuuacaauguaauuau

SEQ ID NO: 1267165 - RNA, 14 nt, Human
auuuuuacagaauu

SEQ ID NO: 1267166 - RNA, 16 nt, Human
auuuuuacagaauugc

SEQ ID NO: 1267167 - RNA, 22 nt, Human
auuuuuacagaauugcuuguuu

SEQ ID NO: 1267168 - RNA, 16 nt, Human
auuuuuacauucugaa

SEQ ID NO: 1267169 - RNA, 17 nt, Human
auuuuuacauucugaau

SEQ ID NO: 1267170 - RNA, 17 nt, Human
auuuuuacaucuaaacu

SEQ ID NO: 1267171 - RNA, 11 nt, Human
auuuuuaccag

SEQ ID NO: 1267172 - RNA, 12 nt, Human
auuuuuaccagu

SEQ ID NO: 1267173 - RNA, 17 nt, Human
auuuuauagcuacuaau

SEQ ID NO: 1267174 - RNA, 23 nt, Human
auuuuauaugcuuacugauauau

SEQ ID NO: 1267175 - RNA, 18 nt, Human
auuuuauauuacacuaca

SEQ ID NO: 1267176 - RNA, 15 nt, Human
auuuuauauuacacu

SEQ ID NO: 1267177 - RNA, 20 nt, Human
auuuguuucuuucucugagg

SEQ ID NO: 1267178 - RNA, 14 nt, Human
auuuugaguugcca

SEQ ID NO: 1267179 - RNA, 22 nt, Human
auuuuaucugccucucuuguaa

SEQ ID NO: 1267180 - RNA, 21 nt, Human
auuuuaucugccucucuugua

SEQ ID NO: 1267181 - RNA, 20 nt, Human
auuuuaucccucaccuguag

SEQ ID NO: 1267182 - RNA, 23 nt, Human
auuuucuugauguagcagaauau

SEQ ID NO: 1267183 - RNA, 14 nt, Human
auuuucuuucaaaa

SEQ ID NO: 1267184 - RNA, 16 nt, Human
auuuucuuucuguaac

SEQ ID NO: 1267185 - RNA, 23 nt, Human
auuuucuuuguguagcuuugcuc

SEQ ID NO: 1267186 - RNA, 24 nt, Human
auuuugacauaaaguugauaaaga

SEQ ID NO: 1267187 - RNA, 22 nt, Human
auuuugagaaagucuuauuuau

SEQ ID NO: 1267188 - RNA, 17 nt, Human
auuuugacauaaaguug

SEQ ID NO: 1267189 - RNA, 20 nt, Human
cacugaacuuugcugagccu

SEQ ID NO: 1267190 - RNA, 11 nt, Human
cacugaagaag

SEQ ID NO: 1267191 - RNA, 16 nt, Human
cacugaaaaaauauau

SEQ ID NO: 1267192 - RNA, 17 nt, Human
cacugaaaaaauauaug

SEQ ID NO: 1267193 - RNA, 20 nt, Human
cacugaaaaaucuaagugau

SEQ ID NO: 1267194 - RNA, 23 nt, Human
cacugaaaaaucuaagugauaua

SEQ ID NO: 1267195 - RNA, 17 nt, Human
cacucuugaaaaaugca

SEQ ID NO: 1267196 - RNA, 14 nt, Human
cacucuuaugcugu

SEQ ID NO: 1267197 - RNA, 18 nt, Human
cacucuuaugcuguaccc

SEQ ID NO: 1267198 - RNA, 19 nt, Human
cacucuuaugcuguaccca

SEQ ID NO: 1267199 - RNA, 21 nt, Human
cacucuuaugcuguacccagu

SEQ ID NO: 1267200 - RNA, 18 nt, Human
cacuccccgaagucuuuu

SEQ ID NO: 1267201 - RNA, 19 nt, Human
cacuccccgaagucuuuug

SEQ ID NO: 1267202 - RNA, 15 nt, Human
cacuagccucagggg

SEQ ID NO: 1267203 - RNA, 19 nt, Human
cacuagccucaggggucug

SEQ ID NO: 1267204 - RNA, 13 nt, Human
cacuacugacaug

SEQ ID NO: 1267205 - RNA, 15 nt, Human
cacuacugacaugug

SEQ ID NO: 1267206 - RNA, 22 nt, Human
cacuagcucuuguugagccgug

SEQ ID NO: 1267207 - RNA, 17 nt, Human
cacuaggcccccacuug

SEQ ID NO: 1267208 - RNA, 20 nt, Human
cacuaggcccccacuugccu

SEQ ID NO: 1267209 - RNA, 21 nt, Human
cacuaggcccccacuugccuc

SEQ ID NO: 1267210 - RNA, 22 nt, Human
cacuaggcccccacuugccucu

SEQ ID NO: 1267211 - RNA, 23 nt, Human
cacuaggcccccacuugccucuu

SEQ ID NO: 1267212 - RNA, 22 nt, Human
cacucccaccugacacaccagg

SEQ ID NO: 1267213 - RNA, 23 nt, Human
cacucccaccugacacaccaggc

SEQ ID NO: 1267214 - RNA, 12 nt, Human
cacuagcucuug

SEQ ID NO: 1267215 - RNA, 15 nt, Human
cacuccccaaccccc

SEQ ID NO: 1267216 - RNA, 14 nt, Human
cacuccccacaucc

SEQ ID NO: 1267217 - RNA, 13 nt, Human
cacggcagccaca

SEQ ID NO: 1267218 - RNA, 20 nt, Human
cacggcaccugggcccuggg

SEQ ID NO: 1267219 - RNA, 21 nt, Human
cacggcaccugggcccugggg

SEQ ID NO: 1267220 - RNA, 17 nt, Human
cacggauuugugucugu

SEQ ID NO: 1267221 - RNA, 17 nt, Human
cacggcaaaggaagacg

SEQ ID NO: 1267222 - RNA, 19 nt, Human
cacggcaccugggcccugg

SEQ ID NO: 1267223 - RNA, 23 nt, Human
cacggagucguggggugugcugg

SEQ ID NO: 1267224 - RNA, 12 nt, Human
cacuacacccag

SEQ ID NO: 1267225 - RNA, 13 nt, Human
cacuacaaccucc

SEQ ID NO: 1267226 - RNA, 14 nt, Human
cacuacaaccuccg

SEQ ID NO: 1267227 - RNA, 11 nt, Human
cacuaauucau

SEQ ID NO: 1267228 - RNA, 12 nt, Human
cacuaauucaua

SEQ ID NO: 1267229 - RNA, 22 nt, Human
cacuaauucauuaaucugccuc

SEQ ID NO: 1267230 - RNA, 20 nt, Human
cacggcagccacagcuuggg

SEQ ID NO: 1267231 - RNA, 22 nt, Human
cacggcaccugggcccuggggc

SEQ ID NO: 1267232 - RNA, 16 nt, Human
cacuaauauauuuaaa

SEQ ID NO: 1267233 - RNA, 17 nt, Human
cacuaauauauuuaaaa

SEQ ID NO: 1267234 - RNA, 19 nt, Human
cacuaauauauuuaaaaau

SEQ ID NO: 1267235 - RNA, 20 nt, Human
cacuaauauauuuaaaaaua

SEQ ID NO: 1267236 - RNA, 21 nt, Human
cacuaauauauuuaaaaauaa

SEQ ID NO: 1267237 - RNA, 23 nt, Human
cacuacgccuggcugauuuuugu

SEQ ID NO: 1267238 - RNA, 18 nt, Human
cacuacacccagcaauag

SEQ ID NO: 1267239 - RNA, 17 nt, Human
cacuacacccagcaaua

SEQ ID NO: 1267240 - RNA, 16 nt, Human
cacuacacccagcaau

SEQ ID NO: 1267241 - RNA, 15 nt, Human
cacuacacccagcaa

SEQ ID NO: 1267242 - RNA, 14 nt, Human
cacuacacccagca

SEQ ID NO: 1267243 - RNA, 13 nt, Human
cacuacucagcau

SEQ ID NO: 1267244 - RNA, 14 nt, Human
cacuacucagcaug

SEQ ID NO: 1267245 - RNA, 20 nt, Human
caccuaccaccacgcccggc

SEQ ID NO: 1267246 - RNA, 18 nt, Human
caccuaccgaguucaagu

SEQ ID NO: 1267247 - RNA, 18 nt, Human
caccuacucacacaggca

SEQ ID NO: 1267248 - RNA, 19 nt, Human
caccuaugucauuucauuu

SEQ ID NO: 1267249 - RNA, 20 nt, Human
caccuaugucauuucauuuc

SEQ ID NO: 1267250 - RNA, 23 nt, Human
caccuaugucauuucauuuccua

SEQ ID NO: 1267251 - RNA, 17 nt, Human
caccuacucacacaggc

SEQ ID NO: 1267252 - RNA, 15 nt, Human
caccuauuaucccag

SEQ ID NO: 1267253 - RNA, 17 nt, Human
caccuauuaucccagcu

SEQ ID NO: 1267254 - RNA, 18 nt, Human
caccuauuaucccagcug

SEQ ID NO: 1267255 - RNA, 19 nt, Human
caccuauuaucccagcugc

SEQ ID NO: 1267256 - RNA, 21 nt, Human
caccuauuaucccagcugccu

SEQ ID NO: 1267257 - RNA, 13 nt, Human
caccuauuuccau

SEQ ID NO: 1267258 - RNA, 21 nt, Human
caccuacaugagguacugaga

SEQ ID NO: 1267259 - RNA, 17 nt, Human
caccuaauccaggcaga

SEQ ID NO: 1267260 - RNA, 14 nt, Human
caccguugucucau

SEQ ID NO: 1267261 - RNA, 19 nt, Human
caccguugucucaugccag

SEQ ID NO: 1267262 - RNA, 12 nt, Human
caccuaaagaaa

SEQ ID NO: 1267263 - RNA, 13 nt, Human
caccuaaagaaaa

SEQ ID NO: 1267264 - RNA, 17 nt, Human
caccuaaagaaaaacaa

SEQ ID NO: 1267265 - RNA, 15 nt, Human
caccuaacucuucuu

SEQ ID NO: 1267266 - RNA, 14 nt, Human
caccguucauucag

SEQ ID NO: 1267267 - RNA, 13 nt, Human
caccguucugugc

SEQ ID NO: 1267268 - RNA, 14 nt, Human
caccguucugugca

SEQ ID NO: 1267269 - RNA, 15 nt, Human
caccguucugugcac

SEQ ID NO: 1267270 - RNA, 13 nt, Human
caccguugucuca

SEQ ID NO: 1267271 - RNA, 14 nt, Human
caccuuuauucugg

SEQ ID NO: 1267272 - RNA, 14 nt, Human
caccuuuaaagugu

SEQ ID NO: 1267273 - RNA, 14 nt, Human
caccuuuagguucu

SEQ ID NO: 1267274 - RNA, 15 nt, Human
caccuuuagguucuu

SEQ ID NO: 1267275 - RNA, 23 nt, Human
caccuugcuccuccuucugcugc

SEQ ID NO: 1267276 - RNA, 23 nt, Human
caccuugugcuggggacaggucc

SEQ ID NO: 1267277 - RNA, 22 nt, Human
caccuuggacauccuccuccca

SEQ ID NO: 1267278 - RNA, 17 nt, Human
caccuuggcaccagaca

SEQ ID NO: 1267279 - RNA, 16 nt, Human
caccuuggacauccuc

SEQ ID NO: 1267280 - RNA, 17 nt, Human
caccuuggacauccucc

SEQ ID NO: 1267281 - RNA, 18 nt, Human
caccuuggacauccuccu

SEQ ID NO: 1267282 - RNA, 21 nt, Human
caccuuggacauccuccuccc

SEQ ID NO: 1267283 - RNA, 16 nt, Human
cagaaguuugcacuau

SEQ ID NO: 1267284 - RNA, 18 nt, Human
cagaaguuugcacuaucu

SEQ ID NO: 1267285 - RNA, 22 nt, Human
cagaaguuugcacuaucuuuca

SEQ ID NO: 1267286 - RNA, 15 nt, Human
cagaauaaguuauug

SEQ ID NO: 1267287 - RNA, 17 nt, Human
cagaauaaguuauugca

SEQ ID NO: 1267288 - RNA, 18 nt, Human
cagaauaaguuauugcag

SEQ ID NO: 1267289 - RNA, 19 nt, Human
cagaauaaguuauugcagu

SEQ ID NO: 1267290 - RNA, 20 nt, Human
cagaauaaguuauugcaguu

SEQ ID NO: 1267291 - RNA, 22 nt, Human
cagaauauuagugaccucagcu

SEQ ID NO: 1267292 - RNA, 21 nt, Human
cagaauaaguuauugcaguuu

SEQ ID NO: 1267293 - RNA, 23 nt, Human
cagaauaaguuauugcaguuuau

SEQ ID NO: 1267294 - RNA, 15 nt, Human
cagaauacauacaaa

SEQ ID NO: 1267295 - RNA, 15 nt, Human
cagaauagccacauu

SEQ ID NO: 1267296 - RNA, 21 nt, Human
cagaauagccacauuuggaau

SEQ ID NO: 1267297 - RNA, 22 nt, Human
cagaauagccacauuuggaaua

SEQ ID NO: 1267298 - RNA, 14 nt, Human
cagaauaguauuuu

SEQ ID NO: 1267299 - RNA, 17 nt, Human
cagaauaucacagaaaa

SEQ ID NO: 1267300 - RNA, 13 nt, Human
cagaauaugucag

SEQ ID NO: 1267301 - RNA, 15 nt, Human
cagaacacauaauuc

SEQ ID NO: 1267302 - RNA, 19 nt, Human
cagaacacauuucaaauga

SEQ ID NO: 1267303 - RNA, 16 nt, Human
cagaacaaaugaagac

SEQ ID NO: 1267304 - RNA, 14 nt, Human
cagaacaaaugaag

SEQ ID NO: 1267305 - RNA, 12 nt, Human
cagaacaaauga

SEQ ID NO: 1267306 - RNA, 21 nt, Human
cagaaauuguauauuguaauu

SEQ ID NO: 1267307 - RNA, 22 nt, Human
cagaaauuguauauuguaauuu

SEQ ID NO: 1267308 - RNA, 17 nt, Human
cagaaauuuaauucaga

SEQ ID NO: 1267309 - RNA, 15 nt, Human
cagaaguuucucagc

SEQ ID NO: 1267310 - RNA, 19 nt, Human
cagaaguuaguuuguauau

SEQ ID NO: 1267311 - RNA, 18 nt, Human
cagaaguuaguuuguaua

SEQ ID NO: 1267312 - RNA, 13 nt, Human
cagaagugugacu

SEQ ID NO: 1267313 - RNA, 17 nt, Human
cagaagugugacuggcu

SEQ ID NO: 1267314 - RNA, 16 nt, Human
cagaaguuaguuugua

SEQ ID NO: 1267315 - RNA, 13 nt, Human
cagaagucuuuca

SEQ ID NO: 1267316 - RNA, 17 nt, Human
cagaagucuuucagcaa

SEQ ID NO: 1267317 - RNA, 12 nt, Human
cagaagugcauc

SEQ ID NO: 1267318 - RNA, 14 nt, Human
cagaagugcaucug

SEQ ID NO: 1267319 - RNA, 16 nt, Human
cagaaauucaauuugg

SEQ ID NO: 1267320 - RNA, 20 nt, Human
cagaaauucaauuuggauuu

SEQ ID NO: 1267321 - RNA, 12 nt, Human
cagaaauuguau

SEQ ID NO: 1267322 - RNA, 13 nt, Human
cagaaauuguaua

SEQ ID NO: 1267323 - RNA, 14 nt, Human
cagaaauuguauau

SEQ ID NO: 1267324 - RNA, 15 nt, Human
cagaaauuguauauu

SEQ ID NO: 1267325 - RNA, 16 nt, Human
cagaaauuguauauug

SEQ ID NO: 1267326 - RNA, 18 nt, Human
cagaaauuguauauugua

SEQ ID NO: 1267327 - RNA, 19 nt, Human
cagaaauuguauauuguaa

SEQ ID NO: 1267328 - RNA, 22 nt, Human
cacuguuucacuacucagcaug

SEQ ID NO: 1267329 - RNA, 21 nt, Human
cacuguuucacuacucagcau

SEQ ID NO: 1267330 - RNA, 21 nt, Human
cacuguuuauacacuguguaa

SEQ ID NO: 1267331 - RNA, 19 nt, Human
cacuguuuauacacugugu

SEQ ID NO: 1267332 - RNA, 20 nt, Human
cacuguuuagaacacacaca

SEQ ID NO: 1267333 - RNA, 17 nt, Human
cacuuagaaauugcauu

SEQ ID NO: 1267334 - RNA, 19 nt, Human
cacuuagaaauugcauuuc

SEQ ID NO: 1267335 - RNA, 16 nt, Human
cacuuacuugcuuauu

SEQ ID NO: 1267336 - RNA, 21 nt, Human
cacuuacuuuuucuggucucu

SEQ ID NO: 1267337 - RNA, 15 nt, Human
cacuuacugguagga

SEQ ID NO: 1267338 - RNA, 21 nt, Human
cacuuacugguaggaccaagc

SEQ ID NO: 1267339 - RNA, 20 nt, Human
cacuuggucugugagaugcu

SEQ ID NO: 1267340 - RNA, 20 nt, Human
cacuuagaaauugcauuucc

SEQ ID NO: 1267341 - RNA, 12 nt, Human
cacuuguacaaa

SEQ ID NO: 1267342 - RNA, 17 nt, Human
cacuuguacaaaauaaa

SEQ ID NO: 1267343 - RNA, 20 nt, Human
cacuuguaauuuuguaucuu

SEQ ID NO: 1267344 - RNA, 19 nt, Human
cacuuguccuuagccugga

SEQ ID NO: 1267345 - RNA, 20 nt, Human
cacuuguccuuagccuggac

SEQ ID NO: 1267346 - RNA, 21 nt, Human
cacuuguccuuagccuggacc

SEQ ID NO: 1267347 - RNA, 22 nt, Human
cacuuguccuuagccuggaccu

SEQ ID NO: 1267348 - RNA, 16 nt, Human
cacuggggaaaacucc

SEQ ID NO: 1267349 - RNA, 18 nt, Human
cacuggggacuuggccuc

SEQ ID NO: 1267350 - RNA, 19 nt, Human
cacuggggacuuggccucu

SEQ ID NO: 1267351 - RNA, 20 nt, Human
cacuggggacuuggccucuc

SEQ ID NO: 1267352 - RNA, 21 nt, Human
cacuggggacuuggccucucu

SEQ ID NO: 1267353 - RNA, 21 nt, Human
cacuggggagcccgucucagu

SEQ ID NO: 1267354 - RNA, 13 nt, Human
cacugguggcccg

SEQ ID NO: 1267355 - RNA, 21 nt, Human
cacugguggcccgacagccug

SEQ ID NO: 1267356 - RNA, 22 nt, Human
cacugguggcccgacagccugg

SEQ ID NO: 1267357 - RNA, 22 nt, Human
cacuggggagcccgucucagug

SEQ ID NO: 1267358 - RNA, 14 nt, Human
cacuggucugcugu

SEQ ID NO: 1267359 - RNA, 15 nt, Human
cacuggucugcuguc

SEQ ID NO: 1267360 - RNA, 16 nt, Human
cacuggucugcuguuc

SEQ ID NO: 1267361 - RNA, 21 nt, Human
cacuggucugcuguuccagug

SEQ ID NO: 1267362 - RNA, 20 nt, Human
cacuggucuguuugcauuug

SEQ ID NO: 1267363 - RNA, 13 nt, Human
cacuggggcaggg

SEQ ID NO: 1267364 - RNA, 15 nt, Human
cacuggggcaggggc

SEQ ID NO: 1267365 - RNA, 19 nt, Human
cacuggggcaggggccggg

SEQ ID NO: 1267366 - RNA, 23 nt, Human
cacuggucacggauuugugucug

SEQ ID NO: 1267367 - RNA, 21 nt, Human
cacuuucaaucuucaauccuu

SEQ ID NO: 1267368 - RNA, 11 nt, Human
cacuuucagcu

SEQ ID NO: 1267369 - RNA, 12 nt, Human
cacuuucagcug

SEQ ID NO: 1267370 - RNA, 13 nt, Human
cacuuucagcugu

SEQ ID NO: 1267371 - RNA, 14 nt, Human
cacuuucagcuguc

SEQ ID NO: 1267372 - RNA, 15 nt, Human
cacuuucagcugucu

SEQ ID NO: 1267373 - RNA, 16 nt, Human
cacuuucagcugucuu

SEQ ID NO: 1267374 - RNA, 17 nt, Human
cacuuucagcugucuuu

SEQ ID NO: 1267375 - RNA, 18 nt, Human
cacuuucagcugucuuuu

SEQ ID NO: 1267376 - RNA, 13 nt, Human
cacuuucccaccc

SEQ ID NO: 1267377 - RNA, 21 nt, Human
cacagggccuuuggcaggugc

SEQ ID NO: 1267378 - RNA, 18 nt, Human
cacagggcaguaccugag

SEQ ID NO: 1267379 - RNA, 21 nt, Human
cacagggcaguaccugagggu

SEQ ID NO: 1267380 - RNA, 20 nt, Human
cacagggagugcacauaucc

SEQ ID NO: 1267381 - RNA, 11 nt, Human
cacagggcagu

SEQ ID NO: 1267382 - RNA, 15 nt, Human
cacagggcaguaccu

SEQ ID NO: 1267383 - RNA, 16 nt, Human
cacagggucugcucuu

SEQ ID NO: 1267384 - RNA, 17 nt, Human
cacagggucugcucuuu

SEQ ID NO: 1267385 - RNA, 19 nt, Human
cacagggucugcucuuucu

SEQ ID NO: 1267386 - RNA, 23 nt, Human
cacagggucugcucuuucucugc

SEQ ID NO: 1267387 - RNA, 21 nt, Human
cacaggucccaaauggcccug

SEQ ID NO: 1267388 - RNA, 12 nt, Human
cacagcuaugaa

SEQ ID NO: 1267389 - RNA, 22 nt, Human
cacagcuaugaaggcuguacac

SEQ ID NO: 1267390 - RNA, 16 nt, Human
cacagcuacucucccc

SEQ ID NO: 1267391 - RNA, 19 nt, Human
cacagacagggucaaagug

SEQ ID NO: 1267392 - RNA, 21 nt, Human
cacagcggagguguggagccg

SEQ ID NO: 1267393 - RNA, 19 nt, Human
cacagaagugcuuucuucu

SEQ ID NO: 1267394 - RNA, 14 nt, Human
cacaggucccaaau

SEQ ID NO: 1267395 - RNA, 13 nt, Human
cacaggucuagac

SEQ ID NO: 1267396 - RNA, 14 nt, Human
cacaggucuagacu

SEQ ID NO: 1267397 - RNA, 16 nt, Human
cacaguagucuugaug

SEQ ID NO: 1267398 - RNA, 12 nt, Human
cacaucccuggg

SEQ ID NO: 1267399 - RNA, 22 nt, Human
cacaucccugggccugcugcug

SEQ ID NO: 1267400 - RNA, 13 nt, Human
cacaucccugggc

SEQ ID NO: 1267401 - RNA, 14 nt, Human
cacaucccugggcc

SEQ ID NO: 1267402 - RNA, 15 nt, Human
cacaucccugggccu

SEQ ID NO: 1267403 - RNA, 16 nt, Human
cacaucccugggccug

SEQ ID NO: 1267404 - RNA, 17 nt, Human
cacaucccugggccugc

SEQ ID NO: 1267405 - RNA, 18 nt, Human
cacaucccugggccugcu

SEQ ID NO: 1267406 - RNA, 20 nt, Human
cacaucccugggccugcugc

SEQ ID NO: 1267407 - RNA, 21 nt, Human
cacaucccugggccugcugcu

SEQ ID NO: 1267408 - RNA, 22 nt, Human
cacauccuccacguucugcuca

SEQ ID NO: 1267409 - RNA, 19 nt, Human
cacaucgcagauucucccu

SEQ ID NO: 1267410 - RNA, 17 nt, Human
cacaucuaaccucaucu

SEQ ID NO: 1267411 - RNA, 13 nt, Human
cacauuucuaaaa

SEQ ID NO: 1267412 - RNA, 17 nt, Human
cacauuucuaaaaucuu

SEQ ID NO: 1267413 - RNA, 19 nt, Human
cacauuugcuuuuugugau

SEQ ID NO: 1267414 - RNA, 16 nt, Human
cacauuuggaauacuu

SEQ ID NO: 1267415 - RNA, 17 nt, Human
cacauuuggaauacuuu

SEQ ID NO: 1267416 - RNA, 19 nt, Human
cacauuuggaauacuuuuu

SEQ ID NO: 1267417 - RNA, 21 nt, Human
cacauuugcuuuuugugauau

SEQ ID NO: 1267418 - RNA, 18 nt, Human
cacauuuuccuuuucaaa

SEQ ID NO: 1267419 - RNA, 17 nt, Human
cacauuugucuucuuuc

SEQ ID NO: 1267420 - RNA, 23 nt, Human
cacauuugucuucuuucugucuu

SEQ ID NO: 1267421 - RNA, 15 nt, Human
cacauuuuaaaagug

SEQ ID NO: 1267422 - RNA, 17 nt, Human
cacauuuuuuaggaaau

SEQ ID NO: 1267423 - RNA, 14 nt, Human
caccaaaaaccuau

SEQ ID NO: 1267424 - RNA, 15 nt, Human
caccaaaacugcucc

SEQ ID NO: 1267425 - RNA, 17 nt, Human
caccaggcgcuaauuca

SEQ ID NO: 1267426 - RNA, 23 nt, Human
caccaggcgcuaauucaaggaau

SEQ ID NO: 1267427 - RNA, 21 nt, Human
caccaggcugagguccugauc

SEQ ID NO: 1267428 - RNA, 14 nt, Human
caccagcugugucc

SEQ ID NO: 1267429 - RNA, 15 nt, Human
caccagcugugucca

SEQ ID NO: 1267430 - RNA, 15 nt, Human
caccaggcagccucu

SEQ ID NO: 1267431 - RNA, 13 nt, Human
caccaggccaccu

SEQ ID NO: 1267432 - RNA, 14 nt, Human
caccaggccaccuc

SEQ ID NO: 1267433 - RNA, 15 nt, Human
caccaggccaccucc

SEQ ID NO: 1267434 - RNA, 19 nt, Human
caccaggccaccuccccag

SEQ ID NO: 1267435 - RNA, 22 nt, Human
caccaggccaccuccccagcau

SEQ ID NO: 1267436 - RNA, 18 nt, Human
caccaggcagccucuggg

SEQ ID NO: 1267437 - RNA, 13 nt, Human
caauaaaaauguu

SEQ ID NO: 1267438 - RNA, 17 nt, Human
caauaaaaauguuuaac

SEQ ID NO: 1267439 - RNA, 14 nt, Human
caaguauuagaaua

SEQ ID NO: 1267440 - RNA, 16 nt, Human
caaguagaaucucagu

SEQ ID NO: 1267441 - RNA, 22 nt, Human
caaguagauaggaagaaagaag

SEQ ID NO: 1267442 - RNA, 24 nt, Human
caaguacaaccacacccacacuca

SEQ ID NO: 1267443 - RNA, 19 nt, Human
caaguacaaccacacccac

SEQ ID NO: 1267444 - RNA, 13 nt, Human
caaguagaaucuc

SEQ ID NO: 1267445 - RNA, 23 nt, Human
caaguagaaucucaguugauuuu

SEQ ID NO: 1267446 - RNA, 13 nt, Human
caagauucagcua

SEQ ID NO: 1267447 - RNA, 15 nt, Human
caagacccccagcac

SEQ ID NO: 1267448 - RNA, 17 nt, Human
caagauuauaauauuuu

SEQ ID NO: 1267449 - RNA, 10 nt, Human
caagauuccg

SEQ ID NO: 1267450 - RNA, 18 nt, Human
caagauuccggauccuaa

SEQ ID NO: 1267451 - RNA, 12 nt, Human
caagauucuaga

SEQ ID NO: 1267452 - RNA, 19 nt, Human
caagauuccggauccuaag

SEQ ID NO: 1267453 - RNA, 22 nt, Human
caagauuccggauccuaagcau

SEQ ID NO: 1267454 - RNA, 20 nt, Human
caaguauuagaauaccacag

SEQ ID NO: 1267455 - RNA, 17 nt, Human
caaguucuaagauucua

SEQ ID NO: 1267456 - RNA, 18 nt, Human
caaguucuaagauucuaa

SEQ ID NO: 1267457 - RNA, 20 nt, Human
caaguucuaagauucuaaug

SEQ ID NO: 1267458 - RNA, 21 nt, Human
caaguucuaagauucuaauga

SEQ ID NO: 1267459 - RNA, 19 nt, Human
caaguugaggacuucuugc

SEQ ID NO: 1267460 - RNA, 15 nt, Human
caaguugcuaauaca

SEQ ID NO: 1267461 - RNA, 15 nt, Human
caaguuggagucacu

SEQ ID NO: 1267462 - RNA, 13 nt, Human
caaguuggaguca

SEQ ID NO: 1267463 - RNA, 19 nt, Human
caaguugugccaaauuauu

SEQ ID NO: 1267464 - RNA, 18 nt, Human
caaguugugcuugagcca

SEQ ID NO: 1267465 - RNA, 18 nt, Human
caaguugugccaaauuau

SEQ ID NO: 1267466 - RNA, 21 nt, Human
caaguuguuccuuaagucaga

SEQ ID NO: 1267467 - RNA, 22 nt, Human
caaguuguuccuuaagucagaa

SEQ ID NO: 1267468 - RNA, 19 nt, Human
caaguuguucgggccaagg

SEQ ID NO: 1267469 - RNA, 16 nt, Human
cacaagacugcacauc

SEQ ID NO: 1267470 - RNA, 11 nt, Human
cacaagacuga

SEQ ID NO: 1267471 - RNA, 20 nt, Human
cacaagacugacgccagggu

SEQ ID NO: 1267472 - RNA, 18 nt, Human
cacaagacugcacaucaa

SEQ ID NO: 1267473 - RNA, 15 nt, Human
cacaagauugguguu

SEQ ID NO: 1267474 - RNA, 17 nt, Human
cacaagauugguguuuu

SEQ ID NO: 1267475 - RNA, 22 nt, Human
cacaagauugguguuuuuuucu

SEQ ID NO: 1267476 - RNA, 23 nt, Human
cacaagauugguguuuuuuucua

SEQ ID NO: 1267477 - RNA, 12 nt, Human
caauuuaaaaaa

SEQ ID NO: 1267478 - RNA, 22 nt, Human
cacaagccucugcccaggcacu

SEQ ID NO: 1267479 - RNA, 12 nt, Human
cacaagccugag

SEQ ID NO: 1267480 - RNA, 13 nt, Human
cacaagccugagg

SEQ ID NO: 1267481 - RNA, 15 nt, Human
cacaagccugaggga

SEQ ID NO: 1267482 - RNA, 15 nt, Human
cacaagccucugccc

SEQ ID NO: 1267483 - RNA, 20 nt, Human
cacaagccucugcccaggca

SEQ ID NO: 1267484 - RNA, 12 nt, Human
caauauuucaga

SEQ ID NO: 1267485 - RNA, 20 nt, Human
caauauuucagauaaucaca

SEQ ID NO: 1267486 - RNA, 21 nt, Human
caauauuucagauaaucacaa

SEQ ID NO: 1267487 - RNA, 14 nt, Human
caaugcuguauuuu

SEQ ID NO: 1267488 - RNA, 15 nt, Human
caaugcuguauuuua

SEQ ID NO: 1267489 - RNA, 17 nt, Human
caauucuucccuaucuu

SEQ ID NO: 1267490 - RNA, 15 nt, Human
caauuguguagccuu

SEQ ID NO: 1267491 - RNA, 20 nt, Human
caauucuucccuaucuuugc

SEQ ID NO: 1267492 - RNA, 16 nt, Human
caauuguguagccuuu

SEQ ID NO: 1267493 - RNA, 17 nt, Human
caauuguguagccuuuu

SEQ ID NO: 1267494 - RNA, 20 nt, Human
caauuguguagccuuuuugu

SEQ ID NO: 1267495 - RNA, 18 nt, Human
caauuguguagccuuuuu

SEQ ID NO: 1267496 - RNA, 19 nt, Human
caauucuccugccucagcc

SEQ ID NO: 1267497 - RNA, 17 nt, Human
caauucuccugccucag

SEQ ID NO: 1267498 - RNA, 14 nt, Human
caauggaccggaga

SEQ ID NO: 1267499 - RNA, 12 nt, Human
ccaucccugcgu

SEQ ID NO: 1267500 - RNA, 13 nt, Human
ccaucccuggccc

SEQ ID NO: 1267501 - RNA, 16 nt, Human
ccaucccuggcccccu

SEQ ID NO: 1267502 - RNA, 19 nt, Human
ccaucccuggcccccuccc

SEQ ID NO: 1267503 - RNA, 23 nt, Human
ccaucccuggcccccucccugga

SEQ ID NO: 1267504 - RNA, 22 nt, Human
ccaucccuggcccccucccugg

SEQ ID NO: 1267505 - RNA, 17 nt, Human
ccauccuacccccugug

SEQ ID NO: 1267506 - RNA, 13 nt, Human
ccaguuugcuuug

SEQ ID NO: 1267507 - RNA, 20 nt, Human
ccaguuuggguaaaauacuu

SEQ ID NO: 1267508 - RNA, 22 nt, Human
ccaguuuggguaaaauacuuuu

SEQ ID NO: 1267509 - RNA, 14 nt, Human
ccaguuuuuauuaa

SEQ ID NO: 1267510 - RNA, 13 nt, Human
ccauacauuugug

SEQ ID NO: 1267511 - RNA, 14 nt, Human
ccauacauuugugu

SEQ ID NO: 1267512 - RNA, 20 nt, Human
ccauaauuuuuuuuuuccuu

SEQ ID NO: 1267513 - RNA, 13 nt, Human
ccauaacugaaca

SEQ ID NO: 1267514 - RNA, 11 nt, Human
ccauugaaggc

SEQ ID NO: 1267515 - RNA, 12 nt, Human
ccauugaaggcu

SEQ ID NO: 1267516 - RNA, 17 nt, Human
ccauugaaggcuuaaac

SEQ ID NO: 1267517 - RNA, 21 nt, Human
ccauugaaggcuuaaacccau

SEQ ID NO: 1267518 - RNA, 13 nt, Human
ccauugaauucuu

SEQ ID NO: 1267519 - RNA, 22 nt, Human
ccauugaauucuugguugagga

SEQ ID NO: 1267520 - RNA, 24 nt, Human
ccauugaggcuugguuccuuccca

SEQ ID NO: 1267521 - RNA, 19 nt, Human
ccauuuaaauuuuuuuccu

SEQ ID NO: 1267522 - RNA, 20 nt, Human
ccauuuaauggggaggacaa

SEQ ID NO: 1267523 - RNA, 17 nt, Human
ccauuuacauguuuuaa

SEQ ID NO: 1267524 - RNA, 20 nt, Human
ccauuuacauguuuuaaaga

SEQ ID NO: 1267525 - RNA, 22 nt, Human
ccauuuacauguuuuaaagaaa

SEQ ID NO: 1267526 - RNA, 16 nt, Human
ccauuuagguuucuga

SEQ ID NO: 1267527 - RNA, 21 nt, Human
ccauuuagguuucugaguucc

SEQ ID NO: 1267528 - RNA, 11 nt, Human
ccauuucuaau

SEQ ID NO: 1267529 - RNA, 12 nt, Human
ccauuucuaauu

SEQ ID NO: 1267530 - RNA, 13 nt, Human
ccauuucuaauua

SEQ ID NO: 1267531 - RNA, 14 nt, Human
ccauuucuaauuau

SEQ ID NO: 1267532 - RNA, 21 nt, Human
ccauuucuaauuauguagcuc

SEQ ID NO: 1267533 - RNA, 23 nt, Human
ccauuucuaauuauguagcucuu

SEQ ID NO: 1267534 - RNA, 17 nt, Human
ccaguauuuaacuucug

SEQ ID NO: 1267535 - RNA, 22 nt, Human
ccaguauuuaacuucugaggaa

SEQ ID NO: 1267536 - RNA, 17 nt, Human
ccaguauuuagaagcca

SEQ ID NO: 1267537 - RNA, 18 nt, Human
ccaguauuuagaagccaa

SEQ ID NO: 1267538 - RNA, 14 nt, Human
ccagucaaccuggg

SEQ ID NO: 1267539 - RNA, 15 nt, Human
ccagggggcaagagg

SEQ ID NO: 1267540 - RNA, 22 nt, Human
ccaggggcucccuccgccccca

SEQ ID NO: 1267541 - RNA, 14 nt, Human
ccagucccccugcc

SEQ ID NO: 1267542 - RNA, 17 nt, Human
ccaguccccccacccuc

SEQ ID NO: 1267543 - RNA, 15 nt, Human
ccaguccccccaccc

SEQ ID NO: 1267544 - RNA, 23 nt, Human
ccagggggagcugggccuggucu

SEQ ID NO: 1267545 - RNA, 14 nt, Human
ccaguauuuuaaaa

SEQ ID NO: 1267546 - RNA, 14 nt, Human
ccagucaggcccag

SEQ ID NO: 1267547 - RNA, 17 nt, Human
ccaggcaacuugggaac

SEQ ID NO: 1267548 - RNA, 12 nt, Human
ccaggcaaggcu

SEQ ID NO: 1267549 - RNA, 22 nt, Human
ccaggauguacaaggacagccc

SEQ ID NO: 1267550 - RNA, 16 nt, Human
ccaggauggcgcagga

SEQ ID NO: 1267551 - RNA, 17 nt, Human
ccaggauggcgcaggaa

SEQ ID NO: 1267552 - RNA, 19 nt, Human
ccaggaguggguggggagu

SEQ ID NO: 1267553 - RNA, 18 nt, Human
ccaggaggugccacugga

SEQ ID NO: 1267554 - RNA, 21 nt, Human
ccaggaggugccacuggagug

SEQ ID NO: 1267555 - RNA, 19 nt, Human
ccaggaggugccacuggag

SEQ ID NO: 1267556 - RNA, 14 nt, Human
ccaggcaaggcugu

SEQ ID NO: 1267557 - RNA, 15 nt, Human
ccaggcaaggcugug

SEQ ID NO: 1267558 - RNA, 16 nt, Human
ccaggcaaggcugugg

SEQ ID NO: 1267559 - RNA, 11 nt, Human
ccaggcuggga

SEQ ID NO: 1267560 - RNA, 15 nt, Human
ccaggggcucccucc

SEQ ID NO: 1267561 - RNA, 16 nt, Human
ccaggggcucccuccg

SEQ ID NO: 1267562 - RNA, 20 nt, Human
ccaggggcugcuuccuccug

SEQ ID NO: 1267563 - RNA, 21 nt, Human
ccaggggcugcuuccuccugg

SEQ ID NO: 1267564 - RNA, 22 nt, Human
ccaggggcugcuuccuccugga

SEQ ID NO: 1267565 - RNA, 23 nt, Human
ccaggggcugcuuccuccuggaa

SEQ ID NO: 1267566 - RNA, 22 nt, Human
ccaggagggacaaaggagccug

SEQ ID NO: 1267567 - RNA, 23 nt, Human
ccaggagggacaaaggagccugu

SEQ ID NO: 1267568 - RNA, 24 nt, Human
ccaggagggacaaaggagccugug

SEQ ID NO: 1267569 - RNA, 15 nt, Human
ccagcuaauuuuugu

SEQ ID NO: 1267570 - RNA, 11 nt, Human
ccagcucagca

SEQ ID NO: 1267571 - RNA, 12 nt, Human
ccagcucagcac

SEQ ID NO: 1267572 - RNA, 15 nt, Human
ccagcucagcacugc

SEQ ID NO: 1267573 - RNA, 13 nt, Human
ccagcucaggaca

SEQ ID NO: 1267574 - RNA, 19 nt, Human
ccagcucaggacagaugcc

SEQ ID NO: 1267575 - RNA, 23 nt, Human
ccagcucaggacagaugccacac

SEQ ID NO: 1267576 - RNA, 20 nt, Human
ccagcucaggacagaugcca

SEQ ID NO: 1267577 - RNA, 19 nt, Human
ccagccccuuagacagagg

SEQ ID NO: 1267578 - RNA, 16 nt, Human
ccagcgucggucugug

SEQ ID NO: 1267579 - RNA, 17 nt, Human
ccagcgucggucugugc

SEQ ID NO: 1267580 - RNA, 19 nt, Human
ccagcgucggucugugccc

SEQ ID NO: 1267581 - RNA, 18 nt, Human
ccagcgucggucugugcc

SEQ ID NO: 1267582 - RNA, 13 nt, Human
ccagcuaagaacc

SEQ ID NO: 1267583 - RNA, 14 nt, Human
ccagcuaagaaccu

SEQ ID NO: 1267584 - RNA, 15 nt, Human
ccagcuaagaaccug

SEQ ID NO: 1267585 - RNA, 17 nt, Human
ccagcuaagaaccugga

SEQ ID NO: 1267586 - RNA, 18 nt, Human
ccagcuaagaaccuggaa

SEQ ID NO: 1267587 - RNA, 19 nt, Human
ccagcuaagaaccuggaac

SEQ ID NO: 1267588 - RNA, 15 nt, Human
ccagcuaaggggugg

SEQ ID NO: 1267589 - RNA, 16 nt, Human
ccagcuaagggguggg

SEQ ID NO: 1267590 - RNA, 18 nt, Human
ccagcuaauaacugaucu

SEQ ID NO: 1267591 - RNA, 13 nt, Human
ccagccccuggcc

SEQ ID NO: 1267592 - RNA, 21 nt, Human
ccagccccuggccccaggacc

SEQ ID NO: 1267593 - RNA, 23 nt, Human
ccagccccuggccccaggaccug

SEQ ID NO: 1267594 - RNA, 19 nt, Human
ccagccccuguagaacuca

SEQ ID NO: 1267595 - RNA, 18 nt, Human
ccagccccuuagacagag

SEQ ID NO: 1267596 - RNA, 18 nt, Human
ccagcuugaaaccuucac

SEQ ID NO: 1267597 - RNA, 20 nt, Human
ccagcuugaaaccuucacuu

SEQ ID NO: 1267598 - RNA, 13 nt, Human
ccagcuuccuuca

SEQ ID NO: 1267599 - RNA, 14 nt, Human
ccagcuuccuucag

SEQ ID NO: 1267600 - RNA, 15 nt, Human
ccagcuuccuucaga

SEQ ID NO: 1267601 - RNA, 23 nt, Human
ccagcuuccuucagagagcagug

SEQ ID NO: 1267602 - RNA, 20 nt, Human
ccagcuuccuucagagagca

SEQ ID NO: 1267603 - RNA, 13 nt, Human
ccagcucagcacu

SEQ ID NO: 1267604 - RNA, 18 nt, Human
ccaggaacagcaaaugca

SEQ ID NO: 1267605 - RNA, 23 nt, Human
ccacucugcucugaugcaucaga

SEQ ID NO: 1267606 - RNA, 23 nt, Human
ccacucuggagcauuucucauca

SEQ ID NO: 1267607 - RNA, 14 nt, Human
ccacucuccuaggc

SEQ ID NO: 1267608 - RNA, 13 nt, Human
ccacucuccuagg

SEQ ID NO: 1267609 - RNA, 13 nt, Human
ccacucugcucug

SEQ ID NO: 1267610 - RNA, 14 nt, Human
ccacucugcucuga

SEQ ID NO: 1267611 - RNA, 15 nt, Human
ccacucugcucugau

SEQ ID NO: 1267612 - RNA, 18 nt, Human
ccacucugcucugaugca

SEQ ID NO: 1267613 - RNA, 13 nt, Human
ccacucugcuucu

SEQ ID NO: 1267614 - RNA, 14 nt, Human
ccacucugcuucuc

SEQ ID NO: 1267615 - RNA, 17 nt, Human
ccacucugcuucucuga

SEQ ID NO: 1267616 - RNA, 19 nt, Human
ccacucugcuucucugacu

SEQ ID NO: 1267617 - RNA, 20 nt, Human
ccacucugcuucucugacuu

SEQ ID NO: 1267618 - RNA, 23 nt, Human
cccaggaaucaguuuaaaagcac

SEQ ID NO: 1267619 - RNA, 22 nt, Human
cccaggaagucucaucugggga

SEQ ID NO: 1267620 - RNA, 21 nt, Human
cccaggacaagcaugguccca

SEQ ID NO: 1267621 - RNA, 16 nt, Human
cccaggacaagcaugg

SEQ ID NO: 1267622 - RNA, 12 nt, Human
cccaggcuggga

SEQ ID NO: 1267623 - RNA, 13 nt, Human
cccaggcugggaa

SEQ ID NO: 1267624 - RNA, 21 nt, Human
cccaggcugggaacucaucug

SEQ ID NO: 1267625 - RNA, 14 nt, Human
cccaggcugggaac

SEQ ID NO: 1267626 - RNA, 22 nt, Human
cccagcugugcuuaugguacca

SEQ ID NO: 1267627 - RNA, 15 nt, Human
cccaggaacugggcc

SEQ ID NO: 1267628 - RNA, 15 nt, Human
cccagcccacccccg

SEQ ID NO: 1267629 - RNA, 13 nt, Human
cccagcccacccc

SEQ ID NO: 1267630 - RNA, 18 nt, Human
cccagcacuuguguuguc

SEQ ID NO: 1267631 - RNA, 21 nt, Human
cccagcacugcuugaggaaaa

SEQ ID NO: 1267632 - RNA, 15 nt, Human
cccagcagcugccag

SEQ ID NO: 1267633 - RNA, 14 nt, Human
cccagcagcugcca

SEQ ID NO: 1267634 - RNA, 19 nt, Human
cccauuuauagauggggga

SEQ ID NO: 1267635 - RNA, 12 nt, Human
cccauuucagcu

SEQ ID NO: 1267636 - RNA, 13 nt, Human
cccauuucagcug

SEQ ID NO: 1267637 - RNA, 14 nt, Human
ccccagcaaagccc

SEQ ID NO: 1267638 - RNA, 22 nt, Human
ccccagcaaagcccccagagcc

SEQ ID NO: 1267639 - RNA, 24 nt, Human
ccccagcaaagcccccagagccca

SEQ ID NO: 1267640 - RNA, 23 nt, Human
cccauaauuuuuuuuuuccuuuu

SEQ ID NO: 1267641 - RNA, 22 nt, Human
cccauaauuuuuuuuuuccuuu

SEQ ID NO: 1267642 - RNA, 23 nt, Human
cccaguuucuaaacuggagacug

SEQ ID NO: 1267643 - RNA, 14 nt, Human
cccagggcuccugc

SEQ ID NO: 1267644 - RNA, 15 nt, Human
cccagggcuccugca

SEQ ID NO: 1267645 - RNA, 13 nt, Human
cccagggcucugu

SEQ ID NO: 1267646 - RNA, 16 nt, Human
cccagggcucuguaag

SEQ ID NO: 1267647 - RNA, 14 nt, Human
cccagggcugggag

SEQ ID NO: 1267648 - RNA, 16 nt, Human
cccagggcugggagga

SEQ ID NO: 1267649 - RNA, 17 nt, Human
cccagggcugggaggaa

SEQ ID NO: 1267650 - RNA, 20 nt, Human
cccagggcugggaggaagga

SEQ ID NO: 1267651 - RNA, 21 nt, Human
cccagggcugggaggaaggac

SEQ ID NO: 1267652 - RNA, 21 nt, Human
cccagggcuguaacugccagg

SEQ ID NO: 1267653 - RNA, 23 nt, Human
cccagggcuguaacugccaggcu

SEQ ID NO: 1267654 - RNA, 19 nt, Human
cccaggggaacacugggga

SEQ ID NO: 1267655 - RNA, 19 nt, Human
cccaguuucuaaacuggag

SEQ ID NO: 1267656 - RNA, 20 nt, Human
cccaguuucuaaacuggaga

SEQ ID NO: 1267657 - RNA, 21 nt, Human
cccaguuucuaaacuggagac

SEQ ID NO: 1267658 - RNA, 22 nt, Human
cccaguuucuaaacuggagacu

SEQ ID NO: 1267659 - RNA, 14 nt, Human
cccucacacuggga

SEQ ID NO: 1267660 - RNA, 13 nt, Human
cccucacacuggg

SEQ ID NO: 1267661 - RNA, 12 nt, Human
cccucacacugg

SEQ ID NO: 1267662 - RNA, 10 nt, Human
cccucacacu

SEQ ID NO: 1267663 - RNA, 15 nt, Human
cccucacacacccug

SEQ ID NO: 1267664 - RNA, 23 nt, Human
cccucaagucuuucucuuucccu

SEQ ID NO: 1267665 - RNA, 14 nt, Human
cccucacacacccu

SEQ ID NO: 1267666 - RNA, 21 nt, Human
cccuaucuuugccacccucau

SEQ ID NO: 1267667 - RNA, 14 nt, Human
cccuaucuguauuc

SEQ ID NO: 1267668 - RNA, 19 nt, Human
cccuaucuuugccacccuc

SEQ ID NO: 1267669 - RNA, 16 nt, Human
cccuaucuuugccacc

SEQ ID NO: 1267670 - RNA, 14 nt, Human
cccuaucuuugcca

SEQ ID NO: 1267671 - RNA, 12 nt, Human
cccggcugcccu

SEQ ID NO: 1267672 - RNA, 13 nt, Human
cccggcugcccuu

SEQ ID NO: 1267673 - RNA, 18 nt, Human
ccccuucuccccugcacu

SEQ ID NO: 1267674 - RNA, 14 nt, Human
ccccuucugcucag

SEQ ID NO: 1267675 - RNA, 19 nt, Human
ccccuucugcucagcucug

SEQ ID NO: 1267676 - RNA, 20 nt, Human
ccccuucugcucagcucugg

SEQ ID NO: 1267677 - RNA, 21 nt, Human
ccccuucugcucagcucuggg

SEQ ID NO: 1267678 - RNA, 18 nt, Human
ccccuugacaacuggcag

SEQ ID NO: 1267679 - RNA, 23 nt, Human
ccccuugacaacuggcaggcagg

SEQ ID NO: 1267680 - RNA, 19 nt, Human
ccccuugaggucucagccc

SEQ ID NO: 1267681 - RNA, 22 nt, Human
ccccuugaggucucagccccuu

SEQ ID NO: 1267682 - RNA, 13 nt, Human
cccucagagccac

SEQ ID NO: 1267683 - RNA, 15 nt, Human
cccucagacuggggc

SEQ ID NO: 1267684 - RNA, 16 nt, Human
cccucagacuggggca

SEQ ID NO: 1267685 - RNA, 19 nt, Human
cccucacuggcucuccugg

SEQ ID NO: 1267686 - RNA, 20 nt, Human
cccucacuggcucuccuggc

SEQ ID NO: 1267687 - RNA, 18 nt, Human
ccccugcaggaaggagcu

SEQ ID NO: 1267688 - RNA, 19 nt, Human
ccccugcaggaaggagcug

SEQ ID NO: 1267689 - RNA, 20 nt, Human
ccccugcaggaaggagcugc

SEQ ID NO: 1267690 - RNA, 21 nt, Human
ccccugcaggaaggagcugcc

SEQ ID NO: 1267691 - RNA, 23 nt, Human
ccccugcaggaaggagcugccug

SEQ ID NO: 1267692 - RNA, 22 nt, Human
ccccugcaggaaggagcugccu

SEQ ID NO: 1267693 - RNA, 21 nt, Human
ccccugcauuggaacuggagg

SEQ ID NO: 1267694 - RNA, 22 nt, Human
ccccugcauuggaacuggaggc

SEQ ID NO: 1267695 - RNA, 18 nt, Human
ccccuucuauuuggggcu

SEQ ID NO: 1267696 - RNA, 12 nt, Human
ccccuucucccc

SEQ ID NO: 1267697 - RNA, 19 nt, Human
ccccuucuccccugcacug

SEQ ID NO: 1267698 - RNA, 18 nt, Human
ccccugcacuccagccug

SEQ ID NO: 1267699 - RNA, 16 nt, Human
ccccugcaaagcccag

SEQ ID NO: 1267700 - RNA, 17 nt, Human
ccccugcaaagcccagc

SEQ ID NO: 1267701 - RNA, 11 nt, Human
ccccugcacug

SEQ ID NO: 1267702 - RNA, 18 nt, Human
ccccugcacuguaaaaug

SEQ ID NO: 1267703 - RNA, 14 nt, Human
ccccugcacuguaa

SEQ ID NO: 1267704 - RNA, 16 nt, Human
ccccugcacuguaaaa

SEQ ID NO: 1267705 - RNA, 17 nt, Human
ccccugcacuguaaaau

SEQ ID NO: 1267706 - RNA, 22 nt, Human
ccccugcagcuuguagccagcc

SEQ ID NO: 1267707 - RNA, 23 nt, Human
ccccugcagcuuguagccagccg

SEQ ID NO: 1267708 - RNA, 14 nt, Human
ccccugcaggaagg

SEQ ID NO: 1267709 - RNA, 15 nt, Human
ccccugcaggaagga

SEQ ID NO: 1267710 - RNA, 15 nt, Human
ccccugcaaagccca

SEQ ID NO: 1267711 - RNA, 20 nt, Human
ccccugaccugugagcccag

SEQ ID NO: 1267712 - RNA, 20 nt, Human
ccccugaccacucagagaca

SEQ ID NO: 1267713 - RNA, 18 nt, Human
ccccugaccacucagaga

SEQ ID NO: 1267714 - RNA, 22 nt, Human
ccccugaccacucagagacaug

SEQ ID NO: 1267715 - RNA, 15 nt, Human
ccccugaccugugag

SEQ ID NO: 1267716 - RNA, 16 nt, Human
ccccauucccgcagug

SEQ ID NO: 1267717 - RNA, 12 nt, Human
ccccaucuugcu

SEQ ID NO: 1267718 - RNA, 14 nt, Human
ccccaucuugcuuc

SEQ ID NO: 1267719 - RNA, 13 nt, Human
ccccaugaccucc

SEQ ID NO: 1267720 - RNA, 16 nt, Human
ccccaugaccuccagc

SEQ ID NO: 1267721 - RNA, 15 nt, Human
ccccaugaccuccag

SEQ ID NO: 1267722 - RNA, 13 nt, Human
ccccaugcacugu

SEQ ID NO: 1267723 - RNA, 19 nt, Human
ccccaugcacugugaagga

SEQ ID NO: 1267724 - RNA, 23 nt, Human
ccccaugcacugugaaggacccu

SEQ ID NO: 1267725 - RNA, 23 nt, Human
ccccauuccugggaaauauuccc

SEQ ID NO: 1267726 - RNA, 23 nt, Human
ccucauggaauuggagcucgugg

SEQ ID NO: 1267727 - RNA, 16 nt, Human
ccucaggacugggagc

SEQ ID NO: 1267728 - RNA, 15 nt, Human
ccucauggccccucu

SEQ ID NO: 1267729 - RNA, 16 nt, Human
ccucauggccccucug

SEQ ID NO: 1267730 - RNA, 17 nt, Human
ccucaggacugggagcc

SEQ ID NO: 1267731 - RNA, 14 nt, Human
ccucaggacuggga

SEQ ID NO: 1267732 - RNA, 15 nt, Human
ccucaggacugggag

SEQ ID NO: 1267733 - RNA, 17 nt, Human
ccucagccuugccagag

SEQ ID NO: 1267734 - RNA, 18 nt, Human
ccucagccuugccagaga

SEQ ID NO: 1267735 - RNA, 19 nt, Human
ccucagccuugccagagau

SEQ ID NO: 1267736 - RNA, 20 nt, Human
ccucagccuugccagagauc

SEQ ID NO: 1267737 - RNA, 21 nt, Human
ccucagccuugccagagaucc

SEQ ID NO: 1267738 - RNA, 13 nt, Human
ccucaggacuggg

SEQ ID NO: 1267739 - RNA, 20 nt, Human
ccucaaaaagauuuccccau

SEQ ID NO: 1267740 - RNA, 14 nt, Human
ccucaaaacaaagg

SEQ ID NO: 1267741 - RNA, 23 nt, Human
ccucaaaauuuaacaguuaccug

SEQ ID NO: 1267742 - RNA, 14 nt, Human
ccucaaagaaagug

SEQ ID NO: 1267743 - RNA, 16 nt, Human
ccucaaagaaagugua

SEQ ID NO: 1267744 - RNA, 21 nt, Human
ccucaaagcaagcauucagaa

SEQ ID NO: 1267745 - RNA, 16 nt, Human
ccucaaaggcccgcuc

SEQ ID NO: 1267746 - RNA, 20 nt, Human
ccucagccuggccagacaca

SEQ ID NO: 1267747 - RNA, 21 nt, Human
ccucagccuggccagacacag

SEQ ID NO: 1267748 - RNA, 22 nt, Human
ccucagccuggccagacacagg

SEQ ID NO: 1267749 - RNA, 12 nt, Human
ccucagccuggg

SEQ ID NO: 1267750 - RNA, 13 nt, Human
ccucagccugggc

SEQ ID NO: 1267751 - RNA, 14 nt, Human
ccucagccugggcg

SEQ ID NO: 1267752 - RNA, 16 nt, Human
ccucagccugggcgcu

SEQ ID NO: 1267753 - RNA, 17 nt, Human
ccucagccugggcgcug

SEQ ID NO: 1267754 - RNA, 20 nt, Human
ccucagccugggcgcugguc

SEQ ID NO: 1267755 - RNA, 21 nt, Human
ccucagccugggcgcuggucc

SEQ ID NO: 1267756 - RNA, 12 nt, Human
ccucagccuuaa

SEQ ID NO: 1267757 - RNA, 18 nt, Human
ccucccauguucaagcga

SEQ ID NO: 1267758 - RNA, 18 nt, Human
ccuccaacccuagcaaaa

SEQ ID NO: 1267759 - RNA, 19 nt, Human
ccuccaacaccaagcacag

SEQ ID NO: 1267760 - RNA, 18 nt, Human
ccucauuuuuuuccuugc

SEQ ID NO: 1267761 - RNA, 17 nt, Human
ccuccaaaaugugccua

SEQ ID NO: 1267762 - RNA, 19 nt, Human
ccuccaaagcuucccacgg

SEQ ID NO: 1267763 - RNA, 22 nt, Human
ccuccaaaaugugccuauugcu

SEQ ID NO: 1267764 - RNA, 15 nt, Human
ccucauguccacugg

SEQ ID NO: 1267765 - RNA, 23 nt, Human
ccucauuuuugaauacaggcaua

SEQ ID NO: 1267766 - RNA, 18 nt, Human
ccucauggccccucugac

SEQ ID NO: 1267767 - RNA, 22 nt, Human
ccucauggccccucugaccugc

SEQ ID NO: 1267768 - RNA, 21 nt, Human
ccucauguacauacccuggcc

SEQ ID NO: 1267769 - RNA, 19 nt, Human
ccuccaacccuagcaaaag

SEQ ID NO: 1267770 - RNA, 17 nt, Human
ccggccccucccccuga

SEQ ID NO: 1267771 - RNA, 14 nt, Human
ccggccugccagga

SEQ ID NO: 1267772 - RNA, 15 nt, Human
ccggccugccaggag

SEQ ID NO: 1267773 - RNA, 18 nt, Human
ccggccugccaggaggac

SEQ ID NO: 1267774 - RNA, 16 nt, Human
ccggccugccaggagg

SEQ ID NO: 1267775 - RNA, 21 nt, Human
cccugucucucagggccaggc

SEQ ID NO: 1267776 - RNA, 22 nt, Human
cccugucucucagggccaggcc

SEQ ID NO: 1267777 - RNA, 18 nt, Human
ccggccccaguacacagg

SEQ ID NO: 1267778 - RNA, 16 nt, Human
ccgcagugggagcaaa

SEQ ID NO: 1267779 - RNA, 17 nt, Human
ccgcagugggagcaaac

SEQ ID NO: 1267780 - RNA, 22 nt, Human
ccugucuuauccuccaccgucu

SEQ ID NO: 1267781 - RNA, 22 nt, Human
ccugucugucugucugucccaa

SEQ ID NO: 1267782 - RNA, 17 nt, Human
ccugucuuauccuccac

SEQ ID NO: 1267783 - RNA, 19 nt, Human
ccugucuucagagaaccca

SEQ ID NO: 1267784 - RNA, 21 nt, Human
ccugucugucugucuguccca

SEQ ID NO: 1267785 - RNA, 20 nt, Human
ccugucugucugucuguccc

SEQ ID NO: 1267786 - RNA, 22 nt, Human
ccugucgauuagacuggacagc

SEQ ID NO: 1267787 - RNA, 15 nt, Human
ccugucucaccugga

SEQ ID NO: 1267788 - RNA, 21 nt, Human
ccugucucucagggccaggcc

SEQ ID NO: 1267789 - RNA, 18 nt, Human
ccugugacuucagcucug

SEQ ID NO: 1267790 - RNA, 15 nt, Human
ccugugaccacaaca

SEQ ID NO: 1267791 - RNA, 18 nt, Human
ccugugaccacaacauga

SEQ ID NO: 1267792 - RNA, 19 nt, Human
ccugugaccacaacaugag

SEQ ID NO: 1267793 - RNA, 16 nt, Human
ccugugaacugaacuc

SEQ ID NO: 1267794 - RNA, 17 nt, Human
ccugugaacugaacucu

SEQ ID NO: 1267795 - RNA, 14 nt, Human
ccugugaacccagg

SEQ ID NO: 1267796 - RNA, 15 nt, Human
ccugugaacccagga

SEQ ID NO: 1267797 - RNA, 16 nt, Human
ccugugaacccaggac

SEQ ID NO: 1267798 - RNA, 17 nt, Human
ccugugaacccaggaca

SEQ ID NO: 1267799 - RNA, 18 nt, Human
ccugugaacccaggacaa

SEQ ID NO: 1267800 - RNA, 16 nt, Human
ccugugaaugccacug

SEQ ID NO: 1267801 - RNA, 17 nt, Human
ccugugaaugccacugc

SEQ ID NO: 1267802 - RNA, 19 nt, Human
ccugugaaugccacugccu

SEQ ID NO: 1267803 - RNA, 21 nt, Human
ccugugaaugccacugccuuc

SEQ ID NO: 1267804 - RNA, 22 nt, Human
ccugugaaugccacugccuucg

SEQ ID NO: 1267805 - RNA, 23 nt, Human
ccugggggccuggcuggcugagg

SEQ ID NO: 1267806 - RNA, 12 nt, Human
ccugggggccug

SEQ ID NO: 1267807 - RNA, 13 nt, Human
ccugggggccugg

SEQ ID NO: 1267808 - RNA, 14 nt, Human
ccugggggccuggc

SEQ ID NO: 1267809 - RNA, 15 nt, Human
ccugggggccuggcu

SEQ ID NO: 1267810 - RNA, 17 nt, Human
ccugggggccuggcugg

SEQ ID NO: 1267811 - RNA, 19 nt, Human
ccugggggccuggcuggcu

SEQ ID NO: 1267812 - RNA, 13 nt, Human
ccuggggccugua

SEQ ID NO: 1267813 - RNA, 14 nt, Human
ccuggggccuguac

SEQ ID NO: 1267814 - RNA, 16 nt, Human
ccuggggccuguacug

SEQ ID NO: 1267815 - RNA, 18 nt, Human
ccuggggccuguacugcc

SEQ ID NO: 1267816 - RNA, 19 nt, Human
ccuggggccuguacugccu

SEQ ID NO: 1267817 - RNA, 20 nt, Human
ccuggggccuguacugccug

SEQ ID NO: 1267818 - RNA, 21 nt, Human
ccuggggccuguacugccugc

SEQ ID NO: 1267819 - RNA, 23 nt, Human
ccuggggccuguacugccugcuu

SEQ ID NO: 1267820 - RNA, 22 nt, Human
ccuggggccuguacugccugcu

SEQ ID NO: 1267821 - RNA, 15 nt, Human
ccugggcccucucug

SEQ ID NO: 1267822 - RNA, 18 nt, Human
ccugggcccucucugcuc

SEQ ID NO: 1267823 - RNA, 14 nt, Human
ccugggcccugggc

SEQ ID NO: 1267824 - RNA, 15 nt, Human
ccugggcccugggcu

SEQ ID NO: 1267825 - RNA, 16 nt, Human
ccugggcccugggcug

SEQ ID NO: 1267826 - RNA, 18 nt, Human
ccugggcccugggcugga

SEQ ID NO: 1267827 - RNA, 19 nt, Human
ccugggcccugggcuggaa

SEQ ID NO: 1267828 - RNA, 14 nt, Human
ccugggcccugggg

SEQ ID NO: 1267829 - RNA, 15 nt, Human
ccugggcccuggggc

SEQ ID NO: 1267830 - RNA, 16 nt, Human
ccugggcccuggggcc

SEQ ID NO: 1267831 - RNA, 17 nt, Human
ccugggcccuggggccu

SEQ ID NO: 1267832 - RNA, 18 nt, Human
ccugggcccuggggccug

SEQ ID NO: 1267833 - RNA, 20 nt, Human
ccugggcccuggggccugua

SEQ ID NO: 1267834 - RNA, 21 nt, Human
ccugggcccuggggccuguac

SEQ ID NO: 1267835 - RNA, 22 nt, Human
ccugggcccuggggccuguacu

SEQ ID NO: 1267836 - RNA, 13 nt, Human
ccugggccgcugc

SEQ ID NO: 1267837 - RNA, 16 nt, Human
ccugggccgcugccac

SEQ ID NO: 1267838 - RNA, 17 nt, Human
ccugggccgcugccacg

SEQ ID NO: 1267839 - RNA, 17 nt, Human
ccugggccuauggagag

SEQ ID NO: 1267840 - RNA, 18 nt, Human
ccugggccuauggagagc

SEQ ID NO: 1267841 - RNA, 19 nt, Human
ccugggccuauggagagcc

SEQ ID NO: 1267842 - RNA, 20 nt, Human
ccugggccuauggagagccc

SEQ ID NO: 1267843 - RNA, 21 nt, Human
ccugggccuauggagagcccu

SEQ ID NO: 1267844 - RNA, 22 nt, Human
ccugggccuauggagagcccug

SEQ ID NO: 1267845 - RNA, 12 nt, Human
ccugggccugca

SEQ ID NO: 1267846 - RNA, 23 nt, Human
ccugggccuauggagagcccugg

SEQ ID NO: 1267847 - RNA, 13 nt, Human
ccugggccugccu

SEQ ID NO: 1267848 - RNA, 15 nt, Human
ccugggccugccuca

SEQ ID NO: 1267849 - RNA, 13 nt, Human
ccugggccugcug

SEQ ID NO: 1267850 - RNA, 14 nt, Human
ccugggccugcugc

SEQ ID NO: 1267851 - RNA, 15 nt, Human
ccugggccugcugcu

SEQ ID NO: 1267852 - RNA, 16 nt, Human
ccugggccugcugcug

SEQ ID NO: 1267853 - RNA, 17 nt, Human
ccugggccugcugcuga

SEQ ID NO: 1267854 - RNA, 18 nt, Human
ccugggccugcugcugag

SEQ ID NO: 1267855 - RNA, 19 nt, Human
ccugggccugcugcugaga

SEQ ID NO: 1267856 - RNA, 20 nt, Human
ccugggccugcugcugagaa

SEQ ID NO: 1267857 - RNA, 13 nt, Human
ccugggccuuggg

SEQ ID NO: 1267858 - RNA, 17 nt, Human
ccugggccuugggcucc

SEQ ID NO: 1267859 - RNA, 15 nt, Human
ccuguaaucacagcu

SEQ ID NO: 1267860 - RNA, 20 nt, Human
ccuguaaucauauaauaaau

SEQ ID NO: 1267861 - RNA, 17 nt, Human
ccuguccugccuaaggc

SEQ ID NO: 1267862 - RNA, 11 nt, Human
ccuguccugcc

SEQ ID NO: 1267863 - RNA, 21 nt, Human
ccuguccucuuucagcuccug

SEQ ID NO: 1267864 - RNA, 22 nt, Human
ccuguccucuuucagcuccuga

SEQ ID NO: 1267865 - RNA, 19 nt, Human
ccuguccugccuaaggcug

SEQ ID NO: 1267866 - RNA, 12 nt, Human
ccuguccugccu

SEQ ID NO: 1267867 - RNA, 19 nt, Human
ccuguccuuagccuaggcc

SEQ ID NO: 1267868 - RNA, 15 nt, Human
ccuguccugguggua

SEQ ID NO: 1267869 - RNA, 21 nt, Human
ccuguccuuuaccaaagauga

SEQ ID NO: 1267870 - RNA, 16 nt, Human
ccugucgauuagacug

SEQ ID NO: 1267871 - RNA, 13 nt, Human
ccugguuuccugc

SEQ ID NO: 1267872 - RNA, 14 nt, Human
ccugguuuccugcc

SEQ ID NO: 1267873 - RNA, 16 nt, Human
ccugguuuccugcccu

SEQ ID NO: 1267874 - RNA, 15 nt, Human
ccugguuuccugccc

SEQ ID NO: 1267875 - RNA, 14 nt, Human
ccugguggccaugc

SEQ ID NO: 1267876 - RNA, 16 nt, Human
ccugguggccaugcuc

SEQ ID NO: 1267877 - RNA, 18 nt, Human
ccugguggccaugcuccu

SEQ ID NO: 1267878 - RNA, 20 nt, Human
ccugguggccaugcuccucu

SEQ ID NO: 1267879 - RNA, 24 nt, Human
ccugguggccaugcuccucuuccc

SEQ ID NO: 1267880 - RNA, 12 nt, Human
ccugguggcccu

SEQ ID NO: 1267881 - RNA, 16 nt, Human
ccugguggcccucucc

SEQ ID NO: 1267882 - RNA, 18 nt, Human
ccugguggcccucucccc

SEQ ID NO: 1267883 - RNA, 21 nt, Human
ccugguggcccucuccccugc

SEQ ID NO: 1267884 - RNA, 22 nt, Human
ccugguggcccucuccccugcc

SEQ ID NO: 1267885 - RNA, 23 nt, Human
ccugguggcccucuccccugccc

SEQ ID NO: 1267886 - RNA, 14 nt, Human
ccuggugggccaac

SEQ ID NO: 1267887 - RNA, 23 nt, Human
ccuggugggccaacaaagaacac

SEQ ID NO: 1267888 - RNA, 13 nt, Human
ccugguggggcag

SEQ ID NO: 1267889 - RNA, 16 nt, Human
ccuggccuagaccagc

SEQ ID NO: 1267890 - RNA, 17 nt, Human
ccuggccuagaccagca

SEQ ID NO: 1267891 - RNA, 20 nt, Human
ccuggccuagaccagcagac

SEQ ID NO: 1267892 - RNA, 20 nt, Human
ccugggccccaguuguauuu

SEQ ID NO: 1267893 - RNA, 11 nt, Human
ccugggcccuc

SEQ ID NO: 1267894 - RNA, 14 nt, Human
ccugggcccucucu

SEQ ID NO: 1267895 - RNA, 21 nt, Human
ccuggccgcccccugcccccc

SEQ ID NO: 1267896 - RNA, 22 nt, Human
ccuggccgcccccugcccccca

SEQ ID NO: 1267897 - RNA, 16 nt, Human
ccuggccgccuggguc

SEQ ID NO: 1267898 - RNA, 18 nt, Human
ccuggccgccugggucca

SEQ ID NO: 1267899 - RNA, 16 nt, Human
ccugccucccuucaug

SEQ ID NO: 1267900 - RNA, 11 nt, Human
ccugccuccug

SEQ ID NO: 1267901 - RNA, 16 nt, Human
ccugccuccccugccu

SEQ ID NO: 1267902 - RNA, 12 nt, Human
ccugccucuacu

SEQ ID NO: 1267903 - RNA, 20 nt, Human
ccugccucucaucaacugaa

SEQ ID NO: 1267904 - RNA, 21 nt, Human
ccugccucuacugggaaggcu

SEQ ID NO: 1267905 - RNA, 12 nt, Human
ccugcugcuccc

SEQ ID NO: 1267906 - RNA, 13 nt, Human
ccugcugcucccu

SEQ ID NO: 1267907 - RNA, 14 nt, Human
ccugcugcucccuc

SEQ ID NO: 1267908 - RNA, 21 nt, Human
ccugcugcugagaaccuggcc

SEQ ID NO: 1267909 - RNA, 22 nt, Human
ccugcugcugagaaccuggccu

SEQ ID NO: 1267910 - RNA, 23 nt, Human
ccugcugcugagaaccuggccuu

SEQ ID NO: 1267911 - RNA, 24 nt, Human
ccugcugcugagaaccuggccuuc

SEQ ID NO: 1267912 - RNA, 15 nt, Human
ccugcugcucccuca

SEQ ID NO: 1267913 - RNA, 16 nt, Human
ccugcugcucccucag

SEQ ID NO: 1267914 - RNA, 18 nt, Human
ccugcugcucccucagac

SEQ ID NO: 1267915 - RNA, 17 nt, Human
ccugcugcucccucaga

SEQ ID NO: 1267916 - RNA, 14 nt, Human
ccugcugcugagaa

SEQ ID NO: 1267917 - RNA, 15 nt, Human
ccugcugcugagaac

SEQ ID NO: 1267918 - RNA, 16 nt, Human
ccugcugcugagaacc

SEQ ID NO: 1267919 - RNA, 17 nt, Human
ccugcugcugagaaccu

SEQ ID NO: 1267920 - RNA, 19 nt, Human
ccugcugcugagaaccugg

SEQ ID NO: 1267921 - RNA, 20 nt, Human
ccugcugcugagaaccuggc

SEQ ID NO: 1267922 - RNA, 24 nt, Human
ccugccccaacucuccccugaccu

SEQ ID NO: 1267923 - RNA, 17 nt, Human
ccugccccagggcuccc

SEQ ID NO: 1267924 - RNA, 16 nt, Human
ccugccccaggccuga

SEQ ID NO: 1267925 - RNA, 18 nt, Human
ccugccccaggccugaaa

SEQ ID NO: 1267926 - RNA, 14 nt, Human
ccugccccaggccu

SEQ ID NO: 1267927 - RNA, 15 nt, Human
ccugcccccaaucca

SEQ ID NO: 1267928 - RNA, 16 nt, Human
ccugcccccaauccau

SEQ ID NO: 1267929 - RNA, 16 nt, Human
ccugagucccaucccu

SEQ ID NO: 1267930 - RNA, 19 nt, Human
ccugagucguacagaaagc

SEQ ID NO: 1267931 - RNA, 21 nt, Human
ccugagucguacagaaagcug

SEQ ID NO: 1267932 - RNA, 22 nt, Human
ccugagucguacagaaagcugc

SEQ ID NO: 1267933 - RNA, 11 nt, Human
ccugaguccca

SEQ ID NO: 1267934 - RNA, 23 nt, Human
ccugagucacccuaccugugccu

SEQ ID NO: 1267935 - RNA, 18 nt, Human
ccugagucgugaccugcu

SEQ ID NO: 1267936 - RNA, 21 nt, Human
ccugagucgugaccugcuagg

SEQ ID NO: 1267937 - RNA, 22 nt, Human
ccugagucgugaccugcuaggc

SEQ ID NO: 1267938 - RNA, 14 nt, Human
ccucuuucagcucc

SEQ ID NO: 1267939 - RNA, 15 nt, Human
ccucuuucagcuccu

SEQ ID NO: 1267940 - RNA, 18 nt, Human
ccucuuucagcuccugac

SEQ ID NO: 1267941 - RNA, 16 nt, Human
ccucuuucagcuccug

SEQ ID NO: 1267942 - RNA, 13 nt, Human
ccugaccacucag

SEQ ID NO: 1267943 - RNA, 21 nt, Human
ccugaguagcugggauuacag

SEQ ID NO: 1267944 - RNA, 21 nt, Human
ccugaccaguugcagucacuc

SEQ ID NO: 1267945 - RNA, 15 nt, Human
ccugaccacucagag

SEQ ID NO: 1267946 - RNA, 16 nt, Human
ccugaccacucagaga

SEQ ID NO: 1267947 - RNA, 17 nt, Human
ccugaccacucagagac

SEQ ID NO: 1267948 - RNA, 18 nt, Human
ccugaccacucagagaca

SEQ ID NO: 1267949 - RNA, 20 nt, Human
ccugaccacucagagacaug

SEQ ID NO: 1267950 - RNA, 14 nt, Human
ccugaccagcuccc

SEQ ID NO: 1267951 - RNA, 14 nt, Human
ccugaccagcugcu

SEQ ID NO: 1267952 - RNA, 15 nt, Human
ccugaccagcugcuc

SEQ ID NO: 1267953 - RNA, 20 nt, Human
ccugaccagcugcuccgagg

SEQ ID NO: 1267954 - RNA, 21 nt, Human
ccugaccagcugcuccgagga

SEQ ID NO: 1267955 - RNA, 22 nt, Human
ccugaccagcugcuccgaggac

SEQ ID NO: 1267956 - RNA, 12 nt, Human
ccugaccaguug

SEQ ID NO: 1267957 - RNA, 13 nt, Human
ccugaccaguugc

SEQ ID NO: 1267958 - RNA, 20 nt, Human
ccugaccaguugcagucacu

SEQ ID NO: 1267959 - RNA, 23 nt, Human
ccugaccaguugcagucacucua

SEQ ID NO: 1267960 - RNA, 23 nt, Human
ccucuuucaagcagucgugccug

SEQ ID NO: 1267961 - RNA, 12 nt, Human
ccucuuucagcu

SEQ ID NO: 1267962 - RNA, 13 nt, Human
ccucuuucagcuc

SEQ ID NO: 1267963 - RNA, 14 nt, Human
cuaauucuaaugug

SEQ ID NO: 1267964 - RNA, 17 nt, Human
cuaauaaaaagcuuuug

SEQ ID NO: 1267965 - RNA, 18 nt, Human
cuaauaaaaagcuuuugu

SEQ ID NO: 1267966 - RNA, 20 nt, Human
cuaauaaaaagcuuuugucu

SEQ ID NO: 1267967 - RNA, 22 nt, Human
cuaauaaaaagcuuuugucuac

SEQ ID NO: 1267968 - RNA, 17 nt, Human
cuaaguuauaagacucu

SEQ ID NO: 1267969 - RNA, 21 nt, Human
cuaaguuauaagacucucaca

SEQ ID NO: 1267970 - RNA, 15 nt, Human
cuaauucuaugccug

SEQ ID NO: 1267971 - RNA, 16 nt, Human
cuaauucuauuaaagu

SEQ ID NO: 1267972 - RNA, 20 nt, Human
cuaauucuauuaaagugcua

SEQ ID NO: 1267973 - RNA, 15 nt, Human
cuaauucuuccuuug

SEQ ID NO: 1267974 - RNA, 18 nt, Human
cuaauucuuccuuuguaa

SEQ ID NO: 1267975 - RNA, 13 nt, Human
cuaauugccaugu

SEQ ID NO: 1267976 - RNA, 13 nt, Human
cuaauuuauaaaa

SEQ ID NO: 1267977 - RNA, 14 nt, Human
cuaauuuauaaaaa

SEQ ID NO: 1267978 - RNA, 14 nt, Human
cuaaguaaauacaa

SEQ ID NO: 1267979 - RNA, 15 nt, Human
cuaaguaaauacaau

SEQ ID NO: 1267980 - RNA, 16 nt, Human
cuaaguaaauacaauu

SEQ ID NO: 1267981 - RNA, 17 nt, Human
cuaaguaaauacaauuu

SEQ ID NO: 1267982 - RNA, 18 nt, Human
cuaaguaaauacaauuuu

SEQ ID NO: 1267983 - RNA, 19 nt, Human
cuaaguaaauacaauuuuu

SEQ ID NO: 1267984 - RNA, 17 nt, Human
cuaaguaaauaggaauu

SEQ ID NO: 1267985 - RNA, 17 nt, Human
cuaaguguuucauaaau

SEQ ID NO: 1267986 - RNA, 15 nt, Human
cuaaguuaauuuaaa

SEQ ID NO: 1267987 - RNA, 17 nt, Human
cuaaguuaauuuaaagu

SEQ ID NO: 1267988 - RNA, 21 nt, Human
cuaaguuaauuuaaaguuguu

SEQ ID NO: 1267989 - RNA, 11 nt, Human
cgugugugugu

SEQ ID NO: 1267990 - RNA, 23 nt, Human
cgugugggagaccggccugccag

SEQ ID NO: 1267991 - RNA, 21 nt, Human
cuaccuguugagcaucacaga

SEQ ID NO: 1267992 - RNA, 12 nt, Human
cuaccugugccu

SEQ ID NO: 1267993 - RNA, 13 nt, Human
cuaccugugccug

SEQ ID NO: 1267994 - RNA, 11 nt, Human
cuaccugugug

SEQ ID NO: 1267995 - RNA, 17 nt, Human
cuaccuguguggacagg

SEQ ID NO: 1267996 - RNA, 22 nt, Human
cuaccuguugagcaucacagaa

SEQ ID NO: 1267997 - RNA, 17 nt, Human
cuacguuaccaggcagg

SEQ ID NO: 1267998 - RNA, 16 nt, Human
cuacgcuguccagaaa

SEQ ID NO: 1267999 - RNA, 14 nt, Human
cuacguauuuaaua

SEQ ID NO: 1268000 - RNA, 14 nt, Human
cuacucacuuuucc

SEQ ID NO: 1268001 - RNA, 15 nt, Human
cuacucacuuuuccc

SEQ ID NO: 1268002 - RNA, 19 nt, Human
cuacucacuuuucccacuc

SEQ ID NO: 1268003 - RNA, 21 nt, Human
cuacucacuuuucccacucca

SEQ ID NO: 1268004 - RNA, 20 nt, Human
cuacaugagguacugagagu

SEQ ID NO: 1268005 - RNA, 14 nt, Human
cuacaugaaacaga

SEQ ID NO: 1268006 - RNA, 16 nt, Human
cuacauaugaucuguc

SEQ ID NO: 1268007 - RNA, 14 nt, Human
cuacaucuucugcc

SEQ ID NO: 1268008 - RNA, 15 nt, Human
cuacaucuucugccu

SEQ ID NO: 1268009 - RNA, 16 nt, Human
cuacaucuucugccuu

SEQ ID NO: 1268010 - RNA, 10 nt, Human
cuacaugaaa

SEQ ID NO: 1268011 - RNA, 13 nt, Human
cuacaugaaacag

SEQ ID NO: 1268012 - RNA, 22 nt, Human
cuacaugaucuagagccaguua

SEQ ID NO: 1268013 - RNA, 21 nt, Human
cuaccugccccacuuguccuu

SEQ ID NO: 1268014 - RNA, 19 nt, Human
cuaccugcucagcccugca

SEQ ID NO: 1268015 - RNA, 16 nt, Human
cuaccuggucucuccu

SEQ ID NO: 1268016 - RNA, 17 nt, Human
cuaauuuauaaaaaggu

SEQ ID NO: 1268017 - RNA, 21 nt, Human
cuaauuuauccugaaauuuca

SEQ ID NO: 1268018 - RNA, 23 nt, Human
cuaauuuauccugaaauuucaga

SEQ ID NO: 1268019 - RNA, 17 nt, Human
cuaauuucaaaaugcuu

SEQ ID NO: 1268020 - RNA, 18 nt, Human
cuaauuucaaaaugcuuu

SEQ ID NO: 1268021 - RNA, 19 nt, Human
cuaauuucaaaaugcuuuu

SEQ ID NO: 1268022 - RNA, 22 nt, Human
cuaauuucaaaaugcuuuuuau

SEQ ID NO: 1268023 - RNA, 16 nt, Human
cuacagucucgucucu

SEQ ID NO: 1268024 - RNA, 15 nt, Human
cuacaguuuuaacug

SEQ ID NO: 1268025 - RNA, 23 nt, Human
cuagaauuugauaugugaacagu

SEQ ID NO: 1268026 - RNA, 14 nt, Human
cuagaauuucuuua

SEQ ID NO: 1268027 - RNA, 21 nt, Human
cuagaauuugauuauuaacau

SEQ ID NO: 1268028 - RNA, 13 nt, Human
cuagacaagccag

SEQ ID NO: 1268029 - RNA, 14 nt, Human
cuagacaagccaga

SEQ ID NO: 1268030 - RNA, 16 nt, Human
cuagacaagccagaac

SEQ ID NO: 1268031 - RNA, 17 nt, Human
cuagacaagccagaacu

SEQ ID NO: 1268032 - RNA, 14 nt, Human
cuagacacaugaag

SEQ ID NO: 1268033 - RNA, 13 nt, Human
cuagaacucccuu

SEQ ID NO: 1268034 - RNA, 12 nt, Human
cuagaacucccu

SEQ ID NO: 1268035 - RNA, 14 nt, Human
cuagaacccucugu

SEQ ID NO: 1268036 - RNA, 11 nt, Human
cuacucagcau

SEQ ID NO: 1268037 - RNA, 18 nt, Human
cuaucguaaaauuaagaa

SEQ ID NO: 1268038 - RNA, 20 nt, Human
cuauccaaucaaucuugcau

SEQ ID NO: 1268039 - RNA, 23 nt, Human
cuauccaaucaaucuugcaugua

SEQ ID NO: 1268040 - RNA, 19 nt, Human
cuaucauugcuuccuccuc

SEQ ID NO: 1268041 - RNA, 20 nt, Human
cuaucauugcuuccuccucc

SEQ ID NO: 1268042 - RNA, 20 nt, Human
cuaucguucucucuuugcau

SEQ ID NO: 1268043 - RNA, 18 nt, Human
cuaucauugcuuccuccu

SEQ ID NO: 1268044 - RNA, 20 nt, Human
cuaguuuucuccucccagga

SEQ ID NO: 1268045 - RNA, 18 nt, Human
cuaguuuucuccucccag

SEQ ID NO: 1268046 - RNA, 19 nt, Human
cuaguuuucuccucccagg

SEQ ID NO: 1268047 - RNA, 16 nt, Human
cuaguuuucuccuccc

SEQ ID NO: 1268048 - RNA, 17 nt, Human
cuaguuuucuccuccca

SEQ ID NO: 1268049 - RNA, 22 nt, Human
cucaaaccaaaucacugaacuu

SEQ ID NO: 1268050 - RNA, 19 nt, Human
cucaaaccaaaucacugaa

SEQ ID NO: 1268051 - RNA, 18 nt, Human
cucaaaccaaaucacuga

SEQ ID NO: 1268052 - RNA, 15 nt, Human
cucaaacaaugacaa

SEQ ID NO: 1268053 - RNA, 20 nt, Human
cucaaacaaugacaaagcag

SEQ ID NO: 1268054 - RNA, 13 nt, Human
cucaaacaauuga

SEQ ID NO: 1268055 - RNA, 21 nt, Human
cucaaacaaugacaaagcaga

SEQ ID NO: 1268056 - RNA, 13 nt, Human
cucaaaauauuug

SEQ ID NO: 1268057 - RNA, 18 nt, Human
cucaaaauauuuguacau

SEQ ID NO: 1268058 - RNA, 13 nt, Human
cucaaacaaugac

SEQ ID NO: 1268059 - RNA, 18 nt, Human
cuauuuuuuuuuuuuugu

SEQ ID NO: 1268060 - RNA, 20 nt, Human
cuauuaaaagacucauccgu

SEQ ID NO: 1268061 - RNA, 19 nt, Human
cuauuaaaagacucauccg

SEQ ID NO: 1268062 - RNA, 19 nt, Human
cuauuaaagugcuaagguu

SEQ ID NO: 1268063 - RNA, 23 nt, Human
cuauuaaagugcuaagguucuaa

SEQ ID NO: 1268064 - RNA, 20 nt, Human
cuauuaaagugcuaagguuc

SEQ ID NO: 1268065 - RNA, 21 nt, Human
cuauuaaagugcuaagguucu

SEQ ID NO: 1268066 - RNA, 22 nt, Human
cuauuaaagugcuaagguucua

SEQ ID NO: 1268067 - RNA, 19 nt, Human
cucaauauucaauaaagcu

SEQ ID NO: 1268068 - RNA, 18 nt, Human
cucaauauucaauaaagc

SEQ ID NO: 1268069 - RNA, 17 nt, Human
cucaauauucaauaaag

SEQ ID NO: 1268070 - RNA, 16 nt, Human
cucaauauucaauaaa

SEQ ID NO: 1268071 - RNA, 14 nt, Human
cucaauaaaguaca

SEQ ID NO: 1268072 - RNA, 16 nt, Human
cucaauaaaugauucu

SEQ ID NO: 1268073 - RNA, 20 nt, Human
cucaauaaaauuauagcucu

SEQ ID NO: 1268074 - RNA, 19 nt, Human
cucaaacuccugaccucag

SEQ ID NO: 1268075 - RNA, 15 nt, Human
cucaauaaaauuaua

SEQ ID NO: 1268076 - RNA, 14 nt, Human
cucaaacuccugac

SEQ ID NO: 1268077 - RNA, 19 nt, Human
cucaauucuucccuaucuu

SEQ ID NO: 1268078 - RNA, 14 nt, Human
cucaauucuucccu

SEQ ID NO: 1268079 - RNA, 16 nt, Human
cucaauugcuuuguaa

SEQ ID NO: 1268080 - RNA, 16 nt, Human
cucaauuucugaacac

SEQ ID NO: 1268081 - RNA, 11 nt, Human
cucacaaaaga

SEQ ID NO: 1268082 - RNA, 15 nt, Human
cucaauuuucacugu

SEQ ID NO: 1268083 - RNA, 22 nt, Human
cucacaaaccaugcaaaugcua

SEQ ID NO: 1268084 - RNA, 17 nt, Human
cucaauuuucacugugu

SEQ ID NO: 1268085 - RNA, 23 nt, Human
cucaauuuuaucccucaccugua

SEQ ID NO: 1268086 - RNA, 21 nt, Human
cucaaugagcauguuuagacu

SEQ ID NO: 1268087 - RNA, 13 nt, Human
cucaauggacugg

SEQ ID NO: 1268088 - RNA, 18 nt, Human
ccuuuuuauuugcaugug

SEQ ID NO: 1268089 - RNA, 17 nt, Human
ccuuuuuauuugcaugu

SEQ ID NO: 1268090 - RNA, 12 nt, Human
ccuuuuucaaug

SEQ ID NO: 1268091 - RNA, 21 nt, Human
ccuuuuucaaugaauuuuaua

SEQ ID NO: 1268092 - RNA, 19 nt, Human
ccuuuuuguauaaaauaga

SEQ ID NO: 1268093 - RNA, 14 nt, Human
ccuuuuuguauaaa

SEQ ID NO: 1268094 - RNA, 12 nt, Human
cgacaagugcug

SEQ ID NO: 1268095 - RNA, 16 nt, Human
cgacacggucggggca

SEQ ID NO: 1268096 - RNA, 12 nt, Human
cgacagccuggc

SEQ ID NO: 1268097 - RNA, 13 nt, Human
cgacagccuggca

SEQ ID NO: 1268098 - RNA, 21 nt, Human
cgacacugcagccccacccag

SEQ ID NO: 1268099 - RNA, 14 nt, Human
cgacagccuggcac

SEQ ID NO: 1268100 - RNA, 23 nt, Human
cgacccccucucccugcauggca

SEQ ID NO: 1268101 - RNA, 17 nt, Human
cgacugaaaauauuguu

SEQ ID NO: 1268102 - RNA, 22 nt, Human
cgacucugugcuggccagcgag

SEQ ID NO: 1268103 - RNA, 19 nt, Human
cgacucacaccacuagccu

SEQ ID NO: 1268104 - RNA, 16 nt, Human
cgacucugugcuggcc

SEQ ID NO: 1268105 - RNA, 16 nt, Human
cgacuccguuggccac

SEQ ID NO: 1268106 - RNA, 19 nt, Human
cgacuccguuggccacucc

SEQ ID NO: 1268107 - RNA, 14 nt, Human
cgacuaauuucaaa

SEQ ID NO: 1268108 - RNA, 21 nt, Human
cgacucacaccacuagccuca

SEQ ID NO: 1268109 - RNA, 18 nt, Human
cgacugaaaauauuguuu

SEQ ID NO: 1268110 - RNA, 14 nt, Human
cgacugcaacagga

SEQ ID NO: 1268111 - RNA, 17 nt, Human
cgacuggccagggccac

SEQ ID NO: 1268112 - RNA, 20 nt, Human
cgacuggccagggccacgcu

SEQ ID NO: 1268113 - RNA, 20 nt, Human
cgacucugugcuggccagcg

SEQ ID NO: 1268114 - RNA, 14 nt, Human
cgacuggccagggc

SEQ ID NO: 1268115 - RNA, 15 nt, Human
cgacuggccagggcc

SEQ ID NO: 1268116 - RNA, 18 nt, Human
ccuuuaauuguaaaguaa

SEQ ID NO: 1268117 - RNA, 12 nt, Human
ccuuuacaugag

SEQ ID NO: 1268118 - RNA, 18 nt, Human
ccuuuacaugaggacucu

SEQ ID NO: 1268119 - RNA, 15 nt, Human
ccuuucacaaccuuc

SEQ ID NO: 1268120 - RNA, 14 nt, Human
ccuuucacaggcag

SEQ ID NO: 1268121 - RNA, 22 nt, Human
ccuuucacaggcagccagugcc

SEQ ID NO: 1268122 - RNA, 18 nt, Human
ccuuuugacacugcucua

SEQ ID NO: 1268123 - RNA, 16 nt, Human
ccuuuugaggagcccc

SEQ ID NO: 1268124 - RNA, 21 nt, Human
ccuuuugaggagccccagcua

SEQ ID NO: 1268125 - RNA, 23 nt, Human
ccuuuugaggagccccagcuacc

SEQ ID NO: 1268126 - RNA, 11 nt, Human
ccuuuugcaaa

SEQ ID NO: 1268127 - RNA, 19 nt, Human
ccuuuuuaauaugcuuaaa

SEQ ID NO: 1268128 - RNA, 14 nt, Human
ccuuucaggaucua

SEQ ID NO: 1268129 - RNA, 19 nt, Human
ccuuucaggaucuauuuuu

SEQ ID NO: 1268130 - RNA, 17 nt, Human
ccuuucaggaucuauuu

SEQ ID NO: 1268131 - RNA, 19 nt, Human
ccuuuccaccacagccagc

SEQ ID NO: 1268132 - RNA, 13 nt, Human
ccuuuugacacug

SEQ ID NO: 1268133 - RNA, 15 nt, Human
ccuuuugacacugcu

SEQ ID NO: 1268134 - RNA, 17 nt, Human
ccuugccccccuggccu

SEQ ID NO: 1268135 - RNA, 22 nt, Human
ccuugcugcaagcacagcccuu

SEQ ID NO: 1268136 - RNA, 12 nt, Human
ccuugcugugaa

SEQ ID NO: 1268137 - RNA, 16 nt, Human
ccuugcuuaccucuca

SEQ ID NO: 1268138 - RNA, 18 nt, Human
ccuugcuuaugacaucac

SEQ ID NO: 1268139 - RNA, 17 nt, Human
ccuugcuuaccucucag

SEQ ID NO: 1268140 - RNA, 16 nt, Human
ccuugccccccuggcc

SEQ ID NO: 1268141 - RNA, 21 nt, Human
ccuugccccccuggccucccc

SEQ ID NO: 1268142 - RNA, 17 nt, Human
cgccuccaacccuagca

SEQ ID NO: 1268143 - RNA, 16 nt, Human
cgccuccaacccuagc

SEQ ID NO: 1268144 - RNA, 21 nt, Human
cgccucacugcaaccuucacc

SEQ ID NO: 1268145 - RNA, 17 nt, Human
cgccacuggggcucaga

SEQ ID NO: 1268146 - RNA, 18 nt, Human
cgccacuggggcucagag

SEQ ID NO: 1268147 - RNA, 13 nt, Human
cgccacuggggcu

SEQ ID NO: 1268148 - RNA, 15 nt, Human
cgccacuggggcuca

SEQ ID NO: 1268149 - RNA, 19 nt, Human
cgccacuggggcucagagc

SEQ ID NO: 1268150 - RNA, 13 nt, Human
cgccucugcauuc

SEQ ID NO: 1268151 - RNA, 16 nt, Human
cgccuccauccaaggc

SEQ ID NO: 1268152 - RNA, 18 nt, Human
cgccuccauccaaggcca

SEQ ID NO: 1268153 - RNA, 15 nt, Human
cgccucuugaccagg

SEQ ID NO: 1268154 - RNA, 17 nt, Human
cgccucuugaccaggcu

SEQ ID NO: 1268155 - RNA, 15 nt, Human
cgccucuuucaagca

SEQ ID NO: 1268156 - RNA, 20 nt, Human
cgccugacaaccacuggucu

SEQ ID NO: 1268157 - RNA, 21 nt, Human
cgccugacaaccacuggucug

SEQ ID NO: 1268158 - RNA, 23 nt, Human
cgccugacaaccacuggucugua

SEQ ID NO: 1268159 - RNA, 11 nt, Human
cgccugagccc

SEQ ID NO: 1268160 - RNA, 13 nt, Human
cgccugagcccag

SEQ ID NO: 1268161 - RNA, 14 nt, Human
cgccugagcccagg

SEQ ID NO: 1268162 - RNA, 15 nt, Human
cgccugagcccaggg

SEQ ID NO: 1268163 - RNA, 16 nt, Human
cgccugagcccaggga

SEQ ID NO: 1268164 - RNA, 17 nt, Human
cgccugagcccagggag

SEQ ID NO: 1268165 - RNA, 18 nt, Human
cgccugagcccagggagg

SEQ ID NO: 1268166 - RNA, 19 nt, Human
cgccugagcccagggaggc

SEQ ID NO: 1268167 - RNA, 21 nt, Human
cgccugagcccagggaggccg

SEQ ID NO: 1268168 - RNA, 20 nt, Human
cgccugaggaacccuuacag

SEQ ID NO: 1268169 - RNA, 17 nt, Human
cgccugaggcaauuaga

SEQ ID NO: 1268170 - RNA, 20 nt, Human
cgccugagcccagggaggcc

SEQ ID NO: 1268171 - RNA, 21 nt, Human
cgccuggcaguccgugggacg

SEQ ID NO: 1268172 - RNA, 19 nt, Human
cgccuggcugcagccugcg

SEQ ID NO: 1268173 - RNA, 20 nt, Human
cgagucauucguucugugga

SEQ ID NO: 1268174 - RNA, 13 nt, Human
cgaguccaagcug

SEQ ID NO: 1268175 - RNA, 14 nt, Human
cgaguccaagcugg

SEQ ID NO: 1268176 - RNA, 15 nt, Human
cgaguccaagcuggg

SEQ ID NO: 1268177 - RNA, 16 nt, Human
cgagucucuucuccac

SEQ ID NO: 1268178 - RNA, 15 nt, Human
cgauauacucuagau

SEQ ID NO: 1268179 - RNA, 18 nt, Human
cgagucauucguucugug

SEQ ID NO: 1268180 - RNA, 19 nt, Human
cgagucauucguucugugg

SEQ ID NO: 1268181 - RNA, 13 nt, Human
cgcaggcuggccc

SEQ ID NO: 1268182 - RNA, 16 nt, Human
cgcauggucacacacu

SEQ ID NO: 1268183 - RNA, 19 nt, Human
cgcauggucacacacugau

SEQ ID NO: 1268184 - RNA, 23 nt, Human
cggaggaaggaggacccaggaca

SEQ ID NO: 1268185 - RNA, 21 nt, Human
cggaggaaggaggacccagga

SEQ ID NO: 1268186 - RNA, 20 nt, Human
cggaggaaggaggacccagg

SEQ ID NO: 1268187 - RNA, 19 nt, Human
cggaggaaggaggacccag

SEQ ID NO: 1268188 - RNA, 14 nt, Human
cggaggacucacca

SEQ ID NO: 1268189 - RNA, 15 nt, Human
cgcugccagcucugu

SEQ ID NO: 1268190 - RNA, 19 nt, Human
cgcugccagcucuguauca

SEQ ID NO: 1268191 - RNA, 20 nt, Human
cgccuggguccaaugcucag

SEQ ID NO: 1268192 - RNA, 14 nt, Human
cgccuggccuggcc

SEQ ID NO: 1268193 - RNA, 15 nt, Human
cggcuccccaugugu

SEQ ID NO: 1268194 - RNA, 17 nt, Human
cggcuccccaugugucc

SEQ ID NO: 1268195 - RNA, 20 nt, Human
cggcuccccauguguccugg

SEQ ID NO: 1268196 - RNA, 15 nt, Human
cgggccaaggaccug

SEQ ID NO: 1268197 - RNA, 18 nt, Human
cgggccaaggaccugaga

SEQ ID NO: 1268198 - RNA, 17 nt, Human
cgggccuguccacaggc

SEQ ID NO: 1268199 - RNA, 22 nt, Human
cgggccuguccacaggcuucug

SEQ ID NO: 1268200 - RNA, 15 nt, Human
cggggaacuggccaa

SEQ ID NO: 1268201 - RNA, 17 nt, Human
cggggaacuggccaagc

SEQ ID NO: 1268202 - RNA, 22 nt, Human
cggggaacuggccaagcugagg

SEQ ID NO: 1268203 - RNA, 13 nt, Human
cggggaaggauuu

SEQ ID NO: 1268204 - RNA, 20 nt, Human
cggggaacuggccaagcuga

SEQ ID NO: 1268205 - RNA, 15 nt, Human
cgugaucucagcuca

SEQ ID NO: 1268206 - RNA, 14 nt, Human
cgugaucucagcuc

SEQ ID NO: 1268207 - RNA, 24 nt, Human
cgugauccacccgccucagccucc

SEQ ID NO: 1268208 - RNA, 17 nt, Human
cgugauccacccgccuc

SEQ ID NO: 1268209 - RNA, 13 nt, Human
cgugauccacccg

SEQ ID NO: 1268210 - RNA, 23 nt, Human
cgugaucaaguugaggggcuucc

SEQ ID NO: 1268211 - RNA, 18 nt, Human
cguggugcgagugcguga

SEQ ID NO: 1268212 - RNA, 13 nt, Human
cgugguggucccu

SEQ ID NO: 1268213 - RNA, 15 nt, Human
cgugguggucccugg

SEQ ID NO: 1268214 - RNA, 17 nt, Human
cgugguggucccugggu

SEQ ID NO: 1268215 - RNA, 14 nt, Human
cguaaaauuaagaa

SEQ ID NO: 1268216 - RNA, 16 nt, Human
cguaaaaaugauuuca

SEQ ID NO: 1268217 - RNA, 12 nt, Human
cguaaagauuug

SEQ ID NO: 1268218 - RNA, 23 nt, Human
cgguguuuaagacauuuuuggaa

SEQ ID NO: 1268219 - RNA, 13 nt, Human
cgguguucuaaga

SEQ ID NO: 1268220 - RNA, 18 nt, Human
cgguuauaaaaaaugguu

SEQ ID NO: 1268221 - RNA, 20 nt, Human
cgguuauaaaaaaugguuca

SEQ ID NO: 1268222 - RNA, 21 nt, Human
cgguuauaaaaaaugguucag

SEQ ID NO: 1268223 - RNA, 11 nt, Human
cgguuucucca

SEQ ID NO: 1268224 - RNA, 21 nt, Human
cugaggaaauugcuuuguauu

SEQ ID NO: 1268225 - RNA, 23 nt, Human
cugaggacaagagaaaaaagcca

SEQ ID NO: 1268226 - RNA, 14 nt, Human
cugaggacagaugc

SEQ ID NO: 1268227 - RNA, 15 nt, Human
cugaggacagaugcc

SEQ ID NO: 1268228 - RNA, 20 nt, Human
cugaggacagaugccuccuu

SEQ ID NO: 1268229 - RNA, 13 nt, Human
cugagauggcucc

SEQ ID NO: 1268230 - RNA, 16 nt, Human
cugagauggcucccag

SEQ ID NO: 1268231 - RNA, 17 nt, Human
cugagauggcucccagg

SEQ ID NO: 1268232 - RNA, 18 nt, Human
cugagauggcucccaggg

SEQ ID NO: 1268233 - RNA, 20 nt, Human
cugagauggcucccaggggc

SEQ ID NO: 1268234 - RNA, 21 nt, Human
cugagauggcucccaggggcu

SEQ ID NO: 1268235 - RNA, 20 nt, Human
cugagaugggcuucccaagg

SEQ ID NO: 1268236 - RNA, 21 nt, Human
cugagauaugaacauauuguu

SEQ ID NO: 1268237 - RNA, 23 nt, Human
cugagauaugaacauauuguuga

SEQ ID NO: 1268238 - RNA, 20 nt, Human
cugaggugcccaggagaaga

SEQ ID NO: 1268239 - RNA, 13 nt, Human
cugaguacuccac

SEQ ID NO: 1268240 - RNA, 15 nt, Human
cugaguacuccacac

SEQ ID NO: 1268241 - RNA, 16 nt, Human
cugaguacuccacacu

SEQ ID NO: 1268242 - RNA, 18 nt, Human
cugaguacuccacacugc

SEQ ID NO: 1268243 - RNA, 19 nt, Human
cugaguacuccacacugca

SEQ ID NO: 1268244 - RNA, 23 nt, Human
cugaguacuccacacugcacaau

SEQ ID NO: 1268245 - RNA, 14 nt, Human
cugaggaccagcca

SEQ ID NO: 1268246 - RNA, 18 nt, Human
cugaggacagaugccucc

SEQ ID NO: 1268247 - RNA, 22 nt, Human
cugaggacuuaaaauauuccug

SEQ ID NO: 1268248 - RNA, 14 nt, Human
cugaggacugauuu

SEQ ID NO: 1268249 - RNA, 22 nt, Human
cugaggacugauuucagaguga

SEQ ID NO: 1268250 - RNA, 14 nt, Human
cugaggagcagcag

SEQ ID NO: 1268251 - RNA, 21 nt, Human
cugaggagcagcaggaggggg

SEQ ID NO: 1268252 - RNA, 23 nt, Human
cugaggagcagcaggagggggga

SEQ ID NO: 1268253 - RNA, 12 nt, Human
cugaggagucug

SEQ ID NO: 1268254 - RNA, 15 nt, Human
cugaggagucugagg

SEQ ID NO: 1268255 - RNA, 16 nt, Human
cugaggagucugaggu

SEQ ID NO: 1268256 - RNA, 17 nt, Human
cugaggagucugagguc

SEQ ID NO: 1268257 - RNA, 18 nt, Human
cugaggagucugaggucc

SEQ ID NO: 1268258 - RNA, 16 nt, Human
cugaggugcacuggga

SEQ ID NO: 1268259 - RNA, 17 nt, Human
cugaggugcacugggag

SEQ ID NO: 1268260 - RNA, 18 nt, Human
cugaggugcacugggagg

SEQ ID NO: 1268261 - RNA, 13 nt, Human
cugaggugcccag

SEQ ID NO: 1268262 - RNA, 14 nt, Human
cugaggugcccagg

SEQ ID NO: 1268263 - RNA, 15 nt, Human
cugaggugcccagga

SEQ ID NO: 1268264 - RNA, 16 nt, Human
cugaggugcccaggag

SEQ ID NO: 1268265 - RNA, 17 nt, Human
cugaggugcccaggaga

SEQ ID NO: 1268266 - RNA, 18 nt, Human
cugaggugcccaggagaa

SEQ ID NO: 1268267 - RNA, 19 nt, Human
cugaggugcccaggagaag

SEQ ID NO: 1268268 - RNA, 17 nt, Human
cugaggugccuguccca

SEQ ID NO: 1268269 - RNA, 19 nt, Human
cugaggugccugucccacc

SEQ ID NO: 1268270 - RNA, 22 nt, Human
cugaggugccugucccaccccc

SEQ ID NO: 1268271 - RNA, 14 nt, Human
cugaguagcuggga

SEQ ID NO: 1268272 - RNA, 15 nt, Human
cugaguagcugggau

SEQ ID NO: 1268273 - RNA, 20 nt, Human
cugaguagcugggauuacag

SEQ ID NO: 1268274 - RNA, 16 nt, Human
cugaguauuaaaaugu

SEQ ID NO: 1268275 - RNA, 21 nt, Human
cugaguauuaaaauguaugca

SEQ ID NO: 1268276 - RNA, 22 nt, Human
cugaguauuaaaauguaugcau

SEQ ID NO: 1268277 - RNA, 23 nt, Human
cugaguauuaaaauguaugcaug

SEQ ID NO: 1268278 - RNA, 15 nt, Human
cugagucaaguuguu

SEQ ID NO: 1268279 - RNA, 16 nt, Human
cugagucaaguuguuc

SEQ ID NO: 1268280 - RNA, 20 nt, Human
cugaccccaaacaccuucca

SEQ ID NO: 1268281 - RNA, 21 nt, Human
cugaccccaaacaccuuccag

SEQ ID NO: 1268282 - RNA, 22 nt, Human
cugaccccaaacaccuuccagc

SEQ ID NO: 1268283 - RNA, 15 nt, Human
cugaccccaucaccu

SEQ ID NO: 1268284 - RNA, 14 nt, Human
cugaccugcacugg

SEQ ID NO: 1268285 - RNA, 13 nt, Human
cugaccugcugac

SEQ ID NO: 1268286 - RNA, 14 nt, Human
cugaccugcugacc

SEQ ID NO: 1268287 - RNA, 15 nt, Human
cugaccugcugaccu

SEQ ID NO: 1268288 - RNA, 19 nt, Human
cugaccugcugaccugugc

SEQ ID NO: 1268289 - RNA, 20 nt, Human
cugaccugcugaccugugca

SEQ ID NO: 1268290 - RNA, 10 nt, Human
cugaccuggc

SEQ ID NO: 1268291 - RNA, 12 nt, Human
cugaccuggccc

SEQ ID NO: 1268292 - RNA, 13 nt, Human
cugaccuggcccc

SEQ ID NO: 1268293 - RNA, 14 nt, Human
cugaccuggccccc

SEQ ID NO: 1268294 - RNA, 17 nt, Human
cugaccuggcccccuca

SEQ ID NO: 1268295 - RNA, 20 nt, Human
cugaccuggcccccucagug

SEQ ID NO: 1268296 - RNA, 13 nt, Human
cugagaccugaag

SEQ ID NO: 1268297 - RNA, 18 nt, Human
cugagacuaaucuuauuc

SEQ ID NO: 1268298 - RNA, 22 nt, Human
cugagaccaaggcuuucucuac

SEQ ID NO: 1268299 - RNA, 21 nt, Human
cugagaccaaggcuuucucua

SEQ ID NO: 1268300 - RNA, 16 nt, Human
cugagacgucaugagg

SEQ ID NO: 1268301 - RNA, 18 nt, Human
cugagacgucaugaggag

SEQ ID NO: 1268302 - RNA, 13 nt, Human
cugagagaggcca

SEQ ID NO: 1268303 - RNA, 14 nt, Human
cugagagaaaauaa

SEQ ID NO: 1268304 - RNA, 14 nt, Human
cugagagaggccau

SEQ ID NO: 1268305 - RNA, 21 nt, Human
cugagagaggccauucuuucc

SEQ ID NO: 1268306 - RNA, 22 nt, Human
cugagagaggccauucuuuccc

SEQ ID NO: 1268307 - RNA, 19 nt, Human
cugagagaugcagaaauau

SEQ ID NO: 1268308 - RNA, 22 nt, Human
cugagagcaucaggccuagagg

SEQ ID NO: 1268309 - RNA, 17 nt, Human
cugagaggacagagaga

SEQ ID NO: 1268310 - RNA, 17 nt, Human
cugagagggcucgaggg

SEQ ID NO: 1268311 - RNA, 16 nt, Human
cugagaggcccuggau

SEQ ID NO: 1268312 - RNA, 14 nt, Human
cugagagucuagau

SEQ ID NO: 1268313 - RNA, 15 nt, Human
cugagagucuagauu

SEQ ID NO: 1268314 - RNA, 17 nt, Human
cugagagucuagauucu

SEQ ID NO: 1268315 - RNA, 22 nt, Human
cugagagucuagauucucuggc

SEQ ID NO: 1268316 - RNA, 17 nt, Human
cugagauacauacagaa

SEQ ID NO: 1268317 - RNA, 19 nt, Human
cugagauacauacagaauu

SEQ ID NO: 1268318 - RNA, 18 nt, Human
cugagauaccagcgagga

SEQ ID NO: 1268319 - RNA, 12 nt, Human
cugagauaugaa

SEQ ID NO: 1268320 - RNA, 15 nt, Human
cugagauaugaacau

SEQ ID NO: 1268321 - RNA, 16 nt, Human
cugagauaugaacaua

SEQ ID NO: 1268322 - RNA, 20 nt, Human
cugagaggacagagagaaau

SEQ ID NO: 1268323 - RNA, 21 nt, Human
cugagaggacagagagaaaua

SEQ ID NO: 1268324 - RNA, 13 nt, Human
cugagaggcccug

SEQ ID NO: 1268325 - RNA, 14 nt, Human
cugagaggcccugg

SEQ ID NO: 1268326 - RNA, 15 nt, Human
cugagaggcccugga

SEQ ID NO: 1268327 - RNA, 14 nt, Human
cugagaggcugucu

SEQ ID NO: 1268328 - RNA, 15 nt, Human
cugacaacagacuuc

SEQ ID NO: 1268329 - RNA, 18 nt, Human
cugacaacagacuucuga

SEQ ID NO: 1268330 - RNA, 19 nt, Human
cugacaacagacuucugaa

SEQ ID NO: 1268331 - RNA, 22 nt, Human
cugacaacauuucuauagccaa

SEQ ID NO: 1268332 - RNA, 14 nt, Human
cugacaacauuucu

SEQ ID NO: 1268333 - RNA, 13 nt, Human
cugacaagcucca

SEQ ID NO: 1268334 - RNA, 23 nt, Human
cugacaagauuauaauauuuuaa

SEQ ID NO: 1268335 - RNA, 14 nt, Human
cugacaagccaucu

SEQ ID NO: 1268336 - RNA, 18 nt, Human
cugacaagcuccauuuaa

SEQ ID NO: 1268337 - RNA, 20 nt, Human
cugacaaccacuggucugua

SEQ ID NO: 1268338 - RNA, 18 nt, Human
cugacaaccacuggucug

SEQ ID NO: 1268339 - RNA, 21 nt, Human
cucuugaugccuggcggggug

SEQ ID NO: 1268340 - RNA, 16 nt, Human
cucuugaugccuggcg

SEQ ID NO: 1268341 - RNA, 15 nt, Human
cucuugaugccuggc

SEQ ID NO: 1268342 - RNA, 13 nt, Human
cucuugaugccug

SEQ ID NO: 1268343 - RNA, 21 nt, Human
cucuugauuauccauauugag

SEQ ID NO: 1268344 - RNA, 22 nt, Human
cucuuuuccuuugguccuucaa

SEQ ID NO: 1268345 - RNA, 21 nt, Human
cucuuuugcuuuauuccagaa

SEQ ID NO: 1268346 - RNA, 13 nt, Human
cucuuuuuaaagu

SEQ ID NO: 1268347 - RNA, 21 nt, Human
cucuuuuuccaacuuggcugc

SEQ ID NO: 1268348 - RNA, 12 nt, Human
cucuuuuuccaa

SEQ ID NO: 1268349 - RNA, 15 nt, Human
cugaaacaacuugga

SEQ ID NO: 1268350 - RNA, 16 nt, Human
cugaaacaacuuggaa

SEQ ID NO: 1268351 - RNA, 20 nt, Human
cugaaacaacuuggaaagau

SEQ ID NO: 1268352 - RNA, 14 nt, Human
cugaaaccaguguu

SEQ ID NO: 1268353 - RNA, 19 nt, Human
cugaaacucauagacacug

SEQ ID NO: 1268354 - RNA, 22 nt, Human
cugaaacucacacaacuaggaa

SEQ ID NO: 1268355 - RNA, 22 nt, Human
cugaagcuaucguaaaauuaag

SEQ ID NO: 1268356 - RNA, 21 nt, Human
cugaagcuaucguaaaauuaa

SEQ ID NO: 1268357 - RNA, 15 nt, Human
cugaaagacaauaua

SEQ ID NO: 1268358 - RNA, 14 nt, Human
cugaaagagaaaca

SEQ ID NO: 1268359 - RNA, 21 nt, Human
cugaagcccucccagguguua

SEQ ID NO: 1268360 - RNA, 13 nt, Human
cugaagcccuugu

SEQ ID NO: 1268361 - RNA, 23 nt, Human
cugaagccuuugcauuuuggaga

SEQ ID NO: 1268362 - RNA, 15 nt, Human
cugaagcucccacag

SEQ ID NO: 1268363 - RNA, 12 nt, Human
cugaaggagccc

SEQ ID NO: 1268364 - RNA, 13 nt, Human
cugaaggagcccc

SEQ ID NO: 1268365 - RNA, 16 nt, Human
cugacaaaauacuugu

SEQ ID NO: 1268366 - RNA, 22 nt, Human
cugaauuuuuaaacaaguauuu

SEQ ID NO: 1268367 - RNA, 21 nt, Human
cugaaggagccccauuccugg

SEQ ID NO: 1268368 - RNA, 13 nt, Human
cugaaggccugag

SEQ ID NO: 1268369 - RNA, 15 nt, Human
cugaaggccugaggu

SEQ ID NO: 1268370 - RNA, 19 nt, Human
cugaaggccugagguuacu

SEQ ID NO: 1268371 - RNA, 22 nt, Human
cucuuagaugcaguucugaaga

SEQ ID NO: 1268372 - RNA, 17 nt, Human
cucuuagcagcuuccag

SEQ ID NO: 1268373 - RNA, 18 nt, Human
cucuuagcagcuuccaga

SEQ ID NO: 1268374 - RNA, 19 nt, Human
cucuuagcagcuuccagau

SEQ ID NO: 1268375 - RNA, 18 nt, Human
cucuucacucuucaaaug

SEQ ID NO: 1268376 - RNA, 16 nt, Human
cucuucaacugaccag

SEQ ID NO: 1268377 - RNA, 17 nt, Human
cucuucaacugaccagc

SEQ ID NO: 1268378 - RNA, 20 nt, Human
cucuucaacugaccagccuc

SEQ ID NO: 1268379 - RNA, 15 nt, Human
cucuucaaaugccug

SEQ ID NO: 1268380 - RNA, 14 nt, Human
cucuuauuucauca

SEQ ID NO: 1268381 - RNA, 13 nt, Human
cucuuauuucauc

SEQ ID NO: 1268382 - RNA, 22 nt, Human
cucuuauugccucacuucaggu

SEQ ID NO: 1268383 - RNA, 17 nt, Human
cucuuauugccucacuu

SEQ ID NO: 1268384 - RNA, 20 nt, Human
cucuuauugccucacuucag

SEQ ID NO: 1268385 - RNA, 14 nt, Human
cucuuauugccuca

SEQ ID NO: 1268386 - RNA, 13 nt, Human
cucuucagaggcc

SEQ ID NO: 1268387 - RNA, 17 nt, Human
cucuucagaggcccucg

SEQ ID NO: 1268388 - RNA, 17 nt, Human
cucugcaggucccuaau

SEQ ID NO: 1268389 - RNA, 16 nt, Human
cucugcaggucccuaa

SEQ ID NO: 1268390 - RNA, 15 nt, Human
cucugcaggucccua

SEQ ID NO: 1268391 - RNA, 14 nt, Human
cucugcaggucccu

SEQ ID NO: 1268392 - RNA, 18 nt, Human
cucugcaggucccuaaua

SEQ ID NO: 1268393 - RNA, 18 nt, Human
cucugcagaaacuacuga

SEQ ID NO: 1268394 - RNA, 17 nt, Human
cucugcagacuucccag

SEQ ID NO: 1268395 - RNA, 18 nt, Human
cucugcagacuucccagc

SEQ ID NO: 1268396 - RNA, 23 nt, Human
cucucccggagguugggugggcc

SEQ ID NO: 1268397 - RNA, 16 nt, Human
cucuccccugccugcc

SEQ ID NO: 1268398 - RNA, 15 nt, Human
cucuccccugaccug

SEQ ID NO: 1268399 - RNA, 17 nt, Human
cucuccccugaccugug

SEQ ID NO: 1268400 - RNA, 12 nt, Human
cucuccccugcc

SEQ ID NO: 1268401 - RNA, 15 nt, Human
cucuccccugccccc

SEQ ID NO: 1268402 - RNA, 19 nt, Human
cucuccccugcccccugca

SEQ ID NO: 1268403 - RNA, 20 nt, Human
cucuccccugcccccugcag

SEQ ID NO: 1268404 - RNA, 22 nt, Human
cucuccccugcccccugcagga

SEQ ID NO: 1268405 - RNA, 21 nt, Human
cucuccccugcccccugcagg

SEQ ID NO: 1268406 - RNA, 14 nt, Human
cucuccccugccug

SEQ ID NO: 1268407 - RNA, 21 nt, Human
cucuccccuggaacugucucu

SEQ ID NO: 1268408 - RNA, 17 nt, Human
cucugguggcacaggag

SEQ ID NO: 1268409 - RNA, 14 nt, Human
cucugucagucaca

SEQ ID NO: 1268410 - RNA, 16 nt, Human
cucugucagucacagc

SEQ ID NO: 1268411 - RNA, 17 nt, Human
cucugucagucacagcc

SEQ ID NO: 1268412 - RNA, 19 nt, Human
cucugucagucacagccac

SEQ ID NO: 1268413 - RNA, 12 nt, Human
cucuguccaggc

SEQ ID NO: 1268414 - RNA, 20 nt, Human
cucugucagucacagccacc

SEQ ID NO: 1268415 - RNA, 14 nt, Human
cucuguccaggcac

SEQ ID NO: 1268416 - RNA, 19 nt, Human
cucuguccaggcacugaga

SEQ ID NO: 1268417 - RNA, 16 nt, Human
cucuggucgcuccugc

SEQ ID NO: 1268418 - RNA, 17 nt, Human
cucuggucgcuccugcc

SEQ ID NO: 1268419 - RNA, 18 nt, Human
cucuggucgcuccugccc

SEQ ID NO: 1268420 - RNA, 20 nt, Human
cucuggucgcuccugcccac

SEQ ID NO: 1268421 - RNA, 23 nt, Human
cucuggugagucaccacuucagg

SEQ ID NO: 1268422 - RNA, 13 nt, Human
cucuggugccucc

SEQ ID NO: 1268423 - RNA, 14 nt, Human
cucuggugccucca

SEQ ID NO: 1268424 - RNA, 16 nt, Human
cucuggugccuccaga

SEQ ID NO: 1268425 - RNA, 18 nt, Human
cucuggugccuccagagg

SEQ ID NO: 1268426 - RNA, 19 nt, Human
cucugcagacuucccagcu

SEQ ID NO: 1268427 - RNA, 22 nt, Human
cucugcagacuucccagcuagg

SEQ ID NO: 1268428 - RNA, 15 nt, Human
cucugguaaccucuu

SEQ ID NO: 1268429 - RNA, 17 nt, Human
cucugguaauauugacu

SEQ ID NO: 1268430 - RNA, 16 nt, Human
cucugggggguggcca

SEQ ID NO: 1268431 - RNA, 19 nt, Human
cucugggggguggccaggc

SEQ ID NO: 1268432 - RNA, 21 nt, Human
cucugggggguggccaggccg

SEQ ID NO: 1268433 - RNA, 15 nt, Human
cucuggggugggcag

SEQ ID NO: 1268434 - RNA, 20 nt, Human
cucugggggguggccaggcc

SEQ ID NO: 1268435 - RNA, 13 nt, Human
cuccaagaauuuc

SEQ ID NO: 1268436 - RNA, 21 nt, Human
cuccaaccugcaaagaucugu

SEQ ID NO: 1268437 - RNA, 16 nt, Human
cucaugugugcaacag

SEQ ID NO: 1268438 - RNA, 23 nt, Human
cucauguuaaauaggcggggcuu

SEQ ID NO: 1268439 - RNA, 18 nt, Human
cucaugugacucuuucca

SEQ ID NO: 1268440 - RNA, 12 nt, Human
cucauguggcug

SEQ ID NO: 1268441 - RNA, 13 nt, Human
cucauguggcugg

SEQ ID NO: 1268442 - RNA, 14 nt, Human
cucauguggcugga

SEQ ID NO: 1268443 - RNA, 15 nt, Human
cucauguggcuggaa

SEQ ID NO: 1268444 - RNA, 12 nt, Human
cucaugccucag

SEQ ID NO: 1268445 - RNA, 16 nt, Human
cucaugccccuggcug

SEQ ID NO: 1268446 - RNA, 17 nt, Human
cucaugccccuggcugg

SEQ ID NO: 1268447 - RNA, 16 nt, Human
cucaugccucagccuc

SEQ ID NO: 1268448 - RNA, 14 nt, Human
cuccaagaauuucu

SEQ ID NO: 1268449 - RNA, 14 nt, Human
cuccaagagcuaca

SEQ ID NO: 1268450 - RNA, 20 nt, Human
cuccaagagcuacauaauuu

SEQ ID NO: 1268451 - RNA, 12 nt, Human
cuccaagauucu

SEQ ID NO: 1268452 - RNA, 13 nt, Human
cuccaagauucua

SEQ ID NO: 1268453 - RNA, 14 nt, Human
cuccaagauucuag

SEQ ID NO: 1268454 - RNA, 15 nt, Human
cuccaagauucuaga

SEQ ID NO: 1268455 - RNA, 16 nt, Human
cuccaagauucuagau

SEQ ID NO: 1268456 - RNA, 17 nt, Human
cuccaagauucuagaug

SEQ ID NO: 1268457 - RNA, 22 nt, Human
cuccaagcccagcccauggaga

SEQ ID NO: 1268458 - RNA, 13 nt, Human
cuccacuggcucc

SEQ ID NO: 1268459 - RNA, 15 nt, Human
cuccacuuggucugu

SEQ ID NO: 1268460 - RNA, 13 nt, Human
cuccacuuggucu

SEQ ID NO: 1268461 - RNA, 22 nt, Human
cuccacuuggucugugagaugc

SEQ ID NO: 1268462 - RNA, 21 nt, Human
cuccacuuggucugugagaug

SEQ ID NO: 1268463 - RNA, 17 nt, Human
cuccacuuggucuguga

SEQ ID NO: 1268464 - RNA, 16 nt, Human
cuccacuuggucugug

SEQ ID NO: 1268465 - RNA, 17 nt, Human
cuccaagcccagcccau

SEQ ID NO: 1268466 - RNA, 15 nt, Human
cuccaagccccaucu

SEQ ID NO: 1268467 - RNA, 18 nt, Human
cuccaagauucuagauga

SEQ ID NO: 1268468 - RNA, 13 nt, Human
cuccaagcagcuu

SEQ ID NO: 1268469 - RNA, 16 nt, Human
cuccaagcagcuuaga

SEQ ID NO: 1268470 - RNA, 19 nt, Human
cuccaagcagcuuagaguu

SEQ ID NO: 1268471 - RNA, 14 nt, Human
cuccaagcuccauc

SEQ ID NO: 1268472 - RNA, 17 nt, Human
cuccaagccccaucuuc

SEQ ID NO: 1268473 - RNA, 18 nt, Human
cuccaagccccaucuucu

SEQ ID NO: 1268474 - RNA, 18 nt, Human
cuccaagcuccaucucca

SEQ ID NO: 1268475 - RNA, 19 nt, Human
cuccaagcuccaucuccac

SEQ ID NO: 1268476 - RNA, 13 nt, Human
cucagucucccuc

SEQ ID NO: 1268477 - RNA, 13 nt, Human
cucaguaauuuag

SEQ ID NO: 1268478 - RNA, 18 nt, Human
cucaguaauuuagaaauc

SEQ ID NO: 1268479 - RNA, 19 nt, Human
cucaguaauuuagaaauca

SEQ ID NO: 1268480 - RNA, 22 nt, Human
cucaguaauuuagaaaucauuu

SEQ ID NO: 1268481 - RNA, 13 nt, Human
cucaguaauuugu

SEQ ID NO: 1268482 - RNA, 13 nt, Human
cucaguaccccau

SEQ ID NO: 1268483 - RNA, 16 nt, Human
cucaguaaagcacuug

SEQ ID NO: 1268484 - RNA, 15 nt, Human
cucagucucccuccc

SEQ ID NO: 1268485 - RNA, 16 nt, Human
cucagucucccucccu

SEQ ID NO: 1268486 - RNA, 17 nt, Human
cucagucucccucccuu

SEQ ID NO: 1268487 - RNA, 14 nt, Human
cucaucugcugguc

SEQ ID NO: 1268488 - RNA, 15 nt, Human
cucaucugcuggucc

SEQ ID NO: 1268489 - RNA, 16 nt, Human
cucaucugcugguccg

SEQ ID NO: 1268490 - RNA, 20 nt, Human
cucaucugcugguccguggg

SEQ ID NO: 1268491 - RNA, 12 nt, Human
cucaucugggga

SEQ ID NO: 1268492 - RNA, 19 nt, Human
cucaucuggggagcaggca

SEQ ID NO: 1268493 - RNA, 20 nt, Human
cucaucuggggagcaggcag

SEQ ID NO: 1268494 - RNA, 21 nt, Human
cucaucuggggagcaggcagc

SEQ ID NO: 1268495 - RNA, 12 nt, Human
cucaucugucac

SEQ ID NO: 1268496 - RNA, 14 nt, Human
cucaucugucacca

SEQ ID NO: 1268497 - RNA, 13 nt, Human
cucaucugucccu

SEQ ID NO: 1268498 - RNA, 15 nt, Human
cucaucugucccucc

SEQ ID NO: 1268499 - RNA, 17 nt, Human
cucaucugucccuccgg

SEQ ID NO: 1268500 - RNA, 18 nt, Human
cucaucugucccuccggg

SEQ ID NO: 1268501 - RNA, 22 nt, Human
cucaugccaguaacaggcucaa

SEQ ID NO: 1268502 - RNA, 16 nt, Human
cucaugcauuguccuc

SEQ ID NO: 1268503 - RNA, 14 nt, Human
cucaugccccuggc

SEQ ID NO: 1268504 - RNA, 23 nt, Human
cuccacuuggucugugagaugcu

SEQ ID NO: 1268505 - RNA, 17 nt, Human
cuccacuuggcauuagc

SEQ ID NO: 1268506 - RNA, 13 nt, Human
cuccacuuucagc

SEQ ID NO: 1268507 - RNA, 14 nt, Human
cuccacuuucagcu

SEQ ID NO: 1268508 - RNA, 15 nt, Human
cuccacuuucagcug

SEQ ID NO: 1268509 - RNA, 16 nt, Human
cuccacuuucagcugu

SEQ ID NO: 1268510 - RNA, 17 nt, Human
cuccacuuucagcuguc

SEQ ID NO: 1268511 - RNA, 20 nt, Human
cuccacuuucagcugucuuu

SEQ ID NO: 1268512 - RNA, 18 nt, Human
cuccacuuucagcugucu

SEQ ID NO: 1268513 - RNA, 19 nt, Human
cuccacuuucagcugucuu

SEQ ID NO: 1268514 - RNA, 14 nt, Human
cuccaggggcugcu

SEQ ID NO: 1268515 - RNA, 15 nt, Human
cuccaggggcugcuu

SEQ ID NO: 1268516 - RNA, 18 nt, Human
cuccaggggcugcuuccu

SEQ ID NO: 1268517 - RNA, 21 nt, Human
cuccaggggcugcuuccuccu

SEQ ID NO: 1268518 - RNA, 23 nt, Human
cucccacaugggcccaggccuca

SEQ ID NO: 1268519 - RNA, 22 nt, Human
cucccacaugggcccaggccuc

SEQ ID NO: 1268520 - RNA, 18 nt, Human
cucccaccuccccuuggg

SEQ ID NO: 1268521 - RNA, 13 nt, Human
cucccaccuccug

SEQ ID NO: 1268522 - RNA, 14 nt, Human
cucccaccuccuga

SEQ ID NO: 1268523 - RNA, 15 nt, Human
cucccaccuccugac

SEQ ID NO: 1268524 - RNA, 21 nt, Human
cucccaccuccugacacccuu

SEQ ID NO: 1268525 - RNA, 14 nt, Human
cucccaccugacac

SEQ ID NO: 1268526 - RNA, 15 nt, Human
cucccaccugacaca

SEQ ID NO: 1268527 - RNA, 20 nt, Human
cucccaccugacacaccagg

SEQ ID NO: 1268528 - RNA, 21 nt, Human
cucccaccugacacaccaggc

SEQ ID NO: 1268529 - RNA, 14 nt, Human
cuccccaugugucc

SEQ ID NO: 1268530 - RNA, 18 nt, Human
cuccccauguguccuggu

SEQ ID NO: 1268531 - RNA, 20 nt, Human
cuccccauguguccugguuc

SEQ ID NO: 1268532 - RNA, 21 nt, Human
cuccccauguguccugguucc

SEQ ID NO: 1268533 - RNA, 16 nt, Human
cucccccaacagcugg

SEQ ID NO: 1268534 - RNA, 18 nt, Human
cucuauaccaauaaagug

SEQ ID NO: 1268535 - RNA, 16 nt, Human
cucuaaagcaaauuua

SEQ ID NO: 1268536 - RNA, 13 nt, Human
cucuaaaaucugc

SEQ ID NO: 1268537 - RNA, 15 nt, Human
cucuaaaauuauaaa

SEQ ID NO: 1268538 - RNA, 17 nt, Human
cucuaaaauuauaaaug

SEQ ID NO: 1268539 - RNA, 23 nt, Human
cucguugacuggcuguguguugg

SEQ ID NO: 1268540 - RNA, 19 nt, Human
cucguuuguguucuguuuu

SEQ ID NO: 1268541 - RNA, 13 nt, Human
cucguuuguguuc

SEQ ID NO: 1268542 - RNA, 19 nt, Human
cucuauaccaauaaaguga

SEQ ID NO: 1268543 - RNA, 12 nt, Human
cucuaaagcaaa

SEQ ID NO: 1268544 - RNA, 22 nt, Human
cucuauauuguucagcaugcaa

SEQ ID NO: 1268545 - RNA, 15 nt, Human
cucuaucaccaagga

SEQ ID NO: 1268546 - RNA, 21 nt, Human
cucuauauaccaaagcacauu

SEQ ID NO: 1268547 - RNA, 18 nt, Human
cucuauccucucuuccuc

SEQ ID NO: 1268548 - RNA, 23 nt, Human
cucucaccauuuggauccugugu

SEQ ID NO: 1268549 - RNA, 16 nt, Human
cucucaccauuuggau

SEQ ID NO: 1268550 - RNA, 14 nt, Human
cucucaccucuagg

SEQ ID NO: 1268551 - RNA, 14 nt, Human
cucucaccuggccc

SEQ ID NO: 1268552 - RNA, 23 nt, Human
cucucacggccacacagcugccg

SEQ ID NO: 1268553 - RNA, 12 nt, Human
cucucagcucca

SEQ ID NO: 1268554 - RNA, 13 nt, Human
cucucagcuccag

SEQ ID NO: 1268555 - RNA, 15 nt, Human
cucucagcuccaggu

SEQ ID NO: 1268556 - RNA, 17 nt, Human
cucucaggaccaaagcu

SEQ ID NO: 1268557 - RNA, 13 nt, Human
cucucaggaucca

SEQ ID NO: 1268558 - RNA, 14 nt, Human
cucucaggauccaa

SEQ ID NO: 1268559 - RNA, 16 nt, Human
cucucaggauccaagc

SEQ ID NO: 1268560 - RNA, 14 nt, Human
cucguguguuucua

SEQ ID NO: 1268561 - RNA, 20 nt, Human
cucguugacuggcugugugu

SEQ ID NO: 1268562 - RNA, 14 nt, Human
cucguuaauuugua

SEQ ID NO: 1268563 - RNA, 15 nt, Human
cucgugucuggcaca

SEQ ID NO: 1268564 - RNA, 18 nt, Human
cuccuggggguucuuucu

SEQ ID NO: 1268565 - RNA, 12 nt, Human
cuccugggcccu

SEQ ID NO: 1268566 - RNA, 14 nt, Human
cuccugggcccucu

SEQ ID NO: 1268567 - RNA, 20 nt, Human
cuccuggggguucuuucuuc

SEQ ID NO: 1268568 - RNA, 22 nt, Human
cuccuggggguucuuucuuccu

SEQ ID NO: 1268569 - RNA, 23 nt, Human
cuccuggggguucuuucuuccuc

SEQ ID NO: 1268570 - RNA, 19 nt, Human
cuccuggguucaagcgauu

SEQ ID NO: 1268571 - RNA, 21 nt, Human
cuccuggguuuuguauucucu

SEQ ID NO: 1268572 - RNA, 22 nt, Human
cuccuggguuuuguauucucug

SEQ ID NO: 1268573 - RNA, 20 nt, Human
cucccccaggggcugucccg

SEQ ID NO: 1268574 - RNA, 13 nt, Human
cucccccaucucu

SEQ ID NO: 1268575 - RNA, 15 nt, Human
cucccccccaugcac

SEQ ID NO: 1268576 - RNA, 13 nt, Human
cucccccccaugc

SEQ ID NO: 1268577 - RNA, 21 nt, Human
cucccccaacagcuggacccu

SEQ ID NO: 1268578 - RNA, 19 nt, Human
cucccccaccguugucuca

SEQ ID NO: 1268579 - RNA, 22 nt, Human
cucccccaccguugucucaugc

SEQ ID NO: 1268580 - RNA, 13 nt, Human
cucccccacuuuc

SEQ ID NO: 1268581 - RNA, 19 nt, Human
cucccccacuuucuuucuu

SEQ ID NO: 1268582 - RNA, 12 nt, Human
cucccccagcaa

SEQ ID NO: 1268583 - RNA, 20 nt, Human
cucccccagcaaagccccca

SEQ ID NO: 1268584 - RNA, 21 nt, Human
cucccccagcaaagcccccag

SEQ ID NO: 1268585 - RNA, 22 nt, Human
cucccccagcaaagcccccaga

SEQ ID NO: 1268586 - RNA, 15 nt, Human
cuccuggaucucccu

SEQ ID NO: 1268587 - RNA, 16 nt, Human
cuccuggaucucccug

SEQ ID NO: 1268588 - RNA, 19 nt, Human
cuccuggaucucccugaga

SEQ ID NO: 1268589 - RNA, 21 nt, Human
cuccuggaucucccugagaug

SEQ ID NO: 1268590 - RNA, 18 nt, Human
cuccuggcugucugaggc

SEQ ID NO: 1268591 - RNA, 19 nt, Human
cuccuggcugucugaggcu

SEQ ID NO: 1268592 - RNA, 14 nt, Human
cuccuggcuuccca

SEQ ID NO: 1268593 - RNA, 23 nt, Human
cuccuggcuucccauccccagcg

SEQ ID NO: 1268594 - RNA, 21 nt, Human
cuccuggcuucccauccccag

SEQ ID NO: 1268595 - RNA, 11 nt, Human
cuccucuucca

SEQ ID NO: 1268596 - RNA, 15 nt, Human
cuccuggacuccugc

SEQ ID NO: 1268597 - RNA, 18 nt, Human
cuccucuucaacugacca

SEQ ID NO: 1268598 - RNA, 23 nt, Human
cuccucuucaacugaccagccuc

SEQ ID NO: 1268599 - RNA, 23 nt, Human
cuccucugugaccaaugucuuga

SEQ ID NO: 1268600 - RNA, 22 nt, Human
cuccucugugaccaaugucuug

SEQ ID NO: 1268601 - RNA, 13 nt, Human
cuccucugugacc

SEQ ID NO: 1268602 - RNA, 19 nt, Human
cuccucucugcccuaaugc

SEQ ID NO: 1268603 - RNA, 22 nt, Human
cuccuaagcaacuaggccuuca

SEQ ID NO: 1268604 - RNA, 14 nt, Human
cuccuaagcaccug

SEQ ID NO: 1268605 - RNA, 22 nt, Human
cuccuaagcaccuguaaugugc

SEQ ID NO: 1268606 - RNA, 13 nt, Human
cuccucucugccc

SEQ ID NO: 1268607 - RNA, 14 nt, Human
cuccucucugcccu

SEQ ID NO: 1268608 - RNA, 15 nt, Human
cuccucucugcccua

SEQ ID NO: 1268609 - RNA, 17 nt, Human
cuccguuagcuccugug

SEQ ID NO: 1268610 - RNA, 18 nt, Human
cuccguuagcuccugugg

SEQ ID NO: 1268611 - RNA, 21 nt, Human
cuccguuagcuccuguggccc

SEQ ID NO: 1268612 - RNA, 22 nt, Human
cuccguuagcuccuguggcccc

SEQ ID NO: 1268613 - RNA, 12 nt, Human
cuccguuggcca

SEQ ID NO: 1268614 - RNA, 20 nt, Human
cuccguuggccacuccgaga

SEQ ID NO: 1268615 - RNA, 17 nt, Human
cuccuaaaguacuggga

SEQ ID NO: 1268616 - RNA, 19 nt, Human
auugguguuuuuuucuaug

SEQ ID NO: 1268617 - RNA, 13 nt, Human
auugguguugcca

SEQ ID NO: 1268618 - RNA, 16 nt, Human
auugguguugccaguu

SEQ ID NO: 1268619 - RNA, 21 nt, Human
auugguguugccaguuguccu

SEQ ID NO: 1268620 - RNA, 22 nt, Human
auugguguugccaguuguccuc

SEQ ID NO: 1268621 - RNA, 19 nt, Human
auugguguaagguacuuuc

SEQ ID NO: 1268622 - RNA, 13 nt, Human
auuguauucagag

SEQ ID NO: 1268623 - RNA, 12 nt, Human
auuguauucugg

SEQ ID NO: 1268624 - RNA, 18 nt, Human
auugguguuuuuuucuau

SEQ ID NO: 1268625 - RNA, 18 nt, Human
auuguccaauccuauguu

SEQ ID NO: 1268626 - RNA, 16 nt, Human
auugugauuagacaga

SEQ ID NO: 1268627 - RNA, 22 nt, Human
auugugauuagacagaacaccu

SEQ ID NO: 1268628 - RNA, 18 nt, Human
auugugauucugccuuug

SEQ ID NO: 1268629 - RNA, 23 nt, Human
auugugaucagaccauaauguua

SEQ ID NO: 1268630 - RNA, 20 nt, Human
auugugguuuauauauuuaa

SEQ ID NO: 1268631 - RNA, 21 nt, Human
auugugguuuauauauuuaaa

SEQ ID NO: 1268632 - RNA, 14 nt, Human
auuguguagccuuu

SEQ ID NO: 1268633 - RNA, 15 nt, Human
auuguguagccuuuu

SEQ ID NO: 1268634 - RNA, 16 nt, Human
auuguguagccuuuuu

SEQ ID NO: 1268635 - RNA, 18 nt, Human
auuguguagccuuuuugu

SEQ ID NO: 1268636 - RNA, 22 nt, Human
auuguguagccuuuuuguauaa

SEQ ID NO: 1268637 - RNA, 17 nt, Human
auugugucagacuguuu

SEQ ID NO: 1268638 - RNA, 17 nt, Human
auugugucccauucccc

SEQ ID NO: 1268639 - RNA, 15 nt, Human
auugugcauucuaga

SEQ ID NO: 1268640 - RNA, 20 nt, Human
auugugcaguacuuugugca

SEQ ID NO: 1268641 - RNA, 20 nt, Human
auugugcaauguaaauauuu

SEQ ID NO: 1268642 - RNA, 15 nt, Human
auugugcaaugugua

SEQ ID NO: 1268643 - RNA, 16 nt, Human
auugugcaauguguau

SEQ ID NO: 1268644 - RNA, 17 nt, Human
auugugcaauguguaua

SEQ ID NO: 1268645 - RNA, 18 nt, Human
auugugcaauguguauaa

SEQ ID NO: 1268646 - RNA, 21 nt, Human
auugugcaauguguauaaaca

SEQ ID NO: 1268647 - RNA, 22 nt, Human
auugugcaauguguauaaacaa

SEQ ID NO: 1268648 - RNA, 23 nt, Human
auugugauuagacagaacaccua

SEQ ID NO: 1268649 - RNA, 15 nt, Human
auugugauuggccug

SEQ ID NO: 1268650 - RNA, 16 nt, Human
auugugauuggccugu

SEQ ID NO: 1268651 - RNA, 15 nt, Human
auugugcaauguaaa

SEQ ID NO: 1268652 - RNA, 17 nt, Human
auugugcaauguaaaua

SEQ ID NO: 1268653 - RNA, 18 nt, Human
auugugcaauguaaauau

SEQ ID NO: 1268654 - RNA, 14 nt, Human
auuuaaaacagaca

SEQ ID NO: 1268655 - RNA, 24 nt, Human
auucugucucuggauuauauuaug

SEQ ID NO: 1268656 - RNA, 14 nt, Human
auucugucuugaag

SEQ ID NO: 1268657 - RNA, 20 nt, Human
auucugugccuuguuuuuug

SEQ ID NO: 1268658 - RNA, 19 nt, Human
auucugguuccaggguccc

SEQ ID NO: 1268659 - RNA, 23 nt, Human
auucugguuccagggucccucug

SEQ ID NO: 1268660 - RNA, 17 nt, Human
auucugggggcugcagu

SEQ ID NO: 1268661 - RNA, 18 nt, Human
auucugucccuagguguu

SEQ ID NO: 1268662 - RNA, 14 nt, Human
auucugcaaguaua

SEQ ID NO: 1268663 - RNA, 17 nt, Human
auucugcaguaaaucuu

SEQ ID NO: 1268664 - RNA, 18 nt, Human
auucugcaguaaaucuuu

SEQ ID NO: 1268665 - RNA, 20 nt, Human
auucugcaguaaaucuuuua

SEQ ID NO: 1268666 - RNA, 21 nt, Human
auucugcaguaaaucuuuuac

SEQ ID NO: 1268667 - RNA, 23 nt, Human
auucugcaguaaaucuuuuacaa

SEQ ID NO: 1268668 - RNA, 13 nt, Human
auucugcuccuuc

SEQ ID NO: 1268669 - RNA, 13 nt, Human
auucugcuggccu

SEQ ID NO: 1268670 - RNA, 16 nt, Human
auucugcuggccucug

SEQ ID NO: 1268671 - RNA, 18 nt, Human
auucugcuggccucugcg

SEQ ID NO: 1268672 - RNA, 19 nt, Human
auucugcuggccucugcga

SEQ ID NO: 1268673 - RNA, 22 nt, Human
auucuggacaggauguguuugc

SEQ ID NO: 1268674 - RNA, 15 nt, Human
auucuggacaggaug

SEQ ID NO: 1268675 - RNA, 12 nt, Human
auucuggaccuc

SEQ ID NO: 1268676 - RNA, 16 nt, Human
auucuggaccucuggg

SEQ ID NO: 1268677 - RNA, 16 nt, Human
auucugggggcugcag

SEQ ID NO: 1268678 - RNA, 16 nt, Human
auucugguuccagggu

SEQ ID NO: 1268679 - RNA, 21 nt, Human
auucuucaagaucccauuuga

SEQ ID NO: 1268680 - RNA, 18 nt, Human
auucuucaagaucccauu

SEQ ID NO: 1268681 - RNA, 17 nt, Human
auucuuauuucaugaaa

SEQ ID NO: 1268682 - RNA, 12 nt, Human
auucuuccuuug

SEQ ID NO: 1268683 - RNA, 13 nt, Human
auucuuccuuugu

SEQ ID NO: 1268684 - RNA, 12 nt, Human
auucuucuagag

SEQ ID NO: 1268685 - RNA, 13 nt, Human
auucuucuagagu

SEQ ID NO: 1268686 - RNA, 14 nt, Human
auucuucuagaguu

SEQ ID NO: 1268687 - RNA, 15 nt, Human
auucuucucuguugu

SEQ ID NO: 1268688 - RNA, 16 nt, Human
auucuucucuguuguc

SEQ ID NO: 1268689 - RNA, 15 nt, Human
auucuucucuuccuu

SEQ ID NO: 1268690 - RNA, 21 nt, Human
auucuucucuuccuuuuauca

SEQ ID NO: 1268691 - RNA, 22 nt, Human
auucuuuuauacucagcuuucu

SEQ ID NO: 1268692 - RNA, 17 nt, Human
auugggggaggaaaagu

SEQ ID NO: 1268693 - RNA, 13 nt, Human
auugggguaguug

SEQ ID NO: 1268694 - RNA, 12 nt, Human
auugggguuauu

SEQ ID NO: 1268695 - RNA, 14 nt, Human
auugggguuauuuu

SEQ ID NO: 1268696 - RNA, 15 nt, Human
auuggguaucaccac

SEQ ID NO: 1268697 - RNA, 16 nt, Human
auugggccagcuuuuc

SEQ ID NO: 1268698 - RNA, 18 nt, Human
auugacccacaagaaaug

SEQ ID NO: 1268699 - RNA, 22 nt, Human
auugaaaauguccaggaaagug

SEQ ID NO: 1268700 - RNA, 21 nt, Human
auugacccacaagaaaugaaa

SEQ ID NO: 1268701 - RNA, 14 nt, Human
auuugaaccaauaa

SEQ ID NO: 1268702 - RNA, 20 nt, Human
auuugaacuuuuuauugauu

SEQ ID NO: 1268703 - RNA, 16 nt, Human
auuugaagaacaugug

SEQ ID NO: 1268704 - RNA, 15 nt, Human
auuugaaauaagaau

SEQ ID NO: 1268705 - RNA, 16 nt, Human
auuugaaauaagaauu

SEQ ID NO: 1268706 - RNA, 14 nt, Human
auuugaaauauuga

SEQ ID NO: 1268707 - RNA, 21 nt, Human
auuucuuuuuuaaaugaagaa

SEQ ID NO: 1268708 - RNA, 23 nt, Human
auuucuuuuugggagagacuugu

SEQ ID NO: 1268709 - RNA, 20 nt, Human
auuucuuuuugggagagacu

SEQ ID NO: 1268710 - RNA, 21 nt, Human
auuucuuuuugggagagacuu

SEQ ID NO: 1268711 - RNA, 18 nt, Human
auuucuuuuuuaaaugaa

SEQ ID NO: 1268712 - RNA, 22 nt, Human
auuucuuuuuuaaaugaagaaa

SEQ ID NO: 1268713 - RNA, 15 nt, Human
auuuccccuccuucc

SEQ ID NO: 1268714 - RNA, 16 nt, Human
auuuccccuccuuccc

SEQ ID NO: 1268715 - RNA, 21 nt, Human
auuucuaauuauguagcucuu

SEQ ID NO: 1268716 - RNA, 22 nt, Human
auuucuaauuauguagcucuuu

SEQ ID NO: 1268717 - RNA, 17 nt, Human
auuucuaccauuucaga

SEQ ID NO: 1268718 - RNA, 18 nt, Human
auuucuaccauuucagag

SEQ ID NO: 1268719 - RNA, 18 nt, Human
auuucuacuuugaaguca

SEQ ID NO: 1268720 - RNA, 16 nt, Human
auuucuagcuuaucua

SEQ ID NO: 1268721 - RNA, 18 nt, Human
auuucuagcuuaucuacu

SEQ ID NO: 1268722 - RNA, 21 nt, Human
auuucuagcuuaucuacuucc

SEQ ID NO: 1268723 - RNA, 19 nt, Human
auuuauuuuaauaauguuu

SEQ ID NO: 1268724 - RNA, 20 nt, Human
auuuauuuuaauaauguuuc

SEQ ID NO: 1268725 - RNA, 21 nt, Human
auuuauuuuaauaauguuuca

SEQ ID NO: 1268726 - RNA, 15 nt, Human
auuucaaaaugauuu

SEQ ID NO: 1268727 - RNA, 13 nt, Human
auuucaaaaugcu

SEQ ID NO: 1268728 - RNA, 14 nt, Human
auuucaaaaugcuu

SEQ ID NO: 1268729 - RNA, 15 nt, Human
auuucaaaaugcuuu

SEQ ID NO: 1268730 - RNA, 21 nt, Human
auuucaaaaugcuuuuuauua

SEQ ID NO: 1268731 - RNA, 16 nt, Human
auuucaaacggccuca

SEQ ID NO: 1268732 - RNA, 16 nt, Human
auuucaaaaugcuuuu

SEQ ID NO: 1268733 - RNA, 17 nt, Human
auuucaaauuggagcuu

SEQ ID NO: 1268734 - RNA, 18 nt, Human
auuucauuucaacuguuu

SEQ ID NO: 1268735 - RNA, 22 nt, Human
auuucauuugugccagaaugcu

SEQ ID NO: 1268736 - RNA, 20 nt, Human
auuuccagugaaaucaguua

SEQ ID NO: 1268737 - RNA, 13 nt, Human
auuuccacugugc

SEQ ID NO: 1268738 - RNA, 18 nt, Human
auuucccaugauuucaug

SEQ ID NO: 1268739 - RNA, 22 nt, Human
auuuccauauaaauauuagaaa

SEQ ID NO: 1268740 - RNA, 13 nt, Human
auuuauuccuuug

SEQ ID NO: 1268741 - RNA, 17 nt, Human
auuuauucauauuuucu

SEQ ID NO: 1268742 - RNA, 23 nt, Human
auuuauaaaaauaaaaaacacug

SEQ ID NO: 1268743 - RNA, 12 nt, Human
auuuauuaauau

SEQ ID NO: 1268744 - RNA, 20 nt, Human
auuuauuaauauauauuauc

SEQ ID NO: 1268745 - RNA, 22 nt, Human
auuuauaaaaauaaaaaacacu

SEQ ID NO: 1268746 - RNA, 17 nt, Human
auuuauaaaaauaaaaa

SEQ ID NO: 1268747 - RNA, 15 nt, Human
auuuaguguauccau

SEQ ID NO: 1268748 - RNA, 12 nt, Human
auuuaguuucag

SEQ ID NO: 1268749 - RNA, 14 nt, Human
auuuaguuucagua

SEQ ID NO: 1268750 - RNA, 20 nt, Human
auuuaguuucaguagauugc

SEQ ID NO: 1268751 - RNA, 15 nt, Human
auuuaguuugauuau

SEQ ID NO: 1268752 - RNA, 22 nt, Human
auuuaguuugauuauucagugu

SEQ ID NO: 1268753 - RNA, 23 nt, Human
auuuaguuucaguagauugcaga

SEQ ID NO: 1268754 - RNA, 16 nt, Human
auuuauaaaaaggugu

SEQ ID NO: 1268755 - RNA, 13 nt, Human
auuuagauguaua

SEQ ID NO: 1268756 - RNA, 19 nt, Human
auuuagacuuggauucuuu

SEQ ID NO: 1268757 - RNA, 23 nt, Human
auuuagacuuggauucuuuccau

SEQ ID NO: 1268758 - RNA, 17 nt, Human
auuuagaugauaaagag

SEQ ID NO: 1268759 - RNA, 14 nt, Human
auuuagauuugugu

SEQ ID NO: 1268760 - RNA, 13 nt, Human
auuuaguguucau

SEQ ID NO: 1268761 - RNA, 14 nt, Human
auuuagucauguga

SEQ ID NO: 1268762 - RNA, 13 nt, Human
auuuagugagcau

SEQ ID NO: 1268763 - RNA, 21 nt, Human
auuuagugaucaaauugugca

SEQ ID NO: 1268764 - RNA, 20 nt, Human
auuuaguaucuuuuuauuca

SEQ ID NO: 1268765 - RNA, 18 nt, Human
auuuaguauuuuguuuca

SEQ ID NO: 1268766 - RNA, 16 nt, Human
auuuagucaugugacc

SEQ ID NO: 1268767 - RNA, 23 nt, Human
auuuaaauguuaugacuauguaa

SEQ ID NO: 1268768 - RNA, 17 nt, Human
auuuaaauuuuuuuccu

SEQ ID NO: 1268769 - RNA, 13 nt, Human
auuuaacaagauc

SEQ ID NO: 1268770 - RNA, 13 nt, Human
auuuaacagaaau

SEQ ID NO: 1268771 - RNA, 13 nt, Human
auuuaaaaaacua

SEQ ID NO: 1268772 - RNA, 17 nt, Human
auuuaaaaaacuaaaaa

SEQ ID NO: 1268773 - RNA, 22 nt, Human
auuuaaaaaacuaaaaacuaga

SEQ ID NO: 1268774 - RNA, 12 nt, Human
auuuaaaaauaa

SEQ ID NO: 1268775 - RNA, 18 nt, Human
auuuaaaaauaagucaac

SEQ ID NO: 1268776 - RNA, 19 nt, Human
auuuaaaaauaagucaaca

SEQ ID NO: 1268777 - RNA, 22 nt, Human
auuuaaaaauaagucaacagua

SEQ ID NO: 1268778 - RNA, 23 nt, Human
auuuaaaaauaagucaacaguaa

SEQ ID NO: 1268779 - RNA, 18 nt, Human
auuuagaaaacuuuaaag

SEQ ID NO: 1268780 - RNA, 12 nt, Human
auuuagaagcca

SEQ ID NO: 1268781 - RNA, 13 nt, Human
auuuagaagccaa

SEQ ID NO: 1268782 - RNA, 21 nt, Human
auuuagaagccaacuaugauu

SEQ ID NO: 1268783 - RNA, 22 nt, Human
auuuagaagccaacuaugauua

SEQ ID NO: 1268784 - RNA, 23 nt, Human
auuuagaagccaacuaugauuau

SEQ ID NO: 1268785 - RNA, 21 nt, Human
auuuuauuuuuuucugaauua

SEQ ID NO: 1268786 - RNA, 15 nt, Human
auuuucaaaaccagg

SEQ ID NO: 1268787 - RNA, 17 nt, Human
auuuucaaaaccagguc

SEQ ID NO: 1268788 - RNA, 16 nt, Human
auuuucaaaaccaggu

SEQ ID NO: 1268789 - RNA, 15 nt, Human
auuuucaaagacuua

SEQ ID NO: 1268790 - RNA, 13 nt, Human
auuuuagcagaga

SEQ ID NO: 1268791 - RNA, 17 nt, Human
auuuuagccuucucugu

SEQ ID NO: 1268792 - RNA, 18 nt, Human
auuuuagccuucucuguu

SEQ ID NO: 1268793 - RNA, 21 nt, Human
auuuuagccuucucuguucau

SEQ ID NO: 1268794 - RNA, 18 nt, Human
auuuucaacgcagcccug

SEQ ID NO: 1268795 - RNA, 16 nt, Human
auuuucaaagacuuaa

SEQ ID NO: 1268796 - RNA, 17 nt, Human
auuuucaaagacuuaag

SEQ ID NO: 1268797 - RNA, 22 nt, Human
auuuucaaagcuuuuuccagag

SEQ ID NO: 1268798 - RNA, 20 nt, Human
auuuucaacgcagcccugcu

SEQ ID NO: 1268799 - RNA, 13 nt, Human
auuuucaagaaac

SEQ ID NO: 1268800 - RNA, 14 nt, Human
auuuucaagaaacu

SEQ ID NO: 1268801 - RNA, 16 nt, Human
auuuucaagaaacuga

SEQ ID NO: 1268802 - RNA, 17 nt, Human
auuuucaagaaacugag

SEQ ID NO: 1268803 - RNA, 22 nt, Human
auuuucaagaaacugaggaauu

SEQ ID NO: 1268804 - RNA, 23 nt, Human
auuuucaagaaacugaggaauuu

SEQ ID NO: 1268805 - RNA, 24 nt, Human
auuuucaagaauaaucacgcuuuc

SEQ ID NO: 1268806 - RNA, 17 nt, Human
auuuucaacauuucaaa

SEQ ID NO: 1268807 - RNA, 21 nt, Human
auuuucaacauuucaaaauga

SEQ ID NO: 1268808 - RNA, 14 nt, Human
auuuucacuguguc

SEQ ID NO: 1268809 - RNA, 13 nt, Human
auuuucacuguag

SEQ ID NO: 1268810 - RNA, 16 nt, Human
auuuucaauagccacu

SEQ ID NO: 1268811 - RNA, 20 nt, Human
auuuucaauagccacuaacc

SEQ ID NO: 1268812 - RNA, 17 nt, Human
auuuucaauagccacua

SEQ ID NO: 1268813 - RNA, 17 nt, Human
auuuuccaaauguaaua

SEQ ID NO: 1268814 - RNA, 19 nt, Human
auuuuccaggacuguuuca

SEQ ID NO: 1268815 - RNA, 15 nt, Human
auuuuccaggcuucu

SEQ ID NO: 1268816 - RNA, 21 nt, Human
auuuuccaggcuucugcuggg

SEQ ID NO: 1268817 - RNA, 21 nt, Human
auuuuccuaauaaaguucugu

SEQ ID NO: 1268818 - RNA, 20 nt, Human
auuuuccuauauuacgguuu

SEQ ID NO: 1268819 - RNA, 17 nt, Human
auuuucauccuugucuu

SEQ ID NO: 1268820 - RNA, 15 nt, Human
auuuucauuauuccu

SEQ ID NO: 1268821 - RNA, 14 nt, Human
auuuuccaaagagu

SEQ ID NO: 1268822 - RNA, 14 nt, Human
auuuuccaaaugua

SEQ ID NO: 1268823 - RNA, 22 nt, Human
auuuucaguuauuauauuuaca

SEQ ID NO: 1268824 - RNA, 20 nt, Human
auuuucauaaguauuucaaa

SEQ ID NO: 1268825 - RNA, 21 nt, Human
auuuucauaaguauuucaaau

SEQ ID NO: 1268826 - RNA, 22 nt, Human
auuuucauaaguauuucaaauu

SEQ ID NO: 1268827 - RNA, 13 nt, Human
auuuucacugugu

SEQ ID NO: 1268828 - RNA, 17 nt, Human
auuuucagcaaacucuu

SEQ ID NO: 1268829 - RNA, 18 nt, Human
auuuucagcaaacucuuu

SEQ ID NO: 1268830 - RNA, 19 nt, Human
auuuucagcaaacucuuuu

SEQ ID NO: 1268831 - RNA, 17 nt, Human
auuuuaaaaaaugguca

SEQ ID NO: 1268832 - RNA, 16 nt, Human
auuuuaaaaaaugguc

SEQ ID NO: 1268833 - RNA, 13 nt, Human
auuuuaaaauuug

SEQ ID NO: 1268834 - RNA, 14 nt, Human
auuuuaaaauuugu

SEQ ID NO: 1268835 - RNA, 17 nt, Human
auuuuaaaauuuguucu

SEQ ID NO: 1268836 - RNA, 18 nt, Human
auuuuaaaagaaugauua

SEQ ID NO: 1268837 - RNA, 22 nt, Human
auuuuaaaagaaugauuaugaa

SEQ ID NO: 1268838 - RNA, 13 nt, Human
auuuuaaacaaag

SEQ ID NO: 1268839 - RNA, 22 nt, Human
auuuuaaacaaagguugagaug

SEQ ID NO: 1268840 - RNA, 15 nt, Human
auuuuaaaauuuguu

SEQ ID NO: 1268841 - RNA, 13 nt, Human
auuuuaaacacau

SEQ ID NO: 1268842 - RNA, 14 nt, Human
auuuuaaacacauu

SEQ ID NO: 1268843 - RNA, 23 nt, Human
auuuuaaacacauuaggaaaagu

SEQ ID NO: 1268844 - RNA, 15 nt, Human
auuuuaaacagagga

SEQ ID NO: 1268845 - RNA, 12 nt, Human
auuuuaaagaau

SEQ ID NO: 1268846 - RNA, 13 nt, Human
auuuuaaagaauu

SEQ ID NO: 1268847 - RNA, 17 nt, Human
auuuuaaagaauugugu

SEQ ID NO: 1268848 - RNA, 12 nt, Human
auuuuaaagaca

SEQ ID NO: 1268849 - RNA, 22 nt, Human
auuuuaauguacuaauauuucu

SEQ ID NO: 1268850 - RNA, 13 nt, Human
auuuuaauuauua

SEQ ID NO: 1268851 - RNA, 19 nt, Human
auuuuaauuauuauucuuc

SEQ ID NO: 1268852 - RNA, 17 nt, Human
auuuuaccuuugacaaa

SEQ ID NO: 1268853 - RNA, 15 nt, Human
auuuuacauuaaauu

SEQ ID NO: 1268854 - RNA, 12 nt, Human
auuuuacauuaa

SEQ ID NO: 1268855 - RNA, 14 nt, Human
auuuuacaugaagu

SEQ ID NO: 1268856 - RNA, 19 nt, Human
auuuuacaugaaguauuuu

SEQ ID NO: 1268857 - RNA, 13 nt, Human
auuuuacaugaag

SEQ ID NO: 1268858 - RNA, 16 nt, Human
auuuuacauaaauuua

SEQ ID NO: 1268859 - RNA, 17 nt, Human
auuuuacauaaauuuag

SEQ ID NO: 1268860 - RNA, 23 nt, Human
auuuuaauuauuauucuucauaa

SEQ ID NO: 1268861 - RNA, 18 nt, Human
auuuguauaaaauaauuu

SEQ ID NO: 1268862 - RNA, 19 nt, Human
auuuguauaaaauaauuuu

SEQ ID NO: 1268863 - RNA, 21 nt, Human
auuuguauaaaauaauuuuua

SEQ ID NO: 1268864 - RNA, 13 nt, Human
auuugaaguguaa

SEQ ID NO: 1268865 - RNA, 14 nt, Human
auuugaaucagccu

SEQ ID NO: 1268866 - RNA, 23 nt, Human
auuugaaucagccuacaggccuc

SEQ ID NO: 1268867 - RNA, 17 nt, Human
auuuuaaaagaaugauu

SEQ ID NO: 1268868 - RNA, 18 nt, Human
auuuguuuuuaaacugua

SEQ ID NO: 1268869 - RNA, 20 nt, Human
auuuguuuuuaaacuguaca

SEQ ID NO: 1268870 - RNA, 22 nt, Human
auuuguuuuuaaacuguacagu

SEQ ID NO: 1268871 - RNA, 21 nt, Human
auuuguuuuuaaacuguacag

SEQ ID NO: 1268872 - RNA, 15 nt, Human
auuuguuuuggauau

SEQ ID NO: 1268873 - RNA, 16 nt, Human
auuuguuuuggauaua

SEQ ID NO: 1268874 - RNA, 15 nt, Human
auuuguuuuguuuac

SEQ ID NO: 1268875 - RNA, 16 nt, Human
auuuguuuuguuuaca

SEQ ID NO: 1268876 - RNA, 18 nt, Human
auuuguuuuguuuacaga

SEQ ID NO: 1268877 - RNA, 16 nt, Human
auuuguuuuuaaacug

SEQ ID NO: 1268878 - RNA, 17 nt, Human
auuuguuuuuaaacugu

SEQ ID NO: 1268879 - RNA, 14 nt, Human
auuugugacaaaaa

SEQ ID NO: 1268880 - RNA, 15 nt, Human
auuugugacaaaaaa

SEQ ID NO: 1268881 - RNA, 17 nt, Human
auuugugacaaaaaauu

SEQ ID NO: 1268882 - RNA, 15 nt, Human
auuuuaaagaccccu

SEQ ID NO: 1268883 - RNA, 18 nt, Human
auuuugguccaaguugug

SEQ ID NO: 1268884 - RNA, 23 nt, Human
auguguguuuuaaaaugagaaau

SEQ ID NO: 1268885 - RNA, 16 nt, Human
auguguguguguguau

SEQ ID NO: 1268886 - RNA, 16 nt, Human
auguguguuuugcuaa

SEQ ID NO: 1268887 - RNA, 12 nt, Human
augugugugugc

SEQ ID NO: 1268888 - RNA, 20 nt, Human
auguggccccugaacaagaa

SEQ ID NO: 1268889 - RNA, 22 nt, Human
auguggccccugaacaagaauu

SEQ ID NO: 1268890 - RNA, 13 nt, Human
auguggcuggaag

SEQ ID NO: 1268891 - RNA, 14 nt, Human
auguggcuggaaga

SEQ ID NO: 1268892 - RNA, 20 nt, Human
auguggcuggaagauccugc

SEQ ID NO: 1268893 - RNA, 20 nt, Human
augugcuaguaauuggaaag

SEQ ID NO: 1268894 - RNA, 18 nt, Human
auguggaccuuagaauac

SEQ ID NO: 1268895 - RNA, 18 nt, Human
auguggcaaggaaaaaca

SEQ ID NO: 1268896 - RNA, 13 nt, Human
auguggcaggggu

SEQ ID NO: 1268897 - RNA, 18 nt, Human
auguggccccugaacaag

SEQ ID NO: 1268898 - RNA, 19 nt, Human
augugcuaguaauuggaaa

SEQ ID NO: 1268899 - RNA, 11 nt, Human
augugccuauu

SEQ ID NO: 1268900 - RNA, 19 nt, Human
augugccuauugcuagagc

SEQ ID NO: 1268901 - RNA, 23 nt, Human
augugccuauugcuagagcuccu

SEQ ID NO: 1268902 - RNA, 20 nt, Human
augugccuauugcuagagcu

SEQ ID NO: 1268903 - RNA, 20 nt, Human
uuuuaauaauguuucaaaca

SEQ ID NO: 1268904 - RNA, 19 nt, Human
augugcccaguuaaucuug

SEQ ID NO: 1268905 - RNA, 16 nt, Human
uuuuaauaauguuuca

SEQ ID NO: 1268906 - RNA, 12 nt, Human
uuuuaauaaugu

SEQ ID NO: 1268907 - RNA, 19 nt, Human
uuuuaauaaaaauaauuuu

SEQ ID NO: 1268908 - RNA, 15 nt, Human
uuuuaauaaaagaaa

SEQ ID NO: 1268909 - RNA, 12 nt, Human
uuuuaauaaauu

SEQ ID NO: 1268910 - RNA, 14 nt, Human
uuuuaauaaauuuc

SEQ ID NO: 1268911 - RNA, 13 nt, Human
uuuuaauaauguu

SEQ ID NO: 1268912 - RNA, 14 nt, Human
uuuuaauaauguuu

SEQ ID NO: 1268913 - RNA, 14 nt, Human
uuuuaauaaacacu

SEQ ID NO: 1268914 - RNA, 19 nt, Human
uuuuaaguuucucugcaga

SEQ ID NO: 1268915 - RNA, 20 nt, Human
uuuuaaguuucucugcagaa

SEQ ID NO: 1268916 - RNA, 16 nt, Human
auguucagauuauugg

SEQ ID NO: 1268917 - RNA, 23 nt, Human
auguucagaagguugcucuagau

SEQ ID NO: 1268918 - RNA, 22 nt, Human
auguucacuuuugacaaaggca

SEQ ID NO: 1268919 - RNA, 12 nt, Human
auguuagccagg

SEQ ID NO: 1268920 - RNA, 20 nt, Human
auguuaagggaagaauucca

SEQ ID NO: 1268921 - RNA, 15 nt, Human
auguuaauauugauu

SEQ ID NO: 1268922 - RNA, 14 nt, Human
auguuaaguuauau

SEQ ID NO: 1268923 - RNA, 17 nt, Human
auguuacuacaugcacu

SEQ ID NO: 1268924 - RNA, 16 nt, Human
auguuaaaauguguug

SEQ ID NO: 1268925 - RNA, 23 nt, Human
auguguguuuugcuaaaggaaaa

SEQ ID NO: 1268926 - RNA, 22 nt, Human
auguguuggggaagggccugcc

SEQ ID NO: 1268927 - RNA, 17 nt, Human
auguguuuacuuuaugu

SEQ ID NO: 1268928 - RNA, 19 nt, Human
auguuaaaaaaauaagaag

SEQ ID NO: 1268929 - RNA, 22 nt, Human
auguuaaaaaaauaagaagaau

SEQ ID NO: 1268930 - RNA, 12 nt, Human
auguuaaaaugu

SEQ ID NO: 1268931 - RNA, 21 nt, Human
auguuaaaaaaauaagaagaa

SEQ ID NO: 1268932 - RNA, 14 nt, Human
auguuaaaaugugu

SEQ ID NO: 1268933 - RNA, 15 nt, Human
auguuaaaauguguu

SEQ ID NO: 1268934 - RNA, 20 nt, Human
auguugcccuguugcugccu

SEQ ID NO: 1268935 - RNA, 17 nt, Human
uuuuacuuuuaaacugu

SEQ ID NO: 1268936 - RNA, 18 nt, Human
uuuuacuuuuaaacugug

SEQ ID NO: 1268937 - RNA, 20 nt, Human
uuuuacuuuuaaacugugua

SEQ ID NO: 1268938 - RNA, 12 nt, Human
uuuuacuuuugu

SEQ ID NO: 1268939 - RNA, 13 nt, Human
uuuuagcuuuugu

SEQ ID NO: 1268940 - RNA, 12 nt, Human
uuuuaggaaaug

SEQ ID NO: 1268941 - RNA, 11 nt, Human
uuuuaggaaau

SEQ ID NO: 1268942 - RNA, 18 nt, Human
uuuuaggaagcaagcuua

SEQ ID NO: 1268943 - RNA, 20 nt, Human
uuuuaggagcuaaggcucua

SEQ ID NO: 1268944 - RNA, 23 nt, Human
uuuuaggagcuaaggcucuauga

SEQ ID NO: 1268945 - RNA, 18 nt, Human
auguugcauagaauaaaa

SEQ ID NO: 1268946 - RNA, 17 nt, Human
auguugcauagaauaaa

SEQ ID NO: 1268947 - RNA, 18 nt, Human
auguucaucaaugaauga

SEQ ID NO: 1268948 - RNA, 16 nt, Human
auguucagcacugucc

SEQ ID NO: 1268949 - RNA, 19 nt, Human
auguucagcacugucccuu

SEQ ID NO: 1268950 - RNA, 22 nt, Human
auguucagcacugucccuugcc

SEQ ID NO: 1268951 - RNA, 22 nt, Human
auguugccauccuaccgucuuu

SEQ ID NO: 1268952 - RNA, 20 nt, Human
uuuucuggccaguguuuaaa

SEQ ID NO: 1268953 - RNA, 14 nt, Human
uuuucucuaggaaa

SEQ ID NO: 1268954 - RNA, 13 nt, Human
uuuucuccuccca

SEQ ID NO: 1268955 - RNA, 14 nt, Human
uuuucuccucccag

SEQ ID NO: 1268956 - RNA, 19 nt, Human
uuuucuccucccaggaacu

SEQ ID NO: 1268957 - RNA, 21 nt, Human
uuuucucgcuguccuuucuag

SEQ ID NO: 1268958 - RNA, 16 nt, Human
uuuucucuaggaaaua

SEQ ID NO: 1268959 - RNA, 23 nt, Human
uuuucucccuggauuuuuaccag

SEQ ID NO: 1268960 - RNA, 19 nt, Human
uuuucaucuucaguugucu

SEQ ID NO: 1268961 - RNA, 21 nt, Human
uuuucaugauuuugaaaccau

SEQ ID NO: 1268962 - RNA, 21 nt, Human
uuuucaugauuuugaaaucau

SEQ ID NO: 1268963 - RNA, 17 nt, Human
uuuucaugcaaacucuu

SEQ ID NO: 1268964 - RNA, 18 nt, Human
uuuucauccauaacugaa

SEQ ID NO: 1268965 - RNA, 20 nt, Human
uuuucauccauaacugaaca

SEQ ID NO: 1268966 - RNA, 13 nt, Human
uuuucauccuaaa

SEQ ID NO: 1268967 - RNA, 14 nt, Human
uuuucaucuucagu

SEQ ID NO: 1268968 - RNA, 16 nt, Human
uuuucaucuucaguug

SEQ ID NO: 1268969 - RNA, 21 nt, Human
uuuucaucuucaguugucucu

SEQ ID NO: 1268970 - RNA, 13 nt, Human
uuuucauuuaucu

SEQ ID NO: 1268971 - RNA, 22 nt, Human
uuuucucccuggauuuuuacca

SEQ ID NO: 1268972 - RNA, 21 nt, Human
uuuucuccucacuguauccag

SEQ ID NO: 1268973 - RNA, 12 nt, Human
uuuuauuaugaa

SEQ ID NO: 1268974 - RNA, 19 nt, Human
uuuuauuaaugcacuuucu

SEQ ID NO: 1268975 - RNA, 19 nt, Human
uuuuauuaauuuuaguuuu

SEQ ID NO: 1268976 - RNA, 15 nt, Human
uuuuauuaguauugu

SEQ ID NO: 1268977 - RNA, 14 nt, Human
uuuuagguucuaaa

SEQ ID NO: 1268978 - RNA, 15 nt, Human
uuuuagguucuaaag

SEQ ID NO: 1268979 - RNA, 16 nt, Human
uuuuagguucuaaagu

SEQ ID NO: 1268980 - RNA, 18 nt, Human
uuuuagguucuaaaguuc

SEQ ID NO: 1268981 - RNA, 23 nt, Human
uuuuagguucuaaaguucuaaga

SEQ ID NO: 1268982 - RNA, 14 nt, Human
uuuuauuaaugcac

SEQ ID NO: 1268983 - RNA, 12 nt, Human
uuuuagguucua

SEQ ID NO: 1268984 - RNA, 13 nt, Human
uuuuagguucuaa

SEQ ID NO: 1268985 - RNA, 20 nt, Human
uuuuauuaguauuguugucc

SEQ ID NO: 1268986 - RNA, 22 nt, Human
uuuuauuaguauuguuguccuu

SEQ ID NO: 1268987 - RNA, 23 nt, Human
uuuuauuaguauuguuguccuuu

SEQ ID NO: 1268988 - RNA, 14 nt, Human
uuuuauuaugcauu

SEQ ID NO: 1268989 - RNA, 13 nt, Human
uuuuauuuaaaaa

SEQ ID NO: 1268990 - RNA, 22 nt, Human
uuuucaguuuauuugaaccaau

SEQ ID NO: 1268991 - RNA, 12 nt, Human
uuuucaguuguu

SEQ ID NO: 1268992 - RNA, 16 nt, Human
uuuucauacauuuucu

SEQ ID NO: 1268993 - RNA, 18 nt, Human
uuuucauacauuuucuaa

SEQ ID NO: 1268994 - RNA, 21 nt, Human
uuuucauacauuuucuaagaa

SEQ ID NO: 1268995 - RNA, 15 nt, Human
uuuucauaggucuga

SEQ ID NO: 1268996 - RNA, 17 nt, Human
uuuucauaggucugaaa

SEQ ID NO: 1268997 - RNA, 16 nt, Human
uuuucauaggucugaa

SEQ ID NO: 1268998 - RNA, 16 nt, Human
uuuuauuuccuaugau

SEQ ID NO: 1268999 - RNA, 18 nt, Human
uuuuauuuccuaugaugu

SEQ ID NO: 1269000 - RNA, 11 nt, Human
uuuuauuuccu

SEQ ID NO: 1269001 - RNA, 15 nt, Human
uuuuauuugcaugug

SEQ ID NO: 1269002 - RNA, 17 nt, Human
uuuuauuuucaaaacca

SEQ ID NO: 1269003 - RNA, 13 nt, Human
uuuucaguuacuu

SEQ ID NO: 1269004 - RNA, 15 nt, Human
uuuucaguuguucuu

SEQ ID NO: 1269005 - RNA, 17 nt, Human
auguuuucaggcuagau

SEQ ID NO: 1269006 - RNA, 21 nt, Human
auguuuucaggcuagauguau

SEQ ID NO: 1269007 - RNA, 23 nt, Human
auguuuuggccaaugcaccuaaa

SEQ ID NO: 1269008 - RNA, 14 nt, Human
auguuuaucugcuu

SEQ ID NO: 1269009 - RNA, 14 nt, Human
uuuucugguucuaa

SEQ ID NO: 1269010 - RNA, 15 nt, Human
uuuucugguucuaac

SEQ ID NO: 1269011 - RNA, 17 nt, Human
uuuucugguucuaacau

SEQ ID NO: 1269012 - RNA, 14 nt, Human
uuuucuguaauuca

SEQ ID NO: 1269013 - RNA, 14 nt, Human
uuuucuguaccagu

SEQ ID NO: 1269014 - RNA, 21 nt, Human
uuuucuguaccaguuaauuuu

SEQ ID NO: 1269015 - RNA, 17 nt, Human
uuuucuguauaaauguc

SEQ ID NO: 1269016 - RNA, 17 nt, Human
uuuucugugccugaaua

SEQ ID NO: 1269017 - RNA, 18 nt, Human
uuuucugugccugaauau

SEQ ID NO: 1269018 - RNA, 15 nt, Human
auguuguguuuuuaa

SEQ ID NO: 1269019 - RNA, 12 nt, Human
auguuguuauuu

SEQ ID NO: 1269020 - RNA, 13 nt, Human
auguuguuauuua

SEQ ID NO: 1269021 - RNA, 14 nt, Human
auguuguuauuuaa

SEQ ID NO: 1269022 - RNA, 15 nt, Human
auguuguuauuuaaa

SEQ ID NO: 1269023 - RNA, 17 nt, Human
auguuguuauuuaaaga

SEQ ID NO: 1269024 - RNA, 14 nt, Human
auguuguugaaagg

SEQ ID NO: 1269025 - RNA, 17 nt, Human
auguuuaguaaucauau

SEQ ID NO: 1269026 - RNA, 17 nt, Human
auuaaaccggaccaucu

SEQ ID NO: 1269027 - RNA, 14 nt, Human
auuaaacgauuuuu

SEQ ID NO: 1269028 - RNA, 15 nt, Human
auuaaacgauuuuua

SEQ ID NO: 1269029 - RNA, 22 nt, Human
auuaaacgauuuuuaaaaugua

SEQ ID NO: 1269030 - RNA, 21 nt, Human
auuaaacgauuuuuaaaaugu

SEQ ID NO: 1269031 - RNA, 18 nt, Human
auuaaacuuuuaauucau

SEQ ID NO: 1269032 - RNA, 19 nt, Human
auuaaacuuuuaauucauu

SEQ ID NO: 1269033 - RNA, 23 nt, Human
auuaaacaugacuccauagaccu

SEQ ID NO: 1269034 - RNA, 16 nt, Human
auuaaaagaauaucug

SEQ ID NO: 1269035 - RNA, 14 nt, Human
auuaaaagaauauc

SEQ ID NO: 1269036 - RNA, 14 nt, Human
auuaaaccaucucc

SEQ ID NO: 1269037 - RNA, 16 nt, Human
auuaaaccaucucccu

SEQ ID NO: 1269038 - RNA, 17 nt, Human
auuaaaccaucucccug

SEQ ID NO: 1269039 - RNA, 18 nt, Human
auuaaaccaucucccugg

SEQ ID NO: 1269040 - RNA, 22 nt, Human
auuaaaccaucucccuggugcu

SEQ ID NO: 1269041 - RNA, 13 nt, Human
uuuuguuuccuuu

SEQ ID NO: 1269042 - RNA, 18 nt, Human
uuuuguuucaaugaggug

SEQ ID NO: 1269043 - RNA, 16 nt, Human
uuuuguuuaccagaga

SEQ ID NO: 1269044 - RNA, 16 nt, Human
uuuuguucaaagccag

SEQ ID NO: 1269045 - RNA, 15 nt, Human
uuuuguuauuaaaca

SEQ ID NO: 1269046 - RNA, 19 nt, Human
uuuugugauggagugcugu

SEQ ID NO: 1269047 - RNA, 21 nt, Human
uuuugugaugucccaacuugu

SEQ ID NO: 1269048 - RNA, 13 nt, Human
uuuugcugagacu

SEQ ID NO: 1269049 - RNA, 22 nt, Human
uuuugcuguaauguuaauauug

SEQ ID NO: 1269050 - RNA, 17 nt, Human
uuuugcccauuuugaau

SEQ ID NO: 1269051 - RNA, 15 nt, Human
uuuugccuuuugcaa

SEQ ID NO: 1269052 - RNA, 21 nt, Human
uuuugcgguucaggaaaauug

SEQ ID NO: 1269053 - RNA, 19 nt, Human
uuuugcugagacuaaucuu

SEQ ID NO: 1269054 - RNA, 13 nt, Human
uuuugcuggaaua

SEQ ID NO: 1269055 - RNA, 12 nt, Human
uuuuuaucaugu

SEQ ID NO: 1269056 - RNA, 17 nt, Human
uuuuuaucaugcauguc

SEQ ID NO: 1269057 - RNA, 19 nt, Human
uuuuuauauuugaaauauu

SEQ ID NO: 1269058 - RNA, 12 nt, Human
uuuuuaggaaau

SEQ ID NO: 1269059 - RNA, 13 nt, Human
uuuuuaggaaaug

SEQ ID NO: 1269060 - RNA, 20 nt, Human
uuuuuaggaagcaagcuuaa

SEQ ID NO: 1269061 - RNA, 12 nt, Human
uuuuuaguugaa

SEQ ID NO: 1269062 - RNA, 15 nt, Human
uuuuuaguugaauuu

SEQ ID NO: 1269063 - RNA, 22 nt, Human
uuuuguuugcuucauguguccc

SEQ ID NO: 1269064 - RNA, 20 nt, Human
uuuuuacccauuuguucaua

SEQ ID NO: 1269065 - RNA, 15 nt, Human
uuuuuacugcucuga

SEQ ID NO: 1269066 - RNA, 12 nt, Human
uuuugcagcuuu

SEQ ID NO: 1269067 - RNA, 9 nt, Human
uuuugcagu

SEQ ID NO: 1269068 - RNA, 13 nt, Human
uuuugcaguaacu

SEQ ID NO: 1269069 - RNA, 14 nt, Human
uuuugcaguaacug

SEQ ID NO: 1269070 - RNA, 16 nt, Human
uuuugcaguaacuguu

SEQ ID NO: 1269071 - RNA, 15 nt, Human
uuuugcaguaacugu

SEQ ID NO: 1269072 - RNA, 18 nt, Human
uuuugcauuuaaaacaga

SEQ ID NO: 1269073 - RNA, 15 nt, Human
uuuugccauuaaacu

SEQ ID NO: 1269074 - RNA, 19 nt, Human
uuuugcccauuuugaauca

SEQ ID NO: 1269075 - RNA, 13 nt, Human
uuuugcccuuuga

SEQ ID NO: 1269076 - RNA, 14 nt, Human
uuuugccacagcuu

SEQ ID NO: 1269077 - RNA, 16 nt, Human
uuuugccacagcuuuu

SEQ ID NO: 1269078 - RNA, 20 nt, Human
uuuugccacagcuuuugcaa

SEQ ID NO: 1269079 - RNA, 16 nt, Human
uuuugauauuucuagc

SEQ ID NO: 1269080 - RNA, 16 nt, Human
uuuugaugaguuguga

SEQ ID NO: 1269081 - RNA, 23 nt, Human
uuuugaugaacaaaauuuccuaa

SEQ ID NO: 1269082 - RNA, 16 nt, Human
uuuugauguaaagaug

SEQ ID NO: 1269083 - RNA, 18 nt, Human
uuuugauguaaagauguu

SEQ ID NO: 1269084 - RNA, 20 nt, Human
uuuugauuuaauguuuucag

SEQ ID NO: 1269085 - RNA, 20 nt, Human
uuuugauuuguacugaaaaa

SEQ ID NO: 1269086 - RNA, 21 nt, Human
uuuugauuuguacugaaaaau

SEQ ID NO: 1269087 - RNA, 13 nt, Human
uuuugcaaagaaa

SEQ ID NO: 1269088 - RNA, 19 nt, Human
uuuugcaaagauuuaaucu

SEQ ID NO: 1269089 - RNA, 17 nt, Human
uuuugcaaagauuuaau

SEQ ID NO: 1269090 - RNA, 21 nt, Human
uuuugcaaccaggaacagcaa

SEQ ID NO: 1269091 - RNA, 17 nt, Human
uuuugcaaccucgcugg

SEQ ID NO: 1269092 - RNA, 21 nt, Human
uuuugcaaccucgcuggacuc

SEQ ID NO: 1269093 - RNA, 18 nt, Human
uuuugcaaucccuuaaua

SEQ ID NO: 1269094 - RNA, 20 nt, Human
uuuugcacauguuuccucua

SEQ ID NO: 1269095 - RNA, 17 nt, Human
uuuugcacagccaaauu

SEQ ID NO: 1269096 - RNA, 14 nt, Human
auuaagcaucagaa

SEQ ID NO: 1269097 - RNA, 17 nt, Human
auuaagcaucagaaacu

SEQ ID NO: 1269098 - RNA, 17 nt, Human
auuaagccacuuaaaau

SEQ ID NO: 1269099 - RNA, 20 nt, Human
auuaagccacuuaaaauguu

SEQ ID NO: 1269100 - RNA, 11 nt, Human
auuaagcaaau

SEQ ID NO: 1269101 - RNA, 12 nt, Human
auuaaagaauau

SEQ ID NO: 1269102 - RNA, 15 nt, Human
auuaaagcauuuaga

SEQ ID NO: 1269103 - RNA, 15 nt, Human
auuaaagaauaugaa

SEQ ID NO: 1269104 - RNA, 15 nt, Human
auuaaagacuccagu

SEQ ID NO: 1269105 - RNA, 16 nt, Human
auuaaagaaaaaaaug

SEQ ID NO: 1269106 - RNA, 17 nt, Human
auuaaagaaaaaaaugu

SEQ ID NO: 1269107 - RNA, 18 nt, Human
auuaaagaaaaaaaugua

SEQ ID NO: 1269108 - RNA, 19 nt, Human
auuaaagaaaaaaauguau

SEQ ID NO: 1269109 - RNA, 22 nt, Human
auuaaagaaaaaaauguauuuu

SEQ ID NO: 1269110 - RNA, 21 nt, Human
auuaaagaaaaaaauguauuu

SEQ ID NO: 1269111 - RNA, 14 nt, Human
auuaaagaagaccu

SEQ ID NO: 1269112 - RNA, 15 nt, Human
auuaaagaagaccug

SEQ ID NO: 1269113 - RNA, 16 nt, Human
auuaaagaagaccuga

SEQ ID NO: 1269114 - RNA, 21 nt, Human
auuaaagaagaccugagaaug

SEQ ID NO: 1269115 - RNA, 22 nt, Human
auuaaagaagaccugagaaugu

SEQ ID NO: 1269116 - RNA, 20 nt, Human
auuaaagaaggguugagcug

SEQ ID NO: 1269117 - RNA, 21 nt, Human
auuaaagaaggguugagcugg

SEQ ID NO: 1269118 - RNA, 13 nt, Human
uuuugaggcaaaa

SEQ ID NO: 1269119 - RNA, 18 nt, Human
uuuugaggcaaaagaagg

SEQ ID NO: 1269120 - RNA, 12 nt, Human
uuuugagauauu

SEQ ID NO: 1269121 - RNA, 13 nt, Human
uuuugagauauua

SEQ ID NO: 1269122 - RNA, 23 nt, Human
uuuugagauauuaaugcccagac

SEQ ID NO: 1269123 - RNA, 15 nt, Human
uuuugaggagcccca

SEQ ID NO: 1269124 - RNA, 19 nt, Human
uuuugauaugcauauuugu

SEQ ID NO: 1269125 - RNA, 18 nt, Human
uuuugauacuaagcauug

SEQ ID NO: 1269126 - RNA, 17 nt, Human
auuacauuuguauaaaa

SEQ ID NO: 1269127 - RNA, 21 nt, Human
auuacauuacugaaaacuuca

SEQ ID NO: 1269128 - RNA, 22 nt, Human
auuacauuacugaaaacuucau

SEQ ID NO: 1269129 - RNA, 18 nt, Human
auuacauuuguauaaaau

SEQ ID NO: 1269130 - RNA, 20 nt, Human
auuacauuuguauaaaauaa

SEQ ID NO: 1269131 - RNA, 15 nt, Human
auuaccauguaaugg

SEQ ID NO: 1269132 - RNA, 14 nt, Human
auuaccauguaaug

SEQ ID NO: 1269133 - RNA, 21 nt, Human
auuacaguggggaaugaagau

SEQ ID NO: 1269134 - RNA, 18 nt, Human
auuaauagcagccuuucu

SEQ ID NO: 1269135 - RNA, 17 nt, Human
auuaauagcagccuuuc

SEQ ID NO: 1269136 - RNA, 22 nt, Human
auuacaguguuuauccuuucau

SEQ ID NO: 1269137 - RNA, 14 nt, Human
auuacaguguuuau

SEQ ID NO: 1269138 - RNA, 17 nt, Human
uuuuuguguguauuugc

SEQ ID NO: 1269139 - RNA, 16 nt, Human
uuuuuguuauuaaaca

SEQ ID NO: 1269140 - RNA, 18 nt, Human
uuuuuguguguauuugcu

SEQ ID NO: 1269141 - RNA, 15 nt, Human
uuuuuguguguauuu

SEQ ID NO: 1269142 - RNA, 23 nt, Human
auuaaguaaugauaacuggaaac

SEQ ID NO: 1269143 - RNA, 19 nt, Human
uuuuugugaaaagcuccau

SEQ ID NO: 1269144 - RNA, 14 nt, Human
uuuuuaucuuuaua

SEQ ID NO: 1269145 - RNA, 14 nt, Human
uuuuuaucuuuuua

SEQ ID NO: 1269146 - RNA, 13 nt, Human
uuuuuauguuaua

SEQ ID NO: 1269147 - RNA, 23 nt, Human
uuuuuauuaauuuuaguuuuuca

SEQ ID NO: 1269148 - RNA, 17 nt, Human
uuuuuauuaguauuguu

SEQ ID NO: 1269149 - RNA, 14 nt, Human
uuuuuauuaugcau

SEQ ID NO: 1269150 - RNA, 15 nt, Human
uuuuuauuaugcauu

SEQ ID NO: 1269151 - RNA, 18 nt, Human
uuuuuauuaguauuguug

SEQ ID NO: 1269152 - RNA, 13 nt, Human
uuuuuauuuaaaa

SEQ ID NO: 1269153 - RNA, 12 nt, Human
uuuuuguaccaa

SEQ ID NO: 1269154 - RNA, 23 nt, Human
uuuuuguaccauuuuaaaguuag

SEQ ID NO: 1269155 - RNA, 14 nt, Human
uuuuuguaccauuu

SEQ ID NO: 1269156 - RNA, 13 nt, Human
auuacgugcucug

SEQ ID NO: 1269157 - RNA, 21 nt, Human
auuacguaugucugguucuca

SEQ ID NO: 1269158 - RNA, 15 nt, Human
auuacguaugucugg

SEQ ID NO: 1269159 - RNA, 22 nt, Human
auuacuuaguauugcaaaguca

SEQ ID NO: 1269160 - RNA, 18 nt, Human
auuacuuaguauugcaaa

SEQ ID NO: 1269161 - RNA, 15 nt, Human
auuacuuaguauugc

SEQ ID NO: 1269162 - RNA, 15 nt, Human
auuacuuauuuuuga

SEQ ID NO: 1269163 - RNA, 16 nt, Human
auuacuuauuuuugac

SEQ ID NO: 1269164 - RNA, 17 nt, Human
auuacuuauuuuugaca

SEQ ID NO: 1269165 - RNA, 18 nt, Human
auuacuuauuuuugacag

SEQ ID NO: 1269166 - RNA, 19 nt, Human
auuacuuauuuuugacagu

SEQ ID NO: 1269167 - RNA, 17 nt, Human
auuacucaguaauuugu

SEQ ID NO: 1269168 - RNA, 15 nt, Human
auuacucugaaauug

SEQ ID NO: 1269169 - RNA, 13 nt, Human
auuaguauuguug

SEQ ID NO: 1269170 - RNA, 14 nt, Human
auuaguauuguugu

SEQ ID NO: 1269171 - RNA, 15 nt, Human
auuaguauuguuguc

SEQ ID NO: 1269172 - RNA, 23 nt, Human
auuaguauuguuguccuuuucau

SEQ ID NO: 1269173 - RNA, 17 nt, Human
auuaguauuguuguccu

SEQ ID NO: 1269174 - RNA, 15 nt, Human
auuagucauguuuau

SEQ ID NO: 1269175 - RNA, 20 nt, Human
auuagucucagugaagacua

SEQ ID NO: 1269176 - RNA, 16 nt, Human
auuagugccacuuaau

SEQ ID NO: 1269177 - RNA, 18 nt, Human
auuagugccacuuaaugu

SEQ ID NO: 1269178 - RNA, 19 nt, Human
auuagugccacuuaaugua

SEQ ID NO: 1269179 - RNA, 20 nt, Human
auuagugccacuuaauguau

SEQ ID NO: 1269180 - RNA, 21 nt, Human
auuagugccacuuaauguaug

SEQ ID NO: 1269181 - RNA, 22 nt, Human
auuagugccacuuaauguaugu

SEQ ID NO: 1269182 - RNA, 16 nt, Human
auuauaguuucugagg

SEQ ID NO: 1269183 - RNA, 19 nt, Human
auuauaguuucugaggcuu

SEQ ID NO: 1269184 - RNA, 15 nt, Human
auuauauaacuguau

SEQ ID NO: 1269185 - RNA, 17 nt, Human
auuauauaacuguauuu

SEQ ID NO: 1269186 - RNA, 19 nt, Human
auuauauaacuguauuuga

SEQ ID NO: 1269187 - RNA, 20 nt, Human
auucagauaugauucaaaug

SEQ ID NO: 1269188 - RNA, 18 nt, Human
auucagauaugauucaaa

SEQ ID NO: 1269189 - RNA, 12 nt, Human
auucagguuuuu

SEQ ID NO: 1269190 - RNA, 14 nt, Human
auucagguuuuucc

SEQ ID NO: 1269191 - RNA, 15 nt, Human
auucagguuuuuccu

SEQ ID NO: 1269192 - RNA, 16 nt, Human
auucagguuuuuccuu

SEQ ID NO: 1269193 - RNA, 23 nt, Human
auucagguuuuuccuuuuuuugu

SEQ ID NO: 1269194 - RNA, 16 nt, Human
auuccaaagucucuaa

SEQ ID NO: 1269195 - RNA, 17 nt, Human
auucagaguugaugguu

SEQ ID NO: 1269196 - RNA, 13 nt, Human
auucagacaggca

SEQ ID NO: 1269197 - RNA, 14 nt, Human
auucagacaggcaa

SEQ ID NO: 1269198 - RNA, 15 nt, Human
auucagacaucugag

SEQ ID NO: 1269199 - RNA, 11 nt, Human
auucagacauc

SEQ ID NO: 1269200 - RNA, 11 nt, Human
auuccauccuu

SEQ ID NO: 1269201 - RNA, 13 nt, Human
auuccagcugucc

SEQ ID NO: 1269202 - RNA, 19 nt, Human
auuccaaagucucuaauuc

SEQ ID NO: 1269203 - RNA, 18 nt, Human
auuccaaagucucuaauu

SEQ ID NO: 1269204 - RNA, 14 nt, Human
auuccaacaguuua

SEQ ID NO: 1269205 - RNA, 16 nt, Human
auuccaacaguuuaau

SEQ ID NO: 1269206 - RNA, 17 nt, Human
auuccaacaguuuaaug

SEQ ID NO: 1269207 - RNA, 18 nt, Human
auuccaacaguuuaauga

SEQ ID NO: 1269208 - RNA, 20 nt, Human
auuccaacaguuuaaugaag

SEQ ID NO: 1269209 - RNA, 19 nt, Human
auuccaacaguuuaaugaa

SEQ ID NO: 1269210 - RNA, 23 nt, Human
auuccaacucguauagcaugcau

SEQ ID NO: 1269211 - RNA, 19 nt, Human
auuccaacucguauagcau

SEQ ID NO: 1269212 - RNA, 22 nt, Human
auuccaagacaugucuguucua

SEQ ID NO: 1269213 - RNA, 11 nt, Human
auucccucacu

SEQ ID NO: 1269214 - RNA, 17 nt, Human
auucccucacucgucuc

SEQ ID NO: 1269215 - RNA, 20 nt, Human
auucccucacucgucucccc

SEQ ID NO: 1269216 - RNA, 12 nt, Human
auucccucccca

SEQ ID NO: 1269217 - RNA, 14 nt, Human
auucccucucccag

SEQ ID NO: 1269218 - RNA, 15 nt, Human
auucccucucccagg

SEQ ID NO: 1269219 - RNA, 18 nt, Human
auucccucucccaggccc

SEQ ID NO: 1269220 - RNA, 16 nt, Human
auucccucucccaggc

SEQ ID NO: 1269221 - RNA, 14 nt, Human
auucuaaaaugauu

SEQ ID NO: 1269222 - RNA, 16 nt, Human
auucuaaaaugauugu

SEQ ID NO: 1269223 - RNA, 20 nt, Human
auucuccugccucagccucc

SEQ ID NO: 1269224 - RNA, 11 nt, Human
auucuccugga

SEQ ID NO: 1269225 - RNA, 21 nt, Human
auucucaugccucagccuccu

SEQ ID NO: 1269226 - RNA, 23 nt, Human
auucuccagccaucaagagacug

SEQ ID NO: 1269227 - RNA, 12 nt, Human
auucuccugccu

SEQ ID NO: 1269228 - RNA, 15 nt, Human
auucucccuugcucu

SEQ ID NO: 1269229 - RNA, 11 nt, Human
auucuccuccu

SEQ ID NO: 1269230 - RNA, 12 nt, Human
auucuccuccuc

SEQ ID NO: 1269231 - RNA, 17 nt, Human
auucuccuccucccucc

SEQ ID NO: 1269232 - RNA, 13 nt, Human
auucuccugccuc

SEQ ID NO: 1269233 - RNA, 14 nt, Human
auucuccugccuca

SEQ ID NO: 1269234 - RNA, 14 nt, Human
auucucaugccuca

SEQ ID NO: 1269235 - RNA, 15 nt, Human
auucucaugccucag

SEQ ID NO: 1269236 - RNA, 22 nt, Human
auucuauuuauauguacaugag

SEQ ID NO: 1269237 - RNA, 17 nt, Human
auucucaaaggagcgag

SEQ ID NO: 1269238 - RNA, 20 nt, Human
auucuaaaaugauuguagua

SEQ ID NO: 1269239 - RNA, 14 nt, Human
auucuaaaaugccu

SEQ ID NO: 1269240 - RNA, 15 nt, Human
auucuaaaaugccuu

SEQ ID NO: 1269241 - RNA, 20 nt, Human
auucuaaaaugugauguucu

SEQ ID NO: 1269242 - RNA, 23 nt, Human
auucuaaaaugugauguucuaag

SEQ ID NO: 1269243 - RNA, 22 nt, Human
auucuaaaaugugauguucuaa

SEQ ID NO: 1269244 - RNA, 14 nt, Human
auucuaaagauucu

SEQ ID NO: 1269245 - RNA, 15 nt, Human
auucuaaagauucua

SEQ ID NO: 1269246 - RNA, 17 nt, Human
auucuaaagauucuaua

SEQ ID NO: 1269247 - RNA, 18 nt, Human
auucuaaagauucuauag

SEQ ID NO: 1269248 - RNA, 19 nt, Human
auucuaaagauucuauagu

SEQ ID NO: 1269249 - RNA, 20 nt, Human
auucuaaagauucuauaguu

SEQ ID NO: 1269250 - RNA, 22 nt, Human
auucuaaagauucuauaguucu

SEQ ID NO: 1269251 - RNA, 14 nt, Human
auucuaaaggucca

SEQ ID NO: 1269252 - RNA, 15 nt, Human
auucuaaaugaaugu

SEQ ID NO: 1269253 - RNA, 17 nt, Human
auucuaaaugaauguuu

SEQ ID NO: 1269254 - RNA, 18 nt, Human
auucuaaaugaauguuua

SEQ ID NO: 1269255 - RNA, 15 nt, Human
auucuauaaggccau

SEQ ID NO: 1269256 - RNA, 18 nt, Human
auucuauaaguuuuaugu

SEQ ID NO: 1269257 - RNA, 13 nt, Human
auucuauaguucu

SEQ ID NO: 1269258 - RNA, 14 nt, Human
auucuauaguucua

SEQ ID NO: 1269259 - RNA, 15 nt, Human
auucuauaguucuag

SEQ ID NO: 1269260 - RNA, 16 nt, Human
auucuauaguucuaga

SEQ ID NO: 1269261 - RNA, 17 nt, Human
auucuauaguucuagac

SEQ ID NO: 1269262 - RNA, 15 nt, Human
auucuaucuauuccu

SEQ ID NO: 1269263 - RNA, 15 nt, Human
auucuauuaaagugc

SEQ ID NO: 1269264 - RNA, 20 nt, Human
auucuauuacauuuucagug

SEQ ID NO: 1269265 - RNA, 18 nt, Human
auucuauuacauuuucag

SEQ ID NO: 1269266 - RNA, 20 nt, Human
auucuauuuauauguacaug

SEQ ID NO: 1269267 - RNA, 11 nt, Human
uugcucaugga

SEQ ID NO: 1269268 - RNA, 12 nt, Human
uugcucauggaa

SEQ ID NO: 1269269 - RNA, 19 nt, Human
uugcugaaauuuuauaugc

SEQ ID NO: 1269270 - RNA, 16 nt, Human
uugcuccgccuggccu

SEQ ID NO: 1269271 - RNA, 17 nt, Human
uugcuccgccuggccug

SEQ ID NO: 1269272 - RNA, 17 nt, Human
uugcuccuaauguugaa

SEQ ID NO: 1269273 - RNA, 11 nt, Human
uugcugaaauu

SEQ ID NO: 1269274 - RNA, 16 nt, Human
uugcugaaauuuuaua

SEQ ID NO: 1269275 - RNA, 18 nt, Human
aucuaaguuaauuuaaag

SEQ ID NO: 1269276 - RNA, 13 nt, Human
aucuaaguuauaa

SEQ ID NO: 1269277 - RNA, 19 nt, Human
aucuaaguuauaagacucu

SEQ ID NO: 1269278 - RNA, 15 nt, Human
uugcuaauuuuuauu

SEQ ID NO: 1269279 - RNA, 17 nt, Human
uugcuaauuuuuauuaa

SEQ ID NO: 1269280 - RNA, 16 nt, Human
uugcuacauaauuauc

SEQ ID NO: 1269281 - RNA, 12 nt, Human
uugcuaccagua

SEQ ID NO: 1269282 - RNA, 15 nt, Human
uugcuaccaguauuu

SEQ ID NO: 1269283 - RNA, 16 nt, Human
uugcuaccaguauuua

SEQ ID NO: 1269284 - RNA, 20 nt, Human
uugcuaccaguauuuagaag

SEQ ID NO: 1269285 - RNA, 22 nt, Human
uugcuaccaguauuuagaagcc

SEQ ID NO: 1269286 - RNA, 23 nt, Human
uugcuaccaguauuuagaagcca

SEQ ID NO: 1269287 - RNA, 13 nt, Human
uugcuacauaauu

SEQ ID NO: 1269288 - RNA, 14 nt, Human
uugcuagagcuccu

SEQ ID NO: 1269289 - RNA, 15 nt, Human
uugcuagagcuccuc

SEQ ID NO: 1269290 - RNA, 16 nt, Human
uugcuagagcuccucc

SEQ ID NO: 1269291 - RNA, 18 nt, Human
uugcuagagcuccucccu

SEQ ID NO: 1269292 - RNA, 21 nt, Human
uugcuagagcuccucccucuc

SEQ ID NO: 1269293 - RNA, 11 nt, Human
uugcugagccu

SEQ ID NO: 1269294 - RNA, 11 nt, Human
uugcugagacu

SEQ ID NO: 1269295 - RNA, 21 nt, Human
uugcugacuguagcuuuggaa

SEQ ID NO: 1269296 - RNA, 15 nt, Human
uugcugaaugcaaga

SEQ ID NO: 1269297 - RNA, 14 nt, Human
uugcugacccuccc

SEQ ID NO: 1269298 - RNA, 15 nt, Human
uugcugacccucccc

SEQ ID NO: 1269299 - RNA, 14 nt, Human
uugcuuuaauauaa

SEQ ID NO: 1269300 - RNA, 16 nt, Human
uugcuuuaauauaaau

SEQ ID NO: 1269301 - RNA, 17 nt, Human
uugcuuuaauauaaaug

SEQ ID NO: 1269302 - RNA, 17 nt, Human
uugcuuuuuuuuccuuc

SEQ ID NO: 1269303 - RNA, 20 nt, Human
uugcuuuuggcaaaacucua

SEQ ID NO: 1269304 - RNA, 15 nt, Human
uugcuuuuucaccag

SEQ ID NO: 1269305 - RNA, 15 nt, Human
uugcuuuuugugaua

SEQ ID NO: 1269306 - RNA, 21 nt, Human
uugcuuuuugugauaugcaca

SEQ ID NO: 1269307 - RNA, 18 nt, Human
uugcuuuaauauaaaugc

SEQ ID NO: 1269308 - RNA, 19 nt, Human
uugcuuuaauauaaaugca

SEQ ID NO: 1269309 - RNA, 21 nt, Human
uugcuuuaauauaaaugcaaa

SEQ ID NO: 1269310 - RNA, 22 nt, Human
uugcuuuaauauaaaugcaaau

SEQ ID NO: 1269311 - RNA, 23 nt, Human
uugcuuuaauauaaaugcaaaua

SEQ ID NO: 1269312 - RNA, 15 nt, Human
uugcuuuucacaaau

SEQ ID NO: 1269313 - RNA, 12 nt, Human
uugcuuuucaug

SEQ ID NO: 1269314 - RNA, 13 nt, Human
uugcuuuucaugc

SEQ ID NO: 1269315 - RNA, 16 nt, Human
uugcuuuucaugcaaa

SEQ ID NO: 1269316 - RNA, 17 nt, Human
uugcuuuucaugcaaac

SEQ ID NO: 1269317 - RNA, 18 nt, Human
uugcuuuucaugcaaacu

SEQ ID NO: 1269318 - RNA, 22 nt, Human
uugcuuuucaugcaaacucuuu

SEQ ID NO: 1269319 - RNA, 21 nt, Human
augaaauauuauguuaaaacu

SEQ ID NO: 1269320 - RNA, 14 nt, Human
aucuuuuauuuugc

SEQ ID NO: 1269321 - RNA, 19 nt, Human
augaaagauggcugugccu

SEQ ID NO: 1269322 - RNA, 20 nt, Human
augaaagauggcugugccuc

SEQ ID NO: 1269323 - RNA, 23 nt, Human
augaaagauggcugugccucugc

SEQ ID NO: 1269324 - RNA, 12 nt, Human
aucuuucccucc

SEQ ID NO: 1269325 - RNA, 13 nt, Human
aucuuucccuccu

SEQ ID NO: 1269326 - RNA, 14 nt, Human
aucuuucccuccuu

SEQ ID NO: 1269327 - RNA, 16 nt, Human
aucuuucccuccuugg

SEQ ID NO: 1269328 - RNA, 19 nt, Human
aucuuucccuccuugguga

SEQ ID NO: 1269329 - RNA, 17 nt, Human
aucuuucccuccuuggu

SEQ ID NO: 1269330 - RNA, 22 nt, Human
aucuuuuacaacugccucgaaa

SEQ ID NO: 1269331 - RNA, 13 nt, Human
uuggacccuucca

SEQ ID NO: 1269332 - RNA, 14 nt, Human
uuggacccuuccau

SEQ ID NO: 1269333 - RNA, 16 nt, Human
uuggacccuuccaugg

SEQ ID NO: 1269334 - RNA, 19 nt, Human
uuggaccuaaauggccuca

SEQ ID NO: 1269335 - RNA, 21 nt, Human
uuggaccuaaauggccucaug

SEQ ID NO: 1269336 - RNA, 23 nt, Human
uuggaccuaaauggccucaugug

SEQ ID NO: 1269337 - RNA, 17 nt, Human
uuggaccuaauccaagc

SEQ ID NO: 1269338 - RNA, 12 nt, Human
uuggacuaugga

SEQ ID NO: 1269339 - RNA, 19 nt, Human
uuggccugaucagaccacg

SEQ ID NO: 1269340 - RNA, 21 nt, Human
uuggccugcuaaggucuugga

SEQ ID NO: 1269341 - RNA, 14 nt, Human
uuggccuggagcac

SEQ ID NO: 1269342 - RNA, 16 nt, Human
uuggccuggagcacaa

SEQ ID NO: 1269343 - RNA, 19 nt, Human
uuggccuguagaguugcug

SEQ ID NO: 1269344 - RNA, 17 nt, Human
uuggcgaugccagccaa

SEQ ID NO: 1269345 - RNA, 13 nt, Human
uuguauaaaauaa

SEQ ID NO: 1269346 - RNA, 13 nt, Human
uuguaguuccacu

SEQ ID NO: 1269347 - RNA, 13 nt, Human
uuguaguugaaua

SEQ ID NO: 1269348 - RNA, 16 nt, Human
uuguaguugaauauug

SEQ ID NO: 1269349 - RNA, 15 nt, Human
uuguauaaaauaauu

SEQ ID NO: 1269350 - RNA, 12 nt, Human
uuguauaaaaua

SEQ ID NO: 1269351 - RNA, 14 nt, Human
uuguauaaaauaga

SEQ ID NO: 1269352 - RNA, 11 nt, Human
uuguauaauug

SEQ ID NO: 1269353 - RNA, 12 nt, Human
uuguauaauugg

SEQ ID NO: 1269354 - RNA, 20 nt, Human
uuguauaauuggauuuccua

SEQ ID NO: 1269355 - RNA, 21 nt, Human
uuguauaauuggauuuccuaa

SEQ ID NO: 1269356 - RNA, 15 nt, Human
uuguaaugucuugag

SEQ ID NO: 1269357 - RNA, 20 nt, Human
uuguaaugucuugagcucua

SEQ ID NO: 1269358 - RNA, 19 nt, Human
uuguaaugucuugagcucu

SEQ ID NO: 1269359 - RNA, 15 nt, Human
uuguaauuauggagu

SEQ ID NO: 1269360 - RNA, 23 nt, Human
uuguaauuaaaagcaaaucauuu

SEQ ID NO: 1269361 - RNA, 11 nt, Human
uuguaauuaug

SEQ ID NO: 1269362 - RNA, 17 nt, Human
uuguaauuaaaagcaaa

SEQ ID NO: 1269363 - RNA, 14 nt, Human
uuguaauuauggag

SEQ ID NO: 1269364 - RNA, 19 nt, Human
uuguaguuccacuuauagc

SEQ ID NO: 1269365 - RNA, 13 nt, Human
uuguaaugaaaac

SEQ ID NO: 1269366 - RNA, 19 nt, Human
uuguaagugaaaaacauga

SEQ ID NO: 1269367 - RNA, 16 nt, Human
uuguauauuacaauga

SEQ ID NO: 1269368 - RNA, 15 nt, Human
uuguauauuacaaug

SEQ ID NO: 1269369 - RNA, 14 nt, Human
uuguauauuacaau

SEQ ID NO: 1269370 - RNA, 13 nt, Human
uuguauauuacaa

SEQ ID NO: 1269371 - RNA, 19 nt, Human
uuguauauauuauuauaau

SEQ ID NO: 1269372 - RNA, 21 nt, Human
uuguauauauuauuauaaucu

SEQ ID NO: 1269373 - RNA, 21 nt, Human
augaauuaguuuuauaugcuu

SEQ ID NO: 1269374 - RNA, 23 nt, Human
augaauuaguuuuauaugcuucu

SEQ ID NO: 1269375 - RNA, 15 nt, Human
augaauuauuacagu

SEQ ID NO: 1269376 - RNA, 17 nt, Human
augaauuauuacagugu

SEQ ID NO: 1269377 - RNA, 20 nt, Human
augacaaagcagauucagaa

SEQ ID NO: 1269378 - RNA, 14 nt, Human
augacaacuucuaa

SEQ ID NO: 1269379 - RNA, 16 nt, Human
augacaacuucuaauu

SEQ ID NO: 1269380 - RNA, 21 nt, Human
augacaagaaaggcugcugua

SEQ ID NO: 1269381 - RNA, 18 nt, Human
augacaacuucuaauugc

SEQ ID NO: 1269382 - RNA, 19 nt, Human
augacaacuucuaauugcc

SEQ ID NO: 1269383 - RNA, 20 nt, Human
augacaacuucuaauugcca

SEQ ID NO: 1269384 - RNA, 15 nt, Human
augacaaucaugugu

SEQ ID NO: 1269385 - RNA, 23 nt, Human
augacacucauauaauuauaugu

SEQ ID NO: 1269386 - RNA, 21 nt, Human
augacaguaauuguguuuaca

SEQ ID NO: 1269387 - RNA, 19 nt, Human
augacaguccgucaaaaca

SEQ ID NO: 1269388 - RNA, 22 nt, Human
augacaguaauuguguuuacau

SEQ ID NO: 1269389 - RNA, 20 nt, Human
augacaguaauuguguuuac

SEQ ID NO: 1269390 - RNA, 12 nt, Human
augacaguaauu

SEQ ID NO: 1269391 - RNA, 17 nt, Human
augacaggauguuugcu

SEQ ID NO: 1269392 - RNA, 15 nt, Human
augacaggccugucc

SEQ ID NO: 1269393 - RNA, 16 nt, Human
augacacuguucagga

SEQ ID NO: 1269394 - RNA, 19 nt, Human
uugggcagcaauuuaaaug

SEQ ID NO: 1269395 - RNA, 23 nt, Human
uugggcagccagaccagcaggcu

SEQ ID NO: 1269396 - RNA, 14 nt, Human
uugggccagaagua

SEQ ID NO: 1269397 - RNA, 13 nt, Human
uugggccagacau

SEQ ID NO: 1269398 - RNA, 14 nt, Human
uugggccagacaug

SEQ ID NO: 1269399 - RNA, 18 nt, Human
uugggcagcaauuuaaau

SEQ ID NO: 1269400 - RNA, 22 nt, Human
uugggcagagcuggcucugagc

SEQ ID NO: 1269401 - RNA, 17 nt, Human
uugggcagagcuggcuc

SEQ ID NO: 1269402 - RNA, 21 nt, Human
uugggcagagcuggcucugag

SEQ ID NO: 1269403 - RNA, 23 nt, Human
uugggcacccccagccugggccu

SEQ ID NO: 1269404 - RNA, 12 nt, Human
uugggcagagcu

SEQ ID NO: 1269405 - RNA, 21 nt, Human
uugggccagaaguaccagacu

SEQ ID NO: 1269406 - RNA, 12 nt, Human
uugggcucugau

SEQ ID NO: 1269407 - RNA, 14 nt, Human
uugggcucugauga

SEQ ID NO: 1269408 - RNA, 13 nt, Human
uugggcucugaug

SEQ ID NO: 1269409 - RNA, 18 nt, Human
uugggcuucagcugccag

SEQ ID NO: 1269410 - RNA, 18 nt, Human
augaauuacauuuguaua

SEQ ID NO: 1269411 - RNA, 19 nt, Human
augaauuacauuuguauaa

SEQ ID NO: 1269412 - RNA, 22 nt, Human
augaauuacauuuguauaaaau

SEQ ID NO: 1269413 - RNA, 14 nt, Human
augaacaucccuuu

SEQ ID NO: 1269414 - RNA, 18 nt, Human
uugggcacccccagccug

SEQ ID NO: 1269415 - RNA, 19 nt, Human
uugggcacccccagccugg

SEQ ID NO: 1269416 - RNA, 20 nt, Human
uugggcacccccagccuggg

SEQ ID NO: 1269417 - RNA, 21 nt, Human
uugggcacccccagccugggc

SEQ ID NO: 1269418 - RNA, 22 nt, Human
uugggcacccccagccugggcc

SEQ ID NO: 1269419 - RNA, 21 nt, Human
augaacauauuguugaaaggu

SEQ ID NO: 1269420 - RNA, 22 nt, Human
uuguaacuaaaauaauuuugua

SEQ ID NO: 1269421 - RNA, 23 nt, Human
uuguaacuaaaauaauuuuguaa

SEQ ID NO: 1269422 - RNA, 22 nt, Human
uuguaaaaauuaaaaguuaugg

SEQ ID NO: 1269423 - RNA, 17 nt, Human
uuguaacuaaaauaauu

SEQ ID NO: 1269424 - RNA, 18 nt, Human
uuguaacuaaaauaauuu

SEQ ID NO: 1269425 - RNA, 21 nt, Human
uuguaacuaaaauaauuuugu

SEQ ID NO: 1269426 - RNA, 18 nt, Human
uugguuuuuaaaacccag

SEQ ID NO: 1269427 - RNA, 17 nt, Human
uugguuuuuaaagauuu

SEQ ID NO: 1269428 - RNA, 22 nt, Human
uugguuuuuacugcucugagaa

SEQ ID NO: 1269429 - RNA, 11 nt, Human
uuggggaagag

SEQ ID NO: 1269430 - RNA, 19 nt, Human
uugggcuucagcugccagu

SEQ ID NO: 1269431 - RNA, 17 nt, Human
uugggcuugcuauucug

SEQ ID NO: 1269432 - RNA, 18 nt, Human
uugggcuugcuauucugu

SEQ ID NO: 1269433 - RNA, 23 nt, Human
uugggcuugcuauucugucccua

SEQ ID NO: 1269434 - RNA, 19 nt, Human
uuggggaaacagcaucucc

SEQ ID NO: 1269435 - RNA, 23 nt, Human
uuggggaaacagcaucuccaagc

SEQ ID NO: 1269436 - RNA, 14 nt, Human
uuggggaagaccca

SEQ ID NO: 1269437 - RNA, 14 nt, Human
uuggggucugaccc

SEQ ID NO: 1269438 - RNA, 15 nt, Human
uuggggucugacccc

SEQ ID NO: 1269439 - RNA, 17 nt, Human
uuggggucuggcagccu

SEQ ID NO: 1269440 - RNA, 14 nt, Human
uugguucauuaauu

SEQ ID NO: 1269441 - RNA, 20 nt, Human
uugguucauuaauucuauaa

SEQ ID NO: 1269442 - RNA, 18 nt, Human
uugguucccccacugauc

SEQ ID NO: 1269443 - RNA, 21 nt, Human
uugguuuugcuacauaauuau

SEQ ID NO: 1269444 - RNA, 18 nt, Human
uugugaagguggaaauaa

SEQ ID NO: 1269445 - RNA, 17 nt, Human
uugugaagguggaaaua

SEQ ID NO: 1269446 - RNA, 22 nt, Human
uugugaaguacccguucacauu

SEQ ID NO: 1269447 - RNA, 13 nt, Human
uuguguguaugca

SEQ ID NO: 1269448 - RNA, 14 nt, Human
uuguguguaugcac

SEQ ID NO: 1269449 - RNA, 18 nt, Human
uugugaagcaaaauuuuu

SEQ ID NO: 1269450 - RNA, 11 nt, Human
uugugaagagg

SEQ ID NO: 1269451 - RNA, 22 nt, Human
uugugaagccaugaguuccaga

SEQ ID NO: 1269452 - RNA, 13 nt, Human
uugugaaggcagg

SEQ ID NO: 1269453 - RNA, 19 nt, Human
uugugugucuuaauuauua

SEQ ID NO: 1269454 - RNA, 18 nt, Human
uuguuccccacuggagca

SEQ ID NO: 1269455 - RNA, 22 nt, Human
uuguguguaugcacaugaacuu

SEQ ID NO: 1269456 - RNA, 16 nt, Human
uuguguguauuugcua

SEQ ID NO: 1269457 - RNA, 14 nt, Human
uuguguguauuugc

SEQ ID NO: 1269458 - RNA, 13 nt, Human
uugugugucuuaa

SEQ ID NO: 1269459 - RNA, 16 nt, Human
uuguucucagaauccc

SEQ ID NO: 1269460 - RNA, 23 nt, Human
uuguucucagaaucccuuaacag

SEQ ID NO: 1269461 - RNA, 18 nt, Human
augaucaccgacugaaaa

SEQ ID NO: 1269462 - RNA, 20 nt, Human
augaucaauuauaguuucug

SEQ ID NO: 1269463 - RNA, 18 nt, Human
augaucccuguguugucu

SEQ ID NO: 1269464 - RNA, 20 nt, Human
augaucccuguguugucucu

SEQ ID NO: 1269465 - RNA, 20 nt, Human
augauccuguauucagacag

SEQ ID NO: 1269466 - RNA, 15 nt, Human
augauccuaaugaau

SEQ ID NO: 1269467 - RNA, 17 nt, Human
augaucggcaggacacc

SEQ ID NO: 1269468 - RNA, 13 nt, Human
augaucugauuga

SEQ ID NO: 1269469 - RNA, 20 nt, Human
augaucaaauguuuaaucau

SEQ ID NO: 1269470 - RNA, 19 nt, Human
augaucaaauguuuaauca

SEQ ID NO: 1269471 - RNA, 17 nt, Human
augaucaaauguuuaau

SEQ ID NO: 1269472 - RNA, 16 nt, Human
augaucaaauguuuaa

SEQ ID NO: 1269473 - RNA, 15 nt, Human
augaucaaauguuua

SEQ ID NO: 1269474 - RNA, 14 nt, Human
augaucaaauguuu

SEQ ID NO: 1269475 - RNA, 13 nt, Human
augaucaaauguu

SEQ ID NO: 1269476 - RNA, 12 nt, Human
augaucaaaugu

SEQ ID NO: 1269477 - RNA, 13 nt, Human
uuguuggaaugaa

SEQ ID NO: 1269478 - RNA, 23 nt, Human
uuguuggagucaaaaagaaccac

SEQ ID NO: 1269479 - RNA, 16 nt, Human
uuguugcguuccuuuc

SEQ ID NO: 1269480 - RNA, 22 nt, Human
augcaaacuuuauuuuguguuu

SEQ ID NO: 1269481 - RNA, 15 nt, Human
augaucugucugugg

SEQ ID NO: 1269482 - RNA, 14 nt, Human
augcaaaccauagc

SEQ ID NO: 1269483 - RNA, 12 nt, Human
augcaaacucuu

SEQ ID NO: 1269484 - RNA, 13 nt, Human
augcaaacucuuu

SEQ ID NO: 1269485 - RNA, 16 nt, Human
augcaaacucuuuggu

SEQ ID NO: 1269486 - RNA, 22 nt, Human
augcaaacucuuuggucguuuu

SEQ ID NO: 1269487 - RNA, 16 nt, Human
uuuaaaaaauggucac

SEQ ID NO: 1269488 - RNA, 21 nt, Human
uuuaaaaaauuaaucugggcc

SEQ ID NO: 1269489 - RNA, 19 nt, Human
uuuaaacuguguacauaac

SEQ ID NO: 1269490 - RNA, 21 nt, Human
uuuaaacuguguacauaacug

SEQ ID NO: 1269491 - RNA, 22 nt, Human
uuuaaacuguguacauaacuga

SEQ ID NO: 1269492 - RNA, 19 nt, Human
uuuaaaaaauagcagcuuu

SEQ ID NO: 1269493 - RNA, 23 nt, Human
uuuaaaaaagcuuaaaacuuuga

SEQ ID NO: 1269494 - RNA, 17 nt, Human
uuuaaaaaauuaaucug

SEQ ID NO: 1269495 - RNA, 21 nt, Human
uuuaaaaaagcuuaaaacuuu

SEQ ID NO: 1269496 - RNA, 19 nt, Human
uuguuuuuuuuuuccacuu

SEQ ID NO: 1269497 - RNA, 13 nt, Human
uuuaaaaaagcuu

SEQ ID NO: 1269498 - RNA, 14 nt, Human
uuuaaaaaagcuua

SEQ ID NO: 1269499 - RNA, 17 nt, Human
uuuaaaaaagcuuaaaa

SEQ ID NO: 1269500 - RNA, 20 nt, Human
uuuaaaaaagcuuaaaacuu

SEQ ID NO: 1269501 - RNA, 16 nt, Human
uuguuuugugcagaga

SEQ ID NO: 1269502 - RNA, 19 nt, Human
uuguuuugugucucuuaug

SEQ ID NO: 1269503 - RNA, 14 nt, Human
uuguuuuuaaacug

SEQ ID NO: 1269504 - RNA, 16 nt, Human
uuguuuuuaaacugua

SEQ ID NO: 1269505 - RNA, 18 nt, Human
uuguuuuuaaacuguaca

SEQ ID NO: 1269506 - RNA, 18 nt, Human
uuguuuuuuuuuuccacu

SEQ ID NO: 1269507 - RNA, 19 nt, Human
uuguuuuuaaacuguacag

SEQ ID NO: 1269508 - RNA, 19 nt, Human
uuguuuuucauucagucuu

SEQ ID NO: 1269509 - RNA, 14 nt, Human
augauaacuggaaa

SEQ ID NO: 1269510 - RNA, 14 nt, Human
augauaaagagaca

SEQ ID NO: 1269511 - RNA, 17 nt, Human
augauaaagagacagug

SEQ ID NO: 1269512 - RNA, 20 nt, Human
augauaaagagacagugaua

SEQ ID NO: 1269513 - RNA, 15 nt, Human
augauaacacuauuu

SEQ ID NO: 1269514 - RNA, 12 nt, Human
augagucuagau

SEQ ID NO: 1269515 - RNA, 13 nt, Human
augagucuagaug

SEQ ID NO: 1269516 - RNA, 17 nt, Human
augagucuagauguuua

SEQ ID NO: 1269517 - RNA, 15 nt, Human
augagugaauaaaug

SEQ ID NO: 1269518 - RNA, 16 nt, Human
augagugaauaaaugu

SEQ ID NO: 1269519 - RNA, 17 nt, Human
augagugaauaaauguc

SEQ ID NO: 1269520 - RNA, 22 nt, Human
augagugcguggugcgagugcg

SEQ ID NO: 1269521 - RNA, 19 nt, Human
augagugcguggugcgagu

SEQ ID NO: 1269522 - RNA, 21 nt, Human
augaguggaaauuaagacuuu

SEQ ID NO: 1269523 - RNA, 13 nt, Human
uugucacgccaga

SEQ ID NO: 1269524 - RNA, 20 nt, Human
uugucacgccagacuuccca

SEQ ID NO: 1269525 - RNA, 14 nt, Human
uugucaccagaucu

SEQ ID NO: 1269526 - RNA, 16 nt, Human
uugucaccagaucuga

SEQ ID NO: 1269527 - RNA, 17 nt, Human
uugucaccagaucugau

SEQ ID NO: 1269528 - RNA, 13 nt, Human
uugucauguguau

SEQ ID NO: 1269529 - RNA, 22 nt, Human
uugucauguguauaaaaauaaa

SEQ ID NO: 1269530 - RNA, 14 nt, Human
uugucauguguaua

SEQ ID NO: 1269531 - RNA, 18 nt, Human
uugucccgauuguaacuc

SEQ ID NO: 1269532 - RNA, 22 nt, Human
uuguccucagccccgcguggaa

SEQ ID NO: 1269533 - RNA, 23 nt, Human
uuguccuagcacagauggccagc

SEQ ID NO: 1269534 - RNA, 15 nt, Human
uuguccuagcacaga

SEQ ID NO: 1269535 - RNA, 16 nt, Human
uuguccgcuggguggu

SEQ ID NO: 1269536 - RNA, 16 nt, Human
uuguccuuagccugga

SEQ ID NO: 1269537 - RNA, 15 nt, Human
uuguccuuucccuuc

SEQ ID NO: 1269538 - RNA, 17 nt, Human
uuguccuuucccuucag

SEQ ID NO: 1269539 - RNA, 19 nt, Human
uuguccuuuugcaaagaaa

SEQ ID NO: 1269540 - RNA, 14 nt, Human
uuguccuuuucaua

SEQ ID NO: 1269541 - RNA, 14 nt, Human
uugucgcucaugug

SEQ ID NO: 1269542 - RNA, 15 nt, Human
augacaugaauuuua

SEQ ID NO: 1269543 - RNA, 21 nt, Human
augacaugaauuuuagcuuuu

SEQ ID NO: 1269544 - RNA, 22 nt, Human
augacauuaaagaaggguugag

SEQ ID NO: 1269545 - RNA, 20 nt, Human
augacaguccgucaaaacag

SEQ ID NO: 1269546 - RNA, 21 nt, Human
augacaguccgucaaaacaga

SEQ ID NO: 1269547 - RNA, 22 nt, Human
augacaguccgucaaaacagau

SEQ ID NO: 1269548 - RNA, 17 nt, Human
augacaguguuccccga

SEQ ID NO: 1269549 - RNA, 18 nt, Human
augacaucaccacaguuu

SEQ ID NO: 1269550 - RNA, 14 nt, Human
augacaucacuugu

SEQ ID NO: 1269551 - RNA, 18 nt, Human
augacaucacuuguacaa

SEQ ID NO: 1269552 - RNA, 19 nt, Human
augacaucacuuguacaaa

SEQ ID NO: 1269553 - RNA, 20 nt, Human
augacaucacuuguacaaaa

SEQ ID NO: 1269554 - RNA, 12 nt, Human
augacaugaauu

SEQ ID NO: 1269555 - RNA, 22 nt, Human
augacaugaauuuuagcuuuug

SEQ ID NO: 1269556 - RNA, 16 nt, Human
augagauauuaaacca

SEQ ID NO: 1269557 - RNA, 23 nt, Human
augagaugauacauccaaagcag

SEQ ID NO: 1269558 - RNA, 24 nt, Human
augagaugauacauccaaagcaga

SEQ ID NO: 1269559 - RNA, 14 nt, Human
augagaugcuggcu

SEQ ID NO: 1269560 - RNA, 15 nt, Human
augagaugcuggcuu

SEQ ID NO: 1269561 - RNA, 22 nt, Human
augagaugcuggcuugggcagc

SEQ ID NO: 1269562 - RNA, 19 nt, Human
augagaugcuggcuugggc

SEQ ID NO: 1269563 - RNA, 13 nt, Human
augagauugaauu

SEQ ID NO: 1269564 - RNA, 14 nt, Human
augagcauguuuag

SEQ ID NO: 1269565 - RNA, 21 nt, Human
augagcauguuuagacuuuaa

SEQ ID NO: 1269566 - RNA, 16 nt, Human
uuuaaagcuuccauug

SEQ ID NO: 1269567 - RNA, 16 nt, Human
uuuaaagcagguucuu

SEQ ID NO: 1269568 - RNA, 19 nt, Human
uuuaaagaaaaaaauugaa

SEQ ID NO: 1269569 - RNA, 22 nt, Human
uuuaaagaaaaaaauugaaaug

SEQ ID NO: 1269570 - RNA, 21 nt, Human
uuuaaagaaaaaaauugaaau

SEQ ID NO: 1269571 - RNA, 12 nt, Human
uuuaaagaaagu

SEQ ID NO: 1269572 - RNA, 13 nt, Human
uuuaaagaaagug

SEQ ID NO: 1269573 - RNA, 15 nt, Human
uuuaaagcagguucu

SEQ ID NO: 1269574 - RNA, 19 nt, Human
uuuaaagcagguucuuguu

SEQ ID NO: 1269575 - RNA, 17 nt, Human
uuuaaagcguuugcaca

SEQ ID NO: 1269576 - RNA, 13 nt, Human
augcgcccccucc

SEQ ID NO: 1269577 - RNA, 18 nt, Human
augcgcccccuccgcccu

SEQ ID NO: 1269578 - RNA, 22 nt, Human
augcgcccccuccgcccugcca

SEQ ID NO: 1269579 - RNA, 15 nt, Human
augcgcucagggcca

SEQ ID NO: 1269580 - RNA, 23 nt, Human
augcgcucagggccaugcugagg

SEQ ID NO: 1269581 - RNA, 23 nt, Human
augcgcaggcuggcccugcccug

SEQ ID NO: 1269582 - RNA, 23 nt, Human
augccucagccacuugccugugc

SEQ ID NO: 1269583 - RNA, 23 nt, Human
augccucagaagugcaucuggag

SEQ ID NO: 1269584 - RNA, 16 nt, Human
augccuaugguggauc

SEQ ID NO: 1269585 - RNA, 19 nt, Human
augccuaugguggauccaa

SEQ ID NO: 1269586 - RNA, 21 nt, Human
augccuaugguggauccaaac

SEQ ID NO: 1269587 - RNA, 15 nt, Human
augccucagaagugc

SEQ ID NO: 1269588 - RNA, 16 nt, Human
augccucagaagugca

SEQ ID NO: 1269589 - RNA, 22 nt, Human
augccguggauugcacguggcc

SEQ ID NO: 1269590 - RNA, 13 nt, Human
uuuacgcuuugau

SEQ ID NO: 1269591 - RNA, 18 nt, Human
uuuacgcuuugauucaua

SEQ ID NO: 1269592 - RNA, 18 nt, Human
augcuacaggauuugaaa

SEQ ID NO: 1269593 - RNA, 21 nt, Human
augcuaauucucagaaaggca

SEQ ID NO: 1269594 - RNA, 13 nt, Human
uuuaccuuguaua

SEQ ID NO: 1269595 - RNA, 17 nt, Human
uuuauaugcuucuguuu

SEQ ID NO: 1269596 - RNA, 14 nt, Human
uuuauaugaagaaa

SEQ ID NO: 1269597 - RNA, 21 nt, Human
uuuauaugaagaaaaucacuu

SEQ ID NO: 1269598 - RNA, 19 nt, Human
uuuauaugcuucuguuuua

SEQ ID NO: 1269599 - RNA, 20 nt, Human
uuuauaugcuuacugauaua

SEQ ID NO: 1269600 - RNA, 14 nt, Human
uuuauguaauuuca

SEQ ID NO: 1269601 - RNA, 19 nt, Human
uuuauguaguaauugacau

SEQ ID NO: 1269602 - RNA, 13 nt, Human
uuuauauauauau

SEQ ID NO: 1269603 - RNA, 20 nt, Human
uuuauauauauauauaaaga

SEQ ID NO: 1269604 - RNA, 19 nt, Human
uuuauauauauauauaaag

SEQ ID NO: 1269605 - RNA, 13 nt, Human
uuuauauauguau

SEQ ID NO: 1269606 - RNA, 14 nt, Human
uuuauauauuauau

SEQ ID NO: 1269607 - RNA, 15 nt, Human
uuuauauauuauaug

SEQ ID NO: 1269608 - RNA, 18 nt, Human
uuuauauauuauauggaa

SEQ ID NO: 1269609 - RNA, 21 nt, Human
uuuauauauuuaaaaguguca

SEQ ID NO: 1269610 - RNA, 15 nt, Human
uuuauaucacauguu

SEQ ID NO: 1269611 - RNA, 17 nt, Human
uuuauauauuauaugga

SEQ ID NO: 1269612 - RNA, 15 nt, Human
uuuaugugaaacaug

SEQ ID NO: 1269613 - RNA, 11 nt, Human
uuuaugucugg

SEQ ID NO: 1269614 - RNA, 19 nt, Human
uuuaugucuguggauuuuu

SEQ ID NO: 1269615 - RNA, 11 nt, Human
uuuauuaaaga

SEQ ID NO: 1269616 - RNA, 12 nt, Human
uuuauuaaagaa

SEQ ID NO: 1269617 - RNA, 13 nt, Human
uuuauuaaagaaa

SEQ ID NO: 1269618 - RNA, 14 nt, Human
uuuauuaaagaaaa

SEQ ID NO: 1269619 - RNA, 14 nt, Human
uuuaugugaaacau

SEQ ID NO: 1269620 - RNA, 11 nt, Human
uuuauguauug

SEQ ID NO: 1269621 - RNA, 19 nt, Human
uuuauguauugugcaaugu

SEQ ID NO: 1269622 - RNA, 16 nt, Human
uuuauuaaagaaaaaa

SEQ ID NO: 1269623 - RNA, 20 nt, Human
uuuagcuggaaaaguauguu

SEQ ID NO: 1269624 - RNA, 15 nt, Human
uuuagcugacaaaau

SEQ ID NO: 1269625 - RNA, 12 nt, Human
uuuagcucugag

SEQ ID NO: 1269626 - RNA, 13 nt, Human
uuuagcucugaga

SEQ ID NO: 1269627 - RNA, 14 nt, Human
uuuagcucugagaa

SEQ ID NO: 1269628 - RNA, 15 nt, Human
uuuagguaagaaguu

SEQ ID NO: 1269629 - RNA, 12 nt, Human
uuuagcauugua

SEQ ID NO: 1269630 - RNA, 14 nt, Human
uuuagccuguccug

SEQ ID NO: 1269631 - RNA, 16 nt, Human
uuuagccuucucuguu

SEQ ID NO: 1269632 - RNA, 11 nt, Human
uuuagcucuga

SEQ ID NO: 1269633 - RNA, 22 nt, Human
uuuaguaaaccaauccuaugca

SEQ ID NO: 1269634 - RNA, 11 nt, Human
uuuagguucua

SEQ ID NO: 1269635 - RNA, 12 nt, Human
uuuagguucuaa

SEQ ID NO: 1269636 - RNA, 13 nt, Human
uuuagguucuaaa

SEQ ID NO: 1269637 - RNA, 14 nt, Human
uuuagguucuaaag

SEQ ID NO: 1269638 - RNA, 15 nt, Human
uuuagguucuaaagu

SEQ ID NO: 1269639 - RNA, 16 nt, Human
uuuagguucuaaaguu

SEQ ID NO: 1269640 - RNA, 18 nt, Human
uuuagguucuaaaguucu

SEQ ID NO: 1269641 - RNA, 23 nt, Human
uuuagguucuaaaguucuaagau

SEQ ID NO: 1269642 - RNA, 22 nt, Human
uuuagguuuuuguuuguuuccu

SEQ ID NO: 1269643 - RNA, 23 nt, Human
uuuagguucuuugcugcauucug

SEQ ID NO: 1269644 - RNA, 13 nt, Human
uuuaguaaaccaa

SEQ ID NO: 1269645 - RNA, 23 nt, Human
uuuacuagggaucccucaucugu

SEQ ID NO: 1269646 - RNA, 18 nt, Human
uuuacuagggaucccuca

SEQ ID NO: 1269647 - RNA, 13 nt, Human
uuuagauagcccu

SEQ ID NO: 1269648 - RNA, 14 nt, Human
uuuagauagcccug

SEQ ID NO: 1269649 - RNA, 18 nt, Human
uuuagauagcccuguccu

SEQ ID NO: 1269650 - RNA, 20 nt, Human
uuuagauagcccuguccugg

SEQ ID NO: 1269651 - RNA, 23 nt, Human
uuuagauagcccuguccuggugg

SEQ ID NO: 1269652 - RNA, 22 nt, Human
uuuagauagcccuguccuggug

SEQ ID NO: 1269653 - RNA, 15 nt, Human
uuuagaucucugaag

SEQ ID NO: 1269654 - RNA, 14 nt, Human
uuuagcauguuguu

SEQ ID NO: 1269655 - RNA, 20 nt, Human
uuuagcauuguagugcuuug

SEQ ID NO: 1269656 - RNA, 23 nt, Human
auggaauuggagcucgugggaca

SEQ ID NO: 1269657 - RNA, 14 nt, Human
uuucccaugauuuc

SEQ ID NO: 1269658 - RNA, 22 nt, Human
uuucccaggcccacugugccuc

SEQ ID NO: 1269659 - RNA, 16 nt, Human
uuucccacuccaagcc

SEQ ID NO: 1269660 - RNA, 21 nt, Human
uuucccacuguuuaaggaguu

SEQ ID NO: 1269661 - RNA, 11 nt, Human
uuucccaggac

SEQ ID NO: 1269662 - RNA, 14 nt, Human
uuucccaggacccu

SEQ ID NO: 1269663 - RNA, 16 nt, Human
uuucccaggacccuga

SEQ ID NO: 1269664 - RNA, 18 nt, Human
uuucccaggacccugaag

SEQ ID NO: 1269665 - RNA, 21 nt, Human
uuucccaccccaaccugcucu

SEQ ID NO: 1269666 - RNA, 23 nt, Human
uuucccaccccaaccugcucucc

SEQ ID NO: 1269667 - RNA, 22 nt, Human
uuucccaccccaaccugcucuc

SEQ ID NO: 1269668 - RNA, 12 nt, Human
uuucccacucca

SEQ ID NO: 1269669 - RNA, 21 nt, Human
uuucaguuuauuugaaccaau

SEQ ID NO: 1269670 - RNA, 15 nt, Human
uuucauaaaaggaga

SEQ ID NO: 1269671 - RNA, 14 nt, Human
uuucauaaauuuga

SEQ ID NO: 1269672 - RNA, 14 nt, Human
uuucauaaguauuu

SEQ ID NO: 1269673 - RNA, 17 nt, Human
uuucauaaguauuucaa

SEQ ID NO: 1269674 - RNA, 18 nt, Human
uuucauaaguauuucaaa

SEQ ID NO: 1269675 - RNA, 19 nt, Human
uuucauaaguauuucaaau

SEQ ID NO: 1269676 - RNA, 14 nt, Human
uuucauacacuuau

SEQ ID NO: 1269677 - RNA, 16 nt, Human
uuucauacauuuucua

SEQ ID NO: 1269678 - RNA, 20 nt, Human
uuucauacauuuucuaagaa

SEQ ID NO: 1269679 - RNA, 18 nt, Human
uuucauauaaauggaauu

SEQ ID NO: 1269680 - RNA, 15 nt, Human
uuucauaguucagaa

SEQ ID NO: 1269681 - RNA, 16 nt, Human
uuucauaggucugaaa

SEQ ID NO: 1269682 - RNA, 17 nt, Human
uuucauaggucugaaau

SEQ ID NO: 1269683 - RNA, 14 nt, Human
uuucauaguucaga

SEQ ID NO: 1269684 - RNA, 15 nt, Human
uuucauagcuaaaaa

SEQ ID NO: 1269685 - RNA, 14 nt, Human
uuucauagcuaaaa

SEQ ID NO: 1269686 - RNA, 13 nt, Human
uuucauauaaagu

SEQ ID NO: 1269687 - RNA, 15 nt, Human
uuucauauaguuagc

SEQ ID NO: 1269688 - RNA, 12 nt, Human
uuucauaaagca

SEQ ID NO: 1269689 - RNA, 17 nt, Human
uuucacuguagcucuaa

SEQ ID NO: 1269690 - RNA, 21 nt, Human
uuucacugucuuuaauucugu

SEQ ID NO: 1269691 - RNA, 16 nt, Human
uuucaccuagauuuuu

SEQ ID NO: 1269692 - RNA, 23 nt, Human
uuucacugcuguuauauuucauc

SEQ ID NO: 1269693 - RNA, 15 nt, Human
uuucacuggagcaca

SEQ ID NO: 1269694 - RNA, 16 nt, Human
uuucacuggagcacaa

SEQ ID NO: 1269695 - RNA, 24 nt, Human
uuucacuguagaaugauuucaugc

SEQ ID NO: 1269696 - RNA, 17 nt, Human
uuuauuuuuuucugaau

SEQ ID NO: 1269697 - RNA, 16 nt, Human
uuuauuuuuugggaaa

SEQ ID NO: 1269698 - RNA, 13 nt, Human
uuucacauuuucc

SEQ ID NO: 1269699 - RNA, 14 nt, Human
uuucacauuuuccu

SEQ ID NO: 1269700 - RNA, 17 nt, Human
uuucaccagauuugcua

SEQ ID NO: 1269701 - RNA, 22 nt, Human
uuucaccauuugauuauguagc

SEQ ID NO: 1269702 - RNA, 16 nt, Human
uuuauuuuguguuuag

SEQ ID NO: 1269703 - RNA, 13 nt, Human
uuuauuuuuuggg

SEQ ID NO: 1269704 - RNA, 14 nt, Human
uuuauuuugacaua

SEQ ID NO: 1269705 - RNA, 16 nt, Human
uuuauuuuaauaaugu

SEQ ID NO: 1269706 - RNA, 20 nt, Human
augcuuauauuguucacuuc

SEQ ID NO: 1269707 - RNA, 23 nt, Human
augcuuagucccucaugcaaauc

SEQ ID NO: 1269708 - RNA, 13 nt, Human
augcuuauuccau

SEQ ID NO: 1269709 - RNA, 15 nt, Human
augcuuagucccuca

SEQ ID NO: 1269710 - RNA, 21 nt, Human
augcuuagucccucaugcaaa

SEQ ID NO: 1269711 - RNA, 15 nt, Human
augcuuauuccauga

SEQ ID NO: 1269712 - RNA, 17 nt, Human
augcuuauuccaugacu

SEQ ID NO: 1269713 - RNA, 23 nt, Human
augcuuauuccaugacugcuugc

SEQ ID NO: 1269714 - RNA, 22 nt, Human
augcuuauuccaugacugcuug

SEQ ID NO: 1269715 - RNA, 14 nt, Human
auggaacacuucga

SEQ ID NO: 1269716 - RNA, 19 nt, Human
uuuauuacuguaagaaaau

SEQ ID NO: 1269717 - RNA, 20 nt, Human
uuuauuaguauuguuguccu

SEQ ID NO: 1269718 - RNA, 15 nt, Human
uuuauuaugaagaag

SEQ ID NO: 1269719 - RNA, 9 nt, Human
augcuggga

SEQ ID NO: 1269720 - RNA, 10 nt, Human
augcugggac

SEQ ID NO: 1269721 - RNA, 15 nt, Human
augcugggacucagc

SEQ ID NO: 1269722 - RNA, 16 nt, Human
augcugggacucagcc

SEQ ID NO: 1269723 - RNA, 21 nt, Human
augcuggguccauaucacaca

SEQ ID NO: 1269724 - RNA, 14 nt, Human
augcuggugagcca

SEQ ID NO: 1269725 - RNA, 23 nt, Human
augcuguacaucuauuuuggauu

SEQ ID NO: 1269726 - RNA, 14 nt, Human
augcuguauuuuaa

SEQ ID NO: 1269727 - RNA, 14 nt, Human
augcuguauauguu

SEQ ID NO: 1269728 - RNA, 19 nt, Human
augcuguauuuuaaaagaa

SEQ ID NO: 1269729 - RNA, 13 nt, Human
augcuguacccag

SEQ ID NO: 1269730 - RNA, 16 nt, Human
augcuguacccaguuu

SEQ ID NO: 1269731 - RNA, 23 nt, Human
augcugugacacauggccccucc

SEQ ID NO: 1269732 - RNA, 21 nt, Human
augcugugagucuuugguucu

SEQ ID NO: 1269733 - RNA, 22 nt, Human
augcugugagucuuugguucua

SEQ ID NO: 1269734 - RNA, 13 nt, Human
augcuuacugaua

SEQ ID NO: 1269735 - RNA, 22 nt, Human
augcuuacugauauauuuuaca

SEQ ID NO: 1269736 - RNA, 23 nt, Human
augcuuacugauauauuuuacaa

SEQ ID NO: 1269737 - RNA, 17 nt, Human
augcuuagauguuccag

SEQ ID NO: 1269738 - RNA, 18 nt, Human
uuucuauagccaaaaaua

SEQ ID NO: 1269739 - RNA, 21 nt, Human
uuucuaguguaucaaaaugcu

SEQ ID NO: 1269740 - RNA, 20 nt, Human
uuucuaguguaucaaaaugc

SEQ ID NO: 1269741 - RNA, 19 nt, Human
uuucuaguguaucaaaaug

SEQ ID NO: 1269742 - RNA, 13 nt, Human
uuucuaguugaaa

SEQ ID NO: 1269743 - RNA, 16 nt, Human
uuucuaguguaucaaa

SEQ ID NO: 1269744 - RNA, 21 nt, Human
uuucuaggacugaauuaugaa

SEQ ID NO: 1269745 - RNA, 17 nt, Human
uuucuaggacugaauua

SEQ ID NO: 1269746 - RNA, 14 nt, Human
uuucuaaacuggag

SEQ ID NO: 1269747 - RNA, 15 nt, Human
uuucuaaacuggaga

SEQ ID NO: 1269748 - RNA, 16 nt, Human
uuucuaaacuggagac

SEQ ID NO: 1269749 - RNA, 17 nt, Human
uuucuaaacuggagacu

SEQ ID NO: 1269750 - RNA, 19 nt, Human
uuucuaaacuggagacugu

SEQ ID NO: 1269751 - RNA, 20 nt, Human
uuucuaaacuggagacugug

SEQ ID NO: 1269752 - RNA, 22 nt, Human
uuucuaggacugaauuaugaaa

SEQ ID NO: 1269753 - RNA, 17 nt, Human
uuucuagguaggaaaug

SEQ ID NO: 1269754 - RNA, 21 nt, Human
uuucuagguaggaaauguggu

SEQ ID NO: 1269755 - RNA, 13 nt, Human
uuucuaugaaaua

SEQ ID NO: 1269756 - RNA, 22 nt, Human
uuucuauagccaaaaauagcua

SEQ ID NO: 1269757 - RNA, 15 nt, Human
uuucuauccucugua

SEQ ID NO: 1269758 - RNA, 17 nt, Human
uuucuaucguucucucu

SEQ ID NO: 1269759 - RNA, 19 nt, Human
uuucuaucguucucucuuu

SEQ ID NO: 1269760 - RNA, 20 nt, Human
uuucuaucguucucucuuug

SEQ ID NO: 1269761 - RNA, 14 nt, Human
uuucuaugaaauau

SEQ ID NO: 1269762 - RNA, 20 nt, Human
uuucuaugaaauauuauguu

SEQ ID NO: 1269763 - RNA, 23 nt, Human
uuucuauggguguuaucaccuag

SEQ ID NO: 1269764 - RNA, 14 nt, Human
uuucuauuaaaaga

SEQ ID NO: 1269765 - RNA, 15 nt, Human
uuucuauuaaaagac

SEQ ID NO: 1269766 - RNA, 16 nt, Human
uuucuauuaaaagacu

SEQ ID NO: 1269767 - RNA, 17 nt, Human
uuucuauuaaaagacuc

SEQ ID NO: 1269768 - RNA, 18 nt, Human
uuucuauuaaaagacuca

SEQ ID NO: 1269769 - RNA, 19 nt, Human
uuucuauuaaaagacucau

SEQ ID NO: 1269770 - RNA, 23 nt, Human
uuucuauuaaaagacucauccgu

SEQ ID NO: 1269771 - RNA, 15 nt, Human
uuucugcaucuccac

SEQ ID NO: 1269772 - RNA, 16 nt, Human
uuucugcaucuccacu

SEQ ID NO: 1269773 - RNA, 12 nt, Human
uuucugcccugc

SEQ ID NO: 1269774 - RNA, 13 nt, Human
uuucugcaucucc

SEQ ID NO: 1269775 - RNA, 17 nt, Human
uuucugcauauguugaa

SEQ ID NO: 1269776 - RNA, 13 nt, Human
uuucugcauaugu

SEQ ID NO: 1269777 - RNA, 22 nt, Human
uuucucauuugccaauaauaau

SEQ ID NO: 1269778 - RNA, 19 nt, Human
uuucucauugcucugaaua

SEQ ID NO: 1269779 - RNA, 21 nt, Human
uuucuccaagagcuacauaau

SEQ ID NO: 1269780 - RNA, 15 nt, Human
uuucuccaagagcua

SEQ ID NO: 1269781 - RNA, 11 nt, Human
uuucuccagcu

SEQ ID NO: 1269782 - RNA, 12 nt, Human
uuucuccagcug

SEQ ID NO: 1269783 - RNA, 16 nt, Human
uuucuauuucacugga

SEQ ID NO: 1269784 - RNA, 17 nt, Human
uuucuauuucacuggag

SEQ ID NO: 1269785 - RNA, 17 nt, Human
uuucuauuucuccucca

SEQ ID NO: 1269786 - RNA, 19 nt, Human
uuucuauuucacuggagca

SEQ ID NO: 1269787 - RNA, 15 nt, Human
uuucuauuuuuaucu

SEQ ID NO: 1269788 - RNA, 13 nt, Human
uuucuauuuuuau

SEQ ID NO: 1269789 - RNA, 16 nt, Human
uuucucacuaaaucuu

SEQ ID NO: 1269790 - RNA, 16 nt, Human
uuucucaguuuucaua

SEQ ID NO: 1269791 - RNA, 20 nt, Human
uuucucauccacauacccug

SEQ ID NO: 1269792 - RNA, 19 nt, Human
uuugaaacacuuugcauaa

SEQ ID NO: 1269793 - RNA, 17 nt, Human
uuugaaacacuuugcau

SEQ ID NO: 1269794 - RNA, 11 nt, Human
uuugaaaaugg

SEQ ID NO: 1269795 - RNA, 22 nt, Human
uuugaaaccccuguaggccuca

SEQ ID NO: 1269796 - RNA, 21 nt, Human
uuugaaagaauagaacacagu

SEQ ID NO: 1269797 - RNA, 21 nt, Human
uuugaaaggagaugucuugga

SEQ ID NO: 1269798 - RNA, 16 nt, Human
uuugaaagucuguccu

SEQ ID NO: 1269799 - RNA, 17 nt, Human
uuugaaagucuguccuu

SEQ ID NO: 1269800 - RNA, 19 nt, Human
uuugaaagucuguccuuga

SEQ ID NO: 1269801 - RNA, 12 nt, Human
uuugaaauaagc

SEQ ID NO: 1269802 - RNA, 14 nt, Human
uuugaaauaagcua

SEQ ID NO: 1269803 - RNA, 19 nt, Human
uuugaaauaagcuauuuga

SEQ ID NO: 1269804 - RNA, 14 nt, Human
uuugaaauauugac

SEQ ID NO: 1269805 - RNA, 15 nt, Human
uuugaaauauugacu

SEQ ID NO: 1269806 - RNA, 16 nt, Human
uuugaaauaagcuauu

SEQ ID NO: 1269807 - RNA, 16 nt, Human
uuugaaauauggucuu

SEQ ID NO: 1269808 - RNA, 14 nt, Human
auggggaccagcag

SEQ ID NO: 1269809 - RNA, 13 nt, Human
auggggaggacaa

SEQ ID NO: 1269810 - RNA, 17 nt, Human
auggggaggacaaaaug

SEQ ID NO: 1269811 - RNA, 14 nt, Human
auggggaggaggag

SEQ ID NO: 1269812 - RNA, 11 nt, Human
auggggaggga

SEQ ID NO: 1269813 - RNA, 18 nt, Human
uuugaaaagcagacauuu

SEQ ID NO: 1269814 - RNA, 16 nt, Human
uuugaaaagcagacau

SEQ ID NO: 1269815 - RNA, 13 nt, Human
uuugaaaagcaga

SEQ ID NO: 1269816 - RNA, 16 nt, Human
uuucuuuucucuggua

SEQ ID NO: 1269817 - RNA, 22 nt, Human
uuucuuuucuggaauguaauca

SEQ ID NO: 1269818 - RNA, 13 nt, Human
uuucuuuucuuug

SEQ ID NO: 1269819 - RNA, 23 nt, Human
uuucuuuugguaaagacuggcuu

SEQ ID NO: 1269820 - RNA, 15 nt, Human
uuucuuuguguagcu

SEQ ID NO: 1269821 - RNA, 18 nt, Human
uuucuuuguuucuuucuu

SEQ ID NO: 1269822 - RNA, 19 nt, Human
uuucuuuguuucuuucuuu

SEQ ID NO: 1269823 - RNA, 9 nt, Human
uuucuuuuc

SEQ ID NO: 1269824 - RNA, 21 nt, Human
uuucuuuucccccauuaauca

SEQ ID NO: 1269825 - RNA, 15 nt, Human
uuucuuuacaaaaca

SEQ ID NO: 1269826 - RNA, 14 nt, Human
uuucuuucaaaauu

SEQ ID NO: 1269827 - RNA, 13 nt, Human
uuucugcccugcc

SEQ ID NO: 1269828 - RNA, 14 nt, Human
uuucugccuggagu

SEQ ID NO: 1269829 - RNA, 22 nt, Human
uuucugccuggaguguaugacu

SEQ ID NO: 1269830 - RNA, 17 nt, Human
uuucugcuuuaaaaaug

SEQ ID NO: 1269831 - RNA, 18 nt, Human
uuucugcuuuaaaaaugu

SEQ ID NO: 1269832 - RNA, 18 nt, Human
uuucuggaauacaugaaa

SEQ ID NO: 1269833 - RNA, 20 nt, Human
uuucuggaauacaugaaaua

SEQ ID NO: 1269834 - RNA, 21 nt, Human
uuucuggaauacaugaaauau

SEQ ID NO: 1269835 - RNA, 18 nt, Human
uuucuggaauguaaucaa

SEQ ID NO: 1269836 - RNA, 15 nt, Human
uuucuggauuucaua

SEQ ID NO: 1269837 - RNA, 23 nt, Human
uuucuggauuccccaucucaggc

SEQ ID NO: 1269838 - RNA, 11 nt, Human
uuucuggccag

SEQ ID NO: 1269839 - RNA, 19 nt, Human
uuucuggccaguguuuaaa

SEQ ID NO: 1269840 - RNA, 15 nt, Human
uuucuuuaaaaaaca

SEQ ID NO: 1269841 - RNA, 12 nt, Human
uuucuuuaacug

SEQ ID NO: 1269842 - RNA, 13 nt, Human
uuucuuuaacugc

SEQ ID NO: 1269843 - RNA, 22 nt, Human
augggacauuugcucauggaau

SEQ ID NO: 1269844 - RNA, 21 nt, Human
augggacauuugcucauggaa

SEQ ID NO: 1269845 - RNA, 17 nt, Human
auggccucauguggcug

SEQ ID NO: 1269846 - RNA, 18 nt, Human
auggccucauguggcugg

SEQ ID NO: 1269847 - RNA, 19 nt, Human
auggccucauguggcugga

SEQ ID NO: 1269848 - RNA, 20 nt, Human
auggccucauguggcuggaa

SEQ ID NO: 1269849 - RNA, 13 nt, Human
auggaccggagag

SEQ ID NO: 1269850 - RNA, 16 nt, Human
auggaccggagagugg

SEQ ID NO: 1269851 - RNA, 20 nt, Human
auggaccggagagugggggu

SEQ ID NO: 1269852 - RNA, 18 nt, Human
auggaccugccugcauag

SEQ ID NO: 1269853 - RNA, 13 nt, Human
auggccucaugug

SEQ ID NO: 1269854 - RNA, 18 nt, Human
auggaauugauuugcauu

SEQ ID NO: 1269855 - RNA, 19 nt, Human
auggaauugauuugcauug

SEQ ID NO: 1269856 - RNA, 17 nt, Human
auggaauuuugcaaaga

SEQ ID NO: 1269857 - RNA, 17 nt, Human
augggagccgggucugc

SEQ ID NO: 1269858 - RNA, 20 nt, Human
augggagccgggucugccuc

SEQ ID NO: 1269859 - RNA, 15 nt, Human
augggacuggccucu

SEQ ID NO: 1269860 - RNA, 17 nt, Human
auggccugcaaacuggg

SEQ ID NO: 1269861 - RNA, 13 nt, Human
augggacauuuuu

SEQ ID NO: 1269862 - RNA, 12 nt, Human
augggaccacaa

SEQ ID NO: 1269863 - RNA, 23 nt, Human
augggagcugaggccacacucag

SEQ ID NO: 1269864 - RNA, 14 nt, Human
augggcagagccca

SEQ ID NO: 1269865 - RNA, 14 nt, Human
augggcccaggccu

SEQ ID NO: 1269866 - RNA, 16 nt, Human
augggcaucuuuugua

SEQ ID NO: 1269867 - RNA, 17 nt, Human
augggcaucuuuuguau

SEQ ID NO: 1269868 - RNA, 21 nt, Human
augggcaucuuuuguauuaag

SEQ ID NO: 1269869 - RNA, 20 nt, Human
augggcaucuuuuguauuaa

SEQ ID NO: 1269870 - RNA, 13 nt, Human
augggcauggugu

SEQ ID NO: 1269871 - RNA, 18 nt, Human
uuucggacaguuuauuug

SEQ ID NO: 1269872 - RNA, 17 nt, Human
uuucggauuuuuuccaa

SEQ ID NO: 1269873 - RNA, 16 nt, Human
uuucguaacacagcau

SEQ ID NO: 1269874 - RNA, 21 nt, Human
uuucgucuguuuauaaacauu

SEQ ID NO: 1269875 - RNA, 13 nt, Human
uuucguggggagg

SEQ ID NO: 1269876 - RNA, 14 nt, Human
uuucguuuguuugu

SEQ ID NO: 1269877 - RNA, 12 nt, Human
uuucguuuguuu

SEQ ID NO: 1269878 - RNA, 12 nt, Human
uuucuaaaaucu

SEQ ID NO: 1269879 - RNA, 21 nt, Human
uuucuaaaaucuuauaguucu

SEQ ID NO: 1269880 - RNA, 21 nt, Human
uuuccuuuuaaaacacuucca

SEQ ID NO: 1269881 - RNA, 13 nt, Human
uuuccuuuuuaau

SEQ ID NO: 1269882 - RNA, 19 nt, Human
uuuccuuuuuaauaugcuu

SEQ ID NO: 1269883 - RNA, 22 nt, Human
uuuccuuuuuaauaugcuuaaa

SEQ ID NO: 1269884 - RNA, 16 nt, Human
uuuccuuuuuuguuau

SEQ ID NO: 1269885 - RNA, 17 nt, Human
uuuccuuuuuuguuauu

SEQ ID NO: 1269886 - RNA, 14 nt, Human
uuucgaaaaucaaa

SEQ ID NO: 1269887 - RNA, 21 nt, Human
uuuccuuuaacugacaagcca

SEQ ID NO: 1269888 - RNA, 20 nt, Human
uuuccuguccucuuucagcu

SEQ ID NO: 1269889 - RNA, 21 nt, Human
uuuccuguccucuuucagcuc

SEQ ID NO: 1269890 - RNA, 18 nt, Human
uuuccuucaaaguuuaau

SEQ ID NO: 1269891 - RNA, 21 nt, Human
uuuccuuccaaugucuggaga

SEQ ID NO: 1269892 - RNA, 12 nt, Human
uuuccuuccaau

SEQ ID NO: 1269893 - RNA, 14 nt, Human
uuuccuucccuuuu

SEQ ID NO: 1269894 - RNA, 18 nt, Human
uuuccuucccuuuucugu

SEQ ID NO: 1269895 - RNA, 19 nt, Human
uuuccuucccuuuucuguu

SEQ ID NO: 1269896 - RNA, 20 nt, Human
uuuccuucccuuuucuguuc

SEQ ID NO: 1269897 - RNA, 16 nt, Human
uucagauaugauucaa

SEQ ID NO: 1269898 - RNA, 17 nt, Human
uucagauaugauucaaa

SEQ ID NO: 1269899 - RNA, 18 nt, Human
uucagauaugauucaaau

SEQ ID NO: 1269900 - RNA, 14 nt, Human
uucagaagaaaaag

SEQ ID NO: 1269901 - RNA, 12 nt, Human
uucagaagaaaa

SEQ ID NO: 1269902 - RNA, 19 nt, Human
uucagauaugauucaaaug

SEQ ID NO: 1269903 - RNA, 22 nt, Human
uucagauaucuuggacaaauca

SEQ ID NO: 1269904 - RNA, 14 nt, Human
uucagauucccaga

SEQ ID NO: 1269905 - RNA, 21 nt, Human
uucagauucccagagcaaaau

SEQ ID NO: 1269906 - RNA, 22 nt, Human
uucagauucccagagcaaaaua

SEQ ID NO: 1269907 - RNA, 17 nt, Human
uucacuuuugacaaagg

SEQ ID NO: 1269908 - RNA, 20 nt, Human
uucacuuuugacaaaggcaa

SEQ ID NO: 1269909 - RNA, 22 nt, Human
uucagaaccccaacuacugugu

SEQ ID NO: 1269910 - RNA, 23 nt, Human
uucagaaccccaacuacuguguu

SEQ ID NO: 1269911 - RNA, 16 nt, Human
uucacuucacugugcu

SEQ ID NO: 1269912 - RNA, 18 nt, Human
uuaucauucaaguguaaa

SEQ ID NO: 1269913 - RNA, 19 nt, Human
uucacuucauaauccagua

SEQ ID NO: 1269914 - RNA, 23 nt, Human
uuaucauguuaguaauaccucua

SEQ ID NO: 1269915 - RNA, 22 nt, Human
uuaucauguuaguaauaccucu

SEQ ID NO: 1269916 - RNA, 18 nt, Human
uuaucauguuaguaauac

SEQ ID NO: 1269917 - RNA, 17 nt, Human
uuaucauguuaguaaua

SEQ ID NO: 1269918 - RNA, 11 nt, Human
uuaucauguua

SEQ ID NO: 1269919 - RNA, 23 nt, Human
uucagcacuuuagaauaugccuu

SEQ ID NO: 1269920 - RNA, 22 nt, Human
uucagcacuuuagaauaugccu

SEQ ID NO: 1269921 - RNA, 20 nt, Human
uucagcacugucccuugccu

SEQ ID NO: 1269922 - RNA, 17 nt, Human
uucagcaggcccaagua

SEQ ID NO: 1269923 - RNA, 23 nt, Human
uucagcauccgcaggugcugguc

SEQ ID NO: 1269924 - RNA, 19 nt, Human
uucagcauccgcaggugcu

SEQ ID NO: 1269925 - RNA, 12 nt, Human
uucagauuuggc

SEQ ID NO: 1269926 - RNA, 14 nt, Human
uucagcacuguccc

SEQ ID NO: 1269927 - RNA, 15 nt, Human
uucagcacugucccu

SEQ ID NO: 1269928 - RNA, 16 nt, Human
uucagcacugucccuu

SEQ ID NO: 1269929 - RNA, 21 nt, Human
uucagcacugucccuugccuc

SEQ ID NO: 1269930 - RNA, 17 nt, Human
uucagcgguuuauauaa

SEQ ID NO: 1269931 - RNA, 14 nt, Human
uucagcuaagcuag

SEQ ID NO: 1269932 - RNA, 20 nt, Human
uucagcuaagcuaggaauga

SEQ ID NO: 1269933 - RNA, 12 nt, Human
uucagcaugcaa

SEQ ID NO: 1269934 - RNA, 10 nt, Human
uucagccaag

SEQ ID NO: 1269935 - RNA, 11 nt, Human
uucagcauuug

SEQ ID NO: 1269936 - RNA, 14 nt, Human
uucagcucacugca

SEQ ID NO: 1269937 - RNA, 13 nt, Human
auauaugcuaagu

SEQ ID NO: 1269938 - RNA, 15 nt, Human
uucaucaaugaauga

SEQ ID NO: 1269939 - RNA, 20 nt, Human
auauauggggaugguaguuu

SEQ ID NO: 1269940 - RNA, 22 nt, Human
auauauggggaugguaguuuuu

SEQ ID NO: 1269941 - RNA, 21 nt, Human
auauauggggaugguaguuuu

SEQ ID NO: 1269942 - RNA, 16 nt, Human
auauauuuuacaauuu

SEQ ID NO: 1269943 - RNA, 21 nt, Human
uucauauuuuucauagcuaaa

SEQ ID NO: 1269944 - RNA, 12 nt, Human
uucauaugcaua

SEQ ID NO: 1269945 - RNA, 19 nt, Human
uucauaguucagaauuuag

SEQ ID NO: 1269946 - RNA, 20 nt, Human
uucauaguucagaauuuagu

SEQ ID NO: 1269947 - RNA, 14 nt, Human
uucauauaaaguau

SEQ ID NO: 1269948 - RNA, 16 nt, Human
uucauauaaaguauca

SEQ ID NO: 1269949 - RNA, 18 nt, Human
uucauauaugaggacuug

SEQ ID NO: 1269950 - RNA, 21 nt, Human
uucauauaugaggacuugugu

SEQ ID NO: 1269951 - RNA, 21 nt, Human
uucauauaguuagcuaauaaa

SEQ ID NO: 1269952 - RNA, 15 nt, Human
uucauaucauccaca

SEQ ID NO: 1269953 - RNA, 24 nt, Human
uucagucucuauaccaauaaagug

SEQ ID NO: 1269954 - RNA, 23 nt, Human
uucagucucuauaccaauaaagu

SEQ ID NO: 1269955 - RNA, 22 nt, Human
uucagucucuauaccaauaaag

SEQ ID NO: 1269956 - RNA, 21 nt, Human
uucagucucuauaccaauaaa

SEQ ID NO: 1269957 - RNA, 18 nt, Human
uucagucucuauaccaau

SEQ ID NO: 1269958 - RNA, 13 nt, Human
uucauaggucuga

SEQ ID NO: 1269959 - RNA, 15 nt, Human
uucauaggucugaaa

SEQ ID NO: 1269960 - RNA, 17 nt, Human
uucauaggucugaaauu

SEQ ID NO: 1269961 - RNA, 22 nt, Human
uucauaggucugaaauuuuucu

SEQ ID NO: 1269962 - RNA, 17 nt, Human
uucauaguaacuucuua

SEQ ID NO: 1269963 - RNA, 14 nt, Human
uucauaguucagaa

SEQ ID NO: 1269964 - RNA, 16 nt, Human
uucauaguucagaauu

SEQ ID NO: 1269965 - RNA, 17 nt, Human
uucauaguucagaauuu

SEQ ID NO: 1269966 - RNA, 14 nt, Human
uucagguccaggcu

SEQ ID NO: 1269967 - RNA, 16 nt, Human
uucagguuuuuccuuu

SEQ ID NO: 1269968 - RNA, 13 nt, Human
uucagguuuuucc

SEQ ID NO: 1269969 - RNA, 16 nt, Human
auauauuuuguuuaca

SEQ ID NO: 1269970 - RNA, 17 nt, Human
auaugaaagcugauuuu

SEQ ID NO: 1269971 - RNA, 18 nt, Human
auauauuuuacaauuuuu

SEQ ID NO: 1269972 - RNA, 15 nt, Human
auauauuuucuguuu

SEQ ID NO: 1269973 - RNA, 15 nt, Human
auaugaacauauugu

SEQ ID NO: 1269974 - RNA, 20 nt, Human
auaugaacauauuguugaaa

SEQ ID NO: 1269975 - RNA, 19 nt, Human
auaugaacauauuguugaa

SEQ ID NO: 1269976 - RNA, 14 nt, Human
auaugaagacauaa

SEQ ID NO: 1269977 - RNA, 15 nt, Human
auaugaagacauaaa

SEQ ID NO: 1269978 - RNA, 16 nt, Human
auaugaagacauaaac

SEQ ID NO: 1269979 - RNA, 20 nt, Human
auaugcaaacaggguaacua

SEQ ID NO: 1269980 - RNA, 23 nt, Human
auauggccacaguagucuugaug

SEQ ID NO: 1269981 - RNA, 15 nt, Human
auaugggacauuuuu

SEQ ID NO: 1269982 - RNA, 21 nt, Human
auaugacuguuuuucggacag

SEQ ID NO: 1269983 - RNA, 22 nt, Human
auaugacuguuuuucggacagu

SEQ ID NO: 1269984 - RNA, 12 nt, Human
uucauuaaauaa

SEQ ID NO: 1269985 - RNA, 14 nt, Human
uucauuaaauaaau

SEQ ID NO: 1269986 - RNA, 16 nt, Human
uucauuaacaaaaugu

SEQ ID NO: 1269987 - RNA, 22 nt, Human
auauguguaugcacaguaaaaa

SEQ ID NO: 1269988 - RNA, 15 nt, Human
auauguauaacuuua

SEQ ID NO: 1269989 - RNA, 16 nt, Human
auauguauaacuuuaa

SEQ ID NO: 1269990 - RNA, 22 nt, Human
uucaugcuguucaugaaagauu

SEQ ID NO: 1269991 - RNA, 23 nt, Human
auauguaccuaacgaaguauccu

SEQ ID NO: 1269992 - RNA, 21 nt, Human
auauguacccucugaaauaca

SEQ ID NO: 1269993 - RNA, 17 nt, Human
auaugggacauuuuuga

SEQ ID NO: 1269994 - RNA, 20 nt, Human
auauggggaugguaguuuuu

SEQ ID NO: 1269995 - RNA, 19 nt, Human
auauggggaugguaguuuu

SEQ ID NO: 1269996 - RNA, 22 nt, Human
uucauugaguugguuacuucau

SEQ ID NO: 1269997 - RNA, 16 nt, Human
uucauuaauucuauaa

SEQ ID NO: 1269998 - RNA, 13 nt, Human
uucauuaaauaaa

SEQ ID NO: 1269999 - RNA, 20 nt, Human
uucauuagaaauauuuuaaa

SEQ ID NO: 1270000 - RNA, 16 nt, Human
uucauuagucauguuu

SEQ ID NO: 1270001 - RNA, 15 nt, Human
uucauuagucauguu

SEQ ID NO: 1270002 - RNA, 15 nt, Human
uuccaagacucuaga

SEQ ID NO: 1270003 - RNA, 16 nt, Human
uuccaagacucuagag

SEQ ID NO: 1270004 - RNA, 17 nt, Human
uuccaagacucuagagu

SEQ ID NO: 1270005 - RNA, 17 nt, Human
uuccaauuuaguuguug

SEQ ID NO: 1270006 - RNA, 18 nt, Human
uuccaaugucuggagacc

SEQ ID NO: 1270007 - RNA, 21 nt, Human
uuccaagacucuagaguccaa

SEQ ID NO: 1270008 - RNA, 22 nt, Human
uuccaagacucuagaguccaag

SEQ ID NO: 1270009 - RNA, 16 nt, Human
uuccaaugucuggaga

SEQ ID NO: 1270010 - RNA, 17 nt, Human
uuccaaugucuggagac

SEQ ID NO: 1270011 - RNA, 21 nt, Human
uuccaauuuucuggaauacau

SEQ ID NO: 1270012 - RNA, 19 nt, Human
uucauugcacuuugauuag

SEQ ID NO: 1270013 - RNA, 18 nt, Human
uucauugaguugguuacu

SEQ ID NO: 1270014 - RNA, 22 nt, Human
uuccaacucguauagcaugcau

SEQ ID NO: 1270015 - RNA, 19 nt, Human
uuccaacucguauagcaug

SEQ ID NO: 1270016 - RNA, 17 nt, Human
uuccaacuuggcugcag

SEQ ID NO: 1270017 - RNA, 22 nt, Human
uuccaacuuggcugcaggaauc

SEQ ID NO: 1270018 - RNA, 16 nt, Human
uuccaagacaugucug

SEQ ID NO: 1270019 - RNA, 21 nt, Human
uuccaagacaugucuguucua

SEQ ID NO: 1270020 - RNA, 22 nt, Human
uuccaccacagccagcaccugg

SEQ ID NO: 1270021 - RNA, 17 nt, Human
uuccaccaaaugugcuu

SEQ ID NO: 1270022 - RNA, 15 nt, Human
uuccaccuucccaug

SEQ ID NO: 1270023 - RNA, 15 nt, Human
uuccacggagccacu

SEQ ID NO: 1270024 - RNA, 21 nt, Human
uuccacggagccacuccucug

SEQ ID NO: 1270025 - RNA, 22 nt, Human
uuccacggagccacuccucuga

SEQ ID NO: 1270026 - RNA, 14 nt, Human
uuccacagaggaca

SEQ ID NO: 1270027 - RNA, 22 nt, Human
uuccacagaggacacagagaag

SEQ ID NO: 1270028 - RNA, 21 nt, Human
uuccacagccugcaagucagu

SEQ ID NO: 1270029 - RNA, 17 nt, Human
uuccacagggucccaca

SEQ ID NO: 1270030 - RNA, 22 nt, Human
uuccacagggucccacagccac

SEQ ID NO: 1270031 - RNA, 18 nt, Human
uuccacagggucccacag

SEQ ID NO: 1270032 - RNA, 15 nt, Human
uuccaccacagccag

SEQ ID NO: 1270033 - RNA, 16 nt, Human
uuccaccacagccagc

SEQ ID NO: 1270034 - RNA, 21 nt, Human
uuccaccacagccagcaccug

SEQ ID NO: 1270035 - RNA, 24 nt, Human
uuccacggagccacuccucugacu

SEQ ID NO: 1270036 - RNA, 19 nt, Human
uuccacguacugcagccuc

SEQ ID NO: 1270037 - RNA, 14 nt, Human
uuccaggcuucugc

SEQ ID NO: 1270038 - RNA, 15 nt, Human
uuccaggcuucugcu

SEQ ID NO: 1270039 - RNA, 16 nt, Human
uuccaggcuucugcug

SEQ ID NO: 1270040 - RNA, 17 nt, Human
uuccaggcuucugcugg

SEQ ID NO: 1270041 - RNA, 18 nt, Human
uuccaggcuucugcuggg

SEQ ID NO: 1270042 - RNA, 20 nt, Human
uuccaggcuucugcuggggc

SEQ ID NO: 1270043 - RNA, 22 nt, Human
uuccaggcuucugcuggggccu

SEQ ID NO: 1270044 - RNA, 18 nt, Human
auauucucacagcuccaa

SEQ ID NO: 1270045 - RNA, 13 nt, Human
auauucuaagacu

SEQ ID NO: 1270046 - RNA, 14 nt, Human
auauucuaagacuu

SEQ ID NO: 1270047 - RNA, 23 nt, Human
auauucuaagacuuacucuaaga

SEQ ID NO: 1270048 - RNA, 22 nt, Human
auauucuauuacauuuucagug

SEQ ID NO: 1270049 - RNA, 21 nt, Human
auauuccugcauuugugaaau

SEQ ID NO: 1270050 - RNA, 15 nt, Human
auauuacacuacaca

SEQ ID NO: 1270051 - RNA, 23 nt, Human
auauuacagauaaaauguaaacu

SEQ ID NO: 1270052 - RNA, 21 nt, Human
auauucucacagcuccaagaa

SEQ ID NO: 1270053 - RNA, 14 nt, Human
auauugacuuguau

SEQ ID NO: 1270054 - RNA, 15 nt, Human
auauugacuuguaua

SEQ ID NO: 1270055 - RNA, 16 nt, Human
auauugacuuguauau

SEQ ID NO: 1270056 - RNA, 19 nt, Human
auauugauaagaucuuuua

SEQ ID NO: 1270057 - RNA, 17 nt, Human
auauugagucaaauggu

SEQ ID NO: 1270058 - RNA, 18 nt, Human
auauugauaagaucuuuu

SEQ ID NO: 1270059 - RNA, 12 nt, Human
auauuggaacuu

SEQ ID NO: 1270060 - RNA, 19 nt, Human
auauuggacaaagaaccuu

SEQ ID NO: 1270061 - RNA, 21 nt, Human
auauuggccaaggaaaggcac

SEQ ID NO: 1270062 - RNA, 17 nt, Human
auauuggccaaggaaag

SEQ ID NO: 1270063 - RNA, 16 nt, Human
auauuguaaaacaggu

SEQ ID NO: 1270064 - RNA, 17 nt, Human
auauuguaaaacaggua

SEQ ID NO: 1270065 - RNA, 12 nt, Human
auauuguaaaua

SEQ ID NO: 1270066 - RNA, 19 nt, Human
auauuguuuuacaauaguu

SEQ ID NO: 1270067 - RNA, 19 nt, Human
auauuuaaauguaaagaca

SEQ ID NO: 1270068 - RNA, 21 nt, Human
auauuuaaauguaaagacaaa

SEQ ID NO: 1270069 - RNA, 19 nt, Human
auauuuaacucucuuuaug

SEQ ID NO: 1270070 - RNA, 13 nt, Human
auauuuacaaaug

SEQ ID NO: 1270071 - RNA, 14 nt, Human
auauuguuugcuaa

SEQ ID NO: 1270072 - RNA, 19 nt, Human
auauuguggguguuaauuu

SEQ ID NO: 1270073 - RNA, 14 nt, Human
auauugugauucug

SEQ ID NO: 1270074 - RNA, 17 nt, Human
auauugugauucugccu

SEQ ID NO: 1270075 - RNA, 19 nt, Human
auauugugauucugccuuu

SEQ ID NO: 1270076 - RNA, 12 nt, Human
auauuacaauga

SEQ ID NO: 1270077 - RNA, 16 nt, Human
auauuacaaugaucac

SEQ ID NO: 1270078 - RNA, 15 nt, Human
auauuacaaugauca

SEQ ID NO: 1270079 - RNA, 13 nt, Human
auauuacaaugau

SEQ ID NO: 1270080 - RNA, 15 nt, Human
auauguugaauacuu

SEQ ID NO: 1270081 - RNA, 16 nt, Human
auauguugaauacuuu

SEQ ID NO: 1270082 - RNA, 17 nt, Human
auauguugaauacuuuu

SEQ ID NO: 1270083 - RNA, 18 nt, Human
auauguugaauacuuuuu

SEQ ID NO: 1270084 - RNA, 16 nt, Human
auauguuguaauauuu

SEQ ID NO: 1270085 - RNA, 21 nt, Human
auauguuguaauauuucuuca

SEQ ID NO: 1270086 - RNA, 13 nt, Human
auauguuguucuu

SEQ ID NO: 1270087 - RNA, 14 nt, Human
auauguuguucuua

SEQ ID NO: 1270088 - RNA, 21 nt, Human
auauguuguucuuacaaacca

SEQ ID NO: 1270089 - RNA, 16 nt, Human
auauguucugacauaa

SEQ ID NO: 1270090 - RNA, 14 nt, Human
auauguugaauacu

SEQ ID NO: 1270091 - RNA, 18 nt, Human
uucccaguuggagcucca

SEQ ID NO: 1270092 - RNA, 12 nt, Human
uucccaggccca

SEQ ID NO: 1270093 - RNA, 22 nt, Human
uucccaggcccacugugccuca

SEQ ID NO: 1270094 - RNA, 19 nt, Human
uucccaggcccacugugcc

SEQ ID NO: 1270095 - RNA, 21 nt, Human
uucccagguaggccaaggugu

SEQ ID NO: 1270096 - RNA, 12 nt, Human
uucccaggugcu

SEQ ID NO: 1270097 - RNA, 16 nt, Human
uucccaggugcuacac

SEQ ID NO: 1270098 - RNA, 15 nt, Human
uucccagucugucga

SEQ ID NO: 1270099 - RNA, 15 nt, Human
uucccaguuggagcu

SEQ ID NO: 1270100 - RNA, 16 nt, Human
uucccaguuggagcuc

SEQ ID NO: 1270101 - RNA, 22 nt, Human
uuccagugaaaucaguuacucu

SEQ ID NO: 1270102 - RNA, 17 nt, Human
uuccagucuuccugaca

SEQ ID NO: 1270103 - RNA, 20 nt, Human
uuccagucuuccugacacuu

SEQ ID NO: 1270104 - RNA, 11 nt, Human
uucccaggacc

SEQ ID NO: 1270105 - RNA, 12 nt, Human
uucccaggaccc

SEQ ID NO: 1270106 - RNA, 13 nt, Human
uucccaggacccu

SEQ ID NO: 1270107 - RNA, 19 nt, Human
uucccaggacccugaaggg

SEQ ID NO: 1270108 - RNA, 20 nt, Human
uucccaggacccugaagggg

SEQ ID NO: 1270109 - RNA, 15 nt, Human
uucccuuuuuuuaag

SEQ ID NO: 1270110 - RNA, 17 nt, Human
uucccuacugaagcccu

SEQ ID NO: 1270111 - RNA, 15 nt, Human
uuccgccacuggggc

SEQ ID NO: 1270112 - RNA, 18 nt, Human
uuccgccacuggggcuca

SEQ ID NO: 1270113 - RNA, 13 nt, Human
uuccgcuuggagc

SEQ ID NO: 1270114 - RNA, 19 nt, Human
uuccgcuuggagcagaggg

SEQ ID NO: 1270115 - RNA, 13 nt, Human
uucccuacuuccu

SEQ ID NO: 1270116 - RNA, 20 nt, Human
uucccuacccucuagagaaa

SEQ ID NO: 1270117 - RNA, 19 nt, Human
uucccuacauuaaacauga

SEQ ID NO: 1270118 - RNA, 14 nt, Human
uucccuacccucua

SEQ ID NO: 1270119 - RNA, 16 nt, Human
uucccuacccucuaga

SEQ ID NO: 1270120 - RNA, 17 nt, Human
uucccuacccucuagag

SEQ ID NO: 1270121 - RNA, 14 nt, Human
uucccuacauuaaa

SEQ ID NO: 1270122 - RNA, 16 nt, Human
uucccuaaucuauggu

SEQ ID NO: 1270123 - RNA, 14 nt, Human
uucccguuucucca

SEQ ID NO: 1270124 - RNA, 15 nt, Human
uucccguuucuccac

SEQ ID NO: 1270125 - RNA, 17 nt, Human
uucccguuucuccaccu

SEQ ID NO: 1270126 - RNA, 12 nt, Human
uucccuaagcca

SEQ ID NO: 1270127 - RNA, 12 nt, Human
uucccgcucagc

SEQ ID NO: 1270128 - RNA, 20 nt, Human
uucccgcagugggagcaaac

SEQ ID NO: 1270129 - RNA, 14 nt, Human
uucccgcucagccc

SEQ ID NO: 1270130 - RNA, 15 nt, Human
uucccgcucagcccu

SEQ ID NO: 1270131 - RNA, 21 nt, Human
uuccuaaauauauuuuaagac

SEQ ID NO: 1270132 - RNA, 18 nt, Human
uuccuaaauauuaugaga

SEQ ID NO: 1270133 - RNA, 16 nt, Human
uuccuaaauauuauga

SEQ ID NO: 1270134 - RNA, 12 nt, Human
uuccuaaauuuu

SEQ ID NO: 1270135 - RNA, 18 nt, Human
uuccuaaauuuuccuguc

SEQ ID NO: 1270136 - RNA, 20 nt, Human
uuccuaaauuuuccuguccu

SEQ ID NO: 1270137 - RNA, 21 nt, Human
uuccuaaauuuuccuguccuc

SEQ ID NO: 1270138 - RNA, 18 nt, Human
uuccucuccacugccuuc

SEQ ID NO: 1270139 - RNA, 13 nt, Human
uuccuaagugauu

SEQ ID NO: 1270140 - RNA, 19 nt, Human
uuccucuccacugccuucg

SEQ ID NO: 1270141 - RNA, 16 nt, Human
uuccucucgcggcccu

SEQ ID NO: 1270142 - RNA, 20 nt, Human
uuccucucgcggcccucagu

SEQ ID NO: 1270143 - RNA, 13 nt, Human
uuccucugagccu

SEQ ID NO: 1270144 - RNA, 21 nt, Human
uuccucucgcggcccucagua

SEQ ID NO: 1270145 - RNA, 12 nt, Human
uuccugaacagg

SEQ ID NO: 1270146 - RNA, 14 nt, Human
uuccugaacaggau

SEQ ID NO: 1270147 - RNA, 19 nt, Human
uuccucuuuuccuucccaa

SEQ ID NO: 1270148 - RNA, 18 nt, Human
uuccugaaacaacuugga

SEQ ID NO: 1270149 - RNA, 17 nt, Human
uuccugggaaauauucc

SEQ ID NO: 1270150 - RNA, 21 nt, Human
uuccugggaaauauucccuag

SEQ ID NO: 1270151 - RNA, 21 nt, Human
aucaaggguacacugccuucu

SEQ ID NO: 1270152 - RNA, 15 nt, Human
aucaagggucaggcc

SEQ ID NO: 1270153 - RNA, 17 nt, Human
aucaagggucaggccuu

SEQ ID NO: 1270154 - RNA, 16 nt, Human
aucaagggucaggccu

SEQ ID NO: 1270155 - RNA, 14 nt, Human
aucaaggucguuuu

SEQ ID NO: 1270156 - RNA, 15 nt, Human
aucaaggucguuuuu

SEQ ID NO: 1270157 - RNA, 14 nt, Human
aucaaguaauacaa

SEQ ID NO: 1270158 - RNA, 15 nt, Human
aucaaguaauacaaa

SEQ ID NO: 1270159 - RNA, 16 nt, Human
aucaaguaauacaaac

SEQ ID NO: 1270160 - RNA, 17 nt, Human
aucaaguaauacaaacu

SEQ ID NO: 1270161 - RNA, 13 nt, Human
aucaauuuaaaaa

SEQ ID NO: 1270162 - RNA, 18 nt, Human
aucaauuauaguuucuga

SEQ ID NO: 1270163 - RNA, 19 nt, Human
aucaauguuucuucuaggu

SEQ ID NO: 1270164 - RNA, 16 nt, Human
aucaauuauaguuucu

SEQ ID NO: 1270165 - RNA, 17 nt, Human
aucaauuauaguuucug

SEQ ID NO: 1270166 - RNA, 19 nt, Human
aucacucuguucauuccuc

SEQ ID NO: 1270167 - RNA, 18 nt, Human
aucacucuagguuuuaca

SEQ ID NO: 1270168 - RNA, 20 nt, Human
aucacucuaauuaauuguaa

SEQ ID NO: 1270169 - RNA, 13 nt, Human
aucacgcuuuccu

SEQ ID NO: 1270170 - RNA, 12 nt, Human
aucacucaccau

SEQ ID NO: 1270171 - RNA, 18 nt, Human
uuccuuacagaacuacuu

SEQ ID NO: 1270172 - RNA, 19 nt, Human
uuccuuaagucagaacagc

SEQ ID NO: 1270173 - RNA, 20 nt, Human
uuccuuaagucagaacagca

SEQ ID NO: 1270174 - RNA, 19 nt, Human
uuccuguuuuucacauuuu

SEQ ID NO: 1270175 - RNA, 23 nt, Human
uuccuguuuuucacauuuuccuu

SEQ ID NO: 1270176 - RNA, 13 nt, Human
uuccuuaccuuuu

SEQ ID NO: 1270177 - RNA, 20 nt, Human
uuccuuacuuuuuauauaua

SEQ ID NO: 1270178 - RNA, 21 nt, Human
auauuuuucaugauuuugaaa

SEQ ID NO: 1270179 - RNA, 11 nt, Human
aucaacugaau

SEQ ID NO: 1270180 - RNA, 13 nt, Human
aucaacugaauga

SEQ ID NO: 1270181 - RNA, 14 nt, Human
aucaacugaaugag

SEQ ID NO: 1270182 - RNA, 21 nt, Human
aucaacuuaccaggcaccaaa

SEQ ID NO: 1270183 - RNA, 15 nt, Human
aucaacuugcuuauc

SEQ ID NO: 1270184 - RNA, 21 nt, Human
aucacugaacuuugcugagcc

SEQ ID NO: 1270185 - RNA, 14 nt, Human
aucacugaacuuug

SEQ ID NO: 1270186 - RNA, 23 nt, Human
aucacucuguucauuccuccagg

SEQ ID NO: 1270187 - RNA, 22 nt, Human
aucacucuguucauuccuccag

SEQ ID NO: 1270188 - RNA, 21 nt, Human
aucacucuguucauuccucca

SEQ ID NO: 1270189 - RNA, 14 nt, Human
aucacuuaaacuug

SEQ ID NO: 1270190 - RNA, 20 nt, Human
aucacuuaggaaauggcuuu

SEQ ID NO: 1270191 - RNA, 17 nt, Human
aucacuuaaacuugcau

SEQ ID NO: 1270192 - RNA, 23 nt, Human
aucacuuaacggaccaaagcaag

SEQ ID NO: 1270193 - RNA, 23 nt, Human
aucacuugaacccgggaggcaga

SEQ ID NO: 1270194 - RNA, 18 nt, Human
aucaguuaacuauugcau

SEQ ID NO: 1270195 - RNA, 18 nt, Human
aucaguuaagaaauuuca

SEQ ID NO: 1270196 - RNA, 22 nt, Human
aucaguuaagaaauuucacaua

SEQ ID NO: 1270197 - RNA, 12 nt, Human
aucaguuaacua

SEQ ID NO: 1270198 - RNA, 21 nt, Human
aucaguuacacaugaucauaa

SEQ ID NO: 1270199 - RNA, 17 nt, Human
aucaguucauuagaaau

SEQ ID NO: 1270200 - RNA, 16 nt, Human
aucagucucagaaugu

SEQ ID NO: 1270201 - RNA, 13 nt, Human
aucagugcccucc

SEQ ID NO: 1270202 - RNA, 15 nt, Human
aucagugcccuccag

SEQ ID NO: 1270203 - RNA, 17 nt, Human
aucagugcccuccagga

SEQ ID NO: 1270204 - RNA, 15 nt, Human
aucagugcucccuca

SEQ ID NO: 1270205 - RNA, 18 nt, Human
aucaguucauuagaaaua

SEQ ID NO: 1270206 - RNA, 19 nt, Human
aucaguucauuagaaauau

SEQ ID NO: 1270207 - RNA, 21 nt, Human
aucaguucauuagaaauauuu

SEQ ID NO: 1270208 - RNA, 16 nt, Human
aucaguuuaaaagcac

SEQ ID NO: 1270209 - RNA, 22 nt, Human
aucaguuuaaaagcacgacagu

SEQ ID NO: 1270210 - RNA, 20 nt, Human
aucaguuuaaaagcacgaca

SEQ ID NO: 1270211 - RNA, 21 nt, Human
aucaguuuuuucaccuggaag

SEQ ID NO: 1270212 - RNA, 17 nt, Human
aucauaagauauuuuuc

SEQ ID NO: 1270213 - RNA, 24 nt, Human
aucauauaaauagaauguaaaugu

SEQ ID NO: 1270214 - RNA, 16 nt, Human
aucauauaauaaaugu

SEQ ID NO: 1270215 - RNA, 20 nt, Human
aucauauaauaaauguacau

SEQ ID NO: 1270216 - RNA, 20 nt, Human
aucauauauauacauacaug

SEQ ID NO: 1270217 - RNA, 15 nt, Human
aucaucaguguagaa

SEQ ID NO: 1270218 - RNA, 16 nt, Human
aucaucaguguagaac

SEQ ID NO: 1270219 - RNA, 23 nt, Human
aucauauaaauagaauguaaaug

SEQ ID NO: 1270220 - RNA, 22 nt, Human
aucauauaaauagaauguaaau

SEQ ID NO: 1270221 - RNA, 21 nt, Human
aucauauaaauagaauguaaa

SEQ ID NO: 1270222 - RNA, 19 nt, Human
aucauauaaauagaaugua

SEQ ID NO: 1270223 - RNA, 18 nt, Human
aucauauaaauagaaugu

SEQ ID NO: 1270224 - RNA, 14 nt, Human
aucauauaaauaga

SEQ ID NO: 1270225 - RNA, 18 nt, Human
aucaucauguguguccac

SEQ ID NO: 1270226 - RNA, 13 nt, Human
aucaucauggcca

SEQ ID NO: 1270227 - RNA, 14 nt, Human
aucaucauggccag

SEQ ID NO: 1270228 - RNA, 13 nt, Human
aucauccacacau

SEQ ID NO: 1270229 - RNA, 14 nt, Human
aucauccacacaug

SEQ ID NO: 1270230 - RNA, 16 nt, Human
aucauccacacaugaa

SEQ ID NO: 1270231 - RNA, 13 nt, Human
aucauuacuauaa

SEQ ID NO: 1270232 - RNA, 12 nt, Human
aucauucucugu

SEQ ID NO: 1270233 - RNA, 14 nt, Human
aucauucucugucu

SEQ ID NO: 1270234 - RNA, 16 nt, Human
aucauucucugucuca

SEQ ID NO: 1270235 - RNA, 21 nt, Human
aucauucucugucucauccau

SEQ ID NO: 1270236 - RNA, 19 nt, Human
aucauugugaaauuauuca

SEQ ID NO: 1270237 - RNA, 18 nt, Human
uucuccccugcacuguaa

SEQ ID NO: 1270238 - RNA, 19 nt, Human
uucuccccugcacuguaaa

SEQ ID NO: 1270239 - RNA, 20 nt, Human
uucuccccugcacuguaaaa

SEQ ID NO: 1270240 - RNA, 15 nt, Human
aucauugugaaauua

SEQ ID NO: 1270241 - RNA, 13 nt, Human
aucauugugaaau

SEQ ID NO: 1270242 - RNA, 24 nt, Human
aucauucucugucucauccaucau

SEQ ID NO: 1270243 - RNA, 19 nt, Human
aucauucuuauuucaugaa

SEQ ID NO: 1270244 - RNA, 20 nt, Human
aucauucuuauuucaugaaa

SEQ ID NO: 1270245 - RNA, 23 nt, Human
aucauucuuauuucaugaaaauu

SEQ ID NO: 1270246 - RNA, 13 nt, Human
aucauuguaugug

SEQ ID NO: 1270247 - RNA, 21 nt, Human
uucuccccugcacuguaaaau

SEQ ID NO: 1270248 - RNA, 19 nt, Human
uucucccuggauuuuuacc

SEQ ID NO: 1270249 - RNA, 10 nt, Human
uucucccugu

SEQ ID NO: 1270250 - RNA, 20 nt, Human
uucucccuggauuuuuacca

SEQ ID NO: 1270251 - RNA, 16 nt, Human
uucuccguuagcuccu

SEQ ID NO: 1270252 - RNA, 17 nt, Human
uucuccguuagcuccug

SEQ ID NO: 1270253 - RNA, 18 nt, Human
uucuccguuagcuccugu

SEQ ID NO: 1270254 - RNA, 19 nt, Human
uucuccguuagcuccugug

SEQ ID NO: 1270255 - RNA, 20 nt, Human
uucuccguuagcuccugugg

SEQ ID NO: 1270256 - RNA, 22 nt, Human
uucuccguuagcuccuguggcc

SEQ ID NO: 1270257 - RNA, 14 nt, Human
uucuccuauguuug

SEQ ID NO: 1270258 - RNA, 18 nt, Human
uucuccucacuguaucca

SEQ ID NO: 1270259 - RNA, 13 nt, Human
uucuccucccagg

SEQ ID NO: 1270260 - RNA, 17 nt, Human
uucugaauaaagcaauu

SEQ ID NO: 1270261 - RNA, 16 nt, Human
uucugaauaaagcaau

SEQ ID NO: 1270262 - RNA, 15 nt, Human
uucugaauaaagcaa

SEQ ID NO: 1270263 - RNA, 14 nt, Human
uucugaauaaagca

SEQ ID NO: 1270264 - RNA, 15 nt, Human
uucugaaugcuucua

SEQ ID NO: 1270265 - RNA, 23 nt, Human
uucugaaugcuucuaaguaaaua

SEQ ID NO: 1270266 - RNA, 18 nt, Human
uucugaaugcuucuaagu

SEQ ID NO: 1270267 - RNA, 15 nt, Human
uucugcaguaaaucu

SEQ ID NO: 1270268 - RNA, 18 nt, Human
uucugcaguaaaucuuuu

SEQ ID NO: 1270269 - RNA, 22 nt, Human
uucugcaguaaaucuuuuacaa

SEQ ID NO: 1270270 - RNA, 17 nt, Human
uucugcauauguugaau

SEQ ID NO: 1270271 - RNA, 21 nt, Human
uucugcauauguugaauacuu

SEQ ID NO: 1270272 - RNA, 22 nt, Human
uucugcauauguugaauacuuu

SEQ ID NO: 1270273 - RNA, 23 nt, Human
uucugcauauguugaauacuuuu

SEQ ID NO: 1270274 - RNA, 16 nt, Human
uucugccugccagcug

SEQ ID NO: 1270275 - RNA, 17 nt, Human
uucugccugccagcugc

SEQ ID NO: 1270276 - RNA, 20 nt, Human
uucucucaacaccaugauuc

SEQ ID NO: 1270277 - RNA, 15 nt, Human
uucucucaacaccau

SEQ ID NO: 1270278 - RNA, 18 nt, Human
uucuccuuucacaaccuu

SEQ ID NO: 1270279 - RNA, 22 nt, Human
uucuccuuucacaaccuucugu

SEQ ID NO: 1270280 - RNA, 23 nt, Human
uucuccuccaugggagaaaauag

SEQ ID NO: 1270281 - RNA, 13 nt, Human
uucuccuuuuccu

SEQ ID NO: 1270282 - RNA, 18 nt, Human
uucuccuuuuccucucuc

SEQ ID NO: 1270283 - RNA, 19 nt, Human
uucucgcuguccuuucuag

SEQ ID NO: 1270284 - RNA, 19 nt, Human
uucucguccucguuugugu

SEQ ID NO: 1270285 - RNA, 16 nt, Human
auccaagcaaauguga

SEQ ID NO: 1270286 - RNA, 16 nt, Human
auccaacuaaugccuu

SEQ ID NO: 1270287 - RNA, 18 nt, Human
auccaacuaaugccuuac

SEQ ID NO: 1270288 - RNA, 20 nt, Human
auccaacuaaugccuuacuc

SEQ ID NO: 1270289 - RNA, 18 nt, Human
auccaagcaaaugugaau

SEQ ID NO: 1270290 - RNA, 19 nt, Human
auccaagauauuuuaaaau

SEQ ID NO: 1270291 - RNA, 22 nt, Human
auccaauuagcuuauguuaacu

SEQ ID NO: 1270292 - RNA, 20 nt, Human
auccaauggguuuuucccug

SEQ ID NO: 1270293 - RNA, 18 nt, Human
uucugccugccagcugca

SEQ ID NO: 1270294 - RNA, 19 nt, Human
uucugccugccagcugcac

SEQ ID NO: 1270295 - RNA, 22 nt, Human
uucugccugccagcugcacuga

SEQ ID NO: 1270296 - RNA, 15 nt, Human
auccaguaaaauaau

SEQ ID NO: 1270297 - RNA, 16 nt, Human
auccaguaggauccag

SEQ ID NO: 1270298 - RNA, 15 nt, Human
auccagguucccucc

SEQ ID NO: 1270299 - RNA, 19 nt, Human
auccagguucccucccaga

SEQ ID NO: 1270300 - RNA, 13 nt, Human
auccaguauaaga

SEQ ID NO: 1270301 - RNA, 18 nt, Human
auccaucaucaugugugu

SEQ ID NO: 1270302 - RNA, 20 nt, Human
auccauccuugccaauagug

SEQ ID NO: 1270303 - RNA, 18 nt, Human
auccaugaccuaguuuuc

SEQ ID NO: 1270304 - RNA, 20 nt, Human
auccaugaccuaguuuucca

SEQ ID NO: 1270305 - RNA, 22 nt, Human
auccacauacccugaccuggcc

SEQ ID NO: 1270306 - RNA, 20 nt, Human
auccaauuagcuuauguuaa

SEQ ID NO: 1270307 - RNA, 14 nt, Human
auccacacaugaau

SEQ ID NO: 1270308 - RNA, 15 nt, Human
aucccugaggacuga

SEQ ID NO: 1270309 - RNA, 18 nt, Human
aucccugaggacugauuu

SEQ ID NO: 1270310 - RNA, 22 nt, Human
aucccugaggacugauuucaga

SEQ ID NO: 1270311 - RNA, 13 nt, Human
auccauggccagc

SEQ ID NO: 1270312 - RNA, 14 nt, Human
auccauggccagca

SEQ ID NO: 1270313 - RNA, 16 nt, Human
auccauggccagcagc

SEQ ID NO: 1270314 - RNA, 17 nt, Human
auccauggccagcagca

SEQ ID NO: 1270315 - RNA, 21 nt, Human
auccaugaccuaguuuuccau

SEQ ID NO: 1270316 - RNA, 22 nt, Human
auccaugaccuaguuuuccaug

SEQ ID NO: 1270317 - RNA, 12 nt, Human
auccaugccuca

SEQ ID NO: 1270318 - RNA, 12 nt, Human
auccauggccag

SEQ ID NO: 1270319 - RNA, 21 nt, Human
auccauggccagcagcaccug

SEQ ID NO: 1270320 - RNA, 23 nt, Human
auccauggccagcagcaccugcc

SEQ ID NO: 1270321 - RNA, 18 nt, Human
aucccacucacaacagcu

SEQ ID NO: 1270322 - RNA, 18 nt, Human
aucccagaaaaaguaacu

SEQ ID NO: 1270323 - RNA, 18 nt, Human
aucccagagagcccgagg

SEQ ID NO: 1270324 - RNA, 14 nt, Human
uucuuacugcuuaa

SEQ ID NO: 1270325 - RNA, 14 nt, Human
uucuuacugcuugg

SEQ ID NO: 1270326 - RNA, 13 nt, Human
uucuuacugcuug

SEQ ID NO: 1270327 - RNA, 15 nt, Human
uucuuaccuguaugu

SEQ ID NO: 1270328 - RNA, 23 nt, Human
uucuuaaccagaucauugugaaa

SEQ ID NO: 1270329 - RNA, 22 nt, Human
uucuuaaccagaucauugugaa

SEQ ID NO: 1270330 - RNA, 11 nt, Human
uucuuaaauaa

SEQ ID NO: 1270331 - RNA, 18 nt, Human
uucuuaaauaagaaacuu

SEQ ID NO: 1270332 - RNA, 19 nt, Human
uucuuaaauaagaaacuuu

SEQ ID NO: 1270333 - RNA, 16 nt, Human
uucuguuuuauaauuu

SEQ ID NO: 1270334 - RNA, 12 nt, Human
uucuguuucaag

SEQ ID NO: 1270335 - RNA, 23 nt, Human
uucuguuucaaggcacucuagau

SEQ ID NO: 1270336 - RNA, 17 nt, Human
uucuguuuuauaauuuu

SEQ ID NO: 1270337 - RNA, 13 nt, Human
uucuguuugcugu

SEQ ID NO: 1270338 - RNA, 12 nt, Human
uucuuagcucaa

SEQ ID NO: 1270339 - RNA, 22 nt, Human
uucuucuacaacucauacacuc

SEQ ID NO: 1270340 - RNA, 11 nt, Human
uucuucuagag

SEQ ID NO: 1270341 - RNA, 14 nt, Human
uucuucuagaguuc

SEQ ID NO: 1270342 - RNA, 18 nt, Human
uucuucuagguucuaaaa

SEQ ID NO: 1270343 - RNA, 21 nt, Human
uucuucuagguucuaaaaauu

SEQ ID NO: 1270344 - RNA, 15 nt, Human
uucuucuagaguuca

SEQ ID NO: 1270345 - RNA, 18 nt, Human
uucuucuauugccucuga

SEQ ID NO: 1270346 - RNA, 20 nt, Human
uucuucuauugccucugaga

SEQ ID NO: 1270347 - RNA, 12 nt, Human
uucuugccucau

SEQ ID NO: 1270348 - RNA, 15 nt, Human
uucuugccucugugc

SEQ ID NO: 1270349 - RNA, 16 nt, Human
uucuugccucugugcu

SEQ ID NO: 1270350 - RNA, 17 nt, Human
uucuugccucugugcug

SEQ ID NO: 1270351 - RNA, 22 nt, Human
uucuugccucugugcugugugu

SEQ ID NO: 1270352 - RNA, 18 nt, Human
uucuugccugaacuccug

SEQ ID NO: 1270353 - RNA, 15 nt, Human
uucuuucucacuaaa

SEQ ID NO: 1270354 - RNA, 13 nt, Human
uucuuugaauaaa

SEQ ID NO: 1270355 - RNA, 14 nt, Human
uucuuugaauaaau

SEQ ID NO: 1270356 - RNA, 17 nt, Human
uucuuugaauaaauguc

SEQ ID NO: 1270357 - RNA, 18 nt, Human
uucuuugaauaaauguca

SEQ ID NO: 1270358 - RNA, 19 nt, Human
uucuuugaauaaaugucac

SEQ ID NO: 1270359 - RNA, 17 nt, Human
aucguaaaauuaagaaa

SEQ ID NO: 1270360 - RNA, 14 nt, Human
aucguaaaauuaag

SEQ ID NO: 1270361 - RNA, 13 nt, Human
aucguaaaauuaa

SEQ ID NO: 1270362 - RNA, 12 nt, Human
aucguaaaauua

SEQ ID NO: 1270363 - RNA, 18 nt, Human
aucggggagccgggagcc

SEQ ID NO: 1270364 - RNA, 16 nt, Human
aucggggagccgggag

SEQ ID NO: 1270365 - RNA, 21 nt, Human
auccuguaggaagguacugua

SEQ ID NO: 1270366 - RNA, 16 nt, Human
auccuguauucagaca

SEQ ID NO: 1270367 - RNA, 18 nt, Human
auccuguauucagacaga

SEQ ID NO: 1270368 - RNA, 20 nt, Human
auccuguauucagacagaug

SEQ ID NO: 1270369 - RNA, 22 nt, Human
auccuguaggaagguacuguau

SEQ ID NO: 1270370 - RNA, 20 nt, Human
auccuguaggaagguacugu

SEQ ID NO: 1270371 - RNA, 19 nt, Human
auccuguaggaagguacug

SEQ ID NO: 1270372 - RNA, 21 nt, Human
auccuguauucagacagauga

SEQ ID NO: 1270373 - RNA, 21 nt, Human
auccugucgauuagacuggac

SEQ ID NO: 1270374 - RNA, 19 nt, Human
auccugucgauuagacugg

SEQ ID NO: 1270375 - RNA, 17 nt, Human
auccuguggucacugac

SEQ ID NO: 1270376 - RNA, 14 nt, Human
auccuguguggaga

SEQ ID NO: 1270377 - RNA, 16 nt, Human
auccuguguggagagg

SEQ ID NO: 1270378 - RNA, 18 nt, Human
auccuguguggagaggga

SEQ ID NO: 1270379 - RNA, 19 nt, Human
auccuguguggagagggaa

SEQ ID NO: 1270380 - RNA, 21 nt, Human
auccuguguggagagggaaug

SEQ ID NO: 1270381 - RNA, 23 nt, Human
auccuguguggagagggaaugug

SEQ ID NO: 1270382 - RNA, 22 nt, Human
auccuguguggagagggaaugu

SEQ ID NO: 1270383 - RNA, 11 nt, Human
auccugugugu

SEQ ID NO: 1270384 - RNA, 12 nt, Human
auccuguguguu

SEQ ID NO: 1270385 - RNA, 13 nt, Human
auccuguguguua

SEQ ID NO: 1270386 - RNA, 21 nt, Human
auccuguguguuaagcucugc

SEQ ID NO: 1270387 - RNA, 19 nt, Human
auccuguguguuaagcucu

SEQ ID NO: 1270388 - RNA, 14 nt, Human
auccuggaggccca

SEQ ID NO: 1270389 - RNA, 15 nt, Human
auccuggaggcccag

SEQ ID NO: 1270390 - RNA, 16 nt, Human
auccuggaggcccagu

SEQ ID NO: 1270391 - RNA, 17 nt, Human
auccuggaggcccaguu

SEQ ID NO: 1270392 - RNA, 14 nt, Human
auccugcuucagug

SEQ ID NO: 1270393 - RNA, 12 nt, Human
auccugcuugau

SEQ ID NO: 1270394 - RNA, 22 nt, Human
auccuggacaugaagauucuuu

SEQ ID NO: 1270395 - RNA, 19 nt, Human
auccuggaggcccaguuca

SEQ ID NO: 1270396 - RNA, 20 nt, Human
auccuggaggcccaguucac

SEQ ID NO: 1270397 - RNA, 22 nt, Human
auccucuuccauauggauccac

SEQ ID NO: 1270398 - RNA, 13 nt, Human
uucuuuugguaaa

SEQ ID NO: 1270399 - RNA, 22 nt, Human
uucuuuugguaaagacuggcuu

SEQ ID NO: 1270400 - RNA, 23 nt, Human
uucuuuugguaaagacuggcuuu

SEQ ID NO: 1270401 - RNA, 21 nt, Human
uucuuuucuggaauguaauca

SEQ ID NO: 1270402 - RNA, 14 nt, Human
uucuuuugccauga

SEQ ID NO: 1270403 - RNA, 14 nt, Human
auccucuuuuucca

SEQ ID NO: 1270404 - RNA, 15 nt, Human
auccucuuuuuccaa

SEQ ID NO: 1270405 - RNA, 14 nt, Human
auccugaaauuuca

SEQ ID NO: 1270406 - RNA, 16 nt, Human
auccugaaauuucaga

SEQ ID NO: 1270407 - RNA, 17 nt, Human
auccugaaauuucagau

SEQ ID NO: 1270408 - RNA, 23 nt, Human
auccugacaagauuauaauauuu

SEQ ID NO: 1270409 - RNA, 24 nt, Human
auccugaccagcugcuccgaggac

SEQ ID NO: 1270410 - RNA, 18 nt, Human
auccugaggcuccacuug

SEQ ID NO: 1270411 - RNA, 16 nt, Human
auccugaggcuccacu

SEQ ID NO: 1270412 - RNA, 13 nt, Human
auccugaggcucc

SEQ ID NO: 1270413 - RNA, 11 nt, Human
auccugaggcu

SEQ ID NO: 1270414 - RNA, 13 nt, Human
auccugccccuga

SEQ ID NO: 1270415 - RNA, 12 nt, Human
auccugccugcc

SEQ ID NO: 1270416 - RNA, 16 nt, Human
auccugcggguggggc

SEQ ID NO: 1270417 - RNA, 13 nt, Human
auccugcuaaguu

SEQ ID NO: 1270418 - RNA, 16 nt, Human
auccugcaauuccacu

SEQ ID NO: 1270419 - RNA, 19 nt, Human
auccugaugagguuucuac

SEQ ID NO: 1270420 - RNA, 22 nt, Human
auccugaggcuccacuuggucu

SEQ ID NO: 1270421 - RNA, 15 nt, Human
uugacauaaaguuga

SEQ ID NO: 1270422 - RNA, 23 nt, Human
uugacacugcucuaacagcccuc

SEQ ID NO: 1270423 - RNA, 19 nt, Human
uugacaguguugaaaaugu

SEQ ID NO: 1270424 - RNA, 14 nt, Human
uugacaguguuuuu

SEQ ID NO: 1270425 - RNA, 19 nt, Human
uugacacuuaaaaaugguu

SEQ ID NO: 1270426 - RNA, 19 nt, Human
uugacauaaaguugauaaa

SEQ ID NO: 1270427 - RNA, 14 nt, Human
uugacccacaagaa

SEQ ID NO: 1270428 - RNA, 21 nt, Human
uugagaaauauggacacuuaa

SEQ ID NO: 1270429 - RNA, 17 nt, Human
uugagaaagucagauuc

SEQ ID NO: 1270430 - RNA, 16 nt, Human
uugagaagcugcucaa

SEQ ID NO: 1270431 - RNA, 19 nt, Human
uugagaaggaaaauuuuag

SEQ ID NO: 1270432 - RNA, 20 nt, Human
uugagaaggaaaauuuuagc

SEQ ID NO: 1270433 - RNA, 15 nt, Human
uugagaagcugcuca

SEQ ID NO: 1270434 - RNA, 13 nt, Human
uugagaagcugcu

SEQ ID NO: 1270435 - RNA, 17 nt, Human
uugagagaagagacaaa

SEQ ID NO: 1270436 - RNA, 16 nt, Human
uugagagaauuugugc

SEQ ID NO: 1270437 - RNA, 15 nt, Human
uugagagugugacca

SEQ ID NO: 1270438 - RNA, 13 nt, Human
uugagagugugac

SEQ ID NO: 1270439 - RNA, 17 nt, Human
uugagauaguuuucauc

SEQ ID NO: 1270440 - RNA, 22 nt, Human
uugagauaguuuucauccauaa

SEQ ID NO: 1270441 - RNA, 20 nt, Human
uugagauauuaaugcccaga

SEQ ID NO: 1270442 - RNA, 21 nt, Human
uugagauauuaaugcccagac

SEQ ID NO: 1270443 - RNA, 17 nt, Human
uugauaaagauuuuuua

SEQ ID NO: 1270444 - RNA, 20 nt, Human
uugauaaagauuuuuuaaua

SEQ ID NO: 1270445 - RNA, 22 nt, Human
uugauaaagauuuuuuaauaau

SEQ ID NO: 1270446 - RNA, 12 nt, Human
uugaguaauggu

SEQ ID NO: 1270447 - RNA, 21 nt, Human
uugaguaaugguguagaacac

SEQ ID NO: 1270448 - RNA, 16 nt, Human
uugaguaaugguguag

SEQ ID NO: 1270449 - RNA, 20 nt, Human
uugaguagagagcaagggaa

SEQ ID NO: 1270450 - RNA, 18 nt, Human
uugaguuuugacugcuug

SEQ ID NO: 1270451 - RNA, 17 nt, Human
uugaguuuugacugcuu

SEQ ID NO: 1270452 - RNA, 14 nt, Human
uugauaaagauuuu

SEQ ID NO: 1270453 - RNA, 18 nt, Human
uugauaaaucauuuuaug

SEQ ID NO: 1270454 - RNA, 21 nt, Human
uugauaaaucauuuuauguca

SEQ ID NO: 1270455 - RNA, 15 nt, Human
uugauaaaucauuuu

SEQ ID NO: 1270456 - RNA, 18 nt, Human
uugauaaccuugaaaaaa

SEQ ID NO: 1270457 - RNA, 18 nt, Human
uugauaagaucuuuuauu

SEQ ID NO: 1270458 - RNA, 16 nt, Human
uugauaagaucuuuua

SEQ ID NO: 1270459 - RNA, 13 nt, Human
aucuaagugauau

SEQ ID NO: 1270460 - RNA, 14 nt, Human
aucuaagugauaua

SEQ ID NO: 1270461 - RNA, 15 nt, Human
aucuaagugauauaa

SEQ ID NO: 1270462 - RNA, 17 nt, Human
aucuaagugauauaaau

SEQ ID NO: 1270463 - RNA, 16 nt, Human
aucuaaguuaauuuaa

SEQ ID NO: 1270464 - RNA, 17 nt, Human
aucuaaguuaauuuaaa

SEQ ID NO: 1270465 - RNA, 13 nt, Human
aucuaaccucauc

SEQ ID NO: 1270466 - RNA, 14 nt, Human
aucuaaccucaucu

SEQ ID NO: 1270467 - RNA, 15 nt, Human
aucuaaccucaucuu

SEQ ID NO: 1270468 - RNA, 18 nt, Human
aucuaaccucaucuucuu

SEQ ID NO: 1270469 - RNA, 15 nt, Human
aucuaaacugccccc

SEQ ID NO: 1270470 - RNA, 22 nt, Human
aucuaaacuggauucacagcuc

SEQ ID NO: 1270471 - RNA, 20 nt, Human
aucuaaaauauuauuuuauu

SEQ ID NO: 1270472 - RNA, 17 nt, Human
aucuaaauaaaaugcua

SEQ ID NO: 1270473 - RNA, 22 nt, Human
aucuaaauauggacugcucagg

SEQ ID NO: 1270474 - RNA, 16 nt, Human
aucuaaauaaaaugcu

SEQ ID NO: 1270475 - RNA, 19 nt, Human
aucguccagcgaccuuccu

SEQ ID NO: 1270476 - RNA, 17 nt, Human
aucgucaugcacaguau

SEQ ID NO: 1270477 - RNA, 23 nt, Human
aucuaaaaauagacuuaaaucuc

SEQ ID NO: 1270478 - RNA, 17 nt, Human
uugacacuuaaaaaugg

SEQ ID NO: 1270479 - RNA, 14 nt, Human
uugacacugcucua

SEQ ID NO: 1270480 - RNA, 15 nt, Human
uugacacugcucuaa

SEQ ID NO: 1270481 - RNA, 16 nt, Human
uugacacugcucuaac

SEQ ID NO: 1270482 - RNA, 22 nt, Human
uugacacugcucuaacagcccu

SEQ ID NO: 1270483 - RNA, 20 nt, Human
uugaauacuuugaauguguu

SEQ ID NO: 1270484 - RNA, 19 nt, Human
uugaaguuagcuuuaacuu

SEQ ID NO: 1270485 - RNA, 23 nt, Human
uugaaguuagcuuuaacuuaaau

SEQ ID NO: 1270486 - RNA, 19 nt, Human
uugaauacuuugaaugugu

SEQ ID NO: 1270487 - RNA, 12 nt, Human
uugaauacuuuu

SEQ ID NO: 1270488 - RNA, 13 nt, Human
uugaauacuuuuu

SEQ ID NO: 1270489 - RNA, 21 nt, Human
uugaaggacuaauagaaaagu

SEQ ID NO: 1270490 - RNA, 14 nt, Human
uugaaggacuaaua

SEQ ID NO: 1270491 - RNA, 15 nt, Human
uugaagggaggggcu

SEQ ID NO: 1270492 - RNA, 20 nt, Human
uugaagggaggggcuguguu

SEQ ID NO: 1270493 - RNA, 15 nt, Human
uugaagggccagagc

SEQ ID NO: 1270494 - RNA, 17 nt, Human
uugaagggccagagcca

SEQ ID NO: 1270495 - RNA, 19 nt, Human
uugaagggccagagccagg

SEQ ID NO: 1270496 - RNA, 20 nt, Human
uugaagggccagagccaggg

SEQ ID NO: 1270497 - RNA, 23 nt, Human
uugaaggugcugacggccaggga

SEQ ID NO: 1270498 - RNA, 15 nt, Human
uugaaguaaacuuuu

SEQ ID NO: 1270499 - RNA, 16 nt, Human
uugaaguaaacuuuuu

SEQ ID NO: 1270500 - RNA, 16 nt, Human
uugaaguagcucuuuu

SEQ ID NO: 1270501 - RNA, 12 nt, Human
uugaaguauuua

SEQ ID NO: 1270502 - RNA, 18 nt, Human
uugaaguauuuugcugga

SEQ ID NO: 1270503 - RNA, 17 nt, Human
uguuguagagaaaacau

SEQ ID NO: 1270504 - RNA, 14 nt, Human
uguuguagagaaaa

SEQ ID NO: 1270505 - RNA, 18 nt, Human
uguuguaaccugcuguga

SEQ ID NO: 1270506 - RNA, 17 nt, Human
uguuguaagcaacaggc

SEQ ID NO: 1270507 - RNA, 14 nt, Human
uguuguaaccugcu

SEQ ID NO: 1270508 - RNA, 14 nt, Human
uguuguaagcaaca

SEQ ID NO: 1270509 - RNA, 11 nt, Human
uguugucaaga

SEQ ID NO: 1270510 - RNA, 16 nt, Human
uguugucaagaauagc

SEQ ID NO: 1270511 - RNA, 20 nt, Human
uguugucaagaauagcauug

SEQ ID NO: 1270512 - RNA, 13 nt, Human
uguugucaccaga

SEQ ID NO: 1270513 - RNA, 23 nt, Human
uguuguagagaaaacaugcagaa

SEQ ID NO: 1270514 - RNA, 22 nt, Human
uguuguagauugauuguauugu

SEQ ID NO: 1270515 - RNA, 14 nt, Human
uguuguauucauug

SEQ ID NO: 1270516 - RNA, 21 nt, Human
uguuguagauugauuguauug

SEQ ID NO: 1270517 - RNA, 20 nt, Human
uguugggagagggcgcaggc

SEQ ID NO: 1270518 - RNA, 20 nt, Human
uguuggggaagggccugccc

SEQ ID NO: 1270519 - RNA, 17 nt, Human
uguugggagagggcgca

SEQ ID NO: 1270520 - RNA, 19 nt, Human
uguugggagagggcgcagg

SEQ ID NO: 1270521 - RNA, 13 nt, Human
aguucgucuguug

SEQ ID NO: 1270522 - RNA, 18 nt, Human
aguucuaagacucaaaug

SEQ ID NO: 1270523 - RNA, 23 nt, Human
aguucuaagacucaaauguucua

SEQ ID NO: 1270524 - RNA, 13 nt, Human
aguucuaagauuc

SEQ ID NO: 1270525 - RNA, 14 nt, Human
aguucuaagauucu

SEQ ID NO: 1270526 - RNA, 15 nt, Human
aguucuaagauucua

SEQ ID NO: 1270527 - RNA, 16 nt, Human
aguucuaagauucuaa

SEQ ID NO: 1270528 - RNA, 17 nt, Human
aguucuaagauucuaau

SEQ ID NO: 1270529 - RNA, 18 nt, Human
aguucuaagauucuaaug

SEQ ID NO: 1270530 - RNA, 19 nt, Human
aguucuaagauucuaauga

SEQ ID NO: 1270531 - RNA, 15 nt, Human
aguucuaagauucug

SEQ ID NO: 1270532 - RNA, 16 nt, Human
aguucuaagauucuga

SEQ ID NO: 1270533 - RNA, 17 nt, Human
aguucuaagauucugau

SEQ ID NO: 1270534 - RNA, 16 nt, Human
aguucuaauaauuucu

SEQ ID NO: 1270535 - RNA, 17 nt, Human
aguucuaauaauuucua

SEQ ID NO: 1270536 - RNA, 18 nt, Human
aguucuaauaauuucuaa

SEQ ID NO: 1270537 - RNA, 19 nt, Human
aguucuaauaauuucuaau

SEQ ID NO: 1270538 - RNA, 20 nt, Human
aguucuaauaauuucuaaug

SEQ ID NO: 1270539 - RNA, 14 nt, Human
aguucaaacucaca

SEQ ID NO: 1270540 - RNA, 12 nt, Human
aguuauuuaaau

SEQ ID NO: 1270541 - RNA, 21 nt, Human
aguuauuuauuuauuggagau

SEQ ID NO: 1270542 - RNA, 18 nt, Human
aguucaaauucuucugaa

SEQ ID NO: 1270543 - RNA, 13 nt, Human
aguucaacauguu

SEQ ID NO: 1270544 - RNA, 19 nt, Human
aguucaagaaauaaguuuu

SEQ ID NO: 1270545 - RNA, 13 nt, Human
aguucaagaaaua

SEQ ID NO: 1270546 - RNA, 13 nt, Human
aguuccugggaac

SEQ ID NO: 1270547 - RNA, 17 nt, Human
aguucccuacuuccugu

SEQ ID NO: 1270548 - RNA, 17 nt, Human
aguuccugugcacagcc

SEQ ID NO: 1270549 - RNA, 16 nt, Human
aguuccugugcacagc

SEQ ID NO: 1270550 - RNA, 14 nt, Human
aguuccugugcaca

SEQ ID NO: 1270551 - RNA, 17 nt, Human
aguuccuguggcucccu

SEQ ID NO: 1270552 - RNA, 15 nt, Human
aguuccuguggcucc

SEQ ID NO: 1270553 - RNA, 13 nt, Human
aguuccuuucaaa

SEQ ID NO: 1270554 - RNA, 22 nt, Human
aguucgacucugugcuggccag

SEQ ID NO: 1270555 - RNA, 20 nt, Human
aguuauuauauuuacaaaug

SEQ ID NO: 1270556 - RNA, 21 nt, Human
aguuauaaguagcaggccaag

SEQ ID NO: 1270557 - RNA, 15 nt, Human
aguuaguuuguauau

SEQ ID NO: 1270558 - RNA, 20 nt, Human
aguuauacuuauuuguauau

SEQ ID NO: 1270559 - RNA, 15 nt, Human
aguuaucuaaguuaa

SEQ ID NO: 1270560 - RNA, 22 nt, Human
aguuaucuaaguuaauuuaaag

SEQ ID NO: 1270561 - RNA, 14 nt, Human
aguuaugaaauauu

SEQ ID NO: 1270562 - RNA, 20 nt, Human
aguuaugauuuuuuuuucau

SEQ ID NO: 1270563 - RNA, 19 nt, Human
aguuaugccgcuagauaca

SEQ ID NO: 1270564 - RNA, 20 nt, Human
aguuauuaacuuuaauguuu

SEQ ID NO: 1270565 - RNA, 14 nt, Human
aguuauuaacuuua

SEQ ID NO: 1270566 - RNA, 18 nt, Human
aguuauuaaguucuuuaa

SEQ ID NO: 1270567 - RNA, 19 nt, Human
aguuauucacaaaaauuga

SEQ ID NO: 1270568 - RNA, 19 nt, Human
aguuauuaaguucuuuaaa

SEQ ID NO: 1270569 - RNA, 17 nt, Human
aguuauuaauuucuuca

SEQ ID NO: 1270570 - RNA, 13 nt, Human
aguuauugcaguu

SEQ ID NO: 1270571 - RNA, 16 nt, Human
aguuauugcaguuuau

SEQ ID NO: 1270572 - RNA, 18 nt, Human
aguuauugcaguuuauca

SEQ ID NO: 1270573 - RNA, 19 nt, Human
aguuauugcaguuuaucau

SEQ ID NO: 1270574 - RNA, 22 nt, Human
aguuauugcaguuuaucauuca

SEQ ID NO: 1270575 - RNA, 17 nt, Human
aguuacccaaauuaaga

SEQ ID NO: 1270576 - RNA, 15 nt, Human
aguuaccagugccuu

SEQ ID NO: 1270577 - RNA, 16 nt, Human
aguuaccagugccuua

SEQ ID NO: 1270578 - RNA, 18 nt, Human
aguuacccaaauuaagag

SEQ ID NO: 1270579 - RNA, 17 nt, Human
aguuaccauuaaaccau

SEQ ID NO: 1270580 - RNA, 19 nt, Human
aguuaccauuaaaccaucu

SEQ ID NO: 1270581 - RNA, 23 nt, Human
aguuaccugagagauuuaacauu

SEQ ID NO: 1270582 - RNA, 15 nt, Human
aguguuuaaaacuuc

SEQ ID NO: 1270583 - RNA, 14 nt, Human
aguguuuaaaacuu

SEQ ID NO: 1270584 - RNA, 16 nt, Human
aguguuuauccuuuca

SEQ ID NO: 1270585 - RNA, 18 nt, Human
aguguuuauccuuucaua

SEQ ID NO: 1270586 - RNA, 20 nt, Human
aguguuuauccuuucauaua

SEQ ID NO: 1270587 - RNA, 16 nt, Human
aguuaccuuauaguua

SEQ ID NO: 1270588 - RNA, 17 nt, Human
aguuaccuuauaguuac

SEQ ID NO: 1270589 - RNA, 20 nt, Human
aguuaccuuauaguuacugu

SEQ ID NO: 1270590 - RNA, 21 nt, Human
aguuaccuuauaguuacugug

SEQ ID NO: 1270591 - RNA, 22 nt, Human
aguuaccuuauaguuacugugu

SEQ ID NO: 1270592 - RNA, 20 nt, Human
aguuaguaucuuuugauaug

SEQ ID NO: 1270593 - RNA, 17 nt, Human
aguuaguggauuacugc

SEQ ID NO: 1270594 - RNA, 20 nt, Human
aguuaguggauuacugccau

SEQ ID NO: 1270595 - RNA, 15 nt, Human
aguuaguuccacuga

SEQ ID NO: 1270596 - RNA, 17 nt, Human
aguuaguuccacugaga

SEQ ID NO: 1270597 - RNA, 19 nt, Human
aguuaguuccacugagacc

SEQ ID NO: 1270598 - RNA, 14 nt, Human
aguuaguuuguaua

SEQ ID NO: 1270599 - RNA, 22 nt, Human
aguuaguuuguauauauuauua

SEQ ID NO: 1270600 - RNA, 15 nt, Human
aguggcaucaucuca

SEQ ID NO: 1270601 - RNA, 18 nt, Human
aguggcaggggacaggag

SEQ ID NO: 1270602 - RNA, 11 nt, Human
aguggcagggg

SEQ ID NO: 1270603 - RNA, 21 nt, Human
agugggguuaucucuguguua

SEQ ID NO: 1270604 - RNA, 17 nt, Human
aguggguacccccagga

SEQ ID NO: 1270605 - RNA, 22 nt, Human
aguggguacccccaggaccaga

SEQ ID NO: 1270606 - RNA, 20 nt, Human
aguggcaggcagaggcccag

SEQ ID NO: 1270607 - RNA, 23 nt, Human
aguggcaggcagaggcccaggcu

SEQ ID NO: 1270608 - RNA, 20 nt, Human
ugugcaacaggguauggacu

SEQ ID NO: 1270609 - RNA, 18 nt, Human
ugugcaacaggguaugga

SEQ ID NO: 1270610 - RNA, 14 nt, Human
aguguaauugagaa

SEQ ID NO: 1270611 - RNA, 22 nt, Human
aguguaaugaauaccuuagugc

SEQ ID NO: 1270612 - RNA, 16 nt, Human
aguguaaugaauaccu

SEQ ID NO: 1270613 - RNA, 14 nt, Human
aguguaaugaauac

SEQ ID NO: 1270614 - RNA, 23 nt, Human
agugguuuaggcuauuuguaaau

SEQ ID NO: 1270615 - RNA, 11 nt, Human
agugggugggg

SEQ ID NO: 1270616 - RNA, 14 nt, Human
aguggguggggagu

SEQ ID NO: 1270617 - RNA, 12 nt, Human
aguggguuuuuu

SEQ ID NO: 1270618 - RNA, 15 nt, Human
aguggguuuuuuagu

SEQ ID NO: 1270619 - RNA, 22 nt, Human
aguggguuuuuuaguugaauuu

SEQ ID NO: 1270620 - RNA, 21 nt, Human
aguggguuuuuuaguugaauu

SEQ ID NO: 1270621 - RNA, 14 nt, Human
uguuauuaaacaaa

SEQ ID NO: 1270622 - RNA, 20 nt, Human
uguuauguuuucgaaaauca

SEQ ID NO: 1270623 - RNA, 21 nt, Human
uguuauguuuucgaaaaucaa

SEQ ID NO: 1270624 - RNA, 17 nt, Human
uguuauuuguaauagau

SEQ ID NO: 1270625 - RNA, 15 nt, Human
uguuaugcugugaca

SEQ ID NO: 1270626 - RNA, 17 nt, Human
uguuaugcaaaagcaag

SEQ ID NO: 1270627 - RNA, 17 nt, Human
uguuauguagauaacaa

SEQ ID NO: 1270628 - RNA, 16 nt, Human
uguucccauucuugca

SEQ ID NO: 1270629 - RNA, 16 nt, Human
uguucccauuucagcu

SEQ ID NO: 1270630 - RNA, 17 nt, Human
uguucccauuucagcug

SEQ ID NO: 1270631 - RNA, 21 nt, Human
uguucaaagccagcguccucc

SEQ ID NO: 1270632 - RNA, 22 nt, Human
uguucaaagccagcguccuccu

SEQ ID NO: 1270633 - RNA, 15 nt, Human
uguucaaagcugccu

SEQ ID NO: 1270634 - RNA, 14 nt, Human
uguuauuuugcaac

SEQ ID NO: 1270635 - RNA, 18 nt, Human
uguuauuuuuuaauuauu

SEQ ID NO: 1270636 - RNA, 16 nt, Human
aguguaccauuugccu

SEQ ID NO: 1270637 - RNA, 22 nt, Human
uguuaugaugugcuuaacaggg

SEQ ID NO: 1270638 - RNA, 19 nt, Human
uguuaugaugugcuuaaca

SEQ ID NO: 1270639 - RNA, 17 nt, Human
uguuaugaugugcuuaa

SEQ ID NO: 1270640 - RNA, 16 nt, Human
uguuaugaugugcuua

SEQ ID NO: 1270641 - RNA, 14 nt, Human
uguuaugaugugcu

SEQ ID NO: 1270642 - RNA, 12 nt, Human
uguuaugaugug

SEQ ID NO: 1270643 - RNA, 16 nt, Human
uguucccccugugcag

SEQ ID NO: 1270644 - RNA, 13 nt, Human
uguuccccacugg

SEQ ID NO: 1270645 - RNA, 14 nt, Human
uguuccccacugga

SEQ ID NO: 1270646 - RNA, 15 nt, Human
uguuccccacuggag

SEQ ID NO: 1270647 - RNA, 16 nt, Human
uguuccccacuggagc

SEQ ID NO: 1270648 - RNA, 13 nt, Human
uguuccccagaga

SEQ ID NO: 1270649 - RNA, 14 nt, Human
uguuccccagagaa

SEQ ID NO: 1270650 - RNA, 17 nt, Human
uguuccccacuggagca

SEQ ID NO: 1270651 - RNA, 15 nt, Human
uguucccccugugca

SEQ ID NO: 1270652 - RNA, 17 nt, Human
uguucuuaccuguaugu

SEQ ID NO: 1270653 - RNA, 22 nt, Human
uguucuuaccuguaugucucca

SEQ ID NO: 1270654 - RNA, 18 nt, Human
uguucuuagcucaaugag

SEQ ID NO: 1270655 - RNA, 20 nt, Human
uguucuuagcucaaugagca

SEQ ID NO: 1270656 - RNA, 22 nt, Human
uguucuuagcucaaugagcaug

SEQ ID NO: 1270657 - RNA, 13 nt, Human
uguuuuauaauuu

SEQ ID NO: 1270658 - RNA, 20 nt, Human
uguuuuauaauuuugugaag

SEQ ID NO: 1270659 - RNA, 21 nt, Human
uguuuuauuuucaaaaccagg

SEQ ID NO: 1270660 - RNA, 19 nt, Human
uguuuucuaguguaucaaa

SEQ ID NO: 1270661 - RNA, 18 nt, Human
uguuuucuaguguaucaa

SEQ ID NO: 1270662 - RNA, 16 nt, Human
uguuuucuaguguauc

SEQ ID NO: 1270663 - RNA, 15 nt, Human
uguuuucuaguguau

SEQ ID NO: 1270664 - RNA, 14 nt, Human
uguuuucuagugua

SEQ ID NO: 1270665 - RNA, 13 nt, Human
uguuuucuagugu

SEQ ID NO: 1270666 - RNA, 21 nt, Human
uguuuucuaguguaucaaaau

SEQ ID NO: 1270667 - RNA, 20 nt, Human
uguuuucuaguguaucaaaa

SEQ ID NO: 1270668 - RNA, 12 nt, Human
uguuuucucuga

SEQ ID NO: 1270669 - RNA, 17 nt, Human
uguuuucucugaacaca

SEQ ID NO: 1270670 - RNA, 21 nt, Human
uguuuucucuggaguauucua

SEQ ID NO: 1270671 - RNA, 19 nt, Human
uguuugcuaagcauuccaa

SEQ ID NO: 1270672 - RNA, 20 nt, Human
uguuugccuucuacuuuuaa

SEQ ID NO: 1270673 - RNA, 20 nt, Human
uguuugcucagcuucuccaa

SEQ ID NO: 1270674 - RNA, 11 nt, Human
uguuuggcugg

SEQ ID NO: 1270675 - RNA, 21 nt, Human
uguuuuacaauaguucugugg

SEQ ID NO: 1270676 - RNA, 20 nt, Human
uguuuuacaaguuggaguca

SEQ ID NO: 1270677 - RNA, 22 nt, Human
uguuuuacaauaguucuguggg

SEQ ID NO: 1270678 - RNA, 17 nt, Human
uguuuuacaauaguucu

SEQ ID NO: 1270679 - RNA, 13 nt, Human
uguuuuacaauag

SEQ ID NO: 1270680 - RNA, 12 nt, Human
uguuuggcuggg

SEQ ID NO: 1270681 - RNA, 13 nt, Human
uguuuggcuuuca

SEQ ID NO: 1270682 - RNA, 14 nt, Human
uguuuggcuuucag

SEQ ID NO: 1270683 - RNA, 15 nt, Human
uguuugcuaagcauu

SEQ ID NO: 1270684 - RNA, 15 nt, Human
uguuugcaucugaaa

SEQ ID NO: 1270685 - RNA, 14 nt, Human
uguuugcauauaag

SEQ ID NO: 1270686 - RNA, 13 nt, Human
uguuugcauauaa

SEQ ID NO: 1270687 - RNA, 17 nt, Human
uguugucuaagaaauug

SEQ ID NO: 1270688 - RNA, 22 nt, Human
uguugucuaagaaauugaauac

SEQ ID NO: 1270689 - RNA, 22 nt, Human
uguuguccuuuucauaggucug

SEQ ID NO: 1270690 - RNA, 18 nt, Human
uguugucguaaagauuug

SEQ ID NO: 1270691 - RNA, 20 nt, Human
uguugucguaaagauuuggg

SEQ ID NO: 1270692 - RNA, 14 nt, Human
uguugucuaagaaa

SEQ ID NO: 1270693 - RNA, 14 nt, Human
uguuguccuuuuca

SEQ ID NO: 1270694 - RNA, 16 nt, Human
uguuguccuuuucaua

SEQ ID NO: 1270695 - RNA, 17 nt, Human
uguuguccuuuucauag

SEQ ID NO: 1270696 - RNA, 19 nt, Human
aguugcaacuuuguauaaa

SEQ ID NO: 1270697 - RNA, 16 nt, Human
aguugauuuucuggau

SEQ ID NO: 1270698 - RNA, 23 nt, Human
aguugauuuuuuuuuuuuuuucc

SEQ ID NO: 1270699 - RNA, 21 nt, Human
aguugauaugccuuuucccaa

SEQ ID NO: 1270700 - RNA, 18 nt, Human
aguucuuugggccagaca

SEQ ID NO: 1270701 - RNA, 19 nt, Human
aguucuuugggccagacau

SEQ ID NO: 1270702 - RNA, 21 nt, Human
aguugaucgccuuucccaggu

SEQ ID NO: 1270703 - RNA, 23 nt, Human
aguugaucuggaacccagacuca

SEQ ID NO: 1270704 - RNA, 13 nt, Human
aguugauuagaaa

SEQ ID NO: 1270705 - RNA, 13 nt, Human
aguugaucuggaa

SEQ ID NO: 1270706 - RNA, 15 nt, Human
aguugaucuggaacc

SEQ ID NO: 1270707 - RNA, 17 nt, Human
aguugaucuggaaccca

SEQ ID NO: 1270708 - RNA, 18 nt, Human
aguugaucuggaacccag

SEQ ID NO: 1270709 - RNA, 19 nt, Human
aguugaucuggaacccaga

SEQ ID NO: 1270710 - RNA, 20 nt, Human
aguugaucuggaacccagac

SEQ ID NO: 1270711 - RNA, 21 nt, Human
aguugaucuggaacccagacu

SEQ ID NO: 1270712 - RNA, 13 nt, Human
aguucugaagaag

SEQ ID NO: 1270713 - RNA, 14 nt, Human
aguucugaagaaga

SEQ ID NO: 1270714 - RNA, 15 nt, Human
aguucugaagaagau

SEQ ID NO: 1270715 - RNA, 16 nt, Human
aguucugaagaagaug

SEQ ID NO: 1270716 - RNA, 16 nt, Human
aguucugugguuucau

SEQ ID NO: 1270717 - RNA, 19 nt, Human
aguucugugguuucauguu

SEQ ID NO: 1270718 - RNA, 22 nt, Human
aguucugugguuucauguuagu

SEQ ID NO: 1270719 - RNA, 23 nt, Human
aguucugugguuucauguuaguu

SEQ ID NO: 1270720 - RNA, 17 nt, Human
aguucuuuaaaauguaa

SEQ ID NO: 1270721 - RNA, 17 nt, Human
aguucuuuggcugaaag

SEQ ID NO: 1270722 - RNA, 15 nt, Human
aguucuuugggccag

SEQ ID NO: 1270723 - RNA, 16 nt, Human
aguucuuugggccaga

SEQ ID NO: 1270724 - RNA, 17 nt, Human
aguucuuugggccagac

SEQ ID NO: 1270725 - RNA, 20 nt, Human
aguuuuaucauuuucaaaau

SEQ ID NO: 1270726 - RNA, 17 nt, Human
aguuugucgcucaugug

SEQ ID NO: 1270727 - RNA, 19 nt, Human
aguuugucgcucaugugug

SEQ ID NO: 1270728 - RNA, 21 nt, Human
aguuugucgcucaugugugca

SEQ ID NO: 1270729 - RNA, 16 nt, Human
aguuucuaaacuggag

SEQ ID NO: 1270730 - RNA, 13 nt, Human
aguuuggguaaaa

SEQ ID NO: 1270731 - RNA, 20 nt, Human
aguuuggguaaaauacuuuu

SEQ ID NO: 1270732 - RNA, 18 nt, Human
aguuuggguaaaauacuu

SEQ ID NO: 1270733 - RNA, 15 nt, Human
aguuuuaucauuuuc

SEQ ID NO: 1270734 - RNA, 23 nt, Human
aguuuuauuaauaaacauucuau

SEQ ID NO: 1270735 - RNA, 12 nt, Human
aguuuucagugg

SEQ ID NO: 1270736 - RNA, 21 nt, Human
aguuuucauccauaacugaac

SEQ ID NO: 1270737 - RNA, 20 nt, Human
aguuuucauccauaacugaa

SEQ ID NO: 1270738 - RNA, 20 nt, Human
aguuuuccauggcaggaagg

SEQ ID NO: 1270739 - RNA, 22 nt, Human
aguuuuccauggcaggaaggcu

SEQ ID NO: 1270740 - RNA, 16 nt, Human
aguuucguuuucaaaa

SEQ ID NO: 1270741 - RNA, 12 nt, Human
aguuuccuuuuu

SEQ ID NO: 1270742 - RNA, 16 nt, Human
aguuuccuuuuuaaua

SEQ ID NO: 1270743 - RNA, 18 nt, Human
aguuuccuuuuuaauaug

SEQ ID NO: 1270744 - RNA, 17 nt, Human
aguuucuaaacuggaga

SEQ ID NO: 1270745 - RNA, 15 nt, Human
aguuucguuuucaaa

SEQ ID NO: 1270746 - RNA, 12 nt, Human
aguuuccugaaa

SEQ ID NO: 1270747 - RNA, 16 nt, Human
aguuucucagcuccca

SEQ ID NO: 1270748 - RNA, 19 nt, Human
uuaaauucccguuuuguca

SEQ ID NO: 1270749 - RNA, 22 nt, Human
uuaaauucccguuuugucacuu

SEQ ID NO: 1270750 - RNA, 23 nt, Human
uuaaauucucucucuugcaggaa

SEQ ID NO: 1270751 - RNA, 18 nt, Human
aguuuauuuguugagagu

SEQ ID NO: 1270752 - RNA, 19 nt, Human
aguuuauuuguugagagug

SEQ ID NO: 1270753 - RNA, 23 nt, Human
aguuuauuuguugagagugugac

SEQ ID NO: 1270754 - RNA, 20 nt, Human
aguuuauuuguugagagugu

SEQ ID NO: 1270755 - RNA, 19 nt, Human
uuaaaaaagaaacauuugg

SEQ ID NO: 1270756 - RNA, 13 nt, Human
uuaaaaaacuaaa

SEQ ID NO: 1270757 - RNA, 20 nt, Human
uuaaaaaguuauaaccaacu

SEQ ID NO: 1270758 - RNA, 15 nt, Human
uuaaaaauaagucaa

SEQ ID NO: 1270759 - RNA, 22 nt, Human
uuaaaaauaagucaacaguaaa

SEQ ID NO: 1270760 - RNA, 21 nt, Human
uuaaaaauaagucaacaguaa

SEQ ID NO: 1270761 - RNA, 18 nt, Human
uuaaaaaugucuuauugu

SEQ ID NO: 1270762 - RNA, 17 nt, Human
uuaaaaauucagcaaag

SEQ ID NO: 1270763 - RNA, 15 nt, Human
uuaaaaaagaaacau

SEQ ID NO: 1270764 - RNA, 18 nt, Human
uuaaaaaagaaacauuug

SEQ ID NO: 1270765 - RNA, 22 nt, Human
aguugcauguaguaacacuaau

SEQ ID NO: 1270766 - RNA, 21 nt, Human
aguugcauguaguaacacuaa

SEQ ID NO: 1270767 - RNA, 20 nt, Human
aguugcacagcaucucagcu

SEQ ID NO: 1270768 - RNA, 13 nt, Human
aguugcauguagu

SEQ ID NO: 1270769 - RNA, 15 nt, Human
aguugcauguaguaa

SEQ ID NO: 1270770 - RNA, 17 nt, Human
aguugcauguaguaaca

SEQ ID NO: 1270771 - RNA, 18 nt, Human
aguugcauguaguaacac

SEQ ID NO: 1270772 - RNA, 19 nt, Human
aguugcauguaguaacacu

SEQ ID NO: 1270773 - RNA, 17 nt, Human
aguugcacagcuaugaa

SEQ ID NO: 1270774 - RNA, 17 nt, Human
aguugcacagcaucuca

SEQ ID NO: 1270775 - RNA, 16 nt, Human
aguugcacagcaucuc

SEQ ID NO: 1270776 - RNA, 16 nt, Human
aguugcacagcuauga

SEQ ID NO: 1270777 - RNA, 15 nt, Human
aguugcacagcaucu

SEQ ID NO: 1270778 - RNA, 14 nt, Human
aguugcacagcauc

SEQ ID NO: 1270779 - RNA, 13 nt, Human
aguugcacagcau

SEQ ID NO: 1270780 - RNA, 12 nt, Human
aguugcacagca

SEQ ID NO: 1270781 - RNA, 11 nt, Human
aguugcacagc

SEQ ID NO: 1270782 - RNA, 16 nt, Human
uuaaaaucagcuauuu

SEQ ID NO: 1270783 - RNA, 16 nt, Human
uuaaaccgcuaaaaga

SEQ ID NO: 1270784 - RNA, 17 nt, Human
uuaaaccuauacucacu

SEQ ID NO: 1270785 - RNA, 14 nt, Human
uuaaaccuauacuc

SEQ ID NO: 1270786 - RNA, 14 nt, Human
uuaaaccuuuuuug

SEQ ID NO: 1270787 - RNA, 19 nt, Human
uuaaaccgcuaaaagaaac

SEQ ID NO: 1270788 - RNA, 15 nt, Human
uuaaacgauuuuuaa

SEQ ID NO: 1270789 - RNA, 18 nt, Human
uuaaacgauuuuuaaaau

SEQ ID NO: 1270790 - RNA, 22 nt, Human
uuaaacgauuuuuaaaauguac

SEQ ID NO: 1270791 - RNA, 23 nt, Human
uuaaacgcucuagguacgaugac

SEQ ID NO: 1270792 - RNA, 16 nt, Human
uuaaaauauuccugca

SEQ ID NO: 1270793 - RNA, 19 nt, Human
uuaaaauauuccugcauuu

SEQ ID NO: 1270794 - RNA, 23 nt, Human
uuaaaauagcguucuuguaauuu

SEQ ID NO: 1270795 - RNA, 12 nt, Human
uuaaaauauaau

SEQ ID NO: 1270796 - RNA, 22 nt, Human
uuaucaugugaaaucauucauu

SEQ ID NO: 1270797 - RNA, 20 nt, Human
uuaucaugugaaaucauuca

SEQ ID NO: 1270798 - RNA, 18 nt, Human
uuaucaugugaaaucauu

SEQ ID NO: 1270799 - RNA, 17 nt, Human
uuaucaugugaaaucau

SEQ ID NO: 1270800 - RNA, 14 nt, Human
uuaucagucaauau

SEQ ID NO: 1270801 - RNA, 15 nt, Human
uuaucagucaauauu

SEQ ID NO: 1270802 - RNA, 23 nt, Human
uuaucagucaauauuuuuagaua

SEQ ID NO: 1270803 - RNA, 21 nt, Human
uuaucagucauaacuaaauaa

SEQ ID NO: 1270804 - RNA, 23 nt, Human
uuaucagucauaacuaaauaaag

SEQ ID NO: 1270805 - RNA, 14 nt, Human
uuaucagugcuucc

SEQ ID NO: 1270806 - RNA, 15 nt, Human
uuaucaacuuccuaa

SEQ ID NO: 1270807 - RNA, 21 nt, Human
uuaucaacuuccuaaauauua

SEQ ID NO: 1270808 - RNA, 21 nt, Human
uuaucaccgugggcucccuga

SEQ ID NO: 1270809 - RNA, 23 nt, Human
uuaucaccuagcugaauguuuuu

SEQ ID NO: 1270810 - RNA, 19 nt, Human
uuaucaccuagcugaaugu

SEQ ID NO: 1270811 - RNA, 22 nt, Human
uuaucagacucggaaucuauuu

SEQ ID NO: 1270812 - RNA, 16 nt, Human
uuaucaguaaauaacu

SEQ ID NO: 1270813 - RNA, 23 nt, Human
auacucaagagugguaucuugca

SEQ ID NO: 1270814 - RNA, 20 nt, Human
auacucaaaugaguaacauu

SEQ ID NO: 1270815 - RNA, 16 nt, Human
uuaucaaaacuuucuu

SEQ ID NO: 1270816 - RNA, 18 nt, Human
uuaucaaacccuagccuu

SEQ ID NO: 1270817 - RNA, 21 nt, Human
uuaucaaacccuagccuugcu

SEQ ID NO: 1270818 - RNA, 19 nt, Human
uuaucaaacccuagccuug

SEQ ID NO: 1270819 - RNA, 15 nt, Human
uuaucaacaauagug

SEQ ID NO: 1270820 - RNA, 21 nt, Human
auaccaauaaagugacccugc

SEQ ID NO: 1270821 - RNA, 19 nt, Human
auaccaaugaaaaaaugua

SEQ ID NO: 1270822 - RNA, 15 nt, Human
auaccaauaaaguga

SEQ ID NO: 1270823 - RNA, 14 nt, Human
auaccaauaaagug

SEQ ID NO: 1270824 - RNA, 22 nt, Human
auaccacaggaaccacaagacu

SEQ ID NO: 1270825 - RNA, 21 nt, Human
auaccaaugaaaaaauguaua

SEQ ID NO: 1270826 - RNA, 17 nt, Human
auacuaagcauugaaug

SEQ ID NO: 1270827 - RNA, 21 nt, Human
auacuaagcauugaauggcua

SEQ ID NO: 1270828 - RNA, 18 nt, Human
auacuaauaaacuaauaa

SEQ ID NO: 1270829 - RNA, 22 nt, Human
auacuaauaaacuaauaauugc

SEQ ID NO: 1270830 - RNA, 21 nt, Human
auacuaaugaaaacagaaugu

SEQ ID NO: 1270831 - RNA, 16 nt, Human
auaccagcgaggaggc

SEQ ID NO: 1270832 - RNA, 22 nt, Human
auaccagcgaggaggcuccaga

SEQ ID NO: 1270833 - RNA, 14 nt, Human
auacuaccuugaaa

SEQ ID NO: 1270834 - RNA, 15 nt, Human
auacuaccuugaaaa

SEQ ID NO: 1270835 - RNA, 17 nt, Human
auacuaccuugaaaaua

SEQ ID NO: 1270836 - RNA, 12 nt, Human
auacuacuuaug

SEQ ID NO: 1270837 - RNA, 19 nt, Human
auacuacuuaugaaaugug

SEQ ID NO: 1270838 - RNA, 20 nt, Human
auacuagggagccauuugag

SEQ ID NO: 1270839 - RNA, 21 nt, Human
auacuauuuaaagccuccuca

SEQ ID NO: 1270840 - RNA, 22 nt, Human
auacuauuuaaagccuccucau

SEQ ID NO: 1270841 - RNA, 16 nt, Human
auacuagggagccauu

SEQ ID NO: 1270842 - RNA, 19 nt, Human
auacucaaaugaguaacau

SEQ ID NO: 1270843 - RNA, 20 nt, Human
auacaucccuuaccugggaa

SEQ ID NO: 1270844 - RNA, 20 nt, Human
auacauucuucaagauccca

SEQ ID NO: 1270845 - RNA, 15 nt, Human
auacauuauauuucu

SEQ ID NO: 1270846 - RNA, 17 nt, Human
auacauuauauuucuau

SEQ ID NO: 1270847 - RNA, 22 nt, Human
auacauuauauuucuauuuuau

SEQ ID NO: 1270848 - RNA, 21 nt, Human
auacaguucugcucugguugu

SEQ ID NO: 1270849 - RNA, 20 nt, Human
auacauuguauauaugugua

SEQ ID NO: 1270850 - RNA, 16 nt, Human
auacauuuaaaacauu

SEQ ID NO: 1270851 - RNA, 21 nt, Human
auacauuuaaaacauuaaaau

SEQ ID NO: 1270852 - RNA, 13 nt, Human
auaccaauaaagu

SEQ ID NO: 1270853 - RNA, 12 nt, Human
auaccaauaaag

SEQ ID NO: 1270854 - RNA, 20 nt, Human
auaccaaaauguugcugaaa

SEQ ID NO: 1270855 - RNA, 17 nt, Human
auaccaaagcacauuuu

SEQ ID NO: 1270856 - RNA, 18 nt, Human
auaccaaagcacauuuua

SEQ ID NO: 1270857 - RNA, 16 nt, Human
auacauuuuguaccaa

SEQ ID NO: 1270858 - RNA, 15 nt, Human
auaccaaaauguugc

SEQ ID NO: 1270859 - RNA, 16 nt, Human
auaccaaaauguugcu

SEQ ID NO: 1270860 - RNA, 16 nt, Human
auacauuuucuaagaa

SEQ ID NO: 1270861 - RNA, 16 nt, Human
auacagcuuuuggauu

SEQ ID NO: 1270862 - RNA, 20 nt, Human
auacagcuguauugucugaa

SEQ ID NO: 1270863 - RNA, 21 nt, Human
auacaguucggugagcuacaa

SEQ ID NO: 1270864 - RNA, 18 nt, Human
auacaaaaauacucagau

SEQ ID NO: 1270865 - RNA, 11 nt, Human
auacaaagcau

SEQ ID NO: 1270866 - RNA, 19 nt, Human
auacaaaggcuuauuaauu

SEQ ID NO: 1270867 - RNA, 13 nt, Human
auacaaauggauu

SEQ ID NO: 1270868 - RNA, 14 nt, Human
auacaaauggauuu

SEQ ID NO: 1270869 - RNA, 20 nt, Human
auacaaauggauuuugggag

SEQ ID NO: 1270870 - RNA, 17 nt, Human
auacaaauggauuuugg

SEQ ID NO: 1270871 - RNA, 16 nt, Human
auacagcaacaauuua

SEQ ID NO: 1270872 - RNA, 22 nt, Human
auacagcagagcuagguggaaa

SEQ ID NO: 1270873 - RNA, 13 nt, Human
auacagcucagaa

SEQ ID NO: 1270874 - RNA, 12 nt, Human
auacagcuguau

SEQ ID NO: 1270875 - RNA, 17 nt, Human
uuauaguacaugauaaa

SEQ ID NO: 1270876 - RNA, 16 nt, Human
uuauaguacaugauaa

SEQ ID NO: 1270877 - RNA, 13 nt, Human
uuauaguacauga

SEQ ID NO: 1270878 - RNA, 24 nt, Human
uuauaggauuuauuuaaaauagca

SEQ ID NO: 1270879 - RNA, 15 nt, Human
uuauagugaauacug

SEQ ID NO: 1270880 - RNA, 21 nt, Human
uuauagugaauacugcuacag

SEQ ID NO: 1270881 - RNA, 21 nt, Human
uuauagugauguaaucuugaa

SEQ ID NO: 1270882 - RNA, 20 nt, Human
uuauagcucuaauguuugca

SEQ ID NO: 1270883 - RNA, 18 nt, Human
uuauaggauuuauuuaaa

SEQ ID NO: 1270884 - RNA, 16 nt, Human
uuauaggaucauuugu

SEQ ID NO: 1270885 - RNA, 18 nt, Human
uuauagcucuaauguuug

SEQ ID NO: 1270886 - RNA, 17 nt, Human
uuauagcucuaauguuu

SEQ ID NO: 1270887 - RNA, 16 nt, Human
uuauagcucuaauguu

SEQ ID NO: 1270888 - RNA, 15 nt, Human
uuauagcucuaaugu

SEQ ID NO: 1270889 - RNA, 12 nt, Human
uuauagcucuaa

SEQ ID NO: 1270890 - RNA, 19 nt, Human
uuauagccucugucuggca

SEQ ID NO: 1270891 - RNA, 15 nt, Human
uuauagccucugucu

SEQ ID NO: 1270892 - RNA, 16 nt, Human
uuauagccucugucug

SEQ ID NO: 1270893 - RNA, 17 nt, Human
uuauagccucugucugg

SEQ ID NO: 1270894 - RNA, 12 nt, Human
uuauagauucua

SEQ ID NO: 1270895 - RNA, 13 nt, Human
uuauagauucuaa

SEQ ID NO: 1270896 - RNA, 14 nt, Human
uuauagauucuaaa

SEQ ID NO: 1270897 - RNA, 15 nt, Human
uuauagauucuaaag

SEQ ID NO: 1270898 - RNA, 16 nt, Human
uuauagauucuaaaga

SEQ ID NO: 1270899 - RNA, 19 nt, Human
uuauagauucuaaagauuc

SEQ ID NO: 1270900 - RNA, 20 nt, Human
uuauagauucuaaagauucu

SEQ ID NO: 1270901 - RNA, 21 nt, Human
uuauagauucuaaagauucua

SEQ ID NO: 1270902 - RNA, 21 nt, Human
uuauaccucaauuuucacugu

SEQ ID NO: 1270903 - RNA, 22 nt, Human
uuauaccucaauuuucacugug

SEQ ID NO: 1270904 - RNA, 14 nt, Human
uuauaccucaauuu

SEQ ID NO: 1270905 - RNA, 22 nt, Human
uuauaccaaaauguugcugaaa

SEQ ID NO: 1270906 - RNA, 14 nt, Human
uuauacgaaauaau

SEQ ID NO: 1270907 - RNA, 16 nt, Human
uuauacgaaauaauug

SEQ ID NO: 1270908 - RNA, 17 nt, Human
uuauacgaaauaauugu

SEQ ID NO: 1270909 - RNA, 20 nt, Human
uuauacgaguaauaugccug

SEQ ID NO: 1270910 - RNA, 21 nt, Human
uuauacgcuggcaacacagag

SEQ ID NO: 1270911 - RNA, 22 nt, Human
uuauacgcuggcaacacagagg

SEQ ID NO: 1270912 - RNA, 16 nt, Human
uuauacucuuucugua

SEQ ID NO: 1270913 - RNA, 15 nt, Human
uuauacuuguaauua

SEQ ID NO: 1270914 - RNA, 19 nt, Human
uuauacuuguaauuaugga

SEQ ID NO: 1270915 - RNA, 18 nt, Human
uuauacuuucccuacccu

SEQ ID NO: 1270916 - RNA, 23 nt, Human
uuauacuuucccuacccucuaga

SEQ ID NO: 1270917 - RNA, 16 nt, Human
uuauagaaguuuagau

SEQ ID NO: 1270918 - RNA, 16 nt, Human
uuagcaguuugcuuug

SEQ ID NO: 1270919 - RNA, 14 nt, Human
uuagccccauaauu

SEQ ID NO: 1270920 - RNA, 21 nt, Human
uuagccaguaauccuguagga

SEQ ID NO: 1270921 - RNA, 15 nt, Human
uuagccccugaaagc

SEQ ID NO: 1270922 - RNA, 16 nt, Human
uuagccccugaaagcc

SEQ ID NO: 1270923 - RNA, 20 nt, Human
uuagccucaauuucugaaca

SEQ ID NO: 1270924 - RNA, 17 nt, Human
uuagccuggaccucuga

SEQ ID NO: 1270925 - RNA, 18 nt, Human
uuagccuggaccucugac

SEQ ID NO: 1270926 - RNA, 23 nt, Human
uuauaaauguaccagagagaguu

SEQ ID NO: 1270927 - RNA, 18 nt, Human
uuauacccccugcaaagc

SEQ ID NO: 1270928 - RNA, 16 nt, Human
uuauaccaaaauguug

SEQ ID NO: 1270929 - RNA, 17 nt, Human
uuauaaauuucuauuuu

SEQ ID NO: 1270930 - RNA, 16 nt, Human
uuauaaccuuaauuua

SEQ ID NO: 1270931 - RNA, 19 nt, Human
uuauaaccuuaauuuauua

SEQ ID NO: 1270932 - RNA, 21 nt, Human
uuauaaccuuaauuuauuauu

SEQ ID NO: 1270933 - RNA, 15 nt, Human
uuauaacuaacaugu

SEQ ID NO: 1270934 - RNA, 19 nt, Human
uuauaacuaacauguccug

SEQ ID NO: 1270935 - RNA, 16 nt, Human
uuauaacuggaaagaa

SEQ ID NO: 1270936 - RNA, 17 nt, Human
uuauaacuggaaagaag

SEQ ID NO: 1270937 - RNA, 17 nt, Human
uuauaacuguaaagaug

SEQ ID NO: 1270938 - RNA, 18 nt, Human
uuauaacuguaaagaugu

SEQ ID NO: 1270939 - RNA, 18 nt, Human
uuauauaagcuuguauuc

SEQ ID NO: 1270940 - RNA, 15 nt, Human
uuauaguuucugagg

SEQ ID NO: 1270941 - RNA, 13 nt, Human
uuauaguuucuga

SEQ ID NO: 1270942 - RNA, 13 nt, Human
uuauaguuacugu

SEQ ID NO: 1270943 - RNA, 14 nt, Human
uuauaguuacugug

SEQ ID NO: 1270944 - RNA, 15 nt, Human
uuauaguuacugugu

SEQ ID NO: 1270945 - RNA, 19 nt, Human
uuauaguuacuguguaauu

SEQ ID NO: 1270946 - RNA, 15 nt, Human
uuauaguuguaacua

SEQ ID NO: 1270947 - RNA, 12 nt, Human
uuauaguuucug

SEQ ID NO: 1270948 - RNA, 12 nt, Human
uuauauaacugu

SEQ ID NO: 1270949 - RNA, 16 nt, Human
uuauauaacuguauuu

SEQ ID NO: 1270950 - RNA, 18 nt, Human
uuauauaacuguauuuga

SEQ ID NO: 1270951 - RNA, 22 nt, Human
uuauauaacuguauuugaaaua

SEQ ID NO: 1270952 - RNA, 20 nt, Human
uuauauaaucauuauuacuu

SEQ ID NO: 1270953 - RNA, 16 nt, Human
uuauauaaucauuauu

SEQ ID NO: 1270954 - RNA, 20 nt, Human
uuauauaauugccaaaaagu

SEQ ID NO: 1270955 - RNA, 22 nt, Human
uuauauaauugccaaaaaguga

SEQ ID NO: 1270956 - RNA, 22 nt, Human
uuauauauauuuuuuucugaaa

SEQ ID NO: 1270957 - RNA, 14 nt, Human
uuauauauguauuu

SEQ ID NO: 1270958 - RNA, 15 nt, Human
uuauauauaaauaua

SEQ ID NO: 1270959 - RNA, 23 nt, Human
uuauauauaaauauauuauuacu

SEQ ID NO: 1270960 - RNA, 18 nt, Human
uuauauauaaauauauua

SEQ ID NO: 1270961 - RNA, 14 nt, Human
uuauauauauauau

SEQ ID NO: 1270962 - RNA, 17 nt, Human
uuauauauguauuuaua

SEQ ID NO: 1270963 - RNA, 21 nt, Human
uuauauauggggaugguaguu

SEQ ID NO: 1270964 - RNA, 13 nt, Human
auaauuuugugaa

SEQ ID NO: 1270965 - RNA, 14 nt, Human
auaauuuugugaag

SEQ ID NO: 1270966 - RNA, 15 nt, Human
auaauuuugugaagc

SEQ ID NO: 1270967 - RNA, 20 nt, Human
auaauuuugugaagcaaaau

SEQ ID NO: 1270968 - RNA, 14 nt, Human
auaauuuuuauauu

SEQ ID NO: 1270969 - RNA, 12 nt, Human
auaauuuuguaa

SEQ ID NO: 1270970 - RNA, 13 nt, Human
auaauuuuguaau

SEQ ID NO: 1270971 - RNA, 23 nt, Human
auaauuuuguaauguaucaaaua

SEQ ID NO: 1270972 - RNA, 16 nt, Human
auaauuuuuauauuug

SEQ ID NO: 1270973 - RNA, 19 nt, Human
auaauuuuuauauuugaaa

SEQ ID NO: 1270974 - RNA, 21 nt, Human
auaauuuuuauauuugaaaua

SEQ ID NO: 1270975 - RNA, 22 nt, Human
auaauuuuuauauuugaaauau

SEQ ID NO: 1270976 - RNA, 14 nt, Human
auaauuuuuauaug

SEQ ID NO: 1270977 - RNA, 22 nt, Human
auacaaaaaaaaaaaaaaauua

SEQ ID NO: 1270978 - RNA, 23 nt, Human
auaaacacucuugaaaaaugcau

SEQ ID NO: 1270979 - RNA, 17 nt, Human
aguuuucuccucccagg

SEQ ID NO: 1270980 - RNA, 22 nt, Human
aguuuuccuaagugauuguaug

SEQ ID NO: 1270981 - RNA, 16 nt, Human
aguuuuccuaugcuuu

SEQ ID NO: 1270982 - RNA, 18 nt, Human
aguuuuccuaugcuuuga

SEQ ID NO: 1270983 - RNA, 16 nt, Human
auaaaccgaacugaug

SEQ ID NO: 1270984 - RNA, 21 nt, Human
auaaacccaguugccaucugc

SEQ ID NO: 1270985 - RNA, 23 nt, Human
auaaaccccaccccaaaauuagc

SEQ ID NO: 1270986 - RNA, 22 nt, Human
auaaaccccaccccaaaauuag

SEQ ID NO: 1270987 - RNA, 13 nt, Human
auaaacauuguau

SEQ ID NO: 1270988 - RNA, 19 nt, Human
auaaacaggucaaugaaug

SEQ ID NO: 1270989 - RNA, 15 nt, Human
auaaacgucuuaaau

SEQ ID NO: 1270990 - RNA, 16 nt, Human
auaaacgucuuaaaua

SEQ ID NO: 1270991 - RNA, 18 nt, Human
auaaacgucuuaaauauu

SEQ ID NO: 1270992 - RNA, 17 nt, Human
auaaacguggauguuac

SEQ ID NO: 1270993 - RNA, 18 nt, Human
auaaacguggauguuacu

SEQ ID NO: 1270994 - RNA, 14 nt, Human
auaaacuaauaauu

SEQ ID NO: 1270995 - RNA, 15 nt, Human
auaaacuaauaauug

SEQ ID NO: 1270996 - RNA, 17 nt, Human
auaaacuaauaauugca

SEQ ID NO: 1270997 - RNA, 16 nt, Human
auaaacuuuaauauaa

SEQ ID NO: 1270998 - RNA, 20 nt, Human
auaaacuuuaauauaaagua

SEQ ID NO: 1270999 - RNA, 22 nt, Human
auaaacuuuaauauaaaguagu

SEQ ID NO: 1271000 - RNA, 20 nt, Human
auaaagugacccugcucuca

SEQ ID NO: 1271001 - RNA, 18 nt, Human
auaaagugacccugcucu

SEQ ID NO: 1271002 - RNA, 16 nt, Human
auaaaguaguccugug

SEQ ID NO: 1271003 - RNA, 17 nt, Human
auaaaguaguccuguga

SEQ ID NO: 1271004 - RNA, 14 nt, Human
auaaaguaucauca

SEQ ID NO: 1271005 - RNA, 15 nt, Human
auaaaguaucaucag

SEQ ID NO: 1271006 - RNA, 19 nt, Human
auaaauaaaguuuguugaa

SEQ ID NO: 1271007 - RNA, 13 nt, Human
auaaauaaaguuu

SEQ ID NO: 1271008 - RNA, 19 nt, Human
auaacaugugaaaagaaua

SEQ ID NO: 1271009 - RNA, 12 nt, Human
auaacuggaaac

SEQ ID NO: 1271010 - RNA, 15 nt, Human
auaacuggaaagaag

SEQ ID NO: 1271011 - RNA, 22 nt, Human
auaacuggaaaacagaacacuu

SEQ ID NO: 1271012 - RNA, 23 nt, Human
auaacuggaaaacagaacacuua

SEQ ID NO: 1271013 - RNA, 15 nt, Human
auaacuggaaaacag

SEQ ID NO: 1271014 - RNA, 17 nt, Human
auaacuggaaaacagaa

SEQ ID NO: 1271015 - RNA, 21 nt, Human
auaacuggaaaacagaacacu

SEQ ID NO: 1271016 - RNA, 14 nt, Human
auaaccacugcuuc

SEQ ID NO: 1271017 - RNA, 14 nt, Human
auaaccaaaugaaa

SEQ ID NO: 1271018 - RNA, 12 nt, Human
auaaccacugcu

SEQ ID NO: 1271019 - RNA, 13 nt, Human
auaacugaaaaug

SEQ ID NO: 1271020 - RNA, 15 nt, Human
auaacugaaaaugug

SEQ ID NO: 1271021 - RNA, 14 nt, Human
auaacugaaaauua

SEQ ID NO: 1271022 - RNA, 17 nt, Human
auaacugaaaauuauuu

SEQ ID NO: 1271023 - RNA, 20 nt, Human
auaacugaaaauuauuuaaa

SEQ ID NO: 1271024 - RNA, 21 nt, Human
auaacugaaaauuauuuaaac

SEQ ID NO: 1271025 - RNA, 14 nt, Human
auaacugaacaucc

SEQ ID NO: 1271026 - RNA, 20 nt, Human
auaacuguaaaugugacauu

SEQ ID NO: 1271027 - RNA, 15 nt, Human
auaacuguauuugaa

SEQ ID NO: 1271028 - RNA, 18 nt, Human
auaacuguauuugaaaua

SEQ ID NO: 1271029 - RNA, 13 nt, Human
uuacaugaaguau

SEQ ID NO: 1271030 - RNA, 14 nt, Human
uuacaugaaguauu

SEQ ID NO: 1271031 - RNA, 15 nt, Human
uuacaugaaguauuu

SEQ ID NO: 1271032 - RNA, 16 nt, Human
uuacaugaaguauuuu

SEQ ID NO: 1271033 - RNA, 20 nt, Human
uuacaugaaguauuuuuuca

SEQ ID NO: 1271034 - RNA, 16 nt, Human
uuacaugauucauuuu

SEQ ID NO: 1271035 - RNA, 17 nt, Human
uuacaugauucauuuua

SEQ ID NO: 1271036 - RNA, 14 nt, Human
uuacaugcuuauuc

SEQ ID NO: 1271037 - RNA, 19 nt, Human
uuacaugcuuauuccauga

SEQ ID NO: 1271038 - RNA, 20 nt, Human
uuacaugcuuauuccaugac

SEQ ID NO: 1271039 - RNA, 23 nt, Human
uuaccauuaaaccaucucccugg

SEQ ID NO: 1271040 - RNA, 22 nt, Human
uuaccauuaaaccaucucccug

SEQ ID NO: 1271041 - RNA, 22 nt, Human
uuacaugaggacucuauucuuu

SEQ ID NO: 1271042 - RNA, 22 nt, Human
uuacaugcauuacugcaugcac

SEQ ID NO: 1271043 - RNA, 12 nt, Human
uuacaugcuuau

SEQ ID NO: 1271044 - RNA, 13 nt, Human
uuacaugcuuauu

SEQ ID NO: 1271045 - RNA, 14 nt, Human
uuaccauuuacaug

SEQ ID NO: 1271046 - RNA, 13 nt, Human
uuacccuggcccc

SEQ ID NO: 1271047 - RNA, 17 nt, Human
uuacccuggccccucuc

SEQ ID NO: 1271048 - RNA, 20 nt, Human
uuacccuggccccucucccu

SEQ ID NO: 1271049 - RNA, 18 nt, Human
uuacccuggccccucucc

SEQ ID NO: 1271050 - RNA, 13 nt, Human
auaaguuuuaugu

SEQ ID NO: 1271051 - RNA, 12 nt, Human
auaaguuuauuu

SEQ ID NO: 1271052 - RNA, 14 nt, Human
auaaguuuauuucu

SEQ ID NO: 1271053 - RNA, 18 nt, Human
auaaguuuauuucuuaaa

SEQ ID NO: 1271054 - RNA, 22 nt, Human
auaaguuuauuucuuaaaucua

SEQ ID NO: 1271055 - RNA, 21 nt, Human
auaaguuucugggaccucagu

SEQ ID NO: 1271056 - RNA, 14 nt, Human
auaauaauuaguaa

SEQ ID NO: 1271057 - RNA, 13 nt, Human
auaaguuauugca

SEQ ID NO: 1271058 - RNA, 14 nt, Human
auaaguuauugcag

SEQ ID NO: 1271059 - RNA, 16 nt, Human
auaaguuauugcaguu

SEQ ID NO: 1271060 - RNA, 20 nt, Human
auaaguuauugcaguuuauc

SEQ ID NO: 1271061 - RNA, 21 nt, Human
auaaguuauugcaguuuauca

SEQ ID NO: 1271062 - RNA, 24 nt, Human
auaaguuauugcaguuuaucauuc

SEQ ID NO: 1271063 - RNA, 18 nt, Human
auaaguucaaauucuucu

SEQ ID NO: 1271064 - RNA, 20 nt, Human
auaaguucaaauucuucuga

SEQ ID NO: 1271065 - RNA, 21 nt, Human
auaaguucaaauucuucugaa

SEQ ID NO: 1271066 - RNA, 24 nt, Human
auaaguucaaauucuucugaacuc

SEQ ID NO: 1271067 - RNA, 13 nt, Human
auaagcaggugga

SEQ ID NO: 1271068 - RNA, 20 nt, Human
auaagcaaaaacaaaaagaa

SEQ ID NO: 1271069 - RNA, 20 nt, Human
auaagaagaaugcuuaauca

SEQ ID NO: 1271070 - RNA, 19 nt, Human
auaagaagaaugcuuaauc

SEQ ID NO: 1271071 - RNA, 13 nt, Human
auaagauucuaac

SEQ ID NO: 1271072 - RNA, 16 nt, Human
auaagaacuuugagcu

SEQ ID NO: 1271073 - RNA, 11 nt, Human
auaagaagaau

SEQ ID NO: 1271074 - RNA, 13 nt, Human
auaagaagaaugc

SEQ ID NO: 1271075 - RNA, 15 nt, Human
auaagaagaaugcuu

SEQ ID NO: 1271076 - RNA, 16 nt, Human
auaagcagguggaucu

SEQ ID NO: 1271077 - RNA, 17 nt, Human
auaagauucuaacgguc

SEQ ID NO: 1271078 - RNA, 16 nt, Human
auaagcaagaaggcaa

SEQ ID NO: 1271079 - RNA, 21 nt, Human
auaagcaagaaggcaaaaaua

SEQ ID NO: 1271080 - RNA, 23 nt, Human
auaagcaagaaggcaaaaauagu

SEQ ID NO: 1271081 - RNA, 12 nt, Human
uuaccugggaaa

SEQ ID NO: 1271082 - RNA, 18 nt, Human
uuaccugaaaacacugug

SEQ ID NO: 1271083 - RNA, 20 nt, Human
uuaccugaaaacacugugca

SEQ ID NO: 1271084 - RNA, 22 nt, Human
uuaccugaaaacacugugcaca

SEQ ID NO: 1271085 - RNA, 14 nt, Human
uuaccuaagauuac

SEQ ID NO: 1271086 - RNA, 18 nt, Human
uuaccuaagauuacaaau

SEQ ID NO: 1271087 - RNA, 23 nt, Human
uuagaugcaguucugaagaagau

SEQ ID NO: 1271088 - RNA, 21 nt, Human
auaauugugauuagacagaac

SEQ ID NO: 1271089 - RNA, 16 nt, Human
auaauuggauuuccua

SEQ ID NO: 1271090 - RNA, 17 nt, Human
auaauuggauuuccuaa

SEQ ID NO: 1271091 - RNA, 18 nt, Human
auaauuggauuuccuaau

SEQ ID NO: 1271092 - RNA, 20 nt, Human
auaauuggauuuccuaauac

SEQ ID NO: 1271093 - RNA, 22 nt, Human
auaauugccaaaaagugaaaua

SEQ ID NO: 1271094 - RNA, 14 nt, Human
auaauucucauuaa

SEQ ID NO: 1271095 - RNA, 15 nt, Human
auaauucucauuaaa

SEQ ID NO: 1271096 - RNA, 22 nt, Human
auaauucucauuaaaagaauau

SEQ ID NO: 1271097 - RNA, 23 nt, Human
auaauucucauuaaaagaauauc

SEQ ID NO: 1271098 - RNA, 20 nt, Human
auaauucugaguuuuguguu

SEQ ID NO: 1271099 - RNA, 23 nt, Human
auaauucugaguuuuguguuugu

SEQ ID NO: 1271100 - RNA, 19 nt, Human
auaauugaguuuucagugg

SEQ ID NO: 1271101 - RNA, 14 nt, Human
auaauugcauugac

SEQ ID NO: 1271102 - RNA, 16 nt, Human
auaauugcauugacuu

SEQ ID NO: 1271103 - RNA, 22 nt, Human
auaauugcauugacuuucccca

SEQ ID NO: 1271104 - RNA, 17 nt, Human
auaauugccaaaaagug

SEQ ID NO: 1271105 - RNA, 21 nt, Human
auaauugccaaaaagugaaau

SEQ ID NO: 1271106 - RNA, 23 nt, Human
auaauugccaaaaagugaaauaa

SEQ ID NO: 1271107 - RNA, 20 nt, Human
auaauugugauuagacagaa

SEQ ID NO: 1271108 - RNA, 16 nt, Human
uuagauguaauuuugu

SEQ ID NO: 1271109 - RNA, 19 nt, Human
uuagauucucugugucuaa

SEQ ID NO: 1271110 - RNA, 20 nt, Human
uuagauucucugugucuaag

SEQ ID NO: 1271111 - RNA, 22 nt, Human
uuagauucucugugucuaagau

SEQ ID NO: 1271112 - RNA, 10 nt, Human
uuagauuuca

SEQ ID NO: 1271113 - RNA, 14 nt, Human
uuagauuucauagu

SEQ ID NO: 1271114 - RNA, 18 nt, Human
uuagauuucauaguucag

SEQ ID NO: 1271115 - RNA, 20 nt, Human
uuagauuucauaguucagaa

SEQ ID NO: 1271116 - RNA, 22 nt, Human
uuagauuucauaguucagaauu

SEQ ID NO: 1271117 - RNA, 13 nt, Human
uuagauuugugug

SEQ ID NO: 1271118 - RNA, 13 nt, Human
uuagauuuuaauc

SEQ ID NO: 1271119 - RNA, 12 nt, Human
uuagauuuuaca

SEQ ID NO: 1271120 - RNA, 14 nt, Human
uuagauuuuacaug

SEQ ID NO: 1271121 - RNA, 15 nt, Human
uuagauuuuacauga

SEQ ID NO: 1271122 - RNA, 19 nt, Human
uuagauuuuacaugaagua

SEQ ID NO: 1271123 - RNA, 20 nt, Human
uuagauuuuacaugaaguau

SEQ ID NO: 1271124 - RNA, 21 nt, Human
uuagauuuuacaugaaguauu

SEQ ID NO: 1271125 - RNA, 23 nt, Human
uuagauuuuacaugaaguauuuu

SEQ ID NO: 1271126 - RNA, 18 nt, Human
uuagauuuucugguucua

SEQ ID NO: 1271127 - RNA, 19 nt, Human
uuagauuuucugguucuaa

SEQ ID NO: 1271128 - RNA, 20 nt, Human
uuagauuuucugguucuaac

SEQ ID NO: 1271129 - RNA, 21 nt, Human
uuagauuuucugguucuaaca

SEQ ID NO: 1271130 - RNA, 12 nt, Human
uuagcagacagg

SEQ ID NO: 1271131 - RNA, 15 nt, Human
uuagcagcuuccaga

SEQ ID NO: 1271132 - RNA, 17 nt, Human
auaauccaguaaaauaa

SEQ ID NO: 1271133 - RNA, 17 nt, Human
auaaugaacagaacaua

SEQ ID NO: 1271134 - RNA, 19 nt, Human
auaaucaucaaguaauaca

SEQ ID NO: 1271135 - RNA, 21 nt, Human
auaaucauuauuacuuuugcu

SEQ ID NO: 1271136 - RNA, 22 nt, Human
auaaucauuauuacuuuugcug

SEQ ID NO: 1271137 - RNA, 16 nt, Human
auaaucacgcuuuccu

SEQ ID NO: 1271138 - RNA, 18 nt, Human
auaaucacgcuuuccuga

SEQ ID NO: 1271139 - RNA, 22 nt, Human
auaaucacucuaauuaauugua

SEQ ID NO: 1271140 - RNA, 14 nt, Human
auaaugaauacuuu

SEQ ID NO: 1271141 - RNA, 15 nt, Human
auaauuauauaacug

SEQ ID NO: 1271142 - RNA, 17 nt, Human
auaauuauauaacugua

SEQ ID NO: 1271143 - RNA, 19 nt, Human
auaauuauauaacuguauu

SEQ ID NO: 1271144 - RNA, 13 nt, Human
auaaugaacagaa

SEQ ID NO: 1271145 - RNA, 14 nt, Human
auaauuauauguug

SEQ ID NO: 1271146 - RNA, 13 nt, Human
auaauuauauguu

SEQ ID NO: 1271147 - RNA, 21 nt, Human
aggggcuuauaauaaaggacu

SEQ ID NO: 1271148 - RNA, 12 nt, Human
aggggcuucagg

SEQ ID NO: 1271149 - RNA, 15 nt, Human
aggggcuucaggucc

SEQ ID NO: 1271150 - RNA, 18 nt, Human
aggggcuggggacuugug

SEQ ID NO: 1271151 - RNA, 21 nt, Human
aggggcuggggacuugugucu

SEQ ID NO: 1271152 - RNA, 16 nt, Human
aggggcuucaggucca

SEQ ID NO: 1271153 - RNA, 14 nt, Human
aggggcuuccuggu

SEQ ID NO: 1271154 - RNA, 16 nt, Human
aggggcuuccuggugc

SEQ ID NO: 1271155 - RNA, 23 nt, Human
aggggcuugacuuuuucaacuuc

SEQ ID NO: 1271156 - RNA, 15 nt, Human
agggggaaggcaggg

SEQ ID NO: 1271157 - RNA, 13 nt, Human
aggggcugggaac

SEQ ID NO: 1271158 - RNA, 14 nt, Human
aggggcugggaaca

SEQ ID NO: 1271159 - RNA, 14 nt, Human
aggggcuggggacu

SEQ ID NO: 1271160 - RNA, 17 nt, Human
aggggaggggcuccuuu

SEQ ID NO: 1271161 - RNA, 18 nt, Human
aggggaggggcuccuuuc

SEQ ID NO: 1271162 - RNA, 18 nt, Human
aggggagggggauccgac

SEQ ID NO: 1271163 - RNA, 20 nt, Human
aggggaggggcuccuuucca

SEQ ID NO: 1271164 - RNA, 12 nt, Human
aggggaccagga

SEQ ID NO: 1271165 - RNA, 13 nt, Human
aggggaccaggag

SEQ ID NO: 1271166 - RNA, 14 nt, Human
aggggaccaggagu

SEQ ID NO: 1271167 - RNA, 15 nt, Human
aggggaccaggagug

SEQ ID NO: 1271168 - RNA, 16 nt, Human
aggggaccaggagugg

SEQ ID NO: 1271169 - RNA, 22 nt, Human
aggggaccaggagugggugggg

SEQ ID NO: 1271170 - RNA, 17 nt, Human
aggggaccaggaguggg

SEQ ID NO: 1271171 - RNA, 20 nt, Human
aggggaccaggagugggugg

SEQ ID NO: 1271172 - RNA, 19 nt, Human
aggggacccuccgcucugu

SEQ ID NO: 1271173 - RNA, 13 nt, Human
aggggaccuggaa

SEQ ID NO: 1271174 - RNA, 23 nt, Human
aggggaccuggaagggagguggg

SEQ ID NO: 1271175 - RNA, 17 nt, Human
aggggaggcaucagugu

SEQ ID NO: 1271176 - RNA, 23 nt, Human
aggguagaauucuggcugguaga

SEQ ID NO: 1271177 - RNA, 20 nt, Human
aggguaggagggugggaagg

SEQ ID NO: 1271178 - RNA, 14 nt, Human
aggguacauggugc

SEQ ID NO: 1271179 - RNA, 17 nt, Human
aggguacauggugcugg

SEQ ID NO: 1271180 - RNA, 18 nt, Human
aggguacauggugcuggg

SEQ ID NO: 1271181 - RNA, 15 nt, Human
aggguaccagcagaa

SEQ ID NO: 1271182 - RNA, 14 nt, Human
aggguaccagcaga

SEQ ID NO: 1271183 - RNA, 12 nt, Human
aggguagggugg

SEQ ID NO: 1271184 - RNA, 13 nt, Human
aggguaggcagga

SEQ ID NO: 1271185 - RNA, 15 nt, Human
aggguaggcaggauu

SEQ ID NO: 1271186 - RNA, 16 nt, Human
aggguaggcaggauug

SEQ ID NO: 1271187 - RNA, 18 nt, Human
aggguaggcaggauuggg

SEQ ID NO: 1271188 - RNA, 16 nt, Human
aggguaggcuggaguu

SEQ ID NO: 1271189 - RNA, 17 nt, Human
aggguauauuuuccuau

SEQ ID NO: 1271190 - RNA, 21 nt, Human
aggguauauuuuccuauauua

SEQ ID NO: 1271191 - RNA, 19 nt, Human
agggggaaaaagugucaac

SEQ ID NO: 1271192 - RNA, 17 nt, Human
agggggcuggugggugc

SEQ ID NO: 1271193 - RNA, 13 nt, Human
aggggggagggaa

SEQ ID NO: 1271194 - RNA, 23 nt, Human
agggggggguauuucaauuaccu

SEQ ID NO: 1271195 - RNA, 16 nt, Human
agggggggcucccugg

SEQ ID NO: 1271196 - RNA, 15 nt, Human
agggggucguggaga

SEQ ID NO: 1271197 - RNA, 16 nt, Human
agggggucguggagag

SEQ ID NO: 1271198 - RNA, 17 nt, Human
agggggucguggagagc

SEQ ID NO: 1271199 - RNA, 18 nt, Human
agggggucguggagagcu

SEQ ID NO: 1271200 - RNA, 15 nt, Human
aggggucggcugacc

SEQ ID NO: 1271201 - RNA, 21 nt, Human
aggggucggcugaccaugcuc

SEQ ID NO: 1271202 - RNA, 12 nt, Human
aggguaaguauu

SEQ ID NO: 1271203 - RNA, 19 nt, Human
uggucacguuuggugcuuc

SEQ ID NO: 1271204 - RNA, 16 nt, Human
uggucaccuaggaagc

SEQ ID NO: 1271205 - RNA, 21 nt, Human
uggucaccuaggaagccucag

SEQ ID NO: 1271206 - RNA, 22 nt, Human
uggucaccuaggaagccucaga

SEQ ID NO: 1271207 - RNA, 23 nt, Human
uggucaccuaggaagccucagau

SEQ ID NO: 1271208 - RNA, 18 nt, Human
uggucauuuuauguuaag

SEQ ID NO: 1271209 - RNA, 21 nt, Human
ugguccaaaagauugcugaaa

SEQ ID NO: 1271210 - RNA, 23 nt, Human
ugguccaaaagauugcugaaauu

SEQ ID NO: 1271211 - RNA, 19 nt, Human
uggucacggauuugugucu

SEQ ID NO: 1271212 - RNA, 15 nt, Human
ugguccaagauuccg

SEQ ID NO: 1271213 - RNA, 15 nt, Human
ugguccaauuaguuu

SEQ ID NO: 1271214 - RNA, 18 nt, Human
ugguccaauuaguuuccu

SEQ ID NO: 1271215 - RNA, 19 nt, Human
ugguccaauuaguuuccuu

SEQ ID NO: 1271216 - RNA, 23 nt, Human
ugguccaauuaguuuccuuuuua

SEQ ID NO: 1271217 - RNA, 21 nt, Human
ugguccaauuaguuuccuuuu

SEQ ID NO: 1271218 - RNA, 12 nt, Human
ugguccaggaga

SEQ ID NO: 1271219 - RNA, 16 nt, Human
ugguccaggagaaggc

SEQ ID NO: 1271220 - RNA, 13 nt, Human
ugguccagggcua

SEQ ID NO: 1271221 - RNA, 21 nt, Human
ugguccagggcuagugacuug

SEQ ID NO: 1271222 - RNA, 20 nt, Human
ugguacagagaagccagcuu

SEQ ID NO: 1271223 - RNA, 21 nt, Human
ugguacagagaagccagcuug

SEQ ID NO: 1271224 - RNA, 22 nt, Human
ugguacaguauggggguuguaa

SEQ ID NO: 1271225 - RNA, 22 nt, Human
ugguacagagaagccagcuugu

SEQ ID NO: 1271226 - RNA, 15 nt, Human
ugguacaugguguuu

SEQ ID NO: 1271227 - RNA, 18 nt, Human
ugguacaugguguuugug

SEQ ID NO: 1271228 - RNA, 22 nt, Human
ugguaauuuaagauuccagaga

SEQ ID NO: 1271229 - RNA, 17 nt, Human
ugguaaagacuggcuuu

SEQ ID NO: 1271230 - RNA, 14 nt, Human
ugguaauuguacua

SEQ ID NO: 1271231 - RNA, 16 nt, Human
ugguaaagacuggcuu

SEQ ID NO: 1271232 - RNA, 13 nt, Human
ugguaauuguugc

SEQ ID NO: 1271233 - RNA, 11 nt, Human
ugguacagaga

SEQ ID NO: 1271234 - RNA, 12 nt, Human
ugguacagagaa

SEQ ID NO: 1271235 - RNA, 13 nt, Human
ugguacagagaag

SEQ ID NO: 1271236 - RNA, 14 nt, Human
ugguacagagaagc

SEQ ID NO: 1271237 - RNA, 15 nt, Human
ugguacagagaagcc

SEQ ID NO: 1271238 - RNA, 16 nt, Human
ugguacagagaagcca

SEQ ID NO: 1271239 - RNA, 17 nt, Human
ugguacagagaagccag

SEQ ID NO: 1271240 - RNA, 18 nt, Human
ugguacagagaagccagc

SEQ ID NO: 1271241 - RNA, 19 nt, Human
ugguacagagaagccagcu

SEQ ID NO: 1271242 - RNA, 22 nt, Human
ugggucuuguuuuuuuuuucca

SEQ ID NO: 1271243 - RNA, 22 nt, Human
uggguuuuuauuuccuaugaug

SEQ ID NO: 1271244 - RNA, 14 nt, Human
uggguuuuucccug

SEQ ID NO: 1271245 - RNA, 19 nt, Human
uggguuuuguauucucuga

SEQ ID NO: 1271246 - RNA, 21 nt, Human
uggguuuuguauucucugagc

SEQ ID NO: 1271247 - RNA, 17 nt, Human
uggguuuuuggacuucu

SEQ ID NO: 1271248 - RNA, 17 nt, Human
uggguuuuuuuccuuua

SEQ ID NO: 1271249 - RNA, 14 nt, Human
ugguaaaaagaaaa

SEQ ID NO: 1271250 - RNA, 14 nt, Human
ugguaaaacacuug

SEQ ID NO: 1271251 - RNA, 20 nt, Human
agggugaguuggcuuaccug

SEQ ID NO: 1271252 - RNA, 20 nt, Human
agggugcaguaucaugcccu

SEQ ID NO: 1271253 - RNA, 14 nt, Human
agggugcugacugg

SEQ ID NO: 1271254 - RNA, 19 nt, Human
agggugaguuggcuuaccu

SEQ ID NO: 1271255 - RNA, 22 nt, Human
agggugaguuggcuuaccuggc

SEQ ID NO: 1271256 - RNA, 22 nt, Human
ugguccaugggccauaugaaaa

SEQ ID NO: 1271257 - RNA, 13 nt, Human
uggucccacaucc

SEQ ID NO: 1271258 - RNA, 15 nt, Human
uggucccacaucccu

SEQ ID NO: 1271259 - RNA, 16 nt, Human
uggucccacaucccug

SEQ ID NO: 1271260 - RNA, 17 nt, Human
uggucccacaucccugg

SEQ ID NO: 1271261 - RNA, 19 nt, Human
uggucccacaucccugggc

SEQ ID NO: 1271262 - RNA, 20 nt, Human
uggucccacaucccugggcc

SEQ ID NO: 1271263 - RNA, 21 nt, Human
uggucccacaucccugggccu

SEQ ID NO: 1271264 - RNA, 19 nt, Human
uggucucgaacuccugacc

SEQ ID NO: 1271265 - RNA, 20 nt, Human
uggucucgaacuccugaccu

SEQ ID NO: 1271266 - RNA, 21 nt, Human
uggucucgaacuccugaccuu

SEQ ID NO: 1271267 - RNA, 22 nt, Human
uggucccacaucccugggccug

SEQ ID NO: 1271268 - RNA, 23 nt, Human
uggucccacaucccugggccugc

SEQ ID NO: 1271269 - RNA, 16 nt, Human
uggucugguugggcag

SEQ ID NO: 1271270 - RNA, 17 nt, Human
uggucugguugggcagc

SEQ ID NO: 1271271 - RNA, 14 nt, Human
uggucuguuggcag

SEQ ID NO: 1271272 - RNA, 18 nt, Human
uggucuguuggcaggcug

SEQ ID NO: 1271273 - RNA, 22 nt, Human
uggucugugagaugcuagaacu

SEQ ID NO: 1271274 - RNA, 11 nt, Human
uggucugcugu

SEQ ID NO: 1271275 - RNA, 18 nt, Human
uggucugcccucugcauc

SEQ ID NO: 1271276 - RNA, 21 nt, Human
uggucucucuaugccucucua

SEQ ID NO: 1271277 - RNA, 13 nt, Human
uggucucuugcuu

SEQ ID NO: 1271278 - RNA, 23 nt, Human
uggugaaaagcagguugauaaau

SEQ ID NO: 1271279 - RNA, 22 nt, Human
uggugaaaagcagguugauaaa

SEQ ID NO: 1271280 - RNA, 14 nt, Human
uggucuuuugguua

SEQ ID NO: 1271281 - RNA, 20 nt, Human
uggucuuacagcaggcagua

SEQ ID NO: 1271282 - RNA, 15 nt, Human
uggucuuacagcagg

SEQ ID NO: 1271283 - RNA, 16 nt, Human
uggucuuuuauaauuc

SEQ ID NO: 1271284 - RNA, 16 nt, Human
aggguugaccccagag

SEQ ID NO: 1271285 - RNA, 17 nt, Human
aggguugaccccagagg

SEQ ID NO: 1271286 - RNA, 18 nt, Human
aggguugaccccagagga

SEQ ID NO: 1271287 - RNA, 15 nt, Human
aggucagugcaaaua

SEQ ID NO: 1271288 - RNA, 17 nt, Human
agguccacaacacacag

SEQ ID NO: 1271289 - RNA, 17 nt, Human
agguccaaugagcuuuc

SEQ ID NO: 1271290 - RNA, 19 nt, Human
agguccaaugagcuuucug

SEQ ID NO: 1271291 - RNA, 20 nt, Human
agguccaaugagcuuucuga

SEQ ID NO: 1271292 - RNA, 15 nt, Human
agguccaaugagcuu

SEQ ID NO: 1271293 - RNA, 16 nt, Human
agguccaaugagcuuu

SEQ ID NO: 1271294 - RNA, 19 nt, Human
agguccacaacacacagau

SEQ ID NO: 1271295 - RNA, 16 nt, Human
aggugaaacauuuucu

SEQ ID NO: 1271296 - RNA, 19 nt, Human
aggugaaacuccagaugcc

SEQ ID NO: 1271297 - RNA, 20 nt, Human
aggugaaacuccagaugcca

SEQ ID NO: 1271298 - RNA, 21 nt, Human
aggugaaacuccagaugccac

SEQ ID NO: 1271299 - RNA, 22 nt, Human
aggugaaacuccagaugccaca

SEQ ID NO: 1271300 - RNA, 15 nt, Human
aggugaaaggaaauu

SEQ ID NO: 1271301 - RNA, 19 nt, Human
aggugaaaguuaauccacu

SEQ ID NO: 1271302 - RNA, 20 nt, Human
aggguuuauguuuaggaugu

SEQ ID NO: 1271303 - RNA, 15 nt, Human
aggguuucaccaugu

SEQ ID NO: 1271304 - RNA, 15 nt, Human
aggguuucauugucu

SEQ ID NO: 1271305 - RNA, 22 nt, Human
aggguuucccuacugaagcccu

SEQ ID NO: 1271306 - RNA, 21 nt, Human
aggguuucccuacugaagccc

SEQ ID NO: 1271307 - RNA, 18 nt, Human
aggguuugugacagggcg

SEQ ID NO: 1271308 - RNA, 15 nt, Human
aggguuugugacagg

SEQ ID NO: 1271309 - RNA, 19 nt, Human
agguauuuuucuuuaacca

SEQ ID NO: 1271310 - RNA, 20 nt, Human
aggucaaaauagugccacua

SEQ ID NO: 1271311 - RNA, 14 nt, Human
agguaggccaaggu

SEQ ID NO: 1271312 - RNA, 19 nt, Human
agguagcugaaaggggaag

SEQ ID NO: 1271313 - RNA, 22 nt, Human
agguauaucuagguuuaugaca

SEQ ID NO: 1271314 - RNA, 19 nt, Human
agguauaucuagguuuaug

SEQ ID NO: 1271315 - RNA, 23 nt, Human
agguaggccaagguguccuacag

SEQ ID NO: 1271316 - RNA, 17 nt, Human
agguaggggccccucuc

SEQ ID NO: 1271317 - RNA, 22 nt, Human
agguaggggccccucucagccc

SEQ ID NO: 1271318 - RNA, 14 nt, Human
agguauauacuuug

SEQ ID NO: 1271319 - RNA, 18 nt, Human
ugguuuuaguugcaacuu

SEQ ID NO: 1271320 - RNA, 13 nt, Human
ugguuuuagauuu

SEQ ID NO: 1271321 - RNA, 14 nt, Human
ugguuuuagauuuu

SEQ ID NO: 1271322 - RNA, 19 nt, Human
ugguuuucuccaagagcua

SEQ ID NO: 1271323 - RNA, 20 nt, Human
ugguuuucuccaagagcuac

SEQ ID NO: 1271324 - RNA, 22 nt, Human
ugguuucuugugcacuggcacc

SEQ ID NO: 1271325 - RNA, 23 nt, Human
ugguuugaagaauguuaagacuu

SEQ ID NO: 1271326 - RNA, 21 nt, Human
ugguuuaaagaaaguguauuu

SEQ ID NO: 1271327 - RNA, 17 nt, Human
ugguuuauauauuuaaa

SEQ ID NO: 1271328 - RNA, 13 nt, Human
ugguuucagcacu

SEQ ID NO: 1271329 - RNA, 20 nt, Human
ugguuucagcacuagccaaa

SEQ ID NO: 1271330 - RNA, 23 nt, Human
ugguuucagcacuagccaaaccu

SEQ ID NO: 1271331 - RNA, 12 nt, Human
ugguuucauguu

SEQ ID NO: 1271332 - RNA, 15 nt, Human
ugguuucauguuagu

SEQ ID NO: 1271333 - RNA, 15 nt, Human
ugguuucgaacuccu

SEQ ID NO: 1271334 - RNA, 16 nt, Human
uguaaaggaauuuaaa

SEQ ID NO: 1271335 - RNA, 13 nt, Human
uguaaagccaugc

SEQ ID NO: 1271336 - RNA, 12 nt, Human
uguaaagcuaaa

SEQ ID NO: 1271337 - RNA, 16 nt, Human
uguaaagcuaaaauaa

SEQ ID NO: 1271338 - RNA, 17 nt, Human
uguaaagcuaaaauaaa

SEQ ID NO: 1271339 - RNA, 20 nt, Human
uguaaagcuaaaauaaagaa

SEQ ID NO: 1271340 - RNA, 21 nt, Human
uguaaagcuaaaauaaagaaa

SEQ ID NO: 1271341 - RNA, 18 nt, Human
uguaaagauauuuuuauc

SEQ ID NO: 1271342 - RNA, 11 nt, Human
uguaaagaugu

SEQ ID NO: 1271343 - RNA, 13 nt, Human
uguaaagcuuguc

SEQ ID NO: 1271344 - RNA, 21 nt, Human
uguaaauacuguuuuuaacaa

SEQ ID NO: 1271345 - RNA, 14 nt, Human
uguaaauauaaaga

SEQ ID NO: 1271346 - RNA, 15 nt, Human
uguaaauacccauau

SEQ ID NO: 1271347 - RNA, 16 nt, Human
uguaaauauaaagacg

SEQ ID NO: 1271348 - RNA, 17 nt, Human
uguaaauauaaagacgu

SEQ ID NO: 1271349 - RNA, 18 nt, Human
uguaaauauuuuaaagaa

SEQ ID NO: 1271350 - RNA, 20 nt, Human
uguaaauauuuuaaagaauu

SEQ ID NO: 1271351 - RNA, 22 nt, Human
uguaaauauuuuaaagaauugu

SEQ ID NO: 1271352 - RNA, 14 nt, Human
uguaaauauugugu

SEQ ID NO: 1271353 - RNA, 15 nt, Human
uguaaauauugugug

SEQ ID NO: 1271354 - RNA, 14 nt, Human
uguaaauauuuuaa

SEQ ID NO: 1271355 - RNA, 17 nt, Human
uguaaauauuuuaaaga

SEQ ID NO: 1271356 - RNA, 17 nt, Human
ugguuguuucuguucca

SEQ ID NO: 1271357 - RNA, 16 nt, Human
ugguucagcuaagcua

SEQ ID NO: 1271358 - RNA, 21 nt, Human
ugguucagaauuaaacuuuua

SEQ ID NO: 1271359 - RNA, 23 nt, Human
ugguuuaaaagacacacuugucc

SEQ ID NO: 1271360 - RNA, 15 nt, Human
ugguuuaaagaaagu

SEQ ID NO: 1271361 - RNA, 16 nt, Human
ugguuuaaagaaagug

SEQ ID NO: 1271362 - RNA, 17 nt, Human
ugguuuaaagaaagugu

SEQ ID NO: 1271363 - RNA, 19 nt, Human
ugguuuaaagaaaguguau

SEQ ID NO: 1271364 - RNA, 15 nt, Human
ugguucacacugacc

SEQ ID NO: 1271365 - RNA, 20 nt, Human
ugguucagaauuaaacuuuu

SEQ ID NO: 1271366 - RNA, 22 nt, Human
ugguguucuccugcugcucccu

SEQ ID NO: 1271367 - RNA, 20 nt, Human
ugguguugccaguuguccuc

SEQ ID NO: 1271368 - RNA, 22 nt, Human
ugguguugccaguuguccuccu

SEQ ID NO: 1271369 - RNA, 20 nt, Human
ugguguuggacaagcuucug

SEQ ID NO: 1271370 - RNA, 22 nt, Human
ugguguuuuuuucuaugggugu

SEQ ID NO: 1271371 - RNA, 19 nt, Human
ugguuaaauaaggcagggu

SEQ ID NO: 1271372 - RNA, 13 nt, Human
ugguuaagagucc

SEQ ID NO: 1271373 - RNA, 14 nt, Human
ugguuaagagucca

SEQ ID NO: 1271374 - RNA, 16 nt, Human
ugguuaagaguccaag

SEQ ID NO: 1271375 - RNA, 17 nt, Human
ugguuaagaguccaaga

SEQ ID NO: 1271376 - RNA, 17 nt, Human
aggugaaacauuuucuc

SEQ ID NO: 1271377 - RNA, 14 nt, Human
aggugaacauuggu

SEQ ID NO: 1271378 - RNA, 21 nt, Human
aggugaacauugguucuuuca

SEQ ID NO: 1271379 - RNA, 18 nt, Human
uggugugaucgucugacu

SEQ ID NO: 1271380 - RNA, 16 nt, Human
uggugugaucgucuga

SEQ ID NO: 1271381 - RNA, 14 nt, Human
uggugugguacaga

SEQ ID NO: 1271382 - RNA, 14 nt, Human
ugguguucuccugc

SEQ ID NO: 1271383 - RNA, 17 nt, Human
ugguguucuccugcugc

SEQ ID NO: 1271384 - RNA, 23 nt, Human
ugguguucuccugcugcucccuc

SEQ ID NO: 1271385 - RNA, 11 nt, Human
ugguguuaaca

SEQ ID NO: 1271386 - RNA, 14 nt, Human
ugguguuaacagaa

SEQ ID NO: 1271387 - RNA, 20 nt, Human
ugguguuaacagaagggagg

SEQ ID NO: 1271388 - RNA, 15 nt, Human
ugguguguguaugcg

SEQ ID NO: 1271389 - RNA, 19 nt, Human
uggugugucccccucuguc

SEQ ID NO: 1271390 - RNA, 15 nt, Human
uggugugguacagag

SEQ ID NO: 1271391 - RNA, 16 nt, Human
uggugugguacagaga

SEQ ID NO: 1271392 - RNA, 17 nt, Human
uggugugguacagagaa

SEQ ID NO: 1271393 - RNA, 18 nt, Human
uggugugguacagagaag

SEQ ID NO: 1271394 - RNA, 19 nt, Human
uggugugguacagagaagc

SEQ ID NO: 1271395 - RNA, 20 nt, Human
uggugugguacagagaagcc

SEQ ID NO: 1271396 - RNA, 21 nt, Human
uggugugguacagagaagcca

SEQ ID NO: 1271397 - RNA, 23 nt, Human
uggugugguacagagaagccagc

SEQ ID NO: 1271398 - RNA, 19 nt, Human
uguacuugcucuugaugcc

SEQ ID NO: 1271399 - RNA, 19 nt, Human
uguagaacacuaauucaua

SEQ ID NO: 1271400 - RNA, 20 nt, Human
uguagaacacuaauucauaa

SEQ ID NO: 1271401 - RNA, 17 nt, Human
uguagaaccuaauucaa

SEQ ID NO: 1271402 - RNA, 15 nt, Human
uguacuugcucuuga

SEQ ID NO: 1271403 - RNA, 21 nt, Human
uguagaagucacauuccugaa

SEQ ID NO: 1271404 - RNA, 16 nt, Human
uguagaaugauuucau

SEQ ID NO: 1271405 - RNA, 17 nt, Human
uguagagaaaacaugca

SEQ ID NO: 1271406 - RNA, 17 nt, Human
uguagaaugauuucaug

SEQ ID NO: 1271407 - RNA, 18 nt, Human
uguagaaugauuucaugc

SEQ ID NO: 1271408 - RNA, 18 nt, Human
uguacaucuauuuuggau

SEQ ID NO: 1271409 - RNA, 14 nt, Human
uguacauuaauuac

SEQ ID NO: 1271410 - RNA, 16 nt, Human
uguacauuugggaguu

SEQ ID NO: 1271411 - RNA, 15 nt, Human
uguacauaugugcug

SEQ ID NO: 1271412 - RNA, 17 nt, Human
uguacauaugugcugga

SEQ ID NO: 1271413 - RNA, 20 nt, Human
uguacauaugugcuggaauu

SEQ ID NO: 1271414 - RNA, 14 nt, Human
uguacaucuauuuu

SEQ ID NO: 1271415 - RNA, 15 nt, Human
uguaaggcaaucaug

SEQ ID NO: 1271416 - RNA, 19 nt, Human
uguaaggauccggaaagaa

SEQ ID NO: 1271417 - RNA, 21 nt, Human
uguaaggauccggaaagaaga

SEQ ID NO: 1271418 - RNA, 23 nt, Human
uguaauuuuacacgcuuuuguga

SEQ ID NO: 1271419 - RNA, 17 nt, Human
uguaaggaugggcaugg

SEQ ID NO: 1271420 - RNA, 18 nt, Human
uguaagaaaauaucacuu

SEQ ID NO: 1271421 - RNA, 19 nt, Human
agguuuaaaugaacaagag

SEQ ID NO: 1271422 - RNA, 12 nt, Human
uguaagaaaccu

SEQ ID NO: 1271423 - RNA, 15 nt, Human
uguaagaaauacaga

SEQ ID NO: 1271424 - RNA, 17 nt, Human
uguaagaaauacagacu

SEQ ID NO: 1271425 - RNA, 21 nt, Human
uguaagaacaacuaccugagc

SEQ ID NO: 1271426 - RNA, 14 nt, Human
uguaagcugaaaau

SEQ ID NO: 1271427 - RNA, 16 nt, Human
uguaagcugaaaauau

SEQ ID NO: 1271428 - RNA, 16 nt, Human
agguugucugaaguca

SEQ ID NO: 1271429 - RNA, 20 nt, Human
agguugucugaagucacugc

SEQ ID NO: 1271430 - RNA, 12 nt, Human
agguugucugug

SEQ ID NO: 1271431 - RNA, 22 nt, Human
agguuguggccuuugcgcuccu

SEQ ID NO: 1271432 - RNA, 13 nt, Human
agguuuaaagagu

SEQ ID NO: 1271433 - RNA, 14 nt, Human
agguuuaaagaguc

SEQ ID NO: 1271434 - RNA, 15 nt, Human
agguuuaaagagucu

SEQ ID NO: 1271435 - RNA, 16 nt, Human
agguuuaaagagucua

SEQ ID NO: 1271436 - RNA, 20 nt, Human
agguuuaaagagucuagauu

SEQ ID NO: 1271437 - RNA, 13 nt, Human
agguuuaaaugaa

SEQ ID NO: 1271438 - RNA, 14 nt, Human
agguuuaaaugaac

SEQ ID NO: 1271439 - RNA, 15 nt, Human
agguuuaaaugaaca

SEQ ID NO: 1271440 - RNA, 22 nt, Human
agguuuaaaugaacaagagaag

SEQ ID NO: 1271441 - RNA, 21 nt, Human
aggugugaaggugauuuaagg

SEQ ID NO: 1271442 - RNA, 14 nt, Human
aggugugagacugg

SEQ ID NO: 1271443 - RNA, 15 nt, Human
aggugugagacuggg

SEQ ID NO: 1271444 - RNA, 18 nt, Human
agguguuaacauuccaag

SEQ ID NO: 1271445 - RNA, 23 nt, Human
agguguuaacauuccaagacucu

SEQ ID NO: 1271446 - RNA, 15 nt, Human
agguguuacuguaau

SEQ ID NO: 1271447 - RNA, 16 nt, Human
agguguuacuguaauu

SEQ ID NO: 1271448 - RNA, 23 nt, Human
agguguuauuuggaaccuuguuu

SEQ ID NO: 1271449 - RNA, 12 nt, Human
agguguuauuug

SEQ ID NO: 1271450 - RNA, 12 nt, Human
agguguugccaa

SEQ ID NO: 1271451 - RNA, 21 nt, Human
agguguugccaaauauguccu

SEQ ID NO: 1271452 - RNA, 22 nt, Human
agguguugccaaauauguccug

SEQ ID NO: 1271453 - RNA, 23 nt, Human
agguguugccaaauauguccugg

SEQ ID NO: 1271454 - RNA, 17 nt, Human
agguguuggcugcacgu

SEQ ID NO: 1271455 - RNA, 19 nt, Human
agguggggagacugggcug

SEQ ID NO: 1271456 - RNA, 21 nt, Human
agguggggagacugggcugag

SEQ ID NO: 1271457 - RNA, 22 nt, Human
aggugauccacucgccuucauc

SEQ ID NO: 1271458 - RNA, 15 nt, Human
aggugauccauguaa

SEQ ID NO: 1271459 - RNA, 18 nt, Human
aggugauccauguaacug

SEQ ID NO: 1271460 - RNA, 21 nt, Human
aggugauccauguaacugccu

SEQ ID NO: 1271461 - RNA, 19 nt, Human
aggugauccauguaacugc

SEQ ID NO: 1271462 - RNA, 22 nt, Human
aggugcaacaagguccucuguc

SEQ ID NO: 1271463 - RNA, 18 nt, Human
agguggguugaaagccaa

SEQ ID NO: 1271464 - RNA, 20 nt, Human
aggugugagccaccacgccc

SEQ ID NO: 1271465 - RNA, 21 nt, Human
agugagcagucaggaaagaga

SEQ ID NO: 1271466 - RNA, 17 nt, Human
agugagcaguguuagcu

SEQ ID NO: 1271467 - RNA, 22 nt, Human
agugagagacauuaacucauua

SEQ ID NO: 1271468 - RNA, 13 nt, Human
agugagagacauu

SEQ ID NO: 1271469 - RNA, 21 nt, Human
agugagagacauuaacucauu

SEQ ID NO: 1271470 - RNA, 21 nt, Human
agugagagaguggcuggggca

SEQ ID NO: 1271471 - RNA, 16 nt, Human
agugagccgagauugu

SEQ ID NO: 1271472 - RNA, 22 nt, Human
agugagcauggaacacuucgag

SEQ ID NO: 1271473 - RNA, 21 nt, Human
agugagcauggaacacuucga

SEQ ID NO: 1271474 - RNA, 15 nt, Human
ugugauggagugcug

SEQ ID NO: 1271475 - RNA, 17 nt, Human
ugugauggagugcuguu

SEQ ID NO: 1271476 - RNA, 18 nt, Human
ugugaugucauacagaga

SEQ ID NO: 1271477 - RNA, 19 nt, Human
ugugaugucauacagagaa

SEQ ID NO: 1271478 - RNA, 20 nt, Human
ugugaugucauacagagaag

SEQ ID NO: 1271479 - RNA, 22 nt, Human
ugugaugucauacagagaaguc

SEQ ID NO: 1271480 - RNA, 23 nt, Human
ugugaugucauacagagaaguca

SEQ ID NO: 1271481 - RNA, 15 nt, Human
ugugaugugaagcca

SEQ ID NO: 1271482 - RNA, 13 nt, Human
ugugauguucuaa

SEQ ID NO: 1271483 - RNA, 14 nt, Human
ugugauguucuaag

SEQ ID NO: 1271484 - RNA, 15 nt, Human
ugugauguucuaagg

SEQ ID NO: 1271485 - RNA, 16 nt, Human
ugugauguucuaaggc

SEQ ID NO: 1271486 - RNA, 17 nt, Human
ugugauguucuaaggcu

SEQ ID NO: 1271487 - RNA, 18 nt, Human
ugugauguucuaaggcuc

SEQ ID NO: 1271488 - RNA, 22 nt, Human
ugugauuagacagaacaccuau

SEQ ID NO: 1271489 - RNA, 16 nt, Human
ugugauuagacagaac

SEQ ID NO: 1271490 - RNA, 14 nt, Human
ugugauucaaucug

SEQ ID NO: 1271491 - RNA, 15 nt, Human
ugugauucaaucugu

SEQ ID NO: 1271492 - RNA, 20 nt, Human
agugaaacucguuaauuugu

SEQ ID NO: 1271493 - RNA, 14 nt, Human
agugaaaauauagc

SEQ ID NO: 1271494 - RNA, 17 nt, Human
agucuuuuguucgcaug

SEQ ID NO: 1271495 - RNA, 22 nt, Human
agucuuuugcuuuugcccauuu

SEQ ID NO: 1271496 - RNA, 15 nt, Human
agugaaaacuuugua

SEQ ID NO: 1271497 - RNA, 16 nt, Human
agugaaaacuuuguag

SEQ ID NO: 1271498 - RNA, 14 nt, Human
agugagacagcucu

SEQ ID NO: 1271499 - RNA, 13 nt, Human
agugagacagacu

SEQ ID NO: 1271500 - RNA, 21 nt, Human
agugagacccagcccucaucc

SEQ ID NO: 1271501 - RNA, 20 nt, Human
agugagaccuuccuuuuacu

SEQ ID NO: 1271502 - RNA, 18 nt, Human
agucuuacucuguugcca

SEQ ID NO: 1271503 - RNA, 16 nt, Human
agucuuacgaauacuu

SEQ ID NO: 1271504 - RNA, 14 nt, Human
agucuuaacugguc

SEQ ID NO: 1271505 - RNA, 22 nt, Human
agucuuaauauauauauccaga

SEQ ID NO: 1271506 - RNA, 15 nt, Human
agucuuccauuugca

SEQ ID NO: 1271507 - RNA, 16 nt, Human
agucuuccauuugcaa

SEQ ID NO: 1271508 - RNA, 17 nt, Human
agucuuccauuugcaag

SEQ ID NO: 1271509 - RNA, 19 nt, Human
agucuuccauuugcaaggg

SEQ ID NO: 1271510 - RNA, 12 nt, Human
agucuuccugac

SEQ ID NO: 1271511 - RNA, 15 nt, Human
agucuuccugacacu

SEQ ID NO: 1271512 - RNA, 16 nt, Human
agucuuccugacacuu

SEQ ID NO: 1271513 - RNA, 17 nt, Human
agucuuccugacacuuu

SEQ ID NO: 1271514 - RNA, 18 nt, Human
agucuuccugacacuuua

SEQ ID NO: 1271515 - RNA, 19 nt, Human
agucuuccugacacuuuaa

SEQ ID NO: 1271516 - RNA, 12 nt, Human
agucuuuugcuu

SEQ ID NO: 1271517 - RNA, 13 nt, Human
agucuuuugcuuu

SEQ ID NO: 1271518 - RNA, 14 nt, Human
agucuuuugcuuuu

SEQ ID NO: 1271519 - RNA, 18 nt, Human
agucuuuugcuuuuggca

SEQ ID NO: 1271520 - RNA, 19 nt, Human
agucuuuugcuuuuggcaa

SEQ ID NO: 1271521 - RNA, 20 nt, Human
agucuuuugcuuuuggcaaa

SEQ ID NO: 1271522 - RNA, 22 nt, Human
agucuuuuguucgcauggucac

SEQ ID NO: 1271523 - RNA, 19 nt, Human
agucuccaaagucucugga

SEQ ID NO: 1271524 - RNA, 14 nt, Human
ugugagcccagcug

SEQ ID NO: 1271525 - RNA, 15 nt, Human
ugugagcccagcugg

SEQ ID NO: 1271526 - RNA, 18 nt, Human
ugugagcccagcuggguc

SEQ ID NO: 1271527 - RNA, 23 nt, Human
agucucugaggggcuaccaggaa

SEQ ID NO: 1271528 - RNA, 22 nt, Human
agucucugaggggcuaccagga

SEQ ID NO: 1271529 - RNA, 16 nt, Human
agucucugaggggcua

SEQ ID NO: 1271530 - RNA, 11 nt, Human
agucucugagc

SEQ ID NO: 1271531 - RNA, 13 nt, Human
agucucugagcag

SEQ ID NO: 1271532 - RNA, 16 nt, Human
agucucugagcaguga

SEQ ID NO: 1271533 - RNA, 14 nt, Human
agucucccucccuu

SEQ ID NO: 1271534 - RNA, 18 nt, Human
agucucccucccuugggg

SEQ ID NO: 1271535 - RNA, 23 nt, Human
agucucucuucucuccagcugac

SEQ ID NO: 1271536 - RNA, 14 nt, Human
ugugaagcaaaauu

SEQ ID NO: 1271537 - RNA, 20 nt, Human
ugugaagcaaacucuaaaau

SEQ ID NO: 1271538 - RNA, 14 nt, Human
ugugaacugaacuc

SEQ ID NO: 1271539 - RNA, 23 nt, Human
ugugaacugaacucugacaacag

SEQ ID NO: 1271540 - RNA, 23 nt, Human
ugugaagccaugaguuccagaaa

SEQ ID NO: 1271541 - RNA, 10 nt, Human
ugugaagcca

SEQ ID NO: 1271542 - RNA, 20 nt, Human
ugugaagccaauucagacag

SEQ ID NO: 1271543 - RNA, 21 nt, Human
ugugaagccaauucagacagg

SEQ ID NO: 1271544 - RNA, 22 nt, Human
ugucucuggauuauauuaugaa

SEQ ID NO: 1271545 - RNA, 18 nt, Human
ugucucucagggccaggc

SEQ ID NO: 1271546 - RNA, 13 nt, Human
ugucucuccugcc

SEQ ID NO: 1271547 - RNA, 16 nt, Human
ugucucuccugccccu

SEQ ID NO: 1271548 - RNA, 13 nt, Human
ugucucugaugca

SEQ ID NO: 1271549 - RNA, 14 nt, Human
ugucucugaugcag

SEQ ID NO: 1271550 - RNA, 19 nt, Human
ugucucugaugcagcuuau

SEQ ID NO: 1271551 - RNA, 20 nt, Human
ugucucugaugcagcuuaua

SEQ ID NO: 1271552 - RNA, 12 nt, Human
ugucucucauga

SEQ ID NO: 1271553 - RNA, 17 nt, Human
ugucucuccugccccuu

SEQ ID NO: 1271554 - RNA, 17 nt, Human
ugucucuacuaaaaaua

SEQ ID NO: 1271555 - RNA, 20 nt, Human
ugucucgagcgcccugcaga

SEQ ID NO: 1271556 - RNA, 15 nt, Human
ugucucgagcgcccu

SEQ ID NO: 1271557 - RNA, 17 nt, Human
ugucucgagcgcccugc

SEQ ID NO: 1271558 - RNA, 18 nt, Human
ugucucgagcgcccugca

SEQ ID NO: 1271559 - RNA, 19 nt, Human
ugucucgagcgcccugcag

SEQ ID NO: 1271560 - RNA, 13 nt, Human
agucccugccugg

SEQ ID NO: 1271561 - RNA, 15 nt, Human
ugucucgaacuauuu

SEQ ID NO: 1271562 - RNA, 18 nt, Human
ugucucugcaaacugccu

SEQ ID NO: 1271563 - RNA, 15 nt, Human
ugucucuuauggaug

SEQ ID NO: 1271564 - RNA, 20 nt, Human
ugucucuuauggaugucccc

SEQ ID NO: 1271565 - RNA, 22 nt, Human
ugucucuuauggauguccccag

SEQ ID NO: 1271566 - RNA, 13 nt, Human
ugucucuucugag

SEQ ID NO: 1271567 - RNA, 16 nt, Human
ugucucuucugagcua

SEQ ID NO: 1271568 - RNA, 17 nt, Human
ugucucuucuuuagaac

SEQ ID NO: 1271569 - RNA, 14 nt, Human
ugucucuugaguuu

SEQ ID NO: 1271570 - RNA, 17 nt, Human
ugucucuugaguuuguc

SEQ ID NO: 1271571 - RNA, 23 nt, Human
ugucucuuuggcgaccuccuuuc

SEQ ID NO: 1271572 - RNA, 14 nt, Human
ugucuuaauuauua

SEQ ID NO: 1271573 - RNA, 15 nt, Human
ugucuuaauuauuau

SEQ ID NO: 1271574 - RNA, 18 nt, Human
ugucuuaauuuucuuuca

SEQ ID NO: 1271575 - RNA, 19 nt, Human
ugucuugagcucuauuaug

SEQ ID NO: 1271576 - RNA, 13 nt, Human
ugucuuggaacau

SEQ ID NO: 1271577 - RNA, 22 nt, Human
ugugaacaguuguguuugaagc

SEQ ID NO: 1271578 - RNA, 14 nt, Human
ugucuuuaaugcaa

SEQ ID NO: 1271579 - RNA, 15 nt, Human
ugucuuuaauucugu

SEQ ID NO: 1271580 - RNA, 15 nt, Human
ugucuuuaaugcaau

SEQ ID NO: 1271581 - RNA, 15 nt, Human
ugucuuuagauagcc

SEQ ID NO: 1271582 - RNA, 18 nt, Human
ugucuuuagauagcccug

SEQ ID NO: 1271583 - RNA, 17 nt, Human
ugucuuuagauagcccu

SEQ ID NO: 1271584 - RNA, 13 nt, Human
ugugaacccagga

SEQ ID NO: 1271585 - RNA, 14 nt, Human
ugugaacccaggac

SEQ ID NO: 1271586 - RNA, 21 nt, Human
ugugaaccccacgaaggagcc

SEQ ID NO: 1271587 - RNA, 15 nt, Human
ugugaacccaggaca

SEQ ID NO: 1271588 - RNA, 16 nt, Human
ugugaacccaggacaa

SEQ ID NO: 1271589 - RNA, 21 nt, Human
ugugaacccaggacaagcaug

SEQ ID NO: 1271590 - RNA, 14 nt, Human
ugucuugagcucua

SEQ ID NO: 1271591 - RNA, 16 nt, Human
ugucuugagcucuauu

SEQ ID NO: 1271592 - RNA, 22 nt, Human
ugucuugaugcaugcacuguuc

SEQ ID NO: 1271593 - RNA, 12 nt, Human
ugucuucucccu

SEQ ID NO: 1271594 - RNA, 13 nt, Human
ugucuucucccug

SEQ ID NO: 1271595 - RNA, 23 nt, Human
agguuuggacaaaauggaauacu

SEQ ID NO: 1271596 - RNA, 18 nt, Human
agguuugcagucccaagc

SEQ ID NO: 1271597 - RNA, 14 nt, Human
agguuuggaaggag

SEQ ID NO: 1271598 - RNA, 22 nt, Human
agguuuggaaggagcagaaaac

SEQ ID NO: 1271599 - RNA, 19 nt, Human
uguagagaaaacaugcaga

SEQ ID NO: 1271600 - RNA, 20 nt, Human
uguauuaagaaaggaagcau

SEQ ID NO: 1271601 - RNA, 22 nt, Human
aguagcguuuuuuaaauguaua

SEQ ID NO: 1271602 - RNA, 21 nt, Human
aguagcguuuuuuaaauguau

SEQ ID NO: 1271603 - RNA, 11 nt, Human
aguagcugagc

SEQ ID NO: 1271604 - RNA, 15 nt, Human
ugucaacucuuuguu

SEQ ID NO: 1271605 - RNA, 19 nt, Human
ugucaaauauuuagaugua

SEQ ID NO: 1271606 - RNA, 11 nt, Human
uguauuaugug

SEQ ID NO: 1271607 - RNA, 15 nt, Human
uguauuagucacaga

SEQ ID NO: 1271608 - RNA, 16 nt, Human
uguauuaagaaaggaa

SEQ ID NO: 1271609 - RNA, 14 nt, Human
uguauuaagccacu

SEQ ID NO: 1271610 - RNA, 21 nt, Human
aguauuuaauucauguugccu

SEQ ID NO: 1271611 - RNA, 22 nt, Human
agucacagagauaauucuagcu

SEQ ID NO: 1271612 - RNA, 17 nt, Human
aguauuuaacuucugag

SEQ ID NO: 1271613 - RNA, 15 nt, Human
aguauuguccagguc

SEQ ID NO: 1271614 - RNA, 16 nt, Human
aguauuguccaggucu

SEQ ID NO: 1271615 - RNA, 22 nt, Human
aguauugcucacccagugcccu

SEQ ID NO: 1271616 - RNA, 12 nt, Human
aguauuguuguc

SEQ ID NO: 1271617 - RNA, 13 nt, Human
aguauuguugucc

SEQ ID NO: 1271618 - RNA, 15 nt, Human
aguauuguuguccuu

SEQ ID NO: 1271619 - RNA, 16 nt, Human
aguauuguuguccuuu

SEQ ID NO: 1271620 - RNA, 19 nt, Human
aguauuguuguccuuuuca

SEQ ID NO: 1271621 - RNA, 20 nt, Human
aguauuguuguccuuuucau

SEQ ID NO: 1271622 - RNA, 24 nt, Human
aguauuguuguccuuuucauaggu

SEQ ID NO: 1271623 - RNA, 21 nt, Human
aguauuguuguccuuuucaua

SEQ ID NO: 1271624 - RNA, 22 nt, Human
aguauuguuguccuuuucauag

SEQ ID NO: 1271625 - RNA, 12 nt, Human
aguauuuaacua

SEQ ID NO: 1271626 - RNA, 17 nt, Human
aguauuuaacuaauuau

SEQ ID NO: 1271627 - RNA, 18 nt, Human
agucacauuccugaacag

SEQ ID NO: 1271628 - RNA, 14 nt, Human
agucacagggcagu

SEQ ID NO: 1271629 - RNA, 20 nt, Human
agucacucgauaauaaagua

SEQ ID NO: 1271630 - RNA, 17 nt, Human
agucacucuagucaaug

SEQ ID NO: 1271631 - RNA, 20 nt, Human
agucacucuagucaaugaca

SEQ ID NO: 1271632 - RNA, 22 nt, Human
agucacucuagucaaugacaug

SEQ ID NO: 1271633 - RNA, 20 nt, Human
agucacauuccaagccucau

SEQ ID NO: 1271634 - RNA, 15 nt, Human
aguauuuagaagcca

SEQ ID NO: 1271635 - RNA, 13 nt, Human
agucacagccacc

SEQ ID NO: 1271636 - RNA, 13 nt, Human
agucacagggcag

SEQ ID NO: 1271637 - RNA, 17 nt, Human
agucacagggcaguacc

SEQ ID NO: 1271638 - RNA, 18 nt, Human
aguauguuagugcaaauu

SEQ ID NO: 1271639 - RNA, 21 nt, Human
aguauguuagugcaaauuguc

SEQ ID NO: 1271640 - RNA, 13 nt, Human
aguagcugagcuc

SEQ ID NO: 1271641 - RNA, 14 nt, Human
aguagcugagcuca

SEQ ID NO: 1271642 - RNA, 22 nt, Human
aguagcugagcucacaaggcag

SEQ ID NO: 1271643 - RNA, 14 nt, Human
aguauguucaaagu

SEQ ID NO: 1271644 - RNA, 23 nt, Human
aguagcugagcucacaaggcagc

SEQ ID NO: 1271645 - RNA, 18 nt, Human
aguauuggggucugaccc

SEQ ID NO: 1271646 - RNA, 12 nt, Human
aguauugcaaag

SEQ ID NO: 1271647 - RNA, 16 nt, Human
aguauugcaaagucag

SEQ ID NO: 1271648 - RNA, 22 nt, Human
aguauugacaaaauguuauuuc

SEQ ID NO: 1271649 - RNA, 12 nt, Human
aguauuauaugu

SEQ ID NO: 1271650 - RNA, 13 nt, Human
aguauuauaugua

SEQ ID NO: 1271651 - RNA, 14 nt, Human
aguauuauauguac

SEQ ID NO: 1271652 - RNA, 18 nt, Human
aguauguucuaaccuuua

SEQ ID NO: 1271653 - RNA, 21 nt, Human
aguauguucuaaccuuuacau

SEQ ID NO: 1271654 - RNA, 22 nt, Human
aguauguucuaaccuuuacaug

SEQ ID NO: 1271655 - RNA, 17 nt, Human
ugucuaagauucuagau

SEQ ID NO: 1271656 - RNA, 23 nt, Human
ugucuaagaaauugaauacuuug

SEQ ID NO: 1271657 - RNA, 18 nt, Human
ugucuaagaaauugaaua

SEQ ID NO: 1271658 - RNA, 13 nt, Human
ugucuaagauucu

SEQ ID NO: 1271659 - RNA, 20 nt, Human
uguccuugaaggacuaauag

SEQ ID NO: 1271660 - RNA, 19 nt, Human
uguccuuuaccaaagauga

SEQ ID NO: 1271661 - RNA, 21 nt, Human
uguccuuuaccaaagaugaau

SEQ ID NO: 1271662 - RNA, 14 nt, Human
ugucuaagauucua

SEQ ID NO: 1271663 - RNA, 15 nt, Human
ugucuaagauucuag

SEQ ID NO: 1271664 - RNA, 20 nt, Human
agucagauggaaaauucauu

SEQ ID NO: 1271665 - RNA, 22 nt, Human
agucagauggaaaauucauuuu

SEQ ID NO: 1271666 - RNA, 23 nt, Human
agucagauggaaaauucauuuuu

SEQ ID NO: 1271667 - RNA, 16 nt, Human
agucagauucuugcau

SEQ ID NO: 1271668 - RNA, 16 nt, Human
ugucuaagauucuaga

SEQ ID NO: 1271669 - RNA, 17 nt, Human
agucagauucuugcauc

SEQ ID NO: 1271670 - RNA, 15 nt, Human
agucagucauucaga

SEQ ID NO: 1271671 - RNA, 21 nt, Human
agucagucauucagauaugau

SEQ ID NO: 1271672 - RNA, 13 nt, Human
agucauccagucu

SEQ ID NO: 1271673 - RNA, 18 nt, Human
agucccaucccugcguga

SEQ ID NO: 1271674 - RNA, 22 nt, Human
agucccagguuggcucugccag

SEQ ID NO: 1271675 - RNA, 22 nt, Human
aguccccacagauaacugaaaa

SEQ ID NO: 1271676 - RNA, 17 nt, Human
agucccaucugcuucag

SEQ ID NO: 1271677 - RNA, 18 nt, Human
agucccagguuggcucug

SEQ ID NO: 1271678 - RNA, 19 nt, Human
agucccagguuggcucugc

SEQ ID NO: 1271679 - RNA, 20 nt, Human
agucccagguuggcucugcc

SEQ ID NO: 1271680 - RNA, 21 nt, Human
agucccagguuggcucugcca

SEQ ID NO: 1271681 - RNA, 23 nt, Human
agucccagguuggcucugccagu

SEQ ID NO: 1271682 - RNA, 16 nt, Human
aguccaucagccucca

SEQ ID NO: 1271683 - RNA, 17 nt, Human
aguccaguccuaucugg

SEQ ID NO: 1271684 - RNA, 13 nt, Human
aguccaucagccu

SEQ ID NO: 1271685 - RNA, 14 nt, Human
aguccaucagccuc

SEQ ID NO: 1271686 - RNA, 11 nt, Human
agucaucuugc

SEQ ID NO: 1271687 - RNA, 13 nt, Human
agucaucuugcua

SEQ ID NO: 1271688 - RNA, 19 nt, Human
agucaucuugcuaccagua

SEQ ID NO: 1271689 - RNA, 23 nt, Human
agucaucuugcuaccaguauuua

SEQ ID NO: 1271690 - RNA, 13 nt, Human
aguccagguccug

SEQ ID NO: 1271691 - RNA, 14 nt, Human
aguccagguccugg

SEQ ID NO: 1271692 - RNA, 15 nt, Human
aguccagguccuggu

SEQ ID NO: 1271693 - RNA, 16 nt, Human
aguccagguccuggug

SEQ ID NO: 1271694 - RNA, 17 nt, Human
aguccagguccuggugg

SEQ ID NO: 1271695 - RNA, 19 nt, Human
aguccagguccuggugggg

SEQ ID NO: 1271696 - RNA, 18 nt, Human
aguccagguccugguggg

SEQ ID NO: 1271697 - RNA, 17 nt, Human
aguccaguccaguccua

SEQ ID NO: 1271698 - RNA, 21 nt, Human
aguccaguccuaucugggcuu

SEQ ID NO: 1271699 - RNA, 17 nt, Human
agucacucuuaugcugu

SEQ ID NO: 1271700 - RNA, 12 nt, Human
ugucagcaugaa

SEQ ID NO: 1271701 - RNA, 14 nt, Human
ugucagcaugaauu

SEQ ID NO: 1271702 - RNA, 16 nt, Human
ugucagcaugaauuug

SEQ ID NO: 1271703 - RNA, 20 nt, Human
ugucagcaugaauuuguaau

SEQ ID NO: 1271704 - RNA, 16 nt, Human
uguccacaggcuucug

SEQ ID NO: 1271705 - RNA, 17 nt, Human
uguccacauagguuuag

SEQ ID NO: 1271706 - RNA, 19 nt, Human
uguccaggcacugcugccc

SEQ ID NO: 1271707 - RNA, 17 nt, Human
uguccagcugagcgcca

SEQ ID NO: 1271708 - RNA, 21 nt, Human
uguccagcugagcgccaggau

SEQ ID NO: 1271709 - RNA, 20 nt, Human
uguccaggcacugcugccca

SEQ ID NO: 1271710 - RNA, 21 nt, Human
uguccaggcacugcugcccag

SEQ ID NO: 1271711 - RNA, 20 nt, Human
ugucccuaccgagucucuuc

SEQ ID NO: 1271712 - RNA, 21 nt, Human
ugucccuaccgagucucuucu

SEQ ID NO: 1271713 - RNA, 22 nt, Human
ugucccuaccgagucucuucuc

SEQ ID NO: 1271714 - RNA, 18 nt, Human
uguccacaggcuucugag

SEQ ID NO: 1271715 - RNA, 11 nt, Human
uguccaccccc

SEQ ID NO: 1271716 - RNA, 13 nt, Human
uguccacccccau

SEQ ID NO: 1271717 - RNA, 12 nt, Human
uguccaccccca

SEQ ID NO: 1271718 - RNA, 16 nt, Human
uguccacgacugucuc

SEQ ID NO: 1271719 - RNA, 17 nt, Human
uguccacgacugucucc

SEQ ID NO: 1271720 - RNA, 18 nt, Human
uguccacgacugucucca

SEQ ID NO: 1271721 - RNA, 19 nt, Human
uguccacgacugucuccau

SEQ ID NO: 1271722 - RNA, 12 nt, Human
uguccagcucca

SEQ ID NO: 1271723 - RNA, 16 nt, Human
uguccagcuccaaccu

SEQ ID NO: 1271724 - RNA, 20 nt, Human
uguccagcuccaaccugcaa

SEQ ID NO: 1271725 - RNA, 23 nt, Human
uguccagcuccaaccugcaaaga

SEQ ID NO: 1271726 - RNA, 18 nt, Human
ugucccuugccccccugg

SEQ ID NO: 1271727 - RNA, 21 nt, Human
ugucccuugccccccuggccu

SEQ ID NO: 1271728 - RNA, 22 nt, Human
ugucccuugccucaaugccagu

SEQ ID NO: 1271729 - RNA, 13 nt, Human
ugucccuaggugu

SEQ ID NO: 1271730 - RNA, 14 nt, Human
ugucccucccccuu

SEQ ID NO: 1271731 - RNA, 12 nt, Human
ugucccuccggg

SEQ ID NO: 1271732 - RNA, 17 nt, Human
uguccuggugguauuuu

SEQ ID NO: 1271733 - RNA, 18 nt, Human
uguccuggugguauuuuc

SEQ ID NO: 1271734 - RNA, 19 nt, Human
uguccuggugguauuuuca

SEQ ID NO: 1271735 - RNA, 20 nt, Human
uguccuggugguauuuucaa

SEQ ID NO: 1271736 - RNA, 15 nt, Human
uguccugguucccgu

SEQ ID NO: 1271737 - RNA, 15 nt, Human
uguccuguaaagguu

SEQ ID NO: 1271738 - RNA, 22 nt, Human
uguccuguaaagguuacaagcc

SEQ ID NO: 1271739 - RNA, 16 nt, Human
uguccuguacauugug

SEQ ID NO: 1271740 - RNA, 19 nt, Human
uguccugucaucaucaugg

SEQ ID NO: 1271741 - RNA, 15 nt, Human
uguccugucaucauc

SEQ ID NO: 1271742 - RNA, 14 nt, Human
uguccuuagccugg

SEQ ID NO: 1271743 - RNA, 15 nt, Human
uguccuuagccugga

SEQ ID NO: 1271744 - RNA, 16 nt, Human
uguccuuagccuggac

SEQ ID NO: 1271745 - RNA, 17 nt, Human
uguccuuagccuggacc

SEQ ID NO: 1271746 - RNA, 22 nt, Human
uguccuuagccuggaccucuga

SEQ ID NO: 1271747 - RNA, 23 nt, Human
uguccuuagccuggaccucugac

SEQ ID NO: 1271748 - RNA, 23 nt, Human
agcuggagaugaggccagaccau

SEQ ID NO: 1271749 - RNA, 22 nt, Human
agcuggagaugaggccagacca

SEQ ID NO: 1271750 - RNA, 21 nt, Human
agcuggagaugaggccagacc

SEQ ID NO: 1271751 - RNA, 20 nt, Human
agcuggagaugaggccagac

SEQ ID NO: 1271752 - RNA, 19 nt, Human
agcuggagaugaggccaga

SEQ ID NO: 1271753 - RNA, 14 nt, Human
agcuggagugcagu

SEQ ID NO: 1271754 - RNA, 21 nt, Human
agcuggaggcaggggcuuccu

SEQ ID NO: 1271755 - RNA, 22 nt, Human
agcuggaggcaggggcuuccug

SEQ ID NO: 1271756 - RNA, 13 nt, Human
agcuggaggcagg

SEQ ID NO: 1271757 - RNA, 17 nt, Human
agcuggaggcaggggcu

SEQ ID NO: 1271758 - RNA, 22 nt, Human
agcuggaucuccauucucucag

SEQ ID NO: 1271759 - RNA, 18 nt, Human
agcuggagaugaggccag

SEQ ID NO: 1271760 - RNA, 13 nt, Human
agcuggaaaagua

SEQ ID NO: 1271761 - RNA, 23 nt, Human
agcugccugucccuaccccaugg

SEQ ID NO: 1271762 - RNA, 22 nt, Human
ugccugcuuggggggugaugag

SEQ ID NO: 1271763 - RNA, 23 nt, Human
ugccucucugcaggucccuaaua

SEQ ID NO: 1271764 - RNA, 15 nt, Human
ugccucucugcaggu

SEQ ID NO: 1271765 - RNA, 11 nt, Human
ugccucugccu

SEQ ID NO: 1271766 - RNA, 23 nt, Human
ugccucugaggccagccuggccu

SEQ ID NO: 1271767 - RNA, 21 nt, Human
ugccucugccaaaggauguga

SEQ ID NO: 1271768 - RNA, 22 nt, Human
ugccucugccaaaggaugugau

SEQ ID NO: 1271769 - RNA, 12 nt, Human
ugccucugaggc

SEQ ID NO: 1271770 - RNA, 13 nt, Human
ugccucugaggcc

SEQ ID NO: 1271771 - RNA, 15 nt, Human
ugccucugaggccag

SEQ ID NO: 1271772 - RNA, 16 nt, Human
ugccucugaggccagc

SEQ ID NO: 1271773 - RNA, 17 nt, Human
ugccucugaggccagcc

SEQ ID NO: 1271774 - RNA, 18 nt, Human
ugccucugaggccagccu

SEQ ID NO: 1271775 - RNA, 19 nt, Human
ugccucugaggccagccug

SEQ ID NO: 1271776 - RNA, 20 nt, Human
ugccucugaggccagccugg

SEQ ID NO: 1271777 - RNA, 21 nt, Human
ugccucugaggccagccuggc

SEQ ID NO: 1271778 - RNA, 22 nt, Human
ugccucugaggccagccuggcc

SEQ ID NO: 1271779 - RNA, 14 nt, Human
ugccugccuuucca

SEQ ID NO: 1271780 - RNA, 15 nt, Human
ugccugccuuuccau

SEQ ID NO: 1271781 - RNA, 22 nt, Human
ugccugccuuuccauccauggc

SEQ ID NO: 1271782 - RNA, 19 nt, Human
ugccugcgugggugugugc

SEQ ID NO: 1271783 - RNA, 17 nt, Human
ugccugcuauuugaagu

SEQ ID NO: 1271784 - RNA, 14 nt, Human
ugccugcucccauc

SEQ ID NO: 1271785 - RNA, 15 nt, Human
ugccugcucccaucc

SEQ ID NO: 1271786 - RNA, 18 nt, Human
ugccugcucccauccugu

SEQ ID NO: 1271787 - RNA, 20 nt, Human
ugccugcucccauccugugu

SEQ ID NO: 1271788 - RNA, 22 nt, Human
ugccugcucccauccugugugu

SEQ ID NO: 1271789 - RNA, 16 nt, Human
ugccugcucgcucccu

SEQ ID NO: 1271790 - RNA, 21 nt, Human
ugccugcucgcucccugcaga

SEQ ID NO: 1271791 - RNA, 12 nt, Human
ugccucucugca

SEQ ID NO: 1271792 - RNA, 11 nt, Human
ugccucucugc

SEQ ID NO: 1271793 - RNA, 18 nt, Human
ugccucagaaaacaagga

SEQ ID NO: 1271794 - RNA, 14 nt, Human
ugccucacuucagg

SEQ ID NO: 1271795 - RNA, 14 nt, Human
ugccucagagacca

SEQ ID NO: 1271796 - RNA, 15 nt, Human
ugccucagagaccag

SEQ ID NO: 1271797 - RNA, 16 nt, Human
ugccucagagaccagg

SEQ ID NO: 1271798 - RNA, 18 nt, Human
ugccucagagaccagggc

SEQ ID NO: 1271799 - RNA, 23 nt, Human
ugccucagccacuugccugugcu

SEQ ID NO: 1271800 - RNA, 15 nt, Human
ugccucagccucccg

SEQ ID NO: 1271801 - RNA, 19 nt, Human
ugccucagagaccagggcu

SEQ ID NO: 1271802 - RNA, 15 nt, Human
ugccucagccuccug

SEQ ID NO: 1271803 - RNA, 18 nt, Human
ugccucaggaggcaggac

SEQ ID NO: 1271804 - RNA, 21 nt, Human
ugccucaggaggcaggaccuu

SEQ ID NO: 1271805 - RNA, 21 nt, Human
agcucuuccuuacucccaggc

SEQ ID NO: 1271806 - RNA, 22 nt, Human
agcucuuccuuacucccaggca

SEQ ID NO: 1271807 - RNA, 12 nt, Human
ugcccugugcaa

SEQ ID NO: 1271808 - RNA, 14 nt, Human
ugcccuucuccuua

SEQ ID NO: 1271809 - RNA, 13 nt, Human
ugcccuucuuucu

SEQ ID NO: 1271810 - RNA, 14 nt, Human
ugcccuucuuucua

SEQ ID NO: 1271811 - RNA, 21 nt, Human
ugcccuucuuucuacccugcu

SEQ ID NO: 1271812 - RNA, 15 nt, Human
ugcccuucacuguca

SEQ ID NO: 1271813 - RNA, 15 nt, Human
ugccucaccccuugc

SEQ ID NO: 1271814 - RNA, 16 nt, Human
ugcccuucuuucuacc

SEQ ID NO: 1271815 - RNA, 22 nt, Human
ugcccugccaccugucugucug

SEQ ID NO: 1271816 - RNA, 21 nt, Human
ugcccugccaccugucugucu

SEQ ID NO: 1271817 - RNA, 20 nt, Human
ugcccugccaccugucuguc

SEQ ID NO: 1271818 - RNA, 15 nt, Human
agcuccacccuggcc

SEQ ID NO: 1271819 - RNA, 17 nt, Human
agcuccacccuggccga

SEQ ID NO: 1271820 - RNA, 11 nt, Human
agcuccacucu

SEQ ID NO: 1271821 - RNA, 12 nt, Human
agcuccacucug

SEQ ID NO: 1271822 - RNA, 13 nt, Human
agcuccacucugc

SEQ ID NO: 1271823 - RNA, 14 nt, Human
agcuccacucugcu

SEQ ID NO: 1271824 - RNA, 16 nt, Human
agcuccacucugcuuc

SEQ ID NO: 1271825 - RNA, 17 nt, Human
agcuccacucugcuucu

SEQ ID NO: 1271826 - RNA, 18 nt, Human
agcuccacucugcuucuc

SEQ ID NO: 1271827 - RNA, 19 nt, Human
agcuccacucugcuucucu

SEQ ID NO: 1271828 - RNA, 22 nt, Human
agcuccacucugcuucucugac

SEQ ID NO: 1271829 - RNA, 23 nt, Human
agcuccacucugcuucucugacu

SEQ ID NO: 1271830 - RNA, 24 nt, Human
agcuccacucugcuucucugacuu

SEQ ID NO: 1271831 - RNA, 19 nt, Human
ugcccugccaccugucugu

SEQ ID NO: 1271832 - RNA, 17 nt, Human
ugcccugccaccugucu

SEQ ID NO: 1271833 - RNA, 16 nt, Human
ugcccugccaccuguc

SEQ ID NO: 1271834 - RNA, 15 nt, Human
ugcccugccaccugu

SEQ ID NO: 1271835 - RNA, 14 nt, Human
ugcccugccaccug

SEQ ID NO: 1271836 - RNA, 15 nt, Human
ugcccugaucccaga

SEQ ID NO: 1271837 - RNA, 22 nt, Human
ugcccugagccagggucuccag

SEQ ID NO: 1271838 - RNA, 19 nt, Human
ugcccucugggcucugagu

SEQ ID NO: 1271839 - RNA, 16 nt, Human
ugcccucugggcucug

SEQ ID NO: 1271840 - RNA, 17 nt, Human
ugcccucugggcucuga

SEQ ID NO: 1271841 - RNA, 18 nt, Human
ugcccucugggcucugag

SEQ ID NO: 1271842 - RNA, 20 nt, Human
ugcccuaaugcgcaggcugg

SEQ ID NO: 1271843 - RNA, 18 nt, Human
ugcccuaagcagaaagug

SEQ ID NO: 1271844 - RNA, 20 nt, Human
ugcccuaagcagaaagugcc

SEQ ID NO: 1271845 - RNA, 22 nt, Human
ugcccuaagcagaaagugccuu

SEQ ID NO: 1271846 - RNA, 17 nt, Human
ugccccggccccucccc

SEQ ID NO: 1271847 - RNA, 13 nt, Human
ugcccuaagcaga

SEQ ID NO: 1271848 - RNA, 15 nt, Human
ugcccuaagcagaaa

SEQ ID NO: 1271849 - RNA, 17 nt, Human
ugcccuaagcagaaagu

SEQ ID NO: 1271850 - RNA, 23 nt, Human
ugcccuaaugcgcaggcuggccc

SEQ ID NO: 1271851 - RNA, 22 nt, Human
ugcccuacagcacccugugguc

SEQ ID NO: 1271852 - RNA, 22 nt, Human
ugcccucccccuccucuccacc

SEQ ID NO: 1271853 - RNA, 14 nt, Human
ugcccuccugugcu

SEQ ID NO: 1271854 - RNA, 20 nt, Human
ugcccuccugugcucagccc

SEQ ID NO: 1271855 - RNA, 23 nt, Human
ugcccuccugugcucagcccuga

SEQ ID NO: 1271856 - RNA, 21 nt, Human
ugcccuccugugcucagcccu

SEQ ID NO: 1271857 - RNA, 16 nt, Human
ugcccucuccccucag

SEQ ID NO: 1271858 - RNA, 12 nt, Human
ugcccucuccca

SEQ ID NO: 1271859 - RNA, 13 nt, Human
ugcccucucccac

SEQ ID NO: 1271860 - RNA, 15 nt, Human
ugcccucucccaccc

SEQ ID NO: 1271861 - RNA, 16 nt, Human
ugcccucucccacccu

SEQ ID NO: 1271862 - RNA, 17 nt, Human
ugcccucucccacccuc

SEQ ID NO: 1271863 - RNA, 20 nt, Human
ugcccucugcauccucugga

SEQ ID NO: 1271864 - RNA, 12 nt, Human
ugcccucugggc

SEQ ID NO: 1271865 - RNA, 13 nt, Human
ugcccucugggcu

SEQ ID NO: 1271866 - RNA, 14 nt, Human
ugcccucugggcuc

SEQ ID NO: 1271867 - RNA, 15 nt, Human
ugcccucugggcucu

SEQ ID NO: 1271868 - RNA, 13 nt, Human
agcuccagccuga

SEQ ID NO: 1271869 - RNA, 14 nt, Human
agcuccagccugac

SEQ ID NO: 1271870 - RNA, 15 nt, Human
agcuccagccugaca

SEQ ID NO: 1271871 - RNA, 19 nt, Human
agcuccagcuccuuugggc

SEQ ID NO: 1271872 - RNA, 16 nt, Human
agcuccagccugacau

SEQ ID NO: 1271873 - RNA, 21 nt, Human
agcuccauuuaaacagauguc

SEQ ID NO: 1271874 - RNA, 16 nt, Human
agcucccacaagccuc

SEQ ID NO: 1271875 - RNA, 17 nt, Human
agcucccacaagccucu

SEQ ID NO: 1271876 - RNA, 18 nt, Human
agcuccauuuaaacagau

SEQ ID NO: 1271877 - RNA, 15 nt, Human
agcuccauuuaaaca

SEQ ID NO: 1271878 - RNA, 14 nt, Human
agcuccauuuaaac

SEQ ID NO: 1271879 - RNA, 21 nt, Human
agcuccaucuccacuccagau

SEQ ID NO: 1271880 - RNA, 18 nt, Human
agcucccacaagccucug

SEQ ID NO: 1271881 - RNA, 20 nt, Human
agcucccacaagccucugcc

SEQ ID NO: 1271882 - RNA, 16 nt, Human
agcucccacaagccug

SEQ ID NO: 1271883 - RNA, 17 nt, Human
agcucccacaagccuga

SEQ ID NO: 1271884 - RNA, 19 nt, Human
agcucccacaagccugagg

SEQ ID NO: 1271885 - RNA, 11 nt, Human
agcucccaccu

SEQ ID NO: 1271886 - RNA, 14 nt, Human
agcucccaccuccc

SEQ ID NO: 1271887 - RNA, 19 nt, Human
agcucccaccuccccuugg

SEQ ID NO: 1271888 - RNA, 21 nt, Human
agcucccaccuccccuugggc

SEQ ID NO: 1271889 - RNA, 21 nt, Human
agcuccuugagggcaagagcc

SEQ ID NO: 1271890 - RNA, 22 nt, Human
agcuccuugagggcaagagcca

SEQ ID NO: 1271891 - RNA, 19 nt, Human
agcucccccagcaaagccc

SEQ ID NO: 1271892 - RNA, 23 nt, Human
agcucccccagcaaagcccccag

SEQ ID NO: 1271893 - RNA, 15 nt, Human
agcucccccucccuc

SEQ ID NO: 1271894 - RNA, 23 nt, Human
agcucugcccauccugccccuga

SEQ ID NO: 1271895 - RNA, 18 nt, Human
agcucuggacagccccac

SEQ ID NO: 1271896 - RNA, 21 nt, Human
agcucuggacagccccacccu

SEQ ID NO: 1271897 - RNA, 21 nt, Human
agcucugcagagcaggaaaca

SEQ ID NO: 1271898 - RNA, 12 nt, Human
agcucugagcug

SEQ ID NO: 1271899 - RNA, 13 nt, Human
agcucugagcugu

SEQ ID NO: 1271900 - RNA, 14 nt, Human
agcucugagcuguc

SEQ ID NO: 1271901 - RNA, 15 nt, Human
agcucugagcuguca

SEQ ID NO: 1271902 - RNA, 16 nt, Human
agcucugagcugucaa

SEQ ID NO: 1271903 - RNA, 12 nt, Human
agcucugaggga

SEQ ID NO: 1271904 - RNA, 15 nt, Human
agcucugagggaaag

SEQ ID NO: 1271905 - RNA, 17 nt, Human
agcucuaucaccaagga

SEQ ID NO: 1271906 - RNA, 23 nt, Human
agcucugagaggcccuggaucag

SEQ ID NO: 1271907 - RNA, 10 nt, Human
agcucugagc

SEQ ID NO: 1271908 - RNA, 21 nt, Human
agcucuaauguuugcauauaa

SEQ ID NO: 1271909 - RNA, 17 nt, Human
agcucuacugccucaac

SEQ ID NO: 1271910 - RNA, 13 nt, Human
agcucuagaaucu

SEQ ID NO: 1271911 - RNA, 14 nt, Human
agcucuagaaucug

SEQ ID NO: 1271912 - RNA, 15 nt, Human
agcucuagaaucugc

SEQ ID NO: 1271913 - RNA, 22 nt, Human
agcucuaauguuugcauauaag

SEQ ID NO: 1271914 - RNA, 20 nt, Human
agcucuaauguuugcauaua

SEQ ID NO: 1271915 - RNA, 18 nt, Human
agcucuaauguuugcaua

SEQ ID NO: 1271916 - RNA, 17 nt, Human
agcucuaauguuugcau

SEQ ID NO: 1271917 - RNA, 14 nt, Human
agcucuaauguuug

SEQ ID NO: 1271918 - RNA, 14 nt, Human
agcucuaaaaucug

SEQ ID NO: 1271919 - RNA, 17 nt, Human
agcucuaaaaucugcuu

SEQ ID NO: 1271920 - RNA, 12 nt, Human
agcucuggaggg

SEQ ID NO: 1271921 - RNA, 16 nt, Human
agcucuggaggggagg

SEQ ID NO: 1271922 - RNA, 17 nt, Human
agcucuggaggggaggg

SEQ ID NO: 1271923 - RNA, 18 nt, Human
agcucuggaggggagggg

SEQ ID NO: 1271924 - RNA, 19 nt, Human
agcucuggaggggaggggg

SEQ ID NO: 1271925 - RNA, 20 nt, Human
agcucuggaggggaggggga

SEQ ID NO: 1271926 - RNA, 15 nt, Human
agcucuguucuuccu

SEQ ID NO: 1271927 - RNA, 17 nt, Human
agcucuguucuuccuca

SEQ ID NO: 1271928 - RNA, 18 nt, Human
agcucuguucuuccucag

SEQ ID NO: 1271929 - RNA, 19 nt, Human
agcucuguucuuccucagc

SEQ ID NO: 1271930 - RNA, 20 nt, Human
agcucuguucuuccucagcc

SEQ ID NO: 1271931 - RNA, 21 nt, Human
agcucuguucuuccucagcca

SEQ ID NO: 1271932 - RNA, 22 nt, Human
agcucuguucuuccucagccag

SEQ ID NO: 1271933 - RNA, 23 nt, Human
agcucuguucuuccucagccagc

SEQ ID NO: 1271934 - RNA, 16 nt, Human
agcucuuaacuacagu

SEQ ID NO: 1271935 - RNA, 13 nt, Human
agcucuucauguu

SEQ ID NO: 1271936 - RNA, 16 nt, Human
agcucuucauguuuca

SEQ ID NO: 1271937 - RNA, 16 nt, Human
ugcauuuauauguacc

SEQ ID NO: 1271938 - RNA, 19 nt, Human
ugcauuuaugagcucuuca

SEQ ID NO: 1271939 - RNA, 14 nt, Human
ugcauuuauaugua

SEQ ID NO: 1271940 - RNA, 13 nt, Human
ugcauuuauaugu

SEQ ID NO: 1271941 - RNA, 16 nt, Human
ugcauuuaaauacagu

SEQ ID NO: 1271942 - RNA, 22 nt, Human
ugcauuuaaauacagucuucca

SEQ ID NO: 1271943 - RNA, 24 nt, Human
ugcauuuaaauacagucuuccauu

SEQ ID NO: 1271944 - RNA, 13 nt, Human
ugcauuuccugac

SEQ ID NO: 1271945 - RNA, 14 nt, Human
ugcauucugccucu

SEQ ID NO: 1271946 - RNA, 15 nt, Human
ugcauucugccucuc

SEQ ID NO: 1271947 - RNA, 19 nt, Human
ugcauucugccucucuagg

SEQ ID NO: 1271948 - RNA, 20 nt, Human
ugcauucugccucucuagga

SEQ ID NO: 1271949 - RNA, 23 nt, Human
ugcauuauuugagaagcugcuca

SEQ ID NO: 1271950 - RNA, 17 nt, Human
ugcauuauuuuccagau

SEQ ID NO: 1271951 - RNA, 12 nt, Human
ugcauucuagua

SEQ ID NO: 1271952 - RNA, 14 nt, Human
agcgcaguuuuuuu

SEQ ID NO: 1271953 - RNA, 23 nt, Human
agcgcaguuuuuuuuuucuuguc

SEQ ID NO: 1271954 - RNA, 14 nt, Human
agcgcacucuucau

SEQ ID NO: 1271955 - RNA, 21 nt, Human
agcgcugucaggauugcgaga

SEQ ID NO: 1271956 - RNA, 16 nt, Human
agcgcugucaggauug

SEQ ID NO: 1271957 - RNA, 16 nt, Human
ugcauuauuugagaag

SEQ ID NO: 1271958 - RNA, 15 nt, Human
ugcauuauuugagaa

SEQ ID NO: 1271959 - RNA, 17 nt, Human
agcggaacaaggaguca

SEQ ID NO: 1271960 - RNA, 22 nt, Human
agcggaacaaggagucagacau

SEQ ID NO: 1271961 - RNA, 12 nt, Human
agccuucucugu

SEQ ID NO: 1271962 - RNA, 16 nt, Human
agccuuccccuacccc

SEQ ID NO: 1271963 - RNA, 20 nt, Human
agccuuccccuaccccuugu

SEQ ID NO: 1271964 - RNA, 21 nt, Human
agccuuccccuuauccucccu

SEQ ID NO: 1271965 - RNA, 23 nt, Human
agccuuccccuuauccucccugu

SEQ ID NO: 1271966 - RNA, 14 nt, Human
agccuucucuguuc

SEQ ID NO: 1271967 - RNA, 19 nt, Human
agccuugauugguguugcc

SEQ ID NO: 1271968 - RNA, 20 nt, Human
agccuugauugguguugcca

SEQ ID NO: 1271969 - RNA, 13 nt, Human
agccuugccagag

SEQ ID NO: 1271970 - RNA, 14 nt, Human
agccuugccagaga

SEQ ID NO: 1271971 - RNA, 15 nt, Human
agccuugccagagau

SEQ ID NO: 1271972 - RNA, 17 nt, Human
agccuugccagagaucc

SEQ ID NO: 1271973 - RNA, 19 nt, Human
agccuugccagagauccaa

SEQ ID NO: 1271974 - RNA, 13 nt, Human
ugccacugccucu

SEQ ID NO: 1271975 - RNA, 17 nt, Human
ugccacugccucuuccu

SEQ ID NO: 1271976 - RNA, 20 nt, Human
ugcauuuaugagcucuucau

SEQ ID NO: 1271977 - RNA, 18 nt, Human
ugccacugccucuuccuc

SEQ ID NO: 1271978 - RNA, 19 nt, Human
ugccacugccucuuccucc

SEQ ID NO: 1271979 - RNA, 20 nt, Human
ugccacugccucuuccuccc

SEQ ID NO: 1271980 - RNA, 14 nt, Human
ugccagagauccaa

SEQ ID NO: 1271981 - RNA, 11 nt, Human
ugccagagccu

SEQ ID NO: 1271982 - RNA, 12 nt, Human
ugccagagccug

SEQ ID NO: 1271983 - RNA, 13 nt, Human
ugccagagccugg

SEQ ID NO: 1271984 - RNA, 14 nt, Human
ugccagagccuggg

SEQ ID NO: 1271985 - RNA, 15 nt, Human
ugccagagccugggg

SEQ ID NO: 1271986 - RNA, 16 nt, Human
ugccagagccuggggc

SEQ ID NO: 1271987 - RNA, 17 nt, Human
ugccagagccuggggcu

SEQ ID NO: 1271988 - RNA, 18 nt, Human
ugccagagccuggggcuc

SEQ ID NO: 1271989 - RNA, 19 nt, Human
ugccagagccuggggcucu

SEQ ID NO: 1271990 - RNA, 20 nt, Human
ugccagagccuggggcucua

SEQ ID NO: 1271991 - RNA, 22 nt, Human
ugccagaggcugaugucaagca

SEQ ID NO: 1271992 - RNA, 21 nt, Human
ugccagccaagcucugcaguc

SEQ ID NO: 1271993 - RNA, 23 nt, Human
ugccagcucuguaucaggaccca

SEQ ID NO: 1271994 - RNA, 13 nt, Human
ugccagccaagcu

SEQ ID NO: 1271995 - RNA, 15 nt, Human
ugccagcugcacuga

SEQ ID NO: 1271996 - RNA, 19 nt, Human
ugccaggaacccuuaaaca

SEQ ID NO: 1271997 - RNA, 13 nt, Human
ugccaguccuguc

SEQ ID NO: 1271998 - RNA, 15 nt, Human
ugccaguccuguccu

SEQ ID NO: 1271999 - RNA, 14 nt, Human
ugccaguccugucc

SEQ ID NO: 1272000 - RNA, 16 nt, Human
ugccagugacagacag

SEQ ID NO: 1272001 - RNA, 17 nt, Human
ugccagugacagacagg

SEQ ID NO: 1272002 - RNA, 19 nt, Human
ugccagugacagacaggcu

SEQ ID NO: 1272003 - RNA, 20 nt, Human
ugccagugacagacaggcuc

SEQ ID NO: 1272004 - RNA, 22 nt, Human
ugccagugacagacaggcucuu

SEQ ID NO: 1272005 - RNA, 15 nt, Human
agcguccuccucugu

SEQ ID NO: 1272006 - RNA, 16 nt, Human
agcguccuccucugug

SEQ ID NO: 1272007 - RNA, 17 nt, Human
agcguccuccucuguga

SEQ ID NO: 1272008 - RNA, 20 nt, Human
agcggcuugccugccugcuc

SEQ ID NO: 1272009 - RNA, 15 nt, Human
agcuccaagaauuuc

SEQ ID NO: 1272010 - RNA, 22 nt, Human
agcuccaaccugcaaagaucug

SEQ ID NO: 1272011 - RNA, 18 nt, Human
agcuccaagaauuucuag

SEQ ID NO: 1272012 - RNA, 15 nt, Human
agcuccaagccccau

SEQ ID NO: 1272013 - RNA, 20 nt, Human
ugccauuguagcgucuuucu

SEQ ID NO: 1272014 - RNA, 15 nt, Human
ugccauuuguacuga

SEQ ID NO: 1272015 - RNA, 18 nt, Human
agcucaggaugagggaaa

SEQ ID NO: 1272016 - RNA, 22 nt, Human
agcucaggaugagggaaaagaa

SEQ ID NO: 1272017 - RNA, 17 nt, Human
agcuaucguaaaauuaa

SEQ ID NO: 1272018 - RNA, 18 nt, Human
agcuauguuauauugaaa

SEQ ID NO: 1272019 - RNA, 22 nt, Human
agcuauguuauauugaaaaaau

SEQ ID NO: 1272020 - RNA, 20 nt, Human
agcuauguuauauugaaaaa

SEQ ID NO: 1272021 - RNA, 20 nt, Human
agcuaugucccaggaaucag

SEQ ID NO: 1272022 - RNA, 19 nt, Human
agcuagucuuuugcuuuug

SEQ ID NO: 1272023 - RNA, 23 nt, Human
agcuagucuuuugcuuuugccca

SEQ ID NO: 1272024 - RNA, 17 nt, Human
agcuagugacccacaug

SEQ ID NO: 1272025 - RNA, 18 nt, Human
agcuagugacccacaugc

SEQ ID NO: 1272026 - RNA, 21 nt, Human
agcuagugacccacaugccau

SEQ ID NO: 1272027 - RNA, 20 nt, Human
agcuagugacccacaugcca

SEQ ID NO: 1272028 - RNA, 20 nt, Human
agcuaucauugcuuccuccu

SEQ ID NO: 1272029 - RNA, 18 nt, Human
agcuauccggacagagca

SEQ ID NO: 1272030 - RNA, 16 nt, Human
agcuacagagaaacca

SEQ ID NO: 1272031 - RNA, 19 nt, Human
agcguccuccucugugacc

SEQ ID NO: 1272032 - RNA, 15 nt, Human
agcgucggucugugc

SEQ ID NO: 1272033 - RNA, 18 nt, Human
agcgucuuucuuuuuugg

SEQ ID NO: 1272034 - RNA, 16 nt, Human
agcgucggucugugcc

SEQ ID NO: 1272035 - RNA, 17 nt, Human
agcuacagagaaaccag

SEQ ID NO: 1272036 - RNA, 18 nt, Human
agcuacagagaaaccagc

SEQ ID NO: 1272037 - RNA, 19 nt, Human
agcuacagagaaaccagcu

SEQ ID NO: 1272038 - RNA, 20 nt, Human
agcuacagagaaaccagcuu

SEQ ID NO: 1272039 - RNA, 21 nt, Human
agcuacagagaaaccagcuuc

SEQ ID NO: 1272040 - RNA, 22 nt, Human
agcuacagagaaaccagcuucc

SEQ ID NO: 1272041 - RNA, 23 nt, Human
agcuacagagaaaccagcuuccu

SEQ ID NO: 1272042 - RNA, 16 nt, Human
agcuagucuuuugcuu

SEQ ID NO: 1272043 - RNA, 15 nt, Human
agcuacauaauuuag

SEQ ID NO: 1272044 - RNA, 20 nt, Human
agcuacccuuuuucuccagc

SEQ ID NO: 1272045 - RNA, 16 nt, Human
ugccccauucaacauc

SEQ ID NO: 1272046 - RNA, 21 nt, Human
ugcccccaaccauuuccucag

SEQ ID NO: 1272047 - RNA, 16 nt, Human
ugcccccaaccauuuc

SEQ ID NO: 1272048 - RNA, 12 nt, Human
ugcccccacccc

SEQ ID NO: 1272049 - RNA, 21 nt, Human
ugcccccuaauccccuucucc

SEQ ID NO: 1272050 - RNA, 23 nt, Human
ugcccccuaauccccuucucccc

SEQ ID NO: 1272051 - RNA, 14 nt, Human
ugcccccucugccc

SEQ ID NO: 1272052 - RNA, 15 nt, Human
ugcccccucugcccu

SEQ ID NO: 1272053 - RNA, 16 nt, Human
ugcccccucugcccug

SEQ ID NO: 1272054 - RNA, 17 nt, Human
ugcccccucugcccugc

SEQ ID NO: 1272055 - RNA, 18 nt, Human
ugcccccucugcccugcg

SEQ ID NO: 1272056 - RNA, 12 nt, Human
ugcccccugcag

SEQ ID NO: 1272057 - RNA, 13 nt, Human
ugcccccugcaga

SEQ ID NO: 1272058 - RNA, 14 nt, Human
ugcccccugcagaa

SEQ ID NO: 1272059 - RNA, 22 nt, Human
ugcccccugcagaaccggagag

SEQ ID NO: 1272060 - RNA, 13 nt, Human
ugcccccugcagg

SEQ ID NO: 1272061 - RNA, 23 nt, Human
ugccauuuguacugaccccauca

SEQ ID NO: 1272062 - RNA, 23 nt, Human
ugcccaaagcagcacuuauaaau

SEQ ID NO: 1272063 - RNA, 20 nt, Human
ugcccaaauccuuagaucug

SEQ ID NO: 1272064 - RNA, 19 nt, Human
ugcccaacccuucccucac

SEQ ID NO: 1272065 - RNA, 11 nt, Human
ugcccaggaga

SEQ ID NO: 1272066 - RNA, 12 nt, Human
ugcccaggagaa

SEQ ID NO: 1272067 - RNA, 23 nt, Human
agccucagcucucaguugcagcc

SEQ ID NO: 1272068 - RNA, 13 nt, Human
agccucaggacug

SEQ ID NO: 1272069 - RNA, 16 nt, Human
agccucaggacuggga

SEQ ID NO: 1272070 - RNA, 17 nt, Human
agccucaggacugggag

SEQ ID NO: 1272071 - RNA, 18 nt, Human
agccucaggacugggagc

SEQ ID NO: 1272072 - RNA, 19 nt, Human
agccucaggacugggagcc

SEQ ID NO: 1272073 - RNA, 21 nt, Human
agccucaggacugggagcccc

SEQ ID NO: 1272074 - RNA, 23 nt, Human
agccucaggacugggagccccca

SEQ ID NO: 1272075 - RNA, 23 nt, Human
agccucaggggucugagcuccag

SEQ ID NO: 1272076 - RNA, 20 nt, Human
agccucaggggucugagcuc

SEQ ID NO: 1272077 - RNA, 23 nt, Human
agccucacuuuuaaugaacaaau

SEQ ID NO: 1272078 - RNA, 22 nt, Human
agccucacuuuuaaugaacaaa

SEQ ID NO: 1272079 - RNA, 20 nt, Human
agccucagagacaucagccc

SEQ ID NO: 1272080 - RNA, 23 nt, Human
agccucagagacaucagcccuug

SEQ ID NO: 1272081 - RNA, 14 nt, Human
agccucagauuccu

SEQ ID NO: 1272082 - RNA, 16 nt, Human
agccucagauuccuuc

SEQ ID NO: 1272083 - RNA, 17 nt, Human
agccucagauuccuucc

SEQ ID NO: 1272084 - RNA, 23 nt, Human
agccucagauuccuucccaugga

SEQ ID NO: 1272085 - RNA, 18 nt, Human
agccucagauuccuuccc

SEQ ID NO: 1272086 - RNA, 13 nt, Human
agccucagucucc

SEQ ID NO: 1272087 - RNA, 16 nt, Human
agccucagucucccuc

SEQ ID NO: 1272088 - RNA, 19 nt, Human
agccucagucucccucccu

SEQ ID NO: 1272089 - RNA, 20 nt, Human
agccucagucucccucccuu

SEQ ID NO: 1272090 - RNA, 22 nt, Human
agccucagucucccucccuugg

SEQ ID NO: 1272091 - RNA, 20 nt, Human
agccucagugacccuggcuc

SEQ ID NO: 1272092 - RNA, 21 nt, Human
agccucagugacccuggcucc

SEQ ID NO: 1272093 - RNA, 14 nt, Human
agcccuuuugucuc

SEQ ID NO: 1272094 - RNA, 15 nt, Human
agcccuuuugucucu

SEQ ID NO: 1272095 - RNA, 21 nt, Human
agccucaagguuuuagguucu

SEQ ID NO: 1272096 - RNA, 22 nt, Human
agccucaagguuuuagguucua

SEQ ID NO: 1272097 - RNA, 23 nt, Human
agccucaagguuuuagguucuaa

SEQ ID NO: 1272098 - RNA, 15 nt, Human
agccucaauuucuga

SEQ ID NO: 1272099 - RNA, 22 nt, Human
agccucugcagcggaaucuguu

SEQ ID NO: 1272100 - RNA, 18 nt, Human
agccucugcccaggcacu

SEQ ID NO: 1272101 - RNA, 22 nt, Human
agccucugcccaggcacugcua

SEQ ID NO: 1272102 - RNA, 21 nt, Human
agccuccaagcuccaucucca

SEQ ID NO: 1272103 - RNA, 14 nt, Human
agccuccaauuuuu

SEQ ID NO: 1272104 - RNA, 17 nt, Human
agccuccaugcugccuc

SEQ ID NO: 1272105 - RNA, 22 nt, Human
agccuccaccccacaacccaaa

SEQ ID NO: 1272106 - RNA, 22 nt, Human
agccucuggcauuagaauuauu

SEQ ID NO: 1272107 - RNA, 23 nt, Human
agccucuggcauuagaauuauuu

SEQ ID NO: 1272108 - RNA, 13 nt, Human
agccucugggggg

SEQ ID NO: 1272109 - RNA, 20 nt, Human
agccucugggggguggccag

SEQ ID NO: 1272110 - RNA, 21 nt, Human
agccucugggggguggccagg

SEQ ID NO: 1272111 - RNA, 22 nt, Human
agccucugggggguggccaggc

SEQ ID NO: 1272112 - RNA, 15 nt, Human
ugcagaagacaguau

SEQ ID NO: 1272113 - RNA, 14 nt, Human
ugcagaagacagua

SEQ ID NO: 1272114 - RNA, 22 nt, Human
ugcagaagacaguauggcagcu

SEQ ID NO: 1272115 - RNA, 16 nt, Human
ugcagaagaaggcauc

SEQ ID NO: 1272116 - RNA, 17 nt, Human
ugcagaagaaggcaucg

SEQ ID NO: 1272117 - RNA, 23 nt, Human
ugcagaccacgcccguccugccu

SEQ ID NO: 1272118 - RNA, 15 nt, Human
ugcagacccugcccu

SEQ ID NO: 1272119 - RNA, 19 nt, Human
ugcagacccugcccuuguu

SEQ ID NO: 1272120 - RNA, 14 nt, Human
ugcagacucacugu

SEQ ID NO: 1272121 - RNA, 14 nt, Human
agcccuguccuggu

SEQ ID NO: 1272122 - RNA, 16 nt, Human
agcccuguccuggugg

SEQ ID NO: 1272123 - RNA, 17 nt, Human
agcccuguccugguggu

SEQ ID NO: 1272124 - RNA, 23 nt, Human
agcccuguccuggugguauuuuc

SEQ ID NO: 1272125 - RNA, 21 nt, Human
agcccuguccuggugguauuu

SEQ ID NO: 1272126 - RNA, 14 nt, Human
agcccuuggggguc

SEQ ID NO: 1272127 - RNA, 21 nt, Human
agcccuuggggguccuccucc

SEQ ID NO: 1272128 - RNA, 22 nt, Human
agcccuuggggguccuccucca

SEQ ID NO: 1272129 - RNA, 23 nt, Human
agcccuuggggguccuccuccag

SEQ ID NO: 1272130 - RNA, 21 nt, Human
agcccuugugaaucaaggguc

SEQ ID NO: 1272131 - RNA, 15 nt, Human
agcccuuuccaagcu

SEQ ID NO: 1272132 - RNA, 23 nt, Human
agcccauucauuccauucuggaa

SEQ ID NO: 1272133 - RNA, 22 nt, Human
agcccauucauuccauucugga

SEQ ID NO: 1272134 - RNA, 17 nt, Human
agcccauucauuccauu

SEQ ID NO: 1272135 - RNA, 14 nt, Human
agcccauucauucc

SEQ ID NO: 1272136 - RNA, 16 nt, Human
agcccagggaggccga

SEQ ID NO: 1272137 - RNA, 14 nt, Human
agcccagggcuccu

SEQ ID NO: 1272138 - RNA, 15 nt, Human
agcccagggcuccug

SEQ ID NO: 1272139 - RNA, 16 nt, Human
agcccagggcuccugc

SEQ ID NO: 1272140 - RNA, 17 nt, Human
agcccagggcuccugca

SEQ ID NO: 1272141 - RNA, 23 nt, Human
agcccagggcuccugcacuuacu

SEQ ID NO: 1272142 - RNA, 19 nt, Human
agcccaggauacuggcaca

SEQ ID NO: 1272143 - RNA, 23 nt, Human
agcccaggauacuggcacagagg

SEQ ID NO: 1272144 - RNA, 21 nt, Human
agcccaggauacuggcacaga

SEQ ID NO: 1272145 - RNA, 13 nt, Human
agcccaggccagg

SEQ ID NO: 1272146 - RNA, 14 nt, Human
agcccaggccagga

SEQ ID NO: 1272147 - RNA, 15 nt, Human
agcccaggccaggac

SEQ ID NO: 1272148 - RNA, 16 nt, Human
agcccaggccaggacu

SEQ ID NO: 1272149 - RNA, 22 nt, Human
agcccaggccaggacucugcag

SEQ ID NO: 1272150 - RNA, 19 nt, Human
agcccaggccaggacucug

SEQ ID NO: 1272151 - RNA, 20 nt, Human
agcccaggccaggacucugc

SEQ ID NO: 1272152 - RNA, 21 nt, Human
agcccaggccaggacucugca

SEQ ID NO: 1272153 - RNA, 20 nt, Human
agcccaggcucggccugccc

SEQ ID NO: 1272154 - RNA, 16 nt, Human
agcccauuguggccua

SEQ ID NO: 1272155 - RNA, 22 nt, Human
agcccauuguggccuaagaggc

SEQ ID NO: 1272156 - RNA, 19 nt, Human
agcccauuguggccuaaga

SEQ ID NO: 1272157 - RNA, 15 nt, Human
ugauuuguacugaaa

SEQ ID NO: 1272158 - RNA, 18 nt, Human
ugauuuguacugaaaaau

SEQ ID NO: 1272159 - RNA, 17 nt, Human
ugauuuguaacccacug

SEQ ID NO: 1272160 - RNA, 22 nt, Human
ugcaaaccugaccccugcucag

SEQ ID NO: 1272161 - RNA, 23 nt, Human
ugcaaaccugaccccugcucagu

SEQ ID NO: 1272162 - RNA, 20 nt, Human
ugcaaacucuuuggucguuu

SEQ ID NO: 1272163 - RNA, 11 nt, Human
ugcaaacuggg

SEQ ID NO: 1272164 - RNA, 13 nt, Human
ugcaaacugggaa

SEQ ID NO: 1272165 - RNA, 23 nt, Human
ugcaaacugggaaccccuuuccc

SEQ ID NO: 1272166 - RNA, 22 nt, Human
ugcaaacugggaaccccuuucc

SEQ ID NO: 1272167 - RNA, 23 nt, Human
ugcaagucaguccaggaugcuaa

SEQ ID NO: 1272168 - RNA, 23 nt, Human
ugcaauacaaguuucauccagaa

SEQ ID NO: 1272169 - RNA, 18 nt, Human
ugcaauacaaguuucauc

SEQ ID NO: 1272170 - RNA, 14 nt, Human
ugcaauacauacca

SEQ ID NO: 1272171 - RNA, 16 nt, Human
ugcaauagaaggugau

SEQ ID NO: 1272172 - RNA, 15 nt, Human
ugcaauauacuggaa

SEQ ID NO: 1272173 - RNA, 20 nt, Human
ugcaauauacuggaaagcuu

SEQ ID NO: 1272174 - RNA, 16 nt, Human
ugcaauauacuggaaa

SEQ ID NO: 1272175 - RNA, 12 nt, Human
agcccaggagcu

SEQ ID NO: 1272176 - RNA, 14 nt, Human
agcccaggagcucc

SEQ ID NO: 1272177 - RNA, 18 nt, Human
agcccaggagcuccccuc

SEQ ID NO: 1272178 - RNA, 19 nt, Human
agcccaggagcuccccucc

SEQ ID NO: 1272179 - RNA, 23 nt, Human
agcccaggagcuccccuccccaa

SEQ ID NO: 1272180 - RNA, 17 nt, Human
ugcaauacaaguuucau

SEQ ID NO: 1272181 - RNA, 16 nt, Human
ugcaauacaaguuuca

SEQ ID NO: 1272182 - RNA, 21 nt, Human
ugcaauaaaucugacccagug

SEQ ID NO: 1272183 - RNA, 23 nt, Human
ugcaauaaaucugacccagugcc

SEQ ID NO: 1272184 - RNA, 20 nt, Human
ugcaauaaaucugacccagu

SEQ ID NO: 1272185 - RNA, 17 nt, Human
agcccugggaggcucug

SEQ ID NO: 1272186 - RNA, 20 nt, Human
agcccugggaccgcuacacc

SEQ ID NO: 1272187 - RNA, 11 nt, Human
agcccugggac

SEQ ID NO: 1272188 - RNA, 13 nt, Human
agcccugggaccg

SEQ ID NO: 1272189 - RNA, 14 nt, Human
agcccugggaccgc

SEQ ID NO: 1272190 - RNA, 15 nt, Human
agcccugggaccgcu

SEQ ID NO: 1272191 - RNA, 19 nt, Human
agcccugcugcugccugcc

SEQ ID NO: 1272192 - RNA, 18 nt, Human
agcccugcugcugccugc

SEQ ID NO: 1272193 - RNA, 22 nt, Human
agcccugccuggaggaccugag

SEQ ID NO: 1272194 - RNA, 20 nt, Human
agcccugcugcugccugccu

SEQ ID NO: 1272195 - RNA, 17 nt, Human
agcccugcuuugggcug

SEQ ID NO: 1272196 - RNA, 15 nt, Human
agcccggcuccuggu

SEQ ID NO: 1272197 - RNA, 16 nt, Human
agcccggcuccugguc

SEQ ID NO: 1272198 - RNA, 20 nt, Human
agcccugccuggaggaccug

SEQ ID NO: 1272199 - RNA, 21 nt, Human
agcccugccuggaggaccuga

SEQ ID NO: 1272200 - RNA, 23 nt, Human
agcccugccuggaggaccugagc

SEQ ID NO: 1272201 - RNA, 12 nt, Human
agcccggcuccu

SEQ ID NO: 1272202 - RNA, 13 nt, Human
agcccggcuccug

SEQ ID NO: 1272203 - RNA, 14 nt, Human
agcccggcuccugg

SEQ ID NO: 1272204 - RNA, 19 nt, Human
agcccugcuuugggcugcc

SEQ ID NO: 1272205 - RNA, 20 nt, Human
agcccugcuuugggcugccc

SEQ ID NO: 1272206 - RNA, 22 nt, Human
agcccuggcaugucaacagcgu

SEQ ID NO: 1272207 - RNA, 19 nt, Human
agcccccuaagagagcacc

SEQ ID NO: 1272208 - RNA, 11 nt, Human
agcccccucac

SEQ ID NO: 1272209 - RNA, 14 nt, Human
agcccccucacagu

SEQ ID NO: 1272210 - RNA, 22 nt, Human
agcccccucacaguauugcuca

SEQ ID NO: 1272211 - RNA, 23 nt, Human
agcccccucacaguauugcucac

SEQ ID NO: 1272212 - RNA, 13 nt, Human
agcccccuccugg

SEQ ID NO: 1272213 - RNA, 20 nt, Human
agcccccuccuggugccacc

SEQ ID NO: 1272214 - RNA, 21 nt, Human
agcccccuccuggugccaccu

SEQ ID NO: 1272215 - RNA, 12 nt, Human
agcccccugacc

SEQ ID NO: 1272216 - RNA, 19 nt, Human
agcccccugaccacucaga

SEQ ID NO: 1272217 - RNA, 20 nt, Human
agcccccugaccacucagag

SEQ ID NO: 1272218 - RNA, 21 nt, Human
agcccccugaccacucagaga

SEQ ID NO: 1272219 - RNA, 21 nt, Human
agccccucuggucgcuccugc

SEQ ID NO: 1272220 - RNA, 22 nt, Human
agccccucuggucgcuccugcc

SEQ ID NO: 1272221 - RNA, 22 nt, Human
agcccccugaccacucagagac

SEQ ID NO: 1272222 - RNA, 15 nt, Human
agccccucuuggaga

SEQ ID NO: 1272223 - RNA, 17 nt, Human
agccccucuuggagaag

SEQ ID NO: 1272224 - RNA, 18 nt, Human
agccccucuuggagaagu

SEQ ID NO: 1272225 - RNA, 20 nt, Human
agccccucuuggagaagucu

SEQ ID NO: 1272226 - RNA, 23 nt, Human
agccccucuuggagaagucucag

SEQ ID NO: 1272227 - RNA, 16 nt, Human
agccccugaaagccau

SEQ ID NO: 1272228 - RNA, 14 nt, Human
agccccugccauug

SEQ ID NO: 1272229 - RNA, 14 nt, Human
agccccugaaagcc

SEQ ID NO: 1272230 - RNA, 14 nt, Human
agccccuuucccuu

SEQ ID NO: 1272231 - RNA, 21 nt, Human
agccccuuucccuuguagcuc

SEQ ID NO: 1272232 - RNA, 23 nt, Human
agccccuuucccuuguagcuccu

SEQ ID NO: 1272233 - RNA, 14 nt, Human
agcccgaggaggug

SEQ ID NO: 1272234 - RNA, 15 nt, Human
agcccgcacaccugc

SEQ ID NO: 1272235 - RNA, 16 nt, Human
agcccacuguacuugc

SEQ ID NO: 1272236 - RNA, 20 nt, Human
agccauggagauucucauaa

SEQ ID NO: 1272237 - RNA, 14 nt, Human
agcccacuguccug

SEQ ID NO: 1272238 - RNA, 14 nt, Human
agcccacuguacuu

SEQ ID NO: 1272239 - RNA, 18 nt, Human
agccaugcuggaaaauaa

SEQ ID NO: 1272240 - RNA, 19 nt, Human
agccauggagauucucaua

SEQ ID NO: 1272241 - RNA, 22 nt, Human
agccauggagauucucauaacu

SEQ ID NO: 1272242 - RNA, 18 nt, Human
agccaucccgucuucucc

SEQ ID NO: 1272243 - RNA, 21 nt, Human
agccaugagaugauacaucca

SEQ ID NO: 1272244 - RNA, 23 nt, Human
agccaugaguuccagaaaguaaa

SEQ ID NO: 1272245 - RNA, 16 nt, Human
agccaugcgcccccuc

SEQ ID NO: 1272246 - RNA, 23 nt, Human
agccaugcgcccccuccgcccug

SEQ ID NO: 1272247 - RNA, 15 nt, Human
agcccacuguccugg

SEQ ID NO: 1272248 - RNA, 17 nt, Human
agcccacuguccugggc

SEQ ID NO: 1272249 - RNA, 18 nt, Human
agcccacuguccugggcc

SEQ ID NO: 1272250 - RNA, 19 nt, Human
agcccacuguccugggccu

SEQ ID NO: 1272251 - RNA, 20 nt, Human
agcccacuguccugggccug

SEQ ID NO: 1272252 - RNA, 22 nt, Human
agcccacuguccugggccugca

SEQ ID NO: 1272253 - RNA, 23 nt, Human
agcccacuguccugggccugcag

SEQ ID NO: 1272254 - RNA, 15 nt, Human
agcccagagggucug

SEQ ID NO: 1272255 - RNA, 17 nt, Human
agcccagagggucuggg

SEQ ID NO: 1272256 - RNA, 20 nt, Human
agcccagagggucugggggc

SEQ ID NO: 1272257 - RNA, 21 nt, Human
agcccagagggucugggggca

SEQ ID NO: 1272258 - RNA, 15 nt, Human
agcccagcacugcuu

SEQ ID NO: 1272259 - RNA, 12 nt, Human
agccaggucccu

SEQ ID NO: 1272260 - RNA, 18 nt, Human
agccagguuccacagagg

SEQ ID NO: 1272261 - RNA, 13 nt, Human
agccagggcucaa

SEQ ID NO: 1272262 - RNA, 15 nt, Human
agccaggucccucuc

SEQ ID NO: 1272263 - RNA, 18 nt, Human
agccaucaaaaugcuuuu

SEQ ID NO: 1272264 - RNA, 17 nt, Human
agccaucaagagacuga

SEQ ID NO: 1272265 - RNA, 15 nt, Human
agccaucaccucaga

SEQ ID NO: 1272266 - RNA, 16 nt, Human
agccaucaccucagau

SEQ ID NO: 1272267 - RNA, 18 nt, Human
agccaucaccucagaugg

SEQ ID NO: 1272268 - RNA, 19 nt, Human
agccaucaccucagauggc

SEQ ID NO: 1272269 - RNA, 21 nt, Human
agccaucaccucagauggcag

SEQ ID NO: 1272270 - RNA, 22 nt, Human
agccaucaccucagauggcagc

SEQ ID NO: 1272271 - RNA, 14 nt, Human
agccaucaccuuag

SEQ ID NO: 1272272 - RNA, 18 nt, Human
agccaucaccuuagacca

SEQ ID NO: 1272273 - RNA, 16 nt, Human
agccagcguccuccuc

SEQ ID NO: 1272274 - RNA, 17 nt, Human
agccagcguccuccucu

SEQ ID NO: 1272275 - RNA, 18 nt, Human
agccagcguccuccucug

SEQ ID NO: 1272276 - RNA, 19 nt, Human
agccagcguccuccucugu

SEQ ID NO: 1272277 - RNA, 21 nt, Human
agccagcguccuccucuguga

SEQ ID NO: 1272278 - RNA, 23 nt, Human
agccagcguccuccucugugacc

SEQ ID NO: 1272279 - RNA, 20 nt, Human
agccagcgucggucugugcc

SEQ ID NO: 1272280 - RNA, 23 nt, Human
agccagcuaagggguggggcugc

SEQ ID NO: 1272281 - RNA, 22 nt, Human
agccagcgucggucugugcccc

SEQ ID NO: 1272282 - RNA, 15 nt, Human
agccagggagagccc

SEQ ID NO: 1272283 - RNA, 16 nt, Human
agccagggagagccca

SEQ ID NO: 1272284 - RNA, 17 nt, Human
agccagggagagcccag

SEQ ID NO: 1272285 - RNA, 18 nt, Human
agccagggagagcccagg

SEQ ID NO: 1272286 - RNA, 19 nt, Human
agccagggagagcccagga

SEQ ID NO: 1272287 - RNA, 20 nt, Human
agccagggagagcccaggag

SEQ ID NO: 1272288 - RNA, 21 nt, Human
agccagggagagcccaggagc

SEQ ID NO: 1272289 - RNA, 22 nt, Human
agccagggagagcccaggagcu

SEQ ID NO: 1272290 - RNA, 13 nt, Human
ugauuuccuugaa

SEQ ID NO: 1272291 - RNA, 14 nt, Human
ugauuuccuugaau

SEQ ID NO: 1272292 - RNA, 15 nt, Human
ugauuuccuugaaug

SEQ ID NO: 1272293 - RNA, 16 nt, Human
ugauuuccuugaaugu

SEQ ID NO: 1272294 - RNA, 17 nt, Human
ugauuuccuugaaugug

SEQ ID NO: 1272295 - RNA, 19 nt, Human
ugauuuccuugaauguggc

SEQ ID NO: 1272296 - RNA, 23 nt, Human
ugauuuccuugaauguggcuuga

SEQ ID NO: 1272297 - RNA, 11 nt, Human
ugauuucuagg

SEQ ID NO: 1272298 - RNA, 17 nt, Human
ugauuugaagaacaugu

SEQ ID NO: 1272299 - RNA, 19 nt, Human
ugauuugaagaacauguga

SEQ ID NO: 1272300 - RNA, 20 nt, Human
ugauuuguaacccacugaga

SEQ ID NO: 1272301 - RNA, 13 nt, Human
ugauuucauucaa

SEQ ID NO: 1272302 - RNA, 15 nt, Human
ugauuucauuaauac

SEQ ID NO: 1272303 - RNA, 18 nt, Human
ugauuucauguacugcau

SEQ ID NO: 1272304 - RNA, 17 nt, Human
ugauuucauguacugca

SEQ ID NO: 1272305 - RNA, 16 nt, Human
ugauuucauguacugc

SEQ ID NO: 1272306 - RNA, 15 nt, Human
ugauuucauguacug

SEQ ID NO: 1272307 - RNA, 13 nt, Human
ugauuucauguac

SEQ ID NO: 1272308 - RNA, 21 nt, Human
ugauuucaguucuaggaaaau

SEQ ID NO: 1272309 - RNA, 19 nt, Human
ugauuucaguucuaggaaa

SEQ ID NO: 1272310 - RNA, 20 nt, Human
ugauuucaguucuaggaaaa

SEQ ID NO: 1272311 - RNA, 22 nt, Human
ugauuucaguagcacaaguuau

SEQ ID NO: 1272312 - RNA, 15 nt, Human
ugauuucaguucuag

SEQ ID NO: 1272313 - RNA, 18 nt, Human
ugauuucaguucuaggaa

SEQ ID NO: 1272314 - RNA, 17 nt, Human
ugauuucagcucacugc

SEQ ID NO: 1272315 - RNA, 21 nt, Human
ugauuuaggagaagccaggaa

SEQ ID NO: 1272316 - RNA, 22 nt, Human
ugauuuaggagaagccaggaau

SEQ ID NO: 1272317 - RNA, 16 nt, Human
ugauuuacgcucauug

SEQ ID NO: 1272318 - RNA, 16 nt, Human
ugauuuaggagaagcc

SEQ ID NO: 1272319 - RNA, 20 nt, Human
ugauuuaggagaagccagga

SEQ ID NO: 1272320 - RNA, 23 nt, Human
agcccagcuugaaaccuucacuu

SEQ ID NO: 1272321 - RNA, 21 nt, Human
agcccagcugggucaggcagg

SEQ ID NO: 1272322 - RNA, 21 nt, Human
agcccagcacugcuugaggaa

SEQ ID NO: 1272323 - RNA, 11 nt, Human
agcccagccag

SEQ ID NO: 1272324 - RNA, 12 nt, Human
agcccagccagc

SEQ ID NO: 1272325 - RNA, 19 nt, Human
agcccagcugggucaggca

SEQ ID NO: 1272326 - RNA, 20 nt, Human
agcccagcugggucaggcag

SEQ ID NO: 1272327 - RNA, 16 nt, Human
ugauucauaguaacuu

SEQ ID NO: 1272328 - RNA, 18 nt, Human
ugauucauaguaacuucu

SEQ ID NO: 1272329 - RNA, 16 nt, Human
ugauucucaugccuca

SEQ ID NO: 1272330 - RNA, 13 nt, Human
ugauucucaugcc

SEQ ID NO: 1272331 - RNA, 14 nt, Human
ugauucucaugccu

SEQ ID NO: 1272332 - RNA, 15 nt, Human
ugauucucaugccuc

SEQ ID NO: 1272333 - RNA, 19 nt, Human
ugauucauaguaacuucuu

SEQ ID NO: 1272334 - RNA, 19 nt, Human
ugauucaugccaauuagca

SEQ ID NO: 1272335 - RNA, 17 nt, Human
ugauucauuuuaacauc

SEQ ID NO: 1272336 - RNA, 17 nt, Human
ugauggagaaggaaggc

SEQ ID NO: 1272337 - RNA, 14 nt, Human
ugauggagugcugu

SEQ ID NO: 1272338 - RNA, 21 nt, Human
ugaugggaaguccggccccag

SEQ ID NO: 1272339 - RNA, 14 nt, Human
ugaugggauuuggu

SEQ ID NO: 1272340 - RNA, 16 nt, Human
ugaugggauucuggac

SEQ ID NO: 1272341 - RNA, 17 nt, Human
ugaugggauucuggaca

SEQ ID NO: 1272342 - RNA, 16 nt, Human
ugauggagugcuguuu

SEQ ID NO: 1272343 - RNA, 16 nt, Human
ugauggagaaggaagg

SEQ ID NO: 1272344 - RNA, 15 nt, Human
ugauggagaaggaag

SEQ ID NO: 1272345 - RNA, 14 nt, Human
ugauggagaaggaa

SEQ ID NO: 1272346 - RNA, 13 nt, Human
ugauggagaagga

SEQ ID NO: 1272347 - RNA, 16 nt, Human
ugauggcaacagaucu

SEQ ID NO: 1272348 - RNA, 12 nt, Human
ugauggagaagg

SEQ ID NO: 1272349 - RNA, 15 nt, Human
ugauggaacacagaa

SEQ ID NO: 1272350 - RNA, 11 nt, Human
ugaugaagaag

SEQ ID NO: 1272351 - RNA, 12 nt, Human
ugaugaagaagu

SEQ ID NO: 1272352 - RNA, 16 nt, Human
ugauccuggaggccca

SEQ ID NO: 1272353 - RNA, 17 nt, Human
ugauccuggaggcccag

SEQ ID NO: 1272354 - RNA, 18 nt, Human
ugauccuggaggcccagu

SEQ ID NO: 1272355 - RNA, 20 nt, Human
ugauccuggaggcccaguuc

SEQ ID NO: 1272356 - RNA, 18 nt, Human
ugaugaacucuuaaucaa

SEQ ID NO: 1272357 - RNA, 14 nt, Human
ugaugaccaaaguc

SEQ ID NO: 1272358 - RNA, 15 nt, Human
ugaugacccuuuuca

SEQ ID NO: 1272359 - RNA, 16 nt, Human
ugaugacccuuuucau

SEQ ID NO: 1272360 - RNA, 21 nt, Human
ugaugacuuaguacaaaguuu

SEQ ID NO: 1272361 - RNA, 23 nt, Human
ugaugacuuucuuuuuguagcug

SEQ ID NO: 1272362 - RNA, 18 nt, Human
agcaccugcccuaccugc

SEQ ID NO: 1272363 - RNA, 22 nt, Human
agcaccugcccuaccugcccca

SEQ ID NO: 1272364 - RNA, 14 nt, Human
ugauccuggaggcc

SEQ ID NO: 1272365 - RNA, 15 nt, Human
ugauccuggaggccc

SEQ ID NO: 1272366 - RNA, 23 nt, Human
ugauuaaguaaugauaacuggaa

SEQ ID NO: 1272367 - RNA, 17 nt, Human
ugauuaauggaaauguu

SEQ ID NO: 1272368 - RNA, 19 nt, Human
agccacuaaccuugccugg

SEQ ID NO: 1272369 - RNA, 20 nt, Human
agccacuaaccuugccuggu

SEQ ID NO: 1272370 - RNA, 22 nt, Human
agccacuaaccuugccugguac

SEQ ID NO: 1272371 - RNA, 12 nt, Human
agccacuccucu

SEQ ID NO: 1272372 - RNA, 18 nt, Human
ugauuaaguaaugauaac

SEQ ID NO: 1272373 - RNA, 17 nt, Human
ugauggugaugaaaugu

SEQ ID NO: 1272374 - RNA, 24 nt, Human
ugaugggauucuggacaggaugug

SEQ ID NO: 1272375 - RNA, 15 nt, Human
ugauggugaugaaau

SEQ ID NO: 1272376 - RNA, 16 nt, Human
ugauggugaugaaaug

SEQ ID NO: 1272377 - RNA, 13 nt, Human
agccacuccucug

SEQ ID NO: 1272378 - RNA, 14 nt, Human
agccagcaucggaa

SEQ ID NO: 1272379 - RNA, 12 nt, Human
agccagcaucug

SEQ ID NO: 1272380 - RNA, 17 nt, Human
agccagcaucugggccu

SEQ ID NO: 1272381 - RNA, 16 nt, Human
agccagcaucugggcc

SEQ ID NO: 1272382 - RNA, 13 nt, Human
agccagcccugcc

SEQ ID NO: 1272383 - RNA, 14 nt, Human
agccagcccugccu

SEQ ID NO: 1272384 - RNA, 15 nt, Human
agccagcccugccug

SEQ ID NO: 1272385 - RNA, 16 nt, Human
agccagcccugccugg

SEQ ID NO: 1272386 - RNA, 17 nt, Human
agccagcccugccugga

SEQ ID NO: 1272387 - RNA, 18 nt, Human
agccagcccugccuggag

SEQ ID NO: 1272388 - RNA, 19 nt, Human
agccagcccugccuggagg

SEQ ID NO: 1272389 - RNA, 20 nt, Human
agccagcccugccuggagga

SEQ ID NO: 1272390 - RNA, 21 nt, Human
agccagcccugccuggaggac

SEQ ID NO: 1272391 - RNA, 23 nt, Human
agccagcccugccuggaggaccu

SEQ ID NO: 1272392 - RNA, 24 nt, Human
agccagcccugccuggaggaccug

SEQ ID NO: 1272393 - RNA, 19 nt, Human
agccagccgagcaggaggc

SEQ ID NO: 1272394 - RNA, 21 nt, Human
agccagccgagcaggaggccu

SEQ ID NO: 1272395 - RNA, 16 nt, Human
agccagccggggcgag

SEQ ID NO: 1272396 - RNA, 19 nt, Human
agccagccggggcgagugg

SEQ ID NO: 1272397 - RNA, 10 nt, Human
agccagccuc

SEQ ID NO: 1272398 - RNA, 18 nt, Human
agccagccucgcccaucc

SEQ ID NO: 1272399 - RNA, 12 nt, Human
uggcugcaugcg

SEQ ID NO: 1272400 - RNA, 14 nt, Human
uggcugauaauuuu

SEQ ID NO: 1272401 - RNA, 19 nt, Human
uggcugauaauuuuaaauu

SEQ ID NO: 1272402 - RNA, 19 nt, Human
uggcugcauaaauguggua

SEQ ID NO: 1272403 - RNA, 15 nt, Human
uggcugagggcaguu

SEQ ID NO: 1272404 - RNA, 22 nt, Human
uggcugagggcaguucgcagcc

SEQ ID NO: 1272405 - RNA, 23 nt, Human
uggcugagggcaguucgcagcca

SEQ ID NO: 1272406 - RNA, 13 nt, Human
uggcugagggcag

SEQ ID NO: 1272407 - RNA, 17 nt, Human
uggcugaggccacccag

SEQ ID NO: 1272408 - RNA, 14 nt, Human
uggcugagggcagu

SEQ ID NO: 1272409 - RNA, 22 nt, Human
aggcugggaauggaggggcaga

SEQ ID NO: 1272410 - RNA, 19 nt, Human
aggcuggcuccagaugcag

SEQ ID NO: 1272411 - RNA, 23 nt, Human
uggcuagauuaaccuucucuguc

SEQ ID NO: 1272412 - RNA, 18 nt, Human
aggcugggaacucaucug

SEQ ID NO: 1272413 - RNA, 15 nt, Human
uggcuaguccuuguu

SEQ ID NO: 1272414 - RNA, 13 nt, Human
uggcuauguuuuu

SEQ ID NO: 1272415 - RNA, 17 nt, Human
uggcuauguuuuuaaug

SEQ ID NO: 1272416 - RNA, 15 nt, Human
uggcuauuuaaaacu

SEQ ID NO: 1272417 - RNA, 18 nt, Human
uggcuauguuuuuaaugu

SEQ ID NO: 1272418 - RNA, 12 nt, Human
uggcuauuuuau

SEQ ID NO: 1272419 - RNA, 20 nt, Human
ugggaaagccccugccccuc

SEQ ID NO: 1272420 - RNA, 22 nt, Human
ugggaaagccccugccccuccu

SEQ ID NO: 1272421 - RNA, 18 nt, Human
ugggaaccccuuucccac

SEQ ID NO: 1272422 - RNA, 15 nt, Human
uggcuucccgcucag

SEQ ID NO: 1272423 - RNA, 16 nt, Human
uggcuucccgcucagc

SEQ ID NO: 1272424 - RNA, 14 nt, Human
uggcuucccauccc

SEQ ID NO: 1272425 - RNA, 15 nt, Human
uggcuucccaucccc

SEQ ID NO: 1272426 - RNA, 18 nt, Human
uggcuucccauccccagc

SEQ ID NO: 1272427 - RNA, 19 nt, Human
uggcuucccauccccagcg

SEQ ID NO: 1272428 - RNA, 20 nt, Human
uggcuucccauccccagcga

SEQ ID NO: 1272429 - RNA, 18 nt, Human
uggcuucccgcucagccc

SEQ ID NO: 1272430 - RNA, 17 nt, Human
uggcuucccgcucagcc

SEQ ID NO: 1272431 - RNA, 21 nt, Human
uggcuucccauccccagcgau

SEQ ID NO: 1272432 - RNA, 13 nt, Human
ugggaacuagacu

SEQ ID NO: 1272433 - RNA, 20 nt, Human
ugggaagacuccuagcuguc

SEQ ID NO: 1272434 - RNA, 23 nt, Human
ugggaagacuccuagcuguccuu

SEQ ID NO: 1272435 - RNA, 22 nt, Human
ugggaagacuccuagcuguccu

SEQ ID NO: 1272436 - RNA, 19 nt, Human
ugggaagcccauccugacc

SEQ ID NO: 1272437 - RNA, 22 nt, Human
ugggaagcccauccugaccagc

SEQ ID NO: 1272438 - RNA, 23 nt, Human
ugggaaggcuacuucggggcugg

SEQ ID NO: 1272439 - RNA, 17 nt, Human
ugggaaggcuugggauu

SEQ ID NO: 1272440 - RNA, 18 nt, Human
ugggaaggcuugggauuu

SEQ ID NO: 1272441 - RNA, 18 nt, Human
ugggaaguccggccccag

SEQ ID NO: 1272442 - RNA, 23 nt, Human
ugggaagucguccuuacuccugu

SEQ ID NO: 1272443 - RNA, 15 nt, Human
ugggaagugaagacu

SEQ ID NO: 1272444 - RNA, 19 nt, Human
uggcuuauaauucuuucaa

SEQ ID NO: 1272445 - RNA, 13 nt, Human
uggcuuaccuggc

SEQ ID NO: 1272446 - RNA, 14 nt, Human
uggcuuaccuggcc

SEQ ID NO: 1272447 - RNA, 17 nt, Human
uggcuuaccuggcccau

SEQ ID NO: 1272448 - RNA, 15 nt, Human
uggcuuaccuggccc

SEQ ID NO: 1272449 - RNA, 18 nt, Human
uggcuuauaauucuuuca

SEQ ID NO: 1272450 - RNA, 19 nt, Human
aggcucuggagcccacugu

SEQ ID NO: 1272451 - RNA, 18 nt, Human
aggcucuggagcccacug

SEQ ID NO: 1272452 - RNA, 24 nt, Human
aggcugccugagucgugaccugcu

SEQ ID NO: 1272453 - RNA, 15 nt, Human
aggcucuggagccca

SEQ ID NO: 1272454 - RNA, 14 nt, Human
aggcucuggagccc

SEQ ID NO: 1272455 - RNA, 13 nt, Human
aggcucuggagcc

SEQ ID NO: 1272456 - RNA, 18 nt, Human
aggcuggaagauagcugu

SEQ ID NO: 1272457 - RNA, 18 nt, Human
aggcuggaagcugggagg

SEQ ID NO: 1272458 - RNA, 22 nt, Human
aggcugcuguacugaaguaaaa

SEQ ID NO: 1272459 - RNA, 23 nt, Human
aggcugcucuugaacuccugacc

SEQ ID NO: 1272460 - RNA, 17 nt, Human
aggcugcucggggugca

SEQ ID NO: 1272461 - RNA, 20 nt, Human
aggcugcucggggugcacag

SEQ ID NO: 1272462 - RNA, 21 nt, Human
aggcugcucggggugcacagg

SEQ ID NO: 1272463 - RNA, 22 nt, Human
aggcugcucggggugcacagga

SEQ ID NO: 1272464 - RNA, 23 nt, Human
aggcugcucggggugcacaggag

SEQ ID NO: 1272465 - RNA, 19 nt, Human
aggcuggcccugcccuggu

SEQ ID NO: 1272466 - RNA, 21 nt, Human
aggcuggccuauguggucuaa

SEQ ID NO: 1272467 - RNA, 12 nt, Human
aggcuggcccug

SEQ ID NO: 1272468 - RNA, 14 nt, Human
aggcuggcccugcc

SEQ ID NO: 1272469 - RNA, 17 nt, Human
aggcuggccaguccagg

SEQ ID NO: 1272470 - RNA, 18 nt, Human
aggcuggccaguccaggc

SEQ ID NO: 1272471 - RNA, 19 nt, Human
aggcuggccaguccaggcu

SEQ ID NO: 1272472 - RNA, 21 nt, Human
aggcuggccaguccaggcugc

SEQ ID NO: 1272473 - RNA, 15 nt, Human
aggcuggcccugccc

SEQ ID NO: 1272474 - RNA, 16 nt, Human
aggcuggcccugcccu

SEQ ID NO: 1272475 - RNA, 17 nt, Human
aggcuggcccugcccug

SEQ ID NO: 1272476 - RNA, 18 nt, Human
aggcuggcccugcccugg

SEQ ID NO: 1272477 - RNA, 22 nt, Human
aggcuggaagauagcugugacu

SEQ ID NO: 1272478 - RNA, 14 nt, Human
aggcuggcacagga

SEQ ID NO: 1272479 - RNA, 16 nt, Human
aggcuggcacaggaca

SEQ ID NO: 1272480 - RNA, 17 nt, Human
aggcuggcacaggacau

SEQ ID NO: 1272481 - RNA, 18 nt, Human
aggcuggcacaggacaug

SEQ ID NO: 1272482 - RNA, 15 nt, Human
aggcuggccagucca

SEQ ID NO: 1272483 - RNA, 17 nt, Human
aggccugguguuucuug

SEQ ID NO: 1272484 - RNA, 14 nt, Human
aggcuccugccacc

SEQ ID NO: 1272485 - RNA, 20 nt, Human
aggccuguguagcugugacc

SEQ ID NO: 1272486 - RNA, 13 nt, Human
aggccugggcagu

SEQ ID NO: 1272487 - RNA, 14 nt, Human
aggccugggcagug

SEQ ID NO: 1272488 - RNA, 15 nt, Human
aggccugggcagugg

SEQ ID NO: 1272489 - RNA, 19 nt, Human
aggccugggccgcugccac

SEQ ID NO: 1272490 - RNA, 11 nt, Human
aggccuggggu

SEQ ID NO: 1272491 - RNA, 18 nt, Human
aggccuggggugacccgg

SEQ ID NO: 1272492 - RNA, 21 nt, Human
aggccuggggugacccggcac

SEQ ID NO: 1272493 - RNA, 20 nt, Human
aggccuggggugacccggca

SEQ ID NO: 1272494 - RNA, 20 nt, Human
aggcuccugccaccacgccc

SEQ ID NO: 1272495 - RNA, 21 nt, Human
aggccuguguagcugugaccu

SEQ ID NO: 1272496 - RNA, 16 nt, Human
aggcuccuguuuugca

SEQ ID NO: 1272497 - RNA, 22 nt, Human
aggcuccuguuuugcacagcca

SEQ ID NO: 1272498 - RNA, 17 nt, Human
aggcucggccugccccc

SEQ ID NO: 1272499 - RNA, 18 nt, Human
aggcucguggacugagug

SEQ ID NO: 1272500 - RNA, 17 nt, Human
aggcucuagaucauaag

SEQ ID NO: 1272501 - RNA, 19 nt, Human
aggcucuaugagucuagau

SEQ ID NO: 1272502 - RNA, 20 nt, Human
aggcucuaugagucuagaug

SEQ ID NO: 1272503 - RNA, 21 nt, Human
aggcucuaugagucuagaugu

SEQ ID NO: 1272504 - RNA, 18 nt, Human
aggcucucuuugcccagu

SEQ ID NO: 1272505 - RNA, 13 nt, Human
aggcucugagagu

SEQ ID NO: 1272506 - RNA, 16 nt, Human
aggcucugagagucua

SEQ ID NO: 1272507 - RNA, 19 nt, Human
aggcucugagagucuagau

SEQ ID NO: 1272508 - RNA, 20 nt, Human
aggcucugagagucuagauu

SEQ ID NO: 1272509 - RNA, 21 nt, Human
aggcucugagagucuagauuc

SEQ ID NO: 1272510 - RNA, 22 nt, Human
aggcucugagagucuagauucu

SEQ ID NO: 1272511 - RNA, 23 nt, Human
aggcucugagagucuagauucuc

SEQ ID NO: 1272512 - RNA, 18 nt, Human
uggacgagaaaacaauaa

SEQ ID NO: 1272513 - RNA, 24 nt, Human
uggacgacacggucggggcaucug

SEQ ID NO: 1272514 - RNA, 22 nt, Human
uggaccucugacagcagcaucu

SEQ ID NO: 1272515 - RNA, 20 nt, Human
aggcauuuguugguuuauca

SEQ ID NO: 1272516 - RNA, 15 nt, Human
aggcauuuuuaccau

SEQ ID NO: 1272517 - RNA, 21 nt, Human
aggccaaagagucuccaguuu

SEQ ID NO: 1272518 - RNA, 22 nt, Human
aggccaaaggggaccuggaagg

SEQ ID NO: 1272519 - RNA, 14 nt, Human
aggccaagaaacgu

SEQ ID NO: 1272520 - RNA, 17 nt, Human
aggccaagaaacgucuu

SEQ ID NO: 1272521 - RNA, 21 nt, Human
aggccaagaaacgucuucuaa

SEQ ID NO: 1272522 - RNA, 21 nt, Human
aggccaaaggggaccuggaag

SEQ ID NO: 1272523 - RNA, 14 nt, Human
aggccaaggugucc

SEQ ID NO: 1272524 - RNA, 19 nt, Human
aggccaagguguccuacag

SEQ ID NO: 1272525 - RNA, 20 nt, Human
aggccaagguguccuacaga

SEQ ID NO: 1272526 - RNA, 21 nt, Human
aggccaagguguccuacagaa

SEQ ID NO: 1272527 - RNA, 18 nt, Human
aggccaagucaggcccuu

SEQ ID NO: 1272528 - RNA, 19 nt, Human
uggagucagacagaugugg

SEQ ID NO: 1272529 - RNA, 16 nt, Human
uggagucaaaaagaac

SEQ ID NO: 1272530 - RNA, 14 nt, Human
uggaguccccucac

SEQ ID NO: 1272531 - RNA, 15 nt, Human
uggaguccccucacc

SEQ ID NO: 1272532 - RNA, 19 nt, Human
uggaguccccucaccuccu

SEQ ID NO: 1272533 - RNA, 20 nt, Human
uggaguccccucaccuccuc

SEQ ID NO: 1272534 - RNA, 21 nt, Human
uggaguccccucaccuccucu

SEQ ID NO: 1272535 - RNA, 15 nt, Human
uggagucugccaccc

SEQ ID NO: 1272536 - RNA, 23 nt, Human
uggaugggggaacucagauccag

SEQ ID NO: 1272537 - RNA, 18 nt, Human
aggccagaccauggacac

SEQ ID NO: 1272538 - RNA, 17 nt, Human
aggccagaccauggaca

SEQ ID NO: 1272539 - RNA, 16 nt, Human
aggccagaccauggac

SEQ ID NO: 1272540 - RNA, 20 nt, Human
aggccacuguguuccuuccg

SEQ ID NO: 1272541 - RNA, 19 nt, Human
aggccacuguuuggaaaua

SEQ ID NO: 1272542 - RNA, 21 nt, Human
aggccaccuggcucucaccuc

SEQ ID NO: 1272543 - RNA, 14 nt, Human
aggccacuggagac

SEQ ID NO: 1272544 - RNA, 20 nt, Human
aggccacuggagacgcauau

SEQ ID NO: 1272545 - RNA, 14 nt, Human
aggccacuguguuc

SEQ ID NO: 1272546 - RNA, 19 nt, Human
aggccacuguguuccuucc

SEQ ID NO: 1272547 - RNA, 17 nt, Human
aggccacacucagcaca

SEQ ID NO: 1272548 - RNA, 18 nt, Human
aggccacacucagcacaa

SEQ ID NO: 1272549 - RNA, 21 nt, Human
aggccacacuucaaacuacuu

SEQ ID NO: 1272550 - RNA, 11 nt, Human
uggcagccuug

SEQ ID NO: 1272551 - RNA, 15 nt, Human
uggcagccucuucaa

SEQ ID NO: 1272552 - RNA, 16 nt, Human
uggcagccucuucaaa

SEQ ID NO: 1272553 - RNA, 23 nt, Human
uggcagccgugccuucagcucua

SEQ ID NO: 1272554 - RNA, 19 nt, Human
uggcagccucccauccagg

SEQ ID NO: 1272555 - RNA, 20 nt, Human
uggcagccucccauccaggg

SEQ ID NO: 1272556 - RNA, 21 nt, Human
uggcagccucccauccagggc

SEQ ID NO: 1272557 - RNA, 22 nt, Human
uggcagccucccauccagggcc

SEQ ID NO: 1272558 - RNA, 19 nt, Human
uggcagccacacuucucag

SEQ ID NO: 1272559 - RNA, 12 nt, Human
uggcagcccagc

SEQ ID NO: 1272560 - RNA, 13 nt, Human
uggcagcccagcc

SEQ ID NO: 1272561 - RNA, 14 nt, Human
uggcagcccagcca

SEQ ID NO: 1272562 - RNA, 15 nt, Human
uggcagcccagccag

SEQ ID NO: 1272563 - RNA, 16 nt, Human
uggcagcccagccagc

SEQ ID NO: 1272564 - RNA, 17 nt, Human
uggcagcccagccagcg

SEQ ID NO: 1272565 - RNA, 16 nt, Human
uggcagccgugccuuc

SEQ ID NO: 1272566 - RNA, 18 nt, Human
uggcagcccagccagcgu

SEQ ID NO: 1272567 - RNA, 14 nt, Human
uggauguccccagc

SEQ ID NO: 1272568 - RNA, 15 nt, Human
uggauguccccagca

SEQ ID NO: 1272569 - RNA, 16 nt, Human
uggauguccccagcag

SEQ ID NO: 1272570 - RNA, 11 nt, Human
uggcagccaca

SEQ ID NO: 1272571 - RNA, 18 nt, Human
uggcagccacacuucuca

SEQ ID NO: 1272572 - RNA, 21 nt, Human
uggcagccacacuucucagga

SEQ ID NO: 1272573 - RNA, 20 nt, Human
uggccagucuggucucgaac

SEQ ID NO: 1272574 - RNA, 23 nt, Human
uggccaguccaggcugccguggg

SEQ ID NO: 1272575 - RNA, 14 nt, Human
uggccagugcccug

SEQ ID NO: 1272576 - RNA, 18 nt, Human
uggccagugcccugaucc

SEQ ID NO: 1272577 - RNA, 21 nt, Human
uggccagugcccugaucccag

SEQ ID NO: 1272578 - RNA, 17 nt, Human
uggccaguccaggcugc

SEQ ID NO: 1272579 - RNA, 21 nt, Human
uggccaguccaggcugccgug

SEQ ID NO: 1272580 - RNA, 20 nt, Human
uggccaggcuugucucgaac

SEQ ID NO: 1272581 - RNA, 14 nt, Human
uggccaaguuccuc

SEQ ID NO: 1272582 - RNA, 20 nt, Human
uggccagggccacgcuccag

SEQ ID NO: 1272583 - RNA, 22 nt, Human
uggccagggccacgcuccagcu

SEQ ID NO: 1272584 - RNA, 20 nt, Human
uggccaggcuggucucgaac

SEQ ID NO: 1272585 - RNA, 16 nt, Human
uggccaaguuccucua

SEQ ID NO: 1272586 - RNA, 22 nt, Human
uggccaaugcaccuaaagaaaa

SEQ ID NO: 1272587 - RNA, 14 nt, Human
uggccaagagaaac

SEQ ID NO: 1272588 - RNA, 18 nt, Human
uggccaagagaaacuucc

SEQ ID NO: 1272589 - RNA, 20 nt, Human
uggccaagagaaacuuccua

SEQ ID NO: 1272590 - RNA, 22 nt, Human
uggccaagaagcaguggccuua

SEQ ID NO: 1272591 - RNA, 13 nt, Human
uggccaagcugag

SEQ ID NO: 1272592 - RNA, 14 nt, Human
uggccaagcugagg

SEQ ID NO: 1272593 - RNA, 17 nt, Human
uggccaagcugaggugc

SEQ ID NO: 1272594 - RNA, 19 nt, Human
uggccaagcugaggugccc

SEQ ID NO: 1272595 - RNA, 21 nt, Human
uggccaagcugaggugcccag

SEQ ID NO: 1272596 - RNA, 22 nt, Human
uggccaagcugaggugcccagg

SEQ ID NO: 1272597 - RNA, 23 nt, Human
uggccaagcugaggugcccagga

SEQ ID NO: 1272598 - RNA, 16 nt, Human
uggccaaggaaaggca

SEQ ID NO: 1272599 - RNA, 21 nt, Human
uggcauggaaauuuaaagcag

SEQ ID NO: 1272600 - RNA, 23 nt, Human
uggcauggaaauuuaaagcaggu

SEQ ID NO: 1272601 - RNA, 13 nt, Human
uggccaagaagca

SEQ ID NO: 1272602 - RNA, 16 nt, Human
uggccaagaagcagug

SEQ ID NO: 1272603 - RNA, 21 nt, Human
uggccaagaagcaguggccuu

SEQ ID NO: 1272604 - RNA, 13 nt, Human
aggccugccuguu

SEQ ID NO: 1272605 - RNA, 19 nt, Human
aggccugagguuacuggaa

SEQ ID NO: 1272606 - RNA, 17 nt, Human
aggccuggacuuuccug

SEQ ID NO: 1272607 - RNA, 19 nt, Human
uggcauggaaauuuaaagc

SEQ ID NO: 1272608 - RNA, 20 nt, Human
uggcauggaaauuuaaagca

SEQ ID NO: 1272609 - RNA, 17 nt, Human
aggccauucuuucccaa

SEQ ID NO: 1272610 - RNA, 18 nt, Human
aggccauucuuucccaac

SEQ ID NO: 1272611 - RNA, 19 nt, Human
aggccauucuuucccaaca

SEQ ID NO: 1272612 - RNA, 17 nt, Human
aggcccucgcugccagc

SEQ ID NO: 1272613 - RNA, 22 nt, Human
aggcccucgcugccagcucugu

SEQ ID NO: 1272614 - RNA, 14 nt, Human
aggccuccuggcug

SEQ ID NO: 1272615 - RNA, 23 nt, Human
aggccuccuggcugucugaggcu

SEQ ID NO: 1272616 - RNA, 13 nt, Human
aggccucagggcu

SEQ ID NO: 1272617 - RNA, 18 nt, Human
aggccucagggcuccuug

SEQ ID NO: 1272618 - RNA, 18 nt, Human
aggccuccaucuucucau

SEQ ID NO: 1272619 - RNA, 12 nt, Human
uggccuggagca

SEQ ID NO: 1272620 - RNA, 23 nt, Human
uggccuggagcacaaagacccug

SEQ ID NO: 1272621 - RNA, 13 nt, Human
uggccuggccagu

SEQ ID NO: 1272622 - RNA, 14 nt, Human
uggccuggccagug

SEQ ID NO: 1272623 - RNA, 17 nt, Human
uggccuggccagugccc

SEQ ID NO: 1272624 - RNA, 20 nt, Human
uggccuggccagugcccuga

SEQ ID NO: 1272625 - RNA, 14 nt, Human
uggcccgacagccu

SEQ ID NO: 1272626 - RNA, 15 nt, Human
uggcccgacagccug

SEQ ID NO: 1272627 - RNA, 16 nt, Human
uggcccgacagccugg

SEQ ID NO: 1272628 - RNA, 17 nt, Human
uggcccgacagccuggc

SEQ ID NO: 1272629 - RNA, 18 nt, Human
uggcccgacagccuggca

SEQ ID NO: 1272630 - RNA, 19 nt, Human
uggcccgacagccuggcac

SEQ ID NO: 1272631 - RNA, 17 nt, Human
uggccgcugaguggcag

SEQ ID NO: 1272632 - RNA, 19 nt, Human
uggccgcugaguggcaggg

SEQ ID NO: 1272633 - RNA, 15 nt, Human
uggccgggagccuga

SEQ ID NO: 1272634 - RNA, 17 nt, Human
uggccgaguccaagcug

SEQ ID NO: 1272635 - RNA, 19 nt, Human
uggccgaguccaagcuggg

SEQ ID NO: 1272636 - RNA, 13 nt, Human
uggccgcccccug

SEQ ID NO: 1272637 - RNA, 15 nt, Human
uggccgcccccugcc

SEQ ID NO: 1272638 - RNA, 17 nt, Human
uggccgcccccugcccc

SEQ ID NO: 1272639 - RNA, 21 nt, Human
uggccgcccccugccccccag

SEQ ID NO: 1272640 - RNA, 23 nt, Human
uggccgcccccugccccccagcc

SEQ ID NO: 1272641 - RNA, 15 nt, Human
uggccgccugggucc

SEQ ID NO: 1272642 - RNA, 18 nt, Human
uggaauuggagcucgugg

SEQ ID NO: 1272643 - RNA, 17 nt, Human
uggaauugggagcuugg

SEQ ID NO: 1272644 - RNA, 17 nt, Human
aggcaaaauccuugcuu

SEQ ID NO: 1272645 - RNA, 19 nt, Human
aggcaaaauccuugcuuau

SEQ ID NO: 1272646 - RNA, 13 nt, Human
aggcaaaauugca

SEQ ID NO: 1272647 - RNA, 17 nt, Human
aggcaaaauugcaaauc

SEQ ID NO: 1272648 - RNA, 15 nt, Human
aggcaaauuugcauu

SEQ ID NO: 1272649 - RNA, 22 nt, Human
aggcaaauuugcauuaaauuac

SEQ ID NO: 1272650 - RNA, 19 nt, Human
aggcaacaguuugacauuu

SEQ ID NO: 1272651 - RNA, 16 nt, Human
aggcaacauccaaaau

SEQ ID NO: 1272652 - RNA, 17 nt, Human
aggaugccccguccccc

SEQ ID NO: 1272653 - RNA, 16 nt, Human
aggaugcuaacaucua

SEQ ID NO: 1272654 - RNA, 17 nt, Human
aggaugcuaacaucuaa

SEQ ID NO: 1272655 - RNA, 19 nt, Human
aggaugcuaacaucuaaaa

SEQ ID NO: 1272656 - RNA, 21 nt, Human
aggauuuuuuuuaauguuuaa

SEQ ID NO: 1272657 - RNA, 15 nt, Human
aggcaaaaauguaaa

SEQ ID NO: 1272658 - RNA, 22 nt, Human
aggaugagggaaaagaaaaaga

SEQ ID NO: 1272659 - RNA, 13 nt, Human
uggacccugacca

SEQ ID NO: 1272660 - RNA, 15 nt, Human
uggacccugaccagc

SEQ ID NO: 1272661 - RNA, 18 nt, Human
uggacccugaccagcucc

SEQ ID NO: 1272662 - RNA, 19 nt, Human
uggacccugaccagcuccc

SEQ ID NO: 1272663 - RNA, 20 nt, Human
uggacccugaccagcucccc

SEQ ID NO: 1272664 - RNA, 13 nt, Human
uggacccuuccau

SEQ ID NO: 1272665 - RNA, 23 nt, Human
uggacccugaccagcucccccuc

SEQ ID NO: 1272666 - RNA, 15 nt, Human
uggaccggagagugg

SEQ ID NO: 1272667 - RNA, 18 nt, Human
uggaccggagaguggggg

SEQ ID NO: 1272668 - RNA, 22 nt, Human
uggaccggagaguggggguggg

SEQ ID NO: 1272669 - RNA, 17 nt, Human
uggaccuaaauggccuc

SEQ ID NO: 1272670 - RNA, 18 nt, Human
uggaccuaaauggccuca

SEQ ID NO: 1272671 - RNA, 21 nt, Human
uggaccuaaauggccucaugu

SEQ ID NO: 1272672 - RNA, 14 nt, Human
uggaccuaauccaa

SEQ ID NO: 1272673 - RNA, 22 nt, Human
uggaccuaauccaagcaucccu

SEQ ID NO: 1272674 - RNA, 15 nt, Human
uggaccucaccaagc

SEQ ID NO: 1272675 - RNA, 13 nt, Human
uggaccucugaca

SEQ ID NO: 1272676 - RNA, 14 nt, Human
uggaccucugacag

SEQ ID NO: 1272677 - RNA, 15 nt, Human
uggaccucugacagc

SEQ ID NO: 1272678 - RNA, 16 nt, Human
uggaccucugacagca

SEQ ID NO: 1272679 - RNA, 17 nt, Human
uggaccucugacagcag

SEQ ID NO: 1272680 - RNA, 18 nt, Human
uggaccucugacagcagc

SEQ ID NO: 1272681 - RNA, 19 nt, Human
uggaccucugacagcagca

SEQ ID NO: 1272682 - RNA, 16 nt, Human
uggaccagccucucca

SEQ ID NO: 1272683 - RNA, 22 nt, Human
uggaccagccucuccacucaug

SEQ ID NO: 1272684 - RNA, 20 nt, Human
uggaccauggaguggcagcc

SEQ ID NO: 1272685 - RNA, 19 nt, Human
uggaccauggaguggcagc

SEQ ID NO: 1272686 - RNA, 17 nt, Human
uggacccagccaggccc

SEQ ID NO: 1272687 - RNA, 21 nt, Human
uggacccagccaggcccagcc

SEQ ID NO: 1272688 - RNA, 18 nt, Human
uggacccagccaggccca

SEQ ID NO: 1272689 - RNA, 14 nt, Human
aggaggcagagaag

SEQ ID NO: 1272690 - RNA, 14 nt, Human
aggaggcaggaccu

SEQ ID NO: 1272691 - RNA, 18 nt, Human
aggaggcaccuacacuca

SEQ ID NO: 1272692 - RNA, 14 nt, Human
aggagggacaaagg

SEQ ID NO: 1272693 - RNA, 18 nt, Human
aggagggacaaaggagcc

SEQ ID NO: 1272694 - RNA, 19 nt, Human
aggagggacaaaggagccu

SEQ ID NO: 1272695 - RNA, 20 nt, Human
aggagggacaaaggagccug

SEQ ID NO: 1272696 - RNA, 21 nt, Human
aggagggacaaaggagccugu

SEQ ID NO: 1272697 - RNA, 23 nt, Human
aggagggacaaaggagccuguga

SEQ ID NO: 1272698 - RNA, 22 nt, Human
aggagggacaaaggagccugug

SEQ ID NO: 1272699 - RNA, 19 nt, Human
aggagggacugucgcugcu

SEQ ID NO: 1272700 - RNA, 16 nt, Human
aggagggagacacugg

SEQ ID NO: 1272701 - RNA, 23 nt, Human
aggagggagacacuggccccuca

SEQ ID NO: 1272702 - RNA, 22 nt, Human
aggaggagccuguccugccugu

SEQ ID NO: 1272703 - RNA, 23 nt, Human
aggaggagggucggugccuucaa

SEQ ID NO: 1272704 - RNA, 18 nt, Human
uggaaauucccuucaucu

SEQ ID NO: 1272705 - RNA, 16 nt, Human
uggaaauugacgaggg

SEQ ID NO: 1272706 - RNA, 17 nt, Human
uggaaauugauuuugaa

SEQ ID NO: 1272707 - RNA, 22 nt, Human
uggaaauucccuucaucuggaa

SEQ ID NO: 1272708 - RNA, 17 nt, Human
uggaaauucccuucauc

SEQ ID NO: 1272709 - RNA, 12 nt, Human
aggagcugccug

SEQ ID NO: 1272710 - RNA, 14 nt, Human
aggagcugccugga

SEQ ID NO: 1272711 - RNA, 15 nt, Human
aggagcugccuggac

SEQ ID NO: 1272712 - RNA, 16 nt, Human
aggagcugccuggacc

SEQ ID NO: 1272713 - RNA, 18 nt, Human
aggagcugccuggacccg

SEQ ID NO: 1272714 - RNA, 17 nt, Human
aggagcugccuggaccc

SEQ ID NO: 1272715 - RNA, 14 nt, Human
uggaaauauauauu

SEQ ID NO: 1272716 - RNA, 17 nt, Human
uggaaauauauauuaua

SEQ ID NO: 1272717 - RNA, 19 nt, Human
uggaaauauauauuauacu

SEQ ID NO: 1272718 - RNA, 15 nt, Human
aggaguuuugcaaag

SEQ ID NO: 1272719 - RNA, 12 nt, Human
aggauaaaauaa

SEQ ID NO: 1272720 - RNA, 21 nt, Human
aggagggagcaucagugcccu

SEQ ID NO: 1272721 - RNA, 14 nt, Human
aggagggaggggga

SEQ ID NO: 1272722 - RNA, 21 nt, Human
aggacuuccuguccagcucca

SEQ ID NO: 1272723 - RNA, 13 nt, Human
aggacuugugucu

SEQ ID NO: 1272724 - RNA, 16 nt, Human
aggacuugugucucug

SEQ ID NO: 1272725 - RNA, 15 nt, Human
aggacuguuucaaac

SEQ ID NO: 1272726 - RNA, 19 nt, Human
aggacuguuucaaacaugc

SEQ ID NO: 1272727 - RNA, 19 nt, Human
aggacuuauuuaaacucug

SEQ ID NO: 1272728 - RNA, 15 nt, Human
aggacuucccugugu

SEQ ID NO: 1272729 - RNA, 20 nt, Human
aggacuuccuguccagcucc

SEQ ID NO: 1272730 - RNA, 14 nt, Human
aggacauuucucua

SEQ ID NO: 1272731 - RNA, 15 nt, Human
aggacugaugucucc

SEQ ID NO: 1272732 - RNA, 19 nt, Human
aggacugaauuaugaaacu

SEQ ID NO: 1272733 - RNA, 20 nt, Human
aggacugaauuaugaaacuu

SEQ ID NO: 1272734 - RNA, 18 nt, Human
aggagcccugggaggcuc

SEQ ID NO: 1272735 - RNA, 20 nt, Human
aggagcccacgacacugcag

SEQ ID NO: 1272736 - RNA, 14 nt, Human
aggagccaccaguu

SEQ ID NO: 1272737 - RNA, 15 nt, Human
aggagccaccaguuc

SEQ ID NO: 1272738 - RNA, 17 nt, Human
aggagccaccaguucuc

SEQ ID NO: 1272739 - RNA, 13 nt, Human
aggagcaaagccu

SEQ ID NO: 1272740 - RNA, 14 nt, Human
aggagcaaagccug

SEQ ID NO: 1272741 - RNA, 16 nt, Human
aggagcaaagccuguu

SEQ ID NO: 1272742 - RNA, 15 nt, Human
aggagcaaagccugu

SEQ ID NO: 1272743 - RNA, 20 nt, Human
aggacuuuauagaucagcca

SEQ ID NO: 1272744 - RNA, 21 nt, Human
aggacuuuauagaucagccag

SEQ ID NO: 1272745 - RNA, 15 nt, Human
aggacuuuguacauu

SEQ ID NO: 1272746 - RNA, 11 nt, Human
aggagaaacug

SEQ ID NO: 1272747 - RNA, 11 nt, Human
aggacuuugca

SEQ ID NO: 1272748 - RNA, 13 nt, Human
aggacuuuguaca

SEQ ID NO: 1272749 - RNA, 21 nt, Human
aggagauucugccuuugccag

SEQ ID NO: 1272750 - RNA, 17 nt, Human
aggagaaacuggaacuc

SEQ ID NO: 1272751 - RNA, 17 nt, Human
aggagauggggacaggg

SEQ ID NO: 1272752 - RNA, 16 nt, Human
aggagauucugccuuu

SEQ ID NO: 1272753 - RNA, 20 nt, Human
aggagauucugccuuugcca

SEQ ID NO: 1272754 - RNA, 22 nt, Human
aggagauucugccuuugccagg

SEQ ID NO: 1272755 - RNA, 23 nt, Human
aggagcccugggaggcucuggag

SEQ ID NO: 1272756 - RNA, 19 nt, Human
aggagcccugggaggcucu

SEQ ID NO: 1272757 - RNA, 11 nt, Human
aggagccuggc

SEQ ID NO: 1272758 - RNA, 12 nt, Human
aggagccugucc

SEQ ID NO: 1272759 - RNA, 16 nt, Human
aggagccuguccugcc

SEQ ID NO: 1272760 - RNA, 17 nt, Human
aggagccuguccugccu

SEQ ID NO: 1272761 - RNA, 19 nt, Human
aggagccuguccugccugu

SEQ ID NO: 1272762 - RNA, 21 nt, Human
aggagccuguccugccugugg

SEQ ID NO: 1272763 - RNA, 11 nt, Human
aggagccugug

SEQ ID NO: 1272764 - RNA, 12 nt, Human
aggagccuguga

SEQ ID NO: 1272765 - RNA, 13 nt, Human
aggagccugugaa

SEQ ID NO: 1272766 - RNA, 17 nt, Human
aggagccugugaaccca

SEQ ID NO: 1272767 - RNA, 18 nt, Human
aggagccugugaacccag

SEQ ID NO: 1272768 - RNA, 19 nt, Human
aggagccugugaacccagg

SEQ ID NO: 1272769 - RNA, 20 nt, Human
aggagccugugaacccagga

SEQ ID NO: 1272770 - RNA, 21 nt, Human
aggagccugugaacccaggac

SEQ ID NO: 1272771 - RNA, 22 nt, Human
aggagccugugaacccaggaca

SEQ ID NO: 1272772 - RNA, 13 nt, Human
aggagccugugac

SEQ ID NO: 1272773 - RNA, 14 nt, Human
aggagccugugaca

SEQ ID NO: 1272774 - RNA, 14 nt, Human
aggagcgagcaugu

SEQ ID NO: 1272775 - RNA, 15 nt, Human
aggagcgagcauguc

SEQ ID NO: 1272776 - RNA, 12 nt, Human
aggagcuaaggc

SEQ ID NO: 1272777 - RNA, 13 nt, Human
aggagcuaaggcu

SEQ ID NO: 1272778 - RNA, 14 nt, Human
aggagcuaaggcuc

SEQ ID NO: 1272779 - RNA, 15 nt, Human
aggagcuaaggcucu

SEQ ID NO: 1272780 - RNA, 21 nt, Human
ugcuugccaaggcagaggccu

SEQ ID NO: 1272781 - RNA, 22 nt, Human
ugcuugccaaggcagaggccug

SEQ ID NO: 1272782 - RNA, 23 nt, Human
ugcuugccaaggcagaggccugg

SEQ ID NO: 1272783 - RNA, 18 nt, Human
ugcuugcccuaagcagaa

SEQ ID NO: 1272784 - RNA, 21 nt, Human
ugcuugcccuaagcagaaagu

SEQ ID NO: 1272785 - RNA, 20 nt, Human
ugcuugcccuaagcagaaag

SEQ ID NO: 1272786 - RNA, 13 nt, Human
uggaaaggcagcu

SEQ ID NO: 1272787 - RNA, 14 nt, Human
uggaaauacacagu

SEQ ID NO: 1272788 - RNA, 15 nt, Human
uggaaauacacagug

SEQ ID NO: 1272789 - RNA, 13 nt, Human
uggaaauauauau

SEQ ID NO: 1272790 - RNA, 14 nt, Human
ugcuuuucagcuga

SEQ ID NO: 1272791 - RNA, 16 nt, Human
ugcuuuucaugcaaac

SEQ ID NO: 1272792 - RNA, 20 nt, Human
ugcuuuucaugcaaacucuu

SEQ ID NO: 1272793 - RNA, 17 nt, Human
ugcuuuucaugcaaacu

SEQ ID NO: 1272794 - RNA, 17 nt, Human
ugcuuuucccuuuguga

SEQ ID NO: 1272795 - RNA, 21 nt, Human
ugcuuuucccuuugugaguca

SEQ ID NO: 1272796 - RNA, 18 nt, Human
ugcuuuucccuuugugag

SEQ ID NO: 1272797 - RNA, 14 nt, Human
ugcuuuucauccuu

SEQ ID NO: 1272798 - RNA, 24 nt, Human
ugcuuuuaguauuuuagugaacuu

SEQ ID NO: 1272799 - RNA, 12 nt, Human
ugcuuuguauug

SEQ ID NO: 1272800 - RNA, 23 nt, Human
ugcuuuguaagugaaaaacauga

SEQ ID NO: 1272801 - RNA, 17 nt, Human
ugcuuugggcuugggcc

SEQ ID NO: 1272802 - RNA, 21 nt, Human
ugcuuggggggugaugagggc

SEQ ID NO: 1272803 - RNA, 20 nt, Human
ugcuuggggggugaugaggg

SEQ ID NO: 1272804 - RNA, 18 nt, Human
ugcuuugggcugcccugg

SEQ ID NO: 1272805 - RNA, 19 nt, Human
ugcuuugggcugcccuggu

SEQ ID NO: 1272806 - RNA, 20 nt, Human
ugcuuugggcugcccuggug

SEQ ID NO: 1272807 - RNA, 21 nt, Human
ugcuuugggcugcccuggugc

SEQ ID NO: 1272808 - RNA, 20 nt, Human
aggaauuuuauuuuuuucug

SEQ ID NO: 1272809 - RNA, 14 nt, Human
ugcuggagcucugc

SEQ ID NO: 1272810 - RNA, 13 nt, Human
ugcuggagcucug

SEQ ID NO: 1272811 - RNA, 15 nt, Human
aggaauuucuuaacu

SEQ ID NO: 1272812 - RNA, 19 nt, Human
aggaauuucuuaacuucuu

SEQ ID NO: 1272813 - RNA, 23 nt, Human
aggaauuucuuaacuucuugcuu

SEQ ID NO: 1272814 - RNA, 15 nt, Human
ugcuggcugccuuag

SEQ ID NO: 1272815 - RNA, 14 nt, Human
ugcuggcugccuua

SEQ ID NO: 1272816 - RNA, 21 nt, Human
ugcuggcugccuuagaaccuu

SEQ ID NO: 1272817 - RNA, 12 nt, Human
ugcuggcccagg

SEQ ID NO: 1272818 - RNA, 13 nt, Human
ugcuggcccaggg

SEQ ID NO: 1272819 - RNA, 14 nt, Human
ugcuggcccagggc

SEQ ID NO: 1272820 - RNA, 16 nt, Human
ugcuggcccagggccc

SEQ ID NO: 1272821 - RNA, 17 nt, Human
ugcuggcccagggccca

SEQ ID NO: 1272822 - RNA, 18 nt, Human
ugcuggcccagggcccag

SEQ ID NO: 1272823 - RNA, 19 nt, Human
ugcuggcccagggcccaga

SEQ ID NO: 1272824 - RNA, 20 nt, Human
ugcuggcccagggcccagag

SEQ ID NO: 1272825 - RNA, 21 nt, Human
ugcuggcccagggcccagagc

SEQ ID NO: 1272826 - RNA, 22 nt, Human
ugcuggcccagggcccagagcc

SEQ ID NO: 1272827 - RNA, 23 nt, Human
ugcuggcccagggcccagagccc

SEQ ID NO: 1272828 - RNA, 18 nt, Human
ugcuguccgguggagauc

SEQ ID NO: 1272829 - RNA, 21 nt, Human
ugcuguacugaaguaaaacaa

SEQ ID NO: 1272830 - RNA, 17 nt, Human
ugcugucaccuugcuca

SEQ ID NO: 1272831 - RNA, 12 nt, Human
ugcugucccucc

SEQ ID NO: 1272832 - RNA, 13 nt, Human
ugcugucccuccc

SEQ ID NO: 1272833 - RNA, 16 nt, Human
ugcugucccucccccu

SEQ ID NO: 1272834 - RNA, 17 nt, Human
ugcugucccucccccuu

SEQ ID NO: 1272835 - RNA, 15 nt, Human
ugcuguacaucuauu

SEQ ID NO: 1272836 - RNA, 16 nt, Human
ugcuguacaucuauuu

SEQ ID NO: 1272837 - RNA, 17 nt, Human
ugcuguacaucuauuuu

SEQ ID NO: 1272838 - RNA, 21 nt, Human
ugcuguacaucuauuuuggau

SEQ ID NO: 1272839 - RNA, 16 nt, Human
ugcugggagaggcagc

SEQ ID NO: 1272840 - RNA, 15 nt, Human
ugcugggagcuccac

SEQ ID NO: 1272841 - RNA, 16 nt, Human
ugcugggagcuccacu

SEQ ID NO: 1272842 - RNA, 17 nt, Human
ugcugggagcuccacuc

SEQ ID NO: 1272843 - RNA, 18 nt, Human
ugcugggagcuccacucu

SEQ ID NO: 1272844 - RNA, 20 nt, Human
ugcugggagcuccacucugc

SEQ ID NO: 1272845 - RNA, 21 nt, Human
ugcugggagcuccacucugcu

SEQ ID NO: 1272846 - RNA, 22 nt, Human
ugcugggagcuccacucugcuu

SEQ ID NO: 1272847 - RNA, 23 nt, Human
ugcugggagcuccacucugcuuc

SEQ ID NO: 1272848 - RNA, 17 nt, Human
ugcugggagaggcagcc

SEQ ID NO: 1272849 - RNA, 14 nt, Human
ugcuucaucccuuu

SEQ ID NO: 1272850 - RNA, 14 nt, Human
aggacacugauaug

SEQ ID NO: 1272851 - RNA, 22 nt, Human
aggacaucagcaaacaggauca

SEQ ID NO: 1272852 - RNA, 16 nt, Human
aggacaucagcaaaca

SEQ ID NO: 1272853 - RNA, 15 nt, Human
aggacaucagcaaac

SEQ ID NO: 1272854 - RNA, 14 nt, Human
aggacaucagcaaa

SEQ ID NO: 1272855 - RNA, 13 nt, Human
aggacaucagcaa

SEQ ID NO: 1272856 - RNA, 12 nt, Human
aggacaucagca

SEQ ID NO: 1272857 - RNA, 20 nt, Human
aggacaugcgguagccagca

SEQ ID NO: 1272858 - RNA, 22 nt, Human
aggacaugcgguagccagcaca

SEQ ID NO: 1272859 - RNA, 17 nt, Human
aggacacugauaugggu

SEQ ID NO: 1272860 - RNA, 16 nt, Human
aggacagccgccugga

SEQ ID NO: 1272861 - RNA, 20 nt, Human
aggacaggauccaggccggc

SEQ ID NO: 1272862 - RNA, 14 nt, Human
aggacaggauccag

SEQ ID NO: 1272863 - RNA, 16 nt, Human
ugcuuauauuguucac

SEQ ID NO: 1272864 - RNA, 21 nt, Human
ugcuuaugacaucacuuguac

SEQ ID NO: 1272865 - RNA, 16 nt, Human
ugcugugaggcugucc

SEQ ID NO: 1272866 - RNA, 17 nt, Human
ugcugugaggcuguccu

SEQ ID NO: 1272867 - RNA, 18 nt, Human
ugcugugaggcuguccug

SEQ ID NO: 1272868 - RNA, 19 nt, Human
ugcugugaggcuguccugu

SEQ ID NO: 1272869 - RNA, 23 nt, Human
ugcugugagucuuugguucuaag

SEQ ID NO: 1272870 - RNA, 20 nt, Human
ugcuuaguguacuuggagua

SEQ ID NO: 1272871 - RNA, 15 nt, Human
ugcugucugggugcu

SEQ ID NO: 1272872 - RNA, 18 nt, Human
ugcugucuggguggcuca

SEQ ID NO: 1272873 - RNA, 19 nt, Human
ugcugucuggguggcucac

SEQ ID NO: 1272874 - RNA, 13 nt, Human
ugcugucuuaaac

SEQ ID NO: 1272875 - RNA, 21 nt, Human
ugcugucuuaaacuaaaugug

SEQ ID NO: 1272876 - RNA, 14 nt, Human
ugcugucuuaaacu

SEQ ID NO: 1272877 - RNA, 13 nt, Human
ugcugugaggcug

SEQ ID NO: 1272878 - RNA, 14 nt, Human
ugcugugaggcugu

SEQ ID NO: 1272879 - RNA, 18 nt, Human
ugcuuaugcucuuaauug

SEQ ID NO: 1272880 - RNA, 21 nt, Human
ugcuuaugguaccagaugcag

SEQ ID NO: 1272881 - RNA, 14 nt, Human
ugcuuaugguacca

SEQ ID NO: 1272882 - RNA, 19 nt, Human
ugcuuauuccaugacugcu

SEQ ID NO: 1272883 - RNA, 21 nt, Human
ugcuuauuccaugacugcuug

SEQ ID NO: 1272884 - RNA, 22 nt, Human
ugcuuauuccaugacugcuugc

SEQ ID NO: 1272885 - RNA, 14 nt, Human
ugcuucacaauguu

SEQ ID NO: 1272886 - RNA, 23 nt, Human
agcuggaggcaggggcuuccugg

SEQ ID NO: 1272887 - RNA, 19 nt, Human
agcuggagugcaguggcau

SEQ ID NO: 1272888 - RNA, 15 nt, Human
agcuggagugcagug

SEQ ID NO: 1272889 - RNA, 13 nt, Human
ugcuccagacagg

SEQ ID NO: 1272890 - RNA, 17 nt, Human
ugcuccagacagggaau

SEQ ID NO: 1272891 - RNA, 12 nt, Human
ugcuccagaccu

SEQ ID NO: 1272892 - RNA, 14 nt, Human
ugcuccagaccuga

SEQ ID NO: 1272893 - RNA, 21 nt, Human
ugcuccagaccugauccugga

SEQ ID NO: 1272894 - RNA, 14 nt, Human
ugcugacuguacuc

SEQ ID NO: 1272895 - RNA, 22 nt, Human
ugcugacggccagggagaagcu

SEQ ID NO: 1272896 - RNA, 14 nt, Human
ugcugaccugugca

SEQ ID NO: 1272897 - RNA, 20 nt, Human
ugcugacgggacccacaugc

SEQ ID NO: 1272898 - RNA, 14 nt, Human
ugcugacggccagg

SEQ ID NO: 1272899 - RNA, 15 nt, Human
ugcugacggccaggg

SEQ ID NO: 1272900 - RNA, 17 nt, Human
ugcugacggccagggag

SEQ ID NO: 1272901 - RNA, 20 nt, Human
ugcugacggccagggagaag

SEQ ID NO: 1272902 - RNA, 18 nt, Human
ugcuccgccuggccuggc

SEQ ID NO: 1272903 - RNA, 17 nt, Human
ugcugacccuccccaaa

SEQ ID NO: 1272904 - RNA, 13 nt, Human
ugcugacccuccc

SEQ ID NO: 1272905 - RNA, 13 nt, Human
ugcugaccugcug

SEQ ID NO: 1272906 - RNA, 14 nt, Human
ugcugaccugcuga

SEQ ID NO: 1272907 - RNA, 23 nt, Human
ugcugaccugcugaccugugcac

SEQ ID NO: 1272908 - RNA, 18 nt, Human
ugcuccgaggacccagga

SEQ ID NO: 1272909 - RNA, 20 nt, Human
ugcuccgaggacccaggaaa

SEQ ID NO: 1272910 - RNA, 14 nt, Human
ugcuccgccuggcc

SEQ ID NO: 1272911 - RNA, 16 nt, Human
ugcuccgccuggccug

SEQ ID NO: 1272912 - RNA, 13 nt, Human
ugcuccccacguc

SEQ ID NO: 1272913 - RNA, 18 nt, Human
ugcucccauccugugugu

SEQ ID NO: 1272914 - RNA, 20 nt, Human
aggaaggaggacccaggaca

SEQ ID NO: 1272915 - RNA, 19 nt, Human
aggaaggaggacccaggac

SEQ ID NO: 1272916 - RNA, 18 nt, Human
aggaauuucaccuguaaa

SEQ ID NO: 1272917 - RNA, 23 nt, Human
aggaauuguguuuauaauuuuaa

SEQ ID NO: 1272918 - RNA, 22 nt, Human
aggaauuucaccuguaaaccug

SEQ ID NO: 1272919 - RNA, 15 nt, Human
aggaauuucccagga

SEQ ID NO: 1272920 - RNA, 17 nt, Human
aggaauuucccaggacc

SEQ ID NO: 1272921 - RNA, 18 nt, Human
aggaauuucccaggaccc

SEQ ID NO: 1272922 - RNA, 19 nt, Human
aggaauuucccaggacccu

SEQ ID NO: 1272923 - RNA, 20 nt, Human
aggaauuucccaggacccug

SEQ ID NO: 1272924 - RNA, 21 nt, Human
aggaauuucccaggacccuga

SEQ ID NO: 1272925 - RNA, 13 nt, Human
aggaauuucuuaa

SEQ ID NO: 1272926 - RNA, 21 nt, Human
aggaaggaggacccaggacag

SEQ ID NO: 1272927 - RNA, 18 nt, Human
aggaaggaggacccagga

SEQ ID NO: 1272928 - RNA, 21 nt, Human
aggaaggagcugccuggaccc

SEQ ID NO: 1272929 - RNA, 22 nt, Human
aggaaggagcugccuggacccg

SEQ ID NO: 1272930 - RNA, 17 nt, Human
aggaaggagcugccugg

SEQ ID NO: 1272931 - RNA, 18 nt, Human
aggaaggagcugccugga

SEQ ID NO: 1272932 - RNA, 19 nt, Human
aggaaggagcugccuggac

SEQ ID NO: 1272933 - RNA, 20 nt, Human
aggaaggagcugccuggacc

SEQ ID NO: 1272934 - RNA, 11 nt, Human
aggaauuuaaa

SEQ ID NO: 1272935 - RNA, 22 nt, Human
aggaagcuuuggugagaaccug

SEQ ID NO: 1272936 - RNA, 23 nt, Human
aggaagcuuuggugagaaccugg

SEQ ID NO: 1272937 - RNA, 12 nt, Human
aggaaggagcug

SEQ ID NO: 1272938 - RNA, 13 nt, Human
aggaaggagcugc

SEQ ID NO: 1272939 - RNA, 14 nt, Human
aggaaggagcugcc

SEQ ID NO: 1272940 - RNA, 15 nt, Human
aggaaggagcugccu

SEQ ID NO: 1272941 - RNA, 16 nt, Human
aggaaggagcugccug

SEQ ID NO: 1272942 - RNA, 18 nt, Human
ugcugacuggcuucagca

SEQ ID NO: 1272943 - RNA, 21 nt, Human
ugagagacacacugaagaagc

SEQ ID NO: 1272944 - RNA, 22 nt, Human
ugagagacacacugaagaagca

SEQ ID NO: 1272945 - RNA, 19 nt, Human
ugagagacauuaacucauu

SEQ ID NO: 1272946 - RNA, 18 nt, Human
ugagagacauuaacucau

SEQ ID NO: 1272947 - RNA, 13 nt, Human
ugagagaggccau

SEQ ID NO: 1272948 - RNA, 15 nt, Human
ugagagaguggcugg

SEQ ID NO: 1272949 - RNA, 22 nt, Human
ugagagaguggcuggggcaugg

SEQ ID NO: 1272950 - RNA, 21 nt, Human
ugagagaugcagaaauauuug

SEQ ID NO: 1272951 - RNA, 21 nt, Human
ugagagcaucaggccuagagg

SEQ ID NO: 1272952 - RNA, 20 nt, Human
ugagagcaucaggccuagag

SEQ ID NO: 1272953 - RNA, 20 nt, Human
ugagagcccugaggccuaga

SEQ ID NO: 1272954 - RNA, 14 nt, Human
ugagauguguucac

SEQ ID NO: 1272955 - RNA, 16 nt, Human
ugagauuacaggcaug

SEQ ID NO: 1272956 - RNA, 15 nt, Human
ugagauucucaaagg

SEQ ID NO: 1272957 - RNA, 22 nt, Human
ugagauucucaaaggagcgagc

SEQ ID NO: 1272958 - RNA, 18 nt, Human
ugagauugcaccacugca

SEQ ID NO: 1272959 - RNA, 17 nt, Human
ugagauugaauuucacu

SEQ ID NO: 1272960 - RNA, 16 nt, Human
ugagauuuauuaaaga

SEQ ID NO: 1272961 - RNA, 17 nt, Human
ugagauuuauuaaagaa

SEQ ID NO: 1272962 - RNA, 21 nt, Human
ugagauuuauuaaagaaaaaa

SEQ ID NO: 1272963 - RNA, 22 nt, Human
ugagaugggcuucccaagggcu

SEQ ID NO: 1272964 - RNA, 23 nt, Human
ugagauguagccccucuccugga

SEQ ID NO: 1272965 - RNA, 17 nt, Human
ugagaugcuggcuuggg

SEQ ID NO: 1272966 - RNA, 12 nt, Human
ugagaugcuggc

SEQ ID NO: 1272967 - RNA, 15 nt, Human
ugagaugcuggcuug

SEQ ID NO: 1272968 - RNA, 18 nt, Human
ugagauggagucuugcuc

SEQ ID NO: 1272969 - RNA, 17 nt, Human
ugagauggagucuugcu

SEQ ID NO: 1272970 - RNA, 16 nt, Human
ugagauggcucccagg

SEQ ID NO: 1272971 - RNA, 19 nt, Human
ugagacagaaucucagucu

SEQ ID NO: 1272972 - RNA, 13 nt, Human
ugagagaaaauaa

SEQ ID NO: 1272973 - RNA, 16 nt, Human
ugagagacacacugaa

SEQ ID NO: 1272974 - RNA, 17 nt, Human
ugagagacacacugaag

SEQ ID NO: 1272975 - RNA, 19 nt, Human
ugagagacacacugaagaa

SEQ ID NO: 1272976 - RNA, 20 nt, Human
ugagagacacacugaagaag

SEQ ID NO: 1272977 - RNA, 12 nt, Human
ugagacagcucu

SEQ ID NO: 1272978 - RNA, 20 nt, Human
ugagacucugucucagucca

SEQ ID NO: 1272979 - RNA, 15 nt, Human
agauuuuccugaaaa

SEQ ID NO: 1272980 - RNA, 13 nt, Human
agauuuuacauga

SEQ ID NO: 1272981 - RNA, 16 nt, Human
agauuuuacaugaagu

SEQ ID NO: 1272982 - RNA, 20 nt, Human
agauuuuacaugaaguauuu

SEQ ID NO: 1272983 - RNA, 16 nt, Human
agauuuuccugaaaac

SEQ ID NO: 1272984 - RNA, 19 nt, Human
agauuuuacaugaaguauu

SEQ ID NO: 1272985 - RNA, 16 nt, Human
agauuuucugcuacuu

SEQ ID NO: 1272986 - RNA, 21 nt, Human
ugagaagcugcucaacuugca

SEQ ID NO: 1272987 - RNA, 14 nt, Human
ugagaaucauuuag

SEQ ID NO: 1272988 - RNA, 19 nt, Human
ugagaaucauuuagcaugu

SEQ ID NO: 1272989 - RNA, 17 nt, Human
ugagaagcugcucaacu

SEQ ID NO: 1272990 - RNA, 16 nt, Human
ugagaagcugcucaac

SEQ ID NO: 1272991 - RNA, 14 nt, Human
ugagaagcugcuca

SEQ ID NO: 1272992 - RNA, 12 nt, Human
ugagaagcucug

SEQ ID NO: 1272993 - RNA, 13 nt, Human
ugagaagcugcuc

SEQ ID NO: 1272994 - RNA, 20 nt, Human
ugagacagaaucucgcucug

SEQ ID NO: 1272995 - RNA, 16 nt, Human
ugagaauguaucccca

SEQ ID NO: 1272996 - RNA, 13 nt, Human
ugagaaucccaaa

SEQ ID NO: 1272997 - RNA, 20 nt, Human
ugagaaucccaaauuugauu

SEQ ID NO: 1272998 - RNA, 21 nt, Human
ugagaaucccaaauuugauug

SEQ ID NO: 1272999 - RNA, 22 nt, Human
ugagaaucccaaauuugauuga

SEQ ID NO: 1273000 - RNA, 12 nt, Human
ugagaaucuacc

SEQ ID NO: 1273001 - RNA, 21 nt, Human
ugagaaucuacccccagaucc

SEQ ID NO: 1273002 - RNA, 18 nt, Human
ugagaaucuauauuuaac

SEQ ID NO: 1273003 - RNA, 23 nt, Human
ugagaaucuauauuuaacaagau

SEQ ID NO: 1273004 - RNA, 14 nt, Human
agcacagcuugacc

SEQ ID NO: 1273005 - RNA, 12 nt, Human
agcaauaugcau

SEQ ID NO: 1273006 - RNA, 18 nt, Human
agcacagcuugaccugag

SEQ ID NO: 1273007 - RNA, 20 nt, Human
agcacagcuugaccugaggc

SEQ ID NO: 1273008 - RNA, 12 nt, Human
agcacaggcuaa

SEQ ID NO: 1273009 - RNA, 17 nt, Human
agcacaggcuaauuuuu

SEQ ID NO: 1273010 - RNA, 16 nt, Human
agcacaggcuaauuuu

SEQ ID NO: 1273011 - RNA, 14 nt, Human
agcaccuccucagc

SEQ ID NO: 1273012 - RNA, 15 nt, Human
agcaccuccucagcc

SEQ ID NO: 1273013 - RNA, 16 nt, Human
agcaccuccucagccu

SEQ ID NO: 1273014 - RNA, 18 nt, Human
agcaccuccucagccuga

SEQ ID NO: 1273015 - RNA, 17 nt, Human
agcaccuagccucgcuc

SEQ ID NO: 1273016 - RNA, 19 nt, Human
agcaccggaccagccuggc

SEQ ID NO: 1273017 - RNA, 18 nt, Human
agcaccguucugugcaca

SEQ ID NO: 1273018 - RNA, 15 nt, Human
agcaccuacuuacau

SEQ ID NO: 1273019 - RNA, 16 nt, Human
agcacaugugcugccc

SEQ ID NO: 1273020 - RNA, 16 nt, Human
agcaccggaccagccu

SEQ ID NO: 1273021 - RNA, 17 nt, Human
agcaccggaccagccug

SEQ ID NO: 1273022 - RNA, 18 nt, Human
agcaccggaccagccugg

SEQ ID NO: 1273023 - RNA, 23 nt, Human
agcaccggaccagccuggcccac

SEQ ID NO: 1273024 - RNA, 15 nt, Human
agcaccguucugugc

SEQ ID NO: 1273025 - RNA, 16 nt, Human
agcaccguucugugca

SEQ ID NO: 1273026 - RNA, 17 nt, Human
agcaccguucugugcac

SEQ ID NO: 1273027 - RNA, 15 nt, Human
agcaagucagaauag

SEQ ID NO: 1273028 - RNA, 13 nt, Human
agcaaguaaaaag

SEQ ID NO: 1273029 - RNA, 18 nt, Human
agcaaguaaaaaggcuaa

SEQ ID NO: 1273030 - RNA, 17 nt, Human
agcaagcuuaauggcug

SEQ ID NO: 1273031 - RNA, 12 nt, Human
agcaaggcccga

SEQ ID NO: 1273032 - RNA, 14 nt, Human
agcaaggcccgagc

SEQ ID NO: 1273033 - RNA, 17 nt, Human
agcaaggcccgagcagc

SEQ ID NO: 1273034 - RNA, 18 nt, Human
agcaaggcccgagcagcu

SEQ ID NO: 1273035 - RNA, 19 nt, Human
agcaaggcccgagcagcug

SEQ ID NO: 1273036 - RNA, 22 nt, Human
agcaaggcccgagcagcugagc

SEQ ID NO: 1273037 - RNA, 20 nt, Human
agcaaggcccgagcagcuga

SEQ ID NO: 1273038 - RNA, 21 nt, Human
agcaaggcccgagcagcugag

SEQ ID NO: 1273039 - RNA, 14 nt, Human
ugagcauuagauuu

SEQ ID NO: 1273040 - RNA, 16 nt, Human
ugagcauguuacugac

SEQ ID NO: 1273041 - RNA, 14 nt, Human
ugagcauguuuaga

SEQ ID NO: 1273042 - RNA, 15 nt, Human
ugagcauguuuagac

SEQ ID NO: 1273043 - RNA, 23 nt, Human
ugagcauguuuagacuuuaacau

SEQ ID NO: 1273044 - RNA, 16 nt, Human
ugagcauuagauuucu

SEQ ID NO: 1273045 - RNA, 24 nt, Human
ugagcauguuuagacuuuaacaua

SEQ ID NO: 1273046 - RNA, 15 nt, Human
ugagcaaauguggcu

SEQ ID NO: 1273047 - RNA, 18 nt, Human
ugagcaucugucccccuu

SEQ ID NO: 1273048 - RNA, 16 nt, Human
ugagcaaaucaccaca

SEQ ID NO: 1273049 - RNA, 19 nt, Human
ugagcauggaacacuucga

SEQ ID NO: 1273050 - RNA, 15 nt, Human
ugagcauguuacuga

SEQ ID NO: 1273051 - RNA, 18 nt, Human
ugagauuuauuaaagaaa

SEQ ID NO: 1273052 - RNA, 11 nt, Human
ugagccacugc

SEQ ID NO: 1273053 - RNA, 15 nt, Human
agcaagcaagaggcc

SEQ ID NO: 1273054 - RNA, 15 nt, Human
agcaagcauucagaa

SEQ ID NO: 1273055 - RNA, 18 nt, Human
agcaagcauucagaagaa

SEQ ID NO: 1273056 - RNA, 21 nt, Human
agcaagcauucagaagaaaaa

SEQ ID NO: 1273057 - RNA, 22 nt, Human
agcaagcauucagaagaaaaag

SEQ ID NO: 1273058 - RNA, 17 nt, Human
agcaagcugauuaaaug

SEQ ID NO: 1273059 - RNA, 21 nt, Human
agaugcaguucugaagaagau

SEQ ID NO: 1273060 - RNA, 20 nt, Human
agaugcaccaccaagccaag

SEQ ID NO: 1273061 - RNA, 18 nt, Human
agaugcauuuggguccag

SEQ ID NO: 1273062 - RNA, 19 nt, Human
agaugcauuuggguccagg

SEQ ID NO: 1273063 - RNA, 19 nt, Human
agaugcuagaacucccuuu

SEQ ID NO: 1273064 - RNA, 20 nt, Human
agaugcauuuggguccagga

SEQ ID NO: 1273065 - RNA, 21 nt, Human
agaugcauuuggguccaggag

SEQ ID NO: 1273066 - RNA, 23 nt, Human
agaugcauuuggguccaggagga

SEQ ID NO: 1273067 - RNA, 22 nt, Human
agaugcauuuggguccaggagg

SEQ ID NO: 1273068 - RNA, 18 nt, Human
agaugcaccaccaagcca

SEQ ID NO: 1273069 - RNA, 21 nt, Human
agaugcaccaccaagccaagg

SEQ ID NO: 1273070 - RNA, 22 nt, Human
agauguagccccucuccuggaa

SEQ ID NO: 1273071 - RNA, 13 nt, Human
agauguaggaggg

SEQ ID NO: 1273072 - RNA, 14 nt, Human
agauguaggaggga

SEQ ID NO: 1273073 - RNA, 15 nt, Human
agauguaggagggac

SEQ ID NO: 1273074 - RNA, 14 nt, Human
agauguaguauuuu

SEQ ID NO: 1273075 - RNA, 14 nt, Human
agaugcuggcccag

SEQ ID NO: 1273076 - RNA, 15 nt, Human
agaugcuggcccagg

SEQ ID NO: 1273077 - RNA, 16 nt, Human
agaugcuggcccaggg

SEQ ID NO: 1273078 - RNA, 17 nt, Human
agaugcuggcccagggc

SEQ ID NO: 1273079 - RNA, 18 nt, Human
agaugcuggcccagggcc

SEQ ID NO: 1273080 - RNA, 19 nt, Human
agaugcuggcccagggccc

SEQ ID NO: 1273081 - RNA, 22 nt, Human
agaugcuagaacucccuuucaa

SEQ ID NO: 1273082 - RNA, 21 nt, Human
agaugcuagaacucccuuuca

SEQ ID NO: 1273083 - RNA, 15 nt, Human
agaucccccagaaaa

SEQ ID NO: 1273084 - RNA, 19 nt, Human
agaucccccagaaaagaaa

SEQ ID NO: 1273085 - RNA, 13 nt, Human
agaucccccagaa

SEQ ID NO: 1273086 - RNA, 18 nt, Human
agauccccaagccuggca

SEQ ID NO: 1273087 - RNA, 14 nt, Human
agauccuaaggguc

SEQ ID NO: 1273088 - RNA, 21 nt, Human
agauccuaagggucgaaagcu

SEQ ID NO: 1273089 - RNA, 23 nt, Human
agauccuaagggucgaaagcucu

SEQ ID NO: 1273090 - RNA, 16 nt, Human
agauccuagauccuaa

SEQ ID NO: 1273091 - RNA, 18 nt, Human
agauccuagauccuaagg

SEQ ID NO: 1273092 - RNA, 22 nt, Human
ugaccaaccuuuucccaaccau

SEQ ID NO: 1273093 - RNA, 15 nt, Human
ugaccaagauacuua

SEQ ID NO: 1273094 - RNA, 13 nt, Human
agauccuggaaau

SEQ ID NO: 1273095 - RNA, 12 nt, Human
agauccuccuca

SEQ ID NO: 1273096 - RNA, 13 nt, Human
agauccuccucau

SEQ ID NO: 1273097 - RNA, 12 nt, Human
agauccuccugc

SEQ ID NO: 1273098 - RNA, 17 nt, Human
agauccugcgggugggg

SEQ ID NO: 1273099 - RNA, 14 nt, Human
agauccuggaaauc

SEQ ID NO: 1273100 - RNA, 18 nt, Human
agauccugcggguggggc

SEQ ID NO: 1273101 - RNA, 15 nt, Human
agauccuccucauuc

SEQ ID NO: 1273102 - RNA, 11 nt, Human
agaucuaaaua

SEQ ID NO: 1273103 - RNA, 19 nt, Human
agaucuaaauaaaaugcua

SEQ ID NO: 1273104 - RNA, 18 nt, Human
agaucuaaauaaaaugcu

SEQ ID NO: 1273105 - RNA, 23 nt, Human
ugacacccuucucccacucuccu

SEQ ID NO: 1273106 - RNA, 21 nt, Human
ugacacccuucucccacucuc

SEQ ID NO: 1273107 - RNA, 15 nt, Human
ugacaccuaacucuu

SEQ ID NO: 1273108 - RNA, 18 nt, Human
ugacaccuaacucuucuu

SEQ ID NO: 1273109 - RNA, 17 nt, Human
ugacaccucuuuuuucg

SEQ ID NO: 1273110 - RNA, 15 nt, Human
ugacaccugcugaga

SEQ ID NO: 1273111 - RNA, 21 nt, Human
ugaaugcuuaaagaauucaaa

SEQ ID NO: 1273112 - RNA, 22 nt, Human
ugaaugcuuaaagaauucaaau

SEQ ID NO: 1273113 - RNA, 15 nt, Human
ugacacccuucuccc

SEQ ID NO: 1273114 - RNA, 16 nt, Human
ugacacccuucuccca

SEQ ID NO: 1273115 - RNA, 19 nt, Human
ugacacccuucucccacuc

SEQ ID NO: 1273116 - RNA, 20 nt, Human
ugacacccuucucccacucu

SEQ ID NO: 1273117 - RNA, 17 nt, Human
ugaaugcuuaaagaauu

SEQ ID NO: 1273118 - RNA, 19 nt, Human
ugaaugccuaugguggauc

SEQ ID NO: 1273119 - RNA, 19 nt, Human
ugaaugcugggacucagcc

SEQ ID NO: 1273120 - RNA, 14 nt, Human
ugaaugcugggacu

SEQ ID NO: 1273121 - RNA, 15 nt, Human
ugaaugcugggacuc

SEQ ID NO: 1273122 - RNA, 13 nt, Human
ugaaucaauaaua

SEQ ID NO: 1273123 - RNA, 15 nt, Human
ugaaucaauaauaua

SEQ ID NO: 1273124 - RNA, 16 nt, Human
ugaaucaauaauauau

SEQ ID NO: 1273125 - RNA, 17 nt, Human
ugaaucaauaauauauu

SEQ ID NO: 1273126 - RNA, 19 nt, Human
ugaaucaauaauauauuuu

SEQ ID NO: 1273127 - RNA, 20 nt, Human
ugaaucaauaauauauuuuc

SEQ ID NO: 1273128 - RNA, 22 nt, Human
ugaaucaauaauauauuuucug

SEQ ID NO: 1273129 - RNA, 14 nt, Human
ugaaugccguggau

SEQ ID NO: 1273130 - RNA, 11 nt, Human
ugaaugcuggg

SEQ ID NO: 1273131 - RNA, 12 nt, Human
ugaaugcuggga

SEQ ID NO: 1273132 - RNA, 13 nt, Human
ugaaugcugggac

SEQ ID NO: 1273133 - RNA, 17 nt, Human
ugacacugcaauuggca

SEQ ID NO: 1273134 - RNA, 13 nt, Human
ugacacugcucua

SEQ ID NO: 1273135 - RNA, 15 nt, Human
ugacacugcucuaac

SEQ ID NO: 1273136 - RNA, 16 nt, Human
ugacacugcucuaaca

SEQ ID NO: 1273137 - RNA, 19 nt, Human
ugacacugcucuaacagcc

SEQ ID NO: 1273138 - RNA, 21 nt, Human
ugacacugcucuaacagcccu

SEQ ID NO: 1273139 - RNA, 22 nt, Human
ugacacugcucuaacagcccuc

SEQ ID NO: 1273140 - RNA, 20 nt, Human
ugacacugcuggagaggccc

SEQ ID NO: 1273141 - RNA, 16 nt, Human
ugacacuuaaaaaugg

SEQ ID NO: 1273142 - RNA, 15 nt, Human
ugacacuuaaaaaug

SEQ ID NO: 1273143 - RNA, 12 nt, Human
ugacagcagcau

SEQ ID NO: 1273144 - RNA, 16 nt, Human
ugacagcagcaucucu

SEQ ID NO: 1273145 - RNA, 14 nt, Human
ugacagcagcaucu

SEQ ID NO: 1273146 - RNA, 18 nt, Human
ugacagccucagugaccc

SEQ ID NO: 1273147 - RNA, 15 nt, Human
ugacagccucaguga

SEQ ID NO: 1273148 - RNA, 15 nt, Human
ugacagguaaacuau

SEQ ID NO: 1273149 - RNA, 15 nt, Human
ugacauuccuugcug

SEQ ID NO: 1273150 - RNA, 15 nt, Human
ugacauucugaaugc

SEQ ID NO: 1273151 - RNA, 16 nt, Human
ugacauucugaaugcu

SEQ ID NO: 1273152 - RNA, 15 nt, Human
ugacauucaccugcc

SEQ ID NO: 1273153 - RNA, 18 nt, Human
ugacauucaccugcccca

SEQ ID NO: 1273154 - RNA, 21 nt, Human
ugacagggcggggguggcggc

SEQ ID NO: 1273155 - RNA, 20 nt, Human
ugacauuaugugguuuuaga

SEQ ID NO: 1273156 - RNA, 12 nt, Human
ugacauucaccu

SEQ ID NO: 1273157 - RNA, 18 nt, Human
ugacauucugaaugcuuc

SEQ ID NO: 1273158 - RNA, 20 nt, Human
ugacauuuauauauugaauu

SEQ ID NO: 1273159 - RNA, 18 nt, Human
ugacauuuauuuuucauu

SEQ ID NO: 1273160 - RNA, 21 nt, Human
ugacauuuauuuuucauuuag

SEQ ID NO: 1273161 - RNA, 21 nt, Human
ugacauuuggaguguuccccu

SEQ ID NO: 1273162 - RNA, 21 nt, Human
ugacauuugggagacauguga

SEQ ID NO: 1273163 - RNA, 22 nt, Human
ugacauuugggagacaugugac

SEQ ID NO: 1273164 - RNA, 23 nt, Human
ugacauuugggagacaugugaca

SEQ ID NO: 1273165 - RNA, 24 nt, Human
ugacauuugggagacaugugacau

SEQ ID NO: 1273166 - RNA, 20 nt, Human
agauuacaaaucagaaguca

SEQ ID NO: 1273167 - RNA, 14 nt, Human
agauuaccuccuga

SEQ ID NO: 1273168 - RNA, 19 nt, Human
ugacuuauaguacaugaua

SEQ ID NO: 1273169 - RNA, 17 nt, Human
ugacuuauaguacauga

SEQ ID NO: 1273170 - RNA, 15 nt, Human
ugacuuauaguacau

SEQ ID NO: 1273171 - RNA, 14 nt, Human
agauuaagaaauag

SEQ ID NO: 1273172 - RNA, 15 nt, Human
agauuaagaaauaga

SEQ ID NO: 1273173 - RNA, 14 nt, Human
ugacuuauaguaca

SEQ ID NO: 1273174 - RNA, 13 nt, Human
ugacuuauaguac

SEQ ID NO: 1273175 - RNA, 14 nt, Human
ugacuuaguacaaa

SEQ ID NO: 1273176 - RNA, 16 nt, Human
ugacuuaguacaaagu

SEQ ID NO: 1273177 - RNA, 19 nt, Human
ugacuuaguacaaaguuuc

SEQ ID NO: 1273178 - RNA, 21 nt, Human
agauuagagccuguaaacuuu

SEQ ID NO: 1273179 - RNA, 13 nt, Human
agauucagcuagu

SEQ ID NO: 1273180 - RNA, 16 nt, Human
agauucagguaauaca

SEQ ID NO: 1273181 - RNA, 18 nt, Human
agauucagguaauacaaa

SEQ ID NO: 1273182 - RNA, 20 nt, Human
agauucagguaauacaaacu

SEQ ID NO: 1273183 - RNA, 14 nt, Human
agauuauagauucu

SEQ ID NO: 1273184 - RNA, 15 nt, Human
agauuauagauucua

SEQ ID NO: 1273185 - RNA, 16 nt, Human
agauuauagauucuaa

SEQ ID NO: 1273186 - RNA, 17 nt, Human
agauuauagauucuaaa

SEQ ID NO: 1273187 - RNA, 18 nt, Human
agauuauagauucuaaag

SEQ ID NO: 1273188 - RNA, 19 nt, Human
agauuauagauucuaaaga

SEQ ID NO: 1273189 - RNA, 20 nt, Human
agauuauagauucuaaagau

SEQ ID NO: 1273190 - RNA, 21 nt, Human
agauuauagauucuaaagauu

SEQ ID NO: 1273191 - RNA, 21 nt, Human
agauuccagagaguggcuccu

SEQ ID NO: 1273192 - RNA, 22 nt, Human
agauuccagagaguggcuccuc

SEQ ID NO: 1273193 - RNA, 19 nt, Human
agauuccauugguccaaga

SEQ ID NO: 1273194 - RNA, 20 nt, Human
agauuccauugguccaagau

SEQ ID NO: 1273195 - RNA, 21 nt, Human
agauuccauugguccaagauu

SEQ ID NO: 1273196 - RNA, 22 nt, Human
agauuccauugguccaagauuc

SEQ ID NO: 1273197 - RNA, 23 nt, Human
agauuccauugguccaagauucc

SEQ ID NO: 1273198 - RNA, 13 nt, Human
agauucccagagc

SEQ ID NO: 1273199 - RNA, 16 nt, Human
agauucccagagcaaa

SEQ ID NO: 1273200 - RNA, 12 nt, Human
agauuguuugca

SEQ ID NO: 1273201 - RNA, 12 nt, Human
agauuucauagu

SEQ ID NO: 1273202 - RNA, 18 nt, Human
agauuucauaguucagaa

SEQ ID NO: 1273203 - RNA, 19 nt, Human
agauuucauaguucagaau

SEQ ID NO: 1273204 - RNA, 20 nt, Human
agauuucauaguucagaauu

SEQ ID NO: 1273205 - RNA, 19 nt, Human
agauuugugugcaucaggc

SEQ ID NO: 1273206 - RNA, 15 nt, Human
agauuuguuuuuaaa

SEQ ID NO: 1273207 - RNA, 17 nt, Human
agauuuguuuuuaaacu

SEQ ID NO: 1273208 - RNA, 19 nt, Human
agauuuguuuuuaaacugu

SEQ ID NO: 1273209 - RNA, 20 nt, Human
agauuuguuuuuaaacugua

SEQ ID NO: 1273210 - RNA, 21 nt, Human
agauuuguuuuuaaacuguac

SEQ ID NO: 1273211 - RNA, 22 nt, Human
agauuuguuuuuaaacuguaca

SEQ ID NO: 1273212 - RNA, 23 nt, Human
agauuuguuuuuaaacuguacag

SEQ ID NO: 1273213 - RNA, 15 nt, Human
agauuuuaaucaaau

SEQ ID NO: 1273214 - RNA, 16 nt, Human
agauuuuaaucaaauu

SEQ ID NO: 1273215 - RNA, 18 nt, Human
agauuuuaaucaaauuug

SEQ ID NO: 1273216 - RNA, 16 nt, Human
ugaccugccucccuuc

SEQ ID NO: 1273217 - RNA, 22 nt, Human
agauguauguacuucaugcugu

SEQ ID NO: 1273218 - RNA, 16 nt, Human
agauguaggagggacu

SEQ ID NO: 1273219 - RNA, 13 nt, Human
agaugucuuggaa

SEQ ID NO: 1273220 - RNA, 14 nt, Human
agaugucuuggaac

SEQ ID NO: 1273221 - RNA, 18 nt, Human
agaugucuuggaacauug

SEQ ID NO: 1273222 - RNA, 18 nt, Human
agaugucuuuucccauuu

SEQ ID NO: 1273223 - RNA, 22 nt, Human
agaugucuuuucccauuuaucu

SEQ ID NO: 1273224 - RNA, 21 nt, Human
ugaccugccucccuucaugca

SEQ ID NO: 1273225 - RNA, 16 nt, Human
ugaccugcuaggccag

SEQ ID NO: 1273226 - RNA, 18 nt, Human
ugaccugcuaggccagag

SEQ ID NO: 1273227 - RNA, 22 nt, Human
ugaccugcuaggccagagccca

SEQ ID NO: 1273228 - RNA, 23 nt, Human
ugaccugccucccuucaugcaug

SEQ ID NO: 1273229 - RNA, 19 nt, Human
ugaccugccucccuucaug

SEQ ID NO: 1273230 - RNA, 17 nt, Human
ugaccugccucccuuca

SEQ ID NO: 1273231 - RNA, 19 nt, Human
ugaccugcuaggccagagc

SEQ ID NO: 1273232 - RNA, 11 nt, Human
ugaccugcuga

SEQ ID NO: 1273233 - RNA, 13 nt, Human
ugaccugcugacc

SEQ ID NO: 1273234 - RNA, 15 nt, Human
ugaccugcugaccug

SEQ ID NO: 1273235 - RNA, 18 nt, Human
ugaccugcugaccugugc

SEQ ID NO: 1273236 - RNA, 12 nt, Human
ugaccugcugag

SEQ ID NO: 1273237 - RNA, 13 nt, Human
ugaccugcugagc

SEQ ID NO: 1273238 - RNA, 14 nt, Human
ugaccugcugagcu

SEQ ID NO: 1273239 - RNA, 15 nt, Human
ugaccugcugagcuc

SEQ ID NO: 1273240 - RNA, 16 nt, Human
ugaccugcugagcucu

SEQ ID NO: 1273241 - RNA, 17 nt, Human
ugaccugcugagcucug

SEQ ID NO: 1273242 - RNA, 18 nt, Human
ugaccugcugagcucuga

SEQ ID NO: 1273243 - RNA, 19 nt, Human
ugaccugcugagcucugag

SEQ ID NO: 1273244 - RNA, 20 nt, Human
ugaccugcugagcucugaga

SEQ ID NO: 1273245 - RNA, 22 nt, Human
ugaccugcugagcucugagagg

SEQ ID NO: 1273246 - RNA, 21 nt, Human
ugaccugcugagcucugagag

SEQ ID NO: 1273247 - RNA, 16 nt, Human
ugaccuggauggggca

SEQ ID NO: 1273248 - RNA, 22 nt, Human
ugaccuggauggggcaggccac

SEQ ID NO: 1273249 - RNA, 12 nt, Human
ugaccuggcccc

SEQ ID NO: 1273250 - RNA, 15 nt, Human
ugaccuggcccccuc

SEQ ID NO: 1273251 - RNA, 12 nt, Human
ugacuauguaaa

SEQ ID NO: 1273252 - RNA, 17 nt, Human
ugacuauucuugaugua

SEQ ID NO: 1273253 - RNA, 19 nt, Human
ugacuauucuugauguaaa

SEQ ID NO: 1273254 - RNA, 20 nt, Human
ugacuauucuugauguaaaa

SEQ ID NO: 1273255 - RNA, 22 nt, Human
ugacuauucuugauguaaaauc

SEQ ID NO: 1273256 - RNA, 13 nt, Human
ugacuauguaaac

SEQ ID NO: 1273257 - RNA, 21 nt, Human
ugacucguauaugucucaggu

SEQ ID NO: 1273258 - RNA, 18 nt, Human
ugacucgguuucuccaaa

SEQ ID NO: 1273259 - RNA, 24 nt, Human
ugacucuaagguuaucuacuuuua

SEQ ID NO: 1273260 - RNA, 21 nt, Human
ugacuauucuugauguaaaau

SEQ ID NO: 1273261 - RNA, 14 nt, Human
ugacucgguuucuc

SEQ ID NO: 1273262 - RNA, 15 nt, Human
ugacucgguuucucc

SEQ ID NO: 1273263 - RNA, 16 nt, Human
ugacucgguuucucca

SEQ ID NO: 1273264 - RNA, 19 nt, Human
ugacuguuuuucggacagu

SEQ ID NO: 1273265 - RNA, 20 nt, Human
ugacuguuuuucggacaguu

SEQ ID NO: 1273266 - RNA, 17 nt, Human
ucuuuuuucaaaagaaa

SEQ ID NO: 1273267 - RNA, 13 nt, Human
ucuuuuuucguuu

SEQ ID NO: 1273268 - RNA, 22 nt, Human
ucuuuuuuggccaucugcuccu

SEQ ID NO: 1273269 - RNA, 21 nt, Human
ucuuuuuuggccaucugcucc

SEQ ID NO: 1273270 - RNA, 15 nt, Human
ucuuuuuuucuugaa

SEQ ID NO: 1273271 - RNA, 15 nt, Human
ucuuuuuuuguauag

SEQ ID NO: 1273272 - RNA, 17 nt, Human
ucuuuuuuuguauaguu

SEQ ID NO: 1273273 - RNA, 22 nt, Human
ucuuuuuucuaaaguaaaaaca

SEQ ID NO: 1273274 - RNA, 21 nt, Human
ucuuuuuucuaaaguaaaaac

SEQ ID NO: 1273275 - RNA, 15 nt, Human
agagacacugguggg

SEQ ID NO: 1273276 - RNA, 15 nt, Human
ucuuugucagggagu

SEQ ID NO: 1273277 - RNA, 21 nt, Human
ucuuugucagggaguguuccc

SEQ ID NO: 1273278 - RNA, 16 nt, Human
agagacacacugaaga

SEQ ID NO: 1273279 - RNA, 15 nt, Human
agagacagaaagcag

SEQ ID NO: 1273280 - RNA, 14 nt, Human
agagacagaaagca

SEQ ID NO: 1273281 - RNA, 16 nt, Human
agagacacuggugggg

SEQ ID NO: 1273282 - RNA, 15 nt, Human
agacuuuuaugauac

SEQ ID NO: 1273283 - RNA, 12 nt, Human
agacuuuuauga

SEQ ID NO: 1273284 - RNA, 19 nt, Human
agacugggaaggcuuggga

SEQ ID NO: 1273285 - RNA, 21 nt, Human
agacugggaaggcuugggauu

SEQ ID NO: 1273286 - RNA, 22 nt, Human
agacugggaaggcuugggauuu

SEQ ID NO: 1273287 - RNA, 23 nt, Human
agacugggaaggcuugggauuug

SEQ ID NO: 1273288 - RNA, 12 nt, Human
agacugggcuga

SEQ ID NO: 1273289 - RNA, 14 nt, Human
agacugggcugagg

SEQ ID NO: 1273290 - RNA, 15 nt, Human
agacugggcugaggg

SEQ ID NO: 1273291 - RNA, 16 nt, Human
agacugggcugaggga

SEQ ID NO: 1273292 - RNA, 20 nt, Human
agacugggcugagggagccu

SEQ ID NO: 1273293 - RNA, 19 nt, Human
agacucuacccauauuaca

SEQ ID NO: 1273294 - RNA, 16 nt, Human
agacucuagaguccaa

SEQ ID NO: 1273295 - RNA, 17 nt, Human
agacucuagaguccaag

SEQ ID NO: 1273296 - RNA, 19 nt, Human
agacucuagaguccaaggu

SEQ ID NO: 1273297 - RNA, 20 nt, Human
agacucuagaguccaagguu

SEQ ID NO: 1273298 - RNA, 21 nt, Human
agacuccagcuggguuggaaa

SEQ ID NO: 1273299 - RNA, 14 nt, Human
agacuccagaccug

SEQ ID NO: 1273300 - RNA, 18 nt, Human
agacuccagaccugaggc

SEQ ID NO: 1273301 - RNA, 16 nt, Human
agacucccaagcugga

SEQ ID NO: 1273302 - RNA, 17 nt, Human
agacucccauuccugaa

SEQ ID NO: 1273303 - RNA, 19 nt, Human
agacucccauuccugaaga

SEQ ID NO: 1273304 - RNA, 23 nt, Human
agacucccauuccugaagaacca

SEQ ID NO: 1273305 - RNA, 17 nt, Human
agacuccuagcuguccu

SEQ ID NO: 1273306 - RNA, 22 nt, Human
agacuccuagcuguccuuuuuc

SEQ ID NO: 1273307 - RNA, 21 nt, Human
agacucuagaguccaagguuu

SEQ ID NO: 1273308 - RNA, 17 nt, Human
agacucugucuaccugg

SEQ ID NO: 1273309 - RNA, 11 nt, Human
agacuggcuuu

SEQ ID NO: 1273310 - RNA, 18 nt, Human
agacuggcuuuuauuaau

SEQ ID NO: 1273311 - RNA, 22 nt, Human
agacuggcuuuuauuaaugcac

SEQ ID NO: 1273312 - RNA, 23 nt, Human
agacuggcuuuuauuaaugcacu

SEQ ID NO: 1273313 - RNA, 17 nt, Human
ucuuuaaugcaauauac

SEQ ID NO: 1273314 - RNA, 12 nt, Human
ucuuucccuccu

SEQ ID NO: 1273315 - RNA, 13 nt, Human
ucuuucccuccuu

SEQ ID NO: 1273316 - RNA, 16 nt, Human
ucuuucccuccuuggu

SEQ ID NO: 1273317 - RNA, 14 nt, Human
ucuuucccuggucc

SEQ ID NO: 1273318 - RNA, 14 nt, Human
ucuuucccuccuug

SEQ ID NO: 1273319 - RNA, 17 nt, Human
ucuuucucacuaaaucu

SEQ ID NO: 1273320 - RNA, 18 nt, Human
ucuuucucacuaaaucuu

SEQ ID NO: 1273321 - RNA, 14 nt, Human
ugaaaauuaacaug

SEQ ID NO: 1273322 - RNA, 20 nt, Human
ugaaaaugugcuauacugca

SEQ ID NO: 1273323 - RNA, 21 nt, Human
ugaaaaugugcuauacugcau

SEQ ID NO: 1273324 - RNA, 22 nt, Human
ugaaaaugugcuauacugcaua

SEQ ID NO: 1273325 - RNA, 13 nt, Human
ugaaagaaaauaa

SEQ ID NO: 1273326 - RNA, 12 nt, Human
ugaaaaugcugg

SEQ ID NO: 1273327 - RNA, 16 nt, Human
ugaaaaugggcucaac

SEQ ID NO: 1273328 - RNA, 13 nt, Human
ugaaaaugcuggc

SEQ ID NO: 1273329 - RNA, 16 nt, Human
ugaaaaugucuugugu

SEQ ID NO: 1273330 - RNA, 17 nt, Human
ugaaaaugugcuauacu

SEQ ID NO: 1273331 - RNA, 19 nt, Human
ugaaaaugugcuauacugc

SEQ ID NO: 1273332 - RNA, 14 nt, Human
ugaaaacacauuug

SEQ ID NO: 1273333 - RNA, 17 nt, Human
ugaaaacacauuugcuu

SEQ ID NO: 1273334 - RNA, 14 nt, Human
ucuuuuuuugugau

SEQ ID NO: 1273335 - RNA, 16 nt, Human
ucuuuuuuugugaugu

SEQ ID NO: 1273336 - RNA, 18 nt, Human
ucuuuuuuuguauaguua

SEQ ID NO: 1273337 - RNA, 23 nt, Human
ucuuuuuuuguauaguuaacaca

SEQ ID NO: 1273338 - RNA, 20 nt, Human
ucuuuuuuuucuauuucacu

SEQ ID NO: 1273339 - RNA, 23 nt, Human
ucuuuuuuuuuuuuuaauaaauu

SEQ ID NO: 1273340 - RNA, 22 nt, Human
ucuuuuuuuuuuuuuaauaaau

SEQ ID NO: 1273341 - RNA, 19 nt, Human
ugaaaacacauuugcuuuu

SEQ ID NO: 1273342 - RNA, 20 nt, Human
ugaaaauaaaaagaucacuu

SEQ ID NO: 1273343 - RNA, 21 nt, Human
ugaaaauaaaaagaucacuuu

SEQ ID NO: 1273344 - RNA, 13 nt, Human
ugaaaauaaagaa

SEQ ID NO: 1273345 - RNA, 14 nt, Human
ugaaaauaaagaau

SEQ ID NO: 1273346 - RNA, 15 nt, Human
ugaaaauaaagaaug

SEQ ID NO: 1273347 - RNA, 16 nt, Human
ugaaaauaaagaaugg

SEQ ID NO: 1273348 - RNA, 17 nt, Human
ugaaaauaaaguguaua

SEQ ID NO: 1273349 - RNA, 16 nt, Human
ugaaaauaagaauaga

SEQ ID NO: 1273350 - RNA, 17 nt, Human
ugaaaauaaagaaugga

SEQ ID NO: 1273351 - RNA, 17 nt, Human
agagaguggcuggggca

SEQ ID NO: 1273352 - RNA, 15 nt, Human
agagaguugaaccua

SEQ ID NO: 1273353 - RNA, 13 nt, Human
agagauacagagg

SEQ ID NO: 1273354 - RNA, 13 nt, Human
agagaguggcugg

SEQ ID NO: 1273355 - RNA, 14 nt, Human
agagaguggcuggg

SEQ ID NO: 1273356 - RNA, 16 nt, Human
agagaguggcuggggc

SEQ ID NO: 1273357 - RNA, 17 nt, Human
agagaguggcuccuccc

SEQ ID NO: 1273358 - RNA, 21 nt, Human
agagaucccaaguagaaucuc

SEQ ID NO: 1273359 - RNA, 13 nt, Human
agagaugcagaaa

SEQ ID NO: 1273360 - RNA, 17 nt, Human
agagaugcagaaauauu

SEQ ID NO: 1273361 - RNA, 16 nt, Human
agagaugcagaaauau

SEQ ID NO: 1273362 - RNA, 13 nt, Human
agagaugccuccc

SEQ ID NO: 1273363 - RNA, 14 nt, Human
agagaugccucccu

SEQ ID NO: 1273364 - RNA, 18 nt, Human
agagaugccucccugagc

SEQ ID NO: 1273365 - RNA, 22 nt, Human
agagacugaauagauaugaaag

SEQ ID NO: 1273366 - RNA, 15 nt, Human
agagacuugggaaug

SEQ ID NO: 1273367 - RNA, 12 nt, Human
agagacuuguuu

SEQ ID NO: 1273368 - RNA, 18 nt, Human
agagacuuguuuuggaug

SEQ ID NO: 1273369 - RNA, 16 nt, Human
agagacuuguuuugga

SEQ ID NO: 1273370 - RNA, 17 nt, Human
ugaaagaggaaugaagu

SEQ ID NO: 1273371 - RNA, 18 nt, Human
ugaaagaggaaugaagua

SEQ ID NO: 1273372 - RNA, 14 nt, Human
ugaaagagaaacac

SEQ ID NO: 1273373 - RNA, 22 nt, Human
ugaaauugaaccuuugugcccu

SEQ ID NO: 1273374 - RNA, 12 nt, Human
ugaaauuucaga

SEQ ID NO: 1273375 - RNA, 13 nt, Human
ugaaauugaaccu

SEQ ID NO: 1273376 - RNA, 17 nt, Human
ugaaauugaaccuuugu

SEQ ID NO: 1273377 - RNA, 19 nt, Human
ugaaauugaaccuuugugc

SEQ ID NO: 1273378 - RNA, 23 nt, Human
ugaaauagacccacaagaggcag

SEQ ID NO: 1273379 - RNA, 15 nt, Human
ugaaauuuccuggga

SEQ ID NO: 1273380 - RNA, 22 nt, Human
ugaaauuucagauucccagagc

SEQ ID NO: 1273381 - RNA, 21 nt, Human
ugaaauuuccugggagcuuuu

SEQ ID NO: 1273382 - RNA, 23 nt, Human
ugaaauuuccugggagcuuuugu

SEQ ID NO: 1273383 - RNA, 13 nt, Human
ugaaauuuuucuu

SEQ ID NO: 1273384 - RNA, 15 nt, Human
ugaaauuuuucuucu

SEQ ID NO: 1273385 - RNA, 14 nt, Human
ugaacaaagcagcc

SEQ ID NO: 1273386 - RNA, 15 nt, Human
ugaacaaagcagcca

SEQ ID NO: 1273387 - RNA, 16 nt, Human
ugaacaaagcagccac

SEQ ID NO: 1273388 - RNA, 17 nt, Human
ugaacaaagcagccacg

SEQ ID NO: 1273389 - RNA, 23 nt, Human
ugaacaaaguuuaccagaaagca

SEQ ID NO: 1273390 - RNA, 15 nt, Human
ugaacaaauggccuu

SEQ ID NO: 1273391 - RNA, 13 nt, Human
ugaaauaaacguc

SEQ ID NO: 1273392 - RNA, 18 nt, Human
ugaaauaaacgucuuaaa

SEQ ID NO: 1273393 - RNA, 22 nt, Human
ugaaauaaacgucuuaaauauu

SEQ ID NO: 1273394 - RNA, 23 nt, Human
ugaaauaaacgucuuaaauauuc

SEQ ID NO: 1273395 - RNA, 14 nt, Human
ugaaauaagccaga

SEQ ID NO: 1273396 - RNA, 15 nt, Human
ugaaauaagaauuca

SEQ ID NO: 1273397 - RNA, 21 nt, Human
ugaaauaccaaccugaagaca

SEQ ID NO: 1273398 - RNA, 20 nt, Human
ugaaauaagaauucagacau

SEQ ID NO: 1273399 - RNA, 20 nt, Human
agagauuaccuccugagaaa

SEQ ID NO: 1273400 - RNA, 23 nt, Human
agagauucugaacuaaagugcug

SEQ ID NO: 1273401 - RNA, 15 nt, Human
agagaugccucccug

SEQ ID NO: 1273402 - RNA, 21 nt, Human
agagauguguguugauacugu

SEQ ID NO: 1273403 - RNA, 22 nt, Human
agagauguguguugauacuguu

SEQ ID NO: 1273404 - RNA, 23 nt, Human
agagauguguguugauacuguug

SEQ ID NO: 1273405 - RNA, 24 nt, Human
agagauguguguugauacuguugc

SEQ ID NO: 1273406 - RNA, 16 nt, Human
agagauuaccuccuga

SEQ ID NO: 1273407 - RNA, 19 nt, Human
agagauuaccuccugagaa

SEQ ID NO: 1273408 - RNA, 23 nt, Human
agagauuggguuuuuggacuucu

SEQ ID NO: 1273409 - RNA, 23 nt, Human
ugaacuagaguuuagcuggaaaa

SEQ ID NO: 1273410 - RNA, 21 nt, Human
ugaacuaaagugcugcacuca

SEQ ID NO: 1273411 - RNA, 19 nt, Human
ugaacuaaagugcugcacu

SEQ ID NO: 1273412 - RNA, 23 nt, Human
ugaacguuuucuaauugcuuauu

SEQ ID NO: 1273413 - RNA, 19 nt, Human
ugaacguuuucuaauugcu

SEQ ID NO: 1273414 - RNA, 15 nt, Human
ugaacuaaagugcug

SEQ ID NO: 1273415 - RNA, 15 nt, Human
ugaacguuuucuaau

SEQ ID NO: 1273416 - RNA, 16 nt, Human
ugaacguuuucuaauu

SEQ ID NO: 1273417 - RNA, 17 nt, Human
ugaacguuuucuaauug

SEQ ID NO: 1273418 - RNA, 18 nt, Human
ugaacccgggaggcagag

SEQ ID NO: 1273419 - RNA, 22 nt, Human
ugaacccauauuuguacaccaa

SEQ ID NO: 1273420 - RNA, 12 nt, Human
ugaaccaccgcg

SEQ ID NO: 1273421 - RNA, 18 nt, Human
ugaacaaauuuacagaga

SEQ ID NO: 1273422 - RNA, 13 nt, Human
ugaacaaauuuac

SEQ ID NO: 1273423 - RNA, 17 nt, Human
ugaaccauuaaccagau

SEQ ID NO: 1273424 - RNA, 12 nt, Human
ugaacccaggac

SEQ ID NO: 1273425 - RNA, 22 nt, Human
ugaacccaggacaagcaugguc

SEQ ID NO: 1273426 - RNA, 13 nt, Human
ugaacccaggaca

SEQ ID NO: 1273427 - RNA, 15 nt, Human
ugaacuccugaccuc

SEQ ID NO: 1273428 - RNA, 20 nt, Human
ugaacuaccuugguuccccc

SEQ ID NO: 1273429 - RNA, 20 nt, Human
ugaacucacuuuccuccuga

SEQ ID NO: 1273430 - RNA, 13 nt, Human
ugaagaacaugug

SEQ ID NO: 1273431 - RNA, 14 nt, Human
ugaagaacauguga

SEQ ID NO: 1273432 - RNA, 19 nt, Human
ugaagaaccagucccccca

SEQ ID NO: 1273433 - RNA, 20 nt, Human
ugaagaaccaguccccccac

SEQ ID NO: 1273434 - RNA, 13 nt, Human
ugaagaacugagg

SEQ ID NO: 1273435 - RNA, 19 nt, Human
ugaagaacugaggaggaaa

SEQ ID NO: 1273436 - RNA, 14 nt, Human
ugaagaacugcagg

SEQ ID NO: 1273437 - RNA, 15 nt, Human
ugaagaacugcaggc

SEQ ID NO: 1273438 - RNA, 16 nt, Human
ugaagaacugcaggcc

SEQ ID NO: 1273439 - RNA, 17 nt, Human
ugaagaacugcaggccc

SEQ ID NO: 1273440 - RNA, 20 nt, Human
ugaagaacugcaggcccugg

SEQ ID NO: 1273441 - RNA, 14 nt, Human
ugaagacagaacca

SEQ ID NO: 1273442 - RNA, 19 nt, Human
ugaagacagaaccacaggg

SEQ ID NO: 1273443 - RNA, 13 nt, Human
ugaagacagaagu

SEQ ID NO: 1273444 - RNA, 12 nt, Human
agagcuggugcg

SEQ ID NO: 1273445 - RNA, 18 nt, Human
ugaagaacugcaggcccu

SEQ ID NO: 1273446 - RNA, 14 nt, Human
ugaacuccugccau

SEQ ID NO: 1273447 - RNA, 15 nt, Human
ugaagaaggugaaua

SEQ ID NO: 1273448 - RNA, 22 nt, Human
ugaagaagcuaaauccuuuacu

SEQ ID NO: 1273449 - RNA, 16 nt, Human
ugaagaauacuucuca

SEQ ID NO: 1273450 - RNA, 19 nt, Human
ugaagaauacuucucauuu

SEQ ID NO: 1273451 - RNA, 21 nt, Human
ugaagaauacuucucauuuuu

SEQ ID NO: 1273452 - RNA, 20 nt, Human
ugaagaauacuucucauuuu

SEQ ID NO: 1273453 - RNA, 22 nt, Human
ugaagaaugcacaagaauggau

SEQ ID NO: 1273454 - RNA, 13 nt, Human
ugaagaauguuaa

SEQ ID NO: 1273455 - RNA, 21 nt, Human
ugaagaauuauuuuuuuucuu

SEQ ID NO: 1273456 - RNA, 20 nt, Human
ugaagaauuauuuuuuuucu

SEQ ID NO: 1273457 - RNA, 22 nt, Human
agaguaauccaagcaaauguga

SEQ ID NO: 1273458 - RNA, 20 nt, Human
agaguaauccaagcaaaugu

SEQ ID NO: 1273459 - RNA, 18 nt, Human
agaguaauccaagcaaau

SEQ ID NO: 1273460 - RNA, 20 nt, Human
agaggcugccccucucacca

SEQ ID NO: 1273461 - RNA, 15 nt, Human
agaggcugcccuccu

SEQ ID NO: 1273462 - RNA, 14 nt, Human
agaggcugccccuc

SEQ ID NO: 1273463 - RNA, 16 nt, Human
agaggcugccccucuc

SEQ ID NO: 1273464 - RNA, 18 nt, Human
agaggcugccccucucac

SEQ ID NO: 1273465 - RNA, 19 nt, Human
agaggcugccccucucacc

SEQ ID NO: 1273466 - RNA, 12 nt, Human
agaggcugcccc

SEQ ID NO: 1273467 - RNA, 20 nt, Human
agaggccuguuuggccucuc

SEQ ID NO: 1273468 - RNA, 19 nt, Human
agaggcugaggcuggcaca

SEQ ID NO: 1273469 - RNA, 21 nt, Human
agaggcugaggcuggcacagg

SEQ ID NO: 1273470 - RNA, 18 nt, Human
agaggccuguuuggccuc

SEQ ID NO: 1273471 - RNA, 23 nt, Human
agaggccaggcaggagcccuucu

SEQ ID NO: 1273472 - RNA, 13 nt, Human
agaggcaguaccu

SEQ ID NO: 1273473 - RNA, 13 nt, Human
agaggccagaggc

SEQ ID NO: 1273474 - RNA, 12 nt, Human
agaggcccugga

SEQ ID NO: 1273475 - RNA, 13 nt, Human
agaggcccuggau

SEQ ID NO: 1273476 - RNA, 15 nt, Human
agaggcccuggauca

SEQ ID NO: 1273477 - RNA, 17 nt, Human
agaggcccuggaucagc

SEQ ID NO: 1273478 - RNA, 20 nt, Human
agaggcccuggaucagcgug

SEQ ID NO: 1273479 - RNA, 21 nt, Human
agaggcccuggaucagcgugg

SEQ ID NO: 1273480 - RNA, 22 nt, Human
agaggcccuggaucagcguggc

SEQ ID NO: 1273481 - RNA, 24 nt, Human
agaggcccuggaucagcguggccu

SEQ ID NO: 1273482 - RNA, 23 nt, Human
agaggcccuggaucagcguggcc

SEQ ID NO: 1273483 - RNA, 14 nt, Human
agaggccguggcug

SEQ ID NO: 1273484 - RNA, 15 nt, Human
agaggccguggcugc

SEQ ID NO: 1273485 - RNA, 22 nt, Human
agaggccguggcugcuguggga

SEQ ID NO: 1273486 - RNA, 17 nt, Human
agaggccguggcugcug

SEQ ID NO: 1273487 - RNA, 14 nt, Human
agaggccugggcug

SEQ ID NO: 1273488 - RNA, 18 nt, Human
agaggccugggcugggaa

SEQ ID NO: 1273489 - RNA, 19 nt, Human
agaggccugggcugggaaa

SEQ ID NO: 1273490 - RNA, 15 nt, Human
agagcuggugcggcu

SEQ ID NO: 1273491 - RNA, 17 nt, Human
agagcuggugcggcugg

SEQ ID NO: 1273492 - RNA, 18 nt, Human
agagcuggugcggcuggc

SEQ ID NO: 1273493 - RNA, 19 nt, Human
agagcuggugcggcuggcc

SEQ ID NO: 1273494 - RNA, 22 nt, Human
agagcuggugcggcuggccaug

SEQ ID NO: 1273495 - RNA, 21 nt, Human
agagcuggugcggcuggccau

SEQ ID NO: 1273496 - RNA, 17 nt, Human
agagcuguauuaagcca

SEQ ID NO: 1273497 - RNA, 19 nt, Human
agagcuguauuaagccacu

SEQ ID NO: 1273498 - RNA, 15 nt, Human
ugaauacauuuccaa

SEQ ID NO: 1273499 - RNA, 16 nt, Human
ugaauaccacucugua

SEQ ID NO: 1273500 - RNA, 20 nt, Human
ugaagucaauuacucuauaa

SEQ ID NO: 1273501 - RNA, 21 nt, Human
ugaauauuuguuauguagaua

SEQ ID NO: 1273502 - RNA, 18 nt, Human
ugaaucaagggucaggcc

SEQ ID NO: 1273503 - RNA, 20 nt, Human
ugaaucaagggucaggccuu

SEQ ID NO: 1273504 - RNA, 23 nt, Human
ugaauaauguaagacaaauaugu

SEQ ID NO: 1273505 - RNA, 20 nt, Human
ugaaguauuuugcuggaaua

SEQ ID NO: 1273506 - RNA, 17 nt, Human
ugaaguauuuuuucagu

SEQ ID NO: 1273507 - RNA, 21 nt, Human
ugaaguauuuuuucaguauua

SEQ ID NO: 1273508 - RNA, 17 nt, Human
ugaaguacucauacaug

SEQ ID NO: 1273509 - RNA, 15 nt, Human
ugaaguaagcaaaga

SEQ ID NO: 1273510 - RNA, 18 nt, Human
ugaaguacccguucacau

SEQ ID NO: 1273511 - RNA, 23 nt, Human
ugaaguacccguucacauuuuug

SEQ ID NO: 1273512 - RNA, 17 nt, Human
ugaagauuuaccacuug

SEQ ID NO: 1273513 - RNA, 20 nt, Human
ugaagauuuaccacuugugu

SEQ ID NO: 1273514 - RNA, 19 nt, Human
ugaagauuuaauauuacag

SEQ ID NO: 1273515 - RNA, 15 nt, Human
ugaagggaagagaca

SEQ ID NO: 1273516 - RNA, 15 nt, Human
ugaagggcaggugcu

SEQ ID NO: 1273517 - RNA, 19 nt, Human
ugaagggcaggugcuucag

SEQ ID NO: 1273518 - RNA, 12 nt, Human
ugaagggccaga

SEQ ID NO: 1273519 - RNA, 14 nt, Human
ugaagggccagagc

SEQ ID NO: 1273520 - RNA, 15 nt, Human
ugaagggccagagcc

SEQ ID NO: 1273521 - RNA, 16 nt, Human
ugaagggccagagcca

SEQ ID NO: 1273522 - RNA, 17 nt, Human
ugaagggccagagccag

SEQ ID NO: 1273523 - RNA, 18 nt, Human
ugaagggccagagccagg

SEQ ID NO: 1273524 - RNA, 13 nt, Human
ugaaguaagcaaa

SEQ ID NO: 1273525 - RNA, 14 nt, Human
ugaaguaagcaaag

SEQ ID NO: 1273526 - RNA, 22 nt, Human
ugaaguaaaacaaacaauaccu

SEQ ID NO: 1273527 - RNA, 13 nt, Human
ugaaguaaaacaa

SEQ ID NO: 1273528 - RNA, 14 nt, Human
ugaaguaaacuuuu

SEQ ID NO: 1273529 - RNA, 16 nt, Human
ugaaguaaacuuuuug

SEQ ID NO: 1273530 - RNA, 22 nt, Human
ugaaguaaacuuuuuguucugg

SEQ ID NO: 1273531 - RNA, 23 nt, Human
ugaaguaaaacaaacaauaccug

SEQ ID NO: 1273532 - RNA, 19 nt, Human
agaauguaaaugucucacu

SEQ ID NO: 1273533 - RNA, 17 nt, Human
agaauguaaaugucuca

SEQ ID NO: 1273534 - RNA, 14 nt, Human
agaauguaaauguc

SEQ ID NO: 1273535 - RNA, 13 nt, Human
agaauguaaaugu

SEQ ID NO: 1273536 - RNA, 13 nt, Human
agaauguaaagcu

SEQ ID NO: 1273537 - RNA, 16 nt, Human
agaauguaaagcuugu

SEQ ID NO: 1273538 - RNA, 17 nt, Human
agaauguaaagcuuguc

SEQ ID NO: 1273539 - RNA, 23 nt, Human
agaauggugugggagagggauga

SEQ ID NO: 1273540 - RNA, 12 nt, Human
agaauguaaagc

SEQ ID NO: 1273541 - RNA, 20 nt, Human
agaauccagcaccggcccca

SEQ ID NO: 1273542 - RNA, 15 nt, Human
agaaucccaaauuug

SEQ ID NO: 1273543 - RNA, 18 nt, Human
agaauccacauuucuaaa

SEQ ID NO: 1273544 - RNA, 19 nt, Human
agaauccacauuucuaaaa

SEQ ID NO: 1273545 - RNA, 20 nt, Human
agaauccacauuucuaaaau

SEQ ID NO: 1273546 - RNA, 22 nt, Human
agaauccacauuucuaaaaucu

SEQ ID NO: 1273547 - RNA, 17 nt, Human
agaaucccaaauuugau

SEQ ID NO: 1273548 - RNA, 18 nt, Human
agaaucccaaauuugauu

SEQ ID NO: 1273549 - RNA, 19 nt, Human
agaaucccaaauuugauug

SEQ ID NO: 1273550 - RNA, 21 nt, Human
agaaucccagcccccugacca

SEQ ID NO: 1273551 - RNA, 20 nt, Human
agaaucccuuaacaguugua

SEQ ID NO: 1273552 - RNA, 18 nt, Human
agaauauuaucuucauaa

SEQ ID NO: 1273553 - RNA, 15 nt, Human
agaaucauuuagcau

SEQ ID NO: 1273554 - RNA, 16 nt, Human
agaauccacauuucua

SEQ ID NO: 1273555 - RNA, 17 nt, Human
agaauccacauuucuaa

SEQ ID NO: 1273556 - RNA, 22 nt, Human
agaauguaaaugucucacugag

SEQ ID NO: 1273557 - RNA, 23 nt, Human
agaauguauauuaagguguggcu

SEQ ID NO: 1273558 - RNA, 21 nt, Human
agaauguauccccaaaagcgu

SEQ ID NO: 1273559 - RNA, 14 nt, Human
agaauguaucccca

SEQ ID NO: 1273560 - RNA, 23 nt, Human
agaauuaacacaugauccugcaa

SEQ ID NO: 1273561 - RNA, 14 nt, Human
agaauuaucuaauu

SEQ ID NO: 1273562 - RNA, 15 nt, Human
agaauuaucuaauuu

SEQ ID NO: 1273563 - RNA, 17 nt, Human
agaauuaucuaauuuau

SEQ ID NO: 1273564 - RNA, 15 nt, Human
agaauuaacacauga

SEQ ID NO: 1273565 - RNA, 14 nt, Human
agaauuaaacuuuu

SEQ ID NO: 1273566 - RNA, 15 nt, Human
agaauuaaacuuuua

SEQ ID NO: 1273567 - RNA, 18 nt, Human
agaauuaaacuuuuaauu

SEQ ID NO: 1273568 - RNA, 20 nt, Human
agaauuaaacuuuuaauuca

SEQ ID NO: 1273569 - RNA, 21 nt, Human
agaauuaaacuuuuaauucau

SEQ ID NO: 1273570 - RNA, 22 nt, Human
agaauuaaacuuuuaauucauu

SEQ ID NO: 1273571 - RNA, 12 nt, Human
agaauucaaauu

SEQ ID NO: 1273572 - RNA, 13 nt, Human
agaauucagacau

SEQ ID NO: 1273573 - RNA, 17 nt, Human
agaauucaaauuuuauc

SEQ ID NO: 1273574 - RNA, 15 nt, Human
agaauuauuuuguga

SEQ ID NO: 1273575 - RNA, 13 nt, Human
agaauuauuuugu

SEQ ID NO: 1273576 - RNA, 18 nt, Human
agaauuaucuaauuuaua

SEQ ID NO: 1273577 - RNA, 20 nt, Human
agaauuaucuaauuuauaaa

SEQ ID NO: 1273578 - RNA, 21 nt, Human
agaauuaucuaauuuauaaaa

SEQ ID NO: 1273579 - RNA, 11 nt, Human
agaauuauuua

SEQ ID NO: 1273580 - RNA, 13 nt, Human
ucugggagggcag

SEQ ID NO: 1273581 - RNA, 19 nt, Human
ucugggagggcagcagggc

SEQ ID NO: 1273582 - RNA, 21 nt, Human
ucugggagggcagcagggcua

SEQ ID NO: 1273583 - RNA, 15 nt, Human
ucugggagucacaca

SEQ ID NO: 1273584 - RNA, 16 nt, Human
ucugggagucacacag

SEQ ID NO: 1273585 - RNA, 18 nt, Human
ucugggagucacacagug

SEQ ID NO: 1273586 - RNA, 17 nt, Human
ucugggagucacacagu

SEQ ID NO: 1273587 - RNA, 18 nt, Human
ucugggauaaguaaguuu

SEQ ID NO: 1273588 - RNA, 17 nt, Human
agaauaaaauuuuuaau

SEQ ID NO: 1273589 - RNA, 13 nt, Human
agaauaaacauuu

SEQ ID NO: 1273590 - RNA, 14 nt, Human
agaauaaacauuug

SEQ ID NO: 1273591 - RNA, 16 nt, Human
agaauaaacauuuguu

SEQ ID NO: 1273592 - RNA, 17 nt, Human
agaauaaacauuuguua

SEQ ID NO: 1273593 - RNA, 14 nt, Human
agaauaaaauuuuu

SEQ ID NO: 1273594 - RNA, 12 nt, Human
agaauaaaauuu

SEQ ID NO: 1273595 - RNA, 12 nt, Human
agaauaaguuau

SEQ ID NO: 1273596 - RNA, 13 nt, Human
agaauaaguuauu

SEQ ID NO: 1273597 - RNA, 14 nt, Human
agaauaaguuauug

SEQ ID NO: 1273598 - RNA, 16 nt, Human
agaauaaguuauugca

SEQ ID NO: 1273599 - RNA, 17 nt, Human
agaauaaguuauugcag

SEQ ID NO: 1273600 - RNA, 19 nt, Human
agaauaaguuauugcaguu

SEQ ID NO: 1273601 - RNA, 20 nt, Human
agaauaaguuauugcaguuu

SEQ ID NO: 1273602 - RNA, 21 nt, Human
agaauaaguuauugcaguuua

SEQ ID NO: 1273603 - RNA, 12 nt, Human
agaauaugccuu

SEQ ID NO: 1273604 - RNA, 13 nt, Human
agaauaugaaaca

SEQ ID NO: 1273605 - RNA, 14 nt, Human
agaauaugucagug

SEQ ID NO: 1273606 - RNA, 16 nt, Human
agaauagaugcugacu

SEQ ID NO: 1273607 - RNA, 17 nt, Human
agaauagccacauuugg

SEQ ID NO: 1273608 - RNA, 19 nt, Human
agaauagccacauuuggaa

SEQ ID NO: 1273609 - RNA, 17 nt, Human
agaauauccaugaccua

SEQ ID NO: 1273610 - RNA, 16 nt, Human
agaauaucacagaaaa

SEQ ID NO: 1273611 - RNA, 19 nt, Human
agaauacuucucauuuuuu

SEQ ID NO: 1273612 - RNA, 15 nt, Human
agaauacuucucauu

SEQ ID NO: 1273613 - RNA, 22 nt, Human
agaauagaaauaaaggauguga

SEQ ID NO: 1273614 - RNA, 17 nt, Human
agaauagaacacaguuu

SEQ ID NO: 1273615 - RNA, 20 nt, Human
agaaguggggacagagcaga

SEQ ID NO: 1273616 - RNA, 21 nt, Human
agaagugugccuucucucucc

SEQ ID NO: 1273617 - RNA, 22 nt, Human
agaaguguggggauuuucacug

SEQ ID NO: 1273618 - RNA, 15 nt, Human
agaaguuaguuugua

SEQ ID NO: 1273619 - RNA, 16 nt, Human
agaaguuaguuuguau

SEQ ID NO: 1273620 - RNA, 18 nt, Human
agaaguuaguuuguauau

SEQ ID NO: 1273621 - RNA, 19 nt, Human
agaaguuaguuuguauaua

SEQ ID NO: 1273622 - RNA, 19 nt, Human
agaaguucaauauaagcuu

SEQ ID NO: 1273623 - RNA, 18 nt, Human
agaaguuuagauuuuaau

SEQ ID NO: 1273624 - RNA, 19 nt, Human
agaaguuucaucauuuuuu

SEQ ID NO: 1273625 - RNA, 21 nt, Human
agaaguuucaucauuuuuuac

SEQ ID NO: 1273626 - RNA, 23 nt, Human
agaaguuucaucauuuuuuacuu

SEQ ID NO: 1273627 - RNA, 12 nt, Human
ucugcuuuccuc

SEQ ID NO: 1273628 - RNA, 13 nt, Human
ucugcuuuccucu

SEQ ID NO: 1273629 - RNA, 18 nt, Human
ucugcuuuccucuuccug

SEQ ID NO: 1273630 - RNA, 17 nt, Human
ucugcuuucuccuuuaa

SEQ ID NO: 1273631 - RNA, 19 nt, Human
agaaggcaaaaauaguuug

SEQ ID NO: 1273632 - RNA, 16 nt, Human
ucugcuuguauuccaa

SEQ ID NO: 1273633 - RNA, 19 nt, Human
ucugcuuguuauuagagau

SEQ ID NO: 1273634 - RNA, 20 nt, Human
ucugcuuuaaaaaugucuua

SEQ ID NO: 1273635 - RNA, 15 nt, Human
agaaggcaaaaaugu

SEQ ID NO: 1273636 - RNA, 18 nt, Human
agaaggcauuugcagggu

SEQ ID NO: 1273637 - RNA, 12 nt, Human
agaagggaaagc

SEQ ID NO: 1273638 - RNA, 15 nt, Human
agaagggaaagccca

SEQ ID NO: 1273639 - RNA, 14 nt, Human
ucugugagaugcua

SEQ ID NO: 1273640 - RNA, 23 nt, Human
ucugugagaugcuagaacucccu

SEQ ID NO: 1273641 - RNA, 17 nt, Human
ucugugagauucauuca

SEQ ID NO: 1273642 - RNA, 19 nt, Human
ucugugagauucauucaug

SEQ ID NO: 1273643 - RNA, 22 nt, Human
ucugugagaugcuagaacuccc

SEQ ID NO: 1273644 - RNA, 17 nt, Human
ucugugagaugcuagaa

SEQ ID NO: 1273645 - RNA, 14 nt, Human
ucugggccagaauu

SEQ ID NO: 1273646 - RNA, 15 nt, Human
ucugggccagaauuu

SEQ ID NO: 1273647 - RNA, 21 nt, Human
ucugggccauucuccacagca

SEQ ID NO: 1273648 - RNA, 12 nt, Human
ucugggccugac

SEQ ID NO: 1273649 - RNA, 14 nt, Human
ucugggccuuggcc

SEQ ID NO: 1273650 - RNA, 15 nt, Human
ucugggccuuggccu

SEQ ID NO: 1273651 - RNA, 18 nt, Human
ucugggccuuggccugga

SEQ ID NO: 1273652 - RNA, 19 nt, Human
ucugggccuuggccuggag

SEQ ID NO: 1273653 - RNA, 20 nt, Human
ucugggccuuggccuggagc

SEQ ID NO: 1273654 - RNA, 22 nt, Human
ucugggccuuggccuggagcac

SEQ ID NO: 1273655 - RNA, 23 nt, Human
ucuguauuugaaucagccuacag

SEQ ID NO: 1273656 - RNA, 21 nt, Human
ucugggccuuggccuggagca

SEQ ID NO: 1273657 - RNA, 13 nt, Human
ucugucacuuaau

SEQ ID NO: 1273658 - RNA, 16 nt, Human
ucuguuguauucauug

SEQ ID NO: 1273659 - RNA, 18 nt, Human
ucuguuggcaggcuggcc

SEQ ID NO: 1273660 - RNA, 20 nt, Human
ucuguuggcaggcuggccag

SEQ ID NO: 1273661 - RNA, 23 nt, Human
ucuguugucguaaagauuugggu

SEQ ID NO: 1273662 - RNA, 15 nt, Human
ucuguugcugccuca

SEQ ID NO: 1273663 - RNA, 15 nt, Human
ucuguuggcaggcug

SEQ ID NO: 1273664 - RNA, 21 nt, Human
ucugugagggugcugacuggc

SEQ ID NO: 1273665 - RNA, 20 nt, Human
ucugugaucugggucucuaa

SEQ ID NO: 1273666 - RNA, 16 nt, Human
ucuguugcaagugcaa

SEQ ID NO: 1273667 - RNA, 22 nt, Human
agaauuugauaugugaacaguu

SEQ ID NO: 1273668 - RNA, 17 nt, Human
agaauugaguaauggug

SEQ ID NO: 1273669 - RNA, 18 nt, Human
agaauugaguaauggugu

SEQ ID NO: 1273670 - RNA, 14 nt, Human
agaauugaguguuu

SEQ ID NO: 1273671 - RNA, 17 nt, Human
agaauugaguguuuaaa

SEQ ID NO: 1273672 - RNA, 12 nt, Human
agacacacauga

SEQ ID NO: 1273673 - RNA, 15 nt, Human
agacacacaugaagu

SEQ ID NO: 1273674 - RNA, 12 nt, Human
agacacagacug

SEQ ID NO: 1273675 - RNA, 12 nt, Human
agacacaggccc

SEQ ID NO: 1273676 - RNA, 16 nt, Human
agacacauacucauuu

SEQ ID NO: 1273677 - RNA, 12 nt, Human
agacacaugaag

SEQ ID NO: 1273678 - RNA, 13 nt, Human
agacacaugaagg

SEQ ID NO: 1273679 - RNA, 19 nt, Human
agacacaugaagguaaaua

SEQ ID NO: 1273680 - RNA, 20 nt, Human
agacacaugaagguaaauaa

SEQ ID NO: 1273681 - RNA, 23 nt, Human
agacacaugaagguaaauaaaaa

SEQ ID NO: 1273682 - RNA, 21 nt, Human
agacacaugaagguaaauaaa

SEQ ID NO: 1273683 - RNA, 18 nt, Human
agacacugaucuggcugc

SEQ ID NO: 1273684 - RNA, 16 nt, Human
agacagagccaggaga

SEQ ID NO: 1273685 - RNA, 19 nt, Human
agacagagccaggagaagc

SEQ ID NO: 1273686 - RNA, 20 nt, Human
agacagagccaggagaagcu

SEQ ID NO: 1273687 - RNA, 19 nt, Human
agacagagcccugugaggc

SEQ ID NO: 1273688 - RNA, 15 nt, Human
agacagagaggacug

SEQ ID NO: 1273689 - RNA, 20 nt, Human
agacagagaggacuguaggg

SEQ ID NO: 1273690 - RNA, 13 nt, Human
agacagagccagg

SEQ ID NO: 1273691 - RNA, 14 nt, Human
agacagagccagga

SEQ ID NO: 1273692 - RNA, 21 nt, Human
agacagagccaggagaagcuc

SEQ ID NO: 1273693 - RNA, 20 nt, Human
agacacugccacacaggguc

SEQ ID NO: 1273694 - RNA, 13 nt, Human
agacacuggcccc

SEQ ID NO: 1273695 - RNA, 15 nt, Human
agacacuggccccuc

SEQ ID NO: 1273696 - RNA, 16 nt, Human
agacacuggccccuca

SEQ ID NO: 1273697 - RNA, 12 nt, Human
agacacugguuu

SEQ ID NO: 1273698 - RNA, 12 nt, Human
agaagacaaaau

SEQ ID NO: 1273699 - RNA, 15 nt, Human
agaagacaaacuuug

SEQ ID NO: 1273700 - RNA, 18 nt, Human
agaagaugguaccaccag

SEQ ID NO: 1273701 - RNA, 22 nt, Human
agaagaaucucaucucagugaa

SEQ ID NO: 1273702 - RNA, 19 nt, Human
agaagaaugcuuaaucaga

SEQ ID NO: 1273703 - RNA, 13 nt, Human
agaagaacugaaa

SEQ ID NO: 1273704 - RNA, 16 nt, Human
agaagaaagaggugac

SEQ ID NO: 1273705 - RNA, 14 nt, Human
agaagaacugaaau

SEQ ID NO: 1273706 - RNA, 22 nt, Human
agaagaaguuucaucauuuuuu

SEQ ID NO: 1273707 - RNA, 18 nt, Human
agaaauucguguguuuuu

SEQ ID NO: 1273708 - RNA, 20 nt, Human
agaaauucguguguuuuuuu

SEQ ID NO: 1273709 - RNA, 23 nt, Human
agaaauucguguguuuuuuuaug

SEQ ID NO: 1273710 - RNA, 17 nt, Human
agaaauugcauuuccug

SEQ ID NO: 1273711 - RNA, 20 nt, Human
agaaauugcauuuccugaca

SEQ ID NO: 1273712 - RNA, 15 nt, Human
agaaauugaauacuu

SEQ ID NO: 1273713 - RNA, 16 nt, Human
agaaauugaauacuuu

SEQ ID NO: 1273714 - RNA, 17 nt, Human
agaaauugaauacuuug

SEQ ID NO: 1273715 - RNA, 18 nt, Human
agaaauugaauacuuuga

SEQ ID NO: 1273716 - RNA, 21 nt, Human
agaaauugaauacuuugaaug

SEQ ID NO: 1273717 - RNA, 22 nt, Human
agaaauugaauacuuugaaugu

SEQ ID NO: 1273718 - RNA, 21 nt, Human
agaacuggauuuucagaccug

SEQ ID NO: 1273719 - RNA, 14 nt, Human
agaacuucagaaag

SEQ ID NO: 1273720 - RNA, 15 nt, Human
agaacuucagaaaga

SEQ ID NO: 1273721 - RNA, 16 nt, Human
agaacuucagaaagac

SEQ ID NO: 1273722 - RNA, 17 nt, Human
agaacuucagaaagacu

SEQ ID NO: 1273723 - RNA, 18 nt, Human
agaacuucagaaagacuu

SEQ ID NO: 1273724 - RNA, 16 nt, Human
agaagacaaacuuugc

SEQ ID NO: 1273725 - RNA, 19 nt, Human
agaagcaacccaaauguuc

SEQ ID NO: 1273726 - RNA, 22 nt, Human
agaagcauucucauuggaaauu

SEQ ID NO: 1273727 - RNA, 19 nt, Human
agaagcauuuuguaaguug

SEQ ID NO: 1273728 - RNA, 18 nt, Human
agaagccaacuaugauua

SEQ ID NO: 1273729 - RNA, 23 nt, Human
agaagccaacuaugauuauuaac

SEQ ID NO: 1273730 - RNA, 10 nt, Human
ucugcccugc

SEQ ID NO: 1273731 - RNA, 14 nt, Human
ucugcccugcccac

SEQ ID NO: 1273732 - RNA, 11 nt, Human
ucugcccugcg

SEQ ID NO: 1273733 - RNA, 12 nt, Human
ucugcccugcgg

SEQ ID NO: 1273734 - RNA, 21 nt, Human
ucugcccucugcauccucugg

SEQ ID NO: 1273735 - RNA, 23 nt, Human
ucugccuggagacuuagggcacc

SEQ ID NO: 1273736 - RNA, 12 nt, Human
ucugccuggagu

SEQ ID NO: 1273737 - RNA, 13 nt, Human
ucugccuggagug

SEQ ID NO: 1273738 - RNA, 21 nt, Human
ucugccuggaguguaugacug

SEQ ID NO: 1273739 - RNA, 16 nt, Human
ucugcgugacaauaaa

SEQ ID NO: 1273740 - RNA, 15 nt, Human
ucugcgugucaccug

SEQ ID NO: 1273741 - RNA, 19 nt, Human
ucugcgugucaccugugcu

SEQ ID NO: 1273742 - RNA, 20 nt, Human
ucugcgugucaccugugcuu

SEQ ID NO: 1273743 - RNA, 22 nt, Human
ucugcucagacagaaccccuac

SEQ ID NO: 1273744 - RNA, 18 nt, Human
ucugcucagauagaauga

SEQ ID NO: 1273745 - RNA, 14 nt, Human
ucugcuccagacag

SEQ ID NO: 1273746 - RNA, 13 nt, Human
ucugcucccaagg

SEQ ID NO: 1273747 - RNA, 15 nt, Human
ucugcuccagacagg

SEQ ID NO: 1273748 - RNA, 11 nt, Human
ucugcucccaa

SEQ ID NO: 1273749 - RNA, 12 nt, Human
ucugcucccaag

SEQ ID NO: 1273750 - RNA, 14 nt, Human
ucugcaggucccua

SEQ ID NO: 1273751 - RNA, 19 nt, Human
ucugcagggggugugucug

SEQ ID NO: 1273752 - RNA, 13 nt, Human
ucugcaggucccu

SEQ ID NO: 1273753 - RNA, 12 nt, Human
ucugcagguccc

SEQ ID NO: 1273754 - RNA, 11 nt, Human
ucugcaggucc

SEQ ID NO: 1273755 - RNA, 21 nt, Human
ucugaugcaagcaagaaacac

SEQ ID NO: 1273756 - RNA, 18 nt, Human
ucugcagauaaacaguag

SEQ ID NO: 1273757 - RNA, 16 nt, Human
ucugagaagcucugaa

SEQ ID NO: 1273758 - RNA, 14 nt, Human
ucugacucugagcu

SEQ ID NO: 1273759 - RNA, 24 nt, Human
ucugagaagcucugaagaacucuc

SEQ ID NO: 1273760 - RNA, 22 nt, Human
ucugagaauuguugagauacuu

SEQ ID NO: 1273761 - RNA, 16 nt, Human
ucugaggugcacuggg

SEQ ID NO: 1273762 - RNA, 19 nt, Human
ucugaggugcacugggagg

SEQ ID NO: 1273763 - RNA, 21 nt, Human
ucugaggugccugucccaccc

SEQ ID NO: 1273764 - RNA, 23 nt, Human
ucugaggugcacugggaggcucc

SEQ ID NO: 1273765 - RNA, 15 nt, Human
ucugagguuuuauuu

SEQ ID NO: 1273766 - RNA, 13 nt, Human
ucugaguacagag

SEQ ID NO: 1273767 - RNA, 16 nt, Human
ucugagucaacuccuu

SEQ ID NO: 1273768 - RNA, 15 nt, Human
ucugagucagagcca

SEQ ID NO: 1273769 - RNA, 20 nt, Human
ucugagucagagccaugucu

SEQ ID NO: 1273770 - RNA, 21 nt, Human
ucugaucccucuacagagcuu

SEQ ID NO: 1273771 - RNA, 17 nt, Human
ucugaucagaacaaaug

SEQ ID NO: 1273772 - RNA, 16 nt, Human
ucugaugcaagcaaga

SEQ ID NO: 1273773 - RNA, 22 nt, Human
ucugaugaaaaauugcugacug

SEQ ID NO: 1273774 - RNA, 15 nt, Human
ucugaugaaaaauug

SEQ ID NO: 1273775 - RNA, 21 nt, Human
ucugaugaaaaauugcugacu

SEQ ID NO: 1273776 - RNA, 23 nt, Human
ucugaguguuuuaugagaaagcc

SEQ ID NO: 1273777 - RNA, 13 nt, Human
ucugaguccugga

SEQ ID NO: 1273778 - RNA, 15 nt, Human
ucugaauuauuuucu

SEQ ID NO: 1273779 - RNA, 13 nt, Human
ucugacucagggc

SEQ ID NO: 1273780 - RNA, 14 nt, Human
ucugacucagggcu

SEQ ID NO: 1273781 - RNA, 15 nt, Human
ucugacucagggcuc

SEQ ID NO: 1273782 - RNA, 20 nt, Human
ucugacucagggcuccuggg

SEQ ID NO: 1273783 - RNA, 16 nt, Human
ucugacucgguuucuc

SEQ ID NO: 1273784 - RNA, 18 nt, Human
ucugacucgguuucucca

SEQ ID NO: 1273785 - RNA, 19 nt, Human
ucugacucgguuucuccaa

SEQ ID NO: 1273786 - RNA, 20 nt, Human
ucugacucgguuucuccaaa

SEQ ID NO: 1273787 - RNA, 10 nt, Human
ucugaauuau

SEQ ID NO: 1273788 - RNA, 22 nt, Human
ucugaaugcuucuaaguaaaua

SEQ ID NO: 1273789 - RNA, 13 nt, Human
ucugaaugcuucu

SEQ ID NO: 1273790 - RNA, 17 nt, Human
ucugaaugcuucuaagu

SEQ ID NO: 1273791 - RNA, 19 nt, Human
ucugaaugcuucuaaguaa

SEQ ID NO: 1273792 - RNA, 22 nt, Human
agaaaugccaagcacuucuuuu

SEQ ID NO: 1273793 - RNA, 14 nt, Human
agaaaugccaagca

SEQ ID NO: 1273794 - RNA, 21 nt, Human
agaaaugccaagcacuucuuu

SEQ ID NO: 1273795 - RNA, 12 nt, Human
agaaaugcagaa

SEQ ID NO: 1273796 - RNA, 11 nt, Human
agaaaugccaa

SEQ ID NO: 1273797 - RNA, 18 nt, Human
ucugaagcccucccaggu

SEQ ID NO: 1273798 - RNA, 17 nt, Human
ucugaagcucaacucuc

SEQ ID NO: 1273799 - RNA, 21 nt, Human
ucugaagcucaacucucuuau

SEQ ID NO: 1273800 - RNA, 16 nt, Human
ucuccuuucacaaccu

SEQ ID NO: 1273801 - RNA, 18 nt, Human
ucuccuuguucugauaau

SEQ ID NO: 1273802 - RNA, 15 nt, Human
ucuccuuuaauugua

SEQ ID NO: 1273803 - RNA, 17 nt, Human
ucuccuuuaauuguaaa

SEQ ID NO: 1273804 - RNA, 13 nt, Human
ucuccuuguucug

SEQ ID NO: 1273805 - RNA, 14 nt, Human
ucuccuuguucuga

SEQ ID NO: 1273806 - RNA, 16 nt, Human
ucuccuuguucugaua

SEQ ID NO: 1273807 - RNA, 22 nt, Human
ucuccuuuaauuguaaaguaaa

SEQ ID NO: 1273808 - RNA, 17 nt, Human
ucuccuuuuccucucuc

SEQ ID NO: 1273809 - RNA, 19 nt, Human
ucuccuuuuccucucuccc

SEQ ID NO: 1273810 - RNA, 18 nt, Human
agaaagccccacccaggc

SEQ ID NO: 1273811 - RNA, 17 nt, Human
agaaagccccacccagg

SEQ ID NO: 1273812 - RNA, 11 nt, Human
agaaagccuga

SEQ ID NO: 1273813 - RNA, 18 nt, Human
agaaagccugggugacau

SEQ ID NO: 1273814 - RNA, 12 nt, Human
agaaagccugag

SEQ ID NO: 1273815 - RNA, 13 nt, Human
agaaauaucuuca

SEQ ID NO: 1273816 - RNA, 20 nt, Human
agaaauaucuucacuuguca

SEQ ID NO: 1273817 - RNA, 21 nt, Human
agaaauaugcacaauagcagu

SEQ ID NO: 1273818 - RNA, 14 nt, Human
agaaauauggacac

SEQ ID NO: 1273819 - RNA, 17 nt, Human
agaaauauggacacuua

SEQ ID NO: 1273820 - RNA, 20 nt, Human
agaaauauuugugacaaaaa

SEQ ID NO: 1273821 - RNA, 15 nt, Human
agaaauauuuuaaaa

SEQ ID NO: 1273822 - RNA, 17 nt, Human
agaaauauuuuaaaauc

SEQ ID NO: 1273823 - RNA, 21 nt, Human
agaaauauuuuaaaaucagcu

SEQ ID NO: 1273824 - RNA, 19 nt, Human
agaaauauuuuaaaaucag

SEQ ID NO: 1273825 - RNA, 17 nt, Human
ucuaggaaauauuuauu

SEQ ID NO: 1273826 - RNA, 14 nt, Human
ucuaggaaaucuag

SEQ ID NO: 1273827 - RNA, 16 nt, Human
ucuaggaaauauuuau

SEQ ID NO: 1273828 - RNA, 15 nt, Human
ucuaguucugccagg

SEQ ID NO: 1273829 - RNA, 16 nt, Human
ucuaguucugccagga

SEQ ID NO: 1273830 - RNA, 17 nt, Human
ucuaguucugccaggag

SEQ ID NO: 1273831 - RNA, 13 nt, Human
ucuaguucuuugu

SEQ ID NO: 1273832 - RNA, 19 nt, Human
ucuaguugaaaauaaagug

SEQ ID NO: 1273833 - RNA, 22 nt, Human
ucuaguuuaauuaaucuguaau

SEQ ID NO: 1273834 - RNA, 13 nt, Human
ucuaguuucucuu

SEQ ID NO: 1273835 - RNA, 19 nt, Human
ucuaguuucucuuagaaaa

SEQ ID NO: 1273836 - RNA, 14 nt, Human
ucuauaaacuauaa

SEQ ID NO: 1273837 - RNA, 21 nt, Human
ucuauaaacuauaaccucucc

SEQ ID NO: 1273838 - RNA, 12 nt, Human
ucuauaaagcau

SEQ ID NO: 1273839 - RNA, 14 nt, Human
ucuauaaagcauuu

SEQ ID NO: 1273840 - RNA, 15 nt, Human
ucuauaaagcauuua

SEQ ID NO: 1273841 - RNA, 16 nt, Human
ucuauaaagcauuuaa

SEQ ID NO: 1273842 - RNA, 17 nt, Human
ucuauaaagcauuuaac

SEQ ID NO: 1273843 - RNA, 20 nt, Human
ucuauaaagcauuuaacccc

SEQ ID NO: 1273844 - RNA, 19 nt, Human
ucuauaaagcauuuaaccc

SEQ ID NO: 1273845 - RNA, 20 nt, Human
ucuauaaccaaaugaaauau

SEQ ID NO: 1273846 - RNA, 13 nt, Human
ucuauaaggccau

SEQ ID NO: 1273847 - RNA, 14 nt, Human
ucuauaaggccaua

SEQ ID NO: 1273848 - RNA, 16 nt, Human
ucuauaaggccauaaa

SEQ ID NO: 1273849 - RNA, 22 nt, Human
ucuauaaggccauaaaacaggu

SEQ ID NO: 1273850 - RNA, 22 nt, Human
acuucaguuucacagaaaauaa

SEQ ID NO: 1273851 - RNA, 18 nt, Human
acuucauauaugaggacu

SEQ ID NO: 1273852 - RNA, 13 nt, Human
acuuccccuuccu

SEQ ID NO: 1273853 - RNA, 19 nt, Human
acuuccccuuccuaauucc

SEQ ID NO: 1273854 - RNA, 12 nt, Human
acuucccugugu

SEQ ID NO: 1273855 - RNA, 14 nt, Human
ucuagacacugcca

SEQ ID NO: 1273856 - RNA, 18 nt, Human
ucuagacauggagguucu

SEQ ID NO: 1273857 - RNA, 19 nt, Human
ucuagacauggagguucua

SEQ ID NO: 1273858 - RNA, 20 nt, Human
ucuagacauggagguucuaa

SEQ ID NO: 1273859 - RNA, 14 nt, Human
ucuagaccaauaaa

SEQ ID NO: 1273860 - RNA, 22 nt, Human
ucuagacauggagguucuaagg

SEQ ID NO: 1273861 - RNA, 14 nt, Human
ucuagagcacugcc

SEQ ID NO: 1273862 - RNA, 15 nt, Human
ucuagagcacugcca

SEQ ID NO: 1273863 - RNA, 15 nt, Human
ucuagagcagggauu

SEQ ID NO: 1273864 - RNA, 18 nt, Human
acuuagguaagaagauuc

SEQ ID NO: 1273865 - RNA, 16 nt, Human
ucuagaggcuuccuuc

SEQ ID NO: 1273866 - RNA, 21 nt, Human
ucuagaggcuuccuucauuuc

SEQ ID NO: 1273867 - RNA, 13 nt, Human
ucuagaguccaag

SEQ ID NO: 1273868 - RNA, 15 nt, Human
ucuagaguccaaggu

SEQ ID NO: 1273869 - RNA, 20 nt, Human
ucuagaguccaagguuuaaa

SEQ ID NO: 1273870 - RNA, 14 nt, Human
ucuagaguucagag

SEQ ID NO: 1273871 - RNA, 18 nt, Human
ucuagaguucagaguccu

SEQ ID NO: 1273872 - RNA, 16 nt, Human
ucuauacccacccaga

SEQ ID NO: 1273873 - RNA, 17 nt, Human
ucuauagaacugaauga

SEQ ID NO: 1273874 - RNA, 17 nt, Human
ucuauacccacccagaa

SEQ ID NO: 1273875 - RNA, 15 nt, Human
ucuauacccacccag

SEQ ID NO: 1273876 - RNA, 18 nt, Human
ucuauaccaauaaaguga

SEQ ID NO: 1273877 - RNA, 17 nt, Human
ucuauaccaauaaagug

SEQ ID NO: 1273878 - RNA, 16 nt, Human
ucuauaccaauaaagu

SEQ ID NO: 1273879 - RNA, 15 nt, Human
ucuauaccaauaaag

SEQ ID NO: 1273880 - RNA, 14 nt, Human
ucuauaccaauaaa

SEQ ID NO: 1273881 - RNA, 15 nt, Human
ucuauggguguuauc

SEQ ID NO: 1273882 - RNA, 13 nt, Human
ucuauguaucaaa

SEQ ID NO: 1273883 - RNA, 22 nt, Human
ucuauguaucaaauguaacuua

SEQ ID NO: 1273884 - RNA, 17 nt, Human
ucuaugugcuuguaaaa

SEQ ID NO: 1273885 - RNA, 11 nt, Human
ucuauuaaaag

SEQ ID NO: 1273886 - RNA, 12 nt, Human
ucuauuaaaaga

SEQ ID NO: 1273887 - RNA, 13 nt, Human
ucuauuaaaagac

SEQ ID NO: 1273888 - RNA, 14 nt, Human
ucuauuaaaagacu

SEQ ID NO: 1273889 - RNA, 15 nt, Human
ucuauuaaaagacuc

SEQ ID NO: 1273890 - RNA, 16 nt, Human
ucuauuaaaagacuca

SEQ ID NO: 1273891 - RNA, 17 nt, Human
ucuauuaaaagacucau

SEQ ID NO: 1273892 - RNA, 18 nt, Human
ucuauuaaaagacucauc

SEQ ID NO: 1273893 - RNA, 19 nt, Human
ucuauuaaaagacucaucc

SEQ ID NO: 1273894 - RNA, 20 nt, Human
ucuauuaaaagacucauccg

SEQ ID NO: 1273895 - RNA, 21 nt, Human
ucuauuaaaagacucauccgu

SEQ ID NO: 1273896 - RNA, 22 nt, Human
ucuauuaaaagacucauccguc

SEQ ID NO: 1273897 - RNA, 22 nt, Human
ucuauuaaagugcuaagguucu

SEQ ID NO: 1273898 - RNA, 23 nt, Human
ucuauuaaagugcuaagguucua

SEQ ID NO: 1273899 - RNA, 17 nt, Human
ucuauuacauuuucagu

SEQ ID NO: 1273900 - RNA, 12 nt, Human
ucuauucagcuu

SEQ ID NO: 1273901 - RNA, 15 nt, Human
ucuauuaugaaugug

SEQ ID NO: 1273902 - RNA, 22 nt, Human
ucuauuaugaaugugaagccuu

SEQ ID NO: 1273903 - RNA, 23 nt, Human
ucuauuaugaaugugaagccuuc

SEQ ID NO: 1273904 - RNA, 18 nt, Human
ucuauucgccacacagua

SEQ ID NO: 1273905 - RNA, 19 nt, Human
ucuauucgccacacaguau

SEQ ID NO: 1273906 - RNA, 22 nt, Human
ucuauucgccacacaguauuuu

SEQ ID NO: 1273907 - RNA, 13 nt, Human
ucuauucuuuaac

SEQ ID NO: 1273908 - RNA, 16 nt, Human
ucuauucuuuaacucc

SEQ ID NO: 1273909 - RNA, 12 nt, Human
ucuauugccucu

SEQ ID NO: 1273910 - RNA, 18 nt, Human
ucuauuuuggauuguaua

SEQ ID NO: 1273911 - RNA, 17 nt, Human
ucuauuuuguaaacuca

SEQ ID NO: 1273912 - RNA, 24 nt, Human
ucuauuuuguaacuuucucuauga

SEQ ID NO: 1273913 - RNA, 15 nt, Human
ucucaccauuuggau

SEQ ID NO: 1273914 - RNA, 16 nt, Human
ucucaccauuuggauc

SEQ ID NO: 1273915 - RNA, 18 nt, Human
ucucaccauuuggauccu

SEQ ID NO: 1273916 - RNA, 12 nt, Human
ucucacccugga

SEQ ID NO: 1273917 - RNA, 13 nt, Human
ucucacccuggag

SEQ ID NO: 1273918 - RNA, 14 nt, Human
ucucacccuggagg

SEQ ID NO: 1273919 - RNA, 16 nt, Human
ucucacccuggaggca

SEQ ID NO: 1273920 - RNA, 19 nt, Human
ucucacccuggaggcaccu

SEQ ID NO: 1273921 - RNA, 18 nt, Human
ucucacccuggaggcacc

SEQ ID NO: 1273922 - RNA, 14 nt, Human
ucucaccggcucuc

SEQ ID NO: 1273923 - RNA, 18 nt, Human
ucucaccggcucucaccu

SEQ ID NO: 1273924 - RNA, 21 nt, Human
ucucaccggcucucaccuggc

SEQ ID NO: 1273925 - RNA, 22 nt, Human
ucuauugccucugagagcauca

SEQ ID NO: 1273926 - RNA, 19 nt, Human
ucuauugccucugagagca

SEQ ID NO: 1273927 - RNA, 21 nt, Human
ucuauugccucugagagcauc

SEQ ID NO: 1273928 - RNA, 13 nt, Human
ucuauuuauaugu

SEQ ID NO: 1273929 - RNA, 18 nt, Human
ucuauuuauauguacaug

SEQ ID NO: 1273930 - RNA, 13 nt, Human
ucuauuuggggcu

SEQ ID NO: 1273931 - RNA, 18 nt, Human
ucuauuuggggcuugaug

SEQ ID NO: 1273932 - RNA, 14 nt, Human
ucuauuuuaaagac

SEQ ID NO: 1273933 - RNA, 20 nt, Human
ucuauuuuaauaaaaauaau

SEQ ID NO: 1273934 - RNA, 12 nt, Human
ucuauuuuaauu

SEQ ID NO: 1273935 - RNA, 20 nt, Human
ucuauuuuauuaugaagaag

SEQ ID NO: 1273936 - RNA, 16 nt, Human
ucuauuuuauuaugaa

SEQ ID NO: 1273937 - RNA, 18 nt, Human
ucuauuuuauuaugaaga

SEQ ID NO: 1273938 - RNA, 13 nt, Human
ucuauuuucucau

SEQ ID NO: 1273939 - RNA, 15 nt, Human
ucuauuuuggauugu

SEQ ID NO: 1273940 - RNA, 13 nt, Human
acuuaaauuuuag

SEQ ID NO: 1273941 - RNA, 18 nt, Human
acuuaaauguuauuaucu

SEQ ID NO: 1273942 - RNA, 15 nt, Human
acuuaaauguuauua

SEQ ID NO: 1273943 - RNA, 11 nt, Human
acuuaacaaac

SEQ ID NO: 1273944 - RNA, 17 nt, Human
acuuaacggaccaaagc

SEQ ID NO: 1273945 - RNA, 22 nt, Human
acuuaacuaucaucuuauucag

SEQ ID NO: 1273946 - RNA, 22 nt, Human
acuguugcacguguguuuuucu

SEQ ID NO: 1273947 - RNA, 16 nt, Human
acuuaaauaguauuuc

SEQ ID NO: 1273948 - RNA, 10 nt, Human
acuguugcac

SEQ ID NO: 1273949 - RNA, 11 nt, Human
acuguugcacg

SEQ ID NO: 1273950 - RNA, 12 nt, Human
acuguugcacgu

SEQ ID NO: 1273951 - RNA, 13 nt, Human
acuguugcacgug

SEQ ID NO: 1273952 - RNA, 14 nt, Human
acuguugcacgugu

SEQ ID NO: 1273953 - RNA, 15 nt, Human
acuguugcacgugug

SEQ ID NO: 1273954 - RNA, 16 nt, Human
acuguugcacgugugu

SEQ ID NO: 1273955 - RNA, 18 nt, Human
acuguugcacguguguuu

SEQ ID NO: 1273956 - RNA, 17 nt, Human
acuuaagcaucuggcuc

SEQ ID NO: 1273957 - RNA, 13 nt, Human
acuuaauguaugu

SEQ ID NO: 1273958 - RNA, 15 nt, Human
acuuaauguauguua

SEQ ID NO: 1273959 - RNA, 16 nt, Human
acuuaauguauguuac

SEQ ID NO: 1273960 - RNA, 14 nt, Human
acuuaauugcuaca

SEQ ID NO: 1273961 - RNA, 12 nt, Human
acuuacaugauu

SEQ ID NO: 1273962 - RNA, 14 nt, Human
acuuagcugggaga

SEQ ID NO: 1273963 - RNA, 13 nt, Human
acuuacuugcuua

SEQ ID NO: 1273964 - RNA, 14 nt, Human
acuuacuugcuuau

SEQ ID NO: 1273965 - RNA, 17 nt, Human
acuuacagcaaauccuu

SEQ ID NO: 1273966 - RNA, 15 nt, Human
acuuacaucaugugu

SEQ ID NO: 1273967 - RNA, 14 nt, Human
acuuacaugauuca

SEQ ID NO: 1273968 - RNA, 16 nt, Human
acuuagggcaccaggg

SEQ ID NO: 1273969 - RNA, 16 nt, Human
acuuaguacaaaguuu

SEQ ID NO: 1273970 - RNA, 20 nt, Human
acuuaguacaaaguuucaau

SEQ ID NO: 1273971 - RNA, 16 nt, Human
acuuaguauugcaaag

SEQ ID NO: 1273972 - RNA, 23 nt, Human
acuuagggcaccagggguuucuc

SEQ ID NO: 1273973 - RNA, 22 nt, Human
acuuaugaaaugugcacuuuau

SEQ ID NO: 1273974 - RNA, 14 nt, Human
acuuaugcugauuu

SEQ ID NO: 1273975 - RNA, 21 nt, Human
acuuauuaacaauuaggcaga

SEQ ID NO: 1273976 - RNA, 12 nt, Human
acuuauuaacaa

SEQ ID NO: 1273977 - RNA, 16 nt, Human
acuuauuaucuucagg

SEQ ID NO: 1273978 - RNA, 18 nt, Human
acuucagguauaccucac

SEQ ID NO: 1273979 - RNA, 20 nt, Human
acuucagguauaccucacuu

SEQ ID NO: 1273980 - RNA, 21 nt, Human
acuucaguuucacagaaaaua

SEQ ID NO: 1273981 - RNA, 23 nt, Human
ucuacagcuaaucagcauucuca

SEQ ID NO: 1273982 - RNA, 20 nt, Human
ucuacagcuaaucagcauuc

SEQ ID NO: 1273983 - RNA, 18 nt, Human
ucuacagaugagucacac

SEQ ID NO: 1273984 - RNA, 18 nt, Human
ucuaauaauuucuaaugu

SEQ ID NO: 1273985 - RNA, 16 nt, Human
ucuaauaauuucuaau

SEQ ID NO: 1273986 - RNA, 17 nt, Human
ucuaauaauuucuaaug

SEQ ID NO: 1273987 - RNA, 14 nt, Human
ucuaaguuucuaag

SEQ ID NO: 1273988 - RNA, 15 nt, Human
ucuaaguuucuaaga

SEQ ID NO: 1273989 - RNA, 16 nt, Human
ucuaaguuucuaagau

SEQ ID NO: 1273990 - RNA, 17 nt, Human
ucuaaguuucuaagauu

SEQ ID NO: 1273991 - RNA, 18 nt, Human
ucuaaguuucuaagauuc

SEQ ID NO: 1273992 - RNA, 20 nt, Human
ucuaaguuucuaagauucua

SEQ ID NO: 1273993 - RNA, 22 nt, Human
ucuaaguuucuaagauucuaaa

SEQ ID NO: 1273994 - RNA, 23 nt, Human
ucuaaguuucuaagauucuaaag

SEQ ID NO: 1273995 - RNA, 15 nt, Human
ucuaauaauuucuaa

SEQ ID NO: 1273996 - RNA, 21 nt, Human
uccuggcuucccauccccagc

SEQ ID NO: 1273997 - RNA, 13 nt, Human
ucuaaguuucuaa

SEQ ID NO: 1273998 - RNA, 12 nt, Human
ucuacccuggga

SEQ ID NO: 1273999 - RNA, 13 nt, Human
ucuacccugggau

SEQ ID NO: 1274000 - RNA, 16 nt, Human
ucuaccuagauuuaau

SEQ ID NO: 1274001 - RNA, 17 nt, Human
ucuaccuagauuuaaua

SEQ ID NO: 1274002 - RNA, 19 nt, Human
ucuaccuagauuuaauaua

SEQ ID NO: 1274003 - RNA, 21 nt, Human
ucuaccuagauuuaauauaaa

SEQ ID NO: 1274004 - RNA, 22 nt, Human
ucuaccuagauuuaauauaaag

SEQ ID NO: 1274005 - RNA, 15 nt, Human
ucuaccucaggcagc

SEQ ID NO: 1274006 - RNA, 15 nt, Human
acuguucccccugug

SEQ ID NO: 1274007 - RNA, 16 nt, Human
acuguucccccugugc

SEQ ID NO: 1274008 - RNA, 18 nt, Human
acuguucccccugugcag

SEQ ID NO: 1274009 - RNA, 13 nt, Human
acuguucuugaau

SEQ ID NO: 1274010 - RNA, 20 nt, Human
acuguucuuagcucaaugag

SEQ ID NO: 1274011 - RNA, 23 nt, Human
acuguucuuagcucaaugagcau

SEQ ID NO: 1274012 - RNA, 21 nt, Human
acuguucuuagcucaaugagc

SEQ ID NO: 1274013 - RNA, 22 nt, Human
acuuuuuauggcacuaguauuu

SEQ ID NO: 1274014 - RNA, 15 nt, Human
acuuuuuauauauau

SEQ ID NO: 1274015 - RNA, 18 nt, Human
acuuuuuaaauguaaaga

SEQ ID NO: 1274016 - RNA, 11 nt, Human
acuuuuuacaa

SEQ ID NO: 1274017 - RNA, 12 nt, Human
acuuuuuauaua

SEQ ID NO: 1274018 - RNA, 13 nt, Human
acuuuuuauauau

SEQ ID NO: 1274019 - RNA, 14 nt, Human
acuuuuuauauaua

SEQ ID NO: 1274020 - RNA, 13 nt, Human
agaaaaaauaaua

SEQ ID NO: 1274021 - RNA, 17 nt, Human
acuuuguacauuuggga

SEQ ID NO: 1274022 - RNA, 13 nt, Human
acuuuggcugcau

SEQ ID NO: 1274023 - RNA, 22 nt, Human
acuuugguaccagauaacuuuu

SEQ ID NO: 1274024 - RNA, 23 nt, Human
acuuuggaguccccucaccuccu

SEQ ID NO: 1274025 - RNA, 18 nt, Human
acuuuggaguccccucac

SEQ ID NO: 1274026 - RNA, 22 nt, Human
acuuuggaguccccucaccucc

SEQ ID NO: 1274027 - RNA, 14 nt, Human
acuuugacaguguu

SEQ ID NO: 1274028 - RNA, 18 nt, Human
acuuugacaguguuuuua

SEQ ID NO: 1274029 - RNA, 20 nt, Human
acuuugaccuaaauuauuua

SEQ ID NO: 1274030 - RNA, 22 nt, Human
acuuugaccuaaauuauuuacu

SEQ ID NO: 1274031 - RNA, 15 nt, Human
acuuuggaaccagac

SEQ ID NO: 1274032 - RNA, 16 nt, Human
acuuuggaaccagacu

SEQ ID NO: 1274033 - RNA, 17 nt, Human
acuuuggaaccagacuc

SEQ ID NO: 1274034 - RNA, 21 nt, Human
acuuuggaaccagacucuugc

SEQ ID NO: 1274035 - RNA, 22 nt, Human
acuuuggaaccagacucuugcc

SEQ ID NO: 1274036 - RNA, 23 nt, Human
acuuuggaaccagacucuugccu

SEQ ID NO: 1274037 - RNA, 21 nt, Human
ucucauuuuuccguaaaaaug

SEQ ID NO: 1274038 - RNA, 14 nt, Human
ucuccacagcaacc

SEQ ID NO: 1274039 - RNA, 19 nt, Human
ucuccacagcaaccccagg

SEQ ID NO: 1274040 - RNA, 23 nt, Human
ucuccaccaucgucuucuuggcc

SEQ ID NO: 1274041 - RNA, 19 nt, Human
ucuccccacgagggcuggc

SEQ ID NO: 1274042 - RNA, 20 nt, Human
ucuccccacgagggcuggcu

SEQ ID NO: 1274043 - RNA, 15 nt, Human
ucuccucacuguauc

SEQ ID NO: 1274044 - RNA, 14 nt, Human
ucuccccagcccag

SEQ ID NO: 1274045 - RNA, 15 nt, Human
ucuccccagcccaga

SEQ ID NO: 1274046 - RNA, 16 nt, Human
ucuccccagcccagag

SEQ ID NO: 1274047 - RNA, 17 nt, Human
ucuccccagcccagaga

SEQ ID NO: 1274048 - RNA, 18 nt, Human
ucuccccagcccagagac

SEQ ID NO: 1274049 - RNA, 19 nt, Human
ucuccccagcccagagaca

SEQ ID NO: 1274050 - RNA, 14 nt, Human
ucuccccagcuccc

SEQ ID NO: 1274051 - RNA, 18 nt, Human
ucuccccagcucccagga

SEQ ID NO: 1274052 - RNA, 15 nt, Human
ucuccccagguccag

SEQ ID NO: 1274053 - RNA, 15 nt, Human
ucuccccagcuccca

SEQ ID NO: 1274054 - RNA, 14 nt, Human
ucucccuugggcuc

SEQ ID NO: 1274055 - RNA, 15 nt, Human
ucucccuugggcucu

SEQ ID NO: 1274056 - RNA, 16 nt, Human
ucucccuugggcucug

SEQ ID NO: 1274057 - RNA, 17 nt, Human
ucucccuugggcucuga

SEQ ID NO: 1274058 - RNA, 18 nt, Human
ucucccuugggcucugau

SEQ ID NO: 1274059 - RNA, 22 nt, Human
ucucccuugggcucugaugaaa

SEQ ID NO: 1274060 - RNA, 15 nt, Human
ucucccuuuuccaug

SEQ ID NO: 1274061 - RNA, 20 nt, Human
ucucccuugggcucugauga

SEQ ID NO: 1274062 - RNA, 20 nt, Human
acuuuaauuaccaaccuguu

SEQ ID NO: 1274063 - RNA, 16 nt, Human
ucuccuccaugggaga

SEQ ID NO: 1274064 - RNA, 22 nt, Human
acuuuaauuaccaaccuguuac

SEQ ID NO: 1274065 - RNA, 20 nt, Human
acuuuacacaauagaauuau

SEQ ID NO: 1274066 - RNA, 13 nt, Human
acuuuacccauuu

SEQ ID NO: 1274067 - RNA, 18 nt, Human
acuuuacacaauagaauu

SEQ ID NO: 1274068 - RNA, 13 nt, Human
acuuucugccugg

SEQ ID NO: 1274069 - RNA, 14 nt, Human
acuuucugccugga

SEQ ID NO: 1274070 - RNA, 17 nt, Human
acuuugaaguuagcuuu

SEQ ID NO: 1274071 - RNA, 22 nt, Human
acuuugaauguguuucacaguu

SEQ ID NO: 1274072 - RNA, 12 nt, Human
acuuugaaugug

SEQ ID NO: 1274073 - RNA, 14 nt, Human
acuuugaauguguu

SEQ ID NO: 1274074 - RNA, 14 nt, Human
acuugcuuuuaaaa

SEQ ID NO: 1274075 - RNA, 19 nt, Human
acuugcuuaucaacuuccu

SEQ ID NO: 1274076 - RNA, 16 nt, Human
acuugcuuauuugaca

SEQ ID NO: 1274077 - RNA, 22 nt, Human
acuugcugcaguaugaaaauaa

SEQ ID NO: 1274078 - RNA, 19 nt, Human
acuuguauuauguguguuu

SEQ ID NO: 1274079 - RNA, 18 nt, Human
acuuguauuauguguguu

SEQ ID NO: 1274080 - RNA, 15 nt, Human
acuugucaauaaaau

SEQ ID NO: 1274081 - RNA, 21 nt, Human
acuugcuuaucaacuuccuaa

SEQ ID NO: 1274082 - RNA, 16 nt, Human
acuugucaauaaaauc

SEQ ID NO: 1274083 - RNA, 20 nt, Human
acuugcucuugaugccuggc

SEQ ID NO: 1274084 - RNA, 14 nt, Human
acuugcaucacuua

SEQ ID NO: 1274085 - RNA, 21 nt, Human
acuugcugcaguaugaaaaua

SEQ ID NO: 1274086 - RNA, 18 nt, Human
acuugcucuugaugccug

SEQ ID NO: 1274087 - RNA, 17 nt, Human
acuugcucuugaugccu

SEQ ID NO: 1274088 - RNA, 16 nt, Human
acuugcucuugaugcc

SEQ ID NO: 1274089 - RNA, 17 nt, Human
acuugcaaaaaggguca

SEQ ID NO: 1274090 - RNA, 23 nt, Human
acuugcaaaaagggucaguaugg

SEQ ID NO: 1274091 - RNA, 13 nt, Human
acuugcaaaauca

SEQ ID NO: 1274092 - RNA, 18 nt, Human
acuugcaaaaucaguuuu

SEQ ID NO: 1274093 - RNA, 17 nt, Human
acuugcaaaaucaguuu

SEQ ID NO: 1274094 - RNA, 16 nt, Human
acuugcaaaaucaguu

SEQ ID NO: 1274095 - RNA, 21 nt, Human
acuugcaaccgucuguuaugc

SEQ ID NO: 1274096 - RNA, 17 nt, Human
acuugauccauuucuaa

SEQ ID NO: 1274097 - RNA, 18 nt, Human
acuugauccauuucuaau

SEQ ID NO: 1274098 - RNA, 20 nt, Human
acuugauccauuucuaauua

SEQ ID NO: 1274099 - RNA, 19 nt, Human
acuugauccauuucuaauu

SEQ ID NO: 1274100 - RNA, 19 nt, Human
acuugauggcuaacuuaca

SEQ ID NO: 1274101 - RNA, 22 nt, Human
acuugauggcuaacuuacaaag

SEQ ID NO: 1274102 - RNA, 12 nt, Human
ucucagccccuu

SEQ ID NO: 1274103 - RNA, 17 nt, Human
ucucagccccuuucccu

SEQ ID NO: 1274104 - RNA, 12 nt, Human
ucucagcccuca

SEQ ID NO: 1274105 - RNA, 20 nt, Human
ucucagccccuuucccuugu

SEQ ID NO: 1274106 - RNA, 15 nt, Human
ucucaggacacaggc

SEQ ID NO: 1274107 - RNA, 16 nt, Human
ucucaggacacaggcc

SEQ ID NO: 1274108 - RNA, 17 nt, Human
ucucaggacacaggccu

SEQ ID NO: 1274109 - RNA, 18 nt, Human
ucucaggacacaggccug

SEQ ID NO: 1274110 - RNA, 19 nt, Human
ucucaggacacaggccugu

SEQ ID NO: 1274111 - RNA, 13 nt, Human
ucucaggauccaa

SEQ ID NO: 1274112 - RNA, 14 nt, Human
ucucaggauccaag

SEQ ID NO: 1274113 - RNA, 15 nt, Human
ucucaggauccaagc

SEQ ID NO: 1274114 - RNA, 16 nt, Human
ucucaggauccaagcu

SEQ ID NO: 1274115 - RNA, 20 nt, Human
ucucaggacacaggccugug

SEQ ID NO: 1274116 - RNA, 21 nt, Human
ucucaggacacaggccugugu

SEQ ID NO: 1274117 - RNA, 23 nt, Human
ucucaggaccaaagcuuucaugu

SEQ ID NO: 1274118 - RNA, 15 nt, Human
ucucauuuccaagca

SEQ ID NO: 1274119 - RNA, 18 nt, Human
ucucauuuagccuguccu

SEQ ID NO: 1274120 - RNA, 22 nt, Human
ucucauuuagccuguccuguca

SEQ ID NO: 1274121 - RNA, 19 nt, Human
ucucauuugccaauaauaa

SEQ ID NO: 1274122 - RNA, 17 nt, Human
ucucauuuuuccguaaa

SEQ ID NO: 1274123 - RNA, 20 nt, Human
ucucauuuuuuaaaaaagcu

SEQ ID NO: 1274124 - RNA, 17 nt, Human
ucucaggccagagccaa

SEQ ID NO: 1274125 - RNA, 21 nt, Human
ucucaugccucagccuccuga

SEQ ID NO: 1274126 - RNA, 17 nt, Human
ucucauggguggcacuc

SEQ ID NO: 1274127 - RNA, 22 nt, Human
ucucauguugaagccacugccu

SEQ ID NO: 1274128 - RNA, 23 nt, Human
uccuggaagugcuaauuuugaaa

SEQ ID NO: 1274129 - RNA, 22 nt, Human
uccuggaauaucuccgucaacu

SEQ ID NO: 1274130 - RNA, 17 nt, Human
uccuggacacucagacc

SEQ ID NO: 1274131 - RNA, 14 nt, Human
uccuggaagccagc

SEQ ID NO: 1274132 - RNA, 18 nt, Human
uccuggaagccagcuuuc

SEQ ID NO: 1274133 - RNA, 20 nt, Human
uccuggaagccagcuuuccc

SEQ ID NO: 1274134 - RNA, 22 nt, Human
uccuggaagcgcgagggccuca

SEQ ID NO: 1274135 - RNA, 16 nt, Human
uccuggaaaucagggu

SEQ ID NO: 1274136 - RNA, 22 nt, Human
uccuggaaauugacgaggggug

SEQ ID NO: 1274137 - RNA, 23 nt, Human
uccugcuugaugggauucuggac

SEQ ID NO: 1274138 - RNA, 12 nt, Human
uccugcuugcca

SEQ ID NO: 1274139 - RNA, 16 nt, Human
uccugcuugccaaggc

SEQ ID NO: 1274140 - RNA, 17 nt, Human
uccugcuugccaaggca

SEQ ID NO: 1274141 - RNA, 19 nt, Human
uccugcuugccaaggcaga

SEQ ID NO: 1274142 - RNA, 18 nt, Human
uccugcuuugggaagccg

SEQ ID NO: 1274143 - RNA, 15 nt, Human
uccugggagcuuuug

SEQ ID NO: 1274144 - RNA, 19 nt, Human
uccuggacacucagaccug

SEQ ID NO: 1274145 - RNA, 11 nt, Human
uccuggacagc

SEQ ID NO: 1274146 - RNA, 13 nt, Human
uccuggacagcug

SEQ ID NO: 1274147 - RNA, 14 nt, Human
uccuggacagcugu

SEQ ID NO: 1274148 - RNA, 15 nt, Human
uccuggacagcugug

SEQ ID NO: 1274149 - RNA, 16 nt, Human
uccuggacagcugugc

SEQ ID NO: 1274150 - RNA, 20 nt, Human
uccuggcgccuggcaguccg

SEQ ID NO: 1274151 - RNA, 23 nt, Human
uccuggcucuugauaccccccuc

SEQ ID NO: 1274152 - RNA, 14 nt, Human
uccuggcuucccau

SEQ ID NO: 1274153 - RNA, 20 nt, Human
uccuggcuucccauccccag

SEQ ID NO: 1274154 - RNA, 22 nt, Human
uccuggcuucccauccccagcg

SEQ ID NO: 1274155 - RNA, 14 nt, Human
uccugggaaauauu

SEQ ID NO: 1274156 - RNA, 16 nt, Human
uccugggaaauauucc

SEQ ID NO: 1274157 - RNA, 20 nt, Human
uccugggaaauauucccuag

SEQ ID NO: 1274158 - RNA, 21 nt, Human
uccugggaaauauucccuaga

SEQ ID NO: 1274159 - RNA, 15 nt, Human
uccugccucuacugg

SEQ ID NO: 1274160 - RNA, 16 nt, Human
uccugccucuacuggg

SEQ ID NO: 1274161 - RNA, 17 nt, Human
uccugccucuacuggga

SEQ ID NO: 1274162 - RNA, 21 nt, Human
uccugccucuacugggaaggc

SEQ ID NO: 1274163 - RNA, 22 nt, Human
uccugccucuacugggaaggcu

SEQ ID NO: 1274164 - RNA, 12 nt, Human
uccugccugugg

SEQ ID NO: 1274165 - RNA, 13 nt, Human
uccugccuguggc

SEQ ID NO: 1274166 - RNA, 20 nt, Human
uccugcugcugucugggugc

SEQ ID NO: 1274167 - RNA, 22 nt, Human
uccugcuugaugggauucugga

SEQ ID NO: 1274168 - RNA, 19 nt, Human
uccugcugcucccucagac

SEQ ID NO: 1274169 - RNA, 20 nt, Human
uccugcugcucccucagacu

SEQ ID NO: 1274170 - RNA, 13 nt, Human
uccugcugcuguc

SEQ ID NO: 1274171 - RNA, 14 nt, Human
uccugcugcugucu

SEQ ID NO: 1274172 - RNA, 15 nt, Human
uccugcugcugucug

SEQ ID NO: 1274173 - RNA, 17 nt, Human
uccugcugcugucuggg

SEQ ID NO: 1274174 - RNA, 18 nt, Human
uccugcugcugucugggu

SEQ ID NO: 1274175 - RNA, 19 nt, Human
uccugcugcugucugggug

SEQ ID NO: 1274176 - RNA, 14 nt, Human
uccugcugcucccu

SEQ ID NO: 1274177 - RNA, 15 nt, Human
uccugcugcucccuc

SEQ ID NO: 1274178 - RNA, 16 nt, Human
uccugcugcucccuca

SEQ ID NO: 1274179 - RNA, 17 nt, Human
uccugcugcucccucag

SEQ ID NO: 1274180 - RNA, 18 nt, Human
uccugcugcucccucaga

SEQ ID NO: 1274181 - RNA, 14 nt, Human
uccugccuguggcc

SEQ ID NO: 1274182 - RNA, 15 nt, Human
uccugccuguggcca

SEQ ID NO: 1274183 - RNA, 18 nt, Human
uccugccuguggccauga

SEQ ID NO: 1274184 - RNA, 14 nt, Human
uccugccuguggcg

SEQ ID NO: 1274185 - RNA, 14 nt, Human
uccugccuuccucc

SEQ ID NO: 1274186 - RNA, 16 nt, Human
uccugccuuccuccug

SEQ ID NO: 1274187 - RNA, 19 nt, Human
uccugccuuccuccugggc

SEQ ID NO: 1274188 - RNA, 22 nt, Human
uccugccuuccuccugggcccu

SEQ ID NO: 1274189 - RNA, 23 nt, Human
uccugccuuccuccugggcccuc

SEQ ID NO: 1274190 - RNA, 16 nt, Human
uccugccuugaaaaag

SEQ ID NO: 1274191 - RNA, 21 nt, Human
uccugccuuggccucccaagu

SEQ ID NO: 1274192 - RNA, 19 nt, Human
uccugccuuggccucccaa

SEQ ID NO: 1274193 - RNA, 17 nt, Human
acugagcacuguuuucu

SEQ ID NO: 1274194 - RNA, 23 nt, Human
acugagcacuguuuucuagugua

SEQ ID NO: 1274195 - RNA, 20 nt, Human
acugcaacuuguaaaugugg

SEQ ID NO: 1274196 - RNA, 17 nt, Human
acugauauauuuuacaa

SEQ ID NO: 1274197 - RNA, 14 nt, Human
acugagccuuguaa

SEQ ID NO: 1274198 - RNA, 22 nt, Human
acugauauaucaugagugaaua

SEQ ID NO: 1274199 - RNA, 16 nt, Human
acugauauauuuuaca

SEQ ID NO: 1274200 - RNA, 19 nt, Human
acugcaccaguugcugcuu

SEQ ID NO: 1274201 - RNA, 23 nt, Human
acugcacagugcaucucagccca

SEQ ID NO: 1274202 - RNA, 15 nt, Human
uccugaucagagccg

SEQ ID NO: 1274203 - RNA, 18 nt, Human
uccugcaccggggccugg

SEQ ID NO: 1274204 - RNA, 19 nt, Human
uccugcaccggggccuggg

SEQ ID NO: 1274205 - RNA, 22 nt, Human
uccugcacacgcuccuuccucu

SEQ ID NO: 1274206 - RNA, 14 nt, Human
uccugcacacgcuc

SEQ ID NO: 1274207 - RNA, 21 nt, Human
uccugcacacgcuccuuccuc

SEQ ID NO: 1274208 - RNA, 21 nt, Human
acugaacuuugcugagccugu

SEQ ID NO: 1274209 - RNA, 12 nt, Human
acugaagaagca

SEQ ID NO: 1274210 - RNA, 14 nt, Human
acugacgccagggu

SEQ ID NO: 1274211 - RNA, 13 nt, Human
acugacggacuca

SEQ ID NO: 1274212 - RNA, 16 nt, Human
acugacggacucauga

SEQ ID NO: 1274213 - RNA, 18 nt, Human
acugacuauucuugaugu

SEQ ID NO: 1274214 - RNA, 20 nt, Human
acugacuauucuugauguaa

SEQ ID NO: 1274215 - RNA, 13 nt, Human
acugacucuuaag

SEQ ID NO: 1274216 - RNA, 14 nt, Human
acugacucuuaaga

SEQ ID NO: 1274217 - RNA, 15 nt, Human
acugacucuuaagaa

SEQ ID NO: 1274218 - RNA, 16 nt, Human
acugacucuuaagaag

SEQ ID NO: 1274219 - RNA, 17 nt, Human
acugacucuuaagaaga

SEQ ID NO: 1274220 - RNA, 18 nt, Human
acugacucuuaagaagac

SEQ ID NO: 1274221 - RNA, 20 nt, Human
acugacucuuaagaagacug

SEQ ID NO: 1274222 - RNA, 22 nt, Human
acugacuauucuugauguaaaa

SEQ ID NO: 1274223 - RNA, 23 nt, Human
acugacuauucuugauguaaaau

SEQ ID NO: 1274224 - RNA, 24 nt, Human
acugacuauucuugauguaaaauc

SEQ ID NO: 1274225 - RNA, 21 nt, Human
acugagaaauuuauaaacuuu

SEQ ID NO: 1274226 - RNA, 17 nt, Human
acugagaaauuuauaaa

SEQ ID NO: 1274227 - RNA, 12 nt, Human
acugagaaauuu

SEQ ID NO: 1274228 - RNA, 13 nt, Human
acugacuuugcuu

SEQ ID NO: 1274229 - RNA, 15 nt, Human
acugacuuugcuugc

SEQ ID NO: 1274230 - RNA, 16 nt, Human
acugacuuugcuugcu

SEQ ID NO: 1274231 - RNA, 17 nt, Human
acugacuuugcuugcuu

SEQ ID NO: 1274232 - RNA, 23 nt, Human
acugacuuugcuugcuuugaagu

SEQ ID NO: 1274233 - RNA, 15 nt, Human
acugagaaaaccugu

SEQ ID NO: 1274234 - RNA, 18 nt, Human
acugagagugaacaaauu

SEQ ID NO: 1274235 - RNA, 16 nt, Human
acugagacaaugccuu

SEQ ID NO: 1274236 - RNA, 23 nt, Human
acugagaccaaggcuuucucuac

SEQ ID NO: 1274237 - RNA, 16 nt, Human
acugagaccaaggcuu

SEQ ID NO: 1274238 - RNA, 20 nt, Human
acugagagaugcagaaauau

SEQ ID NO: 1274239 - RNA, 16 nt, Human
acugagcacuguuuuc

SEQ ID NO: 1274240 - RNA, 15 nt, Human
acugagcacuguuuu

SEQ ID NO: 1274241 - RNA, 13 nt, Human
acugagcacuguu

SEQ ID NO: 1274242 - RNA, 20 nt, Human
acugagcaacgcuauuccag

SEQ ID NO: 1274243 - RNA, 21 nt, Human
acugagcaacgcuauuccagc

SEQ ID NO: 1274244 - RNA, 22 nt, Human
acugagcaacgcuauuccagcu

SEQ ID NO: 1274245 - RNA, 21 nt, Human
acugagaggacagagagaaau

SEQ ID NO: 1274246 - RNA, 18 nt, Human
acugagauaccagcgagg

SEQ ID NO: 1274247 - RNA, 19 nt, Human
acugagauaccagcgagga

SEQ ID NO: 1274248 - RNA, 19 nt, Human
acugaacuuugcugagccu

SEQ ID NO: 1274249 - RNA, 16 nt, Human
acugaacuuugcugag

SEQ ID NO: 1274250 - RNA, 20 nt, Human
acugaacucugacaacagac

SEQ ID NO: 1274251 - RNA, 18 nt, Human
acugaacucacuuuccuc

SEQ ID NO: 1274252 - RNA, 21 nt, Human
acucuuuugcuuuauuccaga

SEQ ID NO: 1274253 - RNA, 13 nt, Human
acugaaaaaauau

SEQ ID NO: 1274254 - RNA, 14 nt, Human
acugaaaaaauaua

SEQ ID NO: 1274255 - RNA, 16 nt, Human
acugaaaaaauauaug

SEQ ID NO: 1274256 - RNA, 20 nt, Human
acugaacaccauugaaggcu

SEQ ID NO: 1274257 - RNA, 21 nt, Human
acugaacaccauugaaggcuu

SEQ ID NO: 1274258 - RNA, 22 nt, Human
acugaacaccauugaaggcuua

SEQ ID NO: 1274259 - RNA, 15 nt, Human
acugaaaaaauauau

SEQ ID NO: 1274260 - RNA, 19 nt, Human
acugaacaucugaguccug

SEQ ID NO: 1274261 - RNA, 20 nt, Human
acugaacaucugaguccugg

SEQ ID NO: 1274262 - RNA, 23 nt, Human
acugaacaucugaguccuggaug

SEQ ID NO: 1274263 - RNA, 24 nt, Human
acugaacaucugaguccuggauga

SEQ ID NO: 1274264 - RNA, 15 nt, Human
acucuuguuuccuua

SEQ ID NO: 1274265 - RNA, 19 nt, Human
uccugacacccuucuccca

SEQ ID NO: 1274266 - RNA, 20 nt, Human
uccugacacccuucucccac

SEQ ID NO: 1274267 - RNA, 21 nt, Human
uccugacacccuucucccacu

SEQ ID NO: 1274268 - RNA, 22 nt, Human
uccugacacccuucucccacuc

SEQ ID NO: 1274269 - RNA, 13 nt, Human
uccugacacugca

SEQ ID NO: 1274270 - RNA, 15 nt, Human
uccugacacugcugg

SEQ ID NO: 1274271 - RNA, 17 nt, Human
uccugacacugcuggag

SEQ ID NO: 1274272 - RNA, 13 nt, Human
uccugacacuuua

SEQ ID NO: 1274273 - RNA, 11 nt, Human
acucuuucaaa

SEQ ID NO: 1274274 - RNA, 13 nt, Human
acucuuucaaaac

SEQ ID NO: 1274275 - RNA, 18 nt, Human
acucuuuaugaucuggcc

SEQ ID NO: 1274276 - RNA, 14 nt, Human
acucuuuaugcuug

SEQ ID NO: 1274277 - RNA, 15 nt, Human
acucuuuaugcuugc

SEQ ID NO: 1274278 - RNA, 17 nt, Human
acucuuuaugcuugcaa

SEQ ID NO: 1274279 - RNA, 18 nt, Human
acucuuuaugcuugcaaa

SEQ ID NO: 1274280 - RNA, 23 nt, Human
acucuuucgguagguggaagcua

SEQ ID NO: 1274281 - RNA, 13 nt, Human
acucuuuguaaga

SEQ ID NO: 1274282 - RNA, 14 nt, Human
acucuuuguaagag

SEQ ID NO: 1274283 - RNA, 18 nt, Human
acucuuuguuauuugaaa

SEQ ID NO: 1274284 - RNA, 18 nt, Human
acucuuuuccuucccuuu

SEQ ID NO: 1274285 - RNA, 12 nt, Human
acucuuuugcuu

SEQ ID NO: 1274286 - RNA, 14 nt, Human
acucuuuugcuuua

SEQ ID NO: 1274287 - RNA, 20 nt, Human
acucuuuugcuuuauuccag

SEQ ID NO: 1274288 - RNA, 21 nt, Human
uccugaaaagguuuaugaaaa

SEQ ID NO: 1274289 - RNA, 23 nt, Human
uccugaaaagguuuaugaaaaag

SEQ ID NO: 1274290 - RNA, 17 nt, Human
uccugaaacaacuugga

SEQ ID NO: 1274291 - RNA, 16 nt, Human
uccugaaagacaauau

SEQ ID NO: 1274292 - RNA, 21 nt, Human
uccugaauuuuauuuuuuggg

SEQ ID NO: 1274293 - RNA, 15 nt, Human
uccugaaauuucaga

SEQ ID NO: 1274294 - RNA, 14 nt, Human
uccugaaauuucag

SEQ ID NO: 1274295 - RNA, 18 nt, Human
uccucuuucagcuccuga

SEQ ID NO: 1274296 - RNA, 17 nt, Human
uccucccucccucuccg

SEQ ID NO: 1274297 - RNA, 13 nt, Human
ucccuuuuuuuaa

SEQ ID NO: 1274298 - RNA, 16 nt, Human
ucccuugggcucugau

SEQ ID NO: 1274299 - RNA, 17 nt, Human
ucccuugggcucugaug

SEQ ID NO: 1274300 - RNA, 21 nt, Human
ucccuugggcucugaugaaaa

SEQ ID NO: 1274301 - RNA, 12 nt, Human
ucccuugggcuc

SEQ ID NO: 1274302 - RNA, 14 nt, Human
ucccuugggcuccc

SEQ ID NO: 1274303 - RNA, 13 nt, Human
ucccuugggcucu

SEQ ID NO: 1274304 - RNA, 14 nt, Human
ucccuugggcucug

SEQ ID NO: 1274305 - RNA, 21 nt, Human
ucccuuuuuuuaaguaaggaa

SEQ ID NO: 1274306 - RNA, 16 nt, Human
ucccuuuuuuuaagua

SEQ ID NO: 1274307 - RNA, 18 nt, Human
uccgguguuuaagacauu

SEQ ID NO: 1274308 - RNA, 14 nt, Human
uccgguguucuaag

SEQ ID NO: 1274309 - RNA, 15 nt, Human
uccgguguucuaaga

SEQ ID NO: 1274310 - RNA, 16 nt, Human
uccgguguucuaagau

SEQ ID NO: 1274311 - RNA, 15 nt, Human
uccguaaaaaugauu

SEQ ID NO: 1274312 - RNA, 13 nt, Human
uccguaaaaauga

SEQ ID NO: 1274313 - RNA, 15 nt, Human
uccuagcuguccuuu

SEQ ID NO: 1274314 - RNA, 18 nt, Human
uccuagcuguccuuuuuc

SEQ ID NO: 1274315 - RNA, 14 nt, Human
uccuaggaaaauac

SEQ ID NO: 1274316 - RNA, 17 nt, Human
uccuagcugugugaaua

SEQ ID NO: 1274317 - RNA, 15 nt, Human
acuccagaccccugg

SEQ ID NO: 1274318 - RNA, 12 nt, Human
acucacacaggc

SEQ ID NO: 1274319 - RNA, 13 nt, Human
acucacacaggca

SEQ ID NO: 1274320 - RNA, 14 nt, Human
acucacacaggcau

SEQ ID NO: 1274321 - RNA, 19 nt, Human
acucacacaggcauuuccu

SEQ ID NO: 1274322 - RNA, 20 nt, Human
acucacacaggcauuuccug

SEQ ID NO: 1274323 - RNA, 22 nt, Human
acucacacaggcauuuccuggg

SEQ ID NO: 1274324 - RNA, 23 nt, Human
acucacacaggcauuuccugggu

SEQ ID NO: 1274325 - RNA, 17 nt, Human
acucacaccacuagccu

SEQ ID NO: 1274326 - RNA, 18 nt, Human
acucacaccacuagccuc

SEQ ID NO: 1274327 - RNA, 21 nt, Human
acucacaccugaacugaacac

SEQ ID NO: 1274328 - RNA, 18 nt, Human
acuccagaccccuggcuu

SEQ ID NO: 1274329 - RNA, 19 nt, Human
acuccagaccccuggcuuu

SEQ ID NO: 1274330 - RNA, 21 nt, Human
acuccagaccccuggcuuuuc

SEQ ID NO: 1274331 - RNA, 16 nt, Human
acucacagugcuuuua

SEQ ID NO: 1274332 - RNA, 19 nt, Human
acuccauagaccuuuucau

SEQ ID NO: 1274333 - RNA, 18 nt, Human
acuccaguuaaaaaaaau

SEQ ID NO: 1274334 - RNA, 20 nt, Human
acuccaguuaaaaaaaauuu

SEQ ID NO: 1274335 - RNA, 19 nt, Human
acuccaucugguagaaggg

SEQ ID NO: 1274336 - RNA, 18 nt, Human
acuccuaguucuagaaaa

SEQ ID NO: 1274337 - RNA, 20 nt, Human
acuccuaguucuagaaaaac

SEQ ID NO: 1274338 - RNA, 16 nt, Human
acuccuaugaucugag

SEQ ID NO: 1274339 - RNA, 19 nt, Human
acuccuaguucuagaaaaa

SEQ ID NO: 1274340 - RNA, 12 nt, Human
acuccucccagg

SEQ ID NO: 1274341 - RNA, 19 nt, Human
acuccucauuguaaacaaa

SEQ ID NO: 1274342 - RNA, 13 nt, Human
acuccucccaggg

SEQ ID NO: 1274343 - RNA, 15 nt, Human
acuccucccaggguu

SEQ ID NO: 1274344 - RNA, 22 nt, Human
acuccucccaggguuuuaacuu

SEQ ID NO: 1274345 - RNA, 19 nt, Human
acuccucccaggguuuuaa

SEQ ID NO: 1274346 - RNA, 21 nt, Human
acuccucccaggguuuuaacu

SEQ ID NO: 1274347 - RNA, 21 nt, Human
acucuuaagaagacugcauua

SEQ ID NO: 1274348 - RNA, 16 nt, Human
acucuggcagccacac

SEQ ID NO: 1274349 - RNA, 17 nt, Human
acucuggcagccacacu

SEQ ID NO: 1274350 - RNA, 13 nt, Human
acucuggcagcca

SEQ ID NO: 1274351 - RNA, 14 nt, Human
acucuggcagccac

SEQ ID NO: 1274352 - RNA, 15 nt, Human
acucuggcagccaca

SEQ ID NO: 1274353 - RNA, 14 nt, Human
acucuuaaucaaau

SEQ ID NO: 1274354 - RNA, 22 nt, Human
acucuuaccauauguuugguaa

SEQ ID NO: 1274355 - RNA, 16 nt, Human
acucuuauaucuauau

SEQ ID NO: 1274356 - RNA, 17 nt, Human
acucuuauaucuauauu

SEQ ID NO: 1274357 - RNA, 18 nt, Human
acucuuauaucuauauuu

SEQ ID NO: 1274358 - RNA, 22 nt, Human
acucuuauaucuauauuuuaca

SEQ ID NO: 1274359 - RNA, 19 nt, Human
acucuuauaucuauauuuu

SEQ ID NO: 1274360 - RNA, 16 nt, Human
acucuuauaaauuucu

SEQ ID NO: 1274361 - RNA, 16 nt, Human
acucuugauuauccau

SEQ ID NO: 1274362 - RNA, 22 nt, Human
acucuugcacagucacugcucu

SEQ ID NO: 1274363 - RNA, 14 nt, Human
acucuugccuguuu

SEQ ID NO: 1274364 - RNA, 18 nt, Human
acucuugccuguuuccca

SEQ ID NO: 1274365 - RNA, 13 nt, Human
uccucccaggcgc

SEQ ID NO: 1274366 - RNA, 12 nt, Human
uccucccagaaa

SEQ ID NO: 1274367 - RNA, 14 nt, Human
uccucauccacccc

SEQ ID NO: 1274368 - RNA, 15 nt, Human
uccucauccacccca

SEQ ID NO: 1274369 - RNA, 17 nt, Human
uccucauccaccccauc

SEQ ID NO: 1274370 - RNA, 18 nt, Human
uccucauccaccccaucc

SEQ ID NO: 1274371 - RNA, 19 nt, Human
uccucccaggcgccccuuc

SEQ ID NO: 1274372 - RNA, 21 nt, Human
uccucccaggcgccccuuccc

SEQ ID NO: 1274373 - RNA, 11 nt, Human
uccucccaggg

SEQ ID NO: 1274374 - RNA, 12 nt, Human
uccucccagggu

SEQ ID NO: 1274375 - RNA, 22 nt, Human
uccucccaggguuuuaacuuug

SEQ ID NO: 1274376 - RNA, 23 nt, Human
uccucccaggguuuuaacuuugu

SEQ ID NO: 1274377 - RNA, 20 nt, Human
uccucccgagcuccucuucc

SEQ ID NO: 1274378 - RNA, 17 nt, Human
uccucccgagcuccucu

SEQ ID NO: 1274379 - RNA, 15 nt, Human
uccucccucagugcc

SEQ ID NO: 1274380 - RNA, 21 nt, Human
uccucagccuugccagagauc

SEQ ID NO: 1274381 - RNA, 15 nt, Human
uccucaggcacacag

SEQ ID NO: 1274382 - RNA, 16 nt, Human
uccucaggcacacagc

SEQ ID NO: 1274383 - RNA, 17 nt, Human
uccucaggcacacagcu

SEQ ID NO: 1274384 - RNA, 22 nt, Human
uccucaggcacacagcuacucu

SEQ ID NO: 1274385 - RNA, 20 nt, Human
uccucagccuugccagagau

SEQ ID NO: 1274386 - RNA, 16 nt, Human
acucugccuccucuuc

SEQ ID NO: 1274387 - RNA, 12 nt, Human
acucugccuccu

SEQ ID NO: 1274388 - RNA, 19 nt, Human
acucugccuacagaacuuc

SEQ ID NO: 1274389 - RNA, 21 nt, Human
acucugaguguuuuaugagaa

SEQ ID NO: 1274390 - RNA, 20 nt, Human
acucugaguguuuuaugaga

SEQ ID NO: 1274391 - RNA, 22 nt, Human
acucucuggaagccccugggcc

SEQ ID NO: 1274392 - RNA, 20 nt, Human
acucucuuauugccucacuu

SEQ ID NO: 1274393 - RNA, 14 nt, Human
acucugaguguuuu

SEQ ID NO: 1274394 - RNA, 19 nt, Human
uccuaggcauucuggaccu

SEQ ID NO: 1274395 - RNA, 23 nt, Human
uccuaggcauucuggaccucugg

SEQ ID NO: 1274396 - RNA, 15 nt, Human
acuccuuccugcccc

SEQ ID NO: 1274397 - RNA, 14 nt, Human
acuccuuccugccc

SEQ ID NO: 1274398 - RNA, 23 nt, Human
acuccuugauuuuagccuucucu

SEQ ID NO: 1274399 - RNA, 20 nt, Human
acucuccuaggcauucugga

SEQ ID NO: 1274400 - RNA, 23 nt, Human
acucuccuaggcauucuggaccu

SEQ ID NO: 1274401 - RNA, 12 nt, Human
acucuccugccu

SEQ ID NO: 1274402 - RNA, 14 nt, Human
acucuccugccuug

SEQ ID NO: 1274403 - RNA, 23 nt, Human
acucuccugccuugaaaaagaca

SEQ ID NO: 1274404 - RNA, 20 nt, Human
uccagccugcugccugcuuu

SEQ ID NO: 1274405 - RNA, 14 nt, Human
uccagccucagcuc

SEQ ID NO: 1274406 - RNA, 11 nt, Human
uccagccuggg

SEQ ID NO: 1274407 - RNA, 13 nt, Human
uccaggagccugg

SEQ ID NO: 1274408 - RNA, 14 nt, Human
uccaggagccuggc

SEQ ID NO: 1274409 - RNA, 23 nt, Human
uccaggagccuggcuccguccag

SEQ ID NO: 1274410 - RNA, 15 nt, Human
uccaggagccugugc

SEQ ID NO: 1274411 - RNA, 19 nt, Human
uccagacagggaauuaggc

SEQ ID NO: 1274412 - RNA, 13 nt, Human
uccagaccccugg

SEQ ID NO: 1274413 - RNA, 18 nt, Human
uccaggagccugugccuc

SEQ ID NO: 1274414 - RNA, 13 nt, Human
uccaggagcucca

SEQ ID NO: 1274415 - RNA, 15 nt, Human
uccaggagcuccagu

SEQ ID NO: 1274416 - RNA, 17 nt, Human
uccaggagcuccagugu

SEQ ID NO: 1274417 - RNA, 20 nt, Human
uccaggagcuccaguguccu

SEQ ID NO: 1274418 - RNA, 21 nt, Human
uccaggagcuccaguguccug

SEQ ID NO: 1274419 - RNA, 22 nt, Human
uccaggagcuccaguguccuga

SEQ ID NO: 1274420 - RNA, 24 nt, Human
uccaggagcuccaguguccugagc

SEQ ID NO: 1274421 - RNA, 19 nt, Human
uccaggaugcuaacaucua

SEQ ID NO: 1274422 - RNA, 22 nt, Human
uccaggaugcuaacaucuaaaa

SEQ ID NO: 1274423 - RNA, 23 nt, Human
uccaggagcuccaguguccugag

SEQ ID NO: 1274424 - RNA, 23 nt, Human
accuuuuuucaacagugaagaca

SEQ ID NO: 1274425 - RNA, 18 nt, Human
accuuuuuucaacaguga

SEQ ID NO: 1274426 - RNA, 14 nt, Human
acgaaacaaagaca

SEQ ID NO: 1274427 - RNA, 17 nt, Human
acgaaauaauuguuguu

SEQ ID NO: 1274428 - RNA, 21 nt, Human
acgaaauaauuguuguucugu

SEQ ID NO: 1274429 - RNA, 23 nt, Human
acgaaauaauuguuguucuguua

SEQ ID NO: 1274430 - RNA, 12 nt, Human
acgaaauguuau

SEQ ID NO: 1274431 - RNA, 13 nt, Human
acgaaauguuauu

SEQ ID NO: 1274432 - RNA, 23 nt, Human
acgaaauguuauuuuuuaauuau

SEQ ID NO: 1274433 - RNA, 16 nt, Human
acgaaauguuauuuuu

SEQ ID NO: 1274434 - RNA, 22 nt, Human
accuuuguuugcaucugaaaau

SEQ ID NO: 1274435 - RNA, 17 nt, Human
accuuugugcccuauca

SEQ ID NO: 1274436 - RNA, 13 nt, Human
accuuugugcccu

SEQ ID NO: 1274437 - RNA, 18 nt, Human
accuuugugcccuaucac

SEQ ID NO: 1274438 - RNA, 18 nt, Human
accuuugacaaagguaaa

SEQ ID NO: 1274439 - RNA, 17 nt, Human
accuuugacaaagguaa

SEQ ID NO: 1274440 - RNA, 20 nt, Human
accuuucuucaccaaaucuu

SEQ ID NO: 1274441 - RNA, 14 nt, Human
ucauuccuccaggu

SEQ ID NO: 1274442 - RNA, 13 nt, Human
ucauuccuccagg

SEQ ID NO: 1274443 - RNA, 12 nt, Human
ucauuccuccag

SEQ ID NO: 1274444 - RNA, 19 nt, Human
accuugaaaacuuuaugcu

SEQ ID NO: 1274445 - RNA, 20 nt, Human
accuugaaaauaagaauaga

SEQ ID NO: 1274446 - RNA, 15 nt, Human
uccacucguguguuu

SEQ ID NO: 1274447 - RNA, 14 nt, Human
uccacucguguguu

SEQ ID NO: 1274448 - RNA, 19 nt, Human
accuuuuuauuugcaugug

SEQ ID NO: 1274449 - RNA, 15 nt, Human
accuuuuauguagua

SEQ ID NO: 1274450 - RNA, 20 nt, Human
accuuuuauguaguaauuga

SEQ ID NO: 1274451 - RNA, 20 nt, Human
accuuuuauugacacagaaa

SEQ ID NO: 1274452 - RNA, 16 nt, Human
accuuuuauugacaca

SEQ ID NO: 1274453 - RNA, 17 nt, Human
accuuuugaggagcccc

SEQ ID NO: 1274454 - RNA, 21 nt, Human
accuuuugaggagccccagcu
